United States Patent Application Publication US 2012/0159672 A1 - sequence listing, part 8

SEQ ID NO: 16561 - protein, 443 aa, Triticum aestivum
  peptide (1)..(443): Ceres Seq. ID no. 14302452
  misc_feature (241)..(419): Pfam Name: DUF1005 Pfam Description: Protein of unknown function
  misc_feature (1)..(443): NCBI GI NO: 34905328 NR Description: OJ9990_A01.12
  misc_feature (1)..(419): NCBI GI NO: 15238004 NR Description: expressed protein [Arabidopsis thaliana]
  misc_feature (1)..(367): NCBI GI NO: 15233530 NR Description: expressed protein [Arabidopsis thaliana]
  misc_feature (365)..(421): NCBI GI NO: 15233530 NR Description: expressed protein [Arabidopsis thaliana]
  misc_feature (1)..(421): NCBI GI NO: 15218372 NR Description: expressed protein [Arabidopsis thaliana]
  misc_feature (1)..(421): NCBI GI NO: 36104436 NR Description: unknown protein
  misc_feature (37)..(418): NCBI GI NO: 32352156 NR Description: hypothetical protein
  misc_feature (57)..(421): NCBI GI NO: 34896878 NR Description: unknown protein
  misc_feature (28)..(421): NCBI GI NO: 15222861 NR Description: expressed protein [Arabidopsis thaliana]
  misc_feature (107)..(421): NCBI GI NO: 15230917 NR Description: expressed protein [Arabidopsis thaliana]
MDPQTFVRLSVGQLGLRLPGASARKAFHCEIRLRGFPVQLAPVPLENSSEFHLDPHANAAVFSLDEPGLKALPTSRWFRTPEPPYLEIAVYVSRRDGGGHCVGLKRRLVGAVRVDVGPEWRDGKPVLLRHSWTGIGRAAELHVRVRVEADPRYVFRFEDEVALNPQVVQLHGGASQPIFSCKFIRDVRRASQPDHLGGKYWSSSGSGEEKETEMAGRRRERKGWKVAIHDLSGSAVAAAFMATPFVPATGSDTVARSNPGAWLIVRADTTGSSESWQPWGRLEAWRECAAPAGGKDAVCLRLHLLPERRDACVLVSETPLSCDKGGEFSIDMDRQSILPEDAVASETTSSSYCAASMGQSCAGGGFVMSCSVQGEAATSSRPPLVHLAARHVMCMEDAAMFLALAAAVDLSVKACRPFRSKTAAAKKKTAAGSSSPDSLELDT

SEQ ID NO: 16562 - protein, 230 aa, Triticum aestivum
  peptide (1)..(230): Ceres Seq. ID no. 14302453
  misc_feature (28)..(206): Pfam Name: DUF1005 Pfam Description: Protein of unknown function
  misc_feature (1)..(230): NCBI GI NO: 34905328 NR Description: OJ9990_A01.12
  misc_feature (1)..(206): NCBI GI NO: 15238004 NR Description: expressed protein [Arabidopsis thaliana]
  misc_feature (1)..(154): NCBI GI NO: 15233530 NR Description: expressed protein [Arabidopsis thaliana]
  misc_feature (152)..(208): NCBI GI NO: 15233530 NR Description: expressed protein [Arabidopsis thaliana]
  misc_feature (1)..(208): NCBI GI NO: 15218372 NR Description: expressed protein [Arabidopsis thaliana]
  misc_feature (1)..(208): NCBI GI NO: 36104436 NR Description: unknown protein
  misc_feature (1)..(205): NCBI GI NO: 32352156 NR Description: hypothetical protein
  misc_feature (1)..(208): NCBI GI NO: 34896878 NR Description: unknown protein
  misc_feature (1)..(208): NCBI GI NO: 15222861 NR Description: expressed protein [Arabidopsis thaliana]
  misc_feature (1)..(208): NCBI GI NO: 15230917 NR Description: expressed protein [Arabidopsis thaliana]
MAGRRRERKGWKVAIHDLSGSAVAAAFMATPFVPATGSDTVARSNPGAWLIVRADTTGSSESWQPWGRLEAWRECAAPAGGKDAVCLRLHLLPERRDACVLVSETPLSCDKGGEFSIDMDRQSILPEDAVASETTSSSYCAASMGQSCAGGGFVMSCSVQGEAATSSRPPLVHLAARHVMCMEDAAMFLALAAAVDLSVKACRPFRSKTAAAKKKTAAGSSSPDSLELDT

SEQ ID NO: 16563 - DNA, 1804 bp, Triticum aestivum
  misc_feature (1)..(1804): Ceres Seq. ID no. 14301554
ccaaatccagctgaacccacccacgctctacatcacactcatcagtccccactcctcacaggcaaacgccataccatatcacacgggctagccagccatcccatcatggagaaggcgcagaagcgggtggccatcgtcggcgccggcgcgagcggcctggcggcgtgcaagcacgcgctggagcgcggcctccggccggtcgtattcgagtcctcgggcgccatcggcggcgtgtgggtgcgcgcgctggcgtccacgcgcctgcagacgccgcgcacgctctacgagttctccgacttcccctggccgccggaggtcgccgaggtgttcccggaccacgcccaggccgcggcgtacctgcgctcctacgcggagcggttcggcgtgctggaccgcgtccggttcggatgccgcgtgacaggcatggagtacgccggcgtcggcgaggacgaggtccgggcgtgggaccggtgggccggcgatgggtcggcgttcggggatggccgcggccagtggcggctcaccgtgcagcagcagggtgccggcgacgtcgagacatatgttgcggattttgtgatcctgtgcgccgggagattcagcggcatcccgaatatacccacattccctcccgacaaagggccggagaagttcgacggcacggtgatccgctccatggactactccgacatgggcaccgaaaaggccaccgagctcatcaggggcaagctcgtcaccgtcgtcggctaccagaagtccgctatcgacatcgctgcagagtgcgcaaacacaaacggagccaagtatccatgcacaataatatgtcgaacgaagaggtggatcatacccgactactacgcttggggcgttcccattgcattcttctacctcaaccgcttctcggagctcctagtacacaagccaggagaggggctgctccttagcattcttgctaccttcttatcacccttgagatggttgttctcgaagttcgtcgagagctactacagatgggcggtgcccatggataagcacggcatggtgccagaccacagtttcttccaggccatcagctcttgcttggttgcaatattgccagacaagttctatgacatggttgatcaaggaagcattgttctcaagaaagcaaagagcttcagcttctgcaaacaaggtgtgattgtcgaaggtgattccgcgccgataaagagcgacgtggtcatattcgccaccggatacaagggagaccaaaagctaaaggagatgttggcatcatccttgttcagagacattgtgactggcccaccatccagtattattcctctctacaggcaatgcgtgcatcctaggatcccacagctggcgatcatcggctactccgagagcatagcaaacctgcacacattcgacatgcgctccaaatggttggcgcatttccttgacggggtgtttcagttgcctagcataaaatctatggagatggatataaaggaatgggatgaatacatgaagaggtactctcgtgaatacttccgtcgatcttgcgttggagctctccacatctggtacaatgaccagttgtgccaggacatggggtgtgaacccaggaggaagaaagggttctttgcagattggctgttgccatatcttccatcagattacaaggatgtcggtctgaagaagtgacatgagagatctgtcgtgccatcgccgcgcttaaatcaaacagaaacattgccattccagcgattctgtgctgactattgtacaaactaaatgtcatggaataagctcttcggttgaacct

SEQ ID NO: 16564 - protein, 560 aa, Triticum aestivum
  peptide (1)..(560): Ceres Seq. ID no. 14301555
  misc_feature (41)..(229): Pfam Name: Pfam Description:  Flavin-binding monooxygenase-like
  misc_feature (36)..(560): NCBI GI NO: 38344124 NR Description: OSJNBb0072N21.3
  misc_feature (36)..(560): NCBI GI NO: 38344126 NR Description: OSJNBb0072N21.5
  misc_feature (42)..(555): NCBI GI NO: 24960753 NR Description: Hypothetical protein
  misc_feature (42)..(554): NCBI GI NO: 25513456 NR Description: T29M8.12 protein - Arabidopsis thaliana
  misc_feature (42)..(294): NCBI GI NO: 15242332 NR Description: flavin-containing monooxygenase (FMO) family
  misc_feature (328)..(534): NCBI GI NO: 15242332 NR Description: flavin-containing monooxygenase (FMO) family
  misc_feature (188)..(511): NCBI GI NO: 15221981 NR Description: flavin-containing monooxygenase (FMO) family
  misc_feature (42)..(184): NCBI GI NO: 15221981 NR Description: flavin-containing monooxygenase (FMO) family
  misc_feature (339)..(554): NCBI GI NO: 15221981 NR Description: flavin-containing monooxygenase (FMO) family
  misc_feature (182)..(560): NCBI GI NO: 23012092 NR Description: hypothetical protein
PNPAEPTHALHHTHQSPLLTGKRHTISHGLASHPIMEKAQKRVAIVGAGASGLAACKHALERGLRPVVFESSGAIGGVWVRALASTRLQTPRTLYEFSDFPWPPEVAEVFPDHAQAAAYLRSYAERFGVLDRVRFGCRVTGMEYAGVGEDEVRAWDRWAGDGSAFGDGRGQWRLTVQQQGAGDVETYVADFVILCAGRFSGIPNIPTFPPDKGPEKFDGTVIRSMDYSDMGTEKATELIRGKLVTVVGYQKSAIDIAAECANTNGAKYPCTIICRTKRWIIPDYYAWGVPIAFFYLNRFSELLVHKPGEGLLLSILATFLSPLRWLFSKFVESYYRWAVPMDKHGMVPDHSFFQAISSCLVAILPDKFYDMVDQGSIVLKKAKSFSFCKQGVIVEGDSAPIKSDVVIFATGYKGDQKLKEMLASSLFRDIVTGPPSSIIPLYRQCVHPRIPQLAIIGYSESIANLHTFDMRSKWLAHFLDGVFQLPSIKSMEMDIKEWDEYMKRYSREYFRRSCVGALHIWYNDQLCQDMGCEPRRKKGFFADWLLPYLPSDYKDVGLKK

SEQ ID NO: 16565 - protein, 525 aa, Triticum aestivum
  peptide (1)..(525): Ceres Seq. ID no. 14301556
  misc_feature (6)..(194): Pfam Name: Pfam Description:  Flavin-binding monooxygenase-like
  misc_feature (1)..(525): NCBI GI NO: 38344124 NR Description: OSJNBb0072N21.3
  misc_feature (1)..(525): NCBI GI NO: 38344126 NR Description: OSJNBb0072N21.5
  misc_feature (7)..(520): NCBI GI NO: 24960753 NR Description: Hypothetical protein
  misc_feature (7)..(519): NCBI GI NO: 25513456 NR Description: T29M8.12 protein - Arabidopsis thaliana
  misc_feature (7)..(259): NCBI GI NO: 15242332 NR Description: flavin-containing monooxygenase (FMO) family
  misc_feature (293)..(499): NCBI GI NO: 15242332 NR Description: flavin-containing monooxygenase (FMO) family
  misc_feature (153)..(476): NCBI GI NO: 15221981 NR Description: flavin-containing monooxygenase (FMO) family
  misc_feature (7)..(149): NCBI GI NO: 15221981 NR Description: flavin-containing monooxygenase (FMO) family
  misc_feature (304)..(519): NCBI GI NO: 15221981 NR Description: flavin-containing monooxygenase (FMO) family
  misc_feature (147)..(525): NCBI GI NO: 23012092 NR Description: hypothetical protein
MEKAQKRVAIVGAGASGLAACKHALERGLRPVVFESSGAIGGVWVRALASTRLQTPRTLYEFSDFPWPPEVAEVFPDHAQAAAYLRSYAERFGVLDRVRFGCRVTGMEYAGVGEDEVRAWDRWAGDGSAFGDGRGQWRLTVQQQGAGDVETYVADFVILCAGRFSGIPNIPTFPPDKGPEKFDGTVIRSMDYSDMGTEKATELIRGKLVTVVGYQKSAIDIAAECANTNGAKYPCTIICRTKRWIIPDYYAWGVPIAFFYLNRFSELLVHKPGEGLLLSILATFLSPLRWLFSKFVESYYRWAVPMDKHGMVPDHSFFQAISSCLVAILPDKFYDMVDQGSIVLKKAKSFSFCKQGVIVEGDSAPIKSDVVIFATGYKGDQKLKEMLASSLFRDIVTGPPSSIIPLYRQCVHPRIPQLAIIGYSESIANLHTFDMRSKWLAHFLDGVFQLPSIKSMEMDIKEWDEYMKRYSREYFRRSCVGALHIWYNDQLCQDMGCEPRRKKGFFADWLLPYLPSDYKDVGLKK

SEQ ID NO: 16566 - protein, 419 aa, Triticum aestivum
  peptide (1)..(419): Ceres Seq. ID no. 14301557
  misc_feature (1)..(88): Pfam Name: Pfam Description:  Flavin-binding monooxygenase-like
  misc_feature (1)..(419): NCBI GI NO: 38344124 NR Description: OSJNBb0072N21.3
  misc_feature (1)..(419): NCBI GI NO: 38344126 NR Description: OSJNBb0072N21.5
  misc_feature (1)..(414): NCBI GI NO: 24960753 NR Description: Hypothetical protein
  misc_feature (1)..(413): NCBI GI NO: 25513456 NR Description: T29M8.12 protein - Arabidopsis thaliana
  misc_feature (1)..(153): NCBI GI NO: 15242332 NR Description: flavin-containing monooxygenase (FMO) family
  misc_feature (187)..(393): NCBI GI NO: 15242332 NR Description: flavin-containing monooxygenase (FMO) family
  misc_feature (47)..(370): NCBI GI NO: 15221981 NR Description: flavin-containing monooxygenase (FMO) family
  misc_feature (1)..(43): NCBI GI NO: 15221981 NR Description: flavin-containing monooxygenase (FMO) family
  misc_feature (198)..(413): NCBI GI NO: 15221981 NR Description: flavin-containing monooxygenase (FMO) family
  misc_feature (41)..(419): NCBI GI NO: 23012092 NR Description: hypothetical protein
MEYAGVGEDEVRAWDRWAGDGSAFGDGRGQWRLTVQQQGAGDVETYVADFVILCAGRFSGIPNIPTFPPDKGPEKFDGTVIRSMDYSDMGTEKATELIRGKLVTVVGYQKSAIDIAAECANTNGAKYPCTIICRTKRWIIPDYYAWGVPIAFFYLNRFSELLVHKPGEGLLLSILATFLSPLRWLFSKFVESYYRWAVPMDKHGMVPDHSFFQAISSCLVAILPDKFYDMVDQGSIVLKKAKSFSFCKQGVIVEGDSAPIKSDVVIFATGYKGDQKLKEMLASSLFRDIVTGPPSSIIPLYRQCVHPRIPQLAIIGYSESIANLHTFDMRSKWLAHFLDGVFQLPSIKSMEMDIKEWDEYMKRYSREYFRRSCVGALHIWYNDQLCQDMGCEPRRKKGFFADWLLPYLPSDYKDVGLKK

SEQ ID NO: 16567 - DNA, 1842 bp, Triticum aestivum
  misc_feature (1)..(1842): Ceres Seq. ID no. 14307960
actgccacacaagacacacacatccaatcaacccgagacctcaagtgtcacgactcgagacacaacacttcccccggaccaccatggataaggcatacattgccgtcctcaccatcgccttcctcttcctgctccactacatttcaggcaagatcagcaatggcaggcgcggcaagggcgccgtgcagctgccgccaagccccccggtcatccccttcctcggccatctccacctcgtggagaaaccgttccacgccgcgctgcgccgcctggccgcgcgcctcggcccggtcttctcgctgcggctcggctcgcgccgcgccgtggtggtgtcgtcggcggagtgcgccagggagtgcttcacggagcacgacgtgacgttcgccaaccggccccggttcccgtcgcagctgctcgtgtccttcgacggcgccgcgctcgccacgtccagctacggcccgcactggcgcaacctccgccgcgtcgccgccgtgcagctgctctccgcgcaccgcgtcgcctgcatgtcgggcgtcatcgccggcgaggtgcgcgccatggcgcgccggctgttccgcgccgccgccgccgcccccggcgacgccgcgcgggtccagctgaagcggaggctgttcgagctctccctcagcgtgctcatggagaccatcgcgcagaccaaggggacccggtcggaggccgacgccgacacggacatgtccgtggaggcccaggagttcaagaaggtggtggacgagatcatcccctacctcggcgccgccaacacgtgggactacctgccggtgttgcggtggttcgacgtgttcggcgtgaggaacaagatcctggccgccgtgagcaggagggacgccttcctgcatcgtctcatcgacaacgagcgccggaggctcgacgacgccggcgccgaaggcgacaagaagagcatgatcgccgtgctcctcaatctccagaagacggagccggaggtgtacacccataccatgatcacggccctctgcgcgaatttatttggggccggaacggagaccacgtcgacgacgacggagtgggcgatgtcgctgctgctgaaccacccggaggcgctgaggaaggcgcaggccgagatcgacgcaaccgtcggaaccacccggctggtcaccgccgacgacgtgccgcggctggcctacctgcagtgcatcgtgagcgagacgctgcgactgtacccggcggcgccgatgctgctgccgcaccagtcctcagcggactgcaaggtcggcggctacaacgtgccgagcggcacgatgctgatggtgaacgcgtacgccatccaccgcgacccggcggcatgggagcggccgctggagttcgtcccggagcggttcgagggcgggaaggccgaggggcggttcatgatcccgttcgggatgggccggcggcggtgccccggggagacgctggcgctgcggaccatcggcatggtgctggccacgctggtgcagtgcttcgactgggagcgcgtggacggcgcggaggtggacatgacggagggcggcgggctcaccatccccaaggccgtgccgctcgaggccgtgtgcaggccgcgcccggccatgcgcgacgtgcttcagagcctctgatcgccgagcttgttggcgtaataatgcatggttttgatagcctgctgatgtcgtagcaaataaactagtgagttgtgactttgagagcagagtcaggctagctaccatctgtaaattactcgtaacgaataagggttttgtaagaaccactagccgtagctatcttgcggtagcactgaaccagcaatctgtaatttagcttgcaacc

SEQ ID NO: 16568 - protein, 543 aa, Triticum aestivum
  peptide (1)..(543): Ceres Seq. ID no. 14307961
  misc_feature (28)..(543): NCBI GI NO: 13661746 NR Description: putative cytochrome P450 [Lolium rigidum]
  misc_feature (28)..(543): NCBI GI NO: 13661748 NR Description: putative cytochrome P450 [Lolium rigidum]
  misc_feature (28)..(543): NCBI GI NO: 13661744 NR Description: putative cytochrome P450 [Lolium rigidum]
  misc_feature (16)..(543): NCBI GI NO: 14488353 NR Description: putative cytochrome P450
  misc_feature (28)..(543): NCBI GI NO: 14488373 NR Description: putative cytochrome P450
  misc_feature (28)..(541): NCBI GI NO: 14488358 NR Description: putative cytochrome P450
  misc_feature (28)..(543): NCBI GI NO: 14488355 NR Description: putative cytochrome P450
  misc_feature (64)..(543): NCBI GI NO: 38344454 NR Description: OSJNBa0017P10.2
  misc_feature (55)..(543): NCBI GI NO: 3059131 NR Description: cytochrome P450 [Helianthus tuberosus]
  misc_feature (28)..(543): NCBI GI NO: 7430635 NR Description: cytochrome P450 (EC 1
CHTRHTHPINPRPQVSRLETQHFPRTTMDKAYIAVLTIAFLFLLHYISGKISNGRRGKGAVQLPPSPPVIPFLGHLHLVEKPFHAALRRLAARLGPVFSLRLGSRRAVVVSSAECARECFTEHDVTFANRPRFPSQLLVSFDGAALATSSYGPHWRNLRRVAAVQLLSAHRVACMSGVIAGEVRAMARRLFRAAAAAPGDAARVQLKRRLFELSLSVLMETIAQTKGTRSEADADTDMSVEAQEFKKVVDEIIPYLGAANTWDYLPVLRWFDVFGVRNKILAAVSRRDAFLHRLIDNERRRLDDAGAEGDKKSMIAVLLNLQKTEPEVYTHTMITALCANLFGAGTETTSTTTEWAMSLLLNHPEALRKAQAEIDATVGTTRLVTADDVPRLAYLQCIVSETLRLYPAAPMLLPHQSSADCKVGGYNVPSGTMLMVNAYAIHRDPAAWERPLEFVPERFEGGKAEGRFMIPFGMGRRRCPGETLALRTIGMVLATLVQCFDWERVDGAEVDMTEGGGLTIPKAVPLEAVCRPRPAMRDVLQSL

SEQ ID NO: 16569 - protein, 516 aa, Triticum aestivum
  peptide (1)..(516): Ceres Seq. ID no. 14307962
  misc_feature (1)..(516): NCBI GI NO: 13661746 NR Description: putative cytochrome P450 [Lolium rigidum]
  misc_feature (1)..(516): NCBI GI NO: 13661748 NR Description: putative cytochrome P450 [Lolium rigidum]
  misc_feature (1)..(516): NCBI GI NO: 13661744 NR Description: putative cytochrome P450 [Lolium rigidum]
  misc_feature (1)..(516): NCBI GI NO: 14488353 NR Description: putative cytochrome P450
  misc_feature (1)..(516): NCBI GI NO: 14488373 NR Description: putative cytochrome P450
  misc_feature (1)..(514): NCBI GI NO: 14488358 NR Description: putative cytochrome P450
  misc_feature (1)..(516): NCBI GI NO: 14488355 NR Description: putative cytochrome P450
  misc_feature (37)..(516): NCBI GI NO: 38344454 NR Description: OSJNBa0017P10.2
  misc_feature (28)..(516): NCBI GI NO: 3059131 NR Description: cytochrome P450 [Helianthus tuberosus]
  misc_feature (1)..(516): NCBI GI NO: 7430635 NR Description: cytochrome P450 (EC 1
MDKAYIAVLTIAFLFLLHYISGKISNGRRGKGAVQLPPSPPVIPFLGHLHLVEKPFHAALRRLAARLGPVFSLRLGSRRAVVVSSAECARECFTEHDVTFANRPRFPSQLLVSFDGAALATSSYGPHWRNLRRVAAVQLLSAHRVACMSGVIAGEVRAMARRLFRAAAAAPGDAARVQLKRRLFELSLSVLMETIAQTKGTRSEADADTDMSVEAQEFKKVVDEIIPYLGAANTWDYLPVLRWFDVFGVRNKILAAVSRRDAFLHRLIDNERRRLDDAGAEGDKKSMIAVLLNLQKTEPEVYTHTMITALCANLFGAGTETTSTTTEWAMSLLLNHPEALRKAQAEIDATVGTTRLVTADDVPRLAYLQCIVSETLRLYPAAPMLLPHQSSADCKVGGYNVPSGTMLMVNAYAIHRDPAAWERPLEFVPERFEGGKAEGRFMIPFGMGRRRCPGETLALRTIGMVLATLVQCFDWERVDGAEVDMTEGGGLTIPKAVPLEAVCRPRPAMRDVLQSL

SEQ ID NO: 16570 - protein, 369 aa, Triticum aestivum
  peptide (1)..(369): Ceres Seq. ID no. 14307963
  misc_feature (1)..(369): NCBI GI NO: 13661746 NR Description: putative cytochrome P450 [Lolium rigidum]
  misc_feature (1)..(369): NCBI GI NO: 13661748 NR Description: putative cytochrome P450 [Lolium rigidum]
  misc_feature (1)..(369): NCBI GI NO: 13661744 NR Description: putative cytochrome P450 [Lolium rigidum]
  misc_feature (1)..(369): NCBI GI NO: 14488353 NR Description: putative cytochrome P450
  misc_feature (1)..(369): NCBI GI NO: 14488373 NR Description: putative cytochrome P450
  misc_feature (1)..(367): NCBI GI NO: 14488358 NR Description: putative cytochrome P450
  misc_feature (1)..(369): NCBI GI NO: 14488355 NR Description: putative cytochrome P450
  misc_feature (1)..(369): NCBI GI NO: 38344454 NR Description: OSJNBa0017P10.2
  misc_feature (1)..(369): NCBI GI NO: 3059131 NR Description: cytochrome P450 [Helianthus tuberosus]
  misc_feature (1)..(369): NCBI GI NO: 7430635 NR Description: cytochrome P450 (EC 1
MSGVIAGEVRAMARRLFRAAAAAPGDAARVQLKRRLFELSLSVLMETIAQTKGTRSEADADTDMSVEAQEFKKVVDEIIPYLGAANTWDYLPVLRWFDVFGVRNKILAAVSRRDAFLHRLIDNERRRLDDAGAEGDKKSMIAVLLNLQKTEPEVYTHTMITALCANLFGAGTETTSTTTEWAMSLLLNHPEALRKAQAEIDATVGTTRLVTADDVPRLAYLQCIVSETLRLYPAAPMLLPHQSSADCKVGGYNVPSGTMLMVNAYAIHRDPAAWERPLEFVPERFEGGKAEGRFMIPFGMGRRRCPGETLALRTIGMVLATLVQCFDWERVDGAEVDMTEGGGLTIPKAVPLEAVCRPRPAMRDVLQSL

SEQ ID NO: 16571 - DNA, 1755 bp, Triticum aestivum
  misc_feature (1)..(1755): Ceres Seq. ID no. 14307964
tcaccttcgaaccatttgcttccaagaaacttctcaagaatcccacgccaggcactgccatggatctttccatggctaccggcccggaagactccctcctcctgctcctcctcccggctaccaccctgctcccacctcctcttccaccgcgcaatgggcttcgccccgtcgggcgacgctcactggcgtgccctccgccgtctcgccgcggcgcacctcttcggcccgcgccgcgtggcggcctccgcaccccatcgctcctctattgggacgcgcatgctcggcgacgtcgcctccctcatggcccgccacggcgaagtcgcccctcggcggttcctgcacgcggcgtccctaaaccacgtcatggccgtcgtcttcggcaagcgctacgatgacttcacaagccaagaaggagtcgtcgtggaggagatggtaaacgaagggtacgacctcctcggcacgttcaactgggcagatcacctgccattcctcaagtggctcgacctccagggcgtgcgacgccggtgcaacaggttagtccggcaggtggaggcgtatgtcggtaacatcattcaggagcacaaagcgaggcgcgccagcggatcaggcattgcggatgagctctccggcgacttcgtcgatgtgctcctcggcctcgacggagaagacaagatgtcagagtccgacatgatcgccgttctttgggagatgatctttcgagggacggacacggtggcgatcttgatggagtggatcatggccaggatggtgctgcacccggagatccagtcgaaggcccgggcggagctggacgccgtggtggggcggggcagggccgtgatggacgaggacgtggcgaggctcccctacatccagtgcatcgtcaaggagacgctgcgcatgcacccgccgggcccgctcctctcgtgggcgcggctggccgtgcacgacgcgcacgtcggcggccacctcgtcccggccggcacgacggcgatggtgaacatgtgggccatcgcgcacgacgcggcggtgtggcccgagccggagctgttccggccggagcggttcatggaggaggaggtgagcgtgctgggcagcgacctccgcctggccccgttcggcgccgggcggcgcgtgtgccccggcaagatgctggccctcgccaccgtccacctctggctcgcccagctgctgcaccggttcgagtgggctcccgcgaccgcggcctcggggggcgtcgacctgtcagagcgcctgaagatgtcgctggagatggccacgccgctggtctgcagggccgtggctcgctagggccagagagagctgcacctgcatgctaccgccgccgtctacgttacctagcctgtcggcggcgccagcgttacttgctttattgcctagtatttattggctagccgttggaggctagcttgccagggtctagtagcactactgctttttggtcatctccatgcatgtacggctagctagctccgtctttgcgcggccgatccgttagccattgaaggaagctatagctagccatgggttactcctgctcgaggtcagcgagcaatcgcgcatgctgtcttgatggggtaattttggtcttctagatggagagttattagtgtgttttgtttttgttcgggagaaacatctggtgtctgtgagtgtgagttgtcatgtcgagtcgtagtagcgtggtgcttcaagaaaatttgtagtgagattttgaatattttttaatccgcg

SEQ ID NO: 16572 - protein, 436 aa, Triticum aestivum
  peptide (1)..(436): Ceres Seq. ID no. 14307965
  misc_feature (46)..(436): NCBI GI NO: 34394563 NR Description: putative cytochrome P-450
  misc_feature (46)..(436): NCBI GI NO: 31126705 NR Description: putative cytochrome P-450
  misc_feature (46)..(436): NCBI GI NO: 1173624 NR Description: cytochrome P-450
  misc_feature (46)..(436): NCBI GI NO: 15221132 NR Description: cytochrome P450 family [Arabidopsis thaliana]
  misc_feature (46)..(436): NCBI GI NO: 15222937 NR Description: cytochrome P450 family [Arabidopsis thaliana]
  misc_feature (46)..(436): NCBI GI NO: 5921925 NR Description: Cytochrome P450 78A4
  misc_feature (46)..(436): NCBI GI NO: 1352187 NR Description: Cytochrome P450 78A1 (CYPLXXVIII)
  misc_feature (46)..(436): NCBI GI NO: 37534160 NR Description: putative cytochrome 450
  misc_feature (46)..(436): NCBI GI NO: 30962524 NR Description: cytochrome P450 78A11
  misc_feature (46)..(429): NCBI GI NO: 15226422 NR Description: cytochrome P450, putative [Arabidopsis thaliana]
SPSNHLLPRNFSRIPRQALPWIFPWLPARKTPSSCSSSRLPPCSHLLFHRAMGFAPSGDAHWRALRRLAAAHLFGPRRVAASAPHRSSIGTRMLGDVASLMARHGEVAPRRFLHAASLNHVMAVVFGKRYDDFTSQEGVVVEEMVNEGYDLLGTFNWADHLPFLKWLDLQGVRRRCNRLVRQVEAYVGNIIQEHKARRASGSGIADELSGDFVDVLLGLDGEDKMSESDMIAVLWEMIFRGTDTVAILMEWIMARMVLHPEIQSKARAELDAVVGRGRAVMDEDVARLPYIQCIVKETLRMHPPGPLLSWARLAVHDAHVGGHLVPAGTTAMVNMWAIAHDAAVWPEPELFRPERFMEEEVSVLGSDLRLAPFGAGRRVCPGKMLALATVHLWLAQLLHRFEWAPATAASGGVDLSERLKMSLEMATPLVCRAVAR

SEQ ID NO: 16573 - protein, 385 aa, Triticum aestivum
  peptide (1)..(385): Ceres Seq. ID no. 14307966
  misc_feature (1)..(385): NCBI GI NO: 34394563 NR Description: putative cytochrome P-450
  misc_feature (1)..(385): NCBI GI NO: 31126705 NR Description: putative cytochrome P-450
  misc_feature (1)..(385): NCBI GI NO: 1173624 NR Description: cytochrome P-450
  misc_feature (1)..(385): NCBI GI NO: 15221132 NR Description: cytochrome P450 family [Arabidopsis thaliana]
  misc_feature (1)..(385): NCBI GI NO: 15222937 NR Description: cytochrome P450 family [Arabidopsis thaliana]
  misc_feature (1)..(385): NCBI GI NO: 5921925 NR Description: Cytochrome P450 78A4
  misc_feature (1)..(385): NCBI GI NO: 1352187 NR Description: Cytochrome P450 78A1 (CYPLXXVIII)
  misc_feature (1)..(385): NCBI GI NO: 37534160 NR Description: putative cytochrome 450
  misc_feature (1)..(385): NCBI GI NO: 30962524 NR Description: cytochrome P450 78A11
  misc_feature (1)..(378): NCBI GI NO: 15226422 NR Description: cytochrome P450, putative [Arabidopsis thaliana]
MGFAPSGDAHWRALRRLAAAHLFGPRRVAASAPHRSSIGTRMLGDVASLMARHGEVAPRRFLHAASLNHVMAVVFGKRYDDFTSQEGVVVEEMVNEGYDLLGTFNWADHLPFLKWLDLQGVRRRCNRLVRQVEAYVGNIIQEHKARRASGSGIADELSGDFVDVLLGLDGEDKMSESDMIAVLWEMIFRGTDTVAILMEWIMARMVLHPEIQSKARAELDAVVGRGRAVMDEDVARLPYIQCIVKETLRMHPPGPLLSWARLAVHDAHVGGHLVPAGTTAMVNMWAIAHDAAVWPEPELFRPERFMEEEVSVLGSDLRLAPFGAGRRVCPGKMLALATVHLWLAQLLHRFEWAPATAASGGVDLSERLKMSLEMATPLVCRAVAR

SEQ ID NO: 16574 - protein, 344 aa, Triticum aestivum
  peptide (1)..(344): Ceres Seq. ID no. 14307967
  misc_feature (1)..(344): NCBI GI NO: 34394563 NR Description: putative cytochrome P-450
  misc_feature (1)..(344): NCBI GI NO: 31126705 NR Description: putative cytochrome P-450
  misc_feature (1)..(344): NCBI GI NO: 1173624 NR Description: cytochrome P-450
  misc_feature (1)..(344): NCBI GI NO: 15221132 NR Description: cytochrome P450 family [Arabidopsis thaliana]
  misc_feature (1)..(344): NCBI GI NO: 15222937 NR Description: cytochrome P450 family [Arabidopsis thaliana]
  misc_feature (1)..(344): NCBI GI NO: 5921925 NR Description: Cytochrome P450 78A4
  misc_feature (1)..(344): NCBI GI NO: 1352187 NR Description: Cytochrome P450 78A1 (CYPLXXVIII)
  misc_feature (1)..(344): NCBI GI NO: 37534160 NR Description: putative cytochrome 450
  misc_feature (1)..(344): NCBI GI NO: 30962524 NR Description: cytochrome P450 78A11
  misc_feature (1)..(337): NCBI GI NO: 15226422 NR Description: cytochrome P450, putative [Arabidopsis thaliana]
MLGDVASLMARHGEVAPRRFLHAASLNHVMAVVFGKRYDDFTSQEGVVVEEMVNEGYDLLGTFNWADHLPFLKWLDLQGVRRRCNRLVRQVEAYVGNIIQEHKARRASGSGIADELSGDFVDVLLGLDGEDKMSESDMIAVLWEMIFRGTDTVAILMEWIMARMVLHPEIQSKARAELDAVVGRGRAVMDEDVARLPYIQCIVKETLRMHPPGPLLSWARLAVHDAHVGGHLVPAGTTAMVNMWAIAHDAAVWPEPELFRPERFMEEEVSVLGSDLRLAPFGAGRRVCPGKMLALATVHLWLAQLLHRFEWAPATAASGGVDLSERLKMSLEMATPLVCRAVAR

SEQ ID NO: 16575 - DNA, 1535 bp, Triticum aestivum
  misc_feature (1)..(1535): Ceres Seq. ID no. 13657850
cccacctagaacatcctaatcgataagccgtcgtcctcgtcctcgccttccccatcaagctaaaacctccctcttttcgtcgaatccagccaccatgaaaccctaagaccaccgtcctcccgaatcctccattgccctccccgatgcaggcgttcgcgcgcctctcctcccccgccgcctccagaaaggtgatttcgggcgtctctggagcggtcgcaaggccgtgctaccggacatggcggtggaaggcgcatgcggcgccgctgtcggctccgggcccacccaagggcaagaagagggaatacatatccaagaatgaaaggaaggctaggatgaaggagtttattgagggttatcaggcatcaaatgacggtagatttccgactatgcaaatgattcgtcaaagtgttggagggggtcactacacaattagggatgtactctcggaagtgaagtataaccagataaagtttccgtttgataagtctaaggcagcccagcttcaggagacagctgaaggtgctgagcagtcaaggccagaggaggagagtggaaacagttcatttaactctcagagctttaacggaaatcaggatgaagatgacacgctcctatcccagaaagattctcctgctggcaatacaatcatggaaaacactgaagcttccatatctttggacgcaaaggaggtgaagttaccgctatataactccgaggcagcccagctccatgagacaggtgaatgtgctgagcaatcaaggctcggggaaagcgggagcagtgcattgaacccagatgacacactcctctcccagaaagactctgctatgggcactacaatcatagaaaacaatcaaccattgggatctctagagtcacaagactcctctcattacagtggagaaactgaggttgccaagcaagattcatgtactgcagcagcagatgcaaatgacctgactgtatcgaaacaagcagaaattgatggcatgaagactgaagcacccatatctttggaactggagactaagtcagacaacgggaatcgtcaaggggaaactgaagttaacaaggtgcattcgaacaatgtgaaaaaattccaggatccaactgaaccaactgtatctgatcaaactgaacatgacatagtgatcaaaggaaatgtacttcacagagaagagaaccccgaggtcgaggagcagggatcaagcaagacaagtcttttagggagcctgaaatcgcttgcttctgggatcagaaacttctggagaaatctgtaaatttgtctcattttggcttggagctaacacacatgaagtccccttatttatcattttgtgagcctggagcagcttgtgaagctttgtcaaggctacagagttaatgatccaagtgccccttgtttagtgttttttgcgaggctgaagaaagctgtaaagttttattttttgcactactgaacactggtctgactcctgcaaaaaaaaaaaaaaaaaagcttatcgataccgtcgacctcgagggggggcccggta

SEQ ID NO: 16576 - protein, 378 aa, Triticum aestivum
  peptide (1)..(378): Ceres Seq. ID no. 15219880
  misc_feature (34)..(308): NCBI GI NO: 7488796 NR Description: DNA-binding protein PD2 - garden pea
MQAFARLSSPAASRKVISGVSGAVARPCYRTWRWKAHAAPLSAPGPPKGKKREYISKNERKARMKEFIEGYQASNDGRFPTMQMIRQSVGGGHYTIRDVLSEVKYNQIKFPFDKSKAAQLQETAEGAEQSRPEEESGNSSFNSQSFNGNQDEDDTLLSQKDSPAGNTIMENTEASISLDAKEVKLPLYNSEAAQLHETGECAEQSRLGESGSSALNPDDTLLSQKDSAMGTTIIENNQPLGSLESQDSSHYSGETEVAKQDSCTAAADANDLTVSKQAEIDGMKTEAPISLELETKSDNGNRQGETEVNKVHSNNVKKFQDPTEPTVSDQTEHDIVIKGNVLHREENPEVEEQGSSKTSLLGSLKSLASGIRNFWRNL

SEQ ID NO: 16577 - protein, 315 aa, Triticum aestivum
  peptide (1)..(315): Ceres Seq. ID no. 15219881
  misc_feature (1)..(245): NCBI GI NO: 7488796 NR Description: DNA-binding protein PD2 - garden pea
MKEFIEGYQASNDGRFPTMQMIRQSVGGGHYTIRDVLSEVKYNQIKFPFDKSKAAQLQETAEGAEQSRPEEESGNSSFNSQSFNGNQDEDDTLLSQKDSPAGNTIMENTEASISLDAKEVKLPLYNSEAAQLHETGECAEQSRLGESGSSALNPDDTLLSQKDSAMGTTIIENNQPLGSLESQDSSHYSGETEVAKQDSCTAAADANDLTVSKQAEIDGMKTEAPISLELETKSDNGNRQGETEVNKVHSNNVKKFQDPTEPTVSDQTEHDIVIKGNVLHREENPEVEEQGSSKTSLLGSLKSLASGIRNFWRNL

SEQ ID NO: 16578 - protein, 297 aa, Triticum aestivum
  peptide (1)..(297): Ceres Seq. ID no. 15219882
  misc_feature (1)..(227): NCBI GI NO: 7488796 NR Description: DNA-binding protein PD2 - garden pea
MQMIRQSVGGGHYTIRDVLSEVKYNQIKFPFDKSKAAQLQETAEGAEQSRPEEESGNSSFNSQSFNGNQDEDDTLLSQKDSPAGNTIMENTEASISLDAKEVKLPLYNSEAAQLHETGECAEQSRLGESGSSALNPDDTLLSQKDSAMGTTIIENNQPLGSLESQDSSHYSGETEVAKQDSCTAAADANDLTVSKQAEIDGMKTEAPISLELETKSDNGNRQGETEVNKVHSNNVKKFQDPTEPTVSDQTEHDIVIKGNVLHREENPEVEEQGSSKTSLLGSLKSLASGIRNFWRNL

SEQ ID NO: 16579 - DNA, 1373 bp, Triticum aestivum
  misc_feature (1)..(1373): Ceres Seq. ID no. 13662898
agaacatcctaatcgaaaaacgctctcaagcaacaatctcaagtagtaggctggcagttcttctcttcccattgaaccatctgtacaagggagagaaaatcctgaagcctgactatcatcctaactagctagcttggtagaactatctcattgtgatctcctcatcaactccaaaggtagtcttttttttgagggggactccaaaggtagttaagatcttgcaatgggtggtctctctcttcagcacccgtgggcctttgcctttggcctcctaggcaacgtcatctcgttcatgacctacctggccccactgccgacgttctaccgaatctaccggagcaagtcgacgcaggggttccagtcggtcccttacgtggtggcgctctttagcgcgatgttgtggatctactacgcgctgctcaagtctgacgagtgcctcctcatcaccatcaactccgccggctgtgtcattgagaccatctacatcatcatctacctcacctatgcaccaaagcaagccaagctcttcacggcgaagatcctcctcctcctgaatgtgggtgtgttcggtcttatcctcctcctcaccctactcctgtcggagggcgagaagcgcgtcgtcatgctcgggtgggtttgcgtcggcttctctgtcagcgtcttcatcgcgcccctcagcgtcatccgccttgtggtgcgtacccggagcgtggagttcatgcctttttccctctccctctccctcactgtcagcgccgtcgtctggttcctctacggcctcctcatcaaggacaaatatgttgccctgccaaacattcttgggtttgccttcggtgtgattcaaatggggctttacgccctctaccgcaacgccatgccttcaccggctcccaagcaggtggacgatgctgatgccatcaaggtgcccgagcatgtcatccacatcgctaagcttggcccagcagctgccatcgagctcaacacacacaatcccatggaacgggggatgccaccgccgatggaggataacggcttggcctgcgccagcgacatgaccaaggggggcattgacatggttgagaaagcaacccgcgtcgagcaagtctaggcagtcatgcgttcatgcctaggatatatgcgtgcacttaagccatgatgggcaggggtcgagcaaaggagctatagggagagaaatgcatgcgcgtgagcttgtgatttccactgtcgacgttccattagttgctcgagccagttattttatcctggtcgtattcattagtatgttcatctatcaattccatgtaatggtcttattataaaagttgccattttctaatgaagcatagcaggataagaaaatggcatctcagtcc

SEQ ID NO: 16580 - protein, 294 aa, Triticum aestivum
  peptide (1)..(294): Ceres Seq. ID no. 15220195
  misc_feature (12)..(99): Pfam Name: Pfam Description:  MtN3/saliva family
  misc_feature (1)..(251): NCBI GI NO: 15229019 NR Description: nodulin MtN3 family protein [Arabidopsis thaliana]
  misc_feature (10)..(251): NCBI GI NO: 15237803 NR Description: nodulin MtN3 family protein [Arabidopsis thaliana]
  misc_feature (10)..(245): NCBI GI NO: 14715258 NR Description: N3 like protein [Medicago truncatula]
  misc_feature (4)..(239): NCBI GI NO: 1619602 NR Description: MtN3 [Medicago truncatula]
  misc_feature (10)..(257): NCBI GI NO: 15241278 NR Description: nodulin MtN3 family protein [Arabidopsis thaliana]
  misc_feature (10)..(257): NCBI GI NO: 21593109 NR Description: MtN3-like protein [Arabidopsis thaliana]
  misc_feature (11)..(279): NCBI GI NO: 15234863 NR Description: nodulin MtN3 family protein [Arabidopsis thaliana]
  misc_feature (8)..(245): NCBI GI NO: 15225014 NR Description: nodulin MtN3 family protein [Arabidopsis thaliana]
  misc_feature (8)..(245): NCBI GI NO: 21554178 NR Description: similar to MtN3 protein [Arabidopsis thaliana]
  misc_feature (1)..(221): NCBI GI NO: 15240040 NR Description: nodulin MtN3 family protein [Arabidopsis thaliana]
MGGLSLQHPWAFAFGLLGNVISFMTYLAPLPTFYRIYRSKSTQGFQSVPYVVALFSAMLWIYYALLKSDECLLITINSAGCVIETIYIIIYLTYAPKQAKLFTAKILLLLNVGVFGLILLLTLLLSEGEKRVVMLGWVCVGFSVSVFIAPLSVIRLVVRTRSVEFMPFSLSLSLTVSAVVWFLYGLLIKDKYVALPNILGFAFGVIQMGLYALYRNAMPSPAPKQVDDADAIKVPEHVIHIAKLGPAAAIELNTHNPMERGMPPPMEDNGLACASDMTKGGIDMVEKATRVEQV

SEQ ID NO: 16581 - protein, 271 aa, Triticum aestivum
  peptide (1)..(271): Ceres Seq. ID no. 15220196
  misc_feature (1)..(76): Pfam Name: Pfam Description:  MtN3/saliva family
  misc_feature (1)..(228): NCBI GI NO: 15229019 NR Description: nodulin MtN3 family protein [Arabidopsis thaliana]
  misc_feature (1)..(228): NCBI GI NO: 15237803 NR Description: nodulin MtN3 family protein [Arabidopsis thaliana]
  misc_feature (1)..(222): NCBI GI NO: 14715258 NR Description: N3 like protein [Medicago truncatula]
  misc_feature (1)..(216): NCBI GI NO: 1619602 NR Description: MtN3 [Medicago truncatula]
  misc_feature (1)..(234): NCBI GI NO: 15241278 NR Description: nodulin MtN3 family protein [Arabidopsis thaliana]
  misc_feature (1)..(234): NCBI GI NO: 21593109 NR Description: MtN3-like protein [Arabidopsis thaliana]
  misc_feature (1)..(256): NCBI GI NO: 15234863 NR Description: nodulin MtN3 family protein [Arabidopsis thaliana]
  misc_feature (1)..(222): NCBI GI NO: 15225014 NR Description: nodulin MtN3 family protein [Arabidopsis thaliana]
  misc_feature (1)..(222): NCBI GI NO: 21554178 NR Description: similar to MtN3 protein [Arabidopsis thaliana]
  misc_feature (1)..(198): NCBI GI NO: 15240040 NR Description: nodulin MtN3 family protein [Arabidopsis thaliana]
MTYLAPLPTFYRIYRSKSTQGFQSVPYVVALFSAMLWIYYALLKSDECLLITINSAGCVIETIYIIIYLTYAPKQAKLFTAKILLLLNVGVFGLILLLTLLLSEGEKRVVMLGWVCVGFSVSVFIAPLSVIRLVVRTRSVEFMPFSLSLSLTVSAVVWFLYGLLIKDKYVALPNILGFAFGVIQMGLYALYRNAMPSPAPKQVDDADAIKVPEHVIHIAKLGPAAAIELNTHNPMERGMPPPMEDNGLACASDMTKGGIDMVEKATRVEQV

SEQ ID NO: 16582 - protein, 237 aa, Triticum aestivum
  peptide (1)..(237): Ceres Seq. ID no. 15220197
  misc_feature (1)..(194): NCBI GI NO: 15229019 NR Description: nodulin MtN3 family protein [Arabidopsis thaliana]
  misc_feature (1)..(194): NCBI GI NO: 15237803 NR Description: nodulin MtN3 family protein [Arabidopsis thaliana]
  misc_feature (1)..(188): NCBI GI NO: 14715258 NR Description: N3 like protein [Medicago truncatula]
  misc_feature (1)..(182): NCBI GI NO: 1619602 NR Description: MtN3 [Medicago truncatula]
  misc_feature (1)..(200): NCBI GI NO: 15241278 NR Description: nodulin MtN3 family protein [Arabidopsis thaliana]
  misc_feature (1)..(200): NCBI GI NO: 21593109 NR Description: MtN3-like protein [Arabidopsis thaliana]
  misc_feature (1)..(222): NCBI GI NO: 15234863 NR Description: nodulin MtN3 family protein [Arabidopsis thaliana]
  misc_feature (1)..(188): NCBI GI NO: 15225014 NR Description: nodulin MtN3 family protein [Arabidopsis thaliana]
  misc_feature (1)..(188): NCBI GI NO: 21554178 NR Description: similar to MtN3 protein [Arabidopsis thaliana]
  misc_feature (1)..(164): NCBI GI NO: 15240040 NR Description: nodulin MtN3 family protein [Arabidopsis thaliana]
MLWIYYALLKSDECLLITINSAGCVIETIYIIIYLTYAPKQAKLFTAKILLLLNVGVFGLILLLTLLLSEGEKRVVMLGWVCVGFSVSVFIAPLSVIRLVVRTRSVEFMPFSLSLSLTVSAVVWFLYGLLIKDKYVALPNILGFAFGVIQMGLYALYRNAMPSPAPKQVDDADAIKVPEHVIHIAKLGPAAAIELNTHNPMERGMPPPMEDNGLACASDMTKGGIDMVEKATRVEQV

SEQ ID NO: 16583 - DNA, 1632 bp, Triticum aestivum
  misc_feature (1)..(1632): Ceres Seq. ID no. 14308049
atccaatcgccagcctccttgtattcatgcgttggtgcaacttctttcttagcttcgtacgttcagctagctcagtatgaagatcacagtgcggtcatccaagtccatcaagcctgactatggcagcggccacctgatggctccggccacggccaacgtcgtcccgctcacagtgttcgacaaagccaacttcgacatgcacgtctctgtcatctacaccttccacccaccagccccgtcccatgacgtcctcgaggccgggctcgccaaggccctcgccgactaccgcgagtgggccggccgtctcaccctggacgccaacggcaagcgctgcgccatcctactcaacgacgccggtgcgcgattcgtcgaagcgacggccggcgtggcgctcgacagcgtcatgcctctgcagcccactcccgaggtgctgagcctgcacccgaccggcggtggcgacgagctgctgttgatccaggccacgaggttcgcatgcgggtccctcgtcgttggcctgactgggcaccacatggtcaccgacggtggcggctggtgcaacctcatcatcgcgtggggtcaggccacgcgaggcgcctccattgaccctgtcccagtgcacgatcggccgtccttcttcctgccgcgcaacccgcttaagatagagtacgagcaccacagcatcgagttcaagccatacgacgaccgcaatagtacggccggcggcggcgacgacgaggtggtggtagagagggtccacttcagtatggaccacatcgcaaaactgaagtcgcaggcgtcagctgtggccggcacgggccggccgtacagcaccgtgcagtgcgtggtggcgcacctgtggcggtgcatgacgctggcgcgcggcctcgatgggcgtgacgtcaccggtctgttcatcgcagtggacgggcgagcgcggatgagccagcgggtgccggacgggtacaccggcaacgtggtgctctgggcgcggcctacagccaccgcgggggaggtcgtgaacaggccgctgcaccacctggcggagctcatcagcggggcggttgcccggattgacgacgcctacttcaagtctttcatcgacttcgcctgctccggggccgtggaggaggaggggctggtgccgactgctgacccggcggtgacggtgcttagccccaacgtcgaggtggacagctggctgcggatcccgttctatgatctggatctgggcagcggccggcccttcttcttcatgcccagctacctgccagtggagggaggggtcatcctcgtgccttccttctatggcgatgggagcgtggatgcctacgtgccccttttcagccgccacatggacgccttcaagaactgctgcacatccggcctccccaaactctgatttttatcccgggattgtaactctcagtcagtcaatgcggtagccgtctgatctggtgcgatatgattcgtaccatcttctggcgttgtattgctttggtggtcttctgaatggccttctatttgtgcctttgtatgcacaaggagatgcattgtgtgcgtgagtgttttgaaatttgtatttcgctttagctacaggtcagtcgcctgaaaaattaagttagggtcactatc

SEQ ID NO: 16584 - protein, 440 aa, Triticum aestivum
  peptide (1)..(440): Ceres Seq. ID no. 14308050
  misc_feature (3)..(435): Pfam Name: Pfam Description:  Transferase family
  misc_feature (1)..(435): NCBI GI NO: 30025135 NR Description: agmatine coumaroyltransferase [Hordeum vulgare]
  misc_feature (1)..(440): NCBI GI NO: 32488652 NR Description: OSJNBa0087O24.2
  misc_feature (1)..(435): NCBI GI NO: 32488651 NR Description: OSJNBa0087O24.1
  misc_feature (88)..(433): NCBI GI NO: 30025137 NR Description: putative agmatine coumaroyltransferase
  misc_feature (1)..(435): NCBI GI NO: 32490471 NR Description: putative anthranilate N-benzoyltransferase
  misc_feature (128)..(435): NCBI GI NO: 32490472 NR Description: putative anthranilate N-benzoyltransferase
  misc_feature (1)..(435): NCBI GI NO: 37533700 NR Description: putative anthranilate N-benzoyltransferase
  misc_feature (137)..(433): NCBI GI NO: 31712073 NR Description: putative hydroxycinnamoyl transferase
  misc_feature (1)..(430): NCBI GI NO: 21536883 NR Description: anthranilate N-benzoyltransferase
  misc_feature (1)..(430): NCBI GI NO: 15239747 NR Description: anthranilate N-hydroxycinnamoyl/ benzoyltransferasefamily
MKITVRSSKSIKPDYGSGHLMAPATANVVPLTVFDKANFDMHVSVIYTFHPPAPSHDVLEAGLAKALADYREWAGRLTLDANGKRCAILLNDAGARFVEATAGVALDSVMPLQPTPEVLSLHPTGGGDELLLIQATRFACGSLVVGLTGHHMVTDGGGWCNLIIAWGQATRGASIDPVPVHDRPSFFLPRNPLKIEYEHHSIEFKPYDDRNSTAGGGDDEVVVERVHFSMDHIAKLKSQASAVAGTGRPYSTVQCVVAHLWRCMTLARGLDGRDVTGLFIAVDGRARMSQRVPDGYTGNVVLWARPTATAGEVVNRPLHHLAELISGAVARIDDAYFKSFIDFACSGAVEEEGLVPTADPAVTVLSPNVEVDSWLRIPFYDLDLGSGRPFFFMPSYLPVEGGVILVPSFYGDGSVDAYVPLFSRHMDAFKNCCTSGLPKL

SEQ ID NO: 16585 - protein, 420 aa, Triticum aestivum
  peptide (1)..(420): Ceres Seq. ID no. 14308051
  misc_feature (1)..(415): Pfam Name: Pfam Description:  Transferase family
  misc_feature (1)..(415): NCBI GI NO: 30025135 NR Description: agmatine coumaroyltransferase [Hordeum vulgare]
  misc_feature (1)..(420): NCBI GI NO: 32488652 NR Description: OSJNBa0087O24.2
  misc_feature (1)..(415): NCBI GI NO: 32488651 NR Description: OSJNBa0087O24.1
  misc_feature (68)..(413): NCBI GI NO: 30025137 NR Description: putative agmatine coumaroyltransferase
  misc_feature (1)..(415): NCBI GI NO: 32490471 NR Description: putative anthranilate N-benzoyltransferase
  misc_feature (108)..(415): NCBI GI NO: 32490472 NR Description: putative anthranilate N-benzoyltransferase
  misc_feature (1)..(415): NCBI GI NO: 37533700 NR Description: putative anthranilate N-benzoyltransferase
  misc_feature (117)..(413): NCBI GI NO: 31712073 NR Description: putative hydroxycinnamoyl transferase
  misc_feature (1)..(410): NCBI GI NO: 21536883 NR Description: anthranilate N-benzoyltransferase
  misc_feature (1)..(410): NCBI GI NO: 15239747 NR Description: anthranilate N-hydroxycinnamoyl/ benzoyltransferasefamily
MAPATANVVPLTVFDKANFDMHVSVIYTFHPPAPSHDVLEAGLAKALADYREWAGRLTLDANGKRCAILLNDAGARFVEATAGVALDSVMPLQPTPEVLSLHPTGGGDELLLIQATRFACGSLVVGLTGHHMVTDGGGWCNLIIAWGQATRGASIDPVPVHDRPSFFLPRNPLKIEYEHHSIEFKPYDDRNSTAGGGDDEVVVERVHFSMDHIAKLKSQASAVAGTGRPYSTVQCVVAHLWRCMTLARGLDGRDVTGLFIAVDGRARMSQRVPDGYTGNVVLWARPTATAGEVVNRPLHHLAELISGAVARIDDAYFKSFIDFACSGAVEEEGLVPTADPAVTVLSPNVEVDSWLRIPFYDLDLGSGRPFFFMPSYLPVEGGVILVPSFYGDGSVDAYVPLFSRHMDAFKNCCTSGLPKL

SEQ ID NO: 16586 - protein, 400 aa, Triticum aestivum
  peptide (1)..(400): Ceres Seq. ID no. 14308052
  misc_feature (1)..(395): Pfam Name: Pfam Description:  Transferase family
  misc_feature (1)..(395): NCBI GI NO: 30025135 NR Description: agmatine coumaroyltransferase [Hordeum vulgare]
  misc_feature (1)..(400): NCBI GI NO: 32488652 NR Description: OSJNBa0087O24.2
  misc_feature (1)..(395): NCBI GI NO: 32488651 NR Description: OSJNBa0087O24.1
  misc_feature (48)..(393): NCBI GI NO: 30025137 NR Description: putative agmatine coumaroyltransferase
  misc_feature (1)..(395): NCBI GI NO: 32490471 NR Description: putative anthranilate N-benzoyltransferase
  misc_feature (88)..(395): NCBI GI NO: 32490472 NR Description: putative anthranilate N-benzoyltransferase
  misc_feature (1)..(395): NCBI GI NO: 37533700 NR Description: putative anthranilate N-benzoyltransferase
  misc_feature (97)..(393): NCBI GI NO: 31712073 NR Description: putative hydroxycinnamoyl transferase
  misc_feature (1)..(390): NCBI GI NO: 21536883 NR Description: anthranilate N-benzoyltransferase
  misc_feature (1)..(390): NCBI GI NO: 15239747 NR Description: anthranilate N-hydroxycinnamoyl/ benzoyltransferasefamily
MHVSVIYTFHPPAPSHDVLEAGLAKALADYREWAGRLTLDANGKRCAILLNDAGARFVEATAGVALDSVMPLQPTPEVLSLHPTGGGDELLLIQATRFACGSLVVGLTGHHMVTDGGGWCNLIIAWGQATRGASIDPVPVHDRPSFFLPRNPLKIEYEHHSIEFKPYDDRNSTAGGGDDEVVVERVHFSMDHIAKLKSQASAVAGTGRPYSTVQCVVAHLWRCMTLARGLDGRDVTGLFIAVDGRARMSQRVPDGYTGNVVLWARPTATAGEVVNRPLHHLAELISGAVARIDDAYFKSFIDFACSGAVEEEGLVPTADPAVTVLSPNVEVDSWLRIPFYDLDLGSGRPFFFMPSYLPVEGGVILVPSFYGDGSVDAYVPLFSRHMDAFKNCCTSGLPKL

SEQ ID NO: 16587 - DNA, 1681 bp, Triticum aestivum
  misc_feature (1)..(1681): Ceres Seq. ID no. 14307976
aacccgaacagttagacagagaaaaatcctccaagcgcatcgccacccgctgccgcgagccgccgcccgccggccccagccccgccacaggctacagcgcgccgccaccgcctaccccgccggcactcctacccctaccccaagtgcctcccacgctcgctacgttctaccgccggcgacactcgacgccgcggccgttgccggctcccacacccgcgggcctttatctccccggcggccgccgccgccgccctgctcgtccagcgggctggccctgtccatggggcgtacgggctacccgcgcccttcgacgcccgcacgcgcctccttctgcccttccgccgcggacgatgccgacttctctgagtctaatgcgatcctggtggtggccacgccctgcgagagtctgttgctgctcagcccagcgtcttgccgtggcgggcgcctgtcgtcggagctctggttgtcggttccagagtcgggtggttccacacaggggcgcatatcccgttgtgccaccaatcacttaattcggctctcttgagctgcccggcttcggcggcgaagatgatggcgatgcctaggacacaacggccacatgggatgaaactagcagagatgaagaaggcggtggtcgttgggaggagaagattgcccggaagctggaggacgtgcaccagctgcggttgctggacaaccgctacgtttagtggctgagggaattgttgggctacgagaatcagtcgctgataagagggctgaggctgagaagatcaagagggatcagagattgtgctcaattgttggtggtcaggacgtcaggagttatctgaagaaaggactcactatctggttaaatgttccattggatgcccttgcaagaaggattgctgcggtggttcagcgtcactgcccctcctgcatcaacaatctggtgatccatatgcaaaggttcagaagagctattttgtgtacatgagttgctactggcagtggacagattgtctatgcagagtgcgtagagaaaaaaatgctcacatacaaacacaaacgacatccagtaggcgcttggaacacccgacagattgaaagcacagaagcaaagatttccaatacgaggccacgatgcccgacagagatgtagccaatatgtgcccaatccttatttcttgatgttggaacaacaagtgttgaggcagggaaaaggcagcagtagaggcatgggcacttcagaaaagggtgttgactgttctgattgaggccagttgaaggcttccacgtgccacctccttcgcctcctacgccgcgtcgagaaaggcggacacgtgcggtaggagccaagggggaacagggaaaggcggacacgagattcgtgaacccagagaagagaatgtatgcgagcttgtccacctcggcggtgtcagccgccagtgccaccgtgtcccgcctccgcctggcctggtcgcaacaaaagtatgactgcaggtgtggttcattcagttttgaagtttgatttacttgcttgtgcatgtgtgtgtgtattctaagagagagggagagattattctgttctagccagtcgtatttctggacaaatctgctcccctccactccttttttatttgccttaaatctgaacatgaaaagcagttacaaattgagagcaacagagtaaacgttc

SEQ ID NO: 16588 - protein, 180 aa, Triticum aestivum
  peptide (1)..(180): Ceres Seq. ID no. 14307977
TRTVRQRKILQAHRHPLPRAAARRPQPRHRLQRAATAYPAGTPTPTPSASHARYVLPPATLDAAAVAGSHTRGPLSPRRPPPPPCSSSGLALSMGRTGYPRPSTPARASFCPSAADDADFSESNAILVVATPCESLLLLSPASCRGGRLSSELWLSVPESGGSTQGRISRCATNHLIRLS

SEQ ID NO: 16589 - protein, 175 aa, Triticum aestivum
  peptide (1)..(175): Ceres Seq. ID no. 14307978
  misc_feature (20)..(120): NCBI GI NO: 27375632 NR Description: blr0521 [Bradyrhizobium japonicum]
PEQLDREKSSKRIATRCREPPPAGPSPATGYSAPPPPTPPALLPLPQVPPTLATFYRRRHSTPRPLPAPTPAGLYLPGGRRRRPARPAGWPCPWGVRATRALRRPHAPPSALPPRTMPTSLSLMRSWWWPRPARVCCCSAQRLAVAGACRRSSGCRFQSRVVPHRGAYPVVPPIT

SEQ ID NO: 16590 - protein, 87 aa, Triticum aestivum
  peptide (1)..(87): Ceres Seq. ID no. 14307979
MGRTGYPRPSTPARASFCPSAADDADFSESNAILVVATPCESLLLLSPASCRGGRLSSELWLSVPESGGSTQGRISRCATNHLIRLS

SEQ ID NO: 16591 - DNA, 1134 bp, Triticum aestivum
  misc_feature (1)..(1134): Ceres Seq. ID no. 14301822
acatgctatagtccacaggtccgggcagtccagttttccctccattcccccgcggagaaaaaaaaggggaaccgcgggatttcgccggagatgtcgtcggcggccacgaagctcgccaccgcggccgacgctacctcgacggaggcccaaaccctcgtcttggacatgcgcaaggcgctcagctccatgaagtccctcgccgtggagtacgagagggccggcaagcccgacaaggtgaagcagctggaggacgcggtgcaggagctggtggcctcgtacgaggactgcgcgtacctcgccgaggcggtgaagaaggtgcccggggcgtaccagccgtccgaccaggcgactgatttcagaaagctgatcgatgcggaggttgagaaagtcaaggggacctcgcgatcgtcgggacacaaggaccagctcatacggcagttcaaagaggctgtttgggatgttcaccatgcaggtcaaccgatgcctggtgatgaacaagaggaacttgttatgactagcacccagaacaacatcctaaatacagtatgcccattgactatgaagcctatagtcgacttggaaaatcctgttcgctgcatcgattgcaggcacatctatgacaaggatccaatcctgaggtacatccggacgaacaaagctccgaattgccccattgcaggctgcccggcggtcctgcaaccggcgaagatcgtctgcgacaccttccttcgtatggagatcgaggagctgcgggcgtcgggcccggccgctccgaacgcctctgagatagaggatatctcggaccacgacgaggacgaggacgaggatccgatggacgaagacgatgacgagtgatacgcgtctggagaaaccaaccttggtggattcttggtattttgtagggatgatgataggtgttggtactctgttttcaggtcgcactggtatgtcgtcgtgtgtggaatcgggggatgtggctcccctggcaattagcttaaccaacgtaacaagcttagctatgaggatatttattcttgttctgccctgcttttcatcagtctgcagtgctcgttcgtttgtctgattggtgatgatttggtgagactgaatgaccccaatctaaaaatatttcac

SEQ ID NO: 16592 - protein, 284 aa, Triticum aestivum
  peptide (1)..(284): Ceres Seq. ID no. 14301823
  misc_feature (26)..(274): NCBI GI NO: 11994504 NR Description: emb|CAB09999
  misc_feature (26)..(274): NCBI GI NO: 30683483 NR Description: expressed protein [Arabidopsis thaliana]
  misc_feature (49)..(269): NCBI GI NO: 24642216 NR Description: CG15645-PA [Drosophila melanogaster]
  misc_feature (158)..(269): NCBI GI NO: 24642218 NR Description: CG15645-PB [Drosophila melanogaster]
TCYSPQVRAVQFSLHSPAEKKKGNRGISPEMSSAATKLATAADATSTEAQTLVLDMRKALSSMKSLAVEYERAGKPDKVKQLEDAVQELVASYEDCAYLAEAVKKVPGAYQPSDQATDFRKLIDAEVEKVKGTSRSSGHKDQLIRQFKEAVWDVHHAGQPMPGDEQEELVMTSTQNNILNTVCPLTMKPIVDLENPVRCIDCRHIYDKDPILRYIRTNKAPNCPIAGCPAVLQPAKIVCDTFLRMEIEELRASGPAAPNASEIEDISDHDEDEDEDPMDEDDDE

SEQ ID NO: 16593 - protein, 254 aa, Triticum aestivum
  peptide (1)..(254): Ceres Seq. ID no. 14301824
  misc_feature (1)..(244): NCBI GI NO: 11994504 NR Description: emb|CAB09999
  misc_feature (1)..(244): NCBI GI NO: 30683483 NR Description: expressed protein [Arabidopsis thaliana]
  misc_feature (19)..(239): NCBI GI NO: 24642216 NR Description: CG15645-PA [Drosophila melanogaster]
  misc_feature (128)..(239): NCBI GI NO: 24642218 NR Description: CG15645-PB [Drosophila melanogaster]
MSSAATKLATAADATSTEAQTLVLDMRKALSSMKSLAVEYERAGKPDKVKQLEDAVQELVASYEDCAYLAEAVKKVPGAYQPSDQATDFRKLIDAEVEKVKGTSRSSGHKDQLIRQFKEAVWDVHHAGQPMPGDEQEELVMTSTQNNILNTVCPLTMKPIVDLENPVRCIDCRHIYDKDPILRYIRTNKAPNCPIAGCPAVLQPAKIVCDTFLRMEIEELRASGPAAPNASEIEDISDHDEDEDEDPMDEDDDE

SEQ ID NO: 16594 - protein, 229 aa, Triticum aestivum
  peptide (1)..(229): Ceres Seq. ID no. 14301825
  misc_feature (1)..(219): NCBI GI NO: 11994504 NR Description: emb|CAB09999
  misc_feature (1)..(219): NCBI GI NO: 30683483 NR Description: expressed protein [Arabidopsis thaliana]
  misc_feature (1)..(214): NCBI GI NO: 24642216 NR Description: CG15645-PA [Drosophila melanogaster]
  misc_feature (103)..(214): NCBI GI NO: 24642218 NR Description: CG15645-PB [Drosophila melanogaster]
MRKALSSMKSLAVEYERAGKPDKVKQLEDAVQELVASYEDCAYLAEAVKKVPGAYQPSDQATDFRKLIDAEVEKVKGTSRSSGHKDQLIRQFKEAVWDVHHAGQPMPGDEQEELVMTSTQNNILNTVCPLTMKPIVDLENPVRCIDCRHIYDKDPILRYIRTNKAPNCPIAGCPAVLQPAKIVCDTFLRMEIEELRASGPAAPNASEIEDISDHDEDEDEDPMDEDDDE

SEQ ID NO: 16595 - DNA, 926 bp, Triticum aestivum
  misc_feature (1)..(926): Ceres Seq. ID no. 14301874
ccgtgtctccctccctccctccctctccaccgcccccctagtctgacaccgccaaaatcccaccgcgccacgctgatggcttcgccgccgacgggacccgcggcgccggcgggcttggagagcatggaggggctcgccctcgacatcatcatcgccaaggccggcgcgcgccccgcggccgcgctcgcctgcgccagcacgcacctgcgcgccgccgtggccgaggacgccgtctggcgcagcttctgcgcccgagacctcggcctcgacgcgcccctcgaccccgaggaccgcccgctcccctccttcaaggtacgtgcatctgctgtctttgtgccagaacatcctcgtcgggggcatttgggcacacatctgtacagctattccatccgcctgtcagttcctgaggcatgcatgctaggtggggtttacttttcttcctgccagcttcactcacgccactggatcatccgatgtaaagacacggttgtttcggatatgcatggggaaggtgttattggggagcaccctttacttttaccagggcaggacgagtttgtctatgagagctgcacgccgctgaatggcagtagtggatctgtggagggctcttttacatttgtgcctgggaggttgacccagccagaaggaaaaccattcgacgtcacggtggctccgttccctctggaagtacccgactacatcttctgagcatagtatgtgcacctaataacagtgtagtatcttggtagaaacaccgaacatatctctagtactctgtctgctgtagcaaagttgctctgcctggagttgatcttgtcgatgtaatgttaactaaaggacgcaaatggttgtcgtgcgccgaccttcttccggttcctggctgtggccctaaaggaatctgtagcaggtggagcttgtttgtt

SEQ ID NO: 16596 - protein, 236 aa, Triticum aestivum
  peptide (1)..(236): Ceres Seq. ID no. 14301875
  misc_feature (104)..(232): Pfam Name: DUF525 Pfam Description: Protein of unknown function
  misc_feature (104)..(236): NCBI GI NO: 18390613 NR Description: F-box protein family [Arabidopsis thaliana]
  misc_feature (38)..(104): NCBI GI NO: 18390613 NR Description: F-box protein family [Arabidopsis thaliana]
  misc_feature (102)..(232): NCBI GI NO: 30249542 NR Description: conserved hypothetical protein
  misc_feature (105)..(232): NCBI GI NO: 23108582 NR Description: hypothetical protein
  misc_feature (96)..(232): NCBI GI NO: 15838740 NR Description: ApaG protein [Xylella fastidiosa 9a5c]
  misc_feature (105)..(232): NCBI GI NO: 22999506 NR Description: hypothetical protein [Magnetococcus sp. MC-1]
  misc_feature (96)..(232): NCBI GI NO: 22994587 NR Description: hypothetical protein [Xylella fastidiosa Dixon]
  misc_feature (96)..(232): NCBI GI NO: 22997541 NR Description: hypothetical protein [Xylella fastidiosa Ann-1]
  misc_feature (105)..(234): NCBI GI NO: 12839470 NR Description: unnamed protein product [Mus musculus]
  misc_feature (97)..(233): NCBI GI NO: 22966573 NR Description: hypothetical protein [Rhodospirillum rubrum]
PCLPPSLPLHRPPSLTPPKSHRATLMASPPTGPAAPAGLESMEGLALDIIIAKAGARPAAALACASTHLRAAVAEDAVWRSFCARDLGLDAPLDPEDRPLPSFKVRASAVFVPEHPRRGHLGTHLYSYSIRLSVPEACMLGGVYFSSCQLHSRHWIIRCKDTVVSDMHGEGVIGEHPLLLPGQDEFVYESCTPLNGSSGSVEGSFTFVPGRLTQPEGKPFDVTVAPFPLEVPDYIF

SEQ ID NO: 16597 - protein, 211 aa, Triticum aestivum
  peptide (1)..(211): Ceres Seq. ID no. 14301876
  misc_feature (79)..(207): Pfam Name: DUF525 Pfam Description: Protein of unknown function
  misc_feature (79)..(211): NCBI GI NO: 18390613 NR Description: F-box protein family [Arabidopsis thaliana]
  misc_feature (13)..(79): NCBI GI NO: 18390613 NR Description: F-box protein family [Arabidopsis thaliana]
  misc_feature (77)..(207): NCBI GI NO: 30249542 NR Description: conserved hypothetical protein
  misc_feature (80)..(207): NCBI GI NO: 23108582 NR Description: hypothetical protein
  misc_feature (71)..(207): NCBI GI NO: 15838740 NR Description: ApaG protein [Xylella fastidiosa 9a5c]
  misc_feature (80)..(207): NCBI GI NO: 22999506 NR Description: hypothetical protein [Magnetococcus sp. MC-1]
  misc_feature (71)..(207): NCBI GI NO: 22994587 NR Description: hypothetical protein [Xylella fastidiosa Dixon]
  misc_feature (71)..(207): NCBI GI NO: 22997541 NR Description: hypothetical protein [Xylella fastidiosa Ann-1]
  misc_feature (80)..(209): NCBI GI NO: 12839470 NR Description: unnamed protein product [Mus musculus]
  misc_feature (72)..(208): NCBI GI NO: 22966573 NR Description: hypothetical protein [Rhodospirillum rubrum]
MASPPTGPAAPAGLESMEGLALDIIIAKAGARPAAALACASTHLRAAVAEDAVWRSFCARDLGLDAPLDPEDRPLPSFKVRASAVFVPEHPRRGHLGTHLYSYSIRLSVPEACMLGGVYFSSCQLHSRHWIIRCKDTVVSDMHGEGVIGEHPLLLPGQDEFVYESCTPLNGSSGSVEGSFTFVPGRLTQPEGKPFDVTVAPFPLEVPDYIF

SEQ ID NO: 16598 - protein, 195 aa, Triticum aestivum
  peptide (1)..(195): Ceres Seq. ID no. 14301877
  misc_feature (63)..(191): Pfam Name: DUF525 Pfam Description: Protein of unknown function
  misc_feature (63)..(195): NCBI GI NO: 18390613 NR Description: F-box protein family [Arabidopsis thaliana]
  misc_feature (1)..(63): NCBI GI NO: 18390613 NR Description: F-box protein family [Arabidopsis thaliana]
  misc_feature (61)..(191): NCBI GI NO: 30249542 NR Description: conserved hypothetical protein
  misc_feature (64)..(191): NCBI GI NO: 23108582 NR Description: hypothetical protein
  misc_feature (55)..(191): NCBI GI NO: 15838740 NR Description: ApaG protein [Xylella fastidiosa 9a5c]
  misc_feature (64)..(191): NCBI GI NO: 22999506 NR Description: hypothetical protein [Magnetococcus sp. MC-1]
  misc_feature (55)..(191): NCBI GI NO: 22994587 NR Description: hypothetical protein [Xylella fastidiosa Dixon]
  misc_feature (55)..(191): NCBI GI NO: 22997541 NR Description: hypothetical protein [Xylella fastidiosa Ann-1]
  misc_feature (64)..(193): NCBI GI NO: 12839470 NR Description: unnamed protein product [Mus musculus]
  misc_feature (56)..(192): NCBI GI NO: 22966573 NR Description: hypothetical protein [Rhodospirillum rubrum]
MEGLALDIIIAKAGARPAAALACASTHLRAAVAEDAVWRSFCARDLGLDAPLDPEDRPLPSFKVRASAVFVPEHPRRGHLGTHLYSYSIRLSVPEACMLGGVYFSSCQLHSRHWIIRCKDTVVSDMHGEGVIGEHPLLLPGQDEFVYESCTPLNGSSGSVEGSFTFVPGRLTQPEGKPFDVTVAPFPLEVPDYIF

SEQ ID NO: 16599 - DNA, 775 bp, Triticum aestivum
  misc_feature (1)..(775): Ceres Seq. ID no. 13598028
atcggtccatctccatcgctctctcctcttctacctcgccggccagccttctccttggatctcgtcgcagcacggcaacggcaacggcaatggtggtctcgtacacgcaggagcacgtgtacctccacccctggcaccgggtcaccgcggcggcgtggcgcaagttcaccgacccggcggcgctctcccacatcctggacgtgcagacgctgtcccgggacgtcgacccgcgcgccggccggctccacgccgtgcgggccatcgcgggccggcccccgccgctcccgctcctcctccgcggcctcgcggccaccgccggcgccggcgacgtggtgctctgcgtggagcgcacctccgtggacgcggccgcgcgcgccatgcgggtggtctcccgcaacgccacgttccggcggctggtggacgtggaggagcggtgcagctacgcgccccacccggagcggccggacgagtggacggtgttcacgcaggagacgagcatccggtgcgcgccgctggcggccgtgtcggccacggtggccgagatggtggagcggcggtgcgccgagagcttcgcgcagaacgccgccagggggcaggaggtcgtcgagaggatctgcgacggcctcgcgctcgccggccgcgtgccaggaccctcccctgccgacggagaagaaccgtagagacagagcactgcgcagagcatgctcgctctctgttatttactgatgtgtaaatactggctgggaggcaataagaagtgaaattctgtaaattc

SEQ ID NO: 16600 - protein, 243 aa, Triticum aestivum
  peptide (1)..(243): Ceres Seq. ID no. 13598029
  misc_feature (36)..(212): NCBI GI NO: 29830954 NR Description: putative GntR-family transcriptional regulator
  misc_feature (35)..(216): NCBI GI NO: 23018788 NR Description: hypothetical protein [Thermobifida fusca]
SVHLHRSLLFYLAGQPSPWISSQHGNGNGNGGLVHAGARVPPPLAPGHRGGVAQVHRPGGALPHPGRADAVPGRRPARRPAPRRAGHRGPAPAAPAPPPRPRGHRRRRRRGALRGAHLRGRGRARHAGGLPQRHVPAAGGRGGAVQLRAPPGAAGRVDGVHAGDEHPVRAAGGRVGHGGRDGGAAVRRELRAERRQGAGGRREDLRRPRARRPRARTLPCRRRRTVETEHCAEHARSLLFTDV

SEQ ID NO: 16601 - protein, 241 aa, Triticum aestivum
  peptide (1)..(241): Ceres Seq. ID no. 13598030
  misc_feature (3)..(227): NCBI GI NO: 25143299 NR Description: pre-mRNA splicing SR protein related RSR-1 (68
  misc_feature (38)..(241): NCBI GI NO: 29250754 NR Description: GLP_49_64409_65443 [Giardia lamblia ATCC 50803]
IGPSPSLSPLLPRRPAFSLDLVAARQRQRQWWSRTRRSTCTSTPGTGSPRRRGASSPTRRRSPTSWTCRRCPGTSTRAPAGSTPCGPSRAGPRRSRSSSAASRPPPAPATWCSAWSAPPWTRPRAPCGWSPATPRSGGWWTWRSGAATRPTRSGRTSGRCSRRRRASGARRWRPCRPRWPRWWSGGAPRASRRTPPGGRRSSRGSATASRSPAACQDPPLPTEKNRRDRALRRACSLSVIY

SEQ ID NO: 16602 - protein, 225 aa, Triticum aestivum
  peptide (1)..(225): Ceres Seq. ID no. 13598031
  misc_feature (49)..(205): Pfam Name: Pfam Description:  MSF1-like conserved region
  misc_feature (30)..(205): NCBI GI NO: 15240002 NR Description: expressed protein [Arabidopsis thaliana]
  misc_feature (34)..(202): NCBI GI NO: 37577049 NR Description: BCR/ABL-regulated protein [Cricetulus griseus]
  misc_feature (34)..(202): NCBI GI NO: 7705610 NR Description: CGI-107 protein [Homo sapiens]
  misc_feature (34)..(202): NCBI GI NO: 26392626 NR Description: Protein C20orf45 (CGI-107)
  misc_feature (34)..(206): NCBI GI NO: 21450093 NR Description: hypothetical protein MGC28728 [Mus musculus]
  misc_feature (34)..(202): NCBI GI NO: 13384954 NR Description: RIKEN cDNA 2310042G06 [Mus musculus]
  misc_feature (34)..(206): NCBI GI NO: 38678528 NR Description: erythroid differentiation and denucleation factor 1
  misc_feature (34)..(202): NCBI GI NO: 12850407 NR Description: unnamed protein product [Mus musculus]
  misc_feature (34)..(216): NCBI GI NO: 34932182 NR Description: similar to hypothetical protein MGC28728
  misc_feature (34)..(202): NCBI GI NO: 28279126 NR Description: Similar to chromosome 20 open reading frame 45
RSISIALSSSTSPASLLLGSRRSTATATAMVVSYTQEHVYLHPWHRVTAAAWRKFTDPAALSHILDVQTLSRDVDPRAGRLHAVRAIAGRPPPLPLLLRGLAATAGAGDVVLCVERTSVDAAARAMRVVSRNATFRRLVDVEERCSYAPHPERPDEWTVFTQETSIRCAPLAAVSATVAEMVERRCAESFAQNAARGQEVVERICDGLALAGRVPGPSPADGEEP

SEQ ID NO: 16603 - protein, 196 aa, Triticum aestivum
  peptide (1)..(196): Ceres Seq. ID no. 13598032
  misc_feature (20)..(176): Pfam Name: Pfam Description:  MSF1-like conserved region
  misc_feature (1)..(176): NCBI GI NO: 15240002 NR Description: expressed protein [Arabidopsis thaliana]
  misc_feature (5)..(173): NCBI GI NO: 37577049 NR Description: BCR/ABL-regulated protein [Cricetulus griseus]
  misc_feature (5)..(173): NCBI GI NO: 7705610 NR Description: CGI-107 protein [Homo sapiens]
  misc_feature (5)..(173): NCBI GI NO: 26392626 NR Description: Protein C20orf45 (CGI-107)
  misc_feature (5)..(177): NCBI GI NO: 21450093 NR Description: hypothetical protein MGC28728 [Mus musculus]
  misc_feature (5)..(173): NCBI GI NO: 13384954 NR Description: RIKEN cDNA 2310042G06 [Mus musculus]
  misc_feature (5)..(177): NCBI GI NO: 38678528 NR Description: erythroid differentiation and denucleation factor 1
  misc_feature (5)..(173): NCBI GI NO: 12850407 NR Description: unnamed protein product [Mus musculus]
  misc_feature (5)..(187): NCBI GI NO: 34932182 NR Description: similar to hypothetical protein MGC28728
  misc_feature (5)..(173): NCBI GI NO: 28279126 NR Description: Similar to chromosome 20 open reading frame 45
MVVSYTQEHVYLHPWHRVTAAAWRKFTDPAALSHILDVQTLSRDVDPRAGRLHAVRAIAGRPPPLPLLLRGLAATAGAGDVVLCVERTSVDAAARAMRVVSRNATFRRLVDVEERCSYAPHPERPDEWTVFTQETSIRCAPLAAVSATVAEMVERRCAESFAQNAARGQEVVERICDGLALAGRVPGPSPADGEEP

SEQ ID NO: 16604 - DNA, 1808 bp, Triticum aestivum
  misc_feature (1)..(1808): Ceres Seq. ID no. 15170167
gtttctccctgtctcagtccctagctaccaccaccgcagcgtgcgcagccatggacgcggccacctcgacgacgctcctctacggggcgctgctcgcggctgctttcctctacgtcgccaccatccagcgtggccgcggcaggggcgaaggcggcctgccgccgggccccaggggcctgccgctcttgggcagcctcctgtccctcgacccggacctgcacacctacttcgccggcctcgccaacaagtacagccccatcttctccatccgactcggctccaagctgggtattgtcatcacctccccggcgctggcccgcgaggtgctgcgcgacaacgacctcgtcttctccaaccgggacatcccggacgccgcgcgctccatctcctacggcggtggccagaacatcgtctggaaccccgtcggtcccacctggcgtctgctccgccgcgtctgcgtccgcgagatgctcagccctgctggcctgcagaatgtgcacggcctccgccgccgcgagttcagggccacgctcgcgcacctgcactccatggccagcgccggcatgccggttgacgtcggcgcccagatgttcctcaccaccatgaacgtcatcaccggcacgctgtggggaggcaacatagggaccgagagcgagcggacggcggtgggcaaggagttccgggagcttgtcgcggagatcaccgagatgctcggcgcacccaacgtgtcagacttcttcccggcgctggcgccgttcgacctgcagggaatccggaagaagtcggacgcgctcaaggagcggttcgacgagatcttcggcaggatcatagagaagagggtcgaggccgaccacgccggcggcgacacggcggaagacttcctcgaatacatgctcaagatggagaaggaaggtggcgacgggaaggccgccttcaccatgaccaacgtcaaggccctgctcatggatatggtggttgggggcacagagacgacgtcgaacacggtggaatgggccatggcggagatgctacaaaaccgggggatactgcggaaggtgcgggaggaactcgacgcggtggttggtatcgatggcgtggtggaggaatcggatctcccgcagctgcactatctgcatctggtggtcaaggagacgctccggctgcacccggcgctgccgctcatggtgccgcactgccccagcgaagacacgaccgtcggcggccaccgcgtcccggcgggaagccgcgtgtttgtcaacgcgtgggcgatcatgagggaccccgctgcgtggaaggatccggcgaagttcatcccggagaggttcgcctctcaggcgagcgacggtgacagcgggcggaaggtggacttcaccggcagcgagctggactacgtgccgttcgggtcggggaggaggatctgcgcgggcatcgccatggccgagaggatgacggcatactctgtggccatgctgctgcaggccttcgactgggagctgccggagggagcggcgctggacctgacagagaagttcggcatcgtcatgaagaaggccacgccgctggtcgccgttccgacgccgaggctttccagacccgagctctattccgcatagatagctgatcctactccatgaccatgactccgtgctcgaatcagttcagcctgcagtacatttcccctctcgtgctgttggtccaaacaaaagtttgcttttctacggtttcaattgtctgcttcttctgtagtagcactagcagtgtgcagacagcatctattatatctatatacctattacaatatttatatg

SEQ ID NO: 16605 - protein, 536 aa, Triticum aestivum
  peptide (1)..(536): Ceres Seq. ID no. 15170168
  misc_feature (53)..(523): Pfam Name: Pfam Description:  Cytochrome P450
  misc_feature (17)..(534): NCBI GI NO: 34911488 NR Description: putative flavonoid 3',5'-hydroxylase
  misc_feature (52)..(534): NCBI GI NO: 15234514 NR Description: cytochrome p450 family [Arabidopsis thaliana]
  misc_feature (52)..(534): NCBI GI NO: 15234517 NR Description: cytochrome P450, putative [Arabidopsis thaliana]
  misc_feature (52)..(534): NCBI GI NO: 11345411 NR Description: putative cytochrome P450 [Matthiola incana]
  misc_feature (30)..(534): NCBI GI NO: 15234521 NR Description: cytochrome P450 family [Arabidopsis thaliana]
  misc_feature (52)..(534): NCBI GI NO: 15241541 NR Description: cytochrome P450 family [Arabidopsis thaliana]
  misc_feature (22)..(536): NCBI GI NO: 15235775 NR Description: cytochrome P450 family [Arabidopsis thaliana]
  misc_feature (22)..(536): NCBI GI NO: 7430667 NR Description: cytochrome P450 homolog T12H17
  misc_feature (22)..(536): NCBI GI NO: 30685891 NR Description: cytochrome P450 family [Arabidopsis thaliana]
  misc_feature (52)..(529): NCBI GI NO: 37531412 NR Description: putative cytochrome P450
FSLSQSLATTTAACAAMDAATSTTLLYGALLAAAFLYVATIQRGRGRGEGGLPPGPRGLPLLGSLLSLDPDLHTYFAGLANKYSPIFSIRLGSKLGIVITSPALAREVLRDNDLVFSNRDIPDAARSISYGGGQNIVWNPVGPTWRLLRRVCVREMLSPAGLQNVHGLRRREFRATLAHLHSMASAGMPVDVGAQMFLTTMNVITGTLWGGNIGTESERTAVGKEFRELVAEITEMLGAPNVSDFFPALAPFDLQGIRKKSDALKERFDEIFGRIIEKRVEADHAGGDTAEDFLEYMLKMEKEGGDGKAAFTMTNVKALLMDMVVGGTETTSNTVEWAMAEMLQNRGILRKVREELDAVVGIDGVVEESDLPQLHYLHLVVKETLRLHPALPLMVPHCPSEDTTVGGHRVPAGSRVFVNAWAIMRDPAAWKDPAKFIPERFASQASDGDSGRKVDFTGSELDYVPFGSGRRICAGIAMAERMTAYSVAMLLQAFDWELPEGAALDLTEKFGIVMKKATPLVAVPTPRLSRPELYSA

SEQ ID NO: 16606 - protein, 520 aa, Triticum aestivum
  peptide (1)..(520): Ceres Seq. ID no. 15170169
  misc_feature (37)..(507): Pfam Name: Pfam Description:  Cytochrome P450
  misc_feature (1)..(518): NCBI GI NO: 34911488 NR Description: putative flavonoid 3',5'-hydroxylase
  misc_feature (36)..(518): NCBI GI NO: 15234514 NR Description: cytochrome p450 family [Arabidopsis thaliana]
  misc_feature (36)..(518): NCBI GI NO: 15234517 NR Description: cytochrome P450, putative [Arabidopsis thaliana]
  misc_feature (36)..(518): NCBI GI NO: 11345411 NR Description: putative cytochrome P450 [Matthiola incana]
  misc_feature (14)..(518): NCBI GI NO: 15234521 NR Description: cytochrome P450 family [Arabidopsis thaliana]
  misc_feature (36)..(518): NCBI GI NO: 15241541 NR Description: cytochrome P450 family [Arabidopsis thaliana]
  misc_feature (6)..(520): NCBI GI NO: 15235775 NR Description: cytochrome P450 family [Arabidopsis thaliana]
  misc_feature (6)..(520): NCBI GI NO: 7430667 NR Description: cytochrome P450 homolog T12H17
  misc_feature (6)..(520): NCBI GI NO: 30685891 NR Description: cytochrome P450 family [Arabidopsis thaliana]
  misc_feature (36)..(513): NCBI GI NO: 37531412 NR Description: putative cytochrome P450
MDAATSTTLLYGALLAAAFLYVATIQRGRGRGEGGLPPGPRGLPLLGSLLSLDPDLHTYFAGLANKYSPIFSIRLGSKLGIVITSPALAREVLRDNDLVFSNRDIPDAARSISYGGGQNIVWNPVGPTWRLLRRVCVREMLSPAGLQNVHGLRRREFRATLAHLHSMASAGMPVDVGAQMFLTTMNVITGTLWGGNIGTESERTAVGKEFRELVAEITEMLGAPNVSDFFPALAPFDLQGIRKKSDALKERFDEIFGRIIEKRVEADHAGGDTAEDFLEYMLKMEKEGGDGKAAFTMTNVKALLMDMVVGGTETTSNTVEWAMAEMLQNRGILRKVREELDAVVGIDGVVEESDLPQLHYLHLVVKETLRLHPALPLMVPHCPSEDTTVGGHRVPAGSRVFVNAWAIMRDPAAWKDPAKFIPERFASQASDGDSGRKVDFTGSELDYVPFGSGRRICAGIAMAERMTAYSVAMLLQAFDWELPEGAALDLTEKFGIVMKKATPLVAVPTPRLSRPELYSA

SEQ ID NO: 16607 - protein, 381 aa, Triticum aestivum
  peptide (1)..(381): Ceres Seq. ID no. 15170170
  misc_feature (1)..(368): Pfam Name: Pfam Description:  Cytochrome P450
  misc_feature (1)..(379): NCBI GI NO: 34911488 NR Description: putative flavonoid 3',5'-hydroxylase
  misc_feature (1)..(379): NCBI GI NO: 15234514 NR Description: cytochrome p450 family [Arabidopsis thaliana]
  misc_feature (1)..(379): NCBI GI NO: 15234517 NR Description: cytochrome P450, putative [Arabidopsis thaliana]
  misc_feature (1)..(379): NCBI GI NO: 11345411 NR Description: putative cytochrome P450 [Matthiola incana]
  misc_feature (1)..(379): NCBI GI NO: 15234521 NR Description: cytochrome P450 family [Arabidopsis thaliana]
  misc_feature (1)..(379): NCBI GI NO: 15241541 NR Description: cytochrome P450 family [Arabidopsis thaliana]
  misc_feature (1)..(381): NCBI GI NO: 15235775 NR Description: cytochrome P450 family [Arabidopsis thaliana]
  misc_feature (1)..(381): NCBI GI NO: 7430667 NR Description: cytochrome P450 homolog T12H17
  misc_feature (1)..(381): NCBI GI NO: 30685891 NR Description: cytochrome P450 family [Arabidopsis thaliana]
  misc_feature (1)..(374): NCBI GI NO: 37531412 NR Description: putative cytochrome P450
MLSPAGLQNVHGLRRREFRATLAHLHSMASAGMPVDVGAQMFLTTMNVITGTLWGGNIGTESERTAVGKEFRELVAEITEMLGAPNVSDFFPALAPFDLQGIRKKSDALKERFDEIFGRIIEKRVEADHAGGDTAEDFLEYMLKMEKEGGDGKAAFTMTNVKALLMDMVVGGTETTSNTVEWAMAEMLQNRGILRKVREELDAVVGIDGVVEESDLPQLHYLHLVVKETLRLHPALPLMVPHCPSEDTTVGGHRVPAGSRVFVNAWAIMRDPAAWKDPAKFIPERFASQASDGDSGRKVDFTGSELDYVPFGSGRRICAGIAMAERMTAYSVAMLLQAFDWELPEGAALDLTEKFGIVMKKATPLVAVPTPRLSRPELYSA

SEQ ID NO: 16608 - DNA, 1207 bp, Triticum aestivum
  misc_feature (1)..(1207): Ceres Seq. ID no. 14303704
aaaaccctaaactcaaccccgcacctccgccatgcgaggccgccatcatctgcttggcttcctccgccgcgccgcggcaggctccttctccgcggcccgccatgctgattctctctccctcctacaccccatcccgccgggaaatggcgccgccgttcccatcagcacccgcttcctctcctcgcgcaccggcggcgccgcgcggagcctaatcgaggacgaggctgacctcagcgactgggtcagcgacatcaaggccgactccttcaaccttggtctcagcagcggcgacgagcgcgaggcctccacccgcaaacccgctgcctccaggggaggccgaagagggagggattcggggggaccgccgacgaggtcgaggtttgatggcggtgagttcggcggagagagacgcggcggggattttggcggtgataggcgcggtggtcggttcggcggcgatagtcgtggtggtcggtttggtggcgacaggcgtggtggtcgattcggcagcgatagtcgtggtggtcggttcgggggcgataggcctggctctgatcgaagggggagggtggtgagttctgatctcagtgatgatggtgaatctgggtttggttctgcgaggggaaggcgagggcggggcgggatgtcatcgggtgtgtcacacaggggagggaggtatggtgatttggatgatgaagaatctgggattgggtctcccaggggaaggcgaggtcgtggtgggaggacaacagatttgtcaggtagaggacgcaggggaagcgatggccgcctccaccgtcgcatccaaggccctggccctcgtcgccatcctgtcggtcgccgccttctccgtcgtctccgcccaggaggccccggcgcccagccccgtgtccgccgccggcgtcgcgatgccgtccctcgccgctgcgctcgtcgcctccggtgccgccttcctcttcgccgccgttcgccactgaagagactgcctccgtcttccccgtcgacctacctagtacaaccacatatagatccatttatttatcactagtgatttgttcgttcgtgtcattttgcccagatctgctactgtgtgtcactcggtgatggtgattagtatctccttattagtagagattgtacccgtgtgcttgtagatactatttatccggtttgatctagtattcgtatgatcgctccatttagtttt

SEQ ID NO: 16609 - protein, 338 aa, Triticum aestivum
  peptide (1)..(338): Ceres Seq. ID no. 14303705
  misc_feature (82)..(252): NCBI GI NO: 28279785 NR Description: Similar to TAF15 RNA polymerase II
  misc_feature (82)..(252): NCBI GI NO: 4507353 NR Description: TBP-associated factor 15 isoform 2
  misc_feature (82)..(252): NCBI GI NO: 21327701 NR Description: TBP-associated factor 15 isoform 1
  misc_feature (69)..(252): NCBI GI NO: 30794412 NR Description: TAF15 RNA polymerase II, TATA box binding protein
  misc_feature (100)..(301): NCBI GI NO: 34393238 NR Description: putative PE_PGRS family protein
  misc_feature (98)..(257): NCBI GI NO: 34903212 NR Description: unnamed protein product
  misc_feature (112)..(252): NCBI GI NO: 28279785 NR Description: Similar to TAF15 RNA polymerase II
  misc_feature (112)..(252): NCBI GI NO: 4507353 NR Description: TBP-associated factor 15 isoform 2
  misc_feature (86)..(267): NCBI GI NO: 17542802 NR Description: putative nuclear protein (4B256)
  misc_feature (112)..(252): NCBI GI NO: 21327701 NR Description: TBP-associated factor 15 isoform 1
MRGRHHLLGFLRRAAAGSFSAARHADSLSLLHPIPPGNGAAVPISTRFLSSRTGGAARSLIEDEADLSDWVSDIKADSFNLGLSSGDEREASTRKPAASRGGRRGRDSGGPPTRSRFDGGEFGGERRGGDFGGDRRGGRFGGDSRGGRFGGDRRGGRFGSDSRGGRFGGDRPGSDRRGRVVSSDLSDDGESGFGSARGRRGRGGMSSGVSHRGGRYGDLDDEESGIGSPRGRRGRGGRTTDLSGRGRRGSDGRLHRRIQGPGPRRHPVGRRLLRRLRPGGPGAQPRVRRRRRDAVPRRCARRLRCRLPLRRRSPLKRLPPSSPSTYLVQPHIDPFIYH

SEQ ID NO: 16610 - DNA, 1448 bp, Triticum aestivum
  misc_feature (1)..(1448): Ceres Seq. ID no. 13657914
gtttgaccggcacacggtacagggctagaagaacggcggcaagcacggagccatttttttctcgtttatttactacggcggggagcacagggctatcgggagcatctcctccgcgcactccccgccgtgtcccattcgccgatgcttcgccgtcgcccatattcatcttccaagaagctcactcctccgctgccatagccgcccgccgcgccatccttgattccttgccgcatcgtttcgcccgtcagatggaccctgaatccgaggtcacgttcgagttcgtgccggtgatccggcagtacaggagcggccgcgtcgagcgcctgctccccgtagaccccgtcccgccctccgtcgacgccgccaccggagtcgcctcaagggacgtcgtcttcgacccggccaccggcgcgtgggcccgcctctacctccccgcgcgccctcccggcggcgcgggcgacaggctccccatcatggtgtacctccatggaggcggcctcgtcggcggctcggccgcggacgggcccgagcacgcgttcctcaaccgcctgtgcgcccgcgcgcgcgtcctggtcgtgtccgtcgagtaccgcctcgcgccggagcaccccgtcccggcctgctacgacgacgcgtgggccgcgctccggtgggccgccgagggcgccgacccgtggctccgggaccgcggcgaccgcggccggatgttcgtggtcgggtacagcgccggcggcaacgttgcccacaacgtggcgctccgcgcgggctcggaggccggcgcgctcccccgcggcgcccgggtcaggggcatcgggctcctgcacccatacttcctctcggccgagaaggccgacggcgagacggagcagtcgtggctgaggggcaagctggaggagctgtggccgttcgcgtgcggcggccgcaccgccgggctggacgacccgcgggtcaacccggtggccgacggggcgccgagcttgcggcggctcggttgcgaccgcgtcctcgtctgcgtcgccgaggacgagctgcggctccggggcaaggcgtaccacgacggactgctggggagcgggtgggcggagggcgacgttgagctgctcgactccatcggcgaggaccaccagttcttcctccgggagcccccgagcgcgacggcgctggttctcatggaccggctggccgcgctcctcgccgccggcgcgaaccagcagtagaccagacgtcaggcgctggtactagtgtgtttggtgttgtactagtactctgttctactccgcgtgtatctggaattttagggtcccgataactgccacacgtgtggtgtatcgggtagttgtgccacacgcctcgtgtggcatggacagcaaccagcccacacacctacgtgtgagcaaaacaactaatgttcacacacatctttttccaaaaaaaaaaaaaaaaaagct

SEQ ID NO: 16611 - protein, 404 aa, Triticum aestivum
  peptide (1)..(404): Ceres Seq. ID no. 15219890
  misc_feature (142)..(200): Pfam Name: Pfam Description:  Carboxylesterase
  misc_feature (86)..(399): NCBI GI NO: 38344841 NR Description: OSJNBa0064H22.22
  misc_feature (88)..(397): NCBI GI NO: 34393904 NR Description: putative cell death associated protein
  misc_feature (86)..(397): NCBI GI NO: 18401743 NR Description: expressed protein [Arabidopsis thaliana]
  misc_feature (86)..(397): NCBI GI NO: 21536771 NR Description: unknown [Arabidopsis thaliana]
  misc_feature (89)..(402): NCBI GI NO: 34393323 NR Description: putative cell death associated protein
  misc_feature (87)..(397): NCBI GI NO: 34393975 NR Description: putative PrMC3
  misc_feature (86)..(400): NCBI GI NO: 18086341 NR Description: AT3g48690/T8P19_200 [Arabidopsis thaliana]
  misc_feature (86)..(400): NCBI GI NO: 15228425 NR Description: expressed protein [Arabidopsis thaliana]
  misc_feature (86)..(397): NCBI GI NO: 15222795 NR Description: expressed protein [Arabidopsis thaliana]
  misc_feature (87)..(397): NCBI GI NO: 34393969 NR Description: putative PrMC3
LTGTRYRARRTAASTEPFFSRLFTTAGSTGLSGASPPRTPRRVPFADASPSPIFIFQEAHSSAAIAARRAILDSLPHRFARQMDPESEVTFEFVPVIRQYRSGRVERLLPVDPVPPSVDAATGVASRDVVFDPATGAWARLYLPARPPGGAGDRLPIMVYLHGGGLVGGSAADGPEHAFLNRLCARARVLVVSVEYRLAPEHPVPACYDDAWAALRWAAEGADPWLRDRGDRGRMFVVGYSAGGNVAHNVALRAGSEAGALPRGARVRGIGLLHPYFLSAEKADGETEQSWLRGKLEELWPFACGGRTAGLDDPRVNPVADGAPSLRRLGCDRVLVCVAEDELRLRGKAYHDGLLGSGWAEGDVELLDSIGEDHQFFLREPPSATALVLMDRLAALLAAGANQQ

SEQ ID NO: 16612 - protein, 322 aa, Triticum aestivum
  peptide (1)..(322): Ceres Seq. ID no. 15219891
  misc_feature (60)..(118): Pfam Name: Pfam Description:  Carboxylesterase
  misc_feature (4)..(317): NCBI GI NO: 38344841 NR Description: OSJNBa0064H22.22
  misc_feature (6)..(315): NCBI GI NO: 34393904 NR Description: putative cell death associated protein
  misc_feature (4)..(315): NCBI GI NO: 18401743 NR Description: expressed protein [Arabidopsis thaliana]
  misc_feature (4)..(315): NCBI GI NO: 21536771 NR Description: unknown [Arabidopsis thaliana]
  misc_feature (7)..(320): NCBI GI NO: 34393323 NR Description: putative cell death associated protein
  misc_feature (5)..(315): NCBI GI NO: 34393975 NR Description: putative PrMC3
  misc_feature (4)..(318): NCBI GI NO: 18086341 NR Description: AT3g48690/T8P19_200 [Arabidopsis thaliana]
  misc_feature (4)..(318): NCBI GI NO: 15228425 NR Description: expressed protein [Arabidopsis thaliana]
  misc_feature (4)..(315): NCBI GI NO: 15222795 NR Description: expressed protein [Arabidopsis thaliana]
  misc_feature (5)..(315): NCBI GI NO: 34393969 NR Description: putative PrMC3
MDPESEVTFEFVPVIRQYRSGRVERLLPVDPVPPSVDAATGVASRDVVFDPATGAWARLYLPARPPGGAGDRLPIMVYLHGGGLVGGSAADGPEHAFLNRLCARARVLVVSVEYRLAPEHPVPACYDDAWAALRWAAEGADPWLRDRGDRGRMFVVGYSAGGNVAHNVALRAGSEAGALPRGARVRGIGLLHPYFLSAEKADGETEQSWLRGKLEELWPFACGGRTAGLDDPRVNPVADGAPSLRRLGCDRVLVCVAEDELRLRGKAYHDGLLGSGWAEGDVELLDSIGEDHQFFLREPPSATALVLMDRLAALLAAGANQQ

SEQ ID NO: 16613 - protein, 247 aa, Triticum aestivum
  peptide (1)..(247): Ceres Seq. ID no. 15219892
  misc_feature (1)..(43): Pfam Name: Pfam Description:  Carboxylesterase
  misc_feature (1)..(242): NCBI GI NO: 38344841 NR Description: OSJNBa0064H22.22
  misc_feature (1)..(240): NCBI GI NO: 34393904 NR Description: putative cell death associated protein
  misc_feature (1)..(240): NCBI GI NO: 18401743 NR Description: expressed protein [Arabidopsis thaliana]
  misc_feature (1)..(240): NCBI GI NO: 21536771 NR Description: unknown [Arabidopsis thaliana]
  misc_feature (1)..(245): NCBI GI NO: 34393323 NR Description: putative cell death associated protein
  misc_feature (1)..(240): NCBI GI NO: 34393975 NR Description: putative PrMC3
  misc_feature (1)..(243): NCBI GI NO: 18086341 NR Description: AT3g48690/T8P19_200 [Arabidopsis thaliana]
  misc_feature (1)..(243): NCBI GI NO: 15228425 NR Description: expressed protein [Arabidopsis thaliana]
  misc_feature (1)..(240): NCBI GI NO: 15222795 NR Description: expressed protein [Arabidopsis thaliana]
  misc_feature (1)..(240): NCBI GI NO: 34393969 NR Description: putative PrMC3
MVYLHGGGLVGGSAADGPEHAFLNRLCARARVLVVSVEYRLAPEHPVPACYDDAWAALRWAAEGADPWLRDRGDRGRMFVVGYSAGGNVAHNVALRAGSEAGALPRGARVRGIGLLHPYFLSAEKADGETEQSWLRGKLEELWPFACGGRTAGLDDPRVNPVADGAPSLRRLGCDRVLVCVAEDELRLRGKAYHDGLLGSGWAEGDVELLDSIGEDHQFFLREPPSATALVLMDRLAALLAAGANQQ

SEQ ID NO: 16614 - DNA, 1948 bp, Triticum aestivum
  misc_feature (1)..(1948): Ceres Seq. ID no. 14301490
atctctccctccttccccctctctctctctctctctctctgacgactctgacgacttgctagctagctcctccggctcaacggaagctagcgatcgccatagcctctgcgactgctgcacccgcacttgaacaagaagaagcagcagcagaagcagaattattagaggcgcaaaggcttgcgtgcggtctcaaggaaccccgaaaaaggccgagaagaaaagaagataaaaggtagttgagtagtcttgcacgcgtccatgggttgcggcttatcgacgccggacaacgacggcgggggcggcgcgcggaggaagcaggggagcgtgggggacgtcgtcgtcttcctcccggggctccgggcgcccatgggcgtggacttgtcccaggcgctcgcggggcgcctggacaagggcgccgtggagaggctgtcggccctgagagcgcgcgtcgtcgacatggcaatgcaagaatcggcggtggccctgaagcccaggcggaaggccgccgcacggcaaggatctagcactgccaatctcttgcaggcgctggaagactacttgccacttctgctaggattggtgaaagaaggtggtgagttgaggcacagcgtgcagtttgtgtggactaaccaagaggacaaggccgaggagacggccatggcggatgcatggtacgaggtgctgtccgtgctgcatttgatggccatggtctgcttgctgcaggccaactccctgctccttccaagggcttacggcgatggttacgggccacaggtctctgaagagagcagacgtgccactgtcgacgttttcttgaaagcatctggctacttggactgcgcaattcgacaagtgctcccacagataccatcagaactaaggagacaacttccagtagacctggctgaaggcaacctcaaagctcttagcctgcaagctctcggtcagggtgttgacatgcagcttgggctggcaatcgatagcccaaaggccacactagctgtaaaaaggcgcttagcttgtgagatggtcaaatattggcaccaggttcaggagagcattccagatcttcctgtgtccgacggatgggggaaaaaacatctactatttgtcaaatggaagtacgtcgaagcgaagtctgcagcatactacttccatggtttgattcttgacgaaggaaacagtgagaaatctcacggaatggcaatagcagcattggaagcttcggaggaatttctgaaagaaagcaaaagggcctctgaagttttccatgcaactcctccaacatctaggagccccactccatttggaacagctaagtatctgtttgacaagatcccgaaagaggcttcaagcaaggtccggatcaaccaggacctatataccccagaaagggtcattggagcaccacccccgttgccggatttctcgttggcactaacacctgaagactatgatcttcctccattagacccactttggaacaaagaagacggccaccagtaagtgtacattcagcattcagcaagagtgtcttctgatgggaaggctctggcgctactgagaaagcaacgaccaggattctgccatgcggaggccggacacgacgcaaaggaagtgtacaaagatatgttccgacaaaaaaaatttgatgtcggcaaactggaagcaaattttagaaaggcctgaagatatctgaagagcatttttacagttaaatcttctctgacaatggaaacacattgtcaaaagcttgctttccaacaattcctgtaaaaattatatttccaatgagcgccatggttcctttttcttaggattttctgaacatggcttagttttggggccattctgagcctattaatgtggtaaatttgccaaacatgatcctgatcttcattcaatgcttgagacagaagcagcaacgatgaaatttaaactactcaac

SEQ ID NO: 16615 - protein, 415 aa, Triticum aestivum
  peptide (1)..(415): Ceres Seq. ID no. 14301491
  misc_feature (1)..(415): NCBI GI NO: 38344447 NR Description: OSJNBa0038O10.19
  misc_feature (1)..(410): NCBI GI NO: 15219459 NR Description: expressed protein [Arabidopsis thaliana]
  misc_feature (1)..(402): NCBI GI NO: 25372891 NR Description: protein F2H15.16 [imported] - Arabidopsis thaliana
  misc_feature (1)..(402): NCBI GI NO: 15220908 NR Description: hypothetical protein [Arabidopsis thaliana]
  misc_feature (1)..(405): NCBI GI NO: 30684716 NR Description: expressed protein [Arabidopsis thaliana]
MGCGLSTPDNDGGGGARRKQGSVGDVVVFLPGLRAPMGVDLSQALAGRLDKGAVERLSALRARVVDMAMQESAVALKPRRKAAARQGSSTANLLQALEDYLPLLLGLVKEGGELRHSVQFVWTNQEDKAEETAMADAWYEVLSVLHLMAMVCLLQANSLLLPRAYGDGYGPQVSEESRRATVDVFLKASGYLDCAIRQVLPQIPSELRRQLPVDLAEGNLKALSLQALGQGVDMQLGLAIDSPKATLAVKRRLACEMVKYWHQVQESIPDLPVSDGWGKKHLLFVKWKYVEAKSAAYYFHGLILDEGNSEKSHGMAIAALEASEEFLKESKRASEVFHATPPTSRSPTPFGTAKYLFDKIPKEASSKVRINQDLYTPERVIGAPPPLPDFSLALTPEDYDLPPLDPLWNKEDGHQ

SEQ ID NO: 16616 - protein, 379 aa, Triticum aestivum
  peptide (1)..(379): Ceres Seq. ID no. 14301492
  misc_feature (1)..(379): NCBI GI NO: 38344447 NR Description: OSJNBa0038O10.19
  misc_feature (1)..(374): NCBI GI NO: 15219459 NR Description: expressed protein [Arabidopsis thaliana]
  misc_feature (1)..(366): NCBI GI NO: 25372891 NR Description: protein F2H15.16 [imported] - Arabidopsis thaliana
  misc_feature (1)..(366): NCBI GI NO: 15220908 NR Description: hypothetical protein [Arabidopsis thaliana]
  misc_feature (1)..(369): NCBI GI NO: 30684716 NR Description: expressed protein [Arabidopsis thaliana]
MGVDLSQALAGRLDKGAVERLSALRARVVDMAMQESAVALKPRRKAAARQGSSTANLLQALEDYLPLLLGLVKEGGELRHSVQFVWTNQEDKAEETAMADAWYEVLSVLHLMAMVCLLQANSLLLPRAYGDGYGPQVSEESRRATVDVFLKASGYLDCAIRQVLPQIPSELRRQLPVDLAEGNLKALSLQALGQGVDMQLGLAIDSPKATLAVKRRLACEMVKYWHQVQESIPDLPVSDGWGKKHLLFVKWKYVEAKSAAYYFHGLILDEGNSEKSHGMAIAALEASEEFLKESKRASEVFHATPPTSRSPTPFGTAKYLFDKIPKEASSKVRINQDLYTPERVIGAPPPLPDFSLALTPEDYDLPPLDPLWNKEDGHQ

SEQ ID NO: 16617 - protein, 349 aa, Triticum aestivum
  peptide (1)..(349): Ceres Seq. ID no. 14301493
  misc_feature (1)..(349): NCBI GI NO: 38344447 NR Description: OSJNBa0038O10.19
  misc_feature (1)..(344): NCBI GI NO: 15219459 NR Description: expressed protein [Arabidopsis thaliana]
  misc_feature (1)..(336): NCBI GI NO: 25372891 NR Description: protein F2H15.16 [imported] - Arabidopsis thaliana
  misc_feature (1)..(336): NCBI GI NO: 15220908 NR Description: hypothetical protein [Arabidopsis thaliana]
  misc_feature (1)..(339): NCBI GI NO: 30684716 NR Description: expressed protein [Arabidopsis thaliana]
MAMQESAVALKPRRKAAARQGSSTANLLQALEDYLPLLLGLVKEGGELRHSVQFVWTNQEDKAEETAMADAWYEVLSVLHLMAMVCLLQANSLLLPRAYGDGYGPQVSEESRRATVDVFLKASGYLDCAIRQVLPQIPSELRRQLPVDLAEGNLKALSLQALGQGVDMQLGLAIDSPKATLAVKRRLACEMVKYWHQVQESIPDLPVSDGWGKKHLLFVKWKYVEAKSAAYYFHGLILDEGNSEKSHGMAIAALEASEEFLKESKRASEVFHATPPTSRSPTPFGTAKYLFDKIPKEASSKVRINQDLYTPERVIGAPPPLPDFSLALTPEDYDLPPLDPLWNKEDGHQ

SEQ ID NO: 16618 - DNA, 1715 bp, Triticum aestivum
  misc_feature (1)..(1715): Ceres Seq. ID no. 12779893
atccatccatccctccccgcgatccgctcccgtccgcaggctccccctcctcctccgttcctcttcctccccctggccccggccgtctccgaccccgcgttgcttcttcttccctcactgctcgagtctggaaccagggaggagtatctagaggagagatggcggcggagagggtcaaggacgtcggcatcctcgccatggacatctacttcccgcccaactgcgtcctccaggaagaattggaagctcatgatggcgtgagcaaagggaagtacaccattgggcttgggcaggatagcatggccttttgcactgaagtggaggatgtcatttcaatgagcttgacagtggtgaagactctcctgaaaaattataacatcgatccaaagtgcattggtcgtttggaagttggcagtgaaactgtaatagacaagagcaagtctataaagacatggttgatgcaaatatttgaggagtgtggcaatactgatattgaaggagttgattcctcaaacgcatgttatggtggaacagctgctttgtttaattgtgttaattgggttgagagcaactcatgggatggacgttatgggctcgttgtttgcacagacagcgcggtttatgctgaagggccggctcgtcctactggcggtgcagctgctattgcaatgctgattggaccaaatgctcctatttcattggaaagcaaatttagagggtcacatatggcacatgtttatgacttttacaagcctgatcttgcgagcgaatatccggtggtcgatgggaagctgtcacagacatgctatctcatggcactggattcttgctacaagaccttttgcaaaaggtacgaaaagattgaagggaagccattttcaatcgtcgacgcagattcttttgtatttcattctccatacaacaagcttgtacagaaaagttttgctcgtttatactacaatgacttcttgagaagctgcagcattgttgacaaagactcgagagaaaaattggagccctactcgggcctgtcatccgaagaaagctatcagagtcgggaccttgagaaggtttgtcagcaagttgcgaagcctctgtatgataccaaggttcaaccaacaacattgatcccaaagcaactcgggaacatgtatacggcgtcactctatgctgcttttgcatcagttgtccacaataaacgcgatgctctggtgggccagaggatcgtcatgttctcttacggcagtggcatgacatcgacaatgttctccttcaaaatcaacgaatgccagcatccgttcagcctatcaaacattgcaaacatactggatatctccaacaagttggagtctaggcatgtggttccgccgaagaaattcgtcgaggcactgaagctgatggagcaccgctacggcgccaaggacttcgtcaccagccaggacacgcgcttgctcgtcccaggcacctactacctcacccttgtcgactccatgtaccgccggttctacgccgtgaaaggcgacgctgccgccactccggtaaccaatggccattgactgattgcccttgctcagcctgaagctgcaataagcgccgcaggcgctcttagattatttatctggcagggaaggggaagggaagggtggagcttgcccagattaatctctctgtaaacttgttctaagtttgtaaagttagatagtgctgccattgcc

SEQ ID NO: 16619 - protein, 517 aa, Triticum aestivum
  peptide (1)..(517): Ceres Seq. ID no. 12779894
  misc_feature (59)..(505): Pfam Name: Pfam Description:  Hydroxymethylglutaryl-coenzyme A synthase
  misc_feature (59)..(516): NCBI GI NO: 16417956 NR Description: hydroxymethylglutaryl coenzyme A synthase
  misc_feature (59)..(517): NCBI GI NO: 7799986 NR Description: HMG-CoA synthase [Brassica juncea]
  misc_feature (59)..(516): NCBI GI NO: 14916100 NR Description: hydroxymethylglutaryl coenzyme A synthase
  misc_feature (59)..(517): NCBI GI NO: 11192003 NR Description: HMG-CoA synthase [Brassica juncea]
  misc_feature (59)..(517): NCBI GI NO: 11192005 NR Description: HMG-CoA synthase [Brassica juncea]
  misc_feature (59)..(517): NCBI GI NO: 1143390 NR Description: hydroxymethylglutaryl-CoA synthase
  misc_feature (59)..(517): NCBI GI NO: 15234313 NR Description: hydroxymethylglutaryl-CoA synthase
  misc_feature (59)..(516): NCBI GI NO: 11192007 NR Description: HMG-CoA synthase [Brassica juncea]
  misc_feature (55)..(505): NCBI GI NO: 7436678 NR Description: hydroxymethylglutaryl-CoA synthase (EC 4
  misc_feature (112)..(517): NCBI GI NO: 30681902 NR Description: hydroxymethylglutaryl-CoA synthase
PSIPPRDPLPSAGSPSSSVPLPPPGPGRLRPRVASSSLTARVWNQGGVSRGEMAAERVKDVGILAMDIYFPPNCVLQEELEAHDGVSKGKYTIGLGQDSMAFCTEVEDVISMSLTVVKTLLKNYNIDPKCIGRLEVGSETVIDKSKSIKTWLMQIFEECGNTDIEGVDSSNACYGGTAALFNCVNWVESNSWDGRYGLVVCTDSAVYAEGPARPTGGAAAIAMLIGPNAPISLESKFRGSHMAHVYDFYKPDLASEYPVVDGKLSQTCYLMALDSCYKTFCKRYEKIEGKPFSIVDADSFVFHSPYNKLVQKSFARLYYNDFLRSCSIVDKDSREKLEPYSGLSSEESYQSRDLEKVCQQVAKPLYDTKVQPTTLIPKQLGNMYTASLYAAFASVVHNKRDALVGQRIVMFSYGSGMTSTMFSFKINECQHPFSLSNIANILDISNKLESRHVVPPKKFVEALKLMEHRYGAKDFVTSQDTRLLVPGTYYLTLVDSMYRRFYAVKGDAAATPVTNGH

SEQ ID NO: 16620 - protein, 465 aa, Triticum aestivum
  peptide (1)..(465): Ceres Seq. ID no. 12779895
  misc_feature (7)..(453): Pfam Name: Pfam Description:  Hydroxymethylglutaryl-coenzyme A synthase
  misc_feature (7)..(464): NCBI GI NO: 16417956 NR Description: hydroxymethylglutaryl coenzyme A synthase
  misc_feature (7)..(465): NCBI GI NO: 7799986 NR Description: HMG-CoA synthase [Brassica juncea]
  misc_feature (7)..(464): NCBI GI NO: 14916100 NR Description: hydroxymethylglutaryl coenzyme A synthase
  misc_feature (7)..(465): NCBI GI NO: 11192003 NR Description: HMG-CoA synthase [Brassica juncea]
  misc_feature (7)..(465): NCBI GI NO: 11192005 NR Description: HMG-CoA synthase [Brassica juncea]
  misc_feature (7)..(465): NCBI GI NO: 1143390 NR Description: hydroxymethylglutaryl-CoA synthase
  misc_feature (7)..(465): NCBI GI NO: 15234313 NR Description: hydroxymethylglutaryl-CoA synthase
  misc_feature (7)..(464): NCBI GI NO: 11192007 NR Description: HMG-CoA synthase [Brassica juncea]
  misc_feature (3)..(453): NCBI GI NO: 7436678 NR Description: hydroxymethylglutaryl-CoA synthase (EC 4
  misc_feature (60)..(465): NCBI GI NO: 30681902 NR Description: hydroxymethylglutaryl-CoA synthase
MAAERVKDVGILAMDIYFPPNCVLQEELEAHDGVSKGKYTIGLGQDSMAFCTEVEDVISMSLTVVKTLLKNYNIDPKCIGRLEVGSETVIDKSKSIKTWLMQIFEECGNTDIEGVDSSNACYGGTAALFNCVNWVESNSWDGRYGLVVCTDSAVYAEGPARPTGGAAAIAMLIGPNAPISLESKFRGSHMAHVYDFYKPDLASEYPVVDGKLSQTCYLMALDSCYKTFCKRYEKIEGKPFSIVDADSFVFHSPYNKLVQKSFARLYYNDFLRSCSIVDKDSREKLEPYSGLSSEESYQSRDLEKVCQQVAKPLYDTKVQPTTLIPKQLGNMYTASLYAAFASVVHNKRDALVGQRIVMFSYGSGMTSTMFSFKINECQHPFSLSNIANILDISNKLESRHVVPPKKFVEALKLMEHRYGAKDFVTSQDTRLLVPGTYYLTLVDSMYRRFYAVKGDAAATPVTNGH

SEQ ID NO: 16621 - protein, 452 aa, Triticum aestivum
  peptide (1)..(452): Ceres Seq. ID no. 12779896
  misc_feature (1)..(440): Pfam Name: Pfam Description:  Hydroxymethylglutaryl-coenzyme A synthase
  misc_feature (1)..(451): NCBI GI NO: 16417956 NR Description: hydroxymethylglutaryl coenzyme A synthase
  misc_feature (1)..(452): NCBI GI NO: 7799986 NR Description: HMG-CoA synthase [Brassica juncea]
  misc_feature (1)..(451): NCBI GI NO: 14916100 NR Description: hydroxymethylglutaryl coenzyme A synthase
  misc_feature (1)..(452): NCBI GI NO: 11192003 NR Description: HMG-CoA synthase [Brassica juncea]
  misc_feature (1)..(452): NCBI GI NO: 11192005 NR Description: HMG-CoA synthase [Brassica juncea]
  misc_feature (1)..(452): NCBI GI NO: 1143390 NR Description: hydroxymethylglutaryl-CoA synthase
  misc_feature (1)..(452): NCBI GI NO: 15234313 NR Description: hydroxymethylglutaryl-CoA synthase
  misc_feature (1)..(451): NCBI GI NO: 11192007 NR Description: HMG-CoA synthase [Brassica juncea]
  misc_feature (1)..(440): NCBI GI NO: 7436678 NR Description: hydroxymethylglutaryl-CoA synthase (EC 4
  misc_feature (47)..(452): NCBI GI NO: 30681902 NR Description: hydroxymethylglutaryl-CoA synthase
MDIYFPPNCVLQEELEAHDGVSKGKYTIGLGQDSMAFCTEVEDVISMSLTVVKTLLKNYNIDPKCIGRLEVGSETVIDKSKSIKTWLMQIFEECGNTDIEGVDSSNACYGGTAALFNCVNWVESNSWDGRYGLVVCTDSAVYAEGPARPTGGAAAIAMLIGPNAPISLESKFRGSHMAHVYDFYKPDLASEYPVVDGKLSQTCYLMALDSCYKTFCKRYEKIEGKPFSIVDADSFVFHSPYNKLVQKSFARLYYNDFLRSCSIVDKDSREKLEPYSGLSSEESYQSRDLEKVCQQVAKPLYDTKVQPTTLIPKQLGNMYTASLYAAFASVVHNKRDALVGQRIVMFSYGSGMTSTMFSFKINECQHPFSLSNIANILDISNKLESRHVVPPKKFVEALKLMEHRYGAKDFVTSQDTRLLVPGTYYLTLVDSMYRRFYAVKGDAAATPVTNGH

SEQ ID NO: 16622 - DNA, 2088 bp, Triticum aestivum
  misc_feature (1)..(2088): Ceres Seq. ID no. 14302875
cctgccggaaacgaaacaccattcgtcgctccctcgcctcccatcagcgcgcactagtccttccctgcctcctcctcttctcgggcgcgcgccgcctctgccctgcctcggcaacgacagcaaacaccggctagccagccaagaaagaggcgccgacatggccatcccgctccaggcgaagaagcagcaggagaacggaagcaagggcggccaaggcagccacgtggacggcggcgacgacaacccttcggcggcggaggagctgcgggagctgtggcgcatggcggcgccgatcacagcgctcaactgcgtggtgtacctgcgcgccatggtgtccgtgctctgcctgggccgcctcggcccgcttgacctcgccggcggcgcgctcgcgatcgggctcaccaacatcactggccacagtgtgctcttcggcctcgcgtccgggttggagccgctctgcgcgcaggcctacggctcccgcaactacgacctgctcacgctctccctccaccgcgccgtgctgctgctcgccatcgccgccgtccccatcgcgctgctctggctcaacgtcggccccatcctggtcgcgctcggccaggacccagccatctccgcctccgccgccgcatacgccgcgtgggcgctcccggacctcgccgcgctggccgtgctccagccgctccgcgtctaccttaggtcccagggcatcaccaagcccatggccgcctgctccgccgccgccgtcgcgctgcacatcccgctcaactttctcctcgtcttccgcatgggcttcggcgtgcgcggcgtcgcggcagcgcaggcgctcacaaacacaaacatggtgctcttcctgctcgcctacgtccgctgggcgggtgcgtgcgacgacacgtggaggggcttcgcgcggcccgccgccgtagccagcgggctcggcggcctcgtccgcctcgccgtgcccagctgcatcggcgtctgcctcgagtggtggtggtacgaggtcgtcaccgtgctcgccggctaccttgccaaccccaccgccgccgtcggcgccgcgggagtcctcatccagacaaccagcctgatgtacaccgtgcccatggcgctcgccgcctgcgtctccacccgggtgggcaacgagctcggcgccgggaagccgcggcgtgcgcggatggcggcgacggtggcgctgtggtgcgcagcgggcgtgggcctcgcgcacgtggcgtggacggcggccttcagcgcgcagtgggtgtcgctcttcacccgggagccgtcggtggtgctgctggcgtcggcggcgatgccgctgctggggctgtgcgagctgggcaactgcccgcagaccacggggtgcggcgtgctgcgcggcacagccaggcccgccgtgggcgcccgcatcaacctgctctccttctacctcgtcggcacgcccgtggcggtgctgctggcgttcgggcacgggccgctgtccgggttccgcgggctgtggtacgggctgctgtccgcgcaggccgcctgcgtggctctggtgctggtcgccgtcgtgtggcgcaccgactggcgcgtcgaggccatgcgcgcgcggaagctgaccggcaccggcgcggacacgacggcgacggccaccgagggggaggagcaggaggagatgaggcgcctcgtggccggcaacggcctggaggcggacgtcgacgtgtagcgagccgttcctttcggtggaaccacctagtttagctctacgtgcggtgcatcgcggtgacatgctaaaattaagccagactagccattccactcgtagggcaggcatagcatattgcagcaccgagtagctggctagctttagttattgtggtgagccacacagctcacagatttgctgctgcatgcatgcttgcagctgggcctaagcggtggtgtgttcgcattgaagtagtacggttgctgcttggagaaatgggctagctagctagcaagctaatcaagctagagatcttgatcgagctaagcaagttcattccaagttacacgcacttcattttctgtatgggctaaacaagttcattagcgcttgattttgggatt

SEQ ID NO: 16623 - protein, 567 aa, Triticum aestivum
  peptide (1)..(567): Ceres Seq. ID no. 14302876
  misc_feature (320)..(482): Pfam Name: Pfam Description:  MatE
  misc_feature (53)..(567): NCBI GI NO: 28376699 NR Description: putative MATE efflux membrane protein
  misc_feature (82)..(533): NCBI GI NO: 15217599 NR Description: MATE efflux protein - related
  misc_feature (83)..(566): NCBI GI NO: 38567909 NR Description: OSJNBa0088I22.5
  misc_feature (83)..(562): NCBI GI NO: 37536202 NR Description: putative membrane protein
  misc_feature (85)..(549): NCBI GI NO: 20532318 NR Description: Putative membrane protein
  misc_feature (87)..(552): NCBI GI NO: 15241158 NR Description: MATE efflux protein - related
  misc_feature (86)..(533): NCBI GI NO: 18406257 NR Description: MATE efflux protein - related
  misc_feature (82)..(534): NCBI GI NO: 15239797 NR Description: MATE efflux protein - related
  misc_feature (84)..(533): NCBI GI NO: 15233459 NR Description: MATE efflux protein - related
  misc_feature (71)..(538): NCBI GI NO: 15235905 NR Description: MATE efflux protein - related
LPETKHHSSLPRLPSARTSPSLPPPLLGRAPPLPCLGNDSKHRLASQERGADMAIPLQAKKQQENGSKGGQGSHVDGGDDNPSAAEELRELWRMAAPITALNCVVYLRAMVSVLCLGRLGPLDLAGGALAIGLTNITGHSVLFGLASGLEPLCAQAYGSRNYDLLTLSLHRAVLLLAIAAVPIALLWLNVGPILVALGQDPAISASAAAYAAWALPDLAALAVLQPLRVYLRSQGITKPMAACSAAAVALHIPLNFLLVFRMGFGVRGVAAAQALTNTNMVLFLLAYVRWAGACDDTWRGFARPAAVASGLGGLVRLAVPSCIGVCLEWWWYEVVTVLAGYLANPTAAVGAAGVLIQTTSLMYTVPMALAACVSTRVGNELGAGKPRRARMAATVALWCAAGVGLAHVAWTAAFSAQWVSLFTREPSVVLLASAAMPLLGLCELGNCPQTTGCGVLRGTARPAVGARINLLSFYLVGTPVAVLLAFGHGPLSGFRGLWYGLLSAQAACVALVLVAVVWRTDWRVEAMRARKLTGTGADTTATATEGEEQEEMRRLVAGNGLEADVDV

SEQ ID NO: 16624 - protein, 515 aa, Triticum aestivum
  peptide (1)..(515): Ceres Seq. ID no. 14302877
  misc_feature (268)..(430): Pfam Name: Pfam Description:  MatE
  misc_feature (1)..(515): NCBI GI NO: 28376699 NR Description: putative MATE efflux membrane protein
  misc_feature (30)..(481): NCBI GI NO: 15217599 NR Description: MATE efflux protein - related
  misc_feature (31)..(514): NCBI GI NO: 38567909 NR Description: OSJNBa0088I22.5
  misc_feature (31)..(510): NCBI GI NO: 37536202 NR Description: putative membrane protein
  misc_feature (33)..(497): NCBI GI NO: 20532318 NR Description: Putative membrane protein
  misc_feature (35)..(500): NCBI GI NO: 15241158 NR Description: MATE efflux protein - related
  misc_feature (34)..(481): NCBI GI NO: 18406257 NR Description: MATE efflux protein - related
  misc_feature (30)..(482): NCBI GI NO: 15239797 NR Description: MATE efflux protein - related
  misc_feature (32)..(481): NCBI GI NO: 15233459 NR Description: MATE efflux protein - related
  misc_feature (19)..(486): NCBI GI NO: 15235905 NR Description: MATE efflux protein - related
MAIPLQAKKQQENGSKGGQGSHVDGGDDNPSAAEELRELWRMAAPITALNCVVYLRAMVSVLCLGRLGPLDLAGGALAIGLTNITGHSVLFGLASGLEPLCAQAYGSRNYDLLTLSLHRAVLLLAIAAVPIALLWLNVGPILVALGQDPAISASAAAYAAWALPDLAALAVLQPLRVYLRSQGITKPMAACSAAAVALHIPLNFLLVFRMGFGVRGVAAAQALTNTNMVLFLLAYVRWAGACDDTWRGFARPAAVASGLGGLVRLAVPSCIGVCLEWWWYEVVTVLAGYLANPTAAVGAAGVLIQTTSLMYTVPMALAACVSTRVGNELGAGKPRRARMAATVALWCAAGVGLAHVAWTAAFSAQWVSLFTREPSVVLLASAAMPLLGLCELGNCPQTTGCGVLRGTARPAVGARINLLSFYLVGTPVAVLLAFGHGPLSGFRGLWYGLLSAQAACVALVLVAVVWRTDWRVEAMRARKLTGTGADTTATATEGEEQEEMRRLVAGNGLEADVDV

SEQ ID NO: 16625 - protein, 474 aa, Triticum aestivum
  peptide (1)..(474): Ceres Seq. ID no. 14302878
  misc_feature (227)..(389): Pfam Name: Pfam Description:  MatE
  misc_feature (1)..(474): NCBI GI NO: 28376699 NR Description: putative MATE efflux membrane protein
  misc_feature (1)..(440): NCBI GI NO: 15217599 NR Description: MATE efflux protein - related
  misc_feature (1)..(473): NCBI GI NO: 38567909 NR Description: OSJNBa0088I22.5
  misc_feature (1)..(469): NCBI GI NO: 37536202 NR Description: putative membrane protein
  misc_feature (1)..(456): NCBI GI NO: 20532318 NR Description: Putative membrane protein
  misc_feature (1)..(459): NCBI GI NO: 15241158 NR Description: MATE efflux protein - related
  misc_feature (1)..(440): NCBI GI NO: 18406257 NR Description: MATE efflux protein - related
  misc_feature (1)..(441): NCBI GI NO: 15239797 NR Description: MATE efflux protein - related
  misc_feature (1)..(440): NCBI GI NO: 15233459 NR Description: MATE efflux protein - related
  misc_feature (1)..(445): NCBI GI NO: 15235905 NR Description: MATE efflux protein - related
MAAPITALNCVVYLRAMVSVLCLGRLGPLDLAGGALAIGLTNITGHSVLFGLASGLEPLCAQAYGSRNYDLLTLSLHRAVLLLAIAAVPIALLWLNVGPILVALGQDPAISASAAAYAAWALPDLAALAVLQPLRVYLRSQGITKPMAACSAAAVALHIPLNFLLVFRMGFGVRGVAAAQALTNTNMVLFLLAYVRWAGACDDTWRGFARPAAVASGLGGLVRLAVPSCIGVCLEWWWYEVVTVLAGYLANPTAAVGAAGVLIQTTSLMYTVPMALAACVSTRVGNELGAGKPRRARMAATVALWCAAGVGLAHVAWTAAFSAQWVSLFTREPSVVLLASAAMPLLGLCELGNCPQTTGCGVLRGTARPAVGARINLLSFYLVGTPVAVLLAFGHGPLSGFRGLWYGLLSAQAACVALVLVAVVWRTDWRVEAMRARKLTGTGADTTATATEGEEQEEMRRLVAGNGLEADVDV

SEQ ID NO: 16626 - DNA, 1487 bp, Triticum aestivum
  misc_feature (1)..(1487): Ceres Seq. ID no. 14301542
ccaccagggcttccgcggcaaccagcagaacaccgccaagccctcggtcgacatccagcccgactggaccatcctcgagcagatccccttcgccaacttcaccaagctctccttcgccgtcgccgaccagcccgaggacctgctcgtctgcggcgccgtcgactcgtacgaccgcgcctacgaccgcgtcaaccccaagacggcccgccgcctcgagcgcttcaagaaccgccagttcttcaagatcaccaccaccgacgaccccatcatccgccgcctcgccgaggaggacaaggccaccgtcttcgccaccgacgccatcctcgccgccctcatgtgcacgccccgcagcatcctctcctgggacattgtcgtgcagcgcgtcggcaacaagctcttcttcgacaagcgcgagggctcccagctcgatctgctcactgtcaacgagactgcgcaggagcagctccctgagaacaaggatgacatcaattccgcgccggcccttgctgtcgaggccacctacatcaaccagaacttctcgcagcaggtgctggtgcgtgatggcgagaaggttacctttgatgagcctaacccgtttgcctctgagaatgaggaggcggcgcctgtttgctaccgttatcgccgctggaagctggatgatgatattagcatcattgcccgctgtgaagtgcatgctgctggtgttgatcccagtggtgctcgccagttcctcacgcttaatgcactcaatgagtttgatcctaagattactggtgttgactggaagcagaagctcgagtcccagcgtggtgctgtgcttgctacagagctcaagaacaatgccaacaagctcgctcgctggactgcccaggctttactttctggtgctgacatgatgaagttgggttatgtgtcacgtgtgcacccccgcgaccacttcaaccactccatactcactgtgatgggctacaagccaagggattttgctacccagatcaacctcaacactgcaaacatgtggggcattgtcaagtcgattgtggacatctgcatgaagtttgaagagggaaagtatgtgcttgtgaaagatcctgccaagccacagatgaggatttatcaggttcctaatgatgcatttgagaatgattatgttgaagagccacttccagaggaggagcagattcgtccggctacagatgatgtcgatgctactgcacaggagatggatgctgctgccgaggcagaggctaataaagcaactactcagggtggtgagggtgagaagagtgcagatgctgctgctgcttgaagggtataatgggccatctttgctttatctagataatgtgtcttttctgttttatgacctgtttttgtggattaaagagttgaactgccttgtcttgatacagtggtcttgttttggtccatgagaaaacttggtactcttaaatttcatgcttagatgtgctaagcttagcacctac

SEQ ID NO: 16627 - protein, 435 aa, Triticum aestivum
  peptide (1)..(435): Ceres Seq. ID no. 14301543
  misc_feature (13)..(392): Pfam Name: eIF-3 Pfam Description: Eukaryotic translation initiation factor 3 subunit 7
  misc_feature (13)..(419): NCBI GI NO: 12407755 NR Description: initiation factor 3d [Arabidopsis thaliana]
  misc_feature (13)..(419): NCBI GI NO: 15233469 NR Description: translation initiation factor eIF3 - like protein
  misc_feature (13)..(419): NCBI GI NO: 17528988 NR Description: putative translation initiation factor eIF3
  misc_feature (13)..(406): NCBI GI NO: 15241470 NR Description: eukaryotic translation initiation factor 3 subunit7
  misc_feature (3)..(430): NCBI GI NO: 31207329 NR Description: ENSANGP00000015368 [Anopheles gambiae]
  misc_feature (9)..(393): NCBI GI NO: 4503523 NR Description: eukaryotic translation initiation factor 3 subunit7
  misc_feature (15)..(394): NCBI GI NO: 27882463 NR Description: Similar to eukaryotic translation initiation factor3
  misc_feature (9)..(393): NCBI GI NO: 34866902 NR Description: similar to eukaryotic translation initiation factor3 subunit 7
  misc_feature (15)..(400): NCBI GI NO: 31418925 NR Description: Unknown (protein for MGC:64097) [Danio rerio]
  misc_feature (15)..(393): NCBI GI NO: 38174024 NR Description: Unknown (protein for MGC:75703)
HQGFRGNQQNTAKPSVDIQPDWTILEQIPFANFTKLSFAVADQPEDLLVCGAVDSYDRAYDRVNPKTARRLERFKNRQFFKITTTDDPIIRRLAEEDKATVFATDAILAALMCTPRSILSWDIVVQRVGNKLFFDKREGSQLDLLTVNETAQEQLPENKDDINSAPALAVEATYINQNFSQQVLVRDGEKVTFDEPNPFASENEEAAPVCYRYRRWKLDDDISIIARCEVHAAGVDPSGARQFLTLNALNEFDPKITGVDWKQKLESQRGAVLATELKNNANKLARWTAQALLSGADMMKLGYVSRVHPRDHFNHSILTVMGYKPRDFATQINLNTANMWGIVKSIVDICMKFEEGKYVLVKDPAKPQMRIYQVPNDAFENDYVEEPLPEEEQIRPATDDVDATAQEMDAAAEAEANKATTQGGEGEKSADAAAA

SEQ ID NO: 16628 - protein, 324 aa, Triticum aestivum
  peptide (1)..(324): Ceres Seq. ID no. 14301544
  misc_feature (1)..(281): Pfam Name: eIF-3 Pfam Description: Eukaryotic translation initiation factor 3 subunit 7
  misc_feature (1)..(308): NCBI GI NO: 12407755 NR Description: initiation factor 3d [Arabidopsis thaliana]
  misc_feature (1)..(308): NCBI GI NO: 15233469 NR Description: translation initiation factor eIF3 - like protein
  misc_feature (1)..(308): NCBI GI NO: 17528988 NR Description: putative translation initiation factor eIF3
  misc_feature (1)..(295): NCBI GI NO: 15241470 NR Description: eukaryotic translation initiation factor 3 subunit7
  misc_feature (1)..(319): NCBI GI NO: 31207329 NR Description: ENSANGP00000015368 [Anopheles gambiae]
  misc_feature (1)..(282): NCBI GI NO: 4503523 NR Description: eukaryotic translation initiation factor 3 subunit7
  misc_feature (1)..(283): NCBI GI NO: 27882463 NR Description: Similar to eukaryotic translation initiation factor3
  misc_feature (1)..(282): NCBI GI NO: 34866902 NR Description: similar to eukaryotic translation initiation factor3 subunit 7
  misc_feature (1)..(289): NCBI GI NO: 31418925 NR Description: Unknown (protein for MGC:64097) [Danio rerio]
  misc_feature (1)..(282): NCBI GI NO: 38174024 NR Description: Unknown (protein for MGC:75703)
MCTPRSILSWDIVVQRVGNKLFFDKREGSQLDLLTVNETAQEQLPENKDDINSAPALAVEATYINQNFSQQVLVRDGEKVTFDEPNPFASENEEAAPVCYRYRRWKLDDDISIIARCEVHAAGVDPSGARQFLTLNALNEFDPKITGVDWKQKLESQRGAVLATELKNNANKLARWTAQALLSGADMMKLGYVSRVHPRDHFNHSILTVMGYKPRDFATQINLNTANMWGIVKSIVDICMKFEEGKYVLVKDPAKPQMRIYQVPNDAFENDYVEEPLPEEEQIRPATDDVDATAQEMDAAAEAEANKATTQGGEGEKSADAAAA

SEQ ID NO: 16629 - protein, 297 aa, Triticum aestivum
  peptide (1)..(297): Ceres Seq. ID no. 14301545
  misc_feature (4)..(179): Pfam Name: Pfam Description:  Equine herpesvirus glycoprotein gp2
  misc_feature (3)..(181): NCBI GI NO: 11359723 NR Description: proteophosphoglycan, membrane-associated
  misc_feature (3)..(181): NCBI GI NO: 5420387 NR Description: proteophosphoglycan [Leishmania major]
  misc_feature (4)..(181): NCBI GI NO: 11359723 NR Description: proteophosphoglycan, membrane-associated
  misc_feature (3)..(181): NCBI GI NO: 11359723 NR Description: proteophosphoglycan, membrane-associated
  misc_feature (3)..(179): NCBI GI NO: 11359723 NR Description: proteophosphoglycan, membrane-associated
  misc_feature (3)..(181): NCBI GI NO: 5420387 NR Description: proteophosphoglycan [Leishmania major]
  misc_feature (3)..(181): NCBI GI NO: 13592175 NR Description: ppg3 [Leishmania major]
  misc_feature (3)..(176): NCBI GI NO: 13592175 NR Description: ppg3 [Leishmania major]
  misc_feature (3)..(181): NCBI GI NO: 11359723 NR Description: proteophosphoglycan, membrane-associated
  misc_feature (3)..(181): NCBI GI NO: 13592175 NR Description: ppg3 [Leishmania major]
TRASAATSRTPPSPRSTSSPTGPSSSRSPSPTSPSSPSPSPTSPRTCSSAAPSTRTTAPTTASTPRRPAASSASRTASSSRSPPPTTPSSAASPRRTRPPSSPPTPSSPPSCARPAASSPGTLSCSASATSSSSTSARAPSSICSLSTRLRRSSSLRTRMTSIPRRPLLSRPPTSTRTSRSRCWCVMARRLPLMSLTRLPLRMRRRRLFATVIAAGSWMMILASLPAVKCMLLVLIPVVLASSSRLMHSMSLILRLLVLTGSRSSSPSVVLCLLQSSRTMPTSSLAGLPRLYFLVLT

SEQ ID NO: 16630 - DNA, 1592 bp, Triticum aestivum
  misc_feature (1)..(1592): Ceres Seq. ID no. 15179824
accaatcatttcctcttcactctcgctcctccttttctgccttgcaaccaaagccccatcccttgattcgatcgatcgttcgggatcctcctctcgcgcgcttctaggacctgtccctcgaagcttcttcttcttctccttggacttgtgcttggtatggcgcagacgaccgtggtggtgccggaggtgggcatgactgcggccgcgcccacggcgtgctcctgccctggttcgctgttcccctacccgccgccgcgtgccgggatggccgtgagccgcaagtgcctgcgggcggcgcaggcggagcttggcgccgggatgctcagtggcctggtcgagtccatgcgggcgtcctcccccacgcacgccagggccgccgccgccctctccgccggcgtcgacgacgagcacgccgcctggatggcgaggcacccgtccgccctgggaaagttcgaggagatcgtggccgcgtccaaggggaagcagatcgtcatgttcctggactacgacggcacgctgtcccccatcgtcgatgaccccgacgccgccttcatgagcgagacgatgcggatggcagtgcgcagcgtggccaagcacttcccgacggcgatcgtcagcggtcggtgccgcgacaaggtgtttgatttcgtgaagctggcggagctctactacgccggcagccacggcatggacatcaagggcccggccaaatcctcaaagtccaaggccaaaggagttctcttccaaccggcaagcgagttcctgcccatgatagaagaggtgcatcaacggctgatagaggagacgaagcacgtagccggggccaaggtggagaacaacaagttctgcgtgtcagttcacttcagatgcgtcgacgaaaagagctggggcgcgctggcggagacggtgaagggcgtgatgcgggagtaccccaagctgcgcatgtcgcaggggcggatggtgttcgaggtgcggcccaccatcaagtgggacaagggcaaggccctcgagttcctgctcgagtcgctgggcttcgccgactgccccaacgtgctgcccgtctacatcggcgacgaccgcaccgacgaggacgccttcaaggtgctgcgccggcggggccagggcgtcgggatcctcgtctccaagcaccccaaggacaccagcgcctccttctcgctgcaggagccggccgaggtcatggagttcctgctccgcctcgtcgagtggaagcagctctccaaggcgcgcctcaggctgcggcgacaggccgacgcctgatcggacgacaaggatcggccggccggcgccggcgggctggactaattatttcactgctacgtgtagcttagctagttaatgaatcccctgctcgtccgaacaaagccaaaggctacgtacgtggatgggaagaaggaacgtactatggcgaacctgtggctgtggagcattgttgcgccacatgttgtcttctaattaaccgcccttctttttgtggggatgtataccgtacctaccgattatgcatgcatgtaaattacctttgtccacgtacaaggggaggaaccatggaataaagaaagagaaacatgagc

SEQ ID NO: 16631 - protein, 373 aa, Triticum aestivum
  peptide (1)..(373): Ceres Seq. ID no. 15179825
  misc_feature (114)..(344): Pfam Name: Pfam Description:  Trehalose-phosphatase
  misc_feature (33)..(361): NCBI GI NO: 18399940 NR Description: trehalose-6-phosphate phosphatase, putative
  misc_feature (33)..(361): NCBI GI NO: 21554408 NR Description: trehalose-phosphatase, putative
  misc_feature (2)..(360): NCBI GI NO: 30683008 NR Description: trehalose-6-phosphate phosphatase, putative
  misc_feature (33)..(361): NCBI GI NO: 25354597 NR Description: probable trehalose-phosphatase
  misc_feature (41)..(360): NCBI GI NO: 30692524 NR Description: trehalose-6-phosphate phosphatase, putative
  misc_feature (31)..(355): NCBI GI NO: 15238360 NR Description: trehalose-6-phosphate phosphatase, putative
  misc_feature (2)..(364): NCBI GI NO: 11282598 NR Description: trehalose-6-phosphate phosphatase-like protein -Arabidopsis thaliana
  misc_feature (42)..(359): NCBI GI NO: 15218205 NR Description: trehalose-6-phosphate phosphatase (TPPB)
  misc_feature (42)..(359): NCBI GI NO: 25354595 NR Description: trehalose-phosphatase (EC 3.1.3.12) B
  misc_feature (13)..(358): NCBI GI NO: 33146623 NR Description: putative trehalose-6-phosphate phosphatase
MAQTTVVVPEVGMTAAAPTACSCPGSLFPYPPPRAGMAVSRKCLRAAQAELGAGMLSGLVESMRASSPTHARAAAALSAGVDDEHAAWMARHPSALGKFEEIVAASKGKQIVMFLDYDGTLSPIVDDPDAAFMSETMRMAVRSVAKHFPTAIVSGRCRDKVFDFVKLAELYYAGSHGMDIKGPAKSSKSKAKGVLFQPASEFLPMIEEVHQRLIEETKHVAGAKVENNKFCVSVHFRCVDEKSWGALAETVKGVMREYPKLRMSQGRMVFEVRPTIKWDKGKALEFLLESLGFADCPNVLPVYIGDDRTDEDAFKVLRRRGQGVGILVSKHPKDTSASFSLQEPAEVMEFLLRLVEWKQLSKARLRLRRQADA

SEQ ID NO: 16632 - protein, 361 aa, Triticum aestivum
  peptide (1)..(361): Ceres Seq. ID no. 15179826
  misc_feature (102)..(332): Pfam Name: Pfam Description:  Trehalose-phosphatase
  misc_feature (21)..(349): NCBI GI NO: 18399940 NR Description: trehalose-6-phosphate phosphatase, putative
  misc_feature (21)..(349): NCBI GI NO: 21554408 NR Description: trehalose-phosphatase, putative
  misc_feature (1)..(348): NCBI GI NO: 30683008 NR Description: trehalose-6-phosphate phosphatase, putative
  misc_feature (21)..(349): NCBI GI NO: 25354597 NR Description: probable trehalose-phosphatase
  misc_feature (29)..(348): NCBI GI NO: 30692524 NR Description: trehalose-6-phosphate phosphatase, putative
  misc_feature (19)..(343): NCBI GI NO: 15238360 NR Description: trehalose-6-phosphate phosphatase, putative
  misc_feature (1)..(352): NCBI GI NO: 11282598 NR Description: trehalose-6-phosphate phosphatase-like protein -Arabidopsis thaliana
  misc_feature (30)..(347): NCBI GI NO: 15218205 NR Description: trehalose-6-phosphate phosphatase (TPPB)
  misc_feature (30)..(347): NCBI GI NO: 25354595 NR Description: trehalose-phosphatase (EC 3.1.3.12) B
  misc_feature (1)..(346): NCBI GI NO: 33146623 NR Description: putative trehalose-6-phosphate phosphatase
MTAAAPTACSCPGSLFPYPPPRAGMAVSRKCLRAAQAELGAGMLSGLVESMRASSPTHARAAAALSAGVDDEHAAWMARHPSALGKFEEIVAASKGKQIVMFLDYDGTLSPIVDDPDAAFMSETMRMAVRSVAKHFPTAIVSGRCRDKVFDFVKLAELYYAGSHGMDIKGPAKSSKSKAKGVLFQPASEFLPMIEEVHQRLIEETKHVAGAKVENNKFCVSVHFRCVDEKSWGALAETVKGVMREYPKLRMSQGRMVFEVRPTIKWDKGKALEFLLESLGFADCPNVLPVYIGDDRTDEDAFKVLRRRGQGVGILVSKHPKDTSASFSLQEPAEVMEFLLRLVEWKQLSKARLRLRRQADA

SEQ ID NO: 16633 - protein, 337 aa, Triticum aestivum
  peptide (1)..(337): Ceres Seq. ID no. 15179827
  misc_feature (78)..(308): Pfam Name: Pfam Description:  Trehalose-phosphatase
  misc_feature (1)..(325): NCBI GI NO: 18399940 NR Description: trehalose-6-phosphate phosphatase, putative
  misc_feature (1)..(325): NCBI GI NO: 21554408 NR Description: trehalose-phosphatase, putative
  misc_feature (1)..(324): NCBI GI NO: 30683008 NR Description: trehalose-6-phosphate phosphatase, putative
  misc_feature (1)..(325): NCBI GI NO: 25354597 NR Description: probable trehalose-phosphatase
  misc_feature (5)..(324): NCBI GI NO: 30692524 NR Description: trehalose-6-phosphate phosphatase, putative
  misc_feature (1)..(319): NCBI GI NO: 15238360 NR Description: trehalose-6-phosphate phosphatase, putative
  misc_feature (1)..(328): NCBI GI NO: 11282598 NR Description: trehalose-6-phosphate phosphatase-like protein -Arabidopsis thaliana
  misc_feature (6)..(323): NCBI GI NO: 15218205 NR Description: trehalose-6-phosphate phosphatase (TPPB)
  misc_feature (6)..(323): NCBI GI NO: 25354595 NR Description: trehalose-phosphatase (EC 3.1.3.12) B
  misc_feature (1)..(322): NCBI GI NO: 33146623 NR Description: putative trehalose-6-phosphate phosphatase
MAVSRKCLRAAQAELGAGMLSGLVESMRASSPTHARAAAALSAGVDDEHAAWMARHPSALGKFEEIVAASKGKQIVMFLDYDGTLSPIVDDPDAAFMSETMRMAVRSVAKHFPTAIVSGRCRDKVFDFVKLAELYYAGSHGMDIKGPAKSSKSKAKGVLFQPASEFLPMIEEVHQRLIEETKHVAGAKVENNKFCVSVHFRCVDEKSWGALAETVKGVMREYPKLRMSQGRMVFEVRPTIKWDKGKALEFLLESLGFADCPNVLPVYIGDDRTDEDAFKVLRRRGQGVGILVSKHPKDTSASFSLQEPAEVMEFLLRLVEWKQLSKARLRLRRQADA

SEQ ID NO: 16634 - DNA, 2581 bp, Triticum aestivum
  misc_feature (1)..(2581): Ceres Seq. ID no. 14303684
aaaaatgatgcgcgaccccagtcctactctccccagttgttactcccagccagcagcaccgtccagggcccggccgcacgctacaactagaaccaaccccagccccggtgcagtgcacagccagtgtagctaggctctctcgcagcgagagcaggacgcaggacggctagctagctttgatcggccggccggatcggagtgctcgtgtgtcgggggccatggccggcgccgcgggcgacagggcggaaggtgtgggcggtggcggggactggccgccgttcgccggcgacgccttcgcggagtactcgtcgtcggtgttcgcggagctcggtggatggtcggatggccttggcgcgggcgccggggagctgccgccgctggatctgccggcggcgagcgcgtccgggccggtcccgatggcgcggtcggacgagatcatgccggccgcgtcaggcgagcccgcaggcgccgcctcctcctgctccagcggcgacggcgccgcagccgccgcggagaacgccgacaagccgcaggaggccgccgacgcagcgagcatgaagccggcggcggcggcagggaagaaggggcagaagcgggcgcggcagcagcggttcgccttcgtgaccaagagcgaagttgatcacctcgaggatgggtacagatggaggaagtatgggcagaaagccgtcaagaacagccctttcccaaggagctactaccggtgcaccaacagcaagtgcaccgtgaagaagcgggtggagcggtcgtcggaggacccctccgtggtgatcaccacctacgagggccagcactgccaccaccagacctccttccagcgcggcggcatgcacttccacggcgccgccaccgttgcgctcgccgagcagatgtcgttcgtgtcaactcagcagctgtacaacctgccgcccctgcgccgacaacagatgaatcctgcatcgtcggagtccgccgttagctccgtgccgccgtctttgcagcagctcaacggcggcgacgaactgcgaaggtcaactagctatagccccacggcgtccgcggtgcagacaccgtcgtcgtcgttggtgcctccggacgtttcctttgacatgggactgcttggcgacatcgtgcctccaggagtaagaaatggatgaagatctataatggtaattattttaagataataggtttataagcgagaacggctacggtgtggacgagctcgtgcgctcccgctaactggacgaacgactccatgacgcgtagcacagcgtatttactgctatggtgtgcattgacgtcgagtacaggtgctccaccgtccaaactaacccgaaagtagcggctcagcttcgtgttgttccgttggaacatgaatgtcggagtggcccataaccgaatgccgccgtcaactttcgctactgagatggcgtcctccgaaagggtacttgggtgcccaactctcaaaagtaaatgggtacccatgtttgggcccatggttgtctcagcgtcgctgaccagtaaaagaaatatatcttccttctcccatagccgcctacagagcaggagctcatggcgatgcagatgtcgacatagccgcctacagagcaggagctcatggcgatgcagatatcggccgctggaggtgttgaagtcgagtttttgtcagatcccgtcgacagatttccactgcgagatctcgctgccgcacagcccttggttgcttacgagatgtacaaatccatggagtgtgagcctgctgagtccagcattggtgatgtggagacgctccggtcaacagtaattgcaatgcgattgccttgtctgcagcagcatctgagcattctacgggcaaagacacccctgaagccccaggctggaggaagagaatgcgagtcggaagttcatctagcgagcgccacccatgcgctgacaggatgagtgctttggaagcaacactaagaagctatgcagagaaaaaaaatggcactgtcgtagttcctactatggggacaaaatttgattctcttgaagaagcctgctagaacatgttcctggatgtgcatggatgcagaaaatgtccttgggatatagagctggaaatctgggacttagggtgttctagagcatccatgccatccaagtgagaggagaatatcctttgtctttaggacatgcttgctgaacatgcaagttcgctagacgaaggatgggtataactgatgaagctttatgcagtctattggcacccatctcatacagagctattgccgagagcgcctttgcatctgacgtcgtgcgccagagttggtcataggggaccacacgcagcttgatcagctcgacatggtcccgcaggcccgtttccttcccttggagagcctaaggctggccatagtgggggtaacataacctgtaacatgcacttgggactagcaaatatgtttatgtggcacataattaaagaggagagagagggttagagtaacataggtagataccatatcatgttaaatgctatgctactttgtgtcatgcatggcaataaatatgatcatctatgatactactttatgttact

SEQ ID NO: 16635 - protein, 311 aa, Triticum aestivum
  peptide (1)..(311): Ceres Seq. ID no. 14303685
  misc_feature (143)..(201): Pfam Name: Pfam Description:  WRKY DNA -binding domain
  misc_feature (15)..(311): NCBI GI NO: 13236648 NR Description: putative DNA binding protein [Oryza sativa]
  misc_feature (12)..(310): NCBI GI NO: 34899462 NR Description: WRKY transcription factor-like protein
  misc_feature (24)..(210): NCBI GI NO: 15222282 NR Description: WRKY family transcription factor
  misc_feature (41)..(209): NCBI GI NO: 34912866 NR Description: putative DNA-binding protein homolog
  misc_feature (39)..(224): NCBI GI NO: 34910900 NR Description: P0003E08.17
  misc_feature (64)..(310): NCBI GI NO: 15239913 NR Description: WRKY family transcription factor
  misc_feature (57)..(208): NCBI GI NO: 15220582 NR Description: WRKY family transcription factor
  misc_feature (57)..(208): NCBI GI NO: 25518132 NR Description: F1N18.10 protein - Arabidopsis thaliana
  misc_feature (84)..(200): NCBI GI NO: 15226550 NR Description: WRKY family transcription factor
  misc_feature (84)..(200): NCBI GI NO: 21536889 NR Description: putative WRKY-type DNA binding protein
MAGAAGDRAEGVGGGGDWPPFAGDAFAEYSSSVFAELGGWSDGLGAGAGELPPLDLPAASASGPVPMARSDEIMPAASGEPAGAASSCSSGDGAAAAAENADKPQEAADAASMKPAAAAGKKGQKRARQQRFAFVTKSEVDHLEDGYRWRKYGQKAVKNSPFPRSYYRCTNSKCTVKKRVERSSEDPSVVITTYEGQHCHHQTSFQRGGMHFHGAATVALAEQMSFVSTQQLYNLPPLRRQQMNPASSESAVSSVPPSLQQLNGGDELRRSTSYSPTASAVQTPSSSLVPPDVSFDMGLLGDIVPPGVRNG

SEQ ID NO: 16636 - protein, 245 aa, Triticum aestivum
  peptide (1)..(245): Ceres Seq. ID no. 14303686
  misc_feature (77)..(135): Pfam Name: Pfam Description:  WRKY DNA -binding domain
  misc_feature (1)..(245): NCBI GI NO: 13236648 NR Description: putative DNA binding protein [Oryza sativa]
  misc_feature (1)..(244): NCBI GI NO: 34899462 NR Description: WRKY transcription factor-like protein
  misc_feature (1)..(144): NCBI GI NO: 15222282 NR Description: WRKY family transcription factor
  misc_feature (1)..(143): NCBI GI NO: 34912866 NR Description: putative DNA-binding protein homolog
  misc_feature (1)..(158): NCBI GI NO: 34910900 NR Description: P0003E08.17
  misc_feature (1)..(244): NCBI GI NO: 15239913 NR Description: WRKY family transcription factor
  misc_feature (1)..(142): NCBI GI NO: 15220582 NR Description: WRKY family transcription factor
  misc_feature (1)..(142): NCBI GI NO: 25518132 NR Description: F1N18.10 protein - Arabidopsis thaliana
  misc_feature (18)..(134): NCBI GI NO: 15226550 NR Description: WRKY family transcription factor
  misc_feature (18)..(134): NCBI GI NO: 21536889 NR Description: putative WRKY-type DNA binding protein
MARSDEIMPAASGEPAGAASSCSSGDGAAAAAENADKPQEAADAASMKPAAAAGKKGQKRARQQRFAFVTKSEVDHLEDGYRWRKYGQKAVKNSPFPRSYYRCTNSKCTVKKRVERSSEDPSVVITTYEGQHCHHQTSFQRGGMHFHGAATVALAEQMSFVSTQQLYNLPPLRRQQMNPASSESAVSSVPPSLQQLNGGDELRRSTSYSPTASAVQTPSSSLVPPDVSFDMGLLGDIVPPGVRNG

SEQ ID NO: 16637 - protein, 238 aa, Triticum aestivum
  peptide (1)..(238): Ceres Seq. ID no. 14303687
  misc_feature (70)..(128): Pfam Name: Pfam Description:  WRKY DNA -binding domain
  misc_feature (1)..(238): NCBI GI NO: 13236648 NR Description: putative DNA binding protein [Oryza sativa]
  misc_feature (1)..(237): NCBI GI NO: 34899462 NR Description: WRKY transcription factor-like protein
  misc_feature (1)..(137): NCBI GI NO: 15222282 NR Description: WRKY family transcription factor
  misc_feature (1)..(136): NCBI GI NO: 34912866 NR Description: putative DNA-binding protein homolog
  misc_feature (1)..(151): NCBI GI NO: 34910900 NR Description: P0003E08.17
  misc_feature (1)..(237): NCBI GI NO: 15239913 NR Description: WRKY family transcription factor
  misc_feature (1)..(135): NCBI GI NO: 15220582 NR Description: WRKY family transcription factor
  misc_feature (1)..(135): NCBI GI NO: 25518132 NR Description: F1N18.10 protein - Arabidopsis thaliana
  misc_feature (11)..(127): NCBI GI NO: 15226550 NR Description: WRKY family transcription factor
  misc_feature (11)..(127): NCBI GI NO: 21536889 NR Description: putative WRKY-type DNA binding protein
MPAASGEPAGAASSCSSGDGAAAAAENADKPQEAADAASMKPAAAAGKKGQKRARQQRFAFVTKSEVDHLEDGYRWRKYGQKAVKNSPFPRSYYRCTNSKCTVKKRVERSSEDPSVVITTYEGQHCHHQTSFQRGGMHFHGAATVALAEQMSFVSTQQLYNLPPLRRQQMNPASSESAVSSVPPSLQQLNGGDELRRSTSYSPTASAVQTPSSSLVPPDVSFDMGLLGDIVPPGVRNG

SEQ ID NO: 16638 - DNA, 1809 bp, Triticum aestivum
  misc_feature (1)..(1809): Ceres Seq. ID no. 13657780
agctcccgtcactttccccctctggtcgagggtttcctctgccctgttacgttccccactccaatccaatggcgacgaccagcaacaagaaaatggcgtcgccgtcgcctatgacggacatgcccgaccagctcctcgccgagatcttcctccggctgcccaccccacaagacctcgcccgcgcctccgccgtttgcctcaccttccgccgaatctccaccgacaggtccttcctccgctgcttccgctgcctccacgcaccaccacttctcggattcctcgaccgcgacggcttccacccagccctaacctccacccccgccgttcgcgcggccgccgtcgccgccgatttcaccttatccttcctcccctaccaccgccgctggaccgtgcaggacgtccgcgacggccgcgtcctcctctgccgcagcatcggaaaacatgggcagcccccggtcttcagagatctcgcggtgtgcgaccccttgcaccggcgctacgtcctgctccccccgctacctcacgacctggctgctttgcttgggcaccctttccccccggtaaccgaggcctgctgcaagcgcttcctcgttcccctcggtgaggaggaggcagcggctggagacacaacattcatagtcatcttgatggcatattgcaaaaccagtctggctgcctttgtcttctcttccagcaacgatcaatggcaagctactgcatccaaggatttgagtgatttggcccttgacgagggcgacatggaggagatgtcaagggtccagccttttattcccatgcgccattatgcttatggctgtttctactgggactgggtgcaattcgggatgaagaagttgctcttgcttgacaccacgaacatggagttctccactgctgacctcccaccaggagaatggagcaaggaaggtatagccattgtggaggcaggggaaggcaggctcgggatctttggtttccatggtggacttgcatccaatctcagctatacagctgcacggaccaaaggcgagagtcccagccagtggcagatggagaagacaatctcactagattctggctacaaatattgtatcagagacgcaacacagaggtacttgctcttgacaaggatagaagcatcatctccaaataatcaccttgttggatatttctcaatggatatcaagacgttgcagcttcagagggtttatgagaaacagcactataagtatccgacatacgcatatatcaacttcccaccatcattgttgtcttcaaggagaatatgaagtggtttgacagagccatacccatacgtaatcatatcagcattcttaattcaaagcgaccatggtttcaacagcttggagttctcacatacgtgatcacgttgcctacaaaacaacaagatctacattgccttgcttggtggtggccatgtcaatgttttggttattaggtctaacatcaatgtggaatttccctgcctaagaatgtgactttgatattaggagttcaagtcaatttttcttcttcattatttgttagagttgctaaaacaggtacaatctgactagtggcagaacgatcacaacggaactgataaccaacataaggacaatwtaagcagcaccagcatgcagttggagggactcggttctttgttgctgctgctgctgtacggtgaagggtaggcagcaaaataggtttgtagagctgtagaaagaggtgagtggaagtcctaaatggtgctcatgtttggatcgccgaagtaccgataatttgtggaatcttgaatatgctgtwtgg

SEQ ID NO: 16639 - protein, 428 aa, Triticum aestivum
  peptide (1)..(428): Ceres Seq. ID no. 15219877
  misc_feature (30)..(400): NCBI GI NO: 34393351 NR Description: hypothetical protein
  misc_feature (20)..(424): NCBI GI NO: 34393354 NR Description: hypothetical protein
  misc_feature (31)..(424): NCBI GI NO: 34393352 NR Description: hypothetical protein
  misc_feature (40)..(302): NCBI GI NO: 32480316 NR Description: OSJNBa0042D13.1
  misc_feature (23)..(425): NCBI GI NO: 37530886 NR Description: hypothetical protein
  misc_feature (34)..(422): NCBI GI NO: 37530888 NR Description: hypothetical protein
  misc_feature (89)..(253): NCBI GI NO: 37531752 NR Description: hypothetical protein
  misc_feature (43)..(98): NCBI GI NO: 37531752 NR Description: hypothetical protein
  misc_feature (31)..(174): NCBI GI NO: 34915428 NR Description: hypothetical protein~similar to Oryza sativachromosome1
  misc_feature (34)..(235): NCBI GI NO: 37530982 NR Description: unknown protein
LPSLSPSGRGFPLPCYVPHSNPMATTSNKKMASPSPMTDMPDQLLAEIFLRLPTPQDLARASAVCLTFRRISTDRSFLRCFRCLHAPPLLGFLDRDGFHPALTSTPAVRAAAVAADFTLSFLPYHRRWTVQDVRDGRVLLCRSIGKHGQPPVFRDLAVCDPLHRRYVLLPPLPHDLAALLGHPFPPVTEACCKRFLVPLGEEEAAAGDTTFIVILMAYCKTSLAAFVFSSSNDQWQATASKDLSDLALDEGDMEEMSRVQPFIPMRHYAYGCFYWDWVQFGMKKLLLLDTTNMEFSTADLPPGEWSKEGIAIVEAGEGRLGIFGFHGGLASNLSYTAARTKGESPSQWQMEKTISLDSGYKYCIRDATQRYLLLTRIEASSPNNHLVGYFSMDIKTLQLQRVYEKQHYKYPTYAYINFPPSLLSSRRI

SEQ ID NO: 16640 - protein, 406 aa, Triticum aestivum
  peptide (1)..(406): Ceres Seq. ID no. 15219878
  misc_feature (8)..(378): NCBI GI NO: 34393351 NR Description: hypothetical protein
  misc_feature (1)..(402): NCBI GI NO: 34393354 NR Description: hypothetical protein
  misc_feature (9)..(402): NCBI GI NO: 34393352 NR Description: hypothetical protein
  misc_feature (18)..(280): NCBI GI NO: 32480316 NR Description: OSJNBa0042D13.1
  misc_feature (1)..(403): NCBI GI NO: 37530886 NR Description: hypothetical protein
  misc_feature (12)..(400): NCBI GI NO: 37530888 NR Description: hypothetical protein
  misc_feature (67)..(231): NCBI GI NO: 37531752 NR Description: hypothetical protein
  misc_feature (21)..(76): NCBI GI NO: 37531752 NR Description: hypothetical protein
  misc_feature (9)..(152): NCBI GI NO: 34915428 NR Description: hypothetical protein~similar to Oryza sativachromosome1
  misc_feature (12)..(213): NCBI GI NO: 37530982 NR Description: unknown protein
MATTSNKKMASPSPMTDMPDQLLAEIFLRLPTPQDLARASAVCLTFRRISTDRSFLRCFRCLHAPPLLGFLDRDGFHPALTSTPAVRAAAVAADFTLSFLPYHRRWTVQDVRDGRVLLCRSIGKHGQPPVFRDLAVCDPLHRRYVLLPPLPHDLAALLGHPFPPVTEACCKRFLVPLGEEEAAAGDTTFIVILMAYCKTSLAAFVFSSSNDQWQATASKDLSDLALDEGDMEEMSRVQPFIPMRHYAYGCFYWDWVQFGMKKLLLLDTTNMEFSTADLPPGEWSKEGIAIVEAGEGRLGIFGFHGGLASNLSYTAARTKGESPSQWQMEKTISLDSGYKYCIRDATQRYLLLTRIEASSPNNHLVGYFSMDIKTLQLQRVYEKQHYKYPTYAYINFPPSLLSSRRI

SEQ ID NO: 16641 - protein, 398 aa, Triticum aestivum
  peptide (1)..(398): Ceres Seq. ID no. 15219879
  misc_feature (1)..(370): NCBI GI NO: 34393351 NR Description: hypothetical protein
  misc_feature (1)..(394): NCBI GI NO: 34393354 NR Description: hypothetical protein
  misc_feature (1)..(394): NCBI GI NO: 34393352 NR Description: hypothetical protein
  misc_feature (10)..(272): NCBI GI NO: 32480316 NR Description: OSJNBa0042D13.1
  misc_feature (1)..(395): NCBI GI NO: 37530886 NR Description: hypothetical protein
  misc_feature (4)..(392): NCBI GI NO: 37530888 NR Description: hypothetical protein
  misc_feature (59)..(223): NCBI GI NO: 37531752 NR Description: hypothetical protein
  misc_feature (13)..(68): NCBI GI NO: 37531752 NR Description: hypothetical protein
  misc_feature (1)..(144): NCBI GI NO: 34915428 NR Description: hypothetical protein~similar to Oryza sativachromosome1
  misc_feature (4)..(205): NCBI GI NO: 37530982 NR Description: unknown protein
MASPSPMTDMPDQLLAEIFLRLPTPQDLARASAVCLTFRRISTDRSFLRCFRCLHAPPLLGFLDRDGFHPALTSTPAVRAAAVAADFTLSFLPYHRRWTVQDVRDGRVLLCRSIGKHGQPPVFRDLAVCDPLHRRYVLLPPLPHDLAALLGHPFPPVTEACCKRFLVPLGEEEAAAGDTTFIVILMAYCKTSLAAFVFSSSNDQWQATASKDLSDLALDEGDMEEMSRVQPFIPMRHYAYGCFYWDWVQFGMKKLLLLDTTNMEFSTADLPPGEWSKEGIAIVEAGEGRLGIFGFHGGLASNLSYTAARTKGESPSQWQMEKTISLDSGYKYCIRDATQRYLLLTRIEASSPNNHLVGYFSMDIKTLQLQRVYEKQHYKYPTYAYINFPPSLLSSRRI

SEQ ID NO: 16642 - DNA, 1780 bp, Triticum aestivum
  misc_feature (1)..(1780): Ceres Seq. ID no. 15170163
agattcaaagcgatcgttcaaagccatggcagggcactcgcccactctccctcatcttgtcttacttgagcaccggcagccatcatccgcctcccattaagaactccagaccgtcaccatggctgcctcttctcctcccaagtcccaacccatcactatggggcctcttccgccgctcgtattagcactctttctcctacctctcctctacttgttcttcaggggcggtagcaagggacgatcgacacagggagcaagaaacgctcccgggccgccgaaacagcttcccgtgctcggcaacctcctgcagctcggcggccggccacaccggtacttccagtcgctcacccagaagtacgggccggtggtgcaggtgcagctcggccgcgtgcggatggtcgtcgtcgcgtcgcctgaggcggccaaggaggttctccggacgaacgacctgcactgctgcagccgcccaaattcaccaggtgcgaggatgctgagctacaacttcctcgacgtggctttcggcccctacagcgactactggcgcgagatgcggaagctcctcgtgctggagctgctgagcgtgaggcgcgtccagtccttcgcctacgcccgggccgcagaggtggaccgccttgtctcctccctcgccggcacccctccgggcaccccggtcgacctcagcgagcagctgtacgcgctctcggacggcatcatcggcacggtggccttcgggaagatgtacgggtcggagtcgttcgagaggaccagcttccagcggatgatggacgagacgctgcgggtgctcggcagcttcacgttcgaggacttcttcccgtcgtcggcgctcgcacggtgggcggacgccctcaccggcgtggcgtcgcggcggcggagggtcttcctcaggatcgataggttcttcgacgcggtcatcgacaagcacctcgagccggggaggctggcggccggggtgcaggaggacatggtcgacgcgctggtgaagatgtggagggatcaagatggggctctggcgctgacgcgtgataacatcaagggaatcctgatggatacattcgccggtgggatcgacacttgcgctgtgacgacgatctggatcatggcggagctgatgaggaacccaagggtgatgcggaaggcgcagtcggaggtacgcgccgcggtggggaacaaatccagagtgtacgaagaagacgcccagggcctcaagtacctcaagatgatagtgaaggagaacttcaggctccacccgccggggcctctgctgatcccaagagagaccatgcagagctgcgaggtcgccggctacagcgtgcccgcgggcaccaggatacacgtcaacgtctgggccatggggagagacccggagatatgggacaggccggaggagttcttccccgagcggttcgaggacgcgcaggttgatttcagggggctgcacttcgagctccttccgttcgggtcgggacgaagggcctgccctgccgtcgccatgggcgtggccaatgtggaggtcgtgctggccaacctgttgtattgcttcgactgggagcttcccgagggcgtgaaggaggacgacgtcgatatggaggaaacagggcagcttgttttcagcaagaaggtggctcttgagcttgtgccagttaagcggtagtgatatctttttttagtgatatcttttttttgagattctagtgatatctcatatgtttcaaatgccacctagtgcttcctcaataaactaaacagtagtttaaatccc

SEQ ID NO: 16643 - protein, 517 aa, Triticum aestivum
  peptide (1)..(517): Ceres Seq. ID no. 15170164
  misc_feature (9)..(516): NCBI GI NO: 27817968 NR Description: putative cytochrome P450 71E1
  misc_feature (1)..(516): NCBI GI NO: 5915841 NR Description: Cytochrome P450 71E1
  misc_feature (17)..(516): NCBI GI NO: 37788136 NR Description: cytochrome P450 protein CYP71E [Manihot esculenta]
  misc_feature (20)..(516): NCBI GI NO: 34897434 NR Description: putative cytochrome P450
  misc_feature (20)..(517): NCBI GI NO: 15222174 NR Description: cytochrome P450 family [Arabidopsis thaliana]
  misc_feature (22)..(517): NCBI GI NO: 15231526 NR Description: cytochrome P450 71B23 [Arabidopsis thaliana]
  misc_feature (20)..(517): NCBI GI NO: 25282603 NR Description: cytochrome P450 monooxygenase
  misc_feature (24)..(515): NCBI GI NO: 16507125 NR Description: cytochrome P450 [Citrus sinensis]
  misc_feature (20)..(516): NCBI GI NO: 15231538 NR Description: cytochrome P450 family [Arabidopsis thaliana]
  misc_feature (22)..(516): NCBI GI NO: 30696845 NR Description: cytochrome P450 71B10 [Arabidopsis thaliana]
MAASSPPKSQPITMGPLPPLVLALFLLPLLYLFFRGGSKGRSTQGARNAPGPPKQLPVLGNLLQLGGRPHRYFQSLTQKYGPVVQVQLGRVRMVVVASPEAAKEVLRTNDLHCCSRPNSPGARMLSYNFLDVAFGPYSDYWREMRKLLVLELLSVRRVQSFAYARAAEVDRLVSSLAGTPPGTPVDLSEQLYALSDGIIGTVAFGKMYGSESFERTSFQRMMDETLRVLGSFTFEDFFPSSALARWADALTGVASRRRRVFLRIDRFFDAVIDKHLEPGRLAAGVQEDMVDALVKMWRDQDGALALTRDNIKGILMDTFAGGIDTCAVTTIWIMAELMRNPRVMRKAQSEVRAAVGNKSRVYEEDAQGLKYLKMIVKENFRLHPPGPLLIPRETMQSCEVAGYSVPAGTRIHVNVWAMGRDPEIWDRPEEFFPERFEDAQVDFRGLHFELLPFGSGRRACPAVAMGVANVEVVLANLLYCFDWELPEGVKEDDVDMEETGQLVFSKKVALELVPVKR

SEQ ID NO: 16644 - protein, 504 aa, Triticum aestivum
  peptide (1)..(504): Ceres Seq. ID no. 15170165
  misc_feature (1)..(503): NCBI GI NO: 27817968 NR Description: putative cytochrome P450 71E1
  misc_feature (1)..(503): NCBI GI NO: 5915841 NR Description: Cytochrome P450 71E1
  misc_feature (4)..(503): NCBI GI NO: 37788136 NR Description: cytochrome P450 protein CYP71E [Manihot esculenta]
  misc_feature (7)..(503): NCBI GI NO: 34897434 NR Description: putative cytochrome P450
  misc_feature (7)..(504): NCBI GI NO: 15222174 NR Description: cytochrome P450 family [Arabidopsis thaliana]
  misc_feature (9)..(504): NCBI GI NO: 15231526 NR Description: cytochrome P450 71B23 [Arabidopsis thaliana]
  misc_feature (7)..(504): NCBI GI NO: 25282603 NR Description: cytochrome P450 monooxygenase
  misc_feature (11)..(502): NCBI GI NO: 16507125 NR Description: cytochrome P450 [Citrus sinensis]
  misc_feature (7)..(503): NCBI GI NO: 15231538 NR Description: cytochrome P450 family [Arabidopsis thaliana]
  misc_feature (9)..(503): NCBI GI NO: 30696845 NR Description: cytochrome P450 71B10 [Arabidopsis thaliana]
MGPLPPLVLALFLLPLLYLFFRGGSKGRSTQGARNAPGPPKQLPVLGNLLQLGGRPHRYFQSLTQKYGPVVQVQLGRVRMVVVASPEAAKEVLRTNDLHCCSRPNSPGARMLSYNFLDVAFGPYSDYWREMRKLLVLELLSVRRVQSFAYARAAEVDRLVSSLAGTPPGTPVDLSEQLYALSDGIIGTVAFGKMYGSESFERTSFQRMMDETLRVLGSFTFEDFFPSSALARWADALTGVASRRRRVFLRIDRFFDAVIDKHLEPGRLAAGVQEDMVDALVKMWRDQDGALALTRDNIKGILMDTFAGGIDTCAVTTIWIMAELMRNPRVMRKAQSEVRAAVGNKSRVYEEDAQGLKYLKMIVKENFRLHPPGPLLIPRETMQSCEVAGYSVPAGTRIHVNVWAMGRDPEIWDRPEEFFPERFEDAQVDFRGLHFELLPFGSGRRACPAVAMGVANVEVVLANLLYCFDWELPEGVKEDDVDMEETGQLVFSKKVALELVPVKR

SEQ ID NO: 16645 - protein, 425 aa, Triticum aestivum
  peptide (1)..(425): Ceres Seq. ID no. 15170166
  misc_feature (1)..(424): NCBI GI NO: 27817968 NR Description: putative cytochrome P450 71E1
  misc_feature (1)..(424): NCBI GI NO: 5915841 NR Description: Cytochrome P450 71E1
  misc_feature (1)..(424): NCBI GI NO: 37788136 NR Description: cytochrome P450 protein CYP71E [Manihot esculenta]
  misc_feature (1)..(424): NCBI GI NO: 34897434 NR Description: putative cytochrome P450
  misc_feature (1)..(425): NCBI GI NO: 15222174 NR Description: cytochrome P450 family [Arabidopsis thaliana]
  misc_feature (1)..(425): NCBI GI NO: 15231526 NR Description: cytochrome P450 71B23 [Arabidopsis thaliana]
  misc_feature (1)..(425): NCBI GI NO: 25282603 NR Description: cytochrome P450 monooxygenase
  misc_feature (1)..(423): NCBI GI NO: 16507125 NR Description: cytochrome P450 [Citrus sinensis]
  misc_feature (1)..(424): NCBI GI NO: 15231538 NR Description: cytochrome P450 family [Arabidopsis thaliana]
  misc_feature (1)..(424): NCBI GI NO: 30696845 NR Description: cytochrome P450 71B10 [Arabidopsis thaliana]
MVVVASPEAAKEVLRTNDLHCCSRPNSPGARMLSYNFLDVAFGPYSDYWREMRKLLVLELLSVRRVQSFAYARAAEVDRLVSSLAGTPPGTPVDLSEQLYALSDGIIGTVAFGKMYGSESFERTSFQRMMDETLRVLGSFTFEDFFPSSALARWADALTGVASRRRRVFLRIDRFFDAVIDKHLEPGRLAAGVQEDMVDALVKMWRDQDGALALTRDNIKGILMDTFAGGIDTCAVTTIWIMAELMRNPRVMRKAQSEVRAAVGNKSRVYEEDAQGLKYLKMIVKENFRLHPPGPLLIPRETMQSCEVAGYSVPAGTRIHVNVWAMGRDPEIWDRPEEFFPERFEDAQVDFRGLHFELLPFGSGRRACPAVAMGVANVEVVLANLLYCFDWELPEGVKEDDVDMEETGQLVFSKKVALELVPVKR

SEQ ID NO: 16646 - DNA, 1351 bp, Triticum aestivum
  misc_feature (1)..(1351): Ceres Seq. ID no. 15225236
acctcattgatttgttttttcttccagctgttcgacactcgtctgtcacggcgacgggatgaactgacgctgcacggatctcagagaggaaccggatcccttcctccctccgaacggcagctcggcagctcaactcaacccaacccagcccagccgtcgtcgacccgagagaatctgcgaggagcagcagcggagaggaagaagacggtggtctctctccgccatggccagctcgtctgccgacccggagaagctcatggccaaggccgacaaactaaccaaactgagctttacaagatggaatgctgattggaagagtgctaccgccttgtacgaacaagctgcaattgcttatagattcagaaaggacaatgagaaagcaaaggatgcatttgagaaggcttcaaaaggacaagaaatgatctcatcaccgtgggatgctgctaagcatatggaaaatgctggtgctttagcaaaggagcttggactatggaatgaagtttcggacttttatcgcagagcatcagaattttaccgtgaatgtggaagatcacaacctgcctctgatgctcttgcaaagggtgccagtgccttggaagataaagctccagaagaagcaactaaattgtatgatgacgcttgcacacttctagaagaagatggaaaggagcagatggcttttgacttgtaccgtgctgctgcaagtttatatgtgaagcttgagaagtactcggatgccgctgcattccatttaagacttggttcagctgctgataagtgcaatgccgtcaacagccaatgcaaggcctatctgagtgcaatcattatctacctttatgcacatgattttcaacaagctcagaaatgctacaatgattgctcagaggttcaaggcttcctgagtagtgaccagaatcgatgtgcaatgaaactgttgtctgcttatgaggaaggtgatgctgaagaaatcaagcgtgctgctcaatcaagtgccattaatcacctcgaccatgtggtaattcggctcgcaaggaagctaccaacaggtgacctgcaggccatcaagaaagatgtaggaggcgacgacggggattccttggacgaggatgacctaacctgatcccaaactggctggcgagatgcagagagaaccacaatcaatcgagtgactacgccattgatgaacaggaaaggttgtaaaaacacattctggaatcgcatagaaagttgtaggcttcatctgtatcatggatttcgatccccttgttttcgttgtttcggatctgtgcacatacaccctacatctgtactgctggattgctgttgttgcgatattcttattggtttggtt

SEQ ID NO: 16647 - protein, 298 aa, Triticum aestivum
  peptide (1)..(298): Ceres Seq. ID no. 15225237
  misc_feature (1)..(298): NCBI GI NO: 38344323 NR Description: OSJNBa0058K23.5
  misc_feature (5)..(298): NCBI GI NO: 21554919 NR Description: unknown [Arabidopsis thaliana]
  misc_feature (5)..(298): NCBI GI NO: 18415496 NR Description: gamma-soluble NSF attachment protein (gamma-SNAP)
  misc_feature (66)..(298): NCBI GI NO: 5852090 NR Description: zwh13.1 [Oryza sativa (indica cultivar-group)]
  misc_feature (5)..(268): NCBI GI NO: 7486759 NR Description: hypothetical protein F9F13
  misc_feature (94)..(210): NCBI GI NO: 32308082 NR Description: gamma-SNAP [Hordeum vulgare subsp. vulgare]
  misc_feature (2)..(272): NCBI GI NO: 5639862 NR Description: soluble NSF attachment protein gamma isoform
  misc_feature (1)..(278): NCBI GI NO: 34932055 NR Description: similar to Gamma-soluble NSF attachment protein
  misc_feature (12)..(278): NCBI GI NO: 12804881 NR Description: N-ethylmaleimide-sensitive factor attachment
  misc_feature (12)..(278): NCBI GI NO: 18272359 NR Description: Gamma-soluble NSF attachment protein
MASSSADPEKLMAKADKLTKLSFTRWNADWKSATALYEQAAIAYRFRKDNEKAKDAFEKASKGQEMISSPWDAAKHMENAGALAKELGLWNEVSDFYRRASEFYRECGRSQPASDALAKGASALEDKAPEEATKLYDDACTLLEEDGKEQMAFDLYRAAASLYVKLEKYSDAAAFHLRLGSAADKCNAVNSQCKAYLSAIIIYLYAHDFQQAQKCYNDCSEVQGFLSSDQNRCAMKLLSAYEEGDAEEIKRAAQSSAINHLDHVVIRLARKLPTGDLQAIKKDVGGDDGDSLDEDDLT

SEQ ID NO: 16648 - protein, 287 aa, Triticum aestivum
  peptide (1)..(287): Ceres Seq. ID no. 15225238
  misc_feature (1)..(287): NCBI GI NO: 38344323 NR Description: OSJNBa0058K23.5
  misc_feature (1)..(287): NCBI GI NO: 21554919 NR Description: unknown [Arabidopsis thaliana]
  misc_feature (1)..(287): NCBI GI NO: 18415496 NR Description: gamma-soluble NSF attachment protein (gamma-SNAP)
  misc_feature (55)..(287): NCBI GI NO: 5852090 NR Description: zwh13.1 [Oryza sativa (indica cultivar-group)]
  misc_feature (1)..(257): NCBI GI NO: 7486759 NR Description: hypothetical protein F9F13
  misc_feature (83)..(199): NCBI GI NO: 32308082 NR Description: gamma-SNAP [Hordeum vulgare subsp. vulgare]
  misc_feature (1)..(261): NCBI GI NO: 5639862 NR Description: soluble NSF attachment protein gamma isoform
  misc_feature (1)..(267): NCBI GI NO: 34932055 NR Description: similar to Gamma-soluble NSF attachment protein
  misc_feature (1)..(267): NCBI GI NO: 12804881 NR Description: N-ethylmaleimide-sensitive factor attachment
  misc_feature (1)..(267): NCBI GI NO: 18272359 NR Description: Gamma-soluble NSF attachment protein
MAKADKLTKLSFTRWNADWKSATALYEQAAIAYRFRKDNEKAKDAFEKASKGQEMISSPWDAAKHMENAGALAKELGLWNEVSDFYRRASEFYRECGRSQPASDALAKGASALEDKAPEEATKLYDDACTLLEEDGKEQMAFDLYRAAASLYVKLEKYSDAAAFHLRLGSAADKCNAVNSQCKAYLSAIIIYLYAHDFQQAQKCYNDCSEVQGFLSSDQNRCAMKLLSAYEEGDAEEIKRAAQSSAINHLDHVVIRLARKLPTGDLQAIKKDVGGDDGDSLDEDDLT

SEQ ID NO: 16649 - protein, 233 aa, Triticum aestivum
  peptide (1)..(233): Ceres Seq. ID no. 15225239
  misc_feature (1)..(233): NCBI GI NO: 38344323 NR Description: OSJNBa0058K23.5
  misc_feature (1)..(233): NCBI GI NO: 21554919 NR Description: unknown [Arabidopsis thaliana]
  misc_feature (1)..(233): NCBI GI NO: 18415496 NR Description: gamma-soluble NSF attachment protein (gamma-SNAP)
  misc_feature (1)..(233): NCBI GI NO: 5852090 NR Description: zwh13.1 [Oryza sativa (indica cultivar-group)]
  misc_feature (1)..(203): NCBI GI NO: 7486759 NR Description: hypothetical protein F9F13
  misc_feature (29)..(145): NCBI GI NO: 32308082 NR Description: gamma-SNAP [Hordeum vulgare subsp. vulgare]
  misc_feature (1)..(207): NCBI GI NO: 5639862 NR Description: soluble NSF attachment protein gamma isoform
  misc_feature (1)..(213): NCBI GI NO: 34932055 NR Description: similar to Gamma-soluble NSF attachment protein
  misc_feature (1)..(213): NCBI GI NO: 12804881 NR Description: N-ethylmaleimide-sensitive factor attachment
  misc_feature (1)..(213): NCBI GI NO: 18272359 NR Description: Gamma-soluble NSF attachment protein
MISSPWDAAKHMENAGALAKELGLWNEVSDFYRRASEFYRECGRSQPASDALAKGASALEDKAPEEATKLYDDACTLLEEDGKEQMAFDLYRAAASLYVKLEKYSDAAAFHLRLGSAADKCNAVNSQCKAYLSAIIIYLYAHDFQQAQKCYNDCSEVQGFLSSDQNRCAMKLLSAYEEGDAEEIKRAAQSSAINHLDHVVIRLARKLPTGDLQAIKKDVGGDDGDSLDEDDLT

SEQ ID NO: 16650 - DNA, 1880 bp, Triticum aestivum
  misc_feature (1)..(1880): Ceres Seq. ID no. 13658728
agaacatcctaatcgaaaaaaggcccatctgagcccattccccattcccccaaaccctcaccctcctccgccggcatcgaaccgccggagcggccgcgccaccatgcaccacctcctccctcctcgcggctgcctgctccgacgcctgtccacggccgccgagaccgccgcagcctcgccccatccaccgcggcgcccgctggccgattcactctaccgccgcgtcactgccgtatggaacccgcgcctcccgctgactcccgtgctggagcaatgggcggtcacggagggccgggccgtcgagaagaacaacctcatgtgcatcgtcaagaagcccgtccgcatccgccgcttatcccacgcgctcgagctttcaatgtggatgaccgaccggcggtacatgtacctgtcgcctggcgacgtcgcgtaccggctggagctgatcagcaaggtgcagggccccgagagtgccgtgaactactggaagggcttgtcgatccaggtgaagaactctcattgctacggctccctcctgaaatgctatgcggaggcaaagtccgtagacgaggccgaaaagctcttcgcggagatgcaggacttgggaatgatgagatcatatccttacaatgtgatgatgaagctttactgggagaccgggcaggttgagagggtgcacgccatgtacaggaccatggaagagagcggcatcaagcctgatgtcttcagtatcaacattctgttgacggtgctcgcagctgctgggaattttgatggcattgaggaaattatcaagaaggtcgacccgaagatcgtgaattggcactcacatgccattgtagccagggccttcatggaagccgggcagcaaggaaaggccttgcgagctatccaggaatcagaaaagcagataggtcggaaggatgagagggttgcatatgggttcttgctttccatgtttgctgatttgggaatgagtagtgaggcggaccgggtttggaatgtctacaagtccaaagtgccggcatgcaactcgatgtacatgtgcaggataactgcgctgcttaagatgaatgacattgatggtgctgagaaagcctttggagagtgggaaagtaggtatgttcaccatgatatccacttaacaaacttactgctaaatgcttactgtgccaaaggtcttatggagaaggcagaagctctcctggatgaagccatcgccaaagggaggacacctcaccgtagtacttggtatagtttggctagtggatttttccaggacggccaggtgtcgaaggcggtggatatgacaaggaaagctcttgcttgtgcgtcttctcgatgggaacctgacctaacaaatgtgctaatgagcctggaacatttcatggagcaaaagaatgttgaagcagccgaggagatggcaagcctgctacggaatttagtacctttgacaagggatgtttaccacattttactgcagacatatgttcatgcaggacaaccagtgtcagatttacttgatcgcatgaaaaaagatggttttgaggctgatgaagaaacagataaaatcatcgctggaatatgccagtagatatccgcatcttcctatcactaagcaatttcgttggttgtttatttcccatggcaggtagctgctaaaccatccaattattaattagtttgacttccttccactgcttagtgcttatctaagacactgtaattctttaatcttctatatgacggtgtcacagggcagtggggatgtcaaatatattcttagagtatgttcatttgaaaaaaaaaaaaaaaaaagcttatcgataccgtcgacctcgagggggggcccggtacccaataaagtgggaacgggagggggg

SEQ ID NO: 16651 - protein, 529 aa, Triticum aestivum
  peptide (1)..(529): Ceres Seq. ID no. 15220659
  misc_feature (344)..(377): Pfam Name: Pfam Description:  PPR repeat
  misc_feature (15)..(526): NCBI GI NO: 37535774 NR Description: putative leaf protein
  misc_feature (38)..(526): NCBI GI NO: 37535776 NR Description: putative leaf protein
  misc_feature (38)..(477): NCBI GI NO: 15225409 NR Description: pentatricopeptide (PPR) repeat-containing protein
  misc_feature (221)..(526): NCBI GI NO: 37535770 NR Description: putative leaf protein
  misc_feature (30)..(504): NCBI GI NO: 34393591 NR Description: putative DNA-binding protein
  misc_feature (35)..(528): NCBI GI NO: 18411800 NR Description: pentatricopeptide (PPR) repeat-containing protein
  misc_feature (35)..(528): NCBI GI NO: 25407143 NR Description: hypothetical protein AT4g01990
  misc_feature (45)..(525): NCBI GI NO: 22328859 NR Description: pentatricopeptide (PPR) repeat-containing protein
  misc_feature (64)..(492): NCBI GI NO: 22329290 NR Description: pentatricopeptide (PPR) repeat-containing protein
  misc_feature (64)..(492): NCBI GI NO: 20453085 NR Description: At1g02150/T7I23.8 [Arabidopsis thaliana]
EHPNRKKAHLSPFPIPPNPHPPPPASNRRSGRATMHHLLPPRGCLLRRLSTAAETAAASPHPPRRPLADSLYRRVTAVWNPRLPLTPVLEQWAVTEGRAVEKNNLMCIVKKPVRIRRLSHALELSMWMTDRRYMYLSPGDVAYRLELISKVQGPESAVNYWKGLSIQVKNSHCYGSLLKCYAEAKSVDEAEKLFAEMQDLGMMRSYPYNVMMKLYWETGQVERVHAMYRTMEESGIKPDVFSINILLTVLAAAGNFDGIEEIIKKVDPKIVNWHSHAIVARAFMEAGQQGKALRAIQESEKQIGRKDERVAYGFLLSMFADLGMSSEADRVWNVYKSKVPACNSMYMCRITALLKMNDIDGAEKAFGEWESRYVHHDIHLTNLLLNAYCAKGLMEKAEALLDEAIAKGRTPHRSTWYSLASGFFQDGQVSKAVDMTRKALACASSRWEPDLTNVLMSLEHFMEQKNVEAAEEMASLLRNLVPLTRDVYHILLQTYVHAGQPVSDLLDRMKKDGFEADEETDKIIAGICQ

SEQ ID NO: 16652 - protein, 495 aa, Triticum aestivum
  peptide (1)..(495): Ceres Seq. ID no. 15220660
  misc_feature (310)..(343): Pfam Name: Pfam Description:  PPR repeat
  misc_feature (1)..(492): NCBI GI NO: 37535774 NR Description: putative leaf protein
  misc_feature (4)..(492): NCBI GI NO: 37535776 NR Description: putative leaf protein
  misc_feature (4)..(443): NCBI GI NO: 15225409 NR Description: pentatricopeptide (PPR) repeat-containing protein
  misc_feature (187)..(492): NCBI GI NO: 37535770 NR Description: putative leaf protein
  misc_feature (1)..(470): NCBI GI NO: 34393591 NR Description: putative DNA-binding protein
  misc_feature (1)..(494): NCBI GI NO: 18411800 NR Description: pentatricopeptide (PPR) repeat-containing protein
  misc_feature (1)..(494): NCBI GI NO: 25407143 NR Description: hypothetical protein AT4g01990
  misc_feature (11)..(491): NCBI GI NO: 22328859 NR Description: pentatricopeptide (PPR) repeat-containing protein
  misc_feature (30)..(458): NCBI GI NO: 22329290 NR Description: pentatricopeptide (PPR) repeat-containing protein
  misc_feature (30)..(458): NCBI GI NO: 20453085 NR Description: At1g02150/T7I23.8 [Arabidopsis thaliana]
MHHLLPPRGCLLRRLSTAAETAAASPHPPRRPLADSLYRRVTAVWNPRLPLTPVLEQWAVTEGRAVEKNNLMCIVKKPVRIRRLSHALELSMWMTDRRYMYLSPGDVAYRLELISKVQGPESAVNYWKGLSIQVKNSHCYGSLLKCYAEAKSVDEAEKLFAEMQDLGMMRSYPYNVMMKLYWETGQVERVHAMYRTMEESGIKPDVFSINILLTVLAAAGNFDGIEEIIKKVDPKIVNWHSHAIVARAFMEAGQQGKALRAIQESEKQIGRKDERVAYGFLLSMFADLGMSSEADRVWNVYKSKVPACNSMYMCRITALLKMNDIDGAEKAFGEWESRYVHHDIHLTNLLLNAYCAKGLMEKAEALLDEAIAKGRTPHRSTWYSLASGFFQDGQVSKAVDMTRKALACASSRWEPDLTNVLMSLEHFMEQKNVEAAEEMASLLRNLVPLTRDVYHILLQTYVHAGQPVSDLLDRMKKDGFEADEETDKIIAGICQ

SEQ ID NO: 16653 - protein, 424 aa, Triticum aestivum
  peptide (1)..(424): Ceres Seq. ID no. 15220661
  misc_feature (239)..(272): Pfam Name: Pfam Description:  PPR repeat
  misc_feature (1)..(421): NCBI GI NO: 37535774 NR Description: putative leaf protein
  misc_feature (1)..(421): NCBI GI NO: 37535776 NR Description: putative leaf protein
  misc_feature (1)..(372): NCBI GI NO: 15225409 NR Description: pentatricopeptide (PPR) repeat-containing protein
  misc_feature (116)..(421): NCBI GI NO: 37535770 NR Description: putative leaf protein
  misc_feature (1)..(399): NCBI GI NO: 34393591 NR Description: putative DNA-binding protein
  misc_feature (1)..(423): NCBI GI NO: 18411800 NR Description: pentatricopeptide (PPR) repeat-containing protein
  misc_feature (1)..(423): NCBI GI NO: 25407143 NR Description: hypothetical protein AT4g01990
  misc_feature (1)..(420): NCBI GI NO: 22328859 NR Description: pentatricopeptide (PPR) repeat-containing protein
  misc_feature (1)..(387): NCBI GI NO: 22329290 NR Description: pentatricopeptide (PPR) repeat-containing protein
  misc_feature (1)..(387): NCBI GI NO: 20453085 NR Description: At1g02150/T7I23.8 [Arabidopsis thaliana]
MCIVKKPVRIRRLSHALELSMWMTDRRYMYLSPGDVAYRLELISKVQGPESAVNYWKGLSIQVKNSHCYGSLLKCYAEAKSVDEAEKLFAEMQDLGMMRSYPYNVMMKLYWETGQVERVHAMYRTMEESGIKPDVFSINILLTVLAAAGNFDGIEEIIKKVDPKIVNWHSHAIVARAFMEAGQQGKALRAIQESEKQIGRKDERVAYGFLLSMFADLGMSSEADRVWNVYKSKVPACNSMYMCRITALLKMNDIDGAEKAFGEWESRYVHHDIHLTNLLLNAYCAKGLMEKAEALLDEAIAKGRTPHRSTWYSLASGFFQDGQVSKAVDMTRKALACASSRWEPDLTNVLMSLEHFMEQKNVEAAEEMASLLRNLVPLTRDVYHILLQTYVHAGQPVSDLLDRMKKDGFEADEETDKIIAGICQ

SEQ ID NO: 16654 - DNA, 1034 bp, Triticum aestivum
  misc_feature (1)..(1034): Ceres Seq. ID no. 12620190
cttttttcttcgcacggatagacggacctccgactcccgtgagtccgctgggcgtggtgcgccatgacccccgccctgcttcccctcgccccctcgcctccttatccaaagccaccacggctatgcctcaaacccacccccgcgcgcccgctctaccggtgcgacgccacacgccgcgacttcgctatctacaccgcctccgctgccgcagccgcagccgcaatgagcctcgccgccgctactgcggcagatgaggcgctcccttcggcgtcacagtcaccgacgcctcaccctccaaacggcggggctacctcgttgctggtcggcatcgcaaacacgaggtcgtggtcgcagtactacggcagcggcttctccatccgcgtgccgccgtccttcgacaacatcttggagcccgaggatttcagcgccgccatgacctattatggcgacaaggccaaggtcagggcgtacgcagctcggttcgcatctccagataggtcagaacttgtaagcgtggtaatcaagccatctaatcagctcaagatcacattcctagaggccaaagatataacggagttgggcactctaaaggaggcgtccaagttatttgtacctggcggtgcgaaaatatactcagctcgaacaattaaagttaaggatcaggagggtatcaggacgtattacttctacgaatttcggtttgacagacaacatgttgctctaatggccaccgtggatagtgggaagacatatatcgctgccgccactgctccagagacgaggtgggagacggatggagtgacattgcgttcggctgctgtatctatgtctctcacatgatctacactagtgtcaaaaatgctcttatatttgttagacctttcagcctgagcattgatagttgtggatgacactaggagagttgggacaattttcgttggtttatttctcacacaatgccatgccaacctgaggggttggggatacatatttataggctgctagccagccaaggcatatgctaagatgctgcc

SEQ ID NO: 16655 - protein, 258 aa, Triticum aestivum
  peptide (1)..(258): Ceres Seq. ID no. 12620191
  misc_feature (23)..(257): NCBI GI NO: 26452557 NR Description: unknown protein [Arabidopsis thaliana]
  misc_feature (23)..(204): NCBI GI NO: 15240916 NR Description: putative protein; protein id: At5g27390.1
MTPALLPLAPSPPYPKPPRLCLKPTPARPLYRCDATRRDFAIYTASAAAAAAAMSLAAATAADEALPSASQSPTPHPPNGGATSLLVGIANTRSWSQYYGSGFSIRVPPSFDNILEPEDFSAAMTYYGDKAKVRAYAARFASPDRSELVSVVIKPSNQLKITFLEAKDITELGTLKEASKLFVPGGAKIYSARTIKVKDQEGIRTYYFYEFRFDRQHVALMATVDSGKTYIAAATAPETRWETDGVTLRSAAVSMSLT

SEQ ID NO: 16656 - protein, 205 aa, Triticum aestivum
  peptide (1)..(205): Ceres Seq. ID no. 12620192
  misc_feature (1)..(204): NCBI GI NO: 26452557 NR Description: unknown protein [Arabidopsis thaliana]
  misc_feature (1)..(151): NCBI GI NO: 15240916 NR Description: putative protein; protein id: At5g27390.1
MSLAAATAADEALPSASQSPTPHPPNGGATSLLVGIANTRSWSQYYGSGFSIRVPPSFDNILEPEDFSAAMTYYGDKAKVRAYAARFASPDRSELVSVVIKPSNQLKITFLEAKDITELGTLKEASKLFVPGGAKIYSARTIKVKDQEGIRTYYFYEFRFDRQHVALMATVDSGKTYIAAATAPETRWETDGVTLRSAAVSMSLT

SEQ ID NO: 16657 - protein, 135 aa, Triticum aestivum
  peptide (1)..(135): Ceres Seq. ID no. 12620193
  misc_feature (1)..(134): NCBI GI NO: 26452557 NR Description: unknown protein [Arabidopsis thaliana]
  misc_feature (1)..(81): NCBI GI NO: 15240916 NR Description: putative protein; protein id: At5g27390.1
MTYYGDKAKVRAYAARFASPDRSELVSVVIKPSNQLKITFLEAKDITELGTLKEASKLFVPGGAKIYSARTIKVKDQEGIRTYYFYEFRFDRQHVALMATVDSGKTYIAAATAPETRWETDGVTLRSAAVSMSLT

SEQ ID NO: 16658 - DNA, 1619 bp, Triticum aestivum
  misc_feature (1)..(1619): Ceres Seq. ID no. 12779909
ccaatccatagccgccacaccctccctcctcctatttcctccctcgtctgccgccgccacgccctccctcctcgtcgccctgtctctgcccagctttgccgcctcccacgcgctcgtcctctcatctcccatggaggggaggggtgaggatgttgggaaaggaggaagccggagatgaggaggtcgatgcaggggacgccatggatggtcggggcgctggctcctcctttccccatgccacggctgcccagatccggcgatcccctcccactccggcatccaggttggaggcattggcgtgaaggtgtcgtgagttatctgcaagggcattgttctgacgtgctcctccatgtctcccgcgagttcttggtgtggcgatcatggctccagatagcataaaatcgacatcatgggtgtcggtgcagaatgacggaggagcgggagaagcaggagctgctcggacgcgctagcgccagtgagatcttccagcatgcgccgacggacaagccggcattcacgctggcccagatcaaggaggcaatcccgcctcactactttcagtgctcgttgatcaagtccttctcctatgtggtctatgacctcgtcatcagcgcgtccctcctgtacgccgggttggtctggatcccagcactctcgagcatgcaatagctgggcgcctgtccgctctactgggtgcctcattttgattttcttaccttggtgggtttgtattcagaaaattaatttgcctatttttgctttttaatctgtgttgggagaaagatgttcctctttgttgagaaaatgtttattgtatggaccatacaaggttctttctccaaatgttattgtgtggtgcaactatgatctattttccttgtgcagaggtctgtgacgaggcagacaggtggcgggcggcaacaataggggttggcggatgctccgagaccaatagcctacttagtgatgggaaggaggatctgacaagttaacccccacaattgtgttgttggaggacttctgcgagctcagtaaaataatgaatcttcatctccgatgttttctctcgaaaatggagcgcggatcgcaggagcaaggagctggtcgagtgtagtgaacaaacaatcaacgcggcacatttggaagttgtgagagctgtgaatggcaccggtcttgtcatactaatgagcaggagcaccggccacattactcttcatgccactctgagcagtcggttgctacttgagattgatttccatgttgaaggaaagggagaccagattgagttcctgtatatgcaagaagaaggggcattgtcgtggttgttgctgaaggtgttggtcaggagctgattaccgggactgatgacaagaacgaagagcaagatgagtatgtcaacatgttgttccttaacgttggccttcttctataaagttcacatgcaactctcctccatggttagaaaaaactaatttaaacgttttgtttctttgatggttactcatttctcttaccattgttgtatcaaaacaattttattttcgctgatggccgcttgggctcattttcgaagagaatgagatgtggaataaactactctaaaatggttggttccctcc

SEQ ID NO: 16659 - protein, 80 aa, Triticum aestivum
  peptide (1)..(80): Ceres Seq. ID no. 12779910
  misc_feature (21)..(80): NCBI GI NO: 34903470 NR Description: putative omega-6 fatty acid desaturase
  misc_feature (3)..(80): NCBI GI NO: 34903462 NR Description: putative omega-6 fatty acid desaturase
  misc_feature (12)..(80): NCBI GI NO: 3417601 NR Description: delta-12 fatty acid desaturase
  misc_feature (1)..(80): NCBI GI NO: 28371827 NR Description: delta-12 oleate desaturase [Punica granatum]
  misc_feature (1)..(80): NCBI GI NO: 28564441 NR Description: delta 12-acyl-lipid-desaturase [Punica granatum]
  misc_feature (12)..(80): NCBI GI NO: 25989476 NR Description: fatty acid desaturase 2
  misc_feature (21)..(80): NCBI GI NO: 7433289 NR Description: Delta12 fatty acid desaturase (EC 1.14.99.-)
  misc_feature (18)..(80): NCBI GI NO: 6118361 NR Description: delta-12 oleate desaturase [Vernonia galamensis]
  misc_feature (18)..(80): NCBI GI NO: 6118359 NR Description: delta-12 oleate desaturase [Vernonia galamensis]
  misc_feature (12)..(80): NCBI GI NO: 13447102 NR Description: delta-12 fatty acid desaturase FAD2
MTEEREKQELLGRASASEIFQHAPTDKPAFTLAQIKEAIPPHYFQCSLIKSFSYVVYDLVISASLLYAGLVWIPALSSMQ

SEQ ID NO: 16660 - protein, 74 aa, Triticum aestivum
  peptide (1)..(74): Ceres Seq. ID no. 12779911
MRRSMQGTPWMVGALAPPFPMPRLPRSGDPLPLRHPGWRHWREGVVSYLQGHCSDVLLHVSREFLVWRSWLQIA

SEQ ID NO: 16661 - protein, 70 aa, Triticum aestivum
  peptide (1)..(70): Ceres Seq. ID no. 12779912
MQGTPWMVGALAPPFPMPRLPRSGDPLPLRHPGWRHWREGVVSYLQGHCSDVLLHVSREFLVWRSWLQIA

SEQ ID NO: 16662 - DNA, 2913 bp, Triticum aestivum
  misc_feature (1)..(2913): Ceres Seq. ID no. 14302891
aaaactctcctcctcctcctccgtctcccagaccaaacgccgcccctctcctccacctcctcccccctcatccatggcgatggcgacctctcacttgcccgactaaacaaacaagcaagctcacgcaagcgcgcacccagacccactgagagcccggacaaaggggtcaagaagacaaggaagaggcgccggtagccactagccactcgtccggcatcccgaggtcgaccatggagaagttcctgttcgaggagctggccggggacgccgtgcgggagctgctgcgcgcggtgcagggcaccttcctgtgccgctccaccgccgagcgcctgcgccggaacgtcgagccgctgctgcccctcgtgcagcagaacggccgccacgcgctccggagcaacgccgagctgggcgagctcgccgtgcagctcagggaggcgctcgacctcgcgcgccgcgccgccgccgccccgcgctggaacgtgtaccgcaccgcgcagctggcccgcaggatggaggccgccgacaagggcatcgagcgctggctggcgcgccacgcccccgcgcacgtgctcgacggcgtgcgccgcctccgcgacgaggccgaggcccgcatcggccgcctcgagcgccgcgtcgaggaggtcgccgcgctgcaggcagcccccacgatcccgcccgccatgtcccttcccgtcgcactgccgccgccgccctccaagggcatggcgatggcggtagaggtggcgccgccgaccaaggccatggggatgccgatggaggtggcgccaccgaccaagggcatggggattccgatggatttcgagttcccgtgcgaggaggagagcaaggacgccggcttggtgggaagcggcgtcaaggtgggcaaggagagagtgaaggagatggtgatgagcagcgggggcggctgggaggtcgtcggcatctgcggcatgggcggcagcggcaagaccacgctcgccatggagatctataaggatcaaaagatccaaggctacttcaacaacagggtcttctttgagacggtctcacagtccgcaaatctggagaccatcaagatgaagctgtgggagcagatcagcagcaatattgtgcttggtgcatataaccagataccggaatggcagctcaagttagggccgagggaccgaggaccagtccttgttatacttgatgatgtgtggtctctctcacagctcgaggagctggtcttcaagttccctggctgcaaaacccttgtcgtatcaaggttgaagttccccacgttagtctcccggacttacgaaatgaaattactcggcgaagaggaggctctctctgtcttctgcagtgctgccttcggtcaggagtctgttcctcagactgctgacaagaaactggttaagcaggttgctgccgagtgcagagggcttcctctagctctcaaggttatcggcgcatccttgcgtgatcagcctcctatgatatggttgagcgcgaagaaccgcttgtcacgaggagagtctatatcggactcacatgagaccaaactcctcgagagaatggcagcaagtgtcgagtgcttgtcgggaaaggttagggaatgtttccttgacctgggttgcttcccagaggataagaagatccctcttgatgtgttgatcaatatttggatggagatacatgatcttgacaagccagatgctttcgccatcctcatggagctatcgaacaagaacctgcttaccctagttaatgatgcacagaataaagctggagatttatacagtaactatcatgactactcagtgacgcaacatgatgtgttgcgtgatctggcacttcacatgagcggtcgtgattctctgaacaaaaggaggcggttagtgatgccaagaagagaagaatcgcttccgagagattggcagaggaataaggaccttccctttgaagctcagattgtttctattcatacaggtgagatgaaagaatctgactggttccagatgagcttccccaaggcagaagttcttatcctcaacttcgcctcaagtgtatactacctcccgtcgttcattgcaacaatgcagaacctgaaggccctggtgctgatcaactatggtactaccagtgcaacccttgacaatttatctgccttcaccacactgagtgacctgaggagtctttggctggaaaagattacgctcccgccactgccgaaaagcacgatcccactgaagaacctgcgcaagatatccctcgtcctttgtgagctgaacaacagtctaagaggatcaacaatggatctctccatgacgtttccgcgcttatccaacctcaccatcgaccattgcgtagatctgaaggagctgccacctagtgtatgtgaaatcagctctctggaaagcatctccttgtcaaactgccatgacctcacagagctgccatatgagctgggcaagctgcactgcctgagcatcttgcgggtgtacgcctgcccggcactgtggaagcttccaccgtcggtatgcagcctgaagaggctgaaatacctggacatatcgcagtgcattaaccttacagaccttccagaagagcttggccacctgacaaacctagagaagatcgacatgcgggaatgctcgcggttgaggagcctccctaggtcctcctcgtcgttgaagtccctcgggcacgtcgtgtgcgacgaggaaacggcgatgctgtggagggaagccgagcaggtcatcccggacctccgtgtgcaggtagcagaagagtgttacaacctggactggcttgtagactgatgttctggatgctctctgcctccaggctcaccatgtacaaatgatgtgtatatgtttccctgcttaaatgcaggatgggtagtcaatacactgttcagttttgacg

SEQ ID NO: 16663 - protein, 858 aa, Triticum aestivum
  peptide (1)..(858): Ceres Seq. ID no. 14302892
  misc_feature (317)..(481): Pfam Name: Pfam Description:  NB-ARC domain
  misc_feature (203)..(856): NCBI GI NO: 30689664 NR Description: disease resistance protein
  misc_feature (4)..(184): NCBI GI NO: 30689664 NR Description: disease resistance protein
  misc_feature (203)..(583): NCBI GI NO: 7485661 NR Description: hypothetical protein F17M5
  misc_feature (580)..(856): NCBI GI NO: 7485661 NR Description: hypothetical protein F17M5
  misc_feature (4)..(184): NCBI GI NO: 7485661 NR Description: hypothetical protein F17M5
  misc_feature (198)..(858): NCBI GI NO: 15238281 NR Description: disease resistance protein
  misc_feature (8)..(138): NCBI GI NO: 15238281 NR Description: disease resistance protein
  misc_feature (317)..(858): NCBI GI NO: 30692890 NR Description: disease resistance protein
  misc_feature (215)..(282): NCBI GI NO: 30692890 NR Description: disease resistance protein
  misc_feature (317)..(858): NCBI GI NO: 25403197 NR Description: probable disease resistance protein
MEKFLFEELAGDAVRELLRAVQGTFLCRSTAERLRRNVEPLLPLVQQNGRHALRSNAELGELAVQLREALDLARRAAAAPRWNVYRTAQLARRMEAADKGIERWLARHAPAHVLDGVRRLRDEAEARIGRLERRVEEVAALQAAPTIPPAMSLPVALPPPPSKGMAMAVEVAPPTKAMGMPMEVAPPTKGMGIPMDFEFPCEEESKDAGLVGSGVKVGKERVKEMVMSSGGGWEVVGICGMGGSGKTTLAMEIYKDQKIQGYFNNRVFFETVSQSANLETIKMKLWEQISSNIVLGAYNQIPEWQLKLGPRDRGPVLVILDDVWSLSQLEELVFKFPGCKTLVVSRLKFPTLVSRTYEMKLLGEEEALSVFCSAAFGQESVPQTADKKLVKQVAAECRGLPLALKVIGASLRDQPPMIWLSAKNRLSRGESISDSHETKLLERMAASVECLSGKVRECFLDLGCFPEDKKIPLDVLINIWMEIHDLDKPDAFAILMELSNKNLLTLVNDAQNKAGDLYSNYHDYSVTQHDVLRDLALHMSGRDSLNKRRRLVMPRREESLPRDWQRNKDLPFEAQIVSIHTGEMKESDWFQMSFPKAEVLILNFASSVYYLPSFIATMQNLKALVLINYGTTSATLDNLSAFTTLSDLRSLWLEKITLPPLPKSTIPLKNLRKISLVLCELNNSLRGSTMDLSMTFPRLSNLTIDHCVDLKELPPSVCEISSLESISLSNCHDLTELPYELGKLHCLSILRVYACPALWKLPPSVCSLKRLKYLDISQCINLTDLPEELGHLTNLEKIDMRECSRLRSLPRSSSSLKSLGHVVCDEETAMLWREAEQVIPDLRVQVAEECYNLDWLVD

SEQ ID NO: 16664 - protein, 765 aa, Triticum aestivum
  peptide (1)..(765): Ceres Seq. ID no. 14302893
  misc_feature (224)..(388): Pfam Name: Pfam Description:  NB-ARC domain
  misc_feature (110)..(763): NCBI GI NO: 30689664 NR Description: disease resistance protein
  misc_feature (1)..(91): NCBI GI NO: 30689664 NR Description: disease resistance protein
  misc_feature (110)..(490): NCBI GI NO: 7485661 NR Description: hypothetical protein F17M5
  misc_feature (487)..(763): NCBI GI NO: 7485661 NR Description: hypothetical protein F17M5
  misc_feature (1)..(91): NCBI GI NO: 7485661 NR Description: hypothetical protein F17M5
  misc_feature (105)..(765): NCBI GI NO: 15238281 NR Description: disease resistance protein
  misc_feature (1)..(45): NCBI GI NO: 15238281 NR Description: disease resistance protein
  misc_feature (224)..(765): NCBI GI NO: 30692890 NR Description: disease resistance protein
  misc_feature (122)..(189): NCBI GI NO: 30692890 NR Description: disease resistance protein
  misc_feature (224)..(765): NCBI GI NO: 25403197 NR Description: probable disease resistance protein
MEAADKGIERWLARHAPAHVLDGVRRLRDEAEARIGRLERRVEEVAALQAAPTIPPAMSLPVALPPPPSKGMAMAVEVAPPTKAMGMPMEVAPPTKGMGIPMDFEFPCEEESKDAGLVGSGVKVGKERVKEMVMSSGGGWEVVGICGMGGSGKTTLAMEIYKDQKIQGYFNNRVFFETVSQSANLETIKMKLWEQISSNIVLGAYNQIPEWQLKLGPRDRGPVLVILDDVWSLSQLEELVFKFPGCKTLVVSRLKFPTLVSRTYEMKLLGEEEALSVFCSAAFGQESVPQTADKKLVKQVAAECRGLPLALKVIGASLRDQPPMIWLSAKNRLSRGESISDSHETKLLERMAASVECLSGKVRECFLDLGCFPEDKKIPLDVLINIWMEIHDLDKPDAFAILMELSNKNLLTLVNDAQNKAGDLYSNYHDYSVTQHDVLRDLALHMSGRDSLNKRRRLVMPRREESLPRDWQRNKDLPFEAQIVSIHTGEMKESDWFQMSFPKAEVLILNFASSVYYLPSFIATMQNLKALVLINYGTTSATLDNLSAFTTLSDLRSLWLEKITLPPLPKSTIPLKNLRKISLVLCELNNSLRGSTMDLSMTFPRLSNLTIDHCVDLKELPPSVCEISSLESISLSNCHDLTELPYELGKLHCLSILRVYACPALWKLPPSVCSLKRLKYLDISQCINLTDLPEELGHLTNLEKIDMRECSRLRSLPRSSSSLKSLGHVVCDEETAMLWREAEQVIPDLRVQVAEECYNLDWLVD

SEQ ID NO: 16665 - protein, 708 aa, Triticum aestivum
  peptide (1)..(708): Ceres Seq. ID no. 14302894
  misc_feature (167)..(331): Pfam Name: Pfam Description:  NB-ARC domain
  misc_feature (53)..(706): NCBI GI NO: 30689664 NR Description: disease resistance protein
  misc_feature (1)..(34): NCBI GI NO: 30689664 NR Description: disease resistance protein
  misc_feature (53)..(433): NCBI GI NO: 7485661 NR Description: hypothetical protein F17M5
  misc_feature (430)..(706): NCBI GI NO: 7485661 NR Description: hypothetical protein F17M5
  misc_feature (1)..(34): NCBI GI NO: 7485661 NR Description: hypothetical protein F17M5
  misc_feature (48)..(708): NCBI GI NO: 15238281 NR Description: disease resistance protein
  misc_feature (167)..(708): NCBI GI NO: 30692890 NR Description: disease resistance protein
  misc_feature (65)..(132): NCBI GI NO: 30692890 NR Description: disease resistance protein
  misc_feature (167)..(708): NCBI GI NO: 25403197 NR Description: probable disease resistance protein
  misc_feature (65)..(132): NCBI GI NO: 25403197 NR Description: probable disease resistance protein
MSLPVALPPPPSKGMAMAVEVAPPTKAMGMPMEVAPPTKGMGIPMDFEFPCEEESKDAGLVGSGVKVGKERVKEMVMSSGGGWEVVGICGMGGSGKTTLAMEIYKDQKIQGYFNNRVFFETVSQSANLETIKMKLWEQISSNIVLGAYNQIPEWQLKLGPRDRGPVLVILDDVWSLSQLEELVFKFPGCKTLVVSRLKFPTLVSRTYEMKLLGEEEALSVFCSAAFGQESVPQTADKKLVKQVAAECRGLPLALKVIGASLRDQPPMIWLSAKNRLSRGESISDSHETKLLERMAASVECLSGKVRECFLDLGCFPEDKKIPLDVLINIWMEIHDLDKPDAFAILMELSNKNLLTLVNDAQNKAGDLYSNYHDYSVTQHDVLRDLALHMSGRDSLNKRRRLVMPRREESLPRDWQRNKDLPFEAQIVSIHTGEMKESDWFQMSFPKAEVLILNFASSVYYLPSFIATMQNLKALVLINYGTTSATLDNLSAFTTLSDLRSLWLEKITLPPLPKSTIPLKNLRKISLVLCELNNSLRGSTMDLSMTFPRLSNLTIDHCVDLKELPPSVCEISSLESISLSNCHDLTELPYELGKLHCLSILRVYACPALWKLPPSVCSLKRLKYLDISQCINLTDLPEELGHLTNLEKIDMRECSRLRSLPRSSSSLKSLGHVVCDEETAMLWREAEQVIPDLRVQVAEECYNLDWLVD

SEQ ID NO: 16666 - DNA, 2283 bp, Triticum aestivum
  misc_feature (1)..(2283): Ceres Seq. ID no. 13658707
catcctaatcgaaaacmmycmtcccgttaaaacttyatyrwrttsmkcwtgctggggctgctgctgctgctgcttcttcttcttctctctccccaccgcctcccccttcctcatcctcctctctcagtccgaagccgattacttagcagcttgccttcgtcttcctctcctgcggttcctggagctacgtcttctcggcccctgccctttggttcgccgctccgctctcccccttctgccgcaaagggggacactcatggcgagtctagtaagtacgtttatcaccgcttgggttaaggaattcctgtggttttttggccgagaaggtgctcttcacggcgcttccttcccagattggttcagtttggttgttgcacggcgccgtggtgagctagggcgccccactgctattgatttccgccgcttggtgtcctccccaaattcgagatcctcctgttgagatcttgcgatccgacgcgcggtttcttgcttcttgcgaattggatttcctgattgatctggaaatctttttgaagcttcgtgttggattcatggagttgcagtgcaaactagtactgactggttcgtgttcttgtgctgctctgttttgttgcaggtagttctggcatcgctgcttaccgtaattgggctcgcgcagggggaggcgcaatgtgcgcggtacagcgggcggccgcggccacatagcgtgaccatcactgagtttggggccgtcggcgacggcctgaccgtcaatacggtgcccttccagaacgccatcttctacctgcggtcctttgccgacaagggcggcgcacagctgtacgtgcccaaggggcggtggctcaccggcagcttcaacctcaccagccacctcacccttttcctggagaaggacgctgtcatcatcggcaccgaggatgtgacacaatggccaattgtggaacctttgccatcatatggccaaggaattgatcttccgggtgcaaggcatcgcagcttaataaatgggcacaatgttaccgatgtcataattacagggaacaatggaatcgtagacggccagggtttgatatggtggaactggtttcgctcgaataaattgaattatagccggcctcatcttgtggagtttgagtattcggaagaaattgtgatttcgaacttgacattcttagattccccagcatggggtatacatcctgtgtattgcagcaatgtaacaatcagtaatgtcacaatcgagactgaattggatgctccactcaccaatggaattgtcccagattcatgctcgaatctgtgcattgaggacagcataattagtgtcggtcatgatgccatctcattaaaaagtgggtgggacaactatggcattacatttggaaggccaacctcagacattcacattagtagagtggatctgcaagcctcactgggagctgctcttgcatttggcagtgagatgtctggtgggatctcggatgttcatgttgatcacctttatattcatggttcatccaaaggtatctccttcaggacagcaccaggccgtggtggttatataagggatgcgatagtatcaaatgtccagatggaagatgtccatgttgcaatcgagttcaccggcgattggtcaagccatcctgatgaacattttgatttgtctgcactcccggagatcagtggaatcaccttaaaagacatggttggaataaacatttcgtttgcaggagttttgtcgggaatcgatggcgatcctttcaccaatatctgcctctccaatatcaatttcaccatagctgattcagcgcattctgcctcttggtcttgctccaacgtttctggatactccgagtcggtatttcccgaggcttgttctgacctccacagtcaatcatcaaattcctccatctgctcatccacccttaggtaccatgccctcgcgacagcgtaaatgcatatagcacccaatattcatcctttcatgtttctgtccatgtacaatctggagacatcaagctgtagcttcatcaccatctttccccccaaaaaattctcttccgttataggtgcatcaaagaatcatcgggcttcgtacagtcagctttgaggctcataatacaaaaatttggctggcgtccttgatgagtccagagaggtgtttccttgtacagttacatttgttcattcaatctgtaagaaattttgtccggtaggttgtctgagtccaaagagttggtttatattgttgtttattttattgccatatataaaataaacatt

SEQ ID NO: 16667 - protein, 163 aa, Triticum aestivum
  peptide (1)..(163): Ceres Seq. ID no. 15219913
  misc_feature (1)..(138): Pfam Name: Pfam Description:  Glycosyl hydrolases family 28
  misc_feature (1)..(161): NCBI GI NO: 40714685 NR Description: putative polygalacturonase
  misc_feature (1)..(163): NCBI GI NO: 7939578 NR Description: polygalacturonase-like protein
  misc_feature (1)..(163): NCBI GI NO: 15228881 NR Description: polygalacturonase, putative [Arabidopsis thaliana]
  misc_feature (1)..(163): NCBI GI NO: 21553827 NR Description: polygalacturonase, putative [Arabidopsis thaliana]
  misc_feature (1)..(146): NCBI GI NO: 22327662 NR Description: expressed protein [Arabidopsis thaliana]
  misc_feature (1)..(141): NCBI GI NO: 18412253 NR Description: polygalacturonase, putative [Arabidopsis thaliana]
  misc_feature (1)..(141): NCBI GI NO: 30679999 NR Description: polygalacturonase, putative [Arabidopsis thaliana]
  misc_feature (1)..(141): NCBI GI NO: 11263971 NR Description: hypothetical protein T17J13
  misc_feature (1)..(163): NCBI GI NO: 34393209 NR Description: putative polygalacturonase
  misc_feature (1)..(141): NCBI GI NO: 21593399 NR Description: polygalacturonase-like protein
MSGGISDVHVDHLYIHGSSKGISFRTAPGRGGYIRDAIVSNVQMEDVHVAIEFTGDWSSHPDEHFDLSALPEISGITLKDMVGINISFAGVLSGIDGDPFTNICLSNINFTIADSAHSASWSCSNVSGYSESVFPEACSDLHSQSSNSSICSSTLRYHALATA

SEQ ID NO: 16668 - protein, 152 aa, Triticum aestivum
  peptide (1)..(152): Ceres Seq. ID no. 15219914
  misc_feature (6)..(6): Xaa is any aa, unknown or other
  misc_feature (7)..(7): Xaa is any aa, unknown or other
  misc_feature (12)..(12): Xaa is any aa, unknown or other
  misc_feature (13)..(13): Xaa is any aa, unknown or other
  misc_feature (14)..(14): Xaa is any aa, unknown or other
  misc_feature (15)..(15): Xaa is any aa, unknown or other
  misc_feature (16)..(16): Xaa is any aa, unknown or other
ILIENXXPVKTXXXXXCWGCCCCCFFFFSLPTASPFLILLSQSEADYLAACLRLPLLRFLELRLLGPCPLVRRSALPLLPQRGTLMASLVSTFITAWVKEFLWFFGREGALHGASFPDWFSLVVARRRGELGRPTAIDFRRLVSSPNSRSSC

SEQ ID NO: 16669 - protein, 120 aa, Triticum aestivum
  peptide (1)..(120): Ceres Seq. ID no. 15219915
  misc_feature (1)..(95): Pfam Name: Pfam Description:  Glycosyl hydrolases family 28
  misc_feature (1)..(118): NCBI GI NO: 40714685 NR Description: putative polygalacturonase
  misc_feature (1)..(120): NCBI GI NO: 7939578 NR Description: polygalacturonase-like protein
  misc_feature (1)..(120): NCBI GI NO: 15228881 NR Description: polygalacturonase, putative [Arabidopsis thaliana]
  misc_feature (1)..(120): NCBI GI NO: 21553827 NR Description: polygalacturonase, putative [Arabidopsis thaliana]
  misc_feature (1)..(103): NCBI GI NO: 22327662 NR Description: expressed protein [Arabidopsis thaliana]
  misc_feature (1)..(98): NCBI GI NO: 18412253 NR Description: polygalacturonase, putative [Arabidopsis thaliana]
  misc_feature (1)..(98): NCBI GI NO: 30679999 NR Description: polygalacturonase, putative [Arabidopsis thaliana]
  misc_feature (1)..(98): NCBI GI NO: 11263971 NR Description: hypothetical protein T17J13
  misc_feature (1)..(120): NCBI GI NO: 34393209 NR Description: putative polygalacturonase
  misc_feature (1)..(98): NCBI GI NO: 21593399 NR Description: polygalacturonase-like protein
MEDVHVAIEFTGDWSSHPDEHFDLSALPEISGITLKDMVGINISFAGVLSGIDGDPFTNICLSNINFTIADSAHSASWSCSNVSGYSESVFPEACSDLHSQSSNSSICSSTLRYHALATA

SEQ ID NO: 16670 - DNA, 2306 bp, Triticum aestivum
  misc_feature (1)..(2306): Ceres Seq. ID no. 13590691
actccaaacccaaaccaactcaacgcgcacacgcgcccccgagacgccaccagaccgccaccatccgcagctcaggcccgaccgacgcggctcggctcagcagtcggcgtcgtctcctctcccccgctcccccgctcccccctccaccgcctcgatcccgcccgcccgcggccgcgcgatcggatccggccagatcccgcgccggcggccatggagaacctgatctcgctcgtcaacaagctgcagcgcgcctgcacggcgctcggcgaccacggcgaggagagcgccctccccaccctctgggactcgctgccgtccatcgccgtcgtcggcggccagagttcgggcaaatcttcggtgctggagagcgttgttggaaaggatttcctgcccaggggctcaggcattgtcacccgtcgcccgctggttctgcaactccataggattgatggagacagggagtatgcagagttcatgcatgtccccaggaagagattcaccgattttgccatggtgaggaaggagatagctgacgaaactgacagacaaactggccatggaaagggaatatcatctgttcccatccatctaagcatattttctccaaacgttgtgaatttgactcttattgatcttcctgggcttactaaagttgctgttgagggtcagccggagagtatcgttcaggaaattgaaaacatggttcgagcattcattgaaaagcccaactgcatcattctggctgtttctccagccaatcaggatcttgcaacttctgatgctatcaagatttcacgggaagttgacccaaaaggtgaacggacctttggtgtgctcacgaaaattgatttaatggacaagggtactgatgctgttgatatactggaaggaagagcttacaggctccaatttccatggattggtgttgtcaatcgatcccagcaagatatcaacaagagtgtggacatgattgctgctaggcgtagagagcgtgactatttcgcaaacacaccagaatacaagcatctcgctcataggatgggatcagaacatttagcaaagagtctatcaaagcatttggagtctgttattaaatcaagaatcccgggtctccagtctcttataacgaagacagttgcagagctggaaactgaacttactcgtcttggaaagcccattgctaatgatgctggaggaaagctgtacacgattatggaaatatgccgcatgtttgatggcatctacaaagagcatctggatggagtgcgccctggtggtgagaaaatttaccatgtctttgacaatcagtttcctgtggcaattaaacggttgcagtttgataagcaactgtcaatggaaaatgtgaggaagctcataacggaagctgatggataccagcctcacttgatagctccagagcaaggatatcggcgcctcatagaatcttgtcttgttagtatcagaggtcctgccgaggcagctgttgacacggtccatggaatcctaaaggaactagtccacaaggctataaatgaaactcatgagctcaagcagttccccactcttcgtgtggaagttggcaatgcagcttttgagtcgttggaaagaatgagggacgaaagcaagaagaacacattaaagctagttgatatggaaacaagctacttaactgtagattttttcaggaagcttcctcaggatgttgagaagggtggaaatccaagccactctatttttgatagatataatgattcttatctaagacgaattgggacaactgttctggcatatgttaacatggtatcttcaacattgaggaactccatcccaaaatctattgtgtactgccaagtccgtgaggcaaagcgctcattgctcgaccacttctttactgagctgggagcaagagagattaggcaactttcgaagctccttgacgaggaccccgcggtcatggagcggaggacaaacctcgccaagaggctggagctataccggagcgcccaagcagagatcgacgcagttgcatggtcaaaataattttttgtcgacttatcgttccgtagtgtgtgttcacctttactccttgtttggtgacatgtctccccttattctgagggtcatatatagctgattctttcttcccgttctaggtcatattatattcttattagatgacagcagctgtgaggtgtgtcatgtgtttgtgcttttgctccttgtgcttgaggatctctctctaggggggacacctttctgctgtaccttgtctgtatcacgtacgagttcatgttattatgatttcc

SEQ ID NO: 16671 - protein, 679 aa, Triticum aestivum
  peptide (1)..(679): Ceres Seq. ID no. 15220998
  misc_feature (291)..(577): Pfam Name: Pfam Description:  Dynamin central region
  misc_feature (71)..(679): NCBI GI NO: 2129826 NR Description: phragmoplastin 5 - soybean
  misc_feature (71)..(679): NCBI GI NO: 2129825 NR Description: phragmoplastin 12 - soybean
  misc_feature (71)..(679): NCBI GI NO: 5931765 NR Description: phragmoplastin [Nicotiana tabacum]
  misc_feature (71)..(679): NCBI GI NO: 30693985 NR Description: dynamin-related protein (pir||S59558)
  misc_feature (71)..(679): NCBI GI NO: 20453081 NR Description: AT5g42080/MJC20_19 [Arabidopsis thaliana]
  misc_feature (71)..(679): NCBI GI NO: 30695480 NR Description: dynamin-related protein [Arabidopsis thaliana]
  misc_feature (189)..(679): NCBI GI NO: 34911188 NR Description: putative dynamin-like protein
  misc_feature (71)..(221): NCBI GI NO: 34911188 NR Description: putative dynamin-like protein
  misc_feature (172)..(679): NCBI GI NO: 11357274 NR Description: dynamin-like protein - Arabidopsis thaliana
  misc_feature (71)..(175): NCBI GI NO: 11357274 NR Description: dynamin-like protein - Arabidopsis thaliana
TPNPNQLNAHTRPRDATRPPPSAAQARPTRLGSAVGVVSSPPLPRSPLHRLDPARPRPRDRIRPDPAPAAMENLISLVNKLQRACTALGDHGEESALPTLWDSLPSIAVVGGQSSGKSSVLESVVGKDFLPRGSGIVTRRPLVLQLHRIDGDREYAEFMHVPRKRFTDFAMVRKEIADETDRQTGHGKGISSVPIHLSIFSPNVVNLTLIDLPGLTKVAVEGQPESIVQEIENMVRAFIEKPNCIILAVSPANQDLATSDAIKISREVDPKGERTFGVLTKIDLMDKGTDAVDILEGRAYRLQFPWIGVVNRSQQDINKSVDMIAARRRERDYFANTPEYKHLAHRMGSEHLAKSLSKHLESVIKSRIPGLQSLITKTVAELETELTRLGKPIANDAGGKLYTIMEICRMFDGIYKEHLDGVRPGGEKIYHVFDNQFPVAIKRLQFDKQLSMENVRKLITEADGYQPHLIAPEQGYRRLIESCLVSIRGPAEAAVDTVHGILKELVHKAINETHELKQFPTLRVEVGNAAFESLERMRDESKKNTLKLVDMETSYLTVDFFRKLPQDVEKGGNPSHSIFDRYNDSYLRRIGTTVLAYVNMVSSTLRNSIPKSIVYCQVREAKRSLLDHFFTELGAREIRQLSKLLDEDPAVMERRTNLAKRLELYRSAQAEIDAVAWSK

SEQ ID NO: 16672 - protein, 609 aa, Triticum aestivum
  peptide (1)..(609): Ceres Seq. ID no. 15220999
  misc_feature (221)..(507): Pfam Name: Pfam Description:  Dynamin central region
  misc_feature (1)..(609): NCBI GI NO: 2129826 NR Description: phragmoplastin 5 - soybean
  misc_feature (1)..(609): NCBI GI NO: 2129825 NR Description: phragmoplastin 12 - soybean
  misc_feature (1)..(609): NCBI GI NO: 5931765 NR Description: phragmoplastin [Nicotiana tabacum]
  misc_feature (1)..(609): NCBI GI NO: 30693985 NR Description: dynamin-related protein (pir||S59558)
  misc_feature (1)..(609): NCBI GI NO: 20453081 NR Description: AT5g42080/MJC20_19 [Arabidopsis thaliana]
  misc_feature (1)..(609): NCBI GI NO: 30695480 NR Description: dynamin-related protein [Arabidopsis thaliana]
  misc_feature (119)..(609): NCBI GI NO: 34911188 NR Description: putative dynamin-like protein
  misc_feature (1)..(151): NCBI GI NO: 34911188 NR Description: putative dynamin-like protein
  misc_feature (102)..(609): NCBI GI NO: 11357274 NR Description: dynamin-like protein - Arabidopsis thaliana
  misc_feature (1)..(105): NCBI GI NO: 11357274 NR Description: dynamin-like protein - Arabidopsis thaliana
MENLISLVNKLQRACTALGDHGEESALPTLWDSLPSIAVVGGQSSGKSSVLESVVGKDFLPRGSGIVTRRPLVLQLHRIDGDREYAEFMHVPRKRFTDFAMVRKEIADETDRQTGHGKGISSVPIHLSIFSPNVVNLTLIDLPGLTKVAVEGQPESIVQEIENMVRAFIEKPNCIILAVSPANQDLATSDAIKISREVDPKGERTFGVLTKIDLMDKGTDAVDILEGRAYRLQFPWIGVVNRSQQDINKSVDMIAARRRERDYFANTPEYKHLAHRMGSEHLAKSLSKHLESVIKSRIPGLQSLITKTVAELETELTRLGKPIANDAGGKLYTIMEICRMFDGIYKEHLDGVRPGGEKIYHVFDNQFPVAIKRLQFDKQLSMENVRKLITEADGYQPHLIAPEQGYRRLIESCLVSIRGPAEAAVDTVHGILKELVHKAINETHELKQFPTLRVEVGNAAFESLERMRDESKKNTLKLVDMETSYLTVDFFRKLPQDVEKGGNPSHSIFDRYNDSYLRRIGTTVLAYVNMVSSTLRNSIPKSIVYCQVREAKRSLLDHFFTELGAREIRQLSKLLDEDPAVMERRTNLAKRLELYRSAQAEIDAVAWSK

SEQ ID NO: 16673 - protein, 521 aa, Triticum aestivum
  peptide (1)..(521): Ceres Seq. ID no. 15221000
  misc_feature (133)..(419): Pfam Name: Pfam Description:  Dynamin central region
  misc_feature (1)..(521): NCBI GI NO: 2129826 NR Description: phragmoplastin 5 - soybean
  misc_feature (1)..(521): NCBI GI NO: 2129825 NR Description: phragmoplastin 12 - soybean
  misc_feature (1)..(521): NCBI GI NO: 5931765 NR Description: phragmoplastin [Nicotiana tabacum]
  misc_feature (1)..(521): NCBI GI NO: 30693985 NR Description: dynamin-related protein (pir||S59558)
  misc_feature (1)..(521): NCBI GI NO: 20453081 NR Description: AT5g42080/MJC20_19 [Arabidopsis thaliana]
  misc_feature (1)..(521): NCBI GI NO: 30695480 NR Description: dynamin-related protein [Arabidopsis thaliana]
  misc_feature (31)..(521): NCBI GI NO: 34911188 NR Description: putative dynamin-like protein
  misc_feature (1)..(63): NCBI GI NO: 34911188 NR Description: putative dynamin-like protein
  misc_feature (14)..(521): NCBI GI NO: 11357274 NR Description: dynamin-like protein - Arabidopsis thaliana
  misc_feature (1)..(17): NCBI GI NO: 11357274 NR Description: dynamin-like protein - Arabidopsis thaliana
MHVPRKRFTDFAMVRKEIADETDRQTGHGKGISSVPIHLSIFSPNVVNLTLIDLPGLTKVAVEGQPESIVQEIENMVRAFIEKPNCIILAVSPANQDLATSDAIKISREVDPKGERTFGVLTKIDLMDKGTDAVDILEGRAYRLQFPWIGVVNRSQQDINKSVDMIAARRRERDYFANTPEYKHLAHRMGSEHLAKSLSKHLESVIKSRIPGLQSLITKTVAELETELTRLGKPIANDAGGKLYTIMEICRMFDGIYKEHLDGVRPGGEKIYHVFDNQFPVAIKRLQFDKQLSMENVRKLITEADGYQPHLIAPEQGYRRLIESCLVSIRGPAEAAVDTVHGILKELVHKAINETHELKQFPTLRVEVGNAAFESLERMRDESKKNTLKLVDMETSYLTVDFFRKLPQDVEKGGNPSHSIFDRYNDSYLRRIGTTVLAYVNMVSSTLRNSIPKSIVYCQVREAKRSLLDHFFTELGAREIRQLSKLLDEDPAVMERRTNLAKRLELYRSAQAEIDAVAWSK

SEQ ID NO: 16674 - DNA, 1564 bp, Triticum aestivum
  misc_feature (1)..(1564): Ceres Seq. ID no. 13658911
gtcagcaaaccttctccccacccccacccccccgccccgccgcgggagcgctccgcggccgccatggcgtctcctccgggcccggggtctgccaaccgcgcgctctcctcctcatcgagggggccgctctcgcccttccccggcggcgcgggcccgttcctccggcatcaacatcctcccggcggcgactccgacggcggcgcctcgttcgacgaagatgacgacgacgatgacgaggaggaggaggatggggaggatcaggacgccgagctggcggcccgcagctcgcagcagcgacgcgccgcctctccaggtgatcactgacgctgttgcttgctggttcacgcagcaagaatcgggcggcctgtggtgaatggggagaatggagggagtcaaatccaggaagggcagcaatggcagctgtacagctgtggaaccgagcagcatgaccgcgcttcgtctagaggggacgaagaacctggttctgttcccagggagatgagggtggaggatggatatggggttattgggagaagagagggaggccctgcatctagctactgggacctgctcagagcgcacctttcggacccgttgacaggtattctcatggacgacgcaatgattctttcatgtggccattcttatggaagtagtgggatgcagcatatctacagaatgaaagcttgtggtaaatgtggtcagccaatcaccgagaactccattcgaccaaacctggctcttggccttgcagtccaggcatttagacgagaggaagagtcggcaaaaacgttgaaaagaaaaagagaccgcctggaacaggtatacacttttttccgggtctatgttactgaatgcccgaacatggacagttgaacatgttacacgatgttcttaaatctgttctctctgtaaaatgaggacaaatgtggcaacgatgacccgggtccagctgaggtttcaagaggcaaaggtgtccagtatcctttcgctgtcttcgaccgggtgataatcaagggaaacaagaggaccccggagcggttcgtggggcgcgtcgcggtggtgacggctcagtgcttgaatggatggtacgtggtgaagaccctggacaacgcggagagcgtgaagctgcagtaccgttcgctggcgaagttcgtcgacggcggcggcggcgagcctcctgccgtggcctccaacagttcccagaacacaagctggttgtgacttggaaggtacaaaagcagatcatgctgagcacaagcacagaatcagatctccaggcccccatcttttgctgtttccaggaggaggcaaacagtagagtgaggaacattatccttttttggtagccaatcacagtgtcaatctttatggtgctcctctttcctttcctttttctttttgtggcagcaactaggtaccatgtggtgtcagtcagtgtccttgtgatgtgaggctttgtagaatgctaccattccagtacacccttatccaggctgctgtgataaatcaggaagcaatcatggtgccaccaaagggcaaccaccaacacaaaagtttggtg

SEQ ID NO: 16675 - protein, 125 aa, Triticum aestivum
  peptide (1)..(125): Ceres Seq. ID no. 13658912
  misc_feature (1)..(108): NCBI GI NO: 28876015 NR Description: hypothetical protein
  misc_feature (20)..(121): NCBI GI NO: 30688352 NR Description: expressed protein [Arabidopsis thaliana]
  misc_feature (20)..(121): NCBI GI NO: 27413505 NR Description: hypothetical protein [Arabidopsis thaliana]
  misc_feature (20)..(121): NCBI GI NO: 30688358 NR Description: expressed protein [Arabidopsis thaliana]
  misc_feature (25)..(109): NCBI GI NO: 30685540 NR Description: expressed protein [Arabidopsis thaliana]
  misc_feature (33)..(109): NCBI GI NO: 11994201 NR Description: gb|AAF35943
  misc_feature (25)..(109): NCBI GI NO: 20453175 NR Description: At3g19895 [Arabidopsis thaliana]
MRVEDGYGVIGRREGGPASSYWDLLRAHLSDPLTGILMDDAMILSCGHSYGSSGMQHIYRMKACGKCGQPITENSIRPNLALGLAVQAFRREEESAKTLKRKRDRLEQVYTFFRVYVTECPNMDS

SEQ ID NO: 16676 - protein, 123 aa, Triticum aestivum
  peptide (1)..(123): Ceres Seq. ID no. 13658913
SANLLPTPTPPPRRGSAPRPPWRLLRARGLPTARSPPHRGGRSRPSPAARARSSGINILPAATPTAAPRSTKMTTTMTRRRRMGRIRTPSWRPAARSSDAPPLQVITDAVACWFTQQESGGLW

SEQ ID NO: 16677 - protein, 107 aa, Triticum aestivum
  peptide (1)..(107): Ceres Seq. ID no. 13658914
  misc_feature (22)..(107): NCBI GI NO: 28876015 NR Description: hypothetical protein
VSKPSPHPHPPAPPRERSAAAMASPPGPGSANRALSSSSRGPLSPFPGGAGPFLRHQHPPGGDSDGGASFDEDDDDDDEEEEDGEDQDAELAARSSQQRRAASPGDH

SEQ ID NO: 16678 - DNA, 1849 bp, Triticum aestivum
  misc_feature (1)..(1849): Ceres Seq. ID no. 13502874
caaaacataacctcggtaattttgatccggagaaatgaagttgttaaaatacatatgtctgataacttcttcataaatagcattgtatttttatgcaccacagacctaggtggccgacggggtggtctggccgtccggcacacgcctaaacgggtctggcctcacacaaacgcaaaccgcaaagttttatttataagcaggcccttctgagcttgcacgtggacctcacctggtggcactgctactgctgcctcctgcacttggggacaaggcgcagcggagccagcggcggcgtgatcagtcccggcgcctcgttcatgtctagacgtgcctcggcggggatttccccagtcgaagtggcgcacaaggctgcagagcgcgatctccagcaccggcatcgcgaagctgatgccggggcagagccgccggccggcgccgaacgggaggagctggtagtcgttcccccgcaggtccacgccctgcgcgctgccgccgcccaggaatcgctccggccagaactcctccgccgttgctccccacgccgccgggtccctcccgatcgcccacgcgttgacgaagagcgcagtctcagctgggatctcgtagccctgcacgaccgccgcggtcgtcgactggtgcgggatgaggagcggtgccgccgggtggagccggagcacctccttcagcaccgccctgaggtactccatcctgctcaggtcgtcttcctcgatggtcggtttgccttcggtgactcgatctatctcgtcctgcagcttggctattgcccgcgggttcccgacgagctccgccatggcccattccaacgtgaccgatgctgtgtctgtcccgccggctatcatgtccttgatgaggcttttgatgcgatcgttggtgagctcgagtccggcggcgccttcttccctaagccgcagcaggacgtcgaggaagctctcctcccctgcgccgttgtctggcttcttctcaaggtgctctgcgattatctctgataggaacttgtcccactgttcgagctcggcgtcgagcctcttctcgagacccgtcgcccacctaaccaccttcgccgccgcgtcggggagcacgtcacccgcctggagccccgacatgatcgctgcggagttacccaaaagcttttttagcttctcggccgtggcacctgcggcgccggtggtcgcgcgggtgaccaccgcgttgctgtaggcggacaggagctccctcagctccacaatctcacccgcctccgcggcgcggcgcaccccggcgacgagggcggccgcctcggcggcccgcacgggggcgaacgagtcggcacggcgcggggagaggaggtggacgacggccatcttcttgctgcggcgccaggcgtcgccgtagggtgcgaaggagacgttggtggagccgtacgtcagcttgtcggccggcgcgctgggcacgcgggaggcgaaggcgaggtcgtggttcttgtacaggcccgccgccgcggccgccgtggaaaccaccagcgtccgcctgcgcccgagctgcaacagcaggaggccgccatcggtgccgtaccgagcgtgcagctcgcgcaaggagcggtgcgggtggcggccaaggaggtggaggtggccgagcagcggacgcgacggcggcgagggcgggagcttgccacttctgctgcctcgagccttccaaacgacgtagcagaaggtcaagagcaccgcgacgaggacggcgtacggagacatcctccttccgccggaaatgtgttgtccgattcaacggaaaaatgtgttgcctggaactggaaacatatcgtgcggcgttgtgtgcgggtatgcggcgttgt

SEQ ID NO: 16679 - protein, 229 aa, Triticum aestivum
  peptide (1)..(229): Ceres Seq. ID no. 13502875
MSRRASAGISPVEVAHKAAERDLQHRHREADAGAEPPAGAEREELVVVPPQVHALRAAAAQESLRPELLRRCSPRRRVPPDRPRVDEERSLSWDLVALHDRRGRRLVRDEERCRRVEPEHLLQHRPEVLHPAQVVFLDGRFAFGDSIYLVLQLGYCPRVPDELRHGPFQRDRCCVCPAGYHVLDEAFDAIVGELESGGAFFPKPQQDVEEALLPCAVVWLLLKVLCDYL

SEQ ID NO: 16680 - protein, 191 aa, Triticum aestivum
  peptide (1)..(191): Ceres Seq. ID no. 13502876
  misc_feature (1)..(191): NCBI GI NO: 13592175 NR Description: ppg3 [Leishmania major]
  misc_feature (1)..(191): NCBI GI NO: 15901602 NR Description: cell wall surface anchor family protein
  misc_feature (1)..(191): NCBI GI NO: 15901602 NR Description: cell wall surface anchor family protein
  misc_feature (1)..(191): NCBI GI NO: 15901602 NR Description: cell wall surface anchor family protein
  misc_feature (1)..(191): NCBI GI NO: 15901602 NR Description: cell wall surface anchor family protein
  misc_feature (1)..(191): NCBI GI NO: 13592175 NR Description: ppg3 [Leishmania major]
  misc_feature (1)..(191): NCBI GI NO: 15901602 NR Description: cell wall surface anchor family protein
  misc_feature (1)..(191): NCBI GI NO: 15901602 NR Description: cell wall surface anchor family protein
  misc_feature (1)..(191): NCBI GI NO: 15901602 NR Description: cell wall surface anchor family protein
  misc_feature (1)..(191): NCBI GI NO: 15901602 NR Description: cell wall surface anchor family protein
MRSGAAGWSRSTSFSTALRYSILLRSSSSMVGLPSVTRSISSCSLAIARGFPTSSAMAHSNVTDAVSVPPAIMSLMRLLMRSLVSSSPAAPSSLSRSRTSRKLSSPAPLSGFFSRCSAIISDRNLSHCSSSASSLFSRPVAHLTTFAAASGSTSPAWSPDMIAAELPKSFFSFSAVAPAAPVVARVTTALL

SEQ ID NO: 16681 - protein, 162 aa, Triticum aestivum
  peptide (1)..(162): Ceres Seq. ID no. 13502877
  misc_feature (1)..(162): NCBI GI NO: 13592175 NR Description: ppg3 [Leishmania major]
  misc_feature (1)..(162): NCBI GI NO: 15901602 NR Description: cell wall surface anchor family protein
  misc_feature (1)..(162): NCBI GI NO: 15901602 NR Description: cell wall surface anchor family protein
  misc_feature (1)..(162): NCBI GI NO: 15901602 NR Description: cell wall surface anchor family protein
  misc_feature (1)..(162): NCBI GI NO: 15901602 NR Description: cell wall surface anchor family protein
  misc_feature (1)..(162): NCBI GI NO: 13592175 NR Description: ppg3 [Leishmania major]
  misc_feature (1)..(162): NCBI GI NO: 15901602 NR Description: cell wall surface anchor family protein
  misc_feature (1)..(162): NCBI GI NO: 15901602 NR Description: cell wall surface anchor family protein
  misc_feature (1)..(162): NCBI GI NO: 15901602 NR Description: cell wall surface anchor family protein
  misc_feature (1)..(162): NCBI GI NO: 15901602 NR Description: cell wall surface anchor family protein
MVGLPSVTRSISSCSLAIARGFPTSSAMAHSNVTDAVSVPPAIMSLMRLLMRSLVSSSPAAPSSLSRSRTSRKLSSPAPLSGFFSRCSAIISDRNLSHCSSSASSLFSRPVAHLTTFAAASGSTSPAWSPDMIAAELPKSFFSFSAVAPAAPVVARVTTALL

SEQ ID NO: 16682 - DNA, 1662 bp, Triticum aestivum
  misc_feature (1)..(1662): Ceres Seq. ID no. 13658411
ttttagagttcaggattgaaacataaacttttgaaggctggaccatatacaaactcactgaaaaagagacccctcgcgtcgctcccgcgagcgaccgaggggataaccctagccgccggcgcgcgtccctcctcccccctcccccccctcgccgccgcctgtccgcgccgccgggcaaagcccggtgggtgctggcggcggcggggccctttctctccccgctcgtggaggctggcgcgggcgggctctcccgggcgacggcgcggcgcggatccggggcgcggcggcgcatggctgcgctcggcgtcggtgtgcggcacggcaggcctggcgcggagggctggacgcgggtgggtgacgcgcttgtgcccgagacggcggtggcttcggcgcggtcagatctggctcaagacggcgcgggctgcgggcggcgcgggctgcaggtggccacctctctgtcgtggtcgcggcaggtggtggtgacttcgcggcagttggtggtggtggtgcgggccggaggttggggacgacggccgcggcggctctttcggatccgacctcccggctgcgtgggccgagaaggcttgggctgtgggcagcggccctgaccgaggccccctcggctggtcggggtggcggcgcactggcggtggctgcgggggttcgttcccggcggctgctgtggtggtggcaggttgattgcggcggcggccagattttcctggcgtcggcccgtctgtaggctgcctgtatcggccctcgacccctttcctcggcgtccgttcgcttctctcccggagggctggccttctcccggctgcggtccatcatccgtcttgcacccggtgccataggaccgagctggtctcgcgcccggcagcaggaccggctcgtctcgcgcccggcagcaggactgcgctcgtctcgcgcccggcagcaggaccggcccgtctcgtgcccggcggcaggactgtgctcgtctcgcgcccgatgtagcaggacggctcgatggaggcttgttgtggccagcctattgggtctcggcgttgggaccggccaggggtgtgaaaggcggatcctttccgcccgtctctacggtgggggtagcggtggggctcgggggacttggtgtcagggtcttggattccggggcggcggccttggtggtggtggcgcggtgctcatgggcagagctcgtgccttggtgctgcccggctaccacggccgtgtgggcggcgtggtagccggggtgtggcgttcggtggcggtgaaggttggccggggtgaaaacctactctatcttcggacggactggcgacggcgaagatcgctcccttcttgaaggcgtcgtcgcggctatcactgcccgtcgtggtgctccaggggaaactctgatcctcggatcgggcggtggcgactctccagtgccgtatccttcctgaaggcaccgccttggagcccacgattcgtcatatgcggccttacttcttcggatgaagccctcggcggctcttgtagtgctagggtgtgtgttgctgcgctcagcgcctatgtatcatgccttgggtgcgtgtgtgtgtgtttgtggtgggtgtgtgcggttgtaccgggcgttgtggatctttgctttatatataaagcggggcgaaagcctttttcggt

SEQ ID NO: 16683 - protein, 105 aa, Triticum aestivum
  peptide (1)..(105): Ceres Seq. ID no. 15220635
MAALGVGVRHGRPGAEGWTRVGDALVPETAVASARSDLAQDGAGCGRRGLQVATSLSWSRQVVVTSRQLVVVVRAGGWGRRPRRLFRIRPPGCVGREGLGCGQRP

SEQ ID NO: 16684 - protein, 56 aa, Triticum aestivum
  peptide (1)..(56): Ceres Seq. ID no. 15220636
MKPSAALVVLGCVLLRSAPMYHALGACVCVCGGCVRLYRALWIFALYIKRGESLFR

SEQ ID NO: 16685 - protein, 52 aa, Triticum aestivum
  peptide (1)..(52): Ceres Seq. ID no. 15220637
  misc_feature (1)..(34): NCBI GI NO: 9625624 NR Description: nuclear antigen EBNA1 [Human herpesvirus 4]
  misc_feature (1)..(22): NCBI GI NO: 34898126 NR Description: putative glycine-rich cell wall protein precursor
  misc_feature (1)..(34): NCBI GI NO: 30679122 NR Description: expressed protein [Arabidopsis thaliana]
MGRARALVLPGYHGRVGGVVAGVWRSVAVKVGRGENLLYLRTDWRRRRSLPS

SEQ ID NO: 16686 - DNA, 2214 bp, Triticum aestivum
  misc_feature (1)..(2214): Ceres Seq. ID no. 13658720
acagacccgagtctccacccatcccggccactctcgtacggacccgaccgtctacgccggcgtcgccgccgccggagctccagtccgccgcccgctaactcagcgcaaactccagtatcattacaaacccgagatagcaggcgccaaccaccacctcgcatcccgtgccccctccccctcgcggaatccccccgccccccgtcgcctgtgctagggttgcagccgtattcctccggcttttgtttcccgggacacagggaagatgtcgtcgacgcagaagaagaagagcaactataaggagaagatggcgcggcggaaggaggagaacaaaaaagaagaaccagagacaccaaggtaccgagatcgtgcaaaggagcgtcgtgaagatcaaaaccctgactatgaacctacagagcttggttcgtttcatgccgtggcacctcctggagcagatttgaggctagaagatgcccaaaagatttcaattgagaaaagcaaataccttggaggcgatctggagcatactcatttggtcaaagggttggattttgctctacttaacaaagtacggagtgaaattgacaagaagcctgatgcagaggatgggaaggatgccaaggcgagggaaacaaaagaagaccgggcggtctcattccgcactgcaattgcaaagtctgtctaccagtggactgtaaagcaacaacaaagcatgataaaggcgaatgacatgtttcttcctggccggatggcatttatttacaatatggaggatggacttaacagtgatattccaacaactcttcacaggagcaaagctgattgccctgtcccagaggaaatggtcactgtcagcgtagatggctctgtacttgacaggattgccaaaatcatgtcataccttagacttggatcatcagggaaggtattgaagaagaagaaaaaggaaagggatacaaaagggaagagtaatttggcaggcggtgtctacaatgaggtagtaagacctgcccaaagtgatggttctgttcagaaacaccagtcagaaaaggatatgccaccaccacccccacccccacgaaagagtaacttcagtgaaaaggagaaacattctgtccctgttgctagagcagatgacgatgacatattcattggagatggagttgactatactgttcctaacaaggaaatgagccagagccccatctccgaagatatggatgaatccccacgtatccatcagaatcagtccaatttgaatgaacctgtgtatggtcctattcaaccatccgaacctgctcaagcttggcaacagccaatggatggttatgatgctatgcaagcccaaatggcagctgctggataccaaggcgagtggtcaggctatcagtatgcggaacagcagctggcttatccagaacagtacatgcaacagggtactgtgggatacgatgtgttagttgacccaaatatatctcaggatccaaggttgatgactcaagcagacaaggataagggtctaggttctgtcttcaagcgtgatgatgacaggcttaagcagctgagggaaaaagatgcgcgggagaaagacccaaattttatttcagatagttactctgagtgttatcctggttaccagggttataatcaagagattgcagggagtgacgatgaagatgatttgtcaaagatggatatgggtggacgggcgaagggccgtcttcaccgctgggactttgagacggaagaagagtgggcgaaatacaacgatcagaaggaagccatgccaaaggcggcattccagtttggtgtgaagatgcaggatggcaggaagaccaggaagcagaacaaggatcagaagctcagcaacgacctcaacaagatcaacaagatcctggcgaggaagaagggcgataaagatggaggcgaagggcattatgatgacgatctacccagcgggaagaaacagcgagcttgatctaactggtcatccattttttttccgtctgtcttgttggaactgtgaaacggccatgcttttgtgagctgaaaccattaggtccgtagcctgtagtttcatttttgatggacattagtcttgcatggtattcgttgtagaatatgtaacccagatggtyccmcctactcaggtcaggcaaaagtaccacacatgacatgagawgyyaarccmtgtwaaattgtgggrgrcgrttytgk

SEQ ID NO: 16687 - protein, 570 aa, Triticum aestivum
  peptide (1)..(570): Ceres Seq. ID no. 15220656
  misc_feature (8)..(555): NCBI GI NO: 15225312 NR Description: expressed protein [Arabidopsis thaliana]
  misc_feature (1)..(234): NCBI GI NO: 5901878 NR Description: chondrosarcoma-associated protein 2 [Homo sapiens]
  misc_feature (416)..(555): NCBI GI NO: 5901878 NR Description: chondrosarcoma-associated protein 2 [Homo sapiens]
  misc_feature (1)..(259): NCBI GI NO: 29179595 NR Description: Similar to IK cytokine, down-regulator of HLA II
  misc_feature (446)..(553): NCBI GI NO: 29179595 NR Description: Similar to IK cytokine, down-regulator of HLA II
  misc_feature (1)..(227): NCBI GI NO: 34878785 NR Description: similar to Ik protein [Rattus norvegicus]
  misc_feature (416)..(555): NCBI GI NO: 34878785 NR Description: similar to Ik protein [Rattus norvegicus]
  misc_feature (1)..(227): NCBI GI NO: 6919955 NR Description: Red protein (RER protein)
  misc_feature (1)..(227): NCBI GI NO: 26352880 NR Description: unnamed protein product [Mus musculus]
  misc_feature (416)..(555): NCBI GI NO: 6919955 NR Description: Red protein (RER protein)
MSSTQKKKSNYKEKMARRKEENKKEEPETPRYRDRAKERREDQNPDYEPTELGSFHAVAPPGADLRLEDAQKISIEKSKYLGGDLEHTHLVKGLDFALLNKVRSEIDKKPDAEDGKDAKARETKEDRAVSFRTAIAKSVYQWTVKQQQSMIKANDMFLPGRMAFIYNMEDGLNSDIPTTLHRSKADCPVPEEMVTVSVDGSVLDRIAKIMSYLRLGSSGKVLKKKKKERDTKGKSNLAGGVYNEVVRPAQSDGSVQKHQSEKDMPPPPPPPRKSNFSEKEKHSVPVARADDDDIFIGDGVDYTVPNKEMSQSPISEDMDESPRIHQNQSNLNEPVYGPIQPSEPAQAWQQPMDGYDAMQAQMAAAGYQGEWSGYQYAEQQLAYPEQYMQQGTVGYDVLVDPNISQDPRLMTQADKDKGLGSVFKRDDDRLKQLREKDAREKDPNFISDSYSECYPGYQGYNQEIAGSDDEDDLSKMDMGGRAKGRLHRWDFETEEEWAKYNDQKEAMPKAAFQFGVKMQDGRKTRKQNKDQKLSNDLNKINKILARKKGDKDGGEGHYDDDLPSGKKQRA

SEQ ID NO: 16688 - protein, 556 aa, Triticum aestivum
  peptide (1)..(556): Ceres Seq. ID no. 15220657
  misc_feature (1)..(541): NCBI GI NO: 15225312 NR Description: expressed protein [Arabidopsis thaliana]
  misc_feature (1)..(220): NCBI GI NO: 5901878 NR Description: chondrosarcoma-associated protein 2 [Homo sapiens]
  misc_feature (402)..(541): NCBI GI NO: 5901878 NR Description: chondrosarcoma-associated protein 2 [Homo sapiens]
  misc_feature (1)..(245): NCBI GI NO: 29179595 NR Description: Similar to IK cytokine, down-regulator of HLA II
  misc_feature (432)..(539): NCBI GI NO: 29179595 NR Description: Similar to IK cytokine, down-regulator of HLA II
  misc_feature (1)..(213): NCBI GI NO: 34878785 NR Description: similar to Ik protein [Rattus norvegicus]
  misc_feature (402)..(541): NCBI GI NO: 34878785 NR Description: similar to Ik protein [Rattus norvegicus]
  misc_feature (1)..(213): NCBI GI NO: 6919955 NR Description: Red protein (RER protein)
  misc_feature (1)..(213): NCBI GI NO: 26352880 NR Description: unnamed protein product [Mus musculus]
  misc_feature (402)..(541): NCBI GI NO: 6919955 NR Description: Red protein (RER protein)
MARRKEENKKEEPETPRYRDRAKERREDQNPDYEPTELGSFHAVAPPGADLRLEDAQKISIEKSKYLGGDLEHTHLVKGLDFALLNKVRSEIDKKPDAEDGKDAKARETKEDRAVSFRTAIAKSVYQWTVKQQQSMIKANDMFLPGRMAFIYNMEDGLNSDIPTTLHRSKADCPVPEEMVTVSVDGSVLDRIAKIMSYLRLGSSGKVLKKKKKERDTKGKSNLAGGVYNEVVRPAQSDGSVQKHQSEKDMPPPPPPPRKSNFSEKEKHSVPVARADDDDIFIGDGVDYTVPNKEMSQSPISEDMDESPRIHQNQSNLNEPVYGPIQPSEPAQAWQQPMDGYDAMQAQMAAAGYQGEWSGYQYAEQQLAYPEQYMQQGTVGYDVLVDPNISQDPRLMTQADKDKGLGSVFKRDDDRLKQLREKDAREKDPNFISDSYSECYPGYQGYNQEIAGSDDEDDLSKMDMGGRAKGRLHRWDFETEEEWAKYNDQKEAMPKAAFQFGVKMQDGRKTRKQNKDQKLSNDLNKINKILARKKGDKDGGEGHYDDDLPSGKKQRA

SEQ ID NO: 16689 - protein, 421 aa, Triticum aestivum
  peptide (1)..(421): Ceres Seq. ID no. 15220658
  misc_feature (1)..(406): NCBI GI NO: 15225312 NR Description: expressed protein [Arabidopsis thaliana]
  misc_feature (1)..(85): NCBI GI NO: 5901878 NR Description: chondrosarcoma-associated protein 2 [Homo sapiens]
  misc_feature (267)..(406): NCBI GI NO: 5901878 NR Description: chondrosarcoma-associated protein 2 [Homo sapiens]
  misc_feature (1)..(110): NCBI GI NO: 29179595 NR Description: Similar to IK cytokine, down-regulator of HLA II
  misc_feature (297)..(404): NCBI GI NO: 29179595 NR Description: Similar to IK cytokine, down-regulator of HLA II
  misc_feature (1)..(78): NCBI GI NO: 34878785 NR Description: similar to Ik protein [Rattus norvegicus]
  misc_feature (267)..(406): NCBI GI NO: 34878785 NR Description: similar to Ik protein [Rattus norvegicus]
  misc_feature (1)..(78): NCBI GI NO: 6919955 NR Description: Red protein (RER protein)
  misc_feature (1)..(78): NCBI GI NO: 26352880 NR Description: unnamed protein product [Mus musculus]
  misc_feature (267)..(406): NCBI GI NO: 6919955 NR Description: Red protein (RER protein)
MIKANDMFLPGRMAFIYNMEDGLNSDIPTTLHRSKADCPVPEEMVTVSVDGSVLDRIAKIMSYLRLGSSGKVLKKKKKERDTKGKSNLAGGVYNEVVRPAQSDGSVQKHQSEKDMPPPPPPPRKSNFSEKEKHSVPVARADDDDIFIGDGVDYTVPNKEMSQSPISEDMDESPRIHQNQSNLNEPVYGPIQPSEPAQAWQQPMDGYDAMQAQMAAAGYQGEWSGYQYAEQQLAYPEQYMQQGTVGYDVLVDPNISQDPRLMTQADKDKGLGSVFKRDDDRLKQLREKDAREKDPNFISDSYSECYPGYQGYNQEIAGSDDEDDLSKMDMGGRAKGRLHRWDFETEEEWAKYNDQKEAMPKAAFQFGVKMQDGRKTRKQNKDQKLSNDLNKINKILARKKGDKDGGEGHYDDDLPSGKKQRA

SEQ ID NO: 16690 - DNA, 1374 bp, Triticum aestivum
  misc_feature (1)..(1374): Ceres Seq. ID no. 13662634
actcaattacggacccctcaaatcaaaacccaaacacaaaaccctgtcgcgctctgaccgaccgtcataccgcctaccatggcctccctctcgccgtcaccgccccgccgcacacccaccgccggcgggaggcagtcccccttcttccgcgacctcgcccctgccatcccttcccaccggacctccgggtccctcgacccctcatccacgccgcccccgccgccgccccttttcaccctcgacgaccgcctatacgcacaggatttctcccctgatcgatccgcctccaacctcctccccgtcgctccatccccatccccacccacacgcgcttcctccggcaatcgccctccctcgtgggaccgttcccgcgccgttccccccggtccgtgctcgctgagtgactggctcgtggagccggcccgtaaagaggtcctcgcgctgcccccgccatcgccgcctcctactcgtgcggcgaacgcggaggtgcgatcgccggtgattccgttgcctgcgccgtctaggacggctccatcagcgaccgtcacgggggccgacggggaggagtgggtcaccgtgttcggattcaccgcgagggagaccaaccttgttctgcgagagtttgggaagtgtggagtgatactgagacactgctctggcccaagagatggtaattggcttcacatattgtatcagcaccaatatgatgctcgaagggcccttgaaaagaatggaatccagctgtttagtggtgttgcaattggggttaaaattactgatccagtgcagcggcaaatggatgagaagatgagtgagagcaattataagggcttcatggtctccttgccttcgaaatcatctatacagaatgcaggggcatcaagcaatttaggagatctcccacgtccctatgacccaaaagctggcagaaatgttaacagagacatggggtgttcaacaggaagtgttgccatgccagcaaaatcagtattggcgaaaactatggacttgatttttggcatttgatatgcagtgctggagattctatgatatttttctacccttgctcgtcgcttctgtggattctctttttgtcaatgcatgtgctgatctgcgagttccttatttctagttctagtgtctgaagatggtattgtttttcactgcagttgaagtagttcttttccccagcatctgagcatatctattcctgggttctgttgtgtagtatttgcaatgtgaaacgtttgcgttggcaatgtaatatactacagtacctttctaaagtggcgagaggtgtaaaagggttttgatgattatacatggtgttatactcagaccagaaatgatggccagtcatttttcattgcttcg

SEQ ID NO: 16691 - protein, 315 aa, Triticum aestivum
  peptide (1)..(315): Ceres Seq. ID no. 15220711
  misc_feature (160)..(243): Pfam Name: rrm-like Pfam Description: MPPN
  misc_feature (75)..(315): NCBI GI NO: 34903646 NR Description: B1015E06.6
  misc_feature (47)..(315): NCBI GI NO: 18401087 NR Description: expressed protein [Arabidopsis thaliana]
  misc_feature (47)..(314): NCBI GI NO: 17979410 NR Description: unknown protein [Arabidopsis thaliana]
  misc_feature (2)..(314): NCBI GI NO: 15987768 NR Description: mitotic phosphoprotein 44 [Xenopus laevis]
  misc_feature (2)..(314): NCBI GI NO: 4584796 NR Description: mitotic phosphoprotein 44 [Xenopus laevis]
  misc_feature (125)..(276): NCBI GI NO: 19223941 NR Description: mitotic phosphoprotein 44 [Mus musculus]
  misc_feature (162)..(276): NCBI GI NO: 34856476 NR Description: similar to CG6540-PA [Rattus norvegicus]
  misc_feature (126)..(314): NCBI GI NO: 18859897 NR Description: CG6540-PA [Drosophila melanogaster]
  misc_feature (1)..(130): NCBI GI NO: 12018149 NR Description: gamete-specific hydroxyproline-rich glyco protein a2
  misc_feature (1)..(152): NCBI GI NO: 20138131 NR Description: Vegetative cell wall protein gp1 precursor
MASLSPSPPRRTPTAGGRQSPFFRDLAPAIPSHRTSGSLDPSSTPPPPPPLFTLDDRLYAQDFSPDRSASNLLPVAPSPSPPTRASSGNRPPSWDRSRAVPPGPCSLSDWLVEPARKEVLALPPPSPPPTRAANAEVRSPVIPLPAPSRTAPSATVTGADGEEWVTVFGFTARETNLVLREFGKCGVILRHCSGPRDGNWLHILYQHQYDARRALEKNGIQLFSGVAIGVKITDPVQRQMDEKMSESNYKGFMVSLPSKSSIQNAGASSNLGDLPRPYDPKAGRNVNRDMGCSTGSVAMPAKSVLAKTMDLIFGI

SEQ ID NO: 16692 - DNA, 1720 bp, Triticum aestivum
  misc_feature (1)..(1720): Ceres Seq. ID no. 13663426
atcgaaaaattactttcgaaaatgctggcgctcacttccttatccccgcgcccggcgcgcccttccccgtctccggccacgcctcctcaccgccggccgccgccgcctcgcggccgtatccgccccacatacgccgtagccacggccgcgtccgacggcggcggcgcggccgacgactaccactccaccatccgctccctaaactcgcacggccgccgccacgtcccccgcaaatccctcggccagaactacatgctgaacgcgagggtgaacgaggagctggtggcggcggcgggggtggaggagggggacgtcgtgctcgagataggccccgggacgggctctctcaccgccgcgctgctcgccgccggcgccaccatcgtcgccgtcgagaaggataagcatatggctacccttgtgagagataggtttggatccacagagcaattgaaggtcattgaagaagatattacaaaatttcacgttcactcccattttctccctatcctggaggagaaatctcatggcaagaaaaaatacgccaaggttgtgtcaaacttaccattcaatgtcagcactgaagttgtcaaacaaattcttccaatgggagatgttttctctgtcatggtgctcatgcttcaggatgaagcggcactacgccttgcaaatgcttcaatacaaacaccagagtaccgacctatcaatgtgtttgtgaatttctactctgaacctgaatacaagttcaaagtagagagggccaactttttccctcaaccgacggttgatggtggcgttataaggtttaaaataaaggatgctggggagtatccgcttgttagttctaacaaaagtttcttttcaatggtgaactccgcgttcaatgggaagcgcaagatgcttcggaaatcacttcaacacctatattcttctgctgacattgaggctgctctgaccaatatcggtcttccgcctacggctagaccgtctgaactggggatggatgatttcgtgaggttgcacaatcacctgggaaaagtatgaccacccctgcgtttcaaaatgcgtatggaatcatcttattggtttgctcgctggactaagcatgccgctgaagtgatttggttcacagctagagcgcactgcagcttgcagattatgcttgctgacagtgaccgcctagtattctccagcagtcccacagccttcaccgcaacataatcggtggcacagcttcagcccacggcgctcttgcatggagatgatcatagtgattgtgatccctattcaaaaccaatgataatatgcaggacatgatttggtcacacaggaatcgcagtttttttccttatcgcagatagcatccctgcaagagtgaagatacgcaggcgttgcatgtgtataatttactggaattatctatcctcttgtactaatcttcgcaagttggaggcagaaatgtagagatcaaatgtctgtcagaacaatctgaagatcaggcaaagatgctagctgctcatagtaaattgccaagagtatttttatgtgttgacatagatggtagatagaggtacggccgttgctttttgagcttaagttttggctataaactacaacgaaacgtgcagatgctcgatgtttgattgtgcagcattctaatacctttttgcctggcagcgtgtcgctgtgatgcaacatacagttactgccagttattttcctg

SEQ ID NO: 16693 - protein, 346 aa, Triticum aestivum
  peptide (1)..(346): Ceres Seq. ID no. 15220718
  misc_feature (51)..(345): NCBI GI NO: 15220982 NR Description: dimethyladenosine transferase -related
  misc_feature (51)..(242): NCBI GI NO: 25518538 NR Description: hypothetical protein F22M8
  misc_feature (76)..(343): NCBI GI NO: 15618967 NR Description: Dimethyladenosine Transferase
  misc_feature (76)..(343): NCBI GI NO: 33242431 NR Description: dimethyladenosine transferase
  misc_feature (76)..(343): NCBI GI NO: 29840068 NR Description: dimethyladenosine transferase
  misc_feature (62)..(339): NCBI GI NO: 15835248 NR Description: dimethyladenosine transferase
  misc_feature (62)..(345): NCBI GI NO: 15605077 NR Description: Dimethyladenosine Transferase
  misc_feature (73)..(346): NCBI GI NO: 15595789 NR Description: rRNA (adenine-N6,N6)-dimethyltransferase
  misc_feature (67)..(345): NCBI GI NO: 29375520 NR Description: dimethyladenosine transferase
  misc_feature (73)..(345): NCBI GI NO: 23061997 NR Description: hypothetical protein
IEKLLSKMLALTSLSPRPARPSPSPATPPHRRPPPPRGRIRPTYAVATAASDGGGAADDYHSTIRSLNSHGRRHVPRKSLGQNYMLNARVNEELVAAAGVEEGDVVLEIGPGTGSLTAALLAAGATIVAVEKDKHMATLVRDRFGSTEQLKVIEEDITKFHVHSHFLPILEEKSHGKKKYAKVVSNLPFNVSTEVVKQILPMGDVFSVMVLMLQDEAALRLANASIQTPEYRPINVFVNFYSEPEYKFKVERANFFPQPTVDGGVIRFKIKDAGEYPLVSSNKSFFSMVNSAFNGKRKMLRKSLQHLYSSADIEAALTNIGLPPTARPSELGMDDFVRLHNHLGKV

SEQ ID NO: 16694 - protein, 339 aa, Triticum aestivum
  peptide (1)..(339): Ceres Seq. ID no. 15220719
  misc_feature (44)..(338): NCBI GI NO: 15220982 NR Description: dimethyladenosine transferase -related
  misc_feature (44)..(235): NCBI GI NO: 25518538 NR Description: hypothetical protein F22M8
  misc_feature (69)..(336): NCBI GI NO: 15618967 NR Description: Dimethyladenosine Transferase
  misc_feature (69)..(336): NCBI GI NO: 33242431 NR Description: dimethyladenosine transferase
  misc_feature (69)..(336): NCBI GI NO: 29840068 NR Description: dimethyladenosine transferase
  misc_feature (55)..(332): NCBI GI NO: 15835248 NR Description: dimethyladenosine transferase
  misc_feature (55)..(338): NCBI GI NO: 15605077 NR Description: Dimethyladenosine Transferase
  misc_feature (66)..(339): NCBI GI NO: 15595789 NR Description: rRNA (adenine-N6,N6)-dimethyltransferase
  misc_feature (60)..(338): NCBI GI NO: 29375520 NR Description: dimethyladenosine transferase
  misc_feature (66)..(338): NCBI GI NO: 23061997 NR Description: hypothetical protein
MLALTSLSPRPARPSPSPATPPHRRPPPPRGRIRPTYAVATAASDGGGAADDYHSTIRSLNSHGRRHVPRKSLGQNYMLNARVNEELVAAAGVEEGDVVLEIGPGTGSLTAALLAAGATIVAVEKDKHMATLVRDRFGSTEQLKVIEEDITKFHVHSHFLPILEEKSHGKKKYAKVVSNLPFNVSTEVVKQILPMGDVFSVMVLMLQDEAALRLANASIQTPEYRPINVFVNFYSEPEYKFKVERANFFPQPTVDGGVIRFKIKDAGEYPLVSSNKSFFSMVNSAFNGKRKMLRKSLQHLYSSADIEAALTNIGLPPTARPSELGMDDFVRLHNHLGKV

SEQ ID NO: 16695 - protein, 262 aa, Triticum aestivum
  peptide (1)..(262): Ceres Seq. ID no. 15220720
  misc_feature (1)..(261): NCBI GI NO: 15220982 NR Description: dimethyladenosine transferase -related
  misc_feature (1)..(158): NCBI GI NO: 25518538 NR Description: hypothetical protein F22M8
  misc_feature (1)..(259): NCBI GI NO: 15618967 NR Description: Dimethyladenosine Transferase
  misc_feature (1)..(259): NCBI GI NO: 33242431 NR Description: dimethyladenosine transferase
  misc_feature (1)..(259): NCBI GI NO: 29840068 NR Description: dimethyladenosine transferase
  misc_feature (1)..(255): NCBI GI NO: 15835248 NR Description: dimethyladenosine transferase
  misc_feature (1)..(261): NCBI GI NO: 15605077 NR Description: Dimethyladenosine Transferase
  misc_feature (1)..(262): NCBI GI NO: 15595789 NR Description: rRNA (adenine-N6,N6)-dimethyltransferase
  misc_feature (1)..(261): NCBI GI NO: 29375520 NR Description: dimethyladenosine transferase
  misc_feature (1)..(261): NCBI GI NO: 23061997 NR Description: hypothetical protein
MLNARVNEELVAAAGVEEGDVVLEIGPGTGSLTAALLAAGATIVAVEKDKHMATLVRDRFGSTEQLKVIEEDITKFHVHSHFLPILEEKSHGKKKYAKVVSNLPFNVSTEVVKQILPMGDVFSVMVLMLQDEAALRLANASIQTPEYRPINVFVNFYSEPEYKFKVERANFFPQPTVDGGVIRFKIKDAGEYPLVSSNKSFFSMVNSAFNGKRKMLRKSLQHLYSSADIEAALTNIGLPPTARPSELGMDDFVRLHNHLGKV

SEQ ID NO: 16696 - DNA, 1387 bp, Triticum aestivum
  misc_feature (1)..(1387): Ceres Seq. ID no. 13658922
ctaatcgaaaactttcttcccgtacgtccgcaggatcggtcaagatggctaacaccgacgctcttagctttttcaaggatttcatggccggtggcatctctgccgctgtgtccaaaaccgccgtcgctcccatcgagcgtgtgaagctgctcctgcaggttcaggcagcatccacccagattgccgccgacaagcagtacaaaggcattgttgactgctttgtccgtatccccaaggagcagggagctctcagcttctggcgtggtaaccttgccaacgtcatcagatacttccccacccaggctcttaacttcgccttcaaagatatctacaagcagattttccttggaggtgtcgacaagaacacccagttctggcgttactttgctggtaacctggcctctggtggtgctgctggtgcctcttccctctgcattgtctaccctcttgacttcgcccgtactcgtcttgctgctgatattggcaagggaccagctgaccgtcagttcagtggtcttggtgactgcctgaagaagaccttcaagtctgatggcctcgttggcatgtaccgtggattcggtgtgtcagtccagggtatcattatctaccgtgctgcctacttcggcttcttcgacactgccaagggcatgctccccaaccctaagaccactcccttcctggtctcatgggctattgctcagactgtcaccactgttgctggtattgcctcttatcccttcgacaccgtccgtcggcgcatgatgatgcaggctggccgtaagaaggctgatatcatgtacactggcaccctcgactgctgggccaagatcgccaagaatgagggtactggtgccttcttcaagggtgccttctccaacgttctcagaggcactggtggtgctcttgtgctggtgttctacgatgagatcaagaagctcctctaaattaattaggaatagattttaggtagaagtgcaggcatccagagttgcgagatctgactcaacattccacattcctgagatcaattcggtagaggatctgcagcttctataaactggtgtagtgcatttcatgtgcaaatgcagaccatgtcagtgttctgatcaagttgaccccatgtgtacaaagtcagatttgcatcttggcttacacttcaatagcagaatttcaattttaaaatctcgaaccatgacttttaggtttgttttactcagtattcattgctcgatcgggaagagctagagaggccgaaagtgaagtaaaatggaagaattaccaaagacattccatccttcatggctgtaccagtgtttcatcaagatggaatggtgattgcaagagattttactgtaactgtccaacaataaataaaagttgatattac

SEQ ID NO: 16697 - protein, 313 aa, Triticum aestivum
  peptide (1)..(313): Ceres Seq. ID no. 15219938
  misc_feature (15)..(313): NCBI GI NO: 28207648 NR Description: ADP/ATP translocase [Manduca sexta]
  misc_feature (15)..(313): NCBI GI NO: 28261391 NR Description: ADP/ATP translocase [Bombyx mori]
  misc_feature (4)..(313): NCBI GI NO: 31200033 NR Description: ENSANGP00000020278 [Anopheles gambiae]
  misc_feature (19)..(313): NCBI GI NO: 28269709 NR Description: ADP/ATP translocase [Anopheles gambiae]
  misc_feature (4)..(313): NCBI GI NO: 24641090 NR Description: stress-sensitive B CG16944-PC
  misc_feature (19)..(313): NCBI GI NO: 18079273 NR Description: stress-sensitive B CG16944-PA
  misc_feature (19)..(313): NCBI GI NO: 6942136 NR Description: ADP/ATP translocase [Lucilia cuprina]
  misc_feature (19)..(313): NCBI GI NO: 15559050 NR Description: ADP-ATP translocator [Ethmostigmus rubripes]
  misc_feature (18)..(313): NCBI GI NO: 31207265 NR Description: ENSANGP00000024030 [Anopheles gambiae]
  misc_feature (19)..(313): NCBI GI NO: 2833329 NR Description: ADP,ATP CARRIER PROTEIN
NRKLSSRTSAGSVKMANTDALSFFKDFMAGGISAAVSKTAVAPIERVKLLLQVQAASTQIAADKQYKGIVDCFVRIPKEQGALSFWRGNLANVIRYFPTQALNFAFKDIYKQIFLGGVDKNTQFWRYFAGNLASGGAAGASSLCIVYPLDFARTRLAADIGKGPADRQFSGLGDCLKKTFKSDGLVGMYRGFGVSVQGIIIYRAAYFGFFDTAKGMLPNPKTTPFLVSWAIAQTVTTVAGIASYPFDTVRRRMMMQAGRKKADIMYTGTLDCWAKIAKNEGTGAFFKGAFSNVLRGTGGALVLVFYDEIKKLL

SEQ ID NO: 16698 - protein, 299 aa, Triticum aestivum
  peptide (1)..(299): Ceres Seq. ID no. 15219939
  misc_feature (1)..(299): NCBI GI NO: 28207648 NR Description: ADP/ATP translocase [Manduca sexta]
  misc_feature (1)..(299): NCBI GI NO: 28261391 NR Description: ADP/ATP translocase [Bombyx mori]
  misc_feature (1)..(299): NCBI GI NO: 31200033 NR Description: ENSANGP00000020278 [Anopheles gambiae]
  misc_feature (5)..(299): NCBI GI NO: 28269709 NR Description: ADP/ATP translocase [Anopheles gambiae]
  misc_feature (1)..(299): NCBI GI NO: 24641090 NR Description: stress-sensitive B CG16944-PC
  misc_feature (5)..(299): NCBI GI NO: 18079273 NR Description: stress-sensitive B CG16944-PA
  misc_feature (5)..(299): NCBI GI NO: 6942136 NR Description: ADP/ATP translocase [Lucilia cuprina]
  misc_feature (5)..(299): NCBI GI NO: 15559050 NR Description: ADP-ATP translocator [Ethmostigmus rubripes]
  misc_feature (4)..(299): NCBI GI NO: 31207265 NR Description: ENSANGP00000024030 [Anopheles gambiae]
  misc_feature (5)..(299): NCBI GI NO: 2833329 NR Description: ADP,ATP CARRIER PROTEIN
MANTDALSFFKDFMAGGISAAVSKTAVAPIERVKLLLQVQAASTQIAADKQYKGIVDCFVRIPKEQGALSFWRGNLANVIRYFPTQALNFAFKDIYKQIFLGGVDKNTQFWRYFAGNLASGGAAGASSLCIVYPLDFARTRLAADIGKGPADRQFSGLGDCLKKTFKSDGLVGMYRGFGVSVQGIIIYRAAYFGFFDTAKGMLPNPKTTPFLVSWAIAQTVTTVAGIASYPFDTVRRRMMMQAGRKKADIMYTGTLDCWAKIAKNEGTGAFFKGAFSNVLRGTGGALVLVFYDEIKKLL

SEQ ID NO: 16699 - protein, 286 aa, Triticum aestivum
  peptide (1)..(286): Ceres Seq. ID no. 15219940
  misc_feature (1)..(286): NCBI GI NO: 28207648 NR Description: ADP/ATP translocase [Manduca sexta]
  misc_feature (1)..(286): NCBI GI NO: 28261391 NR Description: ADP/ATP translocase [Bombyx mori]
  misc_feature (1)..(286): NCBI GI NO: 31200033 NR Description: ENSANGP00000020278 [Anopheles gambiae]
  misc_feature (1)..(286): NCBI GI NO: 28269709 NR Description: ADP/ATP translocase [Anopheles gambiae]
  misc_feature (1)..(286): NCBI GI NO: 24641090 NR Description: stress-sensitive B CG16944-PC
  misc_feature (1)..(286): NCBI GI NO: 18079273 NR Description: stress-sensitive B CG16944-PA
  misc_feature (1)..(286): NCBI GI NO: 6942136 NR Description: ADP/ATP translocase [Lucilia cuprina]
  misc_feature (1)..(286): NCBI GI NO: 15559050 NR Description: ADP-ATP translocator [Ethmostigmus rubripes]
  misc_feature (1)..(286): NCBI GI NO: 31207265 NR Description: ENSANGP00000024030 [Anopheles gambiae]
  misc_feature (1)..(286): NCBI GI NO: 2833329 NR Description: ADP,ATP CARRIER PROTEIN
MAGGISAAVSKTAVAPIERVKLLLQVQAASTQIAADKQYKGIVDCFVRIPKEQGALSFWRGNLANVIRYFPTQALNFAFKDIYKQIFLGGVDKNTQFWRYFAGNLASGGAAGASSLCIVYPLDFARTRLAADIGKGPADRQFSGLGDCLKKTFKSDGLVGMYRGFGVSVQGIIIYRAAYFGFFDTAKGMLPNPKTTPFLVSWAIAQTVTTVAGIASYPFDTVRRRMMMQAGRKKADIMYTGTLDCWAKIAKNEGTGAFFKGAFSNVLRGTGGALVLVFYDEIKKLL

SEQ ID NO: 16700 - DNA, 1931 bp, Triticum aestivum
  misc_feature (1)..(1931): Ceres Seq. ID no. 13662745
  misc_feature (1852)..(1852): n is a, c, t, g, unknown, or other
  misc_feature (1843)..(1843): n is a, c, t, g, unknown, or other
ctttccttcgcttcttcctctcccgactcttcccgactccttcggttcctcaccggtcacccccacccctcaggtctgaaaccctctcgcgccgccgccgtcgccgtccccgtcctccctctcgtcgcgcctccgccggcctttcagtttagggtgggatcatgtcttctgcaatggagtcatcgtaccttcctgctactactgagtcaattgaaaaggctcaggaggctaaggatgcttcagagtcaatttcaatcctttaccgtgtgatccaagacccgtcttcatctgcagatgcactgagaataaaagagcttgcgattaccaaccttacaaactacctcactaaagagaaccgtgctgaggatctgcgtaatctcttgacccagctgaggccatttttctcactgattcccaaggccaagactgcaaaaattgtccgtggaatcattgatgccgtcgccaagattcctggaacatctgatcttcagatctcgctctgcaaggagatggtggaatggacgcgtgcagagaaacgtacgttcctcaggcagcgtgtggaggcaaggttagcggcccttcttttggagaatcaagagtacactgaagccctgaccctccttactggacttatcaaggaagtcaggagacttgatgacaagttgcttcttgtggacattgaccttttggaaagcaaactccacttctctctgagaaacctgcctaaggccaaagcttcactgaccgctgcaagaacagcggcgaatgccatttatgttccaccagctcagcagggcactattgatctgcagagtggaatccttcatgcggaagagaaggactacaaaactgcttacagctacttctttgaagcattcgaggctttcaacgcactggacgacccaagagctatcttcagcttgaagtacatgctcttgtgcaagataatggtcaaccatgctgacgatgttgctggaataatctcatctaaggccagcctgaagtatgtgggtcctgatgttgatgctatgaaagccgtagcggatgcctactctaagagatctctcaagtactttgaaaccgcccttcgtgattacaaagcccagcttgaggaggaccctattgtccacaggcatctttcatctctgtatgatacccttctggagcagaacctctgcaggttgattgagccctactcgagggtggagattgagcatgttgctcagatgattgaattgccagttgaccatgtggagaagaagctgtcacaaatgatccttgacaagaaatttgctggtactctagatcaaggtgctggttgcctcattatctttgaggagatgaaaacagaggccatcttccctgccacactcgaaactatttcaaacgttgggaaggttgtggacagtctttacatgaggtctgcgaagatcatggcttgaacactagtacccacatgatagtttatctgttggctatggtttcatcttttaaaagttatattagtgtctttcaagacatttaatcctgtcagtttgacactttaatctgcaatgttgggttttttagttaaaaaaatctaccttgctatgattggcgtgtaccttgaaaactagatggttcaagatgaaccatgttatgctgccgcgacattcttttgtgataattttccattagctttttttttggcctgtgtattgctgaatatacaatgctggaaaaaaaaaaaaaaaaaaaaaaaaaaaaaaaaaaaaaaaaaaaaaaaaaaaaaaaaaaaaaaaaaaamccmwaaaaaaaaaaaaaargtttttycwwyccccccaacccccgggggggggccccnggaacccanattcccccaaaarggrrgccaaataacccscccccytggccctgccttttwaaaaccttcgggawtggaaaaaccctgg

SEQ ID NO: 16701 - protein, 426 aa, Triticum aestivum
  peptide (1)..(426): Ceres Seq. ID no. 15220181
  misc_feature (288)..(392): Pfam Name: Pfam Description:  PCI domain
  misc_feature (3)..(426): NCBI GI NO: 38344536 NR Description: OSJNBa0027P08.4
  misc_feature (12)..(426): NCBI GI NO: 15218845 NR Description: 26S proteasome regulatory subunit (RPN6), putative
  misc_feature (12)..(419): NCBI GI NO: 25332510 NR Description: 19S proteosome subunit 9
  misc_feature (117)..(426): NCBI GI NO: 38093742 NR Description: putative proteosome subunit
  misc_feature (18)..(424): NCBI GI NO: 17137740 NR Description: Proteasome p44.5 subunit CG10149-PB
  misc_feature (1)..(424): NCBI GI NO: 34872897 NR Description: similar to 26S proteasome non-ATPase regulatory subunit 11
  misc_feature (12)..(424): NCBI GI NO: 26342168 NR Description: unnamed protein product [Mus musculus]
  misc_feature (12)..(424): NCBI GI NO: 2150046 NR Description: 26S proteasome subunit 9 [Homo sapiens]
  misc_feature (12)..(424): NCBI GI NO: 28872725 NR Description: proteasome 26S non-ATPase subunit 11
  misc_feature (17)..(424): NCBI GI NO: 31242521 NR Description: ENSANGP00000015227 [Anopheles gambiae]
MSSAMESSYLPATTESIEKAQEAKDASESISILYRVIQDPSSSADALRIKELAITNLTNYLTKENRAEDLRNLLTQLRPFFSLIPKAKTAKIVRGIIDAVAKIPGTSDLQISLCKEMVEWTRAEKRTFLRQRVEARLAALLLENQEYTEALTLLTGLIKEVRRLDDKLLLVDIDLLESKLHFSLRNLPKAKASLTAARTAANAIYVPPAQQGTIDLQSGILHAEEKDYKTAYSYFFEAFEAFNALDDPRAIFSLKYMLLCKIMVNHADDVAGIISSKASLKYVGPDVDAMKAVADAYSKRSLKYFETALRDYKAQLEEDPIVHRHLSSLYDTLLEQNLCRLIEPYSRVEIEHVAQMIELPVDHVEKKLSQMILDKKFAGTLDQGAGCLIIFEEMKTEAIFPATLETISNVGKVVDSLYMRSAKIMA

SEQ ID NO: 16702 - protein, 422 aa, Triticum aestivum
  peptide (1)..(422): Ceres Seq. ID no. 15220182
  misc_feature (284)..(388): Pfam Name: Pfam Description:  PCI domain
  misc_feature (1)..(422): NCBI GI NO: 38344536 NR Description: OSJNBa0027P08.4
  misc_feature (8)..(422): NCBI GI NO: 15218845 NR Description: 26S proteasome regulatory subunit (RPN6), putative
  misc_feature (8)..(415): NCBI GI NO: 25332510 NR Description: 19S proteosome subunit 9
  misc_feature (113)..(422): NCBI GI NO: 38093742 NR Description: putative proteosome subunit
  misc_feature (14)..(420): NCBI GI NO: 17137740 NR Description: Proteasome p44.5 subunit CG10149-PB
  misc_feature (1)..(420): NCBI GI NO: 34872897 NR Description: similar to 26S proteasome non-ATPase regulatory subunit 11
  misc_feature (8)..(420): NCBI GI NO: 26342168 NR Description: unnamed protein product [Mus musculus]
  misc_feature (8)..(420): NCBI GI NO: 2150046 NR Description: 26S proteasome subunit 9 [Homo sapiens]
  misc_feature (8)..(420): NCBI GI NO: 28872725 NR Description: proteasome 26S non-ATPase subunit 11
  misc_feature (13)..(420): NCBI GI NO: 31242521 NR Description: ENSANGP00000015227 [Anopheles gambiae]
MESSYLPATTESIEKAQEAKDASESISILYRVIQDPSSSADALRIKELAITNLTNYLTKENRAEDLRNLLTQLRPFFSLIPKAKTAKIVRGIIDAVAKIPGTSDLQISLCKEMVEWTRAEKRTFLRQRVEARLAALLLENQEYTEALTLLTGLIKEVRRLDDKLLLVDIDLLESKLHFSLRNLPKAKASLTAARTAANAIYVPPAQQGTIDLQSGILHAEEKDYKTAYSYFFEAFEAFNALDDPRAIFSLKYMLLCKIMVNHADDVAGIISSKASLKYVGPDVDAMKAVADAYSKRSLKYFETALRDYKAQLEEDPIVHRHLSSLYDTLLEQNLCRLIEPYSRVEIEHVAQMIELPVDHVEKKLSQMILDKKFAGTLDQGAGCLIIFEEMKTEAIFPATLETISNVGKVVDSLYMRSAKIMA

SEQ ID NO: 16703 - protein, 310 aa, Triticum aestivum
  peptide (1)..(310): Ceres Seq. ID no. 15220183
  misc_feature (172)..(276): Pfam Name: Pfam Description:  PCI domain
  misc_feature (1)..(310): NCBI GI NO: 38344536 NR Description: OSJNBa0027P08.4
  misc_feature (1)..(310): NCBI GI NO: 15218845 NR Description: 26S proteasome regulatory subunit (RPN6), putative
  misc_feature (1)..(303): NCBI GI NO: 25332510 NR Description: 19S proteosome subunit 9
  misc_feature (1)..(310): NCBI GI NO: 38093742 NR Description: putative proteosome subunit
  misc_feature (1)..(308): NCBI GI NO: 17137740 NR Description: Proteasome p44.5 subunit CG10149-PB
  misc_feature (1)..(308): NCBI GI NO: 34872897 NR Description: similar to 26S proteasome non-ATPase regulatory subunit 11
  misc_feature (1)..(308): NCBI GI NO: 26342168 NR Description: unnamed protein product [Mus musculus]
  misc_feature (1)..(308): NCBI GI NO: 2150046 NR Description: 26S proteasome subunit 9 [Homo sapiens]
  misc_feature (1)..(308): NCBI GI NO: 28872725 NR Description: proteasome 26S non-ATPase subunit 11
  misc_feature (1)..(308): NCBI GI NO: 31242521 NR Description: ENSANGP00000015227 [Anopheles gambiae]
MVEWTRAEKRTFLRQRVEARLAALLLENQEYTEALTLLTGLIKEVRRLDDKLLLVDIDLLESKLHFSLRNLPKAKASLTAARTAANAIYVPPAQQGTIDLQSGILHAEEKDYKTAYSYFFEAFEAFNALDDPRAIFSLKYMLLCKIMVNHADDVAGIISSKASLKYVGPDVDAMKAVADAYSKRSLKYFETALRDYKAQLEEDPIVHRHLSSLYDTLLEQNLCRLIEPYSRVEIEHVAQMIELPVDHVEKKLSQMILDKKFAGTLDQGAGCLIIFEEMKTEAIFPATLETISNVGKVVDSLYMRSAKIMA

SEQ ID NO: 16704 - DNA, 1055 bp, Triticum aestivum
  misc_feature (1)..(1055): Ceres Seq. ID no. 13662746
ccrtttaamcwagaacatcctaatcgaaaaacgaggcggagttgaaattccacacggcctctctcttcgccttcgcctgccccctctcgtgctcgcgagccgcgtcaaaaccctagccaccttctgcccaccacatgcaccgcggcagcgaccgctccggcgacccctccggccccgcgggcggcgctcgcagcggcgcggacggcagattcgcgcgcggaccctcgcgctggtccggcggcggcgggggtagccccccgccccaccgctcctcccgcggcgggagcagcgacggcggcggaggcggaggcggaggcgggaggttccatccgtaccgtgcgccgtctgaatacgttgttggcggtggtggaactggagggtacagaggcggcggcggcggcggcggcgacttcggtgagacggccggtggagcgaggagccgctacggaggcggtggcgggggaggccgtggagactactcagatcatgataacaaaagtggttatgttaaactttttgttggatcagttccaagaacagcaaatgaagatgatgttcgacctttattcgaggatcatggagatgttcttgaagttgctttgatcagggataggaaaactggtgaacaacaaggtgagccataagtatatttttcttatattatcaatataccagtatcgctttcttttcaggttctgagagtattaggagcaacaaggttgcatcttctttcagttagatttggcggttgttgaattttgtttcctgcgcttccgttctgtttcttcgtctgggttaatagaaggcaagaaaggaagcagctaactcttggctggttactgtaatctaactaggctccaccctgctggtacataaggtagcagatttgaacaaacaactttgttcaggtcatagcaatcttgtgcttgttgccgtgttcaatgtagtatgaccagaaataactaagggtgctgtgttactgttgcatctatttgttttgaatgcgatgcaaaaggccagaggacctcctaatgaattaagattaacttttcatt

SEQ ID NO: 16705 - protein, 169 aa, Triticum aestivum
  peptide (1)..(169): Ceres Seq. ID no. 15220184
  misc_feature (1)..(112): Pfam Name: Pfam Description:  Herpesvirus large structural phospho protein UL32
  misc_feature (1)..(167): NCBI GI NO: 33390912 NR Description: gamma flowering time control protein
  misc_feature (1)..(167): NCBI GI NO: 34555648 NR Description: flowering time control protein isoform rFCA-2
  misc_feature (109)..(167): NCBI GI NO: 34555650 NR Description: flowering time control protein isoform rFCA-4
  misc_feature (109)..(167): NCBI GI NO: 34555646 NR Description: flowering time control protein isoform rFCA-3
  misc_feature (8)..(124): NCBI GI NO: 9758509 NR Description: gene_id:MZA15.15~unknown protein
  misc_feature (4)..(113): NCBI GI NO: 17555156 NR Description: Predicted CDS, putative protein, nematode specific
  misc_feature (4)..(112): NCBI GI NO: 121631 NR Description: Glycine-rich protein 2
  misc_feature (3)..(124): NCBI GI NO: 22093662 NR Description: putative zwille protein
  misc_feature (1)..(124): NCBI GI NO: 121644 NR Description: Glycine-rich cell wall structural protein precursor
  misc_feature (1)..(116): NCBI GI NO: 15227583 NR Description: glycine-rich protein [Arabidopsis thaliana]
MHRGSDRSGDPSGPAGGARSGADGRFARGPSRWSGGGGGSPPPHRSSRGGSSDGGGGGGGGGRFHPYRAPSEYVVGGGGTGGYRGGGGGGGDFGETAGGARSRYGGGGGGGRGDYSDHDNKSGYVKLFVGSVPRTANEDDVRPLFEDHGDVLEVALIRDRKTGEQQGEP

SEQ ID NO: 16706 - DNA, 1470 bp, Triticum aestivum
  misc_feature (1)..(1470): Ceres Seq. ID no. 13658153
aaaactacttccccatttatcttttcctttcctatctatctggttcctgcagattcaagatctcgagttttgctctgctccaagcaaagccatggcctccgaacagatggtgcatatgagtcaaggacaaggggaaactagctatgctcgcaactccagtttccagaaggctgagcagaacaggatgaaatccctcatagaagcggtcatcgccgacttatgcggcagcagcagtaccttgttgcatggaaaggtagtaatcgcggacttgggatgctcctccggcccaaatgcgctagcactggtatcaactgccatcaatgccatccacagccaatgccttcacttacagcagccaccacctgaagtatgcgtgctactcaacgacctgcctgacaatgacttcaacacggtggtgaagagcttggtcacgctccttcaaagcaaggatcctgttgtcctgaccggtgtcataccggggtcgttttacgagcggctctttactagtgactccttgcatcttgtatgcgcgtccaacagcttgcaatggctctcaaaggctcctgaggatctaacgagaaatcgcatcccagcgttcgatactgatgaacatgttaggcatgaaaggctcccaatcgtccgtgaggcttatgcacatcagttcagggaagatttcacacttttcctgcagctgagagccaaagaattggtctcgggaggccgaatggttatttccctagtagggacgcgttctaatgtaattgcttccaaattctttcttttcccaggaattgtagctcaaattctaagtgtcatggtcactgagggtgtgatcgacaaagaaaagtttgattctttctatgtgcccgtgcatggaccttccggcgaagaggtgagagaaatcattgaagaagagggctccttttccaccagggagatgcgggtgcacgaccctacgaccgaaatgaacactgctctgagcaccccaaggaagttcgtcaataatctgagagccttattcgagccgataatagtccagcattttggagacattatggatgaatttgtgaggactgcggagctgcactggagcctggatccggatgggagcttgcaagaggagcgggccagaacctctcgagctacgctggttgtatccctcgcaaaggtgtcatgatgaagtaaaggtgcctgaagattacatgcaccgaatttcataaaattgtactattgcttactttgaagcaacaatgtgtgcccatttaattgtgtgaactactgtagtagtggtgttccgtgaatgtactcatggatgcaccaaatgaacttccatctcgcatataaataagcaaaatgccgttgcgtgtgcaatgtggtgtgatgtatggtgtgcacaaattcagccagacatttgtgtcatgtatctgttttagtaagatctgcaatgagagtgaagcagccagaaattcc

SEQ ID NO: 16707 - protein, 391 aa, Triticum aestivum
  peptide (1)..(391): Ceres Seq. ID no. 13658154
  misc_feature (85)..(389): Pfam Name: Pfam Description:  SAM dependent carboxyl methyltransferase
  misc_feature (158)..(354): NCBI GI NO: 13676829 NR Description: S-adenosyl-L-methionine: jasmonic acid carboxylmethyltransferase
  misc_feature (35)..(188): NCBI GI NO: 13676829 NR Description: S-adenosyl-L-methionine: jasmonic acid carboxylmethyltransferase
  misc_feature (158)..(354): NCBI GI NO: 15223601 NR Description: S-adenosyl-L-methionine: jasmonic acid carboxylmethyltransferase
  misc_feature (35)..(188): NCBI GI NO: 15223601 NR Description: S-adenosyl-L-methionine: jasmonic acid carboxylmethyltransferase
  misc_feature (27)..(361): NCBI GI NO: 34911486 NR Description: putative S-adenosyl-L-methionine:salicylic acidcarboxyl methyltransferase
  misc_feature (35)..(361): NCBI GI NO: 13235641 NR Description: S-adenosyl-L-methionine: salicylic acid carboxylmethyltransferase
  misc_feature (158)..(361): NCBI GI NO: 6651395 NR Description: floral nectary-specific protein
  misc_feature (35)..(188): NCBI GI NO: 6651395 NR Description: floral nectary-specific protein
  misc_feature (24)..(361): NCBI GI NO: 34911508 NR Description: putative S-adenosyl-L-methionine:salicylic acidcarboxyl methyltransferase
  misc_feature (39)..(350): NCBI GI NO: 15237695 NR Description: S-adenosyl-L-methionine: carboxyl methyltransferasefamily
KLLPHLSFPFLSIWFLQIQDLEFCSAPSKAMASEQMVHMSQGQGETSYARNSSFQKAEQNRMKSLIEAVIADLCGSSSTLLHGKVVIADLGCSSGPNALALVSTAINAIHSQCLHLQQPPPEVCVLLNDLPDNDFNTVVKSLVTLLQSKDPVVLTGVIPGSFYERLFTSDSLHLVCASNSLQWLSKAPEDLTRNRIPAFDTDEHVRHERLPIVREAYAHQFREDFTLFLQLRAKELVSGGRMVISLVGTRSNVIASKFFLFPGIVAQILSVMVTEGVIDKEKFDSFYVPVHGPSGEEVREIIEEEGSFSTREMRVHDPTTEMNTALSTPRKFVNNLRALFEPIIVQHFGDIMDEFVRTAELHWSLDPDGSLQEERARTSRATLVVSLAKVS

SEQ ID NO: 16708 - protein, 361 aa, Triticum aestivum
  peptide (1)..(361): Ceres Seq. ID no. 13658155
  misc_feature (55)..(359): Pfam Name: Pfam Description:  SAM dependent carboxyl methyltransferase
  misc_feature (128)..(324): NCBI GI NO: 13676829 NR Description: S-adenosyl-L-methionine: jasmonic acid carboxylmethyltransferase
  misc_feature (5)..(158): NCBI GI NO: 13676829 NR Description: S-adenosyl-L-methionine: jasmonic acid carboxylmethyltransferase
  misc_feature (128)..(324): NCBI GI NO: 15223601 NR Description: S-adenosyl-L-methionine: jasmonic acid carboxylmethyltransferase
  misc_feature (5)..(158): NCBI GI NO: 15223601 NR Description: S-adenosyl-L-methionine: jasmonic acid carboxylmethyltransferase
  misc_feature (1)..(331): NCBI GI NO: 34911486 NR Description: putative S-adenosyl-L-methionine:salicylic acidcarboxyl methyltransferase
  misc_feature (5)..(331): NCBI GI NO: 13235641 NR Description: S-adenosyl-L-methionine: salicylic acid carboxylmethyltransferase
  misc_feature (128)..(331): NCBI GI NO: 6651395 NR Description: floral nectary-specific protein
  misc_feature (5)..(158): NCBI GI NO: 6651395 NR Description: floral nectary-specific protein
  misc_feature (1)..(331): NCBI GI NO: 34911508 NR Description: putative S-adenosyl-L-methionine:salicylic acidcarboxyl methyltransferase
  misc_feature (9)..(320): NCBI GI NO: 15237695 NR Description: S-adenosyl-L-methionine: carboxyl methyltransferasefamily
MASEQMVHMSQGQGETSYARNSSFQKAEQNRMKSLIEAVIADLCGSSSTLLHGKVVIADLGCSSGPNALALVSTAINAIHSQCLHLQQPPPEVCVLLNDLPDNDFNTVVKSLVTLLQSKDPVVLTGVIPGSFYERLFTSDSLHLVCASNSLQWLSKAPEDLTRNRIPAFDTDEHVRHERLPIVREAYAHQFREDFTLFLQLRAKELVSGGRMVISLVGTRSNVIASKFFLFPGIVAQILSVMVTEGVIDKEKFDSFYVPVHGPSGEEVREIIEEEGSFSTREMRVHDPTTEMNTALSTPRKFVNNLRALFEPIIVQHFGDIMDEFVRTAELHWSLDPDGSLQEERARTSRATLVVSLAKVS

SEQ ID NO: 16709 - protein, 356 aa, Triticum aestivum
  peptide (1)..(356): Ceres Seq. ID no. 13658156
  misc_feature (50)..(354): Pfam Name: Pfam Description:  SAM dependent carboxyl methyltransferase
  misc_feature (123)..(319): NCBI GI NO: 13676829 NR Description: S-adenosyl-L-methionine: jasmonic acid carboxylmethyltransferase
  misc_feature (1)..(153): NCBI GI NO: 13676829 NR Description: S-adenosyl-L-methionine: jasmonic acid carboxylmethyltransferase
  misc_feature (123)..(319): NCBI GI NO: 15223601 NR Description: S-adenosyl-L-methionine: jasmonic acid carboxylmethyltransferase
  misc_feature (1)..(153): NCBI GI NO: 15223601 NR Description: S-adenosyl-L-methionine: jasmonic acid carboxylmethyltransferase
  misc_feature (1)..(326): NCBI GI NO: 34911486 NR Description: putative S-adenosyl-L-methionine:salicylic acidcarboxyl methyltransferase
  misc_feature (1)..(326): NCBI GI NO: 13235641 NR Description: S-adenosyl-L-methionine: salicylic acid carboxylmethyltransferase
  misc_feature (123)..(326): NCBI GI NO: 6651395 NR Description: floral nectary-specific protein
  misc_feature (1)..(153): NCBI GI NO: 6651395 NR Description: floral nectary-specific protein
  misc_feature (1)..(326): NCBI GI NO: 34911508 NR Description: putative S-adenosyl-L-methionine:salicylic acidcarboxyl methyltransferase
  misc_feature (4)..(315): NCBI GI NO: 15237695 NR Description: S-adenosyl-L-methionine: carboxyl methyltransferasefamily
MVHMSQGQGETSYARNSSFQKAEQNRMKSLIEAVIADLCGSSSTLLHGKVVIADLGCSSGPNALALVSTAINAIHSQCLHLQQPPPEVCVLLNDLPDNDFNTVVKSLVTLLQSKDPVVLTGVIPGSFYERLFTSDSLHLVCASNSLQWLSKAPEDLTRNRIPAFDTDEHVRHERLPIVREAYAHQFREDFTLFLQLRAKELVSGGRMVISLVGTRSNVIASKFFLFPGIVAQILSVMVTEGVIDKEKFDSFYVPVHGPSGEEVREIIEEEGSFSTREMRVHDPTTEMNTALSTPRKFVNNLRALFEPIIVQHFGDIMDEFVRTAELHWSLDPDGSLQEERARTSRATLVVSLAKVS

SEQ ID NO: 16710 - DNA, 2009 bp, Triticum aestivum
  misc_feature (1)..(2009): Ceres Seq. ID no. 14303109
agcaattattctcctccgctacctccgcggtggccagcacaccacaccacaccacgcttcccttgccttgctcccccacctccacacccatctcattcccccctctccccatccccaatggcgccgacctccgagccctagatagatcccccgcgcgcagccgcatggcggagcacgccgcccgccacctccgccgccgcggccccgtcgccggctggtgctgctccttcgccggcgtcccgcccagccccgaccaccgcctccacccccaccgcaccctctcccacgccgccgcgccgccaaccgcaggatctgtgtgcaccggcggcgagggcccgcggaagcaaccacagctgccgcccaaatccccctcctccttccacggctctccctcctccaagctggcgggcctcatcgactacccgcgccggatcctctccccgggccgcgtctcccccatcgaccccgacgcccacccccctcctcctccgacccccaaccccaccgaccagccgcagcacccggagcagcagcagccgccgccgatggccccgttcgtcgcggtgcgggaggaggaggaggaggggcagggggacgggctggatctgaggctctgcctccgcgggagggacggcgccaccggctgcgtcatggacctcgactccgccgtgctctgcgggagcagcgccttcttcgccgccatggcgcccgagcccaacgcctctggtgccggggcccggaggatcgaggtcgacggggtcgacaacgtcgccgccttcagggacgccgtcgagctcatgttccatgccgacgctccgcggtggctcgccagggccggcgtctcgcgagccatcgccgtcctcgaggtggcttcctcgattatgtttgacaaaggaatcagatcatgtttggagtacattgaagcagttccatggaatgagaatgaggaagagaagctaaagcacctctttgctagatgcactttcgatgaagcgttatcaaaagatgtattggcaagattgcaaacacaaccgtctagcagctcggaagacctgactggtcagctcatccaatctgtcaccagcagcacaaacaacagtgcaagaaaagatatgcagtctttgatcaatggtcttctaagcaagagctcagtatatcaaaaggatttgtctggattaaacaaaaggagcctataccagatttgctgctcgtgtctaaacctactggtggaactttttaaggaagactcggagccaaaatgcggcacagaccaggcactgaaagttaggcacaataataaacccatgattgaaagagtgagcaagcaaagtgagaacctcagctggctatttgagatcctggtcaacaatgatatggcagagaatttcgtcgtgctgtgggccggacaagacgatctcatcaggatgcacgagcaagcatcgccaatgttcaggtacgagctaagccggatatcagcgggcgtgttcatcgctctcgggcaagggaaagtgcagtgcccgagcgatctgaggagccaactgttccggggatggttcacgccgatgttaaccgatttcggttggctccaaaggtgctccaaggggctggatgcgagagcgctggaggatagcctggggcaagcccttctcaccctcccgctccgggagcagcagagcctgttcgaggaatggttccagtgcttcgcgtctagtggcgcggaatgcccgaaccttagccgagccttccaggtatggtggcgaaggtcattcgctagatagatttgtcggtagagcccctgcagcagcagaagcctatgagatattgcttggtccgcgtgagttatatcggtatttgtagtgtgtgtatgaatgtaagataagatgaattcctgttagcctgtagagttgaatttttgtttatgatcttggctcggttcttcccagtgtatgcactacttgacaaaaccacaattcccagagtcagcaatagaattgttgtagaattgcttc

SEQ ID NO: 16711 - protein, 591 aa, Triticum aestivum
  peptide (1)..(591): Ceres Seq. ID no. 14303110
  misc_feature (287)..(591): NCBI GI NO: 38347118 NR Description: OSJNBa0009K15.15
  misc_feature (55)..(273): NCBI GI NO: 38347118 NR Description: OSJNBa0009K15.15
  misc_feature (71)..(591): NCBI GI NO: 34900946 NR Description: putative PRLI-interacting factor G
  misc_feature (62)..(591): NCBI GI NO: 21553858 NR Description: unknown [Arabidopsis thaliana]
  misc_feature (62)..(591): NCBI GI NO: 18397316 NR Description: f13j11 PRLI-interacting factor G -related
  misc_feature (62)..(591): NCBI GI NO: 25338924 NR Description: hypothetical protein At2g13690
  misc_feature (62)..(591): NCBI GI NO: 39104567 NR Description: putative f13j11 PRLI-interacting factor G
  misc_feature (141)..(591): NCBI GI NO: 15238599 NR Description: expressed protein [Arabidopsis thaliana]
  misc_feature (116)..(589): NCBI GI NO: 32488518 NR Description: OSJNBa0011J08.25
  misc_feature (201)..(591): NCBI GI NO: 15222554 NR Description: expressed protein [Arabidopsis thaliana]
QLFSSATSAVASTPHHTTLPLPCSPTSTPISFPPLPIPNGADLRALDRSPARSRMAEHAARHLRRRGPVAGWCCSFAGVPPSPDHRLHPHRTLSHAAAPPTAGSVCTGGEGPRKQPQLPPKSPSSFHGSPSSKLAGLIDYPRRILSPGRVSPIDPDAHPPPPPTPNPTDQPQHPEQQQPPPMAPFVAVREEEEEGQGDGLDLRLCLRGRDGATGCVMDLDSAVLCGSSAFFAAMAPEPNASGAGARRIEVDGVDNVAAFRDAVELMFHADAPRWLARAGVSRAIAVLEVASSIMFDKGIRSCLEYIEAVPWNENEEEKLKHLFARCTFDEALSKDVLARLQTQPSSSSEDLTGQLIQSVTSSTNNSARKDMQSLINGLLSKSSVYQKDLSGLNKRSLYQICCSCLNLLVELFKEDSEPKCGTDQALKVRHNNKPMIERVSKQSENLSWLFEILVNNDMAENFVVLWAGQDDLIRMHEQASPMFRYELSRISAGVFIALGQGKVQCPSDLRSQLFRGWFTPMLTDFGWLQRCSKGLDARALEDSLGQALLTLPLREQQSLFEEWFQCFASSGAECPNLSRAFQVWWRRSFAR

SEQ ID NO: 16712 - protein, 537 aa, Triticum aestivum
  peptide (1)..(537): Ceres Seq. ID no. 14303111
  misc_feature (233)..(537): NCBI GI NO: 38347118 NR Description: OSJNBa0009K15.15
  misc_feature (1)..(219): NCBI GI NO: 38347118 NR Description: OSJNBa0009K15.15
  misc_feature (17)..(537): NCBI GI NO: 34900946 NR Description: putative PRLI-interacting factor G
  misc_feature (8)..(537): NCBI GI NO: 21553858 NR Description: unknown [Arabidopsis thaliana]
  misc_feature (8)..(537): NCBI GI NO: 18397316 NR Description: f13j11 PRLI-interacting factor G -related
  misc_feature (8)..(537): NCBI GI NO: 25338924 NR Description: hypothetical protein At2g13690
  misc_feature (8)..(537): NCBI GI NO: 39104567 NR Description: putative f13j11 PRLI-interacting factor G
  misc_feature (87)..(537): NCBI GI NO: 15238599 NR Description: expressed protein [Arabidopsis thaliana]
  misc_feature (62)..(535): NCBI GI NO: 32488518 NR Description: OSJNBa0011J08.25
  misc_feature (147)..(537): NCBI GI NO: 15222554 NR Description: expressed protein [Arabidopsis thaliana]
MAEHAARHLRRRGPVAGWCCSFAGVPPSPDHRLHPHRTLSHAAAPPTAGSVCTGGEGPRKQPQLPPKSPSSFHGSPSSKLAGLIDYPRRILSPGRVSPIDPDAHPPPPPTPNPTDQPQHPEQQQPPPMAPFVAVREEEEEGQGDGLDLRLCLRGRDGATGCVMDLDSAVLCGSSAFFAAMAPEPNASGAGARRIEVDGVDNVAAFRDAVELMFHADAPRWLARAGVSRAIAVLEVASSIMFDKGIRSCLEYIEAVPWNENEEEKLKHLFARCTFDEALSKDVLARLQTQPSSSSEDLTGQLIQSVTSSTNNSARKDMQSLINGLLSKSSVYQKDLSGLNKRSLYQICCSCLNLLVELFKEDSEPKCGTDQALKVRHNNKPMIERVSKQSENLSWLFEILVNNDMAENFVVLWAGQDDLIRMHEQASPMFRYELSRISAGVFIALGQGKVQCPSDLRSQLFRGWFTPMLTDFGWLQRCSKGLDARALEDSLGQALLTLPLREQQSLFEEWFQCFASSGAECPNLSRAFQVWWRRSFAR

SEQ ID NO: 16713 - protein, 410 aa, Triticum aestivum
  peptide (1)..(410): Ceres Seq. ID no. 14303112
  misc_feature (106)..(410): NCBI GI NO: 38347118 NR Description: OSJNBa0009K15.15
  misc_feature (1)..(92): NCBI GI NO: 38347118 NR Description: OSJNBa0009K15.15
  misc_feature (1)..(410): NCBI GI NO: 34900946 NR Description: putative PRLI-interacting factor G
  misc_feature (1)..(410): NCBI GI NO: 21553858 NR Description: unknown [Arabidopsis thaliana]
  misc_feature (1)..(410): NCBI GI NO: 18397316 NR Description: f13j11 PRLI-interacting factor G -related
  misc_feature (1)..(410): NCBI GI NO: 25338924 NR Description: hypothetical protein At2g13690
  misc_feature (1)..(410): NCBI GI NO: 39104567 NR Description: putative f13j11 PRLI-interacting factor G
  misc_feature (1)..(410): NCBI GI NO: 15238599 NR Description: expressed protein [Arabidopsis thaliana]
  misc_feature (1)..(408): NCBI GI NO: 32488518 NR Description: OSJNBa0011J08.25
  misc_feature (20)..(410): NCBI GI NO: 15222554 NR Description: expressed protein [Arabidopsis thaliana]
MAPFVAVREEEEEGQGDGLDLRLCLRGRDGATGCVMDLDSAVLCGSSAFFAAMAPEPNASGAGARRIEVDGVDNVAAFRDAVELMFHADAPRWLARAGVSRAIAVLEVASSIMFDKGIRSCLEYIEAVPWNENEEEKLKHLFARCTFDEALSKDVLARLQTQPSSSSEDLTGQLIQSVTSSTNNSARKDMQSLINGLLSKSSVYQKDLSGLNKRSLYQICCSCLNLLVELFKEDSEPKCGTDQALKVRHNNKPMIERVSKQSENLSWLFEILVNNDMAENFVVLWAGQDDLIRMHEQASPMFRYELSRISAGVFIALGQGKVQCPSDLRSQLFRGWFTPMLTDFGWLQRCSKGLDARALEDSLGQALLTLPLREQQSLFEEWFQCFASSGAECPNLSRAFQVWWRRSFAR

SEQ ID NO: 16714 - DNA, 1745 bp, Triticum aestivum
  misc_feature (1)..(1745): Ceres Seq. ID no. 13663413
aatcgaaagtagcacaccaccgcccagcgcagctcccgagacaccgcatttctcgtctcctctcgctctccgtccaagcaagaagtcaggacgaacacgtcacattcgaccatggacatgcccacggcggcgtgctcaccgtcctcgtcggcgccgcctccgccgtcgtcgtccggcgtcgatgtggccgttgacgcgcggacagaagaggtccggcggcgcctgctcctcgatgccgccatcgacggcaacctcgacctccttgccaggatggcgctggggttgctgccgccggcgcctagcgccacgggcgcggacgccaccgccggcgtctggtcgacgtgcggcagggcgctgcacctggccgcgaccaacggcaggaccgacgtctgccgctacctggtccaggacctcggcatccccgtcgacgccctctccgatgagcgcgagacgccgctgctcctggcggccaccttcggccacaccgccacggcggcctggctcctggagcgcggcgccagcccgcgcgccccggacgtcgacggcgagaccccgctccactgggccgcttacaacggggatcgcgacctggcgatgctgctcctgtgcaagggcgccgacgtgggcgcggcgaacccccggggcacagcgctccacgtcgccgccatgcgggggtgcccggaagtcatccgtgtcctgctgcgccacggcgccgatcccaacaagttcgccagccgtgtcttcacgcccttggtctcatcgcttcttggtggctccgtggaatgcatgaagctgctcattgaggctggggctaatgttcatgccggtggattcagtggagcgacccctctgttgttagcgtgcagccgccgtcgcaacatcggattcgtcaagtgcttgttgaaggctggagcagatccgaaccttcctgacgaacttggtaggttgccgatagaaattgctgcggtccaaggtggaaaaagacttgttcaacttctgtttcctgtgacccgatgccctccaaacatggttggctggagtgttgctggcatcatgagttatgtgaattctgctgcttacaaggagcgggtgagaaaggactcttgtaagaggaaagctgaactaaaactagaagggaacaaggcctacgaaaccaaggactacgacacggctatacttatgtacaacatggcattgaagtttgatgacccaaaggacatagacgcctccatatatgcaaacaagagcctctgttggctgcgccttggtgtgggcgacgaggcgctttcggacgcccaggcctgcatcaggttatggcctgactgggggaaaggctactaccgccaaggcgaggccttccgcttcctgcaggactacgccagcgcttacaccgcgtttgtcaaggcatcggagcttgatccgcagaaccccaagatcgccaacgccctccgggatctcttggagcgcacgaagggcgcctcggtttcacggtgcttggagggaggggtgcaaggacgaagtcaggttctgtctgggccgtgtgatcaagcagtccaagggcagggctcttttgtgcaggcagtaggtagaggtcagccactatccagtggccagtaggaaaatggtgaagcggtgtgaaaactgtggcgggagtcggaggatgtatagttgtttttcggagaaagtctaaaaaaaaccttgaacttggagtcgaaagctaaatcaaaccccgaacttctaatccg

SEQ ID NO: 16715 - protein, 501 aa, Triticum aestivum
  peptide (1)..(501): Ceres Seq. ID no. 13663414
  misc_feature (145)..(176): Pfam Name: Pfam Description:  Ankyrin repeat
  misc_feature (106)..(364): NCBI GI NO: 15528712 NR Description: putative ankyrin-like protein
  misc_feature (358)..(420): NCBI GI NO: 15528712 NR Description: putative ankyrin-like protein
  misc_feature (26)..(341): NCBI GI NO: 24745936 NR Description: ankyrin-like protein [Solanum tuberosum]
  misc_feature (327)..(451): NCBI GI NO: 24745936 NR Description: ankyrin-like protein [Solanum tuberosum]
  misc_feature (41)..(450): NCBI GI NO: 27542766 NR Description: ankyrin-like protein-like protein
  misc_feature (26)..(320): NCBI GI NO: 34329680 NR Description: unknown [Nicotiana benthamiana]
  misc_feature (327)..(451): NCBI GI NO: 34329680 NR Description: unknown [Nicotiana benthamiana]
  misc_feature (26)..(451): NCBI GI NO: 15229331 NR Description: ankyrin-related protein [Arabidopsis thaliana]
  misc_feature (33)..(447): NCBI GI NO: 27542768 NR Description: ankyrin-like protein-like protein
  misc_feature (29)..(445): NCBI GI NO: 34896852 NR Description: putative ankyrin [Oryza sativa]
MDMPTAACSPSSSAPPPPSSSGVDVAVDARTEEVRRRLLLDAAIDGNLDLLARMALGLLPPAPSATGADATAGVWSTCGRALHLAATNGRTDVCRYLVQDLGIPVDALSDERETPLLLAATFGHTATAAWLLERGASPRAPDVDGETPLHWAAYNGDRDLAMLLLCKGADVGAANPRGTALHVAAMRGCPEVIRVLLRHGADPNKFASRVFTPLVSSLLGGSVECMKLLIEAGANVHAGGFSGATPLLLACSRRRNIGFVKCLLKAGADPNLPDELGRLPIEIAAVQGGKRLVQLLFPVTRCPPNMVGWSVAGIMSYVNSAAYKERVRKDSCKRKAELKLEGNKAYETKDYDTAILMYNMALKFDDPKDIDASIYANKSLCWLRLGVGDEALSDAQACIRLWPDWGKGYYRQGEAFRFLQDYASAYTAFVKASELDPQNPKIANALRDLLERTKGASVSRCLEGGVQGRSQVLSGPCDQAVQGQGSFVQAVGRGQPLSSGQ

SEQ ID NO: 16716 - protein, 499 aa, Triticum aestivum
  peptide (1)..(499): Ceres Seq. ID no. 13663415
  misc_feature (143)..(174): Pfam Name: Pfam Description:  Ankyrin repeat
  misc_feature (104)..(362): NCBI GI NO: 15528712 NR Description: putative ankyrin-like protein
  misc_feature (356)..(418): NCBI GI NO: 15528712 NR Description: putative ankyrin-like protein
  misc_feature (24)..(339): NCBI GI NO: 24745936 NR Description: ankyrin-like protein [Solanum tuberosum]
  misc_feature (325)..(449): NCBI GI NO: 24745936 NR Description: ankyrin-like protein [Solanum tuberosum]
  misc_feature (39)..(448): NCBI GI NO: 27542766 NR Description: ankyrin-like protein-like protein
  misc_feature (24)..(318): NCBI GI NO: 34329680 NR Description: unknown [Nicotiana benthamiana]
  misc_feature (325)..(449): NCBI GI NO: 34329680 NR Description: unknown [Nicotiana benthamiana]
  misc_feature (24)..(449): NCBI GI NO: 15229331 NR Description: ankyrin-related protein [Arabidopsis thaliana]
  misc_feature (31)..(445): NCBI GI NO: 27542768 NR Description: ankyrin-like protein-like protein
  misc_feature (27)..(443): NCBI GI NO: 34896852 NR Description: putative ankyrin [Oryza sativa]
MPTAACSPSSSAPPPPSSSGVDVAVDARTEEVRRRLLLDAAIDGNLDLLARMALGLLPPAPSATGADATAGVWSTCGRALHLAATNGRTDVCRYLVQDLGIPVDALSDERETPLLLAATFGHTATAAWLLERGASPRAPDVDGETPLHWAAYNGDRDLAMLLLCKGADVGAANPRGTALHVAAMRGCPEVIRVLLRHGADPNKFASRVFTPLVSSLLGGSVECMKLLIEAGANVHAGGFSGATPLLLACSRRRNIGFVKCLLKAGADPNLPDELGRLPIEIAAVQGGKRLVQLLFPVTRCPPNMVGWSVAGIMSYVNSAAYKERVRKDSCKRKAELKLEGNKAYETKDYDTAILMYNMALKFDDPKDIDASIYANKSLCWLRLGVGDEALSDAQACIRLWPDWGKGYYRQGEAFRFLQDYASAYTAFVKASELDPQNPKIANALRDLLERTKGASVSRCLEGGVQGRSQVLSGPCDQAVQGQGSFVQAVGRGQPLSSGQ

SEQ ID NO: 16717 - protein, 448 aa, Triticum aestivum
  peptide (1)..(448): Ceres Seq. ID no. 13663416
  misc_feature (92)..(123): Pfam Name: Pfam Description:  Ankyrin repeat
  misc_feature (53)..(311): NCBI GI NO: 15528712 NR Description: putative ankyrin-like protein
  misc_feature (305)..(367): NCBI GI NO: 15528712 NR Description: putative ankyrin-like protein
  misc_feature (1)..(288): NCBI GI NO: 24745936 NR Description: ankyrin-like protein [Solanum tuberosum]
  misc_feature (274)..(398): NCBI GI NO: 24745936 NR Description: ankyrin-like protein [Solanum tuberosum]
  misc_feature (1)..(397): NCBI GI NO: 27542766 NR Description: ankyrin-like protein-like protein
  misc_feature (1)..(267): NCBI GI NO: 34329680 NR Description: unknown [Nicotiana benthamiana]
  misc_feature (274)..(398): NCBI GI NO: 34329680 NR Description: unknown [Nicotiana benthamiana]
  misc_feature (1)..(398): NCBI GI NO: 15229331 NR Description: ankyrin-related protein [Arabidopsis thaliana]
  misc_feature (1)..(394): NCBI GI NO: 27542768 NR Description: ankyrin-like protein-like protein
  misc_feature (1)..(392): NCBI GI NO: 34896852 NR Description: putative ankyrin [Oryza sativa]
MALGLLPPAPSATGADATAGVWSTCGRALHLAATNGRTDVCRYLVQDLGIPVDALSDERETPLLLAATFGHTATAAWLLERGASPRAPDVDGETPLHWAAYNGDRDLAMLLLCKGADVGAANPRGTALHVAAMRGCPEVIRVLLRHGADPNKFASRVFTPLVSSLLGGSVECMKLLIEAGANVHAGGFSGATPLLLACSRRRNIGFVKCLLKAGADPNLPDELGRLPIEIAAVQGGKRLVQLLFPVTRCPPNMVGWSVAGIMSYVNSAAYKERVRKDSCKRKAELKLEGNKAYETKDYDTAILMYNMALKFDDPKDIDASIYANKSLCWLRLGVGDEALSDAQACIRLWPDWGKGYYRQGEAFRFLQDYASAYTAFVKASELDPQNPKIANALRDLLERTKGASVSRCLEGGVQGRSQVLSGPCDQAVQGQGSFVQAVGRGQPLSSGQ

SEQ ID NO: 16718 - DNA, 942 bp, Triticum aestivum
  misc_feature (1)..(942): Ceres Seq. ID no. 15179828
acctacccccgttcccccaaaacccaggtacccaggctttccctctgcgagccccccgagccctaagctccagcgagcccctatggcggcgcaggagatcaaggacgccgtgcaggcttacacgggcctctcacccgcggccgccttcaccgtgctggctctcatgctcgccacctacctcatcgtctccaccctcttcgtcgccccagacgccgccgcttccgcaccggcggctcatccccagccgcctcagcagcagaagcaggtgacggaggcggaggcggaggcggaggagccgttcgtgccgctgtttccggaccctgtgcaggtgggcgagatcacgctcgagcagctcagggcgtatgacggcaaggatccagccaagtccatcctcatcgccatccgcggtcaggtctacgacgtctcgcgcgggaggctgttttatggacctcaaggaccatactccttgtttgccgggagggatgcatctcgggccctggcattgatgtcatttgaccttaatgacctgactggagacttggaaggcctgagcccagacgaactggaggttttacaagactgggaagagaagtttaaagagaggtaccctgtggtgggccatcttccttgtgagaaaggcaacagctgatgctcagcctgatcacgaggaagagaaggcctaactctgtgtctgggttcttgtctcgttgcctgtaagttcttgtgtcttttactactggactgcgagcggtagagagatctaatgcgctgacaggtgatgttgtttgtatgtgtgctgcatgagtgtgtgtgactaatgcacctgctttactactactactttggttggtgtgtgtcagtgtgtgggaggaattttgagtgacagagaaaccttggcgctgaaaggccgtgctttagattcgtgccataatccaattcacc

SEQ ID NO: 16719 - protein, 215 aa, Triticum aestivum
  peptide (1)..(215): Ceres Seq. ID no. 15179829
  misc_feature (112)..(206): Pfam Name: Pfam Description:  Cytochrome b5-like Heme/Steroid binding domain
  misc_feature (31)..(206): NCBI GI NO: 4960156 NR Description: putative progesterone-binding protein homolog
  misc_feature (31)..(206): NCBI GI NO: 15242943 NR Description: cytochrome b5 domain-containing protein
  misc_feature (53)..(206): NCBI GI NO: 37535798 NR Description: putative steroid membrane binding protein
  misc_feature (74)..(206): NCBI GI NO: 37535794 NR Description: putative steroid membrane binding protein
  misc_feature (95)..(213): NCBI GI NO: 4960154 NR Description: putative progesterone-binding protein homolog
  misc_feature (95)..(213): NCBI GI NO: 15229044 NR Description: cytochrome b5 domain-containing protein
  misc_feature (112)..(208): NCBI GI NO: 40889041 NR Description: Chain A
  misc_feature (112)..(208): NCBI GI NO: 15224648 NR Description: cytochrome b5 domain-containing protein
  misc_feature (101)..(211): NCBI GI NO: 40741827 NR Description: hypothetical protein AN4939.2
  misc_feature (112)..(213): NCBI GI NO: 18859969 NR Description: CG9066-PA [Drosophila melanogaster]
PTPVPPKPRYPGFPSASPPSPKLQRAPMAAQEIKDAVQAYTGLSPAAAFTVLALMLATYLIVSTLFVAPDAAASAPAAHPQPPQQQKQVTEAEAEAEEPFVPLFPDPVQVGEITLEQLRAYDGKDPAKSILIAIRGQVYDVSRGRLFYGPQGPYSLFAGRDASRALALMSFDLNDLTGDLEGLSPDELEVLQDWEEKFKERYPVVGHLPCEKGNS

SEQ ID NO: 16720 - protein, 188 aa, Triticum aestivum
  peptide (1)..(188): Ceres Seq. ID no. 15179830
  misc_feature (85)..(179): Pfam Name: Pfam Description:  Cytochrome b5-like Heme/Steroid binding domain
  misc_feature (4)..(179): NCBI GI NO: 4960156 NR Description: putative progesterone-binding protein homolog
  misc_feature (4)..(179): NCBI GI NO: 15242943 NR Description: cytochrome b5 domain-containing protein
  misc_feature (26)..(179): NCBI GI NO: 37535798 NR Description: putative steroid membrane binding protein
  misc_feature (47)..(179): NCBI GI NO: 37535794 NR Description: putative steroid membrane binding protein
  misc_feature (68)..(186): NCBI GI NO: 4960154 NR Description: putative progesterone-binding protein homolog
  misc_feature (68)..(186): NCBI GI NO: 15229044 NR Description: cytochrome b5 domain-containing protein
  misc_feature (85)..(181): NCBI GI NO: 40889041 NR Description: Chain A
  misc_feature (85)..(181): NCBI GI NO: 15224648 NR Description: cytochrome b5 domain-containing protein
  misc_feature (74)..(184): NCBI GI NO: 40741827 NR Description: hypothetical protein AN4939.2
  misc_feature (85)..(186): NCBI GI NO: 18859969 NR Description: CG9066-PA [Drosophila melanogaster]
MAAQEIKDAVQAYTGLSPAAAFTVLALMLATYLIVSTLFVAPDAAASAPAAHPQPPQQQKQVTEAEAEAEEPFVPLFPDPVQVGEITLEQLRAYDGKDPAKSILIAIRGQVYDVSRGRLFYGPQGPYSLFAGRDASRALALMSFDLNDLTGDLEGLSPDELEVLQDWEEKFKERYPVVGHLPCEKGNS

SEQ ID NO: 16721 - protein, 161 aa, Triticum aestivum
  peptide (1)..(161): Ceres Seq. ID no. 15179831
  misc_feature (58)..(152): Pfam Name: Pfam Description:  Cytochrome b5-like Heme/Steroid binding domain
  misc_feature (1)..(152): NCBI GI NO: 4960156 NR Description: putative progesterone-binding protein homolog
  misc_feature (1)..(152): NCBI GI NO: 15242943 NR Description: cytochrome b5 domain-containing protein
  misc_feature (1)..(152): NCBI GI NO: 37535798 NR Description: putative steroid membrane binding protein
  misc_feature (20)..(152): NCBI GI NO: 37535794 NR Description: putative steroid membrane binding protein
  misc_feature (41)..(159): NCBI GI NO: 4960154 NR Description: putative progesterone-binding protein homolog
  misc_feature (41)..(159): NCBI GI NO: 15229044 NR Description: cytochrome b5 domain-containing protein
  misc_feature (58)..(154): NCBI GI NO: 40889041 NR Description: Chain A
  misc_feature (58)..(154): NCBI GI NO: 15224648 NR Description: cytochrome b5 domain-containing protein
  misc_feature (47)..(157): NCBI GI NO: 40741827 NR Description: hypothetical protein AN4939.2
  misc_feature (58)..(159): NCBI GI NO: 18859969 NR Description: CG9066-PA [Drosophila melanogaster]
MLATYLIVSTLFVAPDAAASAPAAHPQPPQQQKQVTEAEAEAEEPFVPLFPDPVQVGEITLEQLRAYDGKDPAKSILIAIRGQVYDVSRGRLFYGPQGPYSLFAGRDASRALALMSFDLNDLTGDLEGLSPDELEVLQDWEEKFKERYPVVGHLPCEKGNS

SEQ ID NO: 16722 - DNA, 764 bp, Triticum aestivum
  misc_feature (1)..(764): Ceres Seq. ID no. 15227264
gttcgttccgaccgttcatttgcatcccctttccttccgctggcgcgagggacgggataatggcggcagcgtgctccctctcccccctccctctcgcgccgcctgtggcacccaggccagcgctcttctcgaggtgcgtcgctgctccgcgccgtggtaggaatgccgggggaggcaccgggcgcttgcgcctcgccaggaggctgcgcccgcctgccgccgccatcgaagaggtggagcagaccgaggccatgatgagggtggctgcggacgacgatagcatcaccgccaccgtggtgtcggtgctgctcacggtctcgttcgtcggcctctccctcctcaccatcggggtgatctatctggcggtgcaggacttcttgcagaagagggagagcgagaagtttgagagggaggaagctgagagacagaaagaggaggcgaggcagaagagggccaaagcgaggggaaagaaaagaaatcgacgatgactgcttcttcagtaacctcagtgtgagaactcatggctggttcttctgtaacctggatcattctccggggtatgatttttgtgctggtttcgtgtcattctgacgttctggggcccctttctcatcgtagttcagttcagatgagttccatttcctgtcagttattcaggctgtgaatcgtgagtaaaagtgttatgtactgcaaaatacatggtaaattatatctcaaaaccgacgccgaccgaataaacctgatgcatgcggtcttcggtcctg

SEQ ID NO: 16723 - protein, 161 aa, Triticum aestivum
  peptide (1)..(161): Ceres Seq. ID no. 15227265
  misc_feature (20)..(117): NCBI GI NO: 34902104 NR Description: hypothetical protein
  misc_feature (102)..(158): NCBI GI NO: 34902104 NR Description: hypothetical protein
  misc_feature (96)..(158): NCBI GI NO: 15227050 NR Description: expressed protein [Arabidopsis thaliana]
SFRPFICIPFPSAGARDGIMAAACSLSPLPLAPPVAPRPALFSRCVAAPRRGRNAGGGTGRLRLARRLRPPAAAIEEVEQTEAMMRVAADDDSITATVVSVLLTVSFVGLSLLTIGVIYLAVQDFLQKRESEKFEREEAERQKEEARQKRAKARGKKRNRR

SEQ ID NO: 16724 - protein, 142 aa, Triticum aestivum
  peptide (1)..(142): Ceres Seq. ID no. 15227266
  misc_feature (1)..(98): NCBI GI NO: 34902104 NR Description: hypothetical protein
  misc_feature (83)..(139): NCBI GI NO: 34902104 NR Description: hypothetical protein
  misc_feature (77)..(139): NCBI GI NO: 15227050 NR Description: expressed protein [Arabidopsis thaliana]
MAAACSLSPLPLAPPVAPRPALFSRCVAAPRRGRNAGGGTGRLRLARRLRPPAAAIEEVEQTEAMMRVAADDDSITATVVSVLLTVSFVGLSLLTIGVIYLAVQDFLQKRESEKFEREEAERQKEEARQKRAKARGKKRNRR

SEQ ID NO: 16725 - DNA, 1366 bp, Triticum aestivum
  misc_feature (1)..(1366): Ceres Seq. ID no. 15170103
accctctcccggcccattacattacacgaaagcaaagcatacctgagcagagctgcggcagagcttcgagctgaggccttgtggagtagtcaaacattgagagaacgaaaatggcacggagcccagctcaaatcgctatccggttgatcgctctgctccttctgcttccagtggcgtggtcggcgacgttcacgatgaccaacaactgcggctacacggtgtggccggggctgctgtcgggcgcaggcacggcgccgctgtcgacgacggggttcgcgctggcgcagggcgcgtcggcgactgtgaccgcgccggcgagctggtccgggcgcatgtgggcgcgcacgctctgcgccgaggacgctgccggcaagttcacctgcgccacgggcgactgcggctcgggcgcgctccagtgcaacggcggtggcgctgcgccgccggcctcgcttgtggagttcacgctcgacggctccggtggcatggacttcttcgacgtcagcctggtcgacggctacaacctgccgatgctggtcgtaccgcagggcgctgccactgccgccgccgccagctccacgagcgggcccaagtgcatggccaccggctgcctcgtcgacctgaacgccgcgtgcccggccgcgctgaaggtcacgtcgacgggtgccgccagcagcgcggtcggcgggagcgccatggcgtgccgcagcgcgtgcgaggcgttcggctccccggagtactgctgcagcggcgcgtacgggagccccaacacgtgccggccgtcggcgtactcgcagtacttcaagagcgcgtgcccccgcgcctacagctacgcgtacgacgactccacctccaccttcacctgcgccgccggcaccaactacgccatcaccttctgcccaagcaccaccagtgggaagtacaccgacgagaacccgcaggctgccggcgtgccgcccacgaacggcacgatggtgtaccgcggcggcgagcagttctcaacgggcggcggcgcctccattgccgcccatgcgtcgcagctcctcctcgcggtggccgtcgccgtcgctctgctcctactgtaagcgctggccatgcgtgcaatggcggcaacagcgtacgtactcccgcctctcgaggtgtccttatccggccggcctcttttggcgtgacggaggcagagataatactcgagcggagcacaggagaagggcgggcgggcaagatcaaagtttgacagtgccgctactgatgactgataaaacaaggatatcttacagtagtgtcgtagacttaggttaatgtttactctctacgcttctttgatttgttgagcggaaatgatgatgtgttcattgttcgtcgtgat

SEQ ID NO: 16726 - protein, 323 aa, Triticum aestivum
  peptide (1)..(323): Ceres Seq. ID no. 15170104
  misc_feature (31)..(263): Pfam Name: Pfam Description:  Thaumatin family
  misc_feature (2)..(323): NCBI GI NO: 37531042 NR Description: putative thaumatin-like protein
  misc_feature (24)..(319): NCBI GI NO: 25296204 NR Description: hypothetical protein T20H2.19
  misc_feature (24)..(319): NCBI GI NO: 30686652 NR Description: thaumatin family [Arabidopsis thaliana]
  misc_feature (12)..(323): NCBI GI NO: 6273383 NR Description: SCUTL1 [Vitis vinifera]
  misc_feature (24)..(297): NCBI GI NO: 15222875 NR Description: thaumatin family [Arabidopsis thaliana]
  misc_feature (6)..(264): NCBI GI NO: 15233437 NR Description: thaumatin family [Arabidopsis thaliana]
  misc_feature (24)..(264): NCBI GI NO: 4105697 NR Description: thaumatin-like protein [Arabidopsis thaliana]
  misc_feature (9)..(286): NCBI GI NO: 37531036 NR Description: putative thaumatin-like protein
  misc_feature (1)..(263): NCBI GI NO: 15238593 NR Description: thaumatin-like protein, putative
  misc_feature (1)..(306): NCBI GI NO: 34905146 NR Description: putative pathogenesis-related protein
MARSPAQIAIRLIALLLLLPVAWSATFTMTNNCGYTVWPGLLSGAGTAPLSTTGFALAQGASATVTAPASWSGRMWARTLCAEDAAGKFTCATGDCGSGALQCNGGGAAPPASLVEFTLDGSGGMDFFDVSLVDGYNLPMLVVPQGAATAAAASSTSGPKCMATGCLVDLNAACPAALKVTSTGAASSAVGGSAMACRSACEAFGSPEYCCSGAYGSPNTCRPSAYSQYFKSACPRAYSYAYDDSTSTFTCAAGTNYAITFCPSTTSGKYTDENPQAAGVPPTNGTMVYRGGEQFSTGGGASIAAHASQLLLAVAVAVALLLL

SEQ ID NO: 16727 - protein, 295 aa, Triticum aestivum
  peptide (1)..(295): Ceres Seq. ID no. 15170105
  misc_feature (3)..(235): Pfam Name: Pfam Description:  Thaumatin family
  misc_feature (1)..(295): NCBI GI NO: 37531042 NR Description: putative thaumatin-like protein
  misc_feature (1)..(291): NCBI GI NO: 25296204 NR Description: hypothetical protein T20H2.19
  misc_feature (1)..(291): NCBI GI NO: 30686652 NR Description: thaumatin family [Arabidopsis thaliana]
  misc_feature (1)..(295): NCBI GI NO: 6273383 NR Description: SCUTL1 [Vitis vinifera]
  misc_feature (1)..(269): NCBI GI NO: 15222875 NR Description: thaumatin family [Arabidopsis thaliana]
  misc_feature (1)..(236): NCBI GI NO: 15233437 NR Description: thaumatin family [Arabidopsis thaliana]
  misc_feature (1)..(236): NCBI GI NO: 4105697 NR Description: thaumatin-like protein [Arabidopsis thaliana]
  misc_feature (1)..(258): NCBI GI NO: 37531036 NR Description: putative thaumatin-like protein
  misc_feature (1)..(235): NCBI GI NO: 15238593 NR Description: thaumatin-like protein, putative
  misc_feature (1)..(278): NCBI GI NO: 34905146 NR Description: putative pathogenesis-related protein
MTNNCGYTVWPGLLSGAGTAPLSTTGFALAQGASATVTAPASWSGRMWARTLCAEDAAGKFTCATGDCGSGALQCNGGGAAPPASLVEFTLDGSGGMDFFDVSLVDGYNLPMLVVPQGAATAAAASSTSGPKCMATGCLVDLNAACPAALKVTSTGAASSAVGGSAMACRSACEAFGSPEYCCSGAYGSPNTCRPSAYSQYFKSACPRAYSYAYDDSTSTFTCAAGTNYAITFCPSTTSGKYTDENPQAAGVPPTNGTMVYRGGEQFSTGGGASIAAHASQLLLAVAVAVALLLL

SEQ ID NO: 16728 - protein, 249 aa, Triticum aestivum
  peptide (1)..(249): Ceres Seq. ID no. 15170106
  misc_feature (1)..(189): Pfam Name: Pfam Description:  Thaumatin family
  misc_feature (1)..(249): NCBI GI NO: 37531042 NR Description: putative thaumatin-like protein
  misc_feature (1)..(245): NCBI GI NO: 25296204 NR Description: hypothetical protein T20H2.19
  misc_feature (1)..(245): NCBI GI NO: 30686652 NR Description: thaumatin family [Arabidopsis thaliana]
  misc_feature (1)..(249): NCBI GI NO: 6273383 NR Description: SCUTL1 [Vitis vinifera]
  misc_feature (1)..(223): NCBI GI NO: 15222875 NR Description: thaumatin family [Arabidopsis thaliana]
  misc_feature (1)..(190): NCBI GI NO: 15233437 NR Description: thaumatin family [Arabidopsis thaliana]
  misc_feature (1)..(190): NCBI GI NO: 4105697 NR Description: thaumatin-like protein [Arabidopsis thaliana]
  misc_feature (1)..(212): NCBI GI NO: 37531036 NR Description: putative thaumatin-like protein
  misc_feature (1)..(189): NCBI GI NO: 15238593 NR Description: thaumatin-like protein, putative
  misc_feature (1)..(232): NCBI GI NO: 34905146 NR Description: putative pathogenesis-related protein
MWARTLCAEDAAGKFTCATGDCGSGALQCNGGGAAPPASLVEFTLDGSGGMDFFDVSLVDGYNLPMLVVPQGAATAAAASSTSGPKCMATGCLVDLNAACPAALKVTSTGAASSAVGGSAMACRSACEAFGSPEYCCSGAYGSPNTCRPSAYSQYFKSACPRAYSYAYDDSTSTFTCAAGTNYAITFCPSTTSGKYTDENPQAAGVPPTNGTMVYRGGEQFSTGGGASIAAHASQLLLAVAVAVALLLL

SEQ ID NO: 16729 - DNA, 1725 bp, Triticum aestivum
  misc_feature (1)..(1725): Ceres Seq. ID no. 13657939
attactacgactgcctttcccttcttccaagcaaaccgctcttcgcgtctcaggttcctccgcacaccgctccgccacagtcgacggatcggaaccgcagacccgcccccgccaccaaaccctagcccgccgccccgccgcccgcgatgtcggccgcggccgtcgcgccgagccctgcggcgccgctcccgtcggcgcccccgccgtcctaccccgcggcgccccccgccccctccgccgaggacgacgacgacctctacggccgcctcaagtccctccagcgccacatggagttcgtcgagatccaggaggagtacgtcaaggacgagcagaagaacctgaagcgcgagctgctgcgcgcgcaggaggaggtcaagcggatccagtccgtgccgctcgtcatcggccagttcatggagatggtcgacggcaacaacggcatcgtcggctccaccaccggcagcaactactacgtgcgcatcctcagcaccatcaaccgcgagctgctcaagccctccgcctccgtcgccctgcaccgccactccaacgccctcgtcgacgtgctgccccccgaggccgactccagcatctcgctcctcgcctcgtcggagaagcccaacgtcctgtactcggacattggaggatgtgatatccaaaaacaagaaattcgggaggcagttgagctaccattgacacaccatgaattgtacaagcagattggtattgatccaccaagaggggtgctgctctatggtcctccaggcactggcaagaccatgcttgctaaagctgtggcgcatcacactactgctgcttttatcagagtggttggttcagagtttgtgcagaagtacttgggtgagggcccaaggatggttcgagatgtattccgcttagctaaagagaatgccccggctataatattcattgatgaggttgatgctatagccactgctcgattcgatgctcagaccggggctgaccgagaagttcagcgtattctgatggagctactgaatcagatggatggatttgatcaaacagtgaatgtgaaggttataatggcaaccaatcgggcagatactctagatcctgctctgttgcgtccaggaagactggacaggaaaatcgagttccccctgccggaccggaggcagaagaggcttgttttccaagtttgtactgctaagatgaacttgagtgacgaggttgatttggaagattatgtctccagacctgataaaatcagtgctgctgatatcactgctatttgccaggaagctggcatgcatgctgtccgcaaaaatcggtatgttatcctccccaaggacttcgagaagggttaccgaaccaacgtcaagaagcctgagtcagactttgacttctacaaataaggcagcaaacttttaaagaggatgctttatttcctacaggcgacatgattaacactctagatgaatttgtggatagtcgcctgatagtaatatcgttgtatccccgtgctcgtgtagtttgcacgttcagtctcaccagtgttgttaagctacttgtctgtacaattccttcctaaagtttcgcttgaccattttgcgcttttggaggctgtgatttgtcttccaaaggagaatcgagtacccccttttcgttcttaaagtttaaagtgcattaatctttttgattgaatttcgaaaaaaaaaaaaaaaaaagcttatcgataccgtcgac

SEQ ID NO: 16730 - protein, 415 aa, Triticum aestivum
  peptide (1)..(415): Ceres Seq. ID no. 13657940
  misc_feature (198)..(385): Pfam Name: AAA Pfam Description: ATPase family associated with various cellular activities
  misc_feature (2)..(415): NCBI GI NO: 1709798 NR Description: 26S PROTEASE REGULATORY SUBUNIT 6B HOMOLOG
  misc_feature (23)..(415): NCBI GI NO: 15237159 NR Description: 26S proteasome AAA-ATPase subunit RPT3
  misc_feature (48)..(415): NCBI GI NO: 17298145 NR Description: 26S proteasome regulatory particle triple-A ATPase subunit3
  misc_feature (23)..(415): NCBI GI NO: 1172638 NR Description: 26S PROTEASE REGULATORY SUBUNIT 6B (ATPASE MS73)
  misc_feature (33)..(415): NCBI GI NO: 18860063 NR Description: CG16916-PA [Drosophila melanogaster]
  misc_feature (29)..(415): NCBI GI NO: 5729991 NR Description: proteasome 26S ATPase subunit 4 isoform 1
  misc_feature (29)..(415): NCBI GI NO: 25742677 NR Description: proteasome 26S  ATPase subunit 4
  misc_feature (29)..(415): NCBI GI NO: 30585275 NR Description: Homo sapiens proteasome
  misc_feature (29)..(415): NCBI GI NO: 26341428 NR Description: unnamed protein product [Mus musculus]
  misc_feature (1)..(415): NCBI GI NO: 17554784 NR Description: Proteasome Regulatory Particle, ATPase-like RPT-3
MSAAAVAPSPAAPLPSAPPPSYPAAPPAPSAEDDDDLYGRLKSLQRHMEFVEIQEEYVKDEQKNLKRELLRAQEEVKRIQSVPLVIGQFMEMVDGNNGIVGSTTGSNYYVRILSTINRELLKPSASVALHRHSNALVDVLPPEADSSISLLASSEKPNVLYSDIGGCDIQKQEIREAVELPLTHHELYKQIGIDPPRGVLLYGPPGTGKTMLAKAVAHHTTAAFIRVVGSEFVQKYLGEGPRMVRDVFRLAKENAPAIIFIDEVDAIATARFDAQTGADREVQRILMELLNQMDGFDQTVNVKVIMATNRADTLDPALLRPGRLDRKIEFPLPDRRQKRLVFQVCTAKMNLSDEVDLEDYVSRPDKISAADITAICQEAGMHAVRKNRYVILPKDFEKGYRTNVKKPESDFDFYK

SEQ ID NO: 16731 - protein, 368 aa, Triticum aestivum
  peptide (1)..(368): Ceres Seq. ID no. 13657941
  misc_feature (151)..(338): Pfam Name: AAA Pfam Description: ATPase family associated with various cellular activities
  misc_feature (1)..(368): NCBI GI NO: 1709798 NR Description: 26S PROTEASE REGULATORY SUBUNIT 6B HOMOLOG
  misc_feature (1)..(368): NCBI GI NO: 15237159 NR Description: 26S proteasome AAA-ATPase subunit RPT3
  misc_feature (1)..(368): NCBI GI NO: 17298145 NR Description: 26S proteasome regulatory particle triple-A ATPase subunit3
  misc_feature (1)..(368): NCBI GI NO: 1172638 NR Description: 26S PROTEASE REGULATORY SUBUNIT 6B (ATPASE MS73)
  misc_feature (1)..(368): NCBI GI NO: 18860063 NR Description: CG16916-PA [Drosophila melanogaster]
  misc_feature (1)..(368): NCBI GI NO: 5729991 NR Description: proteasome 26S ATPase subunit 4 isoform 1
  misc_feature (1)..(368): NCBI GI NO: 30585275 NR Description: Homo sapiens proteasome
  misc_feature (1)..(368): NCBI GI NO: 25742677 NR Description: proteasome 26S  ATPase subunit 4
  misc_feature (1)..(368): NCBI GI NO: 26341428 NR Description: unnamed protein product [Mus musculus]
  misc_feature (1)..(368): NCBI GI NO: 17554784 NR Description: Proteasome Regulatory Particle, ATPase-like RPT-3
MEFVEIQEEYVKDEQKNLKRELLRAQEEVKRIQSVPLVIGQFMEMVDGNNGIVGSTTGSNYYVRILSTINRELLKPSASVALHRHSNALVDVLPPEADSSISLLASSEKPNVLYSDIGGCDIQKQEIREAVELPLTHHELYKQIGIDPPRGVLLYGPPGTGKTMLAKAVAHHTTAAFIRVVGSEFVQKYLGEGPRMVRDVFRLAKENAPAIIFIDEVDAIATARFDAQTGADREVQRILMELLNQMDGFDQTVNVKVIMATNRADTLDPALLRPGRLDRKIEFPLPDRRQKRLVFQVCTAKMNLSDEVDLEDYVSRPDKISAADITAICQEAGMHAVRKNRYVILPKDFEKGYRTNVKKPESDFDFYK

SEQ ID NO: 16732 - protein, 326 aa, Triticum aestivum
  peptide (1)..(326): Ceres Seq. ID no. 13657942
  misc_feature (109)..(296): Pfam Name: AAA Pfam Description: ATPase family associated with various cellular activities
  misc_feature (1)..(326): NCBI GI NO: 1709798 NR Description: 26S PROTEASE REGULATORY SUBUNIT 6B HOMOLOG
  misc_feature (1)..(326): NCBI GI NO: 15237159 NR Description: 26S proteasome AAA-ATPase subunit RPT3
  misc_feature (1)..(326): NCBI GI NO: 17298145 NR Description: 26S proteasome regulatory particle triple-A ATPase subunit3
  misc_feature (1)..(326): NCBI GI NO: 1172638 NR Description: 26S PROTEASE REGULATORY SUBUNIT 6B (ATPASE MS73)
  misc_feature (1)..(326): NCBI GI NO: 18860063 NR Description: CG16916-PA [Drosophila melanogaster]
  misc_feature (1)..(326): NCBI GI NO: 5729991 NR Description: proteasome 26S ATPase subunit 4 isoform 1
  misc_feature (1)..(326): NCBI GI NO: 25742677 NR Description: proteasome 26S  ATPase subunit 4
  misc_feature (1)..(326): NCBI GI NO: 30585275 NR Description: Homo sapiens proteasome
  misc_feature (1)..(326): NCBI GI NO: 26341428 NR Description: unnamed protein product [Mus musculus]
  misc_feature (1)..(326): NCBI GI NO: 17554784 NR Description: Proteasome Regulatory Particle, ATPase-like RPT-3
MEMVDGNNGIVGSTTGSNYYVRILSTINRELLKPSASVALHRHSNALVDVLPPEADSSISLLASSEKPNVLYSDIGGCDIQKQEIREAVELPLTHHELYKQIGIDPPRGVLLYGPPGTGKTMLAKAVAHHTTAAFIRVVGSEFVQKYLGEGPRMVRDVFRLAKENAPAIIFIDEVDAIATARFDAQTGADREVQRILMELLNQMDGFDQTVNVKVIMATNRADTLDPALLRPGRLDRKIEFPLPDRRQKRLVFQVCTAKMNLSDEVDLEDYVSRPDKISAADITAICQEAGMHAVRKNRYVILPKDFEKGYRTNVKKPESDFDFYK

SEQ ID NO: 16733 - DNA, 2048 bp, Triticum aestivum
  misc_feature (1)..(2048): Ceres Seq. ID no. 15169490
atactaaacctaatcccatatagcctagcctaatcgagcacaccgccgccgccgccgcgccggttcagcgctgccctcacatcgccggcagcccagccctcacgctgcggccgtggcgccgtcctctacgccctccgtcgccgccgtcctctacgcccctctgccgccgccgaagctctccacggcaacaaccctctccaccgtcgacggcaccctgtagtcttgcacgcctccgacttctgcacccgaaaattattatccaacacatacgatagagacaggctgagattgttaaatggcaaagagaaagatgggttcagaagaggacatacgtggaaaaacggtgaaaagaaagggaccgaggcttcagctgactagcctgccaacggaaattctctgttgtatcttgtcgcaactgccgataaaagaagctgtgcggactagcatactgtaggaacagtggagatgtctttggcgttgccactcgaatctagcattcagtcttatatcaatgttgccagcagttcctcgtaatcgtatcattggagcgctaaaacttgatgataataaactgaggaagcaagagtttattcagagagttgatgcagtcctagagaaacacagtggtgcaggggttgacaggattcagtttcgtgctccatttgataataagcatagagaccagatagaaagatgggtgaactttgctactgcctcgaaggcgaagcagattattttcgatttctcgaccgccagcgacataagtcggccatgtaacttcgatttgcatcttcttgatgatagtaaaagtttaagcttgcggtctataaaactctgctctgtttctctaaaggtgcccgtgggattcaagggttttcagaaccttaaatcgacttacctagcagacacaaatattactgatgatggtcttcaacatttgatgtccaactgcagtgttctagagttccttggaattgcaggttgtgcaatgcttacaacgttgcaaatatctcatccttcaaacacacttaagcatttgcatgtatatgactgctgtttgcttcaagggatggagttaaactttggtctggtaagacttgagtacagaggtctgccgattgtgttatcgcctcctggaaccttgcttctaacaaatatgtgcataaagttggagggtatttgtacttctcttgaatacatcttcaccaaacttcgtgataatgtgcctcgtctcgaggttctgaatctaaaatgccaggagtataagatgactacattgccaggaaagctgcatgagtttgtttatttgaagcacctgatattggagttaacttttgagagctgtcagagagggaagactgatatccttcaatttgcctgccttctggttgctgctccttccttagaaaagcttgaatttcatatgtggctgcgctggggtcgggaacggtatagagccgaggacgggagtctccggagccttccttcccagccacactcccatctcaggtcggtcgatatcacggggttttacggcgagaaggaccggctggagcttgtgctccacatcctcagagattccgttgcgctggagtcgatgaaggtagatccaagccctgtggttgctgctgatgttaaccgacttgggggactggggagcatgcatgttcctcattttgtggatggctatgaagtcgcccttgagttcctctgcagcagagaccgtcgcaatgttgtccatggcgcgagccccgatatcatcgagagggcccgacgtgggtcttcccccctgagtccacgcaacagtagtgcaaaggcatcctggcaacgtgtgaagagggtgaagcgattgtcgcggccttcctccagccgaggagcttcctgaagctgctctatataccggcaagtacctggaaacagacgagaagcaaaagaatccagctctgccgacgtaatagagccgtcgtgttgtgggttccctgaggttgctatattttctggctttgttgtgttaaaaaaacttcaatgatttcagcaacttttgtgtc

SEQ ID NO: 16734 - protein, 457 aa, Triticum aestivum
  peptide (1)..(457): Ceres Seq. ID no. 15169491
  misc_feature (1)..(410): NCBI GI NO: 34899940 NR Description: P0428D12.10
  misc_feature (1)..(409): NCBI GI NO: 34394889 NR Description: unknown protein
  misc_feature (1)..(242): NCBI GI NO: 34899882 NR Description: OJ1714_H10.24
  misc_feature (293)..(409): NCBI GI NO: 34899882 NR Description: OJ1714_H10.24
  misc_feature (1)..(242): NCBI GI NO: 33146738 NR Description: unknown protein
  misc_feature (292)..(409): NCBI GI NO: 33146738 NR Description: unknown protein
  misc_feature (1)..(409): NCBI GI NO: 38344931 NR Description: OSJNBa0018M05.22
  misc_feature (1)..(409): NCBI GI NO: 34899896 NR Description: OJ1714_H10.31
  misc_feature (1)..(372): NCBI GI NO: 18481703 NR Description: hypothetical protein [Sorghum bicolor]
  misc_feature (1)..(368): NCBI GI NO: 5803254 NR Description: ESTs C97429
MLPAVPRNRIIGALKLDDNKLRKQEFIQRVDAVLEKHSGAGVDRIQFRAPFDNKHRDQIERWVNFATASKAKQIIFDFSTASDISRPCNFDLHLLDDSKSLSLRSIKLCSVSLKVPVGFKGFQNLKSTYLADTNITDDGLQHLMSNCSVLEFLGIAGCAMLTTLQISHPSNTLKHLHVYDCCLLQGMELNFGLVRLEYRGLPIVLSPPGTLLLTNMCIKLEGICTSLEYIFTKLRDNVPRLEVLNLKCQEYKMTTLPGKLHEFVYLKHLILELTFESCQRGKTDILQFACLLVAAPSLEKLEFHMWLRWGRERYRAEDGSLRSLPSQPHSHLRSVDITGFYGEKDRLELVLHILRDSVALESMKVDPSPVVAADVNRLGGLGSMHVPHFVDGYEVALEFLCSRDRRNVVHGASPDIIERARRGSSPLSPRNSSAKASWQRVKRVKRLSRPSSSRGAS

SEQ ID NO: 16735 - protein, 314 aa, Triticum aestivum
  peptide (1)..(314): Ceres Seq. ID no. 15169492
  misc_feature (1)..(267): NCBI GI NO: 34899940 NR Description: P0428D12.10
  misc_feature (1)..(266): NCBI GI NO: 34394889 NR Description: unknown protein
  misc_feature (1)..(99): NCBI GI NO: 34899882 NR Description: OJ1714_H10.24
  misc_feature (150)..(266): NCBI GI NO: 34899882 NR Description: OJ1714_H10.24
  misc_feature (1)..(99): NCBI GI NO: 33146738 NR Description: unknown protein
  misc_feature (149)..(266): NCBI GI NO: 33146738 NR Description: unknown protein
  misc_feature (1)..(266): NCBI GI NO: 38344931 NR Description: OSJNBa0018M05.22
  misc_feature (1)..(266): NCBI GI NO: 34899896 NR Description: OJ1714_H10.31
  misc_feature (1)..(229): NCBI GI NO: 18481703 NR Description: hypothetical protein [Sorghum bicolor]
  misc_feature (1)..(225): NCBI GI NO: 5803254 NR Description: ESTs C97429
MSNCSVLEFLGIAGCAMLTTLQISHPSNTLKHLHVYDCCLLQGMELNFGLVRLEYRGLPIVLSPPGTLLLTNMCIKLEGICTSLEYIFTKLRDNVPRLEVLNLKCQEYKMTTLPGKLHEFVYLKHLILELTFESCQRGKTDILQFACLLVAAPSLEKLEFHMWLRWGRERYRAEDGSLRSLPSQPHSHLRSVDITGFYGEKDRLELVLHILRDSVALESMKVDPSPVVAADVNRLGGLGSMHVPHFVDGYEVALEFLCSRDRRNVVHGASPDIIERARRGSSPLSPRNSSAKASWQRVKRVKRLSRPSSSRGAS

SEQ ID NO: 16736 - protein, 298 aa, Triticum aestivum
  peptide (1)..(298): Ceres Seq. ID no. 15169493
  misc_feature (1)..(251): NCBI GI NO: 34899940 NR Description: P0428D12.10
  misc_feature (1)..(250): NCBI GI NO: 34394889 NR Description: unknown protein
  misc_feature (1)..(83): NCBI GI NO: 34899882 NR Description: OJ1714_H10.24
  misc_feature (134)..(250): NCBI GI NO: 34899882 NR Description: OJ1714_H10.24
  misc_feature (1)..(83): NCBI GI NO: 33146738 NR Description: unknown protein
  misc_feature (133)..(250): NCBI GI NO: 33146738 NR Description: unknown protein
  misc_feature (1)..(250): NCBI GI NO: 38344931 NR Description: OSJNBa0018M05.22
  misc_feature (1)..(250): NCBI GI NO: 34899896 NR Description: OJ1714_H10.31
  misc_feature (1)..(213): NCBI GI NO: 18481703 NR Description: hypothetical protein [Sorghum bicolor]
  misc_feature (1)..(209): NCBI GI NO: 5803254 NR Description: ESTs C97429
MLTTLQISHPSNTLKHLHVYDCCLLQGMELNFGLVRLEYRGLPIVLSPPGTLLLTNMCIKLEGICTSLEYIFTKLRDNVPRLEVLNLKCQEYKMTTLPGKLHEFVYLKHLILELTFESCQRGKTDILQFACLLVAAPSLEKLEFHMWLRWGRERYRAEDGSLRSLPSQPHSHLRSVDITGFYGEKDRLELVLHILRDSVALESMKVDPSPVVAADVNRLGGLGSMHVPHFVDGYEVALEFLCSRDRRNVVHGASPDIIERARRGSSPLSPRNSSAKASWQRVKRVKRLSRPSSSRGAS

SEQ ID NO: 16737 - DNA, 1357 bp, Triticum aestivum
  misc_feature (1)..(1357): Ceres Seq. ID no. 13657872
accaatcatttcctcctcactctcgcttctccttttctgccttccaaccgaagccccatcccttgattccatccatcgttcgggatcctcctcctctcgcgcgcttctaggacccgtccgccctgggcaagttcgaggagatcgtggccgcgtccaaggggaagcagatcgtcatgttcctggactacgacggcacgctgtcccccatcgtcgatgaccccgacgccgccttcatgagcgagacgatgcggatggccgtgcgcagcgtggccaagcacttcccgacggcgatcgtcagcggtcggtgccgcgacaaggtgtttgatttcgtgaagctggcggagctctactacgccggcagccacggcatggacatcaagggcccggccaagtcctcaaagtccaaggccaaaggagttctcttccaaccagcaagcgagttcctgcccatgatagaagaggtgcatcagcggctgatagaggagacgaagcacgtagccggggccaaggtggagaacaacaagttctgcgtgtccgtccacttcagatgcgtcgacgaaaagagctggggcgcgctggcggagacggtgaagggcgtgatgcgggagtacccgaagctgcgcatgtcgcaggggcggatggtgttcgaggtgcggcccaccatcaagtgggacaagggcaaggccctcgagttcctgctcgagtcgctgggcttcgccgactgccccaacgtgctccccgtctacatcggcgacgaccgcaccgacgaggacgccttcaaggtgctgcgccggcggggccagggcgtcgggatcctcgtctccaagcaccccaaggacaccagcgcctccttctcgctgcaggagccggccgaggtcatggagttcctgctccgcctcgtcgagtggaagcagctctccaaggcgcgcctcaggctgcggcggcaggccgacgcctgatcggacgacgaggatcggccggccggcgggaatggccgaactaattatttcactgctacgtgtagcttagctagttaatgaaaatcccctgcttgctcatccgaacaaagccaaaggctacgtacgtggatgggaagaaggaacgtactacggcgaacctgcggagcattgttgcgccacatgttgtgttctaattaaccgtccttctttttctggggatgtataccgtacctaccgattatgcatgcatgtaaattacctttgtccacgtacaaggggaggaaccatggaataaacaaagagaaatctgagtaaataacaaaaaaaaaaaaaaaaaagcttatcgataccgtygaccaacacaataaagttggaacgggagggggggcccggtaccc

SEQ ID NO: 16738 - protein, 261 aa, Triticum aestivum
  peptide (1)..(261): Ceres Seq. ID no. 15219883
  misc_feature (2)..(232): Pfam Name: Pfam Description:  Trehalose-phosphatase
  misc_feature (1)..(249): NCBI GI NO: 18399940 NR Description: trehalose-6-phosphate phosphatase, putative
  misc_feature (1)..(249): NCBI GI NO: 21554408 NR Description: trehalose-phosphatase, putative
  misc_feature (1)..(248): NCBI GI NO: 30692524 NR Description: trehalose-6-phosphate phosphatase, putative
  misc_feature (1)..(248): NCBI GI NO: 30683008 NR Description: trehalose-6-phosphate phosphatase, putative
  misc_feature (1)..(249): NCBI GI NO: 25354597 NR Description: probable trehalose-phosphatase
  misc_feature (1)..(247): NCBI GI NO: 15227161 NR Description: trehalose-6-phosphate phosphatase, putative
  misc_feature (1)..(243): NCBI GI NO: 15238360 NR Description: trehalose-6-phosphate phosphatase, putative
  misc_feature (1)..(252): NCBI GI NO: 11282598 NR Description: trehalose-6-phosphate phosphatase-like protein -Arabidopsis thaliana
  misc_feature (1)..(247): NCBI GI NO: 15218205 NR Description: trehalose-6-phosphate phosphatase (TPPB)
  misc_feature (1)..(247): NCBI GI NO: 25354595 NR Description: trehalose-phosphatase (EC 3.1.3.12) B
MFLDYDGTLSPIVDDPDAAFMSETMRMAVRSVAKHFPTAIVSGRCRDKVFDFVKLAELYYAGSHGMDIKGPAKSSKSKAKGVLFQPASEFLPMIEEVHQRLIEETKHVAGAKVENNKFCVSVHFRCVDEKSWGALAETVKGVMREYPKLRMSQGRMVFEVRPTIKWDKGKALEFLLESLGFADCPNVLPVYIGDDRTDEDAFKVLRRRGQGVGILVSKHPKDTSASFSLQEPAEVMEFLLRLVEWKQLSKARLRLRRQADA

SEQ ID NO: 16739 - protein, 241 aa, Triticum aestivum
  peptide (1)..(241): Ceres Seq. ID no. 15219884
  misc_feature (1)..(212): Pfam Name: Pfam Description:  Trehalose-phosphatase
  misc_feature (1)..(229): NCBI GI NO: 18399940 NR Description: trehalose-6-phosphate phosphatase, putative
  misc_feature (1)..(229): NCBI GI NO: 21554408 NR Description: trehalose-phosphatase, putative
  misc_feature (1)..(228): NCBI GI NO: 30692524 NR Description: trehalose-6-phosphate phosphatase, putative
  misc_feature (1)..(228): NCBI GI NO: 30683008 NR Description: trehalose-6-phosphate phosphatase, putative
  misc_feature (1)..(229): NCBI GI NO: 25354597 NR Description: probable trehalose-phosphatase
  misc_feature (1)..(227): NCBI GI NO: 15227161 NR Description: trehalose-6-phosphate phosphatase, putative
  misc_feature (1)..(223): NCBI GI NO: 15238360 NR Description: trehalose-6-phosphate phosphatase, putative
  misc_feature (1)..(232): NCBI GI NO: 11282598 NR Description: trehalose-6-phosphate phosphatase-like protein -Arabidopsis thaliana
  misc_feature (1)..(227): NCBI GI NO: 15218205 NR Description: trehalose-6-phosphate phosphatase (TPPB)
  misc_feature (1)..(227): NCBI GI NO: 25354595 NR Description: trehalose-phosphatase (EC 3.1.3.12) B
MSETMRMAVRSVAKHFPTAIVSGRCRDKVFDFVKLAELYYAGSHGMDIKGPAKSSKSKAKGVLFQPASEFLPMIEEVHQRLIEETKHVAGAKVENNKFCVSVHFRCVDEKSWGALAETVKGVMREYPKLRMSQGRMVFEVRPTIKWDKGKALEFLLESLGFADCPNVLPVYIGDDRTDEDAFKVLRRRGQGVGILVSKHPKDTSASFSLQEPAEVMEFLLRLVEWKQLSKARLRLRRQADA

SEQ ID NO: 16740 - protein, 237 aa, Triticum aestivum
  peptide (1)..(237): Ceres Seq. ID no. 15219885
  misc_feature (1)..(208): Pfam Name: Pfam Description:  Trehalose-phosphatase
  misc_feature (1)..(225): NCBI GI NO: 18399940 NR Description: trehalose-6-phosphate phosphatase, putative
  misc_feature (1)..(225): NCBI GI NO: 21554408 NR Description: trehalose-phosphatase, putative
  misc_feature (1)..(224): NCBI GI NO: 30692524 NR Description: trehalose-6-phosphate phosphatase, putative
  misc_feature (1)..(224): NCBI GI NO: 30683008 NR Description: trehalose-6-phosphate phosphatase, putative
  misc_feature (1)..(225): NCBI GI NO: 25354597 NR Description: probable trehalose-phosphatase
  misc_feature (1)..(223): NCBI GI NO: 15227161 NR Description: trehalose-6-phosphate phosphatase, putative
  misc_feature (1)..(219): NCBI GI NO: 15238360 NR Description: trehalose-6-phosphate phosphatase, putative
  misc_feature (1)..(228): NCBI GI NO: 11282598 NR Description: trehalose-6-phosphate phosphatase-like protein -Arabidopsis thaliana
  misc_feature (1)..(223): NCBI GI NO: 15218205 NR Description: trehalose-6-phosphate phosphatase (TPPB)
  misc_feature (1)..(223): NCBI GI NO: 25354595 NR Description: trehalose-phosphatase (EC 3.1.3.12) B
MRMAVRSVAKHFPTAIVSGRCRDKVFDFVKLAELYYAGSHGMDIKGPAKSSKSKAKGVLFQPASEFLPMIEEVHQRLIEETKHVAGAKVENNKFCVSVHFRCVDEKSWGALAETVKGVMREYPKLRMSQGRMVFEVRPTIKWDKGKALEFLLESLGFADCPNVLPVYIGDDRTDEDAFKVLRRRGQGVGILVSKHPKDTSASFSLQEPAEVMEFLLRLVEWKQLSKARLRLRRQADA

SEQ ID NO: 16741 - DNA, 1951 bp, Triticum aestivum
  misc_feature (1)..(1951): Ceres Seq. ID no. 13657873
aactccaaaagagcagataagcccctcttcgtcccgcggtgcttcggctccgaaggcagccaccccgcaccgccggcggagccaccaacgccaccatcccaccgcaccgcccccatggcctccgccgcctccctcgccgtctcccaccacctcctccccgccgcgcccgcccgctcgcagccccgtccgcccgcccgcctcgtccgcctcccccgcacccgcctccgggtcgccgccatctcctcgtccccctcgcccccctcgcggcgcgaccgcgccgcggccggcctcgagcggtgcctggccgcgactccggcgccggccttcgccccgccggagatgaagggcgggagccagcgcgggtcgttcggggccgccacgctccagaaggccaagctcgacctctcccaaaagaggctcaaaggcgtccagcccgagctggcatctggtggtggtggtggagacaatgggaaacgaattggctatggtggtggtaatagtggagatgatgatggtgatgatgatgattacttcgaagactctgacgatggagatgaagaaagtggatttttcagaaggcgtataattatacaagagctttttaagagggagtttgttgatgccgttcttcaagagtggtacaaaacaatgagtaatttgccagctggtttgcgtcaagctcatgagatgggtttggtcagctcttctcagatggtcaaatatttgtcaatgtttggaaggcccacaaaggctagatatttctctcgagcctttccggacttcttctcaagagaccttgttggaagaatgcttgcagatccatctttcctgcataagatgacctttgagttgctagctaccgttagtacatctgtttgttgggagatgaaaaatcgcaaggagaggttccaagaagaatgggatttggtgtttctcaatgtagttactgccacagtttgcaatttagctgttttcagttcacttgcgccatgccgctcatatatgatccagaaacttcccaataacatatttgagaagagctatcctttcatgagacagtttggtcttctaagaagaacccagtccctcttcagcaaggctgctgagctttgcctaggtgggctaattgttggctccattcaaggtggtctatcgaatatcctttctgctggaagagaaagacggttgtcgatgactgttccttctatcagcaacaatgctcttagttatggagcttattatgggctttatgcaaatctgcggtatcaaattttatgtggtcttgatagatcaatggcaaaccattttgatgtccttggtgttacaatctttttcggcacagcgatgaggttgctgaatattcaaattggggagctatcgagacgtgcctggcttggtgagggagcagatctgcttaactcggataatttgttgagaacatacaatggcccagcagcagagcttggcatcaatcaacaggcagagtggttcatgtccaagaatgcaattgtatctggcttagaacttctaggcatcaagtatggtgcacctaaagatgcctctccaaagcttcggcgaaaaagaattgtccgaaagaagtagggtggatgagggaaagcctaactatacaaacgctgagctcgatggttttgatacccatgctggaacagttttgcctcagttccgccatgccttgtgttgcctatcgaagtaggatggatgaggggaaaattgtaacttgtgttctagttgcaatttggggccaagatcaaaggctttcaattttttactcggaggcgattcggccggttcgctgaaggtccttaccattcttctgtattgttttgagcaaaagtagacctccaaagttctaactgtaatttctagattatagatagtatgttattcactatatattttcttcattctttttgaaatggtgttttacttc

SEQ ID NO: 16742 - protein, 533 aa, Triticum aestivum
  peptide (1)..(533): Ceres Seq. ID no. 13657874
  misc_feature (44)..(533): NCBI GI NO: 22327037 NR Description: expressed protein [Arabidopsis thaliana]
  misc_feature (195)..(533): NCBI GI NO: 9759209 NR Description: gb|AAD25674
  misc_feature (141)..(430): NCBI GI NO: 34900644 NR Description: hypothetical protein~similar to Arabidopsisthaliana chromosome5
  misc_feature (141)..(397): NCBI GI NO: 34395170 NR Description: chloroplast lumen common protein family-likeprotein
  misc_feature (135)..(397): NCBI GI NO: 15242979 NR Description: expressed protein [Arabidopsis thaliana]
  misc_feature (269)..(460): NCBI GI NO: 34909204 NR Description: P0425G02.25
NSKRADKPLFVPRCFGSEGSHPAPPAEPPTPPSHRTAPMASAASLAVSHHLLPAAPARSQPRPPARLVRLPRTRLRVAAISSSPSPPSRRDRAAAGLERCLAATPAPAFAPPEMKGGSQRGSFGAATLQKAKLDLSQKRLKGVQPELASGGGGGDNGKRIGYGGGNSGDDDGDDDDYFEDSDDGDEESGFFRRRIIIQELFKREFVDAVLQEWYKTMSNLPAGLRQAHEMGLVSSSQMVKYLSMFGRPTKARYFSRAFPDFFSRDLVGRMLADPSFLHKMTFELLATVSTSVCWEMKNRKERFQEEWDLVFLNVVTATVCNLAVFSSLAPCRSYMIQKLPNNIFEKSYPFMRQFGLLRRTQSLFSKAAELCLGGLIVGSIQGGLSNILSAGRERRLSMTVPSISNNALSYGAYYGLYANLRYQILCGLDRSMANHFDVLGVTIFFGTAMRLLNIQIGELSRRAWLGEGADLLNSDNLLRTYNGPAAELGINQQAEWFMSKNAIVSGLELLGIKYGAPKDASPKLRRKRIVRKK

SEQ ID NO: 16743 - protein, 495 aa, Triticum aestivum
  peptide (1)..(495): Ceres Seq. ID no. 13657875
  misc_feature (6)..(495): NCBI GI NO: 22327037 NR Description: expressed protein [Arabidopsis thaliana]
  misc_feature (157)..(495): NCBI GI NO: 9759209 NR Description: gb|AAD25674
  misc_feature (103)..(392): NCBI GI NO: 34900644 NR Description: hypothetical protein~similar to Arabidopsisthaliana chromosome5
  misc_feature (103)..(359): NCBI GI NO: 34395170 NR Description: chloroplast lumen common protein family-likeprotein
  misc_feature (97)..(359): NCBI GI NO: 15242979 NR Description: expressed protein [Arabidopsis thaliana]
  misc_feature (231)..(422): NCBI GI NO: 34909204 NR Description: P0425G02.25
MASAASLAVSHHLLPAAPARSQPRPPARLVRLPRTRLRVAAISSSPSPPSRRDRAAAGLERCLAATPAPAFAPPEMKGGSQRGSFGAATLQKAKLDLSQKRLKGVQPELASGGGGGDNGKRIGYGGGNSGDDDGDDDDYFEDSDDGDEESGFFRRRIIIQELFKREFVDAVLQEWYKTMSNLPAGLRQAHEMGLVSSSQMVKYLSMFGRPTKARYFSRAFPDFFSRDLVGRMLADPSFLHKMTFELLATVSTSVCWEMKNRKERFQEEWDLVFLNVVTATVCNLAVFSSLAPCRSYMIQKLPNNIFEKSYPFMRQFGLLRRTQSLFSKAAELCLGGLIVGSIQGGLSNILSAGRERRLSMTVPSISNNALSYGAYYGLYANLRYQILCGLDRSMANHFDVLGVTIFFGTAMRLLNIQIGELSRRAWLGEGADLLNSDNLLRTYNGPAAELGINQQAEWFMSKNAIVSGLELLGIKYGAPKDASPKLRRKRIVRKK

SEQ ID NO: 16744 - protein, 420 aa, Triticum aestivum
  peptide (1)..(420): Ceres Seq. ID no. 13657876
  misc_feature (1)..(420): NCBI GI NO: 22327037 NR Description: expressed protein [Arabidopsis thaliana]
  misc_feature (82)..(420): NCBI GI NO: 9759209 NR Description: gb|AAD25674
  misc_feature (28)..(317): NCBI GI NO: 34900644 NR Description: hypothetical protein~similar to Arabidopsisthaliana chromosome5
  misc_feature (28)..(284): NCBI GI NO: 34395170 NR Description: chloroplast lumen common protein family-likeprotein
  misc_feature (22)..(284): NCBI GI NO: 15242979 NR Description: expressed protein [Arabidopsis thaliana]
  misc_feature (156)..(347): NCBI GI NO: 34909204 NR Description: P0425G02.25
MKGGSQRGSFGAATLQKAKLDLSQKRLKGVQPELASGGGGGDNGKRIGYGGGNSGDDDGDDDDYFEDSDDGDEESGFFRRRIIIQELFKREFVDAVLQEWYKTMSNLPAGLRQAHEMGLVSSSQMVKYLSMFGRPTKARYFSRAFPDFFSRDLVGRMLADPSFLHKMTFELLATVSTSVCWEMKNRKERFQEEWDLVFLNVVTATVCNLAVFSSLAPCRSYMIQKLPNNIFEKSYPFMRQFGLLRRTQSLFSKAAELCLGGLIVGSIQGGLSNILSAGRERRLSMTVPSISNNALSYGAYYGLYANLRYQILCGLDRSMANHFDVLGVTIFFGTAMRLLNIQIGELSRRAWLGEGADLLNSDNLLRTYNGPAAELGINQQAEWFMSKNAIVSGLELLGIKYGAPKDASPKLRRKRIVRKK

SEQ ID NO: 16745 - DNA, 1618 bp, Triticum aestivum
  misc_feature (1)..(1618): Ceres Seq. ID no. 14303177
cccaccaccccgcgcatttattcccctcccgtcctccccccgcgccatgccgtcgcgcccctcctctcctcccacgcccgcctccccgcccgtccgacaccgcccgtcccacgctggcgccgccccccgccgccgtcgccgtcgccgcaacgatgccggagcctgacgacgagggggcggggcagcagcagccaaaggcggggcccgcgctcgagggcctcgtggtggggagctactgccacgacgtgctcctccagggcggccgcgtcgtgggcgagacgctcggcggggcggcggccttcgtctccaccgtgctcgacgccgcctcgcccccggaggcctccttctccgtcgtgtccaaggtcgggcccgacttcgcctacgcctccgcgccggcgcccgcgcggcaccccccgctgctctgccccgcgcggcccaccacctccttccacgcccggttctccgacgccgccgcgtccgcgcacgcgcccgacaggcagctcaggcgcgtccacgcctgcgatccgatctaccccgatgacctccccgaccgccgcttcgcctacggcctcgccgtcggcgtcgccggggaggtgctgccggagacgctcgagcggatgattcggctctgccgcgcggtgctcgtggacgcgcaggcgctgatccgggccttcggcgccgagggcgacggcagcggcgctgccgtccgccacgtggcgctggagggcacgccgtacgcgcggcttctgcagcgggtggcgttcctcaaggcgtcgtcggaggaggcgccgtacgtgggggtggagacggcgagacggcgctgctgcgtgatcgtgacggaggggagggacgggtgccggctttattgggacggcggggaggcacgcgtggcgccgttccccgccgtccaggtggatcctacaggtgccggagacagctatctcgccggtttcgcggccggtctgctttgggggctctcagctacggacgccgcgctgcttggtaacttcttcggcgcagctgctgtctcccaagtcggcgttcccaccttccatcccaagatgttgcaggctgtcaaacggatactcgaggacaaggcgataccatggtctagtccatgtataaacggcaccaccttcaccttccagagatcgattatgcacgatgagctacacgcgtccctggaagaagcggcgaggctgatgcgcgagcagtcaccaccagcaactgagaatggtgatggtattctctcggcacaagagccgacttcaccgccaagtggatgctgacctgaagttcactgcgaaataatgggaaactgccctcccagattttacattgagatctgtacagccaacagacgaaatagattgctcggccagagcttacactcatgaactgtgttgaatagggttctactcagacagtttctcatttgtcaggcaaagcaaaagagcgagttagcatatggagcaccattctgtaatactgagattgagcttgtttcggctgggctgtacataccgccccttcaagttccccctataattttgtagttcatgagatccaacaaaagtactcgtattatggaggcaaatttacacatggttttaaagtt

SEQ ID NO: 16746 - protein, 428 aa, Triticum aestivum
  peptide (1)..(428): Ceres Seq. ID no. 14303178
  misc_feature (73)..(355): Pfam Name: Pfam Description:  pfkB family carbohydrate kinase
  misc_feature (30)..(426): NCBI GI NO: 29788872 NR Description: unknown protein
  misc_feature (6)..(356): NCBI GI NO: 31126792 NR Description: unknown protein
  misc_feature (52)..(359): NCBI GI NO: 15237741 NR Description: pfkB type carbohydrate kinase protein family
  misc_feature (52)..(356): NCBI GI NO: 8843793 NR Description: gene_id:MZN1
  misc_feature (8)..(68): NCBI GI NO: 6523547 NR Description: hydroxyproline-rich glycoprotein DZ-HRGP
  misc_feature (8)..(69): NCBI GI NO: 6523547 NR Description: hydroxyproline-rich glycoprotein DZ-HRGP
  misc_feature (8)..(68): NCBI GI NO: 6523547 NR Description: hydroxyproline-rich glycoprotein DZ-HRGP
  misc_feature (8)..(68): NCBI GI NO: 6523547 NR Description: hydroxyproline-rich glycoprotein DZ-HRGP
  misc_feature (8)..(68): NCBI GI NO: 6523547 NR Description: hydroxyproline-rich glycoprotein DZ-HRGP
  misc_feature (8)..(68): NCBI GI NO: 6523547 NR Description: hydroxyproline-rich glycoprotein DZ-HRGP
HHPAHLFPSRPPPAPCRRAPPLLPRPPPRPSDTARPTLAPPPAAVAVAATMPEPDDEGAGQQQPKAGPALEGLVVGSYCHDVLLQGGRVVGETLGGAAAFVSTVLDAASPPEASFSVVSKVGPDFAYASAPAPARHPPLLCPARPTTSFHARFSDAAASAHAPDRQLRRVHACDPIYPDDLPDRRFAYGLAVGVAGEVLPETLERMIRLCRAVLVDAQALIRAFGAEGDGSGAAVRHVALEGTPYARLLQRVAFLKASSEEAPYVGVETARRRCCVIVTEGRDGCRLYWDGGEARVAPFPAVQVDPTGAGDSYLAGFAAGLLWGLSATDAALLGNFFGAAAVSQVGVPTFHPKMLQAVKRILEDKAIPWSSPCINGTTFTFQRSIMHDELHASLEEAARLMREQSPPATENGDGILSAQEPTSPPSGC

SEQ ID NO: 16747 - protein, 378 aa, Triticum aestivum
  peptide (1)..(378): Ceres Seq. ID no. 14303179
  misc_feature (23)..(305): Pfam Name: Pfam Description:  pfkB family carbohydrate kinase
  misc_feature (1)..(376): NCBI GI NO: 29788872 NR Description: unknown protein
  misc_feature (1)..(306): NCBI GI NO: 31126792 NR Description: unknown protein
  misc_feature (2)..(309): NCBI GI NO: 15237741 NR Description: pfkB type carbohydrate kinase protein family
  misc_feature (2)..(306): NCBI GI NO: 8843793 NR Description: gene_id:MZN1
  misc_feature (1)..(18): NCBI GI NO: 6523547 NR Description: hydroxyproline-rich glycoprotein DZ-HRGP
  misc_feature (1)..(19): NCBI GI NO: 6523547 NR Description: hydroxyproline-rich glycoprotein DZ-HRGP
  misc_feature (1)..(18): NCBI GI NO: 6523547 NR Description: hydroxyproline-rich glycoprotein DZ-HRGP
  misc_feature (1)..(18): NCBI GI NO: 6523547 NR Description: hydroxyproline-rich glycoprotein DZ-HRGP
  misc_feature (1)..(18): NCBI GI NO: 6523547 NR Description: hydroxyproline-rich glycoprotein DZ-HRGP
  misc_feature (1)..(18): NCBI GI NO: 6523547 NR Description: hydroxyproline-rich glycoprotein DZ-HRGP
MPEPDDEGAGQQQPKAGPALEGLVVGSYCHDVLLQGGRVVGETLGGAAAFVSTVLDAASPPEASFSVVSKVGPDFAYASAPAPARHPPLLCPARPTTSFHARFSDAAASAHAPDRQLRRVHACDPIYPDDLPDRRFAYGLAVGVAGEVLPETLERMIRLCRAVLVDAQALIRAFGAEGDGSGAAVRHVALEGTPYARLLQRVAFLKASSEEAPYVGVETARRRCCVIVTEGRDGCRLYWDGGEARVAPFPAVQVDPTGAGDSYLAGFAAGLLWGLSATDAALLGNFFGAAAVSQVGVPTFHPKMLQAVKRILEDKAIPWSSPCINGTTFTFQRSIMHDELHASLEEAARLMREQSPPATENGDGILSAQEPTSPPSGC

SEQ ID NO: 16748 - protein, 223 aa, Triticum aestivum
  peptide (1)..(223): Ceres Seq. ID no. 14303180
  misc_feature (1)..(150): Pfam Name: Pfam Description:  pfkB family carbohydrate kinase
  misc_feature (1)..(221): NCBI GI NO: 29788872 NR Description: unknown protein
  misc_feature (1)..(151): NCBI GI NO: 31126792 NR Description: unknown protein
  misc_feature (1)..(154): NCBI GI NO: 15237741 NR Description: pfkB type carbohydrate kinase protein family
  misc_feature (1)..(151): NCBI GI NO: 8843793 NR Description: gene_id:MZN1
MIRLCRAVLVDAQALIRAFGAEGDGSGAAVRHVALEGTPYARLLQRVAFLKASSEEAPYVGVETARRRCCVIVTEGRDGCRLYWDGGEARVAPFPAVQVDPTGAGDSYLAGFAAGLLWGLSATDAALLGNFFGAAAVSQVGVPTFHPKMLQAVKRILEDKAIPWSSPCINGTTFTFQRSIMHDELHASLEEAARLMREQSPPATENGDGILSAQEPTSPPSGC

SEQ ID NO: 16749 - DNA, 1713 bp, Triticum aestivum
  misc_feature (1)..(1713): Ceres Seq. ID no. 14303091
cccagagaatctttcccccccttccttcctcactccctttctctttcctgacctcaccctacctcatccccctttctttatccccctccctctctccctctgctgacaggggagtgagtgagtgagtgaggcgagcgagtgatggcacggggaggagctcgcgccgtcgcgccggcggctctgctgctcctgcttctcctcgcggcaggcggcggtgtgcattgcctgaggtcaagggcggagagcggcgccacggtcctggagctgcggcaccacgccagcctcggctcaggcggcaggagcggcagcgcggaggaggcccgcggcgtcctggcctccgacgccgccagggtctcgtcgctgcagcggcgcatcggcagctacggcctgatcaggtcgtcggacgcggcgtccaagctggcgcaggtgcccgtcacctctggcgccaggctgcggacgctcaactacgtggccaccgtgggcatcggcggcggcgaggccacggtgatcgtggacacggccagcgagctcacctgggtgcagtgcaagccctgcgacgcctgccacgaccagcaggagccgctcttcgacccgtcggcgtcgccgtcctacgccgccgtgccgtgcaactcctcctcctgcgacgcgctgcgggtggccaccgggatgtccggcggccaggcgtgcgaccagccggcggcctgcagctacgcgctcagctaccgcgacgggtcctactcccgcggcgtgctggcgcacgacaggctgagcctggccggcgaggacatcgagggcttcgtgttcggctgcggcaccagcaaccagggcccgttcgggggcacgtcggggctgatggggctcggccggagcccgctctcgctgatatcccagaccacggagcagttcggcggcgtgttctcctactgcctgccgccgaaggagtccggctcgtcgggctccctcgtcctcggcgacgacgcctcggcgtaccgcaactccacgccgatcgtgtacaccgcgatggtcaccgacccgctgcaggggcccttctacatggtcaacctgaccgggatcagcgtgggcggcgaggaggtgcagtccccgggcttctcggccggcggcggcggcggcgggagggccatcgtggactcgggcacgatcatcacgagcctggtgccgtcggtgtacgcggcggtgcggggcgagttcgtgaggcagctggcggagtacccgcgggcgccggccttctccatcctggacacctgcttcgacctgacggggctgagggaggtgcaggtgccgagcctgaggctggcgttcgacggcggcgcggaggtggaggtggactccaagggcgtgctgtacgtggtcgccggcgacgcctcccaggtgtgcctggccctggccgccctcgggtccgaggacgacaccccgatcatcggcaactaccagcagaagaacctgcgggtggtcttcgacaccgccgcgtcccagatcgggttcgcgcaggagacctgtgattacatttgatttgaccgtggatcatcgggagctgcgtgtgcgtgtgtgcgcgtgtgaatatcctatagttggggatttgttttggaatcacctctggtgattggcttttttatttttatttttttgagttgtggtgatcggcaattggcaatacggtatttagttattggcaaatgtacaagcgtttgtagc

SEQ ID NO: 16750 - protein, 462 aa, Triticum aestivum
  peptide (1)..(462): Ceres Seq. ID no. 14303092
  misc_feature (58)..(453): Pfam Name: Pfam Description:  Eukaryotic aspartyl protease
  misc_feature (37)..(459): NCBI GI NO: 18412482 NR Description: aspartyl protease -related [Arabidopsis thaliana]
  misc_feature (37)..(459): NCBI GI NO: 25406599 NR Description: probable aspartyl proteinase, 105611-106921
  misc_feature (37)..(459): NCBI GI NO: 21595063 NR Description: putative aspartyl protease [Arabidopsis thaliana]
  misc_feature (63)..(459): NCBI GI NO: 7489168 NR Description: nucleoid DNA-binding protein cnd41
  misc_feature (63)..(459): NCBI GI NO: 24430421 NR Description: 41 kD chloroplast nucleoid DNA binding protein
  misc_feature (19)..(459): NCBI GI NO: 22326716 NR Description: nucleoid DNA-binding protein cnd41 - like protein
  misc_feature (14)..(459): NCBI GI NO: 11358588 NR Description: nucleoid DNA-binding protein cnd41-like protein -Arabidopsis thaliana
  misc_feature (21)..(274): NCBI GI NO: 38344196 NR Description: OSJNBa0064G10.12
  misc_feature (299)..(459): NCBI GI NO: 38344196 NR Description: OSJNBa0064G10.12
  misc_feature (1)..(459): NCBI GI NO: 34895664 NR Description: nucleoid DNA-binding protein cnd41-like protein
MARGGARAVAPAALLLLLLLAAGGGVHCLRSRAESGATVLELRHHASLGSGGRSGSAEEARGVLASDAARVSSLQRRIGSYGLIRSSDAASKLAQVPVTSGARLRTLNYVATVGIGGGEATVIVDTASELTWVQCKPCDACHDQQEPLFDPSASPSYAAVPCNSSSCDALRVATGMSGGQACDQPAACSYALSYRDGSYSRGVLAHDRLSLAGEDIEGFVFGCGTSNQGPFGGTSGLMGLGRSPLSLISQTTEQFGGVFSYCLPPKESGSSGSLVLGDDASAYRNSTPIVYTAMVTDPLQGPFYMVNLTGISVGGEEVQSPGFSAGGGGGGRAIVDSGTIITSLVPSVYAAVRGEFVRQLAEYPRAPAFSILDTCFDLTGLREVQVPSLRLAFDGGAEVEVDSKGVLYVVAGDASQVCLALAALGSEDDTPIIGNYQQKNLRVVFDTAASQIGFAQETCDYI

SEQ ID NO: 16751 - protein, 287 aa, Triticum aestivum
  peptide (1)..(287): Ceres Seq. ID no. 14303093
  misc_feature (1)..(278): Pfam Name: Pfam Description:  Eukaryotic aspartyl protease
  misc_feature (1)..(284): NCBI GI NO: 18412482 NR Description: aspartyl protease -related [Arabidopsis thaliana]
  misc_feature (1)..(284): NCBI GI NO: 25406599 NR Description: probable aspartyl proteinase, 105611-106921
  misc_feature (1)..(284): NCBI GI NO: 21595063 NR Description: putative aspartyl protease [Arabidopsis thaliana]
  misc_feature (1)..(284): NCBI GI NO: 7489168 NR Description: nucleoid DNA-binding protein cnd41
  misc_feature (1)..(284): NCBI GI NO: 24430421 NR Description: 41 kD chloroplast nucleoid DNA binding protein
  misc_feature (1)..(284): NCBI GI NO: 22326716 NR Description: nucleoid DNA-binding protein cnd41 - like protein
  misc_feature (1)..(284): NCBI GI NO: 11358588 NR Description: nucleoid DNA-binding protein cnd41-like protein -Arabidopsis thaliana
  misc_feature (1)..(99): NCBI GI NO: 38344196 NR Description: OSJNBa0064G10.12
  misc_feature (124)..(284): NCBI GI NO: 38344196 NR Description: OSJNBa0064G10.12
  misc_feature (1)..(284): NCBI GI NO: 34895664 NR Description: nucleoid DNA-binding protein cnd41-like protein
MSGGQACDQPAACSYALSYRDGSYSRGVLAHDRLSLAGEDIEGFVFGCGTSNQGPFGGTSGLMGLGRSPLSLISQTTEQFGGVFSYCLPPKESGSSGSLVLGDDASAYRNSTPIVYTAMVTDPLQGPFYMVNLTGISVGGEEVQSPGFSAGGGGGGRAIVDSGTIITSLVPSVYAAVRGEFVRQLAEYPRAPAFSILDTCFDLTGLREVQVPSLRLAFDGGAEVEVDSKGVLYVVAGDASQVCLALAALGSEDDTPIIGNYQQKNLRVVFDTAASQIGFAQETCDYI

SEQ ID NO: 16752 - DNA, 1373 bp, Triticum aestivum
  misc_feature (1)..(1373): Ceres Seq. ID no. 13659033
ctagaacatcctaatcgaaaaatagacccaccccatgcgtgctagagatgttccagtcccctccgttttgctcatcctcttggcgctctccgtcgtcgtcacgcaggcgcccttcttccgggctcggcgcctgattagcgatgacggcggtggccgcgctacggcttgcaccaaggacgccgcctcctgtgactgcgattactctgatgggaaatgggtgaggagccgctccactgatgctatgccatacggggaggactgcccgttcctcgaccccggcttccgctgcgtgcaaaatgggcggaatgactcgtcctttcgacactggcgttggcaacctcgccgcggcagctgccacctccctaagttcaatgcgacggatatgctggagaggagccggaacggccggatcgtgttcgtcggtgactccattggccgcaaccagtgggagtccatgttgtgcatgctcgccgccgccgtgcctgccggttcgaggatatacgagcagttcggtaagcccctgagccggcacaaaggctatctatccatggtctttgcggactacaacctctccgtggagtactaccgtgcacccatgcttgtcatggttgatcgcctccctccggcgagcgatggtgccatcaagagggccatccggcttgacgcactaccgcggcatgccgcccgctgggctggcgctgacgtgctcatcctcaacacgggccactggtggaacctacacaagaccatcaaatctggaaactatttcacggtgggcgatcggttcaacatgacaacggacattaaggaagcattccgacggtctctccagacggtgaaagattgggcactaaccaatccacgactctccaagagcagctacatcttctttaggagctattctccatcgcactacgacaacgggacatgggacacaggtggctcttgcgcggaccaatgggatccgctaacgatgattaccagtgaaagtgaccagcatgagcacttgtggatcaacacaatgatctcaagtgcggcacagagcatgaggagacggcatggaatgaacaaagatgcggttttcttgaacataacgtacatgacgggcatgaggggggacgggcacccgtcgaggcaccgggagcccgagacgccatcggatgccccagaggattgcagccactggtgcctgccgggtgtgccggacacgtggaaccagatgatgtacgggcacctcgtgtccatgggattcgacatgaggtcaattaagagataggtagatgcatgatatatgtgtggttgtgtgtgcatgtataatgtgtggaaggcaagattggaccagtgctagtcataattaatttaactttatcgtg

SEQ ID NO: 16753 - protein, 413 aa, Triticum aestivum
  peptide (1)..(413): Ceres Seq. ID no. 13659034
  misc_feature (10)..(406): NCBI GI NO: 15229797 NR Description: expressed protein [Arabidopsis thaliana]
  misc_feature (12)..(406): NCBI GI NO: 9759321 NR Description: gb|AAF00670
  misc_feature (40)..(406): NCBI GI NO: 18415139 NR Description: expressed protein [Arabidopsis thaliana]
  misc_feature (54)..(398): NCBI GI NO: 6862912 NR Description: unknown protein [Arabidopsis thaliana]
  misc_feature (54)..(398): NCBI GI NO: 15239660 NR Description: hypothetical protein [Arabidopsis thaliana]
  misc_feature (49)..(402): NCBI GI NO: 23617116 NR Description: leaf senescence related protein-like
  misc_feature (53)..(402): NCBI GI NO: 15228743 NR Description: expressed protein [Arabidopsis thaliana]
  misc_feature (54)..(402): NCBI GI NO: 15229945 NR Description: expressed protein [Arabidopsis thaliana]
  misc_feature (53)..(402): NCBI GI NO: 9759298 NR Description: emb|CAB82953
  misc_feature (54)..(402): NCBI GI NO: 15242021 NR Description: expressed protein [Arabidopsis thaliana]
MRARDVPVPSVLLILLALSVVVTQAPFFRARRLISDDGGGRATACTKDAASCDCDYSDGKWVRSRSTDAMPYGEDCPFLDPGFRCVQNGRNDSSFRHWRWQPRRGSCHLPKFNATDMLERSRNGRIVFVGDSIGRNQWESMLCMLAAAVPAGSRIYEQFGKPLSRHKGYLSMVFADYNLSVEYYRAPMLVMVDRLPPASDGAIKRAIRLDALPRHAARWAGADVLILNTGHWWNLHKTIKSGNYFTVGDRFNMTTDIKEAFRRSLQTVKDWALTNPRLSKSSYIFFRSYSPSHYDNGTWDTGGSCADQWDPLTMITSESDQHEHLWINTMISSAAQSMRRRHGMNKDAVFLNITYMTGMRGDGHPSRHREPETPSDAPEDCSHWCLPGVPDTWNQMMYGHLVSMGFDMRSIKR

SEQ ID NO: 16754 - protein, 344 aa, Triticum aestivum
  peptide (1)..(344): Ceres Seq. ID no. 13659035
  misc_feature (1)..(337): NCBI GI NO: 15229797 NR Description: expressed protein [Arabidopsis thaliana]
  misc_feature (1)..(337): NCBI GI NO: 9759321 NR Description: gb|AAF00670
  misc_feature (1)..(337): NCBI GI NO: 18415139 NR Description: expressed protein [Arabidopsis thaliana]
  misc_feature (1)..(329): NCBI GI NO: 6862912 NR Description: unknown protein [Arabidopsis thaliana]
  misc_feature (1)..(329): NCBI GI NO: 15239660 NR Description: hypothetical protein [Arabidopsis thaliana]
  misc_feature (1)..(333): NCBI GI NO: 23617116 NR Description: leaf senescence related protein-like
  misc_feature (1)..(333): NCBI GI NO: 15228743 NR Description: expressed protein [Arabidopsis thaliana]
  misc_feature (1)..(333): NCBI GI NO: 15229945 NR Description: expressed protein [Arabidopsis thaliana]
  misc_feature (1)..(333): NCBI GI NO: 9759298 NR Description: emb|CAB82953
  misc_feature (1)..(333): NCBI GI NO: 15242021 NR Description: expressed protein [Arabidopsis thaliana]
MPYGEDCPFLDPGFRCVQNGRNDSSFRHWRWQPRRGSCHLPKFNATDMLERSRNGRIVFVGDSIGRNQWESMLCMLAAAVPAGSRIYEQFGKPLSRHKGYLSMVFADYNLSVEYYRAPMLVMVDRLPPASDGAIKRAIRLDALPRHAARWAGADVLILNTGHWWNLHKTIKSGNYFTVGDRFNMTTDIKEAFRRSLQTVKDWALTNPRLSKSSYIFFRSYSPSHYDNGTWDTGGSCADQWDPLTMITSESDQHEHLWINTMISSAAQSMRRRHGMNKDAVFLNITYMTGMRGDGHPSRHREPETPSDAPEDCSHWCLPGVPDTWNQMMYGHLVSMGFDMRSIKR

SEQ ID NO: 16755 - protein, 297 aa, Triticum aestivum
  peptide (1)..(297): Ceres Seq. ID no. 13659036
  misc_feature (1)..(290): NCBI GI NO: 15229797 NR Description: expressed protein [Arabidopsis thaliana]
  misc_feature (1)..(290): NCBI GI NO: 9759321 NR Description: gb|AAF00670
  misc_feature (1)..(290): NCBI GI NO: 18415139 NR Description: expressed protein [Arabidopsis thaliana]
  misc_feature (1)..(282): NCBI GI NO: 6862912 NR Description: unknown protein [Arabidopsis thaliana]
  misc_feature (1)..(282): NCBI GI NO: 15239660 NR Description: hypothetical protein [Arabidopsis thaliana]
  misc_feature (1)..(286): NCBI GI NO: 23617116 NR Description: leaf senescence related protein-like
  misc_feature (1)..(286): NCBI GI NO: 15228743 NR Description: expressed protein [Arabidopsis thaliana]
  misc_feature (1)..(286): NCBI GI NO: 15229945 NR Description: expressed protein [Arabidopsis thaliana]
  misc_feature (1)..(286): NCBI GI NO: 9759298 NR Description: emb|CAB82953
  misc_feature (1)..(286): NCBI GI NO: 15242021 NR Description: expressed protein [Arabidopsis thaliana]
MLERSRNGRIVFVGDSIGRNQWESMLCMLAAAVPAGSRIYEQFGKPLSRHKGYLSMVFADYNLSVEYYRAPMLVMVDRLPPASDGAIKRAIRLDALPRHAARWAGADVLILNTGHWWNLHKTIKSGNYFTVGDRFNMTTDIKEAFRRSLQTVKDWALTNPRLSKSSYIFFRSYSPSHYDNGTWDTGGSCADQWDPLTMITSESDQHEHLWINTMISSAAQSMRRRHGMNKDAVFLNITYMTGMRGDGHPSRHREPETPSDAPEDCSHWCLPGVPDTWNQMMYGHLVSMGFDMRSIKR

SEQ ID NO: 16756 - DNA, 1683 bp, Triticum aestivum
  misc_feature (1)..(1683): Ceres Seq. ID no. 13657964
ttctgccgctcctgaatctccgccgcccgcgtgctccccggcacccaggaaacggccatgccgacgaccctagagggcggccccgccgccgcgccaccgctgccccgcgcgcgcgtggagctggagctggagctcccgctcggcgcggcgccgttcgacctggaagcggccgtgtgcagccacgggctgttcatgatggcgcccaaccgctgggacccggcctcccgcgcgctcctccgcccgctccgcctcgcctccgaccgctccaggtccctgctcgcccgcgtctcccgccaccccgcgcgcccctcccgctccctcctcgtctccctcttcggcgccgacgccctctccccgctcgaccaggactgcatcctcgagcaagtgcggcggatgctgcggctgtcggaggaggacggcagggtggtggcggagttccaggcgatgcacgccgccgcgagggaggcggggttcggccgcatcttccgctcgcccacgctgttcgaggacatggtcaagtgcatcctcctctgcaattgccaatggacaagaacattggcaatggctactgcgctgtgcgagcttcagttggagttgagacattcatctggtactgaagttcttgagttaaggacacctccaatcagggagcttaaaaggaagcgcggcaagaatcggaatgtccgtgtcaagctagaaacaaagtttaccgagttggagtgcttggaggatccaagagtagaaaccgcggaggatgcaagagtggcaactggtactagcgatgtcataacacatttggaaacggatgaaaaatcggctagcttgccccaagttgcgcctgaaacaggcagtgcatgtcagtcatttgattcttcagagctcagcttggaaggttgcattggagatttccctactccggaagaattggcgtatctggatgaagacttcttagcgaaatgctgtaaccttggatatcgagcggagcggattgtgttgcttgcacgcagcattgtggaaggaaaggtatgcctacaaaatcttgaagaaatgcagaaaatgtctttaccagctacagaagagctatctactatcccgtctacctatgaaagactgaataacgagttaaccactatctccggattcggccctttcactcgtgccaatgtgctcatgtgcatgggatttttccacatgatcccagctgataccgagacaattaggcatttaaagcagtgtcataaaattgcaagcaccatcaaatctgttcatatggaattggataaaatctacggcgagtatgctccatttcagttcttagcatactggttcgagctatggggcttctatgacaagcaatttgggaagatcgctgagatggatccgtccacatataggctatttactgcaagcgctttaaagaagcaacatcggttagttaggaaatagagcctttctttcgtttgtgaaaggggccctgccaaaatcaacttacaacatagaggaattttgagattgttgtagttgctgcctgttctagtaagcagaaagtccgtagcctattttccccttcatgaatgcatctcatactttaggggaacagagtcctgcaagtttttagtttgtagcattccagactgaactaatgtgttatcaggtacttcaattaatttagtggtcaacttt

SEQ ID NO: 16757 - protein, 462 aa, Triticum aestivum
  peptide (1)..(462): Ceres Seq. ID no. 13657965
  misc_feature (157)..(457): NCBI GI NO: 34899050 NR Description: hypothetical protein~predicted by GeneMark
  misc_feature (1)..(169): NCBI GI NO: 34899050 NR Description: hypothetical protein~predicted by GeneMark
MPTTLEGGPAAAPPLPRARVELELELPLGAAPFDLEAAVCSHGLFMMAPNRWDPASRALLRPLRLASDRSRSLLARVSRHPARPSRSLLVSLFGADALSPLDQDCILEQVRRMLRLSEEDGRVVAEFQAMHAAAREAGFGRIFRSPTLFEDMVKCILLCNCQWTRTLAMATALCELQLELRHSSGTEVLELRTPPIRELKRKRGKNRNVRVKLETKFTELECLEDPRVETAEDARVATGTSDVITHLETDEKSASLPQVAPETGSACQSFDSSELSLEGCIGDFPTPEELAYLDEDFLAKCCNLGYRAERIVLLARSIVEGKVCLQNLEEMQKMSLPATEELSTIPSTYERLNNELTTISGFGPFTRANVLMCMGFFHMIPADTETIRHLKQCHKIASTIKSVHMELDKIYGEYAPFQFLAYWFELWGFYDKQFGKIAEMDPSTYRLFTASALKKQHRLVRK

SEQ ID NO: 16758 - protein, 417 aa, Triticum aestivum
  peptide (1)..(417): Ceres Seq. ID no. 13657966
  misc_feature (112)..(412): NCBI GI NO: 34899050 NR Description: hypothetical protein~predicted by GeneMark
  misc_feature (1)..(124): NCBI GI NO: 34899050 NR Description: hypothetical protein~predicted by GeneMark
MMAPNRWDPASRALLRPLRLASDRSRSLLARVSRHPARPSRSLLVSLFGADALSPLDQDCILEQVRRMLRLSEEDGRVVAEFQAMHAAAREAGFGRIFRSPTLFEDMVKCILLCNCQWTRTLAMATALCELQLELRHSSGTEVLELRTPPIRELKRKRGKNRNVRVKLETKFTELECLEDPRVETAEDARVATGTSDVITHLETDEKSASLPQVAPETGSACQSFDSSELSLEGCIGDFPTPEELAYLDEDFLAKCCNLGYRAERIVLLARSIVEGKVCLQNLEEMQKMSLPATEELSTIPSTYERLNNELTTISGFGPFTRANVLMCMGFFHMIPADTETIRHLKQCHKIASTIKSVHMELDKIYGEYAPFQFLAYWFELWGFYDKQFGKIAEMDPSTYRLFTASALKKQHRLVRK

SEQ ID NO: 16759 - protein, 416 aa, Triticum aestivum
  peptide (1)..(416): Ceres Seq. ID no. 13657967
  misc_feature (111)..(411): NCBI GI NO: 34899050 NR Description: hypothetical protein~predicted by GeneMark
  misc_feature (1)..(123): NCBI GI NO: 34899050 NR Description: hypothetical protein~predicted by GeneMark
MAPNRWDPASRALLRPLRLASDRSRSLLARVSRHPARPSRSLLVSLFGADALSPLDQDCILEQVRRMLRLSEEDGRVVAEFQAMHAAAREAGFGRIFRSPTLFEDMVKCILLCNCQWTRTLAMATALCELQLELRHSSGTEVLELRTPPIRELKRKRGKNRNVRVKLETKFTELECLEDPRVETAEDARVATGTSDVITHLETDEKSASLPQVAPETGSACQSFDSSELSLEGCIGDFPTPEELAYLDEDFLAKCCNLGYRAERIVLLARSIVEGKVCLQNLEEMQKMSLPATEELSTIPSTYERLNNELTTISGFGPFTRANVLMCMGFFHMIPADTETIRHLKQCHKIASTIKSVHMELDKIYGEYAPFQFLAYWFELWGFYDKQFGKIAEMDPSTYRLFTASALKKQHRLVRK

SEQ ID NO: 16760 - DNA, 1692 bp, Triticum aestivum
  misc_feature (1)..(1692): Ceres Seq. ID no. 14307912
tagctagctagtgttatccgttagccgatgccgttggctggctttcgatcgatcacacgagacatgtggaaaccacgggcggccatgtattcagttcgtcgttagcgcgcgcgtagcagatagaagatggacgccttggcggggctctcggcccttgccgcggtggcgctgctgctgctgtacagcgtgcaccggtggaggagccctcggtgcaacggccggctcccgccggggtctatgggcctcccgctcgtcggcgagacgttccagttcttctccccggacgcctccttggacatccctcgcttcatccgacacaggctcacgaggtacggcccgatcttcaagacgagcgtggtggggcacccgatggtggtgtcggcggaccaggagctgaaccacatggtgttccagcaggagggggagctgttccagagctggtacccggactcgttcgtggagatcctcggccgcgataacgtcggggagcagaagggcaccatgttcaagtacctcaagaacatagttctcaggtacttcggcccggagagccttaaggagtccatccttggcgacgtcgagcgcgccgtctgcagctcgctctgcacctggtccaccctgccggccgtcgagctcaaagaagccgtctccaccatggtgtttgaactttccgcgagcaagctgctgggcctggagccgtcgaggtccaaggttctacggaagagcttcttcgacttcgtcagagggctcatctccttcccgctctacttgccaggaacagcctactacgcatgcatgcagggacggatgagtgtaatggaggtgctgcagcaggtgctggaggagaggacgagatcggctgaggcggccggaggacgggaagcacggtgccacggcgacttcctggactacgtcgtgcaggagatcaccaaggagaagcctgtcctgacggagggaatggcgctggacctcctgtttgtgctcctcttcgccagcttccacacgacgtcgctggccatcaccctggccgtcaagctcctcaccgagcaccctcgcgtcctggaggagctcacggtggagcatgaaacgattctgaacgagcgtgaggcaggcggcgagtctgatggcgacagagttacatggaaagagtacaaatccatgacattcacatcccaggtgataaacgagacggtccgactggccaacattgcgcctggcatcttcagaaagacactgaaagatgtacagttcagaggatacacaattccagctggatggggagtgatggtctgccctctcgcggtgcaccttaatccagatatttaccctgaccccctcaccttcaatccttcaaggttcaaggataaactagaggcaaaccgtgggttaagacacttcatggctttcggaggaggtctccggtcctgtgttggggcagacttcagcaagctacaaatggccattttccttcactttcttgtcaccaaatataggtggatacaactaggtggaggcaagatagtccggtgtccagggctggaatttcctgatggttacctcattcagatcagacagagagattaatcagcacctgctttcaagtcatgctagcagtaggaaaagcttatatctcacgtgtacaattgttctagcatgttgtttgatgaaataacacttgtgcagaagtattac

SEQ ID NO: 16761 - protein, 485 aa, Triticum aestivum
  peptide (1)..(485): Ceres Seq. ID no. 14307913
  misc_feature (211)..(481): Pfam Name: Pfam Description:  Cytochrome P450
  misc_feature (1)..(484): NCBI GI NO: 38567916 NR Description: OSJNBa0088I22.12
  misc_feature (8)..(481): NCBI GI NO: 38567920 NR Description: OSJNBa0088I22.16
  misc_feature (8)..(481): NCBI GI NO: 20520627 NR Description: putative cytochrome P450
  misc_feature (13)..(485): NCBI GI NO: 30682922 NR Description: cytochrome P450, putative [Arabidopsis thaliana]
  misc_feature (13)..(485): NCBI GI NO: 9502380 NR Description: T12C24.27 [Arabidopsis thaliana]
  misc_feature (1)..(484): NCBI GI NO: 18483228 NR Description: putative cytochrome P450-like protein
  misc_feature (8)..(412): NCBI GI NO: 38567917 NR Description: OSJNBa0088I22.13
  misc_feature (77)..(481): NCBI GI NO: 27764671 NR Description: putative hydroxylase
  misc_feature (141)..(460): NCBI GI NO: 28564842 NR Description: putative cytochrome P450
  misc_feature (26)..(147): NCBI GI NO: 28564842 NR Description: putative cytochrome P450
MDALAGLSALAAVALLLLYSVHRWRSPRCNGRLPPGSMGLPLVGETFQFFSPDASLDIPRFIRHRLTRYGPIFKTSVVGHPMVVSADQELNHMVFQQEGELFQSWYPDSFVEILGRDNVGEQKGTMFKYLKNIVLRYFGPESLKESILGDVERAVCSSLCTWSTLPAVELKEAVSTMVFELSASKLLGLEPSRSKVLRKSFFDFVRGLISFPLYLPGTAYYACMQGRMSVMEVLQQVLEERTRSAEAAGGREARCHGDFLDYVVQEITKEKPVLTEGMALDLLFVLLFASFHTTSLAITLAVKLLTEHPRVLEELTVEHETILNEREAGGESDGDRVTWKEYKSMTFTSQVINETVRLANIAPGIFRKTLKDVQFRGYTIPAGWGVMVCPLAVHLNPDIYPDPLTFNPSRFKDKLEANRGLRHFMAFGGGLRSCVGADFSKLQMAIFLHFLVTKYRWIQLGGGKIVRCPGLEFPDGYLIQIRQRD

SEQ ID NO: 16762 - protein, 448 aa, Triticum aestivum
  peptide (1)..(448): Ceres Seq. ID no. 14307914
  misc_feature (174)..(444): Pfam Name: Pfam Description:  Cytochrome P450
  misc_feature (1)..(447): NCBI GI NO: 38567916 NR Description: OSJNBa0088I22.12
  misc_feature (1)..(444): NCBI GI NO: 38567920 NR Description: OSJNBa0088I22.16
  misc_feature (1)..(444): NCBI GI NO: 20520627 NR Description: putative cytochrome P450
  misc_feature (1)..(448): NCBI GI NO: 30682922 NR Description: cytochrome P450, putative [Arabidopsis thaliana]
  misc_feature (1)..(448): NCBI GI NO: 9502380 NR Description: T12C24.27 [Arabidopsis thaliana]
  misc_feature (1)..(447): NCBI GI NO: 18483228 NR Description: putative cytochrome P450-like protein
  misc_feature (1)..(375): NCBI GI NO: 38567917 NR Description: OSJNBa0088I22.13
  misc_feature (40)..(444): NCBI GI NO: 27764671 NR Description: putative hydroxylase
  misc_feature (104)..(423): NCBI GI NO: 28564842 NR Description: putative cytochrome P450
  misc_feature (1)..(110): NCBI GI NO: 28564842 NR Description: putative cytochrome P450
MGLPLVGETFQFFSPDASLDIPRFIRHRLTRYGPIFKTSVVGHPMVVSADQELNHMVFQQEGELFQSWYPDSFVEILGRDNVGEQKGTMFKYLKNIVLRYFGPESLKESILGDVERAVCSSLCTWSTLPAVELKEAVSTMVFELSASKLLGLEPSRSKVLRKSFFDFVRGLISFPLYLPGTAYYACMQGRMSVMEVLQQVLEERTRSAEAAGGREARCHGDFLDYVVQEITKEKPVLTEGMALDLLFVLLFASFHTTSLAITLAVKLLTEHPRVLEELTVEHETILNEREAGGESDGDRVTWKEYKSMTFTSQVINETVRLANIAPGIFRKTLKDVQFRGYTIPAGWGVMVCPLAVHLNPDIYPDPLTFNPSRFKDKLEANRGLRHFMAFGGGLRSCVGADFSKLQMAIFLHFLVTKYRWIQLGGGKIVRCPGLEFPDGYLIQIRQRD

SEQ ID NO: 16763 - protein, 404 aa, Triticum aestivum
  peptide (1)..(404): Ceres Seq. ID no. 14307915
  misc_feature (130)..(400): Pfam Name: Pfam Description:  Cytochrome P450
  misc_feature (1)..(403): NCBI GI NO: 38567916 NR Description: OSJNBa0088I22.12
  misc_feature (1)..(400): NCBI GI NO: 38567920 NR Description: OSJNBa0088I22.16
  misc_feature (1)..(400): NCBI GI NO: 20520627 NR Description: putative cytochrome P450
  misc_feature (1)..(404): NCBI GI NO: 30682922 NR Description: cytochrome P450, putative [Arabidopsis thaliana]
  misc_feature (1)..(404): NCBI GI NO: 9502380 NR Description: T12C24.27 [Arabidopsis thaliana]
  misc_feature (1)..(403): NCBI GI NO: 18483228 NR Description: putative cytochrome P450-like protein
  misc_feature (1)..(331): NCBI GI NO: 38567917 NR Description: OSJNBa0088I22.13
  misc_feature (1)..(400): NCBI GI NO: 27764671 NR Description: putative hydroxylase
  misc_feature (60)..(379): NCBI GI NO: 28564842 NR Description: putative cytochrome P450
  misc_feature (1)..(66): NCBI GI NO: 28564842 NR Description: putative cytochrome P450
MVVSADQELNHMVFQQEGELFQSWYPDSFVEILGRDNVGEQKGTMFKYLKNIVLRYFGPESLKESILGDVERAVCSSLCTWSTLPAVELKEAVSTMVFELSASKLLGLEPSRSKVLRKSFFDFVRGLISFPLYLPGTAYYACMQGRMSVMEVLQQVLEERTRSAEAAGGREARCHGDFLDYVVQEITKEKPVLTEGMALDLLFVLLFASFHTTSLAITLAVKLLTEHPRVLEELTVEHETILNEREAGGESDGDRVTWKEYKSMTFTSQVINETVRLANIAPGIFRKTLKDVQFRGYTIPAGWGVMVCPLAVHLNPDIYPDPLTFNPSRFKDKLEANRGLRHFMAFGGGLRSCVGADFSKLQMAIFLHFLVTKYRWIQLGGGKIVRCPGLEFPDGYLIQIRQRD

SEQ ID NO: 16764 - DNA, 1728 bp, Triticum aestivum
  misc_feature (1)..(1728): Ceres Seq. ID no. 14302883
attcttttcttcccactcccccctgcccttccgccaaagcgtcagccgccgccttgccatacctcgtcgtcaccgccggcgccgcgacctcaatcccgcgccctccgccaccttcttggggacgcgcgtcgacgccgccgccgccgccgttccccttcttccccggcctccgggacatcctgctgctgcctccacctcgtcccagtctttggccactgggcctccttccttcgttcgagttggacatggcatcatctgctaccatcagttcagttggcgctcaggccgctctggtttcaaagccaaggaatcatggtatcagtggcttaaaggcatcctcatcaattagcttcgaattgggatcctcattcctgggcaagaccgggtctcttcgggcatctgtaaccacaagggttgcgccaaaggcgaagtccgcggctcggatactaccggaggcatcttacaaagtggcggtacttggtgctgctgggggcatcggccaaccattgggcttgttgatcaagatgtcccctctggtctcagaactgcgcctgtacgatattgcgaatgtcaagggagtcgccgctgatctcagccactgcaacacaccctctcaggttatggacttcactggccctgcagaattggccagctgcttgaaaggtgtggatgttgttgtcatccccgccggggtcccaagaaagccagggatgactcgtgacgaccttttcaacatcaatgcgggcatcgtcaagtcacttatcgaggctgttgcagacaattgccctggggcctttatccatattatcagcaacccagtcaactccacagtgccgattgctgctgagattctgaaaaagaagggtgtctacaatcccaagaagctttttggggtttccaccctagatgttgtccgggctaacacatttgtagctcagaagaagggcctcaagctcattgatgttgatgtcccagttgttggtggtcatgctggaattacaatcctgcctttgttgtcaaagacgagaccatctgtcaccttcacggacgaggaaactgaacagctgacgaagaggatacagaacgctgggacagaggtggtggaggcgaaagcgggtgctggatctgctaccctgtccatggcttatgctgctgccagatttgtcgagtcttcgctccgcgcactggctggtgatccagatgtttacgagtgcacgtatgttcagtctgagttaactgagctgccattctttgcgtccagagttaagcttgggaagaatggtgttgagtccatcatttcttctgacctggagggaataaccgagtatgaggccagtgcacttgaggcattgaagcctgagctgaaggccagcattgagaagggcattgagtttgcgcacaaacaacagggagctgctgcctctgtttgagtgaggagaatgataattccatatgaagaggacaaaggcaaactgattgtccttttctagttttgcagcctagagtgtggacatgtagcactatgccctggagcagctatatttctgaattgttggtcagtttattatgattccagtttacatgagggcgtgaagccccaaacgtgcaccctgttctgggtccttgttttgtttgacacataaattttggtcctgttccacctgctgttcttgtagcttcctaagttgacgaactgtggaataataataaagcccatctttgatcgtt

SEQ ID NO: 16765 - protein, 475 aa, Triticum aestivum
  peptide (1)..(475): Ceres Seq. ID no. 14302884
  misc_feature (299)..(464): Pfam Name: Pfam Description:  lactate/malate dehydrogenase
  misc_feature (79)..(474): NCBI GI NO: 34907952 NR Description: putative NAD-malate dehydrogenase
  misc_feature (80)..(472): NCBI GI NO: 5123836 NR Description: NAD-malate dehydrogenase [Nicotiana tabacum]
  misc_feature (107)..(468): NCBI GI NO: 7431178 NR Description: malate dehydrogenase (EC 1
  misc_feature (83)..(468): NCBI GI NO: 7488830 NR Description: probable malate dehydrogenase (EC 1
  misc_feature (107)..(474): NCBI GI NO: 15232820 NR Description: malate dehydrogenase
  misc_feature (107)..(474): NCBI GI NO: 25283601 NR Description: malate dehydrogenase (EC 1.1.1.37), chloroplast
  misc_feature (102)..(472): NCBI GI NO: 7431173 NR Description: malate dehydrogenase (EC 1
  misc_feature (84)..(473): NCBI GI NO: 34913248 NR Description: putative malate dehydrogenase
  misc_feature (128)..(474): NCBI GI NO: 7431166 NR Description: malate dehydrogenase (EC 1
  misc_feature (129)..(467): NCBI GI NO: 24638017 NR Description: Malate dehydrogenase, mitochondrial precursor
SFLPTPPCPSAKASAAALPYLVVTAGAATSIPRPPPPSWGRASTPPPPPFPFFPGLRDILLLPPPRPSLWPLGLLPSFELDMASSATISSVGAQAALVSKPRNHGISGLKASSSISFELGSSFLGKTGSLRASVTTRVAPKAKSAARILPEASYKVAVLGAAGGIGQPLGLLIKMSPLVSELRLYDIANVKGVAADLSHCNTPSQVMDFTGPAELASCLKGVDVVVIPAGVPRKPGMTRDDLFNINAGIVKSLIEAVADNCPGAFIHIISNPVNSTVPIAAEILKKKGVYNPKKLFGVSTLDVVRANTFVAQKKGLKLIDVDVPVVGGHAGITILPLLSKTRPSVTFTDEETEQLTKRIQNAGTEVVEAKAGAGSATLSMAYAAARFVESSLRALAGDPDVYECTYVQSELTELPFFASRVKLGKNGVESIISSDLEGITEYEASALEALKPELKASIEKGIEFAHKQQGAAASV

SEQ ID NO: 16766 - protein, 394 aa, Triticum aestivum
  peptide (1)..(394): Ceres Seq. ID no. 14302885
  misc_feature (218)..(383): Pfam Name: Pfam Description:  lactate/malate dehydrogenase
  misc_feature (1)..(393): NCBI GI NO: 34907952 NR Description: putative NAD-malate dehydrogenase
  misc_feature (1)..(391): NCBI GI NO: 5123836 NR Description: NAD-malate dehydrogenase [Nicotiana tabacum]
  misc_feature (26)..(387): NCBI GI NO: 7431178 NR Description: malate dehydrogenase (EC 1
  misc_feature (2)..(387): NCBI GI NO: 7488830 NR Description: probable malate dehydrogenase (EC 1
  misc_feature (26)..(393): NCBI GI NO: 15232820 NR Description: malate dehydrogenase
  misc_feature (26)..(393): NCBI GI NO: 25283601 NR Description: malate dehydrogenase (EC 1.1.1.37), chloroplast
  misc_feature (21)..(391): NCBI GI NO: 7431173 NR Description: malate dehydrogenase (EC 1
  misc_feature (3)..(392): NCBI GI NO: 34913248 NR Description: putative malate dehydrogenase
  misc_feature (47)..(393): NCBI GI NO: 7431166 NR Description: malate dehydrogenase (EC 1
  misc_feature (48)..(386): NCBI GI NO: 24638017 NR Description: Malate dehydrogenase, mitochondrial precursor
MASSATISSVGAQAALVSKPRNHGISGLKASSSISFELGSSFLGKTGSLRASVTTRVAPKAKSAARILPEASYKVAVLGAAGGIGQPLGLLIKMSPLVSELRLYDIANVKGVAADLSHCNTPSQVMDFTGPAELASCLKGVDVVVIPAGVPRKPGMTRDDLFNINAGIVKSLIEAVADNCPGAFIHIISNPVNSTVPIAAEILKKKGVYNPKKLFGVSTLDVVRANTFVAQKKGLKLIDVDVPVVGGHAGITILPLLSKTRPSVTFTDEETEQLTKRIQNAGTEVVEAKAGAGSATLSMAYAAARFVESSLRALAGDPDVYECTYVQSELTELPFFASRVKLGKNGVESIISSDLEGITEYEASALEALKPELKASIEKGIEFAHKQQGAAASV

SEQ ID NO: 16767 - protein, 301 aa, Triticum aestivum
  peptide (1)..(301): Ceres Seq. ID no. 14302886
  misc_feature (125)..(290): Pfam Name: Pfam Description:  lactate/malate dehydrogenase
  misc_feature (1)..(300): NCBI GI NO: 34907952 NR Description: putative NAD-malate dehydrogenase
  misc_feature (1)..(298): NCBI GI NO: 5123836 NR Description: NAD-malate dehydrogenase [Nicotiana tabacum]
  misc_feature (1)..(294): NCBI GI NO: 7431178 NR Description: malate dehydrogenase (EC 1
  misc_feature (1)..(294): NCBI GI NO: 7488830 NR Description: probable malate dehydrogenase (EC 1
  misc_feature (1)..(300): NCBI GI NO: 15232820 NR Description: malate dehydrogenase
  misc_feature (1)..(300): NCBI GI NO: 25283601 NR Description: malate dehydrogenase (EC 1.1.1.37), chloroplast
  misc_feature (1)..(298): NCBI GI NO: 7431173 NR Description: malate dehydrogenase (EC 1
  misc_feature (1)..(299): NCBI GI NO: 34913248 NR Description: putative malate dehydrogenase
  misc_feature (1)..(300): NCBI GI NO: 7431166 NR Description: malate dehydrogenase (EC 1
  misc_feature (1)..(293): NCBI GI NO: 24638017 NR Description: Malate dehydrogenase, mitochondrial precursor
MSPLVSELRLYDIANVKGVAADLSHCNTPSQVMDFTGPAELASCLKGVDVVVIPAGVPRKPGMTRDDLFNINAGIVKSLIEAVADNCPGAFIHIISNPVNSTVPIAAEILKKKGVYNPKKLFGVSTLDVVRANTFVAQKKGLKLIDVDVPVVGGHAGITILPLLSKTRPSVTFTDEETEQLTKRIQNAGTEVVEAKAGAGSATLSMAYAAARFVESSLRALAGDPDVYECTYVQSELTELPFFASRVKLGKNGVESIISSDLEGITEYEASALEALKPELKASIEKGIEFAHKQQGAAASV

SEQ ID NO: 16768 - DNA, 1523 bp, Triticum aestivum
  misc_feature (1)..(1523): Ceres Seq. ID no. 14303094
acctctctcgacacaccaccgcaacccaacccaccccaccccaccccaccccaccccttcccgtctcaaaaccctaatcccaacgccgccgcggcgccgccgatcaagccgacgacaggcagcccccctatccggccgctccgtacgcacgcccctgcccgtcgcgcgcagatcggcggccgtccaccgcgaccgtgggccgccgcggggctagatttagattccgatttcggggcccctagccgccgggatttcctcgcgtccccgggcaaggtaggagagactatggtgggcggaggcaggaggggaggcgcggcggacgaggccaagctcaacaccggcaacgtgttcgcggcgctcgagaccctcaagaagaagaagaagggcgacaaggccaaggggggctcctccaagggagggaagcagggggacgagcccacgccgcagcagcagaaggagctcttctgggcgcccgccccgctcaacaccaagtcgtgggccgacgtcgaggacgacgacgacgacgactacttcgccaccaccgcgccccccgcgcccatctgggggaacgaccacgccgccgccaaaacggccaaggaggaggaggaggacgaggtcgatgctgtccacgccgccctgccggaggaaattgaaagtgaggatgaggagcatgatgatgaggctgaggatggtgctgaggatgaacctgagcatgaagtggaagctgctgatcctgatgtgaagaaagttgcagcagcacctaaagagacagaaaggcagctgtccaaaaaggagttgaaaaagaaggagctggctgaacttgatgctgtgttagctgagttgggaatttctgaaaacacaagcgatgctgcgcaagatggaaacaacaatgctgagaagaaaggtgcgagccaagctggtgatggagagagaaaggaagacgcacctgcccctttagagagcaagaatgccaagaagaagaagaacaagaaggacaagagcgcaaaggaggcaaaggaagctgaagtgtcggaggaggctgccagtgcagaacccgaggaagacacggctgtggatgtcaaggagcgcctaaagaagatggcgtcgatgaagaagaagaagtcgggcaaggagacggacacagctgcaaagatcgccgcggcagaggcggcagccaggaccgccaggctcgcggcggcaaagaagaaggagaagagccattacaaccagcaacccgtgcggtaaaaacgcgacgggccgcccaagttttgagatgctcctgagtttcgataatgaatgatccccttgttcgttttggacccgtcgcaataaactttttccccatccagtcctccccagagttgtgtatttatggtgaccatggagcgcctttctgatattcggtttcggaattctggaaggccttcgtggtcaccagaacggtcgttgtaattgtgttttgaattgtgttgatccggttgaacttatgatagacaacaacatggccaacagggcctcttggg

SEQ ID NO: 16769 - protein, 414 aa, Triticum aestivum
  peptide (1)..(414): Ceres Seq. ID no. 14303095
  misc_feature (74)..(414): Pfam Name: Pfam Description:  Caldesmon
  misc_feature (216)..(414): NCBI GI NO: 34906156 NR Description: P0509B06.15
  misc_feature (96)..(215): NCBI GI NO: 34906156 NR Description: P0509B06.15
  misc_feature (96)..(414): NCBI GI NO: 18400901 NR Description: expressed protein [Arabidopsis thaliana]
  misc_feature (96)..(414): NCBI GI NO: 21537167 NR Description: unknown [Arabidopsis thaliana]
  misc_feature (96)..(414): NCBI GI NO: 17529066 NR Description: unknown protein [Arabidopsis thaliana]
  misc_feature (96)..(414): NCBI GI NO: 33620414 NR Description: M355 [Lilium longiflorum]
  misc_feature (96)..(414): NCBI GI NO: 15233865 NR Description: expressed protein [Arabidopsis thaliana]
  misc_feature (215)..(414): NCBI GI NO: 7522210 NR Description: hypothetical protein pAFD103 - apple tree
  misc_feature (108)..(404): NCBI GI NO: 39593039 NR Description: Hypothetical protein CBG09238
  misc_feature (97)..(135): NCBI GI NO: 1362179 NR Description: calcium-dependent protein kinase substrate - wheat
TSLDTPPQPNPPHPTPPHPFPSQNPNPNAAAAPPIKPTTGSPPIRPLRTHAPARRAQIGGRPPRPWAAAGLDLDSDFGAPSRRDFLASPGKVGETMVGGGRRGGAADEAKLNTGNVFAALETLKKKKKGDKAKGGSSKGGKQGDEPTPQQQKELFWAPAPLNTKSWADVEDDDDDDYFATTAPPAPIWGNDHAAAKTAKEEEEDEVDAVHAALPEEIESEDEEHDDEAEDGAEDEPEHEVEAADPDVKKVAAAPKETERQLSKKELKKKELAELDAVLAELGISENTSDAAQDGNNNAEKKGASQAGDGERKEDAPAPLESKNAKKKKNKKDKSAKEAKEAEVSEEAASAEPEEDTAVDVKERLKKMASMKKKKSGKETDTAAKIAAAEAAARTARLAAAKKKEKSHYNQQPVR

SEQ ID NO: 16770 - protein, 319 aa, Triticum aestivum
  peptide (1)..(319): Ceres Seq. ID no. 14303096
  misc_feature (1)..(319): Pfam Name: Pfam Description:  Caldesmon
  misc_feature (121)..(319): NCBI GI NO: 34906156 NR Description: P0509B06.15
  misc_feature (1)..(120): NCBI GI NO: 34906156 NR Description: P0509B06.15
  misc_feature (1)..(319): NCBI GI NO: 18400901 NR Description: expressed protein [Arabidopsis thaliana]
  misc_feature (1)..(319): NCBI GI NO: 21537167 NR Description: unknown [Arabidopsis thaliana]
  misc_feature (1)..(319): NCBI GI NO: 17529066 NR Description: unknown protein [Arabidopsis thaliana]
  misc_feature (1)..(319): NCBI GI NO: 33620414 NR Description: M355 [Lilium longiflorum]
  misc_feature (1)..(319): NCBI GI NO: 15233865 NR Description: expressed protein [Arabidopsis thaliana]
  misc_feature (120)..(319): NCBI GI NO: 7522210 NR Description: hypothetical protein pAFD103 - apple tree
  misc_feature (13)..(309): NCBI GI NO: 39593039 NR Description: Hypothetical protein CBG09238
  misc_feature (2)..(40): NCBI GI NO: 1362179 NR Description: calcium-dependent protein kinase substrate - wheat
MVGGGRRGGAADEAKLNTGNVFAALETLKKKKKGDKAKGGSSKGGKQGDEPTPQQQKELFWAPAPLNTKSWADVEDDDDDDYFATTAPPAPIWGNDHAAAKTAKEEEEDEVDAVHAALPEEIESEDEEHDDEAEDGAEDEPEHEVEAADPDVKKVAAAPKETERQLSKKELKKKELAELDAVLAELGISENTSDAAQDGNNNAEKKGASQAGDGERKEDAPAPLESKNAKKKKNKKDKSAKEAKEAEVSEEAASAEPEEDTAVDVKERLKKMASMKKKKSGKETDTAAKIAAAEAAARTARLAAAKKKEKSHYNQQPVR

SEQ ID NO: 16771 - DNA, 814 bp, Triticum aestivum
  misc_feature (1)..(814): Ceres Seq. ID no. 12627109
attttttttccccctcttaccgacacgaacccggcggccaaatttagggttttgctcccgcaatctccccccgaagccgccgccttcttcccgcgccggcagcgatccaactccgcgtctccatccgccgatccggactttttttcaatctccggatctcgctcaagatgcttcccctctcgctcctcaagaccgcccaggggcatcccatgctcgtggagctcaagaacggcgagacctacaatggtcacttggtgaactgcgacacgtggatgaacatccacctccgggaggttatttgcacctcgaaggatggtgataagttttggaggatgccggagtgctatattcgtgggaacacaatcaagtatcttcgggttcctgatgaggtgattgacaaggttcaagaggaaacttctaagagtagatcagataggaagccaccaggtgttggccgcggaagaggaagaggagacatcggcactaagcccgggggcagaggaatcgggcgtggccaagatgatggcaaaggtggtggccgtggaaggggtgggattggaagtaaaggtggcaacaaaggcggacgtggtcgtgggtaagacggatcttgagatgcgagaatgccgctttttaaggcctgtagttgtggtgttgcatagattgcttaggacatgaaaaactttggagctggaattgctgggttttgtggtatggtatggcaaaccgtttgtgtggtctgaagttaccgaggaggagttggctgtcacctgtttgtgttgttcgaaacagttcacttaatattttgggtatgggc

SEQ ID NO: 16772 - protein, 143 aa, Triticum aestivum
  peptide (1)..(143): Ceres Seq. ID no. 12627110
  misc_feature (5)..(71): Pfam Name: Pfam Description:  LSM domain
  misc_feature (1)..(143): NCBI GI NO: 12230291 NR Description: Probable U6 snRNA-associated Sm-like protein LSm4
  misc_feature (1)..(137): NCBI GI NO: 34902916 NR Description: unnamed protein product
  misc_feature (1)..(143): NCBI GI NO: 12230258 NR Description: Probable U6 snRNA-associated Sm-like protein LSm4
  misc_feature (1)..(143): NCBI GI NO: 12230329 NR Description: Probable U6 snRNA-associated Sm-like protein LSm4
  misc_feature (1)..(143): NCBI GI NO: 15241028 NR Description: glycine rich protein - like; protein id:At5g27720
  misc_feature (1)..(143): NCBI GI NO: 21593495 NR Description: glycine rich protein-like [Arabidopsis thaliana]
  misc_feature (1)..(143): NCBI GI NO: 20260282 NR Description: unknown protein [Arabidopsis thaliana]
  misc_feature (1)..(143): NCBI GI NO: 37589787 NR Description: Unknown (protein for MGC:73057) [Danio rerio]
  misc_feature (1)..(140): NCBI GI NO: 27668769 NR Description: similar to U6 snRNA-associated Sm-like protein LSm4
  misc_feature (1)..(140): NCBI GI NO: 7657317 NR Description: U6 snRNA-associated SM-like protein 4
MLPLSLLKTAQGHPMLVELKNGETYNGHLVNCDTWMNIHLREVICTSKDGDKFWRMPECYIRGNTIKYLRVPDEVIDKVQEETSKSRSDRKPPGVGRGRGRGDIGTKPGGRGIGRGQDDGKGGGRGRGGIGSKGGNKGGRGRG

SEQ ID NO: 16773 - protein, 129 aa, Triticum aestivum
  peptide (1)..(129): Ceres Seq. ID no. 12627111
  misc_feature (1)..(57): Pfam Name: Pfam Description:  LSM domain
  misc_feature (1)..(129): NCBI GI NO: 12230291 NR Description: Probable U6 snRNA-associated Sm-like protein LSm4
  misc_feature (1)..(123): NCBI GI NO: 34902916 NR Description: unnamed protein product
  misc_feature (1)..(129): NCBI GI NO: 12230258 NR Description: Probable U6 snRNA-associated Sm-like protein LSm4
  misc_feature (1)..(129): NCBI GI NO: 12230329 NR Description: Probable U6 snRNA-associated Sm-like protein LSm4
  misc_feature (1)..(129): NCBI GI NO: 15241028 NR Description: glycine rich protein - like; protein id:At5g27720
  misc_feature (1)..(129): NCBI GI NO: 21593495 NR Description: glycine rich protein-like [Arabidopsis thaliana]
  misc_feature (1)..(129): NCBI GI NO: 20260282 NR Description: unknown protein [Arabidopsis thaliana]
  misc_feature (1)..(129): NCBI GI NO: 37589787 NR Description: Unknown (protein for MGC:73057) [Danio rerio]
  misc_feature (1)..(126): NCBI GI NO: 27668769 NR Description: similar to U6 snRNA-associated Sm-like protein LSm4
  misc_feature (1)..(126): NCBI GI NO: 7657317 NR Description: U6 snRNA-associated SM-like protein 4
MLVELKNGETYNGHLVNCDTWMNIHLREVICTSKDGDKFWRMPECYIRGNTIKYLRVPDEVIDKVQEETSKSRSDRKPPGVGRGRGRGDIGTKPGGRGIGRGQDDGKGGGRGRGGIGSKGGNKGGRGRG

SEQ ID NO: 16774 - protein, 108 aa, Triticum aestivum
  peptide (1)..(108): Ceres Seq. ID no. 12627112
  misc_feature (1)..(108): NCBI GI NO: 12230291 NR Description: Probable U6 snRNA-associated Sm-like protein LSm4
  misc_feature (1)..(102): NCBI GI NO: 34902916 NR Description: unnamed protein product
  misc_feature (1)..(108): NCBI GI NO: 12230258 NR Description: Probable U6 snRNA-associated Sm-like protein LSm4
  misc_feature (1)..(108): NCBI GI NO: 12230329 NR Description: Probable U6 snRNA-associated Sm-like protein LSm4
  misc_feature (1)..(108): NCBI GI NO: 15241028 NR Description: glycine rich protein - like; protein id:At5g27720
  misc_feature (1)..(108): NCBI GI NO: 21593495 NR Description: glycine rich protein-like [Arabidopsis thaliana]
  misc_feature (1)..(108): NCBI GI NO: 20260282 NR Description: unknown protein [Arabidopsis thaliana]
  misc_feature (1)..(108): NCBI GI NO: 37589787 NR Description: Unknown (protein for MGC:73057) [Danio rerio]
  misc_feature (1)..(105): NCBI GI NO: 27668769 NR Description: similar to U6 snRNA-associated Sm-like protein LSm4
  misc_feature (1)..(105): NCBI GI NO: 7657317 NR Description: U6 snRNA-associated SM-like protein 4
MNIHLREVICTSKDGDKFWRMPECYIRGNTIKYLRVPDEVIDKVQEETSKSRSDRKPPGVGRGRGRGDIGTKPGGRGIGRGQDDGKGGGRGRGGIGSKGGNKGGRGRG

SEQ ID NO: 16775 - DNA, 1889 bp, Triticum aestivum
  misc_feature (1)..(1889): Ceres Seq. ID no. 14307916
actagtatataacaattcactcccatccaccaaccacaccaagaatcgcgagcgagcttgggatccggcttgaagttgccatggaggcggccgccgagctggcgcagcgcctgcgggccgcggccaacgaccggctggcggggcaggagccgctcctcctcgtcgccgcgccgctgctcgcgctcctcgccgcgcgcgccgtccacgccgccgccgccgacgtcgccgaccgcggcctccgcaccgtcctcatcaccctcgccatggccgccgtcaagttggtgccgggggtcagcggatacatcgccgccgagaagagcaaggttgttgagcagttgcagtcaggcagcgcgtccagcaagaagaacctgcgaaccgagctgcccgccgtcggggatcccgacggagtcatagacgagctccaggcgctcaaagacaaggatgtgagatggcagggcaaatgctccggcaccgtttatatcgctgggagcgagtctgaaggccatttttcacttataaacaaggcctactctatgttttcacacacaaatccactgcatcaggatgtattcaagagtgtggcacagttagaggctgaagtagtagcaatgacagctgctttgcttggcagcaaagaaaaggcgtctggtggacaaatttgtggcaatatgacgtcaggcgggactgaaagcatattgttggccgtcaaaacatcacgcgattatatgcaatcaaagaagggaatcacaaagcccgaaattataattgctgaatcagctcattctgcctatgacaaagctgctcaatatttcaatattaaagtgcggcgtgtacctgtgaataaagaatttcttgcagatgtaaaaggattcaaacggtgcataaatggaaacaccataatgatggttggatctgcaccaggatttccccatggtttaattgatcccatcgaggaacttggggagttggcttcacaatatggtatttgcttgcatgttgatctatgccttggtggcttcgtattgcctttcgcccgtaagcttgggtatcctattcctccttttgatttttctgtcaaaggtgttacgtcgatctcaacagatgttcataagtatgggctagccccaaaaggcaccagtactgtcctatacaggaatcatgaaattagaaagcaccaatttgttgctgtgacggaatggactggtgggctctatatttcccctactatggctggaagcaggccaggtggactagtcgcaggagcttgggctgcgatgatgtctcttggattgaatggttatttggaaagtactggtaaaatcatggaagtctcaaggaagatacaaaaaggaattgatgatatctcaggtttatttgtgattgggaagccagacatgaccgtcgtggcctttgggtcggacgcagtcgacatatttgaggtgaatgacataatgtcatcaaaaggatggcacctcaatgctcttcagagacccaacagtctgcacatctgcgtgacgcttcaacacacggctatctatgaggaattcctcaaggacctcgaggattctgtgaacacagtgaaagcgaatccagggcctatcagcggggggatggctccgatctacggcgcggctgggaagatgccggacagaggcacggtcaaggagttgcttgtggagttcatggacagctcttgctaaccattgactataccccattggttggtcatctctctgtaacatgcatatgtacaagccgcagtgacagtgttgtgtgatcttctatatttggtttggctcaaaactgaaggcacacaacacaatgcctccaatatagacatgtatctatgtatcagttacattggtcgcaataaagttacattttcagcc

SEQ ID NO: 16776 - protein, 539 aa, Triticum aestivum
  peptide (1)..(539): Ceres Seq. ID no. 14307917
  misc_feature (141)..(370): Pfam Name: Pfam Description:  Pyridoxal-dependent decarboxylase conserved domain
  misc_feature (6)..(370): NCBI GI NO: 34893998 NR Description: putative sphingosine-1-phosphate lyase
  misc_feature (367)..(539): NCBI GI NO: 34893998 NR Description: putative sphingosine-1-phosphate lyase
  misc_feature (12)..(537): NCBI GI NO: 15217780 NR Description: sphingosine-1-phosphate lyase -related
  misc_feature (15)..(536): NCBI GI NO: 30908928 NR Description: sphingosine-1-phosphate lyase
  misc_feature (65)..(539): NCBI GI NO: 27465561 NR Description: sphingosine-1-phosphate lyase 1
  misc_feature (101)..(537): NCBI GI NO: 10129683 NR Description: sphingosine-1-phosphate lyase [Homo sapiens]
  misc_feature (101)..(537): NCBI GI NO: 6330874 NR Description: KIAA1252 protein [Homo sapiens]
  misc_feature (101)..(537): NCBI GI NO: 31982936 NR Description: sphingosine-1-phosphate lyase 1
  misc_feature (66)..(537): NCBI GI NO: 21355963 NR Description: CG8946-PA [Drosophila melanogaster]
  misc_feature (65)..(536): NCBI GI NO: 31543694 NR Description: sphingosine phosphate lyase 1 [Mus musculus]
MEAAAELAQRLRAAANDRLAGQEPLLLVAAPLLALLAARAVHAAAADVADRGLRTVLITLAMAAVKLVPGVSGYIAAEKSKVVEQLQSGSASSKKNLRTELPAVGDPDGVIDELQALKDKDVRWQGKCSGTVYIAGSESEGHFSLINKAYSMFSHTNPLHQDVFKSVAQLEAEVVAMTAALLGSKEKASGGQICGNMTSGGTESILLAVKTSRDYMQSKKGITKPEIIIAESAHSAYDKAAQYFNIKVRRVPVNKEFLADVKGFKRCINGNTIMMVGSAPGFPHGLIDPIEELGELASQYGICLHVDLCLGGFVLPFARKLGYPIPPFDFSVKGVTSISTDVHKYGLAPKGTSTVLYRNHEIRKHQFVAVTEWTGGLYISPTMAGSRPGGLVAGAWAAMMSLGLNGYLESTGKIMEVSRKIQKGIDDISGLFVIGKPDMTVVAFGSDAVDIFEVNDIMSSKGWHLNALQRPNSLHICVTLQHTAIYEEFLKDLEDSVNTVKANPGPISGGMAPIYGAAGKMPDRGTVKELLVEFMDSSC

SEQ ID NO: 16777 - protein, 478 aa, Triticum aestivum
  peptide (1)..(478): Ceres Seq. ID no. 14307918
  misc_feature (80)..(309): Pfam Name: Pfam Description:  Pyridoxal-dependent decarboxylase conserved domain
  misc_feature (1)..(309): NCBI GI NO: 34893998 NR Description: putative sphingosine-1-phosphate lyase
  misc_feature (306)..(478): NCBI GI NO: 34893998 NR Description: putative sphingosine-1-phosphate lyase
  misc_feature (1)..(476): NCBI GI NO: 15217780 NR Description: sphingosine-1-phosphate lyase -related
  misc_feature (1)..(475): NCBI GI NO: 30908928 NR Description: sphingosine-1-phosphate lyase
  misc_feature (4)..(478): NCBI GI NO: 27465561 NR Description: sphingosine-1-phosphate lyase 1
  misc_feature (40)..(476): NCBI GI NO: 10129683 NR Description: sphingosine-1-phosphate lyase [Homo sapiens]
  misc_feature (40)..(476): NCBI GI NO: 6330874 NR Description: KIAA1252 protein [Homo sapiens]
  misc_feature (40)..(476): NCBI GI NO: 31982936 NR Description: sphingosine-1-phosphate lyase 1
  misc_feature (5)..(476): NCBI GI NO: 21355963 NR Description: CG8946-PA [Drosophila melanogaster]
  misc_feature (4)..(475): NCBI GI NO: 31543694 NR Description: sphingosine phosphate lyase 1 [Mus musculus]
MAAVKLVPGVSGYIAAEKSKVVEQLQSGSASSKKNLRTELPAVGDPDGVIDELQALKDKDVRWQGKCSGTVYIAGSESEGHFSLINKAYSMFSHTNPLHQDVFKSVAQLEAEVVAMTAALLGSKEKASGGQICGNMTSGGTESILLAVKTSRDYMQSKKGITKPEIIIAESAHSAYDKAAQYFNIKVRRVPVNKEFLADVKGFKRCINGNTIMMVGSAPGFPHGLIDPIEELGELASQYGICLHVDLCLGGFVLPFARKLGYPIPPFDFSVKGVTSISTDVHKYGLAPKGTSTVLYRNHEIRKHQFVAVTEWTGGLYISPTMAGSRPGGLVAGAWAAMMSLGLNGYLESTGKIMEVSRKIQKGIDDISGLFVIGKPDMTVVAFGSDAVDIFEVNDIMSSKGWHLNALQRPNSLHICVTLQHTAIYEEFLKDLEDSVNTVKANPGPISGGMAPIYGAAGKMPDRGTVKELLVEFMDSSC

SEQ ID NO: 16778 - protein, 388 aa, Triticum aestivum
  peptide (1)..(388): Ceres Seq. ID no. 14307919
  misc_feature (1)..(219): Pfam Name: Pfam Description:  Pyridoxal-dependent decarboxylase conserved domain
  misc_feature (1)..(219): NCBI GI NO: 34893998 NR Description: putative sphingosine-1-phosphate lyase
  misc_feature (216)..(388): NCBI GI NO: 34893998 NR Description: putative sphingosine-1-phosphate lyase
  misc_feature (1)..(386): NCBI GI NO: 15217780 NR Description: sphingosine-1-phosphate lyase -related
  misc_feature (1)..(385): NCBI GI NO: 30908928 NR Description: sphingosine-1-phosphate lyase
  misc_feature (1)..(388): NCBI GI NO: 27465561 NR Description: sphingosine-1-phosphate lyase 1
  misc_feature (1)..(386): NCBI GI NO: 10129683 NR Description: sphingosine-1-phosphate lyase [Homo sapiens]
  misc_feature (1)..(386): NCBI GI NO: 6330874 NR Description: KIAA1252 protein [Homo sapiens]
  misc_feature (1)..(386): NCBI GI NO: 31982936 NR Description: sphingosine-1-phosphate lyase 1
  misc_feature (1)..(386): NCBI GI NO: 21355963 NR Description: CG8946-PA [Drosophila melanogaster]
  misc_feature (1)..(385): NCBI GI NO: 31543694 NR Description: sphingosine phosphate lyase 1 [Mus musculus]
MFSHTNPLHQDVFKSVAQLEAEVVAMTAALLGSKEKASGGQICGNMTSGGTESILLAVKTSRDYMQSKKGITKPEIIIAESAHSAYDKAAQYFNIKVRRVPVNKEFLADVKGFKRCINGNTIMMVGSAPGFPHGLIDPIEELGELASQYGICLHVDLCLGGFVLPFARKLGYPIPPFDFSVKGVTSISTDVHKYGLAPKGTSTVLYRNHEIRKHQFVAVTEWTGGLYISPTMAGSRPGGLVAGAWAAMMSLGLNGYLESTGKIMEVSRKIQKGIDDISGLFVIGKPDMTVVAFGSDAVDIFEVNDIMSSKGWHLNALQRPNSLHICVTLQHTAIYEEFLKDLEDSVNTVKANPGPISGGMAPIYGAAGKMPDRGTVKELLVEFMDSSC

SEQ ID NO: 16779 - DNA, 1077 bp, Triticum aestivum
  misc_feature (1)..(1077): Ceres Seq. ID no. 13657647
gaaaagaccccacagccgggaggaggagcccatcccgtcccaccccaccgccgcggccaaaaaccaatcacgcctcccggcggcggcccgcgcggcgccggccatggcggacgccgtcaagcagccgctcctccaccaccagcagccctacgcgtacccgtcgcacgccgcgtcggcctcctcccccgcgctcccctccgtgccccactccgggaccgccacccccacccccggggccgggggcgccgcctccgcctccttcgccgggggccgccgcttcccgggcggccttgacgtgcccaacctcaagaagcgcggcggcggcacgcgcagctggatccgcgtcgaggccgccacggcctccgtgcagacgctggaggtcgacaaggccaccatgatgcgccgctgcgagctccccgcccgcgacctccgcctcctcgacccgctcttcgtctacccctccaccgtcctcggccgcgagcgcgccatcgtcgtcaacctcgagcagatccgctgcgtcatcaccgccgacgaggtgctcctcctcaactccctcgacagctacgtcttccagtacgccgccgagctgcagcgccgcctcctccagcgcgccgagggcgacgagctccccttcgagttccgcgccctcgagctcgccctcgaggccgcctgctccttcctcgacgcccaggcagcagaattggaaattgaagcatatcccttactggatgagctaacatcaaaaattagtactctaaatctgaaacgtgttcggcggctaaaaagtagactagttgctctgaccagaagagtccagaaggtcagggatgaaatagaacagctaatggatgatgatggagatatggctgagatgtatcttaccgagaaaaagatgaggatggaatcatcatctgtgtttggtgatcaatcattggcgaccttcaacgcggcagccgctgggacttcagtttcagctcctgtgtctccagtgtcttcacccacagaatcacggaaattggagaaaacctacagcttgtgtagatgtttaaacacaataaagttggaactggagggggg

SEQ ID NO: 16780 - protein, 358 aa, Triticum aestivum
  peptide (1)..(358): Ceres Seq. ID no. 13657648
  misc_feature (53)..(347): NCBI GI NO: 38345033 NR Description: OSJNBa0029H02.17
  misc_feature (102)..(344): NCBI GI NO: 15227679 NR Description: MRS2-5 protein [Arabidopsis thaliana]
  misc_feature (102)..(344): NCBI GI NO: 25360882 NR Description: MRS2-5 [Arabidopsis thaliana]
  misc_feature (65)..(201): NCBI GI NO: 30685422 NR Description: expressed protein [Arabidopsis thaliana]
  misc_feature (198)..(304): NCBI GI NO: 30685422 NR Description: expressed protein [Arabidopsis thaliana]
  misc_feature (135)..(347): NCBI GI NO: 18412911 NR Description: expressed protein [Arabidopsis thaliana]
  misc_feature (170)..(357): NCBI GI NO: 18394312 NR Description: expressed protein [Arabidopsis thaliana]
  misc_feature (135)..(347): NCBI GI NO: 21553824 NR Description: unknown [Arabidopsis thaliana]
  misc_feature (109)..(334): NCBI GI NO: 9758997 NR Description: gene_id:MTH16.11~unknown protein
  misc_feature (109)..(334): NCBI GI NO: 30682808 NR Description: expressed protein [Arabidopsis thaliana]
KRPHSREEEPIPSHPTAAAKNQSRLPAAARAAPAMADAVKQPLLHHQQPYAYPSHAASASSPALPSVPHSGTATPTPGAGGAASASFAGGRRFPGGLDVPNLKKRGGGTRSWIRVEAATASVQTLEVDKATMMRRCELPARDLRLLDPLFVYPSTVLGRERAIVVNLEQIRCVITADEVLLLNSLDSYVFQYAAELQRRLLQRAEGDELPFEFRALELALEAACSFLDAQAAELEIEAYPLLDELTSKISTLNLKRVRRLKSRLVALTRRVQKVRDEIEQLMDDDGDMAEMYLTEKKMRMESSSVFGDQSLATFNAAAAGTSVSAPVSPVSSPTESRKLEKTYSLCRCLNTIKLELEG

SEQ ID NO: 16781 - protein, 324 aa, Triticum aestivum
  peptide (1)..(324): Ceres Seq. ID no. 13657649
  misc_feature (19)..(313): NCBI GI NO: 38345033 NR Description: OSJNBa0029H02.17
  misc_feature (68)..(310): NCBI GI NO: 15227679 NR Description: MRS2-5 protein [Arabidopsis thaliana]
  misc_feature (68)..(310): NCBI GI NO: 25360882 NR Description: MRS2-5 [Arabidopsis thaliana]
  misc_feature (31)..(167): NCBI GI NO: 30685422 NR Description: expressed protein [Arabidopsis thaliana]
  misc_feature (164)..(270): NCBI GI NO: 30685422 NR Description: expressed protein [Arabidopsis thaliana]
  misc_feature (101)..(313): NCBI GI NO: 18412911 NR Description: expressed protein [Arabidopsis thaliana]
  misc_feature (136)..(323): NCBI GI NO: 18394312 NR Description: expressed protein [Arabidopsis thaliana]
  misc_feature (101)..(313): NCBI GI NO: 21553824 NR Description: unknown [Arabidopsis thaliana]
  misc_feature (75)..(300): NCBI GI NO: 9758997 NR Description: gene_id:MTH16.11~unknown protein
  misc_feature (75)..(300): NCBI GI NO: 30682814 NR Description: expressed protein [Arabidopsis thaliana]
MADAVKQPLLHHQQPYAYPSHAASASSPALPSVPHSGTATPTPGAGGAASASFAGGRRFPGGLDVPNLKKRGGGTRSWIRVEAATASVQTLEVDKATMMRRCELPARDLRLLDPLFVYPSTVLGRERAIVVNLEQIRCVITADEVLLLNSLDSYVFQYAAELQRRLLQRAEGDELPFEFRALELALEAACSFLDAQAAELEIEAYPLLDELTSKISTLNLKRVRRLKSRLVALTRRVQKVRDEIEQLMDDDGDMAEMYLTEKKMRMESSSVFGDQSLATFNAAAAGTSVSAPVSPVSSPTESRKLEKTYSLCRCLNTIKLELEG

SEQ ID NO: 16782 - protein, 227 aa, Triticum aestivum
  peptide (1)..(227): Ceres Seq. ID no. 13657650
  misc_feature (1)..(216): NCBI GI NO: 38345033 NR Description: OSJNBa0029H02.17
  misc_feature (1)..(213): NCBI GI NO: 15227679 NR Description: MRS2-5 protein [Arabidopsis thaliana]
  misc_feature (1)..(213): NCBI GI NO: 25360882 NR Description: MRS2-5 [Arabidopsis thaliana]
  misc_feature (1)..(70): NCBI GI NO: 30685422 NR Description: expressed protein [Arabidopsis thaliana]
  misc_feature (67)..(173): NCBI GI NO: 30685422 NR Description: expressed protein [Arabidopsis thaliana]
  misc_feature (4)..(216): NCBI GI NO: 18412911 NR Description: expressed protein [Arabidopsis thaliana]
  misc_feature (39)..(226): NCBI GI NO: 18394312 NR Description: expressed protein [Arabidopsis thaliana]
  misc_feature (4)..(216): NCBI GI NO: 21553824 NR Description: unknown [Arabidopsis thaliana]
  misc_feature (1)..(203): NCBI GI NO: 9758997 NR Description: gene_id:MTH16.11~unknown protein
  misc_feature (1)..(203): NCBI GI NO: 30682808 NR Description: expressed protein [Arabidopsis thaliana]
MMRRCELPARDLRLLDPLFVYPSTVLGRERAIVVNLEQIRCVITADEVLLLNSLDSYVFQYAAELQRRLLQRAEGDELPFEFRALELALEAACSFLDAQAAELEIEAYPLLDELTSKISTLNLKRVRRLKSRLVALTRRVQKVRDEIEQLMDDDGDMAEMYLTEKKMRMESSSVFGDQSLATFNAAAAGTSVSAPVSPVSSPTESRKLEKTYSLCRCLNTIKLELEG

SEQ ID NO: 16783 - DNA, 1291 bp, Triticum aestivum
  misc_feature (1)..(1291): Ceres Seq. ID no. 13658400
aaaacaaagaactactctccccacagctcccatccctggttccaccggccccgacctcgacctcgaccacactcttctgcttccccaggtcttccaatccaccagcctctccgccgcgaaaccctagcccccctgagccaccccccgtcgaggccgctggcggatggcgaaggcgtgaccggcgcggacagcaccccgttcccgccctcagccccgcatctgatgttcctctcccgcatcgtcctgcgcgacctggactccatcgactcccccgcctccatggcgacctccaagaaggtggtgacgcgcgacgagtgggagcgcaagctccgcgacgtcaagatccgcaaggaggacatgaaccgcctcgtcatgaacttcctcgtcaccgagggcttcgtcgacgccgccgacaagttccgcgtcgagtccggcacccaaccggacatcgacctggccaccatcacggatcggatggaggtgaaaaaggcggttcagtcagggaatgtccaggaggcaatcgagaagatcaacgatcttaaccccacgattctggatacaaatcccgaattatacttccatctccagcagcaaaaattaatagagttgattcgtgcggggaagataaatgaagctttggagtttgctcaagaagaacttgcaccaagaggcgaagaaaatcaaacctttctggaggaaatagagaaaactgtagcactgttggtttttgaagatgtaaaaaattgcccatatggtgaactgttggacgtttctcaacgcttaaagacggcaagtgaagttaacgctgccattctcacaagccaaagtcacgagaaagatccaaagctccccagtctgttgaagatgttgatttggactcaaaaccagctgaacgaaaaggcggcatatcctcgaatcaacaacttatccaccgccgcactggaagatccagcaatatgagctgctgtccaaagtgttggagtgttgactatggagcttaggcaccagcagcagccatgtctgcatgtacactatctgtcgtaggtctgttgttcgtttcatcaatgttctagcttaatgcaaaaaaaaaaaaccagatagataatcctgctctctcctgtcgtataggttgttcttgtcatttttttttgaaaacagagataaatgttgcatttgattgttgtttacaaactatgtgttgttgaattattggcgataatgtgttgcacaccattcatgtgttctgctggaatgatgcaaagcaaggcatcaagttcagcttgcctactgt

SEQ ID NO: 16784 - protein, 319 aa, Triticum aestivum
  peptide (1)..(319): Ceres Seq. ID no. 15220632
  misc_feature (75)..(318): NCBI GI NO: 15219873 NR Description: expressed protein [Arabidopsis thaliana]
  misc_feature (75)..(312): NCBI GI NO: 25404311 NR Description: hypothetical protein F11P17.12
  misc_feature (93)..(317): NCBI GI NO: 20863687 NR Description: RIKEN cDNA 2310003C23 [Mus musculus]
  misc_feature (93)..(317): NCBI GI NO: 8923557 NR Description: chromosome 20 open reading frame 11
  misc_feature (94)..(314): NCBI GI NO: 30681030 NR Description: expressed protein [Arabidopsis thaliana]
  misc_feature (93)..(317): NCBI GI NO: 21594655 NR Description: chromosome 20 open reading frame 11 [Homo sapiens]
  misc_feature (94)..(317): NCBI GI NO: 37748055 NR Description: Unknown (protein for MGC:73100) [Danio rerio]
  misc_feature (98)..(314): NCBI GI NO: 26451919 NR Description: unknown protein [Arabidopsis thaliana]
  misc_feature (99)..(315): NCBI GI NO: 24643081 NR Description: CG6617-PA [Drosophila melanogaster]
  misc_feature (96)..(297): NCBI GI NO: 7487558 NR Description: hypothetical protein T30A10
KTKNYSPHSSHPWFHRPRPRPRPHSSASPGLPIHQPLRRETLAPLSHPPSRPLADGEGVTGADSTPFPPSAPHLMFLSRIVLRDLDSIDSPASMATSKKVVTRDEWERKLRDVKIRKEDMNRLVMNFLVTEGFVDAADKFRVESGTQPDIDLATITDRMEVKKAVQSGNVQEAIEKINDLNPTILDTNPELYFHLQQQKLIELIRAGKINEALEFAQEELAPRGEENQTFLEEIEKTVALLVFEDVKNCPYGELLDVSQRLKTASEVNAAILTSQSHEKDPKLPSLLKMLIWTQNQLNEKAAYPRINNLSTAALEDPAI

SEQ ID NO: 16785 - protein, 245 aa, Triticum aestivum
  peptide (1)..(245): Ceres Seq. ID no. 15220633
  misc_feature (1)..(244): NCBI GI NO: 15219873 NR Description: expressed protein [Arabidopsis thaliana]
  misc_feature (1)..(238): NCBI GI NO: 25404311 NR Description: hypothetical protein F11P17.12
  misc_feature (19)..(243): NCBI GI NO: 20863687 NR Description: RIKEN cDNA 2310003C23 [Mus musculus]
  misc_feature (19)..(243): NCBI GI NO: 8923557 NR Description: chromosome 20 open reading frame 11
  misc_feature (20)..(240): NCBI GI NO: 30681030 NR Description: expressed protein [Arabidopsis thaliana]
  misc_feature (19)..(243): NCBI GI NO: 21594655 NR Description: chromosome 20 open reading frame 11 [Homo sapiens]
  misc_feature (20)..(243): NCBI GI NO: 37748055 NR Description: Unknown (protein for MGC:73100) [Danio rerio]
  misc_feature (24)..(240): NCBI GI NO: 26451919 NR Description: unknown protein [Arabidopsis thaliana]
  misc_feature (25)..(241): NCBI GI NO: 24643081 NR Description: CG6617-PA [Drosophila melanogaster]
  misc_feature (22)..(223): NCBI GI NO: 7487558 NR Description: hypothetical protein T30A10
MFLSRIVLRDLDSIDSPASMATSKKVVTRDEWERKLRDVKIRKEDMNRLVMNFLVTEGFVDAADKFRVESGTQPDIDLATITDRMEVKKAVQSGNVQEAIEKINDLNPTILDTNPELYFHLQQQKLIELIRAGKINEALEFAQEELAPRGEENQTFLEEIEKTVALLVFEDVKNCPYGELLDVSQRLKTASEVNAAILTSQSHEKDPKLPSLLKMLIWTQNQLNEKAAYPRINNLSTAALEDPAI

SEQ ID NO: 16786 - protein, 226 aa, Triticum aestivum
  peptide (1)..(226): Ceres Seq. ID no. 15220634
  misc_feature (1)..(225): NCBI GI NO: 15219873 NR Description: expressed protein [Arabidopsis thaliana]
  misc_feature (1)..(219): NCBI GI NO: 25404311 NR Description: hypothetical protein F11P17.12
  misc_feature (1)..(224): NCBI GI NO: 20863687 NR Description: RIKEN cDNA 2310003C23 [Mus musculus]
  misc_feature (1)..(224): NCBI GI NO: 8923557 NR Description: chromosome 20 open reading frame 11
  misc_feature (1)..(221): NCBI GI NO: 30681030 NR Description: expressed protein [Arabidopsis thaliana]
  misc_feature (1)..(224): NCBI GI NO: 21594655 NR Description: chromosome 20 open reading frame 11 [Homo sapiens]
  misc_feature (1)..(224): NCBI GI NO: 37748055 NR Description: Unknown (protein for MGC:73100) [Danio rerio]
  misc_feature (5)..(221): NCBI GI NO: 26451919 NR Description: unknown protein [Arabidopsis thaliana]
  misc_feature (6)..(222): NCBI GI NO: 24643081 NR Description: CG6617-PA [Drosophila melanogaster]
  misc_feature (3)..(204): NCBI GI NO: 7487558 NR Description: hypothetical protein T30A10
MATSKKVVTRDEWERKLRDVKIRKEDMNRLVMNFLVTEGFVDAADKFRVESGTQPDIDLATITDRMEVKKAVQSGNVQEAIEKINDLNPTILDTNPELYFHLQQQKLIELIRAGKINEALEFAQEELAPRGEENQTFLEEIEKTVALLVFEDVKNCPYGELLDVSQRLKTASEVNAAILTSQSHEKDPKLPSLLKMLIWTQNQLNEKAAYPRINNLSTAALEDPAI

SEQ ID NO: 16787 - DNA, 1802 bp, Triticum aestivum
  misc_feature (1)..(1802): Ceres Seq. ID no. 13657707
atccacacacactccactgcgcacaattccaccatcagcaatgcctcctcccctccgcctcctcgccctcctcctcctcctccacctccccttcgccctctcctcccgccaccaccacaaagccccggcgccgccgccccggaaggtgcctcctccggcggccaactacgcggcgccgctccccgtcctcctcgcctgcaacgccacccgcttccggcccgcctgcgtcgccacgctctccgccgccaacgtcaccgccgcgtcctccccctccgacctcctcggcgccacgctctccgcgctccgcgcccgcctcccgccggccgtctccaccgcgcgctccgtcctcgcctcctccaagaacgtcaacctcacgaccgccgccaccaactgcctcaccgccctctccctctcctcgcaccgcctcgagccgccgccctcgccgtcggcgctcatgcccgcctccgcctcgctcctccacctctacgactgctggtccgcctacaagtacgtcaacttctcccggaccatctacgatgccatggcgtacctcaacgacaccatcaccgtcaacagcaactacatctccatgctcgccgcgctgaagcggtacggcgacgacacgtccgtctgggcgccgccgcagacggagcgcgacgggtactggccttcgcccgcggcgtcgggggccgacgtggacgcgctcggcgtgcccaaggggctccccgcggacgcgacggtgtgcggcgccgggtgcgactacaggacagtgcgggaggcggtggcggccgcgccggacaacgggggcaagaggttcgtggtgtacgtgaaggcaggcgtgtacaaggagacggtgagcgtgccgtgggagaagaccaacctggtgctggtcggcgacggcatggggaagacggtcatcaccggcgacctcaacgcggacacgcccggcgtgtccacgttcaacacggccacyktaggcgtgctcgcggacggcttcatggcgcgcgacctgacgatcgcgaacacggcggggccggacgcgcaccaggcggtggcgttccggtccacgggcgaccgcacggtgctggacacggtggagctgctggggcaccaggacacgctgtacgtgcacgccatgcgccagttctacacccgctgccgcgtggccggcacggtggacttcgtcttcggcaactcggccgccgtgctccacgacagcgacctcgtcgtgctgccccggcagctgcggccggagaagggcgagacggacgcgctgacggcgcagggccgcaccgacccggcgcagcccacggggatcgtgctccggggctgccgcgtcaacggcagcgacgagtacatggccttctaccggcagaagcccggcgtgcaccacgtgttcctcggccggccatggaaggagtactcccgcacggtgttcgtcgggtgcacgatggctgagatcgtgcggcccgaggggtggatgccatggagcggcgacttcgcgctcaagacgctctactacggggagtatgatagcgccggccctggcgccggcgggcggggaggcggcagggtggcgtggagcagccaggtgcccaaggagcgcgtcgacgtytacagcgtcgccagcttcatacagggggacgagtggatacccaaagtgaagtagtgggctttttggtcctggtagcatacataatcgagctggcgtgagctcgtgggccggtcggcggtgatcgtgccactcggtcacggatgtactgcagtcgttgcagttatgcaaatgcagtggtgcctaacgc

SEQ ID NO: 16788 - protein, 555 aa, Triticum aestivum
  peptide (1)..(555): Ceres Seq. ID no. 15220615
  misc_feature (244)..(548): Pfam Name: Pfam Description:  Pectinesterase
  misc_feature (15)..(554): NCBI GI NO: 34907404 NR Description: putative pectin methylesterase
  misc_feature (18)..(550): NCBI GI NO: 9759007 NR Description: pectin methylesterase-like protein
  misc_feature (18)..(550): NCBI GI NO: 15242495 NR Description: pectinesterase family [Arabidopsis thaliana]
  misc_feature (39)..(550): NCBI GI NO: 22328058 NR Description: pectinesterase family [Arabidopsis thaliana]
  misc_feature (155)..(550): NCBI GI NO: 22135882 NR Description: pectin methylesterase-like protein
  misc_feature (181)..(551): NCBI GI NO: 1552379 NR Description: pectin methylesterase
  misc_feature (87)..(551): NCBI GI NO: 38344075 NR Description: OSJNBa0006B20.19
  misc_feature (253)..(553): NCBI GI NO: 15238378 NR Description: pectinesterase, putative [Arabidopsis thaliana]
  misc_feature (92)..(551): NCBI GI NO: 15231828 NR Description: pectin methylesterase -related
  misc_feature (217)..(551): NCBI GI NO: 6689892 NR Description: pectin methyl esterase [Solanum tuberosum]
  misc_feature (324)..(324): Xaa is any aa, unknown or other
  misc_feature (325)..(325): Xaa is any aa, unknown or other
  misc_feature (538)..(538): Xaa is any aa, unknown or other
STHTPLRTIPPSAMPPPLRLLALLLLLHLPFALSSRHHHKAPAPPPRKVPPPAANYAAPLPVLLACNATRFRPACVATLSAANVTAASSPSDLLGATLSALRARLPPAVSTARSVLASSKNVNLTTAATNCLTALSLSSHRLEPPPSPSALMPASASLLHLYDCWSAYKYVNFSRTIYDAMAYLNDTITVNSNYISMLAALKRYGDDTSVWAPPQTERDGYWPSPAASGADVDALGVPKGLPADATVCGAGCDYRTVREAVAAAPDNGGKRFVVYVKAGVYKETVSVPWEKTNLVLVGDGMGKTVITGDLNADTPGVSTFNTAXXGVLADGFMARDLTIANTAGPDAHQAVAFRSTGDRTVLDTVELLGHQDTLYVHAMRQFYTRCRVAGTVDFVFGNSAAVLHDSDLVVLPRQLRPEKGETDALTAQGRTDPAQPTGIVLRGCRVNGSDEYMAFYRQKPGVHHVFLGRPWKEYSRTVFVGCTMAEIVRPEGWMPWSGDFALKTLYYGEYDSAGPGAGGRGGGRVAWSSQVPKERVDXYSVASFIQGDEWIPKVK

SEQ ID NO: 16789 - protein, 542 aa, Triticum aestivum
  peptide (1)..(542): Ceres Seq. ID no. 15220616
  misc_feature (231)..(535): Pfam Name: Pfam Description:  Pectinesterase
  misc_feature (2)..(541): NCBI GI NO: 34907404 NR Description: putative pectin methylesterase
  misc_feature (5)..(537): NCBI GI NO: 9759007 NR Description: pectin methylesterase-like protein
  misc_feature (5)..(537): NCBI GI NO: 15242495 NR Description: pectinesterase family [Arabidopsis thaliana]
  misc_feature (26)..(537): NCBI GI NO: 22328058 NR Description: pectinesterase family [Arabidopsis thaliana]
  misc_feature (142)..(537): NCBI GI NO: 22135882 NR Description: pectin methylesterase-like protein
  misc_feature (168)..(538): NCBI GI NO: 1552379 NR Description: pectin methylesterase
  misc_feature (74)..(538): NCBI GI NO: 38344075 NR Description: OSJNBa0006B20.19
  misc_feature (240)..(540): NCBI GI NO: 15238378 NR Description: pectinesterase, putative [Arabidopsis thaliana]
  misc_feature (79)..(538): NCBI GI NO: 15231828 NR Description: pectin methylesterase -related
  misc_feature (204)..(538): NCBI GI NO: 6689892 NR Description: pectin methyl esterase [Solanum tuberosum]
  misc_feature (311)..(311): Xaa is any aa, unknown or other
  misc_feature (312)..(312): Xaa is any aa, unknown or other
  misc_feature (525)..(525): Xaa is any aa, unknown or other
MPPPLRLLALLLLLHLPFALSSRHHHKAPAPPPRKVPPPAANYAAPLPVLLACNATRFRPACVATLSAANVTAASSPSDLLGATLSALRARLPPAVSTARSVLASSKNVNLTTAATNCLTALSLSSHRLEPPPSPSALMPASASLLHLYDCWSAYKYVNFSRTIYDAMAYLNDTITVNSNYISMLAALKRYGDDTSVWAPPQTERDGYWPSPAASGADVDALGVPKGLPADATVCGAGCDYRTVREAVAAAPDNGGKRFVVYVKAGVYKETVSVPWEKTNLVLVGDGMGKTVITGDLNADTPGVSTFNTAXXGVLADGFMARDLTIANTAGPDAHQAVAFRSTGDRTVLDTVELLGHQDTLYVHAMRQFYTRCRVAGTVDFVFGNSAAVLHDSDLVVLPRQLRPEKGETDALTAQGRTDPAQPTGIVLRGCRVNGSDEYMAFYRQKPGVHHVFLGRPWKEYSRTVFVGCTMAEIVRPEGWMPWSGDFALKTLYYGEYDSAGPGAGGRGGGRVAWSSQVPKERVDXYSVASFIQGDEWIPKVK

SEQ ID NO: 16790 - protein, 485 aa, Triticum aestivum
  peptide (1)..(485): Ceres Seq. ID no. 15220617
  misc_feature (187)..(429): Pfam Name: Pfam Description:  Aminotransferase class-III
  misc_feature (17)..(47): NCBI GI NO: 15238378 NR Description: pectinesterase, putative [Arabidopsis thaliana]
  misc_feature (1)..(50): NCBI GI NO: 34909826 NR Description: P0403C05.21
  misc_feature (325)..(325): Xaa is any aa, unknown or other
IHTHSTAHNSTISNASSPPPPRPPPPPPPPLRPLLPPPPQSPGAAAPEGASSGGQLRGAAPRPPRLQRHPLPARLRRHALRRQRHRRVLPLRPPRRHALRAPRPPPAGRLHRALRPRLLQERQPHDRRHQLPHRPLPLLAPPRAAALAVGAHARLRLAPPPLRLLVRLQVRQLLPDHLRCHGVPQRHHHRQQQLHLHARRAEAVRRRHVRLGAAADGARRVLAFARGVGGRRGRARRAQGAPRGRDGVRRRVRLQDSAGGGGGRAGQRGQEVRGVREGRRVQGDGERAVGEDQPGAGRRRHGEDGHHRRPQRGHARRVHVQHGHXRRARGRLHGARPDDREHGGAGRAPGGGVPVHGRPHGAGHGGAAGAPGHAVRARHAPVLHPLPRGRHGGLRLRQLGRRAPRQRPRRAAPAAAAGEGRDGRADGAGPHRPGAAHGDRAPGLPRQRQRRVHGLLPAEARRAPRVPRPAMEGVLPHGVRRVHDG

SEQ ID NO: 16791 - DNA, 2043 bp, Triticum aestivum
  misc_feature (1)..(2043): Ceres Seq. ID no. 13500446
aaaaagctcgcagtgggcccgccccacatccatcttcctccgctccgctggaaaatacacagacgagatgcgagactagctagggtttacactctacactctcctccgaatcgaatcaaagaagcggcggcactctcctctcctccgctgcggaccaggcggccgcggagctgaatttgttcgatggaggacctaccagaggctctgctgacagagattctcaagaggatcaccaggacaagtgatctcaagtcttttacccttgtgtcaaagcagctctgcaagatagagggggatcaaaggggtgctatccatgttggttccggtgtttgcactgctacaaaagcactggcatcattgtgcgcccggttcccaaatctgcggaaagtggaaatcgattactctggctggatacctggacatggaaagcagctggacaacaaaggcctctctgtgttttcatctcactgttcctcgctgattgacctcaccttaagcttctgctcatgcatcgatgactctgggcttgcttgtttagcttattgcaagacattggtgtctctcaggctcaactccgcaccagaaataacgtcagttgggcttttctcggttgcagttggttgcacaaatctatctgctctccaccttactgattgcgagaacatcgacaatgtagagtggctggaataccttggtaggcatggatcgttagaagagcttgtggtgaagaattgcaaaggaatcaatcatcatgacttcctaaagtttgattctggatggatgaagctccagaagtttgagtttgagaggaaaagagaaagatttgattgtcttccaggtgatgtgatctatgactccttgtacgatgctcacagtatggatgcatatgatttctgctgtgagagcttgaaggatttaaggttggcgcatattaaaacttggcccgaagtaggacttcgtattctcctagggaagtgtaaagcattggagaagctttgccttgagtatgttcatgccctaaatgacaatgacatgattgcattgtctcggagctgcagcaaccttaaaagcatcttacttaggctcaacctgcagcgctactctagtgatgtcagctattgtgaaaccaggacgtcatttactgatgccagcctttacgctctagccctcaactgtcgtatgcttcagatggttgacctcagctttacaggatgttcccctgactggccatcagaaataggattcacacagcagggttttctggtgctcattcggtcctgcccgattcgcgttctcgtgctcaacaacgccaacttctttgatgacgaggggatgaaggccctgtcatcctcaccacatctggagacgctcgagcttatattgtgtcatgcggtaactgatgccgggatgcacttcattgcgcacaccccatgcttgagcaatcttacacttcgggtgtgtcatcacattactgatgttggagtggctgaactggggcgtgcacataagttagagtctttggtcattgagtattgtggtgaggtctctccgcaagctgcgcaggttgttgccaagtcagttcactactccaaggactgttcagatgcccttatgaagagaattggtcttggcatctattgatgaagtggtctccaaaattttcagtatgaatttgctgctcaagccattaagttgttcagtgtgcatcattgcacaaggctctgcatcatccgacctagattcacttgtctggactttctattgccttctacctttactatatgatttttctgtatgacagtctaatgatgatctttggatggcatctggtgaatggtgaatggaactttagtactgtagtaagcaccacttgtgtattactatgaaccgtaattctggttgcttaattcctactctctgtagccgtatcgaaaccggcataagtaggccccaagattcccagtttgtgctgtggggggcactatatgacagtttggtgtacttatttgtattatttaagcaaatgtcatgaactcctttttg

SEQ ID NO: 16792 - protein, 485 aa, Triticum aestivum
  peptide (1)..(485): Ceres Seq. ID no. 13500447
  misc_feature (1)..(468): NCBI GI NO: 38344679 NR Description: OSJNBb0042I07.14
  misc_feature (1)..(473): NCBI GI NO: 18412871 NR Description: F-box protein family (FBL14)
  misc_feature (55)..(335): NCBI GI NO: 38605933 NR Description: OSJNBb0076A22.12
  misc_feature (28)..(307): NCBI GI NO: 38605924 NR Description: OSJNBb0076A22.3
  misc_feature (135)..(468): NCBI GI NO: 38344677 NR Description: OSJNBb0042I07.12
  misc_feature (1)..(191): NCBI GI NO: 38344677 NR Description: OSJNBb0042I07.12
  misc_feature (4)..(464): NCBI GI NO: 30679379 NR Description: F-box protein family (FBL3) [Arabidopsis thaliana]
  misc_feature (29)..(438): NCBI GI NO: 21536497 NR Description: F-box protein family, AtFBL4
  misc_feature (41)..(438): NCBI GI NO: 18414458 NR Description: F-box protein family (FBL4) [Arabidopsis thaliana]
  misc_feature (1)..(331): NCBI GI NO: 15237286 NR Description: expressed protein [Arabidopsis thaliana]
MEDLPEALLTEILKRITRTSDLKSFTLVSKQLCKIEGDQRGAIHVGSGVCTATKALASLCARFPNLRKVEIDYSGWIPGHGKQLDNKGLSVFSSHCSSLIDLTLSFCSCIDDSGLACLAYCKTLVSLRLNSAPEITSVGLFSVAVGCTNLSALHLTDCENIDNVEWLEYLGRHGSLEELVVKNCKGINHHDFLKFDSGWMKLQKFEFERKRERFDCLPGDVIYDSLYDAHSMDAYDFCCESLKDLRLAHIKTWPEVGLRILLGKCKALEKLCLEYVHALNDNDMIALSRSCSNLKSILLRLNLQRYSSDVSYCETRTSFTDASLYALALNCRMLQMVDLSFTGCSPDWPSEIGFTQQGFLVLIRSCPIRVLVLNNANFFDDEGMKALSSSPHLETLELILCHAVTDAGMHFIAHTPCLSNLTLRVCHHITDVGVAELGRAHKLESLVIEYCGEVSPQAAQVVAKSVHYSKDCSDALMKRIGLGIY

SEQ ID NO: 16793 - protein, 286 aa, Triticum aestivum
  peptide (1)..(286): Ceres Seq. ID no. 13500448
  misc_feature (1)..(269): NCBI GI NO: 38344679 NR Description: OSJNBb0042I07.14
  misc_feature (1)..(274): NCBI GI NO: 18412871 NR Description: F-box protein family (FBL14)
  misc_feature (1)..(136): NCBI GI NO: 38605933 NR Description: OSJNBb0076A22.12
  misc_feature (1)..(108): NCBI GI NO: 38605924 NR Description: OSJNBb0076A22.3
  misc_feature (1)..(269): NCBI GI NO: 38344677 NR Description: OSJNBb0042I07.12
  misc_feature (1)..(265): NCBI GI NO: 30679379 NR Description: F-box protein family (FBL3) [Arabidopsis thaliana]
  misc_feature (1)..(239): NCBI GI NO: 21536497 NR Description: F-box protein family, AtFBL4
  misc_feature (1)..(239): NCBI GI NO: 18414458 NR Description: F-box protein family (FBL4) [Arabidopsis thaliana]
  misc_feature (1)..(132): NCBI GI NO: 15237286 NR Description: expressed protein [Arabidopsis thaliana]
  misc_feature (1)..(100): NCBI GI NO: 37590914 NR Description: Unknown (protein for MGC:73374) [Danio rerio]
MKLQKFEFERKRERFDCLPGDVIYDSLYDAHSMDAYDFCCESLKDLRLAHIKTWPEVGLRILLGKCKALEKLCLEYVHALNDNDMIALSRSCSNLKSILLRLNLQRYSSDVSYCETRTSFTDASLYALALNCRMLQMVDLSFTGCSPDWPSEIGFTQQGFLVLIRSCPIRVLVLNNANFFDDEGMKALSSSPHLETLELILCHAVTDAGMHFIAHTPCLSNLTLRVCHHITDVGVAELGRAHKLESLVIEYCGEVSPQAAQVVAKSVHYSKDCSDALMKRIGLGIY

SEQ ID NO: 16794 - protein, 254 aa, Triticum aestivum
  peptide (1)..(254): Ceres Seq. ID no. 13500449
  misc_feature (1)..(237): NCBI GI NO: 38344679 NR Description: OSJNBb0042I07.14
  misc_feature (1)..(242): NCBI GI NO: 18412871 NR Description: F-box protein family (FBL14)
  misc_feature (1)..(104): NCBI GI NO: 38605933 NR Description: OSJNBb0076A22.12
  misc_feature (1)..(76): NCBI GI NO: 38605924 NR Description: OSJNBb0076A22.3
  misc_feature (1)..(237): NCBI GI NO: 38344677 NR Description: OSJNBb0042I07.12
  misc_feature (1)..(233): NCBI GI NO: 30679379 NR Description: F-box protein family (FBL3) [Arabidopsis thaliana]
  misc_feature (1)..(207): NCBI GI NO: 21536497 NR Description: F-box protein family, AtFBL4
  misc_feature (1)..(207): NCBI GI NO: 18414458 NR Description: F-box protein family (FBL4) [Arabidopsis thaliana]
  misc_feature (1)..(100): NCBI GI NO: 15237286 NR Description: expressed protein [Arabidopsis thaliana]
  misc_feature (1)..(68): NCBI GI NO: 37590914 NR Description: Unknown (protein for MGC:73374) [Danio rerio]
MDAYDFCCESLKDLRLAHIKTWPEVGLRILLGKCKALEKLCLEYVHALNDNDMIALSRSCSNLKSILLRLNLQRYSSDVSYCETRTSFTDASLYALALNCRMLQMVDLSFTGCSPDWPSEIGFTQQGFLVLIRSCPIRVLVLNNANFFDDEGMKALSSSPHLETLELILCHAVTDAGMHFIAHTPCLSNLTLRVCHHITDVGVAELGRAHKLESLVIEYCGEVSPQAAQVVAKSVHYSKDCSDALMKRIGLGIY

SEQ ID NO: 16795 - DNA, 1438 bp, Triticum aestivum
  misc_feature (1)..(1438): Ceres Seq. ID no. 12784459
ttcctcccatcggcacgcccatcccgctcctctcataatcctgagagtttcttcttttgttttatttttctttcttggtaggagtaacaatagttttggctctcctcctttctctctccctgtatccaaggagagaaatccagaggcgaagcttcagggtttgtaaattttccggatctaatcaactaaccaaaaaaacccaaaaaagaaaccatgagccacttcgccgccatgaagagccccgtcccggtcgccgccgctgccgccaccgacgcgaagagcccgctcttctgccccaagccgcgccgcccggtcgcgcccctccggtgccaccagagcagccactccgacgcgggcgccggcatggatctgctcgacctcctcctgtcaaagggcgacgagagcaatctttcggcggcgtccccgcagccgccgctgttctgtggctcgcctccgcggcgggcttcgaacccggtggtccacgacagccggttcggcatggactgcccgtccagtcccctgccggtcacgccagcgccggtggtggtccgtcccaccccacgcccggcgggaccgccgatatcgccccgttcctcggctgggtgcgctcgcgtgttccagccagccgtccgcgtcgagggttttgactgcctcgacggtggccgtagcggccgtggccatggcatcgccgccatggtctagatgcacatacaacatcgaataaccaggaaatcttctcccctcagtagtgcaaaagctttggagggagagagatgagagtgaggaggagatgagtgagaggagcttaagtccaaaatttaacccctaaaaactatataatccatcagtcaaatcccataagtataatgagtctaggtaattttaccacaaatctttttgtatgtaaataaatttcaggttcagatgcaggtgcccttcttgtaaatttgggagctctagtttgggggggatggggtagaagaaatctagagggcggggatcagggacagagggcacaagaaacacaaagtttagccctcttgtatgaatcatttttttcatgagtccctttgccttccttctggattagtcattcaattaggttggagggagggaggggttgggaattagttaggtacctgtcctagttcatctgtcatcatgcttatttttggtttatgatggaattgtttttgtccatgcaaccaagaaatccaaagccaccaaggccatggagatgtgtacaaaagagtggctacaagaagagaagagagagcagctaggtttaagtcaagtcaatgagtgagttgtgtgaaaggcatgaatgatgtattcgtggtatcgttttctctgtatatgtaatatatcgtttcattgaagcaatatgtgtaatatctcatgccatgattatcaccagcccttgtgatatcttttattg

SEQ ID NO: 16796 - protein, 162 aa, Triticum aestivum
  peptide (1)..(162): Ceres Seq. ID no. 12784460
  misc_feature (20)..(161): NCBI GI NO: 11762168 NR Description: AT5g16110 [Arabidopsis thaliana]
  misc_feature (20)..(161): NCBI GI NO: 30685676 NR Description: expressed protein [Arabidopsis thaliana]
  misc_feature (27)..(151): NCBI GI NO: 18396232 NR Description: Expressed protein; protein id: At3g02555
  misc_feature (16)..(154): NCBI GI NO: 15222278 NR Description: unknown protein; protein id: At1g13390.1
  misc_feature (22)..(161): NCBI GI NO: 18409044 NR Description: expressed protein; protein id: At1g68490
MSHFAAMKSPVPVAAAAATDAKSPLFCPKPRRPVAPLRCHQSSHSDAGAGMDLLDLLLSKGDESNLSAASPQPPLFCGSPPRRASNPVVHDSRFGMDCPSSPLPVTPAPVVVRPTPRPAGPPISPRSSAGCARVFQPAVRVEGFDCLDGGRSGRGHGIAAMV

SEQ ID NO: 16797 - protein, 156 aa, Triticum aestivum
  peptide (1)..(156): Ceres Seq. ID no. 12784461
  misc_feature (14)..(155): NCBI GI NO: 11762168 NR Description: AT5g16110 [Arabidopsis thaliana]
  misc_feature (14)..(155): NCBI GI NO: 30685676 NR Description: expressed protein [Arabidopsis thaliana]
  misc_feature (21)..(145): NCBI GI NO: 18396232 NR Description: Expressed protein; protein id: At3g02555
  misc_feature (10)..(148): NCBI GI NO: 15222278 NR Description: unknown protein; protein id: At1g13390.1
  misc_feature (16)..(155): NCBI GI NO: 18409044 NR Description: expressed protein; protein id: At1g68490
MKSPVPVAAAAATDAKSPLFCPKPRRPVAPLRCHQSSHSDAGAGMDLLDLLLSKGDESNLSAASPQPPLFCGSPPRRASNPVVHDSRFGMDCPSSPLPVTPAPVVVRPTPRPAGPPISPRSSAGCARVFQPAVRVEGFDCLDGGRSGRGHGIAAMV

SEQ ID NO: 16798 - protein, 112 aa, Triticum aestivum
  peptide (1)..(112): Ceres Seq. ID no. 12784462
  misc_feature (1)..(111): NCBI GI NO: 11762168 NR Description: AT5g16110 [Arabidopsis thaliana]
  misc_feature (1)..(111): NCBI GI NO: 30685676 NR Description: expressed protein [Arabidopsis thaliana]
  misc_feature (1)..(101): NCBI GI NO: 18396232 NR Description: Expressed protein; protein id: At3g02555
  misc_feature (1)..(104): NCBI GI NO: 15222278 NR Description: unknown protein; protein id: At1g13390.1
  misc_feature (1)..(111): NCBI GI NO: 18409044 NR Description: expressed protein; protein id: At1g68490
MDLLDLLLSKGDESNLSAASPQPPLFCGSPPRRASNPVVHDSRFGMDCPSSPLPVTPAPVVVRPTPRPAGPPISPRSSAGCARVFQPAVRVEGFDCLDGGRSGRGHGIAAMV

SEQ ID NO: 16799 - DNA, 1737 bp, Triticum aestivum
  misc_feature (1)..(1737): Ceres Seq. ID no. 13658640
cccggcctcgtcgtcccccctccccccgcgcgtcccggcgtcgccacccgcgcccgccagaggatctccgataatttaacctgtgcgtgttgtcgctgtcgcttaaacatcgacaacctttggcgtagctgacctcattgcgtttggaatcgattcatttgttgtgtctggctygtatatgagctcacaagtatccacatcgcggggtttacatcccccagagaaaattatgacgtacgagtcccctcacacatggccactgtcggtgcctacgagcaaggctgaggcaggtagcagcgatgaccaggaggttaggctgttgtcggtttcttggaatcaggattgtggttgcttcgctgccggcacaagcaatggcttcagaatctttaactgcgaccctttcaaggagactttcaggagggatctgaagagtggtgggtttgggatagttgagatgctgttccgctgcaacatccttgctcttgtaggtggcggctccaatatgcattatccgcccaacaaggtgatgatctgggatgatcaccagagccgttgtattggggagtttaccttccgctctgatgtccgggccgtaaaattggggaaagataacattgtgattgtcctcgagacaaagatatatgtttataactttacagatctgaagatgctccatcagatagagaccctgccaaatcctaaaggactctgctgcctctctcatcattccaatacttcagtgctggcctgtcctgggctgagtcagggacatgttcgggtagagcattttgggctaaaggtgacaaagatgattacggcccatgattcacacatttcttgcatggccttaactatggatggtctcttactggcaacggcaagtatgaagggcactctaatcagaatatttaacacaatggatggcactcgcctgcaagaggtgcgcagaggtcttgataaagccgagatatatagcattgcactgtcaccaaatgtgcaatggttggcagtgtccagcgacaaaggaacggttcatatattcagtctaaaagtcagggttgcgggtgaagattcaagtaatgatcagcgtacccttgaagctccacggatggatcaccagaattcttctacctctatggatcctcttatacaaacaaacactggatccaatgwwcaagctcatcactgtctttcatgaaagggattctgccgaagtacttcagctcagagtggtcatttgctcagttccatttaccggaagtcacacgttacatcgtagctttcggcgctcaaaacactgtaatgatggttggcctggatggcagcttctacaggtgcatctttgaccaagtaaacggcggacagatgacgcagaaggaatactcgcggtttctcaagaccgactaccctcccctgaggacattgaccgcttaaaccgcgtgaccctgccgcaccgccatgacgacatgtacatacatagaaggtcgtgctctgtccattgtatataaccgtcctcctcctcgccggcaaagctctaggccggtcgccggaataaggagctccgggggtgtccggctgcaaccgcagcctgcctgcccattttgctgcagatgtccaaattgcattgtttattcgactttatgaacaagagcatccattgatatgtatgtatgtgtgtataatcaggaaggaatgcaaatatgaccttgtctgcaaccagagctgaaacagttgttg

SEQ ID NO: 16800 - protein, 339 aa, Triticum aestivum
  peptide (1)..(339): Ceres Seq. ID no. 15220653
  misc_feature (14)..(334): NCBI GI NO: 34896164 NR Description: hypothetical protein~similar to Arabidopsisthaliana chromosome 2
  misc_feature (20)..(331): NCBI GI NO: 30694449 NR Description: WD-40 repeat protein family [Arabidopsis thaliana]
  misc_feature (36)..(331): NCBI GI NO: 30688413 NR Description: WD-40 repeat protein family [Arabidopsis thaliana]
  misc_feature (43)..(331): NCBI GI NO: 7487233 NR Description: hypothetical protein At2g40810
  misc_feature (27)..(320): NCBI GI NO: 14517420 NR Description: AT3g62770/F26K9_200 [Arabidopsis thaliana]
  misc_feature (47)..(320): NCBI GI NO: 34907164 NR Description: P0423A12.19
  misc_feature (27)..(320): NCBI GI NO: 11288364 NR Description: hypothetical protein F26K9
  misc_feature (20)..(331): NCBI GI NO: 11288366 NR Description: hypothetical protein T5P19
  misc_feature (1)..(315): NCBI GI NO: 15238452 NR Description: WD-40 repeat protein family [Arabidopsis thaliana]
  misc_feature (27)..(257): NCBI GI NO: 18412493 NR Description: expressed protein [Arabidopsis thaliana]
  misc_feature (332)..(332): Xaa is any aa, unknown or other
MSSQVSTSRGLHPPEKIMTYESPHTWPLSVPTSKAEAGSSDDQEVRLLSVSWNQDCGCFAAGTSNGFRIFNCDPFKETFRRDLKSGGFGIVEMLFRCNILALVGGGSNMHYPPNKVMIWDDHQSRCIGEFTFRSDVRAVKLGKDNIVIVLETKIYVYNFTDLKMLHQIETLPNPKGLCCLSHHSNTSVLACPGLSQGHVRVEHFGLKVTKMITAHDSHISCMALTMDGLLLATASMKGTLIRIFNTMDGTRLQEVRRGLDKAEIYSIALSPNVQWLAVSSDKGTVHIFSLKVRVAGEDSSNDQRTLEAPRMDHQNSSTSMDPLIQTNTGSNXQAHHCLS

SEQ ID NO: 16801 - protein, 322 aa, Triticum aestivum
  peptide (1)..(322): Ceres Seq. ID no. 15220654
  misc_feature (1)..(317): NCBI GI NO: 34896164 NR Description: hypothetical protein~similar to Arabidopsisthaliana chromosome 2
  misc_feature (3)..(314): NCBI GI NO: 30694449 NR Description: WD-40 repeat protein family [Arabidopsis thaliana]
  misc_feature (19)..(314): NCBI GI NO: 30688413 NR Description: WD-40 repeat protein family [Arabidopsis thaliana]
  misc_feature (26)..(314): NCBI GI NO: 7487233 NR Description: hypothetical protein At2g40810
  misc_feature (10)..(303): NCBI GI NO: 14517420 NR Description: AT3g62770/F26K9_200 [Arabidopsis thaliana]
  misc_feature (30)..(303): NCBI GI NO: 34907164 NR Description: P0423A12.19
  misc_feature (10)..(303): NCBI GI NO: 11288364 NR Description: hypothetical protein F26K9
  misc_feature (3)..(314): NCBI GI NO: 11288366 NR Description: hypothetical protein T5P19
  misc_feature (1)..(298): NCBI GI NO: 15238452 NR Description: WD-40 repeat protein family [Arabidopsis thaliana]
  misc_feature (10)..(240): NCBI GI NO: 18412493 NR Description: expressed protein [Arabidopsis thaliana]
  misc_feature (315)..(315): Xaa is any aa, unknown or other
MTYESPHTWPLSVPTSKAEAGSSDDQEVRLLSVSWNQDCGCFAAGTSNGFRIFNCDPFKETFRRDLKSGGFGIVEMLFRCNILALVGGGSNMHYPPNKVMIWDDHQSRCIGEFTFRSDVRAVKLGKDNIVIVLETKIYVYNFTDLKMLHQIETLPNPKGLCCLSHHSNTSVLACPGLSQGHVRVEHFGLKVTKMITAHDSHISCMALTMDGLLLATASMKGTLIRIFNTMDGTRLQEVRRGLDKAEIYSIALSPNVQWLAVSSDKGTVHIFSLKVRVAGEDSSNDQRTLEAPRMDHQNSSTSMDPLIQTNTGSNXQAHHCLS

SEQ ID NO: 16802 - protein, 247 aa, Triticum aestivum
  peptide (1)..(247): Ceres Seq. ID no. 15220655
  misc_feature (1)..(242): NCBI GI NO: 34896164 NR Description: hypothetical protein~similar to Arabidopsisthaliana chromosome 2
  misc_feature (1)..(239): NCBI GI NO: 30694449 NR Description: WD-40 repeat protein family [Arabidopsis thaliana]
  misc_feature (1)..(239): NCBI GI NO: 30688413 NR Description: WD-40 repeat protein family [Arabidopsis thaliana]
  misc_feature (1)..(239): NCBI GI NO: 7487233 NR Description: hypothetical protein At2g40810
  misc_feature (1)..(228): NCBI GI NO: 14517420 NR Description: AT3g62770/F26K9_200 [Arabidopsis thaliana]
  misc_feature (1)..(228): NCBI GI NO: 34907164 NR Description: P0423A12.19
  misc_feature (1)..(228): NCBI GI NO: 11288364 NR Description: hypothetical protein F26K9
  misc_feature (1)..(239): NCBI GI NO: 11288366 NR Description: hypothetical protein T5P19
  misc_feature (1)..(223): NCBI GI NO: 15238452 NR Description: WD-40 repeat protein family [Arabidopsis thaliana]
  misc_feature (1)..(165): NCBI GI NO: 18412493 NR Description: expressed protein [Arabidopsis thaliana]
  misc_feature (240)..(240): Xaa is any aa, unknown or other
MLFRCNILALVGGGSNMHYPPNKVMIWDDHQSRCIGEFTFRSDVRAVKLGKDNIVIVLETKIYVYNFTDLKMLHQIETLPNPKGLCCLSHHSNTSVLACPGLSQGHVRVEHFGLKVTKMITAHDSHISCMALTMDGLLLATASMKGTLIRIFNTMDGTRLQEVRRGLDKAEIYSIALSPNVQWLAVSSDKGTVHIFSLKVRVAGEDSSNDQRTLEAPRMDHQNSSTSMDPLIQTNTGSNXQAHHCLS

SEQ ID NO: 16803 - DNA, 534 bp, Triticum aestivum
  misc_feature (1)..(534): Ceres Seq. ID no. 13658641
aaaaaaatccccaccccggtcaaccccacctcccacccccgatacccactcccacatcccacagcccacagccgccacggccctcgccgccggcgcgcgtcccacaaccaccatctcccatgggcgccaaggtccctaccacaggcgcgcgtgccaccgctgccacatcccacaggagccatggtccctaccgccggcgcgcgcgccaccgccaccacctcctgcaggcgccatggtccatgccgccggcacgcgtgccaccgccaccacctcccacagccgccgcggcccccgccgccggtgtgcgccctgccatctccacctcccagagcctccatggccctgtcgccggggagcgccccgccacaaccactgccgttggacgccgtcgccgtgccccccgcacgccagtggctccgagacctcgtcggacatgaccgtggcatccctgaactgccaagcgccgcccaacacccggcttcttcccctgaccactgtcggcctcctaccccgggcaaacccttctcttccttc

SEQ ID NO: 16804 - protein, 178 aa, Triticum aestivum
  peptide (1)..(178): Ceres Seq. ID no. 13658642
  misc_feature (55)..(169): Pfam Name: Peptidase family S21 Pfam Description: Assemblin
  misc_feature (92)..(174): NCBI GI NO: 14253163 NR Description: VMP4 protein [Volvox carteri f. nagariensis]
  misc_feature (93)..(168): NCBI GI NO: 39591755 NR Description: Hypothetical protein CBG18233
  misc_feature (94)..(177): NCBI GI NO: 5305335 NR Description: proline-rich mucin homolog
  misc_feature (92)..(165): NCBI GI NO: 34912294 NR Description: putative extensin-like protein
  misc_feature (4)..(174): NCBI GI NO: 6523547 NR Description: hydroxyproline-rich glycoprotein DZ-HRGP
  misc_feature (92)..(171): NCBI GI NO: 6523547 NR Description: hydroxyproline-rich glycoprotein DZ-HRGP
  misc_feature (92)..(174): NCBI GI NO: 21322711 NR Description: pherophorin-dz1 protein
  misc_feature (92)..(135): NCBI GI NO: 21322711 NR Description: pherophorin-dz1 protein
  misc_feature (92)..(171): NCBI GI NO: 6523547 NR Description: hydroxyproline-rich glycoprotein DZ-HRGP
  misc_feature (94)..(165): NCBI GI NO: 15240851 NR Description: expressed protein [Arabidopsis thaliana]
KKIPTPVNPTSHPRYPLPHPTAHSRHGPRRRRASHNHHLPWAPRSLPQARVPPLPHPTGAMVPTAGARATATTSCRRHGPCRRHACHRHHLPQPPRPPPPVCALPSPPPRASMALSPGSAPPQPLPLDAVAVPPARQWLRDLVGHDRGIPELPSAAQHPASSPDHCRPPTPGKPFSSF

SEQ ID NO: 16805 - protein, 177 aa, Triticum aestivum
  peptide (1)..(177): Ceres Seq. ID no. 13658643
KKSPPRSTPPPTPDTHSHIPQPTAATALAAGARPTTTISHGRQGPYHRRACHRCHIPQEPWSLPPARAPPPPPPAGAMVHAAGTRATATTSHSRRGPRRRCAPCHLHLPEPPWPCRRGAPRHNHCRWTPSPCPPHASGSETSSDMTVASLNCQAPPNTRLLPLTTVGLLPRANPSLP

SEQ ID NO: 16806 - protein, 144 aa, Triticum aestivum
  peptide (1)..(144): Ceres Seq. ID no. 13658644
  misc_feature (1)..(144): Pfam Name: Pfam Description:  Extensin-like region
  misc_feature (3)..(144): NCBI GI NO: 21355745 NR Description: CG15021-PA [Drosophila melanogaster]
  misc_feature (3)..(144): NCBI GI NO: 6523547 NR Description: hydroxyproline-rich glycoprotein DZ-HRGP
  misc_feature (5)..(144): NCBI GI NO: 27375632 NR Description: blr0521 [Bradyrhizobium japonicum]
  misc_feature (8)..(39): NCBI GI NO: 14253163 NR Description: VMP4 protein [Volvox carteri f. nagariensis]
  misc_feature (3)..(144): NCBI GI NO: 15145797 NR Description: basic proline-rich protein [Sus scrofa]
  misc_feature (14)..(45): NCBI GI NO: 39591755 NR Description: Hypothetical protein CBG18233
  misc_feature (3)..(45): NCBI GI NO: 5305335 NR Description: proline-rich mucin homolog
  misc_feature (3)..(144): NCBI GI NO: 22962211 NR Description: hypothetical protein [Rhodopseudomonas palustris]
  misc_feature (2)..(39): NCBI GI NO: 34912294 NR Description: putative extensin-like protein
  misc_feature (3)..(39): NCBI GI NO: 6523547 NR Description: hydroxyproline-rich glycoprotein DZ-HRGP
KNPHPGQPHLPPPIPTPTSHSPQPPRPSPPARVPQPPSPMGAKVPTTGARATAATSHRSHGPYRRRARHRHHLLQAPWSMPPARVPPPPPPTAAAAPAAGVRPAISTSQSLHGPVAGERPATTTAVGRRRRAPRTPVAPRPRRT

SEQ ID NO: 16807 - protein, 118 aa, Triticum aestivum
  peptide (1)..(118): Ceres Seq. ID no. 13658645
  misc_feature (1)..(109): Pfam Name: Peptidase family S21 Pfam Description: Assemblin
  misc_feature (32)..(114): NCBI GI NO: 14253163 NR Description: VMP4 protein [Volvox carteri f. nagariensis]
  misc_feature (33)..(108): NCBI GI NO: 39591755 NR Description: Hypothetical protein CBG18233
  misc_feature (34)..(117): NCBI GI NO: 5305335 NR Description: proline-rich mucin homolog
  misc_feature (32)..(105): NCBI GI NO: 34912294 NR Description: putative extensin-like protein
  misc_feature (1)..(114): NCBI GI NO: 6523547 NR Description: hydroxyproline-rich glycoprotein DZ-HRGP
  misc_feature (32)..(111): NCBI GI NO: 6523547 NR Description: hydroxyproline-rich glycoprotein DZ-HRGP
  misc_feature (32)..(114): NCBI GI NO: 21322711 NR Description: pherophorin-dz1 protein
  misc_feature (32)..(75): NCBI GI NO: 21322711 NR Description: pherophorin-dz1 protein
  misc_feature (32)..(111): NCBI GI NO: 6523547 NR Description: hydroxyproline-rich glycoprotein DZ-HRGP
  misc_feature (34)..(105): NCBI GI NO: 15240851 NR Description: expressed protein [Arabidopsis thaliana]
MVPTAGARATATTSCRRHGPCRRHACHRHHLPQPPRPPPPVCALPSPPPRASMALSPGSAPPQPLPLDAVAVPPARQWLRDLVGHDRGIPELPSAAQHPASSPDHCRPPTPGKPFSSF

SEQ ID NO: 16808 - DNA, 1706 bp, Triticum aestivum
  misc_feature (1)..(1706): Ceres Seq. ID no. 13658584
ggtggttgctcctagtcgcagacttctttattaatctcaatctggatccgggcacggggagcgattgactgatcgacgagactcgagagcctggagagccgggggtttcgcttctcgttgcgtttggagtcttgccgggtctcggttttcgagcaggcaagaatttccttttaattttgggtgatctgttttcgtgtgctaagattttggatcatcgccccccccagtgttgttcctgctgatttaccgcctggattggattttttttggacgggttacctttaatggggcttctcccttctcgtcgtcgcgaatcagtggactagaacaagaaaccttcccgattggagcggattttctgtggtcgccgcgcttagtttcgaaaggcggcacctttatttgctaccacgctttgctgtggcccaaaagttacccattgtgtctgtttcaagaaatagattgggttttcttttcttttttctgaggtgtttgttttacttggcagatccagggaacaccggttttcctttgattttgccgaaatttttgatctgatcggagcgatcccggagcttcgcaaggagcaaggcatttttctgggggccatggccatggggctcggccgattcacacactggctctggccgggtaacgccgcgcgagttggcaaccacgagctccccggcatcgccttgacgggcgcctccttcccggagttcccctccgggttccgtgaggcggacgctatcgccttctccagtgccgccgccggccgccgcacgcggccgaggagggtcaagaaccagcggcgcagtcgcggggagcccagaatcgacagggagtacgacatggtcatcgtgccgtccgacggcggcgggtgcctttccgggtccgagtccgacgactccgactggtccatcggctggctggagccgcaggcgccggagatgcagacggacggtgaccaggagacctccttcgccgtcctcgtgccctgctaccgccacggccgcgccgagcagcccgcgatgccccagggacgcttccttggcgctggccctctcgccgatggcggcctctctgatattgctgagcttaaccttccaaagacaactaaaatttcttttccaaatggaaaggatgatctcatgaactttgaggccactctacgtcctgatgaaggatactatgtaggtgggacatttactttcaccttccaagtatctccttcctaccctcacgaggctccgaaggtcaagtgcaagactaaggtttaccatcctaatattgacctagaaggaaatgtctgcctgaacattctgcgtgaagactggaagcctgtcttgaacatcaacaccataatatatggtttaaaccttcttttctcacaacccaatgacgaggaccccttgaatcatgaagctgcggccgtcctccgagacaacccacagaagttccagagaaatgttcaaacggcgatgtcgggaggctatgttgataatacccatttcccaaggtgcaagtaaggtctgctatgtggagctctggttccgactcttgcccaattaccctgaatgccgttgcacagtctgaaggatgtggcatgtacccaggaaatgtatcgcatttgtgttagacgtgactgttattatgcttgtttggtggatgtaacggagtcatgcatgttgaagaaacatgctaagcmg

SEQ ID NO: 16809 - protein, 306 aa, Triticum aestivum
  peptide (1)..(306): Ceres Seq. ID no. 15219908
  misc_feature (160)..(305): NCBI GI NO: 40253382 NR Description: putative RUB1 conjugating enzyme
  misc_feature (160)..(305): NCBI GI NO: 37531910 NR Description: putative ubiquitin-conjugating enzyme
  misc_feature (160)..(305): NCBI GI NO: 10946511 NR Description: RUB1 conjugating enzyme [Lycopersicon esculentum]
  misc_feature (160)..(305): NCBI GI NO: 6635457 NR Description: RUB1 conjugating enzyme [Arabidopsis thaliana]
  misc_feature (160)..(305): NCBI GI NO: 18398792 NR Description: RUB1-conjugating enzyme, putative
  misc_feature (160)..(305): NCBI GI NO: 26000688 NR Description: RUB1 conjugating enzyme [Olea europaea]
  misc_feature (160)..(305): NCBI GI NO: 25407764 NR Description: ubiquitin-protein ligase-like protein
  misc_feature (160)..(296): NCBI GI NO: 32400752 NR Description: RUB1-conjugating enzyme [Triticum aestivum]
  misc_feature (160)..(305): NCBI GI NO: 38174699 NR Description: Unknown (protein for MGC:75750)
  misc_feature (160)..(305): NCBI GI NO: 4507791 NR Description: ubiquitin-conjugating enzyme E2M
MAMGLGRFTHWLWPGNAARVGNHELPGIALTGASFPEFPSGFREADAIAFSSAAAGRRTRPRRVKNQRRSRGEPRIDREYDMVIVPSDGGGCLSGSESDDSDWSIGWLEPQAPEMQTDGDQETSFAVLVPCYRHGRAEQPAMPQGRFLGAGPLADGGLSDIAELNLPKTTKISFPNGKDDLMNFEATLRPDEGYYVGGTFTFTFQVSPSYPHEAPKVKCKTKVYHPNIDLEGNVCLNILREDWKPVLNINTIIYGLNLLFSQPNDEDPLNHEAAAVLRDNPQKFQRNVQTAMSGGYVDNTHFPRCK

SEQ ID NO: 16810 - protein, 304 aa, Triticum aestivum
  peptide (1)..(304): Ceres Seq. ID no. 15219909
  misc_feature (158)..(303): NCBI GI NO: 40253382 NR Description: putative RUB1 conjugating enzyme
  misc_feature (158)..(303): NCBI GI NO: 37531910 NR Description: putative ubiquitin-conjugating enzyme
  misc_feature (158)..(303): NCBI GI NO: 10946511 NR Description: RUB1 conjugating enzyme [Lycopersicon esculentum]
  misc_feature (158)..(303): NCBI GI NO: 6635457 NR Description: RUB1 conjugating enzyme [Arabidopsis thaliana]
  misc_feature (158)..(303): NCBI GI NO: 18398792 NR Description: RUB1-conjugating enzyme, putative
  misc_feature (158)..(303): NCBI GI NO: 26000688 NR Description: RUB1 conjugating enzyme [Olea europaea]
  misc_feature (158)..(303): NCBI GI NO: 25407764 NR Description: ubiquitin-protein ligase-like protein
  misc_feature (158)..(294): NCBI GI NO: 32400752 NR Description: RUB1-conjugating enzyme [Triticum aestivum]
  misc_feature (158)..(303): NCBI GI NO: 38174699 NR Description: Unknown (protein for MGC:75750)
  misc_feature (158)..(303): NCBI GI NO: 4507791 NR Description: ubiquitin-conjugating enzyme E2M
MGLGRFTHWLWPGNAARVGNHELPGIALTGASFPEFPSGFREADAIAFSSAAAGRRTRPRRVKNQRRSRGEPRIDREYDMVIVPSDGGGCLSGSESDDSDWSIGWLEPQAPEMQTDGDQETSFAVLVPCYRHGRAEQPAMPQGRFLGAGPLADGGLSDIAELNLPKTTKISFPNGKDDLMNFEATLRPDEGYYVGGTFTFTFQVSPSYPHEAPKVKCKTKVYHPNIDLEGNVCLNILREDWKPVLNINTIIYGLNLLFSQPNDEDPLNHEAAAVLRDNPQKFQRNVQTAMSGGYVDNTHFPRCK

SEQ ID NO: 16811 - protein, 225 aa, Triticum aestivum
  peptide (1)..(225): Ceres Seq. ID no. 15219910
  misc_feature (79)..(224): NCBI GI NO: 40253382 NR Description: putative RUB1 conjugating enzyme
  misc_feature (79)..(224): NCBI GI NO: 37531910 NR Description: putative ubiquitin-conjugating enzyme
  misc_feature (79)..(224): NCBI GI NO: 10946511 NR Description: RUB1 conjugating enzyme [Lycopersicon esculentum]
  misc_feature (79)..(224): NCBI GI NO: 6635457 NR Description: RUB1 conjugating enzyme [Arabidopsis thaliana]
  misc_feature (79)..(224): NCBI GI NO: 18398792 NR Description: RUB1-conjugating enzyme, putative
  misc_feature (79)..(224): NCBI GI NO: 26000688 NR Description: RUB1 conjugating enzyme [Olea europaea]
  misc_feature (79)..(224): NCBI GI NO: 25407764 NR Description: ubiquitin-protein ligase-like protein
  misc_feature (79)..(215): NCBI GI NO: 32400752 NR Description: RUB1-conjugating enzyme [Triticum aestivum]
  misc_feature (79)..(224): NCBI GI NO: 38174699 NR Description: Unknown (protein for MGC:75750)
  misc_feature (79)..(224): NCBI GI NO: 4507791 NR Description: ubiquitin-conjugating enzyme E2M
MVIVPSDGGGCLSGSESDDSDWSIGWLEPQAPEMQTDGDQETSFAVLVPCYRHGRAEQPAMPQGRFLGAGPLADGGLSDIAELNLPKTTKISFPNGKDDLMNFEATLRPDEGYYVGGTFTFTFQVSPSYPHEAPKVKCKTKVYHPNIDLEGNVCLNILREDWKPVLNINTIIYGLNLLFSQPNDEDPLNHEAAAVLRDNPQKFQRNVQTAMSGGYVDNTHFPRCK

SEQ ID NO: 16812 - DNA, 1066 bp, Triticum aestivum
  misc_feature (1)..(1066): Ceres Seq. ID no. 13657842
atcaagaagaggaagcgaggagccaagaaccacacaccctcctaaacgcctccgcctcctccccacgggcgcacccgagctccagccctagcatttccgctcccccctctctcccttgtttctccttctgcaggaaatggaggtggtggatttggtgtcgtccgactccgaggacgaggcgtgcgcgcactcgcctgatcggaagcgtcccgcctgggagcccgcggatccatcccgcggccccgggagtcttcccgagcagacaagcagaatggcctggccgccgcagcagccaagcagaatggcctggccgccgcagcagccaagtcaggcggtgaagaaggacaaggagaaggcaggcgagggggggagcgcgtgggcagcaggacccccttcgctcaggggaggatcgcatgcttctagtgccggtatcttgggagctaggcctgcggggtgggattcatggagtgcagcggcacacaaatctagagatgaaagaagtgaaacgcccgagtgttgttggggaccttggggtgatgagatttgcagatcagtctgtgtgcccaaggaagatggtgctgcgatgcctggacagagctgtatggccattcctgagctactgatggaagacagtagcgcatggctgtcgaggatcaaggggctccatttcccacttcctgatgagagccagttgaaggccaggcaaattcattcagatgagatgcttgctcttaagcttcaagagcagttcaaccaggaacagccaggctcgcaatcttcccagcaggttgatacgactctagcttggacactgcaagagcaagatgctgcgcgtgccagaatcgctgcgagagagggccaatctagttctaggcagagggaccgcttaatggcacacttgtattcgtatggctggcgctcgcaagttcaaggttatccttcatggccacctagtgacacatcagctccaataacaagcagacggtggttgccaagaaacagcagcccaggatcagagcaacaaaatatgatatctctcaattgaccaaagggtgttttggacaag

SEQ ID NO: 16813 - protein, 302 aa, Triticum aestivum
  peptide (1)..(302): Ceres Seq. ID no. 13657843
  misc_feature (98)..(246): NCBI GI NO: 34911058 NR Description: P0007F06.24
MEVVDLVSSDSEDEACAHSPDRKRPAWEPADPSRGPGSLPEQTSRMAWPPQQPSRMAWPPQQPSQAVKKDKEKAGEGGSAWAAGPPSLRGGSHASSAGILGARPAGWDSWSAAAHKSRDERSETPECCWGPWGDEICRSVCVPKEDGAAMPGQSCMAIPELLMEDSSAWLSRIKGLHFPLPDESQLKARQIHSDEMLALKLQEQFNQEQPGSQSSQQVDTTLAWTLQEQDAARARIAAREGQSSSRQRDRLMAHLYSYGWRSQVQGYPSWPPSDTSAPITSRRWLPRNSSPGSEQQNMISLN

SEQ ID NO: 16814 - protein, 257 aa, Triticum aestivum
  peptide (1)..(257): Ceres Seq. ID no. 13657844
  misc_feature (53)..(201): NCBI GI NO: 34911058 NR Description: P0007F06.24
MAWPPQQPSRMAWPPQQPSQAVKKDKEKAGEGGSAWAAGPPSLRGGSHASSAGILGARPAGWDSWSAAAHKSRDERSETPECCWGPWGDEICRSVCVPKEDGAAMPGQSCMAIPELLMEDSSAWLSRIKGLHFPLPDESQLKARQIHSDEMLALKLQEQFNQEQPGSQSSQQVDTTLAWTLQEQDAARARIAAREGQSSSRQRDRLMAHLYSYGWRSQVQGYPSWPPSDTSAPITSRRWLPRNSSPGSEQQNMISLN

SEQ ID NO: 16815 - protein, 247 aa, Triticum aestivum
  peptide (1)..(247): Ceres Seq. ID no. 13657845
  misc_feature (43)..(191): NCBI GI NO: 34911058 NR Description: P0007F06.24
MAWPPQQPSQAVKKDKEKAGEGGSAWAAGPPSLRGGSHASSAGILGARPAGWDSWSAAAHKSRDERSETPECCWGPWGDEICRSVCVPKEDGAAMPGQSCMAIPELLMEDSSAWLSRIKGLHFPLPDESQLKARQIHSDEMLALKLQEQFNQEQPGSQSSQQVDTTLAWTLQEQDAARARIAAREGQSSSRQRDRLMAHLYSYGWRSQVQGYPSWPPSDTSAPITSRRWLPRNSSPGSEQQNMISLN

SEQ ID NO: 16816 - DNA, 1846 bp, Triticum aestivum
  misc_feature (1)..(1846): Ceres Seq. ID no. 14307972
actcaatcattccgagagctgtgctccagaaaaagaaactgcagagggggcgagaagtgcaaaaaaaaaaggagctgcgaagctctgctggcgctcgccgtctccgtcttctccggtctccaccatggcctctttcgccgcccttccgctggccgctctcctggtgctggccgtctcgtgggcatgggagcacctcgtgtggaggccctacgccatagccaggaggcacagggcgcaagggatccatggccccccatacaggttcctcaagggctccaacgaggaggtgaggcggatgaaggcggagacggccgacgtggtgctcgacgtccgcgaccacaactacctccccagggtcgcgccgcacttcctcaagtggagggcacagtatggagagccatttctgttctggtttggtgccaagccccggatctgtgtctttgactacgagttggttaggcagatcctttcaagcaaatccggacactttccgaagaacgacgcgcacccgaacgtgttggaattgctcggcaagggcctggtgttggtgaacggtgtggattgggtgcgccatcgcagggtcatcaaccctgcttttgcaatggataagataaaggcgatgacggaaacgatggtgtcttgtgcccaacgcacgttcagtgtgtttgaagatcaggcatgcaagaacacaaatagagaaatcctagtggaattcgacaaagcagtccaagggttaacagcagatatcatatcccacacagccttcggaagtagctacaaattaggaatggaagccttccatgcccagaaagagctccagtcaatcgccatatccagtttacttaatgtgcagataccaggattcagctatctgcccacaaaaaggaataggaggaagtggatgcttgaaaagaagcttcgaagcacgctcatgcgtgtcataaactcgcggttagcgtcgaaggggagcggatatggaaatgacctacttggtttgatgtttgagggctgcactacgacagtgcaagggggcaagcaggagcagctaagcttgagcatggaggagatcctacacgagtgcaaaacattcttcttcgccggttacgaaacgacatcgcttctgctcacctggacagtgttcttgctcagtgtgtacccagagtggcaggagaggctacgggaggaggtcttgagggaggttggaaagggtaaccccaccggcgacaacctcggcaaactgaaagagatgatgatggtcctccatgaagccctgaggctctacggccctgctcttttcatgcagaggaagaccataactgacatggtggtcggagccataacaatccccaaggaccatgcagttgtcataggcgccccattcatgcaccgggataaaaaggtctggggtgaggatgcggatcagttcaacccgatgagattcgcgaacggggtcgccagagcggcgaaggttccacacgccctgctggcgttctcgatcgggccgagggcgtgcatcggccagaactttgcgatgctcgaagccaaatccgtgatggtgacggttctgcagaagttctcgttcgctctctccccgagctatgtccacgctcctgcggatttcctcactctgcagcctaagtttggcctccccgtcgttatgaagctgctggatatatgaaatggaaccggctggttctgaatgttgcagtacagaacttctgaattttctgcatgtggtgctcatagtgcacgcagtgtatatattcttttccaaattaaggttggaaaagtagtacgattacaagaaaatatattgcatgtggcttgaccacccgtctgtttgcac

SEQ ID NO: 16817 - protein, 558 aa, Triticum aestivum
  peptide (1)..(558): Ceres Seq. ID no. 14307973
  misc_feature (46)..(557): NCBI GI NO: 34896952 NR Description: putative cytochrome P450-related protein
  misc_feature (42)..(558): NCBI GI NO: 34913354 NR Description: putative cytochrome P450
  misc_feature (268)..(557): NCBI GI NO: 28927679 NR Description: putative cytochrome P450, 5'-partial
  misc_feature (99)..(232): NCBI GI NO: 28927679 NR Description: putative cytochrome P450, 5'-partial
  misc_feature (48)..(558): NCBI GI NO: 38112707 NR Description: cytochrome P450 [Triticum aestivum]
  misc_feature (51)..(558): NCBI GI NO: 22324446 NR Description: putative cytochrome P450
  misc_feature (47)..(557): NCBI GI NO: 14719280 NR Description: cytochrome P450 [Zea mays]
  misc_feature (39)..(557): NCBI GI NO: 15226472 NR Description: cytochrome P450 family [Arabidopsis thaliana]
  misc_feature (45)..(557): NCBI GI NO: 18407219 NR Description: cytochrome P450 family [Arabidopsis thaliana]
  misc_feature (45)..(557): NCBI GI NO: 7484896 NR Description: cytochrome P450 homolog F14M4
LNHSESCAPEKETAEGARSAKKKGAAKLCWRSPSPSSPVSTMASFAALPLAALLVLAVSWAWEHLVWRPYAIARRHRAQGIHGPPYRFLKGSNEEVRRMKAETADVVLDVRDHNYLPRVAPHFLKWRAQYGEPFLFWFGAKPRICVFDYELVRQILSSKSGHFPKNDAHPNVLELLGKGLVLVNGVDWVRHRRVINPAFAMDKIKAMTETMVSCAQRTFSVFEDQACKNTNREILVEFDKAVQGLTADIISHTAFGSSYKLGMEAFHAQKELQSIAISSLLNVQIPGFSYLPTKRNRRKWMLEKKLRSTLMRVINSRLASKGSGYGNDLLGLMFEGCTTTVQGGKQEQLSLSMEEILHECKTFFFAGYETTSLLLTWTVFLLSVYPEWQERLREEVLREVGKGNPTGDNLGKLKEMMMVLHEALRLYGPALFMQRKTITDMVVGAITIPKDHAVVIGAPFMHRDKKVWGEDADQFNPMRFANGVARAAKVPHALLAFSIGPRACIGQNFAMLEAKSVMVTVLQKFSFALSPSYVHAPADFLTLQPKFGLPVVMKLLDI

SEQ ID NO: 16818 - protein, 517 aa, Triticum aestivum
  peptide (1)..(517): Ceres Seq. ID no. 14307974
  misc_feature (5)..(516): NCBI GI NO: 34896952 NR Description: putative cytochrome P450-related protein
  misc_feature (1)..(517): NCBI GI NO: 34913354 NR Description: putative cytochrome P450
  misc_feature (227)..(516): NCBI GI NO: 28927679 NR Description: putative cytochrome P450, 5'-partial
  misc_feature (58)..(191): NCBI GI NO: 28927679 NR Description: putative cytochrome P450, 5'-partial
  misc_feature (7)..(517): NCBI GI NO: 38112707 NR Description: cytochrome P450 [Triticum aestivum]
  misc_feature (10)..(517): NCBI GI NO: 22324446 NR Description: putative cytochrome P450
  misc_feature (6)..(516): NCBI GI NO: 14719280 NR Description: cytochrome P450 [Zea mays]
  misc_feature (1)..(516): NCBI GI NO: 15226472 NR Description: cytochrome P450 family [Arabidopsis thaliana]
  misc_feature (4)..(516): NCBI GI NO: 18407219 NR Description: cytochrome P450 family [Arabidopsis thaliana]
  misc_feature (4)..(516): NCBI GI NO: 7484896 NR Description: cytochrome P450 homolog F14M4
MASFAALPLAALLVLAVSWAWEHLVWRPYAIARRHRAQGIHGPPYRFLKGSNEEVRRMKAETADVVLDVRDHNYLPRVAPHFLKWRAQYGEPFLFWFGAKPRICVFDYELVRQILSSKSGHFPKNDAHPNVLELLGKGLVLVNGVDWVRHRRVINPAFAMDKIKAMTETMVSCAQRTFSVFEDQACKNTNREILVEFDKAVQGLTADIISHTAFGSSYKLGMEAFHAQKELQSIAISSLLNVQIPGFSYLPTKRNRRKWMLEKKLRSTLMRVINSRLASKGSGYGNDLLGLMFEGCTTTVQGGKQEQLSLSMEEILHECKTFFFAGYETTSLLLTWTVFLLSVYPEWQERLREEVLREVGKGNPTGDNLGKLKEMMMVLHEALRLYGPALFMQRKTITDMVVGAITIPKDHAVVIGAPFMHRDKKVWGEDADQFNPMRFANGVARAAKVPHALLAFSIGPRACIGQNFAMLEAKSVMVTVLQKFSFALSPSYVHAPADFLTLQPKFGLPVVMKLLDI

SEQ ID NO: 16819 - protein, 460 aa, Triticum aestivum
  peptide (1)..(460): Ceres Seq. ID no. 14307975
  misc_feature (1)..(459): NCBI GI NO: 34896952 NR Description: putative cytochrome P450-related protein
  misc_feature (1)..(460): NCBI GI NO: 34913354 NR Description: putative cytochrome P450
  misc_feature (170)..(459): NCBI GI NO: 28927679 NR Description: putative cytochrome P450, 5'-partial
  misc_feature (1)..(134): NCBI GI NO: 28927679 NR Description: putative cytochrome P450, 5'-partial
  misc_feature (1)..(460): NCBI GI NO: 38112707 NR Description: cytochrome P450 [Triticum aestivum]
  misc_feature (1)..(460): NCBI GI NO: 22324446 NR Description: putative cytochrome P450
  misc_feature (1)..(459): NCBI GI NO: 14719280 NR Description: cytochrome P450 [Zea mays]
  misc_feature (1)..(459): NCBI GI NO: 15226472 NR Description: cytochrome P450 family [Arabidopsis thaliana]
  misc_feature (1)..(459): NCBI GI NO: 18407219 NR Description: cytochrome P450 family [Arabidopsis thaliana]
  misc_feature (1)..(459): NCBI GI NO: 7484896 NR Description: cytochrome P450 homolog F14M4
MKAETADVVLDVRDHNYLPRVAPHFLKWRAQYGEPFLFWFGAKPRICVFDYELVRQILSSKSGHFPKNDAHPNVLELLGKGLVLVNGVDWVRHRRVINPAFAMDKIKAMTETMVSCAQRTFSVFEDQACKNTNREILVEFDKAVQGLTADIISHTAFGSSYKLGMEAFHAQKELQSIAISSLLNVQIPGFSYLPTKRNRRKWMLEKKLRSTLMRVINSRLASKGSGYGNDLLGLMFEGCTTTVQGGKQEQLSLSMEEILHECKTFFFAGYETTSLLLTWTVFLLSVYPEWQERLREEVLREVGKGNPTGDNLGKLKEMMMVLHEALRLYGPALFMQRKTITDMVVGAITIPKDHAVVIGAPFMHRDKKVWGEDADQFNPMRFANGVARAAKVPHALLAFSIGPRACIGQNFAMLEAKSVMVTVLQKFSFALSPSYVHAPADFLTLQPKFGLPVVMKLLDI

SEQ ID NO: 16820 - DNA, 1763 bp, Triticum aestivum
  misc_feature (1)..(1763): Ceres Seq. ID no. 14307904
accaccaccgtcctcatctcctcctcgagcccctcccccctcctccgcatctcgccaccaacctccccccgatccccaacccccatgatccgcaggaggcgcgggcacgccgccgcctagggtttccactccccgccccccccgatggagtcgctgccgcggaagcgcaagggcgcgcgctccctcgccggctccctccacgacgcctccgcggaccgcaagcggacctgccgggagcggaagccgcgccccgacaagaagaaaaagaagccctccaccgccggcgatgacgccgccaccgcctccggccggggcggcgtggtcatgacggcgccgccggccagcggccgggccgccccggacagccccggaagggggctcaagcgcaaggtcggctgcatcgagtccgccacccggataggccgcaagaagcgcctcgaggccgagtacgagctcggcgacgagatcggccagggcaagttcggctccgtccggatctgccgcgccaaggccggcggcgaggagttcgcctgcaaggcgctccccaagaacggcgaggagacggtccaccgcgaggtcgagatcatgcagcacctctccggccaccccggcgtcgtcacgctcaaggccgtcttcgaggacgccgacaagttctacctcgtcatggagctctgcagcggcggccgcttgctcgacgagatggccagggacggcaccttctccgagcagcgagccgcccttgtcatcaaggatctaatgtcggtcgtcaagtactgccatgaaatgggcgtcatccacagggacattaagccggagaatattttgctcaccaagactgggaagatgaaactagcagattttggattggcagcacgagttactaacggtcagaaattgtctggcgttgctgggagcccagcctatgtggcgcctgaggtgttgtcaggaagctattctgagaaagtagacatatggggtgctggggtgctcctccatgtactactgcttggttcacttccatttcaagggggctctctggaagctgtctttgaagctataaagacagttgagcttgatttcaacagcggtccatgggaatcaatgtcagttcttggacgggatcttataagtcgaatgttagatcgagatgtctcttctagaataactgctgatcaagttctttgtcatccatgggtgttgttctacacggaatgtaccctgaaggctgtaacacctaatgtcactaacaagattgtagcacccaaaattacatgggacagaattagatcacattgtgagtcgtcagcttcagattcgtctagccagaggtcggaggaccaggatgaatgtggcatagtcgacgcactgacagcggcaataacacatgttagaatatcggagccgaaaaggacccggctttgcagccccggcattcccatacagcaggagtgctcctcaaacataaagagcaacctgtgtacggcgttctgacatgaccccaatgtatagccccttgtgtgttggtctgatgtcagtgatggctcgccctgctggttgtctctgtgctgaggataataactcgggttttcctgtcagagcaagcaagcgttcgacatggtgatgctgtagattgcggtgatggctgatgaacccgacatggtagctgatgctgtaaattttgtaaatagaatgatccatgtagctaatttatatcttgagagagttgagaataatttcagtctatgatgaacatagtgcgcgcc

SEQ ID NO: 16821 - protein, 448 aa, Triticum aestivum
  peptide (1)..(448): Ceres Seq. ID no. 14307905
  misc_feature (102)..(351): Pfam Name: Pfam Description:  Protein kinase domain
  misc_feature (38)..(442): NCBI GI NO: 15222045 NR Description: protein kinase family [Arabidopsis thaliana]
  misc_feature (38)..(442): NCBI GI NO: 25402738 NR Description: protein T12C24.22
  misc_feature (98)..(351): NCBI GI NO: 15222023 NR Description: protein kinase family [Arabidopsis thaliana]
  misc_feature (64)..(370): NCBI GI NO: 7428005 NR Description: calcium-dependent protein kinase (EC 2
  misc_feature (98)..(351): NCBI GI NO: 21064945 NR Description: CDPK-like protein [Solanum tuberosum]
  misc_feature (61)..(351): NCBI GI NO: 25553562 NR Description: OSJNBa0038F22.11
  misc_feature (61)..(351): NCBI GI NO: 34898032 NR Description: ESTs AU030197
  misc_feature (34)..(351): NCBI GI NO: 15227525 NR Description: calcium-dependent protein kinase, putative (CDPK)
  misc_feature (64)..(370): NCBI GI NO: 2827773 NR Description: Calcium-dependent protein kinase (CDPK)
  misc_feature (43)..(370): NCBI GI NO: 28866604 NR Description: calcium-dependent protein kinase
MESLPRKRKGARSLAGSLHDASADRKRTCRERKPRPDKKKKKPSTAGDDAATASGRGGVVMTAPPASGRAAPDSPGRGLKRKVGCIESATRIGRKKRLEAEYELGDEIGQGKFGSVRICRAKAGGEEFACKALPKNGEETVHREVEIMQHLSGHPGVVTLKAVFEDADKFYLVMELCSGGRLLDEMARDGTFSEQRAALVIKDLMSVVKYCHEMGVIHRDIKPENILLTKTGKMKLADFGLAARVTNGQKLSGVAGSPAYVAPEVLSGSYSEKVDIWGAGVLLHVLLLGSLPFQGGSLEAVFEAIKTVELDFNSGPWESMSVLGRDLISRMLDRDVSSRITADQVLCHPWVLFYTECTLKAVTPNVTNKIVAPKITWDRIRSHCESSASDSSSQRSEDQDECGIVDALTAAITHVRISEPKRTRLCSPGIPIQQECSSNIKSNLCTAF

SEQ ID NO: 16822 - protein, 388 aa, Triticum aestivum
  peptide (1)..(388): Ceres Seq. ID no. 14307906
  misc_feature (42)..(291): Pfam Name: Pfam Description:  Protein kinase domain
  misc_feature (1)..(382): NCBI GI NO: 15222045 NR Description: protein kinase family [Arabidopsis thaliana]
  misc_feature (1)..(382): NCBI GI NO: 25402738 NR Description: protein T12C24.22
  misc_feature (38)..(291): NCBI GI NO: 15222023 NR Description: protein kinase family [Arabidopsis thaliana]
  misc_feature (4)..(310): NCBI GI NO: 7428005 NR Description: calcium-dependent protein kinase (EC 2
  misc_feature (38)..(291): NCBI GI NO: 21064945 NR Description: CDPK-like protein [Solanum tuberosum]
  misc_feature (1)..(291): NCBI GI NO: 25553562 NR Description: OSJNBa0038F22.11
  misc_feature (1)..(291): NCBI GI NO: 34898032 NR Description: ESTs AU030197
  misc_feature (1)..(291): NCBI GI NO: 15227525 NR Description: calcium-dependent protein kinase, putative (CDPK)
  misc_feature (4)..(310): NCBI GI NO: 2827773 NR Description: Calcium-dependent protein kinase (CDPK)
  misc_feature (1)..(310): NCBI GI NO: 28866604 NR Description: calcium-dependent protein kinase
MTAPPASGRAAPDSPGRGLKRKVGCIESATRIGRKKRLEAEYELGDEIGQGKFGSVRICRAKAGGEEFACKALPKNGEETVHREVEIMQHLSGHPGVVTLKAVFEDADKFYLVMELCSGGRLLDEMARDGTFSEQRAALVIKDLMSVVKYCHEMGVIHRDIKPENILLTKTGKMKLADFGLAARVTNGQKLSGVAGSPAYVAPEVLSGSYSEKVDIWGAGVLLHVLLLGSLPFQGGSLEAVFEAIKTVELDFNSGPWESMSVLGRDLISRMLDRDVSSRITADQVLCHPWVLFYTECTLKAVTPNVTNKIVAPKITWDRIRSHCESSASDSSSQRSEDQDECGIVDALTAAITHVRISEPKRTRLCSPGIPIQQECSSNIKSNLCTAF

SEQ ID NO: 16823 - protein, 301 aa, Triticum aestivum
  peptide (1)..(301): Ceres Seq. ID no. 14307907
  misc_feature (1)..(204): Pfam Name: Pfam Description:  Protein kinase domain
  misc_feature (1)..(295): NCBI GI NO: 15222045 NR Description: protein kinase family [Arabidopsis thaliana]
  misc_feature (1)..(295): NCBI GI NO: 25402738 NR Description: protein T12C24.22
  misc_feature (1)..(204): NCBI GI NO: 15222023 NR Description: protein kinase family [Arabidopsis thaliana]
  misc_feature (1)..(223): NCBI GI NO: 7428005 NR Description: calcium-dependent protein kinase (EC 2
  misc_feature (1)..(204): NCBI GI NO: 21064945 NR Description: CDPK-like protein [Solanum tuberosum]
  misc_feature (1)..(204): NCBI GI NO: 25553562 NR Description: OSJNBa0038F22.11
  misc_feature (1)..(204): NCBI GI NO: 34898032 NR Description: ESTs AU030197
  misc_feature (1)..(204): NCBI GI NO: 15227525 NR Description: calcium-dependent protein kinase, putative (CDPK)
  misc_feature (1)..(223): NCBI GI NO: 2827773 NR Description: Calcium-dependent protein kinase (CDPK)
  misc_feature (1)..(223): NCBI GI NO: 28866604 NR Description: calcium-dependent protein kinase
MQHLSGHPGVVTLKAVFEDADKFYLVMELCSGGRLLDEMARDGTFSEQRAALVIKDLMSVVKYCHEMGVIHRDIKPENILLTKTGKMKLADFGLAARVTNGQKLSGVAGSPAYVAPEVLSGSYSEKVDIWGAGVLLHVLLLGSLPFQGGSLEAVFEAIKTVELDFNSGPWESMSVLGRDLISRMLDRDVSSRITADQVLCHPWVLFYTECTLKAVTPNVTNKIVAPKITWDRIRSHCESSASDSSSQRSEDQDECGIVDALTAAITHVRISEPKRTRLCSPGIPIQQECSSNIKSNLCTAF

SEQ ID NO: 16824 - DNA, 1089 bp, Triticum aestivum
  misc_feature (1)..(1089): Ceres Seq. ID no. 15179832
atggcattgtgtgaggaataaaccaacgaaaattgtcccaactctcctagtgtcatccacaactatcaatgctcaggttcaaaggtctaacaaactttgatcatgtttgtaggtatggtgagagcgaaggttatccttctcagagtggcatcacaaaagatgcacaggccgcacttgatcatctacttcagaggaaggacattgacacatccaggatagttatcttcgggagatctttaggaggtgctgttggagcagttcttgcaaaaaacaatcctgacaaggtgtctgctctaatattggaaaatacttttacatctatattggatatggctggtatcatgctgcccttcttaagatggttcataggcggtagttctgccaaaggcccaaaacttcttaactgcgttgttcgctctccatggagtacacttgatgttgttgcagaggtcaaacagcccattctctttctttctggattgcaagatgaactggttcccccttcacacatgaggatgctgtatgacaaagctgttgaacataacaggaattgtaggtttgttgattttctcaatggtatgcatatggatacctggatttctggaggggaccgctactggaggacaatcgaattgtttctggaccaatattccccagaagtacagagttctgatgccagctgcacaagtgaaattgctgatgatgataaagctgcataataattggaacatctagagcagcctgctgttttccaccagtttttctgatgttgatgcaattccggtctttgatggattgaagatcatttcaaacaattaattcaggtggttgttctgctccattccacctgaagaagccaaagctgtgaatatattttgaggttgttctccatcctgtgatgctgctgcatatgtgtatggaatgacacatatatatttctgagcctggctcggccttcaactcccgagtttctgtacaatgttgaattggcttcattcaagtatttgcaatttattggaactagtaccgaatgttagaaaatctggccttggtgtatgacggttcagtatagggtaatcttgttggctc

SEQ ID NO: 16825 - protein, 216 aa, Triticum aestivum
  peptide (1)..(216): Ceres Seq. ID no. 15179833
  misc_feature (16)..(98): Pfam Name: Pfam Description:  alpha/beta hydrolase fold
  misc_feature (16)..(215): NCBI GI NO: 34395138 NR Description: putative membrane protein
  misc_feature (16)..(202): NCBI GI NO: 18420236 NR Description: expressed protein [Arabidopsis thaliana]
  misc_feature (16)..(191): NCBI GI NO: 987287 NR Description: temperature sensitive supressor of Saccharomycescerevisiae bem1/ bud5
  misc_feature (16)..(191): NCBI GI NO: 2257503 NR Description: BEM46 PROTEIN [Schizosaccharomyces pombe]
  misc_feature (16)..(191): NCBI GI NO: 19112401 NR Description: supressor of bem1/bud5 [Schizosaccharomyces pombe]
  misc_feature (16)..(204): NCBI GI NO: 14249592 NR Description: hypothetical protein FLJ14906 [Homo sapiens]
  misc_feature (16)..(204): NCBI GI NO: 26336440 NR Description: unnamed protein product [Mus musculus]
  misc_feature (16)..(204): NCBI GI NO: 28483207 NR Description: RIKEN cDNA 1110065L07 [Mus musculus]
  misc_feature (16)..(204): NCBI GI NO: 34879678 NR Description: similar to 1110065L07Rik protein
  misc_feature (16)..(204): NCBI GI NO: 17137566 NR Description: CG18642-PA [Drosophila melanogaster]
MLRFKGLTNFDHVCRYGESEGYPSQSGITKDAQAALDHLLQRKDIDTSRIVIFGRSLGGAVGAVLAKNNPDKVSALILENTFTSILDMAGIMLPFLRWFIGGSSAKGPKLLNCVVRSPWSTLDVVAEVKQPILFLSGLQDELVPPSHMRMLYDKAVEHNRNCRFVDFLNGMHMDTWISGGDRYWRTIELFLDQYSPEVQSSDASCTSEIADDDKAA

SEQ ID NO: 16826 - protein, 129 aa, Triticum aestivum
  peptide (1)..(129): Ceres Seq. ID no. 15179834
  misc_feature (1)..(128): NCBI GI NO: 34395138 NR Description: putative membrane protein
  misc_feature (1)..(115): NCBI GI NO: 18420236 NR Description: expressed protein [Arabidopsis thaliana]
  misc_feature (1)..(104): NCBI GI NO: 987287 NR Description: temperature sensitive supressor of Saccharomycescerevisiae bem1/ bud5
  misc_feature (1)..(104): NCBI GI NO: 19112401 NR Description: supressor of bem1/bud5 [Schizosaccharomyces pombe]
  misc_feature (1)..(104): NCBI GI NO: 2257503 NR Description: BEM46 PROTEIN [Schizosaccharomyces pombe]
  misc_feature (1)..(117): NCBI GI NO: 14249592 NR Description: hypothetical protein FLJ14906 [Homo sapiens]
  misc_feature (1)..(117): NCBI GI NO: 26336440 NR Description: unnamed protein product [Mus musculus]
  misc_feature (1)..(117): NCBI GI NO: 28483207 NR Description: RIKEN cDNA 1110065L07 [Mus musculus]
  misc_feature (1)..(117): NCBI GI NO: 34879678 NR Description: similar to 1110065L07Rik protein
  misc_feature (1)..(117): NCBI GI NO: 17137566 NR Description: CG18642-PA [Drosophila melanogaster]
MAGIMLPFLRWFIGGSSAKGPKLLNCVVRSPWSTLDVVAEVKQPILFLSGLQDELVPPSHMRMLYDKAVEHNRNCRFVDFLNGMHMDTWISGGDRYWRTIELFLDQYSPEVQSSDASCTSEIADDDKAA

SEQ ID NO: 16827 - protein, 125 aa, Triticum aestivum
  peptide (1)..(125): Ceres Seq. ID no. 15179835
  misc_feature (1)..(124): NCBI GI NO: 34395138 NR Description: putative membrane protein
  misc_feature (1)..(111): NCBI GI NO: 18420236 NR Description: expressed protein [Arabidopsis thaliana]
  misc_feature (1)..(100): NCBI GI NO: 987287 NR Description: temperature sensitive supressor of Saccharomycescerevisiae bem1/ bud5
  misc_feature (1)..(100): NCBI GI NO: 19112401 NR Description: supressor of bem1/bud5 [Schizosaccharomyces pombe]
  misc_feature (1)..(100): NCBI GI NO: 2257503 NR Description: BEM46 PROTEIN [Schizosaccharomyces pombe]
  misc_feature (1)..(113): NCBI GI NO: 14249592 NR Description: hypothetical protein FLJ14906 [Homo sapiens]
  misc_feature (1)..(113): NCBI GI NO: 26336440 NR Description: unnamed protein product [Mus musculus]
  misc_feature (1)..(113): NCBI GI NO: 34879678 NR Description: similar to 1110065L07Rik protein
  misc_feature (1)..(113): NCBI GI NO: 28483207 NR Description: RIKEN cDNA 1110065L07 [Mus musculus]
  misc_feature (1)..(113): NCBI GI NO: 17137566 NR Description: CG18642-PA [Drosophila melanogaster]
MLPFLRWFIGGSSAKGPKLLNCVVRSPWSTLDVVAEVKQPILFLSGLQDELVPPSHMRMLYDKAVEHNRNCRFVDFLNGMHMDTWISGGDRYWRTIELFLDQYSPEVQSSDASCTSEIADDDKAA

SEQ ID NO: 16828 - DNA, 1015 bp, Triticum aestivum
  misc_feature (1)..(1015): Ceres Seq. ID no. 12621037
gatcgtcaggcagcaacccccgcacatctgctccctcctccaccagctccccatcctcaacgagctcccaccacccgctgctacccagcatggccgccgccgccaccgccgtccgcttccacacggccgccgcgcgacgcgccgcccctcggcgaccggcgcgcttcgccgtgcgcgcagatgccgcgcaggcggcgacggcgctgacgcaggatgacctcaagaggcttgcggcggtgcgtgcggtggagcaggtgcagagtggtatggttctgggcctcgggacaggctccacggccgcctttgccgtcgccgagatcggtgcgcttcttgccaacgggaagctctccggcatcgtcggtgtgcccacttccaagcgcacctttgagcaggccatgtccctgggaatccctctttccacgctcgacgaccaccccgtgatcgacctcgccattgacggcgctgacgaggttgatccagatcttaaccttgtgaaagggcggggtggagcccttctccgggagaagatggtcgaagctgcatcaggaaagtttgttgttgtcgttgatgagacgaaactagttactggcctaggagggagcggtcttgccatgcctgtggaagttgtgcagttctgctggaagtacaatcaagtaagtctgcagggtctgttcaatgaagaaggttgcgaggcaaagctgagattgaatgaggatggcaagccctatgttactgacaactcgaaatacatcgtagatttatacttcaagacgccaatcaaggatgcgttgggcgcgggcaaggagattgcagctttggaaggagttgttgagcatgggttgttcttgaacatggcaagctcagtgatcattgctggatcagacggtgtcagtgtcaaaacaaagtgacttttttggatcggctgttgttgatgtgttgaacttacggtttttcactgaataatctatctgtgtaaaaggaggaaataatgctcttctataaatatatcttttcc

SEQ ID NO: 16829 - protein, 301 aa, Triticum aestivum
  peptide (1)..(301): Ceres Seq. ID no. 12621038
  misc_feature (118)..(297): Pfam Name: phosphoriboisomerase A Pfam Description: Ribose 5-phosphate isomerase A
  misc_feature (30)..(301): NCBI GI NO: 34393835 NR Description: putative ribose-5-phosphate isomerase
  misc_feature (30)..(301): NCBI GI NO: 34393836 NR Description: putative ribose-5-phosphate isomerase
  misc_feature (68)..(301): NCBI GI NO: 18654317 NR Description: ribose-5-phosphate isomerase [Spinacia oleracea]
  misc_feature (15)..(301): NCBI GI NO: 15229349 NR Description: putative ribose 5-phosphate isomerase
  misc_feature (15)..(301): NCBI GI NO: 21594002 NR Description: putative ribose 5-phosphate isomerase
  misc_feature (68)..(301): NCBI GI NO: 15226223 NR Description: putative ribose 5-phosphate isomerase
  misc_feature (60)..(301): NCBI GI NO: 21592672 NR Description: putative ribose 5-phosphate isomerase
  misc_feature (60)..(301): NCBI GI NO: 15223936 NR Description: putative ribose 5-phosphate isomerase
  misc_feature (60)..(301): NCBI GI NO: 13430836 NR Description: putative ribose 5-phosphate isomerase
  misc_feature (47)..(295): NCBI GI NO: 38347196 NR Description: OSJNBa0023J03.8
SSGSNPRTSAPSSTSSPSSTSSHHPLLPSMAAAATAVRFHTAAARRAAPRRPARFAVRADAAQAATALTQDDLKRLAAVRAVEQVQSGMVLGLGTGSTAAFAVAEIGALLANGKLSGIVGVPTSKRTFEQAMSLGIPLSTLDDHPVIDLAIDGADEVDPDLNLVKGRGGALLREKMVEAASGKFVVVVDETKLVTGLGGSGLAMPVEVVQFCWKYNQVSLQGLFNEEGCEAKLRLNEDGKPYVTDNSKYIVDLYFKTPIKDALGAGKEIAALEGVVEHGLFLNMASSVIIAGSDGVSVKTK

SEQ ID NO: 16830 - protein, 272 aa, Triticum aestivum
  peptide (1)..(272): Ceres Seq. ID no. 12621039
  misc_feature (89)..(268): Pfam Name: phosphoriboisomerase A Pfam Description: Ribose 5-phosphate isomerase A
  misc_feature (1)..(272): NCBI GI NO: 34393835 NR Description: putative ribose-5-phosphate isomerase
  misc_feature (1)..(272): NCBI GI NO: 34393836 NR Description: putative ribose-5-phosphate isomerase
  misc_feature (39)..(272): NCBI GI NO: 18654317 NR Description: ribose-5-phosphate isomerase [Spinacia oleracea]
  misc_feature (1)..(272): NCBI GI NO: 15229349 NR Description: putative ribose 5-phosphate isomerase
  misc_feature (1)..(272): NCBI GI NO: 21594002 NR Description: putative ribose 5-phosphate isomerase
  misc_feature (39)..(272): NCBI GI NO: 15226223 NR Description: putative ribose 5-phosphate isomerase
  misc_feature (31)..(272): NCBI GI NO: 21592672 NR Description: putative ribose 5-phosphate isomerase
  misc_feature (31)..(272): NCBI GI NO: 15223936 NR Description: putative ribose 5-phosphate isomerase
  misc_feature (31)..(272): NCBI GI NO: 13430836 NR Description: putative ribose 5-phosphate isomerase
  misc_feature (18)..(266): NCBI GI NO: 38347196 NR Description: OSJNBa0023J03.8
MAAAATAVRFHTAAARRAAPRRPARFAVRADAAQAATALTQDDLKRLAAVRAVEQVQSGMVLGLGTGSTAAFAVAEIGALLANGKLSGIVGVPTSKRTFEQAMSLGIPLSTLDDHPVIDLAIDGADEVDPDLNLVKGRGGALLREKMVEAASGKFVVVVDETKLVTGLGGSGLAMPVEVVQFCWKYNQVSLQGLFNEEGCEAKLRLNEDGKPYVTDNSKYIVDLYFKTPIKDALGAGKEIAALEGVVEHGLFLNMASSVIIAGSDGVSVKTK

SEQ ID NO: 16831 - protein, 213 aa, Triticum aestivum
  peptide (1)..(213): Ceres Seq. ID no. 12621040
  misc_feature (30)..(209): Pfam Name: phosphoriboisomerase A Pfam Description: Ribose 5-phosphate isomerase A
  misc_feature (1)..(213): NCBI GI NO: 34393835 NR Description: putative ribose-5-phosphate isomerase
  misc_feature (1)..(213): NCBI GI NO: 34393836 NR Description: putative ribose-5-phosphate isomerase
  misc_feature (1)..(213): NCBI GI NO: 18654317 NR Description: ribose-5-phosphate isomerase [Spinacia oleracea]
  misc_feature (1)..(213): NCBI GI NO: 15229349 NR Description: putative ribose 5-phosphate isomerase
  misc_feature (1)..(213): NCBI GI NO: 21594002 NR Description: putative ribose 5-phosphate isomerase
  misc_feature (1)..(213): NCBI GI NO: 15226223 NR Description: putative ribose 5-phosphate isomerase
  misc_feature (1)..(213): NCBI GI NO: 21592672 NR Description: putative ribose 5-phosphate isomerase
  misc_feature (1)..(213): NCBI GI NO: 15223936 NR Description: putative ribose 5-phosphate isomerase
  misc_feature (1)..(213): NCBI GI NO: 13430836 NR Description: putative ribose 5-phosphate isomerase
  misc_feature (1)..(207): NCBI GI NO: 38347196 NR Description: OSJNBa0023J03.8
MVLGLGTGSTAAFAVAEIGALLANGKLSGIVGVPTSKRTFEQAMSLGIPLSTLDDHPVIDLAIDGADEVDPDLNLVKGRGGALLREKMVEAASGKFVVVVDETKLVTGLGGSGLAMPVEVVQFCWKYNQVSLQGLFNEEGCEAKLRLNEDGKPYVTDNSKYIVDLYFKTPIKDALGAGKEIAALEGVVEHGLFLNMASSVIIAGSDGVSVKTK

SEQ ID NO: 16832 - DNA, 1313 bp, Triticum aestivum
  misc_feature (1)..(1313): Ceres Seq. ID no. 15226418
gtacaaaatggtttacctgtccaatttgggcttggaaacgaccctcttacccattacttggccaggatgtcaaggcatcagttgtatcaaatcatgtctgagttgaagaccctaactactcaaaataacgaccttgccaaaaaactgctgcaaggaattccacagcttccaaaggccctatttcaggcacagataatgctcgggctggtgacacctcagatgatgcagatggctaagagccaacagccctctagctcgttggcacaatcttctcacctcaatgaatcatttccgcagccagatgctgtgctaccaattgttcatagacctccaccaaaccctaatgccatgcaggaacaaactgcaccgctgcataactttcctcagtatcagcattcatctcagcctccagtcaaaatgtttccgcatggacatcagcctggggtgctggcacaccctccaatgctatctcagcccttcggcacctcttccagtgttcctactcaaccccttgtaaactcaggaggcttgacatcacaagttcagccttcatttttgacacagcaccctagaccaccagttatgccaactaatgtacagcaactacccttgaccaatcctcatctctcccaggttgctgctgaacctgagatactccccaatgagataagattgcctgatcgagctagtcatcaggcagagttagaccatccctcgaaattgagaaaattggaggatggaacatcaacgccaggaattgtaaacaatagtcctgctgtttattctgctccatcgcaggtagtggtccctagtggaccatcagggagctatagttctggtgctgttcacttccagcaaccagagaatgaagcgcctcagctcacacaggacgatgagtcagcccttctgcagcaagtcttacaactgacacctgagcagctgagttcattgccagtggagcagcagcagcaggtgatacagcttcagaagatgctatcagctggtaaatagcggcataacaccagctgagtaagcacggtgaaattgttaacctacatagttaaacattgaagaaggctcgtctagccacacacacacacacacggaacttctcaactttgttggtatctctgggccatcagttttgctcctgatgattgatttatttggcattctttgtaaagttgaggtaaaaatgtggtggcaaaagaagttgtgaagaaagatgataattgtccattagtcctgtaacattttagaaaagaataatcttatgaagagagggagttgtatttgtgttccggaattgttgc

SEQ ID NO: 16833 - protein, 336 aa, Triticum aestivum
  peptide (1)..(336): Ceres Seq. ID no. 15226419
  misc_feature (13)..(308): NCBI GI NO: 21591633 NR Description: cleavage stimulation factor 64
  misc_feature (13)..(308): NCBI GI NO: 22330574 NR Description: cleavage stimulation factor, putative
  misc_feature (8)..(216): NCBI GI NO: 22330606 NR Description: proline-rich protein family [Arabidopsis thaliana]
  misc_feature (27)..(332): NCBI GI NO: 7488708 NR Description: proline-rich protein precursor - soybean
  misc_feature (14)..(181): NCBI GI NO: 24416589 NR Description: tCstF-64 [Bos taurus]
  misc_feature (247)..(332): NCBI GI NO: 24416589 NR Description: tCstF-64 [Bos taurus]
  misc_feature (16)..(203): NCBI GI NO: 17137710 NR Description: Cleavage stimulation factor 64 kilodalton subunitCG7697-PA
  misc_feature (263)..(333): NCBI GI NO: 17137710 NR Description: Cleavage stimulation factor 64 kilodalton subunitCG7697-PA
  misc_feature (16)..(203): NCBI GI NO: 28557621 NR Description: RE27227p [Drosophila melanogaster]
  misc_feature (263)..(333): NCBI GI NO: 28557621 NR Description: RE27227p [Drosophila melanogaster]
VQNGLPVQFGLGNDPLTHYLARMSRHQLYQIMSELKTLTTQNNDLAKKLLQGIPQLPKALFQAQIMLGLVTPQMMQMAKSQQPSSSLAQSSHLNESFPQPDAVLPIVHRPPPNPNAMQEQTAPLHNFPQYQHSSQPPVKMFPHGHQPGVLAHPPMLSQPFGTSSSVPTQPLVNSGGLTSQVQPSFLTQHPRPPVMPTNVQQLPLTNPHLSQVAAEPEILPNEIRLPDRASHQAELDHPSKLRKLEDGTSTPGIVNNSPAVYSAPSQVVVPSGPSGSYSSGAVHFQQPENEAPQLTQDDESALLQQVLQLTPEQLSSLPVEQQQQVIQLQKMLSAGK

SEQ ID NO: 16834 - protein, 314 aa, Triticum aestivum
  peptide (1)..(314): Ceres Seq. ID no. 15226420
  misc_feature (1)..(286): NCBI GI NO: 21591633 NR Description: cleavage stimulation factor 64
  misc_feature (1)..(286): NCBI GI NO: 22330574 NR Description: cleavage stimulation factor, putative
  misc_feature (1)..(194): NCBI GI NO: 22330606 NR Description: proline-rich protein family [Arabidopsis thaliana]
  misc_feature (5)..(310): NCBI GI NO: 7488708 NR Description: proline-rich protein precursor - soybean
  misc_feature (1)..(159): NCBI GI NO: 24416589 NR Description: tCstF-64 [Bos taurus]
  misc_feature (225)..(310): NCBI GI NO: 24416589 NR Description: tCstF-64 [Bos taurus]
  misc_feature (1)..(181): NCBI GI NO: 17137710 NR Description: Cleavage stimulation factor 64 kilodalton subunitCG7697-PA
  misc_feature (241)..(311): NCBI GI NO: 17137710 NR Description: Cleavage stimulation factor 64 kilodalton subunitCG7697-PA
  misc_feature (1)..(181): NCBI GI NO: 28557621 NR Description: RE27227p [Drosophila melanogaster]
  misc_feature (241)..(311): NCBI GI NO: 28557621 NR Description: RE27227p [Drosophila melanogaster]
MSRHQLYQIMSELKTLTTQNNDLAKKLLQGIPQLPKALFQAQIMLGLVTPQMMQMAKSQQPSSSLAQSSHLNESFPQPDAVLPIVHRPPPNPNAMQEQTAPLHNFPQYQHSSQPPVKMFPHGHQPGVLAHPPMLSQPFGTSSSVPTQPLVNSGGLTSQVQPSFLTQHPRPPVMPTNVQQLPLTNPHLSQVAAEPEILPNEIRLPDRASHQAELDHPSKLRKLEDGTSTPGIVNNSPAVYSAPSQVVVPSGPSGSYSSGAVHFQQPENEAPQLTQDDESALLQQVLQLTPEQLSSLPVEQQQQVIQLQKMLSAGK

SEQ ID NO: 16835 - protein, 305 aa, Triticum aestivum
  peptide (1)..(305): Ceres Seq. ID no. 15226421
  misc_feature (1)..(277): NCBI GI NO: 21591633 NR Description: cleavage stimulation factor 64
  misc_feature (1)..(277): NCBI GI NO: 22330574 NR Description: cleavage stimulation factor, putative
  misc_feature (1)..(185): NCBI GI NO: 22330606 NR Description: proline-rich protein family [Arabidopsis thaliana]
  misc_feature (1)..(301): NCBI GI NO: 7488708 NR Description: proline-rich protein precursor - soybean
  misc_feature (1)..(150): NCBI GI NO: 24416589 NR Description: tCstF-64 [Bos taurus]
  misc_feature (216)..(301): NCBI GI NO: 24416589 NR Description: tCstF-64 [Bos taurus]
  misc_feature (1)..(172): NCBI GI NO: 17137710 NR Description: Cleavage stimulation factor 64 kilodalton subunitCG7697-PA
  misc_feature (232)..(302): NCBI GI NO: 17137710 NR Description: Cleavage stimulation factor 64 kilodalton subunitCG7697-PA
  misc_feature (1)..(172): NCBI GI NO: 28557621 NR Description: RE27227p [Drosophila melanogaster]
  misc_feature (232)..(302): NCBI GI NO: 28557621 NR Description: RE27227p [Drosophila melanogaster]
MSELKTLTTQNNDLAKKLLQGIPQLPKALFQAQIMLGLVTPQMMQMAKSQQPSSSLAQSSHLNESFPQPDAVLPIVHRPPPNPNAMQEQTAPLHNFPQYQHSSQPPVKMFPHGHQPGVLAHPPMLSQPFGTSSSVPTQPLVNSGGLTSQVQPSFLTQHPRPPVMPTNVQQLPLTNPHLSQVAAEPEILPNEIRLPDRASHQAELDHPSKLRKLEDGTSTPGIVNNSPAVYSAPSQVVVPSGPSGSYSSGAVHFQQPENEAPQLTQDDESALLQQVLQLTPEQLSSLPVEQQQQVIQLQKMLSAGK

SEQ ID NO: 16836 - DNA, 1720 bp, Triticum aestivum
  misc_feature (1)..(1720): Ceres Seq. ID no. 14302216
ctgaaaatttcacttgaccgccaagtcccaaagcacaagtggaacacgaaactttgatgtggcgggccgatgtgccccaagcaatgtcaaaggcgaaatggaaacggggggcgtataagttcgaaaaattctccatccccccttctctctctctctccctccgtcgttcgatccccgacgccatcgtgcgcatcgccggccaggacaaggcatacatacaggtacagcggcccctcgtagggacaagaagagacccacccagaggcagaggcccgcctcaaatgcgccgccggccgcgcgtcgccgcacgatgagccccgccgcgacggacgccggcggcgacctcttcgccgccaacctcaagggcgcgctcctcgccgtcgcctcctccaccttcgtcggggtcagcttcatcgtcaagaagaagggcctccgccgcgccggcgccgtcggctcccgggcaggtgtcggagggtatgggtacctctgggagccgctctggtgggtcgggatggtcaccatgcttgttggggagaccgccaatttcgtggcttacatgtttgcgccagccgtcctcgtcgctccgctgggagcactcagcatcattgtcagtgctgttctagcccatttcatgctgaatgagaagttgcagcgggtgggcgtcctgggctgtattctctgcattgttgggtcgacggtgatcatcctccacgctcctgaggagaggcccccggactcggtggagcagatttggcgcctggcaacgcaacctaccttcctttgctacgctgctctagcagtggctgtgtcattgcttcttatactatattgtgctccacggtatgggcagacgaacataatgatctatgttggtatttgctctgttgtcggatccctcacggtaatgagcatcaaggctgtgggcattgcgattaaacttaccattcagggcgaaaaccaggctgggtatttccagacgtggctgtttgtgacggtttcagctatatgcttagtcatccaattagtttacctgaacaaggcattggatactttcaatacggcgctggtttctcccatctattatgccatgttcacaaccctcactattttagcaagtgccataatgttcaaggattggtctgggcagagcgcaagcattattgcctccgagacttgtggatttctcacagttcttgccggtattattgtgctacattccaccaaagaacccgatcaaaatctgtccccagacctttatgcatctctcactgcacccctccctccaaagatatattggcacatccaaggaaacggcggcgacgtagggaagcaaaaagaggacgactcacttccctgcgatttcatcaccgtcgtgcgccaggactacttcgtctagaaaattctcaggacggcatatgcgtttcatatgtgccagccagcctcaagaccttcatgtggcgagggtggaccccagggcctgttaccgacggtacaaggccatcctggcctgaaaaaatgtgaaaattttgcagagacatcgtgttgtaccataccatgaccaaaccggttgcgtcggagctaggtgttgtacgattacctgtgtactgtagaaatcgcgccgtgtgaggaggatgttgttgtaggggggtttgtgagggatgttgtagatgttgttgcctgtctgatgtgaataccaaagcacacaacgctttctgttgcc

SEQ ID NO: 16837 - protein, 361 aa, Triticum aestivum
  peptide (1)..(361): Ceres Seq. ID no. 14302217
  misc_feature (16)..(309): Pfam Name: DUF803 Pfam Description: Protein of unknown function
  misc_feature (16)..(309): NCBI GI NO: 30681265 NR Description: expressed protein [Arabidopsis thaliana]
  misc_feature (16)..(313): NCBI GI NO: 26449939 NR Description: unknown protein [Arabidopsis thaliana]
  misc_feature (198)..(361): NCBI GI NO: 34908722 NR Description: hypothetical protein~similar to Arabidopsisthaliana chromosome4
  misc_feature (1)..(99): NCBI GI NO: 34908722 NR Description: hypothetical protein~similar to Arabidopsisthaliana chromosome4
  misc_feature (1)..(315): NCBI GI NO: 20161440 NR Description: B1065E10.15
  misc_feature (16)..(312): NCBI GI NO: 15229534 NR Description: purine permease - related [Arabidopsis thaliana]
  misc_feature (16)..(312): NCBI GI NO: 18414079 NR Description: expressed protein [Arabidopsis thaliana]
  misc_feature (16)..(312): NCBI GI NO: 21593618 NR Description: unknown [Arabidopsis thaliana]
  misc_feature (16)..(306): NCBI GI NO: 18409942 NR Description: expressed protein [Arabidopsis thaliana]
  misc_feature (16)..(306): NCBI GI NO: 25406128 NR Description: unknown protein F17M19.5
MSPAATDAGGDLFAANLKGALLAVASSTFVGVSFIVKKKGLRRAGAVGSRAGVGGYGYLWEPLWWVGMVTMLVGETANFVAYMFAPAVLVAPLGALSIIVSAVLAHFMLNEKLQRVGVLGCILCIVGSTVIILHAPEERPPDSVEQIWRLATQPTFLCYAALAVAVSLLLILYCAPRYGQTNIMIYVGICSVVGSLTVMSIKAVGIAIKLTIQGENQAGYFQTWLFVTVSAICLVIQLVYLNKALDTFNTALVSPIYYAMFTTLTILASAIMFKDWSGQSASIIASETCGFLTVLAGIIVLHSTKEPDQNLSPDLYASLTAPLPPKIYWHIQGNGGDVGKQKEDDSLPCDFITVVRQDYFV

SEQ ID NO: 16838 - protein, 294 aa, Triticum aestivum
  peptide (1)..(294): Ceres Seq. ID no. 14302218
  misc_feature (1)..(242): Pfam Name: DUF803 Pfam Description: Protein of unknown function
  misc_feature (1)..(242): NCBI GI NO: 30681265 NR Description: expressed protein [Arabidopsis thaliana]
  misc_feature (1)..(246): NCBI GI NO: 26449939 NR Description: unknown protein [Arabidopsis thaliana]
  misc_feature (131)..(294): NCBI GI NO: 34908722 NR Description: hypothetical protein~similar to Arabidopsisthaliana chromosome4
  misc_feature (1)..(32): NCBI GI NO: 34908722 NR Description: hypothetical protein~similar to Arabidopsisthaliana chromosome4
  misc_feature (1)..(248): NCBI GI NO: 20161440 NR Description: B1065E10.15
  misc_feature (1)..(245): NCBI GI NO: 15229534 NR Description: purine permease - related [Arabidopsis thaliana]
  misc_feature (1)..(245): NCBI GI NO: 18414079 NR Description: expressed protein [Arabidopsis thaliana]
  misc_feature (1)..(245): NCBI GI NO: 21593618 NR Description: unknown [Arabidopsis thaliana]
  misc_feature (1)..(239): NCBI GI NO: 18409942 NR Description: expressed protein [Arabidopsis thaliana]
  misc_feature (1)..(239): NCBI GI NO: 25406128 NR Description: unknown protein F17M19.5
MVTMLVGETANFVAYMFAPAVLVAPLGALSIIVSAVLAHFMLNEKLQRVGVLGCILCIVGSTVIILHAPEERPPDSVEQIWRLATQPTFLCYAALAVAVSLLLILYCAPRYGQTNIMIYVGICSVVGSLTVMSIKAVGIAIKLTIQGENQAGYFQTWLFVTVSAICLVIQLVYLNKALDTFNTALVSPIYYAMFTTLTILASAIMFKDWSGQSASIIASETCGFLTVLAGIIVLHSTKEPDQNLSPDLYASLTAPLPPKIYWHIQGNGGDVGKQKEDDSLPCDFITVVRQDYFV

SEQ ID NO: 16839 - protein, 291 aa, Triticum aestivum
  peptide (1)..(291): Ceres Seq. ID no. 14302219
  misc_feature (1)..(239): Pfam Name: DUF803 Pfam Description: Protein of unknown function
  misc_feature (1)..(239): NCBI GI NO: 30681265 NR Description: expressed protein [Arabidopsis thaliana]
  misc_feature (1)..(243): NCBI GI NO: 26449939 NR Description: unknown protein [Arabidopsis thaliana]
  misc_feature (128)..(291): NCBI GI NO: 34908722 NR Description: hypothetical protein~similar to Arabidopsisthaliana chromosome4
  misc_feature (1)..(29): NCBI GI NO: 34908722 NR Description: hypothetical protein~similar to Arabidopsisthaliana chromosome4
  misc_feature (1)..(245): NCBI GI NO: 20161440 NR Description: B1065E10.15
  misc_feature (1)..(242): NCBI GI NO: 15229534 NR Description: purine permease - related [Arabidopsis thaliana]
  misc_feature (1)..(242): NCBI GI NO: 18414079 NR Description: expressed protein [Arabidopsis thaliana]
  misc_feature (1)..(242): NCBI GI NO: 21593618 NR Description: unknown [Arabidopsis thaliana]
  misc_feature (1)..(236): NCBI GI NO: 18409942 NR Description: expressed protein [Arabidopsis thaliana]
  misc_feature (1)..(236): NCBI GI NO: 25406128 NR Description: unknown protein F17M19.5
MLVGETANFVAYMFAPAVLVAPLGALSIIVSAVLAHFMLNEKLQRVGVLGCILCIVGSTVIILHAPEERPPDSVEQIWRLATQPTFLCYAALAVAVSLLLILYCAPRYGQTNIMIYVGICSVVGSLTVMSIKAVGIAIKLTIQGENQAGYFQTWLFVTVSAICLVIQLVYLNKALDTFNTALVSPIYYAMFTTLTILASAIMFKDWSGQSASIIASETCGFLTVLAGIIVLHSTKEPDQNLSPDLYASLTAPLPPKIYWHIQGNGGDVGKQKEDDSLPCDFITVVRQDYFV

SEQ ID NO: 16840 - DNA, 1542 bp, Triticum aestivum
  misc_feature (1)..(1542): Ceres Seq. ID no. 14303097
cccggcctctccaacgagtctcaacttccttatccaacgatccgctggacgggactaactaggctgtcacatcccttccatctaccacaaccaacggcgtcggcgataatggccgccttgccgcagctgcttctgatcctcttccccgcggaggttgccgtcctgaccctgctgctggcctcggcggcgggagcgcgggctcacgcctcctcgtcctcgtcatcggcgacgtaccgctgcggctggtgcccgcgcaggtccaccgcgtccatcctccctcccggcgccggcgcactgaccggtgccgcctgcgggtatggtggccaggcggcggagatggccgtcgacggggggttccacattgcggccgtcagcgccagtttcttccgcggtggccgggcctgcggcgcctgctaccagctgatgtgcaggggacggagcgcgtgcgcggcgggcggcgtcaaggtcgtcgtcgtcgccgacgtggcagagacgaacatgaccggtggtggtgccggtgggcggtttctgctcagcaaggacgccttcgccgccttggcgacgccagaccgtaacgccgagctcgcggacgcagacgtcgacgtggacttcaggaggattccctgcgtgtacaagagcaagaacttggcggttaaagtggaggagacgagcagcagggaccggggttacctcgccctccgcttcctctaccagggcggccagaccgacatcgccgccgtcgaggtcgcgcaggcggtcaccggttccagcggcaccaacaacgacgcagcaccgttgcagacatcctggcagtacatgacccggcgcgaggcgtccccgtcgatgtggcgcacgtcgcgcgtgccggccggtctgctgcagctccggcttgtggtcaccgcgggctccggcggcaagtggctgcgcgccgacggggcggtgctccccgcgaattggcagcccggcgcggtctacgacaccggcctgcgcgtcaccgacgtcgccgcaagcacctgcggcggcgcctcctgttcctccacggacgagggcgacgacgccgagcagctccgatgacacgcttcccggcatgcatgatgcatccaccacggaccgatcgatggtccattggagccggcccgcacgtcaacggcgacgccgcgcatgcagatctgcaccggccagccgccggaatatcggtcgatgctgcatgtacactgtacagagacgtgtacatcgcaacgtacgacatgcatgcatgtgtgcacggccgacgacgagttccggttaggacaaaacctccatggtcccgctctaaacagaggatgttggcgcgtagcttcacgtgtggagggaagggactaatgcagagaagaacatgtagatggctctgttcaggtcttggaatcacatgacagcactactgttttggctgctcgtcctcttcctctttggaatagtaggagagtattattgtaggttgattgcatgggctgattaagattgatcagttgccgactaagactaagttaactgtattgcatt

SEQ ID NO: 16841 - protein, 357 aa, Triticum aestivum
  peptide (1)..(357): Ceres Seq. ID no. 14303098
  misc_feature (216)..(316): Pfam Name: Pfam Description:  Pollen allergen
  misc_feature (80)..(339): NCBI GI NO: 20502989 NR Description: Putative pollen allergen
  misc_feature (93)..(351): NCBI GI NO: 7484482 NR Description: probable allergen - Monterey pine
  misc_feature (75)..(310): NCBI GI NO: 33111959 NR Description: expansin-like protein [Quercus robur]
  misc_feature (176)..(348): NCBI GI NO: 34901594 NR Description: P0571D04.11
  misc_feature (52)..(257): NCBI GI NO: 34901594 NR Description: P0571D04.11
  misc_feature (125)..(339): NCBI GI NO: 21654743 NR Description: expansin-like protein 1 [Oryza sativa]
  misc_feature (177)..(339): NCBI GI NO: 25136297 NR Description: expansin-like protein
  misc_feature (80)..(284): NCBI GI NO: 21654743 NR Description: expansin-like protein 1 [Oryza sativa]
  misc_feature (107)..(339): NCBI GI NO: 37536544 NR Description: putative pollen allergen
  misc_feature (73)..(284): NCBI GI NO: 37536544 NR Description: putative pollen allergen
PGLSNESQLPYPTIRWTGLTRLSHPFHLPQPTASAIMAALPQLLLILFPAEVAVLTLLLASAAGARAHASSSSSSATYRCGWCPRRSTASILPPGAGALTGAACGYGGQAAEMAVDGGFHIAAVSASFFRGGRACGACYQLMCRGRSACAAGGVKVVVVADVAETNMTGGGAGGRFLLSKDAFAALATPDRNAELADADVDVDFRRIPCVYKSKNLAVKVEETSSRDRGYLALRFLYQGGQTDIAAVEVAQAVTGSSGTNNDAAPLQTSWQYMTRREASPSMWRTSRVPAGLLQLRLVVTAGSGGKWLRADGAVLPANWQPGAVYDTGLRVTDVAASTCGGASCSSTDEGDDAEQLR

SEQ ID NO: 16842 - protein, 321 aa, Triticum aestivum
  peptide (1)..(321): Ceres Seq. ID no. 14303099
  misc_feature (180)..(280): Pfam Name: Pfam Description:  Pollen allergen
  misc_feature (44)..(303): NCBI GI NO: 20502989 NR Description: Putative pollen allergen
  misc_feature (57)..(315): NCBI GI NO: 7484482 NR Description: probable allergen - Monterey pine
  misc_feature (39)..(274): NCBI GI NO: 33111959 NR Description: expansin-like protein [Quercus robur]
  misc_feature (140)..(312): NCBI GI NO: 34901594 NR Description: P0571D04.11
  misc_feature (16)..(221): NCBI GI NO: 34901594 NR Description: P0571D04.11
  misc_feature (89)..(303): NCBI GI NO: 21654743 NR Description: expansin-like protein 1 [Oryza sativa]
  misc_feature (141)..(303): NCBI GI NO: 25136297 NR Description: expansin-like protein
  misc_feature (44)..(248): NCBI GI NO: 21654743 NR Description: expansin-like protein 1 [Oryza sativa]
  misc_feature (71)..(303): NCBI GI NO: 37536544 NR Description: putative pollen allergen
  misc_feature (37)..(248): NCBI GI NO: 37536544 NR Description: putative pollen allergen
MAALPQLLLILFPAEVAVLTLLLASAAGARAHASSSSSSATYRCGWCPRRSTASILPPGAGALTGAACGYGGQAAEMAVDGGFHIAAVSASFFRGGRACGACYQLMCRGRSACAAGGVKVVVVADVAETNMTGGGAGGRFLLSKDAFAALATPDRNAELADADVDVDFRRIPCVYKSKNLAVKVEETSSRDRGYLALRFLYQGGQTDIAAVEVAQAVTGSSGTNNDAAPLQTSWQYMTRREASPSMWRTSRVPAGLLQLRLVVTAGSGGKWLRADGAVLPANWQPGAVYDTGLRVTDVAASTCGGASCSSTDEGDDAEQLR

SEQ ID NO: 16843 - protein, 245 aa, Triticum aestivum
  peptide (1)..(245): Ceres Seq. ID no. 14303100
  misc_feature (104)..(204): Pfam Name: Pfam Description:  Pollen allergen
  misc_feature (1)..(227): NCBI GI NO: 20502989 NR Description: Putative pollen allergen
  misc_feature (1)..(239): NCBI GI NO: 7484482 NR Description: probable allergen - Monterey pine
  misc_feature (1)..(198): NCBI GI NO: 33111959 NR Description: expansin-like protein [Quercus robur]
  misc_feature (64)..(236): NCBI GI NO: 34901594 NR Description: P0571D04.11
  misc_feature (1)..(145): NCBI GI NO: 34901594 NR Description: P0571D04.11
  misc_feature (13)..(227): NCBI GI NO: 21654743 NR Description: expansin-like protein 1 [Oryza sativa]
  misc_feature (65)..(227): NCBI GI NO: 25136297 NR Description: expansin-like protein
  misc_feature (1)..(172): NCBI GI NO: 21654743 NR Description: expansin-like protein 1 [Oryza sativa]
  misc_feature (1)..(227): NCBI GI NO: 37536544 NR Description: putative pollen allergen
  misc_feature (1)..(172): NCBI GI NO: 37536544 NR Description: putative pollen allergen
MAVDGGFHIAAVSASFFRGGRACGACYQLMCRGRSACAAGGVKVVVVADVAETNMTGGGAGGRFLLSKDAFAALATPDRNAELADADVDVDFRRIPCVYKSKNLAVKVEETSSRDRGYLALRFLYQGGQTDIAAVEVAQAVTGSSGTNNDAAPLQTSWQYMTRREASPSMWRTSRVPAGLLQLRLVVTAGSGGKWLRADGAVLPANWQPGAVYDTGLRVTDVAASTCGGASCSSTDEGDDAEQLR

SEQ ID NO: 16844 - DNA, 582 bp, Triticum aestivum
  misc_feature (1)..(582): Ceres Seq. ID no. 13658948
aatccccatccgcccgtctctctcctacgctctccccgcccgcctcgccccgctcctcccccgcagcggcgagctactcccgagccagggagagacaggcggcggcggcagcttccccttcccctcctcctctcctccctcgccctcgccgagaaacaacgagagtttcctcttccgtcagcaatggagaacatgagatccgagaacaaccgtggcgcggccatggagggcgtcaagctcgcgtctgaggcggcggccaacaccaaccgcagggccctgagggacatcaagaacatcctcggcgcccctcaccagccccaggccgtcagcaagaggggcttgcaagaaaaacccgccgccggtgccaagagccaagctggcgccgtcggccaccggccggtgaccaggaaattcgccgccatcctgcagcaaacgcagcctgcaaacgccccgctggcaccaattggcagtgagaggcagaagaggaatgctgacaccgcgttcaatgctccttcagacatggagtgcagcaaggcttcagatgatgaccttgatgagatgatgaccaatgagctaaaggag

SEQ ID NO: 16845 - protein, 194 aa, Triticum aestivum
  peptide (1)..(194): Ceres Seq. ID no. 13658949
  misc_feature (62)..(193): NCBI GI NO: 3913236 NR Description: G2/mitotic-specific cyclin 2
  misc_feature (62)..(193): NCBI GI NO: 2130122 NR Description: cyclin III - maize
  misc_feature (67)..(181): NCBI GI NO: 38345935 NR Description: OSJNBb0078D11.10
  misc_feature (67)..(181): NCBI GI NO: 6331704 NR Description: cyclin [Oryza sativa]
NPHPPVSLLRSPRPPRPAPPPQRRATPEPGRDRRRRQLPLPLLLSSLALAEKQREFPLPSAMENMRSENNRGAAMEGVKLASEAAANTNRRALRDIKNILGAPHQPQAVSKRGLQEKPAAGAKSQAGAVGHRPVTRKFAAILQQTQPANAPLAPIGSERQKRNADTAFNAPSDMECSKASDDDLDEMMTNELKE

SEQ ID NO: 16846 - protein, 133 aa, Triticum aestivum
  peptide (1)..(133): Ceres Seq. ID no. 13658950
  misc_feature (1)..(132): NCBI GI NO: 3913236 NR Description: G2/mitotic-specific cyclin 2
  misc_feature (1)..(132): NCBI GI NO: 2130122 NR Description: cyclin III - maize
  misc_feature (6)..(120): NCBI GI NO: 38345935 NR Description: OSJNBb0078D11.10
  misc_feature (6)..(120): NCBI GI NO: 6331704 NR Description: cyclin [Oryza sativa]
MENMRSENNRGAAMEGVKLASEAAANTNRRALRDIKNILGAPHQPQAVSKRGLQEKPAAGAKSQAGAVGHRPVTRKFAAILQQTQPANAPLAPIGSERQKRNADTAFNAPSDMECSKASDDDLDEMMTNELKE

SEQ ID NO: 16847 - protein, 130 aa, Triticum aestivum
  peptide (1)..(130): Ceres Seq. ID no. 13658951
  misc_feature (1)..(129): NCBI GI NO: 3913236 NR Description: G2/mitotic-specific cyclin 2
  misc_feature (1)..(129): NCBI GI NO: 2130122 NR Description: cyclin III - maize
  misc_feature (3)..(117): NCBI GI NO: 38345935 NR Description: OSJNBb0078D11.10
  misc_feature (3)..(117): NCBI GI NO: 6331704 NR Description: cyclin [Oryza sativa]
MRSENNRGAAMEGVKLASEAAANTNRRALRDIKNILGAPHQPQAVSKRGLQEKPAAGAKSQAGAVGHRPVTRKFAAILQQTQPANAPLAPIGSERQKRNADTAFNAPSDMECSKASDDDLDEMMTNELKE

SEQ ID NO: 16848 - DNA, 1765 bp, Triticum aestivum
  misc_feature (1)..(1765): Ceres Seq. ID no. 15176787
acttacccgaggcacgaccacaactatttccaccttttgccagtgccagtgccacctgcaaaacatattctgaaaacattgcagtccacccactttgcttaggttcgagatgaagcagaccgtggtgatgtaccccggcgccggcgtcggccacgttggccccgtgacggagctcgccaacgtcttcctcaagcacggctacgacgtcaccgtggtgctcgtcgagccgcctttcaagtcgacagactccgccgccaccgccatcgagcgcatcgccgcctccaaccctttcatctccttccatgtcctcccgcccctccctgcgccagactttgccgcctccggcaagcaccctttcctactcatgctccagctcttgcacgattataacgagcggtcggaagcgttcctccgtggcatcccccggaagagcttgcactctgttatcctcgacatgttctgcgtccacgccaccgacgtctgcgtgaagctcggcgtcccggtctacacgttcttcgtcgggggcgcctcgtgcctgtcggtcctaacccaggtcccggcagtgatcgccggcaggcagacgggcttgaaggaactcggggacatgcccctcgatttcctcggcgtcccgccgatgccagcgtctcatctcatcaaggagctgctggagcaccccgaggatgagatgtgcaaggccatgacagacgtctggaagcgcaacacggagaccatgggcgttatggtgaacacgtttgagtcattggagagccgggcggtgcagtctctcatggacctccccggcaggaagctgcgtccgatctactgcgtcgggccgttggtcagcaagggcgccaaggatgcctccgacaaagcagagaggaacgagtgccttgagtggctcgatgcgcagcccgaccgcagcgtcgtgttcctctgtttcgggagcatgggcacgctctcggcggagcagctcaaggagatggccgttgggttggagcggtctgggcagcggttcctatggtccgtgcgcaacccggccggaagcaacaacccgaagaaatacttggaggtgcgccccgagccggaccttgacgcgctgcttcctcaagggttcctggagcggaccaagggcaggggcctcgtcgtcaagtcatgggcgccgcaggcgaacgtgctccgccaccgcgcgacgggcgcgttcgtgacgcactgcggatggaactcggtgctggaggccgttgcggccggggtgccgatgctgtgcctgccgctggaggcggagcagaagatgaacaaggtgtgcgtgacggaggacatgggcgtcgccgtggagctggagggatacatggcaggttttgtcaaggcagaggaggtggaggccaaggtgaggctggtgattgagggcggggatgggaggcagctcagggcccgggcggctgctcgcagggaagaggccgaggcggcgctgggggaagggggctcgtcgcgggcgtcgtttgcccagtttctgttggacgtggacaatctcggaaagcagctcggcgagtgacgcactacttgcaaattgcgactgctctttgccttctacgtatatgttgctagtccaagttgccctcttgtttatattttacttgcattgcatgctcaatcacttaacttactagtaagtgtgtgtgtgtgtagcaccatcttaataaatcggctatgtaagtgccaggtaccgcagttacctccacatatatttatgatgttttctcttcctggc

SEQ ID NO: 16849 - protein, 479 aa, Triticum aestivum
  peptide (1)..(479): Ceres Seq. ID no. 15176788
  misc_feature (4)..(473): Pfam Name: Pfam Description:  UDP-glucoronosyl and UDP-glucosyl transferase
  misc_feature (1)..(473): NCBI GI NO: 34910206 NR Description: putative flavonol glucosyltransferase
  misc_feature (1)..(470): NCBI GI NO: 34910204 NR Description: putative flavonol glucosyltransferase
  misc_feature (3)..(467): NCBI GI NO: 34910228 NR Description: putative flavonol glucosyltransferase
  misc_feature (1)..(479): NCBI GI NO: 34908644 NR Description: putative flavonol 3-O-glucosyltransferase
  misc_feature (2)..(467): NCBI GI NO: 22535568 NR Description: putative glucosyltransferase
  misc_feature (1)..(470): NCBI GI NO: 11994646 NR Description: UTP-glucose glucosyltransferase
  misc_feature (132)..(459): NCBI GI NO: 7433902 NR Description: UTP-glucose glucosyltransferase homologA_IG002N01
  misc_feature (105)..(470): NCBI GI NO: 7488111 NR Description: probable glucosyltransferase - Arabidopsis thaliana
  misc_feature (1)..(473): NCBI GI NO: 19911209 NR Description: glucosyltransferase-13 [Vigna angularis]
  misc_feature (112)..(470): NCBI GI NO: 15222344 NR Description: UDP-glycosyltransferase family
MKQTVVMYPGAGVGHVGPVTELANVFLKHGYDVTVVLVEPPFKSTDSAATAIERIAASNPFISFHVLPPLPAPDFAASGKHPFLLMLQLLHDYNERSEAFLRGIPRKSLHSVILDMFCVHATDVCVKLGVPVYTFFVGGASCLSVLTQVPAVIAGRQTGLKELGDMPLDFLGVPPMPASHLIKELLEHPEDEMCKAMTDVWKRNTETMGVMVNTFESLESRAVQSLMDLPGRKLRPIYCVGPLVSKGAKDASDKAERNECLEWLDAQPDRSVVFLCFGSMGTLSAEQLKEMAVGLERSGQRFLWSVRNPAGSNNPKKYLEVRPEPDLDALLPQGFLERTKGRGLVVKSWAPQANVLRHRATGAFVTHCGWNSVLEAVAAGVPMLCLPLEAEQKMNKVCVTEDMGVAVELEGYMAGFVKAEEVEAKVRLVIEGGDGRQLRARAAARREEAEAALGEGGSSRASFAQFLLDVDNLGKQLGE

SEQ ID NO: 16850 - protein, 473 aa, Triticum aestivum
  peptide (1)..(473): Ceres Seq. ID no. 15176789
  misc_feature (1)..(467): Pfam Name: Pfam Description:  UDP-glucoronosyl and UDP-glucosyl transferase
  misc_feature (1)..(467): NCBI GI NO: 34910206 NR Description: putative flavonol glucosyltransferase
  misc_feature (1)..(464): NCBI GI NO: 34910204 NR Description: putative flavonol glucosyltransferase
  misc_feature (1)..(461): NCBI GI NO: 34910228 NR Description: putative flavonol glucosyltransferase
  misc_feature (1)..(473): NCBI GI NO: 34908644 NR Description: putative flavonol 3-O-glucosyltransferase
  misc_feature (1)..(461): NCBI GI NO: 22535568 NR Description: putative glucosyltransferase
  misc_feature (1)..(464): NCBI GI NO: 11994646 NR Description: UTP-glucose glucosyltransferase
  misc_feature (126)..(453): NCBI GI NO: 7433902 NR Description: UTP-glucose glucosyltransferase homologA_IG002N01
  misc_feature (99)..(464): NCBI GI NO: 7488111 NR Description: probable glucosyltransferase - Arabidopsis thaliana
  misc_feature (1)..(467): NCBI GI NO: 19911209 NR Description: glucosyltransferase-13 [Vigna angularis]
  misc_feature (106)..(464): NCBI GI NO: 15222344 NR Description: UDP-glycosyltransferase family
MYPGAGVGHVGPVTELANVFLKHGYDVTVVLVEPPFKSTDSAATAIERIAASNPFISFHVLPPLPAPDFAASGKHPFLLMLQLLHDYNERSEAFLRGIPRKSLHSVILDMFCVHATDVCVKLGVPVYTFFVGGASCLSVLTQVPAVIAGRQTGLKELGDMPLDFLGVPPMPASHLIKELLEHPEDEMCKAMTDVWKRNTETMGVMVNTFESLESRAVQSLMDLPGRKLRPIYCVGPLVSKGAKDASDKAERNECLEWLDAQPDRSVVFLCFGSMGTLSAEQLKEMAVGLERSGQRFLWSVRNPAGSNNPKKYLEVRPEPDLDALLPQGFLERTKGRGLVVKSWAPQANVLRHRATGAFVTHCGWNSVLEAVAAGVPMLCLPLEAEQKMNKVCVTEDMGVAVELEGYMAGFVKAEEVEAKVRLVIEGGDGRQLRARAAARREEAEAALGEGGSSRASFAQFLLDVDNLGKQLGE

SEQ ID NO: 16851 - protein, 394 aa, Triticum aestivum
  peptide (1)..(394): Ceres Seq. ID no. 15176790
  misc_feature (1)..(388): Pfam Name: Pfam Description:  UDP-glucoronosyl and UDP-glucosyl transferase
  misc_feature (1)..(388): NCBI GI NO: 34910206 NR Description: putative flavonol glucosyltransferase
  misc_feature (1)..(385): NCBI GI NO: 34910204 NR Description: putative flavonol glucosyltransferase
  misc_feature (1)..(382): NCBI GI NO: 34910228 NR Description: putative flavonol glucosyltransferase
  misc_feature (1)..(394): NCBI GI NO: 34908644 NR Description: putative flavonol 3-O-glucosyltransferase
  misc_feature (1)..(382): NCBI GI NO: 22535568 NR Description: putative glucosyltransferase
  misc_feature (1)..(385): NCBI GI NO: 11994646 NR Description: UTP-glucose glucosyltransferase
  misc_feature (47)..(374): NCBI GI NO: 7433902 NR Description: UTP-glucose glucosyltransferase homologA_IG002N01
  misc_feature (20)..(385): NCBI GI NO: 7488111 NR Description: probable glucosyltransferase - Arabidopsis thaliana
  misc_feature (1)..(388): NCBI GI NO: 19911209 NR Description: glucosyltransferase-13 [Vigna angularis]
  misc_feature (27)..(385): NCBI GI NO: 15222344 NR Description: UDP-glycosyltransferase family
MLQLLHDYNERSEAFLRGIPRKSLHSVILDMFCVHATDVCVKLGVPVYTFFVGGASCLSVLTQVPAVIAGRQTGLKELGDMPLDFLGVPPMPASHLIKELLEHPEDEMCKAMTDVWKRNTETMGVMVNTFESLESRAVQSLMDLPGRKLRPIYCVGPLVSKGAKDASDKAERNECLEWLDAQPDRSVVFLCFGSMGTLSAEQLKEMAVGLERSGQRFLWSVRNPAGSNNPKKYLEVRPEPDLDALLPQGFLERTKGRGLVVKSWAPQANVLRHRATGAFVTHCGWNSVLEAVAAGVPMLCLPLEAEQKMNKVCVTEDMGVAVELEGYMAGFVKAEEVEAKVRLVIEGGDGRQLRARAAARREEAEAALGEGGSSRASFAQFLLDVDNLGKQLGE

SEQ ID NO: 16852 - DNA, 1585 bp, Triticum aestivum
  misc_feature (1)..(1585): Ceres Seq. ID no. 12578422
agtgtgcttctgcctaagtagtgttgacacctacctccccaccctcccaagaagaaaagaggaatagcccagccagagagagcagagcagatccgttcccggcgagtcggcggcgacaccgctggagaagaagacgtccacgacagccggcgaccgcatcggcatcggcatcgccgtctccttccccaccctacccagtttgccatcaacagcgcatcatgcagaggcccagcaaactgcctgccgtctctctccccggacgccctacctttttcggaccccaaggttgggctgacctcccagatggcttgcttcactccatcgttgatcggctgggctccttccgagaccttcttggcttcgccacaacatgcccctcgtggcatgctgccttctcctcatacccgtcaaaatccacgttcctcacaaaacttccacctctcctcatccagccccatattcgggcacaaggtcctcttcttccttgtaccagtggttgtcgtgagctatacccatgtaaggttgttgatccagccaaccgaaacgccgcccttcgctgttggatccctcaagataccctggagaagatgacatttattggatcctcctatggtaagctcatctactactgcaacggatactgtcgcatcatcgatgtgttcaccggtgacgaggtctcaactccacgtctcccatcccgtgctggatgttcaaaacttcacttggctggcattctaacagccccacttgcatcacccaactcacatctccttgtcagtaccgagtccttcctgcttgatctgcctgttggaaacgactcttggtccgaactccagcttccttgtcagtttgtaatagaccattttgtggagttggatggtcagctcattgtctcgaatagctatgggagatcctacgctctgcagctggcccctcagcatggcctgcaggagataaaaaccaagcctgtgggaggaaggccggtggtaggaaggctggtggtttgtggtgatatgcttctcattctgagttttggcgagttccaccgcctcgacatgtcaactgagcccgcgacacgggtggccgtggagaagctgggcgagcgggcactctttgtaggggcggaagcgaagagctcggcactttcttgcatgagcccggagctatggggaggaaggagtgacatcgtgtactttgctcgtacagctcgaccttggtttctctataggctgtgtggcaggccagatcgcttgcaggatagaccaacacgaccaacacgcgctgaacccgcaggctttggaagcaccccagtgcagtcatcagttcggccgctctggctgtacccaagcatgttctactcggatggccaatgaatgaatgatccgtgcctgccagccaactacgtacagttgccgcagcaccagcttcatctgagatttccctttgagatccagggagtagagattggtttttgctgcatgggcagaatttggtatgtatgtagttagtttgttgaacttgataagttttaacttttgcggtgtcggcactagctttactagaataactcagttatccggttttt

SEQ ID NO: 16853 - protein, 384 aa, Triticum aestivum
  peptide (1)..(384): Ceres Seq. ID no. 12578423
  misc_feature (1)..(384): NCBI GI NO: 34897864 NR Description: hypothetical protein
  misc_feature (1)..(350): NCBI GI NO: 34897914 NR Description: hypothetical protein
  misc_feature (2)..(384): NCBI GI NO: 34897916 NR Description: hypothetical protein
  misc_feature (27)..(328): NCBI GI NO: 34897862 NR Description: hypothetical protein
  misc_feature (22)..(319): NCBI GI NO: 24413941 NR Description: putative selenium-binding protein
  misc_feature (144)..(319): NCBI GI NO: 34897928 NR Description: Similar to Arabidopsis thaliana DNA chromosome 4
MQRPSKLPAVSLPGRPTFFGPQGWADLPDGLLHSIVDRLGSFRDLLGFATTCPSWHAAFSSYPSKSTFLTKLPPLLIQPHIRAQGPLLPCTSGCRELYPCKVVDPANRNAALRCWIPQDTLEKMTFIGSSYGKLIYYCNGYCRIIDVFTGDEVSTPRLPSRAGCSKLHLAGILTAPLASPNSHLLVSTESFLLDLPVGNDSWSELQLPCQFVIDHFVELDGQLIVSNSYGRSYALQLAPQHGLQEIKTKPVGGRPVVGRLVVCGDMLLILSFGEFHRLDMSTEPATRVAVEKLGERALFVGAEAKSSALSCMSPELWGGRSDIVYFARTARPWFLYRLCGRPDRLQDRPTRPTRAEPAGFGSTPVQSSVRPLWLYPSMFYSDGQ

SEQ ID NO: 16854 - protein, 261 aa, Triticum aestivum
  peptide (1)..(261): Ceres Seq. ID no. 12578424
  misc_feature (1)..(261): NCBI GI NO: 34897864 NR Description: hypothetical protein
  misc_feature (1)..(227): NCBI GI NO: 34897914 NR Description: hypothetical protein
  misc_feature (1)..(261): NCBI GI NO: 34897916 NR Description: hypothetical protein
  misc_feature (1)..(205): NCBI GI NO: 34897862 NR Description: hypothetical protein
  misc_feature (1)..(196): NCBI GI NO: 24413941 NR Description: putative selenium-binding protein
  misc_feature (21)..(196): NCBI GI NO: 34897928 NR Description: Similar to Arabidopsis thaliana DNA chromosome 4
MTFIGSSYGKLIYYCNGYCRIIDVFTGDEVSTPRLPSRAGCSKLHLAGILTAPLASPNSHLLVSTESFLLDLPVGNDSWSELQLPCQFVIDHFVELDGQLIVSNSYGRSYALQLAPQHGLQEIKTKPVGGRPVVGRLVVCGDMLLILSFGEFHRLDMSTEPATRVAVEKLGERALFVGAEAKSSALSCMSPELWGGRSDIVYFARTARPWFLYRLCGRPDRLQDRPTRPTRAEPAGFGSTPVQSSVRPLWLYPSMFYSDGQ

SEQ ID NO: 16855 - DNA, 2130 bp, Triticum aestivum
  misc_feature (1)..(2130): Ceres Seq. ID no. 14303672
ccctcgctagcctcgggtgggtctatcctcttccctcgctgagaatggcgtctccggcctccacctccgcgccggtctccctctccctctccctcccgctccgcccttccccgtgccgccgcctccccgcgcccttctcccgcctccctccccgccgcttcaccctctcgccgacccgccccgccgccgcgctgctctccagccccagccccagccccagccacgcgcagcacgagcacaaggacgaggaagatgaagaagaggagtatggtgaagatgaggagctcgtggaggaggatgacttggtggaggtggggtacgtgagcggcgcgcacggggtgcgcggcgacgtcctcgtctcgccccgcaccgacttccccgagctccgcttcgccacgccggggaagaggtggctgagggctcgcgccgccgggaagatgcaggtcagggagttcgagctcgtcagggggaaagcccacacggggaagaagggctggatcgtgcgcttcgacggcgtcgactccttggacgaggccaggcagatagttggttcggctgttctcgtgaagaccgaggataggccggaactggaggaggatgagatctattcgctcgatcttgttggcatgactgttattgtcaaggatacaggcaagcttgtaggcactgttgcacaggtcttcaattttggaggtggcgatcttctccaggttatggttggctctgctgagaatgctgtgcagactgattcagaaaatcaggattcaactccatcccgtcaacacgtgtggattccatttgctgaagatattgtgcctgatattgatatggagactagagagatgtggattacaccaccaaagggtcttcttgaggtcaacacacgtcctgagaaatcaaagaaagaaaggcgtgcgatggattggaaggaaaagaagaaactacagcgtcgcataactgcagcaaagaaggtactacatgaaatggaacagggccatattctggaaggtttgctatcaggggacaagctcgaaaaggcttcacttgctgaacaaattgcgagcattgacttccaattgttcaaacatgcaatgcatagcgtcagcaagcaggttgacagcatgtcaaagaatgttcttgccaattcctcttcatcaagaaaaaacgtgatgaggatacctcgcgaaaccctcatgaatcatggtgagaaagagaagaatgtcttcagtagtgaatttagcaaaggctgtgagatccttcaaaagtcaaaagcagcaattgtacttgttacaaatggctcagactctgatattgtggatgctgagtttcagagattgcttaactcttttagtgagttaatgaaggtagaagaaaatcatatatctccccctttttttattgtttctcctgacgatcatgtggattcagttcggaactacttgatagagaacgactattttggttttgacactcagaaggtatgggtccttgaagagatgaaactaccagttgtcagtctgtcctctgagctagggagcaaaaaaattctgctgaagtccccatgggagatacttcaaaggccagctggatctggggcgattttcagctcactatcatcaaataaaattttggaatcgttcaatgcaatgggcatagagtacgtacagatatgcagcccctctgacgaactagtcctcgggcatcctctgctcttcggtgctgcaagttcgcgcagtgtggatgtcggtgtcaagctccgcaagaccagcgacaagacggaagatggtttcgatttgatcctttccatcgaccacttgaacaagatgtgccgagacgtcgccaaggccaggttctctgcccaccccgagcagcacgaacacgtcgagcttgtcgacggccagtgggtcaccgtccagccagaggggccgaactctcaccggttgagtaccaatgttacaagtgttttggattcttgctctcctgacaagctgtgcgtcatggagattgttgagtagcggctagtgaatctttttgctaatgtactgtaggactgtacatagccagccacaaccaagtactttttttttaaacggagcctcatccattaattaagaagagagttgtccggct

SEQ ID NO: 16856 - protein, 670 aa, Triticum aestivum
  peptide (1)..(670): Ceres Seq. ID no. 14303673
  misc_feature (103)..(192): Pfam Name: Pfam Description:  RimM N-terminal domain
  misc_feature (12)..(668): NCBI GI NO: 10177579 NR Description: gene_id:K11I1
  misc_feature (328)..(668): NCBI GI NO: 18422672 NR Description: expressed protein [Arabidopsis thaliana]
  misc_feature (95)..(237): NCBI GI NO: 33864685 NR Description: possible 16S rRNA processing protein RimM
  misc_feature (256)..(292): NCBI GI NO: 33864685 NR Description: possible 16S rRNA processing protein RimM
  misc_feature (99)..(293): NCBI GI NO: 23125796 NR Description: hypothetical protein [Nostoc punctiforme]
  misc_feature (99)..(294): NCBI GI NO: 17230304 NR Description: probable 16S rRNA processing protein
  misc_feature (102)..(292): NCBI GI NO: 23040973 NR Description: hypothetical protein
  misc_feature (102)..(246): NCBI GI NO: 37521074 NR Description: probable 16S rRNA processing protein
  misc_feature (330)..(593): NCBI GI NO: 32417642 NR Description: hypothetical protein [Neurospora crassa]
  misc_feature (102)..(237): NCBI GI NO: 37525225 NR Description: 16S rRNA processing protein
LASLGWVYPLPSLRMASPASTSAPVSLSLSLPLRPSPCRRLPAPFSRLPPRRFTLSPTRPAAALLSSPSPSPSHAQHEHKDEEDEEEEYGEDEELVEEDDLVEVGYVSGAHGVRGDVLVSPRTDFPELRFATPGKRWLRARAAGKMQVREFELVRGKAHTGKKGWIVRFDGVDSLDEARQIVGSAVLVKTEDRPELEEDEIYSLDLVGMTVIVKDTGKLVGTVAQVFNFGGGDLLQVMVGSAENAVQTDSENQDSTPSRQHVWIPFAEDIVPDIDMETREMWITPPKGLLEVNTRPEKSKKERRAMDWKEKKKLQRRITAAKKVLHEMEQGHILEGLLSGDKLEKASLAEQIASIDFQLFKHAMHSVSKQVDSMSKNVLANSSSSRKNVMRIPRETLMNHGEKEKNVFSSEFSKGCEILQKSKAAIVLVTNGSDSDIVDAEFQRLLNSFSELMKVEENHISPPFFIVSPDDHVDSVRNYLIENDYFGFDTQKVWVLEEMKLPVVSLSSELGSKKILLKSPWEILQRPAGSGAIFSSLSSNKILESFNAMGIEYVQICSPSDELVLGHPLLFGAASSRSVDVGVKLRKTSDKTEDGFDLILSIDHLNKMCRDVAKARFSAHPEQHEHVELVDGQWVTVQPEGPNSHRLSTNVTSVLDSCSPDKLCVMEIVE

SEQ ID NO: 16857 - protein, 656 aa, Triticum aestivum
  peptide (1)..(656): Ceres Seq. ID no. 14303674
  misc_feature (89)..(178): Pfam Name: Pfam Description:  RimM N-terminal domain
  misc_feature (1)..(654): NCBI GI NO: 10177579 NR Description: gene_id:K11I1
  misc_feature (314)..(654): NCBI GI NO: 18422672 NR Description: expressed protein [Arabidopsis thaliana]
  misc_feature (81)..(223): NCBI GI NO: 33864685 NR Description: possible 16S rRNA processing protein RimM
  misc_feature (242)..(278): NCBI GI NO: 33864685 NR Description: possible 16S rRNA processing protein RimM
  misc_feature (85)..(279): NCBI GI NO: 23125796 NR Description: hypothetical protein [Nostoc punctiforme]
  misc_feature (85)..(280): NCBI GI NO: 17230304 NR Description: probable 16S rRNA processing protein
  misc_feature (88)..(278): NCBI GI NO: 23040973 NR Description: hypothetical protein
  misc_feature (88)..(232): NCBI GI NO: 37521074 NR Description: probable 16S rRNA processing protein
  misc_feature (316)..(579): NCBI GI NO: 32417642 NR Description: hypothetical protein [Neurospora crassa]
  misc_feature (88)..(223): NCBI GI NO: 37525225 NR Description: 16S rRNA processing protein
MASPASTSAPVSLSLSLPLRPSPCRRLPAPFSRLPPRRFTLSPTRPAAALLSSPSPSPSHAQHEHKDEEDEEEEYGEDEELVEEDDLVEVGYVSGAHGVRGDVLVSPRTDFPELRFATPGKRWLRARAAGKMQVREFELVRGKAHTGKKGWIVRFDGVDSLDEARQIVGSAVLVKTEDRPELEEDEIYSLDLVGMTVIVKDTGKLVGTVAQVFNFGGGDLLQVMVGSAENAVQTDSENQDSTPSRQHVWIPFAEDIVPDIDMETREMWITPPKGLLEVNTRPEKSKKERRAMDWKEKKKLQRRITAAKKVLHEMEQGHILEGLLSGDKLEKASLAEQIASIDFQLFKHAMHSVSKQVDSMSKNVLANSSSSRKNVMRIPRETLMNHGEKEKNVFSSEFSKGCEILQKSKAAIVLVTNGSDSDIVDAEFQRLLNSFSELMKVEENHISPPFFIVSPDDHVDSVRNYLIENDYFGFDTQKVWVLEEMKLPVVSLSSELGSKKILLKSPWEILQRPAGSGAIFSSLSSNKILESFNAMGIEYVQICSPSDELVLGHPLLFGAASSRSVDVGVKLRKTSDKTEDGFDLILSIDHLNKMCRDVAKARFSAHPEQHEHVELVDGQWVTVQPEGPNSHRLSTNVTSVLDSCSPDKLCVMEIVE

SEQ ID NO: 16858 - protein, 525 aa, Triticum aestivum
  peptide (1)..(525): Ceres Seq. ID no. 14303675
  misc_feature (53)..(145): Pfam Name: Pfam Description:  PRC-barrel domain
  misc_feature (1)..(523): NCBI GI NO: 10177579 NR Description: gene_id:K11I1
  misc_feature (183)..(523): NCBI GI NO: 18422672 NR Description: expressed protein [Arabidopsis thaliana]
  misc_feature (1)..(92): NCBI GI NO: 33864685 NR Description: possible 16S rRNA processing protein RimM
  misc_feature (111)..(147): NCBI GI NO: 33864685 NR Description: possible 16S rRNA processing protein RimM
  misc_feature (1)..(148): NCBI GI NO: 23125796 NR Description: hypothetical protein [Nostoc punctiforme]
  misc_feature (1)..(149): NCBI GI NO: 17230304 NR Description: probable 16S rRNA processing protein
  misc_feature (1)..(147): NCBI GI NO: 23040973 NR Description: hypothetical protein
  misc_feature (1)..(101): NCBI GI NO: 37521074 NR Description: probable 16S rRNA processing protein
  misc_feature (185)..(448): NCBI GI NO: 32417642 NR Description: hypothetical protein [Neurospora crassa]
  misc_feature (1)..(92): NCBI GI NO: 37525225 NR Description: 16S rRNA processing protein
MQVREFELVRGKAHTGKKGWIVRFDGVDSLDEARQIVGSAVLVKTEDRPELEEDEIYSLDLVGMTVIVKDTGKLVGTVAQVFNFGGGDLLQVMVGSAENAVQTDSENQDSTPSRQHVWIPFAEDIVPDIDMETREMWITPPKGLLEVNTRPEKSKKERRAMDWKEKKKLQRRITAAKKVLHEMEQGHILEGLLSGDKLEKASLAEQIASIDFQLFKHAMHSVSKQVDSMSKNVLANSSSSRKNVMRIPRETLMNHGEKEKNVFSSEFSKGCEILQKSKAAIVLVTNGSDSDIVDAEFQRLLNSFSELMKVEENHISPPFFIVSPDDHVDSVRNYLIENDYFGFDTQKVWVLEEMKLPVVSLSSELGSKKILLKSPWEILQRPAGSGAIFSSLSSNKILESFNAMGIEYVQICSPSDELVLGHPLLFGAASSRSVDVGVKLRKTSDKTEDGFDLILSIDHLNKMCRDVAKARFSAHPEQHEHVELVDGQWVTVQPEGPNSHRLSTNVTSVLDSCSPDKLCVMEIVE

SEQ ID NO: 16859 - DNA, 1812 bp, Triticum aestivum
  misc_feature (1)..(1812): Ceres Seq. ID no. 15224473
taattcactacgccgctatttattttactattaattgccccgactccgtctccgtccccgtccccgtcccccgtccccgccccctccgccgtcgccaccccaaattcccacgcaaaccctaagccagccagccagccagctagctcgacagcccagcccagcccaatggcggaggacgccggcgacagggaccagcagcagcagcagcagcccgccgcggccgcgggggccggagcagggcacgaggacgggggcggcagggacgagagctccgtcaagctcttcgtcggccaggtgcccaagctcatgaccgaggccgagctggccgccatgttccgcgacgtcgccgtcgtcgacgaggtcaccgtcatccgcgacaaggccaccaaggcgtcccgaggttgctgcttcctgatctgcccatcaagggaggaggctgacaaagcagtgaatgcatatcacaacaaacgcacgcttcctggggccccaagtccattgcaagtaaaatatgccgatggagagttggaaaggctggagcacaaacttttcattggaatgctacccaaaaatgtgacagatactgaaatgactgatttattttcacaatatggaaatatcaaggatttgcagattttgagaggttcacaacagacgagcaaagctggttgcgcctttctgaagtatgaaacaaaagagcaggctgtggcagctatcgaagctctaaatgggaagcacaaaatagagggttcaagtgtgcctttggttgtaaaatgggctgacacagaaaaggaaaggcaggctcgaaaagcacaaaaggctcaatttccgcagtctaatatgtcaaatgcaaatgccatgcaacaaagttcattatttggtgctttacagatgggatatgtgcctccgtataatggatttggctaccagccacaaggaacctatggacttatgcagtaccctttatctccgatgcaaaatcaagcaggcttcccgaatatggttcagcctgtcaatcaaggaagctcaatacggggcgttaattctgaattatcccctaattcacttcctaggtcattcaattcaatgcagttgggcagcccttatccagctgggcctggtatgcagtatcctgggtcatatgctggtggtggcatcaatagtcgtccttacatgaactctcataattcagtcaataaagttccgaatgcaaatgctacatctcccacatcttcaagcaccagcagcaacactggtcctcagctagagggtcctcctggagccaacttgtttatctatcacatcccgcaagaatttggcgaccaagatctagcaaatgcatttcagagttttggtagagtattgagtgccaaagtgtttgtagacaaaacgaccggtgctagtaaatgcttcggttttgtaagctacgattctcctgctcctgcgcaggcagccataagtatgatgaatgggttccaattaggtggcaaaaagctgaaagtacaactcaagagagacaacagcaagcacaataaactttattgacagcgcccagtcgataccttccaacacgatcaggaaaaaccggtacatatgtgtcgcacaattgatcgtttgtcccattgtttcttctggcctccaccatgtgtcgtcgtcggtgggggcttgtgtatcttggctcaattcaattcaacattcttgaaaactgctaaagtgtgtatttcgtcgcagcatagttgtagcatctgtaccatcagattcagacccattgtacatcagacattgattcattcaattgctcccttttttctaccg

SEQ ID NO: 16860 - protein, 458 aa, Triticum aestivum
  peptide (1)..(458): Ceres Seq. ID no. 15224474
  misc_feature (127)..(199): Pfam Name: a.k.a. RRM, RBD, or RNP domain Pfam Description: RNA recognition motif.
  misc_feature (17)..(456): NCBI GI NO: 34907248 NR Description: putative ribonucleoprotein
  misc_feature (33)..(452): NCBI GI NO: 7488303 NR Description: ribonucleoprotein homolog T4I9
  misc_feature (33)..(452): NCBI GI NO: 18412143 NR Description: RNA-binding protein, putative
  misc_feature (33)..(425): NCBI GI NO: 30679366 NR Description: RNA-binding protein, putative
  misc_feature (33)..(456): NCBI GI NO: 25386552 NR Description: protein F21B7.8 [imported] - Arabidopsis thaliana
  misc_feature (22)..(450): NCBI GI NO: 33354192 NR Description: putative CUG triplet repeat RNA-binding protein 1
  misc_feature (33)..(366): NCBI GI NO: 22329313 NR Description: RNA-binding protein, putative
  misc_feature (33)..(319): NCBI GI NO: 7488302 NR Description: ribonucleoprotein homolog F21B7
  misc_feature (33)..(363): NCBI GI NO: 16660677 NR Description: neuroblastoma apoptosis-related RNA-binding proteinisoform 4
  misc_feature (348)..(452): NCBI GI NO: 16660677 NR Description: neuroblastoma apoptosis-related RNA-binding proteinisoform 4
MAEDAGDRDQQQQQQPAAAAGAGAGHEDGGGRDESSVKLFVGQVPKLMTEAELAAMFRDVAVVDEVTVIRDKATKASRGCCFLICPSREEADKAVNAYHNKRTLPGAPSPLQVKYADGELERLEHKLFIGMLPKNVTDTEMTDLFSQYGNIKDLQILRGSQQTSKAGCAFLKYETKEQAVAAIEALNGKHKIEGSSVPLVVKWADTEKERQARKAQKAQFPQSNMSNANAMQQSSLFGALQMGYVPPYNGFGYQPQGTYGLMQYPLSPMQNQAGFPNMVQPVNQGSSIRGVNSELSPNSLPRSFNSMQLGSPYPAGPGMQYPGSYAGGGINSRPYMNSHNSVNKVPNANATSPTSSSTSSNTGPQLEGPPGANLFIYHIPQEFGDQDLANAFQSFGRVLSAKVFVDKTTGASKCFGFVSYDSPAPAQAAISMMNGFQLGGKKLKVQLKRDNSKHNKLY

SEQ ID NO: 16861 - protein, 411 aa, Triticum aestivum
  peptide (1)..(411): Ceres Seq. ID no. 15224475
  misc_feature (80)..(152): Pfam Name: a.k.a. RRM, RBD, or RNP domain Pfam Description: RNA recognition motif.
  misc_feature (1)..(409): NCBI GI NO: 34907248 NR Description: putative ribonucleoprotein
  misc_feature (1)..(405): NCBI GI NO: 7488303 NR Description: ribonucleoprotein homolog T4I9
  misc_feature (1)..(405): NCBI GI NO: 18412143 NR Description: RNA-binding protein, putative
  misc_feature (1)..(378): NCBI GI NO: 30679366 NR Description: RNA-binding protein, putative
  misc_feature (1)..(409): NCBI GI NO: 25386552 NR Description: protein F21B7.8 [imported] - Arabidopsis thaliana
  misc_feature (1)..(403): NCBI GI NO: 33354192 NR Description: putative CUG triplet repeat RNA-binding protein 1
  misc_feature (1)..(319): NCBI GI NO: 22329313 NR Description: RNA-binding protein, putative
  misc_feature (1)..(272): NCBI GI NO: 7488302 NR Description: ribonucleoprotein homolog F21B7
  misc_feature (1)..(316): NCBI GI NO: 16660677 NR Description: neuroblastoma apoptosis-related RNA-binding proteinisoform 4
  misc_feature (301)..(405): NCBI GI NO: 16660677 NR Description: neuroblastoma apoptosis-related RNA-binding proteinisoform 4
MTEAELAAMFRDVAVVDEVTVIRDKATKASRGCCFLICPSREEADKAVNAYHNKRTLPGAPSPLQVKYADGELERLEHKLFIGMLPKNVTDTEMTDLFSQYGNIKDLQILRGSQQTSKAGCAFLKYETKEQAVAAIEALNGKHKIEGSSVPLVVKWADTEKERQARKAQKAQFPQSNMSNANAMQQSSLFGALQMGYVPPYNGFGYQPQGTYGLMQYPLSPMQNQAGFPNMVQPVNQGSSIRGVNSELSPNSLPRSFNSMQLGSPYPAGPGMQYPGSYAGGGINSRPYMNSHNSVNKVPNANATSPTSSSTSSNTGPQLEGPPGANLFIYHIPQEFGDQDLANAFQSFGRVLSAKVFVDKTTGASKCFGFVSYDSPAPAQAAISMMNGFQLGGKKLKVQLKRDNSKHNKLY

SEQ ID NO: 16862 - protein, 403 aa, Triticum aestivum
  peptide (1)..(403): Ceres Seq. ID no. 15224476
  misc_feature (72)..(144): Pfam Name: a.k.a. RRM, RBD, or RNP domain Pfam Description: RNA recognition motif.
  misc_feature (1)..(401): NCBI GI NO: 34907248 NR Description: putative ribonucleoprotein
  misc_feature (1)..(397): NCBI GI NO: 7488303 NR Description: ribonucleoprotein homolog T4I9
  misc_feature (1)..(397): NCBI GI NO: 18412143 NR Description: RNA-binding protein, putative
  misc_feature (1)..(370): NCBI GI NO: 30679366 NR Description: RNA-binding protein, putative
  misc_feature (1)..(401): NCBI GI NO: 25386552 NR Description: protein F21B7.8 [imported] - Arabidopsis thaliana
  misc_feature (1)..(395): NCBI GI NO: 33354192 NR Description: putative CUG triplet repeat RNA-binding protein 1
  misc_feature (1)..(311): NCBI GI NO: 22329313 NR Description: RNA-binding protein, putative
  misc_feature (1)..(264): NCBI GI NO: 7488302 NR Description: ribonucleoprotein homolog F21B7
  misc_feature (1)..(308): NCBI GI NO: 16660677 NR Description: neuroblastoma apoptosis-related RNA-binding proteinisoform 4
  misc_feature (293)..(397): NCBI GI NO: 16660677 NR Description: neuroblastoma apoptosis-related RNA-binding proteinisoform 4
MFRDVAVVDEVTVIRDKATKASRGCCFLICPSREEADKAVNAYHNKRTLPGAPSPLQVKYADGELERLEHKLFIGMLPKNVTDTEMTDLFSQYGNIKDLQILRGSQQTSKAGCAFLKYETKEQAVAAIEALNGKHKIEGSSVPLVVKWADTEKERQARKAQKAQFPQSNMSNANAMQQSSLFGALQMGYVPPYNGFGYQPQGTYGLMQYPLSPMQNQAGFPNMVQPVNQGSSIRGVNSELSPNSLPRSFNSMQLGSPYPAGPGMQYPGSYAGGGINSRPYMNSHNSVNKVPNANATSPTSSSTSSNTGPQLEGPPGANLFIYHIPQEFGDQDLANAFQSFGRVLSAKVFVDKTTGASKCFGFVSYDSPAPAQAAISMMNGFQLGGKKLKVQLKRDNSKHNKLY

SEQ ID NO: 16863 - DNA, 1945 bp, Triticum aestivum
  misc_feature (1)..(1945): Ceres Seq. ID no. 12784451
acaaggggaagtggatccccattccaaacccagcgcacctatccccattccgttccccgccgcggcacttggcgtcgtccgccccgcagctcagctccacacgcccgcccactccctccgccacaagcgatggcgaccatcaccacgcagctccgctccgcgctcctctccccggccgcctcgtcctcgtcctcctcctcaccgcgccgcggcggccggcgcgcgccctcctccgtccgctgcgatgcctctcccccggcggcgtccgcgtcggcctccctcgacccggacttcgacaagaaggccttccgccacaacctcacccgcagcgacaactacaaccgcaagggcttcggccacaagaaggagaccctcgagctcatgagccaggagtacaccagcgatgtgataaagacgctcaaggacaacgggaacgagtacacctgggggccggtgaccgtgaagctggcggaggcctacggcttctgctggggcgtcgagcgcgccgtgcagatcgcctacgaggcgcgcaagcagttccccgaggagcgcatctggatcaccaacgagatcatccacaaccccacggtcaacaagaaattggaggacatgggtgtcaaagatattcctgttaacgctggtattaaggattttgatgttattgaacaaggcgatgttgttgtcttgcctgcatttggagctgctgtggatgagatgtacacattaaatgagaagaacgtgcaaattgttgatacgacatgcccttgggtttcaaaggtgtggaacatggttgagaagcataagaagggcgactatacttctattattcacggaaaatatgcccatgaagagactgttgccactgcttcttttgcagggaagtacattattgtgaagaatatggtcgaggcaacatatgtatgtgattatatacttggtggccaacttgatgggtctagctcaactagagaggagttccttgagaaattcaaaaaggctgtttctccaggattcgatcctgatgttgacttggaaaaggtgggcattgcaaatcaaacaacaatgcttaaaggagaaactgaacaaattggaaaacttgttgagaagactatgatgcgtaagtatggagtcgagaatgccaatgaacactttgttgcattcaacactatttgtgatgccacacaggaaagacaggatgcgatgtatcacctagtgaaggaaaaggttgaccttattctggttattggagggtggaactccagtaatacctctcatttgcaagaaattggagaactcagtggaattccgtcctactggattgacagtgaacaaaggattggaccaggaaacaggattagctacaagctaaatcacggtgagcttattgaggcagaaaactggctaccagaagggcctatcacaattggagttacttctggtgcctcaaccccggacaaggttgttgaggatacgctacacaaggtgtttgacattaagcgtcaagaagttttgcaggttgcatagattttcagcaaaattggccaggggataataatagttgatggcctggcaaaggttagtagaacaattgtgcgacctatcgttgtacagtagctaagaatgtaatgctttaggcacatacttttacgaggatatctgtgctgggatacatatatatgttgtaatcacttgtaccacgaacagtagtacacttgtatcagctgctataacccctggccccttgaaaaatcgttttcataggctgattacatagatatcaaccactgggtttgttgctggatagggctcaaatgcaggactccctgtatgtagcaagtgcaagaaatgcagggtttcctttgtatattagggcgcaagtccaattcccattctgatatgttcatgtgtcatctgttgtaattgaatttaacttttctccgtattc

SEQ ID NO: 16864 - protein, 507 aa, Triticum aestivum
  peptide (1)..(507): Ceres Seq. ID no. 12784452
  misc_feature (154)..(498): Pfam Name: Pfam Description:  LytB protein
  misc_feature (44)..(507): NCBI GI NO: 10716963 NR Description: LYTB-like protein precursor [Adonis palaestina]
  misc_feature (63)..(507): NCBI GI NO: 18418433 NR Description: putative protein; protein id: At4g34350
  misc_feature (63)..(507): NCBI GI NO: 7485313 NR Description: hypothetical protein F10M10
  misc_feature (99)..(499): NCBI GI NO: 22298585 NR Description: ORF_ID:tlr1041~penicillin tolerance protein LytBhomolog
  misc_feature (99)..(499): NCBI GI NO: 17228480 NR Description: hypothetical protein [Nostoc sp. PCC 7120]
  misc_feature (99)..(504): NCBI GI NO: 23128578 NR Description: hypothetical protein [Nostoc punctiforme]
  misc_feature (99)..(507): NCBI GI NO: 16331361 NR Description: hypothetical protein [Synechocystis sp. PCC 6803]
  misc_feature (99)..(499): NCBI GI NO: 23040062 NR Description: hypothetical protein
  misc_feature (99)..(495): NCBI GI NO: 33864788 NR Description: LytB protein homolog [Synechococcus sp. WH 8102]
  misc_feature (99)..(504): NCBI GI NO: 33239748 NR Description: 4-hydroxy-3-methylbut-2-enyl diphosphate reductase
TRGSGSPFQTQRTYPHSVPRRGTWRRPPRSSAPHARPLPPPQAMATITTQLRSALLSPAASSSSSSSPRRGGRRAPSSVRCDASPPAASASASLDPDFDKKAFRHNLTRSDNYNRKGFGHKKETLELMSQEYTSDVIKTLKDNGNEYTWGPVTVKLAEAYGFCWGVERAVQIAYEARKQFPEERIWITNEIIHNPTVNKKLEDMGVKDIPVNAGIKDFDVIEQGDVVVLPAFGAAVDEMYTLNEKNVQIVDTTCPWVSKVWNMVEKHKKGDYTSIIHGKYAHEETVATASFAGKYIIVKNMVEATYVCDYILGGQLDGSSSTREEFLEKFKKAVSPGFDPDVDLEKVGIANQTTMLKGETEQIGKLVEKTMMRKYGVENANEHFVAFNTICDATQERQDAMYHLVKEKVDLILVIGGWNSSNTSHLQEIGELSGIPSYWIDSEQRIGPGNRISYKLNHGELIEAENWLPEGPITIGVTSGASTPDKVVEDTLHKVFDIKRQEVLQVA

SEQ ID NO: 16865 - protein, 464 aa, Triticum aestivum
  peptide (1)..(464): Ceres Seq. ID no. 12784453
  misc_feature (111)..(455): Pfam Name: Pfam Description:  LytB protein
  misc_feature (1)..(464): NCBI GI NO: 10716963 NR Description: LYTB-like protein precursor [Adonis palaestina]
  misc_feature (20)..(464): NCBI GI NO: 18418433 NR Description: putative protein; protein id: At4g34350
  misc_feature (20)..(464): NCBI GI NO: 7485313 NR Description: hypothetical protein F10M10
  misc_feature (56)..(456): NCBI GI NO: 22298585 NR Description: ORF_ID:tlr1041~penicillin tolerance protein LytBhomolog
  misc_feature (56)..(456): NCBI GI NO: 17228480 NR Description: hypothetical protein [Nostoc sp. PCC 7120]
  misc_feature (56)..(461): NCBI GI NO: 23128578 NR Description: hypothetical protein [Nostoc punctiforme]
  misc_feature (56)..(464): NCBI GI NO: 16331361 NR Description: hypothetical protein [Synechocystis sp. PCC 6803]
  misc_feature (56)..(456): NCBI GI NO: 23040062 NR Description: hypothetical protein
  misc_feature (56)..(452): NCBI GI NO: 33864788 NR Description: LytB protein homolog [Synechococcus sp. WH 8102]
  misc_feature (56)..(461): NCBI GI NO: 33239748 NR Description: 4-hydroxy-3-methylbut-2-enyl diphosphate reductase
MATITTQLRSALLSPAASSSSSSSPRRGGRRAPSSVRCDASPPAASASASLDPDFDKKAFRHNLTRSDNYNRKGFGHKKETLELMSQEYTSDVIKTLKDNGNEYTWGPVTVKLAEAYGFCWGVERAVQIAYEARKQFPEERIWITNEIIHNPTVNKKLEDMGVKDIPVNAGIKDFDVIEQGDVVVLPAFGAAVDEMYTLNEKNVQIVDTTCPWVSKVWNMVEKHKKGDYTSIIHGKYAHEETVATASFAGKYIIVKNMVEATYVCDYILGGQLDGSSSTREEFLEKFKKAVSPGFDPDVDLEKVGIANQTTMLKGETEQIGKLVEKTMMRKYGVENANEHFVAFNTICDATQERQDAMYHLVKEKVDLILVIGGWNSSNTSHLQEIGELSGIPSYWIDSEQRIGPGNRISYKLNHGELIEAENWLPEGPITIGVTSGASTPDKVVEDTLHKVFDIKRQEVLQVA

SEQ ID NO: 16866 - protein, 380 aa, Triticum aestivum
  peptide (1)..(380): Ceres Seq. ID no. 12784454
  misc_feature (27)..(371): Pfam Name: Pfam Description:  LytB protein
  misc_feature (1)..(380): NCBI GI NO: 10716963 NR Description: LYTB-like protein precursor [Adonis palaestina]
  misc_feature (1)..(380): NCBI GI NO: 18418433 NR Description: putative protein; protein id: At4g34350
  misc_feature (1)..(380): NCBI GI NO: 7485313 NR Description: hypothetical protein F10M10
  misc_feature (1)..(372): NCBI GI NO: 22298585 NR Description: ORF_ID:tlr1041~penicillin tolerance protein LytBhomolog
  misc_feature (1)..(372): NCBI GI NO: 17228480 NR Description: hypothetical protein [Nostoc sp. PCC 7120]
  misc_feature (1)..(377): NCBI GI NO: 23128578 NR Description: hypothetical protein [Nostoc punctiforme]
  misc_feature (1)..(380): NCBI GI NO: 16331361 NR Description: hypothetical protein [Synechocystis sp. PCC 6803]
  misc_feature (1)..(372): NCBI GI NO: 23040062 NR Description: hypothetical protein
  misc_feature (1)..(368): NCBI GI NO: 33864788 NR Description: LytB protein homolog [Synechococcus sp. WH 8102]
  misc_feature (1)..(377): NCBI GI NO: 33239748 NR Description: 4-hydroxy-3-methylbut-2-enyl diphosphate reductase
MSQEYTSDVIKTLKDNGNEYTWGPVTVKLAEAYGFCWGVERAVQIAYEARKQFPEERIWITNEIIHNPTVNKKLEDMGVKDIPVNAGIKDFDVIEQGDVVVLPAFGAAVDEMYTLNEKNVQIVDTTCPWVSKVWNMVEKHKKGDYTSIIHGKYAHEETVATASFAGKYIIVKNMVEATYVCDYILGGQLDGSSSTREEFLEKFKKAVSPGFDPDVDLEKVGIANQTTMLKGETEQIGKLVEKTMMRKYGVENANEHFVAFNTICDATQERQDAMYHLVKEKVDLILVIGGWNSSNTSHLQEIGELSGIPSYWIDSEQRIGPGNRISYKLNHGELIEAENWLPEGPITIGVTSGASTPDKVVEDTLHKVFDIKRQEVLQVA

SEQ ID NO: 16867 - DNA, 2300 bp, Triticum aestivum
  misc_feature (1)..(2300): Ceres Seq. ID no. 13598023
gcccgacctcccacctccgcagtacaaccccctcctcctcctcccgggcggccatggcggcatgtacgccagcgacggccgccgtgtccttctctcttccgtcgtacccgcgccgcctccggcgccgcccgtccctcctccgcgctgcgtccactgcggcgcccccgtcccccgacctctccatccagctctctccccgcccttccccgcgcacctcgcctcccgtagtaccatccctcgcccgcgaccgcgcagaggacctgcaggccgagtcccgcgccatgacccgagccgctgccgccaccgtctacacccccgagctactcgcctcccgctacggctcccaacctttccaggtggcgatgagagcggcggaggtgctctcgaagctgggggcattcgggctaaagctgctgctcgaccagcagaggggggagtcgtcctcgtcagcgaagaggcgtgccagggcggtcgagctgcgaactgtactgacaaggcttggcccgacgttcgtcaagattgggcagggtttgtccacgcggcctgacctctgcccgactgagtatctcgaggagctctccgagctgcaggattctctccccacatttccagatgaagaggcatttgcctgtatcgagagggagcttggctttcctcttgattcaatgtactcagcaatgtcaccttcaccgatagctgcagcaagtttaggtcaagtttacaaggcacggttgaaatactctgagcagttggtagctgtcaaggtgcaaagacctggcatcgaggatgccataggccgtgatttttacctactgaggggacttggttttctaataaataagtatgttgacattataactactgatgcagttgctctgatagatgaatttgcccgaagagttttccaagagcttaattatgtccaggaaggccaaaacgcacgaaggtttaaaaaattatatgctgacaagcaagacatattggtccctgatatattttgggattacacaagtgcaaaggtactgacaatggaatggattgagggtgtaaagcttaatcaacaagctgccattgaaggccaaggcttgaaggtcctggacttggtaaacattggtatacagtgtagcctaaggcagctactagagtatggttactttcatgctgacccgcatcctggtaatattttggcaacacctgaagggaagcttgcttttcttgattttggcatgatgagtgaaaccccagaggatgcaagggtagccatcatagggcatgtcgttcacatggtcaatcgggattatgaagcgatggctcgtgattattatgcacttgattttctgaaacctgaagtggatgtatccccaatcgtacctgccctcaagattttttttgatgatgctttggattcaacagtgagtgagctaaactttaaaaccatagttgatggcttaggcgctgttctttatcagtacccattcaatgtaccggcctactatgcgttgatactgcgatcactcactgtgctggaaggtctggcactctatgccgatcctaattttaaggtgcttgctgcctcatatccttactttgctaaaagattactcacagatcccaatccatatctcagagatgctctgattgagctgctattcaaggatgaaaaattcaggtggaataggcttgaaaatcttcttgttcaaggacgccaggatagagagtttgtagcgaaggatgctctacaaccggttttgaaacttctacttggtccagatggggagaatttaagagtgctagttgtgaaagaagcggttcgtgtcacagaagccatcaccttcggaacactgattgattcatacaacgcagctccagaatttttgaagccattaatatccaatggcaatccagctggaccatttaagataagtgatgttgagcgggaacaaatgttggagctacgagacactgttctcagaatatggggtcttctgagatcctctgatacctttgatccaagtcttttgcagccaattgtacaggtgctacaagagcgtgaagcccgtatgtttggttctcgtattgctggaggtgtctcgcagcgccttgcagcccgcttgctgcagcagctgctcaggatcccacctgcacctgttcctggatcttcttagaatctttgtagataggctcacactaaaccatgtaaattgacacgatactttctgcaccaaaaggaaaaaaaagaaaagcaactataataatcagtaggtaaaaaaaaaaaaaaaaaagcttatcgataccgtcga

SEQ ID NO: 16868 - protein, 720 aa, Triticum aestivum
  peptide (1)..(720): Ceres Seq. ID no. 15222246
  misc_feature (213)..(332): Pfam Name: Pfam Description:  ABC1 family
  misc_feature (40)..(717): NCBI GI NO: 18412437 NR Description: expressed protein [Arabidopsis thaliana]
  misc_feature (153)..(717): NCBI GI NO: 14532490 NR Description: At1g79600/F20B17_3 [Arabidopsis thaliana]
  misc_feature (82)..(720): NCBI GI NO: 23042448 NR Description: hypothetical protein
  misc_feature (67)..(715): NCBI GI NO: 22298493 NR Description: ORF_ID:tll0950~hypothetical protein
  misc_feature (102)..(709): NCBI GI NO: 17232452 NR Description: hypothetical protein [Nostoc sp. PCC 7120]
  misc_feature (77)..(717): NCBI GI NO: 16331408 NR Description: ABC1-like [Synechocystis sp. PCC 6803]
  misc_feature (103)..(601): NCBI GI NO: 37522693 NR Description: hypothetical protein glr3124
  misc_feature (87)..(713): NCBI GI NO: 33864536 NR Description: possible protein kinase:ABC1 family
  misc_feature (87)..(706): NCBI GI NO: 33867054 NR Description: possible protein kinase: ABC1 family
  misc_feature (97)..(706): NCBI GI NO: 33241332 NR Description: Predicted protein kinase
PTSHLRSTTPSSSSRAAMAACTPATAAVSFSLPSYPRRLRRRPSLLRAASTAAPPSPDLSIQLSPRPSPRTSPPVVPSLARDRAEDLQAESRAMTRAAAATVYTPELLASRYGSQPFQVAMRAAEVLSKLGAFGLKLLLDQQRGESSSSAKRRARAVELRTVLTRLGPTFVKIGQGLSTRPDLCPTEYLEELSELQDSLPTFPDEEAFACIERELGFPLDSMYSAMSPSPIAAASLGQVYKARLKYSEQLVAVKVQRPGIEDAIGRDFYLLRGLGFLINKYVDIITTDAVALIDEFARRVFQELNYVQEGQNARRFKKLYADKQDILVPDIFWDYTSAKVLTMEWIEGVKLNQQAAIEGQGLKVLDLVNIGIQCSLRQLLEYGYFHADPHPGNILATPEGKLAFLDFGMMSETPEDARVAIIGHVVHMVNRDYEAMARDYYALDFLKPEVDVSPIVPALKIFFDDALDSTVSELNFKTIVDGLGAVLYQYPFNVPAYYALILRSLTVLEGLALYADPNFKVLAASYPYFAKRLLTDPNPYLRDALIELLFKDEKFRWNRLENLLVQGRQDREFVAKDALQPVLKLLLGPDGENLRVLVVKEAVRVTEAITFGTLIDSYNAAPEFLKPLISNGNPAGPFKISDVEREQMLELRDTVLRIWGLLRSSDTFDPSLLQPIVQVLQEREARMFGSRIAGGVSQRLAARLLQQLLRIPPAPVPGSS

SEQ ID NO: 16869 - protein, 703 aa, Triticum aestivum
  peptide (1)..(703): Ceres Seq. ID no. 15222247
  misc_feature (196)..(315): Pfam Name: Pfam Description:  ABC1 family
  misc_feature (23)..(700): NCBI GI NO: 18412437 NR Description: expressed protein [Arabidopsis thaliana]
  misc_feature (136)..(700): NCBI GI NO: 14532490 NR Description: At1g79600/F20B17_3 [Arabidopsis thaliana]
  misc_feature (65)..(703): NCBI GI NO: 23042448 NR Description: hypothetical protein
  misc_feature (50)..(698): NCBI GI NO: 22298493 NR Description: ORF_ID:tll0950~hypothetical protein
  misc_feature (85)..(692): NCBI GI NO: 17232452 NR Description: hypothetical protein [Nostoc sp. PCC 7120]
  misc_feature (60)..(700): NCBI GI NO: 16331408 NR Description: ABC1-like [Synechocystis sp. PCC 6803]
  misc_feature (86)..(584): NCBI GI NO: 37522693 NR Description: hypothetical protein glr3124
  misc_feature (70)..(696): NCBI GI NO: 33864536 NR Description: possible protein kinase:ABC1 family
  misc_feature (70)..(689): NCBI GI NO: 33867054 NR Description: possible protein kinase: ABC1 family
  misc_feature (80)..(689): NCBI GI NO: 33241332 NR Description: Predicted protein kinase
MAACTPATAAVSFSLPSYPRRLRRRPSLLRAASTAAPPSPDLSIQLSPRPSPRTSPPVVPSLARDRAEDLQAESRAMTRAAAATVYTPELLASRYGSQPFQVAMRAAEVLSKLGAFGLKLLLDQQRGESSSSAKRRARAVELRTVLTRLGPTFVKIGQGLSTRPDLCPTEYLEELSELQDSLPTFPDEEAFACIERELGFPLDSMYSAMSPSPIAAASLGQVYKARLKYSEQLVAVKVQRPGIEDAIGRDFYLLRGLGFLINKYVDIITTDAVALIDEFARRVFQELNYVQEGQNARRFKKLYADKQDILVPDIFWDYTSAKVLTMEWIEGVKLNQQAAIEGQGLKVLDLVNIGIQCSLRQLLEYGYFHADPHPGNILATPEGKLAFLDFGMMSETPEDARVAIIGHVVHMVNRDYEAMARDYYALDFLKPEVDVSPIVPALKIFFDDALDSTVSELNFKTIVDGLGAVLYQYPFNVPAYYALILRSLTVLEGLALYADPNFKVLAASYPYFAKRLLTDPNPYLRDALIELLFKDEKFRWNRLENLLVQGRQDREFVAKDALQPVLKLLLGPDGENLRVLVVKEAVRVTEAITFGTLIDSYNAAPEFLKPLISNGNPAGPFKISDVEREQMLELRDTVLRIWGLLRSSDTFDPSLLQPIVQVLQEREARMFGSRIAGGVSQRLAARLLQQLLRIPPAPVPGSS

SEQ ID NO: 16870 - protein, 627 aa, Triticum aestivum
  peptide (1)..(627): Ceres Seq. ID no. 15222248
  misc_feature (120)..(239): Pfam Name: Pfam Description:  ABC1 family
  misc_feature (1)..(624): NCBI GI NO: 18412437 NR Description: expressed protein [Arabidopsis thaliana]
  misc_feature (60)..(624): NCBI GI NO: 14532490 NR Description: At1g79600/F20B17_3 [Arabidopsis thaliana]
  misc_feature (1)..(627): NCBI GI NO: 23042448 NR Description: hypothetical protein
  misc_feature (1)..(622): NCBI GI NO: 22298493 NR Description: ORF_ID:tll0950~hypothetical protein
  misc_feature (9)..(616): NCBI GI NO: 17232452 NR Description: hypothetical protein [Nostoc sp. PCC 7120]
  misc_feature (1)..(624): NCBI GI NO: 16331408 NR Description: ABC1-like [Synechocystis sp. PCC 6803]
  misc_feature (10)..(508): NCBI GI NO: 37522693 NR Description: hypothetical protein glr3124
  misc_feature (1)..(620): NCBI GI NO: 33864536 NR Description: possible protein kinase:ABC1 family
  misc_feature (1)..(613): NCBI GI NO: 33867054 NR Description: possible protein kinase: ABC1 family
  misc_feature (4)..(613): NCBI GI NO: 33241332 NR Description: Predicted protein kinase
MTRAAAATVYTPELLASRYGSQPFQVAMRAAEVLSKLGAFGLKLLLDQQRGESSSSAKRRARAVELRTVLTRLGPTFVKIGQGLSTRPDLCPTEYLEELSELQDSLPTFPDEEAFACIERELGFPLDSMYSAMSPSPIAAASLGQVYKARLKYSEQLVAVKVQRPGIEDAIGRDFYLLRGLGFLINKYVDIITTDAVALIDEFARRVFQELNYVQEGQNARRFKKLYADKQDILVPDIFWDYTSAKVLTMEWIEGVKLNQQAAIEGQGLKVLDLVNIGIQCSLRQLLEYGYFHADPHPGNILATPEGKLAFLDFGMMSETPEDARVAIIGHVVHMVNRDYEAMARDYYALDFLKPEVDVSPIVPALKIFFDDALDSTVSELNFKTIVDGLGAVLYQYPFNVPAYYALILRSLTVLEGLALYADPNFKVLAASYPYFAKRLLTDPNPYLRDALIELLFKDEKFRWNRLENLLVQGRQDREFVAKDALQPVLKLLLGPDGENLRVLVVKEAVRVTEAITFGTLIDSYNAAPEFLKPLISNGNPAGPFKISDVEREQMLELRDTVLRIWGLLRSSDTFDPSLLQPIVQVLQEREARMFGSRIAGGVSQRLAARLLQQLLRIPPAPVPGSS

SEQ ID NO: 16871 - DNA, 1955 bp, Triticum aestivum
  misc_feature (1)..(1955): Ceres Seq. ID no. 15170099
atagccagatccatagggttcttctttttcttccccggcccaccgttcctctacagatcgaagtaggtcgcagctacctcgatcttctcacccatggcgtcctcgaacaagcactggccgagcatgttcaggtccaaccctgctgcctgcgacttccaccaccagcctgacatgagcaacacccacaccaggtcctccttgatctcctcagggcttgaccaggagatgacaaggagcccaggggagacgaaaccgcggtggaacccccggccggagcagatctggatcctggaggggatcttcaactccggcgtcgtcaaccctccccgcgacgagatccgccgcatccgcctccgcctgcaggagtacggccacgtcgccgacgccaacgtcttctactggttccagaaccgcaagtcccgcaccaagaacaagcttcgcgccgccgcggccgcagccgctgcccagggccaacagcctaccggcggtcgcgccgccgtgatgcgcgcgtccctagcggtgaggatgcctgcgccggctccggtgacgccgccgaggcgtttcctcgcgccgtccggcacgctccaggcgccgacgtcctcgtcatcgtcctcctccgaccgctcctccggatccagcaggtcggtgaccatgaaaacgacggccatggcgtctgcggcggcagcctccctgtcccagccgatgctgccgctgtcgaccgccgccatcgacctgttcgccccggctccaccactgacaccgtcgcctgggctgtccgcgtgccagctctactaccagctgcagaacaatcccatgtcgtcgatgccgacgccgacgccggtgcgcgagctggtaacctccatccctgagcagccgccgctccacctgcagtggccgccgcagagccagagccagtacctgccagccaccgagctcggcggcttcctcggctcgcatgcccacacgcatccgacggcggtctcccctggcgcgctcctcctgcctggcctctgcaccgactcggcgttagggcagcatgagatcgtggacgacatgagctcctccaagctgggtctcggcgtcggcggccagttcaacttcaacgtggcggcggatccaccctccgacgcggtgagcgccgtgattaaggacgacgagaaggcaaggctggggtttctgcaccactacggcctcggcgccaccgccggcgcggacgtcagtgcggccgtcctcccatgcactccgcctaccggcaacgccgccgcaagctctgcattcaccgatcagctgcaagggctcctggacgccgggctgctggccggaggaggcgcgccgacgccaatggcgacggtagtgaccgtggccgccgggcggccgggcgcccccgtgcaatgctacagcgtgccggcgatggtgcgcatggacgtgaaggcgctgttcggcccggcggccgtgatgctcgggcagaccggcgaggcaatccccgtcgacggggccggggtcaccgccgagcccctccagaacggcgcctgctactacgtcctgatgtgagactcgctgaagatcgatcgccgatgcctgtgtacgtcttgggtcaagggcgccgcgcgggagaatttgggcaaggcgaattatagttatctctacctagttgctacaaggaaaaaaagtccttatatatagctagctgctagtatattttgctttggtcagtatgtggatctactatagcttctaatcgagcgtcttgtgttactcttattttagtgaggatatcttctaacatggacaatagtgttggcttaatttcctgttgcaataagctgccccatgttgctagtactattcagtggtggtattaagatttaagcatcctcttatatttttaaaaaaatatttaaggttggctaacatgcatgtatgagatgagatgaactttgatgagaggcatgagg

SEQ ID NO: 16872 - protein, 485 aa, Triticum aestivum
  peptide (1)..(485): Ceres Seq. ID no. 15170100
  misc_feature (53)..(115): Pfam Name: Pfam Description:  Homeobox domain
  misc_feature (1)..(413): NCBI GI NO: 34910936 NR Description: OSJNBb0063G05.13
  misc_feature (377)..(485): NCBI GI NO: 34910936 NR Description: OSJNBb0063G05.13
  misc_feature (1)..(116): NCBI GI NO: 30685885 NR Description: homeodomain transcription factor -related
  misc_feature (444)..(484): NCBI GI NO: 30685885 NR Description: homeodomain transcription factor -related
  misc_feature (1)..(116): NCBI GI NO: 37955180 NR Description: WOX8 protein [Arabidopsis thaliana]
  misc_feature (444)..(484): NCBI GI NO: 37955180 NR Description: WOX8 protein [Arabidopsis thaliana]
  misc_feature (1)..(116): NCBI GI NO: 25408317 NR Description: probable homeodomain transcription factor
  misc_feature (1)..(116): NCBI GI NO: 15237353 NR Description: homeodomain protein [Arabidopsis thaliana]
  misc_feature (361)..(484): NCBI GI NO: 40253638 NR Description: putative homeodomain protein
  misc_feature (50)..(135): NCBI GI NO: 40253638 NR Description: putative homeodomain protein
MASSNKHWPSMFRSNPAACDFHHQPDMSNTHTRSSLISSGLDQEMTRSPGETKPRWNPRPEQIWILEGIFNSGVVNPPRDEIRRIRLRLQEYGHVADANVFYWFQNRKSRTKNKLRAAAAAAAAQGQQPTGGRAAVMRASLAVRMPAPAPVTPPRRFLAPSGTLQAPTSSSSSSSDRSSGSSRSVTMKTTAMASAAAASLSQPMLPLSTAAIDLFAPAPPLTPSPGLSACQLYYQLQNNPMSSMPTPTPVRELVTSIPEQPPLHLQWPPQSQSQYLPATELGGFLGSHAHTHPTAVSPGALLLPGLCTDSALGQHEIVDDMSSSKLGLGVGGQFNFNVAADPPSDAVSAVIKDDEKARLGFLHHYGLGATAGADVSAAVLPCTPPTGNAAASSAFTDQLQGLLDAGLLAGGGAPTPMATVVTVAAGRPGAPVQCYSVPAMVRMDVKALFGPAAVMLGQTGEAIPVDGAGVTAEPLQNGACYYVLM

SEQ ID NO: 16873 - protein, 475 aa, Triticum aestivum
  peptide (1)..(475): Ceres Seq. ID no. 15170101
  misc_feature (43)..(105): Pfam Name: Pfam Description:  Homeobox domain
  misc_feature (1)..(403): NCBI GI NO: 34910936 NR Description: OSJNBb0063G05.13
  misc_feature (367)..(475): NCBI GI NO: 34910936 NR Description: OSJNBb0063G05.13
  misc_feature (1)..(106): NCBI GI NO: 30685885 NR Description: homeodomain transcription factor -related
  misc_feature (434)..(474): NCBI GI NO: 30685885 NR Description: homeodomain transcription factor -related
  misc_feature (1)..(106): NCBI GI NO: 37955180 NR Description: WOX8 protein [Arabidopsis thaliana]
  misc_feature (434)..(474): NCBI GI NO: 37955180 NR Description: WOX8 protein [Arabidopsis thaliana]
  misc_feature (1)..(106): NCBI GI NO: 25408317 NR Description: probable homeodomain transcription factor
  misc_feature (1)..(106): NCBI GI NO: 15237353 NR Description: homeodomain protein [Arabidopsis thaliana]
  misc_feature (351)..(474): NCBI GI NO: 40253638 NR Description: putative homeodomain protein
  misc_feature (40)..(125): NCBI GI NO: 40253638 NR Description: putative homeodomain protein
MFRSNPAACDFHHQPDMSNTHTRSSLISSGLDQEMTRSPGETKPRWNPRPEQIWILEGIFNSGVVNPPRDEIRRIRLRLQEYGHVADANVFYWFQNRKSRTKNKLRAAAAAAAAQGQQPTGGRAAVMRASLAVRMPAPAPVTPPRRFLAPSGTLQAPTSSSSSSSDRSSGSSRSVTMKTTAMASAAAASLSQPMLPLSTAAIDLFAPAPPLTPSPGLSACQLYYQLQNNPMSSMPTPTPVRELVTSIPEQPPLHLQWPPQSQSQYLPATELGGFLGSHAHTHPTAVSPGALLLPGLCTDSALGQHEIVDDMSSSKLGLGVGGQFNFNVAADPPSDAVSAVIKDDEKARLGFLHHYGLGATAGADVSAAVLPCTPPTGNAAASSAFTDQLQGLLDAGLLAGGGAPTPMATVVTVAAGRPGAPVQCYSVPAMVRMDVKALFGPAAVMLGQTGEAIPVDGAGVTAEPLQNGACYYVLM

SEQ ID NO: 16874 - protein, 459 aa, Triticum aestivum
  peptide (1)..(459): Ceres Seq. ID no. 15170102
  misc_feature (27)..(89): Pfam Name: Pfam Description:  Homeobox domain
  misc_feature (1)..(387): NCBI GI NO: 34910936 NR Description: OSJNBb0063G05.13
  misc_feature (351)..(459): NCBI GI NO: 34910936 NR Description: OSJNBb0063G05.13
  misc_feature (1)..(90): NCBI GI NO: 30685885 NR Description: homeodomain transcription factor -related
  misc_feature (418)..(458): NCBI GI NO: 30685885 NR Description: homeodomain transcription factor -related
  misc_feature (1)..(90): NCBI GI NO: 37955180 NR Description: WOX8 protein [Arabidopsis thaliana]
  misc_feature (418)..(458): NCBI GI NO: 37955180 NR Description: WOX8 protein [Arabidopsis thaliana]
  misc_feature (1)..(90): NCBI GI NO: 25408317 NR Description: probable homeodomain transcription factor
  misc_feature (1)..(90): NCBI GI NO: 15237353 NR Description: homeodomain protein [Arabidopsis thaliana]
  misc_feature (335)..(458): NCBI GI NO: 40253638 NR Description: putative homeodomain protein
  misc_feature (24)..(109): NCBI GI NO: 40253638 NR Description: putative homeodomain protein
MSNTHTRSSLISSGLDQEMTRSPGETKPRWNPRPEQIWILEGIFNSGVVNPPRDEIRRIRLRLQEYGHVADANVFYWFQNRKSRTKNKLRAAAAAAAAQGQQPTGGRAAVMRASLAVRMPAPAPVTPPRRFLAPSGTLQAPTSSSSSSSDRSSGSSRSVTMKTTAMASAAAASLSQPMLPLSTAAIDLFAPAPPLTPSPGLSACQLYYQLQNNPMSSMPTPTPVRELVTSIPEQPPLHLQWPPQSQSQYLPATELGGFLGSHAHTHPTAVSPGALLLPGLCTDSALGQHEIVDDMSSSKLGLGVGGQFNFNVAADPPSDAVSAVIKDDEKARLGFLHHYGLGATAGADVSAAVLPCTPPTGNAAASSAFTDQLQGLLDAGLLAGGGAPTPMATVVTVAAGRPGAPVQCYSVPAMVRMDVKALFGPAAVMLGQTGEAIPVDGAGVTAEPLQNGACYYVLM

SEQ ID NO: 16875 - DNA, 1294 bp, Triticum aestivum
  misc_feature (1)..(1294): Ceres Seq. ID no. 15225240
cccgtctccgactgcgccgccgccccctcccccagcctcgcttcgctcccgcggggatggaaaaccgcgatggttcctcactgccagactttcttgagctccagcgcacccgtgttctctgcaaggccgatgcccccactcatacagaagggtttcaatactcgggtgcttttgctgctatgggagttgacactagtgtttcagttgagaagttctgcaagaactttaaaatcgagataaatcgacttacagatgaggatatggagtttgatatgattggcgttgatgcatcgatagctaatgctttccggagaatcctcattgcagaggttcctacaatggccattgagaaagtcttcatggttgacaatacctcagttatagcagatgaggtcctttcacaccgactaggccttattccacttgatgctgatccaaggctttttgattatatctctgatgatgtcccaaatgaaaggaacactattgtgtacaaactgcatgtttcatgtgaaaagggttcccaaaggcttacagttaagtctggtcaattggagtggttgccagaaggcagtcaattaactatggcatctcctgcgcaatctggggacaatcagaggacctacacatcctttggtcaaagccaacagaatacctctgaaaggcctctcggtgtgaagtataatgacataacaattgccaggcttgggccaggacaggctattgagcttgaggcacatgctgttaagggagtggggaaagttcatgcgaagtggtctccagttgctacagcctggtacaggatgctccccgaggttgttcttctcaaagaaattaaaaatggtgatgcagaggagctagtgaaaagatgcccagttaatgtttttgacattgaagacctgggaaagggggagaagagagcagttgttgcaaagccaagatcatgcaccctttgtagggaatgtgtcagactggctgacgatcaagtagagctacggcgtgttagagaccacttcatttttacaatcgagtccaccggagctcttccgccagaggtgctcttcacagaggccgtgaagatccttgaggagaagtgcgagcgagtgatatccgaactttcctgagcctgatataaagttttcagtactgttctgatgtagtttttctattgctatgttgtgtcgaggacgaaagcttagtgtactaatataggttactgtgaaacttctgtatccaatattctggagtcacattcagctaatttattactgagctggtatatgcagcagtcctg

SEQ ID NO: 16876 - protein, 373 aa, Triticum aestivum
  peptide (1)..(373): Ceres Seq. ID no. 15225241
  misc_feature (118)..(259): Pfam Name: Pfam Description:  RNA polymerase Rpb3/RpoA insert domain
  misc_feature (25)..(373): NCBI GI NO: 15219773 NR Description: RNA polymerase subunit [Arabidopsis thaliana]
  misc_feature (25)..(368): NCBI GI NO: 21592304 NR Description: RNA polymerase subunit [Arabidopsis thaliana]
  misc_feature (25)..(368): NCBI GI NO: 15219820 NR Description: RNA polymerase subunit [Arabidopsis thaliana]
  misc_feature (25)..(368): NCBI GI NO: 514322 NR Description: RNA polymerase subunit
  misc_feature (35)..(372): NCBI GI NO: 34193909 NR Description: RNA polymerase 1-1 [Danio rerio]
  misc_feature (31)..(372): NCBI GI NO: 3914807 NR Description: DNA-directed RNA polymerase I 40 kDa polypeptide
  misc_feature (31)..(372): NCBI GI NO: 19113623 NR Description: dna-directed rna polymerases i and iii polypeptide
  misc_feature (35)..(372): NCBI GI NO: 1914859 NR Description: homologous to 40kD subunit of RNA-polymerase I andIII
  misc_feature (47)..(372): NCBI GI NO: 14198113 NR Description: POLR1C protein [Homo sapiens]
  misc_feature (31)..(372): NCBI GI NO: 6677787 NR Description: RNA polymerase 1-1; RNA polymerase 1-1
RLRLRRRPLPQPRFAPAGMENRDGSSLPDFLELQRTRVLCKADAPTHTEGFQYSGAFAAMGVDTSVSVEKFCKNFKIEINRLTDEDMEFDMIGVDASIANAFRRILIAEVPTMAIEKVFMVDNTSVIADEVLSHRLGLIPLDADPRLFDYISDDVPNERNTIVYKLHVSCEKGSQRLTVKSGQLEWLPEGSQLTMASPAQSGDNQRTYTSFGQSQQNTSERPLGVKYNDITIARLGPGQAIELEAHAVKGVGKVHAKWSPVATAWYRMLPEVVLLKEIKNGDAEELVKRCPVNVFDIEDLGKGEKRAVVAKPRSCTLCRECVRLADDQVELRRVRDHFIFTIESTGALPPEVLFTEAVKILEEKCERVISELS

SEQ ID NO: 16877 - protein, 355 aa, Triticum aestivum
  peptide (1)..(355): Ceres Seq. ID no. 15225242
  misc_feature (100)..(241): Pfam Name: Pfam Description:  RNA polymerase Rpb3/RpoA insert domain
  misc_feature (7)..(355): NCBI GI NO: 15219773 NR Description: RNA polymerase subunit [Arabidopsis thaliana]
  misc_feature (7)..(350): NCBI GI NO: 21592304 NR Description: RNA polymerase subunit [Arabidopsis thaliana]
  misc_feature (7)..(350): NCBI GI NO: 15219820 NR Description: RNA polymerase subunit [Arabidopsis thaliana]
  misc_feature (7)..(350): NCBI GI NO: 514322 NR Description: RNA polymerase subunit
  misc_feature (17)..(354): NCBI GI NO: 34193909 NR Description: RNA polymerase 1-1 [Danio rerio]
  misc_feature (13)..(354): NCBI GI NO: 3914807 NR Description: DNA-directed RNA polymerase I 40 kDa polypeptide
  misc_feature (13)..(354): NCBI GI NO: 19113623 NR Description: dna-directed rna polymerases i and iii polypeptide
  misc_feature (17)..(354): NCBI GI NO: 1914859 NR Description: homologous to 40kD subunit of RNA-polymerase I andIII
  misc_feature (29)..(354): NCBI GI NO: 14198113 NR Description: POLR1C protein [Homo sapiens]
  misc_feature (13)..(354): NCBI GI NO: 6677787 NR Description: RNA polymerase 1-1; RNA polymerase 1-1
MENRDGSSLPDFLELQRTRVLCKADAPTHTEGFQYSGAFAAMGVDTSVSVEKFCKNFKIEINRLTDEDMEFDMIGVDASIANAFRRILIAEVPTMAIEKVFMVDNTSVIADEVLSHRLGLIPLDADPRLFDYISDDVPNERNTIVYKLHVSCEKGSQRLTVKSGQLEWLPEGSQLTMASPAQSGDNQRTYTSFGQSQQNTSERPLGVKYNDITIARLGPGQAIELEAHAVKGVGKVHAKWSPVATAWYRMLPEVVLLKEIKNGDAEELVKRCPVNVFDIEDLGKGEKRAVVAKPRSCTLCRECVRLADDQVELRRVRDHFIFTIESTGALPPEVLFTEAVKILEEKCERVISELS

SEQ ID NO: 16878 - protein, 314 aa, Triticum aestivum
  peptide (1)..(314): Ceres Seq. ID no. 15225243
  misc_feature (59)..(200): Pfam Name: Pfam Description:  RNA polymerase Rpb3/RpoA insert domain
  misc_feature (1)..(314): NCBI GI NO: 15219773 NR Description: RNA polymerase subunit [Arabidopsis thaliana]
  misc_feature (1)..(309): NCBI GI NO: 21592304 NR Description: RNA polymerase subunit [Arabidopsis thaliana]
  misc_feature (1)..(309): NCBI GI NO: 15219820 NR Description: RNA polymerase subunit [Arabidopsis thaliana]
  misc_feature (1)..(309): NCBI GI NO: 514322 NR Description: RNA polymerase subunit
  misc_feature (1)..(313): NCBI GI NO: 34193909 NR Description: RNA polymerase 1-1 [Danio rerio]
  misc_feature (1)..(313): NCBI GI NO: 3914807 NR Description: DNA-directed RNA polymerase I 40 kDa polypeptide
  misc_feature (1)..(313): NCBI GI NO: 19113623 NR Description: dna-directed rna polymerases i and iii polypeptide
  misc_feature (1)..(313): NCBI GI NO: 1914859 NR Description: homologous to 40kD subunit of RNA-polymerase I andIII
  misc_feature (1)..(313): NCBI GI NO: 14198113 NR Description: POLR1C protein [Homo sapiens]
  misc_feature (1)..(313): NCBI GI NO: 6677787 NR Description: RNA polymerase 1-1; RNA polymerase 1-1
MGVDTSVSVEKFCKNFKIEINRLTDEDMEFDMIGVDASIANAFRRILIAEVPTMAIEKVFMVDNTSVIADEVLSHRLGLIPLDADPRLFDYISDDVPNERNTIVYKLHVSCEKGSQRLTVKSGQLEWLPEGSQLTMASPAQSGDNQRTYTSFGQSQQNTSERPLGVKYNDITIARLGPGQAIELEAHAVKGVGKVHAKWSPVATAWYRMLPEVVLLKEIKNGDAEELVKRCPVNVFDIEDLGKGEKRAVVAKPRSCTLCRECVRLADDQVELRRVRDHFIFTIESTGALPPEVLFTEAVKILEEKCERVISELS

SEQ ID NO: 16879 - DNA, 1423 bp, Triticum aestivum
  misc_feature (1)..(1423): Ceres Seq. ID no. 13658993
agtacgagtcctactaaaactcttgtcatgtcctgggcaataaataggccgatcaaccaccgcccaccgcaccagaagcaaacaccgccggcctgccatggcgcgactgccggacaagattccggcgagccaattcaacgccgccctatccttcatacaacatatcaaagccggcctcgcgtccagccagaccatccacgcagagctcctccacctcctcgcgtgcttgggcaggggcgagaccgccgacacccacgccgtcctggccagggcggacgccatcctccggggccatcccgacctcctccagcgcttcgacgcctttctcggccgtcccagccaccaccaagctgccaaacccgtccgtgaagaccctgtcgccgccgcgccgccgccgaagcggcccaagagggagcaccgccgcacggtcgccgagtgcgccgggcccatgcggttcttggagcgggtgaagatggcggacgccggactctacgacatgctcctggtgcttctgttcaacgtggagatggaggggacgctgaacgcgcatcaaatctacgcgaaggccctcgaggttttcggctccgccgacagccctctcctccgcggcttcacggagttcctgccgctgccgacggccgggcgtgactttctgacgcggcgccgcgcaaaggaggagccggagcacggaccgaagcgcaaggccgtccccgccggcaagccgagcccgagcgcggcaaagaaaccccgcgccgaccacgaccggaagacgaagagcggcagtgtctccgcgtttagggacgcgtgggagttcgagaccacctactcgaagctggcggtcacgctaagacgcaccgagaaatccctggaagagctcgagccaaggaaggagtcgccggaagaagtcgagccggaggcggcgccgggacaccatgggcggccgcgcacgctggagcaactctaccctggccgcgagtgccaggaggtcctccaggagatgtatggcggcatgtgggggcagatgcgggtggcgctcgaggacggcgcgcgcaccgaggtggcgctgcggacgatattgcgcaggctgacgaagctggagcaggtggccgtgaagatggcgatggggcggcgcgatcccgcccgcgtcgaggcccgagtgaagctgcttgtcttagagcggcgggatggcgcccacgccgatggcgggatgaacaagcttaatgtagagttgtagcctgaccgtgtggtggttcttcgaaaggagcggcggcacgtacattgtcgcggtgacccggccgtgcgtgccaccggccggcatgtcgtgaagttgaagaccaagattatcgttgctttgagacgttaatttactttagctttttttcagtttggtcagtccatttcttggccgtcgatttttgctccg

SEQ ID NO: 16880 - protein, 378 aa, Triticum aestivum
  peptide (1)..(378): Ceres Seq. ID no. 13658994
  misc_feature (207)..(349): NCBI GI NO: 20043077 NR Description: Hypothetical protein
  misc_feature (207)..(349): NCBI GI NO: 37533642 NR Description: hypothetical protein
MARLPDKIPASQFNAALSFIQHIKAGLASSQTIHAELLHLLACLGRGETADTHAVLARADAILRGHPDLLQRFDAFLGRPSHHQAAKPVREDPVAAAPPPKRPKREHRRTVAECAGPMRFLERVKMADAGLYDMLLVLLFNVEMEGTLNAHQIYAKALEVFGSADSPLLRGFTEFLPLPTAGRDFLTRRRAKEEPEHGPKRKAVPAGKPSPSAAKKPRADHDRKTKSGSVSAFRDAWEFETTYSKLAVTLRRTEKSLEELEPRKESPEEVEPEAAPGHHGRPRTLEQLYPGRECQEVLQEMYGGMWGQMRVALEDGARTEVALRTILRRLTKLEQVAVKMAMGRRDPARVEARVKLLVLERRDGAHADGGMNKLNVEL

SEQ ID NO: 16881 - protein, 261 aa, Triticum aestivum
  peptide (1)..(261): Ceres Seq. ID no. 13658995
  misc_feature (90)..(232): NCBI GI NO: 20043077 NR Description: Hypothetical protein
  misc_feature (90)..(232): NCBI GI NO: 37533642 NR Description: hypothetical protein
MRFLERVKMADAGLYDMLLVLLFNVEMEGTLNAHQIYAKALEVFGSADSPLLRGFTEFLPLPTAGRDFLTRRRAKEEPEHGPKRKAVPAGKPSPSAAKKPRADHDRKTKSGSVSAFRDAWEFETTYSKLAVTLRRTEKSLEELEPRKESPEEVEPEAAPGHHGRPRTLEQLYPGRECQEVLQEMYGGMWGQMRVALEDGARTEVALRTILRRLTKLEQVAVKMAMGRRDPARVEARVKLLVLERRDGAHADGGMNKLNVEL

SEQ ID NO: 16882 - protein, 253 aa, Triticum aestivum
  peptide (1)..(253): Ceres Seq. ID no. 13658996
  misc_feature (82)..(224): NCBI GI NO: 20043077 NR Description: Hypothetical protein
  misc_feature (82)..(224): NCBI GI NO: 37533642 NR Description: hypothetical protein
MADAGLYDMLLVLLFNVEMEGTLNAHQIYAKALEVFGSADSPLLRGFTEFLPLPTAGRDFLTRRRAKEEPEHGPKRKAVPAGKPSPSAAKKPRADHDRKTKSGSVSAFRDAWEFETTYSKLAVTLRRTEKSLEELEPRKESPEEVEPEAAPGHHGRPRTLEQLYPGRECQEVLQEMYGGMWGQMRVALEDGARTEVALRTILRRLTKLEQVAVKMAMGRRDPARVEARVKLLVLERRDGAHADGGMNKLNVEL

SEQ ID NO: 16883 - DNA, 1725 bp, Triticum aestivum
  misc_feature (1)..(1725): Ceres Seq. ID no. 14307944
atcactatcgtgtaacttcgtacgttgccgactactttcaatggcggcctttgcaaagatcgccatggagtgcctgcacgatcccctcatctggctacttcttgcgtcggtggccttggtcatcctgcaaagacggcggctgaaactgaacccgccgccgctccctccaggccccaagccgctaccgatcatcggcaacctgatgatggcggaccagctgacccaccgtggcctggcggcgctggccaagcagtacggcgggttgctgcacctccgcctgggctcgctccgcgtcttcgcggtgtccaccccggagtacgcgcgcgaggtgctccaggcgcaggacagcgacttctggtaccgcccagcctccatcgccgtccgctacctcacctacggctgctccgacatggcgttcgcgcgcgacgggccctactggcgccagatgcgcaagctgtgcgtcaccaagctcttcagccgccggcgcgccgagacctggctggccgtgcgcgacgggtacggggagctcgcccgggccgtcggcaggtccagcggcgaggccgtgaacctcggcgagctcatcttcaagcacaccgttagcatcatcttccgggccgccttcggcgtgcgcgacgtccaaggactggacgagttcatccccatgttcaaggagttctccaagctcttagaggcgttccacgtcggtgacttcttcccttggctaagctggatgggccggcggggcttcgaccggcgccttcgcaccgtgcgcggcgctctaggaacgtttgtggacaagatcattgacgagcacgtgaggaggggcaagaaccccgacgacgccgacgctgacatggtagacggcctactcgcgctcctcgctgatgccaaccaagccagcggggaggacgacctccgcttcacccgcgacaacgttagggccatgatgatggacatgttgtttggcgggccggacacggtggggttcaccattgagtgggcgatggcagagatgatgcattgccctgacatccttctgcggctgcagcaggagctcgtcgacattgtggggcttgatcggactgttgacgaatcggaccttggcaagctccccttcctcaagtgtgtcatcaaggagacgctccgaatgcacccaccgatcccgattcacctccacgggaacaccaaagattgcgtcctcggtggctactccgtgcccaggggctcccgtgtctttatcaacgcgtgggcgatcaaccgcgacggcgaggcgtggaaggaccctaacgcgttccggccatcgaggttcatgccagatggggaagccaccgggctggatctcaagggcggctgctacgagctattgtcgttcggttcgggggggcgctcgtgcccagcacaggggcttggccagcacgccgtggagtttgccatcgcgcagcttgtgcatgggttcaactggaagctacccggtgacatgaaaccaacggagctcgacatgagcgacatgaacggtgtcactgtgtcccgcgccacacgactctatgcagttcccacaccccggctcaattgtcctttgtaatattaattagaacatcgagctctttgttgtgacgtattgtaggtggaactacttgccataagattgcgtgtcaggctttagatacaaacacgtggtacacaactacacaccatggaatatggagtgtgcaaccgccttcctcc

SEQ ID NO: 16884 - protein, 526 aa, Triticum aestivum
  peptide (1)..(526): Ceres Seq. ID no. 14307945
  misc_feature (55)..(514): Pfam Name: Pfam Description:  Cytochrome P450
  misc_feature (20)..(526): NCBI GI NO: 27476080 NR Description: Hypothetical protein
  misc_feature (21)..(526): NCBI GI NO: 5731998 NR Description: aldehyde 5-hydroxylase [Liquidambar styraciflua]
  misc_feature (25)..(526): NCBI GI NO: 12578893 NR Description: ferulate-5-hydroxylase [Arabidopsis thaliana]
  misc_feature (25)..(526): NCBI GI NO: 12578901 NR Description: ferulate-5-hydroxylase [Arabidopsis thaliana]
  misc_feature (25)..(526): NCBI GI NO: 15234332 NR Description: cytochrome P450 84A1 / ferulate-5-hydroxylase
  misc_feature (27)..(524): NCBI GI NO: 10197650 NR Description: cytochrome p450-dependent monooxygenase
  misc_feature (32)..(526): NCBI GI NO: 6688937 NR Description: ferulate-5-hydroxylase
  misc_feature (27)..(524): NCBI GI NO: 10197652 NR Description: cytochrome p450-dependent monooxygenase
  misc_feature (32)..(524): NCBI GI NO: 10197654 NR Description: cytochrome p450-dependent monooxygenase
  misc_feature (55)..(526): NCBI GI NO: 5002354 NR Description: ferulate-5-hydroxylase
SLSCNFVRCRLLSMAAFAKIAMECLHDPLIWLLLASVALVILQRRRLKLNPPPLPPGPKPLPIIGNLMMADQLTHRGLAALAKQYGGLLHLRLGSLRVFAVSTPEYAREVLQAQDSDFWYRPASIAVRYLTYGCSDMAFARDGPYWRQMRKLCVTKLFSRRRAETWLAVRDGYGELARAVGRSSGEAVNLGELIFKHTVSIIFRAAFGVRDVQGLDEFIPMFKEFSKLLEAFHVGDFFPWLSWMGRRGFDRRLRTVRGALGTFVDKIIDEHVRRGKNPDDADADMVDGLLALLADANQASGEDDLRFTRDNVRAMMMDMLFGGPDTVGFTIEWAMAEMMHCPDILLRLQQELVDIVGLDRTVDESDLGKLPFLKCVIKETLRMHPPIPIHLHGNTKDCVLGGYSVPRGSRVFINAWAINRDGEAWKDPNAFRPSRFMPDGEATGLDLKGGCYELLSFGSGGRSCPAQGLGQHAVEFAIAQLVHGFNWKLPGDMKPTELDMSDMNGVTVSRATRLYAVPTPRLNCPL

SEQ ID NO: 16885 - protein, 513 aa, Triticum aestivum
  peptide (1)..(513): Ceres Seq. ID no. 14307946
  misc_feature (42)..(501): Pfam Name: Pfam Description:  Cytochrome P450
  misc_feature (7)..(513): NCBI GI NO: 27476080 NR Description: Hypothetical protein
  misc_feature (8)..(513): NCBI GI NO: 5731998 NR Description: aldehyde 5-hydroxylase [Liquidambar styraciflua]
  misc_feature (12)..(513): NCBI GI NO: 12578893 NR Description: ferulate-5-hydroxylase [Arabidopsis thaliana]
  misc_feature (12)..(513): NCBI GI NO: 12578901 NR Description: ferulate-5-hydroxylase [Arabidopsis thaliana]
  misc_feature (12)..(513): NCBI GI NO: 15234332 NR Description: cytochrome P450 84A1 / ferulate-5-hydroxylase
  misc_feature (14)..(511): NCBI GI NO: 10197650 NR Description: cytochrome p450-dependent monooxygenase
  misc_feature (19)..(513): NCBI GI NO: 6688937 NR Description: ferulate-5-hydroxylase
  misc_feature (14)..(511): NCBI GI NO: 10197652 NR Description: cytochrome p450-dependent monooxygenase
  misc_feature (19)..(511): NCBI GI NO: 10197654 NR Description: cytochrome p450-dependent monooxygenase
  misc_feature (42)..(513): NCBI GI NO: 5002354 NR Description: ferulate-5-hydroxylase
MAAFAKIAMECLHDPLIWLLLASVALVILQRRRLKLNPPPLPPGPKPLPIIGNLMMADQLTHRGLAALAKQYGGLLHLRLGSLRVFAVSTPEYAREVLQAQDSDFWYRPASIAVRYLTYGCSDMAFARDGPYWRQMRKLCVTKLFSRRRAETWLAVRDGYGELARAVGRSSGEAVNLGELIFKHTVSIIFRAAFGVRDVQGLDEFIPMFKEFSKLLEAFHVGDFFPWLSWMGRRGFDRRLRTVRGALGTFVDKIIDEHVRRGKNPDDADADMVDGLLALLADANQASGEDDLRFTRDNVRAMMMDMLFGGPDTVGFTIEWAMAEMMHCPDILLRLQQELVDIVGLDRTVDESDLGKLPFLKCVIKETLRMHPPIPIHLHGNTKDCVLGGYSVPRGSRVFINAWAINRDGEAWKDPNAFRPSRFMPDGEATGLDLKGGCYELLSFGSGGRSCPAQGLGQHAVEFAIAQLVHGFNWKLPGDMKPTELDMSDMNGVTVSRATRLYAVPTPRLNCPL

SEQ ID NO: 16886 - protein, 505 aa, Triticum aestivum
  peptide (1)..(505): Ceres Seq. ID no. 14307947
  misc_feature (34)..(493): Pfam Name: Pfam Description:  Cytochrome P450
  misc_feature (1)..(505): NCBI GI NO: 27476080 NR Description: Hypothetical protein
  misc_feature (1)..(505): NCBI GI NO: 5731998 NR Description: aldehyde 5-hydroxylase [Liquidambar styraciflua]
  misc_feature (4)..(505): NCBI GI NO: 12578893 NR Description: ferulate-5-hydroxylase [Arabidopsis thaliana]
  misc_feature (4)..(505): NCBI GI NO: 15234332 NR Description: cytochrome P450 84A1 / ferulate-5-hydroxylase
  misc_feature (4)..(505): NCBI GI NO: 12578901 NR Description: ferulate-5-hydroxylase [Arabidopsis thaliana]
  misc_feature (6)..(503): NCBI GI NO: 10197650 NR Description: cytochrome p450-dependent monooxygenase
  misc_feature (11)..(505): NCBI GI NO: 6688937 NR Description: ferulate-5-hydroxylase
  misc_feature (6)..(503): NCBI GI NO: 10197652 NR Description: cytochrome p450-dependent monooxygenase
  misc_feature (11)..(503): NCBI GI NO: 10197654 NR Description: cytochrome p450-dependent monooxygenase
  misc_feature (34)..(505): NCBI GI NO: 5002354 NR Description: ferulate-5-hydroxylase
MECLHDPLIWLLLASVALVILQRRRLKLNPPPLPPGPKPLPIIGNLMMADQLTHRGLAALAKQYGGLLHLRLGSLRVFAVSTPEYAREVLQAQDSDFWYRPASIAVRYLTYGCSDMAFARDGPYWRQMRKLCVTKLFSRRRAETWLAVRDGYGELARAVGRSSGEAVNLGELIFKHTVSIIFRAAFGVRDVQGLDEFIPMFKEFSKLLEAFHVGDFFPWLSWMGRRGFDRRLRTVRGALGTFVDKIIDEHVRRGKNPDDADADMVDGLLALLADANQASGEDDLRFTRDNVRAMMMDMLFGGPDTVGFTIEWAMAEMMHCPDILLRLQQELVDIVGLDRTVDESDLGKLPFLKCVIKETLRMHPPIPIHLHGNTKDCVLGGYSVPRGSRVFINAWAINRDGEAWKDPNAFRPSRFMPDGEATGLDLKGGCYELLSFGSGGRSCPAQGLGQHAVEFAIAQLVHGFNWKLPGDMKPTELDMSDMNGVTVSRATRLYAVPTPRLNCPL

SEQ ID NO: 16887 - DNA, 1620 bp, Triticum aestivum
  misc_feature (1)..(1620): Ceres Seq. ID no. 14302212
agaacatcctagtcgaaaactcatctcaccagaccgcaccaccccgcctccctcctcgtgccctccgccgccgccgcagcctctgcctcggcctcgaggcctccgcccgccacctccgcgcggccagggctcgagaggcgaccccggtctgcccgcccccgcttccggaacaccccgcccccgccgcaatgcagagcgcggcggccatcgggctcctccggccatgcgccgcgcggcccatcctcaagagccctagccccggggccgcccgcctcccggcctcccgcacggccctccgcctctccgccgccgcgccccgcgcgggcctcgtggcggcggcggggctcggccgcatcgggctcgtgccggcgtcgcctgagcaggagaagaggagcgactgcctcgtggccgccgcggccgcggggaaggcgtcggcgggcgaggaggccgtggaggaaagcggagcagcgctcgccaagacgctccagctcggcgtcttcttcgggctctggtacctcttcaacatctacttcaacatctacaacaagcaggtcctcaaggtttttccttatcccataaacatcacaacagttcagtttgctgttggaactacgatttccttgtttatgtgggccacgggtatccttaaaagaccaaagatttccggtgcacagcttcttgctatcctccctttggctattgtccataccatgggcaatcttttcaccaacatgagccttgggaaggttgcagtgtcatttacacatacaatcaaggccatggagcctttcttctcagttctactttctgcaatgttccttggcgagctgcctactccttgggttgttttgtctcttcttcctattgttggtggtgtggcattggcatctatttctgaagcttcttttaactgggctggatttttgagtgcaatggcttcaaatgtgaccttccagtcaaggaatgtcctcagcaagaagcttatgctgaagaaagaggcatctctggacaacatcaatctcttctcgattattacagtcatgtcattcttccttctagctcctgtaaccttgttgaccgaaggtgttaaggtcactcctacttatctgcagtctgctggtctgaacttacaacaagtgtacacaaggtctttgattgccgcattctgtttccatgcataccaacaggtgtcatacatgatcctcgcaagggtgtcaccagttacccattcggtaggtaactgcgtcaagcgtgtggtggtcattgttacatctgttctgttcttcaagactcctgtgtctccaatcaactctatcggaaccgcgatcgctcttgcgggagttttcctgtactcacaactgaagagacttcagcccaagcccaaggctgcttgattgcattctgttcgtcaggatcaatagagcgttgccactcttggaatcggtgctttagtttagccggacatattgggaagccttgttgagtaactagtaccgtgcaggatcatttgtaattcagtaatgagcattttgaccaggaaagttttgaaatctctttcaccgttctctacttggacgttctagttgccactttaataaaacctccgcagtttgattgtgc

SEQ ID NO: 16888 - protein, 463 aa, Triticum aestivum
  peptide (1)..(463): Ceres Seq. ID no. 14302213
  misc_feature (172)..(297): Pfam Name: Pfam Description:  Integral membrane protein DUF6
  misc_feature (63)..(463): NCBI GI NO: 13991929 NR Description: phosphoenolpyruvate/phosphate translocator
  misc_feature (63)..(463): NCBI GI NO: 7489743 NR Description: glucose-6-phosphate/ phosphate-translocatorprecursor homolog
  misc_feature (63)..(463): NCBI GI NO: 7489742 NR Description: glucose-6-phosphate/ phosphate-translocatorprecursor homolog
  misc_feature (63)..(463): NCBI GI NO: 29647427 NR Description: putative phosphoenolpyruvate/phosphate translocator
  misc_feature (63)..(463): NCBI GI NO: 1706110 NR Description: Triose phosphate/phosphate translocator
  misc_feature (116)..(461): NCBI GI NO: 7489171 NR Description: phosphate/ phosphoenolpyruvate translocator TABPPT10precursor
  misc_feature (125)..(463): NCBI GI NO: 7489170 NR Description: phosphate/ phosphoenolpyruvate translocatorprecursor
  misc_feature (85)..(463): NCBI GI NO: 21554233 NR Description: phosphate/ phosphoenolpyruvate translocatorprecursor
  misc_feature (85)..(463): NCBI GI NO: 15242801 NR Description: triose phosphate/phosphate translocator, putative
  misc_feature (85)..(463): NCBI GI NO: 1778141 NR Description: phosphate/ phosphoenolpyruvate translocatorprecursor
NILVENSSHQTAPPRLPPRALRRRRSLCLGLEASARHLRAARAREATPVCPPPLPEHPAPAAMQSAAAIGLLRPCAARPILKSPSPGAARLPASRTALRLSAAAPRAGLVAAAGLGRIGLVPASPEQEKRSDCLVAAAAAGKASAGEEAVEESGAALAKTLQLGVFFGLWYLFNIYFNIYNKQVLKVFPYPINITTVQFAVGTTISLFMWATGILKRPKISGAQLLAILPLAIVHTMGNLFTNMSLGKVAVSFTHTIKAMEPFFSVLLSAMFLGELPTPWVVLSLLPIVGGVALASISEASFNWAGFLSAMASNVTFQSRNVLSKKLMLKKEASLDNINLFSIITVMSFFLLAPVTLLTEGVKVTPTYLQSAGLNLQQVYTRSLIAAFCFHAYQQVSYMILARVSPVTHSVGNCVKRVVVIVTSVLFFKTPVSPINSIGTAIALAGVFLYSQLKRLQPKPKAA

SEQ ID NO: 16889 - protein, 401 aa, Triticum aestivum
  peptide (1)..(401): Ceres Seq. ID no. 14302214
  misc_feature (110)..(235): Pfam Name: Pfam Description:  Integral membrane protein DUF6
  misc_feature (1)..(401): NCBI GI NO: 13991929 NR Description: phosphoenolpyruvate/phosphate translocator
  misc_feature (1)..(401): NCBI GI NO: 7489743 NR Description: glucose-6-phosphate/ phosphate-translocatorprecursor homolog
  misc_feature (1)..(401): NCBI GI NO: 7489742 NR Description: glucose-6-phosphate/ phosphate-translocatorprecursor homolog
  misc_feature (1)..(401): NCBI GI NO: 29647427 NR Description: putative phosphoenolpyruvate/phosphate translocator
  misc_feature (1)..(401): NCBI GI NO: 1706110 NR Description: Triose phosphate/phosphate translocator
  misc_feature (54)..(399): NCBI GI NO: 7489171 NR Description: phosphate/ phosphoenolpyruvate translocator TABPPT10precursor
  misc_feature (63)..(401): NCBI GI NO: 7489170 NR Description: phosphate/ phosphoenolpyruvate translocatorprecursor
  misc_feature (23)..(401): NCBI GI NO: 21554233 NR Description: phosphate/ phosphoenolpyruvate translocatorprecursor
  misc_feature (23)..(401): NCBI GI NO: 15242801 NR Description: triose phosphate/phosphate translocator, putative
  misc_feature (23)..(401): NCBI GI NO: 1778141 NR Description: phosphate/ phosphoenolpyruvate translocatorprecursor
MQSAAAIGLLRPCAARPILKSPSPGAARLPASRTALRLSAAAPRAGLVAAAGLGRIGLVPASPEQEKRSDCLVAAAAAGKASAGEEAVEESGAALAKTLQLGVFFGLWYLFNIYFNIYNKQVLKVFPYPINITTVQFAVGTTISLFMWATGILKRPKISGAQLLAILPLAIVHTMGNLFTNMSLGKVAVSFTHTIKAMEPFFSVLLSAMFLGELPTPWVVLSLLPIVGGVALASISEASFNWAGFLSAMASNVTFQSRNVLSKKLMLKKEASLDNINLFSIITVMSFFLLAPVTLLTEGVKVTPTYLQSAGLNLQQVYTRSLIAAFCFHAYQQVSYMILARVSPVTHSVGNCVKRVVVIVTSVLFFKTPVSPINSIGTAIALAGVFLYSQLKRLQPKPKAA

SEQ ID NO: 16890 - protein, 255 aa, Triticum aestivum
  peptide (1)..(255): Ceres Seq. ID no. 14302215
  misc_feature (1)..(89): Pfam Name: Pfam Description:  Integral membrane protein DUF6
  misc_feature (1)..(255): NCBI GI NO: 13991929 NR Description: phosphoenolpyruvate/phosphate translocator
  misc_feature (1)..(255): NCBI GI NO: 7489743 NR Description: glucose-6-phosphate/ phosphate-translocatorprecursor homolog
  misc_feature (1)..(255): NCBI GI NO: 7489742 NR Description: glucose-6-phosphate/ phosphate-translocatorprecursor homolog
  misc_feature (1)..(255): NCBI GI NO: 29647427 NR Description: putative phosphoenolpyruvate/phosphate translocator
  misc_feature (1)..(255): NCBI GI NO: 1706110 NR Description: Triose phosphate/phosphate translocator
  misc_feature (1)..(253): NCBI GI NO: 7489171 NR Description: phosphate/ phosphoenolpyruvate translocator TABPPT10precursor
  misc_feature (1)..(255): NCBI GI NO: 7489170 NR Description: phosphate/ phosphoenolpyruvate translocatorprecursor
  misc_feature (1)..(255): NCBI GI NO: 21554233 NR Description: phosphate/ phosphoenolpyruvate translocatorprecursor
  misc_feature (1)..(255): NCBI GI NO: 15242801 NR Description: triose phosphate/phosphate translocator, putative
  misc_feature (1)..(255): NCBI GI NO: 1778141 NR Description: phosphate/ phosphoenolpyruvate translocatorprecursor
MWATGILKRPKISGAQLLAILPLAIVHTMGNLFTNMSLGKVAVSFTHTIKAMEPFFSVLLSAMFLGELPTPWVVLSLLPIVGGVALASISEASFNWAGFLSAMASNVTFQSRNVLSKKLMLKKEASLDNINLFSIITVMSFFLLAPVTLLTEGVKVTPTYLQSAGLNLQQVYTRSLIAAFCFHAYQQVSYMILARVSPVTHSVGNCVKRVVVIVTSVLFFKTPVSPINSIGTAIALAGVFLYSQLKRLQPKPKAA

SEQ ID NO: 16891 - DNA, 2475 bp, Triticum aestivum
  misc_feature (1)..(2475): Ceres Seq. ID no. 13658778
atctccttgagcggtttggcactctgactcgatcttgtctcttggactagcttgccgccggcggcacaagattcgccttttcttcttcttcttgttccgcgctctgctgtccatcgcgcaaggggaataatggcgacgaagccttcgcaggacgcgccgctcccgctccacaccgtgcaaacggaccagcccctcgccaccgtcaaccggctcctcgccgccgtccacctggcgctcggcgcggcagccatcgcccaccgcggcgcccacgtgatgctggcggccgacctggtcctcctcttcctgtgggcgctgtcgcaggcgcccatgtggcgccccgtgtcccgcaccgccttcccgtcccggctctcgcgcgccgccctcccggccgtggacgtgatggtggtgacggccgacccggagaaggagcccgcggcgaaggtgatgaacacggtggtctccgccatggcgctcgactacccgggcgggcggctgagcgtgtacctctccgacgacgccgggtcaccgcggacgctgctcgccgccaggaaggcctacgccttcgccagggcctgggtgcccttctgcaggaagtacggcgtgcggtgcccgtgccccgacaggttcttcgccggcgatgacaagctcgacctcggtagtcaccaccaccacgagctcgccgacgacaggctaagaatcaagaatatgtacgagacgttcaatgagggtgtccgggaggtgatgagcgacgcagatctttctcagagktgcacaaaagcagatcacgatgctcacgtcgagatcatcaccggcgatgagcaagacagcagcaacagcaactccggcgacggcgaggaggatgaggacgccatgcccttgctggtctacgtgtctcgcgagaagcggaggtcgtcgactcaccacttcaaagccggcgcactcaacgtccttctccgtgtgtcgagcctgttgagcaactcgccgtacgtgatggtgctggactgcgacatgtactgcaacagccggagctccatcctcgaggccatgtgcttccacctcgacggccgccgccgcgccgatctcgccttcgtgcagttccctcagatgttccacaacctcagcagcagcgacatctacgccaacgagctcagatccatcttctggacgcggtggaaaggcttggatggcctccggggcccgatcctctccggcaccggcttctgcgccaggagagacgccatctacggcgcccggccggccagctcgcaagatcagttctccggtgtggaggtcggcgagcttaagagaaggtttggcgtctcgaatggtcacatagcgtcgctgcgccgatccgggaccgggagcaccattgttgcacgtgatgctctcccacaggaggatgcagagttggtggcgtcctgcgcttacgagacgggcaccgaatggggcgagcaggtcggcttcttgtaccagtcggtggtggaggactacttcacgggctaccggcagctctactgccgagggtggacgtccgtctactgcttcccggcggcggcgtcgaggccgccgttcctcggcagcgtgcccaccaacctcaacgacgcgctggtgcagaacaagcggtggatgtccggcatgctcgccgtcggcctgtccaggcactgccccctcgcctccgccgccatctgcgtgcctcagagcatgggcttcgcctactacgccttcatggccctgtacgccttccccgtgctctgctacgccaccgtgccgcagctctgcttcctccgcggcggcacgtcgttcccaggggcggcttcgacgctctggttcgccgccgtgttcgcgtcgtcgtcgctgcagcacctggtggaggtgtcggtggccaagcgtgggctggcgttgaggacgtggtggaacgagcagaggttctgggcgctcaacgccgtcacgggccagctcttcgcctgcctcggcgtcgccctcaacctggtcggcgccggcggccgggcggtggacttcgacctcaccagcaaggcgtccgacgacaggctctaccgggatggcgtgttcgacttcgccggatgcaccacgctgctcctgccggccaccacgctctgcctgctcaacgccgcggcgctcgtcggcggggtctggaagatggtcggcaggggcggcagcgtgtccggcgagctgttcctcctctgctacgtcgcggcgctgagctatccgctgctgcaagggatgttcctcaggcgggatcccgcaagagttcctgcgccgatcacggcgatgtccgtcgccatggttgccgctctgctgtccttgtttggttaaggcggccactttcattccagagagtttgagtgacacctaagataccttgatactcctaccagtttggtttgattcatccaagcttccaaataccgtgcatatatgagcagaaaagacaagaataaaacggcattttttttt

SEQ ID NO: 16892 - protein, 734 aa, Triticum aestivum
  peptide (1)..(734): Ceres Seq. ID no. 15219919
  misc_feature (48)..(373): Pfam Name: Pfam Description:  Cellulose synthase
  misc_feature (414)..(734): NCBI GI NO: 30686386 NR Description: cellulose synthase - related
  misc_feature (48)..(373): NCBI GI NO: 30686386 NR Description: cellulose synthase - related
  misc_feature (48)..(373): NCBI GI NO: 2262115 NR Description: cellulose synthase isolog [Arabidopsis thaliana]
  misc_feature (414)..(734): NCBI GI NO: 2262115 NR Description: cellulose synthase isolog [Arabidopsis thaliana]
  misc_feature (380)..(732): NCBI GI NO: 21954719 NR Description: cellulose synthase catalytic subunit
  misc_feature (60)..(380): NCBI GI NO: 21954719 NR Description: cellulose synthase catalytic subunit
  misc_feature (48)..(730): NCBI GI NO: 2262116 NR Description: cellulose synthase isolog [Arabidopsis thaliana]
  misc_feature (1)..(373): NCBI GI NO: 16519227 NR Description: cellulose synthase-like protein OsCslE2
  misc_feature (422)..(732): NCBI GI NO: 16519227 NR Description: cellulose synthase-like protein OsCslE2
  misc_feature (390)..(732): NCBI GI NO: 37781495 NR Description: cellulose synthase 6 [Populus tremuloides]
  misc_feature (213)..(213): Xaa is any aa, unknown or other
MATKPSQDAPLPLHTVQTDQPLATVNRLLAAVHLALGAAAIAHRGAHVMLAADLVLLFLWALSQAPMWRPVSRTAFPSRLSRAALPAVDVMVVTADPEKEPAAKVMNTVVSAMALDYPGGRLSVYLSDDAGSPRTLLAARKAYAFARAWVPFCRKYGVRCPCPDRFFAGDDKLDLGSHHHHELADDRLRIKNMYETFNEGVREVMSDADLSQXCTKADHDAHVEIITGDEQDSSNSNSGDGEEDEDAMPLLVYVSREKRRSSTHHFKAGALNVLLRVSSLLSNSPYVMVLDCDMYCNSRSSILEAMCFHLDGRRRADLAFVQFPQMFHNLSSSDIYANELRSIFWTRWKGLDGLRGPILSGTGFCARRDAIYGARPASSQDQFSGVEVGELKRRFGVSNGHIASLRRSGTGSTIVARDALPQEDAELVASCAYETGTEWGEQVGFLYQSVVEDYFTGYRQLYCRGWTSVYCFPAAASRPPFLGSVPTNLNDALVQNKRWMSGMLAVGLSRHCPLASAAICVPQSMGFAYYAFMALYAFPVLCYATVPQLCFLRGGTSFPGAASTLWFAAVFASSSLQHLVEVSVAKRGLALRTWWNEQRFWALNAVTGQLFACLGVALNLVGAGGRAVDFDLTSKASDDRLYRDGVFDFAGCTTLLLPATTLCLLNAAALVGGVWKMVGRGGSVSGELFLLCYVAALSYPLLQGMFLRRDPARVPAPITAMSVAMVAALLSLFG

SEQ ID NO: 16893 - protein, 686 aa, Triticum aestivum
  peptide (1)..(686): Ceres Seq. ID no. 15219920
  misc_feature (1)..(325): Pfam Name: Pfam Description:  Cellulose synthase
  misc_feature (366)..(686): NCBI GI NO: 30686386 NR Description: cellulose synthase - related
  misc_feature (1)..(325): NCBI GI NO: 30686386 NR Description: cellulose synthase - related
  misc_feature (1)..(325): NCBI GI NO: 2262115 NR Description: cellulose synthase isolog [Arabidopsis thaliana]
  misc_feature (366)..(686): NCBI GI NO: 2262115 NR Description: cellulose synthase isolog [Arabidopsis thaliana]
  misc_feature (332)..(684): NCBI GI NO: 21954719 NR Description: cellulose synthase catalytic subunit
  misc_feature (12)..(332): NCBI GI NO: 21954719 NR Description: cellulose synthase catalytic subunit
  misc_feature (1)..(682): NCBI GI NO: 2262116 NR Description: cellulose synthase isolog [Arabidopsis thaliana]
  misc_feature (1)..(325): NCBI GI NO: 16519227 NR Description: cellulose synthase-like protein OsCslE2
  misc_feature (374)..(684): NCBI GI NO: 16519227 NR Description: cellulose synthase-like protein OsCslE2
  misc_feature (342)..(684): NCBI GI NO: 37781495 NR Description: cellulose synthase 6 [Populus tremuloides]
  misc_feature (165)..(165): Xaa is any aa, unknown or other
MLAADLVLLFLWALSQAPMWRPVSRTAFPSRLSRAALPAVDVMVVTADPEKEPAAKVMNTVVSAMALDYPGGRLSVYLSDDAGSPRTLLAARKAYAFARAWVPFCRKYGVRCPCPDRFFAGDDKLDLGSHHHHELADDRLRIKNMYETFNEGVREVMSDADLSQXCTKADHDAHVEIITGDEQDSSNSNSGDGEEDEDAMPLLVYVSREKRRSSTHHFKAGALNVLLRVSSLLSNSPYVMVLDCDMYCNSRSSILEAMCFHLDGRRRADLAFVQFPQMFHNLSSSDIYANELRSIFWTRWKGLDGLRGPILSGTGFCARRDAIYGARPASSQDQFSGVEVGELKRRFGVSNGHIASLRRSGTGSTIVARDALPQEDAELVASCAYETGTEWGEQVGFLYQSVVEDYFTGYRQLYCRGWTSVYCFPAAASRPPFLGSVPTNLNDALVQNKRWMSGMLAVGLSRHCPLASAAICVPQSMGFAYYAFMALYAFPVLCYATVPQLCFLRGGTSFPGAASTLWFAAVFASSSLQHLVEVSVAKRGLALRTWWNEQRFWALNAVTGQLFACLGVALNLVGAGGRAVDFDLTSKASDDRLYRDGVFDFAGCTTLLLPATTLCLLNAAALVGGVWKMVGRGGSVSGELFLLCYVAALSYPLLQGMFLRRDPARVPAPITAMSVAMVAALLSLFG

SEQ ID NO: 16894 - protein, 668 aa, Triticum aestivum
  peptide (1)..(668): Ceres Seq. ID no. 15219921
  misc_feature (1)..(307): Pfam Name: Pfam Description:  Cellulose synthase
  misc_feature (348)..(668): NCBI GI NO: 30686386 NR Description: cellulose synthase - related
  misc_feature (1)..(307): NCBI GI NO: 30686386 NR Description: cellulose synthase - related
  misc_feature (1)..(307): NCBI GI NO: 2262115 NR Description: cellulose synthase isolog [Arabidopsis thaliana]
  misc_feature (348)..(668): NCBI GI NO: 2262115 NR Description: cellulose synthase isolog [Arabidopsis thaliana]
  misc_feature (314)..(666): NCBI GI NO: 21954719 NR Description: cellulose synthase catalytic subunit
  misc_feature (1)..(314): NCBI GI NO: 21954719 NR Description: cellulose synthase catalytic subunit
  misc_feature (1)..(664): NCBI GI NO: 2262116 NR Description: cellulose synthase isolog [Arabidopsis thaliana]
  misc_feature (1)..(307): NCBI GI NO: 16519227 NR Description: cellulose synthase-like protein OsCslE2
  misc_feature (356)..(666): NCBI GI NO: 16519227 NR Description: cellulose synthase-like protein OsCslE2
  misc_feature (324)..(666): NCBI GI NO: 37781495 NR Description: cellulose synthase 6 [Populus tremuloides]
  misc_feature (147)..(147): Xaa is any aa, unknown or other
MWRPVSRTAFPSRLSRAALPAVDVMVVTADPEKEPAAKVMNTVVSAMALDYPGGRLSVYLSDDAGSPRTLLAARKAYAFARAWVPFCRKYGVRCPCPDRFFAGDDKLDLGSHHHHELADDRLRIKNMYETFNEGVREVMSDADLSQXCTKADHDAHVEIITGDEQDSSNSNSGDGEEDEDAMPLLVYVSREKRRSSTHHFKAGALNVLLRVSSLLSNSPYVMVLDCDMYCNSRSSILEAMCFHLDGRRRADLAFVQFPQMFHNLSSSDIYANELRSIFWTRWKGLDGLRGPILSGTGFCARRDAIYGARPASSQDQFSGVEVGELKRRFGVSNGHIASLRRSGTGSTIVARDALPQEDAELVASCAYETGTEWGEQVGFLYQSVVEDYFTGYRQLYCRGWTSVYCFPAAASRPPFLGSVPTNLNDALVQNKRWMSGMLAVGLSRHCPLASAAICVPQSMGFAYYAFMALYAFPVLCYATVPQLCFLRGGTSFPGAASTLWFAAVFASSSLQHLVEVSVAKRGLALRTWWNEQRFWALNAVTGQLFACLGVALNLVGAGGRAVDFDLTSKASDDRLYRDGVFDFAGCTTLLLPATTLCLLNAAALVGGVWKMVGRGGSVSGELFLLCYVAALSYPLLQGMFLRRDPARVPAPITAMSVAMVAALLSLFG

SEQ ID NO: 16895 - DNA, 1384 bp, Triticum aestivum
  misc_feature (1)..(1384): Ceres Seq. ID no. 13658295
agaacatcctawtcgammmacacccgaccaactctcgctcactcgccggagggaaacagagcaaagatgaccacggcggcggcggcgacgacgatgcgtctgtcttccccgttcaaggccccgcctctccgtcctccctgccaccgcgtcgtcccgtcgaggcggggccccgggcgggccgggctggccgtctcggcggccgccggcgggtcgccccccaccgtgctcgtcaccggcgccggaggacgaacaggccaaattgtgtacaagaagctgaaggagaaggcagaccagtttgtggccagagggctggtcaggacgccggacagcaaatctaagatcgatgggggcgacgacgtgttcatcggagacattagggatcctgggagcattgcgccggcgatcgacggcattgacgcgctcatcatcctcaccagtggggtcccgaagatgaagccagggtttgatcctagcaaagggggtcggcccgagttttacttcgaggaagggtctgatcctgagcaggtggattggataggccaaaagaaccaaatcgacgctgccaagagcattggtgtaaagcagatagttttggttggatccatgggtggaacagatctcaaccatccattaaacaagcttgggaatgggaatatactggtgtggaaacggaaggcagaacagtacctagcggactctggtgtaccatatacaattataagggctggaggactacaagacaaagatggtggtgtgcgtgagttgattgttggaaaggatgacgagatcttgaagacggaaacaaaaactattgccagggcagatgttgcagaagtttgcatacaggccttgctatttgaggaagcaaagttcaaggcatttgatctggcttcaaaacctgaaggtgaaggaacaccgacgacagattttaagtctgtttttgcacaaattgctactcgcttctaagaagacaagatcattctggccaatgaaatggggacagttttttaattaggcgatatggaatttgtaccgggtcaggaggctcctcatctgatcaagtagcaaaagtagggaagcatgcaccttgttattgagcagaagaagcagcagatcgttgtgctttgagagaagagttctgaggatttgggctatgaaagaagagtagtgagactggtgttgatgtaaactatttttttttcttcttgttgctttgttcccaacgtcggacatggtaattgtgacagagaatgagtctagattaccgcagttattgcggcgattagttctaggctagacgtataaaaaattgtttattaggaacgcttgcctgggtttcaacattaatacggttcctaattgaattgataaaaaaatctgaggt

SEQ ID NO: 16896 - protein, 321 aa, Triticum aestivum
  peptide (1)..(321): Ceres Seq. ID no. 15219896
  misc_feature (75)..(149): Pfam Name: Pfam Description:  Isoflavone reductase
  misc_feature (30)..(321): NCBI GI NO: 14719331 NR Description: putative 3-beta hydroxysteroiddehydrogenase/isomerase protein
  misc_feature (59)..(321): NCBI GI NO: 18404496 NR Description: expressed protein [Arabidopsis thaliana]
  misc_feature (59)..(321): NCBI GI NO: 7485430 NR Description: hypothetical protein At2g37660
  misc_feature (66)..(321): NCBI GI NO: 34897418 NR Description: unknown protein
  misc_feature (73)..(321): NCBI GI NO: 18413869 NR Description: expressed protein [Arabidopsis thaliana]
  misc_feature (73)..(316): NCBI GI NO: 11358410 NR Description: hypothetical protein T7H20
  misc_feature (160)..(317): NCBI GI NO: 16330694 NR Description: hypothetical protein [Synechocystis sp. PCC 6803]
  misc_feature (65)..(314): NCBI GI NO: 30689062 NR Description: expressed protein [Arabidopsis thaliana]
  misc_feature (174)..(307): NCBI GI NO: 37523053 NR Description: hypothetical protein gll3484
  misc_feature (69)..(319): NCBI GI NO: 17230395 NR Description: hypothetical protein [Nostoc sp. PCC 7120]
  misc_feature (4)..(4): Xaa is any aa, unknown or other
  misc_feature (6)..(6): Xaa is any aa, unknown or other
  misc_feature (7)..(7): Xaa is any aa, unknown or other
RTSXSXXTRPTLAHSPEGNRAKMTTAAAATTMRLSSPFKAPPLRPPCHRVVPSRRGPGRAGLAVSAAAGGSPPTVLVTGAGGRTGQIVYKKLKEKADQFVARGLVRTPDSKSKIDGGDDVFIGDIRDPGSIAPAIDGIDALIILTSGVPKMKPGFDPSKGGRPEFYFEEGSDPEQVDWIGQKNQIDAAKSIGVKQIVLVGSMGGTDLNHPLNKLGNGNILVWKRKAEQYLADSGVPYTIIRAGGLQDKDGGVRELIVGKDDEILKTETKTIARADVAEVCIQALLFEEAKFKAFDLASKPEGEGTPTTDFKSVFAQIATRF

SEQ ID NO: 16897 - protein, 299 aa, Triticum aestivum
  peptide (1)..(299): Ceres Seq. ID no. 15219897
  misc_feature (53)..(127): Pfam Name: Pfam Description:  Isoflavone reductase
  misc_feature (8)..(299): NCBI GI NO: 14719331 NR Description: putative 3-beta hydroxysteroiddehydrogenase/isomerase protein
  misc_feature (37)..(299): NCBI GI NO: 18404496 NR Description: expressed protein [Arabidopsis thaliana]
  misc_feature (37)..(299): NCBI GI NO: 7485430 NR Description: hypothetical protein At2g37660
  misc_feature (44)..(299): NCBI GI NO: 34897418 NR Description: unknown protein
  misc_feature (51)..(299): NCBI GI NO: 18413869 NR Description: expressed protein [Arabidopsis thaliana]
  misc_feature (51)..(294): NCBI GI NO: 11358410 NR Description: hypothetical protein T7H20
  misc_feature (138)..(295): NCBI GI NO: 16330694 NR Description: hypothetical protein [Synechocystis sp. PCC 6803]
  misc_feature (43)..(292): NCBI GI NO: 30689062 NR Description: expressed protein [Arabidopsis thaliana]
  misc_feature (152)..(285): NCBI GI NO: 37523053 NR Description: hypothetical protein gll3484
  misc_feature (47)..(297): NCBI GI NO: 17230395 NR Description: hypothetical protein [Nostoc sp. PCC 7120]
MTTAAAATTMRLSSPFKAPPLRPPCHRVVPSRRGPGRAGLAVSAAAGGSPPTVLVTGAGGRTGQIVYKKLKEKADQFVARGLVRTPDSKSKIDGGDDVFIGDIRDPGSIAPAIDGIDALIILTSGVPKMKPGFDPSKGGRPEFYFEEGSDPEQVDWIGQKNQIDAAKSIGVKQIVLVGSMGGTDLNHPLNKLGNGNILVWKRKAEQYLADSGVPYTIIRAGGLQDKDGGVRELIVGKDDEILKTETKTIARADVAEVCIQALLFEEAKFKAFDLASKPEGEGTPTTDFKSVFAQIATRF

SEQ ID NO: 16898 - protein, 290 aa, Triticum aestivum
  peptide (1)..(290): Ceres Seq. ID no. 15219898
  misc_feature (44)..(118): Pfam Name: Pfam Description:  Isoflavone reductase
  misc_feature (1)..(290): NCBI GI NO: 14719331 NR Description: putative 3-beta hydroxysteroiddehydrogenase/isomerase protein
  misc_feature (28)..(290): NCBI GI NO: 18404496 NR Description: expressed protein [Arabidopsis thaliana]
  misc_feature (28)..(290): NCBI GI NO: 7485430 NR Description: hypothetical protein At2g37660
  misc_feature (35)..(290): NCBI GI NO: 34897418 NR Description: unknown protein
  misc_feature (42)..(290): NCBI GI NO: 18413869 NR Description: expressed protein [Arabidopsis thaliana]
  misc_feature (42)..(285): NCBI GI NO: 11358410 NR Description: hypothetical protein T7H20
  misc_feature (129)..(286): NCBI GI NO: 16330694 NR Description: hypothetical protein [Synechocystis sp. PCC 6803]
  misc_feature (34)..(283): NCBI GI NO: 30689062 NR Description: expressed protein [Arabidopsis thaliana]
  misc_feature (143)..(276): NCBI GI NO: 37523053 NR Description: hypothetical protein gll3484
  misc_feature (38)..(288): NCBI GI NO: 17230395 NR Description: hypothetical protein [Nostoc sp. PCC 7120]
MRLSSPFKAPPLRPPCHRVVPSRRGPGRAGLAVSAAAGGSPPTVLVTGAGGRTGQIVYKKLKEKADQFVARGLVRTPDSKSKIDGGDDVFIGDIRDPGSIAPAIDGIDALIILTSGVPKMKPGFDPSKGGRPEFYFEEGSDPEQVDWIGQKNQIDAAKSIGVKQIVLVGSMGGTDLNHPLNKLGNGNILVWKRKAEQYLADSGVPYTIIRAGGLQDKDGGVRELIVGKDDEILKTETKTIARADVAEVCIQALLFEEAKFKAFDLASKPEGEGTPTTDFKSVFAQIATRF

SEQ ID NO: 16899 - DNA, 2001 bp, Triticum aestivum
  misc_feature (1)..(2001): Ceres Seq. ID no. 14301550
accgacaggattcgccgccgcgccaccccggagctcccgcccaggctcgccgcctcatcgtccgtcatccgccttgtggccgcgggagcacagacctcgccaaaacatccatccggggtcccggctgccggccaggtcgatcgcctcccctctcctccgaaatcgttccccaccaaaacatctctcgtcgccgccacgctccacgtccaggcaggatgcgctgcctccgccgcgcgggcgcggccgcccacctgctccgctccgcgacgaccggccccgccaagcacgctcgcacggccctcgagcagatgcctccgccgcctgccgccttcccatgtcgcgcgcgcgcccaccacctgctcggaggaatgcgcggccagtggctctgcacggcgacggggtccaccggcgcccccgacctcgccgtggaccagcacttcaccgtggtgcctggcctaggccccgatgtctccgaggtggcggggctcaccggcgcccacgatcttgccgtggaccaggacttcacagtggtgcctggcccaggcctcgatgtctccaaggaggcggagagggtctgccgcgtgctgtccaccgtgccggagccgagggttgcatcagccctcgacgcgctcggggcctctgtgtcgcctcagctcgtggcggaggtgctcaagaacctgagcaacgctggcatcctcgccctcgccttcttccggtgggcggagaggcagcaaggcttcgtgtacacggcggagagcttccacaacctcatcgaagcgctcggcaagatcaagcagttcaggctggtctggagcctggtggaggccatgcggtgccgcggcttgctttccaaggacacgttcaggctcatcgtcaggaggtacgccagggcaaggaaggtcaaggaagctgtcgagacgtttgagaagatggccggcttcgggctcaaagcagacttatcagattacaattggttgatcgacgtgctgagcaaatccaagcaagtcaagaaggcgcaagccatcttcaaggagatgaagaggaacggaaagtttgttcccgatttgaagacctacactgtcctcatggaaggctggggccatgagaaggacttgctgatgcttaagtcggtgtaccaagaaatgctcgatgcaggcctgaagcctgatgtcgtggcatacgggatgctcattagttccttttgcaagtctggcaaatgtgatgaggccatcaaggtgttctgtgagatggaagccaatggttgcatgccaagccctcatgtgtattgcatgcttatcaatgggcttggctcagaggagaggctggatgaggctttgaagtattttgagctttctaaggccagtgggtttcccatggaggtacctacatgtaatgcagttgttggggcttactgcagagcctcaaaattccagcatgccttcaagatggtcgatgagatgagaaagagtggaatcggtccaaattcccggacttatgatattattcttcaccatcttataaagtctcagaagatagaagaggcttataatgtgttccagggaatgggcaaggatggctgtgaacctcagctcaacacatatacaatgatggttagtatgttctgcagtaatgaaagggttgatgtggccttgaaggtgtggaaccaaatgaaggagaagggtgttctgccatgtatgcacatgttttctgcattgatcaacgggttatgctttgagaacaggctggaagaagcttgcgtatatttccaggagatgttggacaaagggatcaggccacctggtcagcttttcagtaatttaaaggaagctcttattgagggaggaagaattagtctggcacaggagatggctttgaagttggatggattacggaaaacacctatgcgtcgttgaggaatcatgcaaataatctgttgcagcagcatatggcttttggctgttagaagctcagtcaaaattgtggtaacaaagaaaacttcag

SEQ ID NO: 16900 - protein, 636 aa, Triticum aestivum
  peptide (1)..(636): Ceres Seq. ID no. 14301551
  misc_feature (566)..(600): Pfam Name: Pfam Description:  PPR repeat
  misc_feature (183)..(634): NCBI GI NO: 15223927 NR Description: pentatricopeptide (PPR) repeat-containing protein
  misc_feature (182)..(634): NCBI GI NO: 14488357 NR Description: unknown protein
  misc_feature (183)..(634): NCBI GI NO: 15223926 NR Description: pentatricopeptide (PPR) repeat-containing protein
  misc_feature (187)..(622): NCBI GI NO: 15229604 NR Description: expressed protein [Arabidopsis thaliana]
  misc_feature (186)..(623): NCBI GI NO: 15228767 NR Description: pentatricopeptide (PPR) repeat-containing protein
  misc_feature (186)..(623): NCBI GI NO: 15228788 NR Description: pentatricopeptide (PPR) repeat-containing protein
  misc_feature (186)..(623): NCBI GI NO: 15241508 NR Description: pentatricopeptide (PPR) repeat-containing protein
  misc_feature (180)..(627): NCBI GI NO: 15219049 NR Description: hypothetical protein [Arabidopsis thaliana]
  misc_feature (183)..(622): NCBI GI NO: 15239161 NR Description: pentatricopeptide (PPR) repeat-containing protein
  misc_feature (133)..(610): NCBI GI NO: 21686921 NR Description: putative reverse transcriptase
RQDSPPRHPGAPAQARRLIVRHPPCGRGSTDLAKTSIRGPGCRPGRSPPLSSEIVPHQNISRRRHAPRPGRMRCLRRAGAAAHLLRSATTGPAKHARTALEQMPPPPAAFPCRARAHHLLGGMRGQWLCTATGSTGAPDLAVDQHFTVVPGLGPDVSEVAGLTGAHDLAVDQDFTVVPGPGLDVSKEAERVCRVLSTVPEPRVASALDALGASVSPQLVAEVLKNLSNAGILALAFFRWAERQQGFVYTAESFHNLIEALGKIKQFRLVWSLVEAMRCRGLLSKDTFRLIVRRYARARKVKEAVETFEKMAGFGLKADLSDYNWLIDVLSKSKQVKKAQAIFKEMKRNGKFVPDLKTYTVLMEGWGHEKDLLMLKSVYQEMLDAGLKPDVVAYGMLISSFCKSGKCDEAIKVFCEMEANGCMPSPHVYCMLINGLGSEERLDEALKYFELSKASGFPMEVPTCNAVVGAYCRASKFQHAFKMVDEMRKSGIGPNSRTYDIILHHLIKSQKIEEAYNVFQGMGKDGCEPQLNTYTMMVSMFCSNERVDVALKVWNQMKEKGVLPCMHMFSALINGLCFENRLEEACVYFQEMLDKGIRPPGQLFSNLKEALIEGGRISLAQEMALKLDGLRKTPMRR

SEQ ID NO: 16901 - protein, 565 aa, Triticum aestivum
  peptide (1)..(565): Ceres Seq. ID no. 14301552
  misc_feature (495)..(529): Pfam Name: Pfam Description:  PPR repeat
  misc_feature (112)..(563): NCBI GI NO: 15223927 NR Description: pentatricopeptide (PPR) repeat-containing protein
  misc_feature (111)..(563): NCBI GI NO: 14488357 NR Description: unknown protein
  misc_feature (112)..(563): NCBI GI NO: 15223926 NR Description: pentatricopeptide (PPR) repeat-containing protein
  misc_feature (116)..(551): NCBI GI NO: 15229604 NR Description: expressed protein [Arabidopsis thaliana]
  misc_feature (115)..(552): NCBI GI NO: 15228767 NR Description: pentatricopeptide (PPR) repeat-containing protein
  misc_feature (115)..(552): NCBI GI NO: 15228788 NR Description: pentatricopeptide (PPR) repeat-containing protein
  misc_feature (115)..(552): NCBI GI NO: 15241508 NR Description: pentatricopeptide (PPR) repeat-containing protein
  misc_feature (109)..(556): NCBI GI NO: 15219049 NR Description: hypothetical protein [Arabidopsis thaliana]
  misc_feature (112)..(551): NCBI GI NO: 15239161 NR Description: pentatricopeptide (PPR) repeat-containing protein
  misc_feature (62)..(539): NCBI GI NO: 21686921 NR Description: putative reverse transcriptase
MRCLRRAGAAAHLLRSATTGPAKHARTALEQMPPPPAAFPCRARAHHLLGGMRGQWLCTATGSTGAPDLAVDQHFTVVPGLGPDVSEVAGLTGAHDLAVDQDFTVVPGPGLDVSKEAERVCRVLSTVPEPRVASALDALGASVSPQLVAEVLKNLSNAGILALAFFRWAERQQGFVYTAESFHNLIEALGKIKQFRLVWSLVEAMRCRGLLSKDTFRLIVRRYARARKVKEAVETFEKMAGFGLKADLSDYNWLIDVLSKSKQVKKAQAIFKEMKRNGKFVPDLKTYTVLMEGWGHEKDLLMLKSVYQEMLDAGLKPDVVAYGMLISSFCKSGKCDEAIKVFCEMEANGCMPSPHVYCMLINGLGSEERLDEALKYFELSKASGFPMEVPTCNAVVGAYCRASKFQHAFKMVDEMRKSGIGPNSRTYDIILHHLIKSQKIEEAYNVFQGMGKDGCEPQLNTYTMMVSMFCSNERVDVALKVWNQMKEKGVLPCMHMFSALINGLCFENRLEEACVYFQEMLDKGIRPPGQLFSNLKEALIEGGRISLAQEMALKLDGLRKTPMRR

SEQ ID NO: 16902 - protein, 534 aa, Triticum aestivum
  peptide (1)..(534): Ceres Seq. ID no. 14301553
  misc_feature (464)..(498): Pfam Name: Pfam Description:  PPR repeat
  misc_feature (81)..(532): NCBI GI NO: 15223927 NR Description: pentatricopeptide (PPR) repeat-containing protein
  misc_feature (80)..(532): NCBI GI NO: 14488357 NR Description: unknown protein
  misc_feature (81)..(532): NCBI GI NO: 15223926 NR Description: pentatricopeptide (PPR) repeat-containing protein
  misc_feature (85)..(520): NCBI GI NO: 15229604 NR Description: expressed protein [Arabidopsis thaliana]
  misc_feature (84)..(521): NCBI GI NO: 15228767 NR Description: pentatricopeptide (PPR) repeat-containing protein
  misc_feature (84)..(521): NCBI GI NO: 15228788 NR Description: pentatricopeptide (PPR) repeat-containing protein
  misc_feature (84)..(521): NCBI GI NO: 15241508 NR Description: pentatricopeptide (PPR) repeat-containing protein
  misc_feature (78)..(525): NCBI GI NO: 15219049 NR Description: hypothetical protein [Arabidopsis thaliana]
  misc_feature (81)..(520): NCBI GI NO: 15239161 NR Description: pentatricopeptide (PPR) repeat-containing protein
  misc_feature (31)..(508): NCBI GI NO: 21686921 NR Description: putative reverse transcriptase
MPPPPAAFPCRARAHHLLGGMRGQWLCTATGSTGAPDLAVDQHFTVVPGLGPDVSEVAGLTGAHDLAVDQDFTVVPGPGLDVSKEAERVCRVLSTVPEPRVASALDALGASVSPQLVAEVLKNLSNAGILALAFFRWAERQQGFVYTAESFHNLIEALGKIKQFRLVWSLVEAMRCRGLLSKDTFRLIVRRYARARKVKEAVETFEKMAGFGLKADLSDYNWLIDVLSKSKQVKKAQAIFKEMKRNGKFVPDLKTYTVLMEGWGHEKDLLMLKSVYQEMLDAGLKPDVVAYGMLISSFCKSGKCDEAIKVFCEMEANGCMPSPHVYCMLINGLGSEERLDEALKYFELSKASGFPMEVPTCNAVVGAYCRASKFQHAFKMVDEMRKSGIGPNSRTYDIILHHLIKSQKIEEAYNVFQGMGKDGCEPQLNTYTMMVSMFCSNERVDVALKVWNQMKEKGVLPCMHMFSALINGLCFENRLEEACVYFQEMLDKGIRPPGQLFSNLKEALIEGGRISLAQEMALKLDGLRKTPMRR

SEQ ID NO: 16903 - DNA, 1780 bp, Triticum aestivum
  misc_feature (1)..(1780): Ceres Seq. ID no. 13664362
gctaatcctaattctagtccaaagttcccgtcgctgcgttcaggcagccgccggcgaccagtgaatgcttccgcatcccgtcgcgcaaaaggtagctgagacgagtgtccagccgccagcgagcctaccctacccgagctcacccacatcggcagccgccaccgccgccgccgcgttgctgcgcgcagaggaggagcgccatgatttgattctctgaatctttccccacgccgggcgatacttcctatgcgccaccgccgcccgcggatcacacagcagcggcagtagcgcgagggaggcagtcagaggccgaaagatttggatcgatggagatccgcgcccgcgcgcccggcaagatcatcctcgccggcgagcacgccgtcgtccacggctcctccgccgtcgccgccgccatcgacctctacacgcagtcctccctccacctgcccccgccaggggatggcggcgccggcggggaggtggaggtcgacctgacggactcgggcctcgccttctcctggccatgctcgcgcctcctcgaggcgctgggggagacctgccgcaaggcggagctgcaggccccgaggccctgctccccggaggagctggcctccattkycaggctcgtggagctgcacgagatacccgaggccaagatctggctctccgcaggcctctccgcgttcctctacctctacacttccatcctggggtgtaggcctgggaaggtcgtggtgagctcgggtctgccgatgggcgcggggcttggttcgtcggccgcgttctccgtgtcgttgtcgggcgcgctgctgacggcggcaggagtggtttgcgctgagggcgccgtcgacggaacagagtggcggttgttggggaaggatcatcttgagctggttaacacgtgggcgttccagggggaaaagattattcatggcaagccttctggcattgacaacgctgtcagcacttttgggagcatgatcaaattcaagaagggagaattgacaaacctcaaatctggcaatccagtcaaaatgctcattactgatacaagggttggtaggaacaccaaggctctggttgctggtgtgtctgaaagagcatctaggcatcccgatgctatggcttccgtcttccatgcagtgaacaccattagtgaagagctttccagcattgttgagttagctgccactgatgagatagccatgacctcaaaggaagaaaagctagcagaactcatggagatgaaccaaggtttgctccagtgcatgggagtcagccattcctctatagaaaccgtgctgcgctcgacattgaagtataacttggtctcgaagctcaccggagctggtggtggaggctgtgttttgacgttgataccaactctattgtccaagttagttttggagaaggtcaccacggagctagaatcgcatggtttccgctgcttcaaagtcgaggtcggtggacaaggtcttcagattcaccaaggataagataatgctcgctcctctttcaatggagatgttgtacactatttttaggtttgcttgaccttctgagacgaaagtattctttctattctgtgcctagcagaccacttactgtatcaatcaataagcgagtttgtcagtcgcatgattgttgttgtatcagatcaataaaccctgttccatagtcgggcgtggttggaaggaatatttgaggtgccatgttgcatctgatctgatgtatcattgttatcaaagttgagttcattgggttgggtcatttttcttgt

SEQ ID NO: 16904 - protein, 389 aa, Triticum aestivum
  peptide (1)..(389): Ceres Seq. ID no. 15220316
  misc_feature (1)..(358): NCBI GI NO: 37532842 NR Description: putative mevalonate kinase
  misc_feature (1)..(385): NCBI GI NO: 16417946 NR Description: mevalonate kinase [Hevea brasiliensis]
  misc_feature (1)..(386): NCBI GI NO: 5578718 NR Description: mevalonate kinase [Arabidopsis thaliana]
  misc_feature (1)..(386): NCBI GI NO: 15240936 NR Description: mevalonate kinase [Arabidopsis thaliana]
  misc_feature (7)..(387): NCBI GI NO: 450346 NR Description: ORF for viral-cellular fusion transcript
  misc_feature (7)..(387): NCBI GI NO: 4557769 NR Description: mevalonate kinase [Homo sapiens]
  misc_feature (7)..(387): NCBI GI NO: 33303805 NR Description: mevalonate kinase [synthetic construct]
  misc_feature (7)..(387): NCBI GI NO: 12963731 NR Description: mevalonate kinase [Mus musculus]
  misc_feature (7)..(387): NCBI GI NO: 13592007 NR Description: mevalonate kinase [Rattus norvegicus]
  misc_feature (3)..(387): NCBI GI NO: 28828936 NR Description: similar to Rattus norvegicus (Rat)
  misc_feature (98)..(98): Xaa is any aa, unknown or other
MEIRARAPGKIILAGEHAVVHGSSAVAAAIDLYTQSSLHLPPPGDGGAGGEVEVDLTDSGLAFSWPCSRLLEALGETCRKAELQAPRPCSPEELASIXRLVELHEIPEAKIWLSAGLSAFLYLYTSILGCRPGKVVVSSGLPMGAGLGSSAAFSVSLSGALLTAAGVVCAEGAVDGTEWRLLGKDHLELVNTWAFQGEKIIHGKPSGIDNAVSTFGSMIKFKKGELTNLKSGNPVKMLITDTRVGRNTKALVAGVSERASRHPDAMASVFHAVNTISEELSSIVELAATDEIAMTSKEEKLAELMEMNQGLLQCMGVSHSSIETVLRSTLKYNLVSKLTGAGGGGCVLTLIPTLLSKLVLEKVTTELESHGFRCFKVEVGGQGLQIHQG

SEQ ID NO: 16905 - protein, 247 aa, Triticum aestivum
  peptide (1)..(247): Ceres Seq. ID no. 15220317
  misc_feature (1)..(216): NCBI GI NO: 37532842 NR Description: putative mevalonate kinase
  misc_feature (1)..(243): NCBI GI NO: 16417946 NR Description: mevalonate kinase [Hevea brasiliensis]
  misc_feature (1)..(244): NCBI GI NO: 5578718 NR Description: mevalonate kinase [Arabidopsis thaliana]
  misc_feature (1)..(244): NCBI GI NO: 15240936 NR Description: mevalonate kinase [Arabidopsis thaliana]
  misc_feature (1)..(245): NCBI GI NO: 450346 NR Description: ORF for viral-cellular fusion transcript
  misc_feature (1)..(245): NCBI GI NO: 33303805 NR Description: mevalonate kinase [synthetic construct]
  misc_feature (1)..(245): NCBI GI NO: 4557769 NR Description: mevalonate kinase [Homo sapiens]
  misc_feature (1)..(245): NCBI GI NO: 12963731 NR Description: mevalonate kinase [Mus musculus]
  misc_feature (1)..(245): NCBI GI NO: 13592007 NR Description: mevalonate kinase [Rattus norvegicus]
  misc_feature (1)..(245): NCBI GI NO: 28828936 NR Description: similar to Rattus norvegicus (Rat)
MGAGLGSSAAFSVSLSGALLTAAGVVCAEGAVDGTEWRLLGKDHLELVNTWAFQGEKIIHGKPSGIDNAVSTFGSMIKFKKGELTNLKSGNPVKMLITDTRVGRNTKALVAGVSERASRHPDAMASVFHAVNTISEELSSIVELAATDEIAMTSKEEKLAELMEMNQGLLQCMGVSHSSIETVLRSTLKYNLVSKLTGAGGGGCVLTLIPTLLSKLVLEKVTTELESHGFRCFKVEVGGQGLQIHQG

SEQ ID NO: 16906 - DNA, 770 bp, Triticum aestivum
  misc_feature (1)..(770): Ceres Seq. ID no. 13659044
atgttgtccctcctgcctcttcgcttgccgtcccccgtagccagcacgctcccaggcgccgcctacctcctccccggcctcgccaggattcccatcctccgaaccccaccgcgagccagcatgagcgcggccgcctccacgccggacgcagtcccgtctcccgccgccgccgccgccgctgtcggcgaggaagcgaggaaggaggccgaggacgtggtggtgcagtacgtggtgctgcggcgcgacctggcggacgcgtggccgctggggagcgtggtggcgcaggggtgccacgccgccgtggccgccgtctgggcgcaccgcgaccacccggacaccgccgcctactgcgcgcccggcaacctcgacagcatgcacaaggtaacattggaggtgaaaggggagacacagctgaagaacttggctgagaaactggaagcagctggtgtacggcacaagctgtggatagagcagcccgagaacatcccgacttgcatagccacagcaccctgcccaaagtcgcaggtagcttcgttctttaggaagctaaaactttgcaaatgactgaagagtaatacctatccaggttgctggtcttggttgttatgggatgacattagtagctttgctgcattgaggtcacacattttagtcccatgttattggtgatacctgtttcagtctttcatcaactgattgttcctgtttaagaaatggatgtgctcgtattggcatgacaaataatagtgaatcgatgagttttgtgttgg

SEQ ID NO: 16907 - protein, 187 aa, Triticum aestivum
  peptide (1)..(187): Ceres Seq. ID no. 13659045
  misc_feature (1)..(187): NCBI GI NO: 38346909 NR Description: OSJNBb0015N08.9
  misc_feature (59)..(187): NCBI GI NO: 15238224 NR Description: expressed protein [Arabidopsis thaliana]
  misc_feature (57)..(187): NCBI GI NO: 37546977 NR Description: similar to ENSANGP00000018456 [Homo sapiens]
  misc_feature (72)..(187): NCBI GI NO: 27716785 NR Description: similar to CG14903-PA
  misc_feature (73)..(187): NCBI GI NO: 24647481 NR Description: CG14903-PA [Drosophila melanogaster]
  misc_feature (74)..(185): NCBI GI NO: 25148624 NR Description: Low molecular weight phosphotyrosine proteinphosphatase
  misc_feature (48)..(185): NCBI GI NO: 39585949 NR Description: Hypothetical protein CBG13912
  misc_feature (73)..(185): NCBI GI NO: 31241677 NR Description: ENSANGP00000018456 [Anopheles gambiae]
  misc_feature (70)..(187): NCBI GI NO: 23479593 NR Description: Drosophila melanogaster CG14903 gene product
  misc_feature (70)..(187): NCBI GI NO: 23612187 NR Description: hypothetical protein [Plasmodium falciparum 3D7]
MLSLLPLRLPSPVASTLPGAAYLLPGLARIPILRTPPRASMSAAASTPDAVPSPAAAAAAVGEEARKEAEDVVVQYVVLRRDLADAWPLGSVVAQGCHAAVAAVWAHRDHPDTAAYCAPGNLDSMHKVTLEVKGETQLKNLAEKLEAAGVRHKLWIEQPENIPTCIATAPCPKSQVASFFRKLKLCK

SEQ ID NO: 16908 - protein, 147 aa, Triticum aestivum
  peptide (1)..(147): Ceres Seq. ID no. 13659046
  misc_feature (1)..(147): NCBI GI NO: 38346909 NR Description: OSJNBb0015N08.9
  misc_feature (19)..(147): NCBI GI NO: 15238224 NR Description: expressed protein [Arabidopsis thaliana]
  misc_feature (17)..(147): NCBI GI NO: 37546977 NR Description: similar to ENSANGP00000018456 [Homo sapiens]
  misc_feature (32)..(147): NCBI GI NO: 27716785 NR Description: similar to CG14903-PA
  misc_feature (33)..(147): NCBI GI NO: 24647481 NR Description: CG14903-PA [Drosophila melanogaster]
  misc_feature (34)..(145): NCBI GI NO: 25148624 NR Description: Low molecular weight phosphotyrosine proteinphosphatase
  misc_feature (8)..(145): NCBI GI NO: 39585949 NR Description: Hypothetical protein CBG13912
  misc_feature (33)..(145): NCBI GI NO: 31241677 NR Description: ENSANGP00000018456 [Anopheles gambiae]
  misc_feature (30)..(147): NCBI GI NO: 23479593 NR Description: Drosophila melanogaster CG14903 gene product
  misc_feature (30)..(147): NCBI GI NO: 23612187 NR Description: hypothetical protein [Plasmodium falciparum 3D7]
MSAAASTPDAVPSPAAAAAAVGEEARKEAEDVVVQYVVLRRDLADAWPLGSVVAQGCHAAVAAVWAHRDHPDTAAYCAPGNLDSMHKVTLEVKGETQLKNLAEKLEAAGVRHKLWIEQPENIPTCIATAPCPKSQVASFFRKLKLCK

SEQ ID NO: 16909 - protein, 141 aa, Triticum aestivum
  peptide (1)..(141): Ceres Seq. ID no. 13659047
VVPPASSLAVPRSQHAPRRRLPPPRPRQDSHPPNPTASQHERGRLHAGRSPVSRRRRRRCRRGSEEGGRGRGGAVRGAAARPGGRVAAGERGGAGVPRRRGRRLGAPRPPGHRRLLRARQPRQHAQGNIGGERGDTAEELG

SEQ ID NO: 16910 - DNA, 882 bp, Triticum aestivum
  misc_feature (1)..(882): Ceres Seq. ID no. 13664236
ctcaccaccccccacagcatctcgcgatcccaaagtccaaccagcctccgccgcctctcctcgcctcgcctgcgagatcagcgccgccttctcccccgtctgtttcgtcggaggagtatcagcaagatgtcaactgccactgctccaggagtgtcctttgctaaatccgggtctgggtcccgggctgttgctccggcgatcaggagcgcttccttcatcggttacgccaagcaaacaccaaacttgtctggcctaaggatgtcaaacaagttcagggtgtctgccgcggccgtgcacaaggtgaagctcataagcccagacggtgaagagcacgagtttgaggcccctgaagacacctacattctcgaggcagctgaaaatgctggagtggagctgccattctcctgccgcgccggatcgtgctccacatgcgcgggcaagatgactaccggggaggttgatcagtcggagggctccttcctcgatgagaaccagatgggtgagggataccttctgacctgtatttcataccgcaaggcggattgcgtcattcaaacccaccaagaggaggaactctactagttgtctcacatgtgcttgtgtggcacaattgttgaagttccatggcggattcgttgttcagttgccttctgttattatctagagagatggctaggtgggtgtatcttcctggtgatcagtccggtcttttgatgagatcgttctatatgagttgtgacaataattgatgtaaaatggtttgtcaatccaaactgcatctgtttagattgcagcaattcgaactaccatacactgttggaggtcttgaaaacatgttgtacttatgggtcacttccttgaggaattatatttggccgctcc

SEQ ID NO: 16911 - protein, 193 aa, Triticum aestivum
  peptide (1)..(193): Ceres Seq. ID no. 15220302
  misc_feature (104)..(180): Pfam Name: Pfam Description:  2Fe-2S iron-sulfur cluster binding domain
  misc_feature (43)..(193): NCBI GI NO: 19569591 NR Description: ferredoxin precursor [Triticum aestivum]
  misc_feature (43)..(193): NCBI GI NO: 7430754 NR Description: ferredoxin [2Fe-2S], root - rice
  misc_feature (43)..(193): NCBI GI NO: 3023750 NR Description: Ferredoxin VI, chloroplast precursor (Fd VI)
  misc_feature (43)..(193): NCBI GI NO: 119958 NR Description: Ferredoxin III, chloroplast precursor (Fd III)
  misc_feature (51)..(193): NCBI GI NO: 40714664 NR Description: putative ferredoxin
  misc_feature (43)..(192): NCBI GI NO: 2129915 NR Description: ferredoxin
  misc_feature (69)..(193): NCBI GI NO: 13182955 NR Description: ferredoxin [Impatiens balsamina]
  misc_feature (98)..(193): NCBI GI NO: 6688560 NR Description: putative ferredoxin [Lycopersicon esculentum]
  misc_feature (112)..(193): NCBI GI NO: 2073385 NR Description: root ferredoxin [Oryza sativa]
  misc_feature (43)..(193): NCBI GI NO: 15225888 NR Description: ferredoxin, putative [Arabidopsis thaliana]
LTTPHSISRSQSPTSLRRLSSPRLRDQRRLLPRLFRRRSISKMSTATAPGVSFAKSGSGSRAVAPAIRSASFIGYAKQTPNLSGLRMSNKFRVSAAAVHKVKLISPDGEEHEFEAPEDTYILEAAENAGVELPFSCRAGSCSTCAGKMTTGEVDQSEGSFLDENQMGEGYLLTCISYRKADCVIQTHQEEELY

SEQ ID NO: 16912 - protein, 151 aa, Triticum aestivum
  peptide (1)..(151): Ceres Seq. ID no. 15220303
  misc_feature (62)..(138): Pfam Name: Pfam Description:  2Fe-2S iron-sulfur cluster binding domain
  misc_feature (1)..(151): NCBI GI NO: 19569591 NR Description: ferredoxin precursor [Triticum aestivum]
  misc_feature (1)..(151): NCBI GI NO: 7430754 NR Description: ferredoxin [2Fe-2S], root - rice
  misc_feature (1)..(151): NCBI GI NO: 3023750 NR Description: Ferredoxin VI, chloroplast precursor (Fd VI)
  misc_feature (1)..(151): NCBI GI NO: 119958 NR Description: Ferredoxin III, chloroplast precursor (Fd III)
  misc_feature (9)..(151): NCBI GI NO: 40714664 NR Description: putative ferredoxin
  misc_feature (1)..(150): NCBI GI NO: 2129915 NR Description: ferredoxin
  misc_feature (27)..(151): NCBI GI NO: 13182955 NR Description: ferredoxin [Impatiens balsamina]
  misc_feature (56)..(151): NCBI GI NO: 6688560 NR Description: putative ferredoxin [Lycopersicon esculentum]
  misc_feature (70)..(151): NCBI GI NO: 2073385 NR Description: root ferredoxin [Oryza sativa]
  misc_feature (1)..(151): NCBI GI NO: 15225888 NR Description: ferredoxin, putative [Arabidopsis thaliana]
MSTATAPGVSFAKSGSGSRAVAPAIRSASFIGYAKQTPNLSGLRMSNKFRVSAAAVHKVKLISPDGEEHEFEAPEDTYILEAAENAGVELPFSCRAGSCSTCAGKMTTGEVDQSEGSFLDENQMGEGYLLTCISYRKADCVIQTHQEEELY

SEQ ID NO: 16913 - protein, 107 aa, Triticum aestivum
  peptide (1)..(107): Ceres Seq. ID no. 15220304
  misc_feature (18)..(94): Pfam Name: Pfam Description:  2Fe-2S iron-sulfur cluster binding domain
  misc_feature (1)..(107): NCBI GI NO: 19569591 NR Description: ferredoxin precursor [Triticum aestivum]
  misc_feature (1)..(107): NCBI GI NO: 7430754 NR Description: ferredoxin [2Fe-2S], root - rice
  misc_feature (1)..(107): NCBI GI NO: 3023750 NR Description: Ferredoxin VI, chloroplast precursor (Fd VI)
  misc_feature (1)..(107): NCBI GI NO: 119958 NR Description: Ferredoxin III, chloroplast precursor (Fd III)
  misc_feature (1)..(107): NCBI GI NO: 40714664 NR Description: putative ferredoxin
  misc_feature (1)..(106): NCBI GI NO: 2129915 NR Description: ferredoxin
  misc_feature (1)..(107): NCBI GI NO: 13182955 NR Description: ferredoxin [Impatiens balsamina]
  misc_feature (12)..(107): NCBI GI NO: 6688560 NR Description: putative ferredoxin [Lycopersicon esculentum]
  misc_feature (26)..(107): NCBI GI NO: 2073385 NR Description: root ferredoxin [Oryza sativa]
  misc_feature (1)..(107): NCBI GI NO: 15225888 NR Description: ferredoxin, putative [Arabidopsis thaliana]
MSNKFRVSAAAVHKVKLISPDGEEHEFEAPEDTYILEAAENAGVELPFSCRAGSCSTCAGKMTTGEVDQSEGSFLDENQMGEGYLLTCISYRKADCVIQTHQEEELY

SEQ ID NO: 16914 - DNA, 1469 bp, Triticum aestivum
  misc_feature (1)..(1469): Ceres Seq. ID no. 13591377
actccacacacacacaccggacacaagcccacccagcgccctaccacccaaccagcacccgccgcccgcccgcccgccatgtcgtccgccgcgccggcgccggcgccggaggagcagcggccgcgcccggtgcgcttcggcatcatgggctgcgcgtccatcgcgcgcaagctcgcgcgggcgatgctgctggccgcgcccgcggccgccgtggccgccgtcggcagccgctccgaggccaaggcgcgcctcttcgccgccgacaacggcctccccgcgggcgcgcgcctgcacggctcctacgaggcgctcctcgacgacccggccgtcgacgccgtctacctgccgctccccaccagcctccacgtgcagtgggtcaccgccgccgccgcgcggggcaagcacgtgctcctcgagaagcccaccgcgctctgcgccgccgacctcgacgccatcctcgccgcctgcgacgccagcggcgtccagttcatggactccaccatgtggatgcaccacccccgcaccgccaagatgcgcgacctcctccccgccgacgtcggcgacgtcagagttataaacagtctgttcagcttccgagcaaacgaagatttcctccagaatgacatcagggtgaagccagacctcgacgcgctgggcgtactcggcgatgccgggtggtactgcatccgcgcgatcctgtgggccgtcaactacgagctcccgaagaacgtgatcgcgctccccgaccctgtcaagaaccaagccggcgtgctcatcgcctgcggcgcgacgctctactgggccgacggaaagacggccaccttccactgctcgttcctcgccaacctcaccatggacctgaccgtcgtcggcaccgacggcacgctccacgtcaccgacttcatcatcccgtacgaggagaagtccggcccgttcagcgtggcgtccaggtcgaacttcgccgagctccacaccgggtgggttccgcagcccagcaggcacgtcgtcacgactgacctgccgcaggaggccctgatggtccaggagttctgcaggctggtgcagggcatcagagacgccggcgccaagcctgagggcaagtggccggccatcaccaggaagacgcaggttgtgatggacgcggtgaaggcttccattgacaagggatttgagtctgtcgatgttgtgagctaagaaaatgcaacacgtagctggtcattctggtgatatgtcttccaagccatggtgcatacctggccattccggtgatcttcaaggccatggcgtatggattgtgcgtttgctcaaatcgtacttgtgcgcaagcgcaaaactacttatatatattggaataataactcgaattattattgccataccaaggacaacattgcagttatcaagttcaatgatatattgctacggatttattgtgtggtattttggcaatatggatgcttgcgaggtcc

SEQ ID NO: 16915 - protein, 397 aa, Triticum aestivum
  peptide (1)..(397): Ceres Seq. ID no. 13591378
  misc_feature (44)..(167): Pfam Name: Pfam Description:  Oxidoreductase family
  misc_feature (16)..(350): NCBI GI NO: 37534168 NR Description: putative oxidoreductase
  misc_feature (44)..(395): NCBI GI NO: 15233990 NR Description: AX110P -related protein [Arabidopsis thaliana]
  misc_feature (66)..(395): NCBI GI NO: 21954073 NR Description: putative AX110P protein [Arabidopsis thaliana]
  misc_feature (43)..(391): NCBI GI NO: 7488933 NR Description: protein AX110P - carrot
  misc_feature (44)..(393): NCBI GI NO: 18399170 NR Description: expressed protein [Arabidopsis thaliana]
  misc_feature (44)..(393): NCBI GI NO: 25518452 NR Description: hypothetical protein F23M19.12
  misc_feature (42)..(393): NCBI GI NO: 15218937 NR Description: oxidoreductase -related [Arabidopsis thaliana]
  misc_feature (37)..(389): NCBI GI NO: 17549134 NR Description: CONSERVED HYPOTHETICAL PROTEIN
  misc_feature (44)..(319): NCBI GI NO: 15616405 NR Description: oxidoreductase [Bacillus halodurans]
  misc_feature (9)..(307): NCBI GI NO: 16119237 NR Description: AGR_pAT_7p [Agrobacterium tumefaciens]
TPHTHTGHKPTQRPTTQPAPAARPPAMSSAAPAPAPEEQRPRPVRFGIMGCASIARKLARAMLLAAPAAAVAAVGSRSEAKARLFAADNGLPAGARLHGSYEALLDDPAVDAVYLPLPTSLHVQWVTAAAARGKHVLLEKPTALCAADLDAILAACDASGVQFMDSTMWMHHPRTAKMRDLLPADVGDVRVINSLFSFRANEDFLQNDIRVKPDLDALGVLGDAGWYCIRAILWAVNYELPKNVIALPDPVKNQAGVLIACGATLYWADGKTATFHCSFLANLTMDLTVVGTDGTLHVTDFIIPYEEKSGPFSVASRSNFAELHTGWVPQPSRHVVTTDLPQEALMVQEFCRLVQGIRDAGAKPEGKWPAITRKTQVVMDAVKASIDKGFESVDVVS

SEQ ID NO: 16916 - protein, 371 aa, Triticum aestivum
  peptide (1)..(371): Ceres Seq. ID no. 13591379
  misc_feature (18)..(141): Pfam Name: Pfam Description:  Oxidoreductase family
  misc_feature (1)..(324): NCBI GI NO: 37534168 NR Description: putative oxidoreductase
  misc_feature (18)..(369): NCBI GI NO: 15233990 NR Description: AX110P -related protein [Arabidopsis thaliana]
  misc_feature (40)..(369): NCBI GI NO: 21954073 NR Description: putative AX110P protein [Arabidopsis thaliana]
  misc_feature (17)..(365): NCBI GI NO: 7488933 NR Description: protein AX110P - carrot
  misc_feature (18)..(367): NCBI GI NO: 18399170 NR Description: expressed protein [Arabidopsis thaliana]
  misc_feature (18)..(367): NCBI GI NO: 25518452 NR Description: hypothetical protein F23M19.12
  misc_feature (16)..(367): NCBI GI NO: 15218937 NR Description: oxidoreductase -related [Arabidopsis thaliana]
  misc_feature (11)..(363): NCBI GI NO: 17549134 NR Description: CONSERVED HYPOTHETICAL PROTEIN
  misc_feature (18)..(293): NCBI GI NO: 15616405 NR Description: oxidoreductase [Bacillus halodurans]
  misc_feature (1)..(281): NCBI GI NO: 16119237 NR Description: AGR_pAT_7p [Agrobacterium tumefaciens]
MSSAAPAPAPEEQRPRPVRFGIMGCASIARKLARAMLLAAPAAAVAAVGSRSEAKARLFAADNGLPAGARLHGSYEALLDDPAVDAVYLPLPTSLHVQWVTAAAARGKHVLLEKPTALCAADLDAILAACDASGVQFMDSTMWMHHPRTAKMRDLLPADVGDVRVINSLFSFRANEDFLQNDIRVKPDLDALGVLGDAGWYCIRAILWAVNYELPKNVIALPDPVKNQAGVLIACGATLYWADGKTATFHCSFLANLTMDLTVVGTDGTLHVTDFIIPYEEKSGPFSVASRSNFAELHTGWVPQPSRHVVTTDLPQEALMVQEFCRLVQGIRDAGAKPEGKWPAITRKTQVVMDAVKASIDKGFESVDVVS

SEQ ID NO: 16917 - protein, 349 aa, Triticum aestivum
  peptide (1)..(349): Ceres Seq. ID no. 13591380
  misc_feature (1)..(119): Pfam Name: Pfam Description:  Oxidoreductase family
  misc_feature (1)..(302): NCBI GI NO: 37534168 NR Description: putative oxidoreductase
  misc_feature (1)..(347): NCBI GI NO: 15233990 NR Description: AX110P -related protein [Arabidopsis thaliana]
  misc_feature (18)..(347): NCBI GI NO: 21954073 NR Description: putative AX110P protein [Arabidopsis thaliana]
  misc_feature (1)..(343): NCBI GI NO: 7488933 NR Description: protein AX110P - carrot
  misc_feature (1)..(345): NCBI GI NO: 18399170 NR Description: expressed protein [Arabidopsis thaliana]
  misc_feature (1)..(345): NCBI GI NO: 25518452 NR Description: hypothetical protein F23M19.12
  misc_feature (1)..(345): NCBI GI NO: 15218937 NR Description: oxidoreductase -related [Arabidopsis thaliana]
  misc_feature (1)..(341): NCBI GI NO: 17549134 NR Description: CONSERVED HYPOTHETICAL PROTEIN
  misc_feature (1)..(271): NCBI GI NO: 15616405 NR Description: oxidoreductase [Bacillus halodurans]
  misc_feature (1)..(259): NCBI GI NO: 16119237 NR Description: AGR_pAT_7p [Agrobacterium tumefaciens]
MGCASIARKLARAMLLAAPAAAVAAVGSRSEAKARLFAADNGLPAGARLHGSYEALLDDPAVDAVYLPLPTSLHVQWVTAAAARGKHVLLEKPTALCAADLDAILAACDASGVQFMDSTMWMHHPRTAKMRDLLPADVGDVRVINSLFSFRANEDFLQNDIRVKPDLDALGVLGDAGWYCIRAILWAVNYELPKNVIALPDPVKNQAGVLIACGATLYWADGKTATFHCSFLANLTMDLTVVGTDGTLHVTDFIIPYEEKSGPFSVASRSNFAELHTGWVPQPSRHVVTTDLPQEALMVQEFCRLVQGIRDAGAKPEGKWPAITRKTQVVMDAVKASIDKGFESVDVVS

SEQ ID NO: 16918 - DNA, 1079 bp, Triticum aestivum
  misc_feature (1)..(1079): Ceres Seq. ID no. 12626444
gtagactccaggaaagggaattcctcaaccatactgccttttcatggatcattccagctgaggattaaggagagaaattaaccgcatcccggggccgcgcgcgagtgtgatgcgcgcagcttgccggcggcgatggatttgccgtggctggacctccccttcaccttcctcacgctgctcctggccacccgcctggcgtacgactactacggcgtcgtcgccgccaccttcgccggcagcttcgcgctccagatcttcctcttctactgcttcgcgcgctggtaccgccacaccatgggcgcccgcgccgagctgctcccctcgtcgacgacgtcgcagcagcgcgacgaggggtccccgcccgtcctgaccccgctgctggaggcgtcgagcggagccggcgccgccgcggccgcgggggccctgctggccaaccggtgcctggccttcgtgttcatggtgttcgtcccgctcatcatcgtcgtcttcgagcggagccaggcggacgtcgtcgcctacgcgctctgcctcgccaacatactcgtcatggtcgtctggctctcgccggaggcgcccggctccatgtcggccaccaagtccttcctggggctcagcgacgacgaggacgaggagagcggcggcgccgaggacaagtgctgcgtctgcctcgccggcatgcgggaggagcaggccctccgggacctgccgcggtgcgggcaccggttccatgagaagtgcatcggcaagtggctcaagaccgggcacccgacatgccccgtgtgccgggcgctggtcttgccgccgccggccgtgcacgcggacccgttcgacgactctgttagccccgtctagctctgtttctcccctgcatccagtctaacaatcattcccatagaaaatcagacccctattcagcatcagacgctggaaatggtgaattgctgggtaatttgctactctctcttcttgataatgcgtagttgtctgaacaaatgttcgactgtagcctgtaaataaggactgtacatttttcctttttactctgaaggttgagatgacggagtcttgcatgtttttgc

SEQ ID NO: 16919 - protein, 239 aa, Triticum aestivum
  peptide (1)..(239): Ceres Seq. ID no. 12626445
  misc_feature (175)..(217): Pfam Name: RING finger Pfam Description: Zinc finger, C3HC4 type
  misc_feature (101)..(227): NCBI GI NO: 15234956 NR Description: putative protein; protein id: At4g10160.1
  misc_feature (84)..(225): NCBI GI NO: 34909640 NR Description: P0503C12.20
  misc_feature (167)..(222): NCBI GI NO: 34894518 NR Description: P0551A11.23
  misc_feature (163)..(221): NCBI GI NO: 25403249 NR Description: protein F21J9.24 [imported] - Arabidopsis thaliana
  misc_feature (151)..(223): NCBI GI NO: 15226188 NR Description: hypothetical protein; protein id: At2g34000.1
  misc_feature (172)..(224): NCBI GI NO: 15233696 NR Description: putative protein; protein id: At4g38140.1
  misc_feature (175)..(227): NCBI GI NO: 15240066 NR Description: C3HC4-type RING zinc finger protein-like
  misc_feature (162)..(231): NCBI GI NO: 8698833 NR Description: EL5 [Oryza sativa (japonica cultivar-group)]
  misc_feature (166)..(225): NCBI GI NO: 25408427 NR Description: probable RING zinc finger protein
  misc_feature (165)..(226): NCBI GI NO: 34907968 NR Description: P0446G04.15
MDLPWLDLPFTFLTLLLATRLAYDYYGVVAATFAGSFALQIFLFYCFARWYRHTMGARAELLPSSTTSQQRDEGSPPVLTPLLEASSGAGAAAAAGALLANRCLAFVFMVFVPLIIVVFERSQADVVAYALCLANILVMVVWLSPEAPGSMSATKSFLGLSDDEDEESGGAEDKCCVCLAGMREEQALRDLPRCGHRFHEKCIGKWLKTGHPTCPVCRALVLPPPAVHADPFDDSVSPV

SEQ ID NO: 16920 - protein, 185 aa, Triticum aestivum
  peptide (1)..(185): Ceres Seq. ID no. 12626446
  misc_feature (121)..(163): Pfam Name: RING finger Pfam Description: Zinc finger, C3HC4 type
  misc_feature (47)..(173): NCBI GI NO: 15234956 NR Description: putative protein; protein id: At4g10160.1
  misc_feature (30)..(171): NCBI GI NO: 34909640 NR Description: P0503C12.20
  misc_feature (113)..(168): NCBI GI NO: 34894518 NR Description: P0551A11.23
  misc_feature (109)..(167): NCBI GI NO: 25403249 NR Description: protein F21J9.24 [imported] - Arabidopsis thaliana
  misc_feature (97)..(169): NCBI GI NO: 15226188 NR Description: hypothetical protein; protein id: At2g34000.1
  misc_feature (118)..(170): NCBI GI NO: 15233696 NR Description: putative protein; protein id: At4g38140.1
  misc_feature (121)..(173): NCBI GI NO: 15240066 NR Description: C3HC4-type RING zinc finger protein-like
  misc_feature (108)..(177): NCBI GI NO: 8698833 NR Description: EL5 [Oryza sativa (japonica cultivar-group)]
  misc_feature (112)..(171): NCBI GI NO: 25408427 NR Description: probable RING zinc finger protein
  misc_feature (111)..(172): NCBI GI NO: 34907968 NR Description: P0446G04.15
MGARAELLPSSTTSQQRDEGSPPVLTPLLEASSGAGAAAAAGALLANRCLAFVFMVFVPLIIVVFERSQADVVAYALCLANILVMVVWLSPEAPGSMSATKSFLGLSDDEDEESGGAEDKCCVCLAGMREEQALRDLPRCGHRFHEKCIGKWLKTGHPTCPVCRALVLPPPAVHADPFDDSVSPV

SEQ ID NO: 16921 - protein, 131 aa, Triticum aestivum
  peptide (1)..(131): Ceres Seq. ID no. 12626447
  misc_feature (67)..(109): Pfam Name: RING finger Pfam Description: Zinc finger, C3HC4 type
  misc_feature (1)..(119): NCBI GI NO: 15234956 NR Description: putative protein; protein id: At4g10160.1
  misc_feature (1)..(117): NCBI GI NO: 34909640 NR Description: P0503C12.20
  misc_feature (59)..(114): NCBI GI NO: 34894518 NR Description: P0551A11.23
  misc_feature (55)..(113): NCBI GI NO: 25403249 NR Description: protein F21J9.24 [imported] - Arabidopsis thaliana
  misc_feature (43)..(115): NCBI GI NO: 15226188 NR Description: hypothetical protein; protein id: At2g34000.1
  misc_feature (64)..(116): NCBI GI NO: 15233696 NR Description: putative protein; protein id: At4g38140.1
  misc_feature (67)..(119): NCBI GI NO: 15240066 NR Description: C3HC4-type RING zinc finger protein-like
  misc_feature (54)..(123): NCBI GI NO: 8698833 NR Description: EL5 [Oryza sativa (japonica cultivar-group)]
  misc_feature (58)..(117): NCBI GI NO: 25408427 NR Description: probable RING zinc finger protein
  misc_feature (57)..(118): NCBI GI NO: 34907968 NR Description: P0446G04.15
MVFVPLIIVVFERSQADVVAYALCLANILVMVVWLSPEAPGSMSATKSFLGLSDDEDEESGGAEDKCCVCLAGMREEQALRDLPRCGHRFHEKCIGKWLKTGHPTCPVCRALVLPPPAVHADPFDDSVSPV

SEQ ID NO: 16922 - DNA, 1634 bp, Triticum aestivum
  misc_feature (1)..(1634): Ceres Seq. ID no. 13658888
ctcgccgccccgactcgacccgacgcgactcccctcccaagcccaaatccccaaatcgcccctaaaaccctagccgccgccgccatggccgcctcccccaccgcctccgcctccggctccacggccgcggcggcggcggccgcctccgaggccaacgacgggcccacgctctccgtggtcaccaagcgcctccgcgcgctgcgcaagaagcagaaccgcatcgcgcagatggaggaggccgtcgccgccggcaagacgctcaaccaggagcagaaggaggtgatgcgctccaagcccaccctcgccgccgtcatcgacgagctcgagcgcctccgcacgccgctcgccgtcgccgtcgccgaggaggtctccgtcgcccccgcccccgccccggccccggagccctccggctccgattcctccgtccaggacctcctcgcgctcgtctacttcggcgccctcttcgacgtcaagccgcagagcgacttcatcgccacgatggtcgcgcgcgagcatgagcggagcagctgcatcacctatgactgcgtcggggacgacaccgtggacctgctcgtggagggcgacctcgacgtcgtgtccgctgtggccgcccttgccgccgctcgccctgcttccgcggtgggcgtctcccaccgcgacgcgctccaggcctgtgcccaccatgcccgcttatggctcgcccgcgctgacgagcccatccaccctggctcctctgttacttatgctgcggtgagggctaagctggacaggatcatggcatcagactactacacagcagctgcagttggaggagggagctatggagctgaaggtgtgcaggcacaggagagtatgactgcctcaccagaggcatcagcagtggaggagaacctagctgctgaaggtcacaaggaggagaaggaagactcccatgctacggaaatttacaatgatcatcagtctgactcagcagacgtgcaaaatgtggatcgtgaagcccccgtgaaccctcccgaggaatatccctctgttcaggcagagcaggagaagtttgacatggaagagcaagatgagagggatgctgagccaaaagagcagcagttccagcaccctaggcggtctcatcagaaccagcggggaggtggtcgtggcaggaggggggcctaccccaatggccgtggcgggcgtggaggcggccgcggcatgggcggcggataccagaatgggcgtggataccagggtgggggtggcggataccagggaggcggtggcgagtaccagaatggccggggtggtggtggcggttactacaacaacaacaacgaagaagggtactaccagccgaggaacttcaacaccaggggcaggggtggtcggtctggcggcggcaactctcactacagcaaccagggaggaggcggcgcgcagggaggtggccacgcgtacgccgagagggttgaggcaaatgcttagttgttgaattattttgcttgggtggaggtcacgagagggagagagtctgggagccattttgttattatagaactaacttagcctgttattacgtcgcaatccgtcccccatctgtgagttggttttgttggtccaatccaatgactgcatatggttggtcg

SEQ ID NO: 16923 - protein, 490 aa, Triticum aestivum
  peptide (1)..(490): Ceres Seq. ID no. 15219930
  misc_feature (339)..(479): Pfam Name: LMP1 Pfam Description: Herpesvirus latent membrane protein 1
  misc_feature (65)..(448): NCBI GI NO: 15223426 NR Description: glycine-rich protein [Arabidopsis thaliana]
  misc_feature (279)..(469): NCBI GI NO: 15223426 NR Description: glycine-rich protein [Arabidopsis thaliana]
  misc_feature (44)..(126): NCBI GI NO: 15223426 NR Description: glycine-rich protein [Arabidopsis thaliana]
  misc_feature (380)..(477): NCBI GI NO: 34809533 NR Description: Epa5p [Candida glabrata]
  misc_feature (380)..(477): NCBI GI NO: 34809533 NR Description: Epa5p [Candida glabrata]
  misc_feature (380)..(477): NCBI GI NO: 34809533 NR Description: Epa5p [Candida glabrata]
  misc_feature (380)..(477): NCBI GI NO: 34809533 NR Description: Epa5p [Candida glabrata]
  misc_feature (380)..(479): NCBI GI NO: 121644 NR Description: Glycine-rich cell wall structural protein precursor
  misc_feature (380)..(477): NCBI GI NO: 34809534 NR Description: Epa4p [Candida glabrata]
  misc_feature (346)..(482): NCBI GI NO: 121644 NR Description: Glycine-rich cell wall structural protein precursor
LAAPTRPDATPLPSPNPQIAPKTLAAAAMAASPTASASGSTAAAAAAASEANDGPTLSVVTKRLRALRKKQNRIAQMEEAVAAGKTLNQEQKEVMRSKPTLAAVIDELERLRTPLAVAVAEEVSVAPAPAPAPEPSGSDSSVQDLLALVYFGALFDVKPQSDFIATMVAREHERSSCITYDCVGDDTVDLLVEGDLDVVSAVAALAAARPASAVGVSHRDALQACAHHARLWLARADEPIHPGSSVTYAAVRAKLDRIMASDYYTAAAVGGGSYGAEGVQAQESMTASPEASAVEENLAAEGHKEEKEDSHATEIYNDHQSDSADVQNVDREAPVNPPEEYPSVQAEQEKFDMEEQDERDAEPKEQQFQHPRRSHQNQRGGGRGRRGAYPNGRGGRGGGRGMGGGYQNGRGYQGGGGGYQGGGGEYQNGRGGGGGYYNNNNEEGYYQPRNFNTRGRGGRSGGGNSHYSNQGGGGAQGGGHAYAERVEANA

SEQ ID NO: 16924 - protein, 462 aa, Triticum aestivum
  peptide (1)..(462): Ceres Seq. ID no. 15219931
  misc_feature (311)..(451): Pfam Name: LMP1 Pfam Description: Herpesvirus latent membrane protein 1
  misc_feature (37)..(420): NCBI GI NO: 15223426 NR Description: glycine-rich protein [Arabidopsis thaliana]
  misc_feature (251)..(441): NCBI GI NO: 15223426 NR Description: glycine-rich protein [Arabidopsis thaliana]
  misc_feature (16)..(98): NCBI GI NO: 15223426 NR Description: glycine-rich protein [Arabidopsis thaliana]
  misc_feature (352)..(449): NCBI GI NO: 34809533 NR Description: Epa5p [Candida glabrata]
  misc_feature (352)..(449): NCBI GI NO: 34809533 NR Description: Epa5p [Candida glabrata]
  misc_feature (352)..(449): NCBI GI NO: 34809533 NR Description: Epa5p [Candida glabrata]
  misc_feature (352)..(449): NCBI GI NO: 34809533 NR Description: Epa5p [Candida glabrata]
  misc_feature (352)..(451): NCBI GI NO: 121644 NR Description: Glycine-rich cell wall structural protein precursor
  misc_feature (352)..(449): NCBI GI NO: 34809534 NR Description: Epa4p [Candida glabrata]
  misc_feature (318)..(454): NCBI GI NO: 121644 NR Description: Glycine-rich cell wall structural protein precursor
MAASPTASASGSTAAAAAAASEANDGPTLSVVTKRLRALRKKQNRIAQMEEAVAAGKTLNQEQKEVMRSKPTLAAVIDELERLRTPLAVAVAEEVSVAPAPAPAPEPSGSDSSVQDLLALVYFGALFDVKPQSDFIATMVAREHERSSCITYDCVGDDTVDLLVEGDLDVVSAVAALAAARPASAVGVSHRDALQACAHHARLWLARADEPIHPGSSVTYAAVRAKLDRIMASDYYTAAAVGGGSYGAEGVQAQESMTASPEASAVEENLAAEGHKEEKEDSHATEIYNDHQSDSADVQNVDREAPVNPPEEYPSVQAEQEKFDMEEQDERDAEPKEQQFQHPRRSHQNQRGGGRGRRGAYPNGRGGRGGGRGMGGGYQNGRGYQGGGGGYQGGGGEYQNGRGGGGGYYNNNNEEGYYQPRNFNTRGRGGRSGGGNSHYSNQGGGGAQGGGHAYAERVEANA

SEQ ID NO: 16925 - protein, 414 aa, Triticum aestivum
  peptide (1)..(414): Ceres Seq. ID no. 15219932
  misc_feature (263)..(403): Pfam Name: LMP1 Pfam Description: Herpesvirus latent membrane protein 1
  misc_feature (1)..(372): NCBI GI NO: 15223426 NR Description: glycine-rich protein [Arabidopsis thaliana]
  misc_feature (203)..(393): NCBI GI NO: 15223426 NR Description: glycine-rich protein [Arabidopsis thaliana]
  misc_feature (1)..(50): NCBI GI NO: 15223426 NR Description: glycine-rich protein [Arabidopsis thaliana]
  misc_feature (304)..(401): NCBI GI NO: 34809533 NR Description: Epa5p [Candida glabrata]
  misc_feature (304)..(401): NCBI GI NO: 34809533 NR Description: Epa5p [Candida glabrata]
  misc_feature (304)..(401): NCBI GI NO: 34809533 NR Description: Epa5p [Candida glabrata]
  misc_feature (304)..(401): NCBI GI NO: 34809533 NR Description: Epa5p [Candida glabrata]
  misc_feature (304)..(403): NCBI GI NO: 121644 NR Description: Glycine-rich cell wall structural protein precursor
  misc_feature (304)..(401): NCBI GI NO: 34809534 NR Description: Epa4p [Candida glabrata]
  misc_feature (270)..(406): NCBI GI NO: 121644 NR Description: Glycine-rich cell wall structural protein precursor
MEEAVAAGKTLNQEQKEVMRSKPTLAAVIDELERLRTPLAVAVAEEVSVAPAPAPAPEPSGSDSSVQDLLALVYFGALFDVKPQSDFIATMVAREHERSSCITYDCVGDDTVDLLVEGDLDVVSAVAALAAARPASAVGVSHRDALQACAHHARLWLARADEPIHPGSSVTYAAVRAKLDRIMASDYYTAAAVGGGSYGAEGVQAQESMTASPEASAVEENLAAEGHKEEKEDSHATEIYNDHQSDSADVQNVDREAPVNPPEEYPSVQAEQEKFDMEEQDERDAEPKEQQFQHPRRSHQNQRGGGRGRRGAYPNGRGGRGGGRGMGGGYQNGRGYQGGGGGYQGGGGEYQNGRGGGGGYYNNNNEEGYYQPRNFNTRGRGGRSGGGNSHYSNQGGGGAQGGGHAYAERVEANA

SEQ ID NO: 16926 - DNA, 2137 bp, Triticum aestivum
  misc_feature (1)..(2137): Ceres Seq. ID no. 14302871
agactagtaactgtccaatcaaatcaaaccgaggagggacggtgcagtccctcgttaattttactggaccatctctctgactctcctctccacctcgcccgcttctcttctttacctagccttctcgggtaagctggctaggaccagtggcagcagcagtagtgggagcaggagctgcttggcttgccgttgctgcctttcacgtccacctgcgcgggcgtgaggcgtggaatccaaacaatggcgctgggatccgcggatctataggcgaggccaggcgcgggatgggatctgggaccagcaaggccgcttcgccggcgccggcgccggccggcggcgaggccaaggcgcggaatgggaagccgagggggaggagcctgatgcgcctgcccagctactcctgcttccggggcttcacgcccgagtctgacccttcttcttcgctgccggcgccgccgccgctaggggtcgagtcaagcaagggaggggagacgccttcactcgctcacattggcatatcagataatgatgctccatcagctcctaaactgaatccaagtgaaggcagaacgacgccttcatcagataccgacagagatcaaggtgatgatgtattgcagaatgtcactgctaccaggactgcagtcgacgacgaccaatcgccaaatccttctgaccggccgcatccatgctttggtgtcaactttgggttgagtagagccgtcagcttgggatcatcagtggcatgctccattatgtcaaccggcctctcctcttcagctaatcctagtattggaaatgtggaccatccttccgatgcaagcatccctcaacaaggtggtgcatcaacttctgggatttattcaagtctggatatgctaagggatagcgtcacaacacaagctagagccgctcatcaggctaggagaaatttgctggaatctgaagatgctaacttgaggcattcgcacagaaggatgggaccccaggaaccttctgaaggcagtgtccggtttagccggacacttagtgttggaagacttcgtgacagggtcctcaggaggactccattctcagatagtttattcacctcttcactttatgatagaccagtgtggacagcaggaaatgccagtgcgaggcaagattcatctgtgatgcaacggactaattcagacagaggttccgaaccgcaatcagaaccttcaactaacagcacgtacaattctggctctgcaactctaagagaggccagtaatcgggatcttcttgagcggagatcagcttttcttgaaaggaggaggaggatacgatctcaggtccgagctctccaaaggttgggcagcaggtttgaaaatttatcaggtcatgagagatcatgcattctatctggtcaacatagaacaggaaattgcaactgcagggcaagcagtcgaccaggtaatcctgatgaagaatccggcacaagggctagcatatcaagaattgttatgctagcagaagcactctttgaggtcttggatgaaatccaccaacagtctgctgctttatcctcaaggacatcattaccttcaattggatccgttcctgctccaaaggagatcgtcgagagtcttcctgtcaaggtgtacagaaagccgttgaaacaccaaactgatgaggctgcacaatgctacatttgccttgtcgaatatgaagaaggagactgtgttcgcatacttccatgcaatcacgaatttcatctaacatgtgtagataagtggctgaaagagattcacagggtttgtccactctgtcgtggcgatgtctgccgatcggattcgtcgagcatagggaaattcagctgattccttttatctcttaaggatccagcttcttgcgagaaaaaaatggagcttccgacacggttatttgatccagccggatagagcccgcagaatgttgcgggtgtgatttgatcttcatttctagtctggtctgaacaactcaggatgctcctgtgtgttatagcagatttgcatggcggtcatcccattataaacgatgagcttccatgcgaatttgagatttgttgtacggtggtgtgaagcctgttgatatattggttatatatatggcttgcgttttcgtgatgttg

SEQ ID NO: 16927 - protein, 363 aa, Triticum aestivum
  peptide (1)..(363): Ceres Seq. ID no. 14302872
  misc_feature (306)..(347): Pfam Name: RING finger Pfam Description: Zinc finger, C3HC4 type
  misc_feature (1)..(358): NCBI GI NO: 17978924 NR Description: AT5g45290/K9E15_7 [Arabidopsis thaliana]
  misc_feature (1)..(358): NCBI GI NO: 22327588 NR Description: zinc finger
  misc_feature (1)..(343): NCBI GI NO: 10177000 NR Description: gene_id:K9E15.7~unknown protein
  misc_feature (240)..(351): NCBI GI NO: 34894518 NR Description: P0551A11.23
  misc_feature (228)..(362): NCBI GI NO: 29477113 NR Description: Similar to hypothetical protein LOC51255
  misc_feature (281)..(358): NCBI GI NO: 34577091 NR Description: ring finger protein 13 isoform 3
  misc_feature (278)..(348): NCBI GI NO: 15219150 NR Description: zinc finger
  misc_feature (283)..(361): NCBI GI NO: 37552455 NR Description: similar to RING finger protein 11
  misc_feature (257)..(350): NCBI GI NO: 10437428 NR Description: unnamed protein product [Homo sapiens]
  misc_feature (257)..(350): NCBI GI NO: 19745198 NR Description: RING finger protein OIP1 [Rattus norvegicus]
MSTGLSSSANPSIGNVDHPSDASIPQQGGASTSGIYSSLDMLRDSVTTQARAAHQARRNLLESEDANLRHSHRRMGPQEPSEGSVRFSRTLSVGRLRDRVLRRTPFSDSLFTSSLYDRPVWTAGNASARQDSSVMQRTNSDRGSEPQSEPSTNSTYNSGSATLREASNRDLLERRSAFLERRRRIRSQVRALQRLGSRFENLSGHERSCILSGQHRTGNCNCRASSRPGNPDEESGTRASISRIVMLAEALFEVLDEIHQQSAALSSRTSLPSIGSVPAPKEIVESLPVKVYRKPLKHQTDEAAQCYICLVEYEEGDCVRILPCNHEFHLTCVDKWLKEIHRVCPLCRGDVCRSDSSSIGKFS

SEQ ID NO: 16928 - protein, 520 aa, Triticum aestivum
  peptide (1)..(520): Ceres Seq. ID no. 14302873
  misc_feature (463)..(504): Pfam Name: RING finger Pfam Description: Zinc finger, C3HC4 type
  misc_feature (144)..(515): NCBI GI NO: 17978924 NR Description: AT5g45290/K9E15_7 [Arabidopsis thaliana]
  misc_feature (144)..(515): NCBI GI NO: 22327588 NR Description: zinc finger
  misc_feature (144)..(500): NCBI GI NO: 10177000 NR Description: gene_id:K9E15.7~unknown protein
  misc_feature (397)..(508): NCBI GI NO: 34894518 NR Description: P0551A11.23
  misc_feature (385)..(519): NCBI GI NO: 29477113 NR Description: Similar to hypothetical protein LOC51255
  misc_feature (438)..(515): NCBI GI NO: 34577091 NR Description: ring finger protein 13 isoform 3
  misc_feature (435)..(505): NCBI GI NO: 15219150 NR Description: zinc finger
  misc_feature (440)..(518): NCBI GI NO: 37552455 NR Description: similar to RING finger protein 11
  misc_feature (414)..(507): NCBI GI NO: 10437428 NR Description: unnamed protein product [Homo sapiens]
  misc_feature (414)..(507): NCBI GI NO: 19745198 NR Description: RING finger protein OIP1 [Rattus norvegicus]
MGSGTSKAASPAPAPAGGEAKARNGKPRGRSLMRLPSYSCFRGFTPESDPSSSLPAPPPLGVESSKGGETPSLAHIGISDNDAPSAPKLNPSEGRTTPSSDTDRDQGDDVLQNVTATRTAVDDDQSPNPSDRPHPCFGVNFGLSRAVSLGSSVACSIMSTGLSSSANPSIGNVDHPSDASIPQQGGASTSGIYSSLDMLRDSVTTQARAAHQARRNLLESEDANLRHSHRRMGPQEPSEGSVRFSRTLSVGRLRDRVLRRTPFSDSLFTSSLYDRPVWTAGNASARQDSSVMQRTNSDRGSEPQSEPSTNSTYNSGSATLREASNRDLLERRSAFLERRRRIRSQVRALQRLGSRFENLSGHERSCILSGQHRTGNCNCRASSRPGNPDEESGTRASISRIVMLAEALFEVLDEIHQQSAALSSRTSLPSIGSVPAPKEIVESLPVKVYRKPLKHQTDEAAQCYICLVEYEEGDCVRILPCNHEFHLTCVDKWLKEIHRVCPLCRGDVCRSDSSSIGKFS

SEQ ID NO: 16929 - protein, 488 aa, Triticum aestivum
  peptide (1)..(488): Ceres Seq. ID no. 14302874
  misc_feature (431)..(472): Pfam Name: RING finger Pfam Description: Zinc finger, C3HC4 type
  misc_feature (112)..(483): NCBI GI NO: 17978924 NR Description: AT5g45290/K9E15_7 [Arabidopsis thaliana]
  misc_feature (112)..(483): NCBI GI NO: 22327588 NR Description: zinc finger
  misc_feature (112)..(468): NCBI GI NO: 10177000 NR Description: gene_id:K9E15.7~unknown protein
  misc_feature (365)..(476): NCBI GI NO: 34894518 NR Description: P0551A11.23
  misc_feature (353)..(487): NCBI GI NO: 29477113 NR Description: Similar to hypothetical protein LOC51255
  misc_feature (406)..(483): NCBI GI NO: 34577091 NR Description: ring finger protein 13 isoform 3
  misc_feature (403)..(473): NCBI GI NO: 15219150 NR Description: zinc finger
  misc_feature (408)..(486): NCBI GI NO: 37552455 NR Description: similar to RING finger protein 11
  misc_feature (382)..(475): NCBI GI NO: 10437428 NR Description: unnamed protein product [Homo sapiens]
  misc_feature (382)..(475): NCBI GI NO: 19745198 NR Description: RING finger protein OIP1 [Rattus norvegicus]
MRLPSYSCFRGFTPESDPSSSLPAPPPLGVESSKGGETPSLAHIGISDNDAPSAPKLNPSEGRTTPSSDTDRDQGDDVLQNVTATRTAVDDDQSPNPSDRPHPCFGVNFGLSRAVSLGSSVACSIMSTGLSSSANPSIGNVDHPSDASIPQQGGASTSGIYSSLDMLRDSVTTQARAAHQARRNLLESEDANLRHSHRRMGPQEPSEGSVRFSRTLSVGRLRDRVLRRTPFSDSLFTSSLYDRPVWTAGNASARQDSSVMQRTNSDRGSEPQSEPSTNSTYNSGSATLREASNRDLLERRSAFLERRRRIRSQVRALQRLGSRFENLSGHERSCILSGQHRTGNCNCRASSRPGNPDEESGTRASISRIVMLAEALFEVLDEIHQQSAALSSRTSLPSIGSVPAPKEIVESLPVKVYRKPLKHQTDEAAQCYICLVEYEEGDCVRILPCNHEFHLTCVDKWLKEIHRVCPLCRGDVCRSDSSSIGKFS

SEQ ID NO: 16930 - DNA, 2231 bp, Triticum aestivum
  misc_feature (1)..(2231): Ceres Seq. ID no. 14303173
acctcgctcactccccaagctcactctcacacccacttcaaacccctccaccccaaaccccagccacccacccaccatggccgcccaccccaccgggaccaagaagcggagcggcagcggccatggggccgccgcggccctcgtcgtcgccgccctcctcgtcctctgctccaccgcgtccatggcgctcaccccggacggcgaggcgctgctggagctcaagctggcattcaacgccacggcggggcagcggctgggcagctggcgggccgccgaccccaacccctgcggctgggagggcgtctcctgctccttcccggacctcagggtccatgccataaatctgccctacatgcagctcgggggcatcatctcgcccagcatcggcaggctcaccaagctgcagagactagctctgcaccagaacagcctgcacggccccatccccgccgagatcaggaactgcaccgagctcagagccatttacctgagagccaactacctgcaaggcggcatccctccggggatcggcgacctcactcacctcaccatcctggacctgtccagcaatctgctgcggggtgcaataccggcgacgatcgggagcctaactcatttgcggttcctgaacctctccaccaacttcttctcgggagagatcccgaatgtcggcgtcctcggaaccttcaagagcagctcgtatgtcggaaatctggagctttgtgggctgcccatacagaaaggttgccgcggaaccctcgggttccctgcggtgctgccgcactctgaccccctctcctcctctggtgtttctccaatcaccaacaataataaaacctcacactttctgaatggcgttgtgatcggttcaatgtcaaccatggccatcgcgctggtcgcggtgctaggcttcctctgggtatgcttgctgtccaggaagaagaatggtgtgaactatgagaaaatggacaagcaaactgtcccggatggtgcaaagcttgtgacataccagtggaaccttccgtattcgtcgggcgagatcattagaaggctggagctgcttgatgaagaggatgtggttggttgcggcgggtttggtacggtgtacaagatggtgatggatgatggcacggcgtttgccgtcaagagggttgacctcaatcgagagaggcgagacaagacttttgagaaggagctcgagatcctgggcagcattaggcatatcaaccttgtcaatctgcaaggatactgccggctctccacggccaaactactcatatatgatttcatggagctgggcagcttggatagctacctccatggagatgcacaggaggatcagccattgaactggaatgcgcgtatgaagatcgccctgggctctgcccgcggtttggcatatctgcaccatgattgctcgccggggatcgtccaccgggacatcaaagccagcaacatccttctggacagatgcttggagccgcgcgtgtctgatttcggcctcgcgaggctgctggtggacaatgagacccatgtaaccactgtcgtggcgggtaccttcgggtacctagcaccagagtacctgcaaaatgggcattcgaccgagaaatcagacgtgtatagctttggggtgcttttgctggaactggtgaccggaaagaggcctacggattcttgcttcctcaacaagggtctcaacatcgtcggctggctgaacacgctgagcggggagcatcgcctggaggagatcctggactcgcggtcgggcgacgcggaggtggaggcggtggaggggatcctggacatcgcggccatgtgcacggacgcggacccggggcagcggccgtccatgggcgcggtgctcaagatgctggaggaggagatcctgtcgccctgcctcagcgagctctactacgagcagcacctggagctctgagagccttgagtgtaggtgagtgagtggacagtgccagttgtgcaggtactgctgctcatgatcgaccgatgatggcctggatctggattgaagaagctcaagttttgtagatacgcttgatgatgaaccaccaccgtgtgtgtaggatggactgtgttggcatctctagactagcgagtggttcttgggtcagaaccaggaccaatgcagcaatcggctgtgctttttgtacatagggttggagacctttgagccttttctttcatcccctttttccgacgtggttgcttcttcg

SEQ ID NO: 16931 - protein, 644 aa, Triticum aestivum
  peptide (1)..(644): Ceres Seq. ID no. 14303174
  misc_feature (38)..(639): NCBI GI NO: 30697726 NR Description: leucine rich repeat protein family
  misc_feature (67)..(639): NCBI GI NO: 10177448 NR Description: receptor-like protein kinase
  misc_feature (137)..(637): NCBI GI NO: 25403114 NR Description: probable protein kinase
  misc_feature (137)..(637): NCBI GI NO: 30692520 NR Description: leucine-rich repeat transmembrane protein kinase
  misc_feature (137)..(637): NCBI GI NO: 15227455 NR Description: leucine-rich repeat transmembrane protein kinase
  misc_feature (53)..(630): NCBI GI NO: 21740899 NR Description: OSJNBa0036B21.13
  misc_feature (54)..(630): NCBI GI NO: 13897308 NR Description: SERK1 protein [Zea mays]
  misc_feature (48)..(630): NCBI GI NO: 13897310 NR Description: SERK2 protein [Zea mays]
  misc_feature (45)..(630): NCBI GI NO: 40253600 NR Description: putative somatic embryogenesis receptor kinase 1
  misc_feature (45)..(630): NCBI GI NO: 38679443 NR Description: benzothiadiazole-induced somatic embryogenesisreceptor kinase 1
PRSLPKLTLTPTSNPSTPNPSHPPTMAAHPTGTKKRSGSGHGAAAALVVAALLVLCSTASMALTPDGEALLELKLAFNATAGQRLGSWRAADPNPCGWEGVSCSFPDLRVHAINLPYMQLGGIISPSIGRLTKLQRLALHQNSLHGPIPAEIRNCTELRAIYLRANYLQGGIPPGIGDLTHLTILDLSSNLLRGAIPATIGSLTHLRFLNLSTNFFSGEIPNVGVLGTFKSSSYVGNLELCGLPIQKGCRGTLGFPAVLPHSDPLSSSGVSPITNNNKTSHFLNGVVIGSMSTMAIALVAVLGFLWVCLLSRKKNGVNYEKMDKQTVPDGAKLVTYQWNLPYSSGEIIRRLELLDEEDVVGCGGFGTVYKMVMDDGTAFAVKRVDLNRERRDKTFEKELEILGSIRHINLVNLQGYCRLSTAKLLIYDFMELGSLDSYLHGDAQEDQPLNWNARMKIALGSARGLAYLHHDCSPGIVHRDIKASNILLDRCLEPRVSDFGLARLLVDNETHVTTVVAGTFGYLAPEYLQNGHSTEKSDVYSFGVLLLELVTGKRPTDSCFLNKGLNIVGWLNTLSGEHRLEEILDSRSGDAEVEAVEGILDIAAMCTDADPGQRPSMGAVLKMLEEEILSPCLSELYYEQHLEL

SEQ ID NO: 16932 - protein, 619 aa, Triticum aestivum
  peptide (1)..(619): Ceres Seq. ID no. 14303175
  misc_feature (13)..(614): NCBI GI NO: 30697726 NR Description: leucine rich repeat protein family
  misc_feature (42)..(614): NCBI GI NO: 10177448 NR Description: receptor-like protein kinase
  misc_feature (112)..(612): NCBI GI NO: 25403114 NR Description: probable protein kinase
  misc_feature (112)..(612): NCBI GI NO: 30692520 NR Description: leucine-rich repeat transmembrane protein kinase
  misc_feature (112)..(612): NCBI GI NO: 15227455 NR Description: leucine-rich repeat transmembrane protein kinase
  misc_feature (28)..(605): NCBI GI NO: 21740899 NR Description: OSJNBa0036B21.13
  misc_feature (29)..(605): NCBI GI NO: 13897308 NR Description: SERK1 protein [Zea mays]
  misc_feature (23)..(605): NCBI GI NO: 13897310 NR Description: SERK2 protein [Zea mays]
  misc_feature (20)..(605): NCBI GI NO: 40253600 NR Description: putative somatic embryogenesis receptor kinase 1
  misc_feature (20)..(605): NCBI GI NO: 38679443 NR Description: benzothiadiazole-induced somatic embryogenesisreceptor kinase 1
MAAHPTGTKKRSGSGHGAAAALVVAALLVLCSTASMALTPDGEALLELKLAFNATAGQRLGSWRAADPNPCGWEGVSCSFPDLRVHAINLPYMQLGGIISPSIGRLTKLQRLALHQNSLHGPIPAEIRNCTELRAIYLRANYLQGGIPPGIGDLTHLTILDLSSNLLRGAIPATIGSLTHLRFLNLSTNFFSGEIPNVGVLGTFKSSSYVGNLELCGLPIQKGCRGTLGFPAVLPHSDPLSSSGVSPITNNNKTSHFLNGVVIGSMSTMAIALVAVLGFLWVCLLSRKKNGVNYEKMDKQTVPDGAKLVTYQWNLPYSSGEIIRRLELLDEEDVVGCGGFGTVYKMVMDDGTAFAVKRVDLNRERRDKTFEKELEILGSIRHINLVNLQGYCRLSTAKLLIYDFMELGSLDSYLHGDAQEDQPLNWNARMKIALGSARGLAYLHHDCSPGIVHRDIKASNILLDRCLEPRVSDFGLARLLVDNETHVTTVVAGTFGYLAPEYLQNGHSTEKSDVYSFGVLLLELVTGKRPTDSCFLNKGLNIVGWLNTLSGEHRLEEILDSRSGDAEVEAVEGILDIAAMCTDADPGQRPSMGAVLKMLEEEILSPCLSELYYEQHLEL

SEQ ID NO: 16933 - protein, 584 aa, Triticum aestivum
  peptide (1)..(584): Ceres Seq. ID no. 14303176
  misc_feature (1)..(579): NCBI GI NO: 30697726 NR Description: leucine rich repeat protein family
  misc_feature (7)..(579): NCBI GI NO: 10177448 NR Description: receptor-like protein kinase
  misc_feature (77)..(577): NCBI GI NO: 25403114 NR Description: probable protein kinase
  misc_feature (77)..(577): NCBI GI NO: 30692520 NR Description: leucine-rich repeat transmembrane protein kinase
  misc_feature (77)..(577): NCBI GI NO: 15227455 NR Description: leucine-rich repeat transmembrane protein kinase
  misc_feature (1)..(570): NCBI GI NO: 21740899 NR Description: OSJNBa0036B21.13
  misc_feature (1)..(570): NCBI GI NO: 13897308 NR Description: SERK1 protein [Zea mays]
  misc_feature (1)..(570): NCBI GI NO: 13897310 NR Description: SERK2 protein [Zea mays]
  misc_feature (1)..(570): NCBI GI NO: 40253600 NR Description: putative somatic embryogenesis receptor kinase 1
  misc_feature (1)..(570): NCBI GI NO: 38679443 NR Description: benzothiadiazole-induced somatic embryogenesisreceptor kinase 1
MALTPDGEALLELKLAFNATAGQRLGSWRAADPNPCGWEGVSCSFPDLRVHAINLPYMQLGGIISPSIGRLTKLQRLALHQNSLHGPIPAEIRNCTELRAIYLRANYLQGGIPPGIGDLTHLTILDLSSNLLRGAIPATIGSLTHLRFLNLSTNFFSGEIPNVGVLGTFKSSSYVGNLELCGLPIQKGCRGTLGFPAVLPHSDPLSSSGVSPITNNNKTSHFLNGVVIGSMSTMAIALVAVLGFLWVCLLSRKKNGVNYEKMDKQTVPDGAKLVTYQWNLPYSSGEIIRRLELLDEEDVVGCGGFGTVYKMVMDDGTAFAVKRVDLNRERRDKTFEKELEILGSIRHINLVNLQGYCRLSTAKLLIYDFMELGSLDSYLHGDAQEDQPLNWNARMKIALGSARGLAYLHHDCSPGIVHRDIKASNILLDRCLEPRVSDFGLARLLVDNETHVTTVVAGTFGYLAPEYLQNGHSTEKSDVYSFGVLLLELVTGKRPTDSCFLNKGLNIVGWLNTLSGEHRLEEILDSRSGDAEVEAVEGILDIAAMCTDADPGQRPSMGAVLKMLEEEILSPCLSELYYEQHLEL

SEQ ID NO: 16934 - DNA, 1310 bp, Triticum aestivum
  misc_feature (1)..(1310): Ceres Seq. ID no. 13658577
ctagaacatcctaatcgaaaaccacatcttctattttcaaatattcatctttaaggaactaatcagtcagaaatttgggcaatagttatttctccccattgtcaaccttgtcaattgaaagtactatatgagaaatctacacgcctggtaccatacctcggtgagtaactgagtactccagcttcatatgttagtggttctgatttcaggtgttttgtattacagggcatcaagtgtttatagcatacttctactattactccgtgactcaaacaattataaaataaggatgcatgcggctgttgctttagcagtgccagtcacaaggcttgattatggtagctcctttccagatgttgtcagaggcctcacacatgttcttgagtcattaagttcgaacagttcatcatcgccttcaaatttcaaacaccgggacaaccttgagaaacagcttacgtttactgctctgcatttgcttggttttgtttcaccgaaggatgaccaaagcctgaaagattttcttatcaagaaggcatcctttctggaagactggctgaagggtttatgctcagcattcaatagtgccgaggaccagcctctggcaagcgagaccataaatgacgaggatggtttcagcccaaatgtgtcacagaaagttatgttatcttctgctgtagtgtccttgctcaatgtatatacaagtggaaaccagcaagttattactcagagatttgagcaattggctagaagcacagcgtgagcgtcaaaaatcaatggtggtctccacacccatcaacgagcagcaagatattggtcatccaccttagagaagccaactcgcctatcaattggttcttgaggcttccaataaagcgaggcaacctgacctgtacgtcaatacattccatgaagtcgacgaagctgctgagttgggtgatttcagatcaagggcagctcctggcagctagccaagtagtcggtcaatgcagaattgccttgacatgttgtattctagtgtaaaaatagttgttgaatttcttccaggtttggccatgttgtacatcgtgtttacttatgatcactagtgtgcatacacggagcagacatgtatactgaaggattattcggctagatcagtactacagattaatagctagatcagtactacagactgtagttccatataaactgcaacattatggatttggcttgggttgaatgctttgttagaccacaagcatgatgattttggatctgtgagcgcaacagaaaatgaatgccggccatttcagctgggggtaccaaccgtt

SEQ ID NO: 16935 - protein, 190 aa, Triticum aestivum
  peptide (1)..(190): Ceres Seq. ID no. 13658578
  misc_feature (50)..(185): NCBI GI NO: 30691695 NR Description: expressed protein [Arabidopsis thaliana]
  misc_feature (14)..(52): NCBI GI NO: 30691695 NR Description: expressed protein [Arabidopsis thaliana]
  misc_feature (50)..(90): NCBI GI NO: 7485853 NR Description: hypothetical protein F20D10
  misc_feature (14)..(52): NCBI GI NO: 7485853 NR Description: hypothetical protein F20D10
  misc_feature (17)..(111): NCBI GI NO: 28829187 NR Description: similar to Plasmodium falciparum. Malaria antigen
MLVVLISGVLYYRASSVYSILLLLLRDSNNYKIRMHAAVALAVPVTRLDYGSSFPDVVRGLTHVLESLSSNSSSSPSNFKHRDNLEKQLTFTALHLLGFVSPKDDQSLKDFLIKKASFLEDWLKGLCSAFNSAEDQPLASETINDEDGFSPNVSQKVMLSSAVVSLLNVYTSGNQQVITQRFEQLARSTA

SEQ ID NO: 16936 - protein, 156 aa, Triticum aestivum
  peptide (1)..(156): Ceres Seq. ID no. 13658579
  misc_feature (16)..(151): NCBI GI NO: 30691695 NR Description: expressed protein [Arabidopsis thaliana]
  misc_feature (1)..(18): NCBI GI NO: 30691695 NR Description: expressed protein [Arabidopsis thaliana]
  misc_feature (16)..(56): NCBI GI NO: 7485853 NR Description: hypothetical protein F20D10
  misc_feature (1)..(18): NCBI GI NO: 7485853 NR Description: hypothetical protein F20D10
  misc_feature (1)..(77): NCBI GI NO: 28829187 NR Description: similar to Plasmodium falciparum. Malaria antigen
MHAAVALAVPVTRLDYGSSFPDVVRGLTHVLESLSSNSSSSPSNFKHRDNLEKQLTFTALHLLGFVSPKDDQSLKDFLIKKASFLEDWLKGLCSAFNSAEDQPLASETINDEDGFSPNVSQKVMLSSAVVSLLNVYTSGNQQVITQRFEQLARSTA

SEQ ID NO: 16937 - DNA, 1732 bp, Triticum aestivum
  misc_feature (1)..(1732): Ceres Seq. ID no. 13658498
ctagaacmyccctmmtcgwtaaaacatgagcccatccaaagccgtgaccagtagccataacctgctccattaacacccacacccgcagagaaataagacaccaccggctcgggctctggtaatcaggcaggctcaatcagtgggaataagttgatgatctgtcgtctctaagccgcccgccacgacgcgccatcctccaccacctccctcttaaaagcccccgcttccttgcttcttcaagcccaattccccgcccgctccctccgtccaccgccacccaagagagagaggctctctagattctagccccgcagcaacattagccccatggtgtccttcctgctgggcgccgccgtggccaccgtctgcgtcctcttcttcatgtccgccagccccggccgcagcctcgtcgacgtcgccgcatggagccacaacaacggcaccgccgcccagcaccaccaccacctgcgctccgtcgccgacgacgccgacgccgcccgcaacctctccgtcgtcgtcgccgctccggcacccgcccccgtccaggcgtcgccgtacggggacctggaggaggtgctggcgcgggcggcgacggcggaccggacggtgatcatgacgcagatcaacgcggcgtggaccaagccgggctcgctgctggacctcttcttcgagagcttccgcaccggggagggcggcgtggcgcgcctgctcgaccacctcgtcatcgtcaccatggacccggcggcgtacgcggggtgccagctcgtgcacccgcactgctactttctcaggacgaccggcgtcgactaccgcggcgagaagttcttcatgagcaaggactacctcgagatgatgtggggccgcaacaagttccagcagaccatcctccagctcggatacaacttcctcttcacggacgtggacgtgatgtggttccgtgacccgttcaagcacatctccatgggggcggacatcgccatctccagcgacgtcttcatgggggacccctacagcctcggcaacttccccaacggcggcttcctcttcgtgcgctcctgcaacaagaccatcgagttctaccgccactggcaggccggccgctaccgcttcttcggcaagcacgagcaggacgtgttcaacctcatcaagcacgacatgacggaccgcctcggcgtcgccatccagttcctcgacaccacctacatcagcggcttctgtcagctcagcagggacctcaacaagatctgcaccctgcacgccaactgctgcgtcgggctcggggccaagctgcatgatttgaggaatgtgctggacgtgtggaggaactacacggcggcgccggtgcccgacaagagggccggcaagttccagtggaaggtgcccgggatatgcatccactgatccaactcatggatgagttggttgcccattctttctgttcttcttgcttcgccttctccttctcgtggaaagagagggaggggattgagagggtcagcatcgatcgattgattcattttgtgaaatcatttcagctagatgattattactccctcttatattagtttacggagggagtagtaagttattatactatatatgtacacaaacatacacagagtagcagtactccagtatgcgtgcagcacatgcatgcatgtatgctggtcctggccgaccctccctggcctgtaattaaagatgaatgagtaaagcagtagcctgtttatgc

SEQ ID NO: 16938 - protein, 357 aa, Triticum aestivum
  peptide (1)..(357): Ceres Seq. ID no. 15220638
  misc_feature (1)..(357): NCBI GI NO: 34897442 NR Description: putative regulatory protein
  misc_feature (1)..(357): NCBI GI NO: 19386737 NR Description: P0678F11.26
  misc_feature (73)..(357): NCBI GI NO: 34897440 NR Description: putative regulatory protein
  misc_feature (23)..(357): NCBI GI NO: 34904674 NR Description: P0446G09.1
  misc_feature (75)..(355): NCBI GI NO: 19386738 NR Description: P0678F11.28
  misc_feature (80)..(355): NCBI GI NO: 15223826 NR Description: expressed protein [Arabidopsis thaliana]
  misc_feature (1)..(357): NCBI GI NO: 19386741 NR Description: P0678F11.31
  misc_feature (46)..(355): NCBI GI NO: 18395292 NR Description: hypothetical protein [Arabidopsis thaliana]
  misc_feature (70)..(355): NCBI GI NO: 15235236 NR Description: hypothetical protein common family
  misc_feature (80)..(357): NCBI GI NO: 38344278 NR Description: OSJNBa0013K16.10
MVSFLLGAAVATVCVLFFMSASPGRSLVDVAAWSHNNGTAAQHHHHLRSVADDADAARNLSVVVAAPAPAPVQASPYGDLEEVLARAATADRTVIMTQINAAWTKPGSLLDLFFESFRTGEGGVARLLDHLVIVTMDPAAYAGCQLVHPHCYFLRTTGVDYRGEKFFMSKDYLEMMWGRNKFQQTILQLGYNFLFTDVDVMWFRDPFKHISMGADIAISSDVFMGDPYSLGNFPNGGFLFVRSCNKTIEFYRHWQAGRYRFFGKHEQDVFNLIKHDMTDRLGVAIQFLDTTYISGFCQLSRDLNKICTLHANCCVGLGAKLHDLRNVLDVWRNYTAAPVPDKRAGKFQWKVPGICIH

SEQ ID NO: 16939 - protein, 339 aa, Triticum aestivum
  peptide (1)..(339): Ceres Seq. ID no. 15220639
  misc_feature (1)..(339): NCBI GI NO: 34897442 NR Description: putative regulatory protein
  misc_feature (1)..(339): NCBI GI NO: 19386737 NR Description: P0678F11.26
  misc_feature (55)..(339): NCBI GI NO: 34897440 NR Description: putative regulatory protein
  misc_feature (5)..(339): NCBI GI NO: 34904674 NR Description: P0446G09.1
  misc_feature (57)..(337): NCBI GI NO: 19386738 NR Description: P0678F11.28
  misc_feature (62)..(337): NCBI GI NO: 15223826 NR Description: expressed protein [Arabidopsis thaliana]
  misc_feature (1)..(339): NCBI GI NO: 19386741 NR Description: P0678F11.31
  misc_feature (28)..(337): NCBI GI NO: 18395292 NR Description: hypothetical protein [Arabidopsis thaliana]
  misc_feature (52)..(337): NCBI GI NO: 15235236 NR Description: hypothetical protein common family
  misc_feature (62)..(339): NCBI GI NO: 38344278 NR Description: OSJNBa0013K16.10
MSASPGRSLVDVAAWSHNNGTAAQHHHHLRSVADDADAARNLSVVVAAPAPAPVQASPYGDLEEVLARAATADRTVIMTQINAAWTKPGSLLDLFFESFRTGEGGVARLLDHLVIVTMDPAAYAGCQLVHPHCYFLRTTGVDYRGEKFFMSKDYLEMMWGRNKFQQTILQLGYNFLFTDVDVMWFRDPFKHISMGADIAISSDVFMGDPYSLGNFPNGGFLFVRSCNKTIEFYRHWQAGRYRFFGKHEQDVFNLIKHDMTDRLGVAIQFLDTTYISGFCQLSRDLNKICTLHANCCVGLGAKLHDLRNVLDVWRNYTAAPVPDKRAGKFQWKVPGICIH

SEQ ID NO: 16940 - protein, 262 aa, Triticum aestivum
  peptide (1)..(262): Ceres Seq. ID no. 15220640
  misc_feature (1)..(262): NCBI GI NO: 34897442 NR Description: putative regulatory protein
  misc_feature (1)..(262): NCBI GI NO: 19386737 NR Description: P0678F11.26
  misc_feature (1)..(262): NCBI GI NO: 34897440 NR Description: putative regulatory protein
  misc_feature (1)..(262): NCBI GI NO: 34904674 NR Description: P0446G09.1
  misc_feature (1)..(260): NCBI GI NO: 19386738 NR Description: P0678F11.28
  misc_feature (1)..(260): NCBI GI NO: 15223826 NR Description: expressed protein [Arabidopsis thaliana]
  misc_feature (1)..(262): NCBI GI NO: 19386741 NR Description: P0678F11.31
  misc_feature (1)..(260): NCBI GI NO: 18395292 NR Description: hypothetical protein [Arabidopsis thaliana]
  misc_feature (1)..(260): NCBI GI NO: 15235236 NR Description: hypothetical protein common family
  misc_feature (1)..(262): NCBI GI NO: 38344278 NR Description: OSJNBa0013K16.10
MTQINAAWTKPGSLLDLFFESFRTGEGGVARLLDHLVIVTMDPAAYAGCQLVHPHCYFLRTTGVDYRGEKFFMSKDYLEMMWGRNKFQQTILQLGYNFLFTDVDVMWFRDPFKHISMGADIAISSDVFMGDPYSLGNFPNGGFLFVRSCNKTIEFYRHWQAGRYRFFGKHEQDVFNLIKHDMTDRLGVAIQFLDTTYISGFCQLSRDLNKICTLHANCCVGLGAKLHDLRNVLDVWRNYTAAPVPDKRAGKFQWKVPGICIH

SEQ ID NO: 16941 - DNA, 1531 bp, Triticum aestivum
  misc_feature (1)..(1531): Ceres Seq. ID no. 13663419
gcaactgtaccgactgcaacacagtttcttcagtaagcatgagaactatgacccatcgtctccccccagctgtggctgcggtggccgtggtcttggtggcgctgacgtgcctccaccggccagctgccgcgagcggccatgccgcggaccgcatagcccggctgcctgggcagccggcggtggacttcgacatgtactccggctacatcaccgtggacgagggcgccggacggtcgctgttctatctgctgcaagaggcgccggaggacgcccagccggcgccgctcgtgctgtggctcaacggcggccccggctgctcctccgtcgcctacggcgcgtcggaggagctcggcgcgttccgcgtcaagccccgcggcgccggcctcgtcctcaacgagtaccgctggaacaaagtggccaacgtgctgttcttggactcgccggccggcgtcgggttctcctacaccaacacctcttccgacatctacacctccggcgacaacagaacggcgcacgactcgtacgccttcctggcgaaatggttcgagaggttcccgcactacaagtaccgcgacttctacatcgccggcgagagctacgccgggcactacgtcccggagctgtcccagctggtccaccggagcaaaaaccccgtcatcaacctcaagggcttcatggtcgggaacggcctcatcgacgactaccacgactacgtgggcaccttcgagttctggtggaaccacgggatcgtctccgacgacacctaccgccgcctcaaggaggcctgcctccacgactccttcatccacccctcgccggcgtgcgacgccgccacggacgtcgccacggcggagcagggcaacatcgacatgtacagcctctacacgcccgtctgcaacatcacgtcgtcctcgtcgttggcggcgagccggccccggcccagggggcgctacccatggctgaccgggtcctacgacccgtgcacggaacggtactcgacggcgtactacaaccggcgggacgtgcagatggctctccacgccaacgtcaccggcgccatgaactacacgtgggcgacctgcagcgacaccattaatacccactggcatgatgctccgaggtccatgcttcccatttacagggagcttattgcagcgggcctcaggatttgggtgttcagcggtgacacggacgcggtagtccccttgacagcaacaagatactccatcggcggtctgggtcttccaactactaccagttggtacccttggtatgacgaccaggaggtcggcggttggagccaggtgtacaagggccttacactggtgtccgtcagaggtgccggccatgaggttcccctgcatcgcccgcggcaagcgctcgtactgtttcggtacttcctgcagggcgagcccatgccaggccagaccaagaatgcgacggtggcttagcaacaaagggatggaagtcaaatagtaatttcgatgtgagaaaacaagagtgatcatcaataaagcaatagatgcttctt

SEQ ID NO: 16942 - protein, 482 aa, Triticum aestivum
  peptide (1)..(482): Ceres Seq. ID no. 13663420
  misc_feature (13)..(482): NCBI GI NO: 7428204 NR Description: carboxypeptidase D (EC 3
  misc_feature (13)..(482): NCBI GI NO: 20455471 NR Description: Serine carboxypeptidase II precursor
  misc_feature (44)..(304): NCBI GI NO: 7428205 NR Description: carboxypeptidase D (EC 3.4.16.6) - wheat
  misc_feature (321)..(480): NCBI GI NO: 7428205 NR Description: carboxypeptidase D (EC 3.4.16.6) - wheat
  misc_feature (23)..(473): NCBI GI NO: 34895992 NR Description: putative carboxypeptidase D
  misc_feature (26)..(475): NCBI GI NO: 34908012 NR Description: putative carboxypeptidase D
  misc_feature (27)..(473): NCBI GI NO: 15231911 NR Description: serine carboxypeptidase -related
  misc_feature (34)..(473): NCBI GI NO: 15227493 NR Description: serine carboxypeptidase -related
  misc_feature (44)..(303): NCBI GI NO: 21431500 NR Description:
  misc_feature (45)..(300): NCBI GI NO: 576335 NR Description: Chain A, Serine Carboxypeptidase Ii (E
NCTDCNTVSSVSMRTMTHRLPPAVAAVAVVLVALTCLHRPAAASGHAADRIARLPGQPAVDFDMYSGYITVDEGAGRSLFYLLQEAPEDAQPAPLVLWLNGGPGCSSVAYGASEELGAFRVKPRGAGLVLNEYRWNKVANVLFLDSPAGVGFSYTNTSSDIYTSGDNRTAHDSYAFLAKWFERFPHYKYRDFYIAGESYAGHYVPELSQLVHRSKNPVINLKGFMVGNGLIDDYHDYVGTFEFWWNHGIVSDDTYRRLKEACLHDSFIHPSPACDAATDVATAEQGNIDMYSLYTPVCNITSSSSLAASRPRPRGRYPWLTGSYDPCTERYSTAYYNRRDVQMALHANVTGAMNYTWATCSDTINTHWHDAPRSMLPIYRELIAAGLRIWVFSGDTDAVVPLTATRYSIGGLGLPTTTSWYPWYDDQEVGGWSQVYKGLTLVSVRGAGHEVPLHRPRQALVLFRYFLQGEPMPGQTKNATVA

SEQ ID NO: 16943 - protein, 470 aa, Triticum aestivum
  peptide (1)..(470): Ceres Seq. ID no. 13663421
  misc_feature (1)..(470): NCBI GI NO: 7428204 NR Description: carboxypeptidase D (EC 3
  misc_feature (1)..(470): NCBI GI NO: 20455471 NR Description: Serine carboxypeptidase II precursor
  misc_feature (32)..(292): NCBI GI NO: 7428205 NR Description: carboxypeptidase D (EC 3.4.16.6) - wheat
  misc_feature (309)..(468): NCBI GI NO: 7428205 NR Description: carboxypeptidase D (EC 3.4.16.6) - wheat
  misc_feature (11)..(461): NCBI GI NO: 34895992 NR Description: putative carboxypeptidase D
  misc_feature (14)..(463): NCBI GI NO: 34908012 NR Description: putative carboxypeptidase D
  misc_feature (15)..(461): NCBI GI NO: 15231911 NR Description: serine carboxypeptidase -related
  misc_feature (22)..(461): NCBI GI NO: 15227493 NR Description: serine carboxypeptidase -related
  misc_feature (32)..(291): NCBI GI NO: 21431500 NR Description:
  misc_feature (33)..(288): NCBI GI NO: 576335 NR Description: Chain A, Serine Carboxypeptidase Ii (E
MRTMTHRLPPAVAAVAVVLVALTCLHRPAAASGHAADRIARLPGQPAVDFDMYSGYITVDEGAGRSLFYLLQEAPEDAQPAPLVLWLNGGPGCSSVAYGASEELGAFRVKPRGAGLVLNEYRWNKVANVLFLDSPAGVGFSYTNTSSDIYTSGDNRTAHDSYAFLAKWFERFPHYKYRDFYIAGESYAGHYVPELSQLVHRSKNPVINLKGFMVGNGLIDDYHDYVGTFEFWWNHGIVSDDTYRRLKEACLHDSFIHPSPACDAATDVATAEQGNIDMYSLYTPVCNITSSSSLAASRPRPRGRYPWLTGSYDPCTERYSTAYYNRRDVQMALHANVTGAMNYTWATCSDTINTHWHDAPRSMLPIYRELIAAGLRIWVFSGDTDAVVPLTATRYSIGGLGLPTTTSWYPWYDDQEVGGWSQVYKGLTLVSVRGAGHEVPLHRPRQALVLFRYFLQGEPMPGQTKNATVA

SEQ ID NO: 16944 - protein, 467 aa, Triticum aestivum
  peptide (1)..(467): Ceres Seq. ID no. 13663422
  misc_feature (1)..(467): NCBI GI NO: 7428204 NR Description: carboxypeptidase D (EC 3
  misc_feature (1)..(467): NCBI GI NO: 20455471 NR Description: Serine carboxypeptidase II precursor
  misc_feature (29)..(289): NCBI GI NO: 7428205 NR Description: carboxypeptidase D (EC 3.4.16.6) - wheat
  misc_feature (306)..(465): NCBI GI NO: 7428205 NR Description: carboxypeptidase D (EC 3.4.16.6) - wheat
  misc_feature (8)..(458): NCBI GI NO: 34895992 NR Description: putative carboxypeptidase D
  misc_feature (11)..(460): NCBI GI NO: 34908012 NR Description: putative carboxypeptidase D
  misc_feature (12)..(458): NCBI GI NO: 15231911 NR Description: serine carboxypeptidase -related
  misc_feature (19)..(458): NCBI GI NO: 15227493 NR Description: serine carboxypeptidase -related
  misc_feature (29)..(288): NCBI GI NO: 21431500 NR Description:
  misc_feature (30)..(285): NCBI GI NO: 576335 NR Description: Chain A, Serine Carboxypeptidase Ii (E
MTHRLPPAVAAVAVVLVALTCLHRPAAASGHAADRIARLPGQPAVDFDMYSGYITVDEGAGRSLFYLLQEAPEDAQPAPLVLWLNGGPGCSSVAYGASEELGAFRVKPRGAGLVLNEYRWNKVANVLFLDSPAGVGFSYTNTSSDIYTSGDNRTAHDSYAFLAKWFERFPHYKYRDFYIAGESYAGHYVPELSQLVHRSKNPVINLKGFMVGNGLIDDYHDYVGTFEFWWNHGIVSDDTYRRLKEACLHDSFIHPSPACDAATDVATAEQGNIDMYSLYTPVCNITSSSSLAASRPRPRGRYPWLTGSYDPCTERYSTAYYNRRDVQMALHANVTGAMNYTWATCSDTINTHWHDAPRSMLPIYRELIAAGLRIWVFSGDTDAVVPLTATRYSIGGLGLPTTTSWYPWYDDQEVGGWSQVYKGLTLVSVRGAGHEVPLHRPRQALVLFRYFLQGEPMPGQTKNATVA

SEQ ID NO: 16945 - DNA, 1461 bp, Triticum aestivum
  misc_feature (1)..(1461): Ceres Seq. ID no. 14313350
aagagaccacacacgaccgtccaacgcatcccctctctacccctcaaaagatggccggctggacctccatcccggcggagctactcgcggaaatctccggccgcctgccaggtgacgcggaccggatccacatccatcaggtatgctcccactggcgcgcatccacttcccggctggccgcctgccgtccatggatcatcgccggccgcgaaccatggagcctggttggcccggtcggcgaacactcgttttggctgccccttggcggccgacggatctacttgggcacgcccacgccggcgggcctaccatattgctgcggcacgccccttggctggcttgctctcatggacaacctgcaatccccaacgcggtttgtcctctgggagcccctctctgaagctgagatctttctgccctgtttgcccgccgttgtccaagtcttcctctcaggagacccgctcacctcgcctgactggatggcgattgcaagccagaagctctacagcactggcacttgcatgggccagacgctcttcttctggcggcctggagatgccgcatggactatgcagctcgagcggccaaacggcagaatcgatagctcagcattccatcaggggaaattctacttcaccgacatcgggtggacccttcacgtctatgatcttgaccgctcccctcccaagcttgtccggagcacgtacctttacagtgctctgcgagagcgccatggatttcggcagttccctggcggtggcaggccggcgtggtatgtggtcgcattcaatggcgagttgctgcttgttgtgatgtaccgtgcgcccaacataaaggctgtcgaagtttaccgcccggattgggcagcggagcgcctggagctgcgggacaaggtcacggatctcggcgagtactcgctcttcttgggccgcggtgatgcgtttgccctctgtgcaaaggacttcactatgatcaggagaaattgtctctactttgtagagcacgatacagtcaagcatcaagattgggctattgtgttagacttggggtcaaatgttttccaacaaattccatatcccggagagcagatggagggcacgggcagaaataatcactggacggcgtattcgtggttctgtctcagaagacccttcttgaagggtgaagcccagtaaggtggtagatcttcactgaccatcttattatatgaaagtaaccgaatcagtattggagcagcaacagagcttcccatgtttgaatgatctaaacaccacaccaacaccagcacgtatgtcttgtcacttcagattattcctcccatgaatccttgttgaatcatggactccaacagcccaattactaaccctttggcatagaagtgttaagagctgatttatactcctagatagcaccattgttgtatctctatttctcttgctactaatataactgtcattatac

SEQ ID NO: 16946 - protein, 390 aa, Triticum aestivum
  peptide (1)..(390): Ceres Seq. ID no. 14313351
  misc_feature (20)..(66): Pfam Name: Pfam Description:  F-box domain
  misc_feature (19)..(376): NCBI GI NO: 37536140 NR Description: hypothetical protein
  misc_feature (95)..(386): NCBI GI NO: 12083533 NR Description: hypothetical protein [Oryza sativa]
  misc_feature (38)..(282): NCBI GI NO: 12083533 NR Description: hypothetical protein [Oryza sativa]
  misc_feature (18)..(124): NCBI GI NO: 37536110 NR Description: hypothetical protein
  misc_feature (281)..(335): NCBI GI NO: 37536110 NR Description: hypothetical protein
  misc_feature (20)..(272): NCBI GI NO: 37536134 NR Description: hypothetical protein
  misc_feature (278)..(351): NCBI GI NO: 37536134 NR Description: hypothetical protein
  misc_feature (20)..(163): NCBI GI NO: 37536128 NR Description: hypothetical protein
  misc_feature (280)..(377): NCBI GI NO: 37536128 NR Description: hypothetical protein
  misc_feature (20)..(359): NCBI GI NO: 37531308 NR Description: hypothetical protein
ETTHDRPTHPLSTPQKMAGWTSIPAELLAEISGRLPGDADRIHIHQVCSHWRASTSRLAACRPWIIAGREPWSLVGPVGEHSFWLPLGGRRIYLGTPTPAGLPYCCGTPLGWLALMDNLQSPTRFVLWEPLSEAEIFLPCLPAVVQVFLSGDPLTSPDWMAIASQKLYSTGTCMGQTLFFWRPGDAAWTMQLERPNGRIDSSAFHQGKFYFTDIGWTLHVYDLDRSPPKLVRSTYLYSALRERHGFRQFPGGGRPAWYVVAFNGELLLVVMYRAPNIKAVEVYRPDWAAERLELRDKVTDLGEYSLFLGRGDAFALCAKDFTMIRRNCLYFVEHDTVKHQDWAIVLDLGSNVFQQIPYPGEQMEGTGRNNHWTAYSWFCLRRPFLKGEAQ

SEQ ID NO: 16947 - protein, 374 aa, Triticum aestivum
  peptide (1)..(374): Ceres Seq. ID no. 14313352
  misc_feature (4)..(50): Pfam Name: Pfam Description:  F-box domain
  misc_feature (3)..(360): NCBI GI NO: 37536140 NR Description: hypothetical protein
  misc_feature (79)..(370): NCBI GI NO: 12083533 NR Description: hypothetical protein [Oryza sativa]
  misc_feature (22)..(266): NCBI GI NO: 12083533 NR Description: hypothetical protein [Oryza sativa]
  misc_feature (2)..(108): NCBI GI NO: 37536110 NR Description: hypothetical protein
  misc_feature (265)..(319): NCBI GI NO: 37536110 NR Description: hypothetical protein
  misc_feature (4)..(256): NCBI GI NO: 37536134 NR Description: hypothetical protein
  misc_feature (262)..(335): NCBI GI NO: 37536134 NR Description: hypothetical protein
  misc_feature (4)..(147): NCBI GI NO: 37536128 NR Description: hypothetical protein
  misc_feature (264)..(361): NCBI GI NO: 37536128 NR Description: hypothetical protein
  misc_feature (4)..(343): NCBI GI NO: 37531308 NR Description: hypothetical protein
MAGWTSIPAELLAEISGRLPGDADRIHIHQVCSHWRASTSRLAACRPWIIAGREPWSLVGPVGEHSFWLPLGGRRIYLGTPTPAGLPYCCGTPLGWLALMDNLQSPTRFVLWEPLSEAEIFLPCLPAVVQVFLSGDPLTSPDWMAIASQKLYSTGTCMGQTLFFWRPGDAAWTMQLERPNGRIDSSAFHQGKFYFTDIGWTLHVYDLDRSPPKLVRSTYLYSALRERHGFRQFPGGGRPAWYVVAFNGELLLVVMYRAPNIKAVEVYRPDWAAERLELRDKVTDLGEYSLFLGRGDAFALCAKDFTMIRRNCLYFVEHDTVKHQDWAIVLDLGSNVFQQIPYPGEQMEGTGRNNHWTAYSWFCLRRPFLKGEAQ

SEQ ID NO: 16948 - protein, 275 aa, Triticum aestivum
  peptide (1)..(275): Ceres Seq. ID no. 14313353
  misc_feature (1)..(261): NCBI GI NO: 37536140 NR Description: hypothetical protein
  misc_feature (1)..(271): NCBI GI NO: 12083533 NR Description: hypothetical protein [Oryza sativa]
  misc_feature (1)..(167): NCBI GI NO: 12083533 NR Description: hypothetical protein [Oryza sativa]
  misc_feature (166)..(220): NCBI GI NO: 37536110 NR Description: hypothetical protein
  misc_feature (1)..(157): NCBI GI NO: 37536134 NR Description: hypothetical protein
  misc_feature (163)..(236): NCBI GI NO: 37536134 NR Description: hypothetical protein
  misc_feature (1)..(48): NCBI GI NO: 37536128 NR Description: hypothetical protein
  misc_feature (165)..(262): NCBI GI NO: 37536128 NR Description: hypothetical protein
  misc_feature (1)..(244): NCBI GI NO: 37531308 NR Description: hypothetical protein
MDNLQSPTRFVLWEPLSEAEIFLPCLPAVVQVFLSGDPLTSPDWMAIASQKLYSTGTCMGQTLFFWRPGDAAWTMQLERPNGRIDSSAFHQGKFYFTDIGWTLHVYDLDRSPPKLVRSTYLYSALRERHGFRQFPGGGRPAWYVVAFNGELLLVVMYRAPNIKAVEVYRPDWAAERLELRDKVTDLGEYSLFLGRGDAFALCAKDFTMIRRNCLYFVEHDTVKHQDWAIVLDLGSNVFQQIPYPGEQMEGTGRNNHWTAYSWFCLRRPFLKGEAQ

SEQ ID NO: 16949 - DNA, 1731 bp, Triticum aestivum
  misc_feature (1)..(1731): Ceres Seq. ID no. 14303087
acctcacctcacctcaccgcccgcatatgaaaccccgcgcgcgcgcgcacacgcacgtacggtagataaaaagcaggtagcgccgccgtcacgtcgtgctcgtcatgggcgtcgacgccgcgctgcatggggcggcggcggaggcggcgctgcatggggcgctctcgctgcagccgcacgtggccggcgccttcttcgcgctcgcggcgtgcaccgtggcgctcgccgccctgctggccgtggcgcgcacgcgcccgccgtggtggtgcgactgcgccgtctgcgaggcctacctcacggcgtcctgggccggcgagttcgacaacctctgcgactggtatgcgcacctgctgcgccgctcgccgtcgcagaccgtgcacgtccacgtgctccgcaacgtgctcaccgccaaccccgtcaccgtcgatcacatgctgcgcgcgcgcttcgataactaccccaagggcaagcccttctccgccatcctcgccgacctgctcggccgcgggatcttcaacgtcgacggggacgcgtggctgttccagcggaagctcgccgcggctgagctggcctccccggcgctcagggctttcgcctccggcgtcgtggcctccgagctgcggggccgtctcgttcccctgcttgactctgcatgttcccacgacgacgacgacgacgacgacgacggtggcaaggtgctggacctgcaggacgtcttccgtcgcttcgccttcgactgcatatgcaagatctccttcggcctcgacccgggctgcctcgagctgtccatgccggtatcggcgttcgtggacgcgttcgacacggcgtccatgctctctgcgaggcgcgccaccgcgccgttgcagatcatatggcgcctgaagcggttcttcaacgtcggggacgagagaaagctccgggaatccgtgcgcctcgtcgacgggttcgccgcggaggtcacgcggcaacgacacaagctcggcggcgccgcgtccggcagcgacctcctgtcgcggttcatgggctccatcagcgacgagaagtacctcagggacatcgtcgtcagcttcatgctcgccggccgcgacaccatcgcctcagcgctgaccgccttcttcctgctcctctccgatcacccggaggtcgccgcggccatccgggacgaggtgtcacgcgtcgcgggcgacgacgacaacggccggccgagcttcagcaagctcaaggacatgcactacgtgcacgcggcgctgtacgagagcatgcggctgttcccgccggtgcagttcgactccaagttcgcggcgggcgacgacacgctcccggacggcacggccgtggccaagggcacgcgggtcacctaccacgcctacgccatggggcggatggagtccgtgtggggccccgactgctccgagttccggcccgagcggtggctccgcgacgggcagttcgtcccggtgagcccgtaccggtacccggtgttccaggccggcgtgcgcgtctgcgtcggcaaggacctcgcgctcatggagatgaaggccgtcatcgtcgccgtcgtccggggcttcgacatcgaggcgatcgaccggagctcgcgccggcccaagttcgcgccggggctgacggccacgttcgccggcgggttgccggtcagggttcgccggcgagggcgtccggcgagcgggcacagcccaccaacctgatacggaataaacaactgttggtgccctg

SEQ ID NO: 16950 - protein, 532 aa, Triticum aestivum
  peptide (1)..(532): Ceres Seq. ID no. 14303088
  misc_feature (1)..(531): NCBI GI NO: 34908446 NR Description: putative cytochrome P450
  misc_feature (54)..(521): NCBI GI NO: 15226228 NR Description: cytochrome P450, putative [Arabidopsis thaliana]
  misc_feature (75)..(521): NCBI GI NO: 15228396 NR Description: cytochrome P450 family [Arabidopsis thaliana]
  misc_feature (75)..(521): NCBI GI NO: 15242759 NR Description: cytochrome P450, putative [Arabidopsis thaliana]
  misc_feature (75)..(521): NCBI GI NO: 26452145 NR Description: putative cytochrome P450 [Arabidopsis thaliana]
  misc_feature (75)..(521): NCBI GI NO: 21536522 NR Description: cytochrome P450-like protein
  misc_feature (73)..(521): NCBI GI NO: 18000072 NR Description: cytochrome P450-dependent fatty acid hydroxylase
  misc_feature (67)..(521): NCBI GI NO: 18000068 NR Description: cytochrome P450-dependent fatty acid hydroxylase
  misc_feature (78)..(521): NCBI GI NO: 34909022 NR Description: cytochrome P450-like protein
  misc_feature (73)..(521): NCBI GI NO: 18000066 NR Description: cytochrome P450-dependent fatty acid hydroxylase
MGVDAALHGAAAEAALHGALSLQPHVAGAFFALAACTVALAALLAVARTRPPWWCDCAVCEAYLTASWAGEFDNLCDWYAHLLRRSPSQTVHVHVLRNVLTANPVTVDHMLRARFDNYPKGKPFSAILADLLGRGIFNVDGDAWLFQRKLAAAELASPALRAFASGVVASELRGRLVPLLDSACSHDDDDDDDDGGKVLDLQDVFRRFAFDCICKISFGLDPGCLELSMPVSAFVDAFDTASMLSARRATAPLQIIWRLKRFFNVGDERKLRESVRLVDGFAAEVTRQRHKLGGAASGSDLLSRFMGSISDEKYLRDIVVSFMLAGRDTIASALTAFFLLLSDHPEVAAAIRDEVSRVAGDDDNGRPSFSKLKDMHYVHAALYESMRLFPPVQFDSKFAAGDDTLPDGTAVAKGTRVTYHAYAMGRMESVWGPDCSEFRPERWLRDGQFVPVSPYRYPVFQAGVRVCVGKDLALMEMKAVIVAVVRGFDIEAIDRSSRRPKFAPGLTATFAGGLPVRVRRRGRPASGHSPPT

SEQ ID NO: 16951 - protein, 423 aa, Triticum aestivum
  peptide (1)..(423): Ceres Seq. ID no. 14303089
  misc_feature (1)..(422): NCBI GI NO: 34908446 NR Description: putative cytochrome P450
  misc_feature (1)..(412): NCBI GI NO: 15226228 NR Description: cytochrome P450, putative [Arabidopsis thaliana]
  misc_feature (1)..(412): NCBI GI NO: 15228396 NR Description: cytochrome P450 family [Arabidopsis thaliana]
  misc_feature (1)..(412): NCBI GI NO: 15242759 NR Description: cytochrome P450, putative [Arabidopsis thaliana]
  misc_feature (1)..(412): NCBI GI NO: 21536522 NR Description: cytochrome P450-like protein
  misc_feature (1)..(412): NCBI GI NO: 26452145 NR Description: putative cytochrome P450 [Arabidopsis thaliana]
  misc_feature (1)..(412): NCBI GI NO: 18000072 NR Description: cytochrome P450-dependent fatty acid hydroxylase
  misc_feature (1)..(412): NCBI GI NO: 18000068 NR Description: cytochrome P450-dependent fatty acid hydroxylase
  misc_feature (1)..(412): NCBI GI NO: 34909022 NR Description: cytochrome P450-like protein
  misc_feature (1)..(412): NCBI GI NO: 18000066 NR Description: cytochrome P450-dependent fatty acid hydroxylase
MLRARFDNYPKGKPFSAILADLLGRGIFNVDGDAWLFQRKLAAAELASPALRAFASGVVASELRGRLVPLLDSACSHDDDDDDDDGGKVLDLQDVFRRFAFDCICKISFGLDPGCLELSMPVSAFVDAFDTASMLSARRATAPLQIIWRLKRFFNVGDERKLRESVRLVDGFAAEVTRQRHKLGGAASGSDLLSRFMGSISDEKYLRDIVVSFMLAGRDTIASALTAFFLLLSDHPEVAAAIRDEVSRVAGDDDNGRPSFSKLKDMHYVHAALYESMRLFPPVQFDSKFAAGDDTLPDGTAVAKGTRVTYHAYAMGRMESVWGPDCSEFRPERWLRDGQFVPVSPYRYPVFQAGVRVCVGKDLALMEMKAVIVAVVRGFDIEAIDRSSRRPKFAPGLTATFAGGLPVRVRRRGRPASGHSPPT

SEQ ID NO: 16952 - protein, 359 aa, Triticum aestivum
  peptide (1)..(359): Ceres Seq. ID no. 14303090
MFPRRRRRRRRRWQGAGPAGRLPSLRLRLHMQDLLRPRPGLPRAVHAGIGVRGRVRHGVHALCEARHRAVADHMAPEAVLQRRGREKAPGIRAPRRRVRRGGHAATTQARRRRVRQRPPVAVHGLHQRREVPQGHRRQLHARRPRHHRLSADRLLPAPLRSPGGRRGHPGRGVTRRGRRRQRPAELQQAQGHALRARGAVREHAAVPAGAVRLQVRGGRRHAPGRHGRGQGHAGHLPRLRHGADGVRVGPRLLRVPARAVAPRRAVRPGEPVPVPGVPGRRARLRRQGPRAHGDEGRHRRRRPGLRHRGDRPELAPAQVRAGADGHVRRRVAGQGSPARASGERAQPTNLIRNKQLLVP

SEQ ID NO: 16953 - DNA, 1515 bp, Triticum aestivum
  misc_feature (1)..(1515): Ceres Seq. ID no. 14303083
acgaccttccattccacccgagcagccgcgccgcctccccgatagatgaagcttctcccgcgcctctgcatggccaccagcagcgccgccgccgcgggcgacagcgacgccagcagcaacaagctcgcctcggtcgcctccacctcctcctccaccgtctcaacctcctcctccgccgccgcggccgcggtctccgaggcgtcctcctccacgtccctcccttcgctctccaccgccacgtcgaatgccgcctccttcgcccacgtcgccacgctcctccctccgcccacggcggcgtcgacggcagcggccgtcgcggtggtggacgtctcccgcggcttcgtcgtcgccaggccggcgtccgtcgcccttcacgacctcggcaccctcgagccgacgtccacctccgacccgggccacgacaccgcgaccgccggctcggtcaagtgcgtggcgcacgtccacggtggcaaggccgtgacgggccaccaggacgggaggctgcgcctgtggcgggtctcttcgcgcgcgcccgcccggatccgcctcgccgccgcgctccccacggtctccgaccgcctccgccggttcccgctcccgtccaaccacgtcgccgtccgacgccaccaccgccggctctggatagagcatgccgacaccgtgtccggcgtcgccgcgtccacggacggccgcctcctcttctccgtctcctgggacaagacgctcaaggtctgggccatcccgtccctccgctgcttgcagtccttgccggcgcacgacgatgccgtcaacgcggtcgccgtcgcccccgacggcacggtgtacaccggctccgctgacaggcgcgttcgtgtctgggcgcccaggcccgcgtccgacaagaccaccaagcgtcagagcaagaagccggtttactacctggcggccaccctctcccgccacacggcggcggtgaacgccgtggccgtcgggtgcggggggcaggtgctctactccggcggcaacgatcgctgcgtggtggtgtgggagcgggaggacagcgcgagccacatggtcgcgatcggggcgcttcgggggcaccgcaaggcggtgctctccatcgcgagcacggggggcgggctggttgtgagcgggtcggcggatcacacggttcgggcctggcggcgcgagacggacggacgtggccacacgtgcgtcgccgtgatcgacgggcacggcagcgccgtccgttcggtggcggtggctctcgttccgggcaagaagcagctgcaggggggagaagacggcgatgacggcggcgaggaatggagggtgtgcagcgccagctttgacggcgaggtgcgggtctggtcgttgcgggtgacgacgggtttgtagtaggttggatttgctacgatttttgacgttggaaagagtgttttcctgatttttgatctgatcttgatagctgagatagagatacgtacggtcgtgtacatacaggaaagaggtaatttatctacctgtattttttgg

SEQ ID NO: 16954 - protein, 443 aa, Triticum aestivum
  peptide (1)..(443): Ceres Seq. ID no. 14303084
  misc_feature (236)..(272): Pfam Name: Pfam Description:  WD domain, G-beta repeat
  misc_feature (10)..(439): NCBI GI NO: 38345251 NR Description: OSJNBb0011N17.12
  misc_feature (28)..(398): NCBI GI NO: 18395507 NR Description: transducin / WD-40 repeat protein family
  misc_feature (25)..(441): NCBI GI NO: 15221675 NR Description: transducin / WD-40 repeat protein family
  misc_feature (107)..(439): NCBI GI NO: 15240616 NR Description: transducin / WD-40 repeat protein family
  misc_feature (128)..(440): NCBI GI NO: 15222143 NR Description: transducin / WD-40 repeat protein family
  misc_feature (122)..(435): NCBI GI NO: 31126785 NR Description: putative WD repeat-protein
  misc_feature (128)..(440): NCBI GI NO: 17979259 NR Description: At1g49450/F13F21_11 [Arabidopsis thaliana]
  misc_feature (130)..(399): NCBI GI NO: 15225317 NR Description: transducin / WD-40 repeat protein family
  misc_feature (30)..(395): NCBI GI NO: 15231088 NR Description: transducin / WD-40 repeat protein family
  misc_feature (128)..(414): NCBI GI NO: 15220271 NR Description: transducin / WD-40 repeat protein family
MKLLPRLCMATSSAAAAGDSDASSNKLASVASTSSSTVSTSSSAAAAAVSEASSSTSLPSLSTATSNAASFAHVATLLPPPTAASTAAAVAVVDVSRGFVVARPASVALHDLGTLEPTSTSDPGHDTATAGSVKCVAHVHGGKAVTGHQDGRLRLWRVSSRAPARIRLAAALPTVSDRLRRFPLPSNHVAVRRHHRRLWIEHADTVSGVAASTDGRLLFSVSWDKTLKVWAIPSLRCLQSLPAHDDAVNAVAVAPDGTVYTGSADRRVRVWAPRPASDKTTKRQSKKPVYYLAATLSRHTAAVNAVAVGCGGQVLYSGGNDRCVVVWEREDSASHMVAIGALRGHRKAVLSIASTGGGLVVSGSADHTVRAWRRETDGRGHTCVAVIDGHGSAVRSVAVALVPGKKQLQGGEDGDDGGEEWRVCSASFDGEVRVWSLRVTTGL

SEQ ID NO: 16955 - protein, 435 aa, Triticum aestivum
  peptide (1)..(435): Ceres Seq. ID no. 14303085
  misc_feature (228)..(264): Pfam Name: Pfam Description:  WD domain, G-beta repeat
  misc_feature (2)..(431): NCBI GI NO: 38345251 NR Description: OSJNBb0011N17.12
  misc_feature (20)..(390): NCBI GI NO: 18395507 NR Description: transducin / WD-40 repeat protein family
  misc_feature (17)..(433): NCBI GI NO: 15221675 NR Description: transducin / WD-40 repeat protein family
  misc_feature (99)..(431): NCBI GI NO: 15240616 NR Description: transducin / WD-40 repeat protein family
  misc_feature (120)..(432): NCBI GI NO: 15222143 NR Description: transducin / WD-40 repeat protein family
  misc_feature (114)..(427): NCBI GI NO: 31126785 NR Description: putative WD repeat-protein
  misc_feature (120)..(432): NCBI GI NO: 17979259 NR Description: At1g49450/F13F21_11 [Arabidopsis thaliana]
  misc_feature (122)..(391): NCBI GI NO: 15225317 NR Description: transducin / WD-40 repeat protein family
  misc_feature (22)..(387): NCBI GI NO: 15231088 NR Description: transducin / WD-40 repeat protein family
  misc_feature (120)..(406): NCBI GI NO: 15220271 NR Description: transducin / WD-40 repeat protein family
MATSSAAAAGDSDASSNKLASVASTSSSTVSTSSSAAAAAVSEASSSTSLPSLSTATSNAASFAHVATLLPPPTAASTAAAVAVVDVSRGFVVARPASVALHDLGTLEPTSTSDPGHDTATAGSVKCVAHVHGGKAVTGHQDGRLRLWRVSSRAPARIRLAAALPTVSDRLRRFPLPSNHVAVRRHHRRLWIEHADTVSGVAASTDGRLLFSVSWDKTLKVWAIPSLRCLQSLPAHDDAVNAVAVAPDGTVYTGSADRRVRVWAPRPASDKTTKRQSKKPVYYLAATLSRHTAAVNAVAVGCGGQVLYSGGNDRCVVVWEREDSASHMVAIGALRGHRKAVLSIASTGGGLVVSGSADHTVRAWRRETDGRGHTCVAVIDGHGSAVRSVAVALVPGKKQLQGGEDGDDGGEEWRVCSASFDGEVRVWSLRVTTGL

SEQ ID NO: 16956 - protein, 278 aa, Triticum aestivum
  peptide (1)..(278): Ceres Seq. ID no. 14303086
  misc_feature (162)..(217): NCBI GI NO: 21322711 NR Description: pherophorin-dz1 protein
  misc_feature (179)..(211): NCBI GI NO: 21322711 NR Description: pherophorin-dz1 protein
  misc_feature (179)..(213): NCBI GI NO: 21322711 NR Description: pherophorin-dz1 protein
  misc_feature (179)..(211): NCBI GI NO: 21322711 NR Description: pherophorin-dz1 protein
  misc_feature (179)..(211): NCBI GI NO: 21322711 NR Description: pherophorin-dz1 protein
  misc_feature (179)..(211): NCBI GI NO: 21322711 NR Description: pherophorin-dz1 protein
  misc_feature (179)..(211): NCBI GI NO: 21322711 NR Description: pherophorin-dz1 protein
  misc_feature (179)..(211): NCBI GI NO: 21322711 NR Description: pherophorin-dz1 protein
  misc_feature (179)..(211): NCBI GI NO: 21322711 NR Description: pherophorin-dz1 protein
  misc_feature (179)..(211): NCBI GI NO: 21322711 NR Description: pherophorin-dz1 protein
DLPFHPSSRAASPIDEASPAPLHGHQQRRRRGRQRRQQQQARLGRLHLLLHRLNLLLRRRGRGLRGVLLHVPPFALHRHVECRLLRPRRHAPPSAHGGVDGSGRRGGGRLPRLRRRQAGVRRPSRPRHPRADVHLRPGPRHRDRRLGQVRGARPRWQGRDGPPGREAAPVAGLFARARPDPPRRRAPHGLRPPPPVPAPVQPRRRPTPPPPALDRACRHRVRRRRVHGRPPPLLRLLGQDAQGLGHPVPPLLAVLAGARRCRQRGRRRPRRHGVHRLR

SEQ ID NO: 16957 - DNA, 1775 bp, Triticum aestivum
  misc_feature (1)..(1775): Ceres Seq. ID no. 13658513
attccgatcagccacacgagtccatcaaggcaccgtccgtccctctctctctcgcccaaacgaagaggaagaagaaaaggggggaaaccgcacgcggcggcggcttccaccgccgaacgcgcccccaaaactaaatccctccaccaaaaccccaatccccatctccatccccatccccatggcgaccggctcgcgtgcgccgcgacgccgccgcccccgctcgccgccgacgctgatcgacgacctcgtgcgcgagatcttcctgagcgtacccgtggacgaccccgtgaccatcgtccgcggcgccgccggctgcaggagctggcgcagcatgctgtccgcccccgacttcgcccgcgactaccgcagggcccgcagtgcgtcgcccgtgctgggcttcctccacaacaccaccagcgaaccggaggatcgcttcgcctcctcccacttcgtccccaccgcggccttccgcttccgccccccggcgtacgaggacctctcccgctgggacgtcctcgactcccgccatggcctcgccctcctccacgcccccaagagcaagaggaacaagggcttcgttgcctgcgacctcgtcaccggccagcggtgggaattcggcgamcccgagtgccacaacgtcatgtggtggccgcacggcgatcacatggacaagcgcwtacgctgtagtgccacggtgctctgcgccaaggcccgatgtgaccagctcgactgccatggcgatggcggccctttccgcgtggccttggtgggcaccgactatagaaacttgagatcctacgccaccgtctactcatcagagactcgtgagtggagggacaccatctctgttcacaacctggaatttcgtcaatggcagggggaacagtgctgttgtgggaaataaggtctatgtccaatgtgtagagagtgacaaagtcgtggagtacaacatgcatgagcaaaaactagcwttmwyvtgatcaccctgccatttgaggaccaggaggggatcgacgagagcattgacctcatgggggtggacgacggcagtctgctctttgcatccgtgctgaaggctaaactctgcctatggactatggaggctggtcccggcggagctgcggggtgggcgcgacgctgggctatcgagctcaaaccatcgctccctgctcgtttcctcacagacaaggcaaatatgctggttggctttgctgaaggtgttggtgtcatcttcctgagtacaagggcggggctgtacgcaattgagctcaattcaggcaaaggcaacagggttcacaaagggttttttgataagatcataccctacaggagcttctgcactagagcaataggggggttggccgacctcgcacgcgcagttagccggcgtacaggagcttctgtactagagcaatagggcggttgcccggcctctgatgaagcttcacgcgcagttgttggtgctagaaggatataactaaatggcgtcaggaccttggtttactgttttgcggcccaggaagaatttgaagtgaacttgagcctcatttgctgctggttgtgttgaatagtctggttagggtggatgcgcttttgttccatttctgcttgtgcgaaaaacttgaatcctttcgtccgagttgggtgcaacgcaaactgactgcgaggagaaattttggtgatccgttgacggttttgtggcatgaattgttgcaaatttcttcttccctatctctggctgatagagatgatattattgccttgaaaatgcactg

SEQ ID NO: 16958 - protein, 300 aa, Triticum aestivum
  peptide (1)..(300): Ceres Seq. ID no. 15220644
  misc_feature (76)..(283): NCBI GI NO: 33146558 NR Description: unknown protein
  misc_feature (76)..(283): NCBI GI NO: 34915424 NR Description: hypothetical protein~similar to Oryza sativachromosome1
  misc_feature (74)..(283): NCBI GI NO: 34915420 NR Description: contains EST C98814
  misc_feature (74)..(245): NCBI GI NO: 34915428 NR Description: hypothetical protein~similar to Oryza sativachromosome1
  misc_feature (75)..(141): NCBI GI NO: 35215058 NR Description: hypothetical protein
  misc_feature (229)..(292): NCBI GI NO: 35215058 NR Description: hypothetical protein
  misc_feature (63)..(187): NCBI GI NO: 34914028 NR Description: OJ1014_G12.29
  misc_feature (81)..(215): NCBI GI NO: 34395380 NR Description: unknown protein
  misc_feature (74)..(285): NCBI GI NO: 34394503 NR Description: unknown protein
  misc_feature (67)..(122): NCBI GI NO: 34015373 NR Description: hypothetical protein OSJNBa0070J19.13
  misc_feature (207)..(207): Xaa is any aa, unknown or other
  misc_feature (226)..(226): Xaa is any aa, unknown or other
FRSATRVHQGTVRPSLSRPNEEEEEKGGNRTRRRLPPPNAPPKLNPSTKTPIPISIPIPMATGSRAPRRRRPRSPPTLIDDLVREIFLSVPVDDPVTIVRGAAGCRSWRSMLSAPDFARDYRRARSASPVLGFLHNTTSEPEDRFASSHFVPTAAFRFRPPAYEDLSRWDVLDSRHGLALLHAPKSKRNKGFVACDLVTGQRWEFGXPECHNVMWWPHGDHMDKRXRCSATVLCAKARCDQLDCHGDGGPFRVALVGTDYRNLRSYATVYSSETREWRDTISVHNLEFRQWQGEQCCCGK

SEQ ID NO: 16959 - protein, 241 aa, Triticum aestivum
  peptide (1)..(241): Ceres Seq. ID no. 15220645
  misc_feature (17)..(224): NCBI GI NO: 33146558 NR Description: unknown protein
  misc_feature (17)..(224): NCBI GI NO: 34915424 NR Description: hypothetical protein~similar to Oryza sativachromosome1
  misc_feature (15)..(224): NCBI GI NO: 34915420 NR Description: contains EST C98814
  misc_feature (15)..(186): NCBI GI NO: 34915428 NR Description: hypothetical protein~similar to Oryza sativachromosome1
  misc_feature (16)..(82): NCBI GI NO: 35215058 NR Description: hypothetical protein
  misc_feature (170)..(233): NCBI GI NO: 35215058 NR Description: hypothetical protein
  misc_feature (4)..(128): NCBI GI NO: 34914028 NR Description: OJ1014_G12.29
  misc_feature (22)..(156): NCBI GI NO: 34395380 NR Description: unknown protein
  misc_feature (15)..(226): NCBI GI NO: 34394503 NR Description: unknown protein
  misc_feature (8)..(63): NCBI GI NO: 34015373 NR Description: hypothetical protein OSJNBa0070J19.13
  misc_feature (148)..(148): Xaa is any aa, unknown or other
  misc_feature (167)..(167): Xaa is any aa, unknown or other
MATGSRAPRRRRPRSPPTLIDDLVREIFLSVPVDDPVTIVRGAAGCRSWRSMLSAPDFARDYRRARSASPVLGFLHNTTSEPEDRFASSHFVPTAAFRFRPPAYEDLSRWDVLDSRHGLALLHAPKSKRNKGFVACDLVTGQRWEFGXPECHNVMWWPHGDHMDKRXRCSATVLCAKARCDQLDCHGDGGPFRVALVGTDYRNLRSYATVYSSETREWRDTISVHNLEFRQWQGEQCCCGK

SEQ ID NO: 16960 - protein, 228 aa, Triticum aestivum
  peptide (1)..(228): Ceres Seq. ID no. 15220646
  misc_feature (208)..(208): Xaa is any aa, unknown or other
  misc_feature (226)..(226): Xaa is any aa, unknown or other
IPISHTSPSRHRPSLSLSPKRRGRRKGGKPHAAAASTAERAPKTKSLHQNPNPHLHPHPHGDRLACAATPPPPLAADADRRPRARDLPERTRGRPRDHRPRRRRLQELAQHAVRPRLRPRLPQGPQCVARAGLPPQHHQRTGGSLRLLPLRPHRGLPLPPPGVRGPLPLGRPRLPPWPRPPPRPQEQEEQGLRCLRPRHRPAVGIRRXRVPQRHVVAARRSHGQAXTL

SEQ ID NO: 16961 - DNA, 1778 bp, Triticum aestivum
  misc_feature (1)..(1778): Ceres Seq. ID no. 13590394
aatttcctcttcgtgggcgccgcctcctcctcctcccccattctcctcctaaagccctaactaaacccatcccccctcctcgcgccgccgccgccgcaatggccgccgccgcagtgctccggggcggctcccgccgcgtcctcgcctacccggccctccgcgccgccgtgatctccggccccgccgcgctccccgacgtgcccgcggccgccgggccccagccgccgccgccctcgccgctggccgctggcctatgggcgaggtccatggccaccttcacccgcacgaagccccacgtcaacgtcggcaccatcggccacgtcgaccacggcaagaccacgctcaccgccgccatcaccaaggtgctggcggaggctgggagcgccaaggcggtggcgttcgacgagatcgacaaggctcccgaggagaaagccagaggaatcaccatctccacggctcatgtcgagtatgagaccgctaagaggcactatgctcacgtggactgtccagggcacgccgattatgtcaagaacatgatcactggtgctgctcaaatggatggtggtattcttgttgtgtcagctcctgatggccccatgccacaaactaaggagcatattcttctagctcgacaggttggtgtgccatcacttgtttgtttcttaaacaaagttgatgctgttgaagatgaagagctactagaacttgtggagatggagcttcgagagctcctcagtttctacaagttcccaggcgatgatattcctatcatccgtggatctgccttgtcagccttgaatggaacaaatgaggagattggaaagaatgctattttgaaactgatggatgccgtcgattcttacatccccgatcctgtgagggtgcttgataagtctttcttgatgccaattgaaggcattttctcaatccagggtcgtggtactgttgtgactggacgtattgaacagggggtaattaaaactggtgaggatgttgaggtcataggtttgacggagagtggtcctgtgaagactacagttactggtgttgagatgttcaaaaagatgatggatcatggagaggctggtgacaatgttggtcttcttctccgtggtcttaagcgtggtgatgtcgagcgtggccaggtggtttgcaaacccggtactgtgaagacctacaaaaagtttgaggcggaaatttacgtccttaccaaggatgaaggtggtcgccacactgcattcttctcgaattacagcccacaattctacttcaggacagctgatatctgtgggaaaatcgagttgcctccggacgtgaagatggttatgcctggtgacaacgtaaccgcaatctttgagttgatgttgcctgttccgctcgaaccaggtctaagattcgcgctgagggaaggagggaggaccgtcggcgccggagttgtcgccaaagtcatgagctaataacaataatatgttccagacctttctctttttttggcgtagtgaattttagcgaacaaatgaatgttgatatgaaggatttgtccgaccggaaacacgagataaacgagagtcgagagcaaggggactggcatggatgcatcttgtgtggatgcattcagccaaccaacttcctacggataatggtttgttaccattccgaagaattgctattttttcttctcatgttgggtagtttgctgtatcataccgcagcttgttacctagacacgcttctctggcatatattagctcggtgattcaataagaccgtcttgtttc

SEQ ID NO: 16962 - protein, 484 aa, Triticum aestivum
  peptide (1)..(484): Ceres Seq. ID no. 15220964
  misc_feature (96)..(292): Pfam Name: Pfam Description:  Elongation factor Tu GTP binding domain
  misc_feature (33)..(484): NCBI GI NO: 18001149 NR Description: translational elongation factor Tu [Oryza sativa]
  misc_feature (33)..(484): NCBI GI NO: 11181616 NR Description: translational elongation factor EF-TuM [Zea mays]
  misc_feature (82)..(484): NCBI GI NO: 15236220 NR Description: elongation factor Tu (EF-Tu), putative
  misc_feature (82)..(484): NCBI GI NO: 1149571 NR Description: mitochondrial elongation factor Tu
  misc_feature (92)..(483): NCBI GI NO: 22998293 NR Description: hypothetical protein [Magnetococcus sp. MC-1]
  misc_feature (90)..(483): NCBI GI NO: 23054529 NR Description: hypothetical protein [Geobacter metallireducens]
  misc_feature (88)..(483): NCBI GI NO: 22966137 NR Description: hypothetical protein [Rhodospirillum rubrum]
  misc_feature (88)..(483): NCBI GI NO: 22966124 NR Description: hypothetical protein [Rhodospirillum rubrum]
  misc_feature (92)..(483): NCBI GI NO: 1169498 NR Description: Elongation factor Tu (EF-Tu)
  misc_feature (85)..(483): NCBI GI NO: 22965193 NR Description: hypothetical protein [Rhodopseudomonas palustris]
FPLRGRRLLLLPHSPPKALTKPIPPPRAAAAAMAAAAVLRGGSRRVLAYPALRAAVISGPAALPDVPAAAGPQPPPPSPLAAGLWARSMATFTRTKPHVNVGTIGHVDHGKTTLTAAITKVLAEAGSAKAVAFDEIDKAPEEKARGITISTAHVEYETAKRHYAHVDCPGHADYVKNMITGAAQMDGGILVVSAPDGPMPQTKEHILLARQVGVPSLVCFLNKVDAVEDEELLELVEMELRELLSFYKFPGDDIPIIRGSALSALNGTNEEIGKNAILKLMDAVDSYIPDPVRVLDKSFLMPIEGIFSIQGRGTVVTGRIEQGVIKTGEDVEVIGLTESGPVKTTVTGVEMFKKMMDHGEAGDNVGLLLRGLKRGDVERGQVVCKPGTVKTYKKFEAEIYVLTKDEGGRHTAFFSNYSPQFYFRTADICGKIELPPDVKMVMPGDNVTAIFELMLPVPLEPGLRFALREGGRTVGAGVVAKVMS

SEQ ID NO: 16963 - protein, 452 aa, Triticum aestivum
  peptide (1)..(452): Ceres Seq. ID no. 15220965
  misc_feature (64)..(260): Pfam Name: Pfam Description:  Elongation factor Tu GTP binding domain
  misc_feature (1)..(452): NCBI GI NO: 18001149 NR Description: translational elongation factor Tu [Oryza sativa]
  misc_feature (1)..(452): NCBI GI NO: 11181616 NR Description: translational elongation factor EF-TuM [Zea mays]
  misc_feature (50)..(452): NCBI GI NO: 15236220 NR Description: elongation factor Tu (EF-Tu), putative
  misc_feature (50)..(452): NCBI GI NO: 1149571 NR Description: mitochondrial elongation factor Tu
  misc_feature (60)..(451): NCBI GI NO: 22998293 NR Description: hypothetical protein [Magnetococcus sp. MC-1]
  misc_feature (58)..(451): NCBI GI NO: 23054529 NR Description: hypothetical protein [Geobacter metallireducens]
  misc_feature (56)..(451): NCBI GI NO: 22966137 NR Description: hypothetical protein [Rhodospirillum rubrum]
  misc_feature (56)..(451): NCBI GI NO: 22966124 NR Description: hypothetical protein [Rhodospirillum rubrum]
  misc_feature (60)..(451): NCBI GI NO: 1169498 NR Description: Elongation factor Tu (EF-Tu)
  misc_feature (53)..(451): NCBI GI NO: 22965193 NR Description: hypothetical protein [Rhodopseudomonas palustris]
MAAAAVLRGGSRRVLAYPALRAAVISGPAALPDVPAAAGPQPPPPSPLAAGLWARSMATFTRTKPHVNVGTIGHVDHGKTTLTAAITKVLAEAGSAKAVAFDEIDKAPEEKARGITISTAHVEYETAKRHYAHVDCPGHADYVKNMITGAAQMDGGILVVSAPDGPMPQTKEHILLARQVGVPSLVCFLNKVDAVEDEELLELVEMELRELLSFYKFPGDDIPIIRGSALSALNGTNEEIGKNAILKLMDAVDSYIPDPVRVLDKSFLMPIEGIFSIQGRGTVVTGRIEQGVIKTGEDVEVIGLTESGPVKTTVTGVEMFKKMMDHGEAGDNVGLLLRGLKRGDVERGQVVCKPGTVKTYKKFEAEIYVLTKDEGGRHTAFFSNYSPQFYFRTADICGKIELPPDVKMVMPGDNVTAIFELMLPVPLEPGLRFALREGGRTVGAGVVAKVMS

SEQ ID NO: 16964 - protein, 396 aa, Triticum aestivum
  peptide (1)..(396): Ceres Seq. ID no. 15220966
  misc_feature (8)..(204): Pfam Name: Pfam Description:  Elongation factor Tu GTP binding domain
  misc_feature (1)..(396): NCBI GI NO: 18001149 NR Description: translational elongation factor Tu [Oryza sativa]
  misc_feature (1)..(396): NCBI GI NO: 11181616 NR Description: translational elongation factor EF-TuM [Zea mays]
  misc_feature (1)..(396): NCBI GI NO: 15236220 NR Description: elongation factor Tu (EF-Tu), putative
  misc_feature (1)..(396): NCBI GI NO: 1149571 NR Description: mitochondrial elongation factor Tu
  misc_feature (4)..(395): NCBI GI NO: 22998293 NR Description: hypothetical protein [Magnetococcus sp. MC-1]
  misc_feature (2)..(395): NCBI GI NO: 23054529 NR Description: hypothetical protein [Geobacter metallireducens]
  misc_feature (1)..(395): NCBI GI NO: 22966137 NR Description: hypothetical protein [Rhodospirillum rubrum]
  misc_feature (1)..(395): NCBI GI NO: 22966124 NR Description: hypothetical protein [Rhodospirillum rubrum]
  misc_feature (4)..(395): NCBI GI NO: 1169498 NR Description: Elongation factor Tu (EF-Tu)
  misc_feature (1)..(395): NCBI GI NO: 22965193 NR Description: hypothetical protein [Rhodopseudomonas palustris]
MATFTRTKPHVNVGTIGHVDHGKTTLTAAITKVLAEAGSAKAVAFDEIDKAPEEKARGITISTAHVEYETAKRHYAHVDCPGHADYVKNMITGAAQMDGGILVVSAPDGPMPQTKEHILLARQVGVPSLVCFLNKVDAVEDEELLELVEMELRELLSFYKFPGDDIPIIRGSALSALNGTNEEIGKNAILKLMDAVDSYIPDPVRVLDKSFLMPIEGIFSIQGRGTVVTGRIEQGVIKTGEDVEVIGLTESGPVKTTVTGVEMFKKMMDHGEAGDNVGLLLRGLKRGDVERGQVVCKPGTVKTYKKFEAEIYVLTKDEGGRHTAFFSNYSPQFYFRTADICGKIELPPDVKMVMPGDNVTAIFELMLPVPLEPGLRFALREGGRTVGAGVVAKVMS

SEQ ID NO: 16965 - DNA, 1762 bp, Triticum aestivum
  misc_feature (1)..(1762): Ceres Seq. ID no. 14302071
attttgtcctgtctccctatattcccagtgtctcgctgctcgttcccatatatgcacgcacctcgcgcgtggtcaccgtgtgaagtgcctctgccagagtgccggctaccaaccccgttgccccccggaagtggaacctaggataccgcggcagccgtcgatttcatggcgccggaagaagcaagcacggccaccaccggtggcccgcgccgccgccgcgtgctagtcttccctatcccgtaccagggccacatcaaccccatgttccagctcgccggcctcctccaagaccgcggctttgccgtcaccgtcttccacacccacttcaacgcccccgacccgtcccgccaccccgcctacggcttcgtccccgtccccgacggcttgccggcgggcagccccggcacggtggcggcgaccgtcgagcacatcttcgccatcaacggctcctgcgaggcgccgttccgggagcgcctggccgccctgctggaggctcctggcggcagggacgaggtcgcgtgcctggtcgcggacgcgcacctgctgaccctcatggacgtggcgcggcagcaaggcgtgccgacgctggcgctgcgcaccggcagcgccgcctgcttccgcaacttcatggccaccccgatgctctgcgacaagggctaccttccggtgagcgcggagtcgcagctggacgcgccggtgagggagctgccgccgtaccgcgtccgggacctgatggccgtcaccagcagccgccacgagcacgatctggtgtgcaagctgctggcccgggccgtcgaggcagtgagcacctcggctggattcatactcaacaccttcgacgcgctggaggccgacgacctggcggcgacccggcgggacctcgccggcgtgccggtgttcgaggtcggcccgctccacaagatctccccggcgtcgtccagcagcctcctgccgcaggaccgctcctgcctggactggctggacgcgcaagccccggcgtccgtgctgtacatcagcttcggcagcctggcgagcatgagcggcgaggacctggccgaggcggcgtggggcgtcgccaacagcaggcagccgttcctgtgggcgctccggccgggcctcgcccgcggcgccgccctgcccgacgggttcggcgcggagaccgaaggccgtggactggtcgtgggctgggcgccgcaggaggaggtgctggcgcacggcgccgtgggcgggttctggacgcacggcgggtggaactcggcgctggagggcgcgtgcgggggcgtgccgatgctctgccggccctgcttcggcgaccagatgggcaacgcgaggtacgtggagcacgtgtggcgcgcgggcatcgcgctggacggcggcgtgctcgagcggggagcggtggagcgggccgtccggaggctcatgcggagcgaggagggggaggagatgagggggcgagcccgggagctcgggagcagagcggcggaggccatcgccgagggtgggtcgtctcgccacagtgtcgacaagctggtgaaccacatcatgtcgctgtggaagtgagttccgagtactgccagtagaccgatgcttgcattttgtcctctttaaaatgtttggatcttttcatgactatataagacttcattgaaatcaccggcacaaaaccatggaagttttatttgttgatcaagtgtcctcaaaagcttccatgttttatcccttttttccaacgcaggctcaccatatatgcccgtgaatctcc

SEQ ID NO: 16966 - protein, 464 aa, Triticum aestivum
  peptide (1)..(464): Ceres Seq. ID no. 14302072
  misc_feature (17)..(457): Pfam Name: Pfam Description:  UDP-glucoronosyl and UDP-glucosyl transferase
  misc_feature (5)..(462): NCBI GI NO: 34897378 NR Description: putative UDP-glucosyltransferase
  misc_feature (6)..(462): NCBI GI NO: 34900662 NR Description: glucuronosyl transferase-like protein
  misc_feature (7)..(461): NCBI GI NO: 34395172 NR Description: putative UDP-glucosyltransferase
  misc_feature (12)..(462): NCBI GI NO: 34900682 NR Description: glucuronosyl transferase-like protein
  misc_feature (6)..(445): NCBI GI NO: 18033230 NR Description: UDP-glucosyltransferase BX9 [Zea mays]
  misc_feature (17)..(462): NCBI GI NO: 33146634 NR Description: putative UDP-glucosyltransferase
  misc_feature (9)..(457): NCBI GI NO: 18033228 NR Description: UDP-glucosyltransferase BX8 [Zea mays]
  misc_feature (46)..(462): NCBI GI NO: 33146633 NR Description: putative UDP-glucosyltransferase
  misc_feature (46)..(453): NCBI GI NO: 34900678 NR Description: glucuronosyl transferase-like protein
  misc_feature (291)..(462): NCBI GI NO: 34900680 NR Description: contains ESTsAU095171
MAPEEASTATTGGPRRRRVLVFPIPYQGHINPMFQLAGLLQDRGFAVTVFHTHFNAPDPSRHPAYGFVPVPDGLPAGSPGTVAATVEHIFAINGSCEAPFRERLAALLEAPGGRDEVACLVADAHLLTLMDVARQQGVPTLALRTGSAACFRNFMATPMLCDKGYLPVSAESQLDAPVRELPPYRVRDLMAVTSSRHEHDLVCKLLARAVEAVSTSAGFILNTFDALEADDLAATRRDLAGVPVFEVGPLHKISPASSSSLLPQDRSCLDWLDAQAPASVLYISFGSLASMSGEDLAEAAWGVANSRQPFLWALRPGLARGAALPDGFGAETEGRGLVVGWAPQEEVLAHGAVGGFWTHGGWNSALEGACGGVPMLCRPCFGDQMGNARYVEHVWRAGIALDGGVLERGAVERAVRRLMRSEEGEEMRGRARELGSRAAEAIAEGGSSRHSVDKLVNHIMSLWK

SEQ ID NO: 16967 - protein, 432 aa, Triticum aestivum
  peptide (1)..(432): Ceres Seq. ID no. 14302073
  misc_feature (1)..(425): Pfam Name: Pfam Description:  UDP-glucoronosyl and UDP-glucosyl transferase
  misc_feature (1)..(430): NCBI GI NO: 34897378 NR Description: putative UDP-glucosyltransferase
  misc_feature (1)..(430): NCBI GI NO: 34900662 NR Description: glucuronosyl transferase-like protein
  misc_feature (1)..(429): NCBI GI NO: 34395172 NR Description: putative UDP-glucosyltransferase
  misc_feature (1)..(430): NCBI GI NO: 34900682 NR Description: glucuronosyl transferase-like protein
  misc_feature (1)..(413): NCBI GI NO: 18033230 NR Description: UDP-glucosyltransferase BX9 [Zea mays]
  misc_feature (1)..(430): NCBI GI NO: 33146634 NR Description: putative UDP-glucosyltransferase
  misc_feature (1)..(425): NCBI GI NO: 18033228 NR Description: UDP-glucosyltransferase BX8 [Zea mays]
  misc_feature (14)..(430): NCBI GI NO: 33146633 NR Description: putative UDP-glucosyltransferase
  misc_feature (14)..(421): NCBI GI NO: 34900678 NR Description: glucuronosyl transferase-like protein
  misc_feature (259)..(430): NCBI GI NO: 34900680 NR Description: contains ESTsAU095171
MFQLAGLLQDRGFAVTVFHTHFNAPDPSRHPAYGFVPVPDGLPAGSPGTVAATVEHIFAINGSCEAPFRERLAALLEAPGGRDEVACLVADAHLLTLMDVARQQGVPTLALRTGSAACFRNFMATPMLCDKGYLPVSAESQLDAPVRELPPYRVRDLMAVTSSRHEHDLVCKLLARAVEAVSTSAGFILNTFDALEADDLAATRRDLAGVPVFEVGPLHKISPASSSSLLPQDRSCLDWLDAQAPASVLYISFGSLASMSGEDLAEAAWGVANSRQPFLWALRPGLARGAALPDGFGAETEGRGLVVGWAPQEEVLAHGAVGGFWTHGGWNSALEGACGGVPMLCRPCFGDQMGNARYVEHVWRAGIALDGGVLERGAVERAVRRLMRSEEGEEMRGRARELGSRAAEAIAEGGSSRHSVDKLVNHIMSLWK

SEQ ID NO: 16968 - protein, 335 aa, Triticum aestivum
  peptide (1)..(335): Ceres Seq. ID no. 14302074
  misc_feature (1)..(328): Pfam Name: Pfam Description:  UDP-glucoronosyl and UDP-glucosyl transferase
  misc_feature (1)..(333): NCBI GI NO: 34897378 NR Description: putative UDP-glucosyltransferase
  misc_feature (1)..(333): NCBI GI NO: 34900662 NR Description: glucuronosyl transferase-like protein
  misc_feature (1)..(332): NCBI GI NO: 34395172 NR Description: putative UDP-glucosyltransferase
  misc_feature (1)..(333): NCBI GI NO: 34900682 NR Description: glucuronosyl transferase-like protein
  misc_feature (1)..(316): NCBI GI NO: 18033230 NR Description: UDP-glucosyltransferase BX9 [Zea mays]
  misc_feature (1)..(333): NCBI GI NO: 33146634 NR Description: putative UDP-glucosyltransferase
  misc_feature (1)..(328): NCBI GI NO: 18033228 NR Description: UDP-glucosyltransferase BX8 [Zea mays]
  misc_feature (1)..(333): NCBI GI NO: 33146633 NR Description: putative UDP-glucosyltransferase
  misc_feature (1)..(324): NCBI GI NO: 34900678 NR Description: glucuronosyl transferase-like protein
  misc_feature (162)..(333): NCBI GI NO: 34900680 NR Description: contains ESTsAU095171
MDVARQQGVPTLALRTGSAACFRNFMATPMLCDKGYLPVSAESQLDAPVRELPPYRVRDLMAVTSSRHEHDLVCKLLARAVEAVSTSAGFILNTFDALEADDLAATRRDLAGVPVFEVGPLHKISPASSSSLLPQDRSCLDWLDAQAPASVLYISFGSLASMSGEDLAEAAWGVANSRQPFLWALRPGLARGAALPDGFGAETEGRGLVVGWAPQEEVLAHGAVGGFWTHGGWNSALEGACGGVPMLCRPCFGDQMGNARYVEHVWRAGIALDGGVLERGAVERAVRRLMRSEEGEEMRGRARELGSRAAEAIAEGGSSRHSVDKLVNHIMSLWK

SEQ ID NO: 16969 - DNA, 1773 bp, Triticum aestivum
  misc_feature (1)..(1773): Ceres Seq. ID no. 14303105
cttccacgcgcttgtctgccggccgaatcgattccaagtccaactctgagctgttccccatcgccattttccgtctccatttctccccaccttccccgacccccaaatccccacgcgaatccgcccccgccgccatggcctccccgccgggcgccgcccgcctcgccgccctgctgctcctcgcgctcctcgccgggcccgccgcgtcccgcttcgccccggcggacaaccacctcatcgcctgcggcgcgacggccccggccgtcctccccgacggccgccgcttcgtcccggactccggctgcgcgtccatgaccctccgctccgcggcccccgccctcccgtccgccgcccccgctgcgcccgcgcacgagccgccctcccctctccacgccgccgcgcgcgtcttctcctgccacgcctcctacgacctcgccgtgcgccgccgcgggcgccacgtcctgcgcctccacttctaccccttcagccccgccctcgcctccgcgcgcttccacgtcggcgccgggggcttcctcctcctccacaacttcaccgcctcgtcccccgtcgtcaaggacttcctgctccccgtcgacgccgacgtcctcgtcctcaccttcgtccccgaggccggatccgccgccttcgtcaacgccatcgagctcttctcggcgcccgaggagctcgtcggcgacatcgccaccctcgtcgccgctgacggcgtcaaccgcaccgacgggctctcctcgcaggtcttcgagacgctctaccgggtcaacgtcgccggccgcaaggtcaccccgttcaacgacacgctgtggcggacatgggtcaacgacgagggcttcctcgtcaacaaggaatcatccagcagcaaggcatggtcattcggtggccggattgcttaccccaaggacagcaggttgatgacccgagaggtggctccggacaacgtctacaactcggcgaggtcggtgaggtcagacggcaatctgacatggggtttccctgtgcccgctcgcaaccggtacctcgtgcgcatgcacttctgtgacattgtgagcaaggcactgtatcagctctacttcagtatctatgtcaatggtcatctcgcagtgaaggattttgacatttccagcaccactggatacttggcctatccgtattacatcgactatgttgtggacgttgaggatgaagggatgctgaaactggccattggtggctccaagatgagccagcctggagaagcgagtggtttcctgaatgggctcgagataatgaggatgaacaaaacgggtggcggcatggacggggatttccctgttgttctggacatggggtacctggtcagtaaggggtttggggaattcgctcgctcactgctgtgtggtttagtcttcgccgggctgtttttggttttggtcatgctggtgctgaggttgaggaccgagctgaaaaacaatggaacgctttggttcagccagtcagtggattctggtgaggggaagttggctaaagcatatcagcttgtgcccaccaagacagactattaagcagcatgagatctgagaagcttcaacttgtgtctgttatctgtatcccatggcctaatcttgtgcttcgtttgtaagtattgtagttttctagttctacatttctatgcctttcatggttgaagtttcaattgtttgagcttggccagtgcagagcacaactattgtgtgtacttaagaattaagacgtgtttgtattgctactacttcgctaaat

SEQ ID NO: 16970 - protein, 517 aa, Triticum aestivum
  peptide (1)..(517): Ceres Seq. ID no. 14303106
  misc_feature (45)..(490): NCBI GI NO: 15237872 NR Description: protein kinase family [Arabidopsis thaliana]
  misc_feature (53)..(357): NCBI GI NO: 24417422 NR Description: unknown [Arabidopsis thaliana]
  misc_feature (202)..(438): NCBI GI NO: 18411279 NR Description: fringe-related protein [Arabidopsis thaliana]
  misc_feature (68)..(440): NCBI GI NO: 14488367 NR Description: putative protein kinase
  misc_feature (56)..(487): NCBI GI NO: 15240228 NR Description: rprotein kinase family [Arabidopsis thaliana]
  misc_feature (55)..(480): NCBI GI NO: 15234944 NR Description: protein kinase family [Arabidopsis thaliana]
  misc_feature (63)..(470): NCBI GI NO: 15226565 NR Description: protein kinase family [Arabidopsis thaliana]
  misc_feature (54)..(496): NCBI GI NO: 24796812 NR Description: putative receptor-like protein kinase
  misc_feature (66)..(507): NCBI GI NO: 25553554 NR Description: OSJNBa0038F22.1
  misc_feature (66)..(507): NCBI GI NO: 34898020 NR Description: Similar to putative receptor-like protein kinase
STRLSAGRIDSKSNSELFPIAIFRLHFSPPSPTPKSPRESAPAAMASPPGAARLAALLLLALLAGPAASRFAPADNHLIACGATAPAVLPDGRRFVPDSGCASMTLRSAAPALPSAAPAAPAHEPPSPLHAAARVFSCHASYDLAVRRRGRHVLRLHFYPFSPALASARFHVGAGGFLLLHNFTASSPVVKDFLLPVDADVLVLTFVPEAGSAAFVNAIELFSAPEELVGDIATLVAADGVNRTDGLSSQVFETLYRVNVAGRKVTPFNDTLWRTWVNDEGFLVNKESSSSKAWSFGGRIAYPKDSRLMTREVAPDNVYNSARSVRSDGNLTWGFPVPARNRYLVRMHFCDIVSKALYQLYFSIYVNGHLAVKDFDISSTTGYLAYPYYIDYVVDVEDEGMLKLAIGGSKMSQPGEASGFLNGLEIMRMNKTGGGMDGDFPVVLDMGYLVSKGFGEFARSLLCGLVFAGLFLVLVMLVLRLRTELKNNGTLWFSQSVDSGEGKLAKAYQLVPTKTDY

SEQ ID NO: 16971 - protein, 473 aa, Triticum aestivum
  peptide (1)..(473): Ceres Seq. ID no. 14303107
  misc_feature (1)..(446): NCBI GI NO: 15237872 NR Description: protein kinase family [Arabidopsis thaliana]
  misc_feature (9)..(313): NCBI GI NO: 24417422 NR Description: unknown [Arabidopsis thaliana]
  misc_feature (158)..(394): NCBI GI NO: 18411279 NR Description: fringe-related protein [Arabidopsis thaliana]
  misc_feature (24)..(396): NCBI GI NO: 14488367 NR Description: putative protein kinase
  misc_feature (12)..(443): NCBI GI NO: 15240228 NR Description: rprotein kinase family [Arabidopsis thaliana]
  misc_feature (11)..(436): NCBI GI NO: 15234944 NR Description: protein kinase family [Arabidopsis thaliana]
  misc_feature (19)..(426): NCBI GI NO: 15226565 NR Description: protein kinase family [Arabidopsis thaliana]
  misc_feature (10)..(452): NCBI GI NO: 24796812 NR Description: putative receptor-like protein kinase
  misc_feature (22)..(463): NCBI GI NO: 25553554 NR Description: OSJNBa0038F22.1
  misc_feature (22)..(463): NCBI GI NO: 34898020 NR Description: Similar to putative receptor-like protein kinase
MASPPGAARLAALLLLALLAGPAASRFAPADNHLIACGATAPAVLPDGRRFVPDSGCASMTLRSAAPALPSAAPAAPAHEPPSPLHAAARVFSCHASYDLAVRRRGRHVLRLHFYPFSPALASARFHVGAGGFLLLHNFTASSPVVKDFLLPVDADVLVLTFVPEAGSAAFVNAIELFSAPEELVGDIATLVAADGVNRTDGLSSQVFETLYRVNVAGRKVTPFNDTLWRTWVNDEGFLVNKESSSSKAWSFGGRIAYPKDSRLMTREVAPDNVYNSARSVRSDGNLTWGFPVPARNRYLVRMHFCDIVSKALYQLYFSIYVNGHLAVKDFDISSTTGYLAYPYYIDYVVDVEDEGMLKLAIGGSKMSQPGEASGFLNGLEIMRMNKTGGGMDGDFPVVLDMGYLVSKGFGEFARSLLCGLVFAGLFLVLVMLVLRLRTELKNNGTLWFSQSVDSGEGKLAKAYQLVPTKTDY

SEQ ID NO: 16972 - protein, 414 aa, Triticum aestivum
  peptide (1)..(414): Ceres Seq. ID no. 14303108
  misc_feature (1)..(387): NCBI GI NO: 15237872 NR Description: protein kinase family [Arabidopsis thaliana]
  misc_feature (1)..(254): NCBI GI NO: 24417422 NR Description: unknown [Arabidopsis thaliana]
  misc_feature (99)..(335): NCBI GI NO: 18411279 NR Description: fringe-related protein [Arabidopsis thaliana]
  misc_feature (1)..(337): NCBI GI NO: 14488367 NR Description: putative protein kinase
  misc_feature (1)..(384): NCBI GI NO: 15240228 NR Description: rprotein kinase family [Arabidopsis thaliana]
  misc_feature (1)..(377): NCBI GI NO: 15234944 NR Description: protein kinase family [Arabidopsis thaliana]
  misc_feature (1)..(367): NCBI GI NO: 15226565 NR Description: protein kinase family [Arabidopsis thaliana]
  misc_feature (1)..(393): NCBI GI NO: 24796812 NR Description: putative receptor-like protein kinase
  misc_feature (1)..(404): NCBI GI NO: 25553554 NR Description: OSJNBa0038F22.1
  misc_feature (1)..(404): NCBI GI NO: 34898020 NR Description: Similar to putative receptor-like protein kinase
MTLRSAAPALPSAAPAAPAHEPPSPLHAAARVFSCHASYDLAVRRRGRHVLRLHFYPFSPALASARFHVGAGGFLLLHNFTASSPVVKDFLLPVDADVLVLTFVPEAGSAAFVNAIELFSAPEELVGDIATLVAADGVNRTDGLSSQVFETLYRVNVAGRKVTPFNDTLWRTWVNDEGFLVNKESSSSKAWSFGGRIAYPKDSRLMTREVAPDNVYNSARSVRSDGNLTWGFPVPARNRYLVRMHFCDIVSKALYQLYFSIYVNGHLAVKDFDISSTTGYLAYPYYIDYVVDVEDEGMLKLAIGGSKMSQPGEASGFLNGLEIMRMNKTGGGMDGDFPVVLDMGYLVSKGFGEFARSLLCGLVFAGLFLVLVMLVLRLRTELKNNGTLWFSQSVDSGEGKLAKAYQLVPTKTDY

SEQ ID NO: 16973 - DNA, 949 bp, Triticum aestivum
  misc_feature (1)..(949): Ceres Seq. ID no. 15179836
aattagtcttgcaggagcaagagcgatgtctccgactgatccccgcctcctcttcatcctgtttgtcgtctttgccccggttccggccagggcggtcgacccgaccgtattggccacttttgcgggcatggggatccgcgtctccaccatggagttcgtcatcgacctggacgacctcaacatgaggcaggacatgctgataaccgtggcgacggcgagaagcatgaagagcgtcgagggactaaaggtggcgctcaagcagaccgacatcacggagctgccgacggaagtagtcctcctcaacttggtggtgccggagcggggctcctgcacgctggcgattcgagctgacaatttttatctgttagcatacacaaatgaccgtttggagtggcaggcattcctcgggagggagcacctggttccgacatcgaccccgctcccgttcacgtcggagtacaacgaaagaggcatggggccccgcaccggcctcgcggcgctccagctgagcagggcggccgtgatcgcggcggtcaacacactgctctcctcccgtcggggcgacacgggcgaccaaggccccctcaagcgcgcgctggccacgatcacgctagtcttctgcgaaggctccaggttccgcttcgtccgcgaccgggtcagagcaggctgggagaccgggagccagatcacgaaggatgaggcgctgagggtgacactctgggcaaagatcagctgcgccctcgccaagggctggaccgggggggcgacagccaggctcgcagaaagaggtggcttcccaaatactctcgagggtgccaagtcttttctgctggtactagtttacggcacgaaatgcttgagcgtcatggacgctctccctgtaacctaatctgtggctgcacctttgtttcgccaatgaataataaagaataaaggatggctccgtttc

SEQ ID NO: 16974 - protein, 287 aa, Triticum aestivum
  peptide (1)..(287): Ceres Seq. ID no. 15179837
  misc_feature (50)..(246): Pfam Name: Pfam Description:  Ribosome inactivating protein
  misc_feature (8)..(228): NCBI GI NO: 29244620 NR Description: hypothetical protein
  misc_feature (50)..(246): NCBI GI NO: 18150092 NR Description: RA39p [Oryza sativa]
  misc_feature (100)..(238): NCBI GI NO: 34394615 NR Description: hypothetical protein
  misc_feature (9)..(239): NCBI GI NO: 29150390 NR Description: hypothetical protein
  misc_feature (88)..(254): NCBI GI NO: 31712080 NR Description: hypothetical protein
MSPTDPRLLFILFVVFAPVPARAVDPTVLATFAGMGIRVSTMEFVIDLDDLNMRQDMLITVATARSMKSVEGLKVALKQTDITELPTEVVLLNLVVPERGSCTLAIRADNFYLLAYTNDRLEWQAFLGREHLVPTSTPLPFTSEYNERGMGPRTGLAALQLSRAAVIAAVNTLLSSRRGDTGDQGPLKRALATITLVFCEGSRFRFVRDRVRAGWETGSQITKDEALRVTLWAKISCALAKGWTGGATARLAERGGFPNTLEGAKSFLLVLVYGTKCLSVMDALPVT

SEQ ID NO: 16975 - protein, 253 aa, Triticum aestivum
  peptide (1)..(253): Ceres Seq. ID no. 15179838
  misc_feature (16)..(212): Pfam Name: Pfam Description:  Ribosome inactivating protein
  misc_feature (1)..(194): NCBI GI NO: 29244620 NR Description: hypothetical protein
  misc_feature (16)..(212): NCBI GI NO: 18150092 NR Description: RA39p [Oryza sativa]
  misc_feature (66)..(204): NCBI GI NO: 34394615 NR Description: hypothetical protein
  misc_feature (1)..(205): NCBI GI NO: 29150390 NR Description: hypothetical protein
  misc_feature (54)..(220): NCBI GI NO: 31712080 NR Description: hypothetical protein
MGIRVSTMEFVIDLDDLNMRQDMLITVATARSMKSVEGLKVALKQTDITELPTEVVLLNLVVPERGSCTLAIRADNFYLLAYTNDRLEWQAFLGREHLVPTSTPLPFTSEYNERGMGPRTGLAALQLSRAAVIAAVNTLLSSRRGDTGDQGPLKRALATITLVFCEGSRFRFVRDRVRAGWETGSQITKDEALRVTLWAKISCALAKGWTGGATARLAERGGFPNTLEGAKSFLLVLVYGTKCLSVMDALPVT

SEQ ID NO: 16976 - protein, 295 aa, Triticum aestivum
  peptide (1)..(295): Ceres Seq. ID no. 15179839
  misc_feature (58)..(254): Pfam Name: Pfam Description:  Ribosome inactivating protein
  misc_feature (16)..(236): NCBI GI NO: 29244620 NR Description: hypothetical protein
  misc_feature (58)..(254): NCBI GI NO: 18150092 NR Description: RA39p [Oryza sativa]
  misc_feature (108)..(246): NCBI GI NO: 34394615 NR Description: hypothetical protein
  misc_feature (17)..(247): NCBI GI NO: 29150390 NR Description: hypothetical protein
  misc_feature (96)..(262): NCBI GI NO: 31712080 NR Description: hypothetical protein
ISLAGARAMSPTDPRLLFILFVVFAPVPARAVDPTVLATFAGMGIRVSTMEFVIDLDDLNMRQDMLITVATARSMKSVEGLKVALKQTDITELPTEVVLLNLVVPERGSCTLAIRADNFYLLAYTNDRLEWQAFLGREHLVPTSTPLPFTSEYNERGMGPRTGLAALQLSRAAVIAAVNTLLSSRRGDTGDQGPLKRALATITLVFCEGSRFRFVRDRVRAGWETGSQITKDEALRVTLWAKISCALAKGWTGGATARLAERGGFPNTLEGAKSFLLVLVYGTKCLSVMDALPVT

SEQ ID NO: 16977 - DNA, 1003 bp, Triticum aestivum
  misc_feature (1)..(1003): Ceres Seq. ID no. 12784040
agaaacaaccccaagcggcagccgaagaactcagaacctccgagagagacgacccaactcagaattcgcaagcctcgcttactcgccggagcagcccacgcaccagatggccgcggcaatggaggtcgacgccggcggagagaagccgtcggagaaggagctcttcctcgccgcggagtccggggacgccagcgtcttcgcctccctcgcccccgccgacctcgccgccgctctctccctccgcaacgaggacggccgctccctcgtccacgtcgccgccgcctccgcccgccccgaggccgtcgccgcgcttgtggctgcggggggcgacgccgtggcgagcgccgtgaacgggaaggacgaggaagggtgggcgccgattcactcggtggccagcagcggcaacgccgagatcctcgacatcctgctcggtcacggtgcaaatgttgatttgactactgatgctggccgaactgctcttcactatgctgctagtaaagggaggcttaacattgctgaaacgctgatagctcatcgtgcaaatgtcaacaagaaagataagtttggctgcacacccctgcatagagctgcaagtactggaaatgctgagctgtgtgaatacctgcttgaagaaggcgcagatattgatgcagttgacaagctaggacaatcacctctaatgcatgccgtcatatgcgaggacagaggggttgcccttctgctgatcagacatggtgccgatgttgacattgaagacaaggagggctacactgtccttggccgagcctctgatagcttcaggcctgcactgattgatgcggccaaggcaatgctcgaaggctgaggatgtttagctgccctaaggtaaaagatagatgggagaacatctggaacagaaaaaccgtcgttgtgtacctcgtgatacaagtatgagctgtttccctccaaaatcagattgaccagtcagactttttgttcgtggttaatgattctcgtgttgaag

SEQ ID NO: 16978 - protein, 280 aa, Triticum aestivum
  peptide (1)..(280): Ceres Seq. ID no. 12784041
  misc_feature (188)..(220): Pfam Name: Pfam Description:  Ankyrin repeat
  misc_feature (38)..(280): NCBI GI NO: 15341604 NR Description: putative ankyrin [Oryza sativa]
  misc_feature (40)..(280): NCBI GI NO: 30678058 NR Description: ankyrin -related [Arabidopsis thaliana]
  misc_feature (40)..(280): NCBI GI NO: 25295712 NR Description: probable ankyrin [imported] - Arabidopsis thaliana
  misc_feature (85)..(265): NCBI GI NO: 28274852 NR Description: ankyrin repeat protein E4_2 [synthetic construct]
  misc_feature (58)..(280): NCBI GI NO: 4506217 NR Description: proteasome 26S non-ATPase subunit 10 isoform 1
  misc_feature (58)..(280): NCBI GI NO: 39654744 NR Description: Chain A, X-Ray Structure Of Human Gankyrin
  misc_feature (85)..(265): NCBI GI NO: 28274854 NR Description: ankyrin repeat protein E4_8 [synthetic construct]
  misc_feature (22)..(259): NCBI GI NO: 34854366 NR Description: similar to ankycorbin [Rattus norvegicus]
  misc_feature (82)..(280): NCBI GI NO: 37681913 NR Description: proteasome 26S subunit, non-ATPase, 10
  misc_feature (31)..(259): NCBI GI NO: 32481927 NR Description: RAI14 isoform [Homo sapiens]
ETTPSGSRRTQNLRERRPNSEFASLAYSPEQPTHQMAAAMEVDAGGEKPSEKELFLAAESGDASVFASLAPADLAAALSLRNEDGRSLVHVAAASARPEAVAALVAAGGDAVASAVNGKDEEGWAPIHSVASSGNAEILDILLGHGANVDLTTDAGRTALHYAASKGRLNIAETLIAHRANVNKKDKFGCTPLHRAASTGNAELCEYLLEEGADIDAVDKLGQSPLMHAVICEDRGVALLLIRHGADVDIEDKEGYTVLGRASDSFRPALIDAAKAMLEG

SEQ ID NO: 16979 - protein, 245 aa, Triticum aestivum
  peptide (1)..(245): Ceres Seq. ID no. 12784042
  misc_feature (153)..(185): Pfam Name: Pfam Description:  Ankyrin repeat
  misc_feature (3)..(245): NCBI GI NO: 15341604 NR Description: putative ankyrin [Oryza sativa]
  misc_feature (5)..(245): NCBI GI NO: 30678058 NR Description: ankyrin -related [Arabidopsis thaliana]
  misc_feature (5)..(245): NCBI GI NO: 25295712 NR Description: probable ankyrin [imported] - Arabidopsis thaliana
  misc_feature (50)..(230): NCBI GI NO: 28274852 NR Description: ankyrin repeat protein E4_2 [synthetic construct]
  misc_feature (23)..(245): NCBI GI NO: 4506217 NR Description: proteasome 26S non-ATPase subunit 10 isoform 1
  misc_feature (23)..(245): NCBI GI NO: 39654744 NR Description: Chain A, X-Ray Structure Of Human Gankyrin
  misc_feature (50)..(230): NCBI GI NO: 28274854 NR Description: ankyrin repeat protein E4_8 [synthetic construct]
  misc_feature (1)..(224): NCBI GI NO: 34854366 NR Description: similar to ankycorbin [Rattus norvegicus]
  misc_feature (47)..(245): NCBI GI NO: 37681913 NR Description: proteasome 26S subunit, non-ATPase, 10
  misc_feature (1)..(224): NCBI GI NO: 32481927 NR Description: RAI14 isoform [Homo sapiens]
MAAAMEVDAGGEKPSEKELFLAAESGDASVFASLAPADLAAALSLRNEDGRSLVHVAAASARPEAVAALVAAGGDAVASAVNGKDEEGWAPIHSVASSGNAEILDILLGHGANVDLTTDAGRTALHYAASKGRLNIAETLIAHRANVNKKDKFGCTPLHRAASTGNAELCEYLLEEGADIDAVDKLGQSPLMHAVICEDRGVALLLIRHGADVDIEDKEGYTVLGRASDSFRPALIDAAKAMLEG

SEQ ID NO: 16980 - protein, 241 aa, Triticum aestivum
  peptide (1)..(241): Ceres Seq. ID no. 12784043
  misc_feature (149)..(181): Pfam Name: Pfam Description:  Ankyrin repeat
  misc_feature (1)..(241): NCBI GI NO: 15341604 NR Description: putative ankyrin [Oryza sativa]
  misc_feature (1)..(241): NCBI GI NO: 30678058 NR Description: ankyrin -related [Arabidopsis thaliana]
  misc_feature (1)..(241): NCBI GI NO: 25295712 NR Description: probable ankyrin [imported] - Arabidopsis thaliana
  misc_feature (46)..(226): NCBI GI NO: 28274852 NR Description: ankyrin repeat protein E4_2 [synthetic construct]
  misc_feature (19)..(241): NCBI GI NO: 4506217 NR Description: proteasome 26S non-ATPase subunit 10 isoform 1
  misc_feature (19)..(241): NCBI GI NO: 39654744 NR Description: Chain A, X-Ray Structure Of Human Gankyrin
  misc_feature (46)..(226): NCBI GI NO: 28274854 NR Description: ankyrin repeat protein E4_8 [synthetic construct]
  misc_feature (1)..(220): NCBI GI NO: 34854366 NR Description: similar to ankycorbin [Rattus norvegicus]
  misc_feature (43)..(241): NCBI GI NO: 37681913 NR Description: proteasome 26S subunit, non-ATPase, 10
  misc_feature (1)..(220): NCBI GI NO: 32481927 NR Description: RAI14 isoform [Homo sapiens]
MEVDAGGEKPSEKELFLAAESGDASVFASLAPADLAAALSLRNEDGRSLVHVAAASARPEAVAALVAAGGDAVASAVNGKDEEGWAPIHSVASSGNAEILDILLGHGANVDLTTDAGRTALHYAASKGRLNIAETLIAHRANVNKKDKFGCTPLHRAASTGNAELCEYLLEEGADIDAVDKLGQSPLMHAVICEDRGVALLLIRHGADVDIEDKEGYTVLGRASDSFRPALIDAAKAMLEG

SEQ ID NO: 16981 - DNA, 841 bp, Triticum aestivum
  misc_feature (1)..(841): Ceres Seq. ID no. 13663461
accgcccagcccagcccagacgccgaccgacgccgctcgcgctcccgtctctcggcgatcctacctcctccgacgaccggctgcaaccccggccgccctcgccgccagatccgcgcggccacgcccacccgcctcgctcctcctctcgggcctcggcagatctacgcgggccgcgaccgtccctagccatgattaatttcgtgctcctaatcagccgccagggcaaggtgaggctcaccaagtggtactcgccttacacccagaaggagaggactaaggtcatccgtgagcttagtgggctcattcttactcgagggccaaaactctgcaactttgtcgagtggagaggttacaaggttgtgtacagaaggtatgccagcctctatttctgcatgtgtatcgatgctgatgataatgagctcgaagtccttgaaattatccatcattttgttgagatactggaccgttatttcggcagtgtatgcgagctggatttgatattcaatttccacaaggcgtactacgtactggatgagattctcatttctggtgagcttcaggaatctagcaagaagaatgttgcaagacttattgctgcacaggattcgttggtagaggctgctaaagaggaagctggctccatcagtaacatcattgcccaggctacgaagtaaaagtccgcgtctgatgatgccccgctgctctttggtttatgcatatgttggtaaatttgatgtaatagctcctttgctgtatccattttcccaaagaaatacgacttcccggattcaggcctgttcagaatgagtgatatgtaactacaatgcatgtgttcctttgc

SEQ ID NO: 16982 - protein, 223 aa, Triticum aestivum
  peptide (1)..(223): Ceres Seq. ID no. 13663462
  misc_feature (64)..(204): Pfam Name: Pfam Description:  Clathrin adaptor complex small chain
  misc_feature (61)..(223): NCBI GI NO: 34897116 NR Description: putative clathrin assembly protein [Oryza sativa]
  misc_feature (63)..(223): NCBI GI NO: 1762309 NR Description: AP-1 Golgi-related complex component
  misc_feature (63)..(223): NCBI GI NO: 18398407 NR Description: clathrin assembly protein AP19, small subunit
  misc_feature (63)..(222): NCBI GI NO: 15237005 NR Description: clathrin assembly protein AP19 homolog
  misc_feature (63)..(223): NCBI GI NO: 2231698 NR Description: clathrin assembly protein AP19
  misc_feature (63)..(208): NCBI GI NO: 23508378 NR Description: clathrin assembly protein AP19, putative
  misc_feature (63)..(214): NCBI GI NO: 23480730 NR Description: clathrin assembly protein AP19, small subunit
  misc_feature (63)..(171): NCBI GI NO: 30690340 NR Description: clathrin assembly protein AP19 homolog
  misc_feature (7)..(209): NCBI GI NO: 34880078 NR Description: similar to Adapter-related protein complex 1 sigma1B subunit
  misc_feature (64)..(223): NCBI GI NO: 19114322 NR Description: putative clathrin-associated protein
RPAQPRRRPTPLALPSLGDPTSSDDRLQPRPPSPPDPRGHAHPPRSSSRASADLRGPRPSLAMINFVLLISRQGKVRLTKWYSPYTQKERTKVIRELSGLILTRGPKLCNFVEWRGYKVVYRRYASLYFCMCIDADDNELEVLEIIHHFVEILDRYFGSVCELDLIFNFHKAYYVLDEILISGELQESSKKNVARLIAAQDSLVEAAKEEAGSISNIIAQATK

SEQ ID NO: 16983 - protein, 161 aa, Triticum aestivum; identical to SEQ ID NO: 7024
  peptide (1)..(161): Ceres Seq. ID no. 13663463
  misc_feature (2)..(142): Pfam Name: Pfam Description:  Clathrin adaptor complex small chain
  misc_feature (1)..(161): NCBI GI NO: 34897116 NR Description: putative clathrin assembly protein [Oryza sativa]
  misc_feature (1)..(161): NCBI GI NO: 1762309 NR Description: AP-1 Golgi-related complex component
  misc_feature (1)..(161): NCBI GI NO: 18398407 NR Description: clathrin assembly protein AP19, small subunit
  misc_feature (1)..(160): NCBI GI NO: 15237005 NR Description: clathrin assembly protein AP19 homolog
  misc_feature (1)..(161): NCBI GI NO: 2231698 NR Description: clathrin assembly protein AP19
  misc_feature (1)..(146): NCBI GI NO: 23508378 NR Description: clathrin assembly protein AP19, putative
  misc_feature (1)..(152): NCBI GI NO: 23480730 NR Description: clathrin assembly protein AP19, small subunit
  misc_feature (1)..(109): NCBI GI NO: 30690340 NR Description: clathrin assembly protein AP19 homolog
  misc_feature (1)..(147): NCBI GI NO: 34880078 NR Description: similar to Adapter-related protein complex 1 sigma1B subunit
  misc_feature (2)..(161): NCBI GI NO: 19114322 NR Description: putative clathrin-associated protein

SEQ ID NO: 16984 - DNA, 1031 bp, Triticum aestivum
  misc_feature (1)..(1031): Ceres Seq. ID no. 13658873
aacggcgacgagcgaatcgcgtgaatgagatgagatgggactgggagacgccggcgacggaagcggaggcggaggcgttgcaggagcgcatctgggacctccacgacaagctcagccacgccatcctcgccctctccgcctgcgccggccttccggcctgccgctgccggggcgcccccaacggccacgtaatcctcaaggggcagcggccgccgcaggggggagggcacgtcgaccttgccgcggcggcggcggccatggcggacgcgcggggcctgcacgccatccgcaccgcgctcgaggaccttgagggccacctccacttccttcgcgatgttcagtcacaacagcgtgccgatcgagatgccgcgattgctagggtgcagcaaagtcgtattctccttgctgcaaggttggctgaacatagaggaaaggggcatggagtcattgaggaagccttgggttttgtgggtgatgtgcgtgacaagagccattttgtctcgcccgaagatgtgtatgggatgcacagccaatcaggggaagatgaggaggatcgcagggggcatggttcaaacatggtggtgcgtgtggtatcctgcagttttgctttagccaagaacattttaagattcgagacgatgggtagtgtgctgggtaatgctactgtgtttgcagtaagtatgctcacattcttgcagcttcatcaattggcctctggtaaacaaatgccagcggtccagtataggagaaccgacaatgtttctctctctggagggtcaagaaaagacactaaaggaaagcatctggaagtgttattagctagaggttgagcaatcatcagatacaggaagctttgttctcctttgagttttggtcggttttgttaggtcactaggcactagccattgcattcttttggatggggctggtctacagtctaccttcatcgttagaagctgtaccacacaggatgtaaatggtttgagattagcaatagatgcactggaagaatctgcaagtcggttcccttt

SEQ ID NO: 16985 - protein, 275 aa, Triticum aestivum
  peptide (1)..(275): Ceres Seq. ID no. 13658874
  misc_feature (22)..(275): NCBI GI NO: 15238704 NR Description: expressed protein [Arabidopsis thaliana]
  misc_feature (22)..(275): NCBI GI NO: 21592900 NR Description: unknown [Arabidopsis thaliana]
  misc_feature (22)..(275): NCBI GI NO: 34904152 NR Description: P0417G05.19
RRRANRVNEMRWDWETPATEAEAEALQERIWDLHDKLSHAILALSACAGLPACRCRGAPNGHVILKGQRPPQGGGHVDLAAAAAAMADARGLHAIRTALEDLEGHLHFLRDVQSQQRADRDAAIARVQQSRILLAARLAEHRGKGHGVIEEALGFVGDVRDKSHFVSPEDVYGMHSQSGEDEEDRRGHGSNMVVRVVSCSFALAKNILRFETMGSVLGNATVFAVSMLTFLQLHQLASGKQMPAVQYRRTDNVSLSGGSRKDTKGKHLEVLLARG

SEQ ID NO: 16986 - protein, 266 aa, Triticum aestivum
  peptide (1)..(266): Ceres Seq. ID no. 13658875
  misc_feature (13)..(266): NCBI GI NO: 15238704 NR Description: expressed protein [Arabidopsis thaliana]
  misc_feature (13)..(266): NCBI GI NO: 21592900 NR Description: unknown [Arabidopsis thaliana]
  misc_feature (13)..(266): NCBI GI NO: 34904152 NR Description: P0417G05.19
MRWDWETPATEAEAEALQERIWDLHDKLSHAILALSACAGLPACRCRGAPNGHVILKGQRPPQGGGHVDLAAAAAAMADARGLHAIRTALEDLEGHLHFLRDVQSQQRADRDAAIARVQQSRILLAARLAEHRGKGHGVIEEALGFVGDVRDKSHFVSPEDVYGMHSQSGEDEEDRRGHGSNMVVRVVSCSFALAKNILRFETMGSVLGNATVFAVSMLTFLQLHQLASGKQMPAVQYRRTDNVSLSGGSRKDTKGKHLEVLLARG

SEQ ID NO: 16987 - protein, 190 aa, Triticum aestivum
  peptide (1)..(190): Ceres Seq. ID no. 13658876
  misc_feature (1)..(190): NCBI GI NO: 15238704 NR Description: expressed protein [Arabidopsis thaliana]
  misc_feature (1)..(190): NCBI GI NO: 21592900 NR Description: unknown [Arabidopsis thaliana]
  misc_feature (1)..(190): NCBI GI NO: 34904152 NR Description: P0417G05.19
MADARGLHAIRTALEDLEGHLHFLRDVQSQQRADRDAAIARVQQSRILLAARLAEHRGKGHGVIEEALGFVGDVRDKSHFVSPEDVYGMHSQSGEDEEDRRGHGSNMVVRVVSCSFALAKNILRFETMGSVLGNATVFAVSMLTFLQLHQLASGKQMPAVQYRRTDNVSLSGGSRKDTKGKHLEVLLARG

SEQ ID NO: 16988 - DNA, 1231 bp, Triticum aestivum
  misc_feature (1)..(1231): Ceres Seq. ID no. 14303051
actcgacccagccacagcctggttgcttggcgtcctcgttgccttacccttccaaacgagctccatcgtctccactttccacagcccacctccacctaccgcagcagcaagggcccttgtcgcgcggcggcggcggggaggatgtcatcgccgccggcaccggtattcgagaggctggccgggatccggcccctcgccgagtccggccgcttcaaggcatggttcctggaccagttcggtgttcttcatgacgggaagaaaccctacccgggcgccattttggcattggagaagctcgctgggaatggcgccaagatggtgataatcagcaattcctcaaggcggtcgtctgtaaccatggagaagctgcagagccttgggtttgacacgtcttgtttcctcggggcgatcaccagcggggaactcacccatcagtaccttgacaagagggatgacccatggtttgcatctctgggaaggaagtgtgtccatctgacatggggcaatcgaggtgcaatttctctggagggacttggtttgcaagttgtgaacaatgttgacgatgcagagtttatactagcccatggtactgaagccctgggtttaccttctggtgatccactttcgaaaagtcttgaggagcttgagcagattctagtgcttggtatacaaaagcgacttccaatggtggtagctaatccagattatgtcactgttgaagctcgaaacctgcgtgtcatgcctggcaccctggcagcaaaatacgagagtcttggtggtgaagtaaaatggatggggaagcctgataaggttatctatacatcagcaatgtccctagcaggtgttgaagcacatgaatgtatcaccgtaggtgattcgctgcaccacgacatcaaaggcgcaaatggagccggaatggcatctgcattcatcactggaggtatccatgcggctgaacttggactcggtgaatttggagaaactgctggagatgatgccgtcagtgcgttgtgttgcaagcatagctcatacccatcttacgttttgccttcatttgcatggtagaaaacacggtttagattcaggcacaccgtttaaacgggattgcggtctaggataatgatgctcttttcagttgtcaaagtgagcatcaagaccgtggaggtgtttcagtgccgcgctaaattattagcgttatgcattttccggaaataaaatatctgttgaaatg

SEQ ID NO: 16989 - protein, 354 aa, Triticum aestivum
  peptide (1)..(354): Ceres Seq. ID no. 14303052
  misc_feature (71)..(314): Pfam Name: Pfam Description:  haloacid dehalogenase-like hydrolase
  misc_feature (46)..(354): NCBI GI NO: 19310550 NR Description: unknown protein [Arabidopsis thaliana]
  misc_feature (120)..(352): NCBI GI NO: 15238168 NR Description: haloacid dehalogenase-like hydrolase family
  misc_feature (58)..(354): NCBI GI NO: 23014406 NR Description: hypothetical protein
  misc_feature (53)..(317): NCBI GI NO: 13473111 NR Description: hypothetical protein [Mesorhizobium loti]
  misc_feature (48)..(354): NCBI GI NO: 22968911 NR Description: hypothetical protein [Rhodospirillum rubrum]
  misc_feature (59)..(319): NCBI GI NO: 36958658 NR Description: HAD superfamily protein involved in N-acetyl-glucosamine catabolism
  misc_feature (66)..(315): NCBI GI NO: 15965982 NR Description: CONSERVED HYPOTHETICAL PROTEIN
  misc_feature (175)..(353): NCBI GI NO: 15964548 NR Description: CONSERVED HYPOTHETICAL PROTEIN
  misc_feature (58)..(196): NCBI GI NO: 15964548 NR Description: CONSERVED HYPOTHETICAL PROTEIN
  misc_feature (77)..(317): NCBI GI NO: 22963159 NR Description: hypothetical protein [Rhodopseudomonas palustris]
TRPSHSLVAWRPRCLTLPNELHRLHFPQPTSTYRSSKGPCRAAAAGRMSSPPAPVFERLAGIRPLAESGRFKAWFLDQFGVLHDGKKPYPGAILALEKLAGNGAKMVIISNSSRRSSVTMEKLQSLGFDTSCFLGAITSGELTHQYLDKRDDPWFASLGRKCVHLTWGNRGAISLEGLGLQVVNNVDDAEFILAHGTEALGLPSGDPLSKSLEELEQILVLGIQKRLPMVVANPDYVTVEARNLRVMPGTLAAKYESLGGEVKWMGKPDKVIYTSAMSLAGVEAHECITVGDSLHHDIKGANGAGMASAFITGGIHAAELGLGEFGETAGDDAVSALCCKHSSYPSYVLPSFAW

SEQ ID NO: 16990 - protein, 307 aa, Triticum aestivum
  peptide (1)..(307): Ceres Seq. ID no. 14303053
  misc_feature (24)..(267): Pfam Name: Pfam Description:  haloacid dehalogenase-like hydrolase
  misc_feature (1)..(307): NCBI GI NO: 19310550 NR Description: unknown protein [Arabidopsis thaliana]
  misc_feature (73)..(305): NCBI GI NO: 15238168 NR Description: haloacid dehalogenase-like hydrolase family
  misc_feature (11)..(307): NCBI GI NO: 23014406 NR Description: hypothetical protein
  misc_feature (6)..(270): NCBI GI NO: 13473111 NR Description: hypothetical protein [Mesorhizobium loti]
  misc_feature (1)..(307): NCBI GI NO: 22968911 NR Description: hypothetical protein [Rhodospirillum rubrum]
  misc_feature (12)..(272): NCBI GI NO: 36958658 NR Description: HAD superfamily protein involved in N-acetyl-glucosamine catabolism
  misc_feature (19)..(268): NCBI GI NO: 15965982 NR Description: CONSERVED HYPOTHETICAL PROTEIN
  misc_feature (128)..(306): NCBI GI NO: 15964548 NR Description: CONSERVED HYPOTHETICAL PROTEIN
  misc_feature (11)..(149): NCBI GI NO: 15964548 NR Description: CONSERVED HYPOTHETICAL PROTEIN
  misc_feature (30)..(270): NCBI GI NO: 22963159 NR Description: hypothetical protein [Rhodopseudomonas palustris]
MSSPPAPVFERLAGIRPLAESGRFKAWFLDQFGVLHDGKKPYPGAILALEKLAGNGAKMVIISNSSRRSSVTMEKLQSLGFDTSCFLGAITSGELTHQYLDKRDDPWFASLGRKCVHLTWGNRGAISLEGLGLQVVNNVDDAEFILAHGTEALGLPSGDPLSKSLEELEQILVLGIQKRLPMVVANPDYVTVEARNLRVMPGTLAAKYESLGGEVKWMGKPDKVIYTSAMSLAGVEAHECITVGDSLHHDIKGANGAGMASAFITGGIHAAELGLGEFGETAGDDAVSALCCKHSSYPSYVLPSFAW

SEQ ID NO: 16991 - protein, 249 aa, Triticum aestivum
  peptide (1)..(249): Ceres Seq. ID no. 14303054
  misc_feature (1)..(209): Pfam Name: Pfam Description:  haloacid dehalogenase-like hydrolase
  misc_feature (1)..(249): NCBI GI NO: 19310550 NR Description: unknown protein [Arabidopsis thaliana]
  misc_feature (15)..(247): NCBI GI NO: 15238168 NR Description: haloacid dehalogenase-like hydrolase family
  misc_feature (1)..(249): NCBI GI NO: 23014406 NR Description: hypothetical protein
  misc_feature (1)..(212): NCBI GI NO: 13473111 NR Description: hypothetical protein [Mesorhizobium loti]
  misc_feature (1)..(249): NCBI GI NO: 22968911 NR Description: hypothetical protein [Rhodospirillum rubrum]
  misc_feature (1)..(214): NCBI GI NO: 36958658 NR Description: HAD superfamily protein involved in N-acetyl-glucosamine catabolism
  misc_feature (1)..(210): NCBI GI NO: 15965982 NR Description: CONSERVED HYPOTHETICAL PROTEIN
  misc_feature (70)..(248): NCBI GI NO: 15964548 NR Description: CONSERVED HYPOTHETICAL PROTEIN
  misc_feature (1)..(91): NCBI GI NO: 15964548 NR Description: CONSERVED HYPOTHETICAL PROTEIN
  misc_feature (1)..(212): NCBI GI NO: 22963159 NR Description: hypothetical protein [Rhodopseudomonas palustris]
MVIISNSSRRSSVTMEKLQSLGFDTSCFLGAITSGELTHQYLDKRDDPWFASLGRKCVHLTWGNRGAISLEGLGLQVVNNVDDAEFILAHGTEALGLPSGDPLSKSLEELEQILVLGIQKRLPMVVANPDYVTVEARNLRVMPGTLAAKYESLGGEVKWMGKPDKVIYTSAMSLAGVEAHECITVGDSLHHDIKGANGAGMASAFITGGIHAAELGLGEFGETAGDDAVSALCCKHSSYPSYVLPSFAW

SEQ ID NO: 16992 - DNA, 1176 bp, Triticum aestivum
  misc_feature (1)..(1176): Ceres Seq. ID no. 13659066
aaagaaaacgcaatccaatcgagaccattcttggcgaggagaagggggagaagaaagcagatcggcgccggcgccggccgtggccgcactgatcgactcggactgtgggtgtggtcttccgcccgagcacccataaacatgggtccagaggcgcctgagcttcaaccaaaccccgtcaatcccgctggacgccttttgccagagcacagctcgatggcgatcgccgatgtcaacatgggtctacaggcgcctgaacttttgtcatatcacatcaatcgcgcacgacccttctatgatgaaaagtggaaaagtatgaatgtggggaagaagaagacgaagaagaagattttccgggttccgcagcatgagctggatgacatactttcctatcaggtgcccgcttggccgaaagtggataaacgctgtccttcagccgccatagagatggaaaagatgaaggaatacttcttggccgggcgggagaagatgaggcgagagtatgaggcccatggctatgctacttttgaagcagaggtcaccgatgatgaggaggaggaagacgcagcaatgactcctcctcacgaggagaaggatgttgtgcgagcgacatcttttcatgacaagaatgacgatgcagcagcgactcatcctcacgaggagaaggatgatgtgccagcgacatcttatcacgacaaaaatgacgaagcagcagcgacgactcctcacgaggagaaggatgatgtgccagccacatcttattatgacaagaatgacgatgcagcagcgacgactcctcacgaggagaaggatgatgtgccagccacatcttattatgacaagaatgacgatgcagcagcgactcctcctcacgaggagaaggatgatgtgccagccacatcttattatgacaagaatgacgatgcagcagcgatgtcttctccgtggattattccacgaggaagaggccgaagaagatttcgcccaggagttgtcaagcaagcaagcggtgttaagaaaataacttagatgtattagttgttttcagtgttagttttggctgttggattagttggttccagtttctgggactgtattgtgtcatctttatttataacttcttgtgtaaaacctacagctgataatttgtcagccgacttgatataatatgataaattt

SEQ ID NO: 16993 - protein, 341 aa, Triticum aestivum
  peptide (1)..(341): Ceres Seq. ID no. 13659067
  misc_feature (176)..(317): NCBI GI NO: 3851592 NR Description: surface antigen ariel1 [Entamoeba histolytica]
  misc_feature (174)..(310): NCBI GI NO: 23025007 NR Description: hypothetical protein
KENAIQSRPFLARRRGRRKQIGAGAGRGRTDRLGLWVWSSARAPINMGPEAPELQPNPVNPAGRLLPEHSSMAIADVNMGLQAPELLSYHINRARPFYDEKWKSMNVGKKKTKKKIFRVPQHELDDILSYQVPAWPKVDKRCPSAAIEMEKMKEYFLAGREKMRREYEAHGYATFEAEVTDDEEEEDAAMTPPHEEKDVVRATSFHDKNDDAAATHPHEEKDDVPATSYHDKNDEAAATTPHEEKDDVPATSYYDKNDDAAATTPHEEKDDVPATSYYDKNDDAAATPPHEEKDDVPATSYYDKNDDAAAMSSPWIIPRGRGRRRFRPGVVKQASGVKKIT

SEQ ID NO: 16994 - protein, 295 aa, Triticum aestivum
  peptide (1)..(295): Ceres Seq. ID no. 13659068
  misc_feature (130)..(271): NCBI GI NO: 3851592 NR Description: surface antigen ariel1 [Entamoeba histolytica]
  misc_feature (128)..(264): NCBI GI NO: 23025007 NR Description: hypothetical protein
MGPEAPELQPNPVNPAGRLLPEHSSMAIADVNMGLQAPELLSYHINRARPFYDEKWKSMNVGKKKTKKKIFRVPQHELDDILSYQVPAWPKVDKRCPSAAIEMEKMKEYFLAGREKMRREYEAHGYATFEAEVTDDEEEEDAAMTPPHEEKDVVRATSFHDKNDDAAATHPHEEKDDVPATSYHDKNDEAAATTPHEEKDDVPATSYYDKNDDAAATTPHEEKDDVPATSYYDKNDDAAATPPHEEKDDVPATSYYDKNDDAAAMSSPWIIPRGRGRRRFRPGVVKQASGVKKIT

SEQ ID NO: 16995 - protein, 270 aa, Triticum aestivum
  peptide (1)..(270): Ceres Seq. ID no. 13659069
  misc_feature (105)..(246): NCBI GI NO: 3851592 NR Description: surface antigen ariel1 [Entamoeba histolytica]
  misc_feature (103)..(239): NCBI GI NO: 23025007 NR Description: hypothetical protein
MAIADVNMGLQAPELLSYHINRARPFYDEKWKSMNVGKKKTKKKIFRVPQHELDDILSYQVPAWPKVDKRCPSAAIEMEKMKEYFLAGREKMRREYEAHGYATFEAEVTDDEEEEDAAMTPPHEEKDVVRATSFHDKNDDAAATHPHEEKDDVPATSYHDKNDEAAATTPHEEKDDVPATSYYDKNDDAAATTPHEEKDDVPATSYYDKNDDAAATPPHEEKDDVPATSYYDKNDDAAAMSSPWIIPRGRGRRRFRPGVVKQASGVKKIT

SEQ ID NO: 16996 - DNA, 944 bp, Triticum aestivum
  misc_feature (1)..(944): Ceres Seq. ID no. 13658653
ccactcacgctgccgcggcggccacccccgcccgccgctgcgctcgcattcgcgtctccaccggtccttcccgcgccacggccgcgcacccgacctgatcccccgcgccgctcgcgagccgccatccagcagagatgccggccctgaggccgccgccgccgcgcctcatgctcaacgccgtctcctgcatgcggaacgcgcagacggttctccgggacatcaacgtcagcgtccacgacggcacggcgctcgtcctcacgggcgccaacggctccggcaagaccaccttcctgcggatgctggccggcttctcgcgcccctcggccggggagatcctctggaacggccacgacgtcacctccccgggggtcttccagcagtacaagctgcagctcaactggatgtcgctcaaggacgccgtcaaggagaagctcaccgtgctggagaacgtccagtggttcgagctcctcgagggcaagcacggcaggtccgcccccgccatcgagctcatgggcctcggccggctcatgaacgacaaggccaggatgctctccatggggcagaggaagcgcctgcagctcgccaggctgctcgccatcgaccgcccgatctggctcctggacgagccctccgtcgcgctcgactccgagggtgtcaagctgctcgagtacatcatagcggagcaccgcaagaagggtgggatcgtcatcgtcgccacgcatttgcccattgagatcgaggattccatgaacctccggcttccgcagcggttccccaggaggaaaactctggttgatcttgtgcgttgattgattggagctcaaaatatgtagctgtatctttctaattcttctccagccatacaagttttgcgttggagcaacttctgatggtgcaattttgtgacactttcttctggaaaataagaacatatttgccatgcc

SEQ ID NO: 16997 - protein, 243 aa, Triticum aestivum
  peptide (1)..(243): Ceres Seq. ID no. 13658654
HSRCRGGHPRPPLRSHSRLHRSFPRHGRAPDLIPRAAREPPSSRDAGPEAAAAAPHAQRRLLHAERADGSPGHQRQRPRRHGARPHGRQRLRQDHLPADAGRLLAPLGRGDPLERPRRHLPGGLPAVQAAAQLDVAQGRRQGEAHRAGERPVVRAPRGQARQVRPRHRAHGPRPAHERQGQDALHGAEEAPAARQAARHRPPDLAPGRALRRARLRGCQAARVHHSGAPQEGWDRHRRHAFAH

SEQ ID NO: 16998 - protein, 224 aa, Triticum aestivum
  peptide (1)..(224): Ceres Seq. ID no. 13658655
  misc_feature (36)..(196): Pfam Name: Pfam Description:  ABC transporter
  misc_feature (1)..(223): NCBI GI NO: 15221728 NR Description: ABC transporter family protein
  misc_feature (19)..(224): NCBI GI NO: 39545846 NR Description: OSJNBb0060E08.17
  misc_feature (16)..(213): NCBI GI NO: 23016499 NR Description: hypothetical protein
  misc_feature (10)..(201): NCBI GI NO: 22962200 NR Description: hypothetical protein [Rhodopseudomonas palustris]
  misc_feature (12)..(209): NCBI GI NO: 9911057 NR Description: HEME EXPORTER PROTEIN A
  misc_feature (12)..(209): NCBI GI NO: 16130138 NR Description: ATP binding protein of heme exporter A
  misc_feature (11)..(209): NCBI GI NO: 15802754 NR Description: ATP binding protein of heme exporter A
  misc_feature (12)..(209): NCBI GI NO: 24113587 NR Description: Heme exporter protein A
  misc_feature (12)..(209): NCBI GI NO: 26248584 NR Description: Heme exporter protein A [Escherichia coli CFT073]
  misc_feature (16)..(209): NCBI GI NO: 27375578 NR Description: heme exporter protein A [Bradyrhizobium japonicum]
MPALRPPPPRLMLNAVSCMRNAQTVLRDINVSVHDGTALVLTGANGSGKTTFLRMLAGFSRPSAGEILWNGHDVTSPGVFQQYKLQLNWMSLKDAVKEKLTVLENVQWFELLEGKHGRSAPAIELMGLGRLMNDKARMLSMGQRKRLQLARLLAIDRPIWLLDEPSVALDSEGVKLLEYIIAEHRKKGGIVIVATHLPIEIEDSMNLRLPQRFPRRKTLVDLVR

SEQ ID NO: 16999 - protein, 213 aa, Triticum aestivum
  peptide (1)..(213): Ceres Seq. ID no. 13658656
  misc_feature (25)..(185): Pfam Name: Pfam Description:  ABC transporter
  misc_feature (1)..(212): NCBI GI NO: 15221728 NR Description: ABC transporter family protein
  misc_feature (8)..(213): NCBI GI NO: 39545846 NR Description: OSJNBb0060E08.17
  misc_feature (5)..(202): NCBI GI NO: 23016499 NR Description: hypothetical protein
  misc_feature (1)..(190): NCBI GI NO: 22962200 NR Description: hypothetical protein [Rhodopseudomonas palustris]
  misc_feature (1)..(198): NCBI GI NO: 9911057 NR Description: HEME EXPORTER PROTEIN A
  misc_feature (1)..(198): NCBI GI NO: 16130138 NR Description: ATP binding protein of heme exporter A
  misc_feature (1)..(198): NCBI GI NO: 15802754 NR Description: ATP binding protein of heme exporter A
  misc_feature (1)..(198): NCBI GI NO: 24113587 NR Description: Heme exporter protein A
  misc_feature (1)..(198): NCBI GI NO: 26248584 NR Description: Heme exporter protein A [Escherichia coli CFT073]
  misc_feature (5)..(198): NCBI GI NO: 27375578 NR Description: heme exporter protein A [Bradyrhizobium japonicum]
MLNAVSCMRNAQTVLRDINVSVHDGTALVLTGANGSGKTTFLRMLAGFSRPSAGEILWNGHDVTSPGVFQQYKLQLNWMSLKDAVKEKLTVLENVQWFELLEGKHGRSAPAIELMGLGRLMNDKARMLSMGQRKRLQLARLLAIDRPIWLLDEPSVALDSEGVKLLEYIIAEHRKKGGIVIVATHLPIEIEDSMNLRLPQRFPRRKTLVDLVR

SEQ ID NO: 17000 - DNA, 820 bp, Triticum aestivum
  misc_feature (1)..(820): Ceres Seq. ID no. 14301905
ttccccatctcaggcacacaagccctaaacccgtgcatggcattccccgcctctcgccgtctctccgccgccgccgctccgaaactctcctccctcttcacgcccggacccactcctaagcctcgcccgctgccgccggagtccggcgatgatcctaggcggcggaagccgaggccgagatcaaggcacccgtggggggaggatgcggcagcgcttctccggcggcttcacgaggggcgatacctgccgggaccctacctcccggatgcgccgcatgtagtatcccccgacgctgtcaaggccgccgccgagcggttcggcaacgatcaccaggtcgtcgccaaatggttgtcgggaagtgacttgaagaaggtagcattgtttggctgcccatctgttgagcgaagaacagtttttgcatcaaaaagattacgagctttcttcaacttgccagaagagaaagtatgcagctcttgcaagataagaagttcatgccagtttattaaccaggaggtgcctaggtatgataaagtgatcttgtcagatactatgaggatccttgctttgtttgtactggatgcatatcctgagccactacaggttactgctgaagtaaaagctagtgtccgcaaacttctcaaggacaccataaatctaagcatttaagtgctttgaggataattcgtaatcagtggaggtactatgtacatgtcaggtagatttaggttcattttcccactcttaattttcttttgtgcctcaagcattgtaacatgacctgaagcaactaatagagtgatggccacatttatttgatgtt

SEQ ID NO: 17001 - protein, 221 aa, Triticum aestivum
  peptide (1)..(221): Ceres Seq. ID no. 14301906
  misc_feature (13)..(200): NCBI GI NO: 34903722 NR Description: P0489A05.27
  misc_feature (99)..(220): NCBI GI NO: 18404478 NR Description: expressed protein [Arabidopsis thaliana]
  misc_feature (99)..(220): NCBI GI NO: 21536664 NR Description: unknown [Arabidopsis thaliana]
  misc_feature (20)..(218): NCBI GI NO: 13324787 NR Description: hypothetical protein [Oryza sativa]
  misc_feature (61)..(221): NCBI GI NO: 21593408 NR Description: unknown [Arabidopsis thaliana]
  misc_feature (61)..(221): NCBI GI NO: 25372841 NR Description: hypothetical protein F5A18.17
  misc_feature (61)..(221): NCBI GI NO: 18409643 NR Description: expressed protein [Arabidopsis thaliana]
  misc_feature (99)..(220): NCBI GI NO: 34393925 NR Description: unknown protein
  misc_feature (98)..(220): NCBI GI NO: 15293147 NR Description: unknown protein [Arabidopsis thaliana]
  misc_feature (98)..(220): NCBI GI NO: 18405190 NR Description: expressed protein [Arabidopsis thaliana]
FPISGTQALNPCMAFPASRRLSAAAAPKLSSLFTPGPTPKPRPLPPESGDDPRRRKPRPRSRHPWGEDAAALLRRLHEGRYLPGPYLPDAPHVVSPDAVKAAAERFGNDHQVVAKWLSGSDLKKVALFGCPSVERRTVFASKRLRAFFNLPEEKVCSSCKIRSSCQFINQEVPRYDKVILSDTMRILALFVLDAYPEPLQVTAEVKASVRKLLKDTINLSI

SEQ ID NO: 17002 - protein, 209 aa, Triticum aestivum
  peptide (1)..(209): Ceres Seq. ID no. 14301907
  misc_feature (1)..(188): NCBI GI NO: 34903722 NR Description: P0489A05.27
  misc_feature (87)..(208): NCBI GI NO: 18404478 NR Description: expressed protein [Arabidopsis thaliana]
  misc_feature (87)..(208): NCBI GI NO: 21536664 NR Description: unknown [Arabidopsis thaliana]
  misc_feature (8)..(206): NCBI GI NO: 13324787 NR Description: hypothetical protein [Oryza sativa]
  misc_feature (49)..(209): NCBI GI NO: 21593408 NR Description: unknown [Arabidopsis thaliana]
  misc_feature (49)..(209): NCBI GI NO: 25372841 NR Description: hypothetical protein F5A18.17
  misc_feature (49)..(209): NCBI GI NO: 18409643 NR Description: expressed protein [Arabidopsis thaliana]
  misc_feature (87)..(208): NCBI GI NO: 34393925 NR Description: unknown protein
  misc_feature (86)..(208): NCBI GI NO: 15293147 NR Description: unknown protein [Arabidopsis thaliana]
  misc_feature (86)..(208): NCBI GI NO: 18405190 NR Description: expressed protein [Arabidopsis thaliana]
MAFPASRRLSAAAAPKLSSLFTPGPTPKPRPLPPESGDDPRRRKPRPRSRHPWGEDAAALLRRLHEGRYLPGPYLPDAPHVVSPDAVKAAAERFGNDHQVVAKWLSGSDLKKVALFGCPSVERRTVFASKRLRAFFNLPEEKVCSSCKIRSSCQFINQEVPRYDKVILSDTMRILALFVLDAYPEPLQVTAEVKASVRKLLKDTINLSI

SEQ ID NO: 17003 - DNA, 990 bp, Triticum aestivum
  misc_feature (1)..(990): Ceres Seq. ID no. 15179852
tgtatccagccgcagccgttgccaactactcctcctctcgaatcgcggcaaggcaatcaaccggggccggcgggtcggttgaggaaggaggccgggggcgcggcatggactgcggcggtgaggagcaggcgaggcagaacggccatgccggcgacggcggcgacccggcggagtggaagaaggtggccgagctccgggccgtggtggaggcgcaggaccccgcagccaaggaggaggacgacttcatgctgcgccggttcctgcgcgcccgagaccacaacatcagcaaggcgtcggcgatgttcctcaagtacctgagttggaagcgcggcgccaagcctcgcggctccatcaccgaggccgaggtgcgcggcgagctcgtgcaggacaagctctacattcagggcttcgacaagacgggccgccccatgatctacctcttcggcaaccgccacttcgccgccaagcgagaccttgaggagttcaagcgatacgtcatctacatccttgacaacacctgcaccaagttgccggtagggcaggagaagtttgcgtcggtggtggatctcaaggggtgggggtacgcgaattgcgacatccgggcgaagctggcggcgttggagatcatgcagaactactacccggagcggctgggccgggtgttcttgatccacgtgccttacgtgttcatggcggcgtggaagatggtctaccccttcatcgacgacaacaccaagaagaagtttgtctttgttgcagacaaggaccttgacggcacgcttcgggacgccatcgacttgtcccagctgcccgagcagtacggcggcaagctcagactcgagggatacaagagctcgtcgacaacgctatagtcaacgtgtgactgatttggtttattaagggtgtccagttgtgtgaaagtatgctacattgccccgcttgataagcaagtaatactcatcctttcatctatgcagggccgtttaactc

SEQ ID NO: 17004 - protein, 289 aa, Triticum aestivum
  peptide (1)..(289): Ceres Seq. ID no. 15179853
  misc_feature (130)..(277): Pfam Name: Pfam Description:  CRAL/TRIO domain
  misc_feature (41)..(279): NCBI GI NO: 27573358 NR Description: putative phosphatidylinositol/phosphatidylcholinetransfer protein
  misc_feature (50)..(286): NCBI GI NO: 34907052 NR Description: sec14 like protein
  misc_feature (50)..(286): NCBI GI NO: 2286121 NR Description: sec14 like protein [Oryza sativa]
  misc_feature (46)..(279): NCBI GI NO: 7488696 NR Description: polyphosphoinositide binding protein Ssh2
  misc_feature (54)..(279): NCBI GI NO: 15223439 NR Description: SEC14 cytosolic factor, putative
  misc_feature (57)..(279): NCBI GI NO: 17226662 NR Description: polyphosphoinositide binding protein
  misc_feature (94)..(279): NCBI GI NO: 19347976 NR Description: putative polyphosphoinositide binding protein
  misc_feature (76)..(279): NCBI GI NO: 30684014 NR Description: SEC14 cytosolic factor, putative
  misc_feature (58)..(279): NCBI GI NO: 25402783 NR Description: protein F10B6.22 [imported] - Arabidopsis thaliana
  misc_feature (59)..(276): NCBI GI NO: 34903076 NR Description: unnamed protein product
YPAAAVANYSSSRIAARQSTGAGGSVEEGGRGRGMDCGGEEQARQNGHAGDGGDPAEWKKVAELRAVVEAQDPAAKEEDDFMLRRFLRARDHNISKASAMFLKYLSWKRGAKPRGSITEAEVRGELVQDKLYIQGFDKTGRPMIYLFGNRHFAAKRDLEEFKRYVIYILDNTCTKLPVGQEKFASVVDLKGWGYANCDIRAKLAALEIMQNYYPERLGRVFLIHVPYVFMAAWKMVYPFIDDNTKKKFVFVADKDLDGTLRDAIDLSQLPEQYGGKLRLEGYKSSSTTL

SEQ ID NO: 17005 - protein, 255 aa, Triticum aestivum
  peptide (1)..(255): Ceres Seq. ID no. 15179854
  misc_feature (96)..(243): Pfam Name: Pfam Description:  CRAL/TRIO domain
  misc_feature (7)..(245): NCBI GI NO: 27573358 NR Description: putative phosphatidylinositol/phosphatidylcholinetransfer protein
  misc_feature (16)..(252): NCBI GI NO: 34907052 NR Description: sec14 like protein
  misc_feature (16)..(252): NCBI GI NO: 2286121 NR Description: sec14 like protein [Oryza sativa]
  misc_feature (12)..(245): NCBI GI NO: 7488696 NR Description: polyphosphoinositide binding protein Ssh2
  misc_feature (20)..(245): NCBI GI NO: 15223439 NR Description: SEC14 cytosolic factor, putative
  misc_feature (23)..(245): NCBI GI NO: 17226662 NR Description: polyphosphoinositide binding protein
  misc_feature (60)..(245): NCBI GI NO: 19347976 NR Description: putative polyphosphoinositide binding protein
  misc_feature (42)..(245): NCBI GI NO: 30684014 NR Description: SEC14 cytosolic factor, putative
  misc_feature (24)..(245): NCBI GI NO: 25402783 NR Description: protein F10B6.22 [imported] - Arabidopsis thaliana
  misc_feature (25)..(242): NCBI GI NO: 34903076 NR Description: unnamed protein product
MDCGGEEQARQNGHAGDGGDPAEWKKVAELRAVVEAQDPAAKEEDDFMLRRFLRARDHNISKASAMFLKYLSWKRGAKPRGSITEAEVRGELVQDKLYIQGFDKTGRPMIYLFGNRHFAAKRDLEEFKRYVIYILDNTCTKLPVGQEKFASVVDLKGWGYANCDIRAKLAALEIMQNYYPERLGRVFLIHVPYVFMAAWKMVYPFIDDNTKKKFVFVADKDLDGTLRDAIDLSQLPEQYGGKLRLEGYKSSSTTL

SEQ ID NO: 17006 - protein, 208 aa, Triticum aestivum
  peptide (1)..(208): Ceres Seq. ID no. 15179855
  misc_feature (49)..(196): Pfam Name: Pfam Description:  CRAL/TRIO domain
  misc_feature (1)..(198): NCBI GI NO: 27573358 NR Description: putative phosphatidylinositol/phosphatidylcholinetransfer protein
  misc_feature (1)..(205): NCBI GI NO: 34907052 NR Description: sec14 like protein
  misc_feature (1)..(205): NCBI GI NO: 2286121 NR Description: sec14 like protein [Oryza sativa]
  misc_feature (1)..(198): NCBI GI NO: 7488696 NR Description: polyphosphoinositide binding protein Ssh2
  misc_feature (1)..(198): NCBI GI NO: 15223439 NR Description: SEC14 cytosolic factor, putative
  misc_feature (1)..(198): NCBI GI NO: 17226662 NR Description: polyphosphoinositide binding protein
  misc_feature (13)..(198): NCBI GI NO: 19347976 NR Description: putative polyphosphoinositide binding protein
  misc_feature (1)..(198): NCBI GI NO: 30684014 NR Description: SEC14 cytosolic factor, putative
  misc_feature (1)..(198): NCBI GI NO: 25402783 NR Description: protein F10B6.22 [imported] - Arabidopsis thaliana
  misc_feature (1)..(195): NCBI GI NO: 34903076 NR Description: unnamed protein product
MLRRFLRARDHNISKASAMFLKYLSWKRGAKPRGSITEAEVRGELVQDKLYIQGFDKTGRPMIYLFGNRHFAAKRDLEEFKRYVIYILDNTCTKLPVGQEKFASVVDLKGWGYANCDIRAKLAALEIMQNYYPERLGRVFLIHVPYVFMAAWKMVYPFIDDNTKKKFVFVADKDLDGTLRDAIDLSQLPEQYGGKLRLEGYKSSSTTL

SEQ ID NO: 17007 - DNA, 1248 bp, Triticum aestivum
  misc_feature (1)..(1248): Ceres Seq. ID no. 13658672
cccccctcccgaagcttctcgatccctccccccgcttccgtttccgtttcgtccccgccgtcgccccctcgccgcggcggcggagtcgcccgcactcgctgcgcgcaggaacgatgagccgacgtagtaacggccgcaccatctacgtgggcaacctccccgaggacatccgcgagagagagattgaggatctcttctacaagtatggtcctattgtcgatatcgatctgaaaattcctccaaggcctcctgtttatgcttttgtcgagttcgaagacccacgtgatgctgatgatgcaatttatggccgtgatggatatgactttgatggccacaaattgcgggtggagttagctcatggggggaaaggcccttattttattcgaccaagcagctatagtagttctggacgtcatggtgcagttaggcgttctgattaccgcgttattgttaccggattaccttcttcagcatcatggcaagatctcaaggatcatatgcggcgagctggtgatgtctgtttctctgatgtttatcctgaggctggagcaattactggaatagttgagtataccaactacgaagacatgaaacatgcgataagaaagcttgatgattcagagttccgtaatgcattttcacgagcatatatcagggtgagggagtacaatgctaggcgtagccgctcttactcgagaggtagaagccgaagctgctcttactcaagaagcagaagtcacagttatagcaggagcaagagtccaaggtctagacctgcttctcggtctccttcacctgttaaagcaaggtcatcatcaagatccctatcacctgccgctcctgcccatgacaagtctgcaagcaggagccccgtcaggagcagaagtttaccccgttctcagtctcctgtgaaatctgagtgaagccagatgcactcgaagtcagggaaaaaaaacatatcaggatttgttggattaggacaatataatatggattgtgggtgctctgtcccaagaagtaccattgctgttccttggaaggaaaaacgtcaactttgtggtttgagatcaatgtaggagtctggtgttgttttacttctgcactcagttgcgagaacgtaaaagcgtgaactcatggctttaactttagtatgctatagtttcgcgtcaaaaaacttcatgccacagcagagtaaaaaaaaaaaaaaaaaagcttatcgatamcgkcgacctcgagggggggsccggk

SEQ ID NO: 17008 - protein, 306 aa, Triticum aestivum
  peptide (1)..(306): Ceres Seq. ID no. 15219911
  misc_feature (47)..(115): Pfam Name: a.k.a. RRM, RBD, or RNP domain Pfam Description: RNA recognition motif.
  misc_feature (33)..(305): NCBI GI NO: 33146854 NR Description: putative pre-mRNA splicing factor SF2
  misc_feature (38)..(306): NCBI GI NO: 30678391 NR Description: pre-mRNA splicing factor SF2 (SR1 protein)
  misc_feature (38)..(306): NCBI GI NO: 22329428 NR Description: arginine/serine-rich splicing factor, atSRp30
  misc_feature (38)..(291): NCBI GI NO: 4775270 NR Description: SF2/ASF-like splicing modulator Srp30
  misc_feature (38)..(306): NCBI GI NO: 5815235 NR Description: splicing factor SR1 [Arabidopsis thaliana]
  misc_feature (38)..(293): NCBI GI NO: 34894608 NR Description: putative pre-mRNA splicing factor SF2
  misc_feature (38)..(302): NCBI GI NO: 2443473 NR Description: ASF/SF2 homolog [Arabidopsis thaliana]
  misc_feature (38)..(302): NCBI GI NO: 30678395 NR Description: pre-mRNA splicing factor SF2 (SR1 protein)
  misc_feature (38)..(275): NCBI GI NO: 4775271 NR Description: SF2/ASF-like splicing modulator Srp30, variant 1
  misc_feature (38)..(302): NCBI GI NO: 5815236 NR Description: splicing factor SR1B [Arabidopsis thaliana]
PLPKLLDPSPRFRFRFVPAVAPSPRRRSRPHSLRAGTMSRRSNGRTIYVGNLPEDIREREIEDLFYKYGPIVDIDLKIPPRPPVYAFVEFEDPRDADDAIYGRDGYDFDGHKLRVELAHGGKGPYFIRPSSYSSSGRHGAVRRSDYRVIVTGLPSSASWQDLKDHMRRAGDVCFSDVYPEAGAITGIVEYTNYEDMKHAIRKLDDSEFRNAFSRAYIRVREYNARRSRSYSRGRSRSCSYSRSRSHSYSRSKSPRSRPASRSPSPVKARSSSRSLSPAAPAHDKSASRSPVRSRSLPRSQSPVKSE

SEQ ID NO: 17009 - protein, 269 aa, Triticum aestivum
  peptide (1)..(269): Ceres Seq. ID no. 15219912
  misc_feature (10)..(78): Pfam Name: a.k.a. RRM, RBD, or RNP domain Pfam Description: RNA recognition motif.
  misc_feature (1)..(268): NCBI GI NO: 33146854 NR Description: putative pre-mRNA splicing factor SF2
  misc_feature (1)..(269): NCBI GI NO: 30678391 NR Description: pre-mRNA splicing factor SF2 (SR1 protein)
  misc_feature (1)..(269): NCBI GI NO: 22329428 NR Description: arginine/serine-rich splicing factor, atSRp30
  misc_feature (1)..(254): NCBI GI NO: 4775270 NR Description: SF2/ASF-like splicing modulator Srp30
  misc_feature (1)..(269): NCBI GI NO: 5815235 NR Description: splicing factor SR1 [Arabidopsis thaliana]
  misc_feature (1)..(256): NCBI GI NO: 34894608 NR Description: putative pre-mRNA splicing factor SF2
  misc_feature (1)..(265): NCBI GI NO: 2443473 NR Description: ASF/SF2 homolog [Arabidopsis thaliana]
  misc_feature (1)..(265): NCBI GI NO: 30678395 NR Description: pre-mRNA splicing factor SF2 (SR1 protein)
  misc_feature (1)..(238): NCBI GI NO: 4775271 NR Description: SF2/ASF-like splicing modulator Srp30, variant 1
  misc_feature (1)..(265): NCBI GI NO: 5815236 NR Description: splicing factor SR1B [Arabidopsis thaliana]
MSRRSNGRTIYVGNLPEDIREREIEDLFYKYGPIVDIDLKIPPRPPVYAFVEFEDPRDADDAIYGRDGYDFDGHKLRVELAHGGKGPYFIRPSSYSSSGRHGAVRRSDYRVIVTGLPSSASWQDLKDHMRRAGDVCFSDVYPEAGAITGIVEYTNYEDMKHAIRKLDDSEFRNAFSRAYIRVREYNARRSRSYSRGRSRSCSYSRSRSHSYSRSKSPRSRPASRSPSPVKARSSSRSLSPAAPAHDKSASRSPVRSRSLPRSQSPVKSE

SEQ ID NO: 17010 - DNA, 1013 bp, Triticum aestivum
  misc_feature (1)..(1013): Ceres Seq. ID no. 13658673
attgcataaatatgtgaaatcattatttcattaccagctgtgttaccagaggtgtaaagttaaaatggaatatatactaagctagagccgagaggtttcaaactatttgcattctaattccagcctttcaattttccaacagtatttcaatcaaatattaatgaccgtacttgacgtgctgggtgactccgatccatctactagggagattgctttgtctttaattgctgagatgctcaacaatcagaaagacgctatggaagaatctattgagattgttcttgaaaaacttctgcatgtgacgaaagatgtggtggcaaagatttcaaatgaagcgaacagatgcataaatgttttgttggcaaaatacgatcctttcagatgtcttgctgttgtagtacctcttttggtcagtgatgatgaaaagatgctcgttgtgtgtatcaactgtttgacaaagcttgtcgcgcaccttccccaagaggaattgatggatcagctgcctacatttttgccagcactgtttgatgcttttagtaaccaaagtccagatgttcgaaagagtgttgtattctgcttggtggacatctacatcatgctggggaaagcgtttgtgccgtacctggaagggctgagcagcacacagctgcgcttggtgaccatctacgcgaaccggatttcgcaggcaaggtccggcacggcgattgacagcgctaaccaatgaggtgtaacattcttctgttttatatggacattttgtttggtaggggagtgagatttttggggggtcccgtttgtttgtgtaggtttgtgtatagtatataagcaaacgattcccttgtatttgggtgtttcctggctttggttctttgtgtgattatgtattccttttaactttttctttttcttttggttagcatgtggagaggagtgttagcgagcttgtgttgtcttgggttgtacaactaggtgacaatgtacaaagaaaggaaatgtaacgtaatggagaaagt

SEQ ID NO: 17011 - protein, 187 aa, Triticum aestivum
  peptide (1)..(187): Ceres Seq. ID no. 13658674
  misc_feature (1)..(187): NCBI GI NO: 38346560 NR Description: OSJNBa0043L24.9
  misc_feature (1)..(177): NCBI GI NO: 38567848 NR Description: OSJNBb0002J11.18
  misc_feature (1)..(184): NCBI GI NO: 25411970 NR Description: hypothetical protein At2g20190
  misc_feature (1)..(184): NCBI GI NO: 30680913 NR Description: expressed protein [Arabidopsis thaliana]
  misc_feature (1)..(184): NCBI GI NO: 20259452 NR Description: unknown protein [Arabidopsis thaliana]
  misc_feature (1)..(184): NCBI GI NO: 13508653 NR Description: CLIP-associating protein CLASP1 [Mus musculus]
  misc_feature (1)..(181): NCBI GI NO: 6808437 NR Description: hypothetical protein [Homo sapiens]
  misc_feature (1)..(184): NCBI GI NO: 34980884 NR Description: Unknown (protein for IMAGE:6824890) [Mus musculus]
  misc_feature (1)..(184): NCBI GI NO: 28972317 NR Description: mKIAA0622 protein [Mus musculus]
  misc_feature (1)..(181): NCBI GI NO: 13508539 NR Description: CLASP2 [Mus musculus]
MTVLDVLGDSDPSTREIALSLIAEMLNNQKDAMEESIEIVLEKLLHVTKDVVAKISNEANRCINVLLAKYDPFRCLAVVVPLLVSDDEKMLVVCINCLTKLVAHLPQEELMDQLPTFLPALFDAFSNQSPDVRKSVVFCLVDIYIMLGKAFVPYLEGLSSTQLRLVTIYANRISQARSGTAIDSANQ

SEQ ID NO: 17012 - protein, 163 aa, Triticum aestivum
  peptide (1)..(163): Ceres Seq. ID no. 13658675
  misc_feature (1)..(163): NCBI GI NO: 38346560 NR Description: OSJNBa0043L24.9
  misc_feature (1)..(153): NCBI GI NO: 38567848 NR Description: OSJNBb0002J11.18
  misc_feature (1)..(160): NCBI GI NO: 25411970 NR Description: hypothetical protein At2g20190
  misc_feature (1)..(160): NCBI GI NO: 30680913 NR Description: expressed protein [Arabidopsis thaliana]
  misc_feature (1)..(160): NCBI GI NO: 20259452 NR Description: unknown protein [Arabidopsis thaliana]
  misc_feature (1)..(160): NCBI GI NO: 13508653 NR Description: CLIP-associating protein CLASP1 [Mus musculus]
  misc_feature (1)..(157): NCBI GI NO: 6808437 NR Description: hypothetical protein [Homo sapiens]
  misc_feature (1)..(160): NCBI GI NO: 34980884 NR Description: Unknown (protein for IMAGE:6824890) [Mus musculus]
  misc_feature (1)..(160): NCBI GI NO: 28972317 NR Description: mKIAA0622 protein [Mus musculus]
  misc_feature (1)..(157): NCBI GI NO: 13508539 NR Description: CLASP2 [Mus musculus]
MLNNQKDAMEESIEIVLEKLLHVTKDVVAKISNEANRCINVLLAKYDPFRCLAVVVPLLVSDDEKMLVVCINCLTKLVAHLPQEELMDQLPTFLPALFDAFSNQSPDVRKSVVFCLVDIYIMLGKAFVPYLEGLSSTQLRLVTIYANRISQARSGTAIDSANQ

SEQ ID NO: 17013 - protein, 155 aa, Triticum aestivum
  peptide (1)..(155): Ceres Seq. ID no. 13658676
  misc_feature (1)..(155): NCBI GI NO: 38346560 NR Description: OSJNBa0043L24.9
  misc_feature (1)..(145): NCBI GI NO: 38567848 NR Description: OSJNBb0002J11.18
  misc_feature (1)..(152): NCBI GI NO: 25411970 NR Description: hypothetical protein At2g20190
  misc_feature (1)..(152): NCBI GI NO: 30680913 NR Description: expressed protein [Arabidopsis thaliana]
  misc_feature (1)..(152): NCBI GI NO: 20259452 NR Description: unknown protein [Arabidopsis thaliana]
  misc_feature (1)..(152): NCBI GI NO: 13508653 NR Description: CLIP-associating protein CLASP1 [Mus musculus]
  misc_feature (1)..(149): NCBI GI NO: 6808437 NR Description: hypothetical protein [Homo sapiens]
  misc_feature (1)..(152): NCBI GI NO: 34980884 NR Description: Unknown (protein for IMAGE:6824890) [Mus musculus]
  misc_feature (1)..(152): NCBI GI NO: 28972317 NR Description: mKIAA0622 protein [Mus musculus]
  misc_feature (1)..(149): NCBI GI NO: 13508539 NR Description: CLASP2 [Mus musculus]
MEESIEIVLEKLLHVTKDVVAKISNEANRCINVLLAKYDPFRCLAVVVPLLVSDDEKMLVVCINCLTKLVAHLPQEELMDQLPTFLPALFDAFSNQSPDVRKSVVFCLVDIYIMLGKAFVPYLEGLSSTQLRLVTIYANRISQARSGTAIDSANQ

SEQ ID NO: 17014 - DNA, 676 bp, Triticum aestivum
  misc_feature (1)..(676): Ceres Seq. ID no. 13663146
cctaatcgaaaatttattcctgcaccaccggaagttgcaatgcgtatgttgagggagcagggtgggccaccacctttcgagccgaatgctggtccacgtcctaggaaagcaggaagggctggtggtcccccaatgggtggtccatcaccaatccttaatgctccacttcctataatgcatgatccacgtatgcaagatccacgcatgcaagatccccgtaaaatacgaagctatcaagatctggacgctcctggagatgaagtgacagttttggactaccggagcctgtagtcgtgtgctgtacggccttttaatcttcgaagccgtggacgataccaccaccgcaacgggaccttgctcatctccattagtttgaccgtggcggaggaacactgatgcggtgccccgtcccgtgagctatgttatactactcaatggtgcttctaaaactgaaccacatgaaatcaaagcaactggcgcactgaaagcacggttgtggagtgtgtatttccaacagaattttttagcttttcaaaatttccaccatctagagagagagagagtagaggtctctgctgccgtatccagaactccagaccagatattcctcaccgtgtatgcaatctgtaatttatatacaggaaaaaacggttggtagatggaaccctgattggtc

SEQ ID NO: 17015 - protein, 96 aa, Triticum aestivum
  peptide (1)..(96): Ceres Seq. ID no. 13663147
  misc_feature (1)..(96): NCBI GI NO: 34905134 NR Description: putative C2H2 zinc-finger protein
  misc_feature (1)..(96): NCBI GI NO: 14486604 NR Description: C2H2 zinc-finger protein SERRATE
  misc_feature (1)..(96): NCBI GI NO: 14486608 NR Description: C2H2 zinc-finger protein [Zea mays]
  misc_feature (1)..(96): NCBI GI NO: 14486606 NR Description: C2H2 zinc-finger protein [Zea mays]
PNRKFIPAPPEVAMRMLREQGGPPPFEPNAGPRPRKAGRAGGPPMGGPSPILNAPLPIMHDPRMQDPRMQDPRKIRSYQDLDAPGDEVTVLDYRSL

SEQ ID NO: 17016 - protein, 83 aa, Triticum aestivum
  peptide (1)..(83): Ceres Seq. ID no. 13663148
  misc_feature (1)..(83): NCBI GI NO: 34905134 NR Description: putative C2H2 zinc-finger protein
  misc_feature (1)..(83): NCBI GI NO: 14486604 NR Description: C2H2 zinc-finger protein SERRATE
  misc_feature (1)..(83): NCBI GI NO: 14486608 NR Description: C2H2 zinc-finger protein [Zea mays]
  misc_feature (1)..(83): NCBI GI NO: 14486606 NR Description: C2H2 zinc-finger protein [Zea mays]
MRMLREQGGPPPFEPNAGPRPRKAGRAGGPPMGGPSPILNAPLPIMHDPRMQDPRMQDPRKIRSYQDLDAPGDEVTVLDYRSL

SEQ ID NO: 17017 - protein, 81 aa, Triticum aestivum
  peptide (1)..(81): Ceres Seq. ID no. 13663149
  misc_feature (1)..(81): NCBI GI NO: 34905134 NR Description: putative C2H2 zinc-finger protein
  misc_feature (1)..(81): NCBI GI NO: 14486604 NR Description: C2H2 zinc-finger protein SERRATE
  misc_feature (1)..(81): NCBI GI NO: 14486608 NR Description: C2H2 zinc-finger protein [Zea mays]
  misc_feature (1)..(81): NCBI GI NO: 14486606 NR Description: C2H2 zinc-finger protein [Zea mays]
MLREQGGPPPFEPNAGPRPRKAGRAGGPPMGGPSPILNAPLPIMHDPRMQDPRMQDPRKIRSYQDLDAPGDEVTVLDYRSL

SEQ ID NO: 17018 - DNA, 719 bp, Triticum aestivum
  misc_feature (1)..(719): Ceres Seq. ID no. 13658677
acatggtaatggattttcaaaagaagaacaggaagcgaaagaccaaggtggaaacctcagacgacgagttatcacaggcgtcacttgatgaacaggcgccacttgatgaacggtcaccaaaagccaatgcggtaaccttaaatgagaagtatcacagacggtctttcctcctgttgtaaacaaaactggcatccagattgaacaggcgccacttggtgaacgagagaagtacattgttgagctggaaaggaagttgagtgaaagggatagagaattggaagctttgaagtttgatcataaaaaggcaggatcttcttgcagtgcagacgaaatagcttgcaaaagacagtgccatggagcgcgaagcgaggatgctcagggagaacacttactttgatgtggatctgtgcagcggcggacgatgctaccgcaagctgatggtgcctgggcttagtggaggatgtttgggaccttgtttgtgcgttttatcttcagctctgagcatcccctttctttcagactttattctctattgctggtgtcgtctgcttttcgccccataacaattgttttgatggtgagcattttctgtgggtttcaaaaaaaaaaaaaaaaaaaaaaaaaaaaaaaaaaaaaaaaaaaaaaaaaaaaaaaaaaaaaaaaggaaaaaaaaaaaaaaaaaggtttatcgataccgccaacctcaagggggggcccgg

SEQ ID NO: 17019 - protein, 86 aa, Triticum aestivum
  peptide (1)..(86): Ceres Seq. ID no. 13658678
  misc_feature (45)..(74): NCBI GI NO: 39597582 NR Description: Hypothetical protein CBG03276
  misc_feature (47)..(74): NCBI GI NO: 16416102 NR Description: hypothetical protein [Neurospora crassa]
  misc_feature (45)..(74): NCBI GI NO: 32416700 NR Description: predicted protein [Neurospora crassa]
  misc_feature (47)..(78): NCBI GI NO: 39594135 NR Description: Hypothetical protein CBG16734
  misc_feature (47)..(79): NCBI GI NO: 39597582 NR Description: Hypothetical protein CBG03276
  misc_feature (35)..(74): NCBI GI NO: 37536950 NR Description: hypothetical protein
  misc_feature (47)..(74): NCBI GI NO: 39595494 NR Description: Hypothetical protein CBG04159
  misc_feature (47)..(74): NCBI GI NO: 16416102 NR Description: hypothetical protein [Neurospora crassa]
  misc_feature (47)..(74): NCBI GI NO: 16416102 NR Description: hypothetical protein [Neurospora crassa]
  misc_feature (47)..(74): NCBI GI NO: 16416102 NR Description: hypothetical protein [Neurospora crassa]
MFGTLFVRFIFSSEHPLSFRLYSLLLVSSAFRPITIVLMVSIFCGFQKKKKKKKKKKKKKKKKKKKKKEKKKKKGLSIPPTSRGGP

SEQ ID NO: 17020 - protein, 69 aa, Triticum aestivum
  peptide (1)..(69): Ceres Seq. ID no. 13658679
MEREARMLRENTYFDVDLCSGGRCYRKLMVPGLSGGCLGPCLCVLSSALSIPFLSDFILYCWCRLLFAP

SEQ ID NO: 17021 - protein, 63 aa, Triticum aestivum
  peptide (1)..(63): Ceres Seq. ID no. 13658680
MLRENTYFDVDLCSGGRCYRKLMVPGLSGGCLGPCLCVLSSALSIPFLSDFILYCWCRLLFAP

SEQ ID NO: 17022 - DNA, 520 bp, Triticum aestivum
  misc_feature (1)..(520): Ceres Seq. ID no. 13658646
  misc_feature (406)..(406): n is a, c, t, g, unknown, or other
gtgagccgtccacatcctgtcgcgccgtcaagtaactgctacatggcctggtgcgccctgcgcagccgcctcctcccgctctccccctcctcctccgccgccgccgccgccgcgacgccccaccggctcctcctctgcctcctctccaccgcggccccgcgccactcccacggccaccaccaccgccgccgccactcgcccgccgcctacgccgccgcggccgaggagtcgccgcgccccatgccgcccatcggtcgcgccacgcgccaccccgcgggggccacccccatcgcgcgcttctacgccgacgccaactcccagcggcccaaggagtactgggactacgaggcgctcgacatcgagtggggggagcaggatgggtacgaggtgctgcggaaggtgggcnagggcaagtacagcgaggtgttcgagggattgcggaccgggagcgaagagaggtgcgtcatcaagatcctcaagcccgtgaggaagaagaagatwaagagggaaatamagatac

SEQ ID NO: 17023 - protein, 173 aa, Triticum aestivum
  peptide (1)..(173): Ceres Seq. ID no. 13658647
  misc_feature (15)..(172): NCBI GI NO: 17027272 NR Description: putative casein kinase alpha subunit
  misc_feature (49)..(172): NCBI GI NO: 15227778 NR Description: casein kinase II alpha chain, putative
  misc_feature (98)..(172): NCBI GI NO: 26006492 NR Description: Putative casein kinase II alpha subunit
  misc_feature (98)..(172): NCBI GI NO: 125271 NR Description: Casein kinase II, alpha chain (CK II) (CK2-alpha)
  misc_feature (98)..(172): NCBI GI NO: 3821795 NR Description: protein kinase CK2, alpha subunit [Zea mays]
  misc_feature (98)..(172): NCBI GI NO: 12697575 NR Description: casein kinase II alpha subunit
  misc_feature (98)..(172): NCBI GI NO: 14317906 NR Description: casein kinase II alpha [Triticum aestivum]
  misc_feature (98)..(172): NCBI GI NO: 7766821 NR Description: Chain A
  misc_feature (98)..(172): NCBI GI NO: 12697577 NR Description: casein kinase II alpha subunit
  misc_feature (98)..(172): NCBI GI NO: 33357307 NR Description: Chain A
  misc_feature (136)..(136): Xaa is any aa, unknown or other
  misc_feature (167)..(167): Xaa is any aa, unknown or other
  misc_feature (172)..(172): Xaa is any aa, unknown or other
VSRPHPVAPSSNCYMAWCALRSRLLPLSPSSSAAAAAATPHRLLLCLLSTAAPRHSHGHHHRRRHSPAAYAAAAEESPRPMPPIGRATRHPAGATPIARFYADANSQRPKEYWDYEALDIEWGEQDGYEVLRKVGXGKYSEVFEGLRTGSEERCVIKILKPVRKKKXKREIXI

SEQ ID NO: 17024 - protein, 159 aa, Triticum aestivum
  peptide (1)..(159): Ceres Seq. ID no. 13658648
  misc_feature (1)..(158): NCBI GI NO: 17027272 NR Description: putative casein kinase alpha subunit
  misc_feature (35)..(158): NCBI GI NO: 15227778 NR Description: casein kinase II alpha chain, putative
  misc_feature (84)..(158): NCBI GI NO: 26006492 NR Description: Putative casein kinase II alpha subunit
  misc_feature (84)..(158): NCBI GI NO: 125271 NR Description: Casein kinase II, alpha chain (CK II) (CK2-alpha)
  misc_feature (84)..(158): NCBI GI NO: 3821795 NR Description: protein kinase CK2, alpha subunit [Zea mays]
  misc_feature (84)..(158): NCBI GI NO: 7766821 NR Description: Chain A
  misc_feature (84)..(158): NCBI GI NO: 12697577 NR Description: casein kinase II alpha subunit
  misc_feature (84)..(158): NCBI GI NO: 12697575 NR Description: casein kinase II alpha subunit
  misc_feature (84)..(158): NCBI GI NO: 14317906 NR Description: casein kinase II alpha [Triticum aestivum]
  misc_feature (84)..(158): NCBI GI NO: 33357307 NR Description: Chain A
  misc_feature (122)..(122): Xaa is any aa, unknown or other
  misc_feature (153)..(153): Xaa is any aa, unknown or other
  misc_feature (158)..(158): Xaa is any aa, unknown or other
MAWCALRSRLLPLSPSSSAAAAAATPHRLLLCLLSTAAPRHSHGHHHRRRHSPAAYAAAAEESPRPMPPIGRATRHPAGATPIARFYADANSQRPKEYWDYEALDIEWGEQDGYEVLRKVGXGKYSEVFEGLRTGSEERCVIKILKPVRKKKXKREIXI

SEQ ID NO: 17025 - protein, 93 aa, Triticum aestivum
  peptide (1)..(93): Ceres Seq. ID no. 13658649
  misc_feature (1)..(92): NCBI GI NO: 17027272 NR Description: putative casein kinase alpha subunit
  misc_feature (1)..(92): NCBI GI NO: 15227778 NR Description: casein kinase II alpha chain, putative
  misc_feature (18)..(92): NCBI GI NO: 26006492 NR Description: Putative casein kinase II alpha subunit
  misc_feature (18)..(92): NCBI GI NO: 125271 NR Description: Casein kinase II, alpha chain (CK II) (CK2-alpha)
  misc_feature (18)..(92): NCBI GI NO: 3821795 NR Description: protein kinase CK2, alpha subunit [Zea mays]
  misc_feature (18)..(92): NCBI GI NO: 7766821 NR Description: Chain A
  misc_feature (18)..(92): NCBI GI NO: 12697577 NR Description: casein kinase II alpha subunit
  misc_feature (18)..(92): NCBI GI NO: 12697575 NR Description: casein kinase II alpha subunit
  misc_feature (18)..(92): NCBI GI NO: 14317906 NR Description: casein kinase II alpha [Triticum aestivum]
  misc_feature (18)..(92): NCBI GI NO: 33357307 NR Description: Chain A
  misc_feature (56)..(56): Xaa is any aa, unknown or other
  misc_feature (87)..(87): Xaa is any aa, unknown or other
  misc_feature (92)..(92): Xaa is any aa, unknown or other
MPPIGRATRHPAGATPIARFYADANSQRPKEYWDYEALDIEWGEQDGYEVLRKVGXGKYSEVFEGLRTGSEERCVIKILKPVRKKKXKREIXI

SEQ ID NO: 17026 - DNA, 1916 bp, Triticum aestivum
  misc_feature (1)..(1916): Ceres Seq. ID no. 14302746
ctcgctcctcctccgtccatccacaactcaattgctgccaaatcttagcgctgcacccaccgcctccgtttggttccctggattcttctccgcgcccgcgagaaatctgggtgatgagatgatgaggacggcggcggtgctgttcctctgctttttcgccttcgccggcagcggctggggcggagcgcgggtcgcggccgtatgggcggagggggtcagacagacggcggcggtggtggtggaccctgcctggcgcttccctagcccgcggctgcgggacgcgtacgtcgcgctgcagacatggaagcagcaggccatcttctccgaccccaagaacctcaccggcgactgggtgggtcccgcggtctgcggctacaccggcgtgttctgcgcgcctgctccgtcgtcgggcgagctcgccgtcgccggcatcgacctcaaccacggcgacatcgcgggctacctcccgtcggagctcggcctcctctgcgacctcgcgctgctccacctcaactccaaccgcttctgcggcctcgtgcccgacaccttccgccggctcgtcctcctccacgagctcgacctcagcaacaaccgcttcgtgggcgcgttcccgaccgtcgtgctcgacctcccgtccctcaggttcctcgacctccgcttcaacgacttcgagggcggcgtgccgcgggagctcttcgaccgcccgttcgacgccatcttcctcaaccacaatcgcctccgcttccagctccccgacaacttcggcaattcgcccgtgtccgtcatcgtcctcgccaacaaccacttcggcggctgcctcccggcgagcctcggcaacatgtccgacacgctcaacgagatcctcctcatcaacaacggcctcacctcgtgcctcccggcggaggtcgggatgctccgggaggtgacggtgttcgacgtcagcttcaacgccctcgcagggccgctgccgccggaggtggccgggatgcaaaaggtggagcagctcgacatcgcgcacaacctgctgtcggggaccgtgccggaggccgtgtgcgacctcccacggctcaagaacttcaccttctcctacaacttcttcaccggcgagccgccgtcctgcgcgcgcgtcgtgcctgccgacggcgaccgccggaactgcctccccaaccgccccgcccagcgcatgccgcagcagtgcgccgctttctatgcccgcccgcccgtcgactgcgcagctttccagtgcaagccgtttgtcccacctcggccacccccaccgccagcataccccggcccgttgccgccagtgtaccccatgccatacgcgtcgccgccgccgcctccacgttaccgatgattctttgacaacagaagcattgccagtttcactttcccttgccgcaccccttgccgccggtgtggaagagccagcggagctcgccgtcacaaaagtacgtggtcattgttgttcgtggattaccagttcttgattgatagctaccggcgtaaagaagaacgtggtgcatatatccttttcttgtttttttgcattggttggtgtctgttttccgcatcgtcgtcttcgatcatccgtttgcgcggtggcgatggcgaaaaggattggagcatggtgataaggaaatttgaaaggtgggagcaaattgggcttggattgatggctaattgggttgtgaataataaactggctgagagagacaggttaagctgagattgagaaatccatggaaaagttgtgatgcgggatgtatagaatgatacttttagttcggtaaagctctagttgagggtcagagataagtttctacatcaagagatttgtcctactgaattcctcttgtgtcacagctgcttactgttattcgattattattattaagatgtttagttgggcttct

SEQ ID NO: 17027 - protein, 451 aa, Triticum aestivum
  peptide (1)..(451): Ceres Seq. ID no. 14302747
  misc_feature (378)..(449): Pfam Name: Pfam Description:  Glycoprotein GG/GX
  misc_feature (41)..(447): NCBI GI NO: 34906174 NR Description: putative extensin-like protein
  misc_feature (406)..(448): NCBI GI NO: 34906174 NR Description: putative extensin-like protein
  misc_feature (70)..(447): NCBI GI NO: 15235668 NR Description: leucine-rich repeat extensin family
  misc_feature (78)..(448): NCBI GI NO: 15230120 NR Description: leucine-rich repeat extensin family
  misc_feature (78)..(447): NCBI GI NO: 34912294 NR Description: putative extensin-like protein
  misc_feature (78)..(448): NCBI GI NO: 15233976 NR Description: leucine-rich repeat extensin family
  misc_feature (78)..(448): NCBI GI NO: 7484956 NR Description: extensin homolog F24O1.18 - Arabidopsis thaliana
  misc_feature (78)..(448): NCBI GI NO: 15220780 NR Description: leucine-rich repeat extensin family
  misc_feature (421)..(450): NCBI GI NO: 7484956 NR Description: extensin homolog F24O1.18 - Arabidopsis thaliana
  misc_feature (421)..(450): NCBI GI NO: 15220780 NR Description: leucine-rich repeat extensin family
SLLLRPSTTQLLPNLSAAPTASVWFPGFFSAPARNLGDEMMRTAAVLFLCFFAFAGSGWGGARVAAVWAEGVRQTAAVVVDPAWRFPSPRLRDAYVALQTWKQQAIFSDPKNLTGDWVGPAVCGYTGVFCAPAPSSGELAVAGIDLNHGDIAGYLPSELGLLCDLALLHLNSNRFCGLVPDTFRRLVLLHELDLSNNRFVGAFPTVVLDLPSLRFLDLRFNDFEGGVPRELFDRPFDAIFLNHNRLRFQLPDNFGNSPVSVIVLANNHFGGCLPASLGNMSDTLNEILLINNGLTSCLPAEVGMLREVTVFDVSFNALAGPLPPEVAGMQKVEQLDIAHNLLSGTVPEAVCDLPRLKNFTFSYNFFTGEPPSCARVVPADGDRRNCLPNRPAQRMPQQCAAFYARPPVDCAAFQCKPFVPPRPPPPPAYPGPLPPVYPMPYASPPPPPRYR

SEQ ID NO: 17028 - protein, 412 aa, Triticum aestivum
  peptide (1)..(412): Ceres Seq. ID no. 14302748
  misc_feature (339)..(410): Pfam Name: Pfam Description:  Glycoprotein GG/GX
  misc_feature (2)..(408): NCBI GI NO: 34906174 NR Description: putative extensin-like protein
  misc_feature (367)..(409): NCBI GI NO: 34906174 NR Description: putative extensin-like protein
  misc_feature (31)..(408): NCBI GI NO: 15235668 NR Description: leucine-rich repeat extensin family
  misc_feature (39)..(409): NCBI GI NO: 15230120 NR Description: leucine-rich repeat extensin family
  misc_feature (39)..(408): NCBI GI NO: 34912294 NR Description: putative extensin-like protein
  misc_feature (39)..(409): NCBI GI NO: 15233976 NR Description: leucine-rich repeat extensin family
  misc_feature (39)..(409): NCBI GI NO: 7484956 NR Description: extensin homolog F24O1.18 - Arabidopsis thaliana
  misc_feature (39)..(409): NCBI GI NO: 15220780 NR Description: leucine-rich repeat extensin family
  misc_feature (382)..(411): NCBI GI NO: 7484956 NR Description: extensin homolog F24O1.18 - Arabidopsis thaliana
  misc_feature (382)..(411): NCBI GI NO: 15220780 NR Description: leucine-rich repeat extensin family
MMRTAAVLFLCFFAFAGSGWGGARVAAVWAEGVRQTAAVVVDPAWRFPSPRLRDAYVALQTWKQQAIFSDPKNLTGDWVGPAVCGYTGVFCAPAPSSGELAVAGIDLNHGDIAGYLPSELGLLCDLALLHLNSNRFCGLVPDTFRRLVLLHELDLSNNRFVGAFPTVVLDLPSLRFLDLRFNDFEGGVPRELFDRPFDAIFLNHNRLRFQLPDNFGNSPVSVIVLANNHFGGCLPASLGNMSDTLNEILLINNGLTSCLPAEVGMLREVTVFDVSFNALAGPLPPEVAGMQKVEQLDIAHNLLSGTVPEAVCDLPRLKNFTFSYNFFTGEPPSCARVVPADGDRRNCLPNRPAQRMPQQCAAFYARPPVDCAAFQCKPFVPPRPPPPPAYPGPLPPVYPMPYASPPPPPRYR

SEQ ID NO: 17029 - protein, 411 aa, Triticum aestivum
  peptide (1)..(411): Ceres Seq. ID no. 14302749
  misc_feature (338)..(409): Pfam Name: Pfam Description:  Glycoprotein GG/GX
  misc_feature (1)..(407): NCBI GI NO: 34906174 NR Description: putative extensin-like protein
  misc_feature (366)..(408): NCBI GI NO: 34906174 NR Description: putative extensin-like protein
  misc_feature (30)..(407): NCBI GI NO: 15235668 NR Description: leucine-rich repeat extensin family
  misc_feature (38)..(408): NCBI GI NO: 15230120 NR Description: leucine-rich repeat extensin family
  misc_feature (38)..(407): NCBI GI NO: 34912294 NR Description: putative extensin-like protein
  misc_feature (38)..(408): NCBI GI NO: 15233976 NR Description: leucine-rich repeat extensin family
  misc_feature (38)..(408): NCBI GI NO: 7484956 NR Description: extensin homolog F24O1.18 - Arabidopsis thaliana
  misc_feature (38)..(408): NCBI GI NO: 15220780 NR Description: leucine-rich repeat extensin family
  misc_feature (381)..(410): NCBI GI NO: 7484956 NR Description: extensin homolog F24O1.18 - Arabidopsis thaliana
  misc_feature (381)..(410): NCBI GI NO: 15220780 NR Description: leucine-rich repeat extensin family
MRTAAVLFLCFFAFAGSGWGGARVAAVWAEGVRQTAAVVVDPAWRFPSPRLRDAYVALQTWKQQAIFSDPKNLTGDWVGPAVCGYTGVFCAPAPSSGELAVAGIDLNHGDIAGYLPSELGLLCDLALLHLNSNRFCGLVPDTFRRLVLLHELDLSNNRFVGAFPTVVLDLPSLRFLDLRFNDFEGGVPRELFDRPFDAIFLNHNRLRFQLPDNFGNSPVSVIVLANNHFGGCLPASLGNMSDTLNEILLINNGLTSCLPAEVGMLREVTVFDVSFNALAGPLPPEVAGMQKVEQLDIAHNLLSGTVPEAVCDLPRLKNFTFSYNFFTGEPPSCARVVPADGDRRNCLPNRPAQRMPQQCAAFYARPPVDCAAFQCKPFVPPRPPPPPAYPGPLPPVYPMPYASPPPPPRYR

SEQ ID NO: 17030 - DNA, 576 bp, Triticum aestivum
  misc_feature (1)..(576): Ceres Seq. ID no. 13658253
accaccaattaagttcgcgccaaattaggcaagctagcgcgcactgcacgtacgcgtgggcgcgctctgtctgctgccaaaaggcgtgcaaaccaaagcttgattagtagcggaggccggcgatgaggccacggccgccggctctcgtgagcagcctcctcctcctcctcctactattcgcggtgccgaggcatgccgccgcggcgggaggggacggcggtggcatggtgcgggtggacggcacgcggttcgtggcgggggacggcgaccggacggtgtacctcagcgggttcaacgcctactggctcatggagatggcctccgacccgtcccggcggggcggggtggtgtcggcgttccggcaggcggccgcgcacggcctcaacctcgcgcgcacctgggccttcagcgacggcggcgaccgaccgctgcagtcctcgccgggcgtctaccacgaggacatgttccagggcctggacttcgtcatcgccgaggcgaggcggcacgggatatacctcctcctctgcctcaccaacaacttcgacgacttcggcggcaagcgccagtacgtccagt

SEQ ID NO: 17031 - protein, 151 aa, Triticum aestivum
  peptide (1)..(151): Ceres Seq. ID no. 13658254
  misc_feature (41)..(150): Pfam Name: glycosyl hydrolase family 5 Pfam Description: Cellulase
  misc_feature (1)..(150): NCBI GI NO: 34897316 NR Description: putative endohydrolase [Oryza sativa]
  misc_feature (35)..(150): NCBI GI NO: 34897314 NR Description: putative endohydrolase [Oryza sativa]
  misc_feature (10)..(150): NCBI GI NO: 34912090 NR Description: putative mannan endo-1,4-beta-mannosidase
  misc_feature (11)..(150): NCBI GI NO: 10178872 NR Description: (1-4)-beta-mannan endohydrolase [Coffea arabica]
  misc_feature (50)..(150): NCBI GI NO: 29786430 NR Description: endo-beta-1,4-mannanase [Lactuca sativa]
  misc_feature (7)..(150): NCBI GI NO: 15529113 NR Description: endo-beta-mannanase [Lycopersicon esculentum]
  misc_feature (7)..(150): NCBI GI NO: 21307619 NR Description: mannan endo-1,4-beta-mannosidase
  misc_feature (7)..(150): NCBI GI NO: 22382040 NR Description: inactive endo-beta-mannanase
  misc_feature (33)..(150): NCBI GI NO: 15239973 NR Description: glycosyl hydrolase family 5/cellulase
  misc_feature (12)..(150): NCBI GI NO: 10129675 NR Description: (1-4)-beta-mannan endohydrolase [Coffea arabica]
MRPRPPALVSSLLLLLLLFAVPRHAAAAGGDGGGMVRVDGTRFVAGDGDRTVYLSGFNAYWLMEMASDPSRRGGVVSAFRQAAAHGLNLARTWAFSDGGDRPLQSSPGVYHEDMFQGLDFVIAEARRHGIYLLLCLTNNFDDFGGKRQYVQ

SEQ ID NO: 17032 - protein, 128 aa, Triticum aestivum
  peptide (1)..(128): Ceres Seq. ID no. 13658255
  misc_feature (45)..(127): Pfam Name: Pfam Description:  Cupin
MPPRREGTAVAWCGWTARGSWRGTATGRCTSAGSTPTGSWRWPPTRPGGAGWCRRSGRRPRTASTSRAPGPSATAATDRCSPRRASTTRTCSRAWTSSSPRRGGTGYTSSSASPTTSTTSAASASTSS

SEQ ID NO: 17033 - protein, 117 aa, Triticum aestivum
  peptide (1)..(117): Ceres Seq. ID no. 13658256
  misc_feature (7)..(116): Pfam Name: glycosyl hydrolase family 5 Pfam Description: Cellulase
  misc_feature (1)..(116): NCBI GI NO: 34897316 NR Description: putative endohydrolase [Oryza sativa]
  misc_feature (1)..(116): NCBI GI NO: 34897314 NR Description: putative endohydrolase [Oryza sativa]
  misc_feature (1)..(116): NCBI GI NO: 34912090 NR Description: putative mannan endo-1,4-beta-mannosidase
  misc_feature (1)..(116): NCBI GI NO: 10178872 NR Description: (1-4)-beta-mannan endohydrolase [Coffea arabica]
  misc_feature (16)..(116): NCBI GI NO: 29786430 NR Description: endo-beta-1,4-mannanase [Lactuca sativa]
  misc_feature (1)..(116): NCBI GI NO: 15529113 NR Description: endo-beta-mannanase [Lycopersicon esculentum]
  misc_feature (1)..(116): NCBI GI NO: 21307619 NR Description: mannan endo-1,4-beta-mannosidase
  misc_feature (1)..(116): NCBI GI NO: 22382040 NR Description: inactive endo-beta-mannanase
  misc_feature (1)..(116): NCBI GI NO: 15239973 NR Description: glycosyl hydrolase family 5/cellulase
  misc_feature (1)..(116): NCBI GI NO: 10129675 NR Description: (1-4)-beta-mannan endohydrolase [Coffea arabica]
MVRVDGTRFVAGDGDRTVYLSGFNAYWLMEMASDPSRRGGVVSAFRQAAAHGLNLARTWAFSDGGDRPLQSSPGVYHEDMFQGLDFVIAEARRHGIYLLLCLTNNFDDFGGKRQYVQ

SEQ ID NO: 17034 - DNA, 1440 bp, Triticum aestivum
  misc_feature (1)..(1440): Ceres Seq. ID no. 13658257
gccggacgcagaagcagaagcagcagcgcagccagcagcaaagaatcacgaggagatggcggcggcgacggcgacggcgacggtgcaagcgcagccaggactcgacgcgcgcgagtgggacgaggcggcgtaccggcggggcatcctgcgggagcgcgacctctcctgccgcaccctcttccgcgccgtcttctacgaccagcgcgacgaacccgacccggacgtcctcctcgccgccgcctccagcgacggatccctcgcgtccttctcgctgtcctcctgcatcgcctcctccgcctccgcccacgccgccccacagttggctgccgccgcgctggtcgaccccgtctgcatcgtccaagcgcacagcggccccgtctacgacgccaagttctacaacgatccgattcagccgctgctcttcagctgcggggatgacggccacatccggggttggagatggcacgagatgcagagctgccttctgccactctctctgcaaggggatcatgttgaaccaatacttgacttggttaaccctcagcatgaaggcccttggggtgcacggtctccaataccagaaaataatgccattgcaattagcaaacaggatggatctcttttcgcggcagcgggtgatgcatgtgcttattgctgggatgtggaaagtggaaagtgtaaaatgacctttaaggggcatactgactatttgcatagtatcgcagttcgtgaggcaaaccaccaggtggtaactggatcagaggatgggacagcccgtatctgggattgcagaagtgggaagtgtacgcagacgatacgtccagtacagaacaagaaatttgagggctcgtgggtcggttgcattgccattgatgcgagtgaaagttggctggcttgtggtacttcttgtggtatatcagtttggagtcttctttcaaatgagtgcatcttcaacgcagattgtggtgctcctgttcaagatttgttgtttgacaaaaatcaaattttagcggttggcgctgaacctgcgctctcccgtttcacgatcaacggggttgttgtttcgcaaataaagtgcgctcctccgtcggcattttccgtctccatgcattcatctgggatggcagctgttgctgggcatggaggtctggtggatgtcatctctggattcgggagccatctttgcgcgtttcgttgccgtggcctggataggtaatcagttaccgagtgctgatgaagcgttactgtgcaatttccatttgccactcccacattagtcagtggagcgcgaaactgtatttcttttcccccctcactgttgtaatacttgtttcagttcagtctgcggaatgatttcctgacaaggatagattctttgtaaatgtccttgttctagatattctgttggaggtttcaatacaatccgtctcaatctgtttc

SEQ ID NO: 17035 - protein, 404 aa, Triticum aestivum
  peptide (1)..(404): Ceres Seq. ID no. 13658258
  misc_feature (35)..(402): NCBI GI NO: 30680669 NR Description: transducin / WD-40 repeat protein family
  misc_feature (35)..(339): NCBI GI NO: 7486245 NR Description: probable WD-40 repeat protein
  misc_feature (85)..(391): NCBI GI NO: 13111899 NR Description: MGC2655 protein [Homo sapiens]
  misc_feature (85)..(391): NCBI GI NO: 31543164 NR Description: hypothetical protein MGC2655 [Homo sapiens]
  misc_feature (85)..(348): NCBI GI NO: 22761350 NR Description: unnamed protein product [Homo sapiens]
  misc_feature (192)..(390): NCBI GI NO: 21358289 NR Description: CG5632-PA [Drosophila melanogaster]
  misc_feature (186)..(390): NCBI GI NO: 31212983 NR Description: ENSANGP00000014160 [Anopheles gambiae]
  misc_feature (194)..(347): NCBI GI NO: 37520744 NR Description: WD-repeat protein [Gloeobacter violaceus]
  misc_feature (197)..(331): NCBI GI NO: 17225204 NR Description: beta transducin-like protein HET-E2C
  misc_feature (197)..(331): NCBI GI NO: 17225208 NR Description: beta transducin-like protein HET-E2C*40
PDAEAEAAAQPAAKNHEEMAAATATATVQAQPGLDAREWDEAAYRRGILRERDLSCRTLFRAVFYDQRDEPDPDVLLAAASSDGSLASFSLSSCIASSASAHAAPQLAAAALVDPVCIVQAHSGPVYDAKFYNDPIQPLLFSCGDDGHIRGWRWHEMQSCLLPLSLQGDHVEPILDLVNPQHEGPWGARSPIPENNAIAISKQDGSLFAAAGDACAYCWDVESGKCKMTFKGHTDYLHSIAVREANHQVVTGSEDGTARIWDCRSGKCTQTIRPVQNKKFEGSWVGCIAIDASESWLACGTSCGISVWSLLSNECIFNADCGAPVQDLLFDKNQILAVGAEPALSRFTINGVVVSQIKCAPPSAFSVSMHSSGMAAVAGHGGLVDVISGFGSHLCAFRCRGLDR

SEQ ID NO: 17036 - protein, 386 aa, Triticum aestivum
  peptide (1)..(386): Ceres Seq. ID no. 13658259
  misc_feature (17)..(384): NCBI GI NO: 30680669 NR Description: transducin / WD-40 repeat protein family
  misc_feature (17)..(321): NCBI GI NO: 7486245 NR Description: probable WD-40 repeat protein
  misc_feature (67)..(373): NCBI GI NO: 13111899 NR Description: MGC2655 protein [Homo sapiens]
  misc_feature (67)..(373): NCBI GI NO: 31543164 NR Description: hypothetical protein MGC2655 [Homo sapiens]
  misc_feature (67)..(330): NCBI GI NO: 22761350 NR Description: unnamed protein product [Homo sapiens]
  misc_feature (174)..(372): NCBI GI NO: 21358289 NR Description: CG5632-PA [Drosophila melanogaster]
  misc_feature (168)..(372): NCBI GI NO: 31212983 NR Description: ENSANGP00000014160 [Anopheles gambiae]
  misc_feature (176)..(329): NCBI GI NO: 37520744 NR Description: WD-repeat protein [Gloeobacter violaceus]
  misc_feature (179)..(313): NCBI GI NO: 17225204 NR Description: beta transducin-like protein HET-E2C
  misc_feature (179)..(313): NCBI GI NO: 17225206 NR Description: beta transducin-like protein HET-E2C*4
MAAATATATVQAQPGLDAREWDEAAYRRGILRERDLSCRTLFRAVFYDQRDEPDPDVLLAAASSDGSLASFSLSSCIASSASAHAAPQLAAAALVDPVCIVQAHSGPVYDAKFYNDPIQPLLFSCGDDGHIRGWRWHEMQSCLLPLSLQGDHVEPILDLVNPQHEGPWGARSPIPENNAIAISKQDGSLFAAAGDACAYCWDVESGKCKMTFKGHTDYLHSIAVREANHQVVTGSEDGTARIWDCRSGKCTQTIRPVQNKKFEGSWVGCIAIDASESWLACGTSCGISVWSLLSNECIFNADCGAPVQDLLFDKNQILAVGAEPALSRFTINGVVVSQIKCAPPSAFSVSMHSSGMAAVAGHGGLVDVISGFGSHLCAFRCRGLDR

SEQ ID NO: 17037 - protein, 248 aa, Triticum aestivum
  peptide (1)..(248): Ceres Seq. ID no. 13658260
  misc_feature (1)..(246): NCBI GI NO: 30680669 NR Description: transducin / WD-40 repeat protein family
  misc_feature (1)..(183): NCBI GI NO: 7486245 NR Description: probable WD-40 repeat protein
  misc_feature (1)..(235): NCBI GI NO: 13111899 NR Description: MGC2655 protein [Homo sapiens]
  misc_feature (1)..(235): NCBI GI NO: 31543164 NR Description: hypothetical protein MGC2655 [Homo sapiens]
  misc_feature (1)..(192): NCBI GI NO: 22761350 NR Description: unnamed protein product [Homo sapiens]
  misc_feature (36)..(234): NCBI GI NO: 21358289 NR Description: CG5632-PA [Drosophila melanogaster]
  misc_feature (30)..(234): NCBI GI NO: 31212983 NR Description: ENSANGP00000014160 [Anopheles gambiae]
  misc_feature (38)..(191): NCBI GI NO: 37520744 NR Description: WD-repeat protein [Gloeobacter violaceus]
  misc_feature (41)..(175): NCBI GI NO: 17225204 NR Description: beta transducin-like protein HET-E2C
  misc_feature (41)..(175): NCBI GI NO: 17225208 NR Description: beta transducin-like protein HET-E2C*40
MQSCLLPLSLQGDHVEPILDLVNPQHEGPWGARSPIPENNAIAISKQDGSLFAAAGDACAYCWDVESGKCKMTFKGHTDYLHSIAVREANHQVVTGSEDGTARIWDCRSGKCTQTIRPVQNKKFEGSWVGCIAIDASESWLACGTSCGISVWSLLSNECIFNADCGAPVQDLLFDKNQILAVGAEPALSRFTINGVVVSQIKCAPPSAFSVSMHSSGMAAVAGHGGLVDVISGFGSHLCAFRCRGLDR

SEQ ID NO: 17038 - DNA, 674 bp, Triticum aestivum
  misc_feature (1)..(674): Ceres Seq. ID no. 12620586
aagcgaatccacggacgacgcaagcggagagattgcttgcgcacccgaccatcgacgtagcgtagccaggcgaagggagccaggcaggcggccatgaggggcgaggcgaggatgctgtgcgcgctgggcctggtgctactctgcctcgcggcgcacctccagggcgcgcactgccgcggcggcggcggcgggggacacggcggaggtggaggtggaggccatggagggggcgggggcggaggtcgtggaggcggaggctccgggagagggcgctcaggcgggagggcccgtccgatcatcgcaggcgcgggtgcgggagccctcgctggggccggcgcgggcgcgctcgccggcagggccgcgtcggggtcgcacggccgcagcgctgcgggcgagccgcgcgtcgcctggagggcctccggcgccgccgccgccctcgcggccgccgcgctcgttcggtggctctgagcggcgtgaatctcggtacacacgggtgaatttactgaattactagtagcagttagctgtgctagattggtgggtgtaatccaggcttcgaagaggatgtaatccagactgacggtcgtgaattagtggtttggtagtactagtgctgatgcacgtgtaattatggcgaatttacggcacccttgaacagagctttgcgaggatcc

SEQ ID NO: 17039 - protein, 124 aa, Triticum aestivum
  peptide (1)..(124): Ceres Seq. ID no. 12620587
  misc_feature (34)..(101): Pfam Name: Pfam Description:  Bindin
  misc_feature (30)..(100): NCBI GI NO: 322647 NR Description: glycine-rich protein GRP22 - rape
  misc_feature (22)..(100): NCBI GI NO: 421936 NR Description: glycine-rich protein - common tobacco
  misc_feature (24)..(100): NCBI GI NO: 7488554 NR Description: glycine-rich protein - wild cabbage (fragment)
  misc_feature (21)..(100): NCBI GI NO: 15227583 NR Description: unknown protein; protein id: At2g36120.1
  misc_feature (24)..(100): NCBI GI NO: 81623 NR Description: glycine-rich protein 1 - Arabidopsis thaliana
  misc_feature (30)..(100): NCBI GI NO: 15227583 NR Description: unknown protein; protein id: At2g36120.1
  misc_feature (27)..(117): NCBI GI NO: 9453857 NR Description: EBNA-1 [Cynomolgus Epstein-Barr Virus TsB-B6]
  misc_feature (30)..(100): NCBI GI NO: 81623 NR Description: glycine-rich protein 1 - Arabidopsis thaliana
  misc_feature (30)..(118): NCBI GI NO: 322647 NR Description: glycine-rich protein GRP22 - rape
  misc_feature (24)..(100): NCBI GI NO: 81623 NR Description: glycine-rich protein 1 - Arabidopsis thaliana
MRGEARMLCALGLVLLCLAAHLQGAHCRGGGGGGHGGGGGGGHGGGGGGGRGGGGSGRGRSGGRARPIIAGAGAGALAGAGAGALAGRAASGSHGRSAAGEPRVAWRASGAAAALAAAALVRWL

SEQ ID NO: 17040 - protein, 118 aa, Triticum aestivum
  peptide (1)..(118): Ceres Seq. ID no. 12620588
  misc_feature (28)..(95): Pfam Name: Pfam Description:  Bindin
  misc_feature (24)..(94): NCBI GI NO: 322647 NR Description: glycine-rich protein GRP22 - rape
  misc_feature (16)..(94): NCBI GI NO: 421936 NR Description: glycine-rich protein - common tobacco
  misc_feature (18)..(94): NCBI GI NO: 7488554 NR Description: glycine-rich protein - wild cabbage (fragment)
  misc_feature (15)..(94): NCBI GI NO: 15227583 NR Description: unknown protein; protein id: At2g36120.1
  misc_feature (18)..(94): NCBI GI NO: 81623 NR Description: glycine-rich protein 1 - Arabidopsis thaliana
  misc_feature (24)..(94): NCBI GI NO: 15227583 NR Description: unknown protein; protein id: At2g36120.1
  misc_feature (21)..(111): NCBI GI NO: 9453857 NR Description: EBNA-1 [Cynomolgus Epstein-Barr Virus TsB-B6]
  misc_feature (24)..(94): NCBI GI NO: 81623 NR Description: glycine-rich protein 1 - Arabidopsis thaliana
  misc_feature (24)..(112): NCBI GI NO: 322647 NR Description: glycine-rich protein GRP22 - rape
  misc_feature (18)..(94): NCBI GI NO: 81623 NR Description: glycine-rich protein 1 - Arabidopsis thaliana
MLCALGLVLLCLAAHLQGAHCRGGGGGGHGGGGGGGHGGGGGGGRGGGGSGRGRSGGRARPIIAGAGAGALAGAGAGALAGRAASGSHGRSAAGEPRVAWRASGAAAALAAAALVRWL

SEQ ID NO: 17041 - protein, 97 aa, Triticum aestivum
  peptide (1)..(97): Ceres Seq. ID no. 12620589
MEGAGAEVVEAEAPGEGAQAGGPVRSSQARVREPSLGPARARSPAGPRRGRTAAALRASRASPGGPPAPPPPSRPPRSFGGSERRESRYTRVNLLNY

SEQ ID NO: 17042 - DNA, 1818 bp, Triticum aestivum
  misc_feature (1)..(1818): Ceres Seq. ID no. 13659025
accgatagaattttagaatgggttgggtgaggactgacgctggtgtttcgagggttggcctccgagatgcttcgtctcctccacctcctttcctttgggtcccctcatcaattccagtccactagcacagctcgtcttgtcccatcggccgcttgcaggtttcacctgctttgccaagaagactctgcgcctgctcatcgccttcttcttccccgtcgtcttccagccaagacaagattcgagccgtccgtggtgaccgatcgtcagtccagagacgccgccgggaacggaacaccgtcgcgacgccgccagattaaatcgccgcctccagactagcattcaacatgccgaacagcagcggcgtgaccgtgttcgacgacctgcccgagtggcttgtcgttgacgagatccttgtccggctgccggccaaggatgtacttcggtagcgtgccgtccgccagtcgtggcgcagcggcacttccaccaacgcgttcatcctcaaccaccaccaccgccagccctcgctccccatcatcaaaaacatagagggcatctaccgccatgccggatcccctagtgatcaaaagatacagcgtgtcctccggaacgcagatccctttaaaaacgagatgactctatgtcatgccgcttgtgatggcttcctcatcctggagaagcaatccaatttctacatctgcaaccctaccacccgcaagtgtgcttccctgccacatcctccacgacggccaggcttcagcgccttcggcgtagtcggcttctactggctccacacatctggagaacaccgggttctctgggcgtcatacttgaaccaaatgccgtacttggtactcattggggctgccgtcccaactgagttgcctgattacttcgtactcacagttggatcggaccagccaagatgcatccaatggctgacaatttgaaaatatgggtttcctaccctgtccttcaatactccaccagtccacaatcgtgctcgcctgcactgggcaacatgggcaacaggcctcaacataacggtatttgacaccgtagccgagacattctggcagatgagccgcccagcacagttgggtgataaggtgacattgttggatatgtgcggctcccttgccttgtgctgcaccaccaatgactgtgtcaatttagatgtttgggtgttgcaggactatgatgctgaaacctggggctttcagtaccggtttaacttgtcagcaatggaggcattgccaccatttaagtttgacctcaatgctctccctaggatggctgtgatcaatgagcgtgagctgttgatcgagcagtgtgttggccgtctgttgcattgtgacattgatggtgtgtttttaggatatgtgcgagccaaggagcctgggaaccactttatgctaactatgcagcgcctccaagagagcatgatttcagtcccattgtttgaggcgcaggaagaagatgctgtgaacaaggagtctccattcgtcatggtgctataagatgccaggctccatcttaatgatttcgactagctgtttgttgtgcccttgggagtatctatcctgtatgaaccttgctttctgttctgtcttcttactttttagtactagtagaaccgaacactttgtatgtctgaagtagcgcctcatcacttggtgcttgttatgctatcttgagcatcatgttgatgttgtaaaaaattgtgtgtctatgctattgctatgtagaactgctataatgttcatgttcacccctgttgactttcagtttgcgttgttattaaggcatggttgcagtttg

SEQ ID NO: 17043 - protein, 146 aa, Triticum aestivum
  peptide (1)..(146): Ceres Seq. ID no. 15219941
  misc_feature (1)..(129): NCBI GI NO: 37530720 NR Description: unknown protein
  misc_feature (1)..(143): NCBI GI NO: 38346527 NR Description: OSJNBa0040D17.2
  misc_feature (1)..(129): NCBI GI NO: 37533944 NR Description: hypothetical protein
  misc_feature (1)..(53): NCBI GI NO: 38346536 NR Description: OSJNBa0040D17.11
  misc_feature (1)..(143): NCBI GI NO: 38346045 NR Description: OSJNBa0059D20.17
  misc_feature (1)..(53): NCBI GI NO: 38344215 NR Description: OSJNBb0026E15.3
  misc_feature (1)..(143): NCBI GI NO: 38346044 NR Description: OSJNBa0059D20.16
MSRPAQLGDKVTLLDMCGSLALCCTTNDCVNLDVWVLQDYDAETWGFQYRFNLSAMEALPPFKFDLNALPRMAVINERELLIEQCVGRLLHCDIDGVFLGYVRAKEPGNHFMLTMQRLQESMISVPLFEAQEEDAVNKESPFVMVL

SEQ ID NO: 17044 - protein, 131 aa, Triticum aestivum
  peptide (1)..(131): Ceres Seq. ID no. 15219942
  misc_feature (1)..(114): NCBI GI NO: 37530720 NR Description: unknown protein
  misc_feature (1)..(128): NCBI GI NO: 38346527 NR Description: OSJNBa0040D17.2
  misc_feature (1)..(114): NCBI GI NO: 37533944 NR Description: hypothetical protein
  misc_feature (1)..(38): NCBI GI NO: 38346536 NR Description: OSJNBa0040D17.11
  misc_feature (1)..(128): NCBI GI NO: 38346045 NR Description: OSJNBa0059D20.17
  misc_feature (1)..(38): NCBI GI NO: 38344215 NR Description: OSJNBb0026E15.3
  misc_feature (1)..(128): NCBI GI NO: 38346044 NR Description: OSJNBa0059D20.16
MCGSLALCCTTNDCVNLDVWVLQDYDAETWGFQYRFNLSAMEALPPFKFDLNALPRMAVINERELLIEQCVGRLLHCDIDGVFLGYVRAKEPGNHFMLTMQRLQESMISVPLFEAQEEDAVNKESPFVMVL

SEQ ID NO: 17045 - protein, 105 aa, Triticum aestivum
  peptide (1)..(105): Ceres Seq. ID no. 15219943
  misc_feature (1)..(105): NCBI GI NO: 37530720 NR Description: unknown protein
  misc_feature (1)..(105): NCBI GI NO: 38346527 NR Description: OSJNBa0040D17.2
  misc_feature (1)..(105): NCBI GI NO: 37533944 NR Description: hypothetical protein
  misc_feature (1)..(105): NCBI GI NO: 38346536 NR Description: OSJNBa0040D17.11
  misc_feature (1)..(105): NCBI GI NO: 38346045 NR Description: OSJNBa0059D20.17
  misc_feature (1)..(105): NCBI GI NO: 38344215 NR Description: OSJNBb0026E15.3
  misc_feature (47)..(105): NCBI GI NO: 38346044 NR Description: OSJNBa0059D20.16
MTLCHAACDGFLILEKQSNFYICNPTTRKCASLPHPPRRPGFSAFGVVGFYWLHTSGEHRVLWASYLNQMPYLVLIGAAVPTELPDYFVLTVGSDQPRCIQWLTI

SEQ ID NO: 17046 - DNA, 753 bp, Triticum aestivum
  misc_feature (1)..(753): Ceres Seq. ID no. 12626339
accagctcgatccccccttctattgctcgcagcctccttcctctctcagacgcacaatccatcgcagcctcctccctcctccgctgaagccgtgccgcggctacgacgagctcgtccgactggccggccggagagtccctcgtcgcatagtctaaccatcggaggaagtggtccgtcagttggtctgagcttctcatacgatccctgtgcctacaaggatggagaggagagcggcgaggggcacctctgatcaccgtaggcgaatgcagatgccgccggcgccggtggggcagaagcagcagcagccgcagcgccgcggggggccgaagagctgccagagaacgccgccgccgccgggctgcttcaccatccagctgctcatggtgttcctctgggtggccgcgtcgctcgccttcctgcccctcgtgctcccgccgctgcccccgccgccgctctcgctgctgctcgtgcccgtctgcctgctcgccgtcctcgccgcgctggccttcgtcccgctcgacgcccacaacaacgtcgtcgtcggcggctcgtcttgtttgtagggaggctgcatttttttttcttttccgtgtcggtcagagctggctgttaccagatctagcctgtagtacaaactgtgaacctttttttaagattagaattattaggattaattaagagaggactactttttgactttgtaatcacttgaactccggcaatgtcaattgagacctcacggtatttatgctc

SEQ ID NO: 17047 - protein, 114 aa, Triticum aestivum
  peptide (1)..(114): Ceres Seq. ID no. 12626340
  misc_feature (1)..(114): NCBI GI NO: 34907496 NR Description: B1099D03.18
  misc_feature (11)..(105): NCBI GI NO: 11282356 NR Description: hypothetical protein F24G16
  misc_feature (11)..(105): NCBI GI NO: 30695081 NR Description: expressed protein [Arabidopsis thaliana]
  misc_feature (11)..(112): NCBI GI NO: 7486480 NR Description: hypothetical protein At2g44080
  misc_feature (11)..(112): NCBI GI NO: 30689607 NR Description: expressed protein [Arabidopsis thaliana]
  misc_feature (55)..(110): NCBI GI NO: 20161874 NR Description: B1139B11.15
MERRAARGTSDHRRRMQMPPAPVGQKQQQPQRRGGPKSCQRTPPPPGCFTIQLLMVFLWVAASLAFLPLVLPPLPPPPLSLLLVPVCLLAVLAALAFVPLDAHNNVVVGGSSCL

SEQ ID NO: 17048 - protein, 99 aa, Triticum aestivum
  peptide (1)..(99): Ceres Seq. ID no. 12626341
  misc_feature (1)..(99): NCBI GI NO: 34907496 NR Description: B1099D03.18
  misc_feature (1)..(90): NCBI GI NO: 11282356 NR Description: hypothetical protein F24G16
  misc_feature (1)..(90): NCBI GI NO: 30695081 NR Description: expressed protein [Arabidopsis thaliana]
  misc_feature (1)..(97): NCBI GI NO: 7486480 NR Description: hypothetical protein At2g44080
  misc_feature (1)..(97): NCBI GI NO: 30689607 NR Description: expressed protein [Arabidopsis thaliana]
  misc_feature (40)..(95): NCBI GI NO: 20161874 NR Description: B1139B11.15
MQMPPAPVGQKQQQPQRRGGPKSCQRTPPPPGCFTIQLLMVFLWVAASLAFLPLVLPPLPPPPLSLLLVPVCLLAVLAALAFVPLDAHNNVVVGGSSCL

SEQ ID NO: 17049 - protein, 97 aa, Triticum aestivum
  peptide (1)..(97): Ceres Seq. ID no. 12626342
  misc_feature (1)..(97): NCBI GI NO: 34907496 NR Description: B1099D03.18
  misc_feature (1)..(88): NCBI GI NO: 11282356 NR Description: hypothetical protein F24G16
  misc_feature (1)..(88): NCBI GI NO: 30695081 NR Description: expressed protein [Arabidopsis thaliana]
  misc_feature (1)..(95): NCBI GI NO: 7486480 NR Description: hypothetical protein At2g44080
  misc_feature (1)..(95): NCBI GI NO: 30689607 NR Description: expressed protein [Arabidopsis thaliana]
  misc_feature (38)..(93): NCBI GI NO: 20161874 NR Description: B1139B11.15
MPPAPVGQKQQQPQRRGGPKSCQRTPPPPGCFTIQLLMVFLWVAASLAFLPLVLPPLPPPPLSLLLVPVCLLAVLAALAFVPLDAHNNVVVGGSSCL

SEQ ID NO: 17050 - DNA, 1654 bp, Triticum aestivum
  misc_feature (1)..(1654): Ceres Seq. ID no. 12779833
ccagtttcccctcctccaaacccttcaccgctctcggcgccgactgccgattcctcagtttcccctccccaaacccttcaccgctctcgtctcctcagttccgccgccgccgccatggcttcgtccccctgcgacatcgccctcaaggcagccctcggcggccaactccgcctcctcaagagaatggccaagaaggtggatctccggcgagccaaggacgataaagggcaaaccgcacttcatttcgctgcggccaaggggtgcctggacagctgcaagttcctggtggaggaatcagggcttgatgtcgattccgccacgaaaacagatgtgacaccgatgttctacgccgcatttgggggaaatgtcgaggttatgaggtaccttctcgaccgcggcgcagacccatccacggccgatgacaggggctctgtgtcattgcacaatgcagcagaggaaggacactgcgaggctgtgaggctattgctgttgaaaggggttcatgtggatcctatggatcatcggggcacaccattacacttggcggttgcaaaggaccatgttgaggttgtgaaggttctgctggagcatggtgctaatcccaacagagtggctaatcacgtcttttcaccactcatgatggccgtctgtggaaaggccttgaaatgcatgaagctactgattgaggctggcgctgatgtgaatgttcatggttactctggaccaactcctttaacggaggcagttgatgatggcttaatggactttgtcatgattttactagaggctggagccgacgctaacatccctaaccagcatggcgcagttccaattgagctagcagcagctcgtggtcaacgtgagcttgttgaaattctgtttcctaagacaaaacccattccatctcagccagtttggagcgttaatgggataatgaatactgcaagatcaccacgtatcaagcatcaggacgcatcttctgtggaacaacggatagctgatttgaagtcacgaggaaaggaagcatttggaaaggaagactatattacagcgatgtacttctatggcctggtaatggatatagacccacttgatgccaccatgtttgctaaccggagcctctgctggctgcggatgcgagaaggggacagagctttggaagatgcacggcaatgcataatgatgcggccccattggtccaaggcatggtaccgtgagggcaaagctctcagtttcatgaagacgcgttcctgaaagcacaggaactggaccctaagagtgacgagatcaccaaagctctgagggaggctgtcagtgcgatggaggagctgcgcgtgtgatataagcagctgccagtgccgggtcgctcggagaggaggaagaagagaacgagacgggctggctttgattcattctcccatctctgtatcgaccctgctgtattttccttgcaccagatgctaccctagtagtagtactacactaggtattactgctcgtgtgtcagaaggtgttgcagctggctagctaaccagtccccaagctgtgctggatcaggggtctcgattttggtaggctacggcgatgttttgtgacagacggcatatgcctgatggtgtgctctgcaatgatatggtcgttaccgtttcttttc

SEQ ID NO: 17051 - protein, 417 aa, Triticum aestivum
  peptide (1)..(417): Ceres Seq. ID no. 12779834
  misc_feature (367)..(399): Pfam Name: Pfam Description:  TPR Domain
  misc_feature (50)..(414): NCBI GI NO: 27542766 NR Description: ankyrin-like protein-like protein
  misc_feature (35)..(336): NCBI GI NO: 15229331 NR Description: ankyrin-like protein; protein id: At3g04710
  misc_feature (331)..(414): NCBI GI NO: 15229331 NR Description: ankyrin-like protein; protein id: At3g04710
  misc_feature (48)..(414): NCBI GI NO: 27542768 NR Description: ankyrin-like protein-like protein
  misc_feature (39)..(414): NCBI GI NO: 34896852 NR Description: putative ankyrin [Oryza sativa]
  misc_feature (48)..(357): NCBI GI NO: 13435243 NR Description: putative gag-pol polyprotein [Oryza sativa]
  misc_feature (323)..(414): NCBI GI NO: 13435243 NR Description: putative gag-pol polyprotein [Oryza sativa]
  misc_feature (58)..(414): NCBI GI NO: 13435247 NR Description: putative ankyrin [Oryza sativa]
  misc_feature (48)..(338): NCBI GI NO: 24745936 NR Description: ankyrin-like protein [Solanum tuberosum]
  misc_feature (48)..(347): NCBI GI NO: 34329680 NR Description: unknown [Nicotiana benthamiana]
PVSPPPNPSPLSAPTADSSVSPPQTLHRSRLLSSAAAAMASSPCDIALKAALGGQLRLLKRMAKKVDLRRAKDDKGQTALHFAAAKGCLDSCKFLVEESGLDVDSATKTDVTPMFYAAFGGNVEVMRYLLDRGADPSTADDRGSVSLHNAAEEGHCEAVRLLLLKGVHVDPMDHRGTPLHLAVAKDHVEVVKVLLEHGANPNRVANHVFSPLMMAVCGKALKCMKLLIEAGADVNVHGYSGPTPLTEAVDDGLMDFVMILLEAGADANIPNQHGAVPIELAAARGQRELVEILFPKTKPIPSQPVWSVNGIMNTARSPRIKHQDASSVEQRIADLKSRGKEAFGKEDYITAMYFYGLVMDIDPLDATMFANRSLCWLRMREGDRALEDARQCIMMRPHWSKAWYREGKALSFMKTRS

SEQ ID NO: 17052 - protein, 379 aa, Triticum aestivum
  peptide (1)..(379): Ceres Seq. ID no. 12779835
  misc_feature (329)..(361): Pfam Name: Pfam Description:  TPR Domain
  misc_feature (12)..(376): NCBI GI NO: 27542766 NR Description: ankyrin-like protein-like protein
  misc_feature (1)..(298): NCBI GI NO: 15229331 NR Description: ankyrin-like protein; protein id: At3g04710
  misc_feature (293)..(376): NCBI GI NO: 15229331 NR Description: ankyrin-like protein; protein id: At3g04710
  misc_feature (10)..(376): NCBI GI NO: 27542768 NR Description: ankyrin-like protein-like protein
  misc_feature (1)..(376): NCBI GI NO: 34896852 NR Description: putative ankyrin [Oryza sativa]
  misc_feature (10)..(319): NCBI GI NO: 13435243 NR Description: putative gag-pol polyprotein [Oryza sativa]
  misc_feature (285)..(376): NCBI GI NO: 13435243 NR Description: putative gag-pol polyprotein [Oryza sativa]
  misc_feature (20)..(376): NCBI GI NO: 13435247 NR Description: putative ankyrin [Oryza sativa]
  misc_feature (10)..(300): NCBI GI NO: 24745936 NR Description: ankyrin-like protein [Solanum tuberosum]
  misc_feature (10)..(309): NCBI GI NO: 34329680 NR Description: unknown [Nicotiana benthamiana]
MASSPCDIALKAALGGQLRLLKRMAKKVDLRRAKDDKGQTALHFAAAKGCLDSCKFLVEESGLDVDSATKTDVTPMFYAAFGGNVEVMRYLLDRGADPSTADDRGSVSLHNAAEEGHCEAVRLLLLKGVHVDPMDHRGTPLHLAVAKDHVEVVKVLLEHGANPNRVANHVFSPLMMAVCGKALKCMKLLIEAGADVNVHGYSGPTPLTEAVDDGLMDFVMILLEAGADANIPNQHGAVPIELAAARGQRELVEILFPKTKPIPSQPVWSVNGIMNTARSPRIKHQDASSVEQRIADLKSRGKEAFGKEDYITAMYFYGLVMDIDPLDATMFANRSLCWLRMREGDRALEDARQCIMMRPHWSKAWYREGKALSFMKTRS

SEQ ID NO: 17053 - protein, 356 aa, Triticum aestivum
  peptide (1)..(356): Ceres Seq. ID no. 12779836
  misc_feature (306)..(338): Pfam Name: Pfam Description:  TPR Domain
  misc_feature (1)..(353): NCBI GI NO: 27542766 NR Description: ankyrin-like protein-like protein
  misc_feature (1)..(275): NCBI GI NO: 15229331 NR Description: ankyrin-like protein; protein id: At3g04710
  misc_feature (270)..(353): NCBI GI NO: 15229331 NR Description: ankyrin-like protein; protein id: At3g04710
  misc_feature (1)..(353): NCBI GI NO: 27542768 NR Description: ankyrin-like protein-like protein
  misc_feature (1)..(353): NCBI GI NO: 34896852 NR Description: putative ankyrin [Oryza sativa]
  misc_feature (1)..(296): NCBI GI NO: 13435243 NR Description: putative gag-pol polyprotein [Oryza sativa]
  misc_feature (262)..(353): NCBI GI NO: 13435243 NR Description: putative gag-pol polyprotein [Oryza sativa]
  misc_feature (1)..(353): NCBI GI NO: 13435247 NR Description: putative ankyrin [Oryza sativa]
  misc_feature (1)..(277): NCBI GI NO: 24745936 NR Description: ankyrin-like protein [Solanum tuberosum]
  misc_feature (1)..(286): NCBI GI NO: 34329680 NR Description: unknown [Nicotiana benthamiana]
MAKKVDLRRAKDDKGQTALHFAAAKGCLDSCKFLVEESGLDVDSATKTDVTPMFYAAFGGNVEVMRYLLDRGADPSTADDRGSVSLHNAAEEGHCEAVRLLLLKGVHVDPMDHRGTPLHLAVAKDHVEVVKVLLEHGANPNRVANHVFSPLMMAVCGKALKCMKLLIEAGADVNVHGYSGPTPLTEAVDDGLMDFVMILLEAGADANIPNQHGAVPIELAAARGQRELVEILFPKTKPIPSQPVWSVNGIMNTARSPRIKHQDASSVEQRIADLKSRGKEAFGKEDYITAMYFYGLVMDIDPLDATMFANRSLCWLRMREGDRALEDARQCIMMRPHWSKAWYREGKALSFMKTRS

SEQ ID NO: 17054 - DNA, 1435 bp, Triticum aestivum
  misc_feature (1)..(1435): Ceres Seq. ID no. 13658847
gtgcccgccccgacctcaaactcccgtcgccacccgctctcctcccctctcccctcccctcccctcccctcgcgccggccacgatcgaggcatggcgacgatgacgaccacgaccaccacgacgaagacggcgctgcgccaccgcgggtgctgcgggcacgcgccggcgccggcggaggacggcggcgacctggtggcgctgtcgagcgcggcggcggaggggctcgggaaagaggccgccaggtgggccggcgggctgccgcggctgaagcggttcgaggagctgccggactacctccgcgacaacgagttcatccgcggcggctaccgctgcgagtggtccgtccgcgacgcgctccgcagcgtcttcgcctggcacaacgagacgctcaacgtctggacccatctggggggcttcttcctgttcctggggctcgccgtcgccggccagacggagtggcggccggccggagcagccgcggcgccggggttcatgacgatggtgatgacgtccgccaacgcgtcgtcgttggcgaccaacaacagttcgagcacggcgatccagagcgcgctggcgtcgggcatcggcggcgcggggcacgcggtggcgcggtggccgcggacggtgttcgtgttgggggccatgacgtgcctgtcggtgagcgctgcggcgcacctgctggcaagccactcgcgccgcttcaaccggctcttctggcagctcgactacgccggcatcgccgtcatgatcgtcgcctccttcttcccgccggtctactacaccttcctcggcagccccgtcgcacagctcgcctacctctccgccatcacgctgctcggcgtgctcgtcgtggcggcgctcctggtgccggcccgctcgtcgccgcggctgcggcacctccgcgccggcctgttcgtgtccatggggctctcgggcgtcgtgccggcgctgcacgcgctctggctcaactggggccacccggagtgctacctggcgctgtcgctggagctggccatggggctcgtgtacgccacgggcgccggcttctacgtcgcgcgcgtgccggagcggtggcgcccgggcatgttcgactgcgtcggccacagccaccagatcttccacgtgctggtgctcgtcggcgccgtcacgcactacgccgccaccgccatcctcatcggctggcgcgacgccctggccgcggccgcgtcggcgctcttgtgacgccgcgcgtaggatgcataggcgtagggtgtgccattgattcgttgattcgtgtaactagcttagatgattctttgaacgtgtatcagatcaagtttgtgctcctggctttcttactgtcggtctgcactctgtgtttctgtaatgttgaatggcgtacagcggctgaggtgcaaaaggaaaagggacgagcactgcaacttttttacttgc

SEQ ID NO: 17055 - protein, 478 aa, Triticum aestivum
  peptide (1)..(478): Ceres Seq. ID no. 13658848
  misc_feature (45)..(132): Pfam Name: Pfam Description:  Cupin
  misc_feature (26)..(162): NCBI GI NO: 29788817 NR Description: hypothetical protein
VPAPTSNSRRHPLSSPLPSPPLPSRRPRSRHGDDDDHDHHDEDGAAPPRVLRARAGAGGGRRRPGGAVERGGGGARERGRQVGRRAAAAEAVRGAAGLPPRQRVHPRRLPLRVVRPRRAPQRLRLAQRDAQRLDPSGGLLPVPGARRRRPDGVAAGRSSRGAGVHDDGDDVRQRVVVGDQQQFEHGDPERAGVGHRRRGARGGAVAADGVRVGGHDVPVGERCGAPAGKPLAPLQPALLAARLRRHRRHDRRLLLPAGLLHLPRQPRRTARLPLRHHAARRARRGGAPGAGPLVAAAAAPPRRPVRVHGALGRRAGAARALAQLGPPGVLPGAVAGAGHGARVRHGRRLLRRARAGAVAPGHVRLRRPQPPDLPRAGARRRRHALRRHRHPHRLARRPGRGRVGALVTPRVGCIGVGCAIDSLIRVTSLDDSLNVYQIKFVLLAFLLSVCTLCFCNVEWRTAAEVQKEKGRALQLFYL

SEQ ID NO: 17056 - protein, 406 aa, Triticum aestivum
  peptide (1)..(406): Ceres Seq. ID no. 13658849
  misc_feature (123)..(388): Pfam Name: Hly-III / UPF0073 Pfam Description: Uncharacterised protein family
  misc_feature (88)..(397): NCBI GI NO: 13272399 NR Description: hypothetical protein [Arabidopsis thaliana]
  misc_feature (88)..(397): NCBI GI NO: 18400468 NR Description: expressed protein [Arabidopsis thaliana]
  misc_feature (68)..(402): NCBI GI NO: 30688829 NR Description: expressed protein [Arabidopsis thaliana]
  misc_feature (68)..(402): NCBI GI NO: 18377749 NR Description: unknown protein [Arabidopsis thaliana]
  misc_feature (68)..(397): NCBI GI NO: 25407688 NR Description: hypothetical protein AT4g30850
  misc_feature (202)..(396): NCBI GI NO: 15241302 NR Description: expressed protein [Arabidopsis thaliana]
  misc_feature (49)..(148): NCBI GI NO: 15241302 NR Description: expressed protein [Arabidopsis thaliana]
  misc_feature (221)..(397): NCBI GI NO: 25309925 NR Description: hypothetical protein At2g24150
  misc_feature (88)..(134): NCBI GI NO: 25309925 NR Description: hypothetical protein At2g24150
  misc_feature (202)..(396): NCBI GI NO: 15235657 NR Description: expressed protein [Arabidopsis thaliana]
CPPRPQTPVATRSPPLSPPLPSPRAGHDRGMATMTTTTTTTKTALRHRGCCGHAPAPAEDGGDLVALSSAAAEGLGKEAARWAGGLPRLKRFEELPDYLRDNEFIRGGYRCEWSVRDALRSVFAWHNETLNVWTHLGGFFLFLGLAVAGQTEWRPAGAAAAPGFMTMVMTSANASSLATNNSSSTAIQSALASGIGGAGHAVARWPRTVFVLGAMTCLSVSAAAHLLASHSRRFNRLFWQLDYAGIAVMIVASFFPPVYYTFLGSPVAQLAYLSAITLLGVLVVAALLVPARSSPRLRHLRAGLFVSMGLSGVVPALHALWLNWGHPECYLALSLELAMGLVYATGAGFYVARVPERWRPGMFDCVGHSHQIFHVLVLVGAVTHYAATAILIGWRDALAAAASALL

SEQ ID NO: 17057 - protein, 376 aa, Triticum aestivum
  peptide (1)..(376): Ceres Seq. ID no. 13658850
  misc_feature (93)..(358): Pfam Name: Hly-III / UPF0073 Pfam Description: Uncharacterised protein family
  misc_feature (58)..(367): NCBI GI NO: 13272399 NR Description: hypothetical protein [Arabidopsis thaliana]
  misc_feature (58)..(367): NCBI GI NO: 18400468 NR Description: expressed protein [Arabidopsis thaliana]
  misc_feature (38)..(372): NCBI GI NO: 30688829 NR Description: expressed protein [Arabidopsis thaliana]
  misc_feature (38)..(372): NCBI GI NO: 18377749 NR Description: unknown protein [Arabidopsis thaliana]
  misc_feature (38)..(367): NCBI GI NO: 25407688 NR Description: hypothetical protein AT4g30850
  misc_feature (172)..(366): NCBI GI NO: 15241302 NR Description: expressed protein [Arabidopsis thaliana]
  misc_feature (19)..(118): NCBI GI NO: 15241302 NR Description: expressed protein [Arabidopsis thaliana]
  misc_feature (191)..(367): NCBI GI NO: 25309925 NR Description: hypothetical protein At2g24150
  misc_feature (58)..(104): NCBI GI NO: 25309925 NR Description: hypothetical protein At2g24150
  misc_feature (172)..(366): NCBI GI NO: 15235657 NR Description: expressed protein [Arabidopsis thaliana]
MATMTTTTTTTKTALRHRGCCGHAPAPAEDGGDLVALSSAAAEGLGKEAARWAGGLPRLKRFEELPDYLRDNEFIRGGYRCEWSVRDALRSVFAWHNETLNVWTHLGGFFLFLGLAVAGQTEWRPAGAAAAPGFMTMVMTSANASSLATNNSSSTAIQSALASGIGGAGHAVARWPRTVFVLGAMTCLSVSAAAHLLASHSRRFNRLFWQLDYAGIAVMIVASFFPPVYYTFLGSPVAQLAYLSAITLLGVLVVAALLVPARSSPRLRHLRAGLFVSMGLSGVVPALHALWLNWGHPECYLALSLELAMGLVYATGAGFYVARVPERWRPGMFDCVGHSHQIFHVLVLVGAVTHYAATAILIGWRDALAAAASALL

SEQ ID NO: 17058 - DNA, 1877 bp, Triticum aestivum
  misc_feature (1)..(1877): Ceres Seq. ID no. 13663328
cccactgtaggtgggcagtagtacttggtcatgtgccaccgtctcgtgcccctttgcatcttccaagctctctctgggctggagactctcacgcgtttgcttcaagcattgacccgagcataaatcttccagccacttgttcctggcctcttcttgatttctttctatcccctgcctgtcagtgtagtgctcagatttggtcatcatgaagccatgaacagagctggcgcctctggtgcaggatcctgacgacctgcgtctctgaagggggagaagggcttcttttctcagatcttcttgaagacttgtgaaaaatgaagccgcctttggaaaggaacccatccaggaagcgccattcatggtggtgggatagtcacattagccccaagaactcaaaatggcttgcagaaaacctcgaagaaatggataagcaagtgaaggaaatggtgcagcttattgaggaagatggcgactcctttgcaaagaaagctcaaatgtattatcagaggcgcccagtcctcgttacccatgtcgagaacttctaccggatgtaccgcgctttagctgagcgctacgacaatgttaccggtgaactgcgcaagaacatcccttcaaggatgcagtcccaaggatctttatccggttctgagttcggttcagagctgcaaaggtcgcccacaccatctcctgagccccagaagtcctggacaagggagcagagccctagagccgccggtttcaatttctttctgagtaacaagagcaatgactcaccgtcctcaaggaaggagcctgggtcagcttcacagtcagaatctgacatgaagtctgaagatggtgaggatgatggcattacctacacattgcaccagagagttctcgagctcgaggatgatctcaatgcggcaaaccggaagctgcttgacgcaaacgaaaagctcgaggttttcgaggagaggatcctgaggtgccattgcgattataaggaaaatggaaatggcgccgatcatgctaccaaaattagagacattgatggagagttcgtgtcaactaaggagaagctacaatcttcacaagtggagatcaacaatcttgaaaggaggctcgaagacgctgcaattttgtcagaagagcactccaggctgctggaacaaaacaagggactggaagctgaaattgtgagtctgaaggaagagatgacttcagctagacggcgtttcaacgacaaaatatccgagagtgatgccgagatcagccagtacaggcaagagcttgccaccgcgtccgagaagctgttgcaggagaagtccaccaacagcacagaggtaggaaagctgcaagaaatgaaccggatcaccagtctcaagctggagaaagtttctgaagagaagtctctagtggaggaccaggtgaaggagctggaggaggcgaacgccgaagccgaaaggcagaggcaggagctcgtccatgccgccgaaatgctgtcggaggacaagttcagacatgaagctgagatcctgacgatgcagcagagcatcgaggacctgaagccgaaacttgagagcatcgcaagagagaaatcgctgctgaaactctggttcgcggatctggagcgcgtcgtggagcgaggaaggagcgttgtcattcccccggaataacccggtttcgtctggaaattcagtagctagaatttagcaaactagcagtgctatctctttgtttttttggcctgagatgtaacatcatacggaactgtgaaaccctaccgtggacatcagcttttccttttcttggattatttcttgcactgtgaggtgatgggtggtggtcgtggtgtatgaaacatttgcactgaatgcatttcctttggcmcttct

SEQ ID NO: 17059 - protein, 447 aa, Triticum aestivum
  peptide (1)..(447): Ceres Seq. ID no. 15220219
  misc_feature (190)..(437): Pfam Name: Pfam Description:  Myosin tail
  misc_feature (1)..(442): NCBI GI NO: 34896152 NR Description: P0701D05.31
  misc_feature (5)..(442): NCBI GI NO: 34896156 NR Description: P0701D05.33
  misc_feature (11)..(433): NCBI GI NO: 22002966 NR Description: putative CENP-E like kinetochore protein
  misc_feature (1)..(422): NCBI GI NO: 30697043 NR Description: contains similarity to unknown protein(gb|AAB63087
  misc_feature (1)..(422): NCBI GI NO: 30697046 NR Description: contains similarity to unknown protein(gb|AAB63087
  misc_feature (1)..(422): NCBI GI NO: 8777333 NR Description: contains similarity to unknownprotein~gb|AAB63087
  misc_feature (2)..(422): NCBI GI NO: 15224515 NR Description: expressed protein [Arabidopsis thaliana]
  misc_feature (2)..(422): NCBI GI NO: 28416683 NR Description: At2g30500 [Arabidopsis thaliana]
  misc_feature (8)..(438): NCBI GI NO: 15218702 NR Description: expressed protein [Arabidopsis thaliana]
  misc_feature (12)..(426): NCBI GI NO: 37534452 NR Description: putative centromere protein
MKPPLERNPSRKRHSWWWDSHISPKNSKWLAENLEEMDKQVKEMVQLIEEDGDSFAKKAQMYYQRRPVLVTHVENFYRMYRALAERYDNVTGELRKNIPSRMQSQGSLSGSEFGSELQRSPTPSPEPQKSWTREQSPRAAGFNFFLSNKSNDSPSSRKEPGSASQSESDMKSEDGEDDGITYTLHQRVLELEDDLNAANRKLLDANEKLEVFEERILRCHCDYKENGNGADHATKIRDIDGEFVSTKEKLQSSQVEINNLERRLEDAAILSEEHSRLLEQNKGLEAEIVSLKEEMTSARRRFNDKISESDAEISQYRQELATASEKLLQEKSTNSTEVGKLQEMNRITSLKLEKVSEEKSLVEDQVKELEEANAEAERQRQELVHAAEMLSEDKFRHEAEILTMQQSIEDLKPKLESIAREKSLLKLWFADLERVVERGRSVVIPPE

SEQ ID NO: 17060 - protein, 411 aa, Triticum aestivum
  peptide (1)..(411): Ceres Seq. ID no. 15220220
  misc_feature (154)..(401): Pfam Name: Pfam Description:  Myosin tail
  misc_feature (1)..(406): NCBI GI NO: 34896152 NR Description: P0701D05.31
  misc_feature (1)..(406): NCBI GI NO: 34896156 NR Description: P0701D05.33
  misc_feature (1)..(397): NCBI GI NO: 22002966 NR Description: putative CENP-E like kinetochore protein
  misc_feature (1)..(386): NCBI GI NO: 30697043 NR Description: contains similarity to unknown protein(gb|AAB63087
  misc_feature (1)..(386): NCBI GI NO: 30697046 NR Description: contains similarity to unknown protein(gb|AAB63087
  misc_feature (1)..(386): NCBI GI NO: 8777333 NR Description: contains similarity to unknownprotein~gb|AAB63087
  misc_feature (1)..(386): NCBI GI NO: 15224515 NR Description: expressed protein [Arabidopsis thaliana]
  misc_feature (1)..(386): NCBI GI NO: 28416683 NR Description: At2g30500 [Arabidopsis thaliana]
  misc_feature (1)..(402): NCBI GI NO: 15218702 NR Description: expressed protein [Arabidopsis thaliana]
  misc_feature (1)..(390): NCBI GI NO: 37534452 NR Description: putative centromere protein
MDKQVKEMVQLIEEDGDSFAKKAQMYYQRRPVLVTHVENFYRMYRALAERYDNVTGELRKNIPSRMQSQGSLSGSEFGSELQRSPTPSPEPQKSWTREQSPRAAGFNFFLSNKSNDSPSSRKEPGSASQSESDMKSEDGEDDGITYTLHQRVLELEDDLNAANRKLLDANEKLEVFEERILRCHCDYKENGNGADHATKIRDIDGEFVSTKEKLQSSQVEINNLERRLEDAAILSEEHSRLLEQNKGLEAEIVSLKEEMTSARRRFNDKISESDAEISQYRQELATASEKLLQEKSTNSTEVGKLQEMNRITSLKLEKVSEEKSLVEDQVKELEEANAEAERQRQELVHAAEMLSEDKFRHEAEILTMQQSIEDLKPKLESIAREKSLLKLWFADLERVVERGRSVVIPPE

SEQ ID NO: 17061 - protein, 404 aa, Triticum aestivum
  peptide (1)..(404): Ceres Seq. ID no. 15220221
  misc_feature (147)..(394): Pfam Name: Pfam Description:  Myosin tail
  misc_feature (1)..(399): NCBI GI NO: 34896152 NR Description: P0701D05.31
  misc_feature (1)..(399): NCBI GI NO: 34896156 NR Description: P0701D05.33
  misc_feature (1)..(390): NCBI GI NO: 22002966 NR Description: putative CENP-E like kinetochore protein
  misc_feature (1)..(379): NCBI GI NO: 30697043 NR Description: contains similarity to unknown protein(gb|AAB63087
  misc_feature (1)..(379): NCBI GI NO: 30697046 NR Description: contains similarity to unknown protein(gb|AAB63087
  misc_feature (1)..(379): NCBI GI NO: 8777333 NR Description: contains similarity to unknownprotein~gb|AAB63087
  misc_feature (1)..(379): NCBI GI NO: 15224515 NR Description: expressed protein [Arabidopsis thaliana]
  misc_feature (1)..(379): NCBI GI NO: 28416683 NR Description: At2g30500 [Arabidopsis thaliana]
  misc_feature (1)..(395): NCBI GI NO: 15218702 NR Description: expressed protein [Arabidopsis thaliana]
  misc_feature (1)..(383): NCBI GI NO: 37534452 NR Description: putative centromere protein
MVQLIEEDGDSFAKKAQMYYQRRPVLVTHVENFYRMYRALAERYDNVTGELRKNIPSRMQSQGSLSGSEFGSELQRSPTPSPEPQKSWTREQSPRAAGFNFFLSNKSNDSPSSRKEPGSASQSESDMKSEDGEDDGITYTLHQRVLELEDDLNAANRKLLDANEKLEVFEERILRCHCDYKENGNGADHATKIRDIDGEFVSTKEKLQSSQVEINNLERRLEDAAILSEEHSRLLEQNKGLEAEIVSLKEEMTSARRRFNDKISESDAEISQYRQELATASEKLLQEKSTNSTEVGKLQEMNRITSLKLEKVSEEKSLVEDQVKELEEANAEAERQRQELVHAAEMLSEDKFRHEAEILTMQQSIEDLKPKLESIAREKSLLKLWFADLERVVERGRSVVIPPE

SEQ ID NO: 17062 - DNA, 846 bp, Triticum aestivum
  misc_feature (1)..(846): Ceres Seq. ID no. 13658113
gagacttcatcggggaaatggaggaggaggagataaatctggccggcgccggcggaggggaggtgaagcaggaggtgggggaggaggaggagatcgagttcgagccgacggaggacgagctggtgctgcacttcctgcggccgcagctgcgcgggttcgcgccgcgcgtggcgggcgcggtggtggaggcggacccgtgcgcgtcgcccccctgggagctgctggcgcggcacggcctgctgcggcgcgggcacggctacttcttcgcggcgcggcggcgcgggaaggtgcggcgcaccccggagggcggcggcggcgcgtggatgcacagcggcaacaaggaggaccgccggtccgtgacggagctgggcgtggtggcgcgctggaccatgacgcggtactgcttctacctccgcggcggcgacggggcgcagcaggggcggcggagcaccgggtgggtgatgtccgagtacgagatcacggacccgcggtgctaccgccgcgccgacgacggcgaggaggaccagtactgggtgctctgccacgtccgccgcagcatcagggagaacgtcaagccgcgctcccgcaggcggtagcgggtcagtattactcagcaggctgccgcgcctcggctcggtcgccggccggcgcaagcccgtgtcagttcgtcctcgtcgttcgtcgctaagtcgccatgtgtgtgatctgatctgccatgtccgtctgtcggtgcgcggcacactgtctgtatttaagcagaatttggtcccttggattttgctggcttttgccagagtgtactgctctgccgtttgcaagtctaaaaatatgtcaaattttttcccc

SEQ ID NO: 17063 - protein, 228 aa, Triticum aestivum
  peptide (1)..(228): Ceres Seq. ID no. 13658114
  misc_feature (8)..(84): NCBI GI NO: 15077406 NR Description: fibroin [Antheraea yamamai]
  misc_feature (7)..(127): NCBI GI NO: 32407921 NR Description: predicted protein [Neurospora crassa]
  misc_feature (6)..(98): NCBI GI NO: 7511785 NR Description: fibroin - Chinese oak silkmoth
  misc_feature (5)..(114): NCBI GI NO: 929566 NR Description: fibrillarin [Drosophila melanogaster]
  misc_feature (15)..(190): NCBI GI NO: 37535678 NR Description: hypothetical protein
  misc_feature (4)..(135): NCBI GI NO: 27378597 NR Description: blr3486 [Bradyrhizobium japonicum]
  misc_feature (4)..(146): NCBI GI NO: 22960558 NR Description: hypothetical protein [Rhodobacter sphaeroides]
  misc_feature (2)..(127): NCBI GI NO: 19071647 NR Description: hypothetical protein
  misc_feature (4)..(211): NCBI GI NO: 38636722 NR Description: hypothetical protein
RLHRGNGGGGDKSGRRRRRGGEAGGGGGGGDRVRADGGRAGAALPAAAAARVRAARGGRGGGGGPVRVAPLGAAGAARPAAARARLLLRGAAAREGAAHPGGRRRRVDAQRQQGGPPVRDGAGRGGALDHDAVLLLPPRRRRGAAGAAEHRVGDVRVRDHGPAVLPPRRRRRGGPVLGALPRPPQHQGERQAALPQAVAGQYYSAGCRASARSPAGASPCQFVLVVRR

SEQ ID NO: 17064 - protein, 197 aa, Triticum aestivum
  peptide (1)..(197): Ceres Seq. ID no. 13658115
  misc_feature (31)..(160): Pfam Name: NAM Pfam Description: No apical meristem
  misc_feature (31)..(197): NCBI GI NO: 34906602 NR Description: hypothetical protein
  misc_feature (35)..(197): NCBI GI NO: 34914866 NR Description: P0416G11.18
  misc_feature (31)..(162): NCBI GI NO: 34393886 NR Description: hypothetical protein
  misc_feature (14)..(162): NCBI GI NO: 34394541 NR Description: hypothetical protein
  misc_feature (31)..(162): NCBI GI NO: 34394072 NR Description: hypothetical protein
  misc_feature (31)..(162): NCBI GI NO: 34393893 NR Description: hypothetical protein
  misc_feature (32)..(162): NCBI GI NO: 38637203 NR Description: hypothetical protein
  misc_feature (31)..(162): NCBI GI NO: 28411934 NR Description: OSJNBa0027N13.18
  misc_feature (31)..(162): NCBI GI NO: 28411932 NR Description: OSJNBa0027N13.16
  misc_feature (31)..(162): NCBI GI NO: 34900712 NR Description: hypothetical protein~predicted by FGENESH etc.
DFIGEMEEEEINLAGAGGGEVKQEVGEEEEIEFEPTEDELVLHFLRPQLRGFAPRVAGAVVEADPCASPPWELLARHGLLRRGHGYFFAARRRGKVRRTPEGGGGAWMHSGNKEDRRSVTELGVVARWTMTRYCFYLRGGDGAQQGRRSTGWVMSEYEITDPRCYRRADDGEEDQYWVLCHVRRSIRENVKPRSRRR

SEQ ID NO: 17065 - protein, 192 aa, Triticum aestivum
  peptide (1)..(192): Ceres Seq. ID no. 13658116
  misc_feature (26)..(155): Pfam Name: NAM Pfam Description: No apical meristem
  misc_feature (26)..(192): NCBI GI NO: 34906602 NR Description: hypothetical protein
  misc_feature (30)..(192): NCBI GI NO: 34914866 NR Description: P0416G11.18
  misc_feature (26)..(157): NCBI GI NO: 34393886 NR Description: hypothetical protein
  misc_feature (9)..(157): NCBI GI NO: 34394541 NR Description: hypothetical protein
  misc_feature (26)..(157): NCBI GI NO: 34394072 NR Description: hypothetical protein
  misc_feature (26)..(157): NCBI GI NO: 34393893 NR Description: hypothetical protein
  misc_feature (27)..(157): NCBI GI NO: 38637203 NR Description: hypothetical protein
  misc_feature (26)..(157): NCBI GI NO: 28411934 NR Description: OSJNBa0027N13.18
  misc_feature (26)..(157): NCBI GI NO: 28411932 NR Description: OSJNBa0027N13.16
  misc_feature (26)..(157): NCBI GI NO: 34900712 NR Description: hypothetical protein~predicted by FGENESH etc.
MEEEEINLAGAGGGEVKQEVGEEEEIEFEPTEDELVLHFLRPQLRGFAPRVAGAVVEADPCASPPWELLARHGLLRRGHGYFFAARRRGKVRRTPEGGGGAWMHSGNKEDRRSVTELGVVARWTMTRYCFYLRGGDGAQQGRRSTGWVMSEYEITDPRCYRRADDGEEDQYWVLCHVRRSIRENVKPRSRRR

SEQ ID NO: 17066 - DNA, 389 bp, Triticum aestivum
  misc_feature (1)..(389): Ceres Seq. ID no. 12620877
gttttaaccgcacgctgctcaatccaatccaatcagtcccttgcttggatccatccatcccctccccaccaaataccgtcgatctctattcacctctcccaaagtcttcgtctggtcttctccacctcgacgcagacatggccgccgccgccgcgycggatctggagagcaaggccaaggaggccttcgtcgacgacgacttcgagctggccgccgagctctacacccaggccattgaggcggggccggccaccgcggaactctacgccgaccgagcccaggcgcacatcaagctgggcagttacactgaggctgtagctgatgccaacaaagcaattgaacttgatccttcgatgcataaagcataccttcggaagggctctgcttgc

SEQ ID NO: 17067 - protein, 129 aa, Triticum aestivum
  peptide (1)..(129): Ceres Seq. ID no. 13658637
  misc_feature (85)..(118): Pfam Name: Pfam Description:  TPR Domain
  misc_feature (46)..(128): NCBI GI NO: 17017306 NR Description: SGT1 [Hordeum vulgare]
  misc_feature (46)..(128): NCBI GI NO: 6581058 NR Description: Sgt1 [Oryza sativa]
  misc_feature (46)..(128): NCBI GI NO: 34912836 NR Description: Sgt1 [Oryza sativa (japonica cultivar-group)]
  misc_feature (51)..(128): NCBI GI NO: 29468339 NR Description: SGT1 [Nicotiana benthamiana]
  misc_feature (51)..(128): NCBI GI NO: 15236528 NR Description: phosphatase like protein; protein id: At4g23570
  misc_feature (51)..(128): NCBI GI NO: 17017308 NR Description: SGT1a [Arabidopsis thaliana]
  misc_feature (51)..(128): NCBI GI NO: 40974917 NR Description: SGT1-like protein [Brassica oleracea]
  misc_feature (51)..(128): NCBI GI NO: 15237122 NR Description: putative protein; protein id: At4g11260
  misc_feature (51)..(128): NCBI GI NO: 40974915 NR Description: SGT1-like protein [Brassica oleracea]
  misc_feature (70)..(128): NCBI GI NO: 22212722 NR Description: SGT1-like protein [Nicotiana benthamiana]
  misc_feature (52)..(52): Xaa is any aa, unknown or other
FNRTLLNPIQSVPCLDPSIPSPPNTVDLYSPLPKSSSGLLHLDADMAAAAAXDLESKAKEAFVDDDFELAAELYTQAIEAGPATAELYADRAQAHIKLGSYTEAVADANKAIELDPSMHKAYLRKGSAC

SEQ ID NO: 17068 - protein, 105 aa, Triticum aestivum
  peptide (1)..(105): Ceres Seq. ID no. 13658638
  misc_feature (52)..(52): Xaa is any aa, unknown or other
VLTARCSIQSNQSLAWIHPSPPHQIPSISIHLSQSLRLVFSTSTQTWPPPPXRIWRARPRRPSSTTTSSWPPSSTPRPLRRGRPPRNSTPTEPRRTSSWAVTLRL

SEQ ID NO: 17069 - protein, 84 aa, Triticum aestivum
  peptide (1)..(84): Ceres Seq. ID no. 13658639
  misc_feature (40)..(73): Pfam Name: Pfam Description:  TPR Domain
  misc_feature (1)..(83): NCBI GI NO: 17017306 NR Description: SGT1 [Hordeum vulgare]
  misc_feature (1)..(83): NCBI GI NO: 6581058 NR Description: Sgt1 [Oryza sativa]
  misc_feature (1)..(83): NCBI GI NO: 34912836 NR Description: Sgt1 [Oryza sativa (japonica cultivar-group)]
  misc_feature (6)..(83): NCBI GI NO: 29468339 NR Description: SGT1 [Nicotiana benthamiana]
  misc_feature (6)..(83): NCBI GI NO: 15236528 NR Description: phosphatase like protein; protein id: At4g23570
  misc_feature (6)..(83): NCBI GI NO: 17017308 NR Description: SGT1a [Arabidopsis thaliana]
  misc_feature (6)..(83): NCBI GI NO: 40974917 NR Description: SGT1-like protein [Brassica oleracea]
  misc_feature (6)..(83): NCBI GI NO: 15237122 NR Description: putative protein; protein id: At4g11260
  misc_feature (6)..(83): NCBI GI NO: 40974915 NR Description: SGT1-like protein [Brassica oleracea]
  misc_feature (25)..(83): NCBI GI NO: 22212722 NR Description: SGT1-like protein [Nicotiana benthamiana]
  misc_feature (7)..(7): Xaa is any aa, unknown or other
MAAAAAXDLESKAKEAFVDDDFELAAELYTQAIEAGPATAELYADRAQAHIKLGSYTEAVADANKAIELDPSMHKAYLRKGSAC

SEQ ID NO: 17070 - DNA, 2432 bp, Triticum aestivum
  misc_feature (1)..(2432): Ceres Seq. ID no. 14302351
ctctctcttcttcctcttcctctccccttcaccggcctcctccttcctccgcttcctcctcacgcccccaccccacccgctacctcgaaagcccgaaccctaaacccacgcagaagcggcggcggcgcggcctccgcctgtcgcatgcccgctgcctcctagcagcctgggccgccggcgatcgccggagtcggggagggcggcgagctcccgtgcgtcggagagagatgggggcgggcgggaagggctggccggagacggcgagccgcggggtgaggacggcctggttcatggtggtcatggtggcgtcgctgctcgtcgcgtcggcgcccgtcgtggtggccgccggcgacgtggccgtcacgctctggctcgaggcgcgcctcggctgcccgcgctgccgcggcctccgggaccacctccgggggtacgccttccggagctcgctcgtggacataccgctcctctccgtccttcgctccttcgccatcacctgcgtatacctcgtgtgtgatacttctggtctctctcacggcccgtaccttggaaccacaaccttctgttccttggcttcgctgctcatcttgctcatgaaggcctgcgtttacagtccagctcaggacattgggcctgagctctcgccgtcattggcggaccacaggctaaatatgaagaagctatggggaatgcctgcgcttttcctgtcatccttgatctttgctctcggccattttgttgtcgcttacagaacgagctgcagggctcgacgaaagctgctcatccatcgcattgaccctgaatcgattctggcttacaagaatgcctttcctggatgctacaaggttcctcggtcgcccactccgcacagtgcgaaactttattcaaggagcgagagcgagacaaagagaaaaactcttgtgcacgatgacagggatattccaatcagttttcttgctgatagtgatagcatgttcactgcttgccaggggatcactgtacactacaaaatgtctgatccatcaagttgcatacctccagctcctgaattgtttccagaaactaatcatgatgctgtttcgtcaagcatttctcctagaagacagaggcatgagagcccaccaacagcttcctcgagtacccgtcgtcttttgcataggagctttagtcatcagtaccaccaaacatcgttatatgcaccattgttggtagaaccgctgacctctccaacggtgtcagatggcatcccctttctcagtctcgacgacgacagcttacaggtgtgttcgagacctatgggctttgatctcgaggctggagagcacgggaaatttgctgttgttttggtccatgggtttggagggggagtatttgcatggagacatgttagtaatttgcttgctcgacaagtgggttgcactgtgctggcctttgatcgccctggatgggggttaacatctcgacctcgcagaaaggactgggaagacaagaatttgccaaacccgtacgagcttgagtcacaggttgatcttctgatttcattttgcttagacatgggcttgggctcggtcattttagttggtcatgatgatggcggcttgctggcactgaggaccgcagaaaagttacgtgcttctggagattctaggaaggttgaagtgaagggagttgttcttataggcgtaagcttatcaagagaagtgattcctgcatttgctcgtatactcctgcatactcctctgaggaaaaagcacatggtgcgcccacttctacgtactgaaatcactcaggtgatcaatcgacgagcatggtttgatgctaccaagttgacaacagatgttcttaatctttacaaggctccactatatgtcgagggctgggacgaagcactccatgaagtaggccgtctttcattttccaccgtcctatcatcaaaaagagcaacggaactactaagatcggtggaagacctccctgttttggtggtagcaggctctgaggatgctcttgtttctctgaagtcagcacaaactatggcttcagaacttgtaaattctaggctagtaactatatcaggatgtggtcatctgccacacgaagaatgtgccaatgcattgctctcagctctttctccgttcatctcaaaattggtatcatcagatgattcattgcaaagattgtagcatacacctgtccatcttcccttttgaattttgctctcttctgtgccctctacattgagtagatgacctctagctgttgcgagttggtgtgagcccatgttagttgcaaagtagtggagcctgacccaaaatctcaagggtcctagagctcccctaatttattttttggtcatatgtatttctgttcctgatctgttcaattgagcaagttgaatctgtacagcccatgcctgcagtgttccagttcacgtc

SEQ ID NO: 17071 - protein, 725 aa, Triticum aestivum
  peptide (1)..(725): Ceres Seq. ID no. 14302352
  misc_feature (471)..(710): Pfam Name: Pfam Description:  alpha/beta hydrolase fold
  misc_feature (97)..(725): NCBI GI NO: 34911750 NR Description: P0038D11.18
  misc_feature (81)..(720): NCBI GI NO: 15218212 NR Description: hydrolase, alpha/beta fold family
  misc_feature (80)..(720): NCBI GI NO: 15220097 NR Description: hydrolase, alpha/beta fold family
  misc_feature (95)..(716): NCBI GI NO: 25405595 NR Description: unknown protein, 18223-15857
  misc_feature (188)..(716): NCBI GI NO: 22330208 NR Description: hydrolase, alpha/beta fold family
  misc_feature (73)..(281): NCBI GI NO: 30688139 NR Description: expressed protein [Arabidopsis thaliana]
  misc_feature (89)..(281): NCBI GI NO: 30694339 NR Description: expressed protein [Arabidopsis thaliana]
  misc_feature (89)..(268): NCBI GI NO: 30694336 NR Description: expressed protein [Arabidopsis thaliana]
  misc_feature (552)..(712): NCBI GI NO: 6630546 NR Description: putative alpha/beta hydrolase
  misc_feature (442)..(535): NCBI GI NO: 6630546 NR Description: putative alpha/beta hydrolase
LSSSSSSPLHRPPPSSASSSRPHPTRYLESPNPKPTQKRRRRGLRLSHARCLLAAWAAGDRRSRGGRRAPVRRREMGAGGKGWPETASRGVRTAWFMVVMVASLLVASAPVVVAAGDVAVTLWLEARLGCPRCRGLRDHLRGYAFRSSLVDIPLLSVLRSFAITCVYLVCDTSGLSHGPYLGTTTFCSLASLLILLMKACVYSPAQDIGPELSPSLADHRLNMKKLWGMPALFLSSLIFALGHFVVAYRTSCRARRKLLIHRIDPESILAYKNAFPGCYKVPRSPTPHSAKLYSRSESETKRKTLVHDDRDIPISFLADSDSMFTACQGITVHYKMSDPSSCIPPAPELFPETNHDAVSSSISPRRQRHESPPTASSSTRRLLHRSFSHQYHQTSLYAPLLVEPLTSPTVSDGIPFLSLDDDSLQVCSRPMGFDLEAGEHGKFAVVLVHGFGGGVFAWRHVSNLLARQVGCTVLAFDRPGWGLTSRPRRKDWEDKNLPNPYELESQVDLLISFCLDMGLGSVILVGHDDGGLLALRTAEKLRASGDSRKVEVKGVVLIGVSLSREVIPAFARILLHTPLRKKHMVRPLLRTEITQVINRRAWFDATKLTTDVLNLYKAPLYVEGWDEALHEVGRLSFSTVLSSKRATELLRSVEDLPVLVVAGSEDALVSLKSAQTMASELVNSRLVTISGCGHLPHEECANALLSALSPFISKLVSSDDSLQRL

SEQ ID NO: 17072 - protein, 650 aa, Triticum aestivum
  peptide (1)..(650): Ceres Seq. ID no. 14302353
  misc_feature (396)..(635): Pfam Name: Pfam Description:  alpha/beta hydrolase fold
  misc_feature (22)..(650): NCBI GI NO: 34911750 NR Description: P0038D11.18
  misc_feature (6)..(645): NCBI GI NO: 15218212 NR Description: hydrolase, alpha/beta fold family
  misc_feature (5)..(645): NCBI GI NO: 15220097 NR Description: hydrolase, alpha/beta fold family
  misc_feature (20)..(641): NCBI GI NO: 25405595 NR Description: unknown protein, 18223-15857
  misc_feature (113)..(641): NCBI GI NO: 22330208 NR Description: hydrolase, alpha/beta fold family
  misc_feature (1)..(206): NCBI GI NO: 30688139 NR Description: expressed protein [Arabidopsis thaliana]
  misc_feature (14)..(206): NCBI GI NO: 30694339 NR Description: expressed protein [Arabidopsis thaliana]
  misc_feature (14)..(193): NCBI GI NO: 30694336 NR Description: expressed protein [Arabidopsis thaliana]
  misc_feature (477)..(637): NCBI GI NO: 6630546 NR Description: putative alpha/beta hydrolase
  misc_feature (367)..(460): NCBI GI NO: 6630546 NR Description: putative alpha/beta hydrolase
MGAGGKGWPETASRGVRTAWFMVVMVASLLVASAPVVVAAGDVAVTLWLEARLGCPRCRGLRDHLRGYAFRSSLVDIPLLSVLRSFAITCVYLVCDTSGLSHGPYLGTTTFCSLASLLILLMKACVYSPAQDIGPELSPSLADHRLNMKKLWGMPALFLSSLIFALGHFVVAYRTSCRARRKLLIHRIDPESILAYKNAFPGCYKVPRSPTPHSAKLYSRSESETKRKTLVHDDRDIPISFLADSDSMFTACQGITVHYKMSDPSSCIPPAPELFPETNHDAVSSSISPRRQRHESPPTASSSTRRLLHRSFSHQYHQTSLYAPLLVEPLTSPTVSDGIPFLSLDDDSLQVCSRPMGFDLEAGEHGKFAVVLVHGFGGGVFAWRHVSNLLARQVGCTVLAFDRPGWGLTSRPRRKDWEDKNLPNPYELESQVDLLISFCLDMGLGSVILVGHDDGGLLALRTAEKLRASGDSRKVEVKGVVLIGVSLSREVIPAFARILLHTPLRKKHMVRPLLRTEITQVINRRAWFDATKLTTDVLNLYKAPLYVEGWDEALHEVGRLSFSTVLSSKRATELLRSVEDLPVLVVAGSEDALVSLKSAQTMASELVNSRLVTISGCGHLPHEECANALLSALSPFISKLVSSDDSLQRL

SEQ ID NO: 17073 - protein, 629 aa, Triticum aestivum
  peptide (1)..(629): Ceres Seq. ID no. 14302354
  misc_feature (375)..(614): Pfam Name: Pfam Description:  alpha/beta hydrolase fold
  misc_feature (1)..(629): NCBI GI NO: 34911750 NR Description: P0038D11.18
  misc_feature (1)..(624): NCBI GI NO: 15218212 NR Description: hydrolase, alpha/beta fold family
  misc_feature (1)..(624): NCBI GI NO: 15220097 NR Description: hydrolase, alpha/beta fold family
  misc_feature (1)..(620): NCBI GI NO: 25405595 NR Description: unknown protein, 18223-15857
  misc_feature (92)..(620): NCBI GI NO: 22330208 NR Description: hydrolase, alpha/beta fold family
  misc_feature (1)..(185): NCBI GI NO: 30688139 NR Description: expressed protein [Arabidopsis thaliana]
  misc_feature (1)..(185): NCBI GI NO: 30694339 NR Description: expressed protein [Arabidopsis thaliana]
  misc_feature (1)..(172): NCBI GI NO: 30694336 NR Description: expressed protein [Arabidopsis thaliana]
  misc_feature (456)..(616): NCBI GI NO: 6630546 NR Description: putative alpha/beta hydrolase
  misc_feature (346)..(439): NCBI GI NO: 6630546 NR Description: putative alpha/beta hydrolase
MVVMVASLLVASAPVVVAAGDVAVTLWLEARLGCPRCRGLRDHLRGYAFRSSLVDIPLLSVLRSFAITCVYLVCDTSGLSHGPYLGTTTFCSLASLLILLMKACVYSPAQDIGPELSPSLADHRLNMKKLWGMPALFLSSLIFALGHFVVAYRTSCRARRKLLIHRIDPESILAYKNAFPGCYKVPRSPTPHSAKLYSRSESETKRKTLVHDDRDIPISFLADSDSMFTACQGITVHYKMSDPSSCIPPAPELFPETNHDAVSSSISPRRQRHESPPTASSSTRRLLHRSFSHQYHQTSLYAPLLVEPLTSPTVSDGIPFLSLDDDSLQVCSRPMGFDLEAGEHGKFAVVLVHGFGGGVFAWRHVSNLLARQVGCTVLAFDRPGWGLTSRPRRKDWEDKNLPNPYELESQVDLLISFCLDMGLGSVILVGHDDGGLLALRTAEKLRASGDSRKVEVKGVVLIGVSLSREVIPAFARILLHTPLRKKHMVRPLLRTEITQVINRRAWFDATKLTTDVLNLYKAPLYVEGWDEALHEVGRLSFSTVLSSKRATELLRSVEDLPVLVVAGSEDALVSLKSAQTMASELVNSRLVTISGCGHLPHEECANALLSALSPFISKLVSSDDSLQRL

SEQ ID NO: 17074 - DNA, 480 bp, Triticum aestivum
  misc_feature (1)..(480): Ceres Seq. ID no. 13658214
  misc_feature (374)..(374): n is a, c, t, g, unknown, or other
gctgggtctgcccaccttcttcctccgcctccgtccgtttctcttctctacgaacgcagcacgcaacgtggtcgagactacacaacctagaaaaaatcccatcgatctgctccagctttgcggcgcggcagccagccagccagcacccatggcggtggaagggataaccgagggcgtgaggggcctcaaggtggaggacggcgagggggcggcgggcgccgcggccgacgcgccggccgccgccgccgccggcggggaggggcagaggcggggcgccagcgccagcagcaaccgcatccaggtgtccaacacgamsaagcccctcttcttctacgtcaacctcgccaagaggtatatgcagcagcacggcgacntcgagctctcggcgctcgggatggccattgcgactgttgtaactgtggcggagattctgaagaacaacggcctcgctgttgagaagaagattagaacatccacggt

SEQ ID NO: 17075 - protein, 159 aa, Triticum aestivum
  peptide (1)..(159): Ceres Seq. ID no. 13658215
  misc_feature (50)..(158): NCBI GI NO: 34910240 NR Description: OSJNBa0089K24.4
  misc_feature (93)..(158): NCBI GI NO: 18403464 NR Description: expressed protein [Arabidopsis thaliana]
  misc_feature (97)..(158): NCBI GI NO: 18397011 NR Description: expressed protein [Arabidopsis thaliana]
  misc_feature (97)..(158): NCBI GI NO: 15229322 NR Description: expressed protein [Arabidopsis thaliana]
  misc_feature (105)..(105): Xaa is any aa, unknown or other
  misc_feature (125)..(125): Xaa is any aa, unknown or other
LGLPTFFLRLRPFLFSTNAARNVVETTQPRKNPIDLLQLCGAAASQPAPMAVEGITEGVRGLKVEDGEGAAGAAADAPAAAAAGGEGQRRGASASSNRIQVSNTXKPLFFYVNLAKRYMQQHGDXELSALGMAIATVVTVAEILKNNGLAVEKKIRTST

SEQ ID NO: 17076 - protein, 110 aa, Triticum aestivum
  peptide (1)..(110): Ceres Seq. ID no. 13658216
  misc_feature (1)..(109): NCBI GI NO: 34910240 NR Description: OSJNBa0089K24.4
  misc_feature (44)..(109): NCBI GI NO: 18403464 NR Description: expressed protein [Arabidopsis thaliana]
  misc_feature (48)..(109): NCBI GI NO: 18397011 NR Description: expressed protein [Arabidopsis thaliana]
  misc_feature (48)..(109): NCBI GI NO: 15229322 NR Description: expressed protein [Arabidopsis thaliana]
  misc_feature (56)..(56): Xaa is any aa, unknown or other
  misc_feature (76)..(76): Xaa is any aa, unknown or other
MAVEGITEGVRGLKVEDGEGAAGAAADAPAAAAAGGEGQRRGASASSNRIQVSNTXKPLFFYVNLAKRYMQQHGDXELSALGMAIATVVTVAEILKNNGLAVEKKIRTST

SEQ ID NO: 17077 - DNA, 761 bp, Triticum aestivum
  misc_feature (1)..(761): Ceres Seq. ID no. 13658261
aggctgataatagcttaaagtttgtagcaaggtaccaggttcatgaaacaaacatcaattccccatcgcataggcatctctaataaagtagtagtaataacaatagataatccccaatgaaatgccaaaatagcagcactcctcggtggatcaaggctcggggtcagcaccttactcctccgtggggggcggagcagtcaccgacgaaccctccgactcttcaccgctcggttccgcgggggtctctggagctgcggcggcggcagcggcgcgcgacttggcgagctcgaggaggcggcggctgacctccttggagtaggcctggaggacctcgatcccgtcctccagggaggcgggggaggcggcggcggactccgaggcggcggcgaaggcctcggcctcgacggcggctgcggcgacctcggcctcgggctcggggatggcgccgtagcgctgagagaggacgctgggcgcggacagggtctgcacgacgcgccggacaacggcgtcgcgtgtgcgctgcgacggcggccagatgctgagcgacgggagcagcgtctccgacgaggacttctctgccgacgccgaaggggcagctgcgtcggcgaaggattcagtgggcgcggggtggatgtcctcagcgccggcgttgggggcgtcctcggccatggcgtggagagcggagagcaagggggagggggcggagagggagagatctgtggcgtggagtgggaggagagcgaggtgtgcttctgtgggtt

SEQ ID NO: 17078 - protein, 75 aa, Triticum aestivum
  peptide (1)..(75): Ceres Seq. ID no. 13658262
MLSDGSSVSDEDFSADAEGAAASAKDSVGAGWMSSAPALGASSAMAWRAESKGEGAERERSVAWSGRRARCASVG

SEQ ID NO: 17079 - protein, 62 aa, Triticum aestivum
  peptide (1)..(62): Ceres Seq. ID no. 13658263
  misc_feature (6)..(62): NCBI GI NO: 5821145 NR Description: RNA binding protein [Homo sapiens]
  misc_feature (6)..(62): NCBI GI NO: 5821143 NR Description: RNA binding protein [Homo sapiens]
  misc_feature (6)..(62): NCBI GI NO: 6649242 NR Description: splicing coactivator subunit SRm300 [Homo sapiens]
  misc_feature (6)..(62): NCBI GI NO: 19923466 NR Description: splicing coactivator subunit SRm300
MKCQNSSTPRWIKARGQHLTPPWGAEQSPTNPPTLHRSVPRGSLELRRRQRRATWRARGGGG

SEQ ID NO: 17080 - protein, 43 aa, Triticum aestivum
  peptide (1)..(43): Ceres Seq. ID no. 13658264
MSSAPALGASSAMAWRAESKGEGAERERSVAWSGRRARCASVG

SEQ ID NO: 17081 - DNA, 922 bp, Triticum aestivum
  misc_feature (1)..(922): Ceres Seq. ID no. 13658282
atcgcctcgccacacaaactccagaagaaaatggcggcttgtgctgcgcccccttgcgtccgcatctcctgctccacaccttcaccgaccgctctccgccggccacgccgccggcgcgtcgcctccgcccgatgctccctcgccgcagcccccggtctccgggcgccgccggagctcgtcgactccatcctctccaaggtgaaggggactgaccggggcgtgctgctgccggaggaaggccaccaggaggtcgccgacgtcgcgcagcagctggggaagtactgcatcgacgagcccgtcaagtccccgcttatattcggagactgggacgtggtgtattgctcggtgccgacatcccccggagggatttaccgcacccctctcggacggctggtgttcaagaccgacgacatggttcaggtggtggaagcccccgacatcgtcaggaacaaggtctccttctccatctttggcctcgatggcgcggtgtctctgacaggcaagctgaatgtattggacagtaagtggattcaggtcatatttgagcccccggaactgaaggtaggctccttgggtttccgatatggtggcgagagtgaggtcaagctggaaatcacctatgtcgatgagaagatcaggctcgggaaaggatcccgaggctcgcttttcgtcttcctgagacaagattagaagggtaggttgcatattttgcatgtgctcgacgccacaagggatatcggccatatgggcgtctacgcaactgcttgcagatgtaaattcagagataaagcccacaaagtagttttttatgatattcatttctaccttaagcagattgccttgttgtgagcgaaaatgtttgcggtactcatgctgatcttgtttctggatgtacttatgataatactggggtttgagcagg

SEQ ID NO: 17082 - protein, 229 aa, Triticum aestivum
  peptide (1)..(229): Ceres Seq. ID no. 13658283
  misc_feature (58)..(225): Pfam Name: Pfam Description:  PAP_fibrillin
  misc_feature (11)..(228): NCBI GI NO: 38346556 NR Description: OSJNBa0035M09.17
  misc_feature (29)..(228): NCBI GI NO: 15241221 NR Description: expressed protein [Arabidopsis thaliana]
IASPHKLQKKMAACAAPPCVRISCSTPSPTALRRPRRRRVASARCSLAAAPGLRAPPELVDSILSKVKGTDRGVLLPEEGHQEVADVAQQLGKYCIDEPVKSPLIFGDWDVVYCSVPTSPGGIYRTPLGRLVFKTDDMVQVVEAPDIVRNKVSFSIFGLDGAVSLTGKLNVLDSKWIQVIFEPPELKVGSLGFRYGGESEVKLEITYVDEKIRLGKGSRGSLFVFLRQD

SEQ ID NO: 17083 - protein, 219 aa, Triticum aestivum
  peptide (1)..(219): Ceres Seq. ID no. 13658284
  misc_feature (48)..(215): Pfam Name: Pfam Description:  PAP_fibrillin
  misc_feature (1)..(218): NCBI GI NO: 38346556 NR Description: OSJNBa0035M09.17
  misc_feature (19)..(218): NCBI GI NO: 15241221 NR Description: expressed protein [Arabidopsis thaliana]
MAACAAPPCVRISCSTPSPTALRRPRRRRVASARCSLAAAPGLRAPPELVDSILSKVKGTDRGVLLPEEGHQEVADVAQQLGKYCIDEPVKSPLIFGDWDVVYCSVPTSPGGIYRTPLGRLVFKTDDMVQVVEAPDIVRNKVSFSIFGLDGAVSLTGKLNVLDSKWIQVIFEPPELKVGSLGFRYGGESEVKLEITYVDEKIRLGKGSRGSLFVFLRQD

SEQ ID NO: 17084 - DNA, 1741 bp, Triticum aestivum
  misc_feature (1)..(1741): Ceres Seq. ID no. 13663345
aaaagaaacaaacacgcacacgccacctcacgccgccccgcgcacactgcggccgcgccactcgcacacggccaccacctgctaggctgcgagcggcgagcggcgagatcggcggcgggcggaggaatggtggcgccggcgggaggagggtcgccgtcgcggtggccgtcggatgaggagcttgacattgtgcggaagaatgtggtcgagattagtggaagagatgcgagagaggttagggtggttgcttgcccctacaggatttgtcctttgggggcccacattgatcatcagggcggaatagtgactgctatgacaatcaattatggagtacttcttggctttgtgccctctgatgatgctgaggttgtactccagtctggtcaatttaaaggcattactcgattcagagttgatgacttgcaaaagcctattgagaaccgaggaaacataacttgggaaagctatgcaagaggtgcagtttatgccctgcaaaatagtggatatgatctcagaaagggtataataggttatatttctggagtgaatggacttgacagttcagggcttagttcgtctgcagctgttggcatcgcctatttgctggctttagaaaatgtaaatgatctggttttatcaccagttgataacattcagttggacaagtccattgaaaatagatatttgggtcttgaaaatggcattctagatccatcagccattttattgtctcgatatggctacctcaccttcatggattgcaagactgcctcaccttcctacgtctacttctcggaactaagtaaaagccagcaacctcaaggtcggccgccattcaagattttgttggcattttcaggtttgcaacataacctacccaagtcgcgtgggtataatatgcgagtcttcgagtgcaaagaggctgcacgtgctcttttatgtgcgtcaggctctgaagatgcaccaatactccgtaaagttgatccaggtgtatatgaggcccaaaagtgtatattagatgaaaatcttgccaagagagctgagcactatttctctgaaatgaagcgagttgttaagggaagagaggcatgggctcgtggagacctacaagaattgggacagctgatctctgcatctggccgcagctccatagtcaactacgaatgcgggagcaaagagatgatacagctgtacgagatcctcctgaaggcgccaggggtcctcggcgcgcggttcagcggcgctggcttcagaggctgctgcctcgccatcgtcgaaagcgaccgtgccgaggaggcggcggcgtacgttggcgccgagtacgagaggtcccagccagagctggtgagcaagatccccgcggatcgtcgcgtgctggtctgcgagcccggggactccgcgcaggtcatcttgcagtcatgagcgtcctgttagtcgggactttgtgaaggtgagaacacgtgcaaaattcgtacgtcctcgtccatctggaactccaccccctaaattctactccctccgtcccataatataggacgttttttgacactagtgtagcgtcaaaaaacatcttacattatgggatgaagggagtagacatttagtccaagataagactagcgttgttgtgtatgaactgtactcagtcgagctcccagatagctcatctgtgtatgtgtggaaccatttgattcattcatttccacgtaagcaataatcagtaatgcaaaggttctctttc

SEQ ID NO: 17085 - protein, 473 aa, Triticum aestivum
  peptide (1)..(473): Ceres Seq. ID no. 13663346
  misc_feature (43)..(269): NCBI GI NO: 38567889 NR Description: OSJNBa0060N03.9
  misc_feature (336)..(452): NCBI GI NO: 38567889 NR Description: OSJNBa0060N03.9
  misc_feature (55)..(471): NCBI GI NO: 22330971 NR Description: GHMP kinase family [Arabidopsis thaliana]
  misc_feature (144)..(324): NCBI GI NO: 6630560 NR Description: galactokinase-like protein [Arabidopsis thaliana]
  misc_feature (55)..(144): NCBI GI NO: 6630560 NR Description: galactokinase-like protein [Arabidopsis thaliana]
  misc_feature (304)..(471): NCBI GI NO: 6630560 NR Description: galactokinase-like protein [Arabidopsis thaliana]
  misc_feature (85)..(441): NCBI GI NO: 120900 NR Description: Galactokinase (Galactose kinase)
  misc_feature (62)..(441): NCBI GI NO: 23003215 NR Description: hypothetical protein [Lactobacillus gasseri]
  misc_feature (361)..(471): NCBI GI NO: 12322772 NR Description: putative galactokinase, 5' partial; 97-568
  misc_feature (85)..(442): NCBI GI NO: 15903710 NR Description: Galactokinase [Streptococcus pneumoniae R6]
KRNKHAHATSRRPAHTAAAPLAHGHHLLGCERRAARSAAGGGMVAPAGGGSPSRWPSDEELDIVRKNVVEISGRDAREVRVVACPYRICPLGAHIDHQGGIVTAMTINYGVLLGFVPSDDAEVVLQSGQFKGITRFRVDDLQKPIENRGNITWESYARGAVYALQNSGYDLRKGIIGYISGVNGLDSSGLSSSAAVGIAYLLALENVNDLVLSPVDNIQLDKSIENRYLGLENGILDPSAILLSRYGYLTFMDCKTASPSYVYFSELSKSQQPQGRPPFKILLAFSGLQHNLPKSRGYNMRVFECKEAARALLCASGSEDAPILRKVDPGVYEAQKCILDENLAKRAEHYFSEMKRVVKGREAWARGDLQELGQLISASGRSSIVNYECGSKEMIQLYEILLKAPGVLGARFSGAGFRGCCLAIVESDRAEEAAAYVGAEYERSQPELVSKIPADRRVLVCEPGDSAQVILQS

SEQ ID NO: 17086 - protein, 431 aa, Triticum aestivum
  peptide (1)..(431): Ceres Seq. ID no. 13663347
  misc_feature (1)..(227): NCBI GI NO: 38567889 NR Description: OSJNBa0060N03.9
  misc_feature (294)..(410): NCBI GI NO: 38567889 NR Description: OSJNBa0060N03.9
  misc_feature (13)..(429): NCBI GI NO: 22330971 NR Description: GHMP kinase family [Arabidopsis thaliana]
  misc_feature (102)..(282): NCBI GI NO: 6630560 NR Description: galactokinase-like protein [Arabidopsis thaliana]
  misc_feature (13)..(102): NCBI GI NO: 6630560 NR Description: galactokinase-like protein [Arabidopsis thaliana]
  misc_feature (262)..(429): NCBI GI NO: 6630560 NR Description: galactokinase-like protein [Arabidopsis thaliana]
  misc_feature (43)..(399): NCBI GI NO: 120900 NR Description: Galactokinase (Galactose kinase)
  misc_feature (20)..(399): NCBI GI NO: 23003215 NR Description: hypothetical protein [Lactobacillus gasseri]
  misc_feature (319)..(429): NCBI GI NO: 12322772 NR Description: putative galactokinase, 5' partial; 97-568
  misc_feature (43)..(400): NCBI GI NO: 15903710 NR Description: Galactokinase [Streptococcus pneumoniae R6]
MVAPAGGGSPSRWPSDEELDIVRKNVVEISGRDAREVRVVACPYRICPLGAHIDHQGGIVTAMTINYGVLLGFVPSDDAEVVLQSGQFKGITRFRVDDLQKPIENRGNITWESYARGAVYALQNSGYDLRKGIIGYISGVNGLDSSGLSSSAAVGIAYLLALENVNDLVLSPVDNIQLDKSIENRYLGLENGILDPSAILLSRYGYLTFMDCKTASPSYVYFSELSKSQQPQGRPPFKILLAFSGLQHNLPKSRGYNMRVFECKEAARALLCASGSEDAPILRKVDPGVYEAQKCILDENLAKRAEHYFSEMKRVVKGREAWARGDLQELGQLISASGRSSIVNYECGSKEMIQLYEILLKAPGVLGARFSGAGFRGCCLAIVESDRAEEAAAYVGAEYERSQPELVSKIPADRRVLVCEPGDSAQVILQS

SEQ ID NO: 17087 - protein, 369 aa, Triticum aestivum
  peptide (1)..(369): Ceres Seq. ID no. 13663348
  misc_feature (1)..(165): NCBI GI NO: 38567889 NR Description: OSJNBa0060N03.9
  misc_feature (232)..(348): NCBI GI NO: 38567889 NR Description: OSJNBa0060N03.9
  misc_feature (1)..(367): NCBI GI NO: 22330971 NR Description: GHMP kinase family [Arabidopsis thaliana]
  misc_feature (40)..(220): NCBI GI NO: 6630560 NR Description: galactokinase-like protein [Arabidopsis thaliana]
  misc_feature (1)..(40): NCBI GI NO: 6630560 NR Description: galactokinase-like protein [Arabidopsis thaliana]
  misc_feature (200)..(367): NCBI GI NO: 6630560 NR Description: galactokinase-like protein [Arabidopsis thaliana]
  misc_feature (1)..(337): NCBI GI NO: 120900 NR Description: Galactokinase (Galactose kinase)
  misc_feature (1)..(337): NCBI GI NO: 23003215 NR Description: hypothetical protein [Lactobacillus gasseri]
  misc_feature (257)..(367): NCBI GI NO: 12322772 NR Description: putative galactokinase, 5' partial; 97-568
  misc_feature (1)..(338): NCBI GI NO: 15903710 NR Description: Galactokinase [Streptococcus pneumoniae R6]
MTINYGVLLGFVPSDDAEVVLQSGQFKGITRFRVDDLQKPIENRGNITWESYARGAVYALQNSGYDLRKGIIGYISGVNGLDSSGLSSSAAVGIAYLLALENVNDLVLSPVDNIQLDKSIENRYLGLENGILDPSAILLSRYGYLTFMDCKTASPSYVYFSELSKSQQPQGRPPFKILLAFSGLQHNLPKSRGYNMRVFECKEAARALLCASGSEDAPILRKVDPGVYEAQKCILDENLAKRAEHYFSEMKRVVKGREAWARGDLQELGQLISASGRSSIVNYECGSKEMIQLYEILLKAPGVLGARFSGAGFRGCCLAIVESDRAEEAAAYVGAEYERSQPELVSKIPADRRVLVCEPGDSAQVILQS

SEQ ID NO: 17088 - DNA, 1693 bp, Triticum aestivum
  misc_feature (1)..(1693): Ceres Seq. ID no. 15169615
agatctacatcctccctccaccccgtctcgccggccgcccggccgccccccaatcgtgcgtcggacgaggccacggcgatggatctcctctcggacgcccagccccagtggctcctcgccggcgccgcgctgctgctcgccaccgtcgccttcctcagggtcctcctcggctccggcggccgcggcaagcgggcgccgccgacgatcccgggggcgcccgtcgtgggcgggctcctgcgcttcctgcggggccccatcccgctcatccgggccgagtacgcccgcctcggccccgtcttcaccgtccccatcctcacccgccggatcaccttcctcatcggccccgacgtctcggcgcacttcttcaagagcaacgagtccgacatgagccagcaggaggtctaccgcttcaacgtccccaccttcggccccggggtcgtcttcgacgtcgactaccaggtcaggcaggagcagttcaggttcttcaccgaggcgctcagggccaacaagctccgcagctacgtcgaccagatggttgccgaggccgaggagtacttctcaaagtggggagaaagcggcactgtggatctgaagtatgaactggagcacctcatcatactgactgctagccgatgcttgttgggaagggaagtgcgagaaaaattgtttgatgatgtttctgctctcttccatgatcttgacaatgggatgcagccaatcagtgtcatctttccctacctcccaatccctgcacaccgtcgccgtgaccaggcacggacacgtttggcggagatctttgccacgatcatcaagtcccgcaaggcctctggacagtccgaggaagacatgctgcagtgcttcattgattccaagtacaagaatggccgccagaccacagaaagtgaggtgactgggctacttattgcagccctgtttgctggacagcacactagctcgatcacctcaacctggactggggcctacctgcttaagttccagcagtactttgcagaggctgttgaggagcagaaggaggtcatgaagaggcatggtgacaagatcgatcacgacatattggcagagatggatgtcctctaccggtgcatcaaggaggcgctccggctccacccgccgctgatcatgctgcttcgccaatcacactctgacttcagcgtgaccacgagggaaggcaaagagtttgatatccccaagggccacatcgtcgcaacatctcctgctttcgctaacaggctcccccatatcttcaagaacccggactcgtatgaccctgaccggtttgcagctgggagggaggaggacaaggttgcgggtgccttctcgtacatctcctttgggggtggcaggcacgggtgcctgggtgagcccttcgcgtacctgcagatcaaggcgatatggacacacctcctgaggaactttgagtttgagctggtctcaccgttcccagagaacgactggaatgcgatggtcgtcggcatcaagggcgaggtgatggtcagctacaagcggcggaagcttgtcgtcgacaactagagagcgggtggtcccatagggggtgtttgcttctgtatttgttccatttaagttttttctattcgcacgccaacctgtagggtatctatcttgccattgttttagggtactttgatttgcttccagtgattatttagacgtg

SEQ ID NO: 17089 - protein, 516 aa, Triticum aestivum
  peptide (1)..(516): Ceres Seq. ID no. 15169616
  misc_feature (64)..(516): NCBI GI NO: 6166036 NR Description: Cytochrome P450 51
  misc_feature (27)..(516): NCBI GI NO: 27542762 NR Description: cytochrome P450-like protein [Sorghum bicolor]
  misc_feature (27)..(516): NCBI GI NO: 5921924 NR Description: Cytochrome P450 51
  misc_feature (90)..(516): NCBI GI NO: 4586676 NR Description: sterol 14-demethylase
  misc_feature (38)..(512): NCBI GI NO: 18000074 NR Description: obtusifoliol-14-demethylase [Nicotiana tabacum]
  misc_feature (38)..(512): NCBI GI NO: 15221075 NR Description: obtusifoliol 14-demethylase (CYP51)
  misc_feature (63)..(512): NCBI GI NO: 27461067 NR Description: obtusifoliol-14-demethylase [Nicotiana tabacum]
  misc_feature (204)..(516): NCBI GI NO: 7489685 NR Description: probable obtusifoliol 14-alpha-demethylase CYP51 -wheat
  misc_feature (38)..(510): NCBI GI NO: 15227817 NR Description: obtusifoliol 14-alpha demethylase, putative
  misc_feature (19)..(510): NCBI GI NO: 21618866 NR Description: cytochrome P450, 51 [Mus musculus]
RSTSSLHPVSPAARPPPNRASDEATAMDLLSDAQPQWLLAGAALLLATVAFLRVLLGSGGRGKRAPPTIPGAPVVGGLLRFLRGPIPLIRAEYARLGPVFTVPILTRRITFLIGPDVSAHFFKSNESDMSQQEVYRFNVPTFGPGVVFDVDYQVRQEQFRFFTEALRANKLRSYVDQMVAEAEEYFSKWGESGTVDLKYELEHLIILTASRCLLGREVREKLFDDVSALFHDLDNGMQPISVIFPYLPIPAHRRRDQARTRLAEIFATIIKSRKASGQSEEDMLQCFIDSKYKNGRQTTESEVTGLLIAALFAGQHTSSITSTWTGAYLLKFQQYFAEAVEEQKEVMKRHGDKIDHDILAEMDVLYRCIKEALRLHPPLIMLLRQSHSDFSVTTREGKEFDIPKGHIVATSPAFANRLPHIFKNPDSYDPDRFAAGREEDKVAGAFSYISFGGGRHGCLGEPFAYLQIKAIWTHLLRNFEFELVSPFPENDWNAMVVGIKGEVMVSYKRRKLVVDN

SEQ ID NO: 17090 - protein, 490 aa, Triticum aestivum
  peptide (1)..(490): Ceres Seq. ID no. 15169617
  misc_feature (38)..(490): NCBI GI NO: 6166036 NR Description: Cytochrome P450 51
  misc_feature (1)..(490): NCBI GI NO: 27542762 NR Description: cytochrome P450-like protein [Sorghum bicolor]
  misc_feature (1)..(490): NCBI GI NO: 5921924 NR Description: Cytochrome P450 51
  misc_feature (64)..(490): NCBI GI NO: 4586676 NR Description: sterol 14-demethylase
  misc_feature (12)..(486): NCBI GI NO: 18000074 NR Description: obtusifoliol-14-demethylase [Nicotiana tabacum]
  misc_feature (12)..(486): NCBI GI NO: 15221075 NR Description: obtusifoliol 14-demethylase (CYP51)
  misc_feature (37)..(486): NCBI GI NO: 27461067 NR Description: obtusifoliol-14-demethylase [Nicotiana tabacum]
  misc_feature (178)..(490): NCBI GI NO: 7489685 NR Description: probable obtusifoliol 14-alpha-demethylase CYP51 -wheat
  misc_feature (12)..(484): NCBI GI NO: 15227817 NR Description: obtusifoliol 14-alpha demethylase, putative
  misc_feature (1)..(484): NCBI GI NO: 21618866 NR Description: cytochrome P450, 51 [Mus musculus]
MDLLSDAQPQWLLAGAALLLATVAFLRVLLGSGGRGKRAPPTIPGAPVVGGLLRFLRGPIPLIRAEYARLGPVFTVPILTRRITFLIGPDVSAHFFKSNESDMSQQEVYRFNVPTFGPGVVFDVDYQVRQEQFRFFTEALRANKLRSYVDQMVAEAEEYFSKWGESGTVDLKYELEHLIILTASRCLLGREVREKLFDDVSALFHDLDNGMQPISVIFPYLPIPAHRRRDQARTRLAEIFATIIKSRKASGQSEEDMLQCFIDSKYKNGRQTTESEVTGLLIAALFAGQHTSSITSTWTGAYLLKFQQYFAEAVEEQKEVMKRHGDKIDHDILAEMDVLYRCIKEALRLHPPLIMLLRQSHSDFSVTTREGKEFDIPKGHIVATSPAFANRLPHIFKNPDSYDPDRFAAGREEDKVAGAFSYISFGGGRHGCLGEPFAYLQIKAIWTHLLRNFEFELVSPFPENDWNAMVVGIKGEVMVSYKRRKLVVDN

SEQ ID NO: 17091 - protein, 388 aa, Triticum aestivum
  peptide (1)..(388): Ceres Seq. ID no. 15169618
  misc_feature (1)..(388): NCBI GI NO: 6166036 NR Description: Cytochrome P450 51
  misc_feature (1)..(388): NCBI GI NO: 27542762 NR Description: cytochrome P450-like protein [Sorghum bicolor]
  misc_feature (1)..(388): NCBI GI NO: 5921924 NR Description: Cytochrome P450 51
  misc_feature (1)..(388): NCBI GI NO: 4586676 NR Description: sterol 14-demethylase
  misc_feature (1)..(384): NCBI GI NO: 18000074 NR Description: obtusifoliol-14-demethylase [Nicotiana tabacum]
  misc_feature (1)..(384): NCBI GI NO: 15221075 NR Description: obtusifoliol 14-demethylase (CYP51)
  misc_feature (1)..(384): NCBI GI NO: 27461067 NR Description: obtusifoliol-14-demethylase [Nicotiana tabacum]
  misc_feature (76)..(388): NCBI GI NO: 7489685 NR Description: probable obtusifoliol 14-alpha-demethylase CYP51 -wheat
  misc_feature (1)..(382): NCBI GI NO: 15227817 NR Description: obtusifoliol 14-alpha demethylase, putative
  misc_feature (1)..(382): NCBI GI NO: 21618866 NR Description: cytochrome P450, 51 [Mus musculus]
MSQQEVYRFNVPTFGPGVVFDVDYQVRQEQFRFFTEALRANKLRSYVDQMVAEAEEYFSKWGESGTVDLKYELEHLIILTASRCLLGREVREKLFDDVSALFHDLDNGMQPISVIFPYLPIPAHRRRDQARTRLAEIFATIIKSRKASGQSEEDMLQCFIDSKYKNGRQTTESEVTGLLIAALFAGQHTSSITSTWTGAYLLKFQQYFAEAVEEQKEVMKRHGDKIDHDILAEMDVLYRCIKEALRLHPPLIMLLRQSHSDFSVTTREGKEFDIPKGHIVATSPAFANRLPHIFKNPDSYDPDRFAAGREEDKVAGAFSYISFGGGRHGCLGEPFAYLQIKAIWTHLLRNFEFELVSPFPENDWNAMVVGIKGEVMVSYKRRKLVVDN

SEQ ID NO: 17092 - DNA, 1083 bp, Triticum aestivum
  misc_feature (1)..(1083): Ceres Seq. ID no. 13659098
agcccacacccccctcgtcgctctcaccccctcccgaatcaccctgtatccctctcatcctcgtccacccatgaaaccctagcccccttctcctaatcgccactgccgccttctccctcccagatccaatcctgctcgcgtcggccacctccctccagcggagctcgacccccaccccccgccgctgctccaccctctcccatgagggtctctgaggcccgcgcgcgcacaacctccgtcccctgttgctccaatccggccagcgctccctccacctcgtctctcccgatcccaccggtcggcggtgaccttcaccctagcagtcatactccaccctagcagtcgatcccgaccatcgctgcttcaccagcctcctcatctggcatctccccgagggcggccgatgccagacaggccgtcgacgcgccggacctcaaggccggtcgtgctgctccttctgcctgcgtcccctcgaccgctgtctgcaagatctccctcctcaaggagatgcagcatcggaacatcatcaggctgcaggacgtggtgcataacgagaagagggagggcgccatggcgaagaaggagggaccttgcggccattgcggagtcacaagtgtattgttcctgtacccgagtggctacatcagggaagacccacttggagtccccaacaacctgagccctatgtgcagcaagtcgttgtcgggaggcgcctgcgctgacggtttatgggaccgaatacaacaccaaggatggaataggggtggtgaaattatggtacagaataccagaaattcttctgggtgcgaggcagtattctacccttgttggtgaagtgcgaatccatgttcgaagttttgaagcatatcgacaaagagtagcatattatgtgttgtaattgtaggcagtagtaggcatatctgagttgtaatatactataacgattgtaatagattaatgtagtattggttttggaccaatttcatttgctctttggtctgttcgaaagaatgttgtgcatgtgatttgaatacccatgaaatggaaacctgacaagtgggtcaaggttataatggttgtttg

SEQ ID NO: 17093 - protein, 108 aa, Triticum aestivum
  peptide (1)..(108): Ceres Seq. ID no. 13659099
  misc_feature (1)..(17): NCBI GI NO: 4096105 NR Description: p34cdc2 [Triticum aestivum]
  misc_feature (1)..(18): NCBI GI NO: 22077127 NR Description: putative cyclin dependent kinase [Coffea arabica]
  misc_feature (1)..(18): NCBI GI NO: 2289782 NR Description: cdc2 kinase [Allium cepa]
  misc_feature (1)..(18): NCBI GI NO: 461702 NR Description: CELL DIVISION CONTROL PROTEIN 2 HOMOLOG 2
  misc_feature (1)..(18): NCBI GI NO: 1705676 NR Description: Cell division control protein 2 homolog (p34cdc2)
  misc_feature (1)..(18): NCBI GI NO: 24636266 NR Description: Cell division control protein 2 homolog (p34cdc2)
  misc_feature (1)..(18): NCBI GI NO: 3608177 NR Description: cdc2 [Pisum sativum]
  misc_feature (1)..(18): NCBI GI NO: 2117788 NR Description: protein kinase (EC 2.7.1.37) cdc2 homolog - cowpea
  misc_feature (1)..(18): NCBI GI NO: 115924 NR Description: CELL DIVISION CONTROL PROTEIN 2 HOMOLOG 1
  misc_feature (1)..(17): NCBI GI NO: 231707 NR Description: CELL DIVISION CONTROL PROTEIN 2 HOMOLOG 2
MQHRNIIRLQDVVHNEKREGAMAKKEGPCGHCGVTSVLFLYPSGYIREDPLGVPNNLSPMCSKSLSGGACADGLWDRIQHQGWNRGGEIMVQNTRNSSGCEAVFYPCW

SEQ ID NO: 17094 - protein, 91 aa, Triticum aestivum
  peptide (1)..(91): Ceres Seq. ID no. 13659100
  misc_feature (1)..(33): NCBI GI NO: 15230108 NR Description: protein kinase -related [Arabidopsis thaliana]
  misc_feature (1)..(13): NCBI GI NO: 15230108 NR Description: protein kinase -related [Arabidopsis thaliana]
  misc_feature (1)..(43): NCBI GI NO: 14017929 NR Description: KIAA1856 protein [Homo sapiens]
  misc_feature (1)..(43): NCBI GI NO: 37538336 NR Description: KIAA1856 protein [Homo sapiens]
MPDRPSTRRTSRPVVLLLLPASPRPLSARSPSSRRCSIGTSSGCRTWCITRRGRAPWRRRRDLAAIAESQVYCSCTRVATSGKTHLESPTT

SEQ ID NO: 17095 - protein, 87 aa, Triticum aestivum
  peptide (1)..(87): Ceres Seq. ID no. 13659101
MAKKEGPCGHCGVTSVLFLYPSGYIREDPLGVPNNLSPMCSKSLSGGACADGLWDRIQHQGWNRGGEIMVQNTRNSSGCEAVFYPCW

SEQ ID NO: 17096 - DNA, 1563 bp, Triticum aestivum
  misc_feature (1)..(1563): Ceres Seq. ID no. 15179860
acagatttcctcccaccttccttttccctccccccctctccggccggcgaagaatctcaccgccgccgccccctcctcgccggcccgccatggcgctgtaccgccgcgcggcctccgcgatccggcggcgcggggccctgcccctgctcccggcgcgggcgatggcgtcgctcttcggccacgtcgagccggcgcccaaggaccccatcctcggcgtcaccgaggccttcctcgccgacccctcccccgacaaagtcaacgtcggcgtcggcgcctaccgggacgacaacggcaagcccgtggtgctcgactgcgtgcgcgaggcggagcgccggatcgccggcaacctcaacatggagtaccttccaatgggagggagtatgcacatgattgaggagtcactaaagctggcgtacggcgaggactccgagttcatcaaagataaaagaattgcagcggtgcaggcactttcaggaactggcgcatgccgtctcttcgctgatttccagaagcgtttcttgccggattcgcagatctacatacctacaccaacgtggtccaaccatcataatatttggagggatgctcaagtgccacagaggacattctcatattaccatccggaatcgagagggcttgactttgcaggattgatggatgatatcaagaatgctccaaatggttcgttctttttgcttcatgcatgtgcccataatcctactggagtagatcctactgaggaacaatggcgagaaatatcctatcagttcaagttgaagaatcatttcccattttttgacatggcataccaaggatttgctagcggtgatccagagagagatgccaaggcaatccgtatattccttgaagatggacaccaaattggatgtgctcagtcatatgcaaagaacatgggtctttatggccagagagcgggatgtctgagtatcctctgcgaggatgagatgcaagcagttgctgttaagagccaattgcaacagattgcgagaccaatgtacagcaacccacctgttcatggtgcgctggttgtttcaattatccttagtgatccagaattgaagaatgtatggttgggagaggtcaagggtatggctgatcgtatcattggaatgcggaaggcacttagggagaatcttgaaaagttaggttcaccttcatcatgggagcatgtcaccaatcagattggaatgttttgctacagtggaatgacaccggaacaagttgaccgcttgactagtgaataccatatctacatgacacgcaacgggagaataagcatggccggcgtaacgacgggcaacgtcgcctacttggctaacgccattcatgatgttaccaagtgaaattgaggaccatcttcagcgaatggagggagagcgttttccctttgtttgtagggctattcgctttatactctcacatgctagagaaataaataagttctaggaagtaaacctgttgcggctgtccaacaacggaaaattctacctgtatgtatggaggagcagagacgtcctgacttattttttgcgagattatcct

SEQ ID NO: 17097 - protein, 453 aa, Triticum aestivum
  peptide (1)..(453): Ceres Seq. ID no. 15179861
  misc_feature (135)..(452): Pfam Name: Pfam Description:  Aminotransferase class I and II
  misc_feature (30)..(453): NCBI GI NO: 100728 NR Description: aspartate transaminase (EC 2
  misc_feature (30)..(453): NCBI GI NO: 100726 NR Description: aspartate transaminase (EC 2
  misc_feature (30)..(453): NCBI GI NO: 2130067 NR Description: aspartate transaminase (EC 2
  misc_feature (30)..(453): NCBI GI NO: 15224592 NR Description: aspartate aminotransferase, mitochondrial
  misc_feature (30)..(453): NCBI GI NO: 1362046 NR Description: aspartate transaminase (EC 2
  misc_feature (51)..(453): NCBI GI NO: 6980972 NR Description: glutamate oxaloacetate transaminase 2
  misc_feature (51)..(453): NCBI GI NO: 2690302 NR Description: aspartate aminotransferase precursor
  misc_feature (51)..(453): NCBI GI NO: 27807377 NR Description: glutamic-oxaloacetic transaminase 2, mitochondrial
  misc_feature (51)..(453): NCBI GI NO: 6754036 NR Description: glutamate oxaloacetate transaminase 2
  misc_feature (56)..(453): NCBI GI NO: 39585804 NR Description: Hypothetical protein CBG05011
RFPPTFLFPPPLSGRRRISPPPPPPRRPAMALYRRAASAIRRRGALPLLPARAMASLFGHVEPAPKDPILGVTEAFLADPSPDKVNVGVGAYRDDNGKPVVLDCVREAERRIAGNLNMEYLPMGGSMHMIEESLKLAYGEDSEFIKDKRIAAVQALSGTGACRLFADFQKRFLPDSQIYIPTPTWSNHHNIWRDAQVPQRTFSYYHPESRGLDFAGLMDDIKNAPNGSFFLLHACAHNPTGVDPTEEQWREISYQFKLKNHFPFFDMAYQGFASGDPERDAKAIRIFLEDGHQIGCAQSYAKNMGLYGQRAGCLSILCEDEMQAVAVKSQLQQIARPMYSNPPVHGALVVSIILSDPELKNVWLGEVKGMADRIIGMRKALRENLEKLGSPSSWEHVTNQIGMFCYSGMTPEQVDRLTSEYHIYMTRNGRISMAGVTTGNVAYLANAIHDVTK

SEQ ID NO: 17098 - protein, 424 aa, Triticum aestivum
  peptide (1)..(424): Ceres Seq. ID no. 15179862
  misc_feature (106)..(423): Pfam Name: Pfam Description:  Aminotransferase class I and II
  misc_feature (1)..(424): NCBI GI NO: 100728 NR Description: aspartate transaminase (EC 2
  misc_feature (1)..(424): NCBI GI NO: 100726 NR Description: aspartate transaminase (EC 2
  misc_feature (1)..(424): NCBI GI NO: 2130067 NR Description: aspartate transaminase (EC 2
  misc_feature (1)..(424): NCBI GI NO: 15224592 NR Description: aspartate aminotransferase, mitochondrial
  misc_feature (1)..(424): NCBI GI NO: 1362046 NR Description: aspartate transaminase (EC 2
  misc_feature (22)..(424): NCBI GI NO: 6980972 NR Description: glutamate oxaloacetate transaminase 2
  misc_feature (22)..(424): NCBI GI NO: 2690302 NR Description: aspartate aminotransferase precursor
  misc_feature (22)..(424): NCBI GI NO: 27807377 NR Description: glutamic-oxaloacetic transaminase 2, mitochondrial
  misc_feature (22)..(424): NCBI GI NO: 6754036 NR Description: glutamate oxaloacetate transaminase 2
  misc_feature (27)..(424): NCBI GI NO: 39585804 NR Description: Hypothetical protein CBG05011
MALYRRAASAIRRRGALPLLPARAMASLFGHVEPAPKDPILGVTEAFLADPSPDKVNVGVGAYRDDNGKPVVLDCVREAERRIAGNLNMEYLPMGGSMHMIEESLKLAYGEDSEFIKDKRIAAVQALSGTGACRLFADFQKRFLPDSQIYIPTPTWSNHHNIWRDAQVPQRTFSYYHPESRGLDFAGLMDDIKNAPNGSFFLLHACAHNPTGVDPTEEQWREISYQFKLKNHFPFFDMAYQGFASGDPERDAKAIRIFLEDGHQIGCAQSYAKNMGLYGQRAGCLSILCEDEMQAVAVKSQLQQIARPMYSNPPVHGALVVSIILSDPELKNVWLGEVKGMADRIIGMRKALRENLEKLGSPSSWEHVTNQIGMFCYSGMTPEQVDRLTSEYHIYMTRNGRISMAGVTTGNVAYLANAIHDVTK

SEQ ID NO: 17099 - protein, 400 aa, Triticum aestivum
  peptide (1)..(400): Ceres Seq. ID no. 15179863
  misc_feature (82)..(399): Pfam Name: Pfam Description:  Aminotransferase class I and II
  misc_feature (1)..(400): NCBI GI NO: 100728 NR Description: aspartate transaminase (EC 2
  misc_feature (1)..(400): NCBI GI NO: 100726 NR Description: aspartate transaminase (EC 2
  misc_feature (1)..(400): NCBI GI NO: 2130067 NR Description: aspartate transaminase (EC 2
  misc_feature (1)..(400): NCBI GI NO: 15224592 NR Description: aspartate aminotransferase, mitochondrial
  misc_feature (1)..(400): NCBI GI NO: 1362046 NR Description: aspartate transaminase (EC 2
  misc_feature (1)..(400): NCBI GI NO: 6980972 NR Description: glutamate oxaloacetate transaminase 2
  misc_feature (1)..(400): NCBI GI NO: 2690302 NR Description: aspartate aminotransferase precursor
  misc_feature (1)..(400): NCBI GI NO: 6754036 NR Description: glutamate oxaloacetate transaminase 2
  misc_feature (1)..(400): NCBI GI NO: 27807377 NR Description: glutamic-oxaloacetic transaminase 2, mitochondrial
  misc_feature (3)..(400): NCBI GI NO: 39585804 NR Description: Hypothetical protein CBG05011
MASLFGHVEPAPKDPILGVTEAFLADPSPDKVNVGVGAYRDDNGKPVVLDCVREAERRIAGNLNMEYLPMGGSMHMIEESLKLAYGEDSEFIKDKRIAAVQALSGTGACRLFADFQKRFLPDSQIYIPTPTWSNHHNIWRDAQVPQRTFSYYHPESRGLDFAGLMDDIKNAPNGSFFLLHACAHNPTGVDPTEEQWREISYQFKLKNHFPFFDMAYQGFASGDPERDAKAIRIFLEDGHQIGCAQSYAKNMGLYGQRAGCLSILCEDEMQAVAVKSQLQQIARPMYSNPPVHGALVVSIILSDPELKNVWLGEVKGMADRIIGMRKALRENLEKLGSPSSWEHVTNQIGMFCYSGMTPEQVDRLTSEYHIYMTRNGRISMAGVTTGNVAYLANAIHDVTK

SEQ ID NO: 17100 - DNA, 991 bp, Triticum aestivum
  misc_feature (1)..(991): Ceres Seq. ID no. 12620986
cctccctcccctttctcctccccctgcccccgaggaaagaaagaaagaagaacagagtccacacggcagaggccagcggcggagaagcgggatgccgatcctgtacgcggtggtggcgcggggcgcgacggtgctggcggagcacagcgcggcggcgaccaacgcgggcgccgtcgcgcgccaggtcctcgagcgcctccccggcggcggcgccgacagccacgtctcctacacccaggaccgctacgtcttccacgccaagcgcaccgacggcatcaccgccctctgcatggccgacgacgccgccggacggcgtatcccatttgctttcctcgaggatatccatggaaagtttgttaagacatatggccgtgctgcactgacagctcttgcttatgcaatgaacgacgaattctcaagggttctcagtcagcaaatggactactattcaaatgaccctagtgcagatcaaatcaacctaatgaggggcgaaatcagtcaggttaggagtgttatgattgataatattgataaagtccttgaaagaggtgaccgtttagacctattggtggacaagactacaactatgcaaggaaatacggttcgattcaaaagacaagctcgccgctacagaagcacaacttggtggagaaatgtcaaactcacggccgcgttgatactcctcctgcttgtaatagtatacatcgccctcttcttcgtgtgccacggcttcaccttgccgacttgcatcaggtgaggggggccaggggcatataaattcgcctcgtggtgtgcttgtgtccatggcttgcctgtctcccagcccaggagagcgaccgttgcagcaccagtgcaaccagtcgcattgcaaaattattttttgtgtgtagagaggaaggggagggacctgagcctgctatttattctgtaattgtgacgccttggattgtgaagactccttttggaacgtaatcgagtgccttgctcattc

SEQ ID NO: 17101 - protein, 251 aa, Triticum aestivum
  peptide (1)..(251): Ceres Seq. ID no. 12620987
  misc_feature (154)..(242): Pfam Name: Pfam Description:  Synaptobrevin
  misc_feature (31)..(251): NCBI GI NO: 34898442 NR Description: ESTs AU082579
  misc_feature (31)..(250): NCBI GI NO: 15236687 NR Description: synaptobrevin-like protein; protein id:At4g32150
  misc_feature (31)..(251): NCBI GI NO: 15238971 NR Description: putative protein; protein id: At5g11150
  misc_feature (31)..(250): NCBI GI NO: 15224711 NR Description: putative synaptobrevin; protein id: At2g25340.1
  misc_feature (31)..(249): NCBI GI NO: 15242224 NR Description: synaptobrevin-like protein; protein id: At5g22360
  misc_feature (31)..(249): NCBI GI NO: 37531190 NR Description: putative synaptobrevin-like protein
  misc_feature (31)..(244): NCBI GI NO: 28828593 NR Description: similar to Arabidopsis thaliana (Mouse-ear cress)
  misc_feature (31)..(251): NCBI GI NO: 16758296 NR Description: synaptobrevin-like 1 [Rattus norvegicus]
  misc_feature (31)..(251): NCBI GI NO: 33468929 NR Description: synaptobrevin like 1 [Mus musculus]
  misc_feature (31)..(251): NCBI GI NO: 5032137 NR Description: synaptobrevin-like 1 [Homo sapiens]
LPPLSPPPAPEERKKEEQSPHGRGQRRRSGMPILYAVVARGATVLAEHSAAATNAGAVARQVLERLPGGGADSHVSYTQDRYVFHAKRTDGITALCMADDAAGRRIPFAFLEDIHGKFVKTYGRAALTALAYAMNDEFSRVLSQQMDYYSNDPSADQINLMRGEISQVRSVMIDNIDKVLERGDRLDLLVDKTTTMQGNTVRFKRQARRYRSTTWWRNVKLTAALILLLLVIVYIALFFVCHGFTLPTCIR

SEQ ID NO: 17102 - protein, 221 aa, Triticum aestivum
  peptide (1)..(221): Ceres Seq. ID no. 12620988
  misc_feature (124)..(212): Pfam Name: Pfam Description:  Synaptobrevin
  misc_feature (1)..(221): NCBI GI NO: 34898442 NR Description: ESTs AU082579
  misc_feature (1)..(220): NCBI GI NO: 15236687 NR Description: synaptobrevin-like protein; protein id:At4g32150
  misc_feature (1)..(221): NCBI GI NO: 15238971 NR Description: putative protein; protein id: At5g11150
  misc_feature (1)..(220): NCBI GI NO: 15224711 NR Description: putative synaptobrevin; protein id: At2g25340.1
  misc_feature (1)..(219): NCBI GI NO: 15242224 NR Description: synaptobrevin-like protein; protein id: At5g22360
  misc_feature (1)..(219): NCBI GI NO: 37531190 NR Description: putative synaptobrevin-like protein
  misc_feature (1)..(214): NCBI GI NO: 28828593 NR Description: similar to Arabidopsis thaliana (Mouse-ear cress)
  misc_feature (1)..(221): NCBI GI NO: 16758296 NR Description: synaptobrevin-like 1 [Rattus norvegicus]
  misc_feature (1)..(221): NCBI GI NO: 33468929 NR Description: synaptobrevin like 1 [Mus musculus]
  misc_feature (1)..(221): NCBI GI NO: 5032137 NR Description: synaptobrevin-like 1 [Homo sapiens]
MPILYAVVARGATVLAEHSAAATNAGAVARQVLERLPGGGADSHVSYTQDRYVFHAKRTDGITALCMADDAAGRRIPFAFLEDIHGKFVKTYGRAALTALAYAMNDEFSRVLSQQMDYYSNDPSADQINLMRGEISQVRSVMIDNIDKVLERGDRLDLLVDKTTTMQGNTVRFKRQARRYRSTTWWRNVKLTAALILLLLVIVYIALFFVCHGFTLPTCIR

SEQ ID NO: 17103 - protein, 155 aa, Triticum aestivum
  peptide (1)..(155): Ceres Seq. ID no. 12620989
  misc_feature (58)..(146): Pfam Name: Pfam Description:  Synaptobrevin
  misc_feature (1)..(155): NCBI GI NO: 34898442 NR Description: ESTs AU082579
  misc_feature (1)..(154): NCBI GI NO: 15236687 NR Description: synaptobrevin-like protein; protein id:At4g32150
  misc_feature (1)..(155): NCBI GI NO: 15238971 NR Description: putative protein; protein id: At5g11150
  misc_feature (1)..(154): NCBI GI NO: 15224711 NR Description: putative synaptobrevin; protein id: At2g25340.1
  misc_feature (1)..(153): NCBI GI NO: 15242224 NR Description: synaptobrevin-like protein; protein id: At5g22360
  misc_feature (1)..(153): NCBI GI NO: 37531190 NR Description: putative synaptobrevin-like protein
  misc_feature (1)..(148): NCBI GI NO: 28828593 NR Description: similar to Arabidopsis thaliana (Mouse-ear cress)
  misc_feature (1)..(155): NCBI GI NO: 16758296 NR Description: synaptobrevin-like 1 [Rattus norvegicus]
  misc_feature (1)..(155): NCBI GI NO: 33468929 NR Description: synaptobrevin like 1 [Mus musculus]
  misc_feature (1)..(155): NCBI GI NO: 5032137 NR Description: synaptobrevin-like 1 [Homo sapiens]
MADDAAGRRIPFAFLEDIHGKFVKTYGRAALTALAYAMNDEFSRVLSQQMDYYSNDPSADQINLMRGEISQVRSVMIDNIDKVLERGDRLDLLVDKTTTMQGNTVRFKRQARRYRSTTWWRNVKLTAALILLLLVIVYIALFFVCHGFTLPTCIR

SEQ ID NO: 17104 - DNA, 837 bp, Triticum aestivum
  misc_feature (1)..(837): Ceres Seq. ID no. 12621257
cattgccctccacgagccacaggttgacgctggcccggattctgttcggtggcgcctagagccgtcgggacaattctccaccaagttcctctaccgggctatcgccccctcctccgccccacctcccctcacggcggtttggcatgtccgccttcccctgaagatctgaatcttcatgtggcaatggatccgcggacggattccgtctggcgtagaggtccgcaagcgcaatggccccggtaccggcctttacccgctttgtggcgtccctgaagactcgaatcacatcttcttcacttgcttttccgcccaatttctttggggctgttttcgtgaggtggttggtggcaactggtgccacaccaatttccccgacatgttcgctgaactccaggcctcctccccgcattctcgccacattaggtggttggagattgggactcttgcttggaccctctggacgatccgcaatagatttgtgatctagcgcattccgcttcagcgtgctactgacgctctcttcaaactgtctggttacttgcagctctggcagccgcttagccgccccaggatcgggacgccatctctgccttcatcgccgacctccgctcgatggtcgtccacttatcgccgccgctccctccgccacctcccgagccggattaggggtcgggtccctccccggccccattttgtgtttattttgggcttgttgaggtgtgccctcagcaaaaccttttgtactctgtcttgtgagacttgtgtgtgtgtggtgtgaaccttcttgtgtactggtgctatgtggcggtttgctttatttataaagcagggcgaaag

SEQ ID NO: 17105 - protein, 103 aa, Triticum aestivum
  peptide (1)..(103): Ceres Seq. ID no. 12621258
  misc_feature (1)..(103): NCBI GI NO: 8096424 NR Description: Similar to Arabidopsis thaliana chromosome2 BACF13B15
  misc_feature (1)..(102): NCBI GI NO: 37531298 NR Description: putative retroelement
  misc_feature (1)..(103): NCBI GI NO: 34904884 NR Description: similar to reverse transcriptase
  misc_feature (1)..(103): NCBI GI NO: 39546220 NR Description: OSJNBa0029L02.10
  misc_feature (1)..(29): NCBI GI NO: 27573364 NR Description: hypothetical protein
MWQWIRGRIPSGVEVRKRNGPGTGLYPLCGVPEDSNHIFFTCFSAQFLWGCFREVVGGNWCHTNFPDMFAELQASSPHSRHIRWLEIGTLAWTLWTIRNRFVI

SEQ ID NO: 17106 - protein, 83 aa, Triticum aestivum
  peptide (1)..(83): Ceres Seq. ID no. 12621259
MAPVPAFTRFVASLKTRITSSSLAFPPNFFGAVFVRWLVATGATPISPTCSLNSRPPPRILATLGGWRLGLLLGPSGRSAIDL

SEQ ID NO: 17107 - protein, 55 aa, Triticum aestivum
  peptide (1)..(55): Ceres Seq. ID no. 12621260
  misc_feature (3)..(55): NCBI GI NO: 8096424 NR Description: Similar to Arabidopsis thaliana chromosome2 BACF13B15
  misc_feature (13)..(55): NCBI GI NO: 37531298 NR Description: putative retroelement
  misc_feature (7)..(55): NCBI GI NO: 34904884 NR Description: similar to reverse transcriptase
  misc_feature (9)..(55): NCBI GI NO: 39546220 NR Description: OSJNBa0029L02.10
  misc_feature (7)..(55): NCBI GI NO: 27573364 NR Description: hypothetical protein
IALHEPQVDAGPDSVRWRLEPSGQFSTKFLYRAIAPSSAPPPLTAVWHVRLPLKI

SEQ ID NO: 17108 - DNA, 1881 bp, Triticum aestivum
  misc_feature (1)..(1881): Ceres Seq. ID no. 15176077
accattcgaaagatccaccgaagatttttctcctcactctcctcgacctcacagctctcctctgccagcagcgcagatttatagacacaagctagcacacagcaagctcagagcacctcgctggtctaagtgatccttctcaaggatcatttggatggcctcttcctcctcctcctgtgcatcctcatttctgcggccatcgtgtcctacgcccaccacgtaatccggcggcaacgccagggctgcgctcatggccgccatgagcaagccgccctcaagctgccccctggctccatgggcctgccttacatcggcgagaccctccagctctactcccaggaccccagcgtcttcctctcctccaagcagaagcggtacggcgagatcttcaagacgcacctcctcggctgcccgtgcgtgatgctggcgagcccggaggcggcgcggttcgtgctggtgtcgcgggcaaacctgttcaagccgacgtacccgcggagcaaggagcgcctcatcggcccgtcggcgctcttcttccaccagggcgactaccacctccgtctccgcaggctcgtccagggcccgctcggccccgaggccctgcgcaagctcgtgccggacatcgaggccgccgtgcgggcaaccctcgcggcctgggcggacggcgacgtcgccagcaccttccacgccatgaagaggctctcgttcgacgtcggcatcgtgacgatcttcggcgggcggctggacgagcggcggaaggaggagctccggcggaactacgccgtcgtggagaaaggctacaactccttccccaacagcttccccgggacgctatactacaaggcgatccaggcgaggcggcggctgaacggcgtgctgagcgacatcctgcacgagaggagggagcggggcgagcccggcgacgacctgctcggctgcctcatgcggtcgcgggccggcggcgacgacggcgacgagggcgcgctgttgacggacgagcaggtcgccgacaacgtcatcggcgtgctgttcgcggcgcaggacacgacggccagcgtgctcacctggatcgtcaagtacctccacgaccggccgaagctgctggaggccgtgagggcggagcacgccgcgatccacgaggccaacgacggcgggaggcggccgctgacatgggcgcagacgaggagcatgacgctgacgcacagggtgattttggagagcctgaggatggcgagcatcatctccttcacgttcagggaggccgtggccgacgtggagtacaaagggtttcttatccccaaggggtggaaggtgatgccgctcttcaggaacatccatcacagcccggactacttccaggatccacagaagttcgacccttcgagattcaaggtggcgccgcggccgagcaccttcacgccgttcgggagcggggtgcacgcgtgccccgggaacgagctggccaagctcgagatgctggtgctcatccaccacctggtcaccggctacaggtgggaggttgttggatcgagcgacgacgtcgagtacagcccattccctgttccccagaacggcctgctcgccaggttacggcgggatgacagcgtctgcgtgggtaggaaggggtgcccgactgatgacaactacgacgacgaagacgaagtgatagtgtgattagtcaacgtagatagctagagggctcttctctccctttttgttgttattgttgttgttgttgttgtggcattcttctctaggaaaatcattagagaagaaacaacagaacgactttttaggatgacgatgatcatgtaccgtagtggttatgttgtcaatgatgtattgtcattgatacacgcataaaatgacgcttcctttttccgg

SEQ ID NO: 17109 - protein, 458 aa, Triticum aestivum
  peptide (1)..(458): Ceres Seq. ID no. 15176078
  misc_feature (1)..(429): Pfam Name: Pfam Description:  Cytochrome P450
  misc_feature (1)..(433): NCBI GI NO: 18402179 NR Description: cytochrome P450, putative [Arabidopsis thaliana]
  misc_feature (1)..(406): NCBI GI NO: 9294629 NR Description: cytochrome P450 [Arabidopsis thaliana]
  misc_feature (1)..(437): NCBI GI NO: 18415271 NR Description: cytochrome P450 family [Arabidopsis thaliana]
  misc_feature (1)..(433): NCBI GI NO: 30694740 NR Description: cytochrome P450 family [Arabidopsis thaliana]
  misc_feature (1)..(431): NCBI GI NO: 15227033 NR Description: cytochrome p450 family [Arabidopsis thaliana]
  misc_feature (1)..(405): NCBI GI NO: 7430728 NR Description: cytochrome P450 - Arabidopsis thaliana
  misc_feature (1)..(420): NCBI GI NO: 30694744 NR Description: cytochrome P450 family [Arabidopsis thaliana]
  misc_feature (1)..(419): NCBI GI NO: 15239203 NR Description: cytochrome p450 90A1 [Arabidopsis thaliana]
  misc_feature (1)..(433): NCBI GI NO: 13022042 NR Description: ent-kaurenoic acid oxidase [Hordeum vulgare]
  misc_feature (1)..(419): NCBI GI NO: 9587211 NR Description: cytochrome P450 [Vigna radiata]
MGLPYIGETLQLYSQDPSVFLSSKQKRYGEIFKTHLLGCPCVMLASPEAARFVLVSRANLFKPTYPRSKERLIGPSALFFHQGDYHLRLRRLVQGPLGPEALRKLVPDIEAAVRATLAAWADGDVASTFHAMKRLSFDVGIVTIFGGRLDERRKEELRRNYAVVEKGYNSFPNSFPGTLYYKAIQARRRLNGVLSDILHERRERGEPGDDLLGCLMRSRAGGDDGDEGALLTDEQVADNVIGVLFAAQDTTASVLTWIVKYLHDRPKLLEAVRAEHAAIHEANDGGRRPLTWAQTRSMTLTHRVILESLRMASIISFTFREAVADVEYKGFLIPKGWKVMPLFRNIHHSPDYFQDPQKFDPSRFKVAPRPSTFTPFGSGVHACPGNELAKLEMLVLIHHLVTGYRWEVVGSSDDVEYSPFPVPQNGLLARLRRDDSVCVGRKGCPTDDNYDDEDEVIV

SEQ ID NO: 17110 - protein, 416 aa, Triticum aestivum
  peptide (1)..(416): Ceres Seq. ID no. 15176079
  misc_feature (1)..(387): Pfam Name: Pfam Description:  Cytochrome P450
  misc_feature (1)..(391): NCBI GI NO: 18402179 NR Description: cytochrome P450, putative [Arabidopsis thaliana]
  misc_feature (1)..(364): NCBI GI NO: 9294629 NR Description: cytochrome P450 [Arabidopsis thaliana]
  misc_feature (1)..(395): NCBI GI NO: 18415271 NR Description: cytochrome P450 family [Arabidopsis thaliana]
  misc_feature (1)..(391): NCBI GI NO: 30694740 NR Description: cytochrome P450 family [Arabidopsis thaliana]
  misc_feature (1)..(389): NCBI GI NO: 15227033 NR Description: cytochrome p450 family [Arabidopsis thaliana]
  misc_feature (1)..(363): NCBI GI NO: 7430728 NR Description: cytochrome P450 - Arabidopsis thaliana
  misc_feature (1)..(378): NCBI GI NO: 30694744 NR Description: cytochrome P450 family [Arabidopsis thaliana]
  misc_feature (1)..(377): NCBI GI NO: 15239203 NR Description: cytochrome p450 90A1 [Arabidopsis thaliana]
  misc_feature (1)..(391): NCBI GI NO: 13022042 NR Description: ent-kaurenoic acid oxidase [Hordeum vulgare]
  misc_feature (1)..(377): NCBI GI NO: 9587211 NR Description: cytochrome P450 [Vigna radiata]
MLASPEAARFVLVSRANLFKPTYPRSKERLIGPSALFFHQGDYHLRLRRLVQGPLGPEALRKLVPDIEAAVRATLAAWADGDVASTFHAMKRLSFDVGIVTIFGGRLDERRKEELRRNYAVVEKGYNSFPNSFPGTLYYKAIQARRRLNGVLSDILHERRERGEPGDDLLGCLMRSRAGGDDGDEGALLTDEQVADNVIGVLFAAQDTTASVLTWIVKYLHDRPKLLEAVRAEHAAIHEANDGGRRPLTWAQTRSMTLTHRVILESLRMASIISFTFREAVADVEYKGFLIPKGWKVMPLFRNIHHSPDYFQDPQKFDPSRFKVAPRPSTFTPFGSGVHACPGNELAKLEMLVLIHHLVTGYRWEVVGSSDDVEYSPFPVPQNGLLARLRRDDSVCVGRKGCPTDDNYDDEDEVIV

SEQ ID NO: 17111 - protein, 327 aa, Triticum aestivum
  peptide (1)..(327): Ceres Seq. ID no. 15176080
  misc_feature (1)..(298): Pfam Name: Pfam Description:  Cytochrome P450
  misc_feature (1)..(302): NCBI GI NO: 18402179 NR Description: cytochrome P450, putative [Arabidopsis thaliana]
  misc_feature (1)..(275): NCBI GI NO: 9294629 NR Description: cytochrome P450 [Arabidopsis thaliana]
  misc_feature (1)..(306): NCBI GI NO: 18415271 NR Description: cytochrome P450 family [Arabidopsis thaliana]
  misc_feature (1)..(302): NCBI GI NO: 30694740 NR Description: cytochrome P450 family [Arabidopsis thaliana]
  misc_feature (1)..(300): NCBI GI NO: 15227033 NR Description: cytochrome p450 family [Arabidopsis thaliana]
  misc_feature (1)..(274): NCBI GI NO: 7430728 NR Description: cytochrome P450 - Arabidopsis thaliana
  misc_feature (1)..(289): NCBI GI NO: 30694744 NR Description: cytochrome P450 family [Arabidopsis thaliana]
  misc_feature (1)..(288): NCBI GI NO: 15239203 NR Description: cytochrome p450 90A1 [Arabidopsis thaliana]
  misc_feature (1)..(302): NCBI GI NO: 13022042 NR Description: ent-kaurenoic acid oxidase [Hordeum vulgare]
  misc_feature (1)..(288): NCBI GI NO: 9587211 NR Description: cytochrome P450 [Vigna radiata]
MKRLSFDVGIVTIFGGRLDERRKEELRRNYAVVEKGYNSFPNSFPGTLYYKAIQARRRLNGVLSDILHERRERGEPGDDLLGCLMRSRAGGDDGDEGALLTDEQVADNVIGVLFAAQDTTASVLTWIVKYLHDRPKLLEAVRAEHAAIHEANDGGRRPLTWAQTRSMTLTHRVILESLRMASIISFTFREAVADVEYKGFLIPKGWKVMPLFRNIHHSPDYFQDPQKFDPSRFKVAPRPSTFTPFGSGVHACPGNELAKLEMLVLIHHLVTGYRWEVVGSSDDVEYSPFPVPQNGLLARLRRDDSVCVGRKGCPTDDNYDDEDEVIV

SEQ ID NO: 17112 - DNA, 1667 bp, Triticum aestivum
  misc_feature (1)..(1667): Ceres Seq. ID no. 13658768
  misc_feature (1605)..(1605): n is a, c, t, g, unknown, or other
ccatatccccaaaccgaatccttcgctcccagatcaagaaagaatccttcgccccccaaagagctttttacgcgtctccgccaacgccgcagccgacgaaaccctagcatcgcgatgttgtcgtcgaaggagcccctgggtcctggacatgcctttcccggcgactgctatcccagccatctgcccagcttcgaaatccccacagatctttttggtccctttccccggcatgttcatgagactcgcgaggaggcccccatcgatgtgtttagattcgaaatcgccccagatctattcggttctacccaccatcgtctccttgatgcgttcgaggaggaggaggaggaggaggtggtggtggtgttggcggagaagaaagagagagggttcctcgagagcgaatcagagtctgaatctgagttgcctagctgggacgacattctcgtgggcgctggtgttgaacctgttgatggcgtcaacttgtccgacttgatggattacgatccgctggcagtggatgccgacaacgaggagacaaactgcccagggaagaaatttcccgaggcaacagcagcgaaagtagacgatatatggagtaggatttacaccagacgcaacatcgagtaccagaagaagtgtgaggagattgaagcaagtgaagatgagaatgccacatttccttcttatcctctcaaaatactccctgaggcaacaggtctatgtgtcttgaggggcttttgccaccaccgtgaatataaaacccatgatacttccactactagatcaagtcttgggctacgtgatccaagactgatgctacagatctttgcgatgcatttatcaatctccgaatcctattcctaccccgttagcgtctatggaattgttgctgttcgggatgccttggagccactacggaatcttgtgtttaaccgtccctgcagagatgatgcttttacggttgaccaggattccttaaccttgcctctttgtagtcctcgtcgaggaatgtatatagtaagggacagagcattactagaagttgatctttgggtaaaggaggaaggagatgggtcatctgacaaacagttgctttctttgtatgctgagtttgaggggatgtacgagttagatgaaatgctagatggagaggttagtagtgaccttggcagcttggtcattgactatctcttgcttgatgagagtgttgaggctgtaatacaagtctctgcaaagattgactgccctcatcatatgagattcactgcattcactagtggctttgatggtgagattgtgctgtttgatgataagttctctgggaatggaaaactgttccagtatgttgtcgcggtgaaggctgaggggaaattggatatttgcttaaaaatggaggaatcattgttttggtggactttccaggaaggagctgttggagctgttaggttccctgatgactcagttttaaattacgggcagtttgaggtgacggtgctttttgctcctaagaaatttaccatggatgactgaaacctgatctgtaatatcggtgtttttttatcttctatacttcctctgtaacttaatatacattgatcattactnccaaaaaaaaaaaaaaaaaagcttatcgataccgtcsacctcccragggggrgrrcccggst

SEQ ID NO: 17113 - protein, 509 aa, Triticum aestivum
  peptide (1)..(509): Ceres Seq. ID no. 15219916
  misc_feature (330)..(488): NCBI GI NO: 34912244 NR Description: P0710A02.2
  misc_feature (198)..(323): NCBI GI NO: 34912244 NR Description: P0710A02.2
  misc_feature (176)..(323): NCBI GI NO: 34912236 NR Description: P0415C01.20
  misc_feature (395)..(478): NCBI GI NO: 34912236 NR Description: P0415C01.20
  misc_feature (176)..(323): NCBI GI NO: 34912232 NR Description: P0415C01.18
  misc_feature (266)..(460): NCBI GI NO: 20303623 NR Description: hypothetical protein
  misc_feature (272)..(475): NCBI GI NO: 33146497 NR Description: unknown protein
  misc_feature (272)..(464): NCBI GI NO: 34395317 NR Description: unknown protein
  misc_feature (272)..(464): NCBI GI NO: 38347098 NR Description: OSJNBa0006M15.13
  misc_feature (272)..(409): NCBI GI NO: 5257262 NR Description: hypothetical protein
PYPQTESFAPRSRKNPSPPKELFTRLRQRRSRRNPSIAMLSSKEPLGPGHAFPGDCYPSHLPSFEIPTDLFGPFPRHVHETREEAPIDVFRFEIAPDLFGSTHHRLLDAFEEEEEEEVVVVLAEKKERGFLESESESESELPSWDDILVGAGVEPVDGVNLSDLMDYDPLAVDADNEETNCPGKKFPEATAAKVDDIWSRIYTRRNIEYQKKCEEIEASEDENATFPSYPLKILPEATGLCVLRGFCHHREYKTHDTSTTRSSLGLRDPRLMLQIFAMHLSISESYSYPVSVYGIVAVRDALEPLRNLVFNRPCRDDAFTVDQDSLTLPLCSPRRGMYIVRDRALLEVDLWVKEEGDGSSDKQLLSLYAEFEGMYELDEMLDGEVSSDLGSLVIDYLLLDESVEAVIQVSAKIDCPHHMRFTAFTSGFDGEIVLFDDKFSGNGKLFQYVVAVKAEGKLDICLKMEESLFWWTFQEGAVGAVRFPDDSVLNYGQFEVTVLFAPKKFTMDD

SEQ ID NO: 17114 - protein, 471 aa, Triticum aestivum
  peptide (1)..(471): Ceres Seq. ID no. 15219917
  misc_feature (292)..(450): NCBI GI NO: 34912244 NR Description: P0710A02.2
  misc_feature (160)..(285): NCBI GI NO: 34912244 NR Description: P0710A02.2
  misc_feature (138)..(285): NCBI GI NO: 34912236 NR Description: P0415C01.20
  misc_feature (357)..(440): NCBI GI NO: 34912236 NR Description: P0415C01.20
  misc_feature (138)..(285): NCBI GI NO: 34912232 NR Description: P0415C01.18
  misc_feature (228)..(422): NCBI GI NO: 20303623 NR Description: hypothetical protein
  misc_feature (234)..(437): NCBI GI NO: 33146497 NR Description: unknown protein
  misc_feature (234)..(426): NCBI GI NO: 34395317 NR Description: unknown protein
  misc_feature (234)..(426): NCBI GI NO: 38347098 NR Description: OSJNBa0006M15.13
  misc_feature (234)..(371): NCBI GI NO: 5257262 NR Description: hypothetical protein
MLSSKEPLGPGHAFPGDCYPSHLPSFEIPTDLFGPFPRHVHETREEAPIDVFRFEIAPDLFGSTHHRLLDAFEEEEEEEVVVVLAEKKERGFLESESESESELPSWDDILVGAGVEPVDGVNLSDLMDYDPLAVDADNEETNCPGKKFPEATAAKVDDIWSRIYTRRNIEYQKKCEEIEASEDENATFPSYPLKILPEATGLCVLRGFCHHREYKTHDTSTTRSSLGLRDPRLMLQIFAMHLSISESYSYPVSVYGIVAVRDALEPLRNLVFNRPCRDDAFTVDQDSLTLPLCSPRRGMYIVRDRALLEVDLWVKEEGDGSSDKQLLSLYAEFEGMYELDEMLDGEVSSDLGSLVIDYLLLDESVEAVIQVSAKIDCPHHMRFTAFTSGFDGEIVLFDDKFSGNGKLFQYVVAVKAEGKLDICLKMEESLFWWTFQEGAVGAVRFPDDSVLNYGQFEVTVLFAPKKFTMDD

SEQ ID NO: 17115 - protein, 345 aa, Triticum aestivum
  peptide (1)..(345): Ceres Seq. ID no. 15219918
  misc_feature (166)..(324): NCBI GI NO: 34912244 NR Description: P0710A02.2
  misc_feature (34)..(159): NCBI GI NO: 34912244 NR Description: P0710A02.2
  misc_feature (12)..(159): NCBI GI NO: 34912236 NR Description: P0415C01.20
  misc_feature (231)..(314): NCBI GI NO: 34912236 NR Description: P0415C01.20
  misc_feature (12)..(159): NCBI GI NO: 34912232 NR Description: P0415C01.18
  misc_feature (102)..(296): NCBI GI NO: 20303623 NR Description: hypothetical protein
  misc_feature (108)..(311): NCBI GI NO: 33146497 NR Description: unknown protein
  misc_feature (108)..(300): NCBI GI NO: 34395317 NR Description: unknown protein
  misc_feature (108)..(300): NCBI GI NO: 38347098 NR Description: OSJNBa0006M15.13
  misc_feature (108)..(245): NCBI GI NO: 5257262 NR Description: hypothetical protein
MDYDPLAVDADNEETNCPGKKFPEATAAKVDDIWSRIYTRRNIEYQKKCEEIEASEDENATFPSYPLKILPEATGLCVLRGFCHHREYKTHDTSTTRSSLGLRDPRLMLQIFAMHLSISESYSYPVSVYGIVAVRDALEPLRNLVFNRPCRDDAFTVDQDSLTLPLCSPRRGMYIVRDRALLEVDLWVKEEGDGSSDKQLLSLYAEFEGMYELDEMLDGEVSSDLGSLVIDYLLLDESVEAVIQVSAKIDCPHHMRFTAFTSGFDGEIVLFDDKFSGNGKLFQYVVAVKAEGKLDICLKMEESLFWWTFQEGAVGAVRFPDDSVLNYGQFEVTVLFAPKKFTMDD

SEQ ID NO: 17116 - DNA, 1238 bp, Triticum aestivum
  misc_feature (1)..(1238): Ceres Seq. ID no. 14303696
tttgctacattgtaaatctcaaagtatttgcactgtaatatcttgttgagttttacagtgatttacattgtaattctcgtagtggatttacagtgtaattctcaaagtattttcactgtaatatcttttagtgtttctctcacggtatttgtagtggatttttcgcactgtaattatcttgtttgattatagtgtaattctcatagtatttacactgtaatttttcgcactgtaattacagtgtaattctcatagtatttacactgaatttttttagtgtaaatctcaaatgattttacactgtaattgtcttgtttgatctagtgtaattatcttgttttgatagagtaaatctcaaattatttatactgtcttagtggatttacagtgtaattctcatttttggatttacactataattattttgtttttttgcatttttactgtgtaactatcattggatttacactgtaactatttactggttttgttagtgggttttacaccgcaattcttagtggttttacttgtaaatctgagaaccatttgtactagtatccatttgctttgctctaatgatatagtcttattttcttcattgtaacaagcactttaattctaccgatagcactttattttctttctaacatgaaaaggattaacttcgaagagtttcatgtgttgtacccagctgtccctaagcaagataatcggtatttaagtttttctgccttttcatgttcttgtttaatttttatacagatttgtatgaaagctttatttttcttatttgtgttcttttttatcttttcagccatgaatgtggtgtcttcacatttaagtatatggagatattcacaccaagaactcagatggcaaactttttctctagtgcagacattccaaatcttaggatcagatatgcgaatgacatgtttttcagccccatgaacagttgcgacaagtctttcgtaactgatttctatcatgatggagaggcaatgccgggtgaggttaaacatgtgcgcggtcctagcacaaatggtggctgagttcttttttcagtagcatgtaatctggacaaagtagcatgcaatctgagcatatcagtatttttgatttagtagtggtttgtatgttttttcattttgattgtaatgtcatgtctttatgcctgtaactctgcagtacgtatttcgagcagctttttgattctatatcaagggcccttttttgtt

SEQ ID NO: 17117 - protein, 104 aa, Triticum aestivum
  peptide (1)..(104): Ceres Seq. ID no. 14303697
  misc_feature (28)..(86): NCBI GI NO: 38346808 NR Description: OSJNBa0088A01.15
  misc_feature (28)..(86): NCBI GI NO: 39546274 NR Description: OSJNBa0083D01.7
MFLFNFYTDLYESFIFLICVLFYLFSHECGVFTFKYMEIFTPRTQMANFFSSADIPNLRIRYANDMFFSPMNSCDKSFVTDFYHDGEAMPGEVKHVRGPSTNGG

SEQ ID NO: 17118 - protein, 100 aa, Triticum aestivum
  peptide (1)..(100): Ceres Seq. ID no. 14303698
MKRINFEEFHVLYPAVPKQDNRYLSFSAFSCSCLIFIQICMKALFFLFVFFFIFSAMNVVSSHLSIWRYSHQELRWQTFSLVQTFQILGSDMRMTCFSAP

SEQ ID NO: 17119 - protein, 68 aa, Triticum aestivum
  peptide (1)..(68): Ceres Seq. ID no. 14303699
  misc_feature (1)..(50): NCBI GI NO: 38346808 NR Description: OSJNBa0088A01.15
  misc_feature (1)..(50): NCBI GI NO: 39546274 NR Description: OSJNBa0083D01.7
MEIFTPRTQMANFFSSADIPNLRIRYANDMFFSPMNSCDKSFVTDFYHDGEAMPGEVKHVRGPSTNGG

SEQ ID NO: 17120 - DNA, 722 bp, Triticum aestivum
  misc_feature (1)..(722): Ceres Seq. ID no. 12621078
atcgatagcagagcaattctcttgcaacttgataagatcgagatacttccagacacacgcgcacacatagggccggagatagaagaatagttatggcttcatcggcggtgagccacagccacggcgggcagcaccagcagcacctgccggcggcggcagggagcatgatggcgcgggtggaccggctggacctggtggtggggtacctggaggagatgcgccaccacagcggcggcagcggcaggtcgtccaccaccgcgaccaggacgctgtcatcgtcatccccgaccacgcctaggtcttcccggcctcatgggtgccggccggcggaggagctgctgcgggaggccaaggccaaggggagcctggtggagcgcatagcgttcctggaggaccgggtgctccggatggaggaggagcgcatggatctgtcgtccagcatggatacggcggagcagaccacgccgacctcgtcggggaggaggacgatgaggatgatgatgagcggcagcggcggggccggggatgagcatgggagtggcgggagcgggaagaaagggaagaaggggctcaagagcttggtcaagtcatgcgttcgagcaggcgccaagctcaaggccaaggaatagtctagtctttcttttgtttctttattaatagtcgtgtgtgtacgtgcatatgttcacgtgtacgtacaccatgtacagtaaacgtatgtgtaa

SEQ ID NO: 17121 - protein, 178 aa, Triticum aestivum
  peptide (1)..(178): Ceres Seq. ID no. 12621079
  misc_feature (1)..(116): NCBI GI NO: 40737035 NR Description: hypothetical protein
MASSAVSHSHGGQHQQHLPAAAGSMMARVDRLDLVVGYLEEMRHHSGGSGRSSTTATRTLSSSSPTTPRSSRPHGCRPAEELLREAKAKGSLVERIAFLEDRVLRMEEERMDLSSSMDTAEQTTPTSSGRRTMRMMMSGSGGAGDEHGSGGSGKKGKKGLKSLVKSCVRAGAKLKAKE

SEQ ID NO: 17122 - protein, 154 aa, Triticum aestivum
  peptide (1)..(154): Ceres Seq. ID no. 12621080
  misc_feature (1)..(92): NCBI GI NO: 40737035 NR Description: hypothetical protein
MMARVDRLDLVVGYLEEMRHHSGGSGRSSTTATRTLSSSSPTTPRSSRPHGCRPAEELLREAKAKGSLVERIAFLEDRVLRMEEERMDLSSSMDTAEQTTPTSSGRRTMRMMMSGSGGAGDEHGSGGSGKKGKKGLKSLVKSCVRAGAKLKAKE

SEQ ID NO: 17123 - protein, 153 aa, Triticum aestivum
  peptide (1)..(153): Ceres Seq. ID no. 12621081
  misc_feature (1)..(91): NCBI GI NO: 40737035 NR Description: hypothetical protein
MARVDRLDLVVGYLEEMRHHSGGSGRSSTTATRTLSSSSPTTPRSSRPHGCRPAEELLREAKAKGSLVERIAFLEDRVLRMEEERMDLSSSMDTAEQTTPTSSGRRTMRMMMSGSGGAGDEHGSGGSGKKGKKGLKSLVKSCVRAGAKLKAKE

SEQ ID NO: 17124 - DNA, 1360 bp, Triticum aestivum
  misc_feature (1)..(1360): Ceres Seq. ID no. 14301568
aacccgattccattccgccccactcccactcgtcgccctcccgattcggtttgaaaagagacaaaagggatgctcgaccggtccctccggccggcggaggccggcgccggcgcggccggccccggcgaggtccgcgggaacgtggatcgggtcctcttcaaggacctggtcgacatggtgccgctcgtcgagtccctcatggatcggaggacgaacccgtcgtactcgcggcgcgcctcgctggtgtacacgccggcgccggccaagaagggtggtgatttgaaaagcgcaaagacaccacaaaccttgtcggcaaaaaagcggagggatcctggagacacaggaaataaaagcacacctgattcaaatggagagaacggctccgttgccccgatgactcaatcgggagcagaaaataaacccaaagacaaggatgagattggcttgctgcgtgagcaggtcgatgagctccaaaagcaacttgtcgaaaaagaggaggcattgaggtctgccgagagtactgtgagtgagatgaatgcggtgtattcgacagttgatgggttgaaacgccaagttgctgagaaagaagctttgatcaaatatgctaattctcagttacaaaatgcaaagattatgcttgcagacaagcaagcatccttagaaaaattggaatgggaggtaaagacctcaaataagaaggtggaagatcttcaaggggacgtctccatatggagtttgagataagttcattcgtgacattattcgagaaaatctcggagaatgtttcagatgattgtcacgatggtagcataccatcttatgatctagaggcacttcaatcagtgagtgaaatcgacaagattgaagtggacaagatagagcaggaaagagttacatatgctgaagctcttgctgctgcaagagcaaaccctaacgaagaacagttgagttcagttgcggaggcgcggtcaaggctgcaggtccttgttgtacaataatgcacgaggtgccagttgtagtgtatgtacgatgatgcacgggggtgccaattgtagtgtatgtacgataattttaagtcactgatgtaattataattgtgggcttgagctggttcatgtgtgtgaccggtgtgactgtaaccaatcgagcacttgaaactggacaattgttttagttttcggatcacatttacctggttctgtgctctccgttgtggattatattagaaggaaaactttggctgttgttttgatgatgagcactgggcagtgctgctatctagtgtgattttagtgtttttagacttggttgaatgtccgggcacagattgctgctaagttttatgatgttggaatttttg

SEQ ID NO: 17125 - protein, 224 aa, Triticum aestivum
  peptide (1)..(224): Ceres Seq. ID no. 14301569
  misc_feature (24)..(220): NCBI GI NO: 19716176 NR Description: TMV-MP30 binding protein 2C [Nicotiana tabacum]
  misc_feature (3)..(215): NCBI GI NO: 15241531 NR Description: myosin heavy chain-related protein
  misc_feature (120)..(215): NCBI GI NO: 1732515 NR Description: myosin heavy chain-like protein
MLDRSLRPAEAGAGAAGPGEVRGNVDRVLFKDLVDMVPLVESLMDRRTNPSYSRRASLVYTPAPAKKGGDLKSAKTPQTLSAKKRRDPGDTGNKSTPDSNGENGSVAPMTQSGAENKPKDKDEIGLLREQVDELQKQLVEKEEALRSAESTVSEMNAVYSTVDGLKRQVAEKEALIKYANSQLQNAKIMLADKQASLEKLEWEVKTSNKKVEDLQGDVSIWSLR

SEQ ID NO: 17126 - protein, 189 aa, Triticum aestivum
  peptide (1)..(189): Ceres Seq. ID no. 14301570
  misc_feature (1)..(185): NCBI GI NO: 19716176 NR Description: TMV-MP30 binding protein 2C [Nicotiana tabacum]
  misc_feature (1)..(180): NCBI GI NO: 15241531 NR Description: myosin heavy chain-related protein
  misc_feature (85)..(180): NCBI GI NO: 1732515 NR Description: myosin heavy chain-like protein
MVPLVESLMDRRTNPSYSRRASLVYTPAPAKKGGDLKSAKTPQTLSAKKRRDPGDTGNKSTPDSNGENGSVAPMTQSGAENKPKDKDEIGLLREQVDELQKQLVEKEEALRSAESTVSEMNAVYSTVDGLKRQVAEKEALIKYANSQLQNAKIMLADKQASLEKLEWEVKTSNKKVEDLQGDVSIWSLR

SEQ ID NO: 17127 - protein, 181 aa, Triticum aestivum
  peptide (1)..(181): Ceres Seq. ID no. 14301571
  misc_feature (1)..(177): NCBI GI NO: 19716176 NR Description: TMV-MP30 binding protein 2C [Nicotiana tabacum]
  misc_feature (1)..(172): NCBI GI NO: 15241531 NR Description: myosin heavy chain-related protein
  misc_feature (77)..(172): NCBI GI NO: 1732515 NR Description: myosin heavy chain-like protein
MDRRTNPSYSRRASLVYTPAPAKKGGDLKSAKTPQTLSAKKRRDPGDTGNKSTPDSNGENGSVAPMTQSGAENKPKDKDEIGLLREQVDELQKQLVEKEEALRSAESTVSEMNAVYSTVDGLKRQVAEKEALIKYANSQLQNAKIMLADKQASLEKLEWEVKTSNKKVEDLQGDVSIWSLR

SEQ ID NO: 17128 - DNA, 1492 bp, Triticum aestivum
  misc_feature (1)..(1492): Ceres Seq. ID no. 14302734
atcccttcccccccgcctccacccctcccactgcccccacgcagcagcccgcgcccccaacccacccaacgcgccgccgccgctagggtttctccccctccccccgccgccgcccgcgcagagccccgaatctccctacccgcggcagccatgagcgacggcaaggacaccctcgacctctccgccctcggcgccgccgtccccaacgccgcagagctcagcgccgaggacaaggccaacctcgtggagtcgattaagaacacgctgcagggattggcggcgcggcacacggacgtgctcgagagcctggagcccaaggtcaggaagcgcgtcgaggcgctcagggagatccagagccaacatgatgaatttgaggcaaagttttttgaggagagagctgcacttgaagctaaatatcagaagatgtatgaaccactgtactcaaagcgtcatgatgttgtcaatggtgtggttgaggcagaaggcgtaaccaaagattcaggtgaagccgctccagatgagaaagaggaaaagggtgtgccagatttctggttgaatgcaatgaagaaccatgaaatccttgctgaggagattcaagagagggatgaggaagctctcaagtacctcaaggatatcaagtggtacagaattactgagccaaagggtttcaagcttgagttccacttcaatactaatccattcttcaagaatgaagtgctttcaaaaacgtaccacatgatcgatgaagatgaaccaatcctagagaaggctattggaactgaaattgaatggtatcctggaaagagcttgacacaaaaggtgctaaagaagaagccaaagaaggggtcgaagaacactaaacctatcacgaaaatcgaaaattgcgagagcttctttaatttcttcagtccacctcaagttcctgatgatgatgaggaaattgatgaggatacagctgagcagttgcagaaccagatggagcaagattatgatatcggatctaccatcagagacaagattattccacatgctgtttcatggtttactggagaggccgctcaagatgaggactttgatggcatcatggatgatgatgaagatgacgacgaagatgacgaggaggatgaagatgaggatgaggacgacgaggaagatgaagacgatgacgatggtgataagaagaagggcgggcgagttcctgcaggggaaggtcaggcaggggagcggcccgcagagtgcaagcaacagtgagatccttcccagacgaagactatttttcttggctgaagaatgtttggttctgcttgatgctatgtctttgagtttggttccgaggagccagtgggggattgattgagttgggttttgtggaagaaccggtggggggtttctttgtgggggacatggtattatatactggtagcatttcaattgttgtattgggttgaaatactttgtccgctgctgcgagtgatcatcgatggtgcccgtt

SEQ ID NO: 17129 - protein, 416 aa, Triticum aestivum
  peptide (1)..(416): Ceres Seq. ID no. 14302735
  misc_feature (108)..(354): Pfam Name: NAP Pfam Description: Nucleosome assembly protein
  misc_feature (51)..(416): NCBI GI NO: 21898560 NR Description: nucleosome/chromatin assembly factor group A
  misc_feature (51)..(416): NCBI GI NO: 29569109 NR Description: nucleosome/chromatin assembly factor group A
  misc_feature (73)..(416): NCBI GI NO: 2129840 NR Description: nucleosome assembly protein 1 - soybean
  misc_feature (51)..(411): NCBI GI NO: 15224782 NR Description: nucleosome assembly protein -related
  misc_feature (51)..(416): NCBI GI NO: 18423918 NR Description: nucleosome assembly protein [Arabidopsis thaliana]
  misc_feature (51)..(416): NCBI GI NO: 8777435 NR Description: nucleosome assembly protein [Arabidopsis thaliana]
  misc_feature (51)..(416): NCBI GI NO: 549975 NR Description: nucleosome assembly protein I-like protein
  misc_feature (51)..(416): NCBI GI NO: 15236115 NR Description: nucleosome assembly protein I-related protein
  misc_feature (51)..(416): NCBI GI NO: 7488816 NR Description: nucleosome assembly protein 1 - garden pea
  misc_feature (29)..(415): NCBI GI NO: 28950350 NR Description: probable nucleosome assembly protein I
IPSPPPPPLPLPPRSSPRPQPTQRAAAARVSPPPPAAARAEPRISLPAAAMSDGKDTLDLSALGAAVPNAAELSAEDKANLVESIKNTLQGLAARHTDVLESLEPKVRKRVEALREIQSQHDEFEAKFFEERAALEAKYQKMYEPLYSKRHDVVNGVVEAEGVTKDSGEAAPDEKEEKGVPDFWLNAMKNHEILAEEIQERDEEALKYLKDIKWYRITEPKGFKLEFHFNTNPFFKNEVLSKTYHMIDEDEPILEKAIGTEIEWYPGKSLTQKVLKKKPKKGSKNTKPITKIENCESFFNFFSPPQVPDDDEEIDEDTAEQLQNQMEQDYDIGSTIRDKIIPHAVSWFTGEAAQDEDFDGIMDDDEDDDEDDEEDEDEDEDDEEDEDDDDGDKKKGGRVPAGEGQAGERPAECKQQ

SEQ ID NO: 17130 - protein, 366 aa, Triticum aestivum
  peptide (1)..(366): Ceres Seq. ID no. 14302736
  misc_feature (58)..(304): Pfam Name: NAP Pfam Description: Nucleosome assembly protein
  misc_feature (1)..(366): NCBI GI NO: 21898560 NR Description: nucleosome/chromatin assembly factor group A
  misc_feature (1)..(366): NCBI GI NO: 29569109 NR Description: nucleosome/chromatin assembly factor group A
  misc_feature (23)..(366): NCBI GI NO: 2129840 NR Description: nucleosome assembly protein 1 - soybean
  misc_feature (1)..(361): NCBI GI NO: 15224782 NR Description: nucleosome assembly protein -related
  misc_feature (1)..(366): NCBI GI NO: 18423918 NR Description: nucleosome assembly protein [Arabidopsis thaliana]
  misc_feature (1)..(366): NCBI GI NO: 8777435 NR Description: nucleosome assembly protein [Arabidopsis thaliana]
  misc_feature (1)..(366): NCBI GI NO: 549975 NR Description: nucleosome assembly protein I-like protein
  misc_feature (1)..(366): NCBI GI NO: 15236115 NR Description: nucleosome assembly protein I-related protein
  misc_feature (1)..(366): NCBI GI NO: 7488816 NR Description: nucleosome assembly protein 1 - garden pea
  misc_feature (1)..(365): NCBI GI NO: 28950350 NR Description: probable nucleosome assembly protein I
MSDGKDTLDLSALGAAVPNAAELSAEDKANLVESIKNTLQGLAARHTDVLESLEPKVRKRVEALREIQSQHDEFEAKFFEERAALEAKYQKMYEPLYSKRHDVVNGVVEAEGVTKDSGEAAPDEKEEKGVPDFWLNAMKNHEILAEEIQERDEEALKYLKDIKWYRITEPKGFKLEFHFNTNPFFKNEVLSKTYHMIDEDEPILEKAIGTEIEWYPGKSLTQKVLKKKPKKGSKNTKPITKIENCESFFNFFSPPQVPDDDEEIDEDTAEQLQNQMEQDYDIGSTIRDKIIPHAVSWFTGEAAQDEDFDGIMDDDEDDDEDDEEDEDEDEDDEEDEDDDDGDKKKGGRVPAGEGQAGERPAECKQQ

SEQ ID NO: 17131 - protein, 275 aa, Triticum aestivum
  peptide (1)..(275): Ceres Seq. ID no. 14302737
  misc_feature (1)..(213): Pfam Name: NAP Pfam Description: Nucleosome assembly protein
  misc_feature (1)..(275): NCBI GI NO: 21898560 NR Description: nucleosome/chromatin assembly factor group A
  misc_feature (1)..(275): NCBI GI NO: 29569109 NR Description: nucleosome/chromatin assembly factor group A
  misc_feature (1)..(275): NCBI GI NO: 2129840 NR Description: nucleosome assembly protein 1 - soybean
  misc_feature (1)..(270): NCBI GI NO: 15224782 NR Description: nucleosome assembly protein -related
  misc_feature (1)..(275): NCBI GI NO: 18423918 NR Description: nucleosome assembly protein [Arabidopsis thaliana]
  misc_feature (1)..(275): NCBI GI NO: 8777435 NR Description: nucleosome assembly protein [Arabidopsis thaliana]
  misc_feature (1)..(275): NCBI GI NO: 549975 NR Description: nucleosome assembly protein I-like protein
  misc_feature (1)..(275): NCBI GI NO: 15236115 NR Description: nucleosome assembly protein I-related protein
  misc_feature (1)..(275): NCBI GI NO: 7488816 NR Description: nucleosome assembly protein 1 - garden pea
  misc_feature (1)..(274): NCBI GI NO: 28950350 NR Description: probable nucleosome assembly protein I
MYEPLYSKRHDVVNGVVEAEGVTKDSGEAAPDEKEEKGVPDFWLNAMKNHEILAEEIQERDEEALKYLKDIKWYRITEPKGFKLEFHFNTNPFFKNEVLSKTYHMIDEDEPILEKAIGTEIEWYPGKSLTQKVLKKKPKKGSKNTKPITKIENCESFFNFFSPPQVPDDDEEIDEDTAEQLQNQMEQDYDIGSTIRDKIIPHAVSWFTGEAAQDEDFDGIMDDDEDDDEDDEEDEDEDEDDEEDEDDDDGDKKKGGRVPAGEGQAGERPAECKQQ

SEQ ID NO: 17132 - DNA, 2130 bp, Triticum aestivum
  misc_feature (1)..(2130): Ceres Seq. ID no. 14302419
agctagcgcagatcccaccccgcaaatggcagctcgcctcctcctctagcccactcctctagcccactcccctccacccacccacctaccctcctccgcacgcaaccatgccggggctcgccgcagcggacgcgtcgccgccggccgcggcgccggcgccgcggcggctctcctcgccgctgccgaggcgggcgccgccgtcgccgtccccctcctccgcgtcccgcgccgtcgggaagccggcgcggaagtcgctcgggcagggccagcacccggaggcgacggacgaggcggcgctggacaacccggatctgggccccttcctgctcaagcaggcgcgggacgccatggtgtccggcgagggcgggggcgcggcgcgcgcgctcgagttcgccgagcgtgcggcccgcgcgctcgagcgccgcggcgagggcgccgagctcgagctcgccatgagcctccacgtcgccgccgcgatccactgcgggctcggccggcacgccgacgccgtgcccgtgctcgagcgcgccgtcgccgtcgtcaccccgccgcccgcgccggcccccgtggccgagggtgaggaggtgccgcagccggaggaggaggtggatgagcgcaagggggaggagtgggcgctcgccgccttctccggctggatgcagctcggcgacacccacgccatgctcggccgcatggacgagtccatcgcctgctacggcaagggcttcgagatccagatggccgcgctcggcgaccgcgacccccgcgtcgccgagacctgcaggtatctggcggaagcgcatgtgcaagctctgcagttcgatgaggcagagaaactgtgccgcaaagccctcgagatccaccgggagcacagtgcacctgcatccctcgaggaggcctccgatcgccggctgatggcccttatcctggacgccaagggtgactatgacggcgccctggagcaccttgtactggcttccatgaccatggttgccaatggacgcgacgtcgaggttgcgacgattgatgtcgcgataggcaacacttacctggcccttgctcgtttcgacgagtctgtcttctcataccagaaggctttgactgtactcaagtctgcccgtggcgacgaccacccttcagtggcatctgtcttcgtccgccttgctgatctctatcaccgcacagggaagctccgtgagtccaaatcctactgtgagaatgctctccgtgtctatgcaaagcccgcgcctggtgctgcccctgatgaggttgctggaggcctaatggagattgctgccatctatgaggcgcttggagaccttgatgaggccctaaagcttcttcaaagggcactgaagttgctcgaggactcaccagggcagtggagcactgttgctgggatcgaagcacaaatgggtgtgttgtactacatgatagggaggtatgccgattcaaggaactcgttcgagagcgcggtttccaaattgagggccagtggggaaaggaagtcggcatttttcggtgttctgctgaaccagatggggctagcttgcgtacagctgttcaagattgatgaggctgcacagctgtttgaagaagcacgggcagttctagagcaggagtgtggtgcctctcatcctgatactcttggcgtatacagcaacctggctgcgatctatgatgccatgggaagggtggaggacgcgattgagatcctggagcatgtgctgaaggtgcgggaggagaagctgggcacggcgaacccggacgtggaggatgagaagaagcggctggcggagctgctgaaggaggcggggcggtcccggaaccggaagcagaagtcgctggagaacctgttcgggtccggcggtgctgcgcggggcgccaagaaggacggctccgggggcaggcggtggaccaacttcgggttcaggagctgagctgagaagaaaacagtggtgtgggcctttgtaacataagaggagagagaaagagagaaaaggaagggaggagagagaagcatgtgtaaagaaagaaaggtgttgctggtagagtaggaaggaaggaagatgagatgattgtgattgcagtttgttttgagtttcttctacatgttctgcatctactctc

SEQ ID NO: 17133 - protein, 610 aa, Triticum aestivum
  peptide (1)..(610): Ceres Seq. ID no. 14302420
  misc_feature (346)..(379): Pfam Name: Pfam Description:  TPR Domain
  misc_feature (1)..(609): NCBI GI NO: 15236944 NR Description: kinesin light chain - related
  misc_feature (1)..(609): NCBI GI NO: 21554384 NR Description: putative kinesin light chain
  misc_feature (153)..(586): NCBI GI NO: 20152971 NR Description: similar to A
  misc_feature (28)..(144): NCBI GI NO: 20152971 NR Description: similar to A
  misc_feature (153)..(583): NCBI GI NO: 19387245 NR Description: putative kinesin light chain gene
  misc_feature (1)..(144): NCBI GI NO: 19387245 NR Description: putative kinesin light chain gene
  misc_feature (298)..(610): NCBI GI NO: 32352172 NR Description: hypothetical protein
  misc_feature (95)..(586): NCBI GI NO: 9802538 NR Description: F17L21.29 [Arabidopsis thaliana]
  misc_feature (95)..(586): NCBI GI NO: 15223528 NR Description: kinesin light chain - related
  misc_feature (95)..(586): NCBI GI NO: 26450936 NR Description: unknown protein [Arabidopsis thaliana]
MPGLAAADASPPAAAPAPRRLSSPLPRRAPPSPSPSSASRAVGKPARKSLGQGQHPEATDEAALDNPDLGPFLLKQARDAMVSGEGGGAARALEFAERAARALERRGEGAELELAMSLHVAAAIHCGLGRHADAVPVLERAVAVVTPPPAPAPVAEGEEVPQPEEEVDERKGEEWALAAFSGWMQLGDTHAMLGRMDESIACYGKGFEIQMAALGDRDPRVAETCRYLAEAHVQALQFDEAEKLCRKALEIHREHSAPASLEEASDRRLMALILDAKGDYDGALEHLVLASMTMVANGRDVEVATIDVAIGNTYLALARFDESVFSYQKALTVLKSARGDDHPSVASVFVRLADLYHRTGKLRESKSYCENALRVYAKPAPGAAPDEVAGGLMEIAAIYEALGDLDEALKLLQRALKLLEDSPGQWSTVAGIEAQMGVLYYMIGRYADSRNSFESAVSKLRASGERKSAFFGVLLNQMGLACVQLFKIDEAAQLFEEARAVLEQECGASHPDTLGVYSNLAAIYDAMGRVEDAIEILEHVLKVREEKLGTANPDVEDEKKRLAELLKEAGRSRNRKQKSLENLFGSGGAARGAKKDGSGGRRWTNFGFRS

SEQ ID NO: 17134 - protein, 530 aa, Triticum aestivum
  peptide (1)..(530): Ceres Seq. ID no. 14302421
  misc_feature (266)..(299): Pfam Name: Pfam Description:  TPR Domain
  misc_feature (1)..(529): NCBI GI NO: 15236944 NR Description: kinesin light chain - related
  misc_feature (1)..(529): NCBI GI NO: 21554384 NR Description: putative kinesin light chain
  misc_feature (73)..(506): NCBI GI NO: 20152971 NR Description: similar to A
  misc_feature (1)..(64): NCBI GI NO: 20152971 NR Description: similar to A
  misc_feature (73)..(503): NCBI GI NO: 19387245 NR Description: putative kinesin light chain gene
  misc_feature (1)..(64): NCBI GI NO: 19387245 NR Description: putative kinesin light chain gene
  misc_feature (218)..(530): NCBI GI NO: 32352172 NR Description: hypothetical protein
  misc_feature (15)..(506): NCBI GI NO: 9802538 NR Description: F17L21.29 [Arabidopsis thaliana]
  misc_feature (15)..(506): NCBI GI NO: 26450936 NR Description: unknown protein [Arabidopsis thaliana]
  misc_feature (15)..(506): NCBI GI NO: 15223528 NR Description: kinesin light chain - related
MVSGEGGGAARALEFAERAARALERRGEGAELELAMSLHVAAAIHCGLGRHADAVPVLERAVAVVTPPPAPAPVAEGEEVPQPEEEVDERKGEEWALAAFSGWMQLGDTHAMLGRMDESIACYGKGFEIQMAALGDRDPRVAETCRYLAEAHVQALQFDEAEKLCRKALEIHREHSAPASLEEASDRRLMALILDAKGDYDGALEHLVLASMTMVANGRDVEVATIDVAIGNTYLALARFDESVFSYQKALTVLKSARGDDHPSVASVFVRLADLYHRTGKLRESKSYCENALRVYAKPAPGAAPDEVAGGLMEIAAIYEALGDLDEALKLLQRALKLLEDSPGQWSTVAGIEAQMGVLYYMIGRYADSRNSFESAVSKLRASGERKSAFFGVLLNQMGLACVQLFKIDEAAQLFEEARAVLEQECGASHPDTLGVYSNLAAIYDAMGRVEDAIEILEHVLKVREEKLGTANPDVEDEKKRLAELLKEAGRSRNRKQKSLENLFGSGGAARGAKKDGSGGRRWTNFGFRS

SEQ ID NO: 17135 - protein, 495 aa, Triticum aestivum
  peptide (1)..(495): Ceres Seq. ID no. 14302422
  misc_feature (231)..(264): Pfam Name: Pfam Description:  TPR Domain
  misc_feature (1)..(494): NCBI GI NO: 15236944 NR Description: kinesin light chain - related
  misc_feature (1)..(494): NCBI GI NO: 21554384 NR Description: putative kinesin light chain
  misc_feature (38)..(471): NCBI GI NO: 20152971 NR Description: similar to A
  misc_feature (1)..(29): NCBI GI NO: 20152971 NR Description: similar to A
  misc_feature (38)..(468): NCBI GI NO: 19387245 NR Description: putative kinesin light chain gene
  misc_feature (1)..(29): NCBI GI NO: 19387245 NR Description: putative kinesin light chain gene
  misc_feature (183)..(495): NCBI GI NO: 32352172 NR Description: hypothetical protein
  misc_feature (1)..(471): NCBI GI NO: 9802538 NR Description: F17L21.29 [Arabidopsis thaliana]
  misc_feature (1)..(471): NCBI GI NO: 26450936 NR Description: unknown protein [Arabidopsis thaliana]
  misc_feature (1)..(471): NCBI GI NO: 15223528 NR Description: kinesin light chain - related
MSLHVAAAIHCGLGRHADAVPVLERAVAVVTPPPAPAPVAEGEEVPQPEEEVDERKGEEWALAAFSGWMQLGDTHAMLGRMDESIACYGKGFEIQMAALGDRDPRVAETCRYLAEAHVQALQFDEAEKLCRKALEIHREHSAPASLEEASDRRLMALILDAKGDYDGALEHLVLASMTMVANGRDVEVATIDVAIGNTYLALARFDESVFSYQKALTVLKSARGDDHPSVASVFVRLADLYHRTGKLRESKSYCENALRVYAKPAPGAAPDEVAGGLMEIAAIYEALGDLDEALKLLQRALKLLEDSPGQWSTVAGIEAQMGVLYYMIGRYADSRNSFESAVSKLRASGERKSAFFGVLLNQMGLACVQLFKIDEAAQLFEEARAVLEQECGASHPDTLGVYSNLAAIYDAMGRVEDAIEILEHVLKVREEKLGTANPDVEDEKKRLAELLKEAGRSRNRKQKSLENLFGSGGAARGAKKDGSGGRRWTNFGFRS

SEQ ID NO: 17136 - DNA, 1187 bp, Triticum aestivum
  misc_feature (1)..(1187): Ceres Seq. ID no. 13659131
acttagaacatcctaatcgaaaactcatattcttcattcacagcagcattcttactatgcaccattgtctgcaagtggcgtatctattcctgttgagaccacatccatccccccagtaccaggttcttattatagctatccttccgtcactatggctgccactgaagtagcggttgaatcttctggatactatgcttcatcaacctctgccatttctagtggtgaattagataacaaaacaagcttggcctcccttgttgcaaatagtaatgtgaatactgtggagtctgataaagtgatatccaaggagcccacagttgcgtctttgagccaatcagtaggagcagtatcttcaggaccaacagtacatggaagttctactcaagcttctactagctccactaatcagactaaagttcctcgtactaagaagcgacctgttgctgttgcatcatcactgagatctaataagaaggtctcaagtctggtggataagtggaaagctgcaaaggaggagcttcgtgatgaagaggaagaggagcctgaagatgctttggagtacctagaaaggaaacgccggaaggaaatagatgggtggcgtaagcaacaaatagctagtggagaagccaaggaaaatgctaattttgttccccttggtggtgactggcgtgaccgtgtaaaacgcaaaagagctgaagcaaagaaggaagcaaagactgaacctattcgtgcagctgccgaacaacacaaaggggagcctgatctctcagagctctccaagggttttccttctgggtggcaggcatacatagacgagtctacgaagcaagtgtactatgggaacaacctcacttccgagacgacttgggatcggcctagcaaataaagattggattagttgaagatggtctagttttctctgtagatatccctgtacctcgatatatacgttgcctgtcttgaatggaacggatatgacagtcacgccctgagaagcaaccggtttctgatgttaccttggttttgaggctgtattgtttcttctattttccactgggagatcgtagtggggggaaggagagttcgttttggtatagaggcacccttgtaagagtggcaacttgagatcgaattactgaagcaaaatctactagttagttgctgaccaaggaaaaatgtgccttgtc

SEQ ID NO: 17137 - protein, 244 aa, Triticum aestivum
  peptide (1)..(244): Ceres Seq. ID no. 13659132
  misc_feature (213)..(242): Pfam Name: Pfam Description:  WW domain
  misc_feature (1)..(243): NCBI GI NO: 15229453 NR Description: hypothetical protein [Arabidopsis thaliana]
  misc_feature (88)..(180): NCBI GI NO: 10434696 NR Description: unnamed protein product [Homo sapiens]
  misc_feature (88)..(180): NCBI GI NO: 26350923 NR Description: unnamed protein product [Mus musculus]
  misc_feature (88)..(180): NCBI GI NO: 9055220 NR Description: formin binding protein 4
  misc_feature (88)..(180): NCBI GI NO: 39104535 NR Description: mKIAA1014 protein [Mus musculus]
  misc_feature (90)..(180): NCBI GI NO: 34856516 NR Description: similar to formin binding protein 30
  misc_feature (88)..(180): NCBI GI NO: 11360125 NR Description: hypothetical protein DKFZp434M2023
  misc_feature (88)..(180): NCBI GI NO: 24308033 NR Description: formin binding protein 4 [Homo sapiens]
  misc_feature (88)..(180): NCBI GI NO: 20521728 NR Description: KIAA1014 protein [Homo sapiens]
MAATEVAVESSGYYASSTSAISSGELDNKTSLASLVANSNVNTVESDKVISKEPTVASLSQSVGAVSSGPTVHGSSTQASTSSTNQTKVPRTKKRPVAVASSLRSNKKVSSLVDKWKAAKEELRDEEEEEPEDALEYLERKRRKEIDGWRKQQIASGEAKENANFVPLGGDWRDRVKRKRAEAKKEAKTEPIRAAAEQHKGEPDLSELSKGFPSGWQAYIDESTKQVYYGNNLTSETTWDRPSK

SEQ ID NO: 17138 - DNA, 947 bp, Triticum aestivum
  misc_feature (1)..(947): Ceres Seq. ID no. 13658132
aattggaaaaccaacaagctgccgtggtgactgtaagcgaagcacacgactgcctgtcctttccccaataatgcgcggcatcgcctccgccggaacgctccgccccgggccatccgcagctgtccgatcaaaatccaacgcgggagaccgccccaccctccaccgacgacccctcatccacctccggcgatcgccggaaccctctctgccgtccatccgccgcagccgccgcctcatgcctcctcttaccgcggcctcccgggccaccagcagcggcggcgacgccttcagcgagttggcctctgccgccgacttcgccggcatcgcctctcccgacggcctcatctccgtcatcggcttcggctcccttctttccgagcggagcgcgaggagcacgttcccggagctggaggggttccgtgtggcggcgctgcgagggttccggcgcgtcttcgcccacgccgcccccatcttcttcgagcgcggcatcgccattgaggccactaaggagttctcaagcttaagcgtggagcattgtgagggagaaatgatagttgtcactgtgtttgaaatcaaggaggaggaggtgccagccttcatcgagagggaactcgagttcagatttcttgctgtggtccctgaaggactggatggagtgccttttccaaatccagctgtaagggcctgtattttgggactgaatttctagcttaattttttgtttgatctgcctgcaatgcagttattattcatcttcatggaatttattggttcaggttgtctgtgcacgctatagcgatgaagagtatttccaagtgagatgcaaaggttgaatctatatgacactcaaatttctttcagtcctgcatttcactttaatgacttttctactgactttgtaatgttattgacattgggttatcagcatatcagttgtccgtttgact

SEQ ID NO: 17139 - protein, 235 aa, Triticum aestivum
  peptide (1)..(235): Ceres Seq. ID no. 13658133
  misc_feature (98)..(226): NCBI GI NO: 30683505 NR Description: expressed protein [Arabidopsis thaliana]
  misc_feature (62)..(212): NCBI GI NO: 7485175 NR Description: hypothetical protein - Arabidopsis thaliana
  misc_feature (123)..(226): NCBI GI NO: 26452147 NR Description: unknown protein [Arabidopsis thaliana]
IGKPTSCRGDCKRSTRLPVLSPIMRGIASAGTLRPGPSAAVRSKSNAGDRPTLHRRPLIHLRRSPEPSLPSIRRSRRLMPPLTAASRATSSGGDAFSELASAADFAGIASPDGLISVIGFGSLLSERSARSTFPELEGFRVAALRGFRRVFAHAAPIFFERGIAIEATKEFSSLSVEHCEGEMIVVTVFEIKEEEVPAFIERELEFRFLAVVPEGLDGVPFPNPAVRACILGLNF

SEQ ID NO: 17140 - protein, 212 aa, Triticum aestivum
  peptide (1)..(212): Ceres Seq. ID no. 13658134
  misc_feature (75)..(203): NCBI GI NO: 30683505 NR Description: expressed protein [Arabidopsis thaliana]
  misc_feature (39)..(189): NCBI GI NO: 7485175 NR Description: hypothetical protein - Arabidopsis thaliana
  misc_feature (100)..(203): NCBI GI NO: 26452147 NR Description: unknown protein [Arabidopsis thaliana]
MRGIASAGTLRPGPSAAVRSKSNAGDRPTLHRRPLIHLRRSPEPSLPSIRRSRRLMPPLTAASRATSSGGDAFSELASAADFAGIASPDGLISVIGFGSLLSERSARSTFPELEGFRVAALRGFRRVFAHAAPIFFERGIAIEATKEFSSLSVEHCEGEMIVVTVFEIKEEEVPAFIERELEFRFLAVVPEGLDGVPFPNPAVRACILGLNF

SEQ ID NO: 17141 - protein, 157 aa, Triticum aestivum
  peptide (1)..(157): Ceres Seq. ID no. 13658135
  misc_feature (20)..(148): NCBI GI NO: 30683505 NR Description: expressed protein [Arabidopsis thaliana]
  misc_feature (1)..(134): NCBI GI NO: 7485175 NR Description: hypothetical protein - Arabidopsis thaliana
  misc_feature (45)..(148): NCBI GI NO: 26452147 NR Description: unknown protein [Arabidopsis thaliana]
MPPLTAASRATSSGGDAFSELASAADFAGIASPDGLISVIGFGSLLSERSARSTFPELEGFRVAALRGFRRVFAHAAPIFFERGIAIEATKEFSSLSVEHCEGEMIVVTVFEIKEEEVPAFIERELEFRFLAVVPEGLDGVPFPNPAVRACILGLNF

SEQ ID NO: 17142 - DNA, 1048 bp, Triticum aestivum
  misc_feature (1)..(1048): Ceres Seq. ID no. 13658590
  misc_feature (1035)..(1035): n is a, c, t, g, unknown, or other
  misc_feature (976)..(976): n is a, c, t, g, unknown, or other
atcttttgtcctcctcctccgttgcgcagttggctcgcttgcttgcttgctgtaggtgagtgctgctggagacgggagccgggccgaggcggatcggggagaaggtgggaggcgggcgggtggtagatccggcgggcgtggctcgcgagaaggttggtgcgaggttggtggaggaggggagagaaggaggggatggagcggaaggcggtggtggtgtgcgcgctcgtcggcttcctcggcgtcctctccgccgcgctaggcttcgccgccgagggcacccgcgcgcaaggcctcctacctccatgacctcgcccgcaagtatgcgtcggggatcctctccgacgacaacatcgttgccatggacgaccgctccctcgccgccatgctcaccatggtcaacggcatcggcgcctggagtgttcacatgttcatgatcttctccctagcgcgcccggatgtgctcccctccgcggatctcgggatccgcaagggcgtgcagatgctgtatgggctggaggatgtgccccggccgtcgcagatggagaagctctgcgagcgctggcgcccttaccgctccgtcgccgcgtggtacatgtggcgcctcatcgagtccaaggcggcgcagacggcaggggccatgcctgtagtgccacctgcaatgcctgcgcccagtgaggagttcatgctccagcagcaccagcagcagcaccaccatcagcatcagcagcaacagcaacaagctgccatccaaatgctcgatccggttcagatgcttccaggattggggtgaatttggtatatactcgctctgctcatttgttcttgatgtgaaatggatgtcttaaacctgaatttgtcacttcatttgtgtatcattgttctgtatcggttgagaagtgtagcattggacaggaggatctcgaggcaacttcattatcagttatagttggtgttgtgttgttcatttgtaaatttntgctattttagacattgttgccctagacatatttgtatccgacgaataaatttagaccnagctgttatgtcc

SEQ ID NO: 17143 - protein, 143 aa, Triticum aestivum
  peptide (1)..(143): Ceres Seq. ID no. 13658591
  misc_feature (1)..(143): NCBI GI NO: 5091600 NR Description: This gene is a member of PF| 01332 Alkylbase DNAglycosidases alkA family
  misc_feature (1)..(143): NCBI GI NO: 18410802 NR Description: 3-methyladenine DNA glycosylase -related
  misc_feature (1)..(143): NCBI GI NO: 25406423 NR Description: hypothetical protein F22H5.5
  misc_feature (1)..(116): NCBI GI NO: 18394744 NR Description: expressed protein [Arabidopsis thaliana]
  misc_feature (1)..(116): NCBI GI NO: 21593178 NR Description: unknown [Arabidopsis thaliana]
  misc_feature (1)..(116): NCBI GI NO: 25402893 NR Description: protein F18O14.25
  misc_feature (1)..(86): NCBI GI NO: 15230333 NR Description: DNA-3-methyladenine glycosidase -related
  misc_feature (1)..(81): NCBI GI NO: 22971879 NR Description: hypothetical protein [Chloroflexus aurantiacus]
  misc_feature (1)..(84): NCBI GI NO: 37521587 NR Description: probable DNA-3-methyladenine glycosylase
  misc_feature (1)..(84): NCBI GI NO: 22982918 NR Description: hypothetical protein [Burkholderia fungorum]
MDDRSLAAMLTMVNGIGAWSVHMFMIFSLARPDVLPSADLGIRKGVQMLYGLEDVPRPSQMEKLCERWRPYRSVAAWYMWRLIESKAAQTAGAMPVVPPAMPAPSEEFMLQQHQQQHHHQHQQQQQQAAIQMLDPVQMLPGLG

SEQ ID NO: 17144 - protein, 135 aa, Triticum aestivum
  peptide (1)..(135): Ceres Seq. ID no. 13658592
  misc_feature (1)..(135): NCBI GI NO: 5091600 NR Description: This gene is a member of PF| 01332 Alkylbase DNAglycosidases alkA family
  misc_feature (1)..(135): NCBI GI NO: 18410802 NR Description: 3-methyladenine DNA glycosylase -related
  misc_feature (1)..(135): NCBI GI NO: 25406423 NR Description: hypothetical protein F22H5.5
  misc_feature (1)..(108): NCBI GI NO: 18394744 NR Description: expressed protein [Arabidopsis thaliana]
  misc_feature (1)..(108): NCBI GI NO: 21593178 NR Description: unknown [Arabidopsis thaliana]
  misc_feature (1)..(108): NCBI GI NO: 25402893 NR Description: protein F18O14.25
  misc_feature (1)..(78): NCBI GI NO: 15230333 NR Description: DNA-3-methyladenine glycosidase -related
  misc_feature (1)..(73): NCBI GI NO: 22971879 NR Description: hypothetical protein [Chloroflexus aurantiacus]
  misc_feature (1)..(76): NCBI GI NO: 37521587 NR Description: probable DNA-3-methyladenine glycosylase
  misc_feature (1)..(76): NCBI GI NO: 22982918 NR Description: hypothetical protein [Burkholderia fungorum]
MLTMVNGIGAWSVHMFMIFSLARPDVLPSADLGIRKGVQMLYGLEDVPRPSQMEKLCERWRPYRSVAAWYMWRLIESKAAQTAGAMPVVPPAMPAPSEEFMLQQHQQQHHHQHQQQQQQAAIQMLDPVQMLPGLG

SEQ ID NO: 17145 - protein, 132 aa, Triticum aestivum
  peptide (1)..(132): Ceres Seq. ID no. 13658593
  misc_feature (1)..(132): NCBI GI NO: 5091600 NR Description: This gene is a member of PF| 01332 Alkylbase DNAglycosidases alkA family
  misc_feature (1)..(132): NCBI GI NO: 18410802 NR Description: 3-methyladenine DNA glycosylase -related
  misc_feature (1)..(132): NCBI GI NO: 25406423 NR Description: hypothetical protein F22H5.5
  misc_feature (1)..(105): NCBI GI NO: 18394744 NR Description: expressed protein [Arabidopsis thaliana]
  misc_feature (1)..(105): NCBI GI NO: 21593178 NR Description: unknown [Arabidopsis thaliana]
  misc_feature (1)..(105): NCBI GI NO: 25402893 NR Description: protein F18O14.25
  misc_feature (1)..(75): NCBI GI NO: 15230333 NR Description: DNA-3-methyladenine glycosidase -related
  misc_feature (1)..(70): NCBI GI NO: 22971879 NR Description: hypothetical protein [Chloroflexus aurantiacus]
  misc_feature (1)..(73): NCBI GI NO: 37521587 NR Description: probable DNA-3-methyladenine glycosylase
  misc_feature (1)..(73): NCBI GI NO: 22982918 NR Description: hypothetical protein [Burkholderia fungorum]
MVNGIGAWSVHMFMIFSLARPDVLPSADLGIRKGVQMLYGLEDVPRPSQMEKLCERWRPYRSVAAWYMWRLIESKAAQTAGAMPVVPPAMPAPSEEFMLQQHQQQHHHQHQQQQQQAAIQMLDPVQMLPGLG

SEQ ID NO: 17146 - DNA, 1481 bp, Triticum aestivum
  misc_feature (1)..(1481): Ceres Seq. ID no. 14313362
actctatccgcgtcgactggtagctgaaactccaaaaagccgccaccactccggttcctgcgttcgtactccactcctgccagtccaagatccagctcaagatccaggcagggtcagccagccatgtgctgcggcgagtgcggctgctatgacgcactctgcgaccgctgctgcctctgcgtctccaccggcgcgcgcgacaccatcctctgctgcgcgtgctgcctcgccgtcctcgccggcgtcggcctcctcctcgtcctcctcgcggccttctgcttcatccgccacgccgaggtcgccgtcaccgacgcctccctcacgcgcctcgcgctggccgcgtcccccgccaccgccttcgcctacaacctctcgctcacgctcaccgtccggaacaagaactgggcaatgagcgtcaagaacacccagccgctcgaggccgactacagcttcgacggccagcgcttcgagcgggtcaggctcgccgacgagggctccacgcaccccgccggcaagacccaggtgtaccacctcgtctccggctccgacggcgcctacgtcgcgctcggcaacgccggcgtggccgagttcaaggaggagaacaagacgggggtgttccaggtggaggtggcgctgtcgggccaggtcaggtaccaggcgcacttcaccaagtgcaagttccaggccaattgcccgctcaagctgcagctcgcgccgcccggcacgccggccgtcgtcttccagaaggtcaagtgcaagctcgctccggcgagcaggtactgctagtgattggtacgattggtggctagtgatttctgtcggtagattgggaggactaagtatagttgccgggaacggggaacgatgccgcgtcccctgtaccgggaacatcgacccggatcgagggtcggggtcgacacagggaacgacgcgattcggtgacgggaacgcgacccggaaaggcaggttcgcagctccgtttcagtgatcgcaaatacactggatctcgacccaacttgccaatgaacgggaggccaaatggatagaatcgagacttacctgaagtccatggcatgagccttccgctgtcgaccaaaacgatgcgcgccggaggctagtgtgcatgtgcgaacgcggtgcccagcggcgccggcggctggtgtcgacgtgcagactgcggatgcgatgcccagcggcgccggcggctggtgtcgacgtgcagactgcggatgcggtgcccggcggcgctaacggctggtgtcgacgtgcagactatgcggtgctcggtggcggactgcggacgctgtgctagatggccggacggcggcggcggctgccgtggaccagcgaatgtggtgcccgcttcccactgcccatcctcttgattggaatttgggaatcatacggggcagatttcatggagtagattactttctgctgtcaaaactttccgcgggatatttgcacattttcccttcctc

SEQ ID NO: 17147 - protein, 220 aa, Triticum aestivum
  peptide (1)..(220): Ceres Seq. ID no. 14313363
  misc_feature (2)..(220): NCBI GI NO: 34900810 NR Description: hypothetical protein~predicted by FGENESH etc.
  misc_feature (7)..(220): NCBI GI NO: 34900820 NR Description: hypothetical protein~predicted by FGENESH etc.
  misc_feature (1)..(220): NCBI GI NO: 34900798 NR Description: hypothetical protein~predicted by GENSCAN etc.
  misc_feature (35)..(218): NCBI GI NO: 40714669 NR Description: putative harpin inducing protein
  misc_feature (31)..(218): NCBI GI NO: 40714673 NR Description: putative harpin inducing protein
MCCGECGCYDALCDRCCLCVSTGARDTILCCACCLAVLAGVGLLLVLLAAFCFIRHAEVAVTDASLTRLALAASPATAFAYNLSLTLTVRNKNWAMSVKNTQPLEADYSFDGQRFERVRLADEGSTHPAGKTQVYHLVSGSDGAYVALGNAGVAEFKEENKTGVFQVEVALSGQVRYQAHFTKCKFQANCPLKLQLAPPGTPAVVFQKVKCKLAPASRYC

SEQ ID NO: 17148 - protein, 136 aa, Triticum aestivum
  peptide (1)..(136): Ceres Seq. ID no. 14313364
  misc_feature (43)..(136): Pfam Name: Pfam Description:  Equine herpesvirus glycoprotein gp2
  misc_feature (3)..(136): NCBI GI NO: 13592175 NR Description: ppg3 [Leishmania major]
  misc_feature (39)..(136): NCBI GI NO: 11359723 NR Description: proteophosphoglycan, membrane-associated
  misc_feature (27)..(136): NCBI GI NO: 5420387 NR Description: proteophosphoglycan [Leishmania major]
  misc_feature (39)..(136): NCBI GI NO: 32699068 NR Description: hypothetical protein FLJ35107 [Homo sapiens]
  misc_feature (27)..(136): NCBI GI NO: 13592175 NR Description: ppg3 [Leishmania major]
  misc_feature (39)..(136): NCBI GI NO: 5420387 NR Description: proteophosphoglycan [Leishmania major]
  misc_feature (3)..(136): NCBI GI NO: 13592175 NR Description: ppg3 [Leishmania major]
  misc_feature (39)..(136): NCBI GI NO: 13592175 NR Description: ppg3 [Leishmania major]
  misc_feature (39)..(136): NCBI GI NO: 13592175 NR Description: ppg3 [Leishmania major]
  misc_feature (37)..(136): NCBI GI NO: 32699068 NR Description: hypothetical protein FLJ35107 [Homo sapiens]
LYPRRLVAETPKSRHHSGSCVRTPLLPVQDPAQDPGRVSQPCAAASAAAMTHSATAAASASPPARATPSSAARAASPSSPASASSSSSSRPSASSATPRSPSPTPPSRASRWPRPPPPPSPTTSRSRSPSGTRTGQ

SEQ ID NO: 17149 - protein, 125 aa, Triticum aestivum
  peptide (1)..(125): Ceres Seq. ID no. 14313365
  misc_feature (1)..(125): NCBI GI NO: 34900810 NR Description: hypothetical protein~predicted by FGENESH etc.
  misc_feature (1)..(125): NCBI GI NO: 34900820 NR Description: hypothetical protein~predicted by FGENESH etc.
  misc_feature (1)..(125): NCBI GI NO: 34900798 NR Description: hypothetical protein~predicted by GENSCAN etc.
  misc_feature (1)..(123): NCBI GI NO: 40714669 NR Description: putative harpin inducing protein
  misc_feature (1)..(123): NCBI GI NO: 40714673 NR Description: putative harpin inducing protein
MSVKNTQPLEADYSFDGQRFERVRLADEGSTHPAGKTQVYHLVSGSDGAYVALGNAGVAEFKEENKTGVFQVEVALSGQVRYQAHFTKCKFQANCPLKLQLAPPGTPAVVFQKVKCKLAPASRYC

SEQ ID NO: 17150 - DNA, 954 bp, Triticum aestivum
  misc_feature (1)..(954): Ceres Seq. ID no. 14301807
cccagttcatcgcgatctaagttctaaaataaataaaaagctcatcgcgatctccgtccaactcctcccccaaatcacactcgccggagtgctccgccgtgtaatctagtcccccccttcccaatccctcctgattcgagcgcgcggacgggaggattgcttcgatgcaccggcgtcggcgcgagcggtcgggcaggcggtggccggagctttgcgccggcggccgcctgagatggggaggaagatggaggccaggcgtcggcgtgtgccccttcttcccgcgcggtgcaccagcgatggccggaagggggtgggtggagcgggaggacggcggccagtcggaccatcatgagcatgatcacacccatgaccctggtgtttcctccgtaagcattttttgcgaaggggagatggatctctaaaagtaaaaagtgctgacatatgccggatgaagggactactctctatccagtggaatgtctcaatgctttgcctttcagatttgcacagatgggagaacaaattgctatgtgttctgctccgctctcgttatggaccacttccatgttatccatctgcaatgagtgtatatgacactttacatggatctcccaacagattgaatgtgccgcgcatgaacgagatcgtgcccatcagcagaaacctcaaccgggaagagcgggagccgggcttccaggattgcctgctgaaggaataggccagagacaccaagtttctctctctgcttctcctttttcgcggggtggatctccagctccatgattttgagctttgcggctgcatccagaacttgttcttcaaatgcttaggctcaactgtgcttgaactgacatgaagcgtacgcgaggtgtatgtatatcgacctggccgtttcattgttggaacctggccgtcgtgccgtccactgctgttctcatatgagtcaacaacttc

SEQ ID NO: 17151 - protein, 89 aa, Triticum aestivum
  peptide (1)..(89): Ceres Seq. ID no. 14301808
  misc_feature (47)..(87): NCBI GI NO: 15220146 NR Description: expressed protein [Arabidopsis thaliana]
  misc_feature (47)..(87): NCBI GI NO: 11139268 NR Description: PRLI-interacting factor L [Arabidopsis thaliana]
  misc_feature (47)..(87): NCBI GI NO: 15218287 NR Description: PRLI-interacting factor L -related
MKGLLSIQWNVSMLCLSDLHRWENKLLCVLLRSRYGPLPCYPSAMSVYDTLHGSPNRLNVPRMNEIVPISRNLNREEREPGFQDCLLKE

SEQ ID NO: 17152 - protein, 85 aa, Triticum aestivum
  peptide (1)..(85): Ceres Seq. ID no. 14301809
  misc_feature (55)..(85): NCBI GI NO: 15220146 NR Description: expressed protein [Arabidopsis thaliana]
  misc_feature (61)..(85): NCBI GI NO: 11139268 NR Description: PRLI-interacting factor L [Arabidopsis thaliana]
  misc_feature (61)..(85): NCBI GI NO: 15218287 NR Description: PRLI-interacting factor L -related
MHRRRRERSGRRWPELCAGGRLRWGGRWRPGVGVCPFFPRGAPAMAGRGWVEREDGGQSDHHEHDHTHDPGVSSVSIFCEGEMDL

SEQ ID NO: 17153 - protein, 77 aa, Triticum aestivum
  peptide (1)..(77): Ceres Seq. ID no. 14301810
  misc_feature (35)..(75): NCBI GI NO: 15220146 NR Description: expressed protein [Arabidopsis thaliana]
  misc_feature (35)..(75): NCBI GI NO: 11139268 NR Description: PRLI-interacting factor L [Arabidopsis thaliana]
  misc_feature (35)..(75): NCBI GI NO: 15218287 NR Description: PRLI-interacting factor L -related
MLCLSDLHRWENKLLCVLLRSRYGPLPCYPSAMSVYDTLHGSPNRLNVPRMNEIVPISRNLNREEREPGFQDCLLKE

SEQ ID NO: 17154 - DNA, 1524 bp, Triticum aestivum
  misc_feature (1)..(1524): Ceres Seq. ID no. 12779935
acaatctttcaagtacacctccccagcttccatttaagaatggagatcactagaataggccaatggttaagtcttctgatatgtgtactactattactgcagacagaaggggttcctgtgggaatcacttttgttgaaaatgcagtggcaaaaggggctgtttgtttggatgggagtcctccagcttaccacttccacaagggatctggagcagggattaacaactggatagttcactttgagggaggaggatggtgcaacaacgttactacttgcctttcccgtagggacactcgattaggttcatctaagaaaatggatacatcactttccttttctgggtttttcagtaacagtaaaaagttcaatccagatttctatgattggaacagaatcaaggttaggtattgtgatgggtcatcatttactggtgatgttgaagctgttgatccgaaaaccaatttgcacttcagaggagcaagggtttttgctgtggtcgttgaggatttattagcaaaaggaatgaaaaatgctcaaaatgcaattatctccggatgttcagctggaggattggcttctattctaaattgcgatcgattcaaatcactactacctgcaacaactaaagtgaaatgccttgcagatgctggtttttttatcaatgtaaaggatgtctctggagcacagcgcattgaagagttctacagtcaagttgttcaaacacatggctcagcaaagaatttgcctacatcctgcacttcaagactcagaccagggctgtgctttttccctcaaaatgtcgtgtcccaaatcagtaccccaatcttctttgtaaatgcagcctatgactcatggcagatcaaaaacattttggcaccaggtgctgctgatccccgtggccaatggcgtgaatgcaagcttgatatcaaaaactgctcacctaatcaactcagtgtaatgcaaggattcaggacagatttcttaagggcatttagtgtggttggcaacgccgcatctaaagggcattttatagatggttgctatgcacactgccaaactggaatacaagagacatggctgagaaatgactccccagtggtggccaagacatcaattgcaaaggcagtgggtgattggttttatgatcgaaggcccttccgtgagatagattgtgcctacccttgcaaccctacttgccataatcgtatttttgatcagaatgagcgtccagacgtatagattcatttaaaagagtatgcttatttatttattactacaaactatactttattagttatctagtttttattgaacgagatgtgtcacttgcactcatggctttgtggtttgagatctcaaaccatcaaagtatgggttcgattgttgcatcaacaaaaaacaagctgtgattgatgatttaaaaggttccaaagtgtaagggtaggcaacctgataaaggatgataattgtctaccatgtaaacataacatttttattatcaataaagggtatatctgtaattct

SEQ ID NO: 17155 - protein, 412 aa, Triticum aestivum
  peptide (1)..(412): Ceres Seq. ID no. 12779936
  misc_feature (24)..(389): Pfam Name: Pfam Description:  Pectinacetylesterase
  misc_feature (14)..(412): NCBI GI NO: 7488883 NR Description: pectin acetylesterase (EC 3
  misc_feature (18)..(412): NCBI GI NO: 22328797 NR Description: pectinacetylesterase family; protein id:At4g19420
  misc_feature (20)..(402): NCBI GI NO: 38344147 NR Description: OSJNBa0041A02.14
  misc_feature (16)..(399): NCBI GI NO: 21593445 NR Description: pectin acetylesterase [Arabidopsis thaliana]
  misc_feature (18)..(399): NCBI GI NO: 18415308 NR Description: pectinacetylesterase, putative
  misc_feature (22)..(399): NCBI GI NO: 15242357 NR Description: pectinacetylesterase, putative
  misc_feature (174)..(399): NCBI GI NO: 7488140 NR Description: probable pectin acetylesterase (EC 3
  misc_feature (18)..(151): NCBI GI NO: 7488140 NR Description: probable pectin acetylesterase (EC 3
  misc_feature (40)..(404): NCBI GI NO: 25347293 NR Description: probable pectinacetylesterase precursor T8L23.6
  misc_feature (40)..(404): NCBI GI NO: 30696158 NR Description: pectinacetylesterase, putative
TIFQVHLPSFHLRMEITRIGQWLSLLICVLLLLQTEGVPVGITFVENAVAKGAVCLDGSPPAYHFHKGSGAGINNWIVHFEGGGWCNNVTTCLSRRDTRLGSSKKMDTSLSFSGFFSNSKKFNPDFYDWNRIKVRYCDGSSFTGDVEAVDPKTNLHFRGARVFAVVVEDLLAKGMKNAQNAIISGCSAGGLASILNCDRFKSLLPATTKVKCLADAGFFINVKDVSGAQRIEEFYSQVVQTHGSAKNLPTSCTSRLRPGLCFFPQNVVSQISTPIFFVNAAYDSWQIKNILAPGAADPRGQWRECKLDIKNCSPNQLSVMQGFRTDFLRAFSVVGNAASKGHFIDGCYAHCQTGIQETWLRNDSPVVAKTSIAKAVGDWFYDRRPFREIDCAYPCNPTCHNRIFDQNERPDV

SEQ ID NO: 17156 - protein, 399 aa, Triticum aestivum
  peptide (1)..(399): Ceres Seq. ID no. 12779937
  misc_feature (11)..(376): Pfam Name: Pfam Description:  Pectinacetylesterase
  misc_feature (1)..(399): NCBI GI NO: 7488883 NR Description: pectin acetylesterase (EC 3
  misc_feature (5)..(399): NCBI GI NO: 22328797 NR Description: pectinacetylesterase family; protein id:At4g19420
  misc_feature (7)..(389): NCBI GI NO: 38344147 NR Description: OSJNBa0041A02.14
  misc_feature (3)..(386): NCBI GI NO: 21593445 NR Description: pectin acetylesterase [Arabidopsis thaliana]
  misc_feature (5)..(386): NCBI GI NO: 18415308 NR Description: pectinacetylesterase, putative
  misc_feature (9)..(386): NCBI GI NO: 15242357 NR Description: pectinacetylesterase, putative
  misc_feature (161)..(386): NCBI GI NO: 7488140 NR Description: probable pectin acetylesterase (EC 3
  misc_feature (5)..(138): NCBI GI NO: 7488140 NR Description: probable pectin acetylesterase (EC 3
  misc_feature (27)..(391): NCBI GI NO: 25347293 NR Description: probable pectinacetylesterase precursor T8L23.6
  misc_feature (27)..(391): NCBI GI NO: 30696158 NR Description: pectinacetylesterase, putative
MEITRIGQWLSLLICVLLLLQTEGVPVGITFVENAVAKGAVCLDGSPPAYHFHKGSGAGINNWIVHFEGGGWCNNVTTCLSRRDTRLGSSKKMDTSLSFSGFFSNSKKFNPDFYDWNRIKVRYCDGSSFTGDVEAVDPKTNLHFRGARVFAVVVEDLLAKGMKNAQNAIISGCSAGGLASILNCDRFKSLLPATTKVKCLADAGFFINVKDVSGAQRIEEFYSQVVQTHGSAKNLPTSCTSRLRPGLCFFPQNVVSQISTPIFFVNAAYDSWQIKNILAPGAADPRGQWRECKLDIKNCSPNQLSVMQGFRTDFLRAFSVVGNAASKGHFIDGCYAHCQTGIQETWLRNDSPVVAKTSIAKAVGDWFYDRRPFREIDCAYPCNPTCHNRIFDQNERPDV

SEQ ID NO: 17157 - protein, 307 aa, Triticum aestivum
  peptide (1)..(307): Ceres Seq. ID no. 12779938
  misc_feature (1)..(284): Pfam Name: Pfam Description:  Pectinacetylesterase
  misc_feature (1)..(307): NCBI GI NO: 7488883 NR Description: pectin acetylesterase (EC 3
  misc_feature (1)..(307): NCBI GI NO: 22328797 NR Description: pectinacetylesterase family; protein id:At4g19420
  misc_feature (1)..(297): NCBI GI NO: 38344147 NR Description: OSJNBa0041A02.14
  misc_feature (1)..(294): NCBI GI NO: 21593445 NR Description: pectin acetylesterase [Arabidopsis thaliana]
  misc_feature (1)..(294): NCBI GI NO: 18415308 NR Description: pectinacetylesterase, putative
  misc_feature (1)..(294): NCBI GI NO: 15242357 NR Description: pectinacetylesterase, putative
  misc_feature (69)..(294): NCBI GI NO: 7488140 NR Description: probable pectin acetylesterase (EC 3
  misc_feature (1)..(46): NCBI GI NO: 7488140 NR Description: probable pectin acetylesterase (EC 3
  misc_feature (1)..(299): NCBI GI NO: 25347293 NR Description: probable pectinacetylesterase precursor T8L23.6
  misc_feature (1)..(299): NCBI GI NO: 30696158 NR Description: pectinacetylesterase, putative
MDTSLSFSGFFSNSKKFNPDFYDWNRIKVRYCDGSSFTGDVEAVDPKTNLHFRGARVFAVVVEDLLAKGMKNAQNAIISGCSAGGLASILNCDRFKSLLPATTKVKCLADAGFFINVKDVSGAQRIEEFYSQVVQTHGSAKNLPTSCTSRLRPGLCFFPQNVVSQISTPIFFVNAAYDSWQIKNILAPGAADPRGQWRECKLDIKNCSPNQLSVMQGFRTDFLRAFSVVGNAASKGHFIDGCYAHCQTGIQETWLRNDSPVVAKTSIAKAVGDWFYDRRPFREIDCAYPCNPTCHNRIFDQNERPDV

SEQ ID NO: 17158 - DNA, 971 bp, Triticum aestivum
  misc_feature (1)..(971): Ceres Seq. ID no. 12454684
  misc_feature (870)..(870): n is a, c, t, g, unknown, or other
  misc_feature (933)..(933): n is a, c, t, g, unknown, or other
  misc_feature (792)..(792): n is a, c, t, g, unknown, or other
attgtcaagtggttcaaggcttgaggcatccggaatttgagaccaaagcagtcttgtttctctgcagcagccgacgctgctgatgcccgagccccaccaaatccaccaacccccgcccccgcccccgcctccaaccgatccaaaccccgttgcctccacggctgcaaatgcccggcgcaatccggccccgctgccgctgccgttgcctttgccggatgcggcgtcggcttcagcgtcggcatcacgctcgccggtgtcggcgtcgggctgccacagcacggcatcatcgggaaccactaccacggtggaggttttgcaagcaatgtcccattcgaatcagcaagggttttacctcttgaccatgctaaaaggtatggcatgggatgccatcagttatgcgagcaacgtcgcagctatgaggaaagaatctcgacagaagcttttaagatgtcaggagaatcctcaagtttcaggaggagttgatctgcccaagctggggaaaggaatgtccagcagctttcgatcaacgatggagtgtatcaaggccttcacaaatcagcattggcctccataggcagcacccaagtaaactgaagattgataaaccgagctttgtgtgcaaaccacccaaccgggatcaaagcctgggtagtggtacccctttcactgagtgacaatcgggtagtcggatgcaggtggctcgtatggcgtccaccacagggttgacgtcccttttaatgaagaattaaggacttgtactttatgaataagaacccccatagcacatatttnttcatcatatgtttgtggcatgagcaagtttaaatttttatggttataaggggaaacaattccagctgaagaacatgntagcctgtaatctagctagtgatgaatcgatgtgtaactataacaatgatgttcatccatgcncttcgcagaatcttgtattgtgaaatgaaactccattc

SEQ ID NO: 17159 - protein, 163 aa, Triticum aestivum
  peptide (1)..(163): Ceres Seq. ID no. 12454685
  misc_feature (89)..(163): NCBI GI NO: 34899622 NR Description: cadmium-induced protein-like
  misc_feature (1)..(33): NCBI GI NO: 34899622 NR Description: cadmium-induced protein-like
MPEPHQIHQPPPPPPPPTDPNPVASTAANARRNPAPLPLPLPLPDAASASASASRSPVSASGCHSTASSGTTTTVEVLQAMSHSNQQGFYLLTMLKGMAWDAISYASNVAAMRKESRQKLLRCQENPQVSGGVDLPKLGKGMSSSFRSTMECIKAFTNQHWPP

SEQ ID NO: 17160 - protein, 83 aa, Triticum aestivum
  peptide (1)..(83): Ceres Seq. ID no. 12454686
  misc_feature (9)..(83): NCBI GI NO: 34899622 NR Description: cadmium-induced protein-like
MSHSNQQGFYLLTMLKGMAWDAISYASNVAAMRKESRQKLLRCQENPQVSGGVDLPKLGKGMSSSFRSTMECIKAFTNQHWPP

SEQ ID NO: 17161 - DNA, 1030 bp, Triticum aestivum
  misc_feature (1)..(1030): Ceres Seq. ID no. 12784913
gtagttctcgtgctcactgcccacccagctcatctcgtctcaatctcacccgtctcttcctccaccgtctagaagcttctcgaaggcaggcgccatacacttctctcctctcgccatgggcaacgggctgtctccctgcgtgaacatgccggcggccgccgaggtgcccgccgcggcccggctggtgtactggggcgggcggacgagggcgctgccagtctacgaggacgaggagggtgatggcgagggcaacggcggtgtctcctgcacggcggcggacgtgacggccgagctgctcccggcggaccacgtggtctgcccggccgactccttcttcgtcggcctcccggtccccgtcgcgtcgccgggggagcggctgctgccgggccggacctacttcgtgctcccccgccgcctcctctcctccccctcccccggcggcaacggcaaggcggccgtgctcaccgcggccacgctcgcgtcgctgtcggccgcgccggggggcaggaagacggtgcagctcgccgggcccggccagtgcccgttcgagtacgtcaagggcggcgaggacggtgccgcggcgctcatccgggtcctgccgcagttcatcgagaaggtcatcacctgcgacggcggcaacggcaacggcgacgctgccggccggcgcgggtcgggcaaggtggctgcgtccgcgacggagctgtgcagcacgccggagctgaagcggcactacgcgcagctcgtgggcgccaagggccggccgtggtcgccggggctggagaccatctccgagcgcagcaagaggaggatcttcccgtcgccggccaggctgctgctctcttcgcaataatgtaattagctaatgagcgtagatcgttttcggattagagattaatcgagattaattaggtagggaacacagcgttcgattttacttgtacaatagttggaactgaaatacaaatgtataaatttgtcgaaaacatttacatatgtacctaggatttttggaagtgagatactacaagtc

SEQ ID NO: 17162 - protein, 244 aa, Triticum aestivum
  peptide (1)..(244): Ceres Seq. ID no. 12784914
  misc_feature (44)..(242): NCBI GI NO: 34906632 NR Description: P0431G06.11
  misc_feature (66)..(231): NCBI GI NO: 34899084 NR Description: hypothetical protein~similar to Oryza sativachromosome 1
  misc_feature (64)..(234): NCBI GI NO: 18416841 NR Description: putative protein; protein id: At5g12340.1
MGNGLSPCVNMPAAAEVPAAARLVYWGGRTRALPVYEDEEGDGEGNGGVSCTAADVTAELLPADHVVCPADSFFVGLPVPVASPGERLLPGRTYFVLPRRLLSSPSPGGNGKAAVLTAATLASLSAAPGGRKTVQLAGPGQCPFEYVKGGEDGAAALIRVLPQFIEKVITCDGGNGNGDAAGRRGSGKVAASATELCSTPELKRHYAQLVGAKGRPWSPGLETISERSKRRIFPSPARLLLSSQ

SEQ ID NO: 17163 - protein, 234 aa, Triticum aestivum
  peptide (1)..(234): Ceres Seq. ID no. 12784915
  misc_feature (34)..(232): NCBI GI NO: 34906632 NR Description: P0431G06.11
  misc_feature (56)..(221): NCBI GI NO: 34899084 NR Description: hypothetical protein~similar to Oryza sativachromosome 1
  misc_feature (54)..(224): NCBI GI NO: 18416841 NR Description: putative protein; protein id: At5g12340.1
MPAAAEVPAAARLVYWGGRTRALPVYEDEEGDGEGNGGVSCTAADVTAELLPADHVVCPADSFFVGLPVPVASPGERLLPGRTYFVLPRRLLSSPSPGGNGKAAVLTAATLASLSAAPGGRKTVQLAGPGQCPFEYVKGGEDGAAALIRVLPQFIEKVITCDGGNGNGDAAGRRGSGKVAASATELCSTPELKRHYAQLVGAKGRPWSPGLETISERSKRRIFPSPARLLLSSQ

SEQ ID NO: 17164 - DNA, 1333 bp, Triticum aestivum
  misc_feature (1)..(1333): Ceres Seq. ID no. 12784099
acaaaacaaaacgaccgcccctccgcccttctcccgccctcgcccctctccctctcctcctcccctccttccccggcaagactagggtttgcagccaccgggcctcaccatgtacaacggaggcgaccactacgacgggaacggcggcggcgccgccaacgccaacagcctcttcagcggcggcgggttcatgccctcgcagaccaccaacaccccggagggcagcggcggcatcaccaagactcgcggcgcgcagacgctgctcccgctcaccgtcaagcagattatggacgcgtcccagaccaacgacgacaagtccagtttcgctgtcaatggcaccgaggtgtccacggttaggcttgtaggacgcatgatgaataaggcagagcggatgacagatgtacaattcattcttgatgatggtacaggcaggatagaagtgaatcgctgggaaaatgagacatcggacactacagaaatgagtttagtcaaggatggtgactatgttattgtcaatggtggtctgaaaagctttcaagggaagcgtcacattgttgcttattccgtgcggcttgtaaccaactacaatgatataacacatcactttctgtactgcatttatgtgcatttggatcttgccaaggctaagaaatctgggacacagcctcaagtaactgctaatgcatcatggaaccaagctccaccccctaataatcaggccccaacactatctgcatctgggaatgctggtgggcaagatttaactgatatggtcatgaatgtttttcatgacccagtgcttgtaaacctggagcatggagttagtatcgaacaggttgcaagccgtcttaacatatcagatgcacttgccaggtcgactgttacacatcttattgatgttggcaacctctatccaactatcgatgacaaccattacaagtctacactgaatggttgatatggctgtgcccacgcgtgcaagcgttaggctcccctggagcgatcgaataatataagcactcttgcaagagttgtttttgcagagtggcttgctggtcctctagacagtcgcaaggagagcaacttaacggctaggttaagttgcatatctaagcacttgcgccttatgtgtaatggatatgagtaggttagatctctaggtgctttcgtttgtgtttgctactgcagtacctcgagaacatccatgcctgtgtgacctgcaattagtttgcgacttgtttgtggttatgactctgccctgcatattgtttctggattcagttaacgtttgccctaaaaatgcatatcatgcatctgattatttctggattcc

SEQ ID NO: 17165 - protein, 282 aa, Triticum aestivum
  peptide (1)..(282): Ceres Seq. ID no. 12784100
  misc_feature (82)..(154): Pfam Name: Pfam Description:  OB-fold nucleic acid binding domain
  misc_feature (27)..(281): NCBI GI NO: 13516746 NR Description: replication protein A 30kDa
  misc_feature (27)..(281): NCBI GI NO: 9801268 NR Description: replication protein A2 [Oryza sativa]
  misc_feature (19)..(277): NCBI GI NO: 18400560 NR Description: putative replication protein A1
  misc_feature (19)..(185): NCBI GI NO: 25347925 NR Description: probable replication protein A1
  misc_feature (201)..(277): NCBI GI NO: 25347925 NR Description: probable replication protein A1
  misc_feature (13)..(281): NCBI GI NO: 18396383 NR Description: putative replication factor A
  misc_feature (13)..(281): NCBI GI NO: 6728969 NR Description: putative replication factor A
  misc_feature (8)..(280): NCBI GI NO: 2498849 NR Description: Replication factor-A protein 2
  misc_feature (1)..(273): NCBI GI NO: 21627816 NR Description: possible replication factor-a protein
  misc_feature (42)..(280): NCBI GI NO: 19075727 NR Description: replication factor-a protein 2
MYNGGDHYDGNGGGAANANSLFSGGGFMPSQTTNTPEGSGGITKTRGAQTLLPLTVKQIMDASQTNDDKSSFAVNGTEVSTVRLVGRMMNKAERMTDVQFILDDGTGRIEVNRWENETSDTTEMSLVKDGDYVIVNGGLKSFQGKRHIVAYSVRLVTNYNDITHHFLYCIYVHLDLAKAKKSGTQPQVTANASWNQAPPPNNQAPTLSASGNAGGQDLTDMVMNVFHDPVLVNLEHGVSIEQVASRLNISDALARSTVTHLIDVGNLYPTIDDNHYKSTLNG

SEQ ID NO: 17166 - protein, 255 aa, Triticum aestivum
  peptide (1)..(255): Ceres Seq. ID no. 12784101
  misc_feature (55)..(127): Pfam Name: Pfam Description:  OB-fold nucleic acid binding domain
  misc_feature (1)..(254): NCBI GI NO: 13516746 NR Description: replication protein A 30kDa
  misc_feature (1)..(254): NCBI GI NO: 9801268 NR Description: replication protein A2 [Oryza sativa]
  misc_feature (1)..(250): NCBI GI NO: 18400560 NR Description: putative replication protein A1
  misc_feature (1)..(158): NCBI GI NO: 25347925 NR Description: probable replication protein A1
  misc_feature (174)..(250): NCBI GI NO: 25347925 NR Description: probable replication protein A1
  misc_feature (1)..(254): NCBI GI NO: 18396383 NR Description: putative replication factor A
  misc_feature (1)..(254): NCBI GI NO: 6728969 NR Description: putative replication factor A
  misc_feature (1)..(253): NCBI GI NO: 2498849 NR Description: Replication factor-A protein 2
  misc_feature (1)..(246): NCBI GI NO: 21627816 NR Description: possible replication factor-a protein
  misc_feature (15)..(253): NCBI GI NO: 19075727 NR Description: replication factor-a protein 2
MPSQTTNTPEGSGGITKTRGAQTLLPLTVKQIMDASQTNDDKSSFAVNGTEVSTVRLVGRMMNKAERMTDVQFILDDGTGRIEVNRWENETSDTTEMSLVKDGDYVIVNGGLKSFQGKRHIVAYSVRLVTNYNDITHHFLYCIYVHLDLAKAKKSGTQPQVTANASWNQAPPPNNQAPTLSASGNAGGQDLTDMVMNVFHDPVLVNLEHGVSIEQVASRLNISDALARSTVTHLIDVGNLYPTIDDNHYKSTLNG

SEQ ID NO: 17167 - protein, 223 aa, Triticum aestivum
  peptide (1)..(223): Ceres Seq. ID no. 12784102
  misc_feature (23)..(95): Pfam Name: Pfam Description:  OB-fold nucleic acid binding domain
  misc_feature (1)..(222): NCBI GI NO: 13516746 NR Description: replication protein A 30kDa
  misc_feature (1)..(222): NCBI GI NO: 9801268 NR Description: replication protein A2 [Oryza sativa]
  misc_feature (1)..(218): NCBI GI NO: 18400560 NR Description: putative replication protein A1
  misc_feature (1)..(126): NCBI GI NO: 25347925 NR Description: probable replication protein A1
  misc_feature (142)..(218): NCBI GI NO: 25347925 NR Description: probable replication protein A1
  misc_feature (1)..(222): NCBI GI NO: 18396383 NR Description: putative replication factor A
  misc_feature (1)..(222): NCBI GI NO: 6728969 NR Description: putative replication factor A
  misc_feature (1)..(221): NCBI GI NO: 2498849 NR Description: Replication factor-A protein 2
  misc_feature (1)..(214): NCBI GI NO: 21627816 NR Description: possible replication factor-a protein
  misc_feature (1)..(221): NCBI GI NO: 19075727 NR Description: replication factor-a protein 2
MDASQTNDDKSSFAVNGTEVSTVRLVGRMMNKAERMTDVQFILDDGTGRIEVNRWENETSDTTEMSLVKDGDYVIVNGGLKSFQGKRHIVAYSVRLVTNYNDITHHFLYCIYVHLDLAKAKKSGTQPQVTANASWNQAPPPNNQAPTLSASGNAGGQDLTDMVMNVFHDPVLVNLEHGVSIEQVASRLNISDALARSTVTHLIDVGNLYPTIDDNHYKSTLNG

SEQ ID NO: 17168 - DNA, 1237 bp, Triticum aestivum
  misc_feature (1)..(1237): Ceres Seq. ID no. 14301782
gtattctctctttgtgtttacttgctcttaaaaattatctcacctgctgtgttgttatcagcagtatatctacctacctgtatacagccatacacatcaccagaggtttttcactgttgttgctgcacctgaatctgcaatgggtaggtccccagggccaaggagggggagtgccctgcttctgcctctgtttctcacctgcttcttctcaggggcaacgaggcgggcggagtcggcccgggagttcacgctcatcaaccagtgcaagacggaggtgtggccggcggtgacgccgggcgagagcttcgggggcggcgggtatgcgctccgtgcaggcgagtcggtggtgttcaccgcccccgtggggtggtcgggccgcgtgtggggccgcaccggctgcacctttgactcggccggcaacggcacgtgcgagacgggcgggtgcggcacgtcgctgcagtgcgaatcggcgtcgggggccgctccggcgacgctggcggagttcacgctggcggcgactgactactacgacgtgagcctggtggacggcttcaacctccccgtggtggtgaccccgaccccgacgagcgccaactggacaggctgcgccccggcggggtgcgacggtgacctgcgccggggctgcccgtcggagctggccgtgaagggcgacggggggaaggtggtggcttgccggagcgcgtgcgacgtgttcgggaccgaccagtactgctgccgtggtcagtatgccaacccggtggcctgccagccgaccttctactcgaagaagttcaaggcggcatgcccggccgcctacagctacgcctacgacgacccctcctccatcttcacccgcgcccagtcgcccgactacaccatcaccttctgctccagcaacatgaagcaatcggtgtgttcgtaccgcgacagccggcttgtctgcagcggctccggcaggagcacctcctctggtctaatgctgctgctgctgctctccagcttcgtggcattgcaatttgcaaccccagtgtgactgattggttgattaaggcctaatcatccaagagcaagctgacctgaccctcttcttgatatagttctttttggatttgttttctactatgagaaacagagagtaggtgattcatggatcaaatttctgcactgtcagacagtcagtactcagtaccatttgaatgagagttatacagagatagcataagtgaatgtttcgttc

SEQ ID NO: 17169 - protein, 297 aa, Triticum aestivum
  peptide (1)..(297): Ceres Seq. ID no. 14301783
  misc_feature (40)..(251): Pfam Name: Pfam Description:  Thaumatin family
  misc_feature (9)..(294): NCBI GI NO: 38345519 NR Description: OSJNBa0039K24.22
  misc_feature (9)..(294): NCBI GI NO: 5777618 NR Description: CAA30376.1 protein [Oryza sativa]
  misc_feature (23)..(252): NCBI GI NO: 15217445 NR Description: thaumatin family [Arabidopsis thaliana]
  misc_feature (17)..(251): NCBI GI NO: 30686314 NR Description: thaumatin family [Arabidopsis thaliana]
  misc_feature (17)..(251): NCBI GI NO: 28973703 NR Description: putative pathogenesis-related protein 5 precursor
  misc_feature (9)..(294): NCBI GI NO: 37531042 NR Description: putative thaumatin-like protein
  misc_feature (17)..(250): NCBI GI NO: 15222088 NR Description: thaumatin-like protein [Arabidopsis thaliana]
  misc_feature (17)..(250): NCBI GI NO: 2435406 NR Description: thaumatin-like protein [Arabidopsis thaliana]
  misc_feature (32)..(250): NCBI GI NO: 15221033 NR Description: thaumatin-like protein [Arabidopsis thaliana]
  misc_feature (8)..(278): NCBI GI NO: 21592749 NR Description: putative thaumatin-like protein
MGRSPGPRRGSALLLPLFLTCFFSGATRRAESAREFTLINQCKTEVWPAVTPGESFGGGGYALRAGESVVFTAPVGWSGRVWGRTGCTFDSAGNGTCETGGCGTSLQCESASGAAPATLAEFTLAATDYYDVSLVDGFNLPVVVTPTPTSANWTGCAPAGCDGDLRRGCPSELAVKGDGGKVVACRSACDVFGTDQYCCRGQYANPVACQPTFYSKKFKAACPAAYSYAYDDPSSIFTRAQSPDYTITFCSSNMKQSVCSYRDSRLVCSGSGRSTSSGLMLLLLLSSFVALQFATPV

SEQ ID NO: 17170 - DNA, 1096 bp, Triticum aestivum
  misc_feature (1)..(1096): Ceres Seq. ID no. 14301761
aacacaaagtcttgcttcagtctgcgcctagtcctagcaggtcgcgaatttcgccggttctattgtttctctaattatcttcgagcagatcactagcaggcaccgacggatttggagcagctctgatctttagcggccatggtcaagaaaggaatccagtatgtcgtggtggatgccttcacggcccagccgttcaagggcaacccggcggcggtgtgcttcctggaggacgacgcggccgcccccgcgggggacgggcggtggatgcagtccgtcgccgtcgagttcaacctctcccagacggccttcttctcccgtgactcgtcctgcgcagccgacgccaccacgccgcggttccacctccgctggttcacccccgtcaccgaggtcgcgctctgcggccacgcaacgctggccaccgcccacttcctcttcacgtctgtcctcgcggagcgccatggcgtggttgagttcgcgaccaagtccggggtcctgaccgccaagaaggttcctgcaccggaggctgaggagcaggggaagctgttcattgagctggacttccccatgagtgattatgtgggttgcgatcccgccgacgagctgccgtccatcccggagacgctcaacggcgcgcccgtcgtcagtgttcacaaatcagtggccaccaacgacttcattgttgaactttcatcaggaaaagaggtcgccgatgtccttcctaacatcgaagaaataagaaagtgtgccggcagaggtgtgattgttacagcaccggcgcctgctggatcgggttatgacttcttcacacgcttcttctgcccaaaatttgggattgatgaggatcccgtatgtggcagtgcacactgtgttttggcaccctactggggtggaaagctggggaagcaaaaactgatagcgtttcaggtatctccaaggagtggggcactatacctggagctggatgttgcgaatcagcgagtgcggattcagggagaagctgttactgtcatggctgggacactcttcgcttagctagcatattgaccatccattgacttgctctatgaacttgggagaaataaatatatttgctgcc

SEQ ID NO: 17171 - protein, 297 aa, Triticum aestivum
  peptide (1)..(297): Ceres Seq. ID no. 14301762
  misc_feature (1)..(297): NCBI GI NO: 34903112 NR Description: unnamed protein product
  misc_feature (3)..(293): NCBI GI NO: 15236203 NR Description: expressed protein [Arabidopsis thaliana]
  misc_feature (3)..(293): NCBI GI NO: 20466358 NR Description: putative protein [Arabidopsis thaliana]
  misc_feature (3)..(293): NCBI GI NO: 15218739 NR Description: expressed protein [Arabidopsis thaliana]
  misc_feature (6)..(295): NCBI GI NO: 15236201 NR Description: hypothetical protein [Arabidopsis thaliana]
  misc_feature (39)..(295): NCBI GI NO: 29833535 NR Description: putative oxidoreductase
  misc_feature (10)..(297): NCBI GI NO: 31560132 NR Description: RIKEN cDNA 0610038K03 [Mus musculus]
  misc_feature (10)..(297): NCBI GI NO: 18202860 NR Description: Probable oxidoreductase 0610038K03Rik
  misc_feature (137)..(295): NCBI GI NO: 15597966 NR Description: hypothetical protein [Pseudomonas aeruginosa PA01]
  misc_feature (11)..(123): NCBI GI NO: 15597966 NR Description: hypothetical protein [Pseudomonas aeruginosa PA01]
MVKKGIQYVVVDAFTAQPFKGNPAAVCFLEDDAAAPAGDGRWMQSVAVEFNLSQTAFFSRDSSCAADATTPRFHLRWFTPVTEVALCGHATLATAHFLFTSVLAERHGVVEFATKSGVLTAKKVPAPEAEEQGKLFIELDFPMSDYVGCDPADELPSIPETLNGAPVVSVHKSVATNDFIVELSSGKEVADVLPNIEEIRKCAGRGVIVTAPAPAGSGYDFFTRFFCPKFGIDEDPVCGSAHCVLAPYWGGKLGKQKLIAFQVSPRSGALYLELDVANQRVRIQGEAVTVMAGTLFA

SEQ ID NO: 17172 - protein, 255 aa, Triticum aestivum
  peptide (1)..(255): Ceres Seq. ID no. 14301763
  misc_feature (1)..(255): NCBI GI NO: 34903112 NR Description: unnamed protein product
  misc_feature (1)..(251): NCBI GI NO: 15236203 NR Description: expressed protein [Arabidopsis thaliana]
  misc_feature (1)..(251): NCBI GI NO: 20466358 NR Description: putative protein [Arabidopsis thaliana]
  misc_feature (1)..(251): NCBI GI NO: 15218739 NR Description: expressed protein [Arabidopsis thaliana]
  misc_feature (1)..(253): NCBI GI NO: 15236201 NR Description: hypothetical protein [Arabidopsis thaliana]
  misc_feature (1)..(253): NCBI GI NO: 29833535 NR Description: putative oxidoreductase
  misc_feature (1)..(255): NCBI GI NO: 31560132 NR Description: RIKEN cDNA 0610038K03 [Mus musculus]
  misc_feature (1)..(255): NCBI GI NO: 18202860 NR Description: Probable oxidoreductase 0610038K03Rik
  misc_feature (95)..(253): NCBI GI NO: 15597966 NR Description: hypothetical protein [Pseudomonas aeruginosa PA01]
  misc_feature (1)..(81): NCBI GI NO: 15597966 NR Description: hypothetical protein [Pseudomonas aeruginosa PA01]
MQSVAVEFNLSQTAFFSRDSSCAADATTPRFHLRWFTPVTEVALCGHATLATAHFLFTSVLAERHGVVEFATKSGVLTAKKVPAPEAEEQGKLFIELDFPMSDYVGCDPADELPSIPETLNGAPVVSVHKSVATNDFIVELSSGKEVADVLPNIEEIRKCAGRGVIVTAPAPAGSGYDFFTRFFCPKFGIDEDPVCGSAHCVLAPYWGGKLGKQKLIAFQVSPRSGALYLELDVANQRVRIQGEAVTVMAGTLFA

SEQ ID NO: 17173 - protein, 155 aa, Triticum aestivum
  peptide (1)..(155): Ceres Seq. ID no. 14301764
  misc_feature (1)..(155): NCBI GI NO: 34903112 NR Description: unnamed protein product
  misc_feature (1)..(151): NCBI GI NO: 15236203 NR Description: expressed protein [Arabidopsis thaliana]
  misc_feature (1)..(151): NCBI GI NO: 20466358 NR Description: putative protein [Arabidopsis thaliana]
  misc_feature (1)..(151): NCBI GI NO: 15218739 NR Description: expressed protein [Arabidopsis thaliana]
  misc_feature (1)..(153): NCBI GI NO: 15236201 NR Description: hypothetical protein [Arabidopsis thaliana]
  misc_feature (1)..(153): NCBI GI NO: 29833535 NR Description: putative oxidoreductase
  misc_feature (1)..(155): NCBI GI NO: 31560132 NR Description: RIKEN cDNA 0610038K03 [Mus musculus]
  misc_feature (1)..(155): NCBI GI NO: 18202860 NR Description: Probable oxidoreductase 0610038K03Rik
  misc_feature (1)..(153): NCBI GI NO: 15597966 NR Description: hypothetical protein [Pseudomonas aeruginosa PA01]
  misc_feature (1)..(40): NCBI GI NO: 17542154 NR Description: mawd binding protein like (4N240)
MSDYVGCDPADELPSIPETLNGAPVVSVHKSVATNDFIVELSSGKEVADVLPNIEEIRKCAGRGVIVTAPAPAGSGYDFFTRFFCPKFGIDEDPVCGSAHCVLAPYWGGKLGKQKLIAFQVSPRSGALYLELDVANQRVRIQGEAVTVMAGTLFA

SEQ ID NO: 17174 - DNA, 1370 bp, Triticum aestivum
  misc_feature (1)..(1370): Ceres Seq. ID no. 14313268
aaagagagagaaaagcgcacgaaaagaaaacagagagaaatgaaactgccctgctgctgctgaggtcggcctcctggcgatgagcccccgccgccgtcccccgctgctcctcctcgccgccgtcgccgtcgcctgcgcctgcgccgccgcccgcccctgcgcggccctcgtccgcctcggtgccgcctccttcctcgacgcccccgcgcgcttcgggccccgggtgaccggcgacgggatatgcgggtcgctgcgcgccgcggagcccgccgacgcgtgcgcgcccgtccggggcgcccccggcgggagcggcgggatggcgttcgtgctcatcgcgcgcgggaactgcagcttcgagggcaaggtgcgggcggcgcagcgggccggcttcgacgccgcgctcgtccacgacgacgaggacaaggccagcctctactccatggttggcgatcctgagggcatacacatacctgcggtattcgtatccaaaatggctggggaaaccttgaagaagtttgccagaggtgaagatggggaatgctgtataaactcgtcgatggatgagactgcagggacagtgttggtgatgtcgttcgtatcacttgttgtcatcatatcagttgtagcttcatttcttttcgctcggaactgccgacttttacgcaatggagttgataatcgcccaccttacatcaagaagcatgtggtggaaaagcttccttctgtggtatataaagctccctgctcaagtggcaacaattgtgaagaagcctgtgccatttgtttagaagactatgataatggtgacatgcttagacttctcccatgcaaacatgagtttcatgtggagtgtattgatccctggctgacaaagtggggcacattttgcccggtatgcaaacttgaggtactcacaggtggataagcaggcaagctaggagtaagtctcaggtgaataagcaagcctccgttactgcatactcccttcgtccggaaatacttgtagaagaaatgggtaaaaatggatatatgtagaactaaaacacatccagatacatccattcccccgacaagtatttccggatggagggagtatatacaagtagtgctcggcggcatgacggttatatccaggcgtgctgaactggttgatctgttgttggctgggtttgcaagatagatcaatgccgaacattttatcatgaggatggggtatgggctgtgcggtctctgggactgggcccgtcttgatacccagtagaagattgaattgtgtcgttaacattgagatgaactgtttaattgaggtgtagtatgtggaagccatcttgtaattatatgtcagaagttcaattgcttctttcccatgc

SEQ ID NO: 17175 - protein, 281 aa, Triticum aestivum
  peptide (1)..(281): Ceres Seq. ID no. 14313269
  misc_feature (49)..(147): Pfam Name: Pfam Description:  PA domain
  misc_feature (10)..(279): NCBI GI NO: 15239276 NR Description: ReMembR-H2 protein JR700 (gb|AAF32325.1)
  misc_feature (8)..(280): NCBI GI NO: 38637053 NR Description: putative ReMembR-H2 protein
  misc_feature (6)..(279): NCBI GI NO: 22330577 NR Description: expressed protein [Arabidopsis thaliana]
  misc_feature (37)..(279): NCBI GI NO: 25406132 NR Description: unknown protein F17M19.13
  misc_feature (4)..(280): NCBI GI NO: 19071633 NR Description: putative integral membrane protein
  misc_feature (9)..(279): NCBI GI NO: 6942149 NR Description: ReMembR-H2 protein JR702 [Arabidopsis thaliana]
  misc_feature (37)..(279): NCBI GI NO: 15219930 NR Description: RING zinc finger protein -related
  misc_feature (47)..(280): NCBI GI NO: 15219668 NR Description: integral membrane protein -related
  misc_feature (37)..(281): NCBI GI NO: 15233945 NR Description: expressed protein [Arabidopsis thaliana]
  misc_feature (10)..(280): NCBI GI NO: 15219670 NR Description: integral membrane protein -related
MSPRRRPPLLLLAAVAVACACAAARPCAALVRLGAASFLDAPARFGPRVTGDGICGSLRAAEPADACAPVRGAPGGSGGMAFVLIARGNCSFEGKVRAAQRAGFDAALVHDDEDKASLYSMVGDPEGIHIPAVFVSKMAGETLKKFARGEDGECCINSSMDETAGTVLVMSFVSLVVIISVVASFLFARNCRLLRNGVDNRPPYIKKHVVEKLPSVVYKAPCSSGNNCEEACAICLEDYDNGDMLRLLPCKHEFHVECIDPWLTKWGTFCPVCKLEVLTGG

SEQ ID NO: 17176 - protein, 202 aa, Triticum aestivum
  peptide (1)..(202): Ceres Seq. ID no. 14313270
  misc_feature (1)..(68): Pfam Name: Pfam Description:  PA domain
  misc_feature (1)..(200): NCBI GI NO: 15239276 NR Description: ReMembR-H2 protein JR700 (gb|AAF32325.1)
  misc_feature (1)..(201): NCBI GI NO: 38637053 NR Description: putative ReMembR-H2 protein
  misc_feature (1)..(200): NCBI GI NO: 22330577 NR Description: expressed protein [Arabidopsis thaliana]
  misc_feature (1)..(200): NCBI GI NO: 25406132 NR Description: unknown protein F17M19.13
  misc_feature (1)..(201): NCBI GI NO: 19071633 NR Description: putative integral membrane protein
  misc_feature (1)..(200): NCBI GI NO: 6942149 NR Description: ReMembR-H2 protein JR702 [Arabidopsis thaliana]
  misc_feature (1)..(200): NCBI GI NO: 15219930 NR Description: RING zinc finger protein -related
  misc_feature (1)..(201): NCBI GI NO: 15219668 NR Description: integral membrane protein -related
  misc_feature (1)..(202): NCBI GI NO: 15233945 NR Description: expressed protein [Arabidopsis thaliana]
  misc_feature (1)..(201): NCBI GI NO: 15219670 NR Description: integral membrane protein -related
MAFVLIARGNCSFEGKVRAAQRAGFDAALVHDDEDKASLYSMVGDPEGIHIPAVFVSKMAGETLKKFARGEDGECCINSSMDETAGTVLVMSFVSLVVIISVVASFLFARNCRLLRNGVDNRPPYIKKHVVEKLPSVVYKAPCSSGNNCEEACAICLEDYDNGDMLRLLPCKHEFHVECIDPWLTKWGTFCPVCKLEVLTGG

SEQ ID NO: 17177 - protein, 161 aa, Triticum aestivum
  peptide (1)..(161): Ceres Seq. ID no. 14313271
  misc_feature (112)..(153): Pfam Name: RING finger Pfam Description: Zinc finger, C3HC4 type
  misc_feature (1)..(159): NCBI GI NO: 15239276 NR Description: ReMembR-H2 protein JR700 (gb|AAF32325.1)
  misc_feature (1)..(160): NCBI GI NO: 38637053 NR Description: putative ReMembR-H2 protein
  misc_feature (1)..(159): NCBI GI NO: 22330577 NR Description: expressed protein [Arabidopsis thaliana]
  misc_feature (1)..(159): NCBI GI NO: 25406132 NR Description: unknown protein F17M19.13
  misc_feature (1)..(160): NCBI GI NO: 19071633 NR Description: putative integral membrane protein
  misc_feature (1)..(159): NCBI GI NO: 6942149 NR Description: ReMembR-H2 protein JR702 [Arabidopsis thaliana]
  misc_feature (1)..(159): NCBI GI NO: 15219930 NR Description: RING zinc finger protein -related
  misc_feature (1)..(160): NCBI GI NO: 15219668 NR Description: integral membrane protein -related
  misc_feature (1)..(161): NCBI GI NO: 15233945 NR Description: expressed protein [Arabidopsis thaliana]
  misc_feature (1)..(160): NCBI GI NO: 15219670 NR Description: integral membrane protein -related
MVGDPEGIHIPAVFVSKMAGETLKKFARGEDGECCINSSMDETAGTVLVMSFVSLVVIISVVASFLFARNCRLLRNGVDNRPPYIKKHVVEKLPSVVYKAPCSSGNNCEEACAICLEDYDNGDMLRLLPCKHEFHVECIDPWLTKWGTFCPVCKLEVLTGG

SEQ ID NO: 17178 - DNA, 818 bp, Triticum aestivum
  misc_feature (1)..(818): Ceres Seq. ID no. 14302986
cccatccccaaactccagatcgatcgcaccgggagattgctgacgcccgcccgccgcgatggaggaggagaagaagatgaagctctgcttctccatcccctcgaaacccaaggtcaagcccgccacgcctcccgccgccttctccgtcgccgccgtggcccccggccccgccccgcggttcgtcaccgtgttcgatccctcggaaaccctcaccccagcgcccgccgcgcccgtcgtcattgcgccccttcccgactcgcgcaaaccctccccagctgctgccgcgccggccgcgcccgtcgtcatcgcgccccttcccaacacgcgcaagctcgccgaggcccccgccttcgtgctcggcgcctccgacagcccctcctccagcgcagcctacggcctcaccgtccgcaatacggattcgaagaggaagcttgatccccaggacgatgctgctagggagcagccgtcgcctccaggccccagcggcgaggacctgatgctgcggcggttcaaggaggacatggccgttctcccggaaatcgaaggtacggacgagtatgacgaggtgcctgtggaggggttcggtgctgctctcctcgctggctatggctggaaggaaggggattctattggaaagaaatacaagggcatgggcgctgtcaaggttcgtgagtacggccgccgccgctgcggcacgcagggtctaggctcgtagggttgccaggtcgtgacagtttctgtttcttgtttattttcttgatttcggttatctgtaactgtaagtatgtatggttcatcagactttgtctttgcctatc

SEQ ID NO: 17179 - protein, 218 aa, Triticum aestivum
  peptide (1)..(218): Ceres Seq. ID no. 14302987
  misc_feature (172)..(217): Pfam Name: Pfam Description:  G-patch domain
  misc_feature (7)..(217): NCBI GI NO: 15217576 NR Description: expressed protein [Arabidopsis thaliana]
MEEEKKMKLCFSIPSKPKVKPATPPAAFSVAAVAPGPAPRFVTVFDPSETLTPAPAAPVVIAPLPDSRKPSPAAAAPAAPVVIAPLPNTRKLAEAPAFVLGASDSPSSSAAYGLTVRNTDSKRKLDPQDDAAREQPSPPGPSGEDLMLRRFKEDMAVLPEIEGTDEYDEVPVEGFGAALLAGYGWKEGDSIGKKYKGMGAVKVREYGRRRCGTQGLGS

SEQ ID NO: 17180 - protein, 212 aa, Triticum aestivum
  peptide (1)..(212): Ceres Seq. ID no. 14302988
  misc_feature (166)..(211): Pfam Name: Pfam Description:  G-patch domain
  misc_feature (1)..(211): NCBI GI NO: 15217576 NR Description: expressed protein [Arabidopsis thaliana]
MKLCFSIPSKPKVKPATPPAAFSVAAVAPGPAPRFVTVFDPSETLTPAPAAPVVIAPLPDSRKPSPAAAAPAAPVVIAPLPNTRKLAEAPAFVLGASDSPSSSAAYGLTVRNTDSKRKLDPQDDAAREQPSPPGPSGEDLMLRRFKEDMAVLPEIEGTDEYDEVPVEGFGAALLAGYGWKEGDSIGKKYKGMGAVKVREYGRRRCGTQGLGS

SEQ ID NO: 17181 - protein, 144 aa, Triticum aestivum
  peptide (1)..(144): Ceres Seq. ID no. 14302989
PIPKLQIDRTGRLLTPARRDGGGEEDEALLLHPLETQGQARHASRRLLRRRRGPRPRPAVRHRVRSLGNPHPSARRARRHCAPSRLAQTLPSCCRAGRARRHRAPSQHAQARRGPRLRARRLRQPLLQRSLRPHRPQYGFEEEA

SEQ ID NO: 17182 - DNA, 1621 bp, Triticum aestivum
  misc_feature (1)..(1621): Ceres Seq. ID no. 14313244
gcagggaaaatcaaaaatgttccccggcgacgggaatcgaaagtgaggtaaccttaccggccccgaaacgctcgcccccacatgccaccacggcccgcactgcacgcgcctcctccctcctccccctcctaaccctagaatcttccagaatcagcgggaagcagggagggcgaggcgcgcgccgcgcttccggaagcttctagaagctctaggggggaaggagccgagatggggacgtcggatctggaccggcagatcgagcagctcaagcggtgcgagccgctggcggaggcggaggtcaaggcgctctgcctcaaggccatggagatcctcgtcgaggagagcaacgtccagcgcgtcgacgcccccgtcacgatatgtggagacattcatggacagttctacgacatgaaagaacttttcaaagttggaggtgactgcccaaagacaaactacctgttccttggggattttgtcgaccgaggattttattctgttgaaacatttttgcttcttttggccttaaaggttaggtacccagatcgtataactttaatacgaggaaatcatgagagcaggcagatcacacaagtttatggcttctatgatgagtgtcttcgtaaatatggctcggtgaatgtctggagatattgcacagaaatatttgactatttaagtttgtctgcacttattgagaacaaaatcttcagtgtccatggaggcctttcccctgctattacgacactggatcagatcagagtaatagatcgcaagcaagaagtgcctcatgatggtgccatgtgtgaccttctttggtctgatccagaggatgctgtagacggctggggattaagtcctcgaggtgcagggttcctctttggtggaaacgttgtctcttcatttaaccactcaaacaacatagattatatttgccgtgctcatcaactagtcatggaaggattcaagtggatgttcaataacaagattgttactgtatggtctgctcctaactattgctacaggtgtggcaatgttgctgcaatcctagagcttgatgagaacttgaataagcagttccgtgtatttgaagctgctccacatgaatcaagaggtgttcctgccaagaggcctgccccagattactttctttgagactgcacacatggcatgtgacacgctgtcttttcatgcccttgagcaccagcgggccgatagggggtattgaaggcgtgccatgttggcagatgggcgcgtgctttgcaagagattagccaggaggtgctttcgggatgtataaatcgattgttctgtgtccgtccaggtctattgtttgtaacaaagttgatgtcggtatccacttctccccaaaatagctccaatttgagctttgagaaaatgcctccgagaagggagtggtgtagatgaagccactctgggcccatgatgtaaaattttgatgccagtcccttcctcccctgggaatccgtacattttctagaatgtagaatggtatgcaaatgtgtgccttgagtttaccttttagttgcattgcaggcagctgtaggaaatcttgtagttttgatgttttgcatggaagtattctgaggaagcacacatcagc

SEQ ID NO: 17183 - protein, 307 aa, Triticum aestivum
  peptide (1)..(307): Ceres Seq. ID no. 14313245
  misc_feature (46)..(242): Pfam Name: Pfam Description:  Calcineurin-like phosphoesterase
  misc_feature (4)..(307): NCBI GI NO: 15240488 NR Description: serine/threonine protein phosphatase
  misc_feature (4)..(307): NCBI GI NO: 629550 NR Description: phosphoprotein phosphatase (EC 3
  misc_feature (4)..(307): NCBI GI NO: 15236841 NR Description: phosphoprotein phosphatase (PPX-1)
  misc_feature (3)..(307): NCBI GI NO: 5410609 NR Description: protein phosphatase 4 catalytic subunit
  misc_feature (4)..(307): NCBI GI NO: 4506027 NR Description: protein phosphatase 4
  misc_feature (4)..(307): NCBI GI NO: 130788 NR Description: SERINE/THREONINE PROTEIN PHOSPHATASE 4
  misc_feature (4)..(307): NCBI GI NO: 346323 NR Description: phosphoprotein phosphatase (EC 3
  misc_feature (1)..(307): NCBI GI NO: 4101701 NR Description: serine/threonine phosphatase [Takifugu rubripes]
  misc_feature (4)..(307): NCBI GI NO: 31202749 NR Description: ENSANGP00000015846 [Anopheles gambiae]
  misc_feature (4)..(307): NCBI GI NO: 17864424 NR Description: Protein phosphatase 19C CG32505-PA
MGTSDLDRQIEQLKRCEPLAEAEVKALCLKAMEILVEESNVQRVDAPVTICGDIHGQFYDMKELFKVGGDCPKTNYLFLGDFVDRGFYSVETFLLLLALKVRYPDRITLIRGNHESRQITQVYGFYDECLRKYGSVNVWRYCTEIFDYLSLSALIENKIFSVHGGLSPAITTLDQIRVIDRKQEVPHDGAMCDLLWSDPEDAVDGWGLSPRGAGFLFGGNVVSSFNHSNNIDYICRAHQLVMEGFKWMFNNKIVTVWSAPNYCYRCGNVAAILELDENLNKQFRVFEAAPHESRGVPAKRPAPDYFL

SEQ ID NO: 17184 - protein, 276 aa, Triticum aestivum
  peptide (1)..(276): Ceres Seq. ID no. 14313246
  misc_feature (15)..(211): Pfam Name: Pfam Description:  Calcineurin-like phosphoesterase
  misc_feature (1)..(276): NCBI GI NO: 15240488 NR Description: serine/threonine protein phosphatase
  misc_feature (1)..(276): NCBI GI NO: 629550 NR Description: phosphoprotein phosphatase (EC 3
  misc_feature (1)..(276): NCBI GI NO: 15236841 NR Description: phosphoprotein phosphatase (PPX-1)
  misc_feature (1)..(276): NCBI GI NO: 5410609 NR Description: protein phosphatase 4 catalytic subunit
  misc_feature (1)..(276): NCBI GI NO: 4506027 NR Description: protein phosphatase 4
  misc_feature (1)..(276): NCBI GI NO: 130788 NR Description: SERINE/THREONINE PROTEIN PHOSPHATASE 4
  misc_feature (1)..(276): NCBI GI NO: 346323 NR Description: phosphoprotein phosphatase (EC 3
  misc_feature (1)..(276): NCBI GI NO: 4101701 NR Description: serine/threonine phosphatase [Takifugu rubripes]
  misc_feature (1)..(276): NCBI GI NO: 31202749 NR Description: ENSANGP00000015846 [Anopheles gambiae]
  misc_feature (1)..(276): NCBI GI NO: 17864424 NR Description: Protein phosphatase 19C CG32505-PA
MEILVEESNVQRVDAPVTICGDIHGQFYDMKELFKVGGDCPKTNYLFLGDFVDRGFYSVETFLLLLALKVRYPDRITLIRGNHESRQITQVYGFYDECLRKYGSVNVWRYCTEIFDYLSLSALIENKIFSVHGGLSPAITTLDQIRVIDRKQEVPHDGAMCDLLWSDPEDAVDGWGLSPRGAGFLFGGNVVSSFNHSNNIDYICRAHQLVMEGFKWMFNNKIVTVWSAPNYCYRCGNVAAILELDENLNKQFRVFEAAPHESRGVPAKRPAPDYFL

SEQ ID NO: 17185 - protein, 247 aa, Triticum aestivum
  peptide (1)..(247): Ceres Seq. ID no. 14313247
  misc_feature (1)..(182): Pfam Name: Pfam Description:  Calcineurin-like phosphoesterase
  misc_feature (1)..(247): NCBI GI NO: 15240488 NR Description: serine/threonine protein phosphatase
  misc_feature (1)..(247): NCBI GI NO: 629550 NR Description: phosphoprotein phosphatase (EC 3
  misc_feature (1)..(247): NCBI GI NO: 15236841 NR Description: phosphoprotein phosphatase (PPX-1)
  misc_feature (1)..(247): NCBI GI NO: 5410609 NR Description: protein phosphatase 4 catalytic subunit
  misc_feature (1)..(247): NCBI GI NO: 4506027 NR Description: protein phosphatase 4
  misc_feature (1)..(247): NCBI GI NO: 130788 NR Description: SERINE/THREONINE PROTEIN PHOSPHATASE 4
  misc_feature (1)..(247): NCBI GI NO: 346323 NR Description: phosphoprotein phosphatase (EC 3
  misc_feature (1)..(247): NCBI GI NO: 4101701 NR Description: serine/threonine phosphatase [Takifugu rubripes]
  misc_feature (1)..(247): NCBI GI NO: 31202749 NR Description: ENSANGP00000015846 [Anopheles gambiae]
  misc_feature (1)..(247): NCBI GI NO: 17864424 NR Description: Protein phosphatase 19C CG32505-PA
MKELFKVGGDCPKTNYLFLGDFVDRGFYSVETFLLLLALKVRYPDRITLIRGNHESRQITQVYGFYDECLRKYGSVNVWRYCTEIFDYLSLSALIENKIFSVHGGLSPAITTLDQIRVIDRKQEVPHDGAMCDLLWSDPEDAVDGWGLSPRGAGFLFGGNVVSSFNHSNNIDYICRAHQLVMEGFKWMFNNKIVTVWSAPNYCYRCGNVAAILELDENLNKQFRVFEAAPHESRGVPAKRPAPDYFL

SEQ ID NO: 17186 - DNA, 759 bp, Triticum aestivum
  misc_feature (1)..(759): Ceres Seq. ID no. 13659085
aaggttcagacgaagtgccgagcacgaacatagcggcgctgcaacctctccgccccctacgaagagagagaaaaccatggcggcggtcggcggcgcgggcaacggagccggcgaggaggcaggcggggcggagttctacctgcggtactacgtggggcacaagggcaagttcgggcacgagttcctcgagttcgagttccgccccgacggcaagctccgctacgccaacaactccaactacaagaacgacaccatgatccgcaaggaggtcttcgtctccccttccgtgctccgcgaggcgaggaggatcatccaggactcggagataatgaaggaggacgacagcaactggccggagcccgaccgcgtcggcaggcaggagctcgagattgtcatgggcaacgagcacatctccttcaccacctccaagatcggctccctcgttgacgtccagaccagcaaggacccggagggcctccgcatcttctactacctcgtccaggaccttaaatgtttcgtgttttcacttatcaacctccactttaagatcaagcctattcaactttgagctctgtttggttctcccggttgtgttgtggtactgcgagtgttagagaattctgtacttatgtaacatgcaatgagttgctcctggtgcgatttggtatgcgttgaagattccttttggcatcgcctgaggttgttggattgtgcaaactttgagtgcccattgatatttatatgcatgtttgttttgcg

SEQ ID NO: 17187 - protein, 188 aa, Triticum aestivum
  peptide (1)..(188): Ceres Seq. ID no. 13659086
  misc_feature (44)..(186): Pfam Name: Pfam Description:  Mago nashi protein
  misc_feature (28)..(187): NCBI GI NO: 12802873 NR Description: mago nashi-like protein [Oryza sativa]
  misc_feature (44)..(186): NCBI GI NO: 6016561 NR Description: Mago nashi protein homolog
  misc_feature (44)..(186): NCBI GI NO: 13195558 NR Description: mago nashi [Marsilea vestita]
  misc_feature (36)..(186): NCBI GI NO: 15217623 NR Description: Mago Nashi-related protein [Arabidopsis thaliana]
  misc_feature (42)..(186): NCBI GI NO: 13385002 NR Description: RIKEN cDNA 2010012C16 [Mus musculus]
  misc_feature (42)..(186): NCBI GI NO: 26354182 NR Description: unnamed protein product [Mus musculus]
  misc_feature (42)..(186): NCBI GI NO: 6016563 NR Description: Mago nashi protein homolog (Xl-mago)
  misc_feature (40)..(186): NCBI GI NO: 8922331 NR Description: hypothetical protein FLJ10292 [Homo sapiens]
  misc_feature (43)..(186): NCBI GI NO: 4505087 NR Description: mago-nashi homolog [Homo sapiens]
  misc_feature (43)..(186): NCBI GI NO: 25990444 NR Description: MAGO protein [Gallus gallus]
RFRRSAEHEHSGAATSPPPTKREKTMAAVGGAGNGAGEEAGGAEFYLRYYVGHKGKFGHEFLEFEFRPDGKLRYANNSNYKNDTMIRKEVFVSPSVLREARRIIQDSEIMKEDDSNWPEPDRVGRQELEIVMGNEHISFTTSKIGSLVDVQTSKDPEGLRIFYYLVQDLKCFVFSLINLHFKIKPIQL

SEQ ID NO: 17188 - protein, 163 aa, Triticum aestivum
  peptide (1)..(163): Ceres Seq. ID no. 13659087
  misc_feature (19)..(161): Pfam Name: Pfam Description:  Mago nashi protein
  misc_feature (3)..(162): NCBI GI NO: 12802873 NR Description: mago nashi-like protein [Oryza sativa]
  misc_feature (19)..(161): NCBI GI NO: 6016561 NR Description: Mago nashi protein homolog
  misc_feature (19)..(161): NCBI GI NO: 13195558 NR Description: mago nashi [Marsilea vestita]
  misc_feature (11)..(161): NCBI GI NO: 15217623 NR Description: Mago Nashi-related protein [Arabidopsis thaliana]
  misc_feature (17)..(161): NCBI GI NO: 13385002 NR Description: RIKEN cDNA 2010012C16 [Mus musculus]
  misc_feature (17)..(161): NCBI GI NO: 26354182 NR Description: unnamed protein product [Mus musculus]
  misc_feature (17)..(161): NCBI GI NO: 6016563 NR Description: Mago nashi protein homolog (Xl-mago)
  misc_feature (15)..(161): NCBI GI NO: 8922331 NR Description: hypothetical protein FLJ10292 [Homo sapiens]
  misc_feature (18)..(161): NCBI GI NO: 4505087 NR Description: mago-nashi homolog [Homo sapiens]
  misc_feature (18)..(161): NCBI GI NO: 25990444 NR Description: MAGO protein [Gallus gallus]
MAAVGGAGNGAGEEAGGAEFYLRYYVGHKGKFGHEFLEFEFRPDGKLRYANNSNYKNDTMIRKEVFVSPSVLREARRIIQDSEIMKEDDSNWPEPDRVGRQELEIVMGNEHISFTTSKIGSLVDVQTSKDPEGLRIFYYLVQDLKCFVFSLINLHFKIKPIQL

SEQ ID NO: 17189 - protein, 104 aa, Triticum aestivum
  peptide (1)..(104): Ceres Seq. ID no. 13659088
  misc_feature (1)..(102): Pfam Name: Pfam Description:  Mago nashi protein
  misc_feature (1)..(103): NCBI GI NO: 12802873 NR Description: mago nashi-like protein [Oryza sativa]
  misc_feature (1)..(102): NCBI GI NO: 6016561 NR Description: Mago nashi protein homolog
  misc_feature (1)..(102): NCBI GI NO: 13195558 NR Description: mago nashi [Marsilea vestita]
  misc_feature (1)..(102): NCBI GI NO: 15217623 NR Description: Mago Nashi-related protein [Arabidopsis thaliana]
  misc_feature (1)..(102): NCBI GI NO: 13385002 NR Description: RIKEN cDNA 2010012C16 [Mus musculus]
  misc_feature (1)..(102): NCBI GI NO: 26354182 NR Description: unnamed protein product [Mus musculus]
  misc_feature (1)..(102): NCBI GI NO: 6016563 NR Description: Mago nashi protein homolog (Xl-mago)
  misc_feature (1)..(102): NCBI GI NO: 8922331 NR Description: hypothetical protein FLJ10292 [Homo sapiens]
  misc_feature (1)..(102): NCBI GI NO: 4505087 NR Description: mago-nashi homolog [Homo sapiens]
  misc_feature (1)..(102): NCBI GI NO: 25990444 NR Description: MAGO protein [Gallus gallus]
MIRKEVFVSPSVLREARRIIQDSEIMKEDDSNWPEPDRVGRQELEIVMGNEHISFTTSKIGSLVDVQTSKDPEGLRIFYYLVQDLKCFVFSLINLHFKIKPIQL

SEQ ID NO: 17190 - DNA, 1704 bp, Triticum aestivum
  misc_feature (1)..(1704): Ceres Seq. ID no. 14316045
agtacacagctacgcagaatcataagaggaccggactaaccaccacaggcccatggtagtacagtgtggtagtcccccatgagccccttcgtttgcactctactcttccccgatacaccccttctcccgcggaagcccgcgcctttcaaacgcgctacaaccatccgatgccgcgccgcgccgcccccgggagacgccgctctccgcgccttccgcgtgcaccacatcgctgggcacttcctcggcgccaaccccgccctgttgcccgccctcgcggcctgcgcgcggctgctgacggcggcggccgaagccgagcagatccacgccctcctcttcaagtccggcctccctagttccgtctccggcgtctacgcctccacctccctcgcccgtgtctactcgcggctcggccgcctgggtgacgcgcggaaggtgtttgatggaatgcctgagaggacgttggtttcttggaacgtgcttcttgacggccttgtcagagccagcgatttggatgccgcctgggaggtgtttgcggaaatgccggagcggaatgtgtcttcttggaatactgttatggctggtttcgttagtcatgggtgggctcaagaggcagtggagttgttttctgagatgacagaggtttatggtttgacgccggatgaggccacgatggttggctttgtatctgctgttcgcagtctcggtctacttggacttgggaggaccgcacatggttatgtaatccggcaggagttctcactggatggtgctcttggtgttgctctgatcaacatgtacacaaggtgtgggtgcatgggtgcggcataccaatgcttctcaagcgtcatcagcaagaatgtggagcactggacctctgtcatcgggggtttcgcagcacatggtcacccagagatggcactgaaattgtttgccgagatgaggcaattgggcgtcaagcctaatggtgtcaccttcgtggccgtcttgaatgcctgcagccatggtggtcttgttgatgaaggttttaggtacttcaacctaatgcgcaacatgggtatcaggccatcgatccagcactatggctgcttggtggatcttcttggtcgtgctgggttcttggaagaagccttcaacctcgctagcagtctaccagaagagcagggctttgtgatgtggagctcactactagctgcttgccaaacccatggcaatgtcgacatggcagaggttgctgcccagaagttggcagacacaaagccaagccatggcagctcatatattttgctatcaaacgcctatgcacgtgctggtcaatgggacgacttgaagaggacaagaagcaggatggaggagcatagggtggtgaagaagcctgggctcagctggatcgaggttgatggcagtttacattcctttgtcactgcagacaagttacacacagaatgcgaagatatttatcatatgttggaagacttgaaacttaatttgatatcagctggttccgaacctgaaacatttgatcttcctgaagtttgattcagtaagttactgttgtttatattgaatatatcgtttttcttttttggaagggttacattttttgttgttgatagaaatacatcacatgagaggtctgttcatgatcatgtgaacaatggggcatcggaatatatcatattgatttggtaaatttcaggttggttt

SEQ ID NO: 17191 - protein, 485 aa, Triticum aestivum
  peptide (1)..(485): Ceres Seq. ID no. 14316046
  misc_feature (332)..(366): Pfam Name: Pfam Description:  PPR repeat
  misc_feature (60)..(478): NCBI GI NO: 9279687 NR Description: gb|AAC35225
  misc_feature (60)..(478): NCBI GI NO: 15228829 NR Description: pentatricopeptide (PPR) repeat-containing protein
  misc_feature (28)..(467): NCBI GI NO: 38345581 NR Description: OSJNBa0027H06.17
  misc_feature (58)..(478): NCBI GI NO: 15239979 NR Description: pentatricopeptide (PPR) repeat-containing protein
  misc_feature (58)..(466): NCBI GI NO: 15217517 NR Description: pentatricopeptide (PPR) repeat-containing protein
  misc_feature (133)..(450): NCBI GI NO: 34912348 NR Description: P0518F01.9
  misc_feature (11)..(159): NCBI GI NO: 34912348 NR Description: P0518F01.9
  misc_feature (39)..(479): NCBI GI NO: 15239745 NR Description: pentatricopeptide (PPR) repeat-containing protein
  misc_feature (65)..(479): NCBI GI NO: 15221249 NR Description: pentatricopeptide (PPR) repeat-containing protein
  misc_feature (134)..(485): NCBI GI NO: 15234095 NR Description: pentatricopeptide (PPR) repeat-containing protein
MSPFVCTLLFPDTPLLPRKPAPFKRATTIRCRAAPPPGDAALRAFRVHHIAGHFLGANPALLPALAACARLLTAAAEAEQIHALLFKSGLPSSVSGVYASTSLARVYSRLGRLGDARKVFDGMPERTLVSWNVLLDGLVRASDLDAAWEVFAEMPERNVSSWNTVMAGFVSHGWAQEAVELFSEMTEVYGLTPDEATMVGFVSAVRSLGLLGLGRTAHGYVIRQEFSLDGALGVALINMYTRCGCMGAAYQCFSSVISKNVEHWTSVIGGFAAHGHPEMALKLFAEMRQLGVKPNGVTFVAVLNACSHGGLVDEGFRYFNLMRNMGIRPSIQHYGCLVDLLGRAGFLEEAFNLASSLPEEQGFVMWSSLLAACQTHGNVDMAEVAAQKLADTKPSHGSSYILLSNAYARAGQWDDLKRTRSRMEEHRVVKKPGLSWIEVDGSLHSFVTADKLHTECEDIYHMLEDLKLNLISAGSEPETFDLPEV

SEQ ID NO: 17192 - protein, 363 aa, Triticum aestivum
  peptide (1)..(363): Ceres Seq. ID no. 14316047
  misc_feature (210)..(244): Pfam Name: Pfam Description:  PPR repeat
  misc_feature (1)..(356): NCBI GI NO: 9279687 NR Description: gb|AAC35225
  misc_feature (1)..(356): NCBI GI NO: 15228829 NR Description: pentatricopeptide (PPR) repeat-containing protein
  misc_feature (1)..(345): NCBI GI NO: 38345581 NR Description: OSJNBa0027H06.17
  misc_feature (1)..(356): NCBI GI NO: 15239979 NR Description: pentatricopeptide (PPR) repeat-containing protein
  misc_feature (1)..(344): NCBI GI NO: 15217517 NR Description: pentatricopeptide (PPR) repeat-containing protein
  misc_feature (11)..(328): NCBI GI NO: 34912348 NR Description: P0518F01.9
  misc_feature (1)..(37): NCBI GI NO: 34912348 NR Description: P0518F01.9
  misc_feature (1)..(357): NCBI GI NO: 15239745 NR Description: pentatricopeptide (PPR) repeat-containing protein
  misc_feature (1)..(357): NCBI GI NO: 15221249 NR Description: pentatricopeptide (PPR) repeat-containing protein
  misc_feature (12)..(363): NCBI GI NO: 15234095 NR Description: pentatricopeptide (PPR) repeat-containing protein
MPERTLVSWNVLLDGLVRASDLDAAWEVFAEMPERNVSSWNTVMAGFVSHGWAQEAVELFSEMTEVYGLTPDEATMVGFVSAVRSLGLLGLGRTAHGYVIRQEFSLDGALGVALINMYTRCGCMGAAYQCFSSVISKNVEHWTSVIGGFAAHGHPEMALKLFAEMRQLGVKPNGVTFVAVLNACSHGGLVDEGFRYFNLMRNMGIRPSIQHYGCLVDLLGRAGFLEEAFNLASSLPEEQGFVMWSSLLAACQTHGNVDMAEVAAQKLADTKPSHGSSYILLSNAYARAGQWDDLKRTRSRMEEHRVVKKPGLSWIEVDGSLHSFVTADKLHTECEDIYHMLEDLKLNLISAGSEPETFDLPEV

SEQ ID NO: 17193 - protein, 332 aa, Triticum aestivum
  peptide (1)..(332): Ceres Seq. ID no. 14316048
  misc_feature (179)..(213): Pfam Name: Pfam Description:  PPR repeat
  misc_feature (1)..(325): NCBI GI NO: 9279687 NR Description: gb|AAC35225
  misc_feature (1)..(325): NCBI GI NO: 15228829 NR Description: pentatricopeptide (PPR) repeat-containing protein
  misc_feature (1)..(314): NCBI GI NO: 38345581 NR Description: OSJNBa0027H06.17
  misc_feature (1)..(325): NCBI GI NO: 15239979 NR Description: pentatricopeptide (PPR) repeat-containing protein
  misc_feature (1)..(313): NCBI GI NO: 15217517 NR Description: pentatricopeptide (PPR) repeat-containing protein
  misc_feature (1)..(297): NCBI GI NO: 34912348 NR Description: P0518F01.9
  misc_feature (1)..(326): NCBI GI NO: 15239745 NR Description: pentatricopeptide (PPR) repeat-containing protein
  misc_feature (1)..(326): NCBI GI NO: 15221249 NR Description: pentatricopeptide (PPR) repeat-containing protein
  misc_feature (1)..(332): NCBI GI NO: 15234095 NR Description: pentatricopeptide (PPR) repeat-containing protein
  misc_feature (1)..(323): NCBI GI NO: 34898014 NR Description: Similar to Arabidopsis thaliana chromosome II BACT27A16 genomic sequence
MPERNVSSWNTVMAGFVSHGWAQEAVELFSEMTEVYGLTPDEATMVGFVSAVRSLGLLGLGRTAHGYVIRQEFSLDGALGVALINMYTRCGCMGAAYQCFSSVISKNVEHWTSVIGGFAAHGHPEMALKLFAEMRQLGVKPNGVTFVAVLNACSHGGLVDEGFRYFNLMRNMGIRPSIQHYGCLVDLLGRAGFLEEAFNLASSLPEEQGFVMWSSLLAACQTHGNVDMAEVAAQKLADTKPSHGSSYILLSNAYARAGQWDDLKRTRSRMEEHRVVKKPGLSWIEVDGSLHSFVTADKLHTECEDIYHMLEDLKLNLISAGSEPETFDLPEV

SEQ ID NO: 17194 - DNA, 772 bp, Triticum aestivum
  misc_feature (1)..(772): Ceres Seq. ID no. 14313260
aacccccgtgaagcatcatccatcttctctccttacgccgccttgcactgcattccagcctccatctccaacagcaacccatggccggcatgaaaaccatcgttctccttgccgtgatctcggccgccgccttgggcaccgcgtcagcggcgacccaccgcgtgggcgagccgggcggcgcgtgggacctcaccaccgattacggcagctgggcgtcctccagggagttccacccgggcgacgagctcatcttcaggcaccagccaggggcgcacaacgtgctcgaggtcagcgaggtcgactacgactcctgcaacgccaccagccccatcaccaccttgggctccggctttttcacctacgtcgcccttccggccgtcggcacccgctacttcatctgcggtttccctggccactgcaccaccaccggcaccggcggcatgaagctcaagatcgacgtcgtgccaggttccccctcgtcgtcgcccgccccggccatgccgccgccctcctccgccgcggcctctgccggggctacaataggatctggccttgtcgtcctgctggcggccggtctcatggcttgaaatgcatgtattcttcattagctgatgatgcccggtgcattcaaccgatgtaaagactgtagcctgtaggtttccccccttctaaaaaaacaaaaaaaaagttgagttgccgcagcagacacataccagcttatactatattgttaactggttattattgttgaatacatacaattaattttttg

SEQ ID NO: 17195 - protein, 212 aa, Triticum aestivum
  peptide (1)..(212): Ceres Seq. ID no. 14313261
TPVKHHPSSLLTPPCTAFQPPSPTATHGRHENHRSPCRDLGRRLGHRVSGDPPRGRAGRRVGPHHRLRQLGVLQGVPPGRRAHLQAPARGAQRARGQRGRLRLLQRHQPHHHLGLRLFHLRRPSGRRHPLLHLRFPWPLHHHRHRRHEAQDRRRARFPLVVARPGHAAALLRRGLCRGYNRIWPCRPAGGRSHGLKCMYSSLADDARCIQPM

SEQ ID NO: 17196 - protein, 168 aa, Triticum aestivum
  peptide (1)..(168): Ceres Seq. ID no. 14313262
  misc_feature (35)..(116): Pfam Name: Pfam Description:  Plastocyanin-like domain
  misc_feature (1)..(168): NCBI GI NO: 4104058 NR Description: blue copper-binding protein homolog
  misc_feature (1)..(168): NCBI GI NO: 37651973 NR Description: blue copper binding protein
  misc_feature (2)..(167): NCBI GI NO: 38636764 NR Description: putative blue copper binding protein
  misc_feature (8)..(150): NCBI GI NO: 38636760 NR Description: putative blue copper binding protein
  misc_feature (8)..(150): NCBI GI NO: 38636761 NR Description: putative blue copper binding protein
  misc_feature (2)..(167): NCBI GI NO: 38636838 NR Description: putative blue copper binding protein
  misc_feature (2)..(150): NCBI GI NO: 38636763 NR Description: putative blue copper binding protein
  misc_feature (7)..(155): NCBI GI NO: 38636767 NR Description: putative blue copper binding protein
  misc_feature (1)..(153): NCBI GI NO: 38346158 NR Description: OSJNBa0079A21.5
  misc_feature (1)..(142): NCBI GI NO: 34908748 NR Description: uclacyanin-like protein
MAGMKTIVLLAVISAAALGTASAATHRVGEPGGAWDLTTDYGSWASSREFHPGDELIFRHQPGAHNVLEVSEVDYDSCNATSPITTLGSGFFTYVALPAVGTRYFICGFPGHCTTTGTGGMKLKIDVVPGSPSSSPAPAMPPPSSAAASAGATIGSGLVVLLAAGLMA

SEQ ID NO: 17197 - protein, 165 aa, Triticum aestivum
  peptide (1)..(165): Ceres Seq. ID no. 14313263
  misc_feature (32)..(113): Pfam Name: Pfam Description:  Plastocyanin-like domain
  misc_feature (1)..(165): NCBI GI NO: 4104058 NR Description: blue copper-binding protein homolog
  misc_feature (1)..(165): NCBI GI NO: 37651973 NR Description: blue copper binding protein
  misc_feature (1)..(164): NCBI GI NO: 38636764 NR Description: putative blue copper binding protein
  misc_feature (5)..(147): NCBI GI NO: 38636760 NR Description: putative blue copper binding protein
  misc_feature (5)..(147): NCBI GI NO: 38636761 NR Description: putative blue copper binding protein
  misc_feature (1)..(164): NCBI GI NO: 38636838 NR Description: putative blue copper binding protein
  misc_feature (1)..(147): NCBI GI NO: 38636763 NR Description: putative blue copper binding protein
  misc_feature (4)..(152): NCBI GI NO: 38636767 NR Description: putative blue copper binding protein
  misc_feature (1)..(150): NCBI GI NO: 38346158 NR Description: OSJNBa0079A21.5
  misc_feature (1)..(139): NCBI GI NO: 34908748 NR Description: uclacyanin-like protein
MKTIVLLAVISAAALGTASAATHRVGEPGGAWDLTTDYGSWASSREFHPGDELIFRHQPGAHNVLEVSEVDYDSCNATSPITTLGSGFFTYVALPAVGTRYFICGFPGHCTTTGTGGMKLKIDVVPGSPSSSPAPAMPPPSSAAASAGATIGSGLVVLLAAGLMA

SEQ ID NO: 17198 - DNA, 690 bp, Triticum aestivum
  misc_feature (1)..(690): Ceres Seq. ID no. 12784095
gaccgaccattccaaaccctcgcatccaagccgcctccgcctccgcctccacctccccgcggatctcccatccatccatggccgccgccgccccggcccgcaggctcctcctgcgcctgcgtctcccactccccctctgcaacccaccgccgtcccccgtcccgctcctctcccacctgacgccgcacctccacccaccaccgccaccgcagccaacgctcccgggcgccccggccccggacccgaagctccgggacctcctcttcgccttccaccccgccgtgcacgtatatccgtccctcgtcgacgtcccgagaggagggctgggcgaccttgacgcgcgcgaggacggagggggggccaaggaggcggaggtgtgggcggacagcgtcaagaagaagcggaagcgcaagatgaacaagcacaagctccgcaagctccggaagcgcctccgccgccagacctgagctcatggatcccggcttgaggattgtgattgcaagaaggtcctccggtgccgctgccacaccggtttcaagctgatggtttcttccagttattttggtttggttataggagtagcagttctggtaccaacaacgcaattgctgcgactgggcacgtacctacaaacactgtaatgacaaggagccaggaacgggctgtttcatgtctggatttctggcaggc

SEQ ID NO: 17199 - protein, 154 aa, Triticum aestivum
  peptide (1)..(154): Ceres Seq. ID no. 12784096
  misc_feature (115)..(154): NCBI GI NO: 18424673 NR Description: expressed protein; protein id: At5g63150
PTIPNPRIQAASASASTSPRISHPSMAAAAPARRLLLRLRLPLPLCNPPPSPVPLLSHLTPHLHPPPPPQPTLPGAPAPDPKLRDLLFAFHPAVHVYPSLVDVPRGGLGDLDAREDGGGAKEAEVWADSVKKKRKRKMNKHKLRKLRKRLRRQT

SEQ ID NO: 17200 - protein, 129 aa, Triticum aestivum
  peptide (1)..(129): Ceres Seq. ID no. 12784097
  misc_feature (90)..(129): NCBI GI NO: 18424673 NR Description: expressed protein; protein id: At5g63150
MAAAAPARRLLLRLRLPLPLCNPPPSPVPLLSHLTPHLHPPPPPQPTLPGAPAPDPKLRDLLFAFHPAVHVYPSLVDVPRGGLGDLDAREDGGGAKEAEVWADSVKKKRKRKMNKHKLRKLRKRLRRQT

SEQ ID NO: 17201 - protein, 111 aa, Triticum aestivum
  peptide (1)..(111): Ceres Seq. ID no. 12784098
  misc_feature (3)..(111): Pfam Name: Pfam Description:  Atrophin-1 family
  misc_feature (30)..(111): NCBI GI NO: 15145797 NR Description: basic proline-rich protein [Sus scrofa]
  misc_feature (31)..(111): NCBI GI NO: 40747082 NR Description: hypothetical protein AN1120.2
  misc_feature (31)..(92): NCBI GI NO: 21322711 NR Description: pherophorin-dz1 protein
  misc_feature (28)..(111): NCBI GI NO: 15145797 NR Description: basic proline-rich protein [Sus scrofa]
  misc_feature (19)..(111): NCBI GI NO: 15145797 NR Description: basic proline-rich protein [Sus scrofa]
  misc_feature (31)..(111): NCBI GI NO: 7484420 NR Description: pherophorin-S - Volvox carteri
  misc_feature (31)..(92): NCBI GI NO: 21322711 NR Description: pherophorin-dz1 protein
  misc_feature (31)..(92): NCBI GI NO: 21322711 NR Description: pherophorin-dz1 protein
  misc_feature (31)..(91): NCBI GI NO: 28569968 NR Description: pherophorin [Volvox carteri f. nagariensis]
  misc_feature (19)..(111): NCBI GI NO: 15145797 NR Description: basic proline-rich protein [Sus scrofa]
TDHSKPSHPSRLRLRLHLPADLPSIHGRRRPGPQAPPAPASPTPPLQPTAVPRPAPLPPDAAPPPTTATAANAPGRPGPGPEAPGPPLRLPPRRARISVPRRRPERRAGRP

SEQ ID NO: 17202 - DNA, 1029 bp, Triticum aestivum
  misc_feature (1)..(1029): Ceres Seq. ID no. 13598045
aaaaaaataaacgcatcggcgccgtcaagtcccccagccgaggtcacacaagcccgcacccgcacccgcacccgcacccgcacaacagagacccagagcaggcgacacaccgcccaggcccagctccagctccggcgagatctccggcgacccttcgagatgagccgcggatcgggcgcgggctacgaccgccacatcaccatcttctcccccgagggccgcctctaccaagtcgagtacgcgttcaaggcggtcaagtcggcgggggtcacctcgatcggcgtccgcggcaaggactccgtctgcgtcgtcacccagaagaaagtcccggacaagttgctggatgacaccagcatcacgcacctcttctcgattaccaagtacaccggcttgcttgccaccggcctcacagctgatgcgaggtccttggtctcccaagcaagaaatgaagcagctgagttccgtaaaaaatggggatacgagatgcctgtggatgtattagcaaaatggatagcagacaaagcacaaatatacacgcagcatgcgtacatgagaccccttggtgtagttgccatggtcttgggttatgatgaagagaaaaatgctcagctcttcaagtgtgaccccgcaggtcacttctttggacacaaggcaactagtgccggactgaaggagcaggaagcaataaattttctggagaagaaaatgaaggatagcccgcagttcacatatgacgaaactgttcagattgcagtttctgcattgcaatctgttctgcaggaagatttcaaggctaccgagatcgaggtcggtgttgtgaggaaagaagaccgtgtcttccggtcgctcacgacagaggagattgatcagcacctaacagccattagcgagcgcgactgagctatgagactgtagctgtcaatgcaccataaactgttattttgtttcatagccagccaagaaacattcagtgaatcatttcatgtgtagcaagaaagacgggcatccactctgccatgtattagttgg

SEQ ID NO: 17203 - protein, 299 aa, Triticum aestivum
  peptide (1)..(299): Ceres Seq. ID no. 13598046
  misc_feature (85)..(273): Pfam Name: Pfam Description:  Proteasome A-type and B-type
  misc_feature (54)..(299): NCBI GI NO: 11967891 NR Description: maize 20S proteasome alpha subunit [Zea mays]
  misc_feature (54)..(299): NCBI GI NO: 12229922 NR Description: Proteasome subunit alpha type 6
  misc_feature (54)..(299): NCBI GI NO: 12229948 NR Description: Proteasome subunit alpha type 6
  misc_feature (54)..(299): NCBI GI NO: 15224993 NR Description: 20S proteasome alpha subunit A2 (PAA2)
  misc_feature (54)..(299): NCBI GI NO: 15238554 NR Description: 20S proteasome alpha subunit A1 (PAA1)
  misc_feature (54)..(299): NCBI GI NO: 12229897 NR Description: Proteasome subunit alpha type 6
  misc_feature (54)..(299): NCBI GI NO: 20260140 NR Description: multicatalytic endopeptidase complex alpha subunit-like
  misc_feature (55)..(299): NCBI GI NO: 2511588 NR Description: multicatalytic endopeptidase complex
  misc_feature (54)..(299): NCBI GI NO: 3421070 NR Description: 20S proteasome subunit PAA1 [Arabidopsis thaliana]
  misc_feature (54)..(299): NCBI GI NO: 38512262 NR Description: Proteasome
KKINASAPSSPPAEVTQARTRTRTRTRTTETQSRRHTAQAQLQLRRDLRRPFEMSRGSGAGYDRHITIFSPEGRLYQVEYAFKAVKSAGVTSIGVRGKDSVCVVTQKKVPDKLLDDTSITHLFSITKYTGLLATGLTADARSLVSQARNEAAEFRKKWGYEMPVDVLAKWIADKAQIYTQHAYMRPLGVVAMVLGYDEEKNAQLFKCDPAGHFFGHKATSAGLKEQEAINFLEKKMKDSPQFTYDETVQIAVSALQSVLQEDFKATEIEVGVVRKEDRVFRSLTTEEIDQHLTAISERD

SEQ ID NO: 17204 - protein, 246 aa, Triticum aestivum
  peptide (1)..(246): Ceres Seq. ID no. 13598047
  misc_feature (32)..(220): Pfam Name: Pfam Description:  Proteasome A-type and B-type
  misc_feature (1)..(246): NCBI GI NO: 11967891 NR Description: maize 20S proteasome alpha subunit [Zea mays]
  misc_feature (1)..(246): NCBI GI NO: 12229922 NR Description: Proteasome subunit alpha type 6
  misc_feature (1)..(246): NCBI GI NO: 12229948 NR Description: Proteasome subunit alpha type 6
  misc_feature (1)..(246): NCBI GI NO: 15224993 NR Description: 20S proteasome alpha subunit A2 (PAA2)
  misc_feature (1)..(246): NCBI GI NO: 15238554 NR Description: 20S proteasome alpha subunit A1 (PAA1)
  misc_feature (1)..(246): NCBI GI NO: 12229897 NR Description: Proteasome subunit alpha type 6
  misc_feature (1)..(246): NCBI GI NO: 20260140 NR Description: multicatalytic endopeptidase complex alpha subunit-like
  misc_feature (2)..(246): NCBI GI NO: 2511588 NR Description: multicatalytic endopeptidase complex
  misc_feature (1)..(246): NCBI GI NO: 3421070 NR Description: 20S proteasome subunit PAA1 [Arabidopsis thaliana]
  misc_feature (1)..(246): NCBI GI NO: 38512262 NR Description: Proteasome
MSRGSGAGYDRHITIFSPEGRLYQVEYAFKAVKSAGVTSIGVRGKDSVCVVTQKKVPDKLLDDTSITHLFSITKYTGLLATGLTADARSLVSQARNEAAEFRKKWGYEMPVDVLAKWIADKAQIYTQHAYMRPLGVVAMVLGYDEEKNAQLFKCDPAGHFFGHKATSAGLKEQEAINFLEKKMKDSPQFTYDETVQIAVSALQSVLQEDFKATEIEVGVVRKEDRVFRSLTTEEIDQHLTAISERD

SEQ ID NO: 17205 - DNA, 574 bp, Triticum aestivum
  misc_feature (1)..(574): Ceres Seq. ID no. 12779958
aatcactctcgcgtcagagaaaaaagagaggggcgcacatctccgtctccgccctcccctccccgtccccctctccctccgctcccgatccgctctgcgtcgcggccgcagcggcgacgacccccccatgatctgaccgcattgccgcgcgcggtaacccgatggaggcgctgaacgagctctgcgacctggtggccgcgcacccggatctcctcctcgccgacaagctcacctggctcacctcccgctgcgcgccgcccgcgtcccccgcgtcccccgcgcagcgcgcgacccgggcgcacctccactcgctcctcgccctcgcgcgcctcctccccgcgggcgccggcccgccggcggccccgctcctcgccttcctcgcctcccgcgccttcctcgcgccggccttctggccgcagtccttcgcgcccgcgcccttcctcgccaagctcctccctctcctcgccgccgcgcccgcctcccccgccctctcctccgcgctctccgccgtgctcctcgccttttatctcaactgggatccttgaccatatatgaaaataaatgcaaattagcc

SEQ ID NO: 17206 - protein, 127 aa, Triticum aestivum
  peptide (1)..(127): Ceres Seq. ID no. 12779959
  misc_feature (1)..(120): NCBI GI NO: 13324783 NR Description: putative phosphatidylinositol 4-kinase
  misc_feature (1)..(120): NCBI GI NO: 13702810 NR Description: putative phosphatidylinositol kinase
MEALNELCDLVAAHPDLLLADKLTWLTSRCAPPASPASPAQRATRAHLHSLLALARLLPAGAGPPAAPLLAFLASRAFLAPAFWPQSFAPAPFLAKLLPLLAAAPASPALSSALSAVLLAFYLNWDP

SEQ ID NO: 17207 - DNA, 698 bp, Triticum aestivum
  misc_feature (1)..(698): Ceres Seq. ID no. 12621228
tttttttcagcgtccacaccgttccctttgtccggtggagtgccgcggcgaggggctgtgggaggagatggccttcgcgtcgtggctagtggcgccgcctcctgccgcgagggcagggtggaggcccgcgagggcggcccctcgccggctcgtcctggcggcatccagccgaggcggcggcccggccccggccccgccgacgttcgacaggctgcgggagcagctcctccaactccacgccgaagccgacctcacccagtccaaagcaaacagtgctcgggtgaggcttatgcggttgaccgaggccgctgagaatcttaagaagagagccgtagtcagtgtccggatgggcagagagaatgaggcagtggaattacttgtgcagaagaagaagttgaccaatgctttggagaacataaaggagcgcattgagctgcttgacaagctttccgcaaagattagtgagctatggagaccgcttagcaagcggcgcgatcgggacgtcattgacaacatcatcacgggtctccgctcctcggcctcagcacttgctcctccgccaccaccaccccctcctgagcccgattagacgtacttttcttttctttggggcttgtcttgctgtgcccccagcgatgatttgagacttgtttgtactttgaacatgacttgttggatgcttggtgttggtgctttat

SEQ ID NO: 17208 - protein, 195 aa, Triticum aestivum
  peptide (1)..(195): Ceres Seq. ID no. 12621229
  misc_feature (23)..(155): NCBI GI NO: 22535557 NR Description: OJ1116_H09.3
  misc_feature (69)..(155): NCBI GI NO: 6692689 NR Description: F12K11.16 [Arabidopsis thaliana]
  misc_feature (69)..(155): NCBI GI NO: 30679709 NR Description: expressed protein [Arabidopsis thaliana]
FFQRPHRSLCPVECRGEGLWEEMAFASWLVAPPPAARAGWRPARAAPRRLVLAASSRGGGPAPAPPTFDRLREQLLQLHAEADLTQSKANSARVRLMRLTEAAENLKKRAVVSVRMGRENEAVELLVQKKKLTNALENIKERIELLDKLSAKISELWRPLSKRRDRDVIDNIITGLRSSASALAPPPPPPPPEPD

SEQ ID NO: 17209 - protein, 173 aa, Triticum aestivum
  peptide (1)..(173): Ceres Seq. ID no. 12621230
  misc_feature (1)..(133): NCBI GI NO: 22535557 NR Description: OJ1116_H09.3
  misc_feature (47)..(133): NCBI GI NO: 6692689 NR Description: F12K11.16 [Arabidopsis thaliana]
  misc_feature (47)..(133): NCBI GI NO: 30679709 NR Description: expressed protein [Arabidopsis thaliana]
MAFASWLVAPPPAARAGWRPARAAPRRLVLAASSRGGGPAPAPPTFDRLREQLLQLHAEADLTQSKANSARVRLMRLTEAAENLKKRAVVSVRMGRENEAVELLVQKKKLTNALENIKERIELLDKLSAKISELWRPLSKRRDRDVIDNIITGLRSSASALAPPPPPPPPEPD

SEQ ID NO: 17210 - protein, 103 aa, Triticum aestivum
  peptide (1)..(103): Ceres Seq. ID no. 12621231
FFSASTPFPLSGGVPRRGAVGGDGLRVVASGAASCREGRVEAREGGPSPARPGGIQPRRRPGPGPADVRQAAGAAPPTPRRSRPHPVQSKQCSGEAYAVDRGR

SEQ ID NO: 17211 - DNA, 825 bp, Triticum aestivum
  misc_feature (1)..(825): Ceres Seq. ID no. 13659221
actgtaatactcctgctcagtagcacaagcagtggtactactgctcagtgcacaccacccaactcacccacactttccccgcggcgatgggtcgcacgaagcacgcggtggcggcgacggcggcgacgacggagacgaagaagcggctccgcttcgagctctccccgcgctggaggccgccgccggcgctgcgccaggtaccgccggagccgcagccggagaagaagaagaagcgggcgtaccggttccggccgggcacggtagcgctgcgggaggtcaggaagtaccagaagtccaccgggccgctcatccccttcgcgcccttcgtccgcctggttaaggagatcaccgacgacttgacgaagggcgagatgaaccactggactcctcaggcgctcttctcgttgcaggaggctgcagagtatcacatagtcgatgtatttgaaaaggcaaatctatgtgccatccatgctaagcgtgttaccatcatgcaaaaggacatacagctcgcgaggcgtatcggggggagaaggccttggtgatactaatggaagatgttttctgcatcatagggagcaaagactggtgatttggtggtactaatggtagatgttttctgtattaggggtgcaatgcaaaggcgctgatggtagtggcccagtatgtttgtgagtgtatcgttaggaagtaatgtaggtgtattttcatttagttagcatgtcttcgaagttgatctggttcattgcatggttgggatcatctgacctccctgctttgctccatttgaattgatctaattcagacagcgtttctgcgaacatccgg

SEQ ID NO: 17212 - protein, 151 aa, Triticum aestivum
  peptide (1)..(151): Ceres Seq. ID no. 13659222
  misc_feature (46)..(149): Pfam Name: Pfam Description:  Core histone H2A/H2B/H3/H4
  misc_feature (1)..(151): NCBI GI NO: 40365140 NR Description: centromeric histone 3
  misc_feature (1)..(151): NCBI GI NO: 21668094 NR Description: centromeric histone h3-like protein [Zea mays]
  misc_feature (41)..(151): NCBI GI NO: 19338704 NR Description: centromeric histone H3 HTR12 [Arabidopsis arenosa]
  misc_feature (41)..(151): NCBI GI NO: 19338706 NR Description: centromeric histone H3 HTR12 [Arabidopsis arenosa]
  misc_feature (41)..(151): NCBI GI NO: 21592479 NR Description: histone, putative [Arabidopsis thaliana]
  misc_feature (41)..(151): NCBI GI NO: 18378832 NR Description: histone family [Arabidopsis thaliana]
  misc_feature (41)..(151): NCBI GI NO: 33146136 NR Description: histone H3 like protein [Arabis gemmifera]
  misc_feature (41)..(151): NCBI GI NO: 33146140 NR Description: histone H3 like protein [Arabis gemmifera]
  misc_feature (41)..(151): NCBI GI NO: 33146144 NR Description: histone H3 like protein [Arabis glabra]
  misc_feature (41)..(151): NCBI GI NO: 33146142 NR Description: histone H3 like protein [Arabis gemmifera]
MGRTKHAVAATAATTETKKRLRFELSPRWRPPPALRQVPPEPQPEKKKKRAYRFRPGTVALREVRKYQKSTGPLIPFAPFVRLVKEITDDLTKGEMNHWTPQALFSLQEAAEYHIVDVFEKANLCAIHAKRVTIMQKDIQLARRIGGRRPW

SEQ ID NO: 17213 - protein, 87 aa, Triticum aestivum
  peptide (1)..(87): Ceres Seq. ID no. 13659223
  misc_feature (32)..(87): Pfam Name: Pfam Description:  Protamine P1
TVILLLSSTSSGTTAQCTPPNSPTLSPRRWVARSTRWRRRRRRRRRRSGSASSSPRAGGRRRRCARYRRSRSRRRRRSGRTGSGRAR

SEQ ID NO: 17214 - DNA, 970 bp, Triticum aestivum
  misc_feature (1)..(970): Ceres Seq. ID no. 13664189
aaaagaggcatgctcccttctcgcttcctgctcctcccgcactgccccaccgcgccggccccgactccgactccgacaccccccggcggcgcgcgctcgccgagctcggtcgcactgcggttcggatcccccggaggcgtgcggcttcgtcgcgggcgagggtcggcggcggtcgcgatggcatccgacgggcgcgtggagcggatcgcgtccagcatccgcgccatccccaacttccccaagccagggattttgtttcaggacatcacaaccttgcttctcgatccgcaggcattccgtgacaccactgacctctttgtcgagcggtacaaggacaaagacataactgtagttgctggtgttgaagccagaggattcatttttggtcctcccattgcattagccataggtgcaaagtttgttccaataaggaagccgaaaaaattacctggtgaggtgatatcggaagaatattctctggaatatggcactgacaaaatcgaaatgcacgtaggagctgtgcagcccaatgaccgagtccttattgtggatgatctaattgccacagggggaaccctttgtgccgctgccaaacttattgagcgtgttggagcaaaggtggttgagtgtgcctgtgttattgaactgccagagctgaagggccgggacaagttgggggacatgccagtttttgtcctagtgcaggcagacgaatcagtatgaaacaagttgtgactcttgagttgttccaatgatgttccccttctggaactatactggaagcagcaaagatatccgttacaatcttagctagttcctatctggagctgctcaataaaagtttcatttttaaatttgtccttctggaactgtttgggaatggagacttgattgttgttccctgtaatacgtggcttatttctgtcaaaaacagtgcaaattattcatgtcaatgaaggatgatagtctg

SEQ ID NO: 17215 - protein, 240 aa, Triticum aestivum
  peptide (1)..(240): Ceres Seq. ID no. 15220289
  misc_feature (60)..(240): NCBI GI NO: 2499932 NR Description: Adenine phosphoribosyltransferase 1 (APRT)
  misc_feature (60)..(240): NCBI GI NO: 9711921 NR Description: Adenine phosphoribosyltransferase
  misc_feature (50)..(237): NCBI GI NO: 32492063 NR Description: adenine phosphoribosyltransferase [Brassica napus]
  misc_feature (32)..(236): NCBI GI NO: 18396344 NR Description: adenine phosphoribosyltransferase 1, APRT
  misc_feature (63)..(236): NCBI GI NO: 30689934 NR Description: adenine phosphoribosyltransferase 1, APRT
  misc_feature (63)..(150): NCBI GI NO: 25286872 NR Description: protein F17L21.24
  misc_feature (149)..(236): NCBI GI NO: 25286872 NR Description: protein F17L21.24
  misc_feature (54)..(236): NCBI GI NO: 33354190 NR Description: putative adenine phosphoribosyl transferase
  misc_feature (63)..(235): NCBI GI NO: 15235709 NR Description: adenine phosphoribosyltransferase (EC 2
  misc_feature (63)..(235): NCBI GI NO: 21536749 NR Description: adenine phosphoribosyltransferase (EC 2
KRGMLPSRFLLLPHCPTAPAPTPTPTPPGGARSPSSVALRFGSPGGVRLRRGRGSAAVAMASDGRVERIASSIRAIPNFPKPGILFQDITTLLLDPQAFRDTTDLFVERYKDKDITVVAGVEARGFIFGPPIALAIGAKFVPIRKPKKLPGEVISEEYSLEYGTDKIEMHVGAVQPNDRVLIVDDLIATGGTLCAAAKLIERVGAKVVECACVIELPELKGRDKLGDMPVFVLVQADESV

SEQ ID NO: 17216 - protein, 237 aa, Triticum aestivum
  peptide (1)..(237): Ceres Seq. ID no. 15220290
  misc_feature (57)..(237): NCBI GI NO: 2499932 NR Description: Adenine phosphoribosyltransferase 1 (APRT)
  misc_feature (57)..(237): NCBI GI NO: 9711921 NR Description: Adenine phosphoribosyltransferase
  misc_feature (47)..(234): NCBI GI NO: 32492063 NR Description: adenine phosphoribosyltransferase [Brassica napus]
  misc_feature (29)..(233): NCBI GI NO: 18396344 NR Description: adenine phosphoribosyltransferase 1, APRT
  misc_feature (60)..(233): NCBI GI NO: 30689934 NR Description: adenine phosphoribosyltransferase 1, APRT
  misc_feature (60)..(147): NCBI GI NO: 25286872 NR Description: protein F17L21.24
  misc_feature (146)..(233): NCBI GI NO: 25286872 NR Description: protein F17L21.24
  misc_feature (51)..(233): NCBI GI NO: 33354190 NR Description: putative adenine phosphoribosyl transferase
  misc_feature (60)..(232): NCBI GI NO: 15235709 NR Description: adenine phosphoribosyltransferase (EC 2
  misc_feature (60)..(232): NCBI GI NO: 21536749 NR Description: adenine phosphoribosyltransferase (EC 2
MLPSRFLLLPHCPTAPAPTPTPTPPGGARSPSSVALRFGSPGGVRLRRGRGSAAVAMASDGRVERIASSIRAIPNFPKPGILFQDITTLLLDPQAFRDTTDLFVERYKDKDITVVAGVEARGFIFGPPIALAIGAKFVPIRKPKKLPGEVISEEYSLEYGTDKIEMHVGAVQPNDRVLIVDDLIATGGTLCAAAKLIERVGAKVVECACVIELPELKGRDKLGDMPVFVLVQADESV

SEQ ID NO: 17217 - protein, 181 aa, Triticum aestivum
  peptide (1)..(181): Ceres Seq. ID no. 15220291
  misc_feature (1)..(181): NCBI GI NO: 2499932 NR Description: Adenine phosphoribosyltransferase 1 (APRT)
  misc_feature (1)..(181): NCBI GI NO: 9711921 NR Description: Adenine phosphoribosyltransferase
  misc_feature (1)..(178): NCBI GI NO: 32492063 NR Description: adenine phosphoribosyltransferase [Brassica napus]
  misc_feature (1)..(177): NCBI GI NO: 18396344 NR Description: adenine phosphoribosyltransferase 1, APRT
  misc_feature (4)..(177): NCBI GI NO: 30689934 NR Description: adenine phosphoribosyltransferase 1, APRT
  misc_feature (4)..(91): NCBI GI NO: 25286872 NR Description: protein F17L21.24
  misc_feature (90)..(177): NCBI GI NO: 25286872 NR Description: protein F17L21.24
  misc_feature (1)..(177): NCBI GI NO: 33354190 NR Description: putative adenine phosphoribosyl transferase
  misc_feature (4)..(176): NCBI GI NO: 15235709 NR Description: adenine phosphoribosyltransferase (EC 2
  misc_feature (4)..(176): NCBI GI NO: 21536749 NR Description: adenine phosphoribosyltransferase (EC 2
MASDGRVERIASSIRAIPNFPKPGILFQDITTLLLDPQAFRDTTDLFVERYKDKDITVVAGVEARGFIFGPPIALAIGAKFVPIRKPKKLPGEVISEEYSLEYGTDKIEMHVGAVQPNDRVLIVDDLIATGGTLCAAAKLIERVGAKVVECACVIELPELKGRDKLGDMPVFVLVQADESV

SEQ ID NO: 17218 - DNA, 932 bp, Triticum aestivum
  misc_feature (1)..(932): Ceres Seq. ID no. 13659177
gacttcctctcctctctgtgccccccaatcctcctcgccaactcattcccagagcaccaagaagatctggagaagagaggaggccattgctagctccccaccatccccttctccctctatctgcctagcgttcttgcttggtcgccatggccaccatcctggagaacatccagaaggcgcggttcctgccgacgaggccgctgagggacgacctgcccaccttccagggcggcaaggaggaggagagccacctcatgggcctgcggaagcgcctctccagcttctccggcaagatccagcccatctcctccgcgtccgccgagtgggcgttcaggcggacccggtcggcgccgtcgctcgccgccgagttcgcgggcggcccgctcaagcgctggtgggactggggcctcggctggctgctctccaagaagctcggcttcgccggcgacctggagatgaacgaggaggaggcggccgcgctcggccgccaaagcaggggcacctgggcccacgtcctctacaaggtgcgctccggggtccgccgcctcgtcgcgtccgaccactcgctgcccaccacgcaccaccgcaaggcctcgctgcccccgtcctcctccgcgcaccagcactgcaagcccgcgccgcagttcgcctacacccagagcttccagtacggccaagcaatggcgcactaagcagcttgctttgcatcttgttctggtggtgtccgcgagatccaaatagacacgacgacgggaaggaagctcgtgaagaaggagaagattcaggtctcaggtgagatcgatggggaagatggctcgctacacaattatatctgggaatttagagttgttagtttaccgtgctgctttcttttttgtgggtagatctaatgtctctacgtataatagataccgagtgtatgctggtggtcc

SEQ ID NO: 17219 - protein, 264 aa, Triticum aestivum
  peptide (1)..(264): Ceres Seq. ID no. 13659178
TSSPLCAPQSSSPTHSQSTKKIWRREEAIASSPPSPSPSICLAFLLGRHGHHPGEHPEGAVPADEAAEGRPAHLPGRQGGGEPPHGPAEAPLQLLRQDPAHLLRVRRVGVQADPVGAVARRRVRGRPAQALVGLGPRLAALQEARLRRRPGDERGGGGRARPPKQGHLGPRPLQGALRGPPPRRVRPLAAHHAPPQGLAAPVLLRAPALQARAAVRLHPELPVRPSNGALSSLLCILFWWCPRDPNRHDDGKEAREEGEDSGLR

SEQ ID NO: 17220 - protein, 181 aa, Triticum aestivum
  peptide (1)..(181): Ceres Seq. ID no. 13659179
  misc_feature (1)..(146): NCBI GI NO: 28411879 NR Description: OSJNBa0016N23.32
  misc_feature (1)..(142): NCBI GI NO: 21593793 NR Description: unknown [Arabidopsis thaliana]
  misc_feature (1)..(142): NCBI GI NO: 18418660 NR Description: expressed protein [Arabidopsis thaliana]
  misc_feature (5)..(142): NCBI GI NO: 7486016 NR Description: hypothetical protein F23E12
  misc_feature (39)..(142): NCBI GI NO: 15227807 NR Description: expressed protein [Arabidopsis thaliana]
MATILENIQKARFLPTRPLRDDLPTFQGGKEEESHLMGLRKRLSSFSGKIQPISSASAEWAFRRTRSAPSLAAEFAGGPLKRWWDWGLGWLLSKKLGFAGDLEMNEEEAAALGRQSRGTWAHVLYKVRSGVRRLVASDHSLPTTHHRKASLPPSSSAHQHCKPAPQFAYTQSFQYGQAMAH

SEQ ID NO: 17221 - protein, 145 aa, Triticum aestivum
  peptide (1)..(145): Ceres Seq. ID no. 13659180
  misc_feature (1)..(110): NCBI GI NO: 28411879 NR Description: OSJNBa0016N23.32
  misc_feature (1)..(106): NCBI GI NO: 21593793 NR Description: unknown [Arabidopsis thaliana]
  misc_feature (1)..(106): NCBI GI NO: 18418660 NR Description: expressed protein [Arabidopsis thaliana]
  misc_feature (1)..(106): NCBI GI NO: 7486016 NR Description: hypothetical protein F23E12
  misc_feature (3)..(106): NCBI GI NO: 15227807 NR Description: expressed protein [Arabidopsis thaliana]
MGLRKRLSSFSGKIQPISSASAEWAFRRTRSAPSLAAEFAGGPLKRWWDWGLGWLLSKKLGFAGDLEMNEEEAAALGRQSRGTWAHVLYKVRSGVRRLVASDHSLPTTHHRKASLPPSSSAHQHCKPAPQFAYTQSFQYGQAMAH

SEQ ID NO: 17222 - DNA, 659 bp, Triticum aestivum
  misc_feature (1)..(659): Ceres Seq. ID no. 13659133
caaatgctcaagattttcaaggaacatgtcagcaagacctcaattttggatgactttgcattttacgagaaccgacagaagttgatgcaagaaaagagagcaaagcaacaaccgcttcaggggcagggtgttgatgagaaggagaagagcgcagttaacgggaattccgctgcacagaagcagacaccgagcaaggagagcaccacccctgccgccggtgaagagccgaacgcttccaaacccaccacagctgaaagcggcggcgcgagtgccaactagcgtgatatatttcttacgctcgttgctgtaacatgcggtagtccattgcgcaaaactcggtcaggcttcggaatatgcgcggatcatacatgggaaactaaatttaggtcgtgtgacttggttctcatcgtttaggtctcttatatacttggtgacatcaggttcttatatggcccctttcctattcctatttttgtttcggagtcttgttggtttagtaatttcagctatttgttattgtttagactaaaggagccgattttcgatacttctagacaacatttaaggtactaagtttttatgagtgttgtagtgctggagaaagtaataagaacaaagaactcctggtttttctagtcaaaaaaaaaaaaagaaaaaaa

SEQ ID NO: 17223 - protein, 92 aa, Triticum aestivum
  peptide (1)..(92): Ceres Seq. ID no. 13659134
  misc_feature (1)..(73): NCBI GI NO: 29725575 NR Description: putative RNA-binding protein [Avena sativa]
  misc_feature (1)..(92): NCBI GI NO: 18087662 NR Description: putative RNA-binding protein [Oryza sativa]
  misc_feature (1)..(89): NCBI GI NO: 22773231 NR Description: Putative RNA-binding protein
  misc_feature (1)..(85): NCBI GI NO: 25084169 NR Description: Unknown protein [Arabidopsis thaliana]
  misc_feature (1)..(53): NCBI GI NO: 34395023 NR Description: high-glucose-regulated protein 8-like
  misc_feature (1)..(85): NCBI GI NO: 30682683 NR Description: expressed protein [Arabidopsis thaliana]
  misc_feature (1)..(85): NCBI GI NO: 30682679 NR Description: expressed protein [Arabidopsis thaliana]
  misc_feature (2)..(44): NCBI GI NO: 17979477 NR Description: AT3g13060/MGH6_17 [Arabidopsis thaliana]
  misc_feature (1)..(92): NCBI GI NO: 38636667 NR Description: putative Rubisco subunit binding-protein betasubunit
QMLKIFKEHVSKTSILDDFAFYENRQKLMQEKRAKQQPLQGQGVDEKEKSAVNGNSAAQKQTPSKESTTPAAGEEPNASKPTTAESGGASAN

SEQ ID NO: 17224 - protein, 91 aa, Triticum aestivum
  peptide (1)..(91): Ceres Seq. ID no. 13659135
  misc_feature (1)..(72): NCBI GI NO: 29725575 NR Description: putative RNA-binding protein [Avena sativa]
  misc_feature (1)..(91): NCBI GI NO: 18087662 NR Description: putative RNA-binding protein [Oryza sativa]
  misc_feature (1)..(88): NCBI GI NO: 22773231 NR Description: Putative RNA-binding protein
  misc_feature (1)..(84): NCBI GI NO: 25084169 NR Description: Unknown protein [Arabidopsis thaliana]
  misc_feature (1)..(52): NCBI GI NO: 34395023 NR Description: high-glucose-regulated protein 8-like
  misc_feature (1)..(84): NCBI GI NO: 30682683 NR Description: expressed protein [Arabidopsis thaliana]
  misc_feature (1)..(84): NCBI GI NO: 30682679 NR Description: expressed protein [Arabidopsis thaliana]
  misc_feature (1)..(43): NCBI GI NO: 17979477 NR Description: AT3g13060/MGH6_17 [Arabidopsis thaliana]
  misc_feature (1)..(91): NCBI GI NO: 38636667 NR Description: putative Rubisco subunit binding-protein betasubunit
MLKIFKEHVSKTSILDDFAFYENRQKLMQEKRAKQQPLQGQGVDEKEKSAVNGNSAAQKQTPSKESTTPAAGEEPNASKPTTAESGGASAN

SEQ ID NO: 17225 - protein, 64 aa, Triticum aestivum
  peptide (1)..(64): Ceres Seq. ID no. 13659136
  misc_feature (1)..(45): NCBI GI NO: 29725575 NR Description: putative RNA-binding protein [Avena sativa]
  misc_feature (1)..(64): NCBI GI NO: 18087662 NR Description: putative RNA-binding protein [Oryza sativa]
  misc_feature (1)..(61): NCBI GI NO: 22773231 NR Description: Putative RNA-binding protein
  misc_feature (1)..(57): NCBI GI NO: 25084169 NR Description: Unknown protein [Arabidopsis thaliana]
  misc_feature (1)..(25): NCBI GI NO: 34395023 NR Description: high-glucose-regulated protein 8-like
  misc_feature (1)..(57): NCBI GI NO: 30682683 NR Description: expressed protein [Arabidopsis thaliana]
  misc_feature (1)..(57): NCBI GI NO: 30682679 NR Description: expressed protein [Arabidopsis thaliana]
  misc_feature (1)..(16): NCBI GI NO: 17979477 NR Description: AT3g13060/MGH6_17 [Arabidopsis thaliana]
  misc_feature (1)..(64): NCBI GI NO: 38636667 NR Description: putative Rubisco subunit binding-protein betasubunit
MQEKRAKQQPLQGQGVDEKEKSAVNGNSAAQKQTPSKESTTPAAGEEPNASKPTTAESGGASAN

SEQ ID NO: 17226 - DNA, 1100 bp, Triticum aestivum
  misc_feature (1)..(1100): Ceres Seq. ID no. 15179873
aatgttttcacggacttttgacttcagcccaagtcaaggttcccaaaaggccgaagccgccagcccaccgcacactgcccctcccctcctcgcccaatccccccttcttcgtcccacgacagaccaatttcttcccaaatcgccaccgccaccgccatgatgtcgtcaccggcagataccgcgccgtcatcctcctccgcggcctcggccgctccgaatcagcatccacagccgccggcgcagcaggctgatacgaaggagcggcggatggagtcgctcgggtggctgacggagtccacggtgatgcccaagaagcacaaggccatcgagggcgtcggcgcggcatccatactcgacctcaaggcccagctctaccgcactcaggaggaagcccgcaattccaccgccgctgacgccgcctccagcgagttccgccgcgccaagaaacgctcgggccccgccgaccccctgggcgccaagaactcaggtgtagacgctcgtgcccacaaggataagctggagctgaaagctgtgaaagatggtactgcatgttattctgccctagaaaagaaggctgagctgtatgagaaattatccaggggtgagctacctgatgaagaagaccaggagaaatattgcgttgatttcttccagaaaagttttcatcaagtcagcgtgcgccggcagccagagactgctactgcccctgagcatgtagaacaagaaaatgagagtgtcgattctatgccaaatcccaagccaatgggccttggacgaactggtacaacagttgaccaagatgagcacaaacgctttgtcagggaggttcacgacgaagtaagtcaagcaaggcagaaggcttcaacgatgaaacaccggcgacaagagcaggagtcggctcgtagagagaaactcaggcaagctttcctcaagaagcgccttgacaagttgatggctgaaaagcaagcatcttcagcgagtgatgaccaaccaaatagctaatcgagattttgtatgtcttacacttgtgcccaggaagcagttgttgtagctcatgtggtaatggttcatgcaactgaaaatgagaaaacttgccctac

SEQ ID NO: 17227 - protein, 281 aa, Triticum aestivum
  peptide (1)..(281): Ceres Seq. ID no. 15179874
  misc_feature (30)..(278): NCBI GI NO: 15236824 NR Description: cytochrome b561-related [Arabidopsis thaliana]
  misc_feature (30)..(278): NCBI GI NO: 26452652 NR Description: unknown protein [Arabidopsis thaliana]
  misc_feature (2)..(151): NCBI GI NO: 34910918 NR Description: OSJNBb0063G05.4
  misc_feature (202)..(281): NCBI GI NO: 34910918 NR Description: OSJNBb0063G05.4
  misc_feature (50)..(195): NCBI GI NO: 26333485 NR Description: unnamed protein product [Mus musculus]
  misc_feature (50)..(195): NCBI GI NO: 29835270 NR Description: RIKEN cDNA C130022K22 gene [Mus musculus]
  misc_feature (50)..(199): NCBI GI NO: 34857683 NR Description: similar to RIKEN cDNA C130022K22 gene
MMSSPADTAPSSSSAASAAPNQHPQPPAQQADTKERRMESLGWLTESTVMPKKHKAIEGVGAASILDLKAQLYRTQEEARNSTAADAASSEFRRAKKRSGPADPLGAKNSGVDARAHKDKLELKAVKDGTACYSALEKKAELYEKLSRGELPDEEDQEKYCVDFFQKSFHQVSVRRQPETATAPEHVEQENESVDSMPNPKPMGLGRTGTTVDQDEHKRFVREVHDEVSQARQKASTMKHRRQEQESARREKLRQAFLKKRLDKLMAEKQASSASDDQPNS

SEQ ID NO: 17228 - protein, 280 aa, Triticum aestivum
  peptide (1)..(280): Ceres Seq. ID no. 15179875
  misc_feature (29)..(277): NCBI GI NO: 15236824 NR Description: cytochrome b561-related [Arabidopsis thaliana]
  misc_feature (29)..(277): NCBI GI NO: 26452652 NR Description: unknown protein [Arabidopsis thaliana]
  misc_feature (1)..(150): NCBI GI NO: 34910918 NR Description: OSJNBb0063G05.4
  misc_feature (201)..(280): NCBI GI NO: 34910918 NR Description: OSJNBb0063G05.4
  misc_feature (49)..(194): NCBI GI NO: 26333485 NR Description: unnamed protein product [Mus musculus]
  misc_feature (49)..(194): NCBI GI NO: 29835270 NR Description: RIKEN cDNA C130022K22 gene [Mus musculus]
  misc_feature (49)..(198): NCBI GI NO: 34857683 NR Description: similar to RIKEN cDNA C130022K22 gene
MSSPADTAPSSSSAASAAPNQHPQPPAQQADTKERRMESLGWLTESTVMPKKHKAIEGVGAASILDLKAQLYRTQEEARNSTAADAASSEFRRAKKRSGPADPLGAKNSGVDARAHKDKLELKAVKDGTACYSALEKKAELYEKLSRGELPDEEDQEKYCVDFFQKSFHQVSVRRQPETATAPEHVEQENESVDSMPNPKPMGLGRTGTTVDQDEHKRFVREVHDEVSQARQKASTMKHRRQEQESARREKLRQAFLKKRLDKLMAEKQASSASDDQPNS

SEQ ID NO: 17229 - protein, 244 aa, Triticum aestivum
  peptide (1)..(244): Ceres Seq. ID no. 15179876
  misc_feature (1)..(241): NCBI GI NO: 15236824 NR Description: cytochrome b561-related [Arabidopsis thaliana]
  misc_feature (1)..(241): NCBI GI NO: 26452652 NR Description: unknown protein [Arabidopsis thaliana]
  misc_feature (1)..(114): NCBI GI NO: 34910918 NR Description: OSJNBb0063G05.4
  misc_feature (165)..(244): NCBI GI NO: 34910918 NR Description: OSJNBb0063G05.4
  misc_feature (13)..(158): NCBI GI NO: 26333485 NR Description: unnamed protein product [Mus musculus]
  misc_feature (13)..(158): NCBI GI NO: 29835270 NR Description: RIKEN cDNA C130022K22 gene [Mus musculus]
  misc_feature (13)..(162): NCBI GI NO: 34857683 NR Description: similar to RIKEN cDNA C130022K22 gene
MESLGWLTESTVMPKKHKAIEGVGAASILDLKAQLYRTQEEARNSTAADAASSEFRRAKKRSGPADPLGAKNSGVDARAHKDKLELKAVKDGTACYSALEKKAELYEKLSRGELPDEEDQEKYCVDFFQKSFHQVSVRRQPETATAPEHVEQENESVDSMPNPKPMGLGRTGTTVDQDEHKRFVREVHDEVSQARQKASTMKHRRQEQESARREKLRQAFLKKRLDKLMAEKQASSASDDQPNS

SEQ ID NO: 17230 - DNA, 1162 bp, Triticum aestivum
  misc_feature (1)..(1162): Ceres Seq. ID no. 13663517
  misc_feature (984)..(984): n is a, c, t, g, unknown, or other
  misc_feature (983)..(983): n is a, c, t, g, unknown, or other
  misc_feature (986)..(986): n is a, c, t, g, unknown, or other
aacatcctaatcaaaaactaataaatcccccacccccggatcgacaaagcttcccattcctccgcatcggcaggcagcagcaaaacaacagcccaatcgagggtcactccacaccaccaccactctcttcccccaatcccctcctcctccccgaaaccctagctggaatggagcccaaatccaccacccctccgccgccgggccccgtgctgggcgcgcccgtcggctacccgccggccgccgtctacccggccgccccgccccccggctacccgcacgcgccggccctctacgcgccccagccgccccccgccgccgtcgccgccgcgtcgcagcagaccgccgcgcagcagcagcagcagctgcaggtgttctgggcggagcagtaccgcgagatcgaggccaccaccgacttcaagaaccacaacctgcccctcgcccgcatcaagaagatcatgaaggccgacgaggacgtccgcatgatcgccgccgaggcgcccgtcgtcttcgcccgggcctgcgagatgttcatcctcgagctcacccaccgcggctgggcgcacgccgaggagaacaagcgccgcacgctgcagaagtccgacatcgccgccgccatcgcccgcaccgaggtcttcgacttcctggtggacatcgtgccgcgggacgaggccaaggacgccgaggcggccgtcgccgccgggatgccccaccccgccgccggcatgcccgccgccgacatggggtactactacgtcccgcagcagtaacacctgcagtatgttacagcggatttaagttgcatctaagattgtgctgttgatttagtgctctcctatgtttgtttgttcaccgctgaataatttaagatgttgccattatttgaggggcctcctctatgttacaagtgattcgatccgagaagaacccggctaggttcttctgatcgaggcagtccgtatgatgctcatgcatgtctaactgannanaaaaaaaaaaaaaaaaaaaaaaaaaaaaaaaaaaaaaaaaaaaaaaaaaaaaaaaaaaaaaaaaaaaaaaataaaaaaaaaaaaaaaaaggttaatcaaaaccgccaaccccaaggggggccccggaaccaaattcccccaaaaaaaagccaaaaaacgcgcgccaacggcccgcc

SEQ ID NO: 17231 - protein, 254 aa, Triticum aestivum
  peptide (1)..(254): Ceres Seq. ID no. 13663518
  misc_feature (8)..(103): Pfam Name: Pfam Description:  Extensin-like region
  misc_feature (56)..(253): NCBI GI NO: 5257260 NR Description: Similar to sequence of BAC F7G19 from Arabidopsisthaliana
  misc_feature (91)..(254): NCBI GI NO: 15223482 NR Description: transcription factor Hap5a, putative
  misc_feature (86)..(252): NCBI GI NO: 15228405 NR Description: transcription factor Hap5a, putative
  misc_feature (77)..(252): NCBI GI NO: 15242784 NR Description: transcription factor Hap5a, putative
  misc_feature (91)..(254): NCBI GI NO: 21554704 NR Description: transcription factor, putative
  misc_feature (111)..(247): NCBI GI NO: 15221912 NR Description: transcription factor Hap5a, putative
  misc_feature (98)..(252): NCBI GI NO: 15223986 NR Description: transcription factor Hap5a, putative
  misc_feature (98)..(252): NCBI GI NO: 25372763 NR Description: hypothetical protein
  misc_feature (98)..(252): NCBI GI NO: 6289057 NR Description: heme activated protein [Arabidopsis thaliana]
  misc_feature (130)..(254): NCBI GI NO: 2398533 NR Description: Transcription factor [Arabidopsis thaliana]
HPNQKLINPPPPDRQSFPFLRIGRQQQNNSPIEGHSTPPPLSSPNPLLLPETLAGMEPKSTTPPPPGPVLGAPVGYPPAAVYPAAPPPGYPHAPALYAPQPPPAAVAAASQQTAAQQQQQLQVFWAEQYREIEATTDFKNHNLPLARIKKIMKADEDVRMIAAEAPVVFARACEMFILELTHRGWAHAEENKRRTLQKSDIAAAIARTEVFDFLVDIVPRDEAKDAEAAVAAGMPHPAAGMPAADMGYYYVPQQ

SEQ ID NO: 17232 - protein, 199 aa, Triticum aestivum
  peptide (1)..(199): Ceres Seq. ID no. 13663519
  misc_feature (1)..(55): Pfam Name: Pfam Description:  Extensin-like region
  misc_feature (1)..(198): NCBI GI NO: 5257260 NR Description: Similar to sequence of BAC F7G19 from Arabidopsisthaliana
  misc_feature (36)..(199): NCBI GI NO: 15223482 NR Description: transcription factor Hap5a, putative
  misc_feature (31)..(197): NCBI GI NO: 15228405 NR Description: transcription factor Hap5a, putative
  misc_feature (22)..(197): NCBI GI NO: 15242784 NR Description: transcription factor Hap5a, putative
  misc_feature (36)..(199): NCBI GI NO: 21554704 NR Description: transcription factor, putative
  misc_feature (56)..(192): NCBI GI NO: 15221912 NR Description: transcription factor Hap5a, putative
  misc_feature (43)..(197): NCBI GI NO: 15223986 NR Description: transcription factor Hap5a, putative
  misc_feature (43)..(197): NCBI GI NO: 25372763 NR Description: hypothetical protein
  misc_feature (43)..(197): NCBI GI NO: 6289057 NR Description: heme activated protein [Arabidopsis thaliana]
  misc_feature (75)..(199): NCBI GI NO: 2398533 NR Description: Transcription factor [Arabidopsis thaliana]
MEPKSTTPPPPGPVLGAPVGYPPAAVYPAAPPPGYPHAPALYAPQPPPAAVAAASQQTAAQQQQQLQVFWAEQYREIEATTDFKNHNLPLARIKKIMKADEDVRMIAAEAPVVFARACEMFILELTHRGWAHAEENKRRTLQKSDIAAAIARTEVFDFLVDIVPRDEAKDAEAAVAAGMPHPAAGMPAADMGYYYVPQQ

SEQ ID NO: 17233 - DNA, 898 bp, Triticum aestivum
  misc_feature (1)..(898): Ceres Seq. ID no. 13663563
aacacctcactccctctcctcactcctcactcgcaagcctcgctcctctccctccgctcgctctcctcgctcggccgcagcgacaagaagcatgggcctctcggtgatcgctccgccggccggcgactcggcgtccccggcgcaccgccgcgcgcgccgcgccttcctcgtgtccaactacatgatcctcggcgcggcgtccgggtgcggcttcctcacgctctcgctccgcctggtgccctccgtcgacggcttcctcctcatcctgctccacgcgctcaccgtggcggccgccgtggccgggtgcgccgtcatcgcggcgcccgacccgccgcggggccgcgtctacaccgcccacatgtccgccaccgtcgtcgtgtccatcctgcagggcgccgccgccgtgctcgccttctcccgcaccgccgagttcctcgcctacgggctccggtcctacgtccgcgaggaggacggcgccatcatcctgcgcatgatcgggggcctcggcatcgccatcttctgcctcgagtgggtcgccctcgcgctcgccttcgtcctcaggtactacgcctacgtcgacagggagtgcggcggcaaccccatgcgccgcagcgccaaggtcggcggcgaggacggcgccggcaactggccgtggccgttccaggtctgatctgatccgccacaaggatgatgatgcagcaagcaatttatgatgttggggccttgggggaggggtgtctcaagacgagaagagctgagaaccgatagttcttgggagaaaaactagtgtttggtgatattactattcgtttattgggttgtattgtgtggtgtggtatatgattatgttgtactgcggctgttgccacctctataatattatttgaaattcctgttc

SEQ ID NO: 17234 - protein, 224 aa, Triticum aestivum
  peptide (1)..(224): Ceres Seq. ID no. 15220232
  misc_feature (33)..(224): NCBI GI NO: 29247944 NR Description: GLP_26_54603_52153 [Giardia lamblia ATCC 50803]
NTSLPLLTPHSQASLLSLRSLSSLGRSDKKHGPLGDRSAGRRLGVPGAPPRAPRLPRVQLHDPRRGVRVRLPHALAPPGALRRRLPPHPAPRAHRGGRRGRVRRHRGARPAAGPRLHRPHVRHRRRVHPAGRRRRARLLPHRRVPRLRAPVLRPRGGRRHHPAHDRGPRHRHLLPRVGRPRARLRPQVLRLRRQGVRRQPHAPQRQGRRRGRRRQLAVAVPGLI

SEQ ID NO: 17235 - protein, 222 aa, Triticum aestivum
  peptide (1)..(222): Ceres Seq. ID no. 15220233
  misc_feature (32)..(222): NCBI GI NO: 38345379 NR Description: OSJNBa0067K08.8
  misc_feature (31)..(222): NCBI GI NO: 21553926 NR Description: unknown [Arabidopsis thaliana]
  misc_feature (43)..(222): NCBI GI NO: 15237310 NR Description: expressed protein [Arabidopsis thaliana]
  misc_feature (43)..(222): NCBI GI NO: 21703131 NR Description: AT5g16250/T21H19_170 [Arabidopsis thaliana]
  misc_feature (36)..(222): NCBI GI NO: 18396262 NR Description: expressed protein [Arabidopsis thaliana]
  misc_feature (55)..(222): NCBI GI NO: 15239379 NR Description: expressed protein [Arabidopsis thaliana]
  misc_feature (55)..(222): NCBI GI NO: 15239407 NR Description: hypothetical protein [Arabidopsis thaliana]
  misc_feature (53)..(187): NCBI GI NO: 34907616 NR Description: contains EST C27797(C52876)~unknown protein
TPHSLSSLLTRKPRSSPSARSPRSAAATRSMGLSVIAPPAGDSASPAHRRARRAFLVSNYMILGAASGCGFLTLSLRLVPSVDGFLLILLHALTVAAAVAGCAVIAAPDPPRGRVYTAHMSATVVVSILQGAAAVLAFSRTAEFLAYGLRSYVREEDGAIILRMIGGLGIAIFCLEWVALALAFVLRYYAYVDRECGGNPMRRSAKVGGEDGAGNWPWPFQV

SEQ ID NO: 17236 - protein, 192 aa, Triticum aestivum
  peptide (1)..(192): Ceres Seq. ID no. 15220234
  misc_feature (2)..(192): NCBI GI NO: 38345379 NR Description: OSJNBa0067K08.8
  misc_feature (1)..(192): NCBI GI NO: 21553926 NR Description: unknown [Arabidopsis thaliana]
  misc_feature (13)..(192): NCBI GI NO: 15237310 NR Description: expressed protein [Arabidopsis thaliana]
  misc_feature (13)..(192): NCBI GI NO: 21703131 NR Description: AT5g16250/T21H19_170 [Arabidopsis thaliana]
  misc_feature (6)..(192): NCBI GI NO: 18396262 NR Description: expressed protein [Arabidopsis thaliana]
  misc_feature (25)..(192): NCBI GI NO: 15239379 NR Description: expressed protein [Arabidopsis thaliana]
  misc_feature (25)..(192): NCBI GI NO: 15239407 NR Description: hypothetical protein [Arabidopsis thaliana]
  misc_feature (23)..(157): NCBI GI NO: 34907616 NR Description: contains EST C27797(C52876)~unknown protein
MGLSVIAPPAGDSASPAHRRARRAFLVSNYMILGAASGCGFLTLSLRLVPSVDGFLLILLHALTVAAAVAGCAVIAAPDPPRGRVYTAHMSATVVVSILQGAAAVLAFSRTAEFLAYGLRSYVREEDGAIILRMIGGLGIAIFCLEWVALALAFVLRYYAYVDRECGGNPMRRSAKVGGEDGAGNWPWPFQV

SEQ ID NO: 17237 - DNA, 696 bp, Triticum aestivum
  misc_feature (1)..(696): Ceres Seq. ID no. 15179877
accagcaccagccctccttttcaaatcgctttcaaacaggaacacatcgccgcctcctcctccccttcctccgctccctcccccatccatccagtgatccatggccgccgcctcgcccgagttcttcaacccggcggacgccttctcgccgcgcatgcacctcctctccgccggcgctggagacggcggctgtggcgacggcgacgaatactaccgctgctgcaggacgcccacgggcgccgggatcggctgcctgggccaggcggccacctgcccgccggcgccgcggaagccgcgcgcgcagcccgacgcggcctgccggaagcgcctcttcgacgtccaggtcatcagcctccgcttcgacgacctcgacgccatcttccgcccctcgccgccgccgccctgccacgaccgcaacaacaagcagcagcagcggcggcagcggagccgccgcgtgctcggcaggctcgccgctggctccaccggccggcgcagccgcgccagcttaaattaagtgcctgccattagcagtcagtacccagtagttgagttgagttgacacttgtgtggatggatgattgagttatcagccatcttcaggtaaaaacagtagtggtagccacgacccatacttcgctttgcacacccatcctctgtaatcatccgtcataataatattattatttctactgtcat

SEQ ID NO: 17238 - protein, 175 aa, Triticum aestivum
  peptide (1)..(175): Ceres Seq. ID no. 15179878
TSTSPPFQIAFKQEHIAASSSPSSAPSPIHPVIHGRRLARVLQPGGRLLAAHAPPLRRRWRRRLWRRRRILPLLQDAHGRRDRLPGPGGHLPAGAAEAARAARRGLPEAPLRRPGHQPPLRRPRRHLPPLAAAALPRPQQQAAAAAAAEPPRARQARRWLHRPAQPRQLKLSACH

SEQ ID NO: 17239 - protein, 168 aa, Triticum aestivum
  peptide (1)..(168): Ceres Seq. ID no. 15179879
  misc_feature (39)..(168): Pfam Name: Pfam Description:  Equine herpesvirus glycoprotein gp2
  misc_feature (25)..(168): NCBI GI NO: 11359723 NR Description: proteophosphoglycan, membrane-associated
  misc_feature (40)..(168): NCBI GI NO: 11360494 NR Description: antifreeze glycopeptide AFGP polyprotein precursor
  misc_feature (25)..(168): NCBI GI NO: 13592175 NR Description: ppg3 [Leishmania major]
  misc_feature (41)..(168): NCBI GI NO: 11360494 NR Description: antifreeze glycopeptide AFGP polyprotein precursor
  misc_feature (25)..(168): NCBI GI NO: 13592175 NR Description: ppg3 [Leishmania major]
  misc_feature (23)..(156): NCBI GI NO: 23510008 NR Description: hypothetical protein [Plasmodium falciparum 3D7]
  misc_feature (25)..(168): NCBI GI NO: 5420387 NR Description: proteophosphoglycan [Leishmania major]
  misc_feature (27)..(168): NCBI GI NO: 2145054 NR Description: merozoite surface protein-1 [Plasmodium berghei]
  misc_feature (25)..(168): NCBI GI NO: 13592175 NR Description: ppg3 [Leishmania major]
  misc_feature (25)..(168): NCBI GI NO: 13592175 NR Description: ppg3 [Leishmania major]
QHQPSFSNRFQTGTHRRLLLPFLRSLPHPSSDPWPPPRPSSSTRRTPSRRACTSSPPALETAAVATATNTTAAAGRPRAPGSAAWARRPPARRRRGSRARSPTRPAGSASSTSRSSASASTTSTPSSAPRRRRPATTATTSSSSGGSGAAACSAGSPLAPPAGAAAPA

SEQ ID NO: 17240 - protein, 137 aa, Triticum aestivum
  peptide (1)..(137): Ceres Seq. ID no. 15179880
  misc_feature (1)..(119): NCBI GI NO: 37536602 NR Description: unknown protein
MAAASPEFFNPADAFSPRMHLLSAGAGDGGCGDGDEYYRCCRTPTGAGIGCLGQAATCPPAPRKPRAQPDAACRKRLFDVQVISLRFDDLDAIFRPSPPPPCHDRNNKQQQRRQRSRRVLGRLAAGSTGRRSRASLN

SEQ ID NO: 17241 - DNA, 1176 bp, Triticum aestivum
  misc_feature (1)..(1176): Ceres Seq. ID no. 15179881
agatgccgcattagccaccaacgcactcccccgtctccccctccaatcttcaccaatccaagcctccctccggcggcggcgacggcggagagatcggcgagatttccctcttcctcccactctgtctctgtctgagctcgaggagagggagagagattgagagggcctccgtgcggattggctcggttcctctggttcttgctcccagcccggcccgcgcgccatgacggtggtcgacgccgagacccggttccacgtcctggcggtggacgacagcgtcatcgaccggaagctcatcgagatgctgctcaggacctcctcctaccaagtcaccacggtggactccgggagcaaggcgctggaggtcctgggacttagagacgagggggacgactcctcctcctcctcctcacccccttcctcctccgcccctgaccaccaccaggaggtgggcgtgaatttgatcatcactgactactgcatgcctggcatgacaggatacgatctgctgaggagggtcaaggggtcatcttcattgaaggacattccagtggtgatcatgtcgtctgagaatgtgcctgccaggatcagcaggtgcttggaggacggcgcggaggagttyttcctcaagcccgtgaagctcgctgacatgaagaagctcaagtcgcacctggtccggcggaagcagccccagctccagccgcagacacatgagaagccacagccgcaaccacagcagcagcaacagaaaccacagccagagcagcagctgaaggcagagcaagcgccagccgagccggcggcggaggaggaggcagtgacggccggcggaatcacgggtgactgcggcggcggcagcaggaagcggaaggcggcgatgatggagcaggacggggcgagcacgagcctctccagcggcagcagcggcctggcggtggagacctgaatcctgaagaaactcaacagagacacccccaaccaagaaacctcatgtttctcttggctcctgcaatttttttggggtttacttgctcatatgggagaatcatcatcgtcgtcatggctaatagtagctcctggggtggggtaaaatatttacttagttctaagtgaagaactagaaaaaacatactacttttacactagctgaattttggtgtagtgccctgttcgctc

SEQ ID NO: 17242 - protein, 240 aa, Triticum aestivum
  peptide (1)..(240): Ceres Seq. ID no. 15179882
  misc_feature (10)..(155): Pfam Name: Pfam Description:  Response regulator receiver domain
  misc_feature (1)..(240): NCBI GI NO: 34906626 NR Description: putative response regulator
  misc_feature (1)..(240): NCBI GI NO: 12060386 NR Description: response regulator 5 [Zea mays]
  misc_feature (1)..(191): NCBI GI NO: 12060384 NR Description: response regulator 4 [Zea mays]
  misc_feature (3)..(182): NCBI GI NO: 15227325 NR Description: two-component response regulator 3 protein -related
  misc_feature (6)..(154): NCBI GI NO: 15230202 NR Description: responce reactor 4 [Arabidopsis thaliana]
  misc_feature (1)..(161): NCBI GI NO: 12060388 NR Description: response regulator 6 [Zea mays]
  misc_feature (10)..(146): NCBI GI NO: 33330868 NR Description: type-A response regulator [Catharanthus roseus]
  misc_feature (4)..(200): NCBI GI NO: 15218957 NR Description: response regulator 3 [Arabidopsis thaliana]
  misc_feature (5)..(153): NCBI GI NO: 13173408 NR Description: response regulator protein [Dianthus caryophyllus]
  misc_feature (1)..(163): NCBI GI NO: 15221927 NR Description: response regulator 7 [Arabidopsis thaliana]
  misc_feature (133)..(133): Xaa is any aa, unknown or other
MTVVDAETRFHVLAVDDSVIDRKLIEMLLRTSSYQVTTVDSGSKALEVLGLRDEGDDSSSSSSPPSSSAPDHHQEVGVNLIITDYCMPGMTGYDLLRRVKGSSSLKDIPVVIMSSENVPARISRCLEDGAEEXFLKPVKLADMKKLKSHLVRRKQPQLQPQTHEKPQPQPQQQQQKPQPEQQLKAEQAPAEPAAEEEAVTAGGITGDCGGGSRKRKAAMMEQDGASTSLSSGSSGLAVET

SEQ ID NO: 17243 - protein, 214 aa, Triticum aestivum
  peptide (1)..(214): Ceres Seq. ID no. 15179883
  misc_feature (1)..(129): Pfam Name: Pfam Description:  Response regulator receiver domain
  misc_feature (1)..(214): NCBI GI NO: 34906626 NR Description: putative response regulator
  misc_feature (1)..(214): NCBI GI NO: 12060386 NR Description: response regulator 5 [Zea mays]
  misc_feature (1)..(165): NCBI GI NO: 12060384 NR Description: response regulator 4 [Zea mays]
  misc_feature (1)..(156): NCBI GI NO: 15227325 NR Description: two-component response regulator 3 protein -related
  misc_feature (1)..(128): NCBI GI NO: 15230202 NR Description: responce reactor 4 [Arabidopsis thaliana]
  misc_feature (1)..(135): NCBI GI NO: 12060388 NR Description: response regulator 6 [Zea mays]
  misc_feature (1)..(120): NCBI GI NO: 33330868 NR Description: type-A response regulator [Catharanthus roseus]
  misc_feature (1)..(174): NCBI GI NO: 15218957 NR Description: response regulator 3 [Arabidopsis thaliana]
  misc_feature (1)..(127): NCBI GI NO: 13173408 NR Description: response regulator protein [Dianthus caryophyllus]
  misc_feature (1)..(137): NCBI GI NO: 15221927 NR Description: response regulator 7 [Arabidopsis thaliana]
  misc_feature (107)..(107): Xaa is any aa, unknown or other
MLLRTSSYQVTTVDSGSKALEVLGLRDEGDDSSSSSSPPSSSAPDHHQEVGVNLIITDYCMPGMTGYDLLRRVKGSSSLKDIPVVIMSSENVPARISRCLEDGAEEXFLKPVKLADMKKLKSHLVRRKQPQLQPQTHEKPQPQPQQQQQKPQPEQQLKAEQAPAEPAAEEEAVTAGGITGDCGGGSRKRKAAMMEQDGASTSLSSGSSGLAVET

SEQ ID NO: 17244 - protein, 154 aa, Triticum aestivum
  peptide (1)..(154): Ceres Seq. ID no. 15179884
  misc_feature (1)..(69): Pfam Name: Pfam Description:  Response regulator receiver domain
  misc_feature (1)..(154): NCBI GI NO: 34906626 NR Description: putative response regulator
  misc_feature (1)..(154): NCBI GI NO: 12060386 NR Description: response regulator 5 [Zea mays]
  misc_feature (1)..(105): NCBI GI NO: 12060384 NR Description: response regulator 4 [Zea mays]
  misc_feature (1)..(96): NCBI GI NO: 15227325 NR Description: two-component response regulator 3 protein -related
  misc_feature (1)..(68): NCBI GI NO: 15230202 NR Description: responce reactor 4 [Arabidopsis thaliana]
  misc_feature (1)..(75): NCBI GI NO: 12060388 NR Description: response regulator 6 [Zea mays]
  misc_feature (1)..(60): NCBI GI NO: 33330868 NR Description: type-A response regulator [Catharanthus roseus]
  misc_feature (1)..(114): NCBI GI NO: 15218957 NR Description: response regulator 3 [Arabidopsis thaliana]
  misc_feature (1)..(67): NCBI GI NO: 13173408 NR Description: response regulator protein [Dianthus caryophyllus]
  misc_feature (1)..(77): NCBI GI NO: 15221927 NR Description: response regulator 7 [Arabidopsis thaliana]
  misc_feature (47)..(47): Xaa is any aa, unknown or other
MPGMTGYDLLRRVKGSSSLKDIPVVIMSSENVPARISRCLEDGAEEXFLKPVKLADMKKLKSHLVRRKQPQLQPQTHEKPQPQPQQQQQKPQPEQQLKAEQAPAEPAAEEEAVTAGGITGDCGGGSRKRKAAMMEQDGASTSLSSGSSGLAVET

SEQ ID NO: 17245 - DNA, 898 bp, Triticum aestivum
  misc_feature (1)..(898): Ceres Seq. ID no. 15179885
agtctgctgtctgctctgtgcgccgacccacgcttgtctttctccccaatctccaaactctctctagtccccaccacaacccgctccccatggcgacggccgccgccaccgccgccaagccggcggcgaggacgacggtgaacgtggccggggccgtgtaccgcgtgcagctggccctcctcgacggcgcagcggcctccaacgagcccctcctccacgcggccgccgctatcctctcccgcgccgactacgacgacgtcgtcaccgagcgctccatcgccgaggcgtgcggccacccagcgtgcaccagctccctccccgaccccgccaaccccaaggcggcgccgcggttccacatctccctccgcgagcaccgcgtctacgacctcgaggaggcccgcaagttctgctccgagcgctgcctcgtcgcctccgcggccttcgccgcctcgctcccgcccgaccgccccttcgggatcccgcccaacaggctggacgccctggtcgcgctcttcgagggcagcggggacggtccggggctagggtttcggtcggacggtgggaagaaggaggacgaggggaggaaggtggagattgtggagaaggagacgcctgggcctggggaggtgacgctgcaggagtggattgggccgtcgggcgccatcgagggctatgtgccccgccatcaccccattcatgaaggtgattgtttcatactgaactctgttatttactttgacaattttgtagtctggatattcattcttgcatttgattatgttgccattggttgactggaggacactaggattgttgagaatagctgaggcattttactgtctttgtgtgctgggaattttatgtggattgatctgaataactgagaaattttatcgtc

SEQ ID NO: 17246 - protein, 263 aa, Triticum aestivum
  peptide (1)..(263): Ceres Seq. ID no. 15179886
  misc_feature (46)..(226): Pfam Name: DUF408 Pfam Description: Domain of Unknown Function
  misc_feature (46)..(226): NCBI GI NO: 7485248 NR Description: hypothetical protein A_IG002P16
SAVCSVRRPTLVFLPNLQTLSSPHHNPLPMATAAATAAKPAARTTVNVAGAVYRVQLALLDGAAASNEPLLHAAAAILSRADYDDVVTERSIAEACGHPACTSSLPDPANPKAAPRFHISLREHRVYDLEEARKFCSERCLVASAAFAASLPPDRPFGIPPNRLDALVALFEGSGDGPGLGFRSDGGKKEDEGRKVEIVEKETPGPGEVTLQEWIGPSGAIEGYVPRHHPIHEGDCFILNSVIYFDNFVVWIFILAFDYVAIG

SEQ ID NO: 17247 - protein, 234 aa, Triticum aestivum
  peptide (1)..(234): Ceres Seq. ID no. 15179887
  misc_feature (17)..(197): Pfam Name: DUF408 Pfam Description: Domain of Unknown Function
  misc_feature (17)..(197): NCBI GI NO: 7485248 NR Description: hypothetical protein A_IG002P16
MATAAATAAKPAARTTVNVAGAVYRVQLALLDGAAASNEPLLHAAAAILSRADYDDVVTERSIAEACGHPACTSSLPDPANPKAAPRFHISLREHRVYDLEEARKFCSERCLVASAAFAASLPPDRPFGIPPNRLDALVALFEGSGDGPGLGFRSDGGKKEDEGRKVEIVEKETPGPGEVTLQEWIGPSGAIEGYVPRHHPIHEGDCFILNSVIYFDNFVVWIFILAFDYVAIG

SEQ ID NO: 17248 - DNA, 1171 bp, Triticum aestivum
  misc_feature (1)..(1171): Ceres Seq. ID no. 13659286
cccccctcccgtaaaaacaccagttcttccccaaatcttgcaaaacctaaccctcagccccgaccacacggccgccgccgccaccaaccactcgaccgcagcgccggcttcctcccggaacacagtcgccgccgaccgcctagtcgtcgccgagcacccttctctaccaaggaaaccttcgccgcttcgtccccatcccccgcgcacctagcgcctgcttcctcccgaggaatgccgcagaccgccctccatccccaccacaacagcgacctcctccacaggtttcctccgccgagcaggcctcctcctcctcaagctttctccscccgaacagggcctcctcctccacgagcatccttccccgagcactaagttgggccgcatcctggttccctcacccgagcagcggaccttcctgtacggcccctctcctgagaagctccacctcctctacatcctcccccaggtgcagcgccacctccttgctcaccgagagcacttggctgtgtgcatcttgtttgtcctctccaccaagcagcatcggctactccatacaagcacataagcttatgctcttatgattatatatttaccaatgactattatggttgatagttttaaagtctttgcttctatctatgcagttgagaatgacttataagttcatggcaaaagcagcaacatgagtacgcaaccacaagcaagctgaggggttatttctagacaaaactttaggaaccgagttcactacaactcgaagtcttgtgcatggaggagaattgagatatttgcgcattctgtactggtcaaaaggttggcatcatggttggaagatcttctatgctactctctacatgatgtttcttctacatgatagcgcttgaagtctacatgatgtttcttgtattcatagctcaaaccatttgtttagcttagtttgaacaaaaaatattattgtcttacatgtaaataatgtttactaatgtagctggatgctactgaacgcatgtacgaaagtcaaaatactaaagtgttagtcattacgtgtttgacaaaaaaaaaaaaaaaaaaaaaaaaaaaaaaaaaaaaaaaaaaaaaaaaaaaaaaaaaaaaaaagaaaaaaaaaaaaaaaaargyttatcratmccgycaacctcaagggggggcccgg

SEQ ID NO: 17249 - protein, 123 aa, Triticum aestivum
  peptide (1)..(123): Ceres Seq. ID no. 15219960
  misc_feature (15)..(123): Pfam Name: Pfam Description:  Extensin-like region
  misc_feature (1)..(123): NCBI GI NO: 7949115 NR Description: Ser/Arg-related nuclear matrix protein
  misc_feature (2)..(123): NCBI GI NO: 7949115 NR Description: Ser/Arg-related nuclear matrix protein
  misc_feature (1)..(123): NCBI GI NO: 81286 NR Description: extensin - Volvox carteri (fragment)
  misc_feature (1)..(123): NCBI GI NO: 23274133 NR Description: Similar to serine/arginine repetitive matrix 1
  misc_feature (16)..(123): NCBI GI NO: 81286 NR Description: extensin - Volvox carteri (fragment)
  misc_feature (2)..(123): NCBI GI NO: 34872074 NR Description: similar to Ser/Arg-related nuclear matrix protein
  misc_feature (1)..(123): NCBI GI NO: 119714 NR Description: Extensin precursor
  misc_feature (109)..(109): Xaa is any aa, unknown or other
PPSRKNTSSSPNLAKPNPQPRPHGRRRHQPLDRSAGFLPEHSRRRPPSRRRAPFSTKETFAASSPSPAHLAPASSRGMPQTALHPHHNSDLLHRFPPPSRPPPPQAFSXRTGPPPPRASFPEH

SEQ ID NO: 17250 - protein, 69 aa, Triticum aestivum
  peptide (1)..(69): Ceres Seq. ID no. 15219961
PPPVKTPVLPQILQNLTLSPDHTAAAATNHSTAAPASSRNTVAADRLVVAEHPSLPRKPSPLRPHPPRT

SEQ ID NO: 17251 - DNA, 1147 bp, Triticum aestivum
  misc_feature (1)..(1147): Ceres Seq. ID no. 14303047
gtcctcccggcaccgcacaccgcaacctctaagctcaaaccacaacgcgcacccacacaaagccgagagcgcgctctcgctcgctcgccggcggcgacagaggacaggcatggccgtgtacatccgcctggacgacgccgtgcgcgcgcgcctccgcggggacgggggtggcaccagcagcggcagcgaccacgacgcctccgcctgcctctccgacctcgtccaggccttcctcgagacggacgccgccggcaacggggacgacgcggccgggccggccccgaaaggacgtgacgggtacgactccgacgacgcggacggcgccgcggaggcggccgcgtccgtgcgggagctgctcgacccgccggccgcggaggaccccttccggatcaggctggcggccgccgtgtccgcggcgctggacgcggaggcgccgctgcgggggcacggcgcggcgttccggcgcgcggtgatgcggcggctgcgtgccgctgggtacgacgccggcgtgtgcaggtcgcgctgggagacgtgcggcaacctgacggccgggacgtacgagtacatcgacgtggtcgtgccggccgcggggaaggcggcgaggtacattgtggacgcggacttccgggcggggctggaggtggcgcgcgcgacggcggagtacgcggtcgtcgtggccgcggtgccggccaaggcggtggtcgcgcgggaggaggccgtggggcgcgccgtgcgcgtggccgccgacgccgcgcgccggtcgctccgggcgcacggcctgcacgtgccgccgtggcgcaagagccggtacatgctcgccaagtggctggggccctacaagcggtcgccgtcctcctcatcatcggcgtccggcgcaatgccggcgcccggcggccccgggatggacatcatcaagtgccgcgccgtcgggttcttcccgtcccagacggccgcgccggcggcgaggatcaagtaaaagctcctcggcaccgctaattctccgcgcgcgtctctggaagatgtcatagtctgataagtagatgtagagagatgatcgatgagttggagcgtgcctcgaattcgtttttgtacaaacatttttggtctacctagactatgaaaggagcaaattgttggtcaaaaaaac

SEQ ID NO: 17252 - protein, 324 aa, Triticum aestivum
  peptide (1)..(324): Ceres Seq. ID no. 14303048
  misc_feature (70)..(281): Pfam Name: DUF506 Pfam Description: Protein of unknown function
  misc_feature (37)..(324): NCBI GI NO: 34906942 NR Description: similar to Arabidopsis thaliana chromosome 3
  misc_feature (43)..(311): NCBI GI NO: 18397919 NR Description: expressed protein [Arabidopsis thaliana]
  misc_feature (43)..(311): NCBI GI NO: 21554332 NR Description: unknown [Arabidopsis thaliana]
  misc_feature (28)..(300): NCBI GI NO: 34902608 NR Description: Unknown protein
  misc_feature (50)..(295): NCBI GI NO: 20042978 NR Description: Hypothetical protein [Oryza sativa]
  misc_feature (50)..(295): NCBI GI NO: 37534384 NR Description: unknown protein
  misc_feature (43)..(311): NCBI GI NO: 15230824 NR Description: hypothetical protein [Arabidopsis thaliana]
  misc_feature (9)..(290): NCBI GI NO: 34897230 NR Description: unknown protein
  misc_feature (45)..(297): NCBI GI NO: 15221175 NR Description: hypothetical protein [Arabidopsis thaliana]
  misc_feature (60)..(287): NCBI GI NO: 7486102 NR Description: hypothetical protein F24O1
SSRHRTPQPLSSNHNAHPHKAESALSLARRRRQRTGMAVYIRLDDAVRARLRGDGGGTSSGSDHDASACLSDLVQAFLETDAAGNGDDAAGPAPKGRDGYDSDDADGAAEAAASVRELLDPPAAEDPFRIRLAAAVSAALDAEAPLRGHGAAFRRAVMRRLRAAGYDAGVCRSRWETCGNLTAGTYEYIDVVVPAAGKAARYIVDADFRAGLEVARATAEYAVVVAAVPAKAVVAREEAVGRAVRVAADAARRSLRAHGLHVPPWRKSRYMLAKWLGPYKRSPSSSSSASGAMPAPGGPGMDIIKCRAVGFFPSQTAAPAARIK

SEQ ID NO: 17253 - protein, 288 aa, Triticum aestivum
  peptide (1)..(288): Ceres Seq. ID no. 14303049
  misc_feature (34)..(245): Pfam Name: DUF506 Pfam Description: Protein of unknown function
  misc_feature (1)..(288): NCBI GI NO: 34906942 NR Description: similar to Arabidopsis thaliana chromosome 3
  misc_feature (7)..(275): NCBI GI NO: 18397919 NR Description: expressed protein [Arabidopsis thaliana]
  misc_feature (7)..(275): NCBI GI NO: 21554332 NR Description: unknown [Arabidopsis thaliana]
  misc_feature (1)..(264): NCBI GI NO: 34902608 NR Description: Unknown protein
  misc_feature (14)..(259): NCBI GI NO: 20042978 NR Description: Hypothetical protein [Oryza sativa]
  misc_feature (14)..(259): NCBI GI NO: 37534384 NR Description: unknown protein
  misc_feature (7)..(275): NCBI GI NO: 15230824 NR Description: hypothetical protein [Arabidopsis thaliana]
  misc_feature (1)..(254): NCBI GI NO: 34897230 NR Description: unknown protein
  misc_feature (9)..(261): NCBI GI NO: 15221175 NR Description: hypothetical protein [Arabidopsis thaliana]
  misc_feature (24)..(251): NCBI GI NO: 7486102 NR Description: hypothetical protein F24O1
MAVYIRLDDAVRARLRGDGGGTSSGSDHDASACLSDLVQAFLETDAAGNGDDAAGPAPKGRDGYDSDDADGAAEAAASVRELLDPPAAEDPFRIRLAAAVSAALDAEAPLRGHGAAFRRAVMRRLRAAGYDAGVCRSRWETCGNLTAGTYEYIDVVVPAAGKAARYIVDADFRAGLEVARATAEYAVVVAAVPAKAVVAREEAVGRAVRVAADAARRSLRAHGLHVPPWRKSRYMLAKWLGPYKRSPSSSSSASGAMPAPGGPGMDIIKCRAVGFFPSQTAAPAARIK

SEQ ID NO: 17254 - protein, 167 aa, Triticum aestivum
  peptide (1)..(167): Ceres Seq. ID no. 14303050
  misc_feature (1)..(124): Pfam Name: DUF506 Pfam Description: Protein of unknown function
  misc_feature (1)..(167): NCBI GI NO: 34906942 NR Description: similar to Arabidopsis thaliana chromosome 3
  misc_feature (1)..(154): NCBI GI NO: 18397919 NR Description: expressed protein [Arabidopsis thaliana]
  misc_feature (1)..(154): NCBI GI NO: 21554332 NR Description: unknown [Arabidopsis thaliana]
  misc_feature (1)..(143): NCBI GI NO: 34902608 NR Description: Unknown protein
  misc_feature (1)..(138): NCBI GI NO: 20042978 NR Description: Hypothetical protein [Oryza sativa]
  misc_feature (1)..(138): NCBI GI NO: 37534384 NR Description: unknown protein
  misc_feature (1)..(154): NCBI GI NO: 15230824 NR Description: hypothetical protein [Arabidopsis thaliana]
  misc_feature (1)..(133): NCBI GI NO: 34897230 NR Description: unknown protein
  misc_feature (1)..(140): NCBI GI NO: 15221175 NR Description: hypothetical protein [Arabidopsis thaliana]
  misc_feature (1)..(130): NCBI GI NO: 7486102 NR Description: hypothetical protein F24O1
MRRLRAAGYDAGVCRSRWETCGNLTAGTYEYIDVVVPAAGKAARYIVDADFRAGLEVARATAEYAVVVAAVPAKAVVAREEAVGRAVRVAADAARRSLRAHGLHVPPWRKSRYMLAKWLGPYKRSPSSSSSASGAMPAPGGPGMDIIKCRAVGFFPSQTAAPAARIK

SEQ ID NO: 17255 - DNA, 1367 bp, Triticum aestivum
  misc_feature (1)..(1367): Ceres Seq. ID no. 13659338
catccatccacccgcccccaagttatctcgtgccgtcttctcttctcttctcttctcttctcccctcccgcatccggtagcagcaagcactctgcgtctctccctttatccccgcccgcatggctgctctcctccgcacggcggccgcccttgcgccccgcccttcgcctgcccgcgagtccccgcgccggccgtgcgctgcgtccctcgcctgctcccgccggccgccggtgcggtcgctccgcgcccagttgcttacgacccggcgcgctccgggccacgtcgcgagccggctgcggcgattgggggctaccgaggccgacgagtctgcgcagacggccacgcaggaggatacagaaactgaagttactgggggcactgttgccgatgatggttctgcaggcacagaagagactccctctgttctcatcacagcattgcaatcatacaaagaagctttgatgaatgatgatgaagcaaaaattgcggagatagagtcctttctacttactattgaggatgagaaaaattctctaatgggcaaaatcactgctttagatgcagaattgacaactgagagagatcgtatcgtgcggattagttctgactttgataactacaggaagaggacagaaagagagaagctttctttgatgacaaatgtgcaaggagaagttgttgagagcttgttgcctgttcttgacaactttgaaagagcaaaaacacagataaaggtggaaacagagcgtgaagctaaaataaatgacagctaccagagcatttataagcaacttgttgaaattctgaaatcactgggtgttgaagatgtggaaactgttggcaaaccttttgatcctatgcttcatgaggctattatgcgagaagaatcggtggaatatgaagatggggttgtcctccaggaattccgcaagggtttcaagcttggtgagagattactacgtccggcgatggtcaaggtgtctgcaggaccaggccctgaaaagtcgggagatgacgatactacaataggtgaagatagtgtagggcctcaagcgttcgacgacggtgaagacgatggttttgatgatgccgatgccgagtaattgtgctcggtttctaatttggaaacaagaaattccagaagttttgatgttttttctggagggtgccacatgatagagttagatattctgctcctcaaatgtgctggttctctcttcctgctcttgacatggaagtgttgataattgtgtcaaaagtttctatatcctcatggtacggtcattatcatggttaggaattattgttgggtcaagcaacaacaatgttatatatatacgaggtaaattgtgtttgatttgttggag

SEQ ID NO: 17256 - protein, 327 aa, Triticum aestivum
  peptide (1)..(327): Ceres Seq. ID no. 13659339
  misc_feature (129)..(289): Pfam Name: Pfam Description:  GrpE
  misc_feature (1)..(304): NCBI GI NO: 18418410 NR Description: chloroplast GrpE protein [Arabidopsis thaliana]
  misc_feature (1)..(304): NCBI GI NO: 30686476 NR Description: chloroplast GrpE protein [Arabidopsis thaliana]
  misc_feature (105)..(296): NCBI GI NO: 18400095 NR Description: heat shock protein -related [Arabidopsis thaliana]
  misc_feature (105)..(296): NCBI GI NO: 21593629 NR Description: putative heat shock protein [Arabidopsis thaliana]
  misc_feature (44)..(299): NCBI GI NO: 15384279 NR Description: co-chaperone CGE1 precursor isoform b
  misc_feature (89)..(299): NCBI GI NO: 15384277 NR Description: co-chaperone CGE1 precursor isoform a
  misc_feature (89)..(301): NCBI GI NO: 32488078 NR Description: OSJNBa0084A10.6
  misc_feature (57)..(306): NCBI GI NO: 22298857 NR Description: heat shock protein
  misc_feature (76)..(307): NCBI GI NO: 33239468 NR Description: Molecular chaperone GrpE, heat shock protein
  misc_feature (68)..(289): NCBI GI NO: 17229937 NR Description: heat shock protein [Nostoc sp. PCC 7120]
MAALLRTAAALAPRPSPARESPRRPCAASLACSRRPPVRSLRAQLLTTRRAPGHVASRLRRLGATEADESAQTATQEDTETEVTGGTVADDGSAGTEETPSVLITALQSYKEALMNDDEAKIAEIESFLLTIEDEKNSLMGKITALDAELTTERDRIVRISSDFDNYRKRTEREKLSLMTNVQGEVVESLLPVLDNFERAKTQIKVETEREAKINDSYQSIYKQLVEILKSLGVEDVETVGKPFDPMLHEAIMREESVEYEDGVVLQEFRKGFKLGERLLRPAMVKVSAGPGPEKSGDDDTTIGEDSVGPQAFDDGEDDGFDDADAE

SEQ ID NO: 17257 - protein, 213 aa, Triticum aestivum
  peptide (1)..(213): Ceres Seq. ID no. 13659340
  misc_feature (15)..(175): Pfam Name: Pfam Description:  GrpE
  misc_feature (1)..(190): NCBI GI NO: 18418410 NR Description: chloroplast GrpE protein [Arabidopsis thaliana]
  misc_feature (1)..(190): NCBI GI NO: 30686476 NR Description: chloroplast GrpE protein [Arabidopsis thaliana]
  misc_feature (1)..(182): NCBI GI NO: 18400095 NR Description: heat shock protein -related [Arabidopsis thaliana]
  misc_feature (1)..(182): NCBI GI NO: 21593629 NR Description: putative heat shock protein [Arabidopsis thaliana]
  misc_feature (1)..(185): NCBI GI NO: 15384279 NR Description: co-chaperone CGE1 precursor isoform b
  misc_feature (1)..(185): NCBI GI NO: 15384277 NR Description: co-chaperone CGE1 precursor isoform a
  misc_feature (1)..(187): NCBI GI NO: 32488078 NR Description: OSJNBa0084A10.6
  misc_feature (1)..(192): NCBI GI NO: 22298857 NR Description: heat shock protein
  misc_feature (1)..(193): NCBI GI NO: 33239468 NR Description: Molecular chaperone GrpE, heat shock protein
  misc_feature (1)..(175): NCBI GI NO: 17229937 NR Description: heat shock protein [Nostoc sp. PCC 7120]
MNDDEAKIAEIESFLLTIEDEKNSLMGKITALDAELTTERDRIVRISSDFDNYRKRTEREKLSLMTNVQGEVVESLLPVLDNFERAKTQIKVETEREAKINDSYQSIYKQLVEILKSLGVEDVETVGKPFDPMLHEAIMREESVEYEDGVVLQEFRKGFKLGERLLRPAMVKVSAGPGPEKSGDDDTTIGEDSVGPQAFDDGEDDGFDDADAE

SEQ ID NO: 17258 - protein, 188 aa, Triticum aestivum
  peptide (1)..(188): Ceres Seq. ID no. 13659341
  misc_feature (1)..(150): Pfam Name: Pfam Description:  GrpE
  misc_feature (1)..(165): NCBI GI NO: 18418410 NR Description: chloroplast GrpE protein [Arabidopsis thaliana]
  misc_feature (1)..(165): NCBI GI NO: 30686476 NR Description: chloroplast GrpE protein [Arabidopsis thaliana]
  misc_feature (1)..(157): NCBI GI NO: 18400095 NR Description: heat shock protein -related [Arabidopsis thaliana]
  misc_feature (1)..(157): NCBI GI NO: 21593629 NR Description: putative heat shock protein [Arabidopsis thaliana]
  misc_feature (1)..(160): NCBI GI NO: 15384279 NR Description: co-chaperone CGE1 precursor isoform b
  misc_feature (1)..(160): NCBI GI NO: 15384277 NR Description: co-chaperone CGE1 precursor isoform a
  misc_feature (1)..(162): NCBI GI NO: 32488078 NR Description: OSJNBa0084A10.6
  misc_feature (1)..(167): NCBI GI NO: 22298857 NR Description: heat shock protein
  misc_feature (1)..(168): NCBI GI NO: 33239468 NR Description: Molecular chaperone GrpE, heat shock protein
  misc_feature (1)..(150): NCBI GI NO: 17229937 NR Description: heat shock protein [Nostoc sp. PCC 7120]
MGKITALDAELTTERDRIVRISSDFDNYRKRTEREKLSLMTNVQGEVVESLLPVLDNFERAKTQIKVETEREAKINDSYQSIYKQLVEILKSLGVEDVETVGKPFDPMLHEAIMREESVEYEDGVVLQEFRKGFKLGERLLRPAMVKVSAGPGPEKSGDDDTTIGEDSVGPQAFDDGEDDGFDDADAE

SEQ ID NO: 17259 - DNA, 1242 bp, Triticum aestivum
  misc_feature (1)..(1242): Ceres Seq. ID no. 15179888
ccgcgttatctcgttgcctccacccctccgccccattcccgctgctgctgctcctctctcctcttagcccaaacacacctcacctcgctccccgtcccgccgatctcttctcttagggtcgtccgcgatggcggctccggtggtggacgccgagtacctgcgccaggtcgacagggggcgccgcgctctccgcgccctcatcgcctccaagggatgcgcccccatcatgctccgcctcgcatggcatgatgctggcacgtatgatgtgaacacaagaactggtggtgcaaatggttcaattagatacgaggaagagtacacccatggttcaaatgctggcttaaaaattgctattgatctcctcgagcctattaaagcgaagcatccaaagattacatatgcagacctttatcagcttgctggagtagttgcagttgaagtcaccgggggtccaaccgttgagttcatccctggaagacgtgattcgtcagtttgtccccgtgaagggcgccttcctgatgctaagaaaggcgcaccacatctaagggacatcttttatcgaatgggcttaacagacaaagatattgtagcactatctggggggcacagcctgggaaaggcacatcctgaaaggtctggttttgacggtgcatggactcgtgaccctctgaagtttgacaactcatactttcttgagctactgaagggggaatcggagggtcttctgaagctccctactgataaggcattgttggatgatcctgaatttagacgttatgtggagctttatgcaaaggacgaggatgctttcttcaaggactatactgaatcacacaagaaactttctgaacttggcttcacaccacggatcagtggcccagcttctacaaaatcagatgtttcaactgctgttgtacttgcacagagtgcagtgggggtagcagttgcggcagctgtagtcatcgcgggctacctgtacgaggcttccaagaggagcaagtaaggggtttcatgagttcttggatggcattgccttatttagtaagtatcaagttattcttaaaaaaataagtgccaagttcaaataatagaactctagtgatgaacaaccaacagcagtcttaaaatatttcaggcattcttgaggacatctccttcatgtatacatcatacttgaatatttcagtgacaatgaatgcttactattaaaagcatttttgggcatgtatcttgtgcaatacg

SEQ ID NO: 17260 - protein, 291 aa, Triticum aestivum
  peptide (1)..(291): Ceres Seq. ID no. 15179889
  misc_feature (18)..(224): Pfam Name: Pfam Description:  Peroxidase
  misc_feature (1)..(291): NCBI GI NO: 15080682 NR Description: peroxisome type ascorbate peroxidase
  misc_feature (1)..(291): NCBI GI NO: 7484726 NR Description: L-ascorbate peroxidase (EC 1
  misc_feature (1)..(291): NCBI GI NO: 5442410 NR Description: ascorbate peroxidase [Zantedeschia aethiopica]
  misc_feature (1)..(291): NCBI GI NO: 15430584 NR Description: peroxisomal ascorbate peroxidase
  misc_feature (1)..(291): NCBI GI NO: 15236239 NR Description: ascorbate peroxidase, putative (APX)
  misc_feature (1)..(291): NCBI GI NO: 17066705 NR Description: ascorbate peroxidase [Capsicum annuum]
  misc_feature (2)..(289): NCBI GI NO: 38344123 NR Description: OSJNBb0072N21.2
  misc_feature (2)..(289): NCBI GI NO: 37030052 NR Description: putative peroxisome-bound ascorbate peroxidase
  misc_feature (1)..(291): NCBI GI NO: 3288066 NR Description: ascorbate peroxidase [Arabidopsis thaliana]
  misc_feature (1)..(244): NCBI GI NO: 27552464 NR Description: putative ascorbate peroxidase
MAAPVVDAEYLRQVDRGRRALRALIASKGCAPIMLRLAWHDAGTYDVNTRTGGANGSIRYEEEYTHGSNAGLKIAIDLLEPIKAKHPKITYADLYQLAGVVAVEVTGGPTVEFIPGRRDSSVCPREGRLPDAKKGAPHLRDIFYRMGLTDKDIVALSGGHSLGKAHPERSGFDGAWTRDPLKFDNSYFLELLKGESEGLLKLPTDKALLDDPEFRRYVELYAKDEDAFFKDYTESHKKLSELGFTPRISGPASTKSDVSTAVVLAQSAVGVAVAAAVVIAGYLYEASKRSK

SEQ ID NO: 17261 - protein, 258 aa, Triticum aestivum
  peptide (1)..(258): Ceres Seq. ID no. 15179890
  misc_feature (1)..(191): Pfam Name: Pfam Description:  Peroxidase
  misc_feature (1)..(258): NCBI GI NO: 15080682 NR Description: peroxisome type ascorbate peroxidase
  misc_feature (1)..(258): NCBI GI NO: 7484726 NR Description: L-ascorbate peroxidase (EC 1
  misc_feature (1)..(258): NCBI GI NO: 5442410 NR Description: ascorbate peroxidase [Zantedeschia aethiopica]
  misc_feature (1)..(258): NCBI GI NO: 15430584 NR Description: peroxisomal ascorbate peroxidase
  misc_feature (1)..(258): NCBI GI NO: 15236239 NR Description: ascorbate peroxidase, putative (APX)
  misc_feature (1)..(258): NCBI GI NO: 17066705 NR Description: ascorbate peroxidase [Capsicum annuum]
  misc_feature (1)..(256): NCBI GI NO: 38344123 NR Description: OSJNBb0072N21.2
  misc_feature (1)..(256): NCBI GI NO: 37030052 NR Description: putative peroxisome-bound ascorbate peroxidase
  misc_feature (1)..(258): NCBI GI NO: 3288066 NR Description: ascorbate peroxidase [Arabidopsis thaliana]
  misc_feature (1)..(211): NCBI GI NO: 27552464 NR Description: putative ascorbate peroxidase
MLRLAWHDAGTYDVNTRTGGANGSIRYEEEYTHGSNAGLKIAIDLLEPIKAKHPKITYADLYQLAGVVAVEVTGGPTVEFIPGRRDSSVCPREGRLPDAKKGAPHLRDIFYRMGLTDKDIVALSGGHSLGKAHPERSGFDGAWTRDPLKFDNSYFLELLKGESEGLLKLPTDKALLDDPEFRRYVELYAKDEDAFFKDYTESHKKLSELGFTPRISGPASTKSDVSTAVVLAQSAVGVAVAAAVVIAGYLYEASKRSK

SEQ ID NO: 17262 - protein, 146 aa, Triticum aestivum
  peptide (1)..(146): Ceres Seq. ID no. 15179891
  misc_feature (1)..(79): Pfam Name: Pfam Description:  Peroxidase
  misc_feature (1)..(146): NCBI GI NO: 15080682 NR Description: peroxisome type ascorbate peroxidase
  misc_feature (1)..(146): NCBI GI NO: 7484726 NR Description: L-ascorbate peroxidase (EC 1
  misc_feature (1)..(146): NCBI GI NO: 5442410 NR Description: ascorbate peroxidase [Zantedeschia aethiopica]
  misc_feature (1)..(146): NCBI GI NO: 15430584 NR Description: peroxisomal ascorbate peroxidase
  misc_feature (1)..(146): NCBI GI NO: 15236239 NR Description: ascorbate peroxidase, putative (APX)
  misc_feature (1)..(146): NCBI GI NO: 17066705 NR Description: ascorbate peroxidase [Capsicum annuum]
  misc_feature (1)..(144): NCBI GI NO: 38344123 NR Description: OSJNBb0072N21.2
  misc_feature (1)..(144): NCBI GI NO: 37030052 NR Description: putative peroxisome-bound ascorbate peroxidase
  misc_feature (1)..(146): NCBI GI NO: 3288066 NR Description: ascorbate peroxidase [Arabidopsis thaliana]
  misc_feature (1)..(99): NCBI GI NO: 27552464 NR Description: putative ascorbate peroxidase
MGLTDKDIVALSGGHSLGKAHPERSGFDGAWTRDPLKFDNSYFLELLKGESEGLLKLPTDKALLDDPEFRRYVELYAKDEDAFFKDYTESHKKLSELGFTPRISGPASTKSDVSTAVVLAQSAVGVAVAAAVVIAGYLYEASKRSK

SEQ ID NO: 17263 - DNA, 1740 bp, Triticum aestivum
  misc_feature (1)..(1740): Ceres Seq. ID no. 14303197
ccatatctccgactcctctgccctgccgcgcgggcccaactcggcgccaaaaaatccatctcgcatctcacgctcttctagctctctccccccgccatggaagaccggcaagccaccggcggcgccggcgccgcgaccaaggtccgcgtgaacggcacgacggccgaagcgacactctccaccacaggcggctgccccgagctccggtggcgctgcgctagggccacggcggagaggagcctctcgctggaggccgacgtgctcggagccgaggcgagcggcaaggaggtcgtcgtcagggccttcgtggcggaggatgccgcgagaccgccgtcgcgcgccaaggcgagagggaagaggcgcaggagggagtacgtcttcgagatggccgacggcgagggcgcggccgcggcctggggcgagacgctacggggctgcttggactcgatagggcggcccaagagattgttcgtcctcatcaacccctacggaggcaaaagacgggcgagcaagatctacgaggcagaaatcaaacccctgttcgaagccgccggcgtcgaagtcacaatgcaagagacccggtaccgggggcatgcccgggaggtggcgtcctctctcgaccttgcaagatacgacgggatcgtctgcgtcagcggcgatggcgtcctcgtggagcttgtgaatgggattctgcaaagatcagactgggaggaagcaataaagatgccaattggcatagttccagctggcacaggaaacggcatggccaaatcacttctccatgctgccagcgagacgtgctcagtttcagacgccgtatttgccattatcacaggtcacaagcaggccttggatgtctgcaccatagtgcaaggggaaaaaaccgttttcagcgtgctgtcaactacttggggtttggtggccgatgttgacatcgagtctgagaaatacaggtggatggggagcgcacggttcgacttttatgctctggttcgcataatgaacttgcgccgataccgcggaagcgtccactttgtgcctgccccgggctacgaggcatacggagatcctgtcaagcaagccgagactcccatcgtggagcgaaacggggaatctcaggtgtgctcttatcaaggccctacggccgagtttcaatgttcagactggagatccatcgatggcccatttgtgggtgtgtgcgtctacaacgtgccatgggctgctgaaaacgccatggcagctcctgaagccaagttctcagatggctacatggacgcggtcatactgaaagactgtccgaaggccgatcttttggctctgctgctgaagatgagcgatgggagctacgtgaaatcgccacatgttacatatttcaaggtgaaatccttccggttatcgccggggcagctcatggaggatcccaaaaggggcggcatcgtagacgtggacggcgaggtggttgccagaggagaaggaacgtacggcatgaaccaggatcaagatttgatggcctatggcccttctgttcagctgaccgtgcaccagggcttggccactgtatactgtcccaaatgatcctaccttgccttctcctctcaccagagattgtccctttgtgtcaattgctttattcttgttcatatttaaaaaagtactctattgtattcaaaacaagattctttcaagaaaaggtcacacgtctctgagcaaaaaaaaaaaaaaaaaaaaaaaaaaaaaaat

SEQ ID NO: 17264 - protein, 492 aa, Triticum aestivum
  peptide (1)..(492): Ceres Seq. ID no. 14303198
  misc_feature (123)..(259): Pfam Name: presumed Pfam Description: Diacylglycerol kinase catalytic domain
  misc_feature (213)..(492): NCBI GI NO: 34898712 NR Description: putative sphingosine kinase
  misc_feature (1)..(217): NCBI GI NO: 34898712 NR Description: putative sphingosine kinase
  misc_feature (1)..(492): NCBI GI NO: 22136030 NR Description: putative protein [Arabidopsis thaliana]
  misc_feature (16)..(460): NCBI GI NO: 15234501 NR Description: expressed protein [Arabidopsis thaliana]
  misc_feature (427)..(492): NCBI GI NO: 15234501 NR Description: expressed protein [Arabidopsis thaliana]
  misc_feature (1)..(194): NCBI GI NO: 34910090 NR Description: B1100D10.20
  misc_feature (295)..(408): NCBI GI NO: 34910090 NR Description: B1100D10.20
  misc_feature (1)..(296): NCBI GI NO: 34910090 NR Description: B1100D10.20
  misc_feature (1)..(386): NCBI GI NO: 15234501 NR Description: expressed protein [Arabidopsis thaliana]
  misc_feature (88)..(316): NCBI GI NO: 28828335 NR Description: similar to Homo sapiens (Human)
MEDRQATGGAGAATKVRVNGTTAEATLSTTGGCPELRWRCARATAERSLSLEADVLGAEASGKEVVVRAFVAEDAARPPSRAKARGKRRRREYVFEMADGEGAAAAWGETLRGCLDSIGRPKRLFVLINPYGGKRRASKIYEAEIKPLFEAAGVEVTMQETRYRGHAREVASSLDLARYDGIVCVSGDGVLVELVNGILQRSDWEEAIKMPIGIVPAGTGNGMAKSLLHAASETCSVSDAVFAIITGHKQALDVCTIVQGEKTVFSVLSTTWGLVADVDIESEKYRWMGSARFDFYALVRIMNLRRYRGSVHFVPAPGYEAYGDPVKQAETPIVERNGESQVCSYQGPTAEFQCSDWRSIDGPFVGVCVYNVPWAAENAMAAPEAKFSDGYMDAVILKDCPKADLLALLLKMSDGSYVKSPHVTYFKVKSFRLSPGQLMEDPKRGGIVDVDGEVVARGEGTYGMNQDQDLMAYGPSVQLTVHQGLATVYCPK

SEQ ID NO: 17265 - protein, 396 aa, Triticum aestivum
  peptide (1)..(396): Ceres Seq. ID no. 14303199
  misc_feature (27)..(163): Pfam Name: presumed Pfam Description: Diacylglycerol kinase catalytic domain
  misc_feature (117)..(396): NCBI GI NO: 34898712 NR Description: putative sphingosine kinase
  misc_feature (1)..(121): NCBI GI NO: 34898712 NR Description: putative sphingosine kinase
  misc_feature (1)..(396): NCBI GI NO: 22136030 NR Description: putative protein [Arabidopsis thaliana]
  misc_feature (1)..(364): NCBI GI NO: 15234501 NR Description: expressed protein [Arabidopsis thaliana]
  misc_feature (331)..(396): NCBI GI NO: 15234501 NR Description: expressed protein [Arabidopsis thaliana]
  misc_feature (1)..(98): NCBI GI NO: 34910090 NR Description: B1100D10.20
  misc_feature (199)..(312): NCBI GI NO: 34910090 NR Description: B1100D10.20
  misc_feature (1)..(200): NCBI GI NO: 34910090 NR Description: B1100D10.20
  misc_feature (1)..(290): NCBI GI NO: 15234501 NR Description: expressed protein [Arabidopsis thaliana]
  misc_feature (1)..(220): NCBI GI NO: 28828335 NR Description: similar to Homo sapiens (Human)
MADGEGAAAAWGETLRGCLDSIGRPKRLFVLINPYGGKRRASKIYEAEIKPLFEAAGVEVTMQETRYRGHAREVASSLDLARYDGIVCVSGDGVLVELVNGILQRSDWEEAIKMPIGIVPAGTGNGMAKSLLHAASETCSVSDAVFAIITGHKQALDVCTIVQGEKTVFSVLSTTWGLVADVDIESEKYRWMGSARFDFYALVRIMNLRRYRGSVHFVPAPGYEAYGDPVKQAETPIVERNGESQVCSYQGPTAEFQCSDWRSIDGPFVGVCVYNVPWAAENAMAAPEAKFSDGYMDAVILKDCPKADLLALLLKMSDGSYVKSPHVTYFKVKSFRLSPGQLMEDPKRGGIVDVDGEVVARGEGTYGMNQDQDLMAYGPSVQLTVHQGLATVYCPK

SEQ ID NO: 17266 - protein, 335 aa, Triticum aestivum
  peptide (1)..(335): Ceres Seq. ID no. 14303200
  misc_feature (1)..(102): Pfam Name: presumed Pfam Description: Diacylglycerol kinase catalytic domain
  misc_feature (56)..(335): NCBI GI NO: 34898712 NR Description: putative sphingosine kinase
  misc_feature (1)..(60): NCBI GI NO: 34898712 NR Description: putative sphingosine kinase
  misc_feature (1)..(335): NCBI GI NO: 22136030 NR Description: putative protein [Arabidopsis thaliana]
  misc_feature (1)..(303): NCBI GI NO: 15234501 NR Description: expressed protein [Arabidopsis thaliana]
  misc_feature (270)..(335): NCBI GI NO: 15234501 NR Description: expressed protein [Arabidopsis thaliana]
  misc_feature (1)..(37): NCBI GI NO: 34910090 NR Description: B1100D10.20
  misc_feature (138)..(251): NCBI GI NO: 34910090 NR Description: B1100D10.20
  misc_feature (1)..(139): NCBI GI NO: 34910090 NR Description: B1100D10.20
  misc_feature (1)..(229): NCBI GI NO: 15234501 NR Description: expressed protein [Arabidopsis thaliana]
  misc_feature (1)..(159): NCBI GI NO: 28828335 NR Description: similar to Homo sapiens (Human)
MQETRYRGHAREVASSLDLARYDGIVCVSGDGVLVELVNGILQRSDWEEAIKMPIGIVPAGTGNGMAKSLLHAASETCSVSDAVFAIITGHKQALDVCTIVQGEKTVFSVLSTTWGLVADVDIESEKYRWMGSARFDFYALVRIMNLRRYRGSVHFVPAPGYEAYGDPVKQAETPIVERNGESQVCSYQGPTAEFQCSDWRSIDGPFVGVCVYNVPWAAENAMAAPEAKFSDGYMDAVILKDCPKADLLALLLKMSDGSYVKSPHVTYFKVKSFRLSPGQLMEDPKRGGIVDVDGEVVARGEGTYGMNQDQDLMAYGPSVQLTVHQGLATVYCPK

SEQ ID NO: 17267 - DNA, 1227 bp, Triticum aestivum
  misc_feature (1)..(1227): Ceres Seq. ID no. 13502809
cgaaaaaaaaaagaccgatcgtgaaccaccccgtgccctacaacctccgcccccgtccccgtccccgtccccgcgtgccttacacaactcctcctccgcctctgccgcgccgcgcgtcgcctccgtcgccgtccctggggttcgaggatgcaacagcctacaggcgagatggagatgaagaaggcgcctctgccagcgcctgctttccacaaagagtacactcttcctagagcacgacactaccttgatcaacactattcactccgccctcctctctccaaggatgattactccaaaaaggatcctacaagcgagatggagaagaagaagaaggcgccgctgccaacacctcatttccacaaagagcggcctcttcctagagcagagcggtcccccgatcgacgctactcgccttaccctcctccgtccatggatggttgctctggaaagaatgctggatcttggcctcttcccccgatttactatgggcctccatctgaagcctttcatgtcgactggcgcaataaagacggggttgtggacatggagcattacagcacagagctgtttgcagcgatggacaaacatagtattttgtcggtgcaccgttgtacacgcccacagtttggaccaaacgtcagcgctgagtatgtgcttgatcctatatttgaggatacgttccttgccaatccccgttttagctacctgcttcccttgatcggccacaaagtatcttctgcagctgaggctcccaattcaaccacgcaggttggcacaactactggatactggcagtgtgatggttctatagaagtccctgtccgcgaagttgctgctttgaagatttctgacaactagccacctatgtgcccaaccaagttgctcccagaagatgaaaatcaagattttcatggagggccctgagtttcatattgagattacgaacccgttagcagtaactatgtattagctacatctaccctatgtgtgggccgcatcttcaagatcaatgcgtgcaggatatattaattttaacttggtgtctgcgctgcgccgcatctatctatctatctatctatctatatagtgcaagatatttataagcttggttcaggttgtgtctgagaaagagtggcaatctgtcacagatgatgccattcgtcttatatatgcatatgaactggaaaagtttatctgcggtggtgactatttcmcaatatgcttytc

SEQ ID NO: 17268 - protein, 236 aa, Triticum aestivum
  peptide (1)..(236): Ceres Seq. ID no. 15223197
  misc_feature (4)..(116): NCBI GI NO: 100209 NR Description: extensin (clone Tom J-10) - tomato
MQQPTGEMEMKKAPLPAPAFHKEYTLPRARHYLDQHYSLRPPLSKDDYSKKDPTSEMEKKKKAPLPTPHFHKERPLPRAERSPDRRYSPYPPPSMDGCSGKNAGSWPLPPIYYGPPSEAFHVDWRNKDGVVDMEHYSTELFAAMDKHSILSVHRCTRPQFGPNVSAEYVLDPIFEDTFLANPRFSYLLPLIGHKVSSAAEAPNSTTQVGTTTGYWQCDGSIEVPVREVAALKISDN

SEQ ID NO: 17269 - protein, 229 aa, Triticum aestivum
  peptide (1)..(229): Ceres Seq. ID no. 15223198
  misc_feature (1)..(109): NCBI GI NO: 100209 NR Description: extensin (clone Tom J-10) - tomato
MEMKKAPLPAPAFHKEYTLPRARHYLDQHYSLRPPLSKDDYSKKDPTSEMEKKKKAPLPTPHFHKERPLPRAERSPDRRYSPYPPPSMDGCSGKNAGSWPLPPIYYGPPSEAFHVDWRNKDGVVDMEHYSTELFAAMDKHSILSVHRCTRPQFGPNVSAEYVLDPIFEDTFLANPRFSYLLPLIGHKVSSAAEAPNSTTQVGTTTGYWQCDGSIEVPVREVAALKISDN

SEQ ID NO: 17270 - protein, 227 aa, Triticum aestivum
  peptide (1)..(227): Ceres Seq. ID no. 15223199
  misc_feature (1)..(107): NCBI GI NO: 100209 NR Description: extensin (clone Tom J-10) - tomato
MKKAPLPAPAFHKEYTLPRARHYLDQHYSLRPPLSKDDYSKKDPTSEMEKKKKAPLPTPHFHKERPLPRAERSPDRRYSPYPPPSMDGCSGKNAGSWPLPPIYYGPPSEAFHVDWRNKDGVVDMEHYSTELFAAMDKHSILSVHRCTRPQFGPNVSAEYVLDPIFEDTFLANPRFSYLLPLIGHKVSSAAEAPNSTTQVGTTTGYWQCDGSIEVPVREVAALKISDN

SEQ ID NO: 17271 - DNA, 1157 bp, Triticum aestivum
  misc_feature (1)..(1157): Ceres Seq. ID no. 14302407
gaataacccgcacctatccacgacaccgagggagaggagcaactgatccccgacgccccaaatggcgcctcccctcctcctcctcctcctcgtccctctcgtcgccgccaccgcaccgtgcgcccacccggcccacccgagccagccggcgtcgtgcgccgcggagcccgtgctggcgccggagcgccgggaggcgcacggcgggggccgcatcctggacatcacccactactaccgggaggacatgccctcgtgggagtccggcgccggggtgggccagttcctctggctgcccgcctccatgcgcaacggctccctcgccaacaactccgagatgcggatgcccacccacaccggcacccacatcgacgcctccggccacgtcttccagcactacttcgacgctggcttcgacgtcgacaccctcgacctcgacgtcctcaacggtcctgcactgctggttgatgttccaagggatgaaaatattactgctaaaacgatggaatctttgcatattcctaaaggagttcaacgggtactttttagaacattaaacactgacaggaacctaatgtggaagaaagagtttgacacaagctatgtgggttttatgaaagatggtgcccaatggttggtagacaacacggatattaagcttgtcggaatagactatttgtccgttgcagctttcgatgacttgatcccttcacatttagttttacttgaaaaccgggatatcattcttgtggagggcctcaaactggagaatgtcatacctgggatatactcgttgcattgcctgccacttcggttgcgtggagctgaaggttcgccgatcagatgcatccttataaagtgaaagacatttgcatcccgctgcggcggtttagtttgataccgcaagcacttatatataaaaatagaatgtgtatagcagcaaaactcgtgtctttgataccagaggagtactgtcatgtgtccagaaacatggtggcacttcgatgcttagtaaggagcgacaaacggctagggatgcaaatgtgtagcctctagggtaccctccgaacctttagttgggctatagaagggatggattacaatacaaaccgcaatgttcggtggtaccaaaatcccaaaaaaaaaaaaaaaaaaaaaag

SEQ ID NO: 17272 - protein, 265 aa, Triticum aestivum
  peptide (1)..(265): Ceres Seq. ID no. 14302408
  misc_feature (51)..(251): Pfam Name: Pfam Description:  Putative cyclase
  misc_feature (5)..(265): NCBI GI NO: 35215089 NR Description: hypothetical protein
  misc_feature (3)..(264): NCBI GI NO: 18418598 NR Description: expressed protein [Arabidopsis thaliana]
  misc_feature (40)..(265): NCBI GI NO: 18418393 NR Description: expressed protein [Arabidopsis thaliana]
  misc_feature (40)..(265): NCBI GI NO: 15219416 NR Description: hypothetical protein [Arabidopsis thaliana]
  misc_feature (40)..(224): NCBI GI NO: 7486287 NR Description: hypothetical protein F28A23
  misc_feature (3)..(143): NCBI GI NO: 7486023 NR Description: hypothetical protein F23E12
  misc_feature (51)..(263): NCBI GI NO: 16330650 NR Description: hypothetical protein [Synechocystis sp. PCC 6803]
  misc_feature (50)..(265): NCBI GI NO: 23016903 NR Description: hypothetical protein
  misc_feature (50)..(265): NCBI GI NO: 39998438 NR Description: cyclase, putative [Geobacter sulfurreducens PCA]
  misc_feature (51)..(263): NCBI GI NO: 23056289 NR Description: hypothetical protein [Geobacter metallireducens]
MAPPLLLLLLVPLVAATAPCAHPAHPSQPASCAAEPVLAPERREAHGGGRILDITHYYREDMPSWESGAGVGQFLWLPASMRNGSLANNSEMRMPTHTGTHIDASGHVFQHYFDAGFDVDTLDLDVLNGPALLVDVPRDENITAKTMESLHIPKGVQRVLFRTLNTDRNLMWKKEFDTSYVGFMKDGAQWLVDNTDIKLVGIDYLSVAAFDDLIPSHLVLLENRDIILVEGLKLENVIPGIYSLHCLPLRLRGAEGSPIRCILIK

SEQ ID NO: 17273 - protein, 204 aa, Triticum aestivum
  peptide (1)..(204): Ceres Seq. ID no. 14302409
  misc_feature (1)..(190): Pfam Name: Pfam Description:  Putative cyclase
  misc_feature (1)..(204): NCBI GI NO: 35215089 NR Description: hypothetical protein
  misc_feature (1)..(203): NCBI GI NO: 18418598 NR Description: expressed protein [Arabidopsis thaliana]
  misc_feature (1)..(204): NCBI GI NO: 18418393 NR Description: expressed protein [Arabidopsis thaliana]
  misc_feature (1)..(204): NCBI GI NO: 15219416 NR Description: hypothetical protein [Arabidopsis thaliana]
  misc_feature (1)..(163): NCBI GI NO: 7486287 NR Description: hypothetical protein F28A23
  misc_feature (1)..(82): NCBI GI NO: 7486023 NR Description: hypothetical protein F23E12
  misc_feature (1)..(202): NCBI GI NO: 16330650 NR Description: hypothetical protein [Synechocystis sp. PCC 6803]
  misc_feature (1)..(204): NCBI GI NO: 23016903 NR Description: hypothetical protein
  misc_feature (1)..(204): NCBI GI NO: 39998438 NR Description: cyclase, putative [Geobacter sulfurreducens PCA]
  misc_feature (1)..(202): NCBI GI NO: 23056289 NR Description: hypothetical protein [Geobacter metallireducens]
MPSWESGAGVGQFLWLPASMRNGSLANNSEMRMPTHTGTHIDASGHVFQHYFDAGFDVDTLDLDVLNGPALLVDVPRDENITAKTMESLHIPKGVQRVLFRTLNTDRNLMWKKEFDTSYVGFMKDGAQWLVDNTDIKLVGIDYLSVAAFDDLIPSHLVLLENRDIILVEGLKLENVIPGIYSLHCLPLRLRGAEGSPIRCILIK

SEQ ID NO: 17274 - protein, 185 aa, Triticum aestivum
  peptide (1)..(185): Ceres Seq. ID no. 14302410
  misc_feature (1)..(171): Pfam Name: Pfam Description:  Putative cyclase
  misc_feature (1)..(185): NCBI GI NO: 35215089 NR Description: hypothetical protein
  misc_feature (1)..(184): NCBI GI NO: 18418598 NR Description: expressed protein [Arabidopsis thaliana]
  misc_feature (1)..(185): NCBI GI NO: 18418393 NR Description: expressed protein [Arabidopsis thaliana]
  misc_feature (1)..(185): NCBI GI NO: 15219416 NR Description: hypothetical protein [Arabidopsis thaliana]
  misc_feature (1)..(144): NCBI GI NO: 7486287 NR Description: hypothetical protein F28A23
  misc_feature (1)..(63): NCBI GI NO: 7486023 NR Description: hypothetical protein F23E12
  misc_feature (1)..(183): NCBI GI NO: 16330650 NR Description: hypothetical protein [Synechocystis sp. PCC 6803]
  misc_feature (1)..(185): NCBI GI NO: 23016903 NR Description: hypothetical protein
  misc_feature (1)..(185): NCBI GI NO: 39998438 NR Description: cyclase, putative [Geobacter sulfurreducens PCA]
  misc_feature (1)..(183): NCBI GI NO: 23056289 NR Description: hypothetical protein [Geobacter metallireducens]
MRNGSLANNSEMRMPTHTGTHIDASGHVFQHYFDAGFDVDTLDLDVLNGPALLVDVPRDENITAKTMESLHIPKGVQRVLFRTLNTDRNLMWKKEFDTSYVGFMKDGAQWLVDNTDIKLVGIDYLSVAAFDDLIPSHLVLLENRDIILVEGLKLENVIPGIYSLHCLPLRLRGAEGSPIRCILIK

SEQ ID NO: 17275 - DNA, 1104 bp, Triticum aestivum
  misc_feature (1)..(1104): Ceres Seq. ID no. 13660394
cattacctagaacatcctaatcgaaaaatgaatgaatgtcactgaggcataaaccccctgttcctcttgttcctccccttcggcctccggcgcagttggttgccacgacgaggggcggacccacccatcggacgaggtccgtcgccggacattccagccggtggtgagcggagggcggcaaggcgtgggagctcgcggcgacgtacaaggctgggtgagagtggcgcttgaggcggacggccaactccgacagcggacccctcagccgacgacgccaccgaagttggtcagcattagctccttcaggcttctggccggtgtgaaaagttgctaggtcaccatggatgtcgatcgacaagaaacgatggaagagaccattctcgtcggtgatgatcttatgcgtgggccaccttcccctgtcgtaccgaaagagattgcatcccatgtccttgaaggtgttgagctttgtgatggtatcctgaagaatcttttcctatgcttgcaaatcaatgatattgagccattttgtcaagacgaaattgtgctatacaaacaatgtgctgagaaaagggataaggaaataagggaacgacttcaggatagtgagtataaattaggtttctcgatgcccctcgaagatgcaaaggaaagagtcactcaactccaatcagaactcacactgctcgaaaggcgcatgattcttgctagtggtcttccgggtatggaaggatttcgccaacgatggagcttgcatggacagcttggcgatacaaggaaaaggttggaggcgctgaacagtgggatggcaaaaagagagagcccaagtcctccaggcgaaggcacaacacctgcagttaagaagaggtggttcttttagtacgttagcgcatatttttccgacttgcaaaacgttgtaactaatgctgtgttagtggcaatgtcatccactctttcttggtttggggttctacctccaaagtaactactactgtgtttgctaacagtggtttcgccacagctgcacttttgattaaaaatatggaaatacttggcctgtaaaccttgaacataccatttgaattacccacgaaaatggtgatatgc

SEQ ID NO: 17276 - protein, 178 aa, Triticum aestivum
  peptide (1)..(178): Ceres Seq. ID no. 15219233
  misc_feature (9)..(177): NCBI GI NO: 21741739 NR Description: OSJNBa0073L04.19
  misc_feature (9)..(143): NCBI GI NO: 15233419 NR Description: hypothetical protein [Arabidopsis thaliana]
  misc_feature (128)..(168): NCBI GI NO: 34906406 NR Description: P0710E05.16
MDVDRQETMEETILVGDDLMRGPPSPVVPKEIASHVLEGVELCDGILKNLFLCLQINDIEPFCQDEIVLYKQCAEKRDKEIRERLQDSEYKLGFSMPLEDAKERVTQLQSELTLLERRMILASGLPGMEGFRQRWSLHGQLGDTRKRLEALNSGMAKRESPSPPGEGTTPAVKKRWFF

SEQ ID NO: 17277 - protein, 170 aa, Triticum aestivum
  peptide (1)..(170): Ceres Seq. ID no. 15219234
  misc_feature (1)..(169): NCBI GI NO: 21741739 NR Description: OSJNBa0073L04.19
  misc_feature (1)..(135): NCBI GI NO: 15233419 NR Description: hypothetical protein [Arabidopsis thaliana]
  misc_feature (120)..(160): NCBI GI NO: 34906406 NR Description: P0710E05.16
MEETILVGDDLMRGPPSPVVPKEIASHVLEGVELCDGILKNLFLCLQINDIEPFCQDEIVLYKQCAEKRDKEIRERLQDSEYKLGFSMPLEDAKERVTQLQSELTLLERRMILASGLPGMEGFRQRWSLHGQLGDTRKRLEALNSGMAKRESPSPPGEGTTPAVKKRWFF

SEQ ID NO: 17278 - protein, 159 aa, Triticum aestivum
  peptide (1)..(159): Ceres Seq. ID no. 15219235
  misc_feature (1)..(158): NCBI GI NO: 21741739 NR Description: OSJNBa0073L04.19
  misc_feature (1)..(124): NCBI GI NO: 15233419 NR Description: hypothetical protein [Arabidopsis thaliana]
  misc_feature (109)..(149): NCBI GI NO: 34906406 NR Description: P0710E05.16
MRGPPSPVVPKEIASHVLEGVELCDGILKNLFLCLQINDIEPFCQDEIVLYKQCAEKRDKEIRERLQDSEYKLGFSMPLEDAKERVTQLQSELTLLERRMILASGLPGMEGFRQRWSLHGQLGDTRKRLEALNSGMAKRESPSPPGEGTTPAVKKRWFF

SEQ ID NO: 17279 - DNA, 1699 bp, Triticum aestivum
  misc_feature (1)..(1699): Ceres Seq. ID no. 14302742
actgctcctccctcctccctcctcctccacctcttccctcccctgacccctcgcctccaaattactatctccgtcggacgcacgcacgcgcgcggaaaggtttggttttgcggtgaccatgcaggcagcgacggtggcagcggcggcgaacggcgggggcgacgtgcagaagcagcagcaggtgggggcggcgccgctcccggcggtggcggcgctggcgccgccgccccattgggtggccatgccgttcgcgccgccgggcgccgcggccatggtggtgccgcaccagatggcgccggcgccgccccaccagttcgcgccgcacttcgtgccgttccacgccgtcgcaccgccgcccccgccgctgcagccgcgcccggcgcacgtcgccatgggctcgcccgcccccgccgcgcagcccggccaggaggagaacaagaccatctgggtcggcgacctccattactggatggacgagaactacctccacacctgcttcggctacaccggcgaggttgtcgcaatcaaggttattcgtaataagcaaaccggacaatcagaaggatatggatttgtagagttctacagtcatgctgcagctgaaaaagtacttgatggttttgctgggcatataatgccaaatactgaccaaccttttaggataaactgggcatcatttagcatgggggataggcgctcggacattgcttcagatcattccatatttgtaggcgatcttgcctctgatgtcaatgatactgcattgctagagactttctccagcaggtactcctctgtcaaaggtgcaaaagttgttattgatgctaacactggtagatccaagggctatggctttgtgcggtttggagatgatagtgagaagacaaacgccatgactgagatgaatggagtgtattgctcaactaggcccatgaggattggccctgcaactcccagaaaatcttcaggtacttctggatctactgtttcatctgctcgatcagacggagatttgacaaacacaactgtatttgtcggtgggcttgacccaaatgttagtgaagatgatcttaagcaaaccttctcccagtatggcgagatttcctctgtgaagattccagttgggaaacagtgcgggtttgtgcagtttcttcagagaaagaatgcagaagatgcattgcaagggctgaacgggagcaccattgggaaacagaccgtgcgcctttcatggggtcgcaatccagcaaacaagcagttgaggagtgacaacggcaaccagtggaacaacgggatgtactacgcgccctcgcccttctacaacgggtacggctaccccgcggcaccgttccctgacccgggcatgtacgccgctgcctatggcgcataccccgtctacgggaaccagcaacaggtcagctgaagatcggaggatcacacgcccatcgatccctcgacaacaacccgaggcgcgcacgcagtagctgtagctcttgctagagaaagaaggtagacgatgacggcttcttaggtgagctagatgtagtgactggtcatgtaaagtacattactattacgaagaactagcaccactaaggcacctaaaatgactcgaccgccatggccgtctagctggattgttctagggaaaaaaaaagttttggcatagagctgcaatataaggtagaacaataatctattc

SEQ ID NO: 17280 - protein, 433 aa, Triticum aestivum
  peptide (1)..(433): Ceres Seq. ID no. 14302743
  misc_feature (202)..(274): Pfam Name: a.k.a. RRM, RBD, or RNP domain Pfam Description: RNA recognition motif.
  misc_feature (17)..(433): NCBI GI NO: 15594035 NR Description: nucleic acid binding protein [Nicotiana tabacum]
  misc_feature (35)..(433): NCBI GI NO: 15220233 NR Description: RNA binding protein 47 (RBP47), putative
  misc_feature (28)..(433): NCBI GI NO: 15220241 NR Description: RNA binding protein 47 (RBP47), putative
  misc_feature (13)..(422): NCBI GI NO: 9663769 NR Description: RNA Binding Protein 47 [Nicotiana plumbaginifolia]
  misc_feature (13)..(422): NCBI GI NO: 7489196 NR Description: RNA binding protein homolog - common tobacco
  misc_feature (35)..(431): NCBI GI NO: 34896988 NR Description: putative RNA binding protein [Oryza sativa]
  misc_feature (100)..(422): NCBI GI NO: 7489112 NR Description: DNA binding protein ACBF - common tobacco
  misc_feature (39)..(282): NCBI GI NO: 15230291 NR Description: RNA-binding protein, putative
  misc_feature (284)..(405): NCBI GI NO: 15230291 NR Description: RNA-binding protein, putative
  misc_feature (11)..(307): NCBI GI NO: 25386576 NR Description: probable RNA binding protein
MQAATVAAAANGGGDVQKQQQVGAAPLPAVAALAPPPHWVAMPFAPPGAAAMVVPHQMAPAPPHQFAPHFVPFHAVAPPPPPLQPRPAHVAMGSPAPAAQPGQEENKTIWVGDLHYWMDENYLHTCFGYTGEVVAIKVIRNKQTGQSEGYGFVEFYSHAAAEKVLDGFAGHIMPNTDQPFRINWASFSMGDRRSDIASDHSIFVGDLASDVNDTALLETFSSRYSSVKGAKVVIDANTGRSKGYGFVRFGDDSEKTNAMTEMNGVYCSTRPMRIGPATPRKSSGTSGSTVSSARSDGDLTNTTVFVGGLDPNVSEDDLKQTFSQYGEISSVKIPVGKQCGFVQFLQRKNAEDALQGLNGSTIGKQTVRLSWGRNPANKQLRSDNGNQWNNGMYYAPSPFYNGYGYPAAPFPDPGMYAAAYGAYPVYGNQQQVS

SEQ ID NO: 17281 - protein, 392 aa, Triticum aestivum
  peptide (1)..(392): Ceres Seq. ID no. 14302744
  misc_feature (161)..(233): Pfam Name: a.k.a. RRM, RBD, or RNP domain Pfam Description: RNA recognition motif.
  misc_feature (1)..(392): NCBI GI NO: 15594035 NR Description: nucleic acid binding protein [Nicotiana tabacum]
  misc_feature (1)..(392): NCBI GI NO: 15220233 NR Description: RNA binding protein 47 (RBP47), putative
  misc_feature (1)..(392): NCBI GI NO: 15220241 NR Description: RNA binding protein 47 (RBP47), putative
  misc_feature (1)..(381): NCBI GI NO: 9663769 NR Description: RNA Binding Protein 47 [Nicotiana plumbaginifolia]
  misc_feature (1)..(381): NCBI GI NO: 7489196 NR Description: RNA binding protein homolog - common tobacco
  misc_feature (1)..(390): NCBI GI NO: 34896988 NR Description: putative RNA binding protein [Oryza sativa]
  misc_feature (59)..(381): NCBI GI NO: 7489112 NR Description: DNA binding protein ACBF - common tobacco
  misc_feature (1)..(241): NCBI GI NO: 15230291 NR Description: RNA-binding protein, putative
  misc_feature (243)..(364): NCBI GI NO: 15230291 NR Description: RNA-binding protein, putative
  misc_feature (1)..(266): NCBI GI NO: 25386576 NR Description: probable RNA binding protein
MPFAPPGAAAMVVPHQMAPAPPHQFAPHFVPFHAVAPPPPPLQPRPAHVAMGSPAPAAQPGQEENKTIWVGDLHYWMDENYLHTCFGYTGEVVAIKVIRNKQTGQSEGYGFVEFYSHAAAEKVLDGFAGHIMPNTDQPFRINWASFSMGDRRSDIASDHSIFVGDLASDVNDTALLETFSSRYSSVKGAKVVIDANTGRSKGYGFVRFGDDSEKTNAMTEMNGVYCSTRPMRIGPATPRKSSGTSGSTVSSARSDGDLTNTTVFVGGLDPNVSEDDLKQTFSQYGEISSVKIPVGKQCGFVQFLQRKNAEDALQGLNGSTIGKQTVRLSWGRNPANKQLRSDNGNQWNNGMYYAPSPFYNGYGYPAAPFPDPGMYAAAYGAYPVYGNQQQVS

SEQ ID NO: 17282 - protein, 382 aa, Triticum aestivum
  peptide (1)..(382): Ceres Seq. ID no. 14302745
  misc_feature (151)..(223): Pfam Name: a.k.a. RRM, RBD, or RNP domain Pfam Description: RNA recognition motif.
  misc_feature (1)..(382): NCBI GI NO: 15594035 NR Description: nucleic acid binding protein [Nicotiana tabacum]
  misc_feature (1)..(382): NCBI GI NO: 15220233 NR Description: RNA binding protein 47 (RBP47), putative
  misc_feature (1)..(382): NCBI GI NO: 15220241 NR Description: RNA binding protein 47 (RBP47), putative
  misc_feature (1)..(371): NCBI GI NO: 9663769 NR Description: RNA Binding Protein 47 [Nicotiana plumbaginifolia]
  misc_feature (1)..(371): NCBI GI NO: 7489196 NR Description: RNA binding protein homolog - common tobacco
  misc_feature (1)..(380): NCBI GI NO: 34896988 NR Description: putative RNA binding protein [Oryza sativa]
  misc_feature (49)..(371): NCBI GI NO: 7489112 NR Description: DNA binding protein ACBF - common tobacco
  misc_feature (1)..(231): NCBI GI NO: 15230291 NR Description: RNA-binding protein, putative
  misc_feature (233)..(354): NCBI GI NO: 15230291 NR Description: RNA-binding protein, putative
  misc_feature (1)..(256): NCBI GI NO: 25386576 NR Description: probable RNA binding protein
MVVPHQMAPAPPHQFAPHFVPFHAVAPPPPPLQPRPAHVAMGSPAPAAQPGQEENKTIWVGDLHYWMDENYLHTCFGYTGEVVAIKVIRNKQTGQSEGYGFVEFYSHAAAEKVLDGFAGHIMPNTDQPFRINWASFSMGDRRSDIASDHSIFVGDLASDVNDTALLETFSSRYSSVKGAKVVIDANTGRSKGYGFVRFGDDSEKTNAMTEMNGVYCSTRPMRIGPATPRKSSGTSGSTVSSARSDGDLTNTTVFVGGLDPNVSEDDLKQTFSQYGEISSVKIPVGKQCGFVQFLQRKNAEDALQGLNGSTIGKQTVRLSWGRNPANKQLRSDNGNQWNNGMYYAPSPFYNGYGYPAAPFPDPGMYAAAYGAYPVYGNQQQVS

SEQ ID NO: 17283 - DNA, 841 bp, Triticum aestivum
  misc_feature (1)..(841): Ceres Seq. ID no. 13663564
acaagaggacagggaagaatcttgttcgcgttgagccgccgcagaccttccctttccccacgcccaggcgatcccctcaaatcccccgcaccatccccctctccttcgatcggatccgcccgcccgcccgcctgccgcaccggtcgatcgacgatgacgctgggcagctccggcgccggatcgagcgtcgtcgttcctcggaacttcaggctgctagaagagcttgagcgcggggagaagggcattggagatggaacggtcagctatggaatggatgatgctgatgacatatacatgcggtcatggactggcaccattattggtcctcacaatactgtccatgagggtcgcatctaccagctgaagctgttctgtgacaaggactaccccgagaaggcaccatctgttagatttcattcaagaatcaacatggcttgtgttaatcacgagaccggggcggttgacccgaagaagttcagtgtgctggcgaactggcagcgagagtacactatggaacatgtcttgacccagctgaagaaagatatggcggcgacgcagaaccgcaagctagtgcagcctccagaagggacattcttctagcggggtgttttcctgcccatctccagttccaacagcagcgatctatgtcactcccatgggatttgaaatgtagattcagcgtctgctgcctgcagatcttttcccagttttatgtgaaaccgtgttcctcgcgatctgcccgattgccgttaaggagatggaatgaaacatgtaccggtttgccgttaaggagtactaattaaggtctgtaattgaagaaacaacccgtgtcaaggaaata

SEQ ID NO: 17284 - protein, 199 aa, Triticum aestivum
  peptide (1)..(199): Ceres Seq. ID no. 13663565
  misc_feature (52)..(199): NCBI GI NO: 18404032 NR Description: ubiquitin-conjugating enzyme family
  misc_feature (52)..(199): NCBI GI NO: 18409633 NR Description: ubiquitin-conjugating enzyme family
  misc_feature (52)..(199): NCBI GI NO: 30686662 NR Description: ubiquitin-conjugating enzyme family
  misc_feature (52)..(199): NCBI GI NO: 30693656 NR Description: ubiquitin-conjugating enzyme family
  misc_feature (60)..(199): NCBI GI NO: 2982253 NR Description: CROC-1-like protein [Picea mariana]
  misc_feature (52)..(199): NCBI GI NO: 32488709 NR Description: OSJNBa0088H09.10
  misc_feature (63)..(196): NCBI GI NO: 21593918 NR Description: E2, ubiquitin-conjugating enzyme, putative
  misc_feature (63)..(196): NCBI GI NO: 18409647 NR Description: ubiquitin-conjugating enzyme family
  misc_feature (57)..(196): NCBI GI NO: 18395221 NR Description: ubiquitin-conjugating enzyme family
  misc_feature (65)..(196): NCBI GI NO: 13324790 NR Description: putative DNA-binding protein [Oryza sativa]
TRGQGRILFALSRRRPSLSPRPGDPLKSPAPSPSPSIGSARPPACRTGRSTMTLGSSGAGSSVVVPRNFRLLEELERGEKGIGDGTVSYGMDDADDIYMRSWTGTIIGPHNTVHEGRIYQLKLFCDKDYPEKAPSVRFHSRINMACVNHETGAVDPKKFSVLANWQREYTMEHVLTQLKKDMAATQNRKLVQPPEGTFF

SEQ ID NO: 17285 - protein, 148 aa, Triticum aestivum
  peptide (1)..(148): Ceres Seq. ID no. 13663566
  misc_feature (1)..(148): NCBI GI NO: 18404032 NR Description: ubiquitin-conjugating enzyme family
  misc_feature (1)..(148): NCBI GI NO: 18409633 NR Description: ubiquitin-conjugating enzyme family
  misc_feature (1)..(148): NCBI GI NO: 30686662 NR Description: ubiquitin-conjugating enzyme family
  misc_feature (1)..(148): NCBI GI NO: 30693656 NR Description: ubiquitin-conjugating enzyme family
  misc_feature (9)..(148): NCBI GI NO: 2982253 NR Description: CROC-1-like protein [Picea mariana]
  misc_feature (1)..(148): NCBI GI NO: 32488709 NR Description: OSJNBa0088H09.10
  misc_feature (12)..(145): NCBI GI NO: 21593918 NR Description: E2, ubiquitin-conjugating enzyme, putative
  misc_feature (12)..(145): NCBI GI NO: 18409647 NR Description: ubiquitin-conjugating enzyme family
  misc_feature (6)..(145): NCBI GI NO: 18395221 NR Description: ubiquitin-conjugating enzyme family
  misc_feature (14)..(145): NCBI GI NO: 13324790 NR Description: putative DNA-binding protein [Oryza sativa]
MTLGSSGAGSSVVVPRNFRLLEELERGEKGIGDGTVSYGMDDADDIYMRSWTGTIIGPHNTVHEGRIYQLKLFCDKDYPEKAPSVRFHSRINMACVNHETGAVDPKKFSVLANWQREYTMEHVLTQLKKDMAATQNRKLVQPPEGTFF

SEQ ID NO: 17286 - protein, 109 aa, Triticum aestivum
  peptide (1)..(109): Ceres Seq. ID no. 13663567
  misc_feature (1)..(109): NCBI GI NO: 18404032 NR Description: ubiquitin-conjugating enzyme family
  misc_feature (1)..(109): NCBI GI NO: 18409633 NR Description: ubiquitin-conjugating enzyme family
  misc_feature (1)..(109): NCBI GI NO: 30686662 NR Description: ubiquitin-conjugating enzyme family
  misc_feature (1)..(109): NCBI GI NO: 30693656 NR Description: ubiquitin-conjugating enzyme family
  misc_feature (1)..(109): NCBI GI NO: 2982253 NR Description: CROC-1-like protein [Picea mariana]
  misc_feature (1)..(109): NCBI GI NO: 32488709 NR Description: OSJNBa0088H09.10
  misc_feature (1)..(106): NCBI GI NO: 21593918 NR Description: E2, ubiquitin-conjugating enzyme, putative
  misc_feature (1)..(106): NCBI GI NO: 18409647 NR Description: ubiquitin-conjugating enzyme family
  misc_feature (1)..(106): NCBI GI NO: 18395221 NR Description: ubiquitin-conjugating enzyme family
  misc_feature (1)..(106): NCBI GI NO: 13324790 NR Description: putative DNA-binding protein [Oryza sativa]
MDDADDIYMRSWTGTIIGPHNTVHEGRIYQLKLFCDKDYPEKAPSVRFHSRINMACVNHETGAVDPKKFSVLANWQREYTMEHVLTQLKKDMAATQNRKLVQPPEGTFF

SEQ ID NO: 17287 - DNA, 981 bp, Triticum aestivum
  misc_feature (1)..(981): Ceres Seq. ID no. 14302396
agtagacaacagaaaatttccccattcttctccgaaccctagctccccgcttcccgctcctcacgcctctcgccgtcgccgtcccgccgagcccatggctaagacgcgtccgcccaagaagatcctcgagtcctacaccatcaaggggtccgacaaagtcatcaagcctggggactgtgtgctaatgagatcagctgatacatcaaagccaccatatgtggcaaaagttgagtccattgaggcagcagggtctcgaggcacaaatgtgagagtacgggttcgatggtactatcgtccagaagaattcattggtgggaggcgaccatttcatggttccaaagaggtattcctctctgaccactatgatgtacagagtgctgacacaatagagggaaaatgcaatgtccacagcttccgtagctacacaaagcttgattctgtgaatgccgaggacttcttctgtcgctttgactacaaatcagcatctggcagtttcgtgcccgaccgtatagctgtgttttgcaagtgtgagatgccgtacaatcctgatgaccttatgatccaatgtgaggaatgctctgactggtttcacccttcttgtattggaatgaccattaaagaagcaaagaaacgagaacactttttctgccagagctgtactgctgaaaatgggaagacaactgagaattttcatgaagccacggcagagtcagaagaaaagctggtggagtcgaaaaggcggagaaggtgatgggctggattaatttgatggaattcccacacggatatacaaactacatagccttctagtatgaggtctgtggtgatgtttgtggcagtctgtgaccccttctaatgtcaggcatgcagtgtacataacgtgcaacctgagattgttgtattaggagaaaatagaatttggacgctagtgtcagagtttgagcagtatggcaccatcaagatcccttgtgatcttccctc

SEQ ID NO: 17288 - protein, 249 aa, Triticum aestivum
  peptide (1)..(249): Ceres Seq. ID no. 14302397
  misc_feature (53)..(169): Pfam Name: Pfam Description:  BAH domain
  misc_feature (32)..(249): NCBI GI NO: 33146914 NR Description: putative ES43 protein
  misc_feature (32)..(249): NCBI GI NO: 34897170 NR Description: putative DNA-binding protein
  misc_feature (31)..(249): NCBI GI NO: 629783 NR Description: ES43 protein - barley
  misc_feature (32)..(249): NCBI GI NO: 37573088 NR Description: receptor like protein
  misc_feature (32)..(249): NCBI GI NO: 18420377 NR Description: ES43 like protein [Arabidopsis thaliana]
  misc_feature (32)..(249): NCBI GI NO: 21595796 NR Description: ES43 like protein [Arabidopsis thaliana]
  misc_feature (32)..(240): NCBI GI NO: 7484948 NR Description: ES43 protein homolog F19H22
  misc_feature (32)..(243): NCBI GI NO: 34904940 NR Description: OSJNBa0077M12.13
  misc_feature (57)..(236): NCBI GI NO: 11292613 NR Description: receptor like protein - Arabidopsis thaliana
  misc_feature (62)..(236): NCBI GI NO: 15234729 NR Description: receptor like protein (fragment)
VDNRKFPHSSPNPSSPLPAPHASRRRRPAEPMAKTRPPKKILESYTIKGSDKVIKPGDCVLMRSADTSKPPYVAKVESIEAAGSRGTNVRVRVRWYYRPEEFIGGRRPFHGSKEVFLSDHYDVQSADTIEGKCNVHSFRSYTKLDSVNAEDFFCRFDYKSASGSFVPDRIAVFCKCEMPYNPDDLMIQCEECSDWFHPSCIGMTIKEAKKREHFFCQSCTAENGKTTENFHEATAESEEKLVESKRRRR

SEQ ID NO: 17289 - protein, 218 aa, Triticum aestivum
  peptide (1)..(218): Ceres Seq. ID no. 14302398
  misc_feature (22)..(138): Pfam Name: Pfam Description:  BAH domain
  misc_feature (1)..(218): NCBI GI NO: 33146914 NR Description: putative ES43 protein
  misc_feature (1)..(218): NCBI GI NO: 34897170 NR Description: putative DNA-binding protein
  misc_feature (1)..(218): NCBI GI NO: 629783 NR Description: ES43 protein - barley
  misc_feature (1)..(218): NCBI GI NO: 37573088 NR Description: receptor like protein
  misc_feature (1)..(218): NCBI GI NO: 18420377 NR Description: ES43 like protein [Arabidopsis thaliana]
  misc_feature (1)..(218): NCBI GI NO: 21595796 NR Description: ES43 like protein [Arabidopsis thaliana]
  misc_feature (1)..(209): NCBI GI NO: 7484948 NR Description: ES43 protein homolog F19H22
  misc_feature (1)..(212): NCBI GI NO: 34904940 NR Description: OSJNBa0077M12.13
  misc_feature (26)..(205): NCBI GI NO: 11292613 NR Description: receptor like protein - Arabidopsis thaliana
  misc_feature (31)..(205): NCBI GI NO: 15234729 NR Description: receptor like protein (fragment)
MAKTRPPKKILESYTIKGSDKVIKPGDCVLMRSADTSKPPYVAKVESIEAAGSRGTNVRVRVRWYYRPEEFIGGRRPFHGSKEVFLSDHYDVQSADTIEGKCNVHSFRSYTKLDSVNAEDFFCRFDYKSASGSFVPDRIAVFCKCEMPYNPDDLMIQCEECSDWFHPSCIGMTIKEAKKREHFFCQSCTAENGKTTENFHEATAESEEKLVESKRRRR

SEQ ID NO: 17290 - protein, 188 aa, Triticum aestivum
  peptide (1)..(188): Ceres Seq. ID no. 14302399
  misc_feature (1)..(108): Pfam Name: Pfam Description:  BAH domain
  misc_feature (1)..(188): NCBI GI NO: 33146914 NR Description: putative ES43 protein
  misc_feature (1)..(188): NCBI GI NO: 34897170 NR Description: putative DNA-binding protein
  misc_feature (1)..(188): NCBI GI NO: 629783 NR Description: ES43 protein - barley
  misc_feature (1)..(188): NCBI GI NO: 37573088 NR Description: receptor like protein
  misc_feature (1)..(188): NCBI GI NO: 18420377 NR Description: ES43 like protein [Arabidopsis thaliana]
  misc_feature (1)..(188): NCBI GI NO: 21595796 NR Description: ES43 like protein [Arabidopsis thaliana]
  misc_feature (1)..(179): NCBI GI NO: 7484948 NR Description: ES43 protein homolog F19H22
  misc_feature (1)..(182): NCBI GI NO: 34904940 NR Description: OSJNBa0077M12.13
  misc_feature (1)..(175): NCBI GI NO: 11292613 NR Description: receptor like protein - Arabidopsis thaliana
  misc_feature (1)..(175): NCBI GI NO: 15234729 NR Description: receptor like protein (fragment)
MRSADTSKPPYVAKVESIEAAGSRGTNVRVRVRWYYRPEEFIGGRRPFHGSKEVFLSDHYDVQSADTIEGKCNVHSFRSYTKLDSVNAEDFFCRFDYKSASGSFVPDRIAVFCKCEMPYNPDDLMIQCEECSDWFHPSCIGMTIKEAKKREHFFCQSCTAENGKTTENFHEATAESEEKLVESKRRRR

SEQ ID NO: 17291 - DNA, 849 bp, Triticum aestivum
  misc_feature (1)..(849): Ceres Seq. ID no. 12626698
  misc_feature (189)..(189): n is a, c, t, g, unknown, or other
  misc_feature (148)..(148): n is a, c, t, g, unknown, or other
aaaaaaaagaaagaatgccctattattttcatccccttcacaatttccctcacaccctcaccccgcagcccatttgccccctgaccaagccgccgccgccgccatctccggccaccccgcctctcccccctctccctccccggcctcnccgccgccgacccataccggaacaggaggaccgccaccgcngtaaagcctccgtgccagctgcctccccgtcggccacgctgcaaccagagcaagatcccgcccctggtcgcatctcagaatggcgaccctgaggaacctgaagatcaagacgtcgacgtgcaagaggatcgtcaaagagctgcgctcgtacgagaaggaggtggagaaggaggccgccaagaccgccgacatgaaggagaagggcgccgacccctatgatctcaagcagcaggaaaatgttttagctgagtcgaggatgatggtcccagactgccataagcggcttgaagctgcactgacagacttgaaagcaactctggccgagttgaaggagtcaaatgaacaaggcactgagatcggtgaggctgaggctacaatcactgaagttgaagctgtctacacgccaacagaagctgaagattaagctcgcaacttccttttcgctgaaatgtcagtatgcatcaccagacttgctcttgtcgacaagttagtcccattcatatgatgttgacgcgaaagcttgtatgtatcacgactcatgatctgtctcgagatgtgcaactggtaatatcactgtactggaatatggttaggcgtttatgatgtgctggaaatgctgcatgttgttggcattgttccatttgagtctcggatgcatat

SEQ ID NO: 17292 - protein, 114 aa, Triticum aestivum
  peptide (1)..(114): Ceres Seq. ID no. 12626699
  misc_feature (6)..(99): Pfam Name: Pfam Description:  Tubulin binding cofactor A
  misc_feature (1)..(111): NCBI GI NO: 18402340 NR Description: TCP1-chaperonin cofactor A isolog
  misc_feature (1)..(80): NCBI GI NO: 25408070 NR Description: probable TCP1-chaperonin cofactor A
  misc_feature (4)..(104): NCBI GI NO: 4759212 NR Description: beta-tubulin cofactor A [Homo sapiens]
  misc_feature (4)..(104): NCBI GI NO: 6678225 NR Description: tubulin cofactor a
  misc_feature (4)..(104): NCBI GI NO: 28461233 NR Description: tubulin cofactor a [Bos taurus]
  misc_feature (4)..(104): NCBI GI NO: 21706425 NR Description: Unknown (protein for IMAGE:4209187) [Mus musculus]
  misc_feature (4)..(104): NCBI GI NO: 30585151 NR Description: Homo sapiens tubulin-specific chaperone a
  misc_feature (4)..(104): NCBI GI NO: 1711661 NR Description: TUBULIN-SPECIFIC CHAPERONE A
  misc_feature (4)..(104): NCBI GI NO: 1711660 NR Description: TUBULIN-SPECIFIC CHAPERONE A
  misc_feature (1)..(104): NCBI GI NO: 34868671 NR Description: similar to homeodomain protein [Rattus norvegicus]
MATLRNLKIKTSTCKRIVKELRSYEKEVEKEAAKTADMKEKGADPYDLKQQENVLAESRMMVPDCHKRLEAALTDLKATLAELKESNEQGTEIGEAEATITEVEAVYTPTEAED

SEQ ID NO: 17293 - protein, 92 aa, Triticum aestivum
  peptide (1)..(92): Ceres Seq. ID no. 12626700
  misc_feature (49)..(49): Xaa is any aa, unknown or other
  misc_feature (63)..(63): Xaa is any aa, unknown or other
KKERMPYYFHPLHNFPHTLTPQPICPLTKPPPPPSPATPPLPPLPPRPXRRRPIPEQEDRHRXKASVPAASPSATLQPEQDPAPGRISEWRP

SEQ ID NO: 17294 - protein, 88 aa, Triticum aestivum
  peptide (1)..(88): Ceres Seq. ID no. 12626701
  misc_feature (45)..(45): Xaa is any aa, unknown or other
  misc_feature (59)..(59): Xaa is any aa, unknown or other
MPYYFHPLHNFPHTLTPQPICPLTKPPPPPSPATPPLPPLPPRPXRRRPIPEQEDRHRXKASVPAASPSATLQPEQDPAPGRISEWRP

SEQ ID NO: 17295 - DNA, 2132 bp, Triticum aestivum
  misc_feature (1)..(2132): Ceres Seq. ID no. 14307896
caccgcatcgcacgaaaaacaccgaccttttttccagccgagacacgatgatccaccgccattagcagcggcggggaagcggcgatcgatcttccgtggccccgcgctcgcgtgctcgctctcgccggatcgggcctggcaaatggcgcgcgcggcctccctggcggcgctctgcctcctcctcctcgccgccgccgccgccgccggagctcgaatggacccgatttattctggccaactggtgccggactggagcagggaacccaagattaaaccgcagaatttctccctgaatcgagaggataatcttcagctcctaagcaggtcacgagatgtgactcgcaggaaattgggggagaggaccggtgtaataaagatggaaacagtacagcaggatgatgaagccctggttaaacttgagaatgcaggttttgagcgttcaaaagcagttgattctgctgtgctgggaaaatatagtctatggagacgcgaaaatgaaaacgagaaggcggatgcaaatgtccgtctgatgcgggaccaaatgatcatggctagaatatattccgtgcttgccaaatccagggacaagctcgatctttatcgggagctactcgccaggatcaaggaaagccagcgctcccttggggaagctactgctgattctgatctccctaagagtgcttctgagagagcaaaagcgatgggtctagttttatcaaaagcaagggatcaattgtacaattgcaaggaaattacccatcgtttaagatcaatgcttcagtcagctgatgagcaggtccggagcttaaagaagcagagcaccttcctcagtcagttggcagctaagacaataccgaatggcatacattgcttgtccatgcgcttaacaatagactattaccttctctctccagagaaaagaaagttccctaatagtgagaatttggaagatcctgatctttatcactatgctcttttttcggacaatgttctggcagcatcagttgtggttaactcaaccatcgtgaacgcaaaggagcctgagaagcatgtctttcatcttgttactgacaaactgaactttggggcaatgaacatgtggttcttgttgaatccacctggggatgccacaatccatgttgaaaatgtggatgacttcaaatggttgaactcttcgtactgccctgttttgaagcagctcgagtctgcagccatgaaagagtactactttaaggcagatcgtcaaaaaactctctctgctgggtcctctaatctgaagtaccgaaacccaaaatatctgtccatgctcaaccatctaagattttacctgccacaagtctatcctaagttgaataaaatccttttcctcgatgacgacattgtggtccagaaggacttgaccggactgtgggatgttgatcttaatgggaatgtaaatggtgctgtggaaacgtgcggggagagcttccaccgatttgacaagtacctcaatttctcgaacccaaatatttcgcagaattttgatcctaacgcatgtggttgggcttatggaatgaatatatttgatctggaggagtggaagaagaaggacattactggaatttaccataagtggcagaacatgaatgaaaacaggctgctgtggaaactggggacgcttccgccaggcctgatgactttctacaagctgacgcaccccctggacaaatcatggcatgtgcttgggttagggtacaacccgacggtcgagcacgcggagatcgacaccgccgccgtcatccactacaacgggaacatgaagccgtggctggagattgcgatgaccaagtaccggccttactggacgcagtacatcaactacgagcactcctatgtccggggctgcaagatcagtcaataggcagtagctagaagaggagcattcgcttcgacaggactactaaagaaagaaagtgtttccctgttggtagtgcagttatagcgcatgttcttcgttcgtgttattagatttgttttggttggtatcttttctgctgtatgtagcttcctcgcccgattcgttgtgctgcctcgactagtctgctgcggcacgtgttacatgttattctcttgaaaagaatggtgaacttggc

SEQ ID NO: 17296 - protein, 632 aa, Triticum aestivum
  peptide (1)..(632): Ceres Seq. ID no. 14307897
  misc_feature (64)..(632): NCBI GI NO: 15233046 NR Description: glycosyltransferase family 8
  misc_feature (112)..(632): NCBI GI NO: 7271113 NR Description: 68 kDa protein [Cicer arietinum]
  misc_feature (64)..(569): NCBI GI NO: 14517362 NR Description: AT3g61130/T20K12_30 [Arabidopsis thaliana]
  misc_feature (96)..(632): NCBI GI NO: 7485958 NR Description: hypothetical protein F22I13
  misc_feature (96)..(632): NCBI GI NO: 30691875 NR Description: glycosyltransferase family 8
  misc_feature (105)..(632): NCBI GI NO: 37533460 NR Description: hypothetical protein
  misc_feature (171)..(631): NCBI GI NO: 10177914 NR Description: emb|CAB71043
  misc_feature (171)..(631): NCBI GI NO: 18422837 NR Description: glycosyltransferase family 8
  misc_feature (132)..(517): NCBI GI NO: 15227235 NR Description: glycosyltransferase family 8
  misc_feature (503)..(630): NCBI GI NO: 15227235 NR Description: glycosyltransferase family 8
TASHEKHRPFFQPRHDDPPPLAAAGKRRSIFRGPALACSLSPDRAWQMARAASLAALCLLLLAAAAAAGARMDPIYSGQLVPDWSREPKIKPQNFSLNREDNLQLLSRSRDVTRRKLGERTGVIKMETVQQDDEALVKLENAGFERSKAVDSAVLGKYSLWRRENENEKADANVRLMRDQMIMARIYSVLAKSRDKLDLYRELLARIKESQRSLGEATADSDLPKSASERAKAMGLVLSKARDQLYNCKEITHRLRSMLQSADEQVRSLKKQSTFLSQLAAKTIPNGIHCLSMRLTIDYYLLSPEKRKFPNSENLEDPDLYHYALFSDNVLAASVVVNSTIVNAKEPEKHVFHLVTDKLNFGAMNMWFLLNPPGDATIHVENVDDFKWLNSSYCPVLKQLESAAMKEYYFKADRQKTLSAGSSNLKYRNPKYLSMLNHLRFYLPQVYPKLNKILFLDDDIVVQKDLTGLWDVDLNGNVNGAVETCGESFHRFDKYLNFSNPNISQNFDPNACGWAYGMNIFDLEEWKKKDITGIYHKWQNMNENRLLWKLGTLPPGLMTFYKLTHPLDKSWHVLGLGYNPTVEHAEIDTAAVIHYNGNMKPWLEIAMTKYRPYWTQYINYEHSYVRGCKISQ

SEQ ID NO: 17297 - protein, 585 aa, Triticum aestivum
  peptide (1)..(585): Ceres Seq. ID no. 14307898
  misc_feature (17)..(585): NCBI GI NO: 15233046 NR Description: glycosyltransferase family 8
  misc_feature (65)..(585): NCBI GI NO: 7271113 NR Description: 68 kDa protein [Cicer arietinum]
  misc_feature (17)..(522): NCBI GI NO: 14517362 NR Description: AT3g61130/T20K12_30 [Arabidopsis thaliana]
  misc_feature (49)..(585): NCBI GI NO: 7485958 NR Description: hypothetical protein F22I13
  misc_feature (49)..(585): NCBI GI NO: 30691875 NR Description: glycosyltransferase family 8
  misc_feature (58)..(585): NCBI GI NO: 37533460 NR Description: hypothetical protein
  misc_feature (124)..(584): NCBI GI NO: 10177914 NR Description: emb|CAB71043
  misc_feature (124)..(584): NCBI GI NO: 18422837 NR Description: glycosyltransferase family 8
  misc_feature (85)..(470): NCBI GI NO: 15227235 NR Description: glycosyltransferase family 8
  misc_feature (456)..(583): NCBI GI NO: 15227235 NR Description: glycosyltransferase family 8
MARAASLAALCLLLLAAAAAAGARMDPIYSGQLVPDWSREPKIKPQNFSLNREDNLQLLSRSRDVTRRKLGERTGVIKMETVQQDDEALVKLENAGFERSKAVDSAVLGKYSLWRRENENEKADANVRLMRDQMIMARIYSVLAKSRDKLDLYRELLARIKESQRSLGEATADSDLPKSASERAKAMGLVLSKARDQLYNCKEITHRLRSMLQSADEQVRSLKKQSTFLSQLAAKTIPNGIHCLSMRLTIDYYLLSPEKRKFPNSENLEDPDLYHYALFSDNVLAASVVVNSTIVNAKEPEKHVFHLVTDKLNFGAMNMWFLLNPPGDATIHVENVDDFKWLNSSYCPVLKQLESAAMKEYYFKADRQKTLSAGSSNLKYRNPKYLSMLNHLRFYLPQVYPKLNKILFLDDDIVVQKDLTGLWDVDLNGNVNGAVETCGESFHRFDKYLNFSNPNISQNFDPNACGWAYGMNIFDLEEWKKKDITGIYHKWQNMNENRLLWKLGTLPPGLMTFYKLTHPLDKSWHVLGLGYNPTVEHAEIDTAAVIHYNGNMKPWLEIAMTKYRPYWTQYINYEHSYVRGCKISQ

SEQ ID NO: 17298 - protein, 561 aa, Triticum aestivum
  peptide (1)..(561): Ceres Seq. ID no. 14307899
  misc_feature (1)..(561): NCBI GI NO: 15233046 NR Description: glycosyltransferase family 8
  misc_feature (41)..(561): NCBI GI NO: 7271113 NR Description: 68 kDa protein [Cicer arietinum]
  misc_feature (1)..(498): NCBI GI NO: 14517362 NR Description: AT3g61130/T20K12_30 [Arabidopsis thaliana]
  misc_feature (25)..(561): NCBI GI NO: 7485958 NR Description: hypothetical protein F22I13
  misc_feature (25)..(561): NCBI GI NO: 30691875 NR Description: glycosyltransferase family 8
  misc_feature (34)..(561): NCBI GI NO: 37533460 NR Description: hypothetical protein
  misc_feature (100)..(560): NCBI GI NO: 10177914 NR Description: emb|CAB71043
  misc_feature (100)..(560): NCBI GI NO: 18422837 NR Description: glycosyltransferase family 8
  misc_feature (61)..(446): NCBI GI NO: 15227235 NR Description: glycosyltransferase family 8
  misc_feature (432)..(559): NCBI GI NO: 15227235 NR Description: glycosyltransferase family 8
MDPIYSGQLVPDWSREPKIKPQNFSLNREDNLQLLSRSRDVTRRKLGERTGVIKMETVQQDDEALVKLENAGFERSKAVDSAVLGKYSLWRRENENEKADANVRLMRDQMIMARIYSVLAKSRDKLDLYRELLARIKESQRSLGEATADSDLPKSASERAKAMGLVLSKARDQLYNCKEITHRLRSMLQSADEQVRSLKKQSTFLSQLAAKTIPNGIHCLSMRLTIDYYLLSPEKRKFPNSENLEDPDLYHYALFSDNVLAASVVVNSTIVNAKEPEKHVFHLVTDKLNFGAMNMWFLLNPPGDATIHVENVDDFKWLNSSYCPVLKQLESAAMKEYYFKADRQKTLSAGSSNLKYRNPKYLSMLNHLRFYLPQVYPKLNKILFLDDDIVVQKDLTGLWDVDLNGNVNGAVETCGESFHRFDKYLNFSNPNISQNFDPNACGWAYGMNIFDLEEWKKKDITGIYHKWQNMNENRLLWKLGTLPPGLMTFYKLTHPLDKSWHVLGLGYNPTVEHAEIDTAAVIHYNGNMKPWLEIAMTKYRPYWTQYINYEHSYVRGCKISQ

SEQ ID NO: 17299 - DNA, 1422 bp, Triticum aestivum
  misc_feature (1)..(1422): Ceres Seq. ID no. 14302776
atcccgcacccaccattgagagaagcagcagcacgagcagcacatgtcacagagggccagcgtcccacactcctcctgcatagccttcgccctccattcccacctcctcgtgtcctctgagatgtgccccagctcctactgggaatagaatagccacccccgcccaaatcccacacctttttcgtttttgatttcctctcttctttagattttttttctagatctttgggggcctccaattcgtccgtccgcgagggggaagcgaggggaagatgggcgtcaaggggttcgtcgagggcggcatcgcctccatcgtcgccggctgctccacccaccctctcgacctcatcaaggtccggatgcagctgcagggggagtcctccgcggccgcggcccagcccgcgctccgcccggcgctcgccttccaggccggggcgcacaccgtgacgctcccgcacgcgcccacgccggtgcccaagcccggcccgattggcatctgcacgcagatcctgcgcgccgagggcgccgccgggctcttctccgggatctcggccaccatgctgcgccagacgctctactccaccacgcggatggggctctacgacatcctcaagaagcgctggacccaggagaacgccggcgtgctgccgctgcaccgcaagatcgccgccggcctcatcgccggcggcgtcggcgcggccgtcggcaacccggccgacctggccatggtgcggatgcaggccgacggccgcctcccgctggccgaccgcaggaactaccgcagcgtgggcgacgccatcgcccggatgacgcgcgacgagggcgtgcgcagcctctggcgcggctccgcgctcacggtcaaccgcgccatgattgtcaccgcgtcgcagctggccacctacgaccaggccaaggaggccatcctggcccgccgcggcccggccgccgacgggctgggcacgcacgtggccgccagcttcgccgcgggcatcgtggccgccgccgcgtccaaccccgtggacgtggtcaagaccagggtgatgaacatgaaggtggcgcccggcgcgccccctccgtacgccggggccctggactgcgcgctcaagacggtgcggtcggagggcgtgatggcgctctacaaggggttcatccccacggtgtcgcgccaggggcccttcaccgtggtgctcttcgtcaccctggagcaggtgcgcaaggtcttcaaggacgtcgagttctaatgcagtgcagaccaccgcacggcgcggcgccatggatccatgatgatgacgacaagaagctgcccattgatgccgctgctgctaagaataactagtagtaccgctggagggatttctccagttcctgcctctcattttattcggatgaatttgatcgattttgaatgaaattctcattttc

SEQ ID NO: 17300 - protein, 322 aa, Triticum aestivum
  peptide (1)..(322): Ceres Seq. ID no. 14302777
  misc_feature (1)..(322): NCBI GI NO: 15227225 NR Description: mitochondrial carrier protein family
  misc_feature (1)..(322): NCBI GI NO: 21554157 NR Description: putative mitochondrial dicarboxylate carrierprotein
  misc_feature (1)..(322): NCBI GI NO: 13878155 NR Description: putative mitochondrial dicarboxylate carrierprotein
  misc_feature (1)..(319): NCBI GI NO: 15233884 NR Description: mitochondrial carrier protein family
  misc_feature (46)..(322): NCBI GI NO: 15242423 NR Description: mitochondrial carrier protein family
  misc_feature (1)..(42): NCBI GI NO: 15242423 NR Description: mitochondrial carrier protein family
  misc_feature (78)..(317): NCBI GI NO: 31240035 NR Description: ENSANGP00000016898 [Anopheles gambiae]
  misc_feature (6)..(39): NCBI GI NO: 31240035 NR Description: ENSANGP00000016898 [Anopheles gambiae]
  misc_feature (77)..(318): NCBI GI NO: 1079478 NR Description: 2-oxoglutarate carrier protein - human
  misc_feature (1)..(37): NCBI GI NO: 1079478 NR Description: 2-oxoglutarate carrier protein - human
MGVKGFVEGGIASIVAGCSTHPLDLIKVRMQLQGESSAAAAQPALRPALAFQAGAHTVTLPHAPTPVPKPGPIGICTQILRAEGAAGLFSGISATMLRQTLYSTTRMGLYDILKKRWTQENAGVLPLHRKIAAGLIAGGVGAAVGNPADLAMVRMQADGRLPLADRRNYRSVGDAIARMTRDEGVRSLWRGSALTVNRAMIVTASQLATYDQAKEAILARRGPAADGLGTHVAASFAAGIVAAAASNPVDVVKTRVMNMKVAPGAPPPYAGALDCALKTVRSEGVMALYKGFIPTVSRQGPFTVVLFVTLEQVRKVFKDVEF

SEQ ID NO: 17301 - protein, 293 aa, Triticum aestivum
  peptide (1)..(293): Ceres Seq. ID no. 14302778
  misc_feature (1)..(293): NCBI GI NO: 15227225 NR Description: mitochondrial carrier protein family
  misc_feature (1)..(293): NCBI GI NO: 21554157 NR Description: putative mitochondrial dicarboxylate carrierprotein
  misc_feature (1)..(293): NCBI GI NO: 13878155 NR Description: putative mitochondrial dicarboxylate carrierprotein
  misc_feature (1)..(290): NCBI GI NO: 15233884 NR Description: mitochondrial carrier protein family
  misc_feature (17)..(293): NCBI GI NO: 15242423 NR Description: mitochondrial carrier protein family
  misc_feature (1)..(13): NCBI GI NO: 15242423 NR Description: mitochondrial carrier protein family
  misc_feature (49)..(288): NCBI GI NO: 31240035 NR Description: ENSANGP00000016898 [Anopheles gambiae]
  misc_feature (48)..(289): NCBI GI NO: 1079478 NR Description: 2-oxoglutarate carrier protein - human
  misc_feature (48)..(289): NCBI GI NO: 21361114 NR Description: solute carrier family 25
  misc_feature (48)..(289): NCBI GI NO: 21312994 NR Description: solute carrier family 25
MQLQGESSAAAAQPALRPALAFQAGAHTVTLPHAPTPVPKPGPIGICTQILRAEGAAGLFSGISATMLRQTLYSTTRMGLYDILKKRWTQENAGVLPLHRKIAAGLIAGGVGAAVGNPADLAMVRMQADGRLPLADRRNYRSVGDAIARMTRDEGVRSLWRGSALTVNRAMIVTASQLATYDQAKEAILARRGPAADGLGTHVAASFAAGIVAAAASNPVDVVKTRVMNMKVAPGAPPPYAGALDCALKTVRSEGVMALYKGFIPTVSRQGPFTVVLFVTLEQVRKVFKDVEF

SEQ ID NO: 17302 - protein, 227 aa, Triticum aestivum
  peptide (1)..(227): Ceres Seq. ID no. 14302779
  misc_feature (1)..(227): NCBI GI NO: 15227225 NR Description: mitochondrial carrier protein family
  misc_feature (1)..(227): NCBI GI NO: 21554157 NR Description: putative mitochondrial dicarboxylate carrierprotein
  misc_feature (1)..(227): NCBI GI NO: 13878155 NR Description: putative mitochondrial dicarboxylate carrierprotein
  misc_feature (1)..(224): NCBI GI NO: 15233884 NR Description: mitochondrial carrier protein family
  misc_feature (1)..(227): NCBI GI NO: 15242423 NR Description: mitochondrial carrier protein family
  misc_feature (1)..(222): NCBI GI NO: 31240035 NR Description: ENSANGP00000016898 [Anopheles gambiae]
  misc_feature (1)..(223): NCBI GI NO: 1079478 NR Description: 2-oxoglutarate carrier protein - human
  misc_feature (1)..(223): NCBI GI NO: 21361114 NR Description: solute carrier family 25
  misc_feature (1)..(223): NCBI GI NO: 21312994 NR Description: solute carrier family 25
  misc_feature (1)..(223): NCBI GI NO: 1580888 NR Description: 2-oxoglutarate carrier protein
MLRQTLYSTTRMGLYDILKKRWTQENAGVLPLHRKIAAGLIAGGVGAAVGNPADLAMVRMQADGRLPLADRRNYRSVGDAIARMTRDEGVRSLWRGSALTVNRAMIVTASQLATYDQAKEAILARRGPAADGLGTHVAASFAAGIVAAAASNPVDVVKTRVMNMKVAPGAPPPYAGALDCALKTVRSEGVMALYKGFIPTVSRQGPFTVVLFVTLEQVRKVFKDVEF

SEQ ID NO: 17303 - DNA, 1283 bp, Triticum aestivum
  misc_feature (1)..(1283): Ceres Seq. ID no. 13663895
atagcaaaggactctatccttctccccttgcgcctccggtgttccaaattccaaattccaaaacccacccccgaggcgaggaaaagcaccgcaccctcctcgcgatacaaaaggcgcagagagaaagtgaggagcggcccccgtaccgcatcccaccaccccggcccgaacccctgcacgccgcaaccgcccgcccgcccgcctgcctgcccggccgcgatgatccagctcctcttcaccttgctgggcgcggaggcgggcgtggcggccgtcctgctcttcaagacgccgctgcggaagctggcgatgctcgcgctcgaccgcctcaagcgcggccgggcccccgtcatggtgcgcaccgtcgccgccaccgtcctcgtcgtcctcgcctccagcctccacagcatggccaagatccacggccacgccggcgccggcgagctcgacgcgcccggcgcgctcagccccaccgaccaggtcctcctcgcccgccacctcctcgaggcctccctcatgggatatattttattccttgctctcgtcattgaccggctacacagctacatcagagagatgcgagggctgaagaagaacctggaggctgtgtcgaagcagaacaagaccttagaagaagcaaaatctggaaggtccgacgagagcaagccacaccacaacgacattgcttcgctgaacgaggagatcaagaagctgaagcggcaactgaaagaaaaggcggaggaggccaaggatgcagaggccaaagcactagctgcccagacgcagtctgaaggtcttgcgcgcaaatatgaccgcctgctggaggacaacaagcatctccatgaccagctgcagtcaggagacatcccgctgtcgcgttcggatggcaagaagaatgcctaagttgtggttggtcctcatcaagctagtcggaaactcctgcaagcctgaagacagttgcgagatgaaaatgacgtcggttactgataatcagccatcggagtagtaccatctttacataaatgttctggtactgtgtaccagaacgcaaaaatatcactcaacctcttacagccaggttagccgagactatgcgaagatgctcgcctgtaaacatctgatggtgttcgactgaatgttcttagtctgatcaagtcgtagttagaacatgagaggtattcatatctcgacaaatctggctgctggttgtcttcgccatcgacttacttgtccaaacatagagaagccgtcattgaactctggttaccctttcataaatttcggct

SEQ ID NO: 17304 - protein, 299 aa, Triticum aestivum
  peptide (1)..(299): Ceres Seq. ID no. 15220263
  misc_feature (77)..(270): Pfam Name: Pfam Description:  B-cell receptor-associated protein 31-like
  misc_feature (74)..(297): NCBI GI NO: 21553655 NR Description: unknown [Arabidopsis thaliana]
  misc_feature (74)..(297): NCBI GI NO: 18422225 NR Description: expressed protein [Arabidopsis thaliana]
  misc_feature (74)..(296): NCBI GI NO: 9759015 NR Description: gene_id:K16E1.4~unknown protein
  misc_feature (74)..(298): NCBI GI NO: 22655198 NR Description: unknown protein [Arabidopsis thaliana]
  misc_feature (74)..(283): NCBI GI NO: 34897474 NR Description: unknown protein
  misc_feature (74)..(283): NCBI GI NO: 15239667 NR Description: hypothetical protein [Arabidopsis thaliana]
  misc_feature (74)..(286): NCBI GI NO: 15231412 NR Description: expressed protein [Arabidopsis thaliana]
  misc_feature (74)..(232): NCBI GI NO: 30682503 NR Description: expressed protein [Arabidopsis thaliana]
  misc_feature (74)..(208): NCBI GI NO: 18402620 NR Description: expressed protein [Arabidopsis thaliana]
IAKDSILLPLRLRCSKFQIPKPTPEARKSTAPSSRYKRRREKVRSGPRTASHHPGPNPCTPQPPARPPACPAAMIQLLFTLLGAEAGVAAVLLFKTPLRKLAMLALDRLKRGRAPVMVRTVAATVLVVLASSLHSMAKIHGHAGAGELDAPGALSPTDQVLLARHLLEASLMGYILFLALVIDRLHSYIREMRGLKKNLEAVSKQNKTLEEAKSGRSDESKPHHNDIASLNEEIKKLKRQLKEKAEEAKDAEAKALAAQTQSEGLARKYDRLLEDNKHLHDQLQSGDIPLSRSDGKKNA

SEQ ID NO: 17305 - protein, 226 aa, Triticum aestivum
  peptide (1)..(226): Ceres Seq. ID no. 15220264
  misc_feature (4)..(197): Pfam Name: Pfam Description:  B-cell receptor-associated protein 31-like
  misc_feature (1)..(224): NCBI GI NO: 21553655 NR Description: unknown [Arabidopsis thaliana]
  misc_feature (1)..(224): NCBI GI NO: 18422225 NR Description: expressed protein [Arabidopsis thaliana]
  misc_feature (1)..(223): NCBI GI NO: 9759015 NR Description: gene_id:K16E1.4~unknown protein
  misc_feature (1)..(225): NCBI GI NO: 22655198 NR Description: unknown protein [Arabidopsis thaliana]
  misc_feature (1)..(210): NCBI GI NO: 34897474 NR Description: unknown protein
  misc_feature (1)..(210): NCBI GI NO: 15239667 NR Description: hypothetical protein [Arabidopsis thaliana]
  misc_feature (1)..(213): NCBI GI NO: 15231412 NR Description: expressed protein [Arabidopsis thaliana]
  misc_feature (1)..(159): NCBI GI NO: 30682503 NR Description: expressed protein [Arabidopsis thaliana]
  misc_feature (1)..(135): NCBI GI NO: 18402620 NR Description: expressed protein [Arabidopsis thaliana]
MIQLLFTLLGAEAGVAAVLLFKTPLRKLAMLALDRLKRGRAPVMVRTVAATVLVVLASSLHSMAKIHGHAGAGELDAPGALSPTDQVLLARHLLEASLMGYILFLALVIDRLHSYIREMRGLKKNLEAVSKQNKTLEEAKSGRSDESKPHHNDIASLNEEIKKLKRQLKEKAEEAKDAEAKALAAQTQSEGLARKYDRLLEDNKHLHDQLQSGDIPLSRSDGKKNA

SEQ ID NO: 17306 - protein, 197 aa, Triticum aestivum
  peptide (1)..(197): Ceres Seq. ID no. 15220265
  misc_feature (1)..(168): Pfam Name: Pfam Description:  B-cell receptor-associated protein 31-like
  misc_feature (1)..(195): NCBI GI NO: 21553655 NR Description: unknown [Arabidopsis thaliana]
  misc_feature (1)..(195): NCBI GI NO: 18422225 NR Description: expressed protein [Arabidopsis thaliana]
  misc_feature (1)..(194): NCBI GI NO: 9759015 NR Description: gene_id:K16E1.4~unknown protein
  misc_feature (1)..(196): NCBI GI NO: 22655198 NR Description: unknown protein [Arabidopsis thaliana]
  misc_feature (1)..(181): NCBI GI NO: 34897474 NR Description: unknown protein
  misc_feature (1)..(181): NCBI GI NO: 15239667 NR Description: hypothetical protein [Arabidopsis thaliana]
  misc_feature (1)..(184): NCBI GI NO: 15231412 NR Description: expressed protein [Arabidopsis thaliana]
  misc_feature (1)..(130): NCBI GI NO: 30682503 NR Description: expressed protein [Arabidopsis thaliana]
  misc_feature (1)..(106): NCBI GI NO: 18402620 NR Description: expressed protein [Arabidopsis thaliana]
MLALDRLKRGRAPVMVRTVAATVLVVLASSLHSMAKIHGHAGAGELDAPGALSPTDQVLLARHLLEASLMGYILFLALVIDRLHSYIREMRGLKKNLEAVSKQNKTLEEAKSGRSDESKPHHNDIASLNEEIKKLKRQLKEKAEEAKDAEAKALAAQTQSEGLARKYDRLLEDNKHLHDQLQSGDIPLSRSDGKKNA

SEQ ID NO: 17307 - DNA, 578 bp, Triticum aestivum
  misc_feature (1)..(578): Ceres Seq. ID no. 12621638
attagacacacttaaaccctcctagctcactctcaccagcagtacctactagctagccggcagcaatggcgtccaggaccttctcggcggcgtgcctgctggcgctgctggtggccaacacgttcctcgccggcgatgcctgcggcagctgcaagcaccaaaccccgccgccggcctccccgtccccgcccccaccatcgccgtctacgacgccgtgcccacctccttcgtcaggcggtgggcgcgccggcgggggtgctgggcgggctggcgctggcggaagggccgagctacctggaggacaagatcgaggacgacgtggcggagaaggtggaggacgtcctggccggcggcggctacgacgacgacgactactagagaaaacgaaaacgatgggcacctcctgagagattgttgtacacgctggtgttgactagccagctatcttctgtacttttattatgaccggatttgttgaataaatacgggaaacaacttaacatcgagtgtagcagtacatccaatcgaaatgttttacgtggccttggccccaacaaattgttgaacacagcaacgtt

SEQ ID NO: 17308 - protein, 113 aa, Triticum aestivum
  peptide (1)..(113): Ceres Seq. ID no. 12621639
  misc_feature (35)..(90): Pfam Name: Pfam Description:  TT viral ORF2
  misc_feature (1)..(93): NCBI GI NO: 7510074 NR Description: hypothetical protein Y50E8A
  misc_feature (34)..(59): NCBI GI NO: 15234820 NR Description: extensin like protein; protein id: At4g16140.1
  misc_feature (23)..(94): NCBI GI NO: 7510074 NR Description: hypothetical protein Y50E8A
  misc_feature (25)..(95): NCBI GI NO: 102424 NR Description: collagen-related protein 1 precursor
  misc_feature (1)..(56): NCBI GI NO: 7488729 NR Description: CIC protein, cold-inducible - alfalfa
MASRTFSAACLLALLVANTFLAGDACGSCKHQTPPPASPSPPPPSPSTTPCPPPSSGGGRAGGGAGRAGAGGRAELPGGQDRGRRGGEGGGRPGRRRLRRRRLLEKTKTMGTS

SEQ ID NO: 17309 - protein, 80 aa, Triticum aestivum
  peptide (1)..(80): Ceres Seq. ID no. 12621640
MPAAAASTKPRRRPPRPRPHHRRLRRRAHLLRQAVGAPAGVLGGLALAEGPSYLEDKIEDDVAEKVEDVLAGGGYDDDDY

SEQ ID NO: 17310 - DNA, 1127 bp, Triticum aestivum
  misc_feature (1)..(1127): Ceres Seq. ID no. 15179896
caaaccacacatgacacgccatctcccacatctctctccacaaaagacaggcagcctgcagttgcacagcctttccctccctctctcgcgtatcatctccgtcgacctctctccacaaagctagctagctcttgagtcttgagttcgtgtgaatttgccaagcataaagcacgagctagctctaggctgtcttgctgcctacttggtatacttgatatatacatacatacacaccagagagggagagagagaaaggggtagtcatgtgcgactacttcttgaagagggctgagggccaccagcaggccggagacctcaccgacatcgtccgagccggcggggccatgccggctggctctgcggatcccccgtcgacggccaccgagtggctgcagctgccggctgacccgatcctcttcccgctgccccagacgtcgtcctcggacggtgctgggccgagcagcgcagacgctctcggtgacccgttctccggcctcccggatgccttcagcaccgactacccctcctcctccggcagcgccgccgccgatttcttcgacgccgtccaggacgcgatgggtgtcggcatggccaagcaggtcggcttcgtcgacacgaccggctgcggcggcggtggaacaactgccggtgctggtggcgggttcctggacatgaggaatcaccatatgtttccaggggagatgccgatgcgcgggctgtcgccgtacgcgctgatgggcggtggcgcggcgaagctcggcgtgccgatggccgggcacgggctggcggctggcccgtgcgcgttcgacgccgtcgcagggctgcagatgtcgtcctcaccgcgtggcggggggatcaagcgcaggttcggcaccggccatcgttagctagctgtctgttcagtcagatctacacaagtgcgccttaatttcttcgattcctcccgacaagtgtaattaagcacggagttccttgtcgtcggggcactgttcagggtttcgtaatttagggaaagtttgcagctccatttcctcctaccgtgcttagtttttcctcattctgcaactcccaacaatgtaaggatcgagatgaaagaagaaacttaaatgcatcgccagctttgggac

SEQ ID NO: 17311 - protein, 207 aa, Triticum aestivum
  peptide (1)..(207): Ceres Seq. ID no. 15179897
  misc_feature (7)..(168): NCBI GI NO: 38567968 NR Description: OSJNBa0093F12.9
MCDYFLKRAEGHQQAGDLTDIVRAGGAMPAGSADPPSTATEWLQLPADPILFPLPQTSSSDGAGPSSADALGDPFSGLPDAFSTDYPSSSGSAAADFFDAVQDAMGVGMAKQVGFVDTTGCGGGGTTAGAGGGFLDMRNHHMFPGEMPMRGLSPYALMGGGAAKLGVPMAGHGLAAGPCAFDAVAGLQMSSSPRGGGIKRRFGTGHR

SEQ ID NO: 17312 - protein, 180 aa, Triticum aestivum
  peptide (1)..(180): Ceres Seq. ID no. 15179898
  misc_feature (1)..(141): NCBI GI NO: 38567968 NR Description: OSJNBa0093F12.9
MPAGSADPPSTATEWLQLPADPILFPLPQTSSSDGAGPSSADALGDPFSGLPDAFSTDYPSSSGSAAADFFDAVQDAMGVGMAKQVGFVDTTGCGGGGTTAGAGGGFLDMRNHHMFPGEMPMRGLSPYALMGGGAAKLGVPMAGHGLAAGPCAFDAVAGLQMSSSPRGGGIKRRFGTGHR

SEQ ID NO: 17313 - protein, 103 aa, Triticum aestivum
  peptide (1)..(103): Ceres Seq. ID no. 15179899
  misc_feature (1)..(64): NCBI GI NO: 38567968 NR Description: OSJNBa0093F12.9
MGVGMAKQVGFVDTTGCGGGGTTAGAGGGFLDMRNHHMFPGEMPMRGLSPYALMGGGAAKLGVPMAGHGLAAGPCAFDAVAGLQMSSSPRGGGIKRRFGTGHR

SEQ ID NO: 17314 - DNA, 1489 bp, Triticum aestivum
  misc_feature (1)..(1489): Ceres Seq. ID no. 15170690
cgcagaaaggcagaagctccttcctcccccaaaaaaagcgagacgacgggacgagacagcgagggcgagacagacagacaggaggccgaggccgaggccgaggcgcgacccacccaagcaagccctaggcgacgagacgcgacggcgacgacggcggcggcgaaggcgtatcccgcgtccgcgtgcccggattcggggctcatccggtcggctcggccatgtccaccaagagggttctttgcaagttcttcatgcatggtgcttgcttgaaaggagagtattgtgagttctcccacgactggagtgaccaagcaaataatgtttgcacgttttaccagagaggctcatgctcttatggtaaccgttgcagatatgaccatgtcaaggtttctcgtaacaacccagtgcctccactaccatcatcaagtaccgcaacacgtaattccccacttcgcccgccaccatcatcaagtactgcgacacatgttgcatctacatctccacaacttttaagttctggacgtcctcttcacttgggacaccaaacaaattcaagcaaccaacggcaacagatatctatggataagctggcagtttctgaaagtaagcctgcatggaggaatgaggtccaacttaacagtgtatcagaggatgggattggctggtcatccattcaaactgcgcaaaaccaaacttccatgaaacttgctgatatgccaatttgttcttttgctgctggtggtaactgcccgtatggggaagagtgtcctcacatgcatggggatttgtgtgcgttctgtgggaaaatgtgcttgcatccttatcgtcctgatgagaggcaggagcatatcaagctatgtgaaaagaaccacaagcgtcttgaggctttgaaacgtagccaagaaatagaatgcagtgtctgcttggaccgcgtgctctcaaagtctactgctgcagaaaggaaatttggactattatctgaatgtgatcatcccttctgtatttcatgcataagaaattggcgtggcaactctcctacatctggtatggatgtgaactcagcactgagagcttgcccaatatgccgcaaactttcgtactatgtcattccaagtgttctttggtacttctcgaaagaggaaaagttggagatcactgaaaactacaaagcaaagctcaagtcaatagattgcaagtacttcgatttcggaacgggcacttgccccttcgggacaagctgtttctacaagcatgcttacagagatggccgcttggaagaagtcgtattgcgacatcttgattgtgatgatggaagtacacttattgctaagaacattaggttgtcagacttcctcggccggttgcatctttagggacctgcttcatatatatcgaattattccgaagacatcagtttaaatcgaggcatcttggaaaactgctgctttatctccaatttttttggtggttgctttgtcgccaaacatac

SEQ ID NO: 17315 - protein, 384 aa, Triticum aestivum
  peptide (1)..(384): Ceres Seq. ID no. 15170691
  misc_feature (232)..(289): Pfam Name: RING finger Pfam Description: Zinc finger, C3HC4 type
  misc_feature (165)..(384): NCBI GI NO: 30680549 NR Description: zinc finger domain-containing protein
  misc_feature (5)..(83): NCBI GI NO: 30680549 NR Description: zinc finger domain-containing protein
  misc_feature (1)..(379): NCBI GI NO: 40807149 NR Description: Mkrn2 protein [Danio rerio]
  misc_feature (1)..(379): NCBI GI NO: 23308621 NR Description: makorin, ring finger protein, 2 [Danio rerio]
  misc_feature (1)..(379): NCBI GI NO: 12847323 NR Description: unnamed protein product [Mus musculus]
  misc_feature (1)..(379): NCBI GI NO: 34858337 NR Description: similar to makorin, ring finger protein, 2
  misc_feature (1)..(379): NCBI GI NO: 12963621 NR Description: makorin, ring finger protein, 2
  misc_feature (168)..(354): NCBI GI NO: 22255324 NR Description: gene encoding protein featuring ring-finger
  misc_feature (168)..(354): NCBI GI NO: 37590960 NR Description: Makorin1 [Seriola quinqueradiata]
  misc_feature (3)..(86): NCBI GI NO: 22255324 NR Description: gene encoding protein featuring ring-finger
MSTKRVLCKFFMHGACLKGEYCEFSHDWSDQANNVCTFYQRGSCSYGNRCRYDHVKVSRNNPVPPLPSSSTATRNSPLRPPPSSSTATHVASTSPQLLSSGRPLHLGHQTNSSNQRQQISMDKLAVSESKPAWRNEVQLNSVSEDGIGWSSIQTAQNQTSMKLADMPICSFAAGGNCPYGEECPHMHGDLCAFCGKMCLHPYRPDERQEHIKLCEKNHKRLEALKRSQEIECSVCLDRVLSKSTAAERKFGLLSECDHPFCISCIRNWRGNSPTSGMDVNSALRACPICRKLSYYVIPSVLWYFSKEEKLEITENYKAKLKSIDCKYFDFGTGTCPFGTSCFYKHAYRDGRLEEVVLRHLDCDDGSTLIAKNIRLSDFLGRLHL

SEQ ID NO: 17316 - protein, 373 aa, Triticum aestivum
  peptide (1)..(373): Ceres Seq. ID no. 15170692
  misc_feature (221)..(278): Pfam Name: RING finger Pfam Description: Zinc finger, C3HC4 type
  misc_feature (154)..(373): NCBI GI NO: 30680549 NR Description: zinc finger domain-containing protein
  misc_feature (1)..(72): NCBI GI NO: 30680549 NR Description: zinc finger domain-containing protein
  misc_feature (1)..(368): NCBI GI NO: 40807149 NR Description: Mkrn2 protein [Danio rerio]
  misc_feature (1)..(368): NCBI GI NO: 23308621 NR Description: makorin, ring finger protein, 2 [Danio rerio]
  misc_feature (1)..(368): NCBI GI NO: 12847323 NR Description: unnamed protein product [Mus musculus]
  misc_feature (1)..(368): NCBI GI NO: 34858337 NR Description: similar to makorin, ring finger protein, 2
  misc_feature (1)..(368): NCBI GI NO: 12963621 NR Description: makorin, ring finger protein, 2
  misc_feature (157)..(343): NCBI GI NO: 22255324 NR Description: gene encoding protein featuring ring-finger
  misc_feature (157)..(343): NCBI GI NO: 37590960 NR Description: Makorin1 [Seriola quinqueradiata]
  misc_feature (1)..(75): NCBI GI NO: 22255324 NR Description: gene encoding protein featuring ring-finger
MHGACLKGEYCEFSHDWSDQANNVCTFYQRGSCSYGNRCRYDHVKVSRNNPVPPLPSSSTATRNSPLRPPPSSSTATHVASTSPQLLSSGRPLHLGHQTNSSNQRQQISMDKLAVSESKPAWRNEVQLNSVSEDGIGWSSIQTAQNQTSMKLADMPICSFAAGGNCPYGEECPHMHGDLCAFCGKMCLHPYRPDERQEHIKLCEKNHKRLEALKRSQEIECSVCLDRVLSKSTAAERKFGLLSECDHPFCISCIRNWRGNSPTSGMDVNSALRACPICRKLSYYVIPSVLWYFSKEEKLEITENYKAKLKSIDCKYFDFGTGTCPFGTSCFYKHAYRDGRLEEVVLRHLDCDDGSTLIAKNIRLSDFLGRLHL

SEQ ID NO: 17317 - protein, 264 aa, Triticum aestivum
  peptide (1)..(264): Ceres Seq. ID no. 15170693
  misc_feature (112)..(169): Pfam Name: RING finger Pfam Description: Zinc finger, C3HC4 type
  misc_feature (45)..(264): NCBI GI NO: 30680549 NR Description: zinc finger domain-containing protein
  misc_feature (1)..(259): NCBI GI NO: 40807149 NR Description: Mkrn2 protein [Danio rerio]
  misc_feature (1)..(259): NCBI GI NO: 23308621 NR Description: makorin, ring finger protein, 2 [Danio rerio]
  misc_feature (1)..(259): NCBI GI NO: 12847323 NR Description: unnamed protein product [Mus musculus]
  misc_feature (1)..(259): NCBI GI NO: 34858337 NR Description: similar to makorin, ring finger protein, 2
  misc_feature (1)..(259): NCBI GI NO: 12963621 NR Description: makorin, ring finger protein, 2
  misc_feature (48)..(234): NCBI GI NO: 22255324 NR Description: gene encoding protein featuring ring-finger
  misc_feature (48)..(234): NCBI GI NO: 37590960 NR Description: Makorin1 [Seriola quinqueradiata]
  misc_feature (1)..(259): NCBI GI NO: 8714513 NR Description: HSPC070 [Homo sapiens]
  misc_feature (1)..(259): NCBI GI NO: 32880199 NR Description: makorin, ring finger protein, 2 [Homo sapiens]
MDKLAVSESKPAWRNEVQLNSVSEDGIGWSSIQTAQNQTSMKLADMPICSFAAGGNCPYGEECPHMHGDLCAFCGKMCLHPYRPDERQEHIKLCEKNHKRLEALKRSQEIECSVCLDRVLSKSTAAERKFGLLSECDHPFCISCIRNWRGNSPTSGMDVNSALRACPICRKLSYYVIPSVLWYFSKEEKLEITENYKAKLKSIDCKYFDFGTGTCPFGTSCFYKHAYRDGRLEEVVLRHLDCDDGSTLIAKNIRLSDFLGRLHL

SEQ ID NO: 17318 - DNA, 1495 bp, Triticum aestivum
  misc_feature (1)..(1495): Ceres Seq. ID no. 13659881
ataaatgtaaatatttctattgatggaccatcctgatttattgggctggctacgccactggcaggggggacgacctctcgctcggcttcaatgccggcgccgccgcggccgcggccgcggccgcctccggcgccgcgctgggggccgggctctggggcccggcgtccgcgtcctcctcgtcccccgcctcgcgccaggcggccctgaactacggcatggcggccggcgacgtggggatggtggtggtcgcccctgcggcctcgttccaccacacgcaccaccatcaccaccaccacgacgcggccgccgcggccgctgcctccgacgccatcttcccgctgctctccgcgggctcctgcgtgctcgaccccgaggcggccaaggccgcggccgccagcggcggcatccagttctggcagtccgcgcagcaccatcagcagcagcactcgccgtcrgccgcgggcggcggcggcggcaaccctaaccctagcctcggccccttctacctcaagaagcccttcccgatgctcgacaccggcggcgacgggtcctccggctccggcaccaccacctgccaggactgcggcaaccaggccaagaaggactgcacccacagccgctgccgcacctgctgcaagagccgcggcttcgactgctccacgcacgtcaagagcacctgggtccccgccgcccgccgccgcgagcgccagcacctcggcggctccgcctcgtcccccgccaccgcctccaccgccgcgggatcgaagaagcctcgcctcctctcctcccagcaggccaccacgtcgtacacctccacctccaacgccaccacgccgcgcagctacgacaccacctccagccatcaagacgcatcgttcagggggaacctgccgcggcaggtgcgcgcgccggcggtgttcaggtgcgtgcgcgtgacgtccgtcgacgacggcgaggacgagtacgcgtaccaggccacggtgaccatcaacggccacgtcttcaagggcttcctctacgaccagggcgtggacgacggccgcgccagcaatgacatcgactcgagcaccggcggcgccgtgcccaacatgtccgagctccacctcgggggcggcggcaatgccgcgaggggaggcgggggttcctcctcgatggcgccctccgacatgtacggcggcggtggcgccggaggagcaggcggagggggaggaggccagcacatactcggcggcgggtccagctatggtaacaccatgaactgagccgagctgctagaagagtaaggtcacatagtagatcattactacagtaccattctttcctttcttctcttcattgctagtaagtacaaacctgtcaaccctctcatggccggggtgcaatgcaatgcatggtgttcgccattaatttgttcatgctgtatgacatcaagtgttaatcgttggaacgggaggggrgttaaaaaaaaaaaaaaaaaagcttatcgataccgtcg

SEQ ID NO: 17319 - protein, 348 aa, Triticum aestivum
  peptide (1)..(348): Ceres Seq. ID no. 15220681
  misc_feature (111)..(275): Pfam Name: DUF702 Pfam Description: Domain of unknown function
  misc_feature (5)..(348): NCBI GI NO: 34906658 NR Description: putative LRP(lateral root primordia) 1
  misc_feature (4)..(330): NCBI GI NO: 18416839 NR Description: lateral root primordia (LRP1)
  misc_feature (4)..(330): NCBI GI NO: 882341 NR Description: LRP1
  misc_feature (112)..(322): NCBI GI NO: 15234365 NR Description: expressed protein [Arabidopsis thaliana]
  misc_feature (67)..(271): NCBI GI NO: 15239350 NR Description: zinc finger protein SHI-related
  misc_feature (107)..(285): NCBI GI NO: 15223669 NR Description: hypothetical protein [Arabidopsis thaliana]
  misc_feature (65)..(271): NCBI GI NO: 15222285 NR Description: hypothetical protein [Arabidopsis thaliana]
  misc_feature (112)..(222): NCBI GI NO: 15224110 NR Description: expressed protein [Arabidopsis thaliana]
  misc_feature (226)..(274): NCBI GI NO: 15224110 NR Description: expressed protein [Arabidopsis thaliana]
  misc_feature (104)..(238): NCBI GI NO: 15230389 NR Description: expressed protein [Arabidopsis thaliana]
  misc_feature (80)..(80): Xaa is any aa, unknown or other
MAAGDVGMVVVAPAASFHHTHHHHHHHDAAAAAAASDAIFPLLSAGSCVLDPEAAKAAAASGGIQFWQSAQHHQQQHSPXAAGGGGGNPNPSLGPFYLKKPFPMLDTGGDGSSGSGTTTCQDCGNQAKKDCTHSRCRTCCKSRGFDCSTHVKSTWVPAARRRERQHLGGSASSPATASTAAGSKKPRLLSSQQATTSYTSTSNATTPRSYDTTSSHQDASFRGNLPRQVRAPAVFRCVRVTSVDDGEDEYAYQATVTINGHVFKGFLYDQGVDDGRASNDIDSSTGGAVPNMSELHLGGGGNAARGGGGSSSMAPSDMYGGGGAGGAGGGGGGQHILGGGSSYGNTMN

SEQ ID NO: 17320 - protein, 341 aa, Triticum aestivum
  peptide (1)..(341): Ceres Seq. ID no. 15220682
  misc_feature (104)..(268): Pfam Name: DUF702 Pfam Description: Domain of unknown function
  misc_feature (1)..(341): NCBI GI NO: 34906658 NR Description: putative LRP(lateral root primordia) 1
  misc_feature (1)..(323): NCBI GI NO: 18416839 NR Description: lateral root primordia (LRP1)
  misc_feature (1)..(323): NCBI GI NO: 882341 NR Description: LRP1
  misc_feature (105)..(315): NCBI GI NO: 15234365 NR Description: expressed protein [Arabidopsis thaliana]
  misc_feature (60)..(264): NCBI GI NO: 15239350 NR Description: zinc finger protein SHI-related
  misc_feature (100)..(278): NCBI GI NO: 15223669 NR Description: hypothetical protein [Arabidopsis thaliana]
  misc_feature (58)..(264): NCBI GI NO: 15222285 NR Description: hypothetical protein [Arabidopsis thaliana]
  misc_feature (105)..(215): NCBI GI NO: 15224110 NR Description: expressed protein [Arabidopsis thaliana]
  misc_feature (219)..(267): NCBI GI NO: 15224110 NR Description: expressed protein [Arabidopsis thaliana]
  misc_feature (97)..(231): NCBI GI NO: 15230389 NR Description: expressed protein [Arabidopsis thaliana]
  misc_feature (73)..(73): Xaa is any aa, unknown or other
MVVVAPAASFHHTHHHHHHHDAAAAAAASDAIFPLLSAGSCVLDPEAAKAAAASGGIQFWQSAQHHQQQHSPXAAGGGGGNPNPSLGPFYLKKPFPMLDTGGDGSSGSGTTTCQDCGNQAKKDCTHSRCRTCCKSRGFDCSTHVKSTWVPAARRRERQHLGGSASSPATASTAAGSKKPRLLSSQQATTSYTSTSNATTPRSYDTTSSHQDASFRGNLPRQVRAPAVFRCVRVTSVDDGEDEYAYQATVTINGHVFKGFLYDQGVDDGRASNDIDSSTGGAVPNMSELHLGGGGNAARGGGGSSSMAPSDMYGGGGAGGAGGGGGGQHILGGGSSYGNTMN

SEQ ID NO: 17321 - protein, 245 aa, Triticum aestivum
  peptide (1)..(245): Ceres Seq. ID no. 15220683
  misc_feature (8)..(172): Pfam Name: DUF702 Pfam Description: Domain of unknown function
  misc_feature (1)..(245): NCBI GI NO: 34906658 NR Description: putative LRP(lateral root primordia) 1
  misc_feature (1)..(227): NCBI GI NO: 18416839 NR Description: lateral root primordia (LRP1)
  misc_feature (1)..(227): NCBI GI NO: 882341 NR Description: LRP1
  misc_feature (9)..(219): NCBI GI NO: 15234365 NR Description: expressed protein [Arabidopsis thaliana]
  misc_feature (1)..(168): NCBI GI NO: 15239350 NR Description: zinc finger protein SHI-related
  misc_feature (4)..(182): NCBI GI NO: 15223669 NR Description: hypothetical protein [Arabidopsis thaliana]
  misc_feature (1)..(168): NCBI GI NO: 15222285 NR Description: hypothetical protein [Arabidopsis thaliana]
  misc_feature (9)..(119): NCBI GI NO: 15224110 NR Description: expressed protein [Arabidopsis thaliana]
  misc_feature (123)..(171): NCBI GI NO: 15224110 NR Description: expressed protein [Arabidopsis thaliana]
  misc_feature (1)..(135): NCBI GI NO: 15230389 NR Description: expressed protein [Arabidopsis thaliana]
MLDTGGDGSSGSGTTTCQDCGNQAKKDCTHSRCRTCCKSRGFDCSTHVKSTWVPAARRRERQHLGGSASSPATASTAAGSKKPRLLSSQQATTSYTSTSNATTPRSYDTTSSHQDASFRGNLPRQVRAPAVFRCVRVTSVDDGEDEYAYQATVTINGHVFKGFLYDQGVDDGRASNDIDSSTGGAVPNMSELHLGGGGNAARGGGGSSSMAPSDMYGGGGAGGAGGGGGGQHILGGGSSYGNTMN

SEQ ID NO: 17322 - DNA, 1117 bp, Triticum aestivum
  misc_feature (1)..(1117): Ceres Seq. ID no. 15179900
acactggtctctcacgcacgcacgcagctgccaacaccagccatcgtcaaagcgctagctccaccggaagccatggcgcgcgccttcgtgcgctccatctccttccctctcagcccctcgaggtctcccaaggcgcgcgctccctccttgtcgtaccacgggcggtccgtgagcctgccatgccgctcgcacccgatcttggcgcacctccacacccacatccgcgccgtgcgcgcctgggcgcagcagggcccagcggcgttgttctcctccgtcgcagcggggctcgcgcacgttgatgcgctccacaccgccgtcggcgacctgctcgacctgcccgaggcccaggacgcgctctccggcgccggcggcagcgtggaccgcctcctcgactccttcctccgcctcgccgacgcgcacggctgtttccaggaggccgtggttgcgctcaagcatgacgtggccgaggcgctggccgccgtgcgccgtcgcgacggtgcacgcctggcatcggccgtgcgggcgcagcgcagggccggcaaggagctcgcccgcctcgccgccgcggccaaagagtgtgccagccgtccctcgcgcctgagcatcctcggaggtggccaaggcagcgcggcggaggtggaggtgacggggctgctgatggagtcggccgcggcgacggcgtcggcgtctgccgcgctgttcggggccgtggcggccatgtccgggtccgtggaggcggagtcgtgctcgtgcaagggcacggcggcgctggtgtgcctcgtgaagaagagcaagaagaagtcgtcggcgccggccgggtgtggggaggaggggatggcggtggcggccgtggcggagaggctggaggagctggaggagtgcatcgaggagctggaggccgggagcgagaaggtgttccggagcctggtgcagaccagggtcgcgctcctcaacatccacacgctccacatcttctagctttactactatcactatcatcgatgatccatccatcttaattctagtacaaatgaaattagtgctagcaatcctgtgtaactgtaaaaaaaagttaagtagatgatgaatagaagaaggaatttgtgcaactcctgcg

SEQ ID NO: 17323 - protein, 325 aa, Triticum aestivum
  peptide (1)..(325): Ceres Seq. ID no. 15179901
  misc_feature (95)..(319): Pfam Name: Pfam Description:  Arabidopsis protein of unknown function
  misc_feature (31)..(272): NCBI GI NO: 38345858 NR Description: OSJNBa0084K11.22
  misc_feature (277)..(319): NCBI GI NO: 38345858 NR Description: OSJNBa0084K11.22
  misc_feature (55)..(320): NCBI GI NO: 37535958 NR Description: hypothetical protein
  misc_feature (53)..(320): NCBI GI NO: 37535956 NR Description: hypothetical protein
  misc_feature (45)..(321): NCBI GI NO: 37536548 NR Description: hypothetical protein
  misc_feature (18)..(321): NCBI GI NO: 6573720 NR Description: T23E18.17 [Arabidopsis thaliana]
  misc_feature (25)..(321): NCBI GI NO: 15222989 NR Description: expressed protein [Arabidopsis thaliana]
TLVSHARTQLPTPAIVKALAPPEAMARAFVRSISFPLSPSRSPKARAPSLSYHGRSVSLPCRSHPILAHLHTHIRAVRAWAQQGPAALFSSVAAGLAHVDALHTAVGDLLDLPEAQDALSGAGGSVDRLLDSFLRLADAHGCFQEAVVALKHDVAEALAAVRRRDGARLASAVRAQRRAGKELARLAAAAKECASRPSRLSILGGGQGSAAEVEVTGLLMESAAATASASAALFGAVAAMSGSVEAESCSCKGTAALVCLVKKSKKKSSAPAGCGEEGMAVAAVAERLEELEECIEELEAGSEKVFRSLVQTRVALLNIHTLHIF

SEQ ID NO: 17324 - protein, 301 aa, Triticum aestivum
  peptide (1)..(301): Ceres Seq. ID no. 15179902
  misc_feature (71)..(295): Pfam Name: Pfam Description:  Arabidopsis protein of unknown function
  misc_feature (7)..(248): NCBI GI NO: 38345858 NR Description: OSJNBa0084K11.22
  misc_feature (253)..(295): NCBI GI NO: 38345858 NR Description: OSJNBa0084K11.22
  misc_feature (31)..(296): NCBI GI NO: 37535958 NR Description: hypothetical protein
  misc_feature (29)..(296): NCBI GI NO: 37535956 NR Description: hypothetical protein
  misc_feature (21)..(297): NCBI GI NO: 37536548 NR Description: hypothetical protein
  misc_feature (1)..(297): NCBI GI NO: 6573720 NR Description: T23E18.17 [Arabidopsis thaliana]
  misc_feature (1)..(297): NCBI GI NO: 15222989 NR Description: expressed protein [Arabidopsis thaliana]
MARAFVRSISFPLSPSRSPKARAPSLSYHGRSVSLPCRSHPILAHLHTHIRAVRAWAQQGPAALFSSVAAGLAHVDALHTAVGDLLDLPEAQDALSGAGGSVDRLLDSFLRLADAHGCFQEAVVALKHDVAEALAAVRRRDGARLASAVRAQRRAGKELARLAAAAKECASRPSRLSILGGGQGSAAEVEVTGLLMESAAATASASAALFGAVAAMSGSVEAESCSCKGTAALVCLVKKSKKKSSAPAGCGEEGMAVAAVAERLEELEECIEELEAGSEKVFRSLVQTRVALLNIHTLHIF

SEQ ID NO: 17325 - DNA, 913 bp, Triticum aestivum
  misc_feature (1)..(913): Ceres Seq. ID no. 15179903
aagctagctagcgaaagcagcagccttccgctgattgccagagatcgagcgagcgaggctgacgccggccatgagcgaccagccccagcccgtccgcaccggggacgtctacccgccctcggccgccgctcacgacgcgcgccgccagcgcgacgaagtcctcacccatgatgatcagcagcagaaacaagatgatcgccgcggccagctccgggtcaccgagaccgacgagccacacgctgggagacgcgtcgtcaccgccaccgccggcggccaggtgatggcgcagttcacggtgccggtgccggacrccggtgtggaggaggcgacagacgcggtgaccatcggcgaagctctacaggccgcggcgcagacgtccgcgggtgagaggccggtcgacctcgcggacgcggctgcggtgcaggccgccgagacgcgcgcgacggggctgggccgcgtcatccccggtggcgtggcggctgccgcgcagcaggccgcggagaccaacatgaggccccgggtcagtgacggtgagaagttgcggctgagggacgtgctggacagcgccgcggcggtgctgccggccaacaaggtggccacgagggaggacgccgttgcggtggccacagcagcggagcgctacgccgctgcgggagcaggtggaggaggcaagggtgtggccgacgcggtggccgtggccgccgagatgaacgacaagaggatgacgcgcacgcggcaggcttaggctaggtagcaggctagcagcctagcagaagaacgtgcgtggccactgtgatacgttgtactgcgtatgcaccacgcatatcactactacgtacgtaacgtacttctctatccgtgttgtaatctacatcatattgtacgctttttcagtagtataaaacgttcttac

SEQ ID NO: 17326 - protein, 224 aa, Triticum aestivum
  peptide (1)..(224): Ceres Seq. ID no. 15179904
  misc_feature (88)..(146): Pfam Name: Pfam Description:  Seed maturation protein
  misc_feature (17)..(215): NCBI GI NO: 126078 NR Description: LATE EMBRYOGENESIS ABUNDANT PROTEIN D-34
  misc_feature (4)..(215): NCBI GI NO: 6648966 NR Description: seed maturation protein PM25 [Glycine max]
  misc_feature (4)..(215): NCBI GI NO: 6648968 NR Description: seed maturation protein PM26 [Glycine max]
  misc_feature (38)..(215): NCBI GI NO: 6648964 NR Description: seed maturation protein PM24 [Glycine max]
  misc_feature (48)..(216): NCBI GI NO: 15218707 NR Description: hypothetical protein [Arabidopsis thaliana]
  misc_feature (44)..(216): NCBI GI NO: 15228768 NR Description: LEA protein -related [Arabidopsis thaliana]
  misc_feature (17)..(214): NCBI GI NO: 82045 NR Description: embryonic protein ecp31 - carrot
  misc_feature (33)..(216): NCBI GI NO: 15228770 NR Description: LEA protein -related [Arabidopsis thaliana]
  misc_feature (36)..(217): NCBI GI NO: 15241107 NR Description: embryonic abundant protein - like
  misc_feature (33)..(216): NCBI GI NO: 1526422 NR Description: LEA protein in group 5 [Arabidopsis thaliana]
  misc_feature (81)..(81): Xaa is any aa, unknown or other
MSDQPQPVRTGDVYPPSAAAHDARRQRDEVLTHDDQQQKQDDRRGQLRVTETDEPHAGRRVVTATAGGQVMAQFTVPVPDXGVEEATDAVTIGEALQAAAQTSAGERPVDLADAAAVQAAETRATGLGRVIPGGVAAAAQQAAETNMRPRVSDGEKLRLRDVLDSAAAVLPANKVATREDAVAVATAAERYAAAGAGGGGKGVADAVAVAAEMNDKRMTRTRQA

SEQ ID NO: 17327 - protein, 154 aa, Triticum aestivum
  peptide (1)..(154): Ceres Seq. ID no. 15179905
  misc_feature (18)..(76): Pfam Name: Pfam Description:  Seed maturation protein
  misc_feature (1)..(145): NCBI GI NO: 126078 NR Description: LATE EMBRYOGENESIS ABUNDANT PROTEIN D-34
  misc_feature (1)..(145): NCBI GI NO: 6648966 NR Description: seed maturation protein PM25 [Glycine max]
  misc_feature (1)..(145): NCBI GI NO: 6648968 NR Description: seed maturation protein PM26 [Glycine max]
  misc_feature (1)..(145): NCBI GI NO: 6648964 NR Description: seed maturation protein PM24 [Glycine max]
  misc_feature (1)..(146): NCBI GI NO: 15218707 NR Description: hypothetical protein [Arabidopsis thaliana]
  misc_feature (1)..(146): NCBI GI NO: 15228768 NR Description: LEA protein -related [Arabidopsis thaliana]
  misc_feature (1)..(144): NCBI GI NO: 82045 NR Description: embryonic protein ecp31 - carrot
  misc_feature (1)..(146): NCBI GI NO: 15228770 NR Description: LEA protein -related [Arabidopsis thaliana]
  misc_feature (1)..(147): NCBI GI NO: 15241107 NR Description: embryonic abundant protein - like
  misc_feature (1)..(146): NCBI GI NO: 1526422 NR Description: LEA protein in group 5 [Arabidopsis thaliana]
  misc_feature (11)..(11): Xaa is any aa, unknown or other
MAQFTVPVPDXGVEEATDAVTIGEALQAAAQTSAGERPVDLADAAAVQAAETRATGLGRVIPGGVAAAAQQAAETNMRPRVSDGEKLRLRDVLDSAAAVLPANKVATREDAVAVATAAERYAAAGAGGGGKGVADAVAVAAEMNDKRMTRTRQA

SEQ ID NO: 17328 - DNA, 1673 bp, Triticum aestivum
  misc_feature (1)..(1673): Ceres Seq. ID no. 14303209
aaaaaacaaaccgagtctgcagttgcaattcctatacgacctcgatccccctcctcccccaacaagtcgaatccgcccgcgttgaggaaggatgtgctcccaagcccccaaatccctagacctagacctcgacctcgacccctccccagtccccagatccctagacctcgaccccgaatcccaaccctgccccggcgtgacgacgacggccgagctccccgacgaagcggagaacccctgcttgtcgcggtttcgccaccggcgactcctcgccttcctctcgcgccagcgctacgatgtcgccttcaacgggctgatgctacaggcgagtgagcccttctgcttggagcgtctgcaggggctcgtgaggaagggcctgtgggaggatgccatcgactaccttgatggcttcctgcctgccggccccaggagcctccacgcccacgccttccgcaacttcctcttgatgcaccactacttggccagcatcgccgccggggatgagtccgccatggacaagctccgggcccaccattggatgcaacacgtcgttgatgcctggaaaacgaaagcgaaccacacatttcctcgtgtcatggcccaagccctgctctcgtcggagcagctccgggcgtccatggactgggatggagtgaggagggaggctgcgtacatcctctccaggttagcttcgaggaccccagagctcaacaggccgctcacattgccgacttgctacaccaagccgcaccaagtgcttcccattgacgttgcctctggattgtgcaggcggcggcgcgtgaaggaacagcgtccccatctacaaccagctgctgttgccagggccatccttttcagggggagtcagcgttacacaagatctctagccaactcaagtttcgaattcattgagaatgcaaaggaatggtttgcgactatcatggatgaaagcttacgagctggttcaggtaaagcgacttccctgctccaacaaattatgaaggaaggtgctcctgttgctccagtttcactgataagtcctgctaaaagttctggtacctcgtcattgacaaatgcaggtgctcctgtttcttcagtgtgccagactctgaacatgacaagagacgctgaaaactatggtatctcatcagtgacaagtccaggcccagaaaagagtcaagaaggtgcctgcggtggtttcaatcccagaaagaatccacgggcagaattggcaactattgatgaatatttggattcaaaaaggcaacgtactactgggacttttggggaagcaagtatggtgccggtgaatgaagtttgggctgaagctcactagctggctggtgaagtcaaccacctagattcataaccgagatatggtgacaatggtggtggtggtggtgtacctgctaactcgcacttcatttatgctttgaacttggatgttaattatacaactttgtttccaagtgcctactatgagctagtacttcataagtaattctgctagtgttggttaatcaggctgcttactgccagcattttctatcactgaaatgaaaattaatcagattattggatcatatcattcagtaacagtattgccaaaagatacacgtaagtgtgacctcaagcattgctttatgaagttgctcagaaaaaaaaaaaaaaac

SEQ ID NO: 17329 - protein, 414 aa, Triticum aestivum
  peptide (1)..(414): Ceres Seq. ID no. 14303210
  misc_feature (47)..(329): NCBI GI NO: 38345605 NR Description: OSJNBa0093O08.7
  misc_feature (85)..(403): NCBI GI NO: 38344249 NR Description: OSJNBa0008M17.1
  misc_feature (26)..(286): NCBI GI NO: 34394789 NR Description: hypothetical protein
  misc_feature (26)..(358): NCBI GI NO: 34394797 NR Description: unknown protein
MCSQAPKSLDLDLDLDPSPVPRSLDLDPESQPCPGVTTTAELPDEAENPCLSRFRHRRLLAFLSRQRYDVAFNGLMLQASEPFCLERLQGLVRKGLWEDAIDYLDGFLPAGPRSLHAHAFRNFLLMHHYLASIAAGDESAMDKLRAHHWMQHVVDAWKTKANHTFPRVMAQALLSSEQLRASMDWDGVRREAAYILSRLASRTPELNRPLTLPTCYTKPHQVLPIDVASGLCRRRRVKEQRPHLQPAAVARAILFRGSQRYTRSLANSSFEFIENAKEWFATIMDESLRAGSGKATSLLQQIMKEGAPVAPVSLISPAKSSGTSSLTNAGAPVSSVCQTLNMTRDAENYGISSVTSPGPEKSQEGACGGFNPRKNPRAELATIDEYLDSKRQRTTGTFGEASMVPVNEVWAEAH

SEQ ID NO: 17330 - protein, 339 aa, Triticum aestivum
  peptide (1)..(339): Ceres Seq. ID no. 14303211
  misc_feature (1)..(254): NCBI GI NO: 38345605 NR Description: OSJNBa0093O08.7
  misc_feature (10)..(328): NCBI GI NO: 38344249 NR Description: OSJNBa0008M17.1
  misc_feature (1)..(211): NCBI GI NO: 34394789 NR Description: hypothetical protein
  misc_feature (1)..(283): NCBI GI NO: 34394797 NR Description: unknown protein
MLQASEPFCLERLQGLVRKGLWEDAIDYLDGFLPAGPRSLHAHAFRNFLLMHHYLASIAAGDESAMDKLRAHHWMQHVVDAWKTKANHTFPRVMAQALLSSEQLRASMDWDGVRREAAYILSRLASRTPELNRPLTLPTCYTKPHQVLPIDVASGLCRRRRVKEQRPHLQPAAVARAILFRGSQRYTRSLANSSFEFIENAKEWFATIMDESLRAGSGKATSLLQQIMKEGAPVAPVSLISPAKSSGTSSLTNAGAPVSSVCQTLNMTRDAENYGISSVTSPGPEKSQEGACGGFNPRKNPRAELATIDEYLDSKRQRTTGTFGEASMVPVNEVWAEAH

SEQ ID NO: 17331 - protein, 289 aa, Triticum aestivum
  peptide (1)..(289): Ceres Seq. ID no. 14303212
  misc_feature (1)..(204): NCBI GI NO: 38345605 NR Description: OSJNBa0093O08.7
  misc_feature (1)..(278): NCBI GI NO: 38344249 NR Description: OSJNBa0008M17.1
  misc_feature (1)..(161): NCBI GI NO: 34394789 NR Description: hypothetical protein
  misc_feature (1)..(233): NCBI GI NO: 34394797 NR Description: unknown protein
MHHYLASIAAGDESAMDKLRAHHWMQHVVDAWKTKANHTFPRVMAQALLSSEQLRASMDWDGVRREAAYILSRLASRTPELNRPLTLPTCYTKPHQVLPIDVASGLCRRRRVKEQRPHLQPAAVARAILFRGSQRYTRSLANSSFEFIENAKEWFATIMDESLRAGSGKATSLLQQIMKEGAPVAPVSLISPAKSSGTSSLTNAGAPVSSVCQTLNMTRDAENYGISSVTSPGPEKSQEGACGGFNPRKNPRAELATIDEYLDSKRQRTTGTFGEASMVPVNEVWAEAH

SEQ ID NO: 17332 - DNA, 936 bp, Triticum aestivum
  misc_feature (1)..(936): Ceres Seq. ID no. 13597953
attcattcattctctcacagccatcgatccatctaaactaggtggagcagtacatacacagcaaagcaaggcataatggcctcgggagtgttcggtacccccatttcagagaagacggtgctggccactggagagtataaggaacccatcactcaaaaggatgttgcggactataccatgaagatgatcaacgccggtggtaaggatattaacgcacaaaccttcgtcgacaacctcaaggagaggtacggtaacggaatatctgtaaaatgcctcatctacaatgccaccggtgccactttgaacttggctaactacaaagactggcacggccatatctacgatacaccctacccatcagatattcagaatgggcaatggggggcatttctccacgtccacccaagtggcgctgcggttggttcagctggtgccgttgtgtatcgtaccaaggtcccatccagcagcagctcctgcgattggttgttctcctggaccgtcccctacattggtgccaatgggatctacaccgaaatccgtgaggaagggcactacccaagtgtgggaagctgggattatatctatgacgtgaagctggaaaatgcaaatctcaactctactgataaaaactatggatatgtttccgagactaacatcggtgaaggctctaccatgaacgctcgtggagttttccagtttccctactagatctctttgccagcatcgaggggttattgtggtcttcaaagtcttttgtggcgaggacgtttggggctgttatcttcctttactatatttgtggtgcactccactagtagaaaaagggcctaatgtgaagctcattagtcccggtttgtaattgaaccggcactaatgtgaccattagtgctgcttccaacggctaggcgggcggagctcaaaataatgaagctttgt

SEQ ID NO: 17333 - protein, 210 aa, Triticum aestivum
  peptide (1)..(210): Ceres Seq. ID no. 13597954
  misc_feature (1)..(210): NCBI GI NO: 400094 NR Description: 23 KD JASMONATE-INDUCED PROTEIN
  misc_feature (1)..(149): NCBI GI NO: 7489427 NR Description: probable jasmonate-induced protein 1 - barley
  misc_feature (6)..(199): NCBI GI NO: 38347186 NR Description: OSJNBa0024J22.14
  misc_feature (25)..(199): NCBI GI NO: 38567934 NR Description: OSJNBa0033H08.11
  misc_feature (27)..(199): NCBI GI NO: 38347187 NR Description: OSJNBa0024J22.15
MASGVFGTPISEKTVLATGEYKEPITQKDVADYTMKMINAGGKDINAQTFVDNLKERYGNGISVKCLIYNATGATLNLANYKDWHGHIYDTPYPSDIQNGQWGAFLHVHPSGAAVGSAGAVVYRTKVPSSSSSCDWLFSWTVPYIGANGIYTEIREEGHYPSVGSWDYIYDVKLENANLNSTDKNYGYVSETNIGEGSTMNARGVFQFPY

SEQ ID NO: 17334 - protein, 176 aa, Triticum aestivum
  peptide (1)..(176): Ceres Seq. ID no. 13597955
  misc_feature (1)..(176): NCBI GI NO: 400094 NR Description: 23 KD JASMONATE-INDUCED PROTEIN
  misc_feature (1)..(115): NCBI GI NO: 7489427 NR Description: probable jasmonate-induced protein 1 - barley
  misc_feature (1)..(165): NCBI GI NO: 38347186 NR Description: OSJNBa0024J22.14
  misc_feature (1)..(165): NCBI GI NO: 38567934 NR Description: OSJNBa0033H08.11
  misc_feature (1)..(165): NCBI GI NO: 38347187 NR Description: OSJNBa0024J22.15
MKMINAGGKDINAQTFVDNLKERYGNGISVKCLIYNATGATLNLANYKDWHGHIYDTPYPSDIQNGQWGAFLHVHPSGAAVGSAGAVVYRTKVPSSSSSCDWLFSWTVPYIGANGIYTEIREEGHYPSVGSWDYIYDVKLENANLNSTDKNYGYVSETNIGEGSTMNARGVFQFPY

SEQ ID NO: 17335 - protein, 174 aa, Triticum aestivum
  peptide (1)..(174): Ceres Seq. ID no. 13597956
  misc_feature (1)..(174): NCBI GI NO: 400094 NR Description: 23 KD JASMONATE-INDUCED PROTEIN
  misc_feature (1)..(113): NCBI GI NO: 7489427 NR Description: probable jasmonate-induced protein 1 - barley
  misc_feature (1)..(163): NCBI GI NO: 38347186 NR Description: OSJNBa0024J22.14
  misc_feature (1)..(163): NCBI GI NO: 38567934 NR Description: OSJNBa0033H08.11
  misc_feature (1)..(163): NCBI GI NO: 38347187 NR Description: OSJNBa0024J22.15
MINAGGKDINAQTFVDNLKERYGNGISVKCLIYNATGATLNLANYKDWHGHIYDTPYPSDIQNGQWGAFLHVHPSGAAVGSAGAVVYRTKVPSSSSSCDWLFSWTVPYIGANGIYTEIREEGHYPSVGSWDYIYDVKLENANLNSTDKNYGYVSETNIGEGSTMNARGVFQFPY

SEQ ID NO: 17336 - DNA, 1715 bp, Triticum aestivum
  misc_feature (1)..(1715): Ceres Seq. ID no. 14303301
agacgcttttaaattcgagattttattgtccgccttccccgacgcgcagctgcctcgctgccccggtgctgctgctcccctcccacccgccgcgccccgccgacgcctccgccgatggaccgggaagaaggtaaggcagcggcgagcctgccggatttgggagcgactgtggctaattttggggacgattcccgttggtgtgcagtgacggagttcctgggccaggtgcccctcctgcagtgcctccccggctcctccatccgcaggatcgccgaggccgtccaggtcaagcactacgaacctggtgattatgttgcccgtgaaggtgaacccgtagatggcctttgcatcatattggatgggcaggctgaagtttctgctcctgcaaacacagaagaagcaaaccgtccagactatgtgttaaataagtatgactactttggttacgggaccaatagttctgtacatcaagtaaatgttattgccgtgacaaagctgtcctgctttgtattgccgagtcaatatggacatctgctgcaaaccaagacaatttggaatgcagaagaaacacctgaaagccattcattgatggaacaaattttacatttagagaaattagaggttgatatatttcgtggatttactttgccagaagctccaacttttaatcaagtttttggaggacaattgattgggcaggcactagcagcagcatccaagactgtcgattgcctgaaacttgtgcatagtctgcatgcaatttttctaatagcaggagacaataatatgccaataatatatcaagtgcatcgggagcgtgatggaaccagctttgccaccagaaaagtggaggcaaagcagaaaggccttgttatgttcactttaattgtttctttccagaaggaagaattagggtttgagcatcaggctgcaatcatgcctgtcgttcctcctccagaacagctcctgaatatggaggagatacgggaaagaagactcactgatccacggtttccgatgcaatataggaactcagctgccaagaaaaagtttgtaccttggcccattgaaatgaggttctgccaagattctaaatctcagcatgaaccaagcctgcattattggtttagagctagaggaaaactttcggatgatccagctctgcatagatgcgttgtagcatatgcttcggatctactatattcaggcgtcagcctaaatccgcaccgtaagaggggtttgaagacatactctctcagtcttgatcactcgatgtggttccacaagcctgtgaaagctgatgactggttgttatatgtgatcgacagcccatccgcacatggtggcaggggattcgtcaccggacgtatgttcaaccggcaaggagagcttattgtgtcgctgacccaagaggcgttgattaggagggccaagacacccgggcaaaccccaaggccgaagctttgagatgtgcagaagagccatggctgtactttaatattttctttccccttgctgttccgtatttttatcttatatagtacacggagacaatggtgagatttatgtataggagtacagcttacagcttgaatttggcacacatgtgaacgattgtatcctcgcatgctgattcacattcaggttttcctttgcatatgtggatggcaattgccatccaacacgcggcacatgaatgtagacagatgtacctc

SEQ ID NO: 17337 - protein, 450 aa, Triticum aestivum
  peptide (1)..(450): Ceres Seq. ID no. 14303302
  misc_feature (309)..(435): Pfam Name: Pfam Description:  Acyl-CoA thioesterase
  misc_feature (1)..(450): NCBI GI NO: 38345758 NR Description: OSJNBa0065O17.11
  misc_feature (30)..(450): NCBI GI NO: 30678177 NR Description: acyl CoA thioesterase -related
  misc_feature (30)..(450): NCBI GI NO: 26449786 NR Description: putative acyl CoA thioesterase
  misc_feature (174)..(411): NCBI GI NO: 25304479 NR Description: hypothetical protein T1N6
  misc_feature (150)..(437): NCBI GI NO: 17986450 NR Description: ACYL-COA THIOESTERASE II [Brucella melitensis]
  misc_feature (150)..(437): NCBI GI NO: 23502749 NR Description: acyl-CoA thioesterase II [Brucella suis 1330]
  misc_feature (162)..(438): NCBI GI NO: 15599137 NR Description: acyl-CoA thioesterase II
  misc_feature (153)..(442): NCBI GI NO: 22962266 NR Description: hypothetical protein [Rhodopseudomonas palustris]
  misc_feature (151)..(438): NCBI GI NO: 15966941 NR Description: PROBABLE ACYL-COA THIOESTERASE II PROTEIN
  misc_feature (155)..(442): NCBI GI NO: 39933348 NR Description: acyl-CoA thioesterase II
MDREEGKAAASLPDLGATVANFGDDSRWCAVTEFLGQVPLLQCLPGSSIRRIAEAVQVKHYEPGDYVAREGEPVDGLCIILDGQAEVSAPANTEEANRPDYVLNKYDYFGYGTNSSVHQVNVIAVTKLSCFVLPSQYGHLLQTKTIWNAEETPESHSLMEQILHLEKLEVDIFRGFTLPEAPTFNQVFGGQLIGQALAAASKTVDCLKLVHSLHAIFLIAGDNNMPIIYQVHRERDGTSFATRKVEAKQKGLVMFTLIVSFQKEELGFEHQAAIMPVVPPPEQLLNMEEIRERRLTDPRFPMQYRNSAAKKKFVPWPIEMRFCQDSKSQHEPSLHYWFRARGKLSDDPALHRCVVAYASDLLYSGVSLNPHRKRGLKTYSLSLDHSMWFHKPVKADDWLLYVIDSPSAHGGRGFVTGRMFNRQGELIVSLTQEALIRRAKTPGQTPRPKL

SEQ ID NO: 17338 - protein, 292 aa, Triticum aestivum
  peptide (1)..(292): Ceres Seq. ID no. 14303303
  misc_feature (151)..(277): Pfam Name: Pfam Description:  Acyl-CoA thioesterase
  misc_feature (1)..(292): NCBI GI NO: 38345758 NR Description: OSJNBa0065O17.11
  misc_feature (1)..(292): NCBI GI NO: 30678177 NR Description: acyl CoA thioesterase -related
  misc_feature (1)..(292): NCBI GI NO: 26449786 NR Description: putative acyl CoA thioesterase
  misc_feature (16)..(253): NCBI GI NO: 25304479 NR Description: hypothetical protein T1N6
  misc_feature (1)..(279): NCBI GI NO: 17986450 NR Description: ACYL-COA THIOESTERASE II [Brucella melitensis]
  misc_feature (1)..(279): NCBI GI NO: 23502749 NR Description: acyl-CoA thioesterase II [Brucella suis 1330]
  misc_feature (4)..(280): NCBI GI NO: 15599137 NR Description: acyl-CoA thioesterase II
  misc_feature (1)..(284): NCBI GI NO: 22962266 NR Description: hypothetical protein [Rhodopseudomonas palustris]
  misc_feature (1)..(280): NCBI GI NO: 15966941 NR Description: PROBABLE ACYL-COA THIOESTERASE II PROTEIN
  misc_feature (1)..(284): NCBI GI NO: 39933348 NR Description: acyl-CoA thioesterase II
MEQILHLEKLEVDIFRGFTLPEAPTFNQVFGGQLIGQALAAASKTVDCLKLVHSLHAIFLIAGDNNMPIIYQVHRERDGTSFATRKVEAKQKGLVMFTLIVSFQKEELGFEHQAAIMPVVPPPEQLLNMEEIRERRLTDPRFPMQYRNSAAKKKFVPWPIEMRFCQDSKSQHEPSLHYWFRARGKLSDDPALHRCVVAYASDLLYSGVSLNPHRKRGLKTYSLSLDHSMWFHKPVKADDWLLYVIDSPSAHGGRGFVTGRMFNRQGELIVSLTQEALIRRAKTPGQTPRPKL

SEQ ID NO: 17339 - protein, 226 aa, Triticum aestivum
  peptide (1)..(226): Ceres Seq. ID no. 14303304
  misc_feature (85)..(211): Pfam Name: Pfam Description:  Acyl-CoA thioesterase
  misc_feature (1)..(226): NCBI GI NO: 38345758 NR Description: OSJNBa0065O17.11
  misc_feature (1)..(226): NCBI GI NO: 30678177 NR Description: acyl CoA thioesterase -related
  misc_feature (1)..(226): NCBI GI NO: 26449786 NR Description: putative acyl CoA thioesterase
  misc_feature (1)..(187): NCBI GI NO: 25304479 NR Description: hypothetical protein T1N6
  misc_feature (1)..(213): NCBI GI NO: 17986450 NR Description: ACYL-COA THIOESTERASE II [Brucella melitensis]
  misc_feature (1)..(213): NCBI GI NO: 23502749 NR Description: acyl-CoA thioesterase II [Brucella suis 1330]
  misc_feature (1)..(214): NCBI GI NO: 15599137 NR Description: acyl-CoA thioesterase II
  misc_feature (1)..(218): NCBI GI NO: 22962266 NR Description: hypothetical protein [Rhodopseudomonas palustris]
  misc_feature (1)..(214): NCBI GI NO: 15966941 NR Description: PROBABLE ACYL-COA THIOESTERASE II PROTEIN
  misc_feature (1)..(218): NCBI GI NO: 39933348 NR Description: acyl-CoA thioesterase II
MPIIYQVHRERDGTSFATRKVEAKQKGLVMFTLIVSFQKEELGFEHQAAIMPVVPPPEQLLNMEEIRERRLTDPRFPMQYRNSAAKKKFVPWPIEMRFCQDSKSQHEPSLHYWFRARGKLSDDPALHRCVVAYASDLLYSGVSLNPHRKRGLKTYSLSLDHSMWFHKPVKADDWLLYVIDSPSAHGGRGFVTGRMFNRQGELIVSLTQEALIRRAKTPGQTPRPKL

SEQ ID NO: 17340 - DNA, 1706 bp, Triticum aestivum
  misc_feature (1)..(1706): Ceres Seq. ID no. 13590739
aggaagaaggaaagacagatcggtgcgtgtgaggcagccccgctccgctaaacctcgcaacaacccccgtgggcgaccaacccagcccagccgcccccctctcctcaccaacccccgagccggaagcagagccgcgatggccggcaccgtgcccaagctcgccgccccgaggccggcggccgcggggccgctcccctcgcagcccctccgcgccgccgcgctcgccttcgccccctccgcccgacgcttccgcgtctccctcgccggccgcgccaggagccccgtcattgcgatggcttccgccaaggaagggaacggtgcggtgacgaagaggaccacgctccatgacctctatgagcaacagggtcagtccccgtggtacgacaacctttgccggcctgtcaccgatttgctgccctacatcgccaacggtgtccgtggagtcaccagcaacccaacgattttccagaaagccatctcttcatcaaacgcctatgacggtcagttcaaggagcttatatcagctgggaaggatgcggagagcgcttactgggaactcgtcataaaggacatccaagacgcgtgcaagctgtttgagcccatctacgacgagactgatggggctgatggttacgtttcagtggaggtgtctcctaggctggcaaatgacacccaaggaaccgtcgaagctgcgaagtggttacacaaagtggtcaaccgccccaatgtgtacataaagatcccagctacagcagaatgtgttccttctatcaaggaagtcattgctaatggcatcagcgtcaatgtcactcttatcttctctgttgcaagatacgaggctgtgattgatgcttacctcgacgggcttgaggcttctggtttgagcgacttatcccgagtaaccagtgtagcatccttctttgtcagccgagttgacagtctgatcgacaaaatgcttgagaagattggaacaccggaagctcttgccctgaggggaaaggctgccgtagcacaagcaaagatagcaaatcagctttacctgaagaaattctctggcccgaggtgggaggctttggtgaagaagggagccaagaagcagaggttgttgtgggcatccaccagcgtgaagaacccggcttacttggacactctttacgtcgatcctctcatcggacctgacaccgtctctacgatgcccgaccaagctctggacgcgttcatcgaccacggcacagttgctaggacaatcgacgcgaacgtatcagaagctgagggcatatacagtgccctggagaagctgggcatcgactgggaagaggttggcaagcagctggagcacgagggcgtgagctccttcaaggggagcttcgacagcctgctcacgagcttggaggagaagggcaatgccctcaagaccgccgccaacctgtaggcgctaaaattgttggatagaatggtttggtaccggcgctggccatcaaacgattacccaataaaaatgccagcttgctggctctccccttccattcggaaatgaaatgctcccagttatctgggtgagcttctttgtattctaggcgtgcctggctgtcattgtgtaactgaggtttgttgctcgcaactgctatcgttttctgatcaattgtttttgagcaagtcagccatatttgtgtatctttggcaaatgcatttctccttactgttgt

SEQ ID NO: 17341 - protein, 476 aa, Triticum aestivum
  peptide (1)..(476): Ceres Seq. ID no. 15221001
  misc_feature (124)..(463): Pfam Name: Pfam Description:  Transaldolase
  misc_feature (154)..(476): NCBI GI NO: 34907042 NR Description: putative transaldolase
  misc_feature (97)..(154): NCBI GI NO: 34907042 NR Description: putative transaldolase
  misc_feature (46)..(101): NCBI GI NO: 34907042 NR Description: putative transaldolase
  misc_feature (84)..(475): NCBI GI NO: 15240625 NR Description: transaldolase - like protein
  misc_feature (92)..(471): NCBI GI NO: 7489279 NR Description: transaldolase (EC 2.2.1.2) - potato
  misc_feature (69)..(471): NCBI GI NO: 10441272 NR Description: transaldolase [Lycopersicon esculentum]
  misc_feature (69)..(471): NCBI GI NO: 32481059 NR Description: transaldolase [Lycopersicon esculentum]
  misc_feature (108)..(467): NCBI GI NO: 29828309 NR Description: putative transaldolase
  misc_feature (120)..(464): NCBI GI NO: 29832856 NR Description: putative transaldolase
  misc_feature (122)..(464): NCBI GI NO: 23335136 NR Description: hypothetical protein
GRRKDRSVRVRQPRSAKPRNNPRGRPTQPSRPPLLTNPRAGSRAAMAGTVPKLAAPRPAAAGPLPSQPLRAAALAFAPSARRFRVSLAGRARSPVIAMASAKEGNGAVTKRTTLHDLYEQQGQSPWYDNLCRPVTDLLPYIANGVRGVTSNPTIFQKAISSSNAYDGQFKELISAGKDAESAYWELVIKDIQDACKLFEPIYDETDGADGYVSVEVSPRLANDTQGTVEAAKWLHKVVNRPNVYIKIPATAECVPSIKEVIANGISVNVTLIFSVARYEAVIDAYLDGLEASGLSDLSRVTSVASFFVSRVDSLIDKMLEKIGTPEALALRGKAAVAQAKIANQLYLKKFSGPRWEALVKKGAKKQRLLWASTSVKNPAYLDTLYVDPLIGPDTVSTMPDQALDAFIDHGTVARTIDANVSEAEGIYSALEKLGIDWEEVGKQLEHEGVSSFKGSFDSLLTSLEEKGNALKTAANL

SEQ ID NO: 17342 - protein, 431 aa, Triticum aestivum
  peptide (1)..(431): Ceres Seq. ID no. 15221002
  misc_feature (79)..(418): Pfam Name: Pfam Description:  Transaldolase
  misc_feature (109)..(431): NCBI GI NO: 34907042 NR Description: putative transaldolase
  misc_feature (52)..(109): NCBI GI NO: 34907042 NR Description: putative transaldolase
  misc_feature (1)..(56): NCBI GI NO: 34907042 NR Description: putative transaldolase
  misc_feature (39)..(430): NCBI GI NO: 15240625 NR Description: transaldolase - like protein
  misc_feature (47)..(426): NCBI GI NO: 7489279 NR Description: transaldolase (EC 2.2.1.2) - potato
  misc_feature (24)..(426): NCBI GI NO: 10441272 NR Description: transaldolase [Lycopersicon esculentum]
  misc_feature (24)..(426): NCBI GI NO: 32481059 NR Description: transaldolase [Lycopersicon esculentum]
  misc_feature (63)..(422): NCBI GI NO: 29828309 NR Description: putative transaldolase
  misc_feature (75)..(419): NCBI GI NO: 29832856 NR Description: putative transaldolase
  misc_feature (77)..(419): NCBI GI NO: 23335136 NR Description: hypothetical protein
MAGTVPKLAAPRPAAAGPLPSQPLRAAALAFAPSARRFRVSLAGRARSPVIAMASAKEGNGAVTKRTTLHDLYEQQGQSPWYDNLCRPVTDLLPYIANGVRGVTSNPTIFQKAISSSNAYDGQFKELISAGKDAESAYWELVIKDIQDACKLFEPIYDETDGADGYVSVEVSPRLANDTQGTVEAAKWLHKVVNRPNVYIKIPATAECVPSIKEVIANGISVNVTLIFSVARYEAVIDAYLDGLEASGLSDLSRVTSVASFFVSRVDSLIDKMLEKIGTPEALALRGKAAVAQAKIANQLYLKKFSGPRWEALVKKGAKKQRLLWASTSVKNPAYLDTLYVDPLIGPDTVSTMPDQALDAFIDHGTVARTIDANVSEAEGIYSALEKLGIDWEEVGKQLEHEGVSSFKGSFDSLLTSLEEKGNALKTAANL

SEQ ID NO: 17343 - protein, 379 aa, Triticum aestivum
  peptide (1)..(379): Ceres Seq. ID no. 15221003
  misc_feature (27)..(366): Pfam Name: Pfam Description:  Transaldolase
  misc_feature (57)..(379): NCBI GI NO: 34907042 NR Description: putative transaldolase
  misc_feature (1)..(57): NCBI GI NO: 34907042 NR Description: putative transaldolase
  misc_feature (1)..(378): NCBI GI NO: 15240625 NR Description: transaldolase - like protein
  misc_feature (1)..(374): NCBI GI NO: 7489279 NR Description: transaldolase (EC 2.2.1.2) - potato
  misc_feature (1)..(374): NCBI GI NO: 10441272 NR Description: transaldolase [Lycopersicon esculentum]
  misc_feature (1)..(374): NCBI GI NO: 32481059 NR Description: transaldolase [Lycopersicon esculentum]
  misc_feature (11)..(370): NCBI GI NO: 29828309 NR Description: putative transaldolase
  misc_feature (23)..(367): NCBI GI NO: 29832856 NR Description: putative transaldolase
  misc_feature (25)..(367): NCBI GI NO: 23335136 NR Description: hypothetical protein
  misc_feature (25)..(367): NCBI GI NO: 23465295 NR Description: transaldolase [Bifidobacterium longum NCC2705]
MASAKEGNGAVTKRTTLHDLYEQQGQSPWYDNLCRPVTDLLPYIANGVRGVTSNPTIFQKAISSSNAYDGQFKELISAGKDAESAYWELVIKDIQDACKLFEPIYDETDGADGYVSVEVSPRLANDTQGTVEAAKWLHKVVNRPNVYIKIPATAECVPSIKEVIANGISVNVTLIFSVARYEAVIDAYLDGLEASGLSDLSRVTSVASFFVSRVDSLIDKMLEKIGTPEALALRGKAAVAQAKIANQLYLKKFSGPRWEALVKKGAKKQRLLWASTSVKNPAYLDTLYVDPLIGPDTVSTMPDQALDAFIDHGTVARTIDANVSEAEGIYSALEKLGIDWEEVGKQLEHEGVSSFKGSFDSLLTSLEEKGNALKTAANL

SEQ ID NO: 17344 - DNA, 1204 bp, Triticum aestivum
  misc_feature (1)..(1204): Ceres Seq. ID no. 13659351
  misc_feature (1154)..(1154): n is a, c, t, g, unknown, or other
gttttctattccttccctcttttgttttctcccgcgagcagctcgtgcgacagctgagctgcggccgccgccgccacactttgcttcgctgtgagcggtcccgagcgtgagccggtgggggtgtcggcgaggcgcgcgagggtcaggcagcgaggagaccgccgccgctgcagcctggtgtgcgcgcgctccaggctgctccgccactcagccaccgggttgcagatgccgccattgctcctgctaggctgctaccgtccgtcgccagccgtccgcgctgctgctgccaccttcgccgcgcacctgaccgcgccgccgcccgggaattgcccgacgcggccgtctcgtgttgccctctgccggcgcgcgcggcagacgacgcctttgacgtctatctttctggccaaacgcattcctcgggcatacagaggctaaagtcaaccttaaaatggaggatgctaacgcagtagtagattggaatgttgacattattggcccagatggtggtagcggcgcttgccgcaaattggcaaaaactgaagaccctgatgccacagagtgttcaagttcctttggggacacactatctggatctcaggatgatgcaaagccttcagagattagtgacattgaagtagactcaccattctgccgttatcctcataatggtgatgctgctgcactcttggatgcagctgctgctgacaatttggatagattattgaaaaagaaaaaagtgaccgatcattggagaagctatatcagcccattaatgtggagatgccaatggttagagctgcggatgaaagacttgcaatctcaagtatccagatatgacagggagcttgcagtacttaaacatgagaaagagttgcagacaaaaatgattgagttggactgttcctcgtcaagatcagtgcccttctcttctcattgctgcaggaagactatgaagaggaagaagaggaagagaaatgaggagaaaatcaatgctccctcatacatcgcaacccacaccatattgtcttattatgaaaaagagaccagcggatggctttgatacctggtacttgtttgcatgatatgctgttcccaagttatctccagagtgctgagcaccaactcccatcaaatcaagataatgttgatagtgngatataatgccattcatattatcaatggaccctttaccacagatggcatc

SEQ ID NO: 17345 - protein, 203 aa, Triticum aestivum
  peptide (1)..(203): Ceres Seq. ID no. 13659352
  misc_feature (11)..(196): NCBI GI NO: 15231731 NR Description: hypothetical protein [Arabidopsis thaliana]
  misc_feature (31)..(196): NCBI GI NO: 15235560 NR Description: expressed protein [Arabidopsis thaliana]
  misc_feature (109)..(201): NCBI GI NO: 34894616 NR Description: P0028G04.3
  misc_feature (39)..(197): NCBI GI NO: 15229662 NR Description: hypothetical protein [Arabidopsis thaliana]
MEDANAVVDWNVDIIGPDGGSGACRKLAKTEDPDATECSSSFGDTLSGSQDDAKPSEISDIEVDSPFCRYPHNGDAAALLDAAAADNLDRLLKKKKVTDHWRSYISPLMWRCQWLELRMKDLQSQVSRYDRELAVLKHEKELQTKMIELDCSSSRSVPFSSHCCRKTMKRKKRKRNEEKINAPSYIATHTILSYYEKETSGWL

SEQ ID NO: 17346 - DNA, 827 bp, Triticum aestivum
  misc_feature (1)..(827): Ceres Seq. ID no. 13659433
attcacatcgattgatcatcgcagctagctaggttgcggcaacatggagagcggcagcacggcggcgtcgagcgacgaggccgtgagatcgcccggcgggacgacggcggtggcggccgcccggccgtactacgagtgcgtgttctgcaagcgcgggttcaccacggcgcaggcgctgggcgggcacatgaacatccaccgccgggaccgcgccaagcccgcccgcctcacgacgtcagcttcccggagcacagagtgcaacttggcgtaccccccagcgccgccggccacgtccctgatgagcagcggcgacttcgccatgttgtactacggccggcacaccggagccggagtggacgccgaggccgtgagccctggtagcccgatcccgagggagctgagcctgttcggcgcggacgacgacagtcacgacgaccgtgacgactgcttgcaactgggcctccggtgccatggaagcagcagcggcgacgggttcgagcggcggccggacggcgagctgccggagaggaagctggacttggagctcaggctcgggcccgggcctcgtccgaggcactgatcactcgcacggtaccctggtgcaactcagacacaggaacgcactcatctatatacatgcatgggcttcctagctagtattacttcagwtcttktgttgcttgatatcattattgctattctcatcttctgctgcttgtttatatgactaaatatatttatatttcgccataacaacaagagcagatgctttgatgtattgaatgtacatggagagctatatatgcttggctcttgttttgattcgc

SEQ ID NO: 17347 - protein, 178 aa, Triticum aestivum
  peptide (1)..(178): Ceres Seq. ID no. 15219972
  misc_feature (30)..(52): Pfam Name: Pfam Description:  Zinc finger, C2H2 type
  misc_feature (77)..(178): NCBI GI NO: 27261470 NR Description: Hypothetical protein
  misc_feature (6)..(81): NCBI GI NO: 27261470 NR Description: Hypothetical protein
  misc_feature (3)..(66): NCBI GI NO: 15239898 NR Description: hypothetical protein [Arabidopsis thaliana]
  misc_feature (18)..(57): NCBI GI NO: 34903482 NR Description: OSJNBa0066B06.23
  misc_feature (30)..(139): NCBI GI NO: 38346721 NR Description: OSJNBa0086O06.19
  misc_feature (26)..(72): NCBI GI NO: 15232335 NR Description: zinc finger (C2H2 type) protein family
  misc_feature (27)..(171): NCBI GI NO: 15228973 NR Description: zinc finger (C2H2 type) protein family
  misc_feature (2)..(174): NCBI GI NO: 15236660 NR Description: SUPERMAN like protein [Arabidopsis thaliana]
  misc_feature (30)..(88): NCBI GI NO: 15228971 NR Description: superman protein [Arabidopsis thaliana]
  misc_feature (30)..(58): NCBI GI NO: 15232631 NR Description: zinc finger (C2H2 type) protein family
MESGSTAASSDEAVRSPGGTTAVAAARPYYECVFCKRGFTTAQALGGHMNIHRRDRAKPARLTTSASRSTECNLAYPPAPPATSLMSSGDFAMLYYGRHTGAGVDAEAVSPGSPIPRELSLFGADDDSHDDRDDCLQLGLRCHGSSSGDGFERRPDGELPERKLDLELRLGPGPRPRH

SEQ ID NO: 17348 - protein, 130 aa, Triticum aestivum
  peptide (1)..(130): Ceres Seq. ID no. 15219973
  misc_feature (29)..(130): NCBI GI NO: 27261470 NR Description: Hypothetical protein
  misc_feature (1)..(33): NCBI GI NO: 27261470 NR Description: Hypothetical protein
  misc_feature (1)..(18): NCBI GI NO: 15239898 NR Description: hypothetical protein [Arabidopsis thaliana]
  misc_feature (1)..(91): NCBI GI NO: 38346721 NR Description: OSJNBa0086O06.19
  misc_feature (1)..(24): NCBI GI NO: 15232335 NR Description: zinc finger (C2H2 type) protein family
  misc_feature (1)..(123): NCBI GI NO: 15228973 NR Description: zinc finger (C2H2 type) protein family
  misc_feature (1)..(126): NCBI GI NO: 15236660 NR Description: SUPERMAN like protein [Arabidopsis thaliana]
  misc_feature (1)..(40): NCBI GI NO: 15228971 NR Description: superman protein [Arabidopsis thaliana]
  misc_feature (1)..(122): NCBI GI NO: 32482926 NR Description: OSJNBa0058G03.3
MNIHRRDRAKPARLTTSASRSTECNLAYPPAPPATSLMSSGDFAMLYYGRHTGAGVDAEAVSPGSPIPRELSLFGADDDSHDDRDDCLQLGLRCHGSSSGDGFERRPDGELPERKLDLELRLGPGPRPRH

SEQ ID NO: 17349 - protein, 93 aa, Triticum aestivum
  peptide (1)..(93): Ceres Seq. ID no. 15219974
  misc_feature (1)..(93): NCBI GI NO: 27261470 NR Description: Hypothetical protein
  misc_feature (1)..(54): NCBI GI NO: 38346721 NR Description: OSJNBa0086O06.19
  misc_feature (1)..(86): NCBI GI NO: 15228973 NR Description: zinc finger (C2H2 type) protein family
  misc_feature (1)..(89): NCBI GI NO: 15236660 NR Description: SUPERMAN like protein [Arabidopsis thaliana]
  misc_feature (1)..(85): NCBI GI NO: 32482926 NR Description: OSJNBa0058G03.3
MSSGDFAMLYYGRHTGAGVDAEAVSPGSPIPRELSLFGADDDSHDDRDDCLQLGLRCHGSSSGDGFERRPDGELPERKLDLELRLGPGPRPRH

SEQ ID NO: 17350 - DNA, 1369 bp, Triticum aestivum
  misc_feature (1)..(1369): Ceres Seq. ID no. 13659840
agcttaggccccactcaagtcaacttacccttcttcctcctcgatccacatatgtacgcctgcagctagctagcaagtactcagatctctgggagtacttgctaggtccgcttcaagtagtagcaaggagccaaggagaccgagatctcgtttctctcttcccagcaaggatcccgcaagctattgttcctctcaagatcatcagagatggccaccgcaagtagtaacctgcaactaccggcagaactaccctacgattttgtgaagaaaattacaaatgacttctctaaggagcgagaaattagtgacaatccatttggaaaactttacaagggaattaatccagatgatggcacagtgattgctgtgaagaaacttcaggaaaacgcaccaatgccagctggcaagatatttataaatgaggttcagaatattatggtgctcaaacacgcaaacattgtaaaaatggttggatactgcagtgaaacaacaaagaaattggtgcagttcgatcatcgatatattcaggcagatgttactgaaagtgtactctgctatgaatatttacctaaaggggaccttgcaaagaatctatttggtaaactcattatcgattgggatacacgtttcaaaataatcaaggggatctgcaaggggttactttatctacacaaattagatattcccataatccatatggatctgaagcccgagaatatattgttggatgaagatatggtgcctaagattgcggactttgcactctctagagtctttggcgaagcacaaacccgattgtgcacacagactgtcgtgggatcatatggatatatggctccagaatatctatacaggggtgaaatctcagcgcaatcagacatatatagtttaggcctactcataattgagatcaccacaggagagaagaattgtcctgaaaccaaccaaccgtccgcaagaaattttattgataatgtacaaaaaaattggacagaggattacataacattcaagtactcaagtttaaccccagattgcctcaatcaagttaagcgatgcatcaaaattgggctggaatgtgttactatcgatcggaaaggcagacccactatagaaaaaattattgacaccctcaacggaataaactgaattgcgaacaaggtcttcgatcaggtctacagtgagcatgaaagatgggtctgttgggatccggtgaagaaaccatgcatgtccccattattgctaagtgtactttattttattttggaaataagtccctttgattgatgtcgtgtcattgtggaaataccaaatgtaatttctcgagaattgctgtagattttttgtgttgatcaagcatcaagatgtg

SEQ ID NO: 17351 - protein, 313 aa, Triticum aestivum
  peptide (1)..(313): Ceres Seq. ID no. 15220678
  misc_feature (118)..(309): NCBI GI NO: 37532178 NR Description: putative receptor-like protein kinase
  misc_feature (19)..(97): NCBI GI NO: 37532178 NR Description: putative receptor-like protein kinase
  misc_feature (10)..(313): NCBI GI NO: 38344521 NR Description: OSJNBa0016N04.14
  misc_feature (13)..(313): NCBI GI NO: 21728344 NR Description: stem rust resistance protein Rpg1
  misc_feature (13)..(313): NCBI GI NO: 21929723 NR Description: barley stem rust resistance protein
  misc_feature (13)..(313): NCBI GI NO: 21929729 NR Description: barley stem rust resistance protein
  misc_feature (125)..(309): NCBI GI NO: 38344522 NR Description: OSJNBa0016N04.15
  misc_feature (10)..(131): NCBI GI NO: 38344522 NR Description: OSJNBa0016N04.15
  misc_feature (52)..(313): NCBI GI NO: 21724199 NR Description: stem rust resistance protein
  misc_feature (1)..(311): NCBI GI NO: 33146545 NR Description: putative receptor-like protein kinase 4
MATASSNLQLPAELPYDFVKKITNDFSKEREISDNPFGKLYKGINPDDGTVIAVKKLQENAPMPAGKIFINEVQNIMVLKHANIVKMVGYCSETTKKLVQFDHRYIQADVTESVLCYEYLPKGDLAKNLFGKLIIDWDTRFKIIKGICKGLLYLHKLDIPIIHMDLKPENILLDEDMVPKIADFALSRVFGEAQTRLCTQTVVGSYGYMAPEYLYRGEISAQSDIYSLGLLIIEITTGEKNCPETNQPSARNFIDNVQKNWTEDYITFKYSSLTPDCLNQVKRCIKIGLECVTIDRKGRPTIEKIIDTLNGIN

SEQ ID NO: 17352 - protein, 251 aa, Triticum aestivum
  peptide (1)..(251): Ceres Seq. ID no. 15220679
  misc_feature (56)..(247): NCBI GI NO: 37532178 NR Description: putative receptor-like protein kinase
  misc_feature (1)..(35): NCBI GI NO: 37532178 NR Description: putative receptor-like protein kinase
  misc_feature (1)..(251): NCBI GI NO: 38344521 NR Description: OSJNBa0016N04.14
  misc_feature (1)..(251): NCBI GI NO: 21728344 NR Description: stem rust resistance protein Rpg1
  misc_feature (1)..(251): NCBI GI NO: 21929723 NR Description: barley stem rust resistance protein
  misc_feature (1)..(251): NCBI GI NO: 21929729 NR Description: barley stem rust resistance protein
  misc_feature (63)..(247): NCBI GI NO: 38344522 NR Description: OSJNBa0016N04.15
  misc_feature (1)..(69): NCBI GI NO: 38344522 NR Description: OSJNBa0016N04.15
  misc_feature (1)..(251): NCBI GI NO: 21724199 NR Description: stem rust resistance protein
  misc_feature (1)..(249): NCBI GI NO: 33146545 NR Description: putative receptor-like protein kinase 4
MPAGKIFINEVQNIMVLKHANIVKMVGYCSETTKKLVQFDHRYIQADVTESVLCYEYLPKGDLAKNLFGKLIIDWDTRFKIIKGICKGLLYLHKLDIPIIHMDLKPENILLDEDMVPKIADFALSRVFGEAQTRLCTQTVVGSYGYMAPEYLYRGEISAQSDIYSLGLLIIEITTGEKNCPETNQPSARNFIDNVQKNWTEDYITFKYSSLTPDCLNQVKRCIKIGLECVTIDRKGRPTIEKIIDTLNGIN

SEQ ID NO: 17353 - protein, 237 aa, Triticum aestivum
  peptide (1)..(237): Ceres Seq. ID no. 15220680
  misc_feature (42)..(233): NCBI GI NO: 37532178 NR Description: putative receptor-like protein kinase
  misc_feature (1)..(21): NCBI GI NO: 37532178 NR Description: putative receptor-like protein kinase
  misc_feature (1)..(237): NCBI GI NO: 38344521 NR Description: OSJNBa0016N04.14
  misc_feature (1)..(237): NCBI GI NO: 21728344 NR Description: stem rust resistance protein Rpg1
  misc_feature (1)..(237): NCBI GI NO: 21929729 NR Description: barley stem rust resistance protein
  misc_feature (1)..(237): NCBI GI NO: 21929723 NR Description: barley stem rust resistance protein
  misc_feature (49)..(233): NCBI GI NO: 38344522 NR Description: OSJNBa0016N04.15
  misc_feature (1)..(55): NCBI GI NO: 38344522 NR Description: OSJNBa0016N04.15
  misc_feature (1)..(237): NCBI GI NO: 21724199 NR Description: stem rust resistance protein
  misc_feature (1)..(235): NCBI GI NO: 33146545 NR Description: putative receptor-like protein kinase 4
MVLKHANIVKMVGYCSETTKKLVQFDHRYIQADVTESVLCYEYLPKGDLAKNLFGKLIIDWDTRFKIIKGICKGLLYLHKLDIPIIHMDLKPENILLDEDMVPKIADFALSRVFGEAQTRLCTQTVVGSYGYMAPEYLYRGEISAQSDIYSLGLLIIEITTGEKNCPETNQPSARNFIDNVQKNWTEDYITFKYSSLTPDCLNQVKRCIKIGLECVTIDRKGRPTIEKIIDTLNGIN

SEQ ID NO: 17354 - DNA, 1255 bp, Triticum aestivum
  misc_feature (1)..(1255): Ceres Seq. ID no. 12780029
gtggataattttaccggcgagggcgcggtgacgcggcacctctccatccagacacccgaactccgccgctctccagccgccgccagcacgccatgctcccgctcgccgccgcaagggcctgcctttcctccccggcgccgacgccgagacccccatccccatcccgagcggcgtctctctccccccttctccgtcgcagctccaccgccaggcagctcagacccgccaggctccccctcctccgcccgctccaggccgcaacgggcgccggcgcgccgggcgcgtcctcgcggcccgcgagggaccgcgtgatcgacttcggcaagcacaagggccagatgctgggcacgctgccgccgtcctacctgcgctgggtggtcgcggagctcgactacggggacacggcggcctgggcgcgcctggcgcgcgaggtgctcgacgaccccgtctacgtcgactgcgtcgagtgggagcacgcgcaccgcttcctccgcggcgactccaagttcgactacgtctacgacgacgccggcgaagacggcgacgggccgctccaggagatggccgagcgcttcggctgggacctctccgacgaggacggctggggccgcctcgacttccgcctcctcggcacctcctacggcggccgcatcccgaggaaggccgaccggcgccagagcaccggcaacagatccccccgcggcggcggcggcgccctgttcgacgccggggcggacgggccgagggggaagagggacgagaggcgggagcggatgcggacgaggagggaggagcaggtgaggacggccaaactggatgtgctcggcgtgaacgccggcgcgaaggatggcggcgcactggggacggcgaggaaggcccgcattggtgtggcggcaaagaaggagatcctggggctgggccgctgcggcgagagggcggcgccgctgaaaggcggcgagggagggaacccgttccccggccggcaagccttcctcgacaaggtcaggaagctcaagggcgatgatagctagcgccagcagctaggctaggtgatatcaggatcgtttagtgctcaatagacgtaaattttgggcagttcatggaagcaagcagattgtattccttagataaattacagtacaagagtgagatctactctagcagacaagcaaggcactaggaatttaagaacttctttacgggaacattgacactgtttgagttgctgctaggaatttaagaatttaagatcgtc

SEQ ID NO: 17355 - protein, 312 aa, Triticum aestivum
  peptide (1)..(312): Ceres Seq. ID no. 12780030
  misc_feature (69)..(229): NCBI GI NO: 15223713 NR Description: hypothetical protein; protein id: At1g51080.1
MLPLAAARACLSSPAPTPRPPSPSRAASLSPLLRRSSTARQLRPARLPLLRPLQAATGAGAPGASSRPARDRVIDFGKHKGQMLGTLPPSYLRWVVAELDYGDTAAWARLAREVLDDPVYVDCVEWEHAHRFLRGDSKFDYVYDDAGEDGDGPLQEMAERFGWDLSDEDGWGRLDFRLLGTSYGGRIPRKADRRQSTGNRSPRGGGGALFDAGADGPRGKRDERRERMRTRREEQVRTAKLDVLGVNAGAKDGGALGTARKARIGVAAKKEILGLGRCGERAAPLKGGEGGNPFPGRQAFLDKVRKLKGDDS

SEQ ID NO: 17356 - protein, 230 aa, Triticum aestivum
  peptide (1)..(230): Ceres Seq. ID no. 12780031
  misc_feature (1)..(147): NCBI GI NO: 15223713 NR Description: hypothetical protein; protein id: At1g51080.1
MLGTLPPSYLRWVVAELDYGDTAAWARLAREVLDDPVYVDCVEWEHAHRFLRGDSKFDYVYDDAGEDGDGPLQEMAERFGWDLSDEDGWGRLDFRLLGTSYGGRIPRKADRRQSTGNRSPRGGGGALFDAGADGPRGKRDERRERMRTRREEQVRTAKLDVLGVNAGAKDGGALGTARKARIGVAAKKEILGLGRCGERAAPLKGGEGGNPFPGRQAFLDKVRKLKGDDS

SEQ ID NO: 17357 - protein, 156 aa, Triticum aestivum
  peptide (1)..(156): Ceres Seq. ID no. 12780032
  misc_feature (1)..(73): NCBI GI NO: 15223713 NR Description: hypothetical protein; protein id: At1g51080.1
MAERFGWDLSDEDGWGRLDFRLLGTSYGGRIPRKADRRQSTGNRSPRGGGGALFDAGADGPRGKRDERRERMRTRREEQVRTAKLDVLGVNAGAKDGGALGTARKARIGVAAKKEILGLGRCGERAAPLKGGEGGNPFPGRQAFLDKVRKLKGDDS

SEQ ID NO: 17358 - DNA, 1818 bp, Triticum aestivum
  misc_feature (1)..(1818): Ceres Seq. ID no. 14302867
cgaaaaaaaatctatcggttttggtctctctcgccgccggatcgccggtccccaacccccacggccgcctccgtcagtaaggcatcgccatgtctgccgctccagaagctcctccttccgaaggtcctccatcgttcatcgccatgtctgccgctccggaagctcctccttccgaaggtccttcatcgtcggtcgccatatccacctcccccttccccaactggatactgctggagagctttgtcttccgcagggacgacaagaagtcttttccggacgacacaaaggcacccatcagggcgtccggcatcacctcctggaacgctcccttccggattgccttctcccttgccaagcccccgctcgcttcccgcctctatgcaaagttgcgacgctttccagatcctagtcaagagacgcctttagccatagtggcgacccacttcaatctactgctgcttcgcgtaggtaccaaaatccctgcacgagggctagtgcaggacttctttatctgcaatgcctatgaaccttccacgctcaaagctttgcctccttgtagagagccctacacagattatagccgcagcagcggtgacaacctacctcgtggtcgacccctccagaaggaggagcgacgcctgcttgaggttcaatcaatggggctcttgtgcggaggcggggagaagtttgcggtggcagagctctgcgttttcaagaccatccacttaaaatcatatgctgacatttgtttgctatgctctcccacatcagccgcccctgtccttggcggcaattggaactcgttccgtgtaccaatccttggcattgacagcaatgatccatggcacatttgttgctgggacactgacactgtcattacttttaggcactggctgtgctggatcgattatcatcgtggtattctattctttgacgtgttcggagagcctgtccctaccgtcacattccttgcttttcctcttgatgagtatccttccccgcacagtctcaaagaggtcaagccatccagccctctcaaatccagccggttgtatcgtggtgcgtctgtcttatttggtggcaatatgatcaaatttgtcaatgtcacccgccacgacggcattggttatggagaactcaaacctcgttcaggcttcaccatcacctgccacaccctcgagttaggcgacaccccagtgataggcaatgcaaggtggaagttagactacaagattacttctgatgagctttggtccgccaatcctcctgagcatcttccacacaacattctcatgttccctcaaatagacttagacatgccacatctagtgcactttatcatcagcgagtttgaattcgttattaagaagatgtggttggtgtccattgatatgaaaactaaggaggtgaaatcatttgctccgtacatcagtgggaaggaaggacttgaaacagacgacgcagacttgatcagagaaaggtctgacgctcccatgcccttcctaccctgtgatttctccaggtttctccgtctctcaaggttgagcaaggatatggaatgactcacggtgtacatttaagttcagctaccatgccaagactttccaaaggcaaacaacaagagaaatgacgcaatgacggacgatatacattaatacattattagatcctcacagacatcaagataacggtgtactacataagctgcgtatgagtagtctctcccaaagcttcatccttgtaattattgtagttgaacttgaattgtagaccgtaaagctatccagattgatgaagttggcacacgtgagtcattcc

SEQ ID NO: 17359 - protein, 490 aa, Triticum aestivum
  peptide (1)..(490): Ceres Seq. ID no. 14302868
  misc_feature (32)..(479): NCBI GI NO: 34896694 NR Description: hypothetical protein
  misc_feature (37)..(482): NCBI GI NO: 34912374 NR Description: P0518F01.23
  misc_feature (13)..(419): NCBI GI NO: 38637211 NR Description: hypothetical protein
MSAAPEAPPSEGPPSFIAMSAAPEAPPSEGPSSSVAISTSPFPNWILLESFVFRRDDKKSFPDDTKAPIRASGITSWNAPFRIAFSLAKPPLASRLYAKLRRFPDPSQETPLAIVATHFNLLLLRVGTKIPARGLVQDFFICNAYEPSTLKALPPCREPYTDYSRSSGDNLPRGRPLQKEERRLLEVQSMGLLCGGGEKFAVAELCVFKTIHLKSYADICLLCSPTSAAPVLGGNWNSFRVPILGIDSNDPWHICCWDTDTVITFRHWLCWIDYHRGILFFDVFGEPVPTVTFLAFPLDEYPSPHSLKEVKPSSPLKSSRLYRGASVLFGGNMIKFVNVTRHDGIGYGELKPRSGFTITCHTLELGDTPVIGNARWKLDYKITSDELWSANPPEHLPHNILMFPQIDLDMPHLVHFIISEFEFVIKKMWLVSIDMKTKEVKSFAPYISGKEGLETDDADLIRERSDAPMPFLPCDFSRFLRLSRLSKDME

SEQ ID NO: 17360 - protein, 472 aa, Triticum aestivum
  peptide (1)..(472): Ceres Seq. ID no. 14302869
  misc_feature (14)..(461): NCBI GI NO: 34896694 NR Description: hypothetical protein
  misc_feature (19)..(464): NCBI GI NO: 34912374 NR Description: P0518F01.23
  misc_feature (1)..(401): NCBI GI NO: 38637211 NR Description: hypothetical protein
MSAAPEAPPSEGPSSSVAISTSPFPNWILLESFVFRRDDKKSFPDDTKAPIRASGITSWNAPFRIAFSLAKPPLASRLYAKLRRFPDPSQETPLAIVATHFNLLLLRVGTKIPARGLVQDFFICNAYEPSTLKALPPCREPYTDYSRSSGDNLPRGRPLQKEERRLLEVQSMGLLCGGGEKFAVAELCVFKTIHLKSYADICLLCSPTSAAPVLGGNWNSFRVPILGIDSNDPWHICCWDTDTVITFRHWLCWIDYHRGILFFDVFGEPVPTVTFLAFPLDEYPSPHSLKEVKPSSPLKSSRLYRGASVLFGGNMIKFVNVTRHDGIGYGELKPRSGFTITCHTLELGDTPVIGNARWKLDYKITSDELWSANPPEHLPHNILMFPQIDLDMPHLVHFIISEFEFVIKKMWLVSIDMKTKEVKSFAPYISGKEGLETDDADLIRERSDAPMPFLPCDFSRFLRLSRLSKDME

SEQ ID NO: 17361 - protein, 301 aa, Triticum aestivum
  peptide (1)..(301): Ceres Seq. ID no. 14302870
  misc_feature (1)..(290): NCBI GI NO: 34896694 NR Description: hypothetical protein
  misc_feature (1)..(293): NCBI GI NO: 34912374 NR Description: P0518F01.23
  misc_feature (1)..(230): NCBI GI NO: 38637211 NR Description: hypothetical protein
MGLLCGGGEKFAVAELCVFKTIHLKSYADICLLCSPTSAAPVLGGNWNSFRVPILGIDSNDPWHICCWDTDTVITFRHWLCWIDYHRGILFFDVFGEPVPTVTFLAFPLDEYPSPHSLKEVKPSSPLKSSRLYRGASVLFGGNMIKFVNVTRHDGIGYGELKPRSGFTITCHTLELGDTPVIGNARWKLDYKITSDELWSANPPEHLPHNILMFPQIDLDMPHLVHFIISEFEFVIKKMWLVSIDMKTKEVKSFAPYISGKEGLETDDADLIRERSDAPMPFLPCDFSRFLRLSRLSKDME

SEQ ID NO: 17362 - DNA, 1160 bp, Triticum aestivum
  misc_feature (1)..(1160): Ceres Seq. ID no. 12784064
aaaaatcctcgatctcaccaacataagccttcctcattcattcattcagctgtacaactctgatcatcgaccagcagcgggattctcctcgtctgatttgttcatccgacacccgatcgatccgcagcagcaggtgatccggctacaatggaggcagcggtagctcgcgccgacacagcagcattcttctcgggccaggaggacgcggccggggggagcatatccagactaccggctcgggtcgccggctcgatcgtccgcggcgtgatcaccttcatcttcgccacagtgggcacgattctgggagccatcacgggcgggatgatcgggctggcgacggagagcggtctcgtccgcggcgcgggcatcggcgccatctccggcgccgtggtggccatggaggttgtcgacaggtccatggccatgtggcgctccgacgagtgcggcatctggagcgtcctatacgtgcttgacgtgatctggagcctcctgacgggtcgtctggtgcgcgagaaggtggaccccgcagtgcagaacgcggtcgacagccagatgaacgccgcgggcgacgggttcagcgacagcccgccgacgctctccgagatgtttgacatgggctccgcctccttcaaaggcatggctgcagacgccatcgccgagctccccgcgacgacgatcaccgagcagcaagccgccgtgcaggacgggggctgctccgtgtgcctccaggagttcgaggccggcgaggcggcgcggagcctgccggagtgccgccacacgttccacatgtcgtgcatagacgggtggctttgccggcatgcgtcgtgcccgctgtgccgccgcgccgtctaggcctggcgtgcccggctcgttaggatcgatgtgtgcatagccagcgtatatacacacgtgttacgcgcgtgtgtgagtgtggcgctagcacgtacggcacgcgcacgcacatacgggaagttcgttaatttgttatacgtagttagctactagttgggttgagactgacatgacatgacacttgtgccgacaagttctttcgtgacttgttcgttgccttcatttctgcggaaattatgattgtattgctacaccacacgcgcggctggttgcgaatatctatacagaaaatcatcagcgtttagatt

SEQ ID NO: 17363 - protein, 234 aa, Triticum aestivum
  peptide (1)..(234): Ceres Seq. ID no. 12784065
  misc_feature (189)..(230): Pfam Name: RING finger Pfam Description: Zinc finger, C3HC4 type
  misc_feature (10)..(232): NCBI GI NO: 18855037 NR Description: putative zinc finger protein [Oryza sativa]
  misc_feature (28)..(234): NCBI GI NO: 30680091 NR Description: expressed protein [Arabidopsis thaliana]
  misc_feature (21)..(234): NCBI GI NO: 37536572 NR Description: hypothetical protein
  misc_feature (28)..(234): NCBI GI NO: 26452210 NR Description: unknown protein [Arabidopsis thaliana]
  misc_feature (28)..(229): NCBI GI NO: 25411815 NR Description: hypothetical protein At2g17730
  misc_feature (32)..(232): NCBI GI NO: 26451101 NR Description: unknown protein [Arabidopsis thaliana]
  misc_feature (35)..(232): NCBI GI NO: 15239242 NR Description: putative protein; protein id: At5g66070.1
  misc_feature (32)..(232): NCBI GI NO: 27524902 NR Description: NEP1-interacting protein [Arabidopsis thaliana]
  misc_feature (1)..(234): NCBI GI NO: 33146606 NR Description: putative NEP1-interacting protein 2
  misc_feature (28)..(229): NCBI GI NO: 7485279 NR Description: hypothetical protein A_TM017A05
MEAAVARADTAAFFSGQEDAAGGSISRLPARVAGSIVRGVITFIFATVGTILGAITGGMIGLATESGLVRGAGIGAISGAVVAMEVVDRSMAMWRSDECGIWSVLYVLDVIWSLLTGRLVREKVDPAVQNAVDSQMNAAGDGFSDSPPTLSEMFDMGSASFKGMAADAIAELPATTITEQQAAVQDGGCSVCLQEFEAGEAARSLPECRHTFHMSCIDGWLCRHASCPLCRRAV

SEQ ID NO: 17364 - protein, 176 aa, Triticum aestivum
  peptide (1)..(176): Ceres Seq. ID no. 12784066
  misc_feature (131)..(172): Pfam Name: RING finger Pfam Description: Zinc finger, C3HC4 type
  misc_feature (1)..(174): NCBI GI NO: 18855037 NR Description: putative zinc finger protein [Oryza sativa]
  misc_feature (1)..(176): NCBI GI NO: 30680091 NR Description: expressed protein [Arabidopsis thaliana]
  misc_feature (1)..(176): NCBI GI NO: 37536572 NR Description: hypothetical protein
  misc_feature (1)..(176): NCBI GI NO: 26452210 NR Description: unknown protein [Arabidopsis thaliana]
  misc_feature (1)..(171): NCBI GI NO: 25411815 NR Description: hypothetical protein At2g17730
  misc_feature (1)..(174): NCBI GI NO: 26451101 NR Description: unknown protein [Arabidopsis thaliana]
  misc_feature (1)..(174): NCBI GI NO: 15239242 NR Description: putative protein; protein id: At5g66070.1
  misc_feature (1)..(174): NCBI GI NO: 27524902 NR Description: NEP1-interacting protein [Arabidopsis thaliana]
  misc_feature (1)..(176): NCBI GI NO: 33146606 NR Description: putative NEP1-interacting protein 2
  misc_feature (1)..(171): NCBI GI NO: 7485279 NR Description: hypothetical protein A_TM017A05
MIGLATESGLVRGAGIGAISGAVVAMEVVDRSMAMWRSDECGIWSVLYVLDVIWSLLTGRLVREKVDPAVQNAVDSQMNAAGDGFSDSPPTLSEMFDMGSASFKGMAADAIAELPATTITEQQAAVQDGGCSVCLQEFEAGEAARSLPECRHTFHMSCIDGWLCRHASCPLCRRAV

SEQ ID NO: 17365 - protein, 151 aa, Triticum aestivum
  peptide (1)..(151): Ceres Seq. ID no. 12784067
  misc_feature (106)..(147): Pfam Name: RING finger Pfam Description: Zinc finger, C3HC4 type
  misc_feature (1)..(149): NCBI GI NO: 18855037 NR Description: putative zinc finger protein [Oryza sativa]
  misc_feature (1)..(151): NCBI GI NO: 30680091 NR Description: expressed protein [Arabidopsis thaliana]
  misc_feature (1)..(151): NCBI GI NO: 37536572 NR Description: hypothetical protein
  misc_feature (1)..(151): NCBI GI NO: 26452210 NR Description: unknown protein [Arabidopsis thaliana]
  misc_feature (1)..(146): NCBI GI NO: 25411815 NR Description: hypothetical protein At2g17730
  misc_feature (1)..(149): NCBI GI NO: 26451101 NR Description: unknown protein [Arabidopsis thaliana]
  misc_feature (1)..(149): NCBI GI NO: 15239242 NR Description: putative protein; protein id: At5g66070.1
  misc_feature (1)..(149): NCBI GI NO: 27524902 NR Description: NEP1-interacting protein [Arabidopsis thaliana]
  misc_feature (1)..(151): NCBI GI NO: 33146606 NR Description: putative NEP1-interacting protein 2
  misc_feature (1)..(146): NCBI GI NO: 7485279 NR Description: hypothetical protein A_TM017A05
MEVVDRSMAMWRSDECGIWSVLYVLDVIWSLLTGRLVREKVDPAVQNAVDSQMNAAGDGFSDSPPTLSEMFDMGSASFKGMAADAIAELPATTITEQQAAVQDGGCSVCLQEFEAGEAARSLPECRHTFHMSCIDGWLCRHASCPLCRRAV

SEQ ID NO: 17366 - DNA, 1379 bp, Triticum aestivum
  misc_feature (1)..(1379): Ceres Seq. ID no. 13659489
aaaacacggcagagttttcccctttcccccctcctccctccccactcgccaaaaatcctcgatccaaatccccactcccggcgacgcgacgcggccatgcgcagctgccgataggcgacgactgcagcgaccacgcacgagcggccatggacgagggctacgccagcctccccaccagccacctcctcggctccgtccccgctgtggctgtggctcccgatgagaggaagcccggtgcccccgccgaagttggaaatgccgctgccacctcgcgccttcagcagtttccgcctgctcctgctgccaacggaggagggtaccagcctccagggagtcctctaggtggagatgtagaaacacagacaaactggaaaggatacttcaatgttgcctcttatactccatatttcaatgttgatactgatgtcgttgttgacagacttatcagttcagtttatccaatggatgggtttttcaggaagatagatgctaatcctgacatgtatggacccttatggatcaccactacactgatattcatgctggctgcattcggaaactttgccacttatctaatgcaaaggaaaagtgatctgaatatatggaactttgatgtcagctatttcagtttggcggcatcagtcatgtacggttatgctatcgtggtacctgctgcattctttttcctgtttcagtactttggatcacgcccaagccttctccggttttggtgtatgtggggctattctctgttcatcttcgtgccggcatctatactgctccttattcctgtggaatttcttcgctgggtcatcatagctggtgctggtggtgcatcatcttggttcatctttttaaacttgaaggaatgcaccgaaggagctgatatgatggctttaatcgcaagtgcagcagtgctgcagtttgctctggcactgttcatcaaagttttcttttttgcctgagatctattctgtgttgcttcaggtgagctggatgttttctttgtgtccccgtcgttctgttctgccattcatctttccgaggaccaggcagtggactagtttcaccctacatacatattgaccctagatttgatagaccttgggagtgtctgttttcaagatttttgactcctgtagttaagggaatttcactgtgtgcgttccagtgcgaagttactaagtttgcatctaaatttgtacctggtgaactttctgccaccgtgttgtacaacaacggtggttagcaagaatgtgaagctcttttttgtttgtacaatccattgctgtgaatgcatggttttctcatgtttctatccagcataaaaaaaaaaaaaaaaaagcttatcgataccgtcgacctcgagggggggcccg

SEQ ID NO: 17367 - protein, 320 aa, Triticum aestivum
  peptide (1)..(320): Ceres Seq. ID no. 13659490
  misc_feature (136)..(292): Pfam Name: Pfam Description:  Yip1 domain
  misc_feature (49)..(319): NCBI GI NO: 30688039 NR Description: expressed protein [Arabidopsis thaliana]
  misc_feature (53)..(319): NCBI GI NO: 30690667 NR Description: expressed protein [Arabidopsis thaliana]
  misc_feature (53)..(319): NCBI GI NO: 38564308 NR Description: At5g27490 [Arabidopsis thaliana]
  misc_feature (53)..(319): NCBI GI NO: 6729038 NR Description: unknown protein [Arabidopsis thaliana]
  misc_feature (53)..(319): NCBI GI NO: 30679454 NR Description: expressed protein [Arabidopsis thaliana]
  misc_feature (52)..(319): NCBI GI NO: 34912560 NR Description: P0410E03.18
  misc_feature (89)..(319): NCBI GI NO: 18859855 NR Description: CG4645-PA [Drosophila melanogaster]
  misc_feature (102)..(320): NCBI GI NO: 40740298 NR Description: hypothetical protein AN4017.2
  misc_feature (108)..(319): NCBI GI NO: 17536971 NR Description: Putative membrane protein
  misc_feature (81)..(319): NCBI GI NO: 13128976 NR Description: hypothetical protein MGC3262 [Homo sapiens]
NTAEFSPFPPPPSPLAKNPRSKSPLPATRRGHAQLPIGDDCSDHARAAMDEGYASLPTSHLLGSVPAVAVAPDERKPGAPAEVGNAAATSRLQQFPPAPAANGGGYQPPGSPLGGDVETQTNWKGYFNVASYTPYFNVDTDVVVDRLISSVYPMDGFFRKIDANPDMYGPLWITTTLIFMLAAFGNFATYLMQRKSDLNIWNFDVSYFSLAASVMYGYAIVVPAAFFFLFQYFGSRPSLLRFWCMWGYSLFIFVPASILLLIPVEFLRWVIIAGAGGASSWFIFLNLKECTEGADMMALIASAAVLQFALALFIKVFFFA

SEQ ID NO: 17368 - protein, 272 aa, Triticum aestivum
  peptide (1)..(272): Ceres Seq. ID no. 13659491
  misc_feature (88)..(244): Pfam Name: Pfam Description:  Yip1 domain
  misc_feature (1)..(271): NCBI GI NO: 30688039 NR Description: expressed protein [Arabidopsis thaliana]
  misc_feature (5)..(271): NCBI GI NO: 30690667 NR Description: expressed protein [Arabidopsis thaliana]
  misc_feature (5)..(271): NCBI GI NO: 38564308 NR Description: At5g27490 [Arabidopsis thaliana]
  misc_feature (5)..(271): NCBI GI NO: 6729038 NR Description: unknown protein [Arabidopsis thaliana]
  misc_feature (5)..(271): NCBI GI NO: 30679454 NR Description: expressed protein [Arabidopsis thaliana]
  misc_feature (4)..(271): NCBI GI NO: 34912560 NR Description: P0410E03.18
  misc_feature (41)..(271): NCBI GI NO: 18859855 NR Description: CG4645-PA [Drosophila melanogaster]
  misc_feature (54)..(272): NCBI GI NO: 40740298 NR Description: hypothetical protein AN4017.2
  misc_feature (60)..(271): NCBI GI NO: 17536971 NR Description: Putative membrane protein
  misc_feature (33)..(271): NCBI GI NO: 13128976 NR Description: hypothetical protein MGC3262 [Homo sapiens]
MDEGYASLPTSHLLGSVPAVAVAPDERKPGAPAEVGNAAATSRLQQFPPAPAANGGGYQPPGSPLGGDVETQTNWKGYFNVASYTPYFNVDTDVVVDRLISSVYPMDGFFRKIDANPDMYGPLWITTTLIFMLAAFGNFATYLMQRKSDLNIWNFDVSYFSLAASVMYGYAIVVPAAFFFLFQYFGSRPSLLRFWCMWGYSLFIFVPASILLLIPVEFLRWVIIAGAGGASSWFIFLNLKECTEGADMMALIASAAVLQFALALFIKVFFFA

SEQ ID NO: 17369 - protein, 167 aa, Triticum aestivum
  peptide (1)..(167): Ceres Seq. ID no. 13659492
  misc_feature (1)..(139): Pfam Name: Pfam Description:  Yip1 domain
  misc_feature (1)..(166): NCBI GI NO: 30688039 NR Description: expressed protein [Arabidopsis thaliana]
  misc_feature (1)..(166): NCBI GI NO: 30690667 NR Description: expressed protein [Arabidopsis thaliana]
  misc_feature (1)..(166): NCBI GI NO: 38564308 NR Description: At5g27490 [Arabidopsis thaliana]
  misc_feature (1)..(166): NCBI GI NO: 6729038 NR Description: unknown protein [Arabidopsis thaliana]
  misc_feature (1)..(166): NCBI GI NO: 30679454 NR Description: expressed protein [Arabidopsis thaliana]
  misc_feature (1)..(166): NCBI GI NO: 34912560 NR Description: P0410E03.18
  misc_feature (1)..(166): NCBI GI NO: 18859855 NR Description: CG4645-PA [Drosophila melanogaster]
  misc_feature (1)..(167): NCBI GI NO: 40740298 NR Description: hypothetical protein AN4017.2
  misc_feature (1)..(166): NCBI GI NO: 17536971 NR Description: Putative membrane protein
  misc_feature (1)..(166): NCBI GI NO: 13128976 NR Description: hypothetical protein MGC3262 [Homo sapiens]
MDGFFRKIDANPDMYGPLWITTTLIFMLAAFGNFATYLMQRKSDLNIWNFDVSYFSLAASVMYGYAIVVPAAFFFLFQYFGSRPSLLRFWCMWGYSLFIFVPASILLLIPVEFLRWVIIAGAGGASSWFIFLNLKECTEGADMMALIASAAVLQFALALFIKVFFFA

SEQ ID NO: 17370 - DNA, 885 bp, Triticum aestivum
  misc_feature (1)..(885): Ceres Seq. ID no. 13660037
agaacatcytaatcgaaaasgggagccgamccaaataggcaacctaaagtagaaaacagtccacgccgccgcggcaccgagcgaccccgcgggcgtccttggaagaagacgaagcggcggcgacgacgacctaggcagaccgctcgctcgtgttggagcctggatggcgtccggaggcatcgcccgcggccgcctcgccgaggagcgcaagtcgtggcgcaagaaccacccccatggcttcgtggccaagccggagaccctgccggatgggtccgtcaatctcatggtctggcggtgcgtcatccccggcaagccagggactgactgggaaggtggatatttcccgctaactctgcaatttgatgataattacccaacaaccgctcctagctgcaggttcccagcaggtttcttccatatcaatgtctatgattctggagtagtatgcctatcgatactgggtgatgcatggaaaccttcaattacagtgaagcaggttttggtaggcatccaggagttgctggatgacccaaatcctaactcagccgcacagcatcgatgctatgaactctataagaagaacatgccagagtacaggaacaaagtccgtgagcagaccaagcgctacccttcgcgcatgtagctactctagtagtgcataatattagtgtgcatttcgttggggactgaagtctagagttgcgccgcgatgggggtgtagttagcgcaatggtagtgtatttgttggaactgctgaactgcacttttgagtacatcttcgctacgaattgttccgggcctcggtagcttatctcaatgtagtttgggtgagctttgctgacccttttttttactttgtgatgaaaagagatatccttttcttcc

SEQ ID NO: 17371 - protein, 159 aa, Triticum aestivum
  peptide (1)..(159): Ceres Seq. ID no. 15220007
  misc_feature (1)..(159): NCBI GI NO: 38345867 NR Description: OSJNBa0064M23.9
  misc_feature (3)..(157): NCBI GI NO: 20975734 NR Description: putative ubiquitin-conjugating enzyme
  misc_feature (3)..(157): NCBI GI NO: 37536440 NR Description: putative ubiquitin-conjugating enzyme
  misc_feature (3)..(156): NCBI GI NO: 25446690 NR Description: Putative ubiquitin-conjugating enzyme
  misc_feature (1)..(157): NCBI GI NO: 15230881 NR Description: ubiquitin-conjugating enzyme, putative
  misc_feature (5)..(156): NCBI GI NO: 7621708 NR Description: putative E2 enzyme Ubc9 [Dictyostelium discoideum]
  misc_feature (5)..(157): NCBI GI NO: 2194010 NR Description: Chain A, Human Ubiquitin-Conjugating Enzyme Ubc9
  misc_feature (5)..(157): NCBI GI NO: 20150955 NR Description: Chain A
  misc_feature (5)..(157): NCBI GI NO: 3212324 NR Description: Human Ubc9
  misc_feature (5)..(157): NCBI GI NO: 4507785 NR Description: ubiquitin-conjugating enzyme E2I
MASGGIARGRLAEERKSWRKNHPHGFVAKPETLPDGSVNLMVWRCVIPGKPGTDWEGGYFPLTLQFDDNYPTTAPSCRFPAGFFHINVYDSGVVCLSILGDAWKPSITVKQVLVGIQELLDDPNPNSAAQHRCYELYKKNMPEYRNKVREQTKRYPSRM

SEQ ID NO: 17372 - protein, 119 aa, Triticum aestivum
  peptide (1)..(119): Ceres Seq. ID no. 15220008
  misc_feature (1)..(119): NCBI GI NO: 38345867 NR Description: OSJNBa0064M23.9
  misc_feature (1)..(117): NCBI GI NO: 20975734 NR Description: putative ubiquitin-conjugating enzyme
  misc_feature (1)..(117): NCBI GI NO: 37536440 NR Description: putative ubiquitin-conjugating enzyme
  misc_feature (1)..(116): NCBI GI NO: 25446690 NR Description: Putative ubiquitin-conjugating enzyme
  misc_feature (1)..(117): NCBI GI NO: 15230881 NR Description: ubiquitin-conjugating enzyme, putative
  misc_feature (1)..(116): NCBI GI NO: 7621708 NR Description: putative E2 enzyme Ubc9 [Dictyostelium discoideum]
  misc_feature (1)..(117): NCBI GI NO: 2194010 NR Description: Chain A, Human Ubiquitin-Conjugating Enzyme Ubc9
  misc_feature (1)..(117): NCBI GI NO: 20150955 NR Description: Chain A
  misc_feature (1)..(117): NCBI GI NO: 4507785 NR Description: ubiquitin-conjugating enzyme E2I
  misc_feature (1)..(117): NCBI GI NO: 3212324 NR Description: Human Ubc9
MVWRCVIPGKPGTDWEGGYFPLTLQFDDNYPTTAPSCRFPAGFFHINVYDSGVVCLSILGDAWKPSITVKQVLVGIQELLDDPNPNSAAQHRCYELYKKNMPEYRNKVREQTKRYPSRM

SEQ ID NO: 17373 - DNA, 762 bp, Triticum aestivum
  misc_feature (1)..(762): Ceres Seq. ID no. 12626722
aagactttgggctcacccgatgcttttcccctcccccacagccctcgtcctcttggtcggatcttctctctcgagtcttgtccaggccgcgccgccacagccacgccgcctagtgctatagttcttccctcccctcccctccctccatcccaccggccgcctgcgtccaatccgtcctgttgattccgaattttcaatcaatctttctaacaacagctagcttcttctcccccttccgcagatggagatgccgacgggttcttcgcaggcaggtggccgcttccctgtgccgcacaagtccctctccttggatatcaagggcaacaagactgacattgttatcagcaaatacgaagataactttctggtcattgtgacacagattggatgcatgggaaccatattagctgctaagaaagatgaaagtgttttctctgatccaacctacaatgtatctgttctttttgggaagagggatgagccactcctgctagtttgtgcacgccaacttatcgagcatataagtggtagtggctcagctcgtccgttggtgatctcttttggtttgaaggatcattcccagggaacatcgaaagatgtagtttcttccatcgttgacaaccgcctatggtgataactttgcaaaggttgggatgggcatttacagtttcggttcatcttcagagatattgacatacacaagctgtcagagcaaaaccagcccttccttaccatgcatgaatctctagaaactatgtaatg

SEQ ID NO: 17374 - protein, 130 aa, Triticum aestivum
  peptide (1)..(130): Ceres Seq. ID no. 12626723
  misc_feature (1)..(130): NCBI GI NO: 37534018 NR Description: hypothetical protein
  misc_feature (14)..(130): NCBI GI NO: 15241480 NR Description: putative protein; protein id: At5g14710
  misc_feature (58)..(94): NCBI GI NO: 34894978 NR Description: B1088D01.11
  misc_feature (27)..(46): NCBI GI NO: 34894978 NR Description: B1088D01.11
MEMPTGSSQAGGRFPVPHKSLSLDIKGNKTDIVISKYEDNFLVIVTQIGCMGTILAAKKDESVFSDPTYNVSVLFGKRDEPLLLVCARQLIEHISGSGSARPLVISFGLKDHSQGTSKDVVSSIVDNRLW

SEQ ID NO: 17375 - protein, 128 aa, Triticum aestivum
  peptide (1)..(128): Ceres Seq. ID no. 12626724
  misc_feature (1)..(128): NCBI GI NO: 37534018 NR Description: hypothetical protein
  misc_feature (12)..(128): NCBI GI NO: 15241480 NR Description: putative protein; protein id: At5g14710
  misc_feature (56)..(92): NCBI GI NO: 34894978 NR Description: B1088D01.11
  misc_feature (25)..(44): NCBI GI NO: 34894978 NR Description: B1088D01.11
MPTGSSQAGGRFPVPHKSLSLDIKGNKTDIVISKYEDNFLVIVTQIGCMGTILAAKKDESVFSDPTYNVSVLFGKRDEPLLLVCARQLIEHISGSGSARPLVISFGLKDHSQGTSKDVVSSIVDNRLW

SEQ ID NO: 17376 - protein, 80 aa, Triticum aestivum
  peptide (1)..(80): Ceres Seq. ID no. 12626725
  misc_feature (1)..(80): NCBI GI NO: 37534018 NR Description: hypothetical protein
  misc_feature (1)..(80): NCBI GI NO: 15241480 NR Description: putative protein; protein id: At5g14710
  misc_feature (8)..(44): NCBI GI NO: 34894978 NR Description: B1088D01.11
MGTILAAKKDESVFSDPTYNVSVLFGKRDEPLLLVCARQLIEHISGSGSARPLVISFGLKDHSQGTSKDVVSSIVDNRLW

SEQ ID NO: 17377 - DNA, 1627 bp, Triticum aestivum
  misc_feature (1)..(1627): Ceres Seq. ID no. 15226673
aagaacgtgacatgggcgcacattgacattaggctgctgctgccattccttcctctttcccctccttccacatcccagtcttctccacccacgccaccaaacccccgagatcacgcgagctatatatactgcatattctcccggccctgcaaagcgaggcctctattacttactgatatccccgccgaaatcaagatggggctgcggacctgcggcgccatggaaggcgagcacgttgtcgcctcgcctttcttcgagtggttgaagccgccgccggcgtcgccgtcctcgtcgagatcgtcgtcgactttctcgtcctcctcgtcgtctatggcgtctgggcaccaagaggatcgcagcagcgtggcatgcttgcccctgctccgcatgctcgaggaggggaagggggctggtggtgaccatgatcaccctgcacctccagtcaaggaagagatcatgggcagcggcgcggccgaggtgctggggcctggcgtggatctgaatatcggcttgccggttggtggatcttgcgatgatgacatcatggaggaggagagccaggaggaagatgatgaccacgactgtgacgaagaggaggaggaagagatggatgagttggaacctaaccatggcggttgcaaggtggaggcagaggagaaagagaagcacggcgagccggtggtctcggtggaaggatcaaacagcgtcagcatgccggaattcggcgtgctcggagcagagagcggcgtgcccatgagctgcgggtactggatcccgacgccggcgcagatcctcgtcggcccggtgcagtttgtctgccatgtctgtaacaagagcttcaacagatacaataacatgcagatgcacatgtggggccacgggcgcgagtaccgcaagggcccggagtcgctcaagggcacgcagacgctggcgctcctgaagctgccgtgctactgctgcgccgccgggtgccggaacagcgtggcccacccgcgcgcgcggccgctcaaggacttccgcaccctgcagacgcactacaagcgcaagcacggcgccaggcccttccgctgccgccgctgcgccaagcccttcgccgtcaagggcgactggcgcacgcacgagaagaactgcggcaagcgctggttctgcgcctgcggctccgacttcaagcacaagcgctcgctcaacgaccacgtccgctcattcggcggcgaccacctccccgtcgccctcgacggcgcccccgcccccgcccccgcccccgtcgaggaccgccgcatcatacgcttccaacggtgagatcgtacgtcgaccgagctagctgatcgtactacatagatcatatatatgcatgcatgcatgcagtgcatgctagggtgcatgcaggaggagcaacgaggtaagtgatagcgcaataagggggttctcgaccagttgctaaaagctgtgaagtagctgaattttcttcagccggactgtgggagctgcaggcagtgctattagctaggctgtcaatgcagctttgtaatggagaaaatttatcagcttcacaggctaactaaactggtatttggacctagtactgtatacatagcattttgaacatgagacatagcaatttatgagc

SEQ ID NO: 17378 - protein, 432 aa, Triticum aestivum
  peptide (1)..(432): Ceres Seq. ID no. 15226674
  misc_feature (271)..(293): Pfam Name: Pfam Description:  Zinc finger, C2H2 type
  misc_feature (74)..(432): NCBI GI NO: 34908460 NR Description: P0683F02.21
  misc_feature (256)..(425): NCBI GI NO: 9294415 NR Description: zinc finger-like protein [Arabidopsis thaliana]
  misc_feature (256)..(425): NCBI GI NO: 30685975 NR Description: DNA-binding protein -related
  misc_feature (256)..(412): NCBI GI NO: 15223781 NR Description: expressed protein [Arabidopsis thaliana]
  misc_feature (242)..(413): NCBI GI NO: 28973719 NR Description: putative zinc finger protein
  misc_feature (256)..(413): NCBI GI NO: 15230370 NR Description: zinc finger - like protein [Arabidopsis thaliana]
  misc_feature (183)..(408): NCBI GI NO: 18253283 NR Description: transparent testa 1 [Arabidopsis thaliana]
  misc_feature (183)..(408): NCBI GI NO: 30693123 NR Description: transparent testa 1 (TT1) protein
  misc_feature (254)..(408): NCBI GI NO: 15223175 NR Description: WIP3 protein [Arabidopsis thaliana]
  misc_feature (256)..(406): NCBI GI NO: 15222242 NR Description: zinc finger protein -related
KNVTWAHIDIRLLLPFLPLSPPSTSQSSPPTPPNPRDHASYIYCIFSRPCKARPLLLTDIPAEIKMGLRTCGAMEGEHVVASPFFEWLKPPPASPSSSRSSSTFSSSSSSMASGHQEDRSSVACLPLLRMLEEGKGAGGDHDHPAPPVKEEIMGSGAAEVLGPGVDLNIGLPVGGSCDDDIMEEESQEEDDDHDCDEEEEEEMDELEPNHGGCKVEAEEKEKHGEPVVSVEGSNSVSMPEFGVLGAESGVPMSCGYWIPTPAQILVGPVQFVCHVCNKSFNRYNNMQMHMWGHGREYRKGPESLKGTQTLALLKLPCYCCAAGCRNSVAHPRARPLKDFRTLQTHYKRKHGARPFRCRRCAKPFAVKGDWRTHEKNCGKRWFCACGSDFKHKRSLNDHVRSFGGDHLPVALDGAPAPAPAPVEDRRIIRFQR

SEQ ID NO: 17379 - protein, 367 aa, Triticum aestivum
  peptide (1)..(367): Ceres Seq. ID no. 15226675
  misc_feature (206)..(228): Pfam Name: Pfam Description:  Zinc finger, C2H2 type
  misc_feature (9)..(367): NCBI GI NO: 34908460 NR Description: P0683F02.21
  misc_feature (191)..(360): NCBI GI NO: 9294415 NR Description: zinc finger-like protein [Arabidopsis thaliana]
  misc_feature (191)..(360): NCBI GI NO: 30685975 NR Description: DNA-binding protein -related
  misc_feature (191)..(347): NCBI GI NO: 15223781 NR Description: expressed protein [Arabidopsis thaliana]
  misc_feature (177)..(348): NCBI GI NO: 28973719 NR Description: putative zinc finger protein
  misc_feature (191)..(348): NCBI GI NO: 15230370 NR Description: zinc finger - like protein [Arabidopsis thaliana]
  misc_feature (118)..(343): NCBI GI NO: 18253283 NR Description: transparent testa 1 [Arabidopsis thaliana]
  misc_feature (118)..(343): NCBI GI NO: 30693123 NR Description: transparent testa 1 (TT1) protein
  misc_feature (189)..(343): NCBI GI NO: 15223175 NR Description: WIP3 protein [Arabidopsis thaliana]
  misc_feature (191)..(341): NCBI GI NO: 15222242 NR Description: zinc finger protein -related
MGLRTCGAMEGEHVVASPFFEWLKPPPASPSSSRSSSTFSSSSSSMASGHQEDRSSVACLPLLRMLEEGKGAGGDHDHPAPPVKEEIMGSGAAEVLGPGVDLNIGLPVGGSCDDDIMEEESQEEDDDHDCDEEEEEEMDELEPNHGGCKVEAEEKEKHGEPVVSVEGSNSVSMPEFGVLGAESGVPMSCGYWIPTPAQILVGPVQFVCHVCNKSFNRYNNMQMHMWGHGREYRKGPESLKGTQTLALLKLPCYCCAAGCRNSVAHPRARPLKDFRTLQTHYKRKHGARPFRCRRCAKPFAVKGDWRTHEKNCGKRWFCACGSDFKHKRSLNDHVRSFGGDHLPVALDGAPAPAPAPVEDRRIIRFQR

SEQ ID NO: 17380 - protein, 359 aa, Triticum aestivum
  peptide (1)..(359): Ceres Seq. ID no. 15226676
  misc_feature (198)..(220): Pfam Name: Pfam Description:  Zinc finger, C2H2 type
  misc_feature (1)..(359): NCBI GI NO: 34908460 NR Description: P0683F02.21
  misc_feature (183)..(352): NCBI GI NO: 9294415 NR Description: zinc finger-like protein [Arabidopsis thaliana]
  misc_feature (183)..(352): NCBI GI NO: 30685975 NR Description: DNA-binding protein -related
  misc_feature (183)..(339): NCBI GI NO: 15223781 NR Description: expressed protein [Arabidopsis thaliana]
  misc_feature (169)..(340): NCBI GI NO: 28973719 NR Description: putative zinc finger protein
  misc_feature (183)..(340): NCBI GI NO: 15230370 NR Description: zinc finger - like protein [Arabidopsis thaliana]
  misc_feature (110)..(335): NCBI GI NO: 18253283 NR Description: transparent testa 1 [Arabidopsis thaliana]
  misc_feature (110)..(335): NCBI GI NO: 30693123 NR Description: transparent testa 1 (TT1) protein
  misc_feature (181)..(335): NCBI GI NO: 15223175 NR Description: WIP3 protein [Arabidopsis thaliana]
  misc_feature (183)..(333): NCBI GI NO: 15222242 NR Description: zinc finger protein -related
MEGEHVVASPFFEWLKPPPASPSSSRSSSTFSSSSSSMASGHQEDRSSVACLPLLRMLEEGKGAGGDHDHPAPPVKEEIMGSGAAEVLGPGVDLNIGLPVGGSCDDDIMEEESQEEDDDHDCDEEEEEEMDELEPNHGGCKVEAEEKEKHGEPVVSVEGSNSVSMPEFGVLGAESGVPMSCGYWIPTPAQILVGPVQFVCHVCNKSFNRYNNMQMHMWGHGREYRKGPESLKGTQTLALLKLPCYCCAAGCRNSVAHPRARPLKDFRTLQTHYKRKHGARPFRCRRCAKPFAVKGDWRTHEKNCGKRWFCACGSDFKHKRSLNDHVRSFGGDHLPVALDGAPAPAPAPVEDRRIIRFQR

SEQ ID NO: 17381 - DNA, 1072 bp, Triticum aestivum
  misc_feature (1)..(1072): Ceres Seq. ID no. 15225398
cccactgccactgtacccgtgacgagctgctgctgctaagggacacgcgcgcgcgcgtacacgcgaacagcagtgtcacgagcacgaccgacggccatggcgagcggcgacccgaagccggacgaaaactactcctccgatggcggtgacaccaccgacgccgagtcctccgacgagtccccgcatcagccgcggaggggcccccgcgccaaccccatactgacgcgcctctccgtgtcgcggaatccgagcccgctctccgccgccaccgcggcgcctggggtctgcctcctccgcttcgcctgggagtcggccgccggttccctcgtcggcgccgtcgttggatatggaaaaggtttggttactacaaaagggtttaaaggctcatttgctgacgctgcctcttctgctaagatatttgctgttcttgccggcgttcaaagcttggtttcttgctctttgagaaagctacgtggcaaagatgacgttattaacgcaggagttgcaggctgttgcactggccttgctttgagttttccaggtgcaccgcaaactctgattcagagctgtctggcctttggaactttctcgtacatcatagaaaagctcaataggcagcaacctgcgcttgcgctaccgtcagccgctggcctgaaggatctgaaggctggcccgagtgttcttccccccttcacgcttaacatgccgcacgatgcgatggaaggtttttcttcgtttcaaaactttttgtcaaagttccgagaaagctgaaggacctgggggcatgatactttgatatctgtccatgtaaatgcatcgagctgagctttttgtttccagtttagtgtatcgcgaaggatgatcattctactctgcctttgaacagttttgcaaattaccctccagaaggaaatcagcttagctggtgtccaacctgatgaataatcgtgtataacctgggcagcagattgcctgaacctttgtgatagtcctttactagcgaatgctcttgtatatgacgggtactcggtaatgtttcatcaggtctcagaataagactagactgataact

SEQ ID NO: 17382 - protein, 224 aa, Triticum aestivum
  peptide (1)..(224): Ceres Seq. ID no. 15225399
  misc_feature (60)..(175): Pfam Name: Pfam Description:  Tim17/Tim22/Tim23 family
  misc_feature (13)..(220): NCBI GI NO: 15240525 NR Description: expressed protein [Arabidopsis thaliana]
  misc_feature (13)..(220): NCBI GI NO: 9758183 NR Description: contains similarity to unknownprotein~gene_id:MTE17
  misc_feature (50)..(223): NCBI GI NO: 18416798 NR Description: expressed protein [Arabidopsis thaliana]
  misc_feature (59)..(218): NCBI GI NO: 37533490 NR Description: unknown protein
  misc_feature (50)..(223): NCBI GI NO: 7485327 NR Description: hypothetical protein F10M23
  misc_feature (50)..(213): NCBI GI NO: 24414272 NR Description: Unknown protein
  misc_feature (103)..(170): NCBI GI NO: 18398755 NR Description: expressed protein [Arabidopsis thaliana]
MASGDPKPDENYSSDGGDTTDAESSDESPHQPRRGPRANPILTRLSVSRNPSPLSAATAAPGVCLLRFAWESAAGSLVGAVVGYGKGLVTTKGFKGSFADAASSAKIFAVLAGVQSLVSCSLRKLRGKDDVINAGVAGCCTGLALSFPGAPQTLIQSCLAFGTFSYIIEKLNRQQPALALPSAAGLKDLKAGPSVLPPFTLNMPHDAMEGFSSFQNFLSKFRES

SEQ ID NO: 17383 - DNA, 1229 bp, Triticum aestivum
  misc_feature (1)..(1229): Ceres Seq. ID no. 13663874
tgaacccgtctcttactttacctccttggaggaaaacccaactggagcccctcctttttctgccttcggcttgggtcctatattataaaccaaagggaggaaggacagctagctagctgtatcagagagccccatacctagtcgatcgtctgctctcttctgcctagctaggtttaccctccttatctgcgtgtttggcagagttccgggctgagactaagaagaggtcgagatggggaggggaaggattgagatcaagaggatcgagaacaccactagccggcaggtgaccttctgcaagcgccggaacgggctcctcaaaaaggcctacgagctctccgtcctgtgcgacgccgaggtggcgctcatcgtcttctccagccgcggccgcctctacgagtactccaacaacagtgtcaaggctacaattgacaggtacaagaaggcacatgcttgtggctcaacctctggggtacctctcatagaagtcaatgctcagcaatactaccagcaagaagctgcaaagctgcgccaccagatccagatgctgcaaagcactaacaagcacttggttggtgattctgttgggaacctgtcactcaaggagctgaagcaactcgaaagccggcttgagaaaggcattgcgaagatcagggccaggaagaatgagctcctatcttctgagatcaactacatggtcaaaagggagatagagcttcagagtgacagcattgatctcagaaccaagattgcggaggaggagcagcggttgcagcaggtgactatcgccaggccctcggtggcgccggagctgaaccctttcaccgcactggacatgaagtgcttcttccctgccaacctcttcgaggcggcggtgcatgcgcacgcgcaggcacaggctcaggctcaggctcaggcctcgcttcagctgaacctaggctaccagcagcttgctccaccgggcgccggcgatgtggctcatcagttctagtcaacctgcaggagctcttgcttgactacacacactgcaataaaactggaaagtcgtcggcagtgttatcagtactcaactgttccggtcaaaccgtctggctaagatatatgtgtgctaagttttattgtctcaagtacctctaaatttgccgctggtgtagaaccaaatttctgagataaaacctattgattaataattatttttttccttttcttttttgatgaaaaggaggtcg

SEQ ID NO: 17384 - protein, 252 aa, Triticum aestivum
  peptide (1)..(252): Ceres Seq. ID no. 13663875
  misc_feature (74)..(175): Pfam Name: Pfam Description:  K-box region
  misc_feature (1)..(245): NCBI GI NO: 6470126 NR Description: transcription factor [Oryza sativa]
  misc_feature (1)..(245): NCBI GI NO: 33242915 NR Description: MADS protein
  misc_feature (1)..(250): NCBI GI NO: 7446525 NR Description: MADS box protein - maize
  misc_feature (1)..(252): NCBI GI NO: 951172 NR Description: MADS box protein
  misc_feature (11)..(252): NCBI GI NO: 542192 NR Description: floral homeotic protein ZAG2 - maize (fragment)
  misc_feature (25)..(250): NCBI GI NO: 29372744 NR Description: putative MADS-domain transcription factor
  misc_feature (1)..(243): NCBI GI NO: 29467048 NR Description: MADS-box transcription factor AG
  misc_feature (1)..(218): NCBI GI NO: 23194453 NR Description: MADS box protein GHMADS-2 [Gossypium hirsutum]
  misc_feature (1)..(212): NCBI GI NO: 20385590 NR Description: MADS-box protein 5 [Vitis vinifera]
  misc_feature (1)..(245): NCBI GI NO: 21955182 NR Description: transcription factor MADS1 [Hyacinthus orientalis]
MGRGRIEIKRIENTTSRQVTFCKRRNGLLKKAYELSVLCDAEVALIVFSSRGRLYEYSNNSVKATIDRYKKAHACGSTSGVPLIEVNAQQYYQQEAAKLRHQIQMLQSTNKHLVGDSVGNLSLKELKQLESRLEKGIAKIRARKNELLSSEINYMVKREIELQSDSIDLRTKIAEEEQRLQQVTIARPSVAPELNPFTALDMKCFFPANLFEAAVHAHAQAQAQAQAQASLQLNLGYQQLAPPGAGDVAHQF

SEQ ID NO: 17385 - protein, 148 aa, Triticum aestivum
  peptide (1)..(148): Ceres Seq. ID no. 13663876
  misc_feature (1)..(71): Pfam Name: Pfam Description:  K-box region
  misc_feature (1)..(141): NCBI GI NO: 6470126 NR Description: transcription factor [Oryza sativa]
  misc_feature (1)..(141): NCBI GI NO: 33242915 NR Description: MADS protein
  misc_feature (1)..(146): NCBI GI NO: 7446525 NR Description: MADS box protein - maize
  misc_feature (1)..(148): NCBI GI NO: 951172 NR Description: MADS box protein
  misc_feature (1)..(148): NCBI GI NO: 542192 NR Description: floral homeotic protein ZAG2 - maize (fragment)
  misc_feature (1)..(146): NCBI GI NO: 29372744 NR Description: putative MADS-domain transcription factor
  misc_feature (1)..(139): NCBI GI NO: 29467048 NR Description: MADS-box transcription factor AG
  misc_feature (1)..(114): NCBI GI NO: 23194453 NR Description: MADS box protein GHMADS-2 [Gossypium hirsutum]
  misc_feature (1)..(108): NCBI GI NO: 20385590 NR Description: MADS-box protein 5 [Vitis vinifera]
  misc_feature (1)..(141): NCBI GI NO: 21955182 NR Description: transcription factor MADS1 [Hyacinthus orientalis]
MLQSTNKHLVGDSVGNLSLKELKQLESRLEKGIAKIRARKNELLSSEINYMVKREIELQSDSIDLRTKIAEEEQRLQQVTIARPSVAPELNPFTALDMKCFFPANLFEAAVHAHAQAQAQAQAQASLQLNLGYQQLAPPGAGDVAHQF

SEQ ID NO: 17386 - DNA, 1082 bp, Triticum aestivum
  misc_feature (1)..(1082): Ceres Seq. ID no. 15179906
cccaaccgacacgcgaagccgagccagcagccccgccaaaccctccctccggcgaccccggcgatctactcccccggagacggccgccgcgtctccagctgccgcgctctcttcccaccgtgcctttattggctatcaactgtatagtttgtagtggtttctggggttcttcgcaaaatggtgaagctgacaatgatagcacgtgtcaccgatggccttccgctggcagaagggctggatgacgggcgggatcagaaggattctgatttctacaagcagcaagctaaacttcttttcaagaacttgtcaaaggggcaacatgaagcctcacggatgtcaattgagaccggatcatactttttccattacatcattgaaggccgagtatgctatctaacaatgtgcgaccgttcttatccaaagaaacttgcattccagtacttggaagatctgaaaaatgaatttgagagggtcaatgggagtcaaattgaaactgctgcaaggccttacgctttcattaagtttgatacatacatacagaagactaagaaactgtatttggataccagaacccagaggaacattgcgaaattgaacgatgagctctatgaggtgcatcaaatcatgactcgcaatgttcaagaagttytcggtgtcggtgagaagctagatcaggttagtgaaatgtcaagtaggttgacatttgacacgagaatytatgctgataaggcaaaggatttcaatcgccaggccttcattcggaagtatgctccggttgccattgtgattggggttgtaataatactgttytgggccaagaacaagatatggtgattttactaaacaaggaagccggcctgttataacactggagaaagaaattctggatcaagcgatgcttcgatgacttgtatcccgtatctgcccgttcaagggagtagtttgaagccacctttacacctcgttacaagcagttattcaagtgaatgaattcgttggttgtagtatagaccatatggcggacttgattttgtgaaccctgggaaccgtgcatacaagagctctgtagagtcgagttttcg

SEQ ID NO: 17387 - protein, 218 aa, Triticum aestivum
  peptide (1)..(218): Ceres Seq. ID no. 15179907
  misc_feature (132)..(218): Pfam Name: Pfam Description:  Synaptobrevin
  misc_feature (1)..(218): NCBI GI NO: 28269424 NR Description: putative vesicle trafficking protein
  misc_feature (1)..(218): NCBI GI NO: 15221123 NR Description: vesicle transport protein SEC22, putative
  misc_feature (62)..(218): NCBI GI NO: 25402691 NR Description: hypothetical protein
  misc_feature (1)..(64): NCBI GI NO: 25402691 NR Description: hypothetical protein
  misc_feature (1)..(218): NCBI GI NO: 34904386 NR Description: unnamed protein product
  misc_feature (1)..(121): NCBI GI NO: 34015230 NR Description: putative vesicle trafficking protein
  misc_feature (1)..(121): NCBI GI NO: 35215218 NR Description: putative vesicle trafficking protein
  misc_feature (1)..(212): NCBI GI NO: 4759086 NR Description: vesicle trafficking protein sec22b [Homo sapiens]
  misc_feature (1)..(212): NCBI GI NO: 14290512 NR Description: SEC22 vesicle trafficking protein-like 1
  misc_feature (1)..(212): NCBI GI NO: 1927215 NR Description: ERS-24 [Cricetulus griseus]
  misc_feature (158)..(158): Xaa is any aa, unknown or other
  misc_feature (180)..(180): Xaa is any aa, unknown or other
  misc_feature (211)..(211): Xaa is any aa, unknown or other
MVKLTMIARVTDGLPLAEGLDDGRDQKDSDFYKQQAKLLFKNLSKGQHEASRMSIETGSYFFHYIIEGRVCYLTMCDRSYPKKLAFQYLEDLKNEFERVNGSQIETAARPYAFIKFDTYIQKTKKLYLDTRTQRNIAKLNDELYEVHQIMTRNVQEVXGVGEKLDQVSEMSSRLTFDTRXYADKAKDFNRQAFIRKYAPVAIVIGVVIILXWAKNKIW

SEQ ID NO: 17388 - protein, 213 aa, Triticum aestivum
  peptide (1)..(213): Ceres Seq. ID no. 15179908
  misc_feature (127)..(213): Pfam Name: Pfam Description:  Synaptobrevin
  misc_feature (1)..(213): NCBI GI NO: 28269424 NR Description: putative vesicle trafficking protein
  misc_feature (1)..(213): NCBI GI NO: 15221123 NR Description: vesicle transport protein SEC22, putative
  misc_feature (57)..(213): NCBI GI NO: 25402691 NR Description: hypothetical protein
  misc_feature (1)..(59): NCBI GI NO: 25402691 NR Description: hypothetical protein
  misc_feature (1)..(213): NCBI GI NO: 34904386 NR Description: unnamed protein product
  misc_feature (1)..(116): NCBI GI NO: 34015230 NR Description: putative vesicle trafficking protein
  misc_feature (1)..(116): NCBI GI NO: 35215218 NR Description: putative vesicle trafficking protein
  misc_feature (1)..(207): NCBI GI NO: 4759086 NR Description: vesicle trafficking protein sec22b [Homo sapiens]
  misc_feature (1)..(207): NCBI GI NO: 14290512 NR Description: SEC22 vesicle trafficking protein-like 1
  misc_feature (1)..(207): NCBI GI NO: 1927215 NR Description: ERS-24 [Cricetulus griseus]
  misc_feature (153)..(153): Xaa is any aa, unknown or other
  misc_feature (175)..(175): Xaa is any aa, unknown or other
  misc_feature (206)..(206): Xaa is any aa, unknown or other
MIARVTDGLPLAEGLDDGRDQKDSDFYKQQAKLLFKNLSKGQHEASRMSIETGSYFFHYIIEGRVCYLTMCDRSYPKKLAFQYLEDLKNEFERVNGSQIETAARPYAFIKFDTYIQKTKKLYLDTRTQRNIAKLNDELYEVHQIMTRNVQEVXGVGEKLDQVSEMSSRLTFDTRXYADKAKDFNRQAFIRKYAPVAIVIGVVIILXWAKNKIW

SEQ ID NO: 17389 - protein, 166 aa, Triticum aestivum
  peptide (1)..(166): Ceres Seq. ID no. 15179909
  misc_feature (80)..(166): Pfam Name: Pfam Description:  Synaptobrevin
  misc_feature (1)..(166): NCBI GI NO: 28269424 NR Description: putative vesicle trafficking protein
  misc_feature (1)..(166): NCBI GI NO: 15221123 NR Description: vesicle transport protein SEC22, putative
  misc_feature (10)..(166): NCBI GI NO: 25402691 NR Description: hypothetical protein
  misc_feature (1)..(12): NCBI GI NO: 25402691 NR Description: hypothetical protein
  misc_feature (1)..(166): NCBI GI NO: 34904386 NR Description: unnamed protein product
  misc_feature (1)..(69): NCBI GI NO: 34015230 NR Description: putative vesicle trafficking protein
  misc_feature (1)..(69): NCBI GI NO: 35215218 NR Description: putative vesicle trafficking protein
  misc_feature (1)..(160): NCBI GI NO: 4759086 NR Description: vesicle trafficking protein sec22b [Homo sapiens]
  misc_feature (1)..(160): NCBI GI NO: 14290512 NR Description: SEC22 vesicle trafficking protein-like 1
  misc_feature (1)..(160): NCBI GI NO: 1927215 NR Description: ERS-24 [Cricetulus griseus]
  misc_feature (106)..(106): Xaa is any aa, unknown or other
  misc_feature (128)..(128): Xaa is any aa, unknown or other
  misc_feature (159)..(159): Xaa is any aa, unknown or other
MSIETGSYFFHYIIEGRVCYLTMCDRSYPKKLAFQYLEDLKNEFERVNGSQIETAARPYAFIKFDTYIQKTKKLYLDTRTQRNIAKLNDELYEVHQIMTRNVQEVXGVGEKLDQVSEMSSRLTFDTRXYADKAKDFNRQAFIRKYAPVAIVIGVVIILXWAKNKIW

SEQ ID NO: 17390 - DNA, 1907 bp, Triticum aestivum
  misc_feature (1)..(1907): Ceres Seq. ID no. 13660049
gcataaaggcggcaatgcaaaccgagcaactggaaggaatccccgcaccacgataatcacgaagcgcgacgcaagcgccacaactcaactcccccactgactgcctgtctcctccccaaaccccgcgccgcccaagcgcctcctcgccgccgccgccgccggacccagctagggttccggcgagctcgcggcctcgccgccccgccgcgcctccttcctcgagggctccgctcctcggtgagggcgcccgcccctgcgcccccttgctggatttggtagcagctatgcaaaaggatacaggctctggtgatgtttctccttctcatgtaggacgtgttagacatcggaggcgccctaatgagactgccaccgatgggaatagagccaatgggacggttttgcttgtcagcgaccagaacaagtacaagtcaatgcttatccgtacatattcaagtttgtggatgattggaggctttgtgttcgtagtttatatgggtcatctttatatctgggccatggtggttgtgattcaaatatttatggcaacagagctttttaacctactcagaagatccagcgaagagaaacaactgccagggttcaggctcctgaattggcacttcttcttcacggcaatgttgtttacttatgggcgttttcttagccgggagcttgttaacacagtaacttcagatcacttgctgtataagctcgtcagcggcctaataaagtatcagatgtttatttgctattttctttatattgcaggatttgtatggtttattttgactctgaagaagaagacatacaattatcagttcaaacagtatgcctggacgcacatgatccttttaacggtttttgcccaatcttctttcaccgtggcaaatatatttgaagggatgttctggtttcttctccctgcttcgctcattgtgatcaatgacattgctgcgtatttatttgggttttttctcgggagaacaccattgatcaagttatcaccaaagaaaacatgggaaggttttattggtgcatcggtgacaaccatcatctctgcttttctgttggcaaacgtaatgggtcattttcagtggttaacctgcccaagaaaggacctgtcgacaggatggcttacctgtgatcccggttctatgtttaagccagagcattactttttgggggattgggtgccacaatggtttccatggaaagaagttttccttttacccgtgcagtggcatgctttagcccttgggttgtttgcatcgataatagcaccatttggaggatttttcgcaagtggcttcaagagggcttttaaaataaaggattttggcgacagtatacctgggcatggtggaattactgaccgaatggattgtcaaatggtcatggcagtctttgcatacatatatcaccaatcatttatctcaccccacaatttctctgttgacacaatcttggatcagattgtaagaaacctaacctacgaggagcagaagtccttataccagcaactaggagagatcttccgtgaaaggcagtttatgcaaagctgaagatttatttgcatgaaccacacaaccacacaagacagctgcgtatggttcattatgtagttctagatctatgtacagcatcatagctcctctgtaccgtgatagagtgatgtccttatccagaccattgtacagaacggagtgtggataggggtttaggttcttgatccgctctccacttatgttgcttcttttaatcatctgcgctaattctctccttgttcgttatcatcagtgttcttgtaaaaacagagctggaaatgcttattcgtgtatatcactttgtcggtcttcgcatcaaatattttgtaagcccttagtttgccagtgtcctttgtttttttg

SEQ ID NO: 17391 - protein, 425 aa, Triticum aestivum
  peptide (1)..(425): Ceres Seq. ID no. 13660050
  misc_feature (1)..(416): NCBI GI NO: 20303635 NR Description: putative CDP-diacylglycerol synthetase
  misc_feature (1)..(425): NCBI GI NO: 3121837 NR Description: Phosphatidate cytidylyltransferase
  misc_feature (11)..(420): NCBI GI NO: 30696710 NR Description: phosphatidate cytidylyltransferase (CDS)
  misc_feature (1)..(420): NCBI GI NO: 15235611 NR Description: phosphatidate cytidylyltransferase, putative
  misc_feature (11)..(420): NCBI GI NO: 7484839 NR Description: CDP-diacylglycerol synthetase homolog F24O1
  misc_feature (13)..(420): NCBI GI NO: 15236874 NR Description: phosphatidate cytidylyltransferase, putative
  misc_feature (1)..(133): NCBI GI NO: 37532798 NR Description: putative phosphatidate cytidylyltransferase
  misc_feature (278)..(368): NCBI GI NO: 37532798 NR Description: putative phosphatidate cytidylyltransferase
  misc_feature (387)..(416): NCBI GI NO: 37532798 NR Description: putative phosphatidate cytidylyltransferase
  misc_feature (44)..(415): NCBI GI NO: 40743157 NR Description: hypothetical protein AN5166.2
MQKDTGSGDVSPSHVGRVRHRRRPNETATDGNRANGTVLLVSDQNKYKSMLIRTYSSLWMIGGFVFVVYMGHLYIWAMVVVIQIFMATELFNLLRRSSEEKQLPGFRLLNWHFFFTAMLFTYGRFLSRELVNTVTSDHLLYKLVSGLIKYQMFICYFLYIAGFVWFILTLKKKTYNYQFKQYAWTHMILLTVFAQSSFTVANIFEGMFWFLLPASLIVINDIAAYLFGFFLGRTPLIKLSPKKTWEGFIGASVTTIISAFLLANVMGHFQWLTCPRKDLSTGWLTCDPGSMFKPEHYFLGDWVPQWFPWKEVFLLPVQWHALALGLFASIIAPFGGFFASGFKRAFKIKDFGDSIPGHGGITDRMDCQMVMAVFAYIYHQSFISPHNFSVDTILDQIVRNLTYEEQKSLYQQLGEIFRERQFMQS

SEQ ID NO: 17392 - protein, 376 aa, Triticum aestivum
  peptide (1)..(376): Ceres Seq. ID no. 13660051
  misc_feature (1)..(367): NCBI GI NO: 20303635 NR Description: putative CDP-diacylglycerol synthetase
  misc_feature (1)..(376): NCBI GI NO: 3121837 NR Description: Phosphatidate cytidylyltransferase
  misc_feature (1)..(371): NCBI GI NO: 30696710 NR Description: phosphatidate cytidylyltransferase (CDS)
  misc_feature (1)..(371): NCBI GI NO: 15235611 NR Description: phosphatidate cytidylyltransferase, putative
  misc_feature (1)..(371): NCBI GI NO: 7484839 NR Description: CDP-diacylglycerol synthetase homolog F24O1
  misc_feature (1)..(371): NCBI GI NO: 15236874 NR Description: phosphatidate cytidylyltransferase, putative
  misc_feature (1)..(84): NCBI GI NO: 37532798 NR Description: putative phosphatidate cytidylyltransferase
  misc_feature (229)..(319): NCBI GI NO: 37532798 NR Description: putative phosphatidate cytidylyltransferase
  misc_feature (338)..(367): NCBI GI NO: 37532798 NR Description: putative phosphatidate cytidylyltransferase
  misc_feature (1)..(366): NCBI GI NO: 40743157 NR Description: hypothetical protein AN5166.2
MLIRTYSSLWMIGGFVFVVYMGHLYIWAMVVVIQIFMATELFNLLRRSSEEKQLPGFRLLNWHFFFTAMLFTYGRFLSRELVNTVTSDHLLYKLVSGLIKYQMFICYFLYIAGFVWFILTLKKKTYNYQFKQYAWTHMILLTVFAQSSFTVANIFEGMFWFLLPASLIVINDIAAYLFGFFLGRTPLIKLSPKKTWEGFIGASVTTIISAFLLANVMGHFQWLTCPRKDLSTGWLTCDPGSMFKPEHYFLGDWVPQWFPWKEVFLLPVQWHALALGLFASIIAPFGGFFASGFKRAFKIKDFGDSIPGHGGITDRMDCQMVMAVFAYIYHQSFISPHNFSVDTILDQIVRNLTYEEQKSLYQQLGEIFRERQFMQS

SEQ ID NO: 17393 - protein, 366 aa, Triticum aestivum
  peptide (1)..(366): Ceres Seq. ID no. 13660052
  misc_feature (1)..(357): NCBI GI NO: 20303635 NR Description: putative CDP-diacylglycerol synthetase
  misc_feature (1)..(366): NCBI GI NO: 3121837 NR Description: Phosphatidate cytidylyltransferase
  misc_feature (1)..(361): NCBI GI NO: 30696710 NR Description: phosphatidate cytidylyltransferase (CDS)
  misc_feature (1)..(361): NCBI GI NO: 15235611 NR Description: phosphatidate cytidylyltransferase, putative
  misc_feature (1)..(361): NCBI GI NO: 7484839 NR Description: CDP-diacylglycerol synthetase homolog F24O1
  misc_feature (1)..(361): NCBI GI NO: 15236874 NR Description: phosphatidate cytidylyltransferase, putative
  misc_feature (1)..(74): NCBI GI NO: 37532798 NR Description: putative phosphatidate cytidylyltransferase
  misc_feature (219)..(309): NCBI GI NO: 37532798 NR Description: putative phosphatidate cytidylyltransferase
  misc_feature (328)..(357): NCBI GI NO: 37532798 NR Description: putative phosphatidate cytidylyltransferase
  misc_feature (1)..(356): NCBI GI NO: 40743157 NR Description: hypothetical protein AN5166.2
MIGGFVFVVYMGHLYIWAMVVVIQIFMATELFNLLRRSSEEKQLPGFRLLNWHFFFTAMLFTYGRFLSRELVNTVTSDHLLYKLVSGLIKYQMFICYFLYIAGFVWFILTLKKKTYNYQFKQYAWTHMILLTVFAQSSFTVANIFEGMFWFLLPASLIVINDIAAYLFGFFLGRTPLIKLSPKKTWEGFIGASVTTIISAFLLANVMGHFQWLTCPRKDLSTGWLTCDPGSMFKPEHYFLGDWVPQWFPWKEVFLLPVQWHALALGLFASIIAPFGGFFASGFKRAFKIKDFGDSIPGHGGITDRMDCQMVMAVFAYIYHQSFISPHNFSVDTILDQIVRNLTYEEQKSLYQQLGEIFRERQFMQS

SEQ ID NO: 17394 - DNA, 1142 bp, Triticum aestivum
  misc_feature (1)..(1142): Ceres Seq. ID no. 13659378
ctagaacatcctaatcgaaaaagctaggcagagcccgacccgtcaatcctttcccctccagaaccctccctcccgccccctcccctccccgccaccacccgccgccgccgcctcgccgcggaaaccctagacccctcccccgtccgccccgtccgttcgccgctccgtcgccgccgccacccgcttcagatctcgacgacttccgcccgcgatggaggactgggagaatgatgattttcaaccaatcgcgcctgttgtgaaagctcaacctcttaaaagtaactgggaagatgaagatgtggatgaagatgatgtcaaagaatcttgggaagaggaggaagagaaacctaagccacaacctgtagaaaagcctgctccaaaacctagtgctaaagctgctgtgaaaaaaggcaaacagccctcaacgagtactgaagtagttgatgatgatgttcttgatgatcctatttcagagaagcttcgccaacaaaggctagtggaagaagctgactttaaggcaacagcagagctttttgcaaagaaggacggcagtgaaaagtcactagagactttcatcccgaagtctgagagcgactttgcggaatatgctgagcttatcgcaaacaaaattcgcccgtatgagaaaagctttcactacatgggtctacttaagaatgtcatgagactttccatggcatcgttgaaaggtgcggatgcgaaagaaatatcctcctctgtcacggcaattgctaatgaaaagatcaaggctgagaaagaagctgcagcaggcaaaaagaaaggaggagcaaaaaagaagcagctccatatagagaaaggagaggaggactttgttgcccgaccgggtgcatcttttgacgatcccgacgagttcgacttcatgtgattggctgggaggggaatagcctcttccgtgtaatacctttgaggcaaagcagagactagggtttgcggcggtctgtattcccttcagaggcacctgaacacttggaactgcgtgggaacatgtcttatctatttgaggttgattttgacactcggagaataagaagaacgcttgcggctccctgaggcgtttttcttgttcaaaaaaaaaaaaaaaaaagcttatcgataccgtcgac

SEQ ID NO: 17395 - protein, 230 aa, Triticum aestivum
  peptide (1)..(230): Ceres Seq. ID no. 13659379
  misc_feature (1)..(230): NCBI GI NO: 18408426 NR Description: expressed protein [Arabidopsis thaliana]
  misc_feature (1)..(230): NCBI GI NO: 30693092 NR Description: expressed protein [Arabidopsis thaliana]
  misc_feature (2)..(196): NCBI GI NO: 32766433 NR Description: Unknown (protein for MGC:63801) [Danio rerio]
  misc_feature (2)..(227): NCBI GI NO: 27374365 NR Description: Adam-PA [Drosophila willistoni]
  misc_feature (2)..(227): NCBI GI NO: 27374242 NR Description: CG12131-PA [Drosophila erecta]
  misc_feature (2)..(227): NCBI GI NO: 19921950 NR Description: CG12131-PA [Drosophila melanogaster]
  misc_feature (2)..(230): NCBI GI NO: 27374269 NR Description: Adam-PA [Drosophila pseudoobscura]
  misc_feature (25)..(198): NCBI GI NO: 26349519 NR Description: unnamed protein product [Mus musculus]
  misc_feature (25)..(198): NCBI GI NO: 34856798 NR Description: similar to Eukaryotic translation initiation factor3 subunit 1
  misc_feature (25)..(198): NCBI GI NO: 10435304 NR Description: unnamed protein product [Homo sapiens]
MEDWENDDFQPIAPVVKAQPLKSNWEDEDVDEDDVKESWEEEEEKPKPQPVEKPAPKPSAKAAVKKGKQPSTSTEVVDDDVLDDPISEKLRQQRLVEEADFKATAELFAKKDGSEKSLETFIPKSESDFAEYAELIANKIRPYEKSFHYMGLLKNVMRLSMASLKGADAKEISSSVTAIANEKIKAEKEAAAGKKKGGAKKKQLHIEKGEEDFVARPGASFDDPDEFDFM

SEQ ID NO: 17396 - DNA, 796 bp, Triticum aestivum
  misc_feature (1)..(796): Ceres Seq. ID no. 12621592
atattattattaggcttcccgtcgtgggccgctcactgggcttctcctctgcttctctcggccgaaaccccagctcagcgagcagagacccggcggcggcggcgatatgcagttcctccgggcggtcggcggcgggggaggaggggcggggtcgacggcgtgggaggcgttcaggaggcatttctcgcggaagcgggcggtggacatccggcggatcaaccccaaggtgcccaaggaggaggccgtggccatctccggccgcctcctccagatcctcgccgaccacgggcccctcaccgtcggcaacacctggaaccacgccaaggatgctgcgatcgatggcctgaacagcaagacccacatgaagatcctgctcaagtggatgtgggggaggaggatcatcaagctctcctgcacgcaggccggcaacaccaagaagttcctctactccccgttcaccgccgacgacgccgaggcggccgaggagccatcgccagccgaggagcagccgaagaagaaagggtggaaagggaaacacccaaagtaccagaccaagaaacagcctgcggcagcagcttgaccctggtctgctgagcattctttcgggcattttcccgctgctgttggcttttctgttttacttagcacggaagagttcaccgccatatctgtttgacaacaaaacatatattttgtgatggaccatttgggtgggcacaaattacgctggcaggccgatttgttcggctctgtgttgtagactctgtctggtagaataatgatgacacgataatcc

SEQ ID NO: 17397 - protein, 197 aa, Triticum aestivum
  peptide (1)..(197): Ceres Seq. ID no. 12621593
ILLLGFPSWAAHWASPLLLSAETPAQRAETRRRRRYAVPPGGRRRGRRGGVDGVGGVQEAFLAEAGGGHPADQPQGAQGGGRGHLRPPPPDPRRPRAPHRRQHLEPRQGCCDRWPEQQDPHEDPAQVDVGEEDHQALLHAGRQHQEVPLLPVHRRRRRGGRGAIASRGAAEEERVERETPKVPDQETACGSSLTLVC

SEQ ID NO: 17398 - protein, 157 aa, Triticum aestivum
  peptide (1)..(157): Ceres Seq. ID no. 12621594
  misc_feature (1)..(155): NCBI GI NO: 27573361 NR Description: unknown protein
  misc_feature (24)..(146): NCBI GI NO: 18410491 NR Description: expressed protein; protein id: At1g73940
  misc_feature (24)..(146): NCBI GI NO: 15239880 NR Description: putative protein; protein id: At5g49410
  misc_feature (24)..(146): NCBI GI NO: 21594042 NR Description: unknown [Arabidopsis thaliana]
  misc_feature (24)..(146): NCBI GI NO: 38637563 NR Description: unknown protein
MQFLRAVGGGGGGAGSTAWEAFRRHFSRKRAVDIRRINPKVPKEEAVAISGRLLQILADHGPLTVGNTWNHAKDAAIDGLNSKTHMKILLKWMWGRRIIKLSCTQAGNTKKFLYSPFTADDAEAAEEPSPAEEQPKKKGWKGKHPKYQTKKQPAAAA

SEQ ID NO: 17399 - protein, 114 aa, Triticum aestivum
  peptide (1)..(114): Ceres Seq. ID no. 12621595
IIIRLPVVGRSLGFSSASLGRNPSSASRDPAAAAICSSSGRSAAGEEGRGRRRGRRSGGISRGSGRWTSGGSTPRCPRRRPWPSPAASSRSSPTTGPSPSATPGTTPRMLRSMA

SEQ ID NO: 17400 - DNA, 1629 bp, Triticum aestivum
  misc_feature (1)..(1629): Ceres Seq. ID no. 14301826
cctaagtacctctcccgcacctctcctccttcccgtcggcaccgccgccatctttgctaggtcttcctccagatccaactcacagcttccatgcccataggtaccgccgcaaccaccatgcccaccgttgcctcctggatcctcctccatgtccatgccaccgtccgccaacctcccaaaaacgcctccgccgtcgcccactcgagcaataacgagaaaatatatgcttcccttctccgccagcgcccgccggttccctccaatctgtacgtgtactgcgcagacggcacattcggagagaccccccgcgtgctgtcaatggtggacgacatcatcctcttccacgcatacatcggtcctgcgttcccctcccccaagccatggaagggggacttcttcatataccggtctgactccaatcgacggtctctggagcgtctaccgcacccccaaggtatgatcggaagggacgatccattcggcatctttccccgagagggcgacagctacacaatcgcggcgctgttacccagcatatcctctatgtacgattttgaactccacctcttcgactcggagactcggatttggagcaggaagaatctgactgttgggtcgcgacaggaaaggttcaaggttgatatccccatcaacataagtcagatcttacaccataacacatccactgtgatcactcttggaggctccatgtgctgggttgatctttggcgtggtatattgttctgtgacatgctctccgagaaacatgcactcacaggtgttccactgccactgccattgatctactattctggtgatagaagcaagatcctaggacctgcgaagtgtcaccgtagcattgcttttcttgatggatgcaccaggctcgttgaggtgaattctgatgtcagtattgccgaaggaactgaatttggttgtggccgaactgaagactggacgattaccacatggtacaacaataatgtgcataataattcttatgatgattggcatccggacatcacactaaaagcttccaacatcatcctgggcaaccactccgtgaagctgccgttaggcttgcagtacctttttttctgacccaactatttgcatgaacaatagggatggctatattgtttacctgactgccagggagaagtatatgcattctaagtcatggattattgctattgatttgaaaaagcgcaaggtgcaaagtgtggttctgtctggtcctgtacctccgccaatgccgcgcattgacactaactactgcacttgtagtatctccaagtactgtaccagcacttcaacagtatcaggtggtacttaagatgctgagcagtcgtgtggcagtaaattcaatgtacgatgtctacaagttcctggtggctgagattgaggaatgcatgtgtttatcacttactacattccaaacaatatattgttctcctggtcctgcttgacatcatatatctatcctaattagctatatcctatgtagtgaactggttaattattattggcagtgaactgattacttgttcttgttggacattatgtatcttgaacattttgtactagcatgtttatggtttaatttttttgttcggtctgcttggcttt

SEQ ID NO: 17401 - protein, 336 aa, Triticum aestivum
  peptide (1)..(336): Ceres Seq. ID no. 14301827
  misc_feature (17)..(333): NCBI GI NO: 33146903 NR Description: hypothetical protein
  misc_feature (17)..(243): NCBI GI NO: 34913296 NR Description: P0519E12.26
  misc_feature (17)..(236): NCBI GI NO: 34910024 NR Description: P0413G02.13
  misc_feature (16)..(248): NCBI GI NO: 34393336 NR Description: hypothetical protein
  misc_feature (14)..(236): NCBI GI NO: 18855020 NR Description: unknown protein [Oryza sativa]
  misc_feature (72)..(236): NCBI GI NO: 37535036 NR Description: hypothetical protein
  misc_feature (64)..(236): NCBI GI NO: 18855027 NR Description: hypothetical protein [Oryza sativa]
  misc_feature (53)..(320): NCBI GI NO: 32483272 NR Description: OSJNBa0024J22.3
MPIGTAATTMPTVASWILLHVHATVRQPPKNASAVAHSSNNEKIYASLLRQRPPVPSNLYVYCADGTFGETPRVLSMVDDIILFHAYIGPAFPSPKPWKGDFFIYRSDSNRRSLERLPHPQGMIGRDDPFGIFPREGDSYTIAALLPSISSMYDFELHLFDSETRIWSRKNLTVGSRQERFKVDIPINISQILHHNTSTVITLGGSMCWVDLWRGILFCDMLSEKHALTGVPLPLPLIYYSGDRSKILGPAKCHRSIAFLDGCTRLVEVNSDVSIAEGTEFGCGRTEDWTITTWYNNNVHNNSYDDWHPDITLKASNIILGNHSVKLPLGLQYLFF

SEQ ID NO: 17402 - protein, 327 aa, Triticum aestivum
  peptide (1)..(327): Ceres Seq. ID no. 14301828
  misc_feature (8)..(324): NCBI GI NO: 33146903 NR Description: hypothetical protein
  misc_feature (8)..(234): NCBI GI NO: 34913296 NR Description: P0519E12.26
  misc_feature (8)..(227): NCBI GI NO: 34910024 NR Description: P0413G02.13
  misc_feature (7)..(239): NCBI GI NO: 34393336 NR Description: hypothetical protein
  misc_feature (5)..(227): NCBI GI NO: 18855020 NR Description: unknown protein [Oryza sativa]
  misc_feature (63)..(227): NCBI GI NO: 37535036 NR Description: hypothetical protein
  misc_feature (55)..(227): NCBI GI NO: 18855027 NR Description: hypothetical protein [Oryza sativa]
  misc_feature (44)..(311): NCBI GI NO: 32483272 NR Description: OSJNBa0024J22.3
MPTVASWILLHVHATVRQPPKNASAVAHSSNNEKIYASLLRQRPPVPSNLYVYCADGTFGETPRVLSMVDDIILFHAYIGPAFPSPKPWKGDFFIYRSDSNRRSLERLPHPQGMIGRDDPFGIFPREGDSYTIAALLPSISSMYDFELHLFDSETRIWSRKNLTVGSRQERFKVDIPINISQILHHNTSTVITLGGSMCWVDLWRGILFCDMLSEKHALTGVPLPLPLIYYSGDRSKILGPAKCHRSIAFLDGCTRLVEVNSDVSIAEGTEFGCGRTEDWTITTWYNNNVHNNSYDDWHPDITLKASNIILGNHSVKLPLGLQYLFF

SEQ ID NO: 17403 - protein, 260 aa, Triticum aestivum
  peptide (1)..(260): Ceres Seq. ID no. 14301829
  misc_feature (1)..(257): NCBI GI NO: 33146903 NR Description: hypothetical protein
  misc_feature (1)..(167): NCBI GI NO: 34913296 NR Description: P0519E12.26
  misc_feature (1)..(160): NCBI GI NO: 34910024 NR Description: P0413G02.13
  misc_feature (1)..(172): NCBI GI NO: 34393336 NR Description: hypothetical protein
  misc_feature (1)..(160): NCBI GI NO: 18855020 NR Description: unknown protein [Oryza sativa]
  misc_feature (1)..(160): NCBI GI NO: 37535036 NR Description: hypothetical protein
  misc_feature (1)..(160): NCBI GI NO: 18855027 NR Description: hypothetical protein [Oryza sativa]
  misc_feature (1)..(244): NCBI GI NO: 32483272 NR Description: OSJNBa0024J22.3
MVDDIILFHAYIGPAFPSPKPWKGDFFIYRSDSNRRSLERLPHPQGMIGRDDPFGIFPREGDSYTIAALLPSISSMYDFELHLFDSETRIWSRKNLTVGSRQERFKVDIPINISQILHHNTSTVITLGGSMCWVDLWRGILFCDMLSEKHALTGVPLPLPLIYYSGDRSKILGPAKCHRSIAFLDGCTRLVEVNSDVSIAEGTEFGCGRTEDWTITTWYNNNVHNNSYDDWHPDITLKASNIILGNHSVKLPLGLQYLFF

SEQ ID NO: 17404 - DNA, 1898 bp, Triticum aestivum
  misc_feature (1)..(1898): Ceres Seq. ID no. 15224862
acttttccttgcggacggacgtgccaaccgtttccttccgaaaacaagaaccggcggccgccgcccgagctcgaactcgacagccatggcctcccaactagggccgccgacggcgagatatgccccacctgctcccagcaccatcacttctataggcgacgaccttctccgcgagatcttcctccatctcccctccctcccgagcctcgtccgcgccgcccttgcctgccgcaccttcctccacgctgtccgttcgtcccccgtcttccgccggggattccggtcgctccacccatccccattccttggcctctttatcgagtcctacagctgttccctcccttctttcgtccccctccgccgccggtccgacccggacctcgccgccgcaatacgcggcggcgatctcttcctcactcgactcccggaggacaacgacgacccctctcccgggtgggagatccagggctgccaagacggctacgtcgtcctgctcaaccggagcaccgagcagattgccgcctacaaccccctcacactggctctggatttcctccctccactgccccatgagatgtcccgctcccgctccctcgagatccacgtcgtcttctcccaagagggccaggggtcgttccgtgcggtctgcgtccgccacggcaggtccctgcggcgggcgcgggcgcgcatcgccgtcttctcatcggacgacaggggcaaggggtggctggttatgccggcggtggacaccgcgacgccacagcctggggatggtggagttgacaagcccatgtttcacactggcaccctggtgaatggattcatctattggaagcgcaagacccaagcctgcatgctcgtgctcaacactgcgacattgcagttctctgaaatggatttgccgcagcccctaaaagggaaacactccacaaacttcaggcttggtcagaccaaggatggcgagctctgtatcgtttgcgcagacgactcccgtgcaaaggagtggacgcttgctgtttggttctggagagccgacgatggcggtgtcaagagatggatggagaagaggtttccgttgcacaagtttgttgagttcaccgagtgttcaggagaagatcatgtcgtggtgaacagtttggcagttgtcgacggctttgtgtacctgtctagttactgtcacgcaagtactgaatctcctgagtggtttctatccttctgccttgaaacagcggagcttatcaaactcttccggggtacatttgacagccctctccatccctacatcatggcctggccaccttctttggtatgcaacaaggaggattcagagaccaaagtaactggggccaatgttgtagaagatggtttgtaagcacagagaaatttccctctgttctcgtcagtgttgcagtcatgcaaagaagctttggttagtgatgatggggcaaaatttgcagagatagaggcctttttactttctagggtgagaagaagtctgagcaaaatggctgctctacatacagaattgacaactgcgaggagtcacatcttgaggataggtgttcttcgatagctacagggaatagacagaagcagagagctgatgatcaatttacaaggagaggcagtggagaacctgtgaccacttatttgccagttgaacttgcctctttggaatggtcaccgcgtatttcttctgttgagatgatcggcgtatttcttctgttgagatgagcttttattcagcgtgcctagctcccaagagaccgagtgagcttttatcttgatcttcattgaggtttctgtattgctgtctatgattgagtttgttgttgcacttgatccatcttacagcactttatgtccatcctaatattttagtttaaacagttcttctc

SEQ ID NO: 17405 - protein, 456 aa, Triticum aestivum
  peptide (1)..(456): Ceres Seq. ID no. 15224863
  misc_feature (19)..(364): NCBI GI NO: 34901902 NR Description: OSJNBa0036M16.17
  misc_feature (112)..(438): NCBI GI NO: 34901902 NR Description: OSJNBa0036M16.17
  misc_feature (34)..(423): NCBI GI NO: 34914942 NR Description: B1096D03.38
  misc_feature (42)..(436): NCBI GI NO: 34914940 NR Description: B1096D03.37
  misc_feature (53)..(226): NCBI GI NO: 34914580 NR Description: P0455H0310.25
  misc_feature (39)..(179): NCBI GI NO: 37530924 NR Description: unknown protein
  misc_feature (20)..(179): NCBI GI NO: 37530944 NR Description: hypothetical protein
  misc_feature (41)..(202): NCBI GI NO: 34393351 NR Description: hypothetical protein
  misc_feature (44)..(179): NCBI GI NO: 37530914 NR Description: unknown protein
  misc_feature (34)..(193): NCBI GI NO: 37530886 NR Description: hypothetical protein
LFLADGRANRFLPKTRTGGRRPSSNSTAMASQLGPPTARYAPPAPSTITSIGDDLLREIFLHLPSLPSLVRAALACRTFLHAVRSSPVFRRGFRSLHPSPFLGLFIESYSCSLPSFVPLRRRSDPDLAAAIRGGDLFLTRLPEDNDDPSPGWEIQGCQDGYVVLLNRSTEQIAAYNPLTLALDFLPPLPHEMSRSRSLEIHVVFSQEGQGSFRAVCVRHGRSLRRARARIAVFSSDDRGKGWLVMPAVDTATPQPGDGGVDKPMFHTGTLVNGFIYWKRKTQACMLVLNTATLQFSEMDLPQPLKGKHSTNFRLGQTKDGELCIVCADDSRAKEWTLAVWFWRADDGGVKRWMEKRFPLHKFVEFTECSGEDHVVVNSLAVVDGFVYLSSYCHASTESPEWFLSFCLETAELIKLFRGTFDSPLHPYIMAWPPSLVCNKEDSETKVTGANVVEDGL

SEQ ID NO: 17406 - protein, 428 aa, Triticum aestivum
  peptide (1)..(428): Ceres Seq. ID no. 15224864
  misc_feature (1)..(336): NCBI GI NO: 34901902 NR Description: OSJNBa0036M16.17
  misc_feature (84)..(410): NCBI GI NO: 34901902 NR Description: OSJNBa0036M16.17
  misc_feature (6)..(395): NCBI GI NO: 34914942 NR Description: B1096D03.38
  misc_feature (14)..(408): NCBI GI NO: 34914940 NR Description: B1096D03.37
  misc_feature (25)..(198): NCBI GI NO: 34914580 NR Description: P0455H0310.25
  misc_feature (11)..(151): NCBI GI NO: 37530924 NR Description: unknown protein
  misc_feature (1)..(151): NCBI GI NO: 37530944 NR Description: hypothetical protein
  misc_feature (13)..(174): NCBI GI NO: 34393351 NR Description: hypothetical protein
  misc_feature (16)..(151): NCBI GI NO: 37530914 NR Description: unknown protein
  misc_feature (6)..(165): NCBI GI NO: 37530886 NR Description: hypothetical protein
MASQLGPPTARYAPPAPSTITSIGDDLLREIFLHLPSLPSLVRAALACRTFLHAVRSSPVFRRGFRSLHPSPFLGLFIESYSCSLPSFVPLRRRSDPDLAAAIRGGDLFLTRLPEDNDDPSPGWEIQGCQDGYVVLLNRSTEQIAAYNPLTLALDFLPPLPHEMSRSRSLEIHVVFSQEGQGSFRAVCVRHGRSLRRARARIAVFSSDDRGKGWLVMPAVDTATPQPGDGGVDKPMFHTGTLVNGFIYWKRKTQACMLVLNTATLQFSEMDLPQPLKGKHSTNFRLGQTKDGELCIVCADDSRAKEWTLAVWFWRADDGGVKRWMEKRFPLHKFVEFTECSGEDHVVVNSLAVVDGFVYLSSYCHASTESPEWFLSFCLETAELIKLFRGTFDSPLHPYIMAWPPSLVCNKEDSETKVTGANVVEDGL

SEQ ID NO: 17407 - protein, 265 aa, Triticum aestivum
  peptide (1)..(265): Ceres Seq. ID no. 15224865
  misc_feature (1)..(173): NCBI GI NO: 34901902 NR Description: OSJNBa0036M16.17
  misc_feature (1)..(247): NCBI GI NO: 34901902 NR Description: OSJNBa0036M16.17
  misc_feature (1)..(232): NCBI GI NO: 34914942 NR Description: B1096D03.38
  misc_feature (1)..(245): NCBI GI NO: 34914940 NR Description: B1096D03.37
  misc_feature (1)..(35): NCBI GI NO: 34914580 NR Description: P0455H0310.25
  misc_feature (1)..(11): NCBI GI NO: 34393351 NR Description: hypothetical protein
  misc_feature (1)..(162): NCBI GI NO: 37530982 NR Description: unknown protein
  misc_feature (1)..(123): NCBI GI NO: 38347670 NR Description: OSJNBa0054D14.5
MSRSRSLEIHVVFSQEGQGSFRAVCVRHGRSLRRARARIAVFSSDDRGKGWLVMPAVDTATPQPGDGGVDKPMFHTGTLVNGFIYWKRKTQACMLVLNTATLQFSEMDLPQPLKGKHSTNFRLGQTKDGELCIVCADDSRAKEWTLAVWFWRADDGGVKRWMEKRFPLHKFVEFTECSGEDHVVVNSLAVVDGFVYLSSYCHASTESPEWFLSFCLETAELIKLFRGTFDSPLHPYIMAWPPSLVCNKEDSETKVTGANVVEDGL

SEQ ID NO: 17408 - DNA, 1549 bp, Triticum aestivum
  misc_feature (1)..(1549): Ceres Seq. ID no. 14316017
acacgccccggctccaaagcgcaggccttctctttccccacaccacaccacccaccggcctcctcccacccgaacccccattaaccccagaggagagatcccccgtcctctgacgccagcggccatgtccgtcacgcgggttcttgcgctgcttgtcgcggcggcgctggcggccgcggcgccggcgcgcgtgggcgcggcgggggcgtgcgcggcggagaggttctccaagaaccgcgtgtacgccgcctgcaccgacctgcccaccctgggcgcgtccgtgcactggacctacgacccggcggcctcctccctctccgtggcgttcgtcgccgcgccgccctcgtccggcggctgggtcgcctggggcctcaacccctccggcgacggcatgagcggcacgcaggcgctcgtcgcctcgcccacgggcagcggcggcgcgtacggcgtccagacgttcgacatccagggcacatcgctcggatcgccgggccccatcgcctacaagacgtccgacctcgccgccgaggtcggcgccgacggccgcgtccagatgttcgggaagctcgcgctccagaacggcaccggggaggtgaaccaggtctggcaggtgggaccggcgtcgggcgggagcatcggcatacacgccatggccgccgccaacatgggggccaaggggaagctcaacctcgtcacgggggcgaccacagccgtcagcggaggcagcatcctcaggaagaaaaatacccatggaattctgaatgctgtgagctgggggattcttctgccaatgggaggcatagttgctagatacctcaagacattcaaatcagccgaccctgcctggttctaccttcacgttgcttgccagctgatcgggtatgctgtgggagtgtctggctgggccaccggcattcatctaggaaatctgtccaagggaatcacctactcgcttcacaggaacatcgggatcgccgtatttgctctcggtaccgttcagatctttgcgctgttcctgaggccgaagaaggatcacaagctgcgggtgtactggaacgtgtaccaccactcggtgggctacaccatcatcatcctgggcatcgtcaacatcttcaagggcatgagcatcctggacgtggcgcagaagtggaagacgggctacatcatcgccatcggcatcctgggcggcgtcgcggtggcgctggaggtgatcacctgggccatcgtgctcaagaggaggaagacggaggacaaggcctacaacggcggcgcctccaacaacaacaacggccatctgcccatgtgatgcgatgtgatgtgattctttctcggtggccggagtctgtgggctgtgttgagctgagctgcgtgtgtgtgagcatggattggcagatgctatgtaggttagggccgggccttagtggccttcgtctctctgtttctttttttatgatgatgatgatgattgatagatctgtgtgtatagtactgctgcacattatattagttattatatactggaatgagagaggtgatgccggtcgatgct

SEQ ID NO: 17409 - protein, 434 aa, Triticum aestivum
  peptide (1)..(434): Ceres Seq. ID no. 14316018
  misc_feature (131)..(257): Pfam Name: DUF568 Pfam Description: Protein of unknown function
  misc_feature (43)..(416): NCBI GI NO: 21593814 NR Description: unknown [Arabidopsis thaliana]
  misc_feature (43)..(416): NCBI GI NO: 15235545 NR Description: auxin-induced protein, putative
  misc_feature (40)..(413): NCBI GI NO: 18404500 NR Description: auxin-induced protein family
  misc_feature (51)..(428): NCBI GI NO: 24414270 NR Description: Putative membrane protein
  misc_feature (42)..(426): NCBI GI NO: 18086563 NR Description: AT4g17280/dl4675c [Arabidopsis thaliana]
  misc_feature (54)..(413): NCBI GI NO: 18421491 NR Description: auxin-induced protein family
  misc_feature (54)..(413): NCBI GI NO: 21592781 NR Description: putative membrane protein [Arabidopsis thaliana]
  misc_feature (50)..(432): NCBI GI NO: 15238124 NR Description: auxin-induced protein, putative
  misc_feature (70)..(426): NCBI GI NO: 13785209 NR Description: putative membrane protein [Solanum tuberosum]
  misc_feature (42)..(430): NCBI GI NO: 13785213 NR Description: putative membrane protein [Solanum tuberosum]
HAPAPKRRPSLSPHHTTHRPPPTRTPINPRGEIPRPLTPAAMSVTRVLALLVAAALAAAAPARVGAAGACAAERFSKNRVYAACTDLPTLGASVHWTYDPAASSLSVAFVAAPPSSGGWVAWGLNPSGDGMSGTQALVASPTGSGGAYGVQTFDIQGTSLGSPGPIAYKTSDLAAEVGADGRVQMFGKLALQNGTGEVNQVWQVGPASGGSIGIHAMAAANMGAKGKLNLVTGATTAVSGGSILRKKNTHGILNAVSWGILLPMGGIVARYLKTFKSADPAWFYLHVACQLIGYAVGVSGWATGIHLGNLSKGITYSLHRNIGIAVFALGTVQIFALFLRPKKDHKLRVYWNVYHHSVGYTIIILGIVNIFKGMSILDVAQKWKTGYIIAIGILGGVAVALEVITWAIVLKRRKTEDKAYNGGASNNNNGHLPM

SEQ ID NO: 17410 - protein, 393 aa, Triticum aestivum
  peptide (1)..(393): Ceres Seq. ID no. 14316019
  misc_feature (90)..(216): Pfam Name: DUF568 Pfam Description: Protein of unknown function
  misc_feature (2)..(375): NCBI GI NO: 21593814 NR Description: unknown [Arabidopsis thaliana]
  misc_feature (2)..(375): NCBI GI NO: 15235545 NR Description: auxin-induced protein, putative
  misc_feature (1)..(372): NCBI GI NO: 18404500 NR Description: auxin-induced protein family
  misc_feature (10)..(387): NCBI GI NO: 24414270 NR Description: Putative membrane protein
  misc_feature (1)..(385): NCBI GI NO: 18086563 NR Description: AT4g17280/dl4675c [Arabidopsis thaliana]
  misc_feature (13)..(372): NCBI GI NO: 18421491 NR Description: auxin-induced protein family
  misc_feature (13)..(372): NCBI GI NO: 21592781 NR Description: putative membrane protein [Arabidopsis thaliana]
  misc_feature (9)..(391): NCBI GI NO: 15238124 NR Description: auxin-induced protein, putative
  misc_feature (29)..(385): NCBI GI NO: 13785209 NR Description: putative membrane protein [Solanum tuberosum]
  misc_feature (1)..(389): NCBI GI NO: 13785213 NR Description: putative membrane protein [Solanum tuberosum]
MSVTRVLALLVAAALAAAAPARVGAAGACAAERFSKNRVYAACTDLPTLGASVHWTYDPAASSLSVAFVAAPPSSGGWVAWGLNPSGDGMSGTQALVASPTGSGGAYGVQTFDIQGTSLGSPGPIAYKTSDLAAEVGADGRVQMFGKLALQNGTGEVNQVWQVGPASGGSIGIHAMAAANMGAKGKLNLVTGATTAVSGGSILRKKNTHGILNAVSWGILLPMGGIVARYLKTFKSADPAWFYLHVACQLIGYAVGVSGWATGIHLGNLSKGITYSLHRNIGIAVFALGTVQIFALFLRPKKDHKLRVYWNVYHHSVGYTIIILGIVNIFKGMSILDVAQKWKTGYIIAIGILGGVAVALEVITWAIVLKRRKTEDKAYNGGASNNNNGHLPM

SEQ ID NO: 17411 - protein, 304 aa, Triticum aestivum
  peptide (1)..(304): Ceres Seq. ID no. 14316020
  misc_feature (1)..(127): Pfam Name: DUF568 Pfam Description: Protein of unknown function
  misc_feature (1)..(286): NCBI GI NO: 21593814 NR Description: unknown [Arabidopsis thaliana]
  misc_feature (1)..(286): NCBI GI NO: 15235545 NR Description: auxin-induced protein, putative
  misc_feature (1)..(283): NCBI GI NO: 18404500 NR Description: auxin-induced protein family
  misc_feature (1)..(298): NCBI GI NO: 24414270 NR Description: Putative membrane protein
  misc_feature (1)..(296): NCBI GI NO: 18086563 NR Description: AT4g17280/dl4675c [Arabidopsis thaliana]
  misc_feature (1)..(283): NCBI GI NO: 18421491 NR Description: auxin-induced protein family
  misc_feature (1)..(283): NCBI GI NO: 21592781 NR Description: putative membrane protein [Arabidopsis thaliana]
  misc_feature (1)..(302): NCBI GI NO: 15238124 NR Description: auxin-induced protein, putative
  misc_feature (1)..(296): NCBI GI NO: 13785209 NR Description: putative membrane protein [Solanum tuberosum]
  misc_feature (1)..(300): NCBI GI NO: 13785213 NR Description: putative membrane protein [Solanum tuberosum]
MSGTQALVASPTGSGGAYGVQTFDIQGTSLGSPGPIAYKTSDLAAEVGADGRVQMFGKLALQNGTGEVNQVWQVGPASGGSIGIHAMAAANMGAKGKLNLVTGATTAVSGGSILRKKNTHGILNAVSWGILLPMGGIVARYLKTFKSADPAWFYLHVACQLIGYAVGVSGWATGIHLGNLSKGITYSLHRNIGIAVFALGTVQIFALFLRPKKDHKLRVYWNVYHHSVGYTIIILGIVNIFKGMSILDVAQKWKTGYIIAIGILGGVAVALEVITWAIVLKRRKTEDKAYNGGASNNNNGHLPM

SEQ ID NO: 17412 - DNA, 1681 bp, Triticum aestivum
  misc_feature (1)..(1681): Ceres Seq. ID no. 15169501
acttctccaccgtgactgcgactgccactgcgactgcgactgctctctcctgactggagtcagtgtctcgggtgctgctgacccgccgtcttctccgcttgccgtgccgccatcgccatggatggggtttcgacggagcctcgccacccgctcctgcaggccgttctcgacggcgacctccgcctcctcaaagagatggcgggcgtcgtggcggcggacgtcggcatcagggcgcgcgcgctgactgtggcggtcatggaagggcggctggacatctgtaggtgcctcgtcgaggaccacggcgtcgatgtcaaccagcgcaccttcacaggtgacactcctctggccatttctacgacttatgggacgcctgctaccaccagatatcttctggatcgtggtgctgatccaactttagctggtgccctgtggccacctcttcatgctgctgcaatttttggacaatgtgagatagtggaattgctgctttcaactggaattgatgtggatcatttcgattctgtgtatgggaccgcattgcatgttgccgctactaatggtcaagatggctcgatgaatattttgttgcagcatcatgcagatcccaataaggttttccgccttgatagtaccccgttaaggctggccatgatttctgaatcactggaatgtgtgaagctactcattaaggctggcgctgatgtgaataaaattgactatactggtgttacttacttgatgatagcagcgggcaatggcttatctgataccctgaaatgcttactagatgctggcgctaacccagatattgatgatgggtttggtacaactccaatcgaaattgccgccctccaagccagatgggatatggttgcgatgttatttcctttaacttctcccatttcaagattgccggattggagtgttgatggaattatttctcatgtgcaatctttcggtttgaagccgagggatatacatctatgtgaagcgaaaagagctgaactaaagttgcaagctacagaggcttttaagagaaaggaatatatcatagcaggagacctatatacttgtgcaatgagttttcagcctagtccaaaaggtcttgcaaacctgctagcacataggagtttctgtatgttgcacgcgggaataggaaaagaggctctctccgactctgctaggtgcacagtgctacgacctctttggcccaaaggttactatcgactaggagcagcctttatgttgctacaggactatggaaaagcagctcagacgttcgaagctggcttgaaactggaccctacaaatgcggatatggcaaacgctttaagggaagcccaagagacggcgaggaatcctcctcgcaccaggggggctggagtgccttcacccatttggaatgagacgttcctggagtgattgaggcgctgtttcgttgctatgtccagtccagggtatgcatgcctgcctgttattctcttttcctatgtccagtccaaggtatgcgtgcctgttattctctggagagactgagactctgtttcgttgcttaagactctgttttgtgttgaaccgtccaagagtactgatctcatgtgctatattgtagaccgtgtaaacatggctatctgtacattgtggttatatgtcgtctccgtgaaccattgtggttatatac

SEQ ID NO: 17413 - protein, 434 aa, Triticum aestivum
  peptide (1)..(434): Ceres Seq. ID no. 15169502
  misc_feature (366)..(398): Pfam Name: Pfam Description:  TPR Domain
  misc_feature (9)..(406): NCBI GI NO: 27542768 NR Description: ankyrin-like protein-like protein
  misc_feature (13)..(408): NCBI GI NO: 27542766 NR Description: ankyrin-like protein-like protein
  misc_feature (45)..(408): NCBI GI NO: 34896852 NR Description: putative ankyrin [Oryza sativa]
  misc_feature (41)..(413): NCBI GI NO: 15229331 NR Description: ankyrin-related protein [Arabidopsis thaliana]
  misc_feature (1)..(289): NCBI GI NO: 13435243 NR Description: putative gag-pol polyprotein [Oryza sativa]
  misc_feature (293)..(405): NCBI GI NO: 13435243 NR Description: putative gag-pol polyprotein [Oryza sativa]
  misc_feature (42)..(413): NCBI GI NO: 13435247 NR Description: putative ankyrin [Oryza sativa]
  misc_feature (163)..(416): NCBI GI NO: 34910278 NR Description: OSJNBa0089K24.26
  misc_feature (1)..(279): NCBI GI NO: 24745936 NR Description: ankyrin-like protein [Solanum tuberosum]
  misc_feature (1)..(195): NCBI GI NO: 38637543 NR Description: ankyrin-like protein
MDGVSTEPRHPLLQAVLDGDLRLLKEMAGVVAADVGIRARALTVAVMEGRLDICRCLVEDHGVDVNQRTFTGDTPLAISTTYGTPATTRYLLDRGADPTLAGALWPPLHAAAIFGQCEIVELLLSTGIDVDHFDSVYGTALHVAATNGQDGSMNILLQHHADPNKVFRLDSTPLRLAMISESLECVKLLIKAGADVNKIDYTGVTYLMIAAGNGLSDTLKCLLDAGANPDIDDGFGTTPIEIAALQARWDMVAMLFPLTSPISRLPDWSVDGIISHVQSFGLKPRDIHLCEAKRAELKLQATEAFKRKEYIIAGDLYTCAMSFQPSPKGLANLLAHRSFCMLHAGIGKEALSDSARCTVLRPLWPKGYYRLGAAFMLLQDYGKAAQTFEAGLKLDPTNADMANALREAQETARNPPRTRGAGVPSPIWNETFLE

SEQ ID NO: 17414 - protein, 408 aa, Triticum aestivum
  peptide (1)..(408): Ceres Seq. ID no. 15169503
  misc_feature (340)..(372): Pfam Name: Pfam Description:  TPR Domain
  misc_feature (1)..(380): NCBI GI NO: 27542768 NR Description: ankyrin-like protein-like protein
  misc_feature (1)..(382): NCBI GI NO: 27542766 NR Description: ankyrin-like protein-like protein
  misc_feature (19)..(382): NCBI GI NO: 34896852 NR Description: putative ankyrin [Oryza sativa]
  misc_feature (15)..(387): NCBI GI NO: 15229331 NR Description: ankyrin-related protein [Arabidopsis thaliana]
  misc_feature (1)..(263): NCBI GI NO: 13435243 NR Description: putative gag-pol polyprotein [Oryza sativa]
  misc_feature (267)..(379): NCBI GI NO: 13435243 NR Description: putative gag-pol polyprotein [Oryza sativa]
  misc_feature (16)..(387): NCBI GI NO: 13435247 NR Description: putative ankyrin [Oryza sativa]
  misc_feature (137)..(390): NCBI GI NO: 34910278 NR Description: OSJNBa0089K24.26
  misc_feature (1)..(253): NCBI GI NO: 24745936 NR Description: ankyrin-like protein [Solanum tuberosum]
  misc_feature (1)..(169): NCBI GI NO: 38637543 NR Description: ankyrin-like protein
MAGVVAADVGIRARALTVAVMEGRLDICRCLVEDHGVDVNQRTFTGDTPLAISTTYGTPATTRYLLDRGADPTLAGALWPPLHAAAIFGQCEIVELLLSTGIDVDHFDSVYGTALHVAATNGQDGSMNILLQHHADPNKVFRLDSTPLRLAMISESLECVKLLIKAGADVNKIDYTGVTYLMIAAGNGLSDTLKCLLDAGANPDIDDGFGTTPIEIAALQARWDMVAMLFPLTSPISRLPDWSVDGIISHVQSFGLKPRDIHLCEAKRAELKLQATEAFKRKEYIIAGDLYTCAMSFQPSPKGLANLLAHRSFCMLHAGIGKEALSDSARCTVLRPLWPKGYYRLGAAFMLLQDYGKAAQTFEAGLKLDPTNADMANALREAQETARNPPRTRGAGVPSPIWNETFLE

SEQ ID NO: 17415 - protein, 388 aa, Triticum aestivum
  peptide (1)..(388): Ceres Seq. ID no. 15169504
  misc_feature (320)..(352): Pfam Name: Pfam Description:  TPR Domain
  misc_feature (1)..(360): NCBI GI NO: 27542768 NR Description: ankyrin-like protein-like protein
  misc_feature (1)..(362): NCBI GI NO: 27542766 NR Description: ankyrin-like protein-like protein
  misc_feature (1)..(362): NCBI GI NO: 34896852 NR Description: putative ankyrin [Oryza sativa]
  misc_feature (1)..(367): NCBI GI NO: 15229331 NR Description: ankyrin-related protein [Arabidopsis thaliana]
  misc_feature (1)..(243): NCBI GI NO: 13435243 NR Description: putative gag-pol polyprotein [Oryza sativa]
  misc_feature (247)..(359): NCBI GI NO: 13435243 NR Description: putative gag-pol polyprotein [Oryza sativa]
  misc_feature (1)..(367): NCBI GI NO: 13435247 NR Description: putative ankyrin [Oryza sativa]
  misc_feature (117)..(370): NCBI GI NO: 34910278 NR Description: OSJNBa0089K24.26
  misc_feature (1)..(233): NCBI GI NO: 24745936 NR Description: ankyrin-like protein [Solanum tuberosum]
  misc_feature (1)..(149): NCBI GI NO: 38637543 NR Description: ankyrin-like protein
MEGRLDICRCLVEDHGVDVNQRTFTGDTPLAISTTYGTPATTRYLLDRGADPTLAGALWPPLHAAAIFGQCEIVELLLSTGIDVDHFDSVYGTALHVAATNGQDGSMNILLQHHADPNKVFRLDSTPLRLAMISESLECVKLLIKAGADVNKIDYTGVTYLMIAAGNGLSDTLKCLLDAGANPDIDDGFGTTPIEIAALQARWDMVAMLFPLTSPISRLPDWSVDGIISHVQSFGLKPRDIHLCEAKRAELKLQATEAFKRKEYIIAGDLYTCAMSFQPSPKGLANLLAHRSFCMLHAGIGKEALSDSARCTVLRPLWPKGYYRLGAAFMLLQDYGKAAQTFEAGLKLDPTNADMANALREAQETARNPPRTRGAGVPSPIWNETFLE

SEQ ID NO: 17416 - DNA, 1635 bp, Triticum aestivum
  misc_feature (1)..(1635): Ceres Seq. ID no. 14316049
gagaaaaggactcgaataataaaaactcataaacaactccgccctcgggaccgagaccgagacccgaagaagagggagatcgctcgctcgctgcacaacgcccgcccacgccgccgtctccctctccctctccgcctccctccgtccaaccgcagcccgctccacctcatggcgtcgctctccctctccctccgcgcctccgcctcctcggccgcagccggatcccgcgccgccgccccaatcaaggcgtcgtgtgtgaggagcaaggttacctgcagcttaccatccatcagagctacctcctcacctgctagaagcattgagcccgtaagagccaccgccacacaggcgccccctgccacccctcaatcttctagcggagagaagacaaaggtcggcatcaatggttttgggcggattgggaggttagttctgcgaattgcaattgatagagatgacattgaagttgtggctgtcaatgatccgtttatcgatgctaagtacatggcctacatgtttaagtatgattccacacacggtccattcaaaggaaccataacagttctggatgagtcaaccttggagattaatgggaagaaagtctcagttacaagcaaaagggacccgtcagatatcccttggggtaactttggagctgaatatgttgttgaatcatctggtgtttttacaacagttgagaaagcttcagcacatttgaaggggggtgcaaagaaagtggtgatatcggctccgtcagcggatgctcccatgtttgttgttggagtaaatgagaagaattacaaccctagcatggatgtcgtctctaatgctagttgtaccaccaactgtcttgctcctgttgccaaggttgtccacgaggagtttggcattcttgaaggcctaatgacaactgtccatgccacaacatccactcaaaagactgttgatggtccttcaatgaaggactggaggggaggacgtggtgctggtcaaaacatcatccctagctctacgggtgcagcaaaggctgttggaaaggtccttccagctttaaatggaaagctcactggcatggccttccgggttcctacacctaacgtatctgttgttgatctgacctgccgacttgagaaaaatgcttcatatgaagatgtgaaagcagctatcaaggacgcatcagaaggttcgcttaaaggtattctaggctacacagatgaggatgttgtttcaaacgatttcgttggtgacacaaggtcgagcatatttgatgccaatgctggtatgggactaagttcatctttcatgaagctcgtctcctggtacgacaacgagtggggctacagcaaccgtgtcctcgatctgatcgggcacatgtctcttgttgcctaacgatgatgccacgatacgatttagcacagaaggtctcctcgcgtagtgtaggaagtgaaggctgcaattttgatggccattttcgtatcctggaataataataattctgtacgatgaaaacaatcaaatcaatcggcgtcgacttgaagctgcagaacgctcatgctggtctgtaaaaccccataattgaactgttgtgggtggacaataaacccaatctccgactcgtcgagtcatagtgctgtt

SEQ ID NO: 17417 - protein, 462 aa, Triticum aestivum
  peptide (1)..(462): Ceres Seq. ID no. 14316050
  misc_feature (280)..(441): Pfam Name: Pfam Description:  Glyceraldehyde 3-phosphate dehydrogenase
  misc_feature (59)..(462): NCBI GI NO: 27754473 NR Description: putative glyceraldehyde-3-phosphate dehydrogenase
  misc_feature (59)..(462): NCBI GI NO: 15219206 NR Description: glyceraldehyde-3-phosphate dehydrogenase -related
  misc_feature (59)..(462): NCBI GI NO: 21618027 NR Description: putative glyceraldehyde-3-phosphate dehydrogenase
  misc_feature (104)..(462): NCBI GI NO: 15219406 NR Description: glyceraldehyde-3-phosphate dehydrogenase -related
  misc_feature (58)..(462): NCBI GI NO: 18072805 NR Description: glyceraldehyde-3-phosphate dehydrogenase
  misc_feature (104)..(462): NCBI GI NO: 2129471 NR Description: glyceraldehyde-3-phosphate dehydrogenase
  misc_feature (104)..(462): NCBI GI NO: 3059140 NR Description: NAD-dependent glyceraldehyde-3-phosphatedehydrogenase
  misc_feature (104)..(462): NCBI GI NO: 2129472 NR Description: glyceraldehyde-3-phosphate dehydrogenase
  misc_feature (59)..(462): NCBI GI NO: 25284351 NR Description: hypothetical protein F3O9
  misc_feature (110)..(461): NCBI GI NO: 3059122 NR Description: glyeraldehyde-3-phosphate dehydrogenase
EKRTRIIKTHKQLRPRDRDRDPKKREIARSLHNARPRRRLPLPLRLPPSNRSPLHLMASLSLSLRASASSAAAGSRAAAPIKASCVRSKVTCSLPSIRATSSPARSIEPVRATATQAPPATPQSSSGEKTKVGINGFGRIGRLVLRIAIDRDDIEVVAVNDPFIDAKYMAYMFKYDSTHGPFKGTITVLDESTLEINGKKVSVTSKRDPSDIPWGNFGAEYVVESSGVFTTVEKASAHLKGGAKKVVISAPSADAPMFVVGVNEKNYNPSMDVVSNASCTTNCLAPVAKVVHEEFGILEGLMTTVHATTSTQKTVDGPSMKDWRGGRGAGQNIIPSSTGAAKAVGKVLPALNGKLTGMAFRVPTPNVSVVDLTCRLEKNASYEDVKAAIKDASEGSLKGILGYTDEDVVSNDFVGDTRSSIFDANAGMGLSSSFMKLVSWYDNEWGYSNRVLDLIGHMSLVA

SEQ ID NO: 17418 - protein, 406 aa, Triticum aestivum
  peptide (1)..(406): Ceres Seq. ID no. 14316051
  misc_feature (224)..(385): Pfam Name: Pfam Description:  Glyceraldehyde 3-phosphate dehydrogenase
  misc_feature (3)..(406): NCBI GI NO: 27754473 NR Description: putative glyceraldehyde-3-phosphate dehydrogenase
  misc_feature (3)..(406): NCBI GI NO: 15219206 NR Description: glyceraldehyde-3-phosphate dehydrogenase -related
  misc_feature (3)..(406): NCBI GI NO: 21618027 NR Description: putative glyceraldehyde-3-phosphate dehydrogenase
  misc_feature (48)..(406): NCBI GI NO: 15219406 NR Description: glyceraldehyde-3-phosphate dehydrogenase -related
  misc_feature (2)..(406): NCBI GI NO: 18072805 NR Description: glyceraldehyde-3-phosphate dehydrogenase
  misc_feature (48)..(406): NCBI GI NO: 2129471 NR Description: glyceraldehyde-3-phosphate dehydrogenase
  misc_feature (48)..(406): NCBI GI NO: 3059140 NR Description: NAD-dependent glyceraldehyde-3-phosphatedehydrogenase
  misc_feature (48)..(406): NCBI GI NO: 2129472 NR Description: glyceraldehyde-3-phosphate dehydrogenase
  misc_feature (3)..(406): NCBI GI NO: 25284351 NR Description: hypothetical protein F3O9
  misc_feature (54)..(405): NCBI GI NO: 3059122 NR Description: glyeraldehyde-3-phosphate dehydrogenase
MASLSLSLRASASSAAAGSRAAAPIKASCVRSKVTCSLPSIRATSSPARSIEPVRATATQAPPATPQSSSGEKTKVGINGFGRIGRLVLRIAIDRDDIEVVAVNDPFIDAKYMAYMFKYDSTHGPFKGTITVLDESTLEINGKKVSVTSKRDPSDIPWGNFGAEYVVESSGVFTTVEKASAHLKGGAKKVVISAPSADAPMFVVGVNEKNYNPSMDVVSNASCTTNCLAPVAKVVHEEFGILEGLMTTVHATTSTQKTVDGPSMKDWRGGRGAGQNIIPSSTGAAKAVGKVLPALNGKLTGMAFRVPTPNVSVVDLTCRLEKNASYEDVKAAIKDASEGSLKGILGYTDEDVVSNDFVGDTRSSIFDANAGMGLSSSFMKLVSWYDNEWGYSNRVLDLIGHMSLVA

SEQ ID NO: 17419 - protein, 294 aa, Triticum aestivum
  peptide (1)..(294): Ceres Seq. ID no. 14316052
  misc_feature (112)..(273): Pfam Name: Pfam Description:  Glyceraldehyde 3-phosphate dehydrogenase
  misc_feature (1)..(294): NCBI GI NO: 27754473 NR Description: putative glyceraldehyde-3-phosphate dehydrogenase
  misc_feature (1)..(294): NCBI GI NO: 15219206 NR Description: glyceraldehyde-3-phosphate dehydrogenase -related
  misc_feature (1)..(294): NCBI GI NO: 21618027 NR Description: putative glyceraldehyde-3-phosphate dehydrogenase
  misc_feature (1)..(294): NCBI GI NO: 15219406 NR Description: glyceraldehyde-3-phosphate dehydrogenase -related
  misc_feature (1)..(294): NCBI GI NO: 18072805 NR Description: glyceraldehyde-3-phosphate dehydrogenase
  misc_feature (1)..(294): NCBI GI NO: 2129471 NR Description: glyceraldehyde-3-phosphate dehydrogenase
  misc_feature (1)..(294): NCBI GI NO: 3059140 NR Description: NAD-dependent glyceraldehyde-3-phosphatedehydrogenase
  misc_feature (1)..(294): NCBI GI NO: 2129472 NR Description: glyceraldehyde-3-phosphate dehydrogenase
  misc_feature (1)..(294): NCBI GI NO: 25284351 NR Description: hypothetical protein F3O9
  misc_feature (1)..(293): NCBI GI NO: 3059122 NR Description: glyeraldehyde-3-phosphate dehydrogenase
MAYMFKYDSTHGPFKGTITVLDESTLEINGKKVSVTSKRDPSDIPWGNFGAEYVVESSGVFTTVEKASAHLKGGAKKVVISAPSADAPMFVVGVNEKNYNPSMDVVSNASCTTNCLAPVAKVVHEEFGILEGLMTTVHATTSTQKTVDGPSMKDWRGGRGAGQNIIPSSTGAAKAVGKVLPALNGKLTGMAFRVPTPNVSVVDLTCRLEKNASYEDVKAAIKDASEGSLKGILGYTDEDVVSNDFVGDTRSSIFDANAGMGLSSSFMKLVSWYDNEWGYSNRVLDLIGHMSLVA

SEQ ID NO: 17420 - DNA, 445 bp, Triticum aestivum
  misc_feature (1)..(445): Ceres Seq. ID no. 13660231
aatcacgcgcgtcaggctccgtaattgttaccgatccgagtctgatttcgccatcacgcgtcccaggctccataaattccagggatcgtccttatggcggtttcggcgactgagattttgcagcatccgctagaggagtaggtccagaggattcgagatctgccttgcccgatccttgggggagattatggccgtgataaaggtgcgagtgagcaaactccgcgaggcaaagagtgttgaggacagcaggcacaagagtgccagtcgcgagccaaaggaaggccagagcagcaacccaaagagggccaatggcgaggcaccagttgagcctcagcagagggaagtttgtgcattttgcgacgatggtggtgaattaatctgctgtgatggtggatgtctgagatccttccacccaaccaaagaacatggtgaaagatctatgtgc

SEQ ID NO: 17421 - protein, 86 aa, Triticum aestivum
  peptide (1)..(86): Ceres Seq. ID no. 13660232
  misc_feature (53)..(85): NCBI GI NO: 15240501 NR Description: expressed protein [Arabidopsis thaliana]
MAVIKVRVSKLREAKSVEDSRHKSASREPKEGQSSNPKRANGEAPVEPQQREVCAFCDDGGELICCDGGCLRSFHPTKEHGERSMC

SEQ ID NO: 17422 - protein, 43 aa, Triticum aestivum
  peptide (1)..(43): Ceres Seq. ID no. 13660233
ITRVRLRNCYRSESDFAITRPRLHKFQGSSLWRFRRLRFCSIR

SEQ ID NO: 17423 - DNA, 867 bp, Triticum aestivum
  misc_feature (1)..(867): Ceres Seq. ID no. 13659322
aacggctcgccacaaagccaacaaacccagcagccccagccctttccgcctccccccgctcccaaaccaagccccgcccccgttctgtccctccgcaaaaccctagctccgtacacgcgcggcgacctccaccatgaagggcaaggccgacacctccaagaagggcgagggcaggctcaaggccgccggcggcgccagcaagaggaagaaggacgccgctgccgctggcaagcccaagcgcccaccctccgccttcttcgtcttcatgtctgagttcaggcagcagtacaacgcggagaaccccaacaacaagagtgtcgccaacgtgagcaaggcggcgggtgagaagtggagagctatgtctgatgaggacaaagcaccttatgtggaaaaggctgaacagaagaagaaggactatgagaagaccaaagccacctttgataacaaggagagtgcgagctccaagaaggccaagactcagaacgatgaggaggtcaaatctgaggtcgaagatgagggtagcgatgaggaaaacgaggacgatgatgagtaaatagtgtatcagagtatgaggtagcaaattgggtgtttggtccccgcttagtgtactagtttgctatcctgctatcctcagtgttagatgatgagatttggaagtagatgttgtgtttgtgtgttaagggggcccttttagacttgtggactcatggtttgagaagttgcttagtagtgtattagcagagaggaagctgagaatgctaccagctgttccaatgcttttctcttgctaaccacctgtgtaagaacttgttttcattcgctaatctgatgactgcccagccattggctcttggttaatttcgcctt

SEQ ID NO: 17424 - protein, 139 aa, Triticum aestivum
  peptide (1)..(139): Ceres Seq. ID no. 13659323
  misc_feature (34)..(103): Pfam Name: high mobility group Pfam Description: HMG
  misc_feature (1)..(139): NCBI GI NO: 18700443 NR Description: high mobility group box protein 2
  misc_feature (1)..(138): NCBI GI NO: 7446226 NR Description: high mobility group protein HMGc1 - maize
  misc_feature (1)..(138): NCBI GI NO: 17017394 NR Description: HMG-like nucleosome/chromatin assembly factor D
  misc_feature (1)..(138): NCBI GI NO: 7446227 NR Description: high mobility group protein HMGc2 - maize
  misc_feature (2)..(139): NCBI GI NO: 7446231 NR Description: probable high mobility group protein HMG1 - swordbean
  misc_feature (1)..(138): NCBI GI NO: 729737 NR Description: HMG1/2-LIKE PROTEIN
  misc_feature (1)..(138): NCBI GI NO: 15227862 NR Description: HMG protein -related [Arabidopsis thaliana]
  misc_feature (1)..(138): NCBI GI NO: 21592453 NR Description: putative HMG protein [Arabidopsis thaliana]
  misc_feature (1)..(138): NCBI GI NO: 13877775 NR Description: putative HMG protein [Arabidopsis thaliana]
  misc_feature (1)..(138): NCBI GI NO: 11346367 NR Description: high mobility group protein HMG-gamma
MKGKADTSKKGEGRLKAAGGASKRKKDAAAAGKPKRPPSAFFVFMSEFRQQYNAENPNNKSVANVSKAAGEKWRAMSDEDKAPYVEKAEQKKKDYEKTKATFDNKESASSKKAKTQNDEEVKSEVEDEGSDEENEDDDE

SEQ ID NO: 17425 - protein, 95 aa, Triticum aestivum
  peptide (1)..(95): Ceres Seq. ID no. 13659324
  misc_feature (1)..(59): Pfam Name: high mobility group Pfam Description: HMG
  misc_feature (1)..(95): NCBI GI NO: 18700443 NR Description: high mobility group box protein 2
  misc_feature (1)..(94): NCBI GI NO: 7446226 NR Description: high mobility group protein HMGc1 - maize
  misc_feature (1)..(94): NCBI GI NO: 17017394 NR Description: HMG-like nucleosome/chromatin assembly factor D
  misc_feature (1)..(94): NCBI GI NO: 7446227 NR Description: high mobility group protein HMGc2 - maize
  misc_feature (1)..(95): NCBI GI NO: 7446231 NR Description: probable high mobility group protein HMG1 - swordbean
  misc_feature (1)..(94): NCBI GI NO: 729737 NR Description: HMG1/2-LIKE PROTEIN
  misc_feature (1)..(94): NCBI GI NO: 15227862 NR Description: HMG protein -related [Arabidopsis thaliana]
  misc_feature (1)..(94): NCBI GI NO: 21592453 NR Description: putative HMG protein [Arabidopsis thaliana]
  misc_feature (1)..(94): NCBI GI NO: 13877775 NR Description: putative HMG protein [Arabidopsis thaliana]
  misc_feature (1)..(94): NCBI GI NO: 11346367 NR Description: high mobility group protein HMG-gamma
MSEFRQQYNAENPNNKSVANVSKAAGEKWRAMSDEDKAPYVEKAEQKKKDYEKTKATFDNKESASSKKAKTQNDEEVKSEVEDEGSDEENEDDDE

SEQ ID NO: 17426 - protein, 90 aa, Triticum aestivum
  peptide (1)..(90): Ceres Seq. ID no. 13659325
NGSPQSQQTQQPQPFPPPPAPKPSPAPVLSLRKTLAPYTRGDLHHEGQGRHLQEGRGQAQGRRRRQQEEEGRRCRWQAQAPTLRLLRLHV

SEQ ID NO: 17427 - DNA, 1123 bp, Triticum aestivum
  misc_feature (1)..(1123): Ceres Seq. ID no. 13659393
acctcactcactcacccgaccgcgcgccggcccgctcctgcactacacccagaggcttcctcccaccggacgcaggatcgcgaccgcctagctacctagagcagagcttggggaattcttacggctcagagcctgcctgggctctccggtggttgttccttccagcatcgatctgcttcttgggcgatcttggtagctgatggaggcggcattggttctggtggtggcggtgctccttgggtcctcagcccttgttgcctcagatttctgcgtgtgccggtcggagcagccgacggcggtgctgcagaaggcgatcgactacgcgtgcgggcagggcgcggactgcacggccatcgcgcagagcggggcgtgctacagccccgacgaggtcgccgcgcactgctcctgggccgccaacagctacttccagaagttcaggtccaccggcgccacctgcgacttctccggcgccgccaccctctccaccaccgaccccagtttctctggttgcacgttcccatccagtgccagtgccgccggcaccaccacgggaaccgggacagccacgacgggcaccggcaccaccacgggcaccgggacgaccacggggggcaccttcagccccgggatgggcaccggcttcaacagcaccgggttcagcccgacaaccgggagcatggacggcaccgccgcggcggccggcttgcttccgtcgatcagactggcggcctccatcgccgtcctcctcctctcctacttggcgctgccatgaactctgcctgcctgtccgtctcttctcatggcagaacacattagcagttagcttcagtggccttctggcctggcctgccagaagcaagctgagagtgtggatttgtctaatggaatccatcgatctggaagagttgatcgccgttattgttccctagtgtcatgggctggttagctgggggtgtcattttggttctagcttaattttaatttatatatggcctcccacaggctggaggagtggtgtatgatttggtaggatggctgtctctttccctctgcaaggacccttgtcttccatgtctgtttttatactgttggcctctcttaatttttaagcattttttgcttg

SEQ ID NO: 17428 - protein, 190 aa, Triticum aestivum
  peptide (1)..(190): Ceres Seq. ID no. 15219965
  misc_feature (1)..(189): NCBI GI NO: 22775658 NR Description: contains ESTs C91599
  misc_feature (5)..(169): NCBI GI NO: 18409239 NR Description: expressed protein [Arabidopsis thaliana]
  misc_feature (5)..(169): NCBI GI NO: 21553768 NR Description: unknown [Arabidopsis thaliana]
  misc_feature (3)..(178): NCBI GI NO: 21592859 NR Description: unknown [Arabidopsis thaliana]
  misc_feature (3)..(178): NCBI GI NO: 15241485 NR Description: glycosyl hydrolase family 17
  misc_feature (5)..(169): NCBI GI NO: 25404810 NR Description: unknown protein, 45065-49536
  misc_feature (4)..(155): NCBI GI NO: 18394637 NR Description: glycosyl hydrolase family 17
  misc_feature (1)..(110): NCBI GI NO: 34909796 NR Description: P0403C05.4
  misc_feature (3)..(185): NCBI GI NO: 30697478 NR Description: glycosyl hydrolase family 17
  misc_feature (5)..(183): NCBI GI NO: 30683485 NR Description: expressed protein [Arabidopsis thaliana]
MEAALVLVVAVLLGSSALVASDFCVCRSEQPTAVLQKAIDYACGQGADCTAIAQSGACYSPDEVAAHCSWAANSYFQKFRSTGATCDFSGAATLSTTDPSFSGCTFPSSASAAGTTTGTGTATTGTGTTTGTGTTTGGTFSPGMGTGFNSTGFSPTTGSMDGTAAAAGLLPSIRLAASIAVLLLSYLALP

SEQ ID NO: 17429 - DNA, 2303 bp, Triticum aestivum
  misc_feature (1)..(2303): Ceres Seq. ID no. 13659394
atcacccattctcctcctccctcttctccgtccgtcaatccccctctatctcctccccgcaccagctcttgtactactcggagcacctccacccctgaccccgactccgaccacccatccatccgcttcttgcttcttccgctgtccgggccaagaatctgagatcctgtccggcgccgccgcttgtttcttgatggccgcatagatggcaggatcaacttcattttgagcttgtcccacaaggttgcaatcaccagtatgtcagctaaggcttcagaacgtacatatagatgctcagatgattcacaaatggcgtactacaacaactcggtgcctttagcagaaaatggacggttctatatgatgcaaaatcatctggatgttcactacacatcttcaggtgatgggtcacagaaaattagttccaatcctcaagtatttgaagcacagtactgcacactcgaatcatcatcggcaaatggtgtttatcctacacagagctccacatcttctcatagcatctcccctataagtgggagccccctgtctcagaatgatagccactcataccacacatatgattcacccccaactgcttcatgtgttaccgagataccggatttccagagtaaactgaaggagctagaaaatgcaattcttggacctgaattggacatagcctctgacagccccgagagcttattgcaagccaaccatcctttgaaacaagataactggagacagcttctgggaattaacacaggagacttgaagcaggtgatcatagcatgcggtaaggctgttgctgcgaatgatatgtatgcaacagaactattgatatctgagctaggtcagctggtgtctgtctctggagatccaatgcaacgcctaggggcatatatgttggaaggccttgtggccaggctctctttctctggaagtaagctgtataaatccttgaagtgcaaagaacctacaagctctgagctcatgtcttacatgcatctcctctgtgagatctgcccgttctacaagtttggttacatgtcggccaatggtgccatagcagaggctatcwrwggcgagaacttcgttcacatcattgatttccaaatcgcacaggggagccagtggataactatcattcaggctcttgcagcgaggcccgggggtccaccattcctaagaatcactggtatagatgactcaaactctgcttatgcccgaggtggtggactggatatggttgggacaagattgcatagcatctctgcttcgtgtggccttccctttgagttcaatgctgtccatgctgctagccatgaggtttatattcagcatcttgacacaagacctggggaggctattgtagtgaattttgcctatcagctgcaccatactcctgatgaaagcgtgagcgtggaaaatcaccgggacaggatcataagaatgatcaagagcctgtccccctagggtggtgactcttgttgagcaggagtcgaacacaaacacaagtgcattcttgccaaggtacttggagaccctcgactactatacggcaatgtttgagtcaatagatgttgctctaccaagggatgataagaggcggattagcacggagcaacactgtgtggcaagggatatcgtcaatttaatcgcgtgcgagggtgctgaaagggttgagaggcacgaggtgtttgggaaatggaaggcgaggtttgcaatggctggattcaggccgtacccgctgagttcggtggtgaacaacaccatcaaaacgctgctggatagctaccacagttgctacaggcttgaggagagggacggagtcctttaccttggttggaagggcagagtgttggtcgtgtcttctgcgtggtgctgacatgtcttgaggagaagctcatgtcatgtatgtacactgtttttattgttgaaacttaattcttgagtgattcgtgttacgtcgatccacgatatttctatagcctgacttgtcctttacccaatttcagatggaacctgagcttatcagtttcagatggaacctgagcttatataagggctttgctgcttgtctgcaccaggagttgctgtgatgataccgcgacagccgtgacttagaagaaggcatagtgattaaataaataaatatgttcatagctaggaatttggtgtgttgtggtttgctcccgttgttctaggattgacatgcttgtaatatactgtactactaattagaggatgtttagagacgattaaagggtatgcaggcacaagaggcggctgttgcatgtgtcctc

SEQ ID NO: 17430 - protein, 404 aa, Triticum aestivum
  peptide (1)..(404): Ceres Seq. ID no. 15219966
  misc_feature (145)..(404): Pfam Name: Pfam Description:  GRAS family transcription factor
  misc_feature (18)..(404): NCBI GI NO: 37533564 NR Description: putative SCARECROW gene regulator-like
  misc_feature (39)..(404): NCBI GI NO: 25989334 NR Description: chitin-inducible gibberellin-responsive protein
  misc_feature (59)..(404): NCBI GI NO: 15238903 NR Description: phytochrome A signal transduction 1 (PAT1)
  misc_feature (1)..(404): NCBI GI NO: 23397333 NR Description: putative scarecrow protein [Arabidopsis thaliana]
  misc_feature (1)..(404): NCBI GI NO: 30694805 NR Description: scarecrow-like transcription factor 5 (SCL5)
  misc_feature (34)..(404): NCBI GI NO: 25405382 NR Description: scarecrow-like protein
  misc_feature (34)..(404): NCBI GI NO: 14517552 NR Description: F17J6.12/F17J6.12 [Arabidopsis thaliana]
  misc_feature (133)..(404): NCBI GI NO: 26450054 NR Description: putative SCARECROW gene regulator
  misc_feature (65)..(404): NCBI GI NO: 16930433 NR Description: AT4g17230/dl4650c [Arabidopsis thaliana]
  misc_feature (133)..(404): NCBI GI NO: 15224425 NR Description: scarecrow-like transcription factor 21 (SCL21)
  misc_feature (274)..(274): Xaa is any aa, unknown or other
MSAKASERTYRCSDDSQMAYYNNSVPLAENGRFYMMQNHLDVHYTSSGDGSQKISSNPQVFEAQYCTLESSSANGVYPTQSSTSSHSISPISGSPLSQNDSHSYHTYDSPPTASCVTEIPDFQSKLKELENAILGPELDIASDSPESLLQANHPLKQDNWRQLLGINTGDLKQVIIACGKAVAANDMYATELLISELGQLVSVSGDPMQRLGAYMLEGLVARLSFSGSKLYKSLKCKEPTSSELMSYMHLLCEICPFYKFGYMSANGAIAEAIXGENFVHIIDFQIAQGSQWITIIQALAARPGGPPFLRITGIDDSNSAYARGGGLDMVGTRLHSISASCGLPFEFNAVHAASHEVYIQHLDTRPGEAIVVNFAYQLHHTPDESVSVENHRDRIIRMIKSLSP

SEQ ID NO: 17431 - protein, 387 aa, Triticum aestivum
  peptide (1)..(387): Ceres Seq. ID no. 15219967
  misc_feature (128)..(387): Pfam Name: Pfam Description:  GRAS family transcription factor
  misc_feature (1)..(387): NCBI GI NO: 37533564 NR Description: putative SCARECROW gene regulator-like
  misc_feature (22)..(387): NCBI GI NO: 25989334 NR Description: chitin-inducible gibberellin-responsive protein
  misc_feature (42)..(387): NCBI GI NO: 15238903 NR Description: phytochrome A signal transduction 1 (PAT1)
  misc_feature (1)..(387): NCBI GI NO: 23397333 NR Description: putative scarecrow protein [Arabidopsis thaliana]
  misc_feature (1)..(387): NCBI GI NO: 30694805 NR Description: scarecrow-like transcription factor 5 (SCL5)
  misc_feature (17)..(387): NCBI GI NO: 25405382 NR Description: scarecrow-like protein
  misc_feature (17)..(387): NCBI GI NO: 14517552 NR Description: F17J6.12/F17J6.12 [Arabidopsis thaliana]
  misc_feature (116)..(387): NCBI GI NO: 26450054 NR Description: putative SCARECROW gene regulator
  misc_feature (48)..(387): NCBI GI NO: 16930433 NR Description: AT4g17230/dl4650c [Arabidopsis thaliana]
  misc_feature (116)..(387): NCBI GI NO: 15224425 NR Description: scarecrow-like transcription factor 21 (SCL21)
  misc_feature (257)..(257): Xaa is any aa, unknown or other
MAYYNNSVPLAENGRFYMMQNHLDVHYTSSGDGSQKISSNPQVFEAQYCTLESSSANGVYPTQSSTSSHSISPISGSPLSQNDSHSYHTYDSPPTASCVTEIPDFQSKLKELENAILGPELDIASDSPESLLQANHPLKQDNWRQLLGINTGDLKQVIIACGKAVAANDMYATELLISELGQLVSVSGDPMQRLGAYMLEGLVARLSFSGSKLYKSLKCKEPTSSELMSYMHLLCEICPFYKFGYMSANGAIAEAIXGENFVHIIDFQIAQGSQWITIIQALAARPGGPPFLRITGIDDSNSAYARGGGLDMVGTRLHSISASCGLPFEFNAVHAASHEVYIQHLDTRPGEAIVVNFAYQLHHTPDESVSVENHRDRIIRMIKSLSP

SEQ ID NO: 17432 - protein, 370 aa, Triticum aestivum
  peptide (1)..(370): Ceres Seq. ID no. 15219968
  misc_feature (111)..(370): Pfam Name: Pfam Description:  GRAS family transcription factor
  misc_feature (1)..(370): NCBI GI NO: 37533564 NR Description: putative SCARECROW gene regulator-like
  misc_feature (5)..(370): NCBI GI NO: 25989334 NR Description: chitin-inducible gibberellin-responsive protein
  misc_feature (25)..(370): NCBI GI NO: 15238903 NR Description: phytochrome A signal transduction 1 (PAT1)
  misc_feature (1)..(370): NCBI GI NO: 23397333 NR Description: putative scarecrow protein [Arabidopsis thaliana]
  misc_feature (1)..(370): NCBI GI NO: 30694805 NR Description: scarecrow-like transcription factor 5 (SCL5)
  misc_feature (1)..(370): NCBI GI NO: 25405382 NR Description: scarecrow-like protein
  misc_feature (1)..(370): NCBI GI NO: 14517552 NR Description: F17J6.12/F17J6.12 [Arabidopsis thaliana]
  misc_feature (99)..(370): NCBI GI NO: 26450054 NR Description: putative SCARECROW gene regulator
  misc_feature (31)..(370): NCBI GI NO: 16930433 NR Description: AT4g17230/dl4650c [Arabidopsis thaliana]
  misc_feature (99)..(370): NCBI GI NO: 15224425 NR Description: scarecrow-like transcription factor 21 (SCL21)
  misc_feature (240)..(240): Xaa is any aa, unknown or other
MMQNHLDVHYTSSGDGSQKISSNPQVFEAQYCTLESSSANGVYPTQSSTSSHSISPISGSPLSQNDSHSYHTYDSPPTASCVTEIPDFQSKLKELENAILGPELDIASDSPESLLQANHPLKQDNWRQLLGINTGDLKQVIIACGKAVAANDMYATELLISELGQLVSVSGDPMQRLGAYMLEGLVARLSFSGSKLYKSLKCKEPTSSELMSYMHLLCEICPFYKFGYMSANGAIAEAIXGENFVHIIDFQIAQGSQWITIIQALAARPGGPPFLRITGIDDSNSAYARGGGLDMVGTRLHSISASCGLPFEFNAVHAASHEVYIQHLDTRPGEAIVVNFAYQLHHTPDESVSVENHRDRIIRMIKSLSP

SEQ ID NO: 17433 - DNA, 1763 bp, Triticum aestivum
  misc_feature (1)..(1763): Ceres Seq. ID no. 15178236
cccaacgcgccctaaatcccccccaccactctgccgccggcgcgtccatcagcccccctaccgcctctctccctcgcgcgcgcgtcgccgccgccgccgtccttcctccccggggcaccgcgctcccgccgccccgtccgcgttgctcggccattgagcctccctcgaggtggtaatttttgtcaaggttgttgttaccatggaggtcaacggtcgtcacaagcctacaagagagtatatcgacagagggtgcaatggtgtaaaatcgcccaataatttcggcgaagttgatccctggaccgcgtgggcgtacagaccacggaccatctcgttgttactcatgggaacctgctttttaatttgggcaagtggtgctcttaatccagaaggaagcttctctgctgaccgtgtctcatctgtaaaaaggggtgtctttgcgatgattgctgttttcttggcttattcttttattcaggcaccttcaactgtgctcatcagaccacatcctgcaatttggcggctggtccatgggatggcagttgtttaccttgtggccctcacatttttgcttttccagactcgtgatgatgctaggcagttcatgaagtaccttcaccctgaccttggtgttgaattacctgaaagatcctatggaaccgactgccgtatatatgtacctgatcatccgaaaagcaggtttaacaatgtttatgacatcctttttgacgagtttgttattgcccatatccttggatggtggggaaaggctataatgatacgaaaccaaccacttctatgggtgttatcaattggctttgagttaatggagctaacttttcgacatatgttgccaaattttaacgaatgctggtgggatagcattgttctagacatattgatctgcaattggtttggtatctgggctggtatgaagactgtgagatattttgatgggaggacatatgaatgggttggcttgagtcgccagcccaatattatgagtaaggtgaaaaggacactaggtcagttcacaccagcacagtgggacaaggatgagtggtaccctctgctcggcccttggagattcatccaagtgctaagcctgtgcgtaattttcatgaccatcgaacttaacacattctttcttaagttctgcctctggattcctccccggaatcccttgattgtctaccgactggtcctttggtggttgattgcgataccaaccatccgcgaatacaacacctatttgcaggacaggaactctgtgaagaaggtggggtctttctgttggctttcgctggctatatgcatcatagagcttctgatctgcatcaagtttggccatggtctcttcccgaagtcgatgccgtcgtggctgatcatattctggacgacggtggccacgcttctcacgatgttcctttttgtgtggacatggaaaatttaccgaacaatgattagaaaaaggttgtgattgcaaccaaagccattgttttctctggcccacaccattcttttctcctccgattcaatattgccgtgtaaatatccattcaaattgtgtacatgtagcagtaggccattaatcggtgaccgcgtgaaggtcagccttagaaatttcttgtcgatccaccagcagaataagccccccttccttccgttcattcatgtaccgtgtcaatcaactccgaaactctgaaattcatttggtccgacctacttcgatttaatgaaagtaatgaaataaggttattctgtcc

SEQ ID NO: 17434 - protein, 425 aa, Triticum aestivum
  peptide (1)..(425): Ceres Seq. ID no. 15178237
  misc_feature (101)..(384): Pfam Name: Pfam Description:  Phosphatidyl serine synthase
  misc_feature (1)..(384): NCBI GI NO: 25518032 NR Description: F9L1.4 protein - Arabidopsis thaliana
  misc_feature (191)..(298): NCBI GI NO: 34895332 NR Description: P0494A10.20
  misc_feature (1)..(54): NCBI GI NO: 34895332 NR Description: P0494A10.20
  misc_feature (315)..(353): NCBI GI NO: 34895332 NR Description: P0494A10.20
  misc_feature (216)..(424): NCBI GI NO: 22329573 NR Description: phosphatidylserine synthase -related
  misc_feature (77)..(126): NCBI GI NO: 34895332 NR Description: P0494A10.20
  misc_feature (214)..(328): NCBI GI NO: 34911216 NR Description: putative phosphatidylserine synthase
  misc_feature (77)..(143): NCBI GI NO: 34911216 NR Description: putative phosphatidylserine synthase
  misc_feature (29)..(56): NCBI GI NO: 34911216 NR Description: putative phosphatidylserine synthase
  misc_feature (31)..(422): NCBI GI NO: 13540555 NR Description: phosphatidylserine synthase 2 [Homo sapiens]
MEVNGRHKPTREYIDRGCNGVKSPNNFGEVDPWTAWAYRPRTISLLLMGTCFLIWASGALNPEGSFSADRVSSVKRGVFAMIAVFLAYSFIQAPSTVLIRPHPAIWRLVHGMAVVYLVALTFLLFQTRDDARQFMKYLHPDLGVELPERSYGTDCRIYVPDHPKSRFNNVYDILFDEFVIAHILGWWGKAIMIRNQPLLWVLSIGFELMELTFRHMLPNFNECWWDSIVLDILICNWFGIWAGMKTVRYFDGRTYEWVGLSRQPNIMSKVKRTLGQFTPAQWDKDEWYPLLGPWRFIQVLSLCVIFMTIELNTFFLKFCLWIPPRNPLIVYRLVLWWLIAIPTIREYNTYLQDRNSVKKVGSFCWLSLAICIIELLICIKFGHGLFPKSMPSWLIIFWTTVATLLTMFLFVWTWKIYRTMIRKRL

SEQ ID NO: 17435 - protein, 378 aa, Triticum aestivum
  peptide (1)..(378): Ceres Seq. ID no. 15178238
  misc_feature (54)..(337): Pfam Name: Pfam Description:  Phosphatidyl serine synthase
  misc_feature (1)..(337): NCBI GI NO: 25518032 NR Description: F9L1.4 protein - Arabidopsis thaliana
  misc_feature (144)..(251): NCBI GI NO: 34895332 NR Description: P0494A10.20
  misc_feature (268)..(306): NCBI GI NO: 34895332 NR Description: P0494A10.20
  misc_feature (169)..(377): NCBI GI NO: 22329573 NR Description: phosphatidylserine synthase -related
  misc_feature (30)..(79): NCBI GI NO: 34895332 NR Description: P0494A10.20
  misc_feature (167)..(281): NCBI GI NO: 34911216 NR Description: putative phosphatidylserine synthase
  misc_feature (30)..(96): NCBI GI NO: 34911216 NR Description: putative phosphatidylserine synthase
  misc_feature (1)..(375): NCBI GI NO: 13540555 NR Description: phosphatidylserine synthase 2 [Homo sapiens]
  misc_feature (1)..(375): NCBI GI NO: 2190007 NR Description: phosphatidylserine synthase II
  misc_feature (1)..(375): NCBI GI NO: 4063700 NR Description: phosphatidylserine synthase-2 [Mus musculus]
MGTCFLIWASGALNPEGSFSADRVSSVKRGVFAMIAVFLAYSFIQAPSTVLIRPHPAIWRLVHGMAVVYLVALTFLLFQTRDDARQFMKYLHPDLGVELPERSYGTDCRIYVPDHPKSRFNNVYDILFDEFVIAHILGWWGKAIMIRNQPLLWVLSIGFELMELTFRHMLPNFNECWWDSIVLDILICNWFGIWAGMKTVRYFDGRTYEWVGLSRQPNIMSKVKRTLGQFTPAQWDKDEWYPLLGPWRFIQVLSLCVIFMTIELNTFFLKFCLWIPPRNPLIVYRLVLWWLIAIPTIREYNTYLQDRNSVKKVGSFCWLSLAICIIELLICIKFGHGLFPKSMPSWLIIFWTTVATLLTMFLFVWTWKIYRTMIRKRL

SEQ ID NO: 17436 - protein, 345 aa, Triticum aestivum
  peptide (1)..(345): Ceres Seq. ID no. 15178239
  misc_feature (21)..(304): Pfam Name: Pfam Description:  Phosphatidyl serine synthase
  misc_feature (1)..(304): NCBI GI NO: 25518032 NR Description: F9L1.4 protein - Arabidopsis thaliana
  misc_feature (111)..(218): NCBI GI NO: 34895332 NR Description: P0494A10.20
  misc_feature (235)..(273): NCBI GI NO: 34895332 NR Description: P0494A10.20
  misc_feature (136)..(344): NCBI GI NO: 22329573 NR Description: phosphatidylserine synthase -related
  misc_feature (1)..(46): NCBI GI NO: 34895332 NR Description: P0494A10.20
  misc_feature (134)..(248): NCBI GI NO: 34911216 NR Description: putative phosphatidylserine synthase
  misc_feature (1)..(63): NCBI GI NO: 34911216 NR Description: putative phosphatidylserine synthase
  misc_feature (1)..(342): NCBI GI NO: 13540555 NR Description: phosphatidylserine synthase 2 [Homo sapiens]
  misc_feature (1)..(342): NCBI GI NO: 2190007 NR Description: phosphatidylserine synthase II
  misc_feature (1)..(342): NCBI GI NO: 4063700 NR Description: phosphatidylserine synthase-2 [Mus musculus]
MIAVFLAYSFIQAPSTVLIRPHPAIWRLVHGMAVVYLVALTFLLFQTRDDARQFMKYLHPDLGVELPERSYGTDCRIYVPDHPKSRFNNVYDILFDEFVIAHILGWWGKAIMIRNQPLLWVLSIGFELMELTFRHMLPNFNECWWDSIVLDILICNWFGIWAGMKTVRYFDGRTYEWVGLSRQPNIMSKVKRTLGQFTPAQWDKDEWYPLLGPWRFIQVLSLCVIFMTIELNTFFLKFCLWIPPRNPLIVYRLVLWWLIAIPTIREYNTYLQDRNSVKKVGSFCWLSLAICIIELLICIKFGHGLFPKSMPSWLIIFWTTVATLLTMFLFVWTWKIYRTMIRKRL

SEQ ID NO: 17437 - DNA, 2008 bp, Triticum aestivum
  misc_feature (1)..(2008): Ceres Seq. ID no. 14313228
atccgcacgagcgcacacgcacagcgataaagccagcgcagcagcaaagccggagcagagccatcaaaccacgccgcgactcctccccctcccctgctcctcccggcgactcgcggggtgctgctgctgacggctcatgggctgctgccgctcgtcgctgcgggcggtgacgcacccccacccggagaagccgccggggacgggcgcgggggcggcgccgatggccaggcggccgtccttctcggcgagcgcgcaccgggccgcgccgcctccgccggcggcggcggcggcggcatcgtcctccgaggcggggttcgccgagttctcgctggcggagctgcgcgcggccacgggcgggttcgcgccggagaacatcgtgtccgagagcggcgacaaggcgcccaacttcgtctacaggggccgcctgcagcaggggcaggggcagggcccccgccgcgcgatcgccgtcaagaagttcggcaagatggcctggcccgaccccaagcagttcgcggaggaggccaggggggtgggcaggctgcgccaccgccggctcgccaacctcatcggctactgctgcgacggggacgagcgcctgctcgtcgccgagttcatgcccaacgacaccctcgccaagcacgtcttccactgggaaaaccagactattgaatgggctatgcgtctaagagtcgcgtaccacatagctgaggcgctggactactgcagcaacgagggtagacctttatatcatgacctaaatgcatatagggtcctttttgatgagaatggtgatcctcgcctttcatgctttggtttgatgaaaaacagcagagatgggaaaagttatagcacaaaccttgcatacacacctccagaatatttgagaactggaagagtcactccagaaagtgtcatattcagctttggcaccgtactactggaccttctaagtggaaaacgcatacctccttcccatgctcttgacatgatgcgaggcaacaatatccaaatgttgatggattcacatttggaaggaaactactcaacagaagaggcaaccgctttggtagatcttgcctcccagtgtttgcagtatgaagctagggaccgccccaatacaaaaaagctggttaacatacttgagcccttgcaaacaaaattagaggtaccgtcctacgagatgcttggcataccaaagcatgaggaagaagtacctccacctcctgccccacaaccaccacaacaccctctttctcccatggctgaggcctgttctaggatggacctgacagctatccagcagatccttgtatcgacacattacagagacgacgaaggcagtaatgagctatcattccaggaatggacgcagcagatgagggacatgttggacgccaggaaacgtggggatctagcttttcgtgacaaagatttcaagacagccatagaatgctatacacagtttgttgatgtgggcacaatggtatcgccgacggtgtatgcccgaaggagcttgtgtcacctcatgtgcgaccagcccgacgctgccctccgggacgcgatgcaagcgcaatgcgtgtaccccgaatggccaactgcattctatatgcaagccgtcgcgctttcgaagccagatatgcagagcgacgccaaggacatgttgagtgaggcttcgcagctagaagagaagaagcaaaagaactcgagatgatgtcgagagcgtggtctttgtaaagatgtgtcggttcggtctcttttgcggctcaaatgtttacgtcgattgaggcgtgctattccgtcctttggaaaagaaaaaaactgtgagatattcgaggttgagttagggagaaactgcagggaagaagtgccgccgtagagtcgtgtggttgtaactatttggtttggcatttctgcgatgcattattttttgggtctatatatatatatatatgacatttttaaaagctataatcaggcataatgcttaagctaatgccgtagcttccac

SEQ ID NO: 17438 - protein, 524 aa, Triticum aestivum
  peptide (1)..(524): Ceres Seq. ID no. 14313229
  misc_feature (1)..(522): NCBI GI NO: 37536550 NR Description: protein kinase-like protein
  misc_feature (1)..(524): NCBI GI NO: 18418600 NR Description: protein kinase family [Arabidopsis thaliana]
  misc_feature (1)..(524): NCBI GI NO: 7486022 NR Description: hypothetical protein F23E12
  misc_feature (24)..(524): NCBI GI NO: 37537032 NR Description: putative protein kinase
  misc_feature (60)..(524): NCBI GI NO: 15232406 NR Description: protein kinase family [Arabidopsis thaliana]
  misc_feature (60)..(522): NCBI GI NO: 22327962 NR Description: protein kinase - related [Arabidopsis thaliana]
  misc_feature (60)..(524): NCBI GI NO: 21553556 NR Description: protein kinase-like protein [Arabidopsis thaliana]
  misc_feature (30)..(524): NCBI GI NO: 15237465 NR Description: protein kinase family [Arabidopsis thaliana]
  misc_feature (30)..(524): NCBI GI NO: 28393210 NR Description: putative protein kinase [Arabidopsis thaliana]
  misc_feature (60)..(519): NCBI GI NO: 15237604 NR Description: protein kinase family [Arabidopsis thaliana]
MGCCRSSLRAVTHPHPEKPPGTGAGAAPMARRPSFSASAHRAAPPPPAAAAAASSSEAGFAEFSLAELRAATGGFAPENIVSESGDKAPNFVYRGRLQQGQGQGPRRAIAVKKFGKMAWPDPKQFAEEARGVGRLRHRRLANLIGYCCDGDERLLVAEFMPNDTLAKHVFHWENQTIEWAMRLRVAYHIAEALDYCSNEGRPLYHDLNAYRVLFDENGDPRLSCFGLMKNSRDGKSYSTNLAYTPPEYLRTGRVTPESVIFSFGTVLLDLLSGKRIPPSHALDMMRGNNIQMLMDSHLEGNYSTEEATALVDLASQCLQYEARDRPNTKKLVNILEPLQTKLEVPSYEMLGIPKHEEEVPPPPAPQPPQHPLSPMAEACSRMDLTAIQQILVSTHYRDDEGSNELSFQEWTQQMRDMLDARKRGDLAFRDKDFKTAIECYTQFVDVGTMVSPTVYARRSLCHLMCDQPDAALRDAMQAQCVYPEWPTAFYMQAVALSKPDMQSDAKDMLSEASQLEEKKQKNSR

SEQ ID NO: 17439 - protein, 496 aa, Triticum aestivum
  peptide (1)..(496): Ceres Seq. ID no. 14313230
  misc_feature (1)..(494): NCBI GI NO: 37536550 NR Description: protein kinase-like protein
  misc_feature (1)..(496): NCBI GI NO: 18418600 NR Description: protein kinase family [Arabidopsis thaliana]
  misc_feature (1)..(496): NCBI GI NO: 7486022 NR Description: hypothetical protein F23E12
  misc_feature (1)..(496): NCBI GI NO: 37537032 NR Description: putative protein kinase
  misc_feature (32)..(496): NCBI GI NO: 15232406 NR Description: protein kinase family [Arabidopsis thaliana]
  misc_feature (32)..(494): NCBI GI NO: 22327962 NR Description: protein kinase - related [Arabidopsis thaliana]
  misc_feature (32)..(496): NCBI GI NO: 21553556 NR Description: protein kinase-like protein [Arabidopsis thaliana]
  misc_feature (2)..(496): NCBI GI NO: 15237465 NR Description: protein kinase family [Arabidopsis thaliana]
  misc_feature (2)..(496): NCBI GI NO: 28393210 NR Description: putative protein kinase [Arabidopsis thaliana]
  misc_feature (32)..(491): NCBI GI NO: 15237604 NR Description: protein kinase family [Arabidopsis thaliana]
MARRPSFSASAHRAAPPPPAAAAAASSSEAGFAEFSLAELRAATGGFAPENIVSESGDKAPNFVYRGRLQQGQGQGPRRAIAVKKFGKMAWPDPKQFAEEARGVGRLRHRRLANLIGYCCDGDERLLVAEFMPNDTLAKHVFHWENQTIEWAMRLRVAYHIAEALDYCSNEGRPLYHDLNAYRVLFDENGDPRLSCFGLMKNSRDGKSYSTNLAYTPPEYLRTGRVTPESVIFSFGTVLLDLLSGKRIPPSHALDMMRGNNIQMLMDSHLEGNYSTEEATALVDLASQCLQYEARDRPNTKKLVNILEPLQTKLEVPSYEMLGIPKHEEEVPPPPAPQPPQHPLSPMAEACSRMDLTAIQQILVSTHYRDDEGSNELSFQEWTQQMRDMLDARKRGDLAFRDKDFKTAIECYTQFVDVGTMVSPTVYARRSLCHLMCDQPDAALRDAMQAQCVYPEWPTAFYMQAVALSKPDMQSDAKDMLSEASQLEEKKQKNSR

SEQ ID NO: 17440 - protein, 408 aa, Triticum aestivum
  peptide (1)..(408): Ceres Seq. ID no. 14313231
  misc_feature (1)..(406): NCBI GI NO: 37536550 NR Description: protein kinase-like protein
  misc_feature (1)..(408): NCBI GI NO: 18418600 NR Description: protein kinase family [Arabidopsis thaliana]
  misc_feature (1)..(408): NCBI GI NO: 7486022 NR Description: hypothetical protein F23E12
  misc_feature (1)..(408): NCBI GI NO: 37537032 NR Description: putative protein kinase
  misc_feature (1)..(408): NCBI GI NO: 15232406 NR Description: protein kinase family [Arabidopsis thaliana]
  misc_feature (1)..(406): NCBI GI NO: 22327962 NR Description: protein kinase - related [Arabidopsis thaliana]
  misc_feature (1)..(408): NCBI GI NO: 21553556 NR Description: protein kinase-like protein [Arabidopsis thaliana]
  misc_feature (1)..(408): NCBI GI NO: 15237465 NR Description: protein kinase family [Arabidopsis thaliana]
  misc_feature (1)..(408): NCBI GI NO: 28393210 NR Description: putative protein kinase [Arabidopsis thaliana]
  misc_feature (1)..(403): NCBI GI NO: 15237604 NR Description: protein kinase family [Arabidopsis thaliana]
MAWPDPKQFAEEARGVGRLRHRRLANLIGYCCDGDERLLVAEFMPNDTLAKHVFHWENQTIEWAMRLRVAYHIAEALDYCSNEGRPLYHDLNAYRVLFDENGDPRLSCFGLMKNSRDGKSYSTNLAYTPPEYLRTGRVTPESVIFSFGTVLLDLLSGKRIPPSHALDMMRGNNIQMLMDSHLEGNYSTEEATALVDLASQCLQYEARDRPNTKKLVNILEPLQTKLEVPSYEMLGIPKHEEEVPPPPAPQPPQHPLSPMAEACSRMDLTAIQQILVSTHYRDDEGSNELSFQEWTQQMRDMLDARKRGDLAFRDKDFKTAIECYTQFVDVGTMVSPTVYARRSLCHLMCDQPDAALRDAMQAQCVYPEWPTAFYMQAVALSKPDMQSDAKDMLSEASQLEEKKQKNSR

SEQ ID NO: 17441 - DNA, 1901 bp, Triticum aestivum
  misc_feature (1)..(1901): Ceres Seq. ID no. 13663734
cattacctagaacatcctaatcgaaaaaaagcctctcttcccctcaccccccacagatcgatccctcccggacagaaacgcagcaaggccgactaccttccaccgccgcttcgacactagggttcagccgttacatcgtcggcggggcttggcccgccgccgccggagatgggcgtcgcggagattgcgaagaaggtcgacgccctcaaggccgagctcgccgccaagtcgtcccgcatcgccgacctggaggcccgggtctcgctcctcgaagccgagaacgcgcgcttgaggaaggccatgtccgagggagttgcgatgaaccgtagagccaaaaagggtccaacctttggtcgattggaggagggtctcggcggaaacaagcaaaagtcagccgacatcgcgggcgggcatctgatgaatgatgtcatagaggtcagcgacggcgaggaagarggsgatggctgtggatgtcaacagcggggaggagggcgttcctccggtcccgactcctagcaagtgtgcggtgcgggtggtgaccggcaagaggggtgttgcagaggagattaaggacgccgatggaggtggtgggcgagaccatgggagcgttcgctgtgatggcaatgtgattctggacgacgatgatgttttgatcacgccacgaggcaagaagcgcacagcgacacgggtaatcagtgacagtgagagtgaggatgaagatgagaatggtcaagggcatggagatggtgaggtgggtgttagaagcagcaggaaatgtttgttgcgtggagtcagtgacagtgcgagtgaggatggcagtgagggtgttcgtgtggttaatcaaaaacctgtttcacctctagttacgacaggggtcgagagtgaggatgacgatggtgaattacatgagatggaggggcgttctactccggcaacaaggcgcttcgctcggttggctgaaggtcaatcaaagagaatgcgacctacacgtcggaaacttgagttttttgaacccaagaatcatgaagagagcgaggatgattcagaagaggatgataatatggaaaattttatagtagatgattcagattgttcagaaaattctgctgattctgttgaagaatcctctgctggaccagaagagtctgacgacgaggaaacttataaagagcttatggataggatacgcggcaaaaggaatgccaagaataaggattggaagattgagccagagatgctatcagcatttgatgaataccctgaacttcgcctgaaagctgtttgtgccctctatcgaaagcagacccaggaagaacaggcaggaaaagctattatcatgcacaacaaaaaaggatttaaccagatagacgcccgaaggggttctaacatagcgcagtttcttctggatggtgatgctgctgggccgcttaagaagactgcacaagacttggaaaattacgatcggtatgctcttgagttctgtcacaagatggctttacgttactcgaagcagttgtttgcaatatatcagaataaggagtacccctactttccatgactctggtgtcagttatcacttacttcatatgttgacctttctgtgacccttgtacctccccaatcagtcagtcagagtcttttgtatatatgggtttagttttgtgtcttaagtaatctgtagttagggcatgctaaagttagtttatcactaggatgcacgctgttaagtgaagcacgtgtctgacagggtctatgttgtttagctgaactgcttgtgctccctgtaatatccatgcatagtaaatctatctctatccttgaaatgttacccaaggagttgttcaaaaaaaaaaaaaaaaaagcttatcgataccgtcgacctcgagggggggcccggtacc

SEQ ID NO: 17442 - protein, 365 aa, Triticum aestivum
  peptide (1)..(365): Ceres Seq. ID no. 15220724
  misc_feature (1)..(146): NCBI GI NO: 34904092 NR Description: unnamed protein product
  misc_feature (84)..(364): NCBI GI NO: 15238681 NR Description: hypothetical protein [Arabidopsis thaliana]
  misc_feature (189)..(364): NCBI GI NO: 21742592 NR Description: OSJNBb0076A22.19
MAVDVNSGEEGVPPVPTPSKCAVRVVTGKRGVAEEIKDADGGGGRDHGSVRCDGNVILDDDDVLITPRGKKRTATRVISDSESEDEDENGQGHGDGEVGVRSSRKCLLRGVSDSASEDGSEGVRVVNQKPVSPLVTTGVESEDDDGELHEMEGRSTPATRRFARLAEGQSKRMRPTRRKLEFFEPKNHEESEDDSEEDDNMENFIVDDSDCSENSADSVEESSAGPEESDDEETYKELMDRIRGKRNAKNKDWKIEPEMLSAFDEYPELRLKAVCALYRKQTQEEQAGKAIIMHNKKGFNQIDARRGSNIAQFLLDGDAAGPLKKTAQDLENYDRYALEFCHKMALRYSKQLFAIYQNKEYPYFP

SEQ ID NO: 17443 - protein, 215 aa, Triticum aestivum
  peptide (1)..(215): Ceres Seq. ID no. 15220725
  misc_feature (1)..(214): NCBI GI NO: 15238681 NR Description: hypothetical protein [Arabidopsis thaliana]
  misc_feature (39)..(214): NCBI GI NO: 21742592 NR Description: OSJNBb0076A22.19
MEGRSTPATRRFARLAEGQSKRMRPTRRKLEFFEPKNHEESEDDSEEDDNMENFIVDDSDCSENSADSVEESSAGPEESDDEETYKELMDRIRGKRNAKNKDWKIEPEMLSAFDEYPELRLKAVCALYRKQTQEEQAGKAIIMHNKKGFNQIDARRGSNIAQFLLDGDAAGPLKKTAQDLENYDRYALEFCHKMALRYSKQLFAIYQNKEYPYFP

SEQ ID NO: 17444 - protein, 193 aa, Triticum aestivum
  peptide (1)..(193): Ceres Seq. ID no. 15220726
  misc_feature (1)..(192): NCBI GI NO: 15238681 NR Description: hypothetical protein [Arabidopsis thaliana]
  misc_feature (17)..(192): NCBI GI NO: 21742592 NR Description: OSJNBb0076A22.19
MRPTRRKLEFFEPKNHEESEDDSEEDDNMENFIVDDSDCSENSADSVEESSAGPEESDDEETYKELMDRIRGKRNAKNKDWKIEPEMLSAFDEYPELRLKAVCALYRKQTQEEQAGKAIIMHNKKGFNQIDARRGSNIAQFLLDGDAAGPLKKTAQDLENYDRYALEFCHKMALRYSKQLFAIYQNKEYPYFP

SEQ ID NO: 17445 - DNA, 1091 bp, Triticum aestivum
  misc_feature (1)..(1091): Ceres Seq. ID no. 13663630
acctagaacatcctaacgaaaaaaatcacattcgtcccgttctctatctcggtatctccattcccgaacagaaaaaaagggaacacacacacaggcggacgcgtagagcccaatccccgcagggccgagatccccgccccactcctccggacaaccgccgccgactcgccggccctcgccgccttccgcgtcgccggcaccgccgccgtattgcagggcttcgtgtgctgttcctcaccagtgccgtctaagatggtgtcctttgagatgaatgaccttaagaagatagggctaggcctgacaggctttggagtattcttctccttcctgggaatcgttttcttctttgacaaggggcttattgctatgggcaatatactcttcctgtcaggtttgggtatgacaattggtctgaaatcaactatgcagttcttcacaaagcctaagaattacaagggtaccatctcatttggcgcaggctttttcctggttctcattggatggcctttctttggcatgctcttagaggcatatggttttatcgtgctcttcagtggattctggccaacactcgcagttttcctgcaaaggattcctatccttggctggatttttcaacaaccatttgtcacttcgttccttgaccgttacagagggaaacgagtgccggtgtagtatcacttcgcgctatgtttcttatgatgtagcagctgaagtttttttccttccctggggataacagcaagtagttgtgccatcctggcctttccctttgcctgtttacttactggtgactgtcctttgtaaattacacccctggatggttttatcaaagaccaagatgcaaattgtcccatggtatgggctgaagaaacttcataagcgaacccggacgattcaaatatgtagctgtagagggatgctgttgaagtagaagctacatcctatccgtctcttctgtacttatgttcagatatagatattctgttctctcgagtcttgagcttgtgtttgctttatttttgtgcgcgcttcatagcttgaagaaagtcaaatatgtgctggaactgaaattaattcatgattcatac

SEQ ID NO: 17446 - protein, 140 aa, Triticum aestivum
  peptide (1)..(140): Ceres Seq. ID no. 15220241
  misc_feature (30)..(129): Pfam Name: Pfam Description:  Got1-like family
  misc_feature (1)..(140): NCBI GI NO: 15229139 NR Description: expressed protein [Arabidopsis thaliana]
  misc_feature (1)..(140): NCBI GI NO: 30678779 NR Description: expressed protein [Arabidopsis thaliana]
  misc_feature (1)..(128): NCBI GI NO: 12324443 NR Description: unknown protein; 50647-51606
  misc_feature (1)..(128): NCBI GI NO: 33146513 NR Description: NFkB activating protein-like
  misc_feature (1)..(100): NCBI GI NO: 6714435 NR Description: unknown protein [Arabidopsis thaliana]
  misc_feature (5)..(126): NCBI GI NO: 24642432 NR Description: CG32576-PA [Drosophila melanogaster]
  misc_feature (5)..(126): NCBI GI NO: 17945675 NR Description: RE29988p [Drosophila melanogaster]
  misc_feature (1)..(132): NCBI GI NO: 7634779 NR Description: HDCMA39P [Homo sapiens]
  misc_feature (4)..(137): NCBI GI NO: 22329359 NR Description: expressed protein [Arabidopsis thaliana]
  misc_feature (1)..(132): NCBI GI NO: 26384022 NR Description: unnamed protein product [Mus musculus]
MVSFEMNDLKKIGLGLTGFGVFFSFLGIVFFFDKGLIAMGNILFLSGLGMTIGLKSTMQFFTKPKNYKGTISFGAGFFLVLIGWPFFGMLLEAYGFIVLFSGFWPTLAVFLQRIPILGWIFQQPFVTSFLDRYRGKRVPV

SEQ ID NO: 17447 - protein, 135 aa, Triticum aestivum
  peptide (1)..(135): Ceres Seq. ID no. 15220242
  misc_feature (25)..(124): Pfam Name: Pfam Description:  Got1-like family
  misc_feature (1)..(135): NCBI GI NO: 15229139 NR Description: expressed protein [Arabidopsis thaliana]
  misc_feature (1)..(135): NCBI GI NO: 30678779 NR Description: expressed protein [Arabidopsis thaliana]
  misc_feature (1)..(123): NCBI GI NO: 12324443 NR Description: unknown protein; 50647-51606
  misc_feature (1)..(123): NCBI GI NO: 33146513 NR Description: NFkB activating protein-like
  misc_feature (1)..(95): NCBI GI NO: 6714435 NR Description: unknown protein [Arabidopsis thaliana]
  misc_feature (1)..(121): NCBI GI NO: 24642432 NR Description: CG32576-PA [Drosophila melanogaster]
  misc_feature (1)..(121): NCBI GI NO: 17945675 NR Description: RE29988p [Drosophila melanogaster]
  misc_feature (1)..(127): NCBI GI NO: 7634779 NR Description: HDCMA39P [Homo sapiens]
  misc_feature (1)..(132): NCBI GI NO: 22329359 NR Description: expressed protein [Arabidopsis thaliana]
  misc_feature (1)..(127): NCBI GI NO: 26384022 NR Description: unnamed protein product [Mus musculus]
MNDLKKIGLGLTGFGVFFSFLGIVFFFDKGLIAMGNILFLSGLGMTIGLKSTMQFFTKPKNYKGTISFGAGFFLVLIGWPFFGMLLEAYGFIVLFSGFWPTLAVFLQRIPILGWIFQQPFVTSFLDRYRGKRVPV

SEQ ID NO: 17448 - protein, 102 aa, Triticum aestivum
  peptide (1)..(102): Ceres Seq. ID no. 15220243
  misc_feature (1)..(91): Pfam Name: Pfam Description:  Got1-like family
  misc_feature (1)..(102): NCBI GI NO: 15229139 NR Description: expressed protein [Arabidopsis thaliana]
  misc_feature (1)..(102): NCBI GI NO: 30678779 NR Description: expressed protein [Arabidopsis thaliana]
  misc_feature (1)..(90): NCBI GI NO: 12324443 NR Description: unknown protein; 50647-51606
  misc_feature (1)..(90): NCBI GI NO: 33146513 NR Description: NFkB activating protein-like
  misc_feature (1)..(62): NCBI GI NO: 6714435 NR Description: unknown protein [Arabidopsis thaliana]
  misc_feature (1)..(88): NCBI GI NO: 24642432 NR Description: CG32576-PA [Drosophila melanogaster]
  misc_feature (1)..(88): NCBI GI NO: 17945675 NR Description: RE29988p [Drosophila melanogaster]
  misc_feature (1)..(94): NCBI GI NO: 7634779 NR Description: HDCMA39P [Homo sapiens]
  misc_feature (1)..(99): NCBI GI NO: 22329359 NR Description: expressed protein [Arabidopsis thaliana]
  misc_feature (1)..(94): NCBI GI NO: 26384022 NR Description: unnamed protein product [Mus musculus]
MGNILFLSGLGMTIGLKSTMQFFTKPKNYKGTISFGAGFFLVLIGWPFFGMLLEAYGFIVLFSGFWPTLAVFLQRIPILGWIFQQPFVTSFLDRYRGKRVPV

SEQ ID NO: 17449 - DNA, 1902 bp, Triticum aestivum
  misc_feature (1)..(1902): Ceres Seq. ID no. 15170655
aagtgttgtgccaacggatgctggttttacattttataaacttgtcatggtattaagctgttgccccatggctgacgtatatctatgtttatatgatttactttgggccttatttgtatggtccagcagccgggcccatacacgtagtatttgaactaaattccacgaggatgggctgggatccgtgtccaccctagtctgtccaaattaagccttattgtgcaatgtctatttttaagtgatgtttaaggttgttgcttttcgtatgaaagtttttttttttaacatgtgacacacttgcttcttgagccttgtttgctgcatacctaaatgctaaaaccactcttgcaggttacagacagaaagtaaaagacattgtgcagggtgctctgtttcctgaggttggtgttgacaaaaggactggttctgctggaggaactggagggcaagttgttgttcgtgatatcgatctttattcatactgtgagtcttgcttacttccgttcagcatacaatgccatgttggatatgtgccctccggtggaagggtcgttgggttaagcaagctttcaagagtagctgatgtctttgccaagagatttcaaaaccctcagagattagctaatgaagtttgtggtgcattgcatgttagcatacaacctgctggtgttgctgttgctatgcagtgctggcacataccgttgccggagaacttcaaatgcaaaaattcgcgagctttgattagaacctcacattcatctcgttcgggagtttttgagggcgagaacagctccttttggaatgattttgtggctcttcttaagcttagaggcatagacatggagatggacagccgttctgcttctttaacttggtgccccttaaggcctcatgaggttccgctttgcaatgggcacgcaaagaagattacaaccaatggtgctagctcagcaaaatcggcatccattccatctaatatggtttctgctgtcagctcaatgctcctgtctcttggtgaggaccccctaaggaaagaacttctaggcagtcctcagcgttacgtgcaatggctgatgaggttcagagcatgcaatcttgatgtgaagctgaatggttttacacttaacagtgcaagtgtatatgagagaccaggcgaagatgctactgatcatcgagcaattggttctgagctgcatttgccattttgtgcccagtgcgagcaccacctcctgccgttctacggagtagtgcacattggttactttggcagtggagacggtgaagggatcaaccgctcacattttcaggctctggttcatttctacgggtgcaagcttcaggtccaggaaaggatgacaagacagatagctgaagcagtttattccgtctcacatcgtggagccatagttgttgtagaagcaaaccatatctgcatgatatcaaggggaatagagaaaatcaggagtagtacagcaacaattgcagttttgggtcagttttcaaccgattcttctgccaaggcatcctttctacagaacgtcttagatactgctaatcaggaagtatgagtggcttcagatcatatactgatagaatctcagcgaaaagatacaatgagtctaatccctggtcgtcatttcagcaaggcaggcactgcgacgactatatatatggtttgaagttgtcatgcagctatggcatggttgccattttaccagccattgcaggtgggagcgaccaggacctcgtcgcgtggaatgttgtgtctgaagaagattaaccagaagcaccagaaagttttggttctcccgtgttgtaccattttcgtttgaacgacatgtcaaagttatcctagcgttgtaggtgtggcggctgtgccgagcaatacagtataaatgtttt

SEQ ID NO: 17450 - protein, 295 aa, Triticum aestivum
  peptide (1)..(295): Ceres Seq. ID no. 15170656
  misc_feature (1)..(295): NCBI GI NO: 38346071 NR Description: OSJNBa0084K01.11
  misc_feature (1)..(290): NCBI GI NO: 15231435 NR Description: GTP cyclohydrolase I [Arabidopsis thaliana]
  misc_feature (1)..(290): NCBI GI NO: 19909132 NR Description: GTP cyclohydrolase I [Arabidopsis thaliana]
  misc_feature (1)..(163): NCBI GI NO: 17979018 NR Description: GTP cyclohydrolase I [Lycopersicon esculentum]
  misc_feature (65)..(292): NCBI GI NO: 17979018 NR Description: GTP cyclohydrolase I [Lycopersicon esculentum]
  misc_feature (102)..(288): NCBI GI NO: 15827020 NR Description: putative GTP cyclohydrolase I
  misc_feature (100)..(292): NCBI GI NO: 22298852 NR Description: GTP cyclohydrolase I
  misc_feature (85)..(289): NCBI GI NO: 39593376 NR Description: Hypothetical protein CBG09642
  misc_feature (95)..(284): NCBI GI NO: 13242245 NR Description: GTP cyclohydrolase 1 [Rattus norvegicus]
  misc_feature (95)..(284): NCBI GI NO: 20150237 NR Description: Chain A
MQCWHIPLPENFKCKNSRALIRTSHSSRSGVFEGENSSFWNDFVALLKLRGIDMEMDSRSASLTWCPLRPHEVPLCNGHAKKITTNGASSAKSASIPSNMVSAVSSMLLSLGEDPLRKELLGSPQRYVQWLMRFRACNLDVKLNGFTLNSASVYERPGEDATDHRAIGSELHLPFCAQCEHHLLPFYGVVHIGYFGSGDGEGINRSHFQALVHFYGCKLQVQERMTRQIAEAVYSVSHRGAIVVVEANHICMISRGIEKIRSSTATIAVLGQFSTDSSAKASFLQNVLDTANQEV

SEQ ID NO: 17451 - protein, 242 aa, Triticum aestivum
  peptide (1)..(242): Ceres Seq. ID no. 15170657
  misc_feature (1)..(242): NCBI GI NO: 38346071 NR Description: OSJNBa0084K01.11
  misc_feature (1)..(237): NCBI GI NO: 15231435 NR Description: GTP cyclohydrolase I [Arabidopsis thaliana]
  misc_feature (1)..(237): NCBI GI NO: 19909132 NR Description: GTP cyclohydrolase I [Arabidopsis thaliana]
  misc_feature (1)..(110): NCBI GI NO: 17979018 NR Description: GTP cyclohydrolase I [Lycopersicon esculentum]
  misc_feature (12)..(239): NCBI GI NO: 17979018 NR Description: GTP cyclohydrolase I [Lycopersicon esculentum]
  misc_feature (49)..(235): NCBI GI NO: 15827020 NR Description: putative GTP cyclohydrolase I
  misc_feature (47)..(239): NCBI GI NO: 22298852 NR Description: GTP cyclohydrolase I
  misc_feature (32)..(236): NCBI GI NO: 39593376 NR Description: Hypothetical protein CBG09642
  misc_feature (42)..(231): NCBI GI NO: 13242245 NR Description: GTP cyclohydrolase 1 [Rattus norvegicus]
  misc_feature (42)..(231): NCBI GI NO: 20150237 NR Description: Chain A
MEMDSRSASLTWCPLRPHEVPLCNGHAKKITTNGASSAKSASIPSNMVSAVSSMLLSLGEDPLRKELLGSPQRYVQWLMRFRACNLDVKLNGFTLNSASVYERPGEDATDHRAIGSELHLPFCAQCEHHLLPFYGVVHIGYFGSGDGEGINRSHFQALVHFYGCKLQVQERMTRQIAEAVYSVSHRGAIVVVEANHICMISRGIEKIRSSTATIAVLGQFSTDSSAKASFLQNVLDTANQEV

SEQ ID NO: 17452 - protein, 240 aa, Triticum aestivum
  peptide (1)..(240): Ceres Seq. ID no. 15170658
  misc_feature (1)..(240): NCBI GI NO: 38346071 NR Description: OSJNBa0084K01.11
  misc_feature (1)..(235): NCBI GI NO: 15231435 NR Description: GTP cyclohydrolase I [Arabidopsis thaliana]
  misc_feature (1)..(235): NCBI GI NO: 19909132 NR Description: GTP cyclohydrolase I [Arabidopsis thaliana]
  misc_feature (1)..(108): NCBI GI NO: 17979018 NR Description: GTP cyclohydrolase I [Lycopersicon esculentum]
  misc_feature (10)..(237): NCBI GI NO: 17979018 NR Description: GTP cyclohydrolase I [Lycopersicon esculentum]
  misc_feature (47)..(233): NCBI GI NO: 15827020 NR Description: putative GTP cyclohydrolase I
  misc_feature (45)..(237): NCBI GI NO: 22298852 NR Description: GTP cyclohydrolase I
  misc_feature (30)..(234): NCBI GI NO: 39593376 NR Description: Hypothetical protein CBG09642
  misc_feature (40)..(229): NCBI GI NO: 13242245 NR Description: GTP cyclohydrolase 1 [Rattus norvegicus]
  misc_feature (40)..(229): NCBI GI NO: 20150237 NR Description: Chain A
MDSRSASLTWCPLRPHEVPLCNGHAKKITTNGASSAKSASIPSNMVSAVSSMLLSLGEDPLRKELLGSPQRYVQWLMRFRACNLDVKLNGFTLNSASVYERPGEDATDHRAIGSELHLPFCAQCEHHLLPFYGVVHIGYFGSGDGEGINRSHFQALVHFYGCKLQVQERMTRQIAEAVYSVSHRGAIVVVEANHICMISRGIEKIRSSTATIAVLGQFSTDSSAKASFLQNVLDTANQEV

SEQ ID NO: 17453 - DNA, 775 bp, Triticum aestivum
  misc_feature (1)..(775): Ceres Seq. ID no. 13663631
aatatgcagcaccagtagtatatagcagtaaaaaatactttgtacactcgtggcatcgccatcgatttgtcttgaactctcgatgagcaacaatcaatgggacatcaagatagtgctacgccgcgccgcatcgccgtccgcgctggccggccggcaacggagctgcgacgaagaccggcgaggcggagcggcaacgcgcgacggcggccggccatcagtattcagtaggggcgcatgccgacgtagttgccgggcgggtcgtagttgcaggtgatgaaggtgccgcggccgccgtagcactcgaccatggcgcaccccacgcgggtgctgccgcgccacacgatctgcgtgtagtgcccgcacatgccgccgctgcagcggttgctccagtagtcgtaccggggccgctccgccagccacgcccccacggcctgcgcgggcgcccagccggtgccgctgccccagaagaggttctcgccgtagggccccgacgagtgcaccagcgcgcagtccccgcgccgcgactcggcgtacgaccgcgcgtacgccgccacccgctcgtcccacctcagcgccggcagccccatcgccgcccgcgccgcgttctgctggaacaggaactgcgccctgtagtccccgccgccgccgcgggggtagccggcgtccaccacgacgacgaggaacgccgcattgcacagcgcgacggcgaggagggcgatggccagctgggctcgagtacaagtggaggaggccatgggaggtgggtggtgatgct

SEQ ID NO: 17454 - protein, 63 aa, Triticum aestivum
  peptide (1)..(63): Ceres Seq. ID no. 13663632
  misc_feature (14)..(63): NCBI GI NO: 5821145 NR Description: RNA binding protein [Homo sapiens]
  misc_feature (14)..(63): NCBI GI NO: 5821143 NR Description: RNA binding protein [Homo sapiens]
  misc_feature (14)..(63): NCBI GI NO: 6649242 NR Description: splicing coactivator subunit SRm300 [Homo sapiens]
  misc_feature (14)..(63): NCBI GI NO: 19923466 NR Description: splicing coactivator subunit SRm300
  misc_feature (13)..(63): NCBI GI NO: 25143299 NR Description: pre-mRNA splicing SR protein related RSR-1 (68
  misc_feature (14)..(63): NCBI GI NO: 5821145 NR Description: RNA binding protein [Homo sapiens]
  misc_feature (14)..(63): NCBI GI NO: 30424862 NR Description: RIKEN cDNA 5033413A03 [Mus musculus]
  misc_feature (18)..(63): NCBI GI NO: 25989119 NR Description: unknown [Streptomyces aureofaciens]
  misc_feature (14)..(63): NCBI GI NO: 5821143 NR Description: RNA binding protein [Homo sapiens]
  misc_feature (14)..(63): NCBI GI NO: 6649242 NR Description: splicing coactivator subunit SRm300 [Homo sapiens]
MSNNQWDIKIVLRRAASPSALAGRQRSCDEDRRGGAATRDGGRPSVFSRGACRRSCRAGRSCR

SEQ ID NO: 17455 - protein, 43 aa, Triticum aestivum
  peptide (1)..(43): Ceres Seq. ID no. 13663633
MGHQDSATPRRIAVRAGRPATELRRRPARRSGNARRRPAISIQ

SEQ ID NO: 17456 - DNA, 1041 bp, Triticum aestivum
  misc_feature (1)..(1041): Ceres Seq. ID no. 12622531
ataggttaccactagtaggccacgaccaaccgctcccgtcgcccgatccatcatctgattgccgccgccgcttgccgcccatcggtccagctcacactgaccgctacgtctcactctctcctccctctcctagctaattgcctagctactggtagagctagctagctggtgatcaccacgcgcgcccgcccgcagctcgttttaagccggccgggtcggacacggcatgcgctgctctgcccgcacggcaaacgatggctccagcttccgcctcgctcctgcccgccgccggcgccaagcgccctttcgccgcccccgacgctgctgagcaagagcagccactcgcgcaggagagcgcggtgaccaagaagaacggcgagagccagcagcagccgaagctggagtgcccgcggtgcagctccaccgacaccaagttctgctactacaacaactacagcacggcgcagccgcgccactactgccgcacctgccgccgctactggacgcacggcggcacgctgcgcaaggtccccgtcggtggcgcctgccgccgcggctccggcagcagcagcaagcgccgcaggtcctccgccgagccccacacgccctcctccgactcgacgccaccgccgcagccagacctgccagacacgctcccccagctccctgtcttcccgttcctcaccgacggcggccccgtcttccttccgcagttcgacctcgggctcggcgggttcccgtggacggcatcgtcagtcacagacaacctttacgacagtctcgcgccgtgggctgcctgcgacggcgcgctcgcccccaccggcgcatgggaggacttcggtggcctcgagctcacctggccaccgccaccacccccggcggccggcaactgatgatcggcgtcgtcgtgacagtcgccggcgcgttcgaggctcctgttttatcatcgcagcctcgatcgatcagctagttgttgcttaccttcaccagtttgcagtgtgtctgtctcctctgctaggaattaatgtactcatgcagctc

SEQ ID NO: 17457 - protein, 212 aa, Triticum aestivum
  peptide (1)..(212): Ceres Seq. ID no. 12622532
  misc_feature (44)..(105): Pfam Name: Pfam Description:  Dof domain, zinc finger
  misc_feature (1)..(205): NCBI GI NO: 38344208 NR Description: OSJNBa0064G10.24
  misc_feature (3)..(133): NCBI GI NO: 21538785 NR Description: dof zinc finger protein
  misc_feature (4)..(137): NCBI GI NO: 4996644 NR Description: Dof zinc finger protein [Oryza sativa]
  misc_feature (11)..(123): NCBI GI NO: 4996642 NR Description: Dof zinc finger protein [Oryza sativa]
  misc_feature (14)..(120): NCBI GI NO: 4996646 NR Description: Dof zinc finger protein [Oryza sativa]
  misc_feature (18)..(197): NCBI GI NO: 3777436 NR Description: DNA binding protein
  misc_feature (21)..(121): NCBI GI NO: 6092016 NR Description: elicitor-responsive Dof protein ERDP
  misc_feature (27)..(203): NCBI GI NO: 15027981 NR Description: putative Dof zinc finger protein
  misc_feature (21)..(123): NCBI GI NO: 18401834 NR Description: Dof zinc finger protein; protein id: At1g47655
  misc_feature (19)..(177): NCBI GI NO: 7489820 NR Description: prolamin box binding factor - maize
MAPASASLLPAAGAKRPFAAPDAAEQEQPLAQESAVTKKNGESQQQPKLECPRCSSTDTKFCYYNNYSTAQPRHYCRTCRRYWTHGGTLRKVPVGGACRRGSGSSSKRRRSSAEPHTPSSDSTPPPQPDLPDTLPQLPVFPFLTDGGPVFLPQFDLGLGGFPWTASSVTDNLYDSLAPWAACDGALAPTGAWEDFGGLELTWPPPPPPAAGN

SEQ ID NO: 17458 - DNA, 1323 bp, Triticum aestivum
  misc_feature (1)..(1323): Ceres Seq. ID no. 14303067
acacacatcccacccacacacatcatccatccacccgtagaaacatcgagcatacacttggcgacatccagctagctagctctcgtcggcgtcgacgatggcggggaggcggcaggcagcctggtgcctggtggtcatcgctctggcagtgacgctggcggtggcgtcggcgcagcccgtgcagccgagggtgggcgggccggggaagaaaggcggcaagatgccgccgggcaagttcgagacggtgaccttcgccaagaacaacaagcgcaagtacgaggtggcctgcaccgacaaccgcggcccgccctgcgtcgtctcctgccccaagacctgccccaacaagtgcctcgccttctgcgagtactgcatgaccttctgcatgtgcgacatgttcccgggcacgtcgtgcggggacccgcgcttcacgggcggcgacggcaacaccttctacttccacggaaagaaggaccaggacttttgcatcgtctctgacaaggacctccacatcaacgcgcacttcattggcaaccacaaccctgatatgaagcgtgacttcacgtgggtgcaggccctcggtgtcaccttcgtccatggcggcgccgaccaccgcctctacgtgggtgccaagaaggtcgtcgagtgggacgaggaggaggaccatgttcaaatcaccctcgatggggtgcccgtggaggtggaggccggcaagaatgcccaatgggtctctagggccatgccggggctctccgtcactcgcaccgacacggtgaacaccgtcgtcgtggagctcgacggcgtgttcagcatctcggccaacgccgtgcccatcactgacgaggactcccggatccacaactacgggaagaccaaggacagcctcatgcacctcgacctagggttcaagttccacacccttactaacggcgtcgacggcgtgctcggccagacctaccgcttagactacatcagcaaggtcaacgtcacggccaagatgcccatcatgggcggcgcgcccaagtacctctcggccagcctcttctccacagactgcgccgtctccagcttccaccgtaacggtgacgccgccatcgagacgttcgcctcataaaccattggttcatggaacctacacgagaaataaacaaatatcaaccggaagggagtgatatcatctccatcatgttgttgtggagtatatatgtgtgcatctcacacgattgaggttgtgaaataagtttcaagtcaataattgaagcaaagtgtgtaccatgttagtaacttaacatttttttaagaaaagaagcatcgtgcttacatagt

SEQ ID NO: 17459 - protein, 337 aa, Triticum aestivum
  peptide (1)..(337): Ceres Seq. ID no. 14303068
  misc_feature (7)..(337): NCBI GI NO: 34905940 NR Description: similar to root cap protein
  misc_feature (8)..(337): NCBI GI NO: 34905936 NR Description: similar to root cap protein
  misc_feature (5)..(334): NCBI GI NO: 34905930 NR Description: similar to root cap protein
  misc_feature (12)..(334): NCBI GI NO: 34905934 NR Description: similar to root cap protein
  misc_feature (10)..(331): NCBI GI NO: 4514635 NR Description: root cap protein 1 [Zea mays]
  misc_feature (11)..(328): NCBI GI NO: 4514637 NR Description: root cap protein 2 [Zea mays]
  misc_feature (5)..(324): NCBI GI NO: 21741738 NR Description: OSJNBa0073L04.2
  misc_feature (22)..(330): NCBI GI NO: 11994465 NR Description: contains similarity to late embryogenesis abundantprotein~gene_id:MLD14
  misc_feature (22)..(330): NCBI GI NO: 30685319 NR Description: late embryogenesis abundant protein -related
  misc_feature (64)..(329): NCBI GI NO: 7484468 NR Description: late embryonic abundant protein EMB7
MAGRRQAAWCLVVIALAVTLAVASAQPVQPRVGGPGKKGGKMPPGKFETVTFAKNNKRKYEVACTDNRGPPCVVSCPKTCPNKCLAFCEYCMTFCMCDMFPGTSCGDPRFTGGDGNTFYFHGKKDQDFCIVSDKDLHINAHFIGNHNPDMKRDFTWVQALGVTFVHGGADHRLYVGAKKVVEWDEEEDHVQITLDGVPVEVEAGKNAQWVSRAMPGLSVTRTDTVNTVVVELDGVFSISANAVPITDEDSRIHNYGKTKDSLMHLDLGFKFHTLTNGVDGVLGQTYRLDYISKVNVTAKMPIMGGAPKYLSASLFSTDCAVSSFHRNGDAAIETFAS

SEQ ID NO: 17460 - protein, 296 aa, Triticum aestivum
  peptide (1)..(296): Ceres Seq. ID no. 14303069
  misc_feature (1)..(296): NCBI GI NO: 34905940 NR Description: similar to root cap protein
  misc_feature (1)..(296): NCBI GI NO: 34905936 NR Description: similar to root cap protein
  misc_feature (1)..(293): NCBI GI NO: 34905930 NR Description: similar to root cap protein
  misc_feature (1)..(293): NCBI GI NO: 34905934 NR Description: similar to root cap protein
  misc_feature (1)..(290): NCBI GI NO: 4514635 NR Description: root cap protein 1 [Zea mays]
  misc_feature (1)..(287): NCBI GI NO: 4514637 NR Description: root cap protein 2 [Zea mays]
  misc_feature (1)..(283): NCBI GI NO: 21741738 NR Description: OSJNBa0073L04.2
  misc_feature (1)..(289): NCBI GI NO: 11994465 NR Description: contains similarity to late embryogenesis abundantprotein~gene_id:MLD14
  misc_feature (1)..(289): NCBI GI NO: 30685319 NR Description: late embryogenesis abundant protein -related
  misc_feature (23)..(288): NCBI GI NO: 7484468 NR Description: late embryonic abundant protein EMB7
MPPGKFETVTFAKNNKRKYEVACTDNRGPPCVVSCPKTCPNKCLAFCEYCMTFCMCDMFPGTSCGDPRFTGGDGNTFYFHGKKDQDFCIVSDKDLHINAHFIGNHNPDMKRDFTWVQALGVTFVHGGADHRLYVGAKKVVEWDEEEDHVQITLDGVPVEVEAGKNAQWVSRAMPGLSVTRTDTVNTVVVELDGVFSISANAVPITDEDSRIHNYGKTKDSLMHLDLGFKFHTLTNGVDGVLGQTYRLDYISKVNVTAKMPIMGGAPKYLSASLFSTDCAVSSFHRNGDAAIETFAS

SEQ ID NO: 17461 - protein, 246 aa, Triticum aestivum
  peptide (1)..(246): Ceres Seq. ID no. 14303070
  misc_feature (1)..(246): NCBI GI NO: 34905940 NR Description: similar to root cap protein
  misc_feature (1)..(246): NCBI GI NO: 34905936 NR Description: similar to root cap protein
  misc_feature (1)..(243): NCBI GI NO: 34905930 NR Description: similar to root cap protein
  misc_feature (1)..(243): NCBI GI NO: 34905934 NR Description: similar to root cap protein
  misc_feature (1)..(240): NCBI GI NO: 4514635 NR Description: root cap protein 1 [Zea mays]
  misc_feature (1)..(237): NCBI GI NO: 4514637 NR Description: root cap protein 2 [Zea mays]
  misc_feature (1)..(233): NCBI GI NO: 21741738 NR Description: OSJNBa0073L04.2
  misc_feature (1)..(239): NCBI GI NO: 11994465 NR Description: contains similarity to late embryogenesis abundantprotein~gene_id:MLD14
  misc_feature (1)..(239): NCBI GI NO: 30685319 NR Description: late embryogenesis abundant protein -related
  misc_feature (1)..(238): NCBI GI NO: 7484468 NR Description: late embryonic abundant protein EMB7
MTFCMCDMFPGTSCGDPRFTGGDGNTFYFHGKKDQDFCIVSDKDLHINAHFIGNHNPDMKRDFTWVQALGVTFVHGGADHRLYVGAKKVVEWDEEEDHVQITLDGVPVEVEAGKNAQWVSRAMPGLSVTRTDTVNTVVVELDGVFSISANAVPITDEDSRIHNYGKTKDSLMHLDLGFKFHTLTNGVDGVLGQTYRLDYISKVNVTAKMPIMGGAPKYLSASLFSTDCAVSSFHRNGDAAIETFAS

SEQ ID NO: 17462 - DNA, 830 bp, Triticum aestivum
  misc_feature (1)..(830): Ceres Seq. ID no. 12621847
aaaactcacagcaagacttggtaaaggcggccgaagaagcaaagctgactaatctgcaaccatgaagatgaagagatgcatcctgctgatgctcgcacttgaggccgccgtcctcgtcgccggccgcccctccgctgttgccgtctccaacgacgtgggcaccattctcatgccgaccgaaggcaaagggcaagtgggaacggcggcggcttccaggccatgggattgctgcgacaacaccatatgcaccaggtccttgccgccaatctgcatctgtctggacgaggtcgacgagtgcgcctccacctgcatggcctgcgtgccgtccgtctcaaacccattccgccgcgtctgcggagaccggtactacggcgaccccgggcccaagtgcacctacaacaccgtcgccggcgacaacaacgacgacgccctcgtagcggcggcggcagaggaggagaagccgtgggagtgctgtgacatggctctgtgcaccaggtcatacccgccgatgtgccgctgcgtggacgaggtcgagcagtgcgctgcaacctgcaagagctgcggggtgtccatcttgaacccgttccgccacgtctgcaacgactggtacaacggcttcccaggtcgcaagtgcaccgaggccgcccacgccggcggtaataactagcacctgcgttgatcaacgccatcaagagtgcacttgaatttcccctgcatgcaatgtgttacaaattacaataaaataaaataaaaaatggatggccggctggctggcctgctaccgctactgcttgcctgaatggtgatcagacaagcatgcatgcatgaat

SEQ ID NO: 17463 - protein, 201 aa, Triticum aestivum
  peptide (1)..(201): Ceres Seq. ID no. 12621848
  misc_feature (137)..(161): Pfam Name: Pfam Description:  Bowman-Birk serine protease inhibitor family
  misc_feature (3)..(191): NCBI GI NO: 34895496 NR Description: P0409B08.18
  misc_feature (17)..(191): NCBI GI NO: 7635919 NR Description: putative Bowman Birk trypsin inhibitor
  misc_feature (18)..(196): NCBI GI NO: 7635923 NR Description: putative Bowman Birk tryspin inhibitor
  misc_feature (18)..(196): NCBI GI NO: 34895446 NR Description: putative Bowman Birk tryspin inhibitor
  misc_feature (20)..(196): NCBI GI NO: 34895432 NR Description: putative Bowman Birk trypsin inhibitor
  misc_feature (52)..(155): NCBI GI NO: 6730112 NR Description: Chain A, Crystal Structure Of Barley Bbi
  misc_feature (17)..(191): NCBI GI NO: 34895448 NR Description: putative Bowman Birk tryspin inhibitor
  misc_feature (48)..(155): NCBI GI NO: 124037 NR Description: BOWMAN-BIRK TYPE TRYPSIN INHIBITOR
  misc_feature (52)..(111): NCBI GI NO: 124037 NR Description: BOWMAN-BIRK TYPE TRYPSIN INHIBITOR
  misc_feature (52)..(111): NCBI GI NO: 6730112 NR Description: Chain A, Crystal Structure Of Barley Bbi
MKMKRCILLMLALEAAVLVAGRPSAVAVSNDVGTILMPTEGKGQVGTAAASRPWDCCDNTICTRSLPPICICLDEVDECASTCMACVPSVSNPFRRVCGDRYYGDPGPKCTYNTVAGDNNDDALVAAAAEEEKPWECCDMALCTRSYPPMCRCVDEVEQCAATCKSCGVSILNPFRHVCNDWYNGFPGRKCTEAAHAGGNN

SEQ ID NO: 17464 - protein, 199 aa, Triticum aestivum
  peptide (1)..(199): Ceres Seq. ID no. 12621849
  misc_feature (135)..(159): Pfam Name: Pfam Description:  Bowman-Birk serine protease inhibitor family
  misc_feature (1)..(189): NCBI GI NO: 34895496 NR Description: P0409B08.18
  misc_feature (15)..(189): NCBI GI NO: 7635919 NR Description: putative Bowman Birk trypsin inhibitor
  misc_feature (16)..(194): NCBI GI NO: 7635923 NR Description: putative Bowman Birk tryspin inhibitor
  misc_feature (16)..(194): NCBI GI NO: 34895446 NR Description: putative Bowman Birk tryspin inhibitor
  misc_feature (18)..(194): NCBI GI NO: 34895432 NR Description: putative Bowman Birk trypsin inhibitor
  misc_feature (50)..(153): NCBI GI NO: 6730112 NR Description: Chain A, Crystal Structure Of Barley Bbi
  misc_feature (15)..(189): NCBI GI NO: 34895448 NR Description: putative Bowman Birk tryspin inhibitor
  misc_feature (46)..(153): NCBI GI NO: 124037 NR Description: BOWMAN-BIRK TYPE TRYPSIN INHIBITOR
  misc_feature (50)..(109): NCBI GI NO: 124037 NR Description: BOWMAN-BIRK TYPE TRYPSIN INHIBITOR
  misc_feature (50)..(109): NCBI GI NO: 6730112 NR Description: Chain A, Crystal Structure Of Barley Bbi
MKRCILLMLALEAAVLVAGRPSAVAVSNDVGTILMPTEGKGQVGTAAASRPWDCCDNTICTRSLPPICICLDEVDECASTCMACVPSVSNPFRRVCGDRYYGDPGPKCTYNTVAGDNNDDALVAAAAEEEKPWECCDMALCTRSYPPMCRCVDEVEQCAATCKSCGVSILNPFRHVCNDWYNGFPGRKCTEAAHAGGNN

SEQ ID NO: 17465 - protein, 192 aa, Triticum aestivum
  peptide (1)..(192): Ceres Seq. ID no. 12621850
  misc_feature (128)..(152): Pfam Name: Pfam Description:  Bowman-Birk serine protease inhibitor family
  misc_feature (1)..(182): NCBI GI NO: 34895496 NR Description: P0409B08.18
  misc_feature (8)..(182): NCBI GI NO: 7635919 NR Description: putative Bowman Birk trypsin inhibitor
  misc_feature (9)..(187): NCBI GI NO: 7635923 NR Description: putative Bowman Birk tryspin inhibitor
  misc_feature (9)..(187): NCBI GI NO: 34895446 NR Description: putative Bowman Birk tryspin inhibitor
  misc_feature (11)..(187): NCBI GI NO: 34895432 NR Description: putative Bowman Birk trypsin inhibitor
  misc_feature (43)..(146): NCBI GI NO: 6730112 NR Description: Chain A, Crystal Structure Of Barley Bbi
  misc_feature (8)..(182): NCBI GI NO: 34895448 NR Description: putative Bowman Birk tryspin inhibitor
  misc_feature (39)..(146): NCBI GI NO: 124037 NR Description: BOWMAN-BIRK TYPE TRYPSIN INHIBITOR
  misc_feature (43)..(102): NCBI GI NO: 124037 NR Description: BOWMAN-BIRK TYPE TRYPSIN INHIBITOR
  misc_feature (43)..(102): NCBI GI NO: 6730112 NR Description: Chain A, Crystal Structure Of Barley Bbi
MLALEAAVLVAGRPSAVAVSNDVGTILMPTEGKGQVGTAAASRPWDCCDNTICTRSLPPICICLDEVDECASTCMACVPSVSNPFRRVCGDRYYGDPGPKCTYNTVAGDNNDDALVAAAAEEEKPWECCDMALCTRSYPPMCRCVDEVEQCAATCKSCGVSILNPFRHVCNDWYNGFPGRKCTEAAHAGGNN

SEQ ID NO: 17466 - DNA, 1041 bp, Triticum aestivum
  misc_feature (1)..(1041): Ceres Seq. ID no. 14303031
aaatcccatgccagaaacgcggaacgacctgccgatggagccgtcgttcgggtccaactccgcgagcaccgaggaggcgtcgacccggcgcgtggccaaccgcatcatccgcgcgctgcagcaccacctccagctgctgcaccgcgccggcgcggacttcttcgtgctgggcgccacgggcaacgtgtacacggtgacgctggcgaccacgccggcgtgcacgtgccccgaccccggcgcgccctgcaagcacatcctcttcgtgctgctccgcgtcctcggcctgtccctcgacgaggcctgcgtgtggaggcagtcgctgcggccgtgccaggtcgcgcggctcgtcgccgcgcccacgtacccggaggtgctcgccggccctcgcgcccgggagaggttccaccagcagtgggcggcccacgcggcggctgcagccgcaaaggccgctgaccagcgccggcaggagtccgccggtccgtcgttgggccgcctcgacggcgccgcctgcccggtgtgcctcgaggagatggcgccgtcggcagaggcacaaggcggcgcggcggcaacggggccggcgccgctgctgacgtgcggcacctgccggaactcggtgcacgccgagtgcttcgcgcggtggaagcgcagccgcgcgaggcgggcggcgacgtgcgtcgtgtgccgcgcgaggtggcggaagccgagccgggaccgggagcaggaccagcagcagtacatgaacctgtcggcgtacatgaacgaggagaacgacgtggtggacatgcaggtcgaggacggggctccgtgtggcggatagaggaacttgttacggcggttcatatactgtatgaaatttaagaagctgtacagagggagtagcatcccaattcattcggactcgtgacatttctttcttatttttcttaggatctgacttattacatgcatgtacagaacttatatgtcaataaaatcactgtgttctgaagaaattatcgatgatgacagatatgccctctgtgataggaaacaatttttggg

SEQ ID NO: 17467 - protein, 271 aa, Triticum aestivum
  peptide (1)..(271): Ceres Seq. ID no. 14303032
  misc_feature (63)..(93): Pfam Name: Pfam Description:  SWIM zinc finger
  misc_feature (31)..(266): NCBI GI NO: 15239119 NR Description: expressed protein [Arabidopsis thaliana]
  misc_feature (170)..(241): NCBI GI NO: 40741330 NR Description: hypothetical protein AN4359.2
  misc_feature (52)..(93): NCBI GI NO: 40741330 NR Description: hypothetical protein AN4359.2
  misc_feature (17)..(232): NCBI GI NO: 6141559 NR Description: MEKK1 N-terminal [Mus musculus]
  misc_feature (17)..(232): NCBI GI NO: 33859656 NR Description: mitogen activated protein kinase kinase kinase 1
  misc_feature (14)..(232): NCBI GI NO: 8488988 NR Description: Mitogen-activated protein kinase kinase kinase 1
  misc_feature (17)..(232): NCBI GI NO: 16758760 NR Description: mitogen activated protein kinase kinase kinase 1
  misc_feature (14)..(232): NCBI GI NO: 37550279 NR Description: similar to Mitogen-activated protein kinase kinasekinase 1
  misc_feature (139)..(249): NCBI GI NO: 25294132 NR Description: Znf1p [Gibberella moniliformis]
  misc_feature (52)..(88): NCBI GI NO: 25294132 NR Description: Znf1p [Gibberella moniliformis]
NPMPETRNDLPMEPSFGSNSASTEEASTRRVANRIIRALQHHLQLLHRAGADFFVLGATGNVYTVTLATTPACTCPDPGAPCKHILFVLLRVLGLSLDEACVWRQSLRPCQVARLVAAPTYPEVLAGPRARERFHQQWAAHAAAAAAKAADQRRQESAGPSLGRLDGAACPVCLEEMAPSAEAQGGAAATGPAPLLTCGTCRNSVHAECFARWKRSRARRAATCVVCRARWRKPSRDREQDQQQYMNLSAYMNEENDVVDMQVEDGAPCGG

SEQ ID NO: 17468 - protein, 269 aa, Triticum aestivum
  peptide (1)..(269): Ceres Seq. ID no. 14303033
  misc_feature (61)..(91): Pfam Name: Pfam Description:  SWIM zinc finger
  misc_feature (29)..(264): NCBI GI NO: 15239119 NR Description: expressed protein [Arabidopsis thaliana]
  misc_feature (168)..(239): NCBI GI NO: 40741330 NR Description: hypothetical protein AN4359.2
  misc_feature (50)..(91): NCBI GI NO: 40741330 NR Description: hypothetical protein AN4359.2
  misc_feature (15)..(230): NCBI GI NO: 6141559 NR Description: MEKK1 N-terminal [Mus musculus]
  misc_feature (15)..(230): NCBI GI NO: 33859656 NR Description: mitogen activated protein kinase kinase kinase 1
  misc_feature (12)..(230): NCBI GI NO: 8488988 NR Description: Mitogen-activated protein kinase kinase kinase 1
  misc_feature (15)..(230): NCBI GI NO: 16758760 NR Description: mitogen activated protein kinase kinase kinase 1
  misc_feature (12)..(230): NCBI GI NO: 37550279 NR Description: similar to Mitogen-activated protein kinase kinasekinase 1
  misc_feature (137)..(247): NCBI GI NO: 25294132 NR Description: Znf1p [Gibberella moniliformis]
  misc_feature (50)..(86): NCBI GI NO: 25294132 NR Description: Znf1p [Gibberella moniliformis]
MPETRNDLPMEPSFGSNSASTEEASTRRVANRIIRALQHHLQLLHRAGADFFVLGATGNVYTVTLATTPACTCPDPGAPCKHILFVLLRVLGLSLDEACVWRQSLRPCQVARLVAAPTYPEVLAGPRARERFHQQWAAHAAAAAAKAADQRRQESAGPSLGRLDGAACPVCLEEMAPSAEAQGGAAATGPAPLLTCGTCRNSVHAECFARWKRSRARRAATCVVCRARWRKPSRDREQDQQQYMNLSAYMNEENDVVDMQVEDGAPCGG

SEQ ID NO: 17469 - protein, 260 aa, Triticum aestivum
  peptide (1)..(260): Ceres Seq. ID no. 14303034
  misc_feature (52)..(82): Pfam Name: Pfam Description:  SWIM zinc finger
  misc_feature (20)..(255): NCBI GI NO: 15239119 NR Description: expressed protein [Arabidopsis thaliana]
  misc_feature (159)..(230): NCBI GI NO: 40741330 NR Description: hypothetical protein AN4359.2
  misc_feature (41)..(82): NCBI GI NO: 40741330 NR Description: hypothetical protein AN4359.2
  misc_feature (6)..(221): NCBI GI NO: 6141559 NR Description: MEKK1 N-terminal [Mus musculus]
  misc_feature (6)..(221): NCBI GI NO: 33859656 NR Description: mitogen activated protein kinase kinase kinase 1
  misc_feature (3)..(221): NCBI GI NO: 8488988 NR Description: Mitogen-activated protein kinase kinase kinase 1
  misc_feature (6)..(221): NCBI GI NO: 16758760 NR Description: mitogen activated protein kinase kinase kinase 1
  misc_feature (3)..(221): NCBI GI NO: 37550279 NR Description: similar to Mitogen-activated protein kinase kinasekinase 1
  misc_feature (128)..(238): NCBI GI NO: 25294132 NR Description: Znf1p [Gibberella moniliformis]
  misc_feature (41)..(77): NCBI GI NO: 25294132 NR Description: Znf1p [Gibberella moniliformis]
MEPSFGSNSASTEEASTRRVANRIIRALQHHLQLLHRAGADFFVLGATGNVYTVTLATTPACTCPDPGAPCKHILFVLLRVLGLSLDEACVWRQSLRPCQVARLVAAPTYPEVLAGPRARERFHQQWAAHAAAAAAKAADQRRQESAGPSLGRLDGAACPVCLEEMAPSAEAQGGAAATGPAPLLTCGTCRNSVHAECFARWKRSRARRAATCVVCRARWRKPSRDREQDQQQYMNLSAYMNEENDVVDMQVEDGAPCGG

SEQ ID NO: 17470 - DNA, 585 bp, Triticum aestivum
  misc_feature (1)..(585): Ceres Seq. ID no. 13659740
accccagcccgtccccaaatctccaaagcgcgagcgacaaccggccctgcctcaaccccccggcgcgtctccgactccatggcccgcaccaagcagacggcgaggaagtccgaggggcttaagcagacatttgccgcggtggaaacactggaaggagccctgcgggagtgctccaagggagagggctactttggtggtgagaccgtcgggcttgtggacatttcacttgggagcctgctctcctggttgaacgcgacagaagtgatgtccggaaccaagatatttgatcctgttaagactccgctcctggcagcgtggatggagcgctttagcaagctcgatgctgccaaggcggcgttgccagaagttgatagggtggtcgaatttgccaaagaagagacaagcacaggctgctgccgccgccgctgcttcagagaccaagtaaacatcatggggacgtgacttccattgaataaaaaaaagtgcatgttttctatatagcatatatgattgttgtttgtatgtcgatttttgttgtaatggtgccaaggataattaatgcatgtgatattttgtgaaggtttt

SEQ ID NO: 17471 - protein, 153 aa, Triticum aestivum
  peptide (1)..(153): Ceres Seq. ID no. 13659741
  misc_feature (29)..(114): Pfam Name: Pfam Description:  Glutathione S-transferase, C-terminal domain
  misc_feature (29)..(131): NCBI GI NO: 22038178 NR Description: glutathione-S-transferase 2 [Aegilops tauschii]
  misc_feature (29)..(131): NCBI GI NO: 21956482 NR Description: glutathione-S-transferase 28e45
  misc_feature (29)..(131): NCBI GI NO: 21730248 NR Description: Chain A
  misc_feature (28)..(148): NCBI GI NO: 22038181 NR Description: glutathione S-transferase [Aegilops tauschii]
  misc_feature (29)..(131): NCBI GI NO: 33304610 NR Description: tau class GST protein 4
  misc_feature (29)..(131): NCBI GI NO: 37536310 NR Description: putative glutathione S-transferase
  misc_feature (29)..(131): NCBI GI NO: 37536346 NR Description: putative glutathione S-transferase
  misc_feature (31)..(131): NCBI GI NO: 4127348 NR Description: glutathione transferase [Alopecurus myosuroides]
  misc_feature (29)..(132): NCBI GI NO: 37536330 NR Description: putative glutathione S-transferase
  misc_feature (29)..(131): NCBI GI NO: 37536340 NR Description: putative glutathione S-transferase
TPARPQISKARATTGPASTPRRVSDSMARTKQTARKSEGLKQTFAAVETLEGALRECSKGEGYFGGETVGLVDISLGSLLSWLNATEVMSGTKIFDPVKTPLLAAWMERFSKLDAAKAALPEVDRVVEFAKEETSTGCCRRRCFRDQVNIMGT

SEQ ID NO: 17472 - protein, 127 aa, Triticum aestivum
  peptide (1)..(127): Ceres Seq. ID no. 13659742
  misc_feature (3)..(88): Pfam Name: Pfam Description:  Glutathione S-transferase, C-terminal domain
  misc_feature (3)..(105): NCBI GI NO: 22038178 NR Description: glutathione-S-transferase 2 [Aegilops tauschii]
  misc_feature (3)..(105): NCBI GI NO: 21956482 NR Description: glutathione-S-transferase 28e45
  misc_feature (3)..(105): NCBI GI NO: 21730248 NR Description: Chain A
  misc_feature (2)..(122): NCBI GI NO: 22038181 NR Description: glutathione S-transferase [Aegilops tauschii]
  misc_feature (3)..(105): NCBI GI NO: 33304610 NR Description: tau class GST protein 4
  misc_feature (3)..(105): NCBI GI NO: 37536310 NR Description: putative glutathione S-transferase
  misc_feature (3)..(105): NCBI GI NO: 37536346 NR Description: putative glutathione S-transferase
  misc_feature (5)..(105): NCBI GI NO: 4127348 NR Description: glutathione transferase [Alopecurus myosuroides]
  misc_feature (3)..(106): NCBI GI NO: 37536330 NR Description: putative glutathione S-transferase
  misc_feature (3)..(105): NCBI GI NO: 37536340 NR Description: putative glutathione S-transferase
MARTKQTARKSEGLKQTFAAVETLEGALRECSKGEGYFGGETVGLVDISLGSLLSWLNATEVMSGTKIFDPVKTPLLAAWMERFSKLDAAKAALPEVDRVVEFAKEETSTGCCRRRCFRDQVNIMGT

SEQ ID NO: 17473 - protein, 82 aa, Triticum aestivum
  peptide (1)..(82): Ceres Seq. ID no. 13659743
PQPVPKSPKRERQPALPQPPGASPTPWPAPSRRRGSPRGLSRHLPRWKHWKEPCGSAPRERATLVVRPSGLWTFHLGACSPG

SEQ ID NO: 17474 - DNA, 904 bp, Triticum aestivum; identical to SEQ ID NO: 14461
  misc_feature (1)..(904): Ceres Seq. ID no. 13584363

SEQ ID NO: 17475 - protein, 119 aa, Triticum aestivum; identical to SEQ ID NO: 14462
  peptide (1)..(119): Ceres Seq. ID no. 13584364
  misc_feature (2)..(92): Pfam Name: Pfam Description:  Mitochondrial ribosomal protein L51 / S25 / CI-B8 domain
  misc_feature (1)..(119): NCBI GI NO: 26006491 NR Description: Unknown protein
  misc_feature (1)..(118): NCBI GI NO: 15231727 NR Description: expressed protein [Arabidopsis thaliana]
  misc_feature (6)..(114): NCBI GI NO: 40739113 NR Description: hypothetical protein AN6904.2
  misc_feature (8)..(114): NCBI GI NO: 17505717 NR Description: NADH-ubiquinone oxidoreductase B8
  misc_feature (8)..(114): NCBI GI NO: 39589613 NR Description: Hypothetical protein CBG12220
  misc_feature (10)..(114): NCBI GI NO: 19112489 NR Description: hypothetical protein [Schizosaccharomyces pombe]
  misc_feature (4)..(119): NCBI GI NO: 17647665 NR Description: mitochondrial ribosomal protein L-CI-B8 CG5479-PA
  misc_feature (6)..(114): NCBI GI NO: 6325356 NR Description: Mitochondrial Ribosome Protein, Large Subunit

SEQ ID NO: 17476 - protein, 90 aa, Triticum aestivum; identical to SEQ ID NO: 14463
  peptide (1)..(90): Ceres Seq. ID no. 13584365
  misc_feature (1)..(63): Pfam Name: Pfam Description:  Mitochondrial ribosomal protein L51 / S25 / CI-B8 domain
  misc_feature (1)..(90): NCBI GI NO: 26006491 NR Description: Unknown protein
  misc_feature (1)..(89): NCBI GI NO: 15231727 NR Description: expressed protein [Arabidopsis thaliana]
  misc_feature (1)..(85): NCBI GI NO: 40739113 NR Description: hypothetical protein AN6904.2
  misc_feature (1)..(85): NCBI GI NO: 17505717 NR Description: NADH-ubiquinone oxidoreductase B8
  misc_feature (1)..(85): NCBI GI NO: 39589613 NR Description: Hypothetical protein CBG12220
  misc_feature (1)..(85): NCBI GI NO: 19112489 NR Description: hypothetical protein [Schizosaccharomyces pombe]
  misc_feature (1)..(90): NCBI GI NO: 17647665 NR Description: mitochondrial ribosomal protein L-CI-B8 CG5479-PA
  misc_feature (1)..(85): NCBI GI NO: 6325356 NR Description: Mitochondrial Ribosome Protein, Large Subunit

SEQ ID NO: 17477 - DNA, 1233 bp, Triticum aestivum
  misc_feature (1)..(1233): Ceres Seq. ID no. 13502960
ccacttagaccgcctccgcccacgcatcatcgacggtgaagcgtaggtagcgagcgcctccacagatcgggatcaggcggcgatcgacttctccggcgatgtcaagcaggcgatcccccgcccggccgtcgctttcggcggcgtcggcagcgctggcgatcacggcggtgcacaaggtcgcccagggtccccggtgcagggctttccagcagcagggacagctccctggccgctgcgcgcggcgccgacgggggcaatgccaagttcgcgtggtacggcgcgccgtcggcggacgtggccgcggcggtggagcacgggttcgggaggaccaacagccgggtcctcggccatcgcgcgcacggcgacagcgtccacctctcgccgcctcagtctccttacgccagcgcaatgctagcaaatgcagatgagaacggcgaggcgcacatcgtgctgtgccgtgttctgatgggccggccagaggccatcccagccgggtcctcccagctccaccccagcagtgacgattacgacagcgccgtcgacaacatgcagaatccccagtggtacgttgtttggagcaaggatatgaacacgaggatcctcccagagtacgtcgtcagcttcaagtgccccagcctccatcagatgcaaggatcatcgggagcgacctccgccctaaagaagccttcgccggtggctcgtgacatgtttccgacgcttctagcagagatccagcggttcgtgccatcctccaagctggagacattgcaggggacctacaatcgcttcaagaaagggcagatgaagaaggatcagttcatccggttcttgcgcgccttcatcggcgacagggtgttgacagcagttgccaagaaactccgaggatactgatggacagtgcaagggtgttcttctgctagttctgttgtcgtcaaagtggtgtgctggtggtgaggtggtagctcattcggctgactccatagaaccggaagggtgtgcgtgtcgggtatcaaccagatagttcttcatttcttatgtcgccgtagtttagccgagaatcgttgttgatctcaagaacatagaggggttacgggcaatcttccattaaccaacacaaagttagattttattcttggtttctgctatattttacttggtattttgttacctgcaatctgtacagactgaaagttttaccaatttatgcctgaaagcaatcatttgttcgacgcc

SEQ ID NO: 17478 - protein, 160 aa, Triticum aestivum
  peptide (1)..(160): Ceres Seq. ID no. 13502961
  misc_feature (1)..(160): NCBI GI NO: 27311235 NR Description: Unknown protein
  misc_feature (1)..(155): NCBI GI NO: 15220787 NR Description: hypothetical protein [Arabidopsis thaliana]
  misc_feature (1)..(158): NCBI GI NO: 15223159 NR Description: hypothetical protein [Arabidopsis thaliana]
  misc_feature (1)..(155): NCBI GI NO: 8778582 NR Description: F28C11.18 [Arabidopsis thaliana]
  misc_feature (1)..(142): NCBI GI NO: 7485680 NR Description: hypothetical protein F17O7
  misc_feature (1)..(155): NCBI GI NO: 15241862 NR Description: expressed protein [Arabidopsis thaliana]
  misc_feature (1)..(155): NCBI GI NO: 21592445 NR Description: unknown [Arabidopsis thaliana]
  misc_feature (1)..(157): NCBI GI NO: 15228235 NR Description: hypothetical protein [Arabidopsis thaliana]
  misc_feature (1)..(83): NCBI GI NO: 11044957 NR Description: ceo protein [Arabidopsis thaliana]
  misc_feature (1)..(83): NCBI GI NO: 18398335 NR Description: expressed protein [Arabidopsis thaliana]
MLANADENGEAHIVLCRVLMGRPEAIPAGSSQLHPSSDDYDSAVDNMQNPQWYVVWSKDMNTRILPEYVVSFKCPSLHQMQGSSGATSALKKPSPVARDMFPTLLAEIQRFVPSSKLETLQGTYNRFKKGQMKKDQFIRFLRAFIGDRVLTAVAKKLRGY

SEQ ID NO: 17479 - protein, 141 aa, Triticum aestivum
  peptide (1)..(141): Ceres Seq. ID no. 13502962
  misc_feature (1)..(141): NCBI GI NO: 27311235 NR Description: Unknown protein
  misc_feature (1)..(136): NCBI GI NO: 15220787 NR Description: hypothetical protein [Arabidopsis thaliana]
  misc_feature (1)..(139): NCBI GI NO: 15223159 NR Description: hypothetical protein [Arabidopsis thaliana]
  misc_feature (1)..(136): NCBI GI NO: 8778582 NR Description: F28C11.18 [Arabidopsis thaliana]
  misc_feature (1)..(123): NCBI GI NO: 7485680 NR Description: hypothetical protein F17O7
  misc_feature (1)..(136): NCBI GI NO: 15241862 NR Description: expressed protein [Arabidopsis thaliana]
  misc_feature (1)..(136): NCBI GI NO: 21592445 NR Description: unknown [Arabidopsis thaliana]
  misc_feature (1)..(138): NCBI GI NO: 15228235 NR Description: hypothetical protein [Arabidopsis thaliana]
  misc_feature (1)..(64): NCBI GI NO: 11044957 NR Description: ceo protein [Arabidopsis thaliana]
  misc_feature (1)..(64): NCBI GI NO: 30692664 NR Description: expressed protein [Arabidopsis thaliana]
MGRPEAIPAGSSQLHPSSDDYDSAVDNMQNPQWYVVWSKDMNTRILPEYVVSFKCPSLHQMQGSSGATSALKKPSPVARDMFPTLLAEIQRFVPSSKLETLQGTYNRFKKGQMKKDQFIRFLRAFIGDRVLTAVAKKLRGY

SEQ ID NO: 17480 - protein, 114 aa, Triticum aestivum
  peptide (1)..(114): Ceres Seq. ID no. 13502963
  misc_feature (1)..(114): NCBI GI NO: 27311235 NR Description: Unknown protein
  misc_feature (1)..(109): NCBI GI NO: 15220787 NR Description: hypothetical protein [Arabidopsis thaliana]
  misc_feature (1)..(112): NCBI GI NO: 15223159 NR Description: hypothetical protein [Arabidopsis thaliana]
  misc_feature (1)..(109): NCBI GI NO: 8778582 NR Description: F28C11.18 [Arabidopsis thaliana]
  misc_feature (1)..(96): NCBI GI NO: 7485680 NR Description: hypothetical protein F17O7
  misc_feature (1)..(109): NCBI GI NO: 15241862 NR Description: expressed protein [Arabidopsis thaliana]
  misc_feature (1)..(109): NCBI GI NO: 21592445 NR Description: unknown [Arabidopsis thaliana]
  misc_feature (1)..(111): NCBI GI NO: 15228235 NR Description: hypothetical protein [Arabidopsis thaliana]
  misc_feature (1)..(37): NCBI GI NO: 11044957 NR Description: ceo protein [Arabidopsis thaliana]
  misc_feature (1)..(37): NCBI GI NO: 18398335 NR Description: expressed protein [Arabidopsis thaliana]
MQNPQWYVVWSKDMNTRILPEYVVSFKCPSLHQMQGSSGATSALKKPSPVARDMFPTLLAEIQRFVPSSKLETLQGTYNRFKKGQMKKDQFIRFLRAFIGDRVLTAVAKKLRGY

SEQ ID NO: 17481 - DNA, 1466 bp, Triticum aestivum
  misc_feature (1)..(1466): Ceres Seq. ID no. 13659640
gtttttaactcgacttagccaagtttggcaaacgaacaggccccgtggccccgcccccgcgcgacagcgaccgggcgcccgaagtgtctcgcgctcgcccacggcacccgagcggagcccccgcccctaccatgtgctctccctgcccgcagacccctcaaaacccacccgcgcccgcacccaggcaccgagcacccagcagaaagaaacgcaccaaatctttatcccctgccctcagcagtgccgacctgagcgccggagatctgcggcgagcgagatgaaagtggaggagcagacggtggtgggaggaggaggaggggggctctgggggctggccgggcggccgtgcgacacgtgcgccgtggacgcggcgcggctctactgccggtcggacggcgcctacctctgcgccgggtgcgacgcgcgcgctcacggggccggctcccgccacgcgcgcgtctggctctgcgaggtctgcgagcacgcgcccgccgcggtcacctgccgcgccgacgccgccgcgctctgcgccacgtgcgacgccgacatccactccgccaacccgctcgccagccggcacgagcgcctccccgtcacgcctttcttcggcgcgctcgccgacccgccccagcccgccccctccccgtcctccgccgccgcgacgcaggaggacgcggacgacgacgggagcaacgaggccgaggcggcctcctggcttcttcccgagcctggcgatagccccgaggacagcaccgctaccttcttccctgactcggacgcgtacctcgatctggacttcgtccggtctatggacgggatcaaggccatcggggtgcccgtcgccccttccgagctcgacgtcgccggcggcgctctcttctaccccgaacactccatgaaccacagcatgtcaacgtccgaggtcgcggtggtgccggacgcgctgtcagccggcggggccccggcgccggcgccgtcggtggcggtggtggctagcaaggggaaggagcgggaggcccggctgatgcggtaccgggagaagcgcaagaaccggaggttccagaagaccatccgctacgcgtcccgcaaggcgtacgccgagacgcggccgcgcatcaagggccggttcgccaagcgcaccgccgaggacgacgcgctggagcgggacgggccgttctcgcccgcgtcgtcggcgcacctggcgtcggacggtgactacggcgtcgtgccgtccttctgaggagaccggcgacggcgacggcgactctgctgtagttttggcgcgcgcatccatccgagtgcgctcgcgtgcggtggctgcgacgcgcgctccgtgtaacattgaataatctgtacagttttgttccatgggattagtgccgtgaccgtgccgacctgaaaaaaaaaaaaaaaaaaaaaaaaaaaaaaaaatgtttaaacacaataaagttggaacgggagggggg

SEQ ID NO: 17482 - protein, 412 aa, Triticum aestivum
  peptide (1)..(412): Ceres Seq. ID no. 13659641
  misc_feature (111)..(155): Pfam Name: Pfam Description:  B-box zinc finger
  misc_feature (93)..(412): NCBI GI NO: 21655154 NR Description: CONSTANS-like protein CO5
  misc_feature (105)..(412): NCBI GI NO: 38345390 NR Description: OSJNBa0067K08.19
  misc_feature (93)..(408): NCBI GI NO: 21667485 NR Description: CONSTANS-like protein
  misc_feature (111)..(266): NCBI GI NO: 4091806 NR Description: CONSTANS-like protein 2 [Malus x domestica]
  misc_feature (284)..(388): NCBI GI NO: 4091806 NR Description: CONSTANS-like protein 2 [Malus x domestica]
  misc_feature (106)..(271): NCBI GI NO: 21594050 NR Description: CONSTANS-like B-box zinc finger protein-like
  misc_feature (291)..(412): NCBI GI NO: 21594050 NR Description: CONSTANS-like B-box zinc finger protein-like
  misc_feature (106)..(271): NCBI GI NO: 18424009 NR Description: CONSTANS B-box zinc finger family protein
  misc_feature (291)..(412): NCBI GI NO: 18424009 NR Description: CONSTANS B-box zinc finger family protein
  misc_feature (111)..(266): NCBI GI NO: 4091804 NR Description: CONSTANS-like protein 1 [Malus x domestica]
FLTRLSQVWQTNRPRGPAPARQRPGARSVSRSPTAPERSPRPYHVLSLPADPSKPTRARTQAPSTQQKETHQIFIPCPQQCRPERRRSAASEMKVEEQTVVGGGGGGLWGLAGRPCDTCAVDAARLYCRSDGAYLCAGCDARAHGAGSRHARVWLCEVCEHAPAAVTCRADAAALCATCDADIHSANPLASRHERLPVTPFFGALADPPQPAPSPSSAAATQEDADDDGSNEAEAASWLLPEPGDSPEDSTATFFPDSDAYLDLDFVRSMDGIKAIGVPVAPSELDVAGGALFYPEHSMNHSMSTSEVAVVPDALSAGGAPAPAPSVAVVASKGKEREARLMRYREKRKNRRFQKTIRYASRKAYAETRPRIKGRFAKRTAEDDALERDGPFSPASSAHLASDGDYGVVPSF

SEQ ID NO: 17483 - protein, 320 aa, Triticum aestivum
  peptide (1)..(320): Ceres Seq. ID no. 13659642
  misc_feature (19)..(63): Pfam Name: Pfam Description:  B-box zinc finger
  misc_feature (1)..(320): NCBI GI NO: 21655154 NR Description: CONSTANS-like protein CO5
  misc_feature (13)..(320): NCBI GI NO: 38345390 NR Description: OSJNBa0067K08.19
  misc_feature (1)..(316): NCBI GI NO: 21667485 NR Description: CONSTANS-like protein
  misc_feature (19)..(174): NCBI GI NO: 4091806 NR Description: CONSTANS-like protein 2 [Malus x domestica]
  misc_feature (192)..(296): NCBI GI NO: 4091806 NR Description: CONSTANS-like protein 2 [Malus x domestica]
  misc_feature (14)..(179): NCBI GI NO: 21594050 NR Description: CONSTANS-like B-box zinc finger protein-like
  misc_feature (199)..(320): NCBI GI NO: 21594050 NR Description: CONSTANS-like B-box zinc finger protein-like
  misc_feature (14)..(179): NCBI GI NO: 18424009 NR Description: CONSTANS B-box zinc finger family protein
  misc_feature (199)..(320): NCBI GI NO: 18424009 NR Description: CONSTANS B-box zinc finger family protein
  misc_feature (19)..(174): NCBI GI NO: 4091804 NR Description: CONSTANS-like protein 1 [Malus x domestica]
MKVEEQTVVGGGGGGLWGLAGRPCDTCAVDAARLYCRSDGAYLCAGCDARAHGAGSRHARVWLCEVCEHAPAAVTCRADAAALCATCDADIHSANPLASRHERLPVTPFFGALADPPQPAPSPSSAAATQEDADDDGSNEAEAASWLLPEPGDSPEDSTATFFPDSDAYLDLDFVRSMDGIKAIGVPVAPSELDVAGGALFYPEHSMNHSMSTSEVAVVPDALSAGGAPAPAPSVAVVASKGKEREARLMRYREKRKNRRFQKTIRYASRKAYAETRPRIKGRFAKRTAEDDALERDGPFSPASSAHLASDGDYGVVPSF

SEQ ID NO: 17484 - DNA, 815 bp, Triticum aestivum
  misc_feature (1)..(815): Ceres Seq. ID no. 12626708
agatcgagtcgctcgctcccttttccgaataggaaaagagtgagagaaaggagagaactccatggcagccgagggttccagcggcgtcggcgtcggcggccggaaaacatcgttgtctcataacccaagagagcgcggagtggcgaaattcctcaccggcttgccagcgcgaggaaacttctcctcaagttccatctcttccaatctgggaggcctcagggtttatgtctgcgagcacgacacaaatcctccagagggacaagtgatcgagacggatacgacaaatatcttaatcagacatctgcaactaaagaagaaagagagtgaggccaaagacgcaggttctaggactccaggggaaagtggcaagggtaaaagatgtgctgccagaagtttgggtgtgcagaagtcatcaaaaaagcccaacttgggcagttcttccggattgtcttcctctgatgaagcaatatctggcttttcacagcacacactgcagtccttcaccgtagagaggttgcgtgcacttctccgacaaagtggcctcacaaccaaggggaaaaaggacgaactgatcactcgcttaagagaggcgcagagttgatttcaatctcaagtttctgccttgtttgtgattgatcaattgcctactggcactgtaaaacgttgctgagctgaatgaatcatcaggctttacttgttgacattttgtaggtgtatgacttaaggtgatgtagtgatttactcgggctcaggctatcatgaatttgaagacttgtagcgaactttcactatatgcttgtcagaattcttgtttc

SEQ ID NO: 17485 - protein, 179 aa, Triticum aestivum
  peptide (1)..(179): Ceres Seq. ID no. 12626709
  misc_feature (24)..(167): NCBI GI NO: 15242782 NR Description: unknown protein; protein id: At5g63460.1
MAAEGSSGVGVGGRKTSLSHNPRERGVAKFLTGLPARGNFSSSSISSNLGGLRVYVCEHDTNPPEGQVIETDTTNILIRHLQLKKKESEAKDAGSRTPGESGKGKRCAARSLGVQKSSKKPNLGSSSGLSSSDEAISGFSQHTLQSFTVERLRALLRQSGLTTKGKKDELITRLREAQS

SEQ ID NO: 17486 - DNA, 1264 bp, Triticum aestivum
  misc_feature (1)..(1264): Ceres Seq. ID no. 13659643
actwkawyrtsyttaatcgaaaagaaacccttttagctcctggcctcttcccggcccatggccatcgattcgctgatacgacgctcgcggacagcagccaccgctcgaatctccgcgccggctccggccacggaagtgttctcccccaccatcaccatggctcaggctccaggccgcgccgcctcctccatgcggctcttcgacgcgcactgccacctgcaggacccccgcatcgcggcggccgcccccgccctcatacgcgccgccacagcctccggcgtcggccggttcgcggtcaacggcacctccgagaaagactggcacctggtgaagcagatggcccaggagcacccggctgtcatcccctgcttcggcctccacccatggtgggtgccggagaggtcgcctgattggatggattcgctccggcagttcttctcggagaccccagaggcggctgttggagagactggtctcgacaagggatcgcatggaaaaactattgacttcagagaacaggttgaagtattccaacgacaacttgaacttgctaaggaattggagaaacctgtttctgttcattgtgtacgtgccttcggcgatcttctggaaatactaaagcgtactgggcctttcccagcaggtgtgctgttgcattcttatctggggtctgcagaaatggtgcccggccttgcaaatttaggttgttacttttcgttgtctggtttccttacaggcatgaaatctactaaggcaaagaaaatgctcaaagcaatacccttggacaggattctgttagagacagatgcaccagatgcagtaccaaagttggacaatgtttctctagttacagtccctgtggacatttcaaatgcagatattgaaaaattccacggcgattctacctcttcaaaagaatccttgaatcatccagctaacatccacattgttttgaagtatgtggcatcactgcttgaaatgccggaagcagaactcgccgaggcgagctacaggaacgccaccaaactgttctcctaccctggatccaaagttcatcccgaagctgaaactgtgtgaatggggtggtgcggatggccatccaatacgaaccatgctcatcggaatcctggtgcgttctgcctctggatgtttgcctgtataccgcatgtatattgttgtactagtatatataatcggcctaagacaaagtaacaatcagagaagaaataataaagcggttcatggctggccgtgccatgttgcc

SEQ ID NO: 17487 - protein, 339 aa, Triticum aestivum
  peptide (1)..(339): Ceres Seq. ID no. 15219975
  misc_feature (45)..(327): Pfam Name: Pfam Description:  TatD related DNase
  misc_feature (34)..(339): NCBI GI NO: 38345538 NR Description: OSJNBa0020J04.13
  misc_feature (45)..(332): NCBI GI NO: 18418353 NR Description: expressed protein [Arabidopsis thaliana]
  misc_feature (45)..(332): NCBI GI NO: 11357936 NR Description: hypothetical protein K10A8_50 - Arabidopsisthaliana
  misc_feature (45)..(262): NCBI GI NO: 15228573 NR Description: hypothetical protein [Arabidopsis thaliana]
  misc_feature (45)..(257): NCBI GI NO: 15794829 NR Description: conserved hypothetical protein
  misc_feature (45)..(257): NCBI GI NO: 15677535 NR Description: conserved hypothetical protein
  misc_feature (43)..(257): NCBI GI NO: 23055931 NR Description: hypothetical protein [Geobacter metallireducens]
  misc_feature (47)..(253): NCBI GI NO: 23028677 NR Description: hypothetical protein
  misc_feature (45)..(256): NCBI GI NO: 27262182 NR Description: Sec-independent protein TatD
  misc_feature (290)..(328): NCBI GI NO: 27262182 NR Description: Sec-independent protein TatD
MAIDSLIRRSRTAATARISAPAPATEVFSPTITMAQAPGRAASSMRLFDAHCHLQDPRIAAAAPALIRAATASGVGRFAVNGTSEKDWHLVKQMAQEHPAVIPCFGLHPWWVPERSPDWMDSLRQFFSETPEAAVGETGLDKGSHGKTIDFREQVEVFQRQLELAKELEKPVSVHCVRAFGDLLEILKRTGPFPAGVLLHSYLGSAEMVPGLANLGCYFSLSGFLTGMKSTKAKKMLKAIPLDRILLETDAPDAVPKLDNVSLVTVPVDISNADIEKFHGDSTSSKESLNHPANIHIVLKYVASLLEMPEAELAEASYRNATKLFSYPGSKVHPEAETV

SEQ ID NO: 17488 - protein, 306 aa, Triticum aestivum
  peptide (1)..(306): Ceres Seq. ID no. 15219976
  misc_feature (12)..(294): Pfam Name: Pfam Description:  TatD related DNase
  misc_feature (1)..(306): NCBI GI NO: 38345538 NR Description: OSJNBa0020J04.13
  misc_feature (12)..(299): NCBI GI NO: 18418353 NR Description: expressed protein [Arabidopsis thaliana]
  misc_feature (12)..(299): NCBI GI NO: 11357936 NR Description: hypothetical protein K10A8_50 - Arabidopsisthaliana
  misc_feature (12)..(229): NCBI GI NO: 15228573 NR Description: hypothetical protein [Arabidopsis thaliana]
  misc_feature (12)..(224): NCBI GI NO: 15794829 NR Description: conserved hypothetical protein
  misc_feature (12)..(224): NCBI GI NO: 15677535 NR Description: conserved hypothetical protein
  misc_feature (10)..(224): NCBI GI NO: 23055931 NR Description: hypothetical protein [Geobacter metallireducens]
  misc_feature (14)..(220): NCBI GI NO: 23028677 NR Description: hypothetical protein
  misc_feature (12)..(223): NCBI GI NO: 27262182 NR Description: Sec-independent protein TatD
  misc_feature (257)..(295): NCBI GI NO: 27262182 NR Description: Sec-independent protein TatD
MAQAPGRAASSMRLFDAHCHLQDPRIAAAAPALIRAATASGVGRFAVNGTSEKDWHLVKQMAQEHPAVIPCFGLHPWWVPERSPDWMDSLRQFFSETPEAAVGETGLDKGSHGKTIDFREQVEVFQRQLELAKELEKPVSVHCVRAFGDLLEILKRTGPFPAGVLLHSYLGSAEMVPGLANLGCYFSLSGFLTGMKSTKAKKMLKAIPLDRILLETDAPDAVPKLDNVSLVTVPVDISNADIEKFHGDSTSSKESLNHPANIHIVLKYVASLLEMPEAELAEASYRNATKLFSYPGSKVHPEAETV

SEQ ID NO: 17489 - protein, 295 aa, Triticum aestivum
  peptide (1)..(295): Ceres Seq. ID no. 15219977
  misc_feature (1)..(283): Pfam Name: Pfam Description:  TatD related DNase
  misc_feature (1)..(295): NCBI GI NO: 38345538 NR Description: OSJNBa0020J04.13
  misc_feature (1)..(288): NCBI GI NO: 18418353 NR Description: expressed protein [Arabidopsis thaliana]
  misc_feature (1)..(288): NCBI GI NO: 11357936 NR Description: hypothetical protein K10A8_50 - Arabidopsisthaliana
  misc_feature (1)..(218): NCBI GI NO: 15228573 NR Description: hypothetical protein [Arabidopsis thaliana]
  misc_feature (1)..(213): NCBI GI NO: 15794829 NR Description: conserved hypothetical protein
  misc_feature (1)..(213): NCBI GI NO: 15677535 NR Description: conserved hypothetical protein
  misc_feature (1)..(213): NCBI GI NO: 23055931 NR Description: hypothetical protein [Geobacter metallireducens]
  misc_feature (3)..(209): NCBI GI NO: 23028677 NR Description: hypothetical protein
  misc_feature (1)..(212): NCBI GI NO: 27262182 NR Description: Sec-independent protein TatD
  misc_feature (246)..(284): NCBI GI NO: 27262182 NR Description: Sec-independent protein TatD
MRLFDAHCHLQDPRIAAAAPALIRAATASGVGRFAVNGTSEKDWHLVKQMAQEHPAVIPCFGLHPWWVPERSPDWMDSLRQFFSETPEAAVGETGLDKGSHGKTIDFREQVEVFQRQLELAKELEKPVSVHCVRAFGDLLEILKRTGPFPAGVLLHSYLGSAEMVPGLANLGCYFSLSGFLTGMKSTKAKKMLKAIPLDRILLETDAPDAVPKLDNVSLVTVPVDISNADIEKFHGDSTSSKESLNHPANIHIVLKYVASLLEMPEAELAEASYRNATKLFSYPGSKVHPEAETV

SEQ ID NO: 17490 - DNA, 1601 bp, Triticum aestivum
  misc_feature (1)..(1601): Ceres Seq. ID no. 14303043
tttttttcttgtaaatttccgaatggaaaactagtttttcttcccaaaaaacccacgaacacgagggttttgcccccgtcgacccacggtcgccattggccactctgctccgccgctccatgctcctccctagcctcctccgcggcgcccacctgctgcggccgtgccaccctcctcgccgccacctctcccgcctcctagaccgctacggcttcgtgccgccggcctccctgacccccaccgcgaaagagatctcccacggcacaggcgccgccgccgaccagaagcgtcggaccaagaagcccccctaccggccgccctcttcgctggaccgcggagaccgcccggcctcccactccgacctccccttcgatttccgcttcagctacacggagagctccccggacgccaagcccatcgggctccgcgagcccaagtactcccctttcggccccggtcgcctcgaccgcccctggaccggcctctgcgcgcccgccgtcgacaccacgctccggagcgtcgacgccgaggaccccgcccccgccgccgagaaggacctggaggaggcccggcggcgcgagcgagagcgcgtgctcggcgagccgctcacccccgcggagcgctccttcttggtcgacaaatgccagaagaaccgcaccaagcggcagatcaatctcgggagagatgggctcactcataacatgctgaatgacattcacaaccactggaagcatggcgagggggtcagggtgaaatgccttggtgtgccgacggttgatatgcaaaatgtgtgccgtgagctcgaggataaaactggtggccttatcatccacaggcatggtggccagttaatactatacagagggaggcattatcatccaaagaaaagacctgttattccgttgatgttatggaagccagctgaaccgatctacccaaggctaattaaaacaacaatagaagggctgacagttcaggagacaaaggaaatgaggaagaagggcctacatgctcctgtcttgacaaagcttgcaaagaacgggtattatgctagtctcgtgtcgatggttcgagatggttttctggccgatgaattggttcgtatagattgtaaaggattgccaaagagtgattatcggaagattggagtcaagctcagggaccttgttccttgtattcttgtgtcttttgacaaggagcaaattattgtttggagggggaaagaccatgatgaaagcatacaggataatatgcacaaggcattcccttcagttcttcaattagagagtgcagcaggagagaatgaacaggaagaagcatcaagtgagagtgtagcaggagagaatgaacatggtgaaaaagaagaaacatcagttgactgttcttctgatgagtggtctgagatcagtagctctgacgatgtgccagatgataagtaggacatttccagggtagaatatctttagatcgatctgacatatccagaggactcaatctgccaccaggtgttcacaaagttggcatgtcatccaacaccaccaacttgtccattcttaccagtgatgattatgttctatcactagtcgcaaccaaatccagtt

SEQ ID NO: 17491 - protein, 439 aa, Triticum aestivum
  peptide (1)..(439): Ceres Seq. ID no. 14303044
  misc_feature (163)..(248): Pfam Name: Pfam Description:  CRS1 / YhbY domain
  misc_feature (1)..(439): NCBI GI NO: 40253285 NR Description: putative CRS2-associated factor 1
  misc_feature (1)..(382): NCBI GI NO: 22329043 NR Description: expressed protein [Arabidopsis thaliana]
  misc_feature (1)..(356): NCBI GI NO: 25407702 NR Description: hypothetical protein AT4g31010
  misc_feature (1)..(288): NCBI GI NO: 14596153 NR Description: Unknown protein [Arabidopsis thaliana]
  misc_feature (80)..(368): NCBI GI NO: 15240416 NR Description: expressed protein [Arabidopsis thaliana]
  misc_feature (153)..(369): NCBI GI NO: 30349369 NR Description: CRS2-associated factor 2 [Zea mays]
  misc_feature (83)..(121): NCBI GI NO: 30349369 NR Description: CRS2-associated factor 2 [Zea mays]
  misc_feature (83)..(401): NCBI GI NO: 18399222 NR Description: expressed protein [Arabidopsis thaliana]
  misc_feature (66)..(439): NCBI GI NO: 30349367 NR Description: CRS2-associated factor 1 [Zea mays]
  misc_feature (73)..(403): NCBI GI NO: 22329751 NR Description: expressed protein [Arabidopsis thaliana]
MLLPSLLRGAHLLRPCHPPRRHLSRLLDRYGFVPPASLTPTAKEISHGTGAAADQKRRTKKPPYRPPSSLDRGDRPASHSDLPFDFRFSYTESSPDAKPIGLREPKYSPFGPGRLDRPWTGLCAPAVDTTLRSVDAEDPAPAAEKDLEEARRRERERVLGEPLTPAERSFLVDKCQKNRTKRQINLGRDGLTHNMLNDIHNHWKHGEGVRVKCLGVPTVDMQNVCRELEDKTGGLIIHRHGGQLILYRGRHYHPKKRPVIPLMLWKPAEPIYPRLIKTTIEGLTVQETKEMRKKGLHAPVLTKLAKNGYYASLVSMVRDGFLADELVRIDCKGLPKSDYRKIGVKLRDLVPCILVSFDKEQIIVWRGKDHDESIQDNMHKAFPSVLQLESAAGENEQEEASSESVAGENEHGEKEETSVDCSSDEWSEISSSDDVPDDK

SEQ ID NO: 17492 - protein, 245 aa, Triticum aestivum
  peptide (1)..(245): Ceres Seq. ID no. 14303045
  misc_feature (1)..(54): Pfam Name: Pfam Description:  CRS1 / YhbY domain
  misc_feature (1)..(245): NCBI GI NO: 40253285 NR Description: putative CRS2-associated factor 1
  misc_feature (1)..(188): NCBI GI NO: 22329043 NR Description: expressed protein [Arabidopsis thaliana]
  misc_feature (1)..(162): NCBI GI NO: 25407702 NR Description: hypothetical protein AT4g31010
  misc_feature (1)..(94): NCBI GI NO: 14596153 NR Description: Unknown protein [Arabidopsis thaliana]
  misc_feature (1)..(174): NCBI GI NO: 15240416 NR Description: expressed protein [Arabidopsis thaliana]
  misc_feature (1)..(175): NCBI GI NO: 30349369 NR Description: CRS2-associated factor 2 [Zea mays]
  misc_feature (1)..(207): NCBI GI NO: 18399222 NR Description: expressed protein [Arabidopsis thaliana]
  misc_feature (1)..(245): NCBI GI NO: 30349367 NR Description: CRS2-associated factor 1 [Zea mays]
  misc_feature (1)..(209): NCBI GI NO: 22329751 NR Description: expressed protein [Arabidopsis thaliana]
  misc_feature (1)..(113): NCBI GI NO: 34905354 NR Description: OJ1126_G08.1
MLNDIHNHWKHGEGVRVKCLGVPTVDMQNVCRELEDKTGGLIIHRHGGQLILYRGRHYHPKKRPVIPLMLWKPAEPIYPRLIKTTIEGLTVQETKEMRKKGLHAPVLTKLAKNGYYASLVSMVRDGFLADELVRIDCKGLPKSDYRKIGVKLRDLVPCILVSFDKEQIIVWRGKDHDESIQDNMHKAFPSVLQLESAAGENEQEEASSESVAGENEHGEKEETSVDCSSDEWSEISSSDDVPDDK

SEQ ID NO: 17493 - protein, 219 aa, Triticum aestivum
  peptide (1)..(219): Ceres Seq. ID no. 14303046
  misc_feature (1)..(219): NCBI GI NO: 40253285 NR Description: putative CRS2-associated factor 1
  misc_feature (1)..(162): NCBI GI NO: 22329043 NR Description: expressed protein [Arabidopsis thaliana]
  misc_feature (1)..(136): NCBI GI NO: 25407702 NR Description: hypothetical protein AT4g31010
  misc_feature (1)..(68): NCBI GI NO: 14596153 NR Description: Unknown protein [Arabidopsis thaliana]
  misc_feature (1)..(148): NCBI GI NO: 15240416 NR Description: expressed protein [Arabidopsis thaliana]
  misc_feature (1)..(149): NCBI GI NO: 30349369 NR Description: CRS2-associated factor 2 [Zea mays]
  misc_feature (1)..(181): NCBI GI NO: 18399222 NR Description: expressed protein [Arabidopsis thaliana]
  misc_feature (1)..(219): NCBI GI NO: 30349367 NR Description: CRS2-associated factor 1 [Zea mays]
  misc_feature (1)..(183): NCBI GI NO: 22329751 NR Description: expressed protein [Arabidopsis thaliana]
  misc_feature (1)..(87): NCBI GI NO: 34905354 NR Description: OJ1126_G08.1
MQNVCRELEDKTGGLIIHRHGGQLILYRGRHYHPKKRPVIPLMLWKPAEPIYPRLIKTTIEGLTVQETKEMRKKGLHAPVLTKLAKNGYYASLVSMVRDGFLADELVRIDCKGLPKSDYRKIGVKLRDLVPCILVSFDKEQIIVWRGKDHDESIQDNMHKAFPSVLQLESAAGENEQEEASSESVAGENEHGEKEETSVDCSSDEWSEISSSDDVPDDK

SEQ ID NO: 17494 - DNA, 1482 bp, Triticum aestivum
  misc_feature (1)..(1482): Ceres Seq. ID no. 14303071
gttgatgctcgacacctttgtatcttgtgtttggtgtgtgctgtgtgcgatggtagtgtgtgtttgttcggctttcggttgtaatcgatggttgtaatcggtgatggttactttataatactccagcctgtggacaacaacgcttgcttgctctgattttgatgtgataaatttgagccagcctagagctgcgggagctgctccccgctgaatcctaggccgctgcgaggtgtcgtcaggccatggccaccaagatgcgcaagctgccgagcgccgttttgctgctcctcttggtcgcgaacctgggatgggcatgggcgctgatcccttcctcccccgcaggcctctccgccaggcgctacgactccatcttcagcttcggcgactcctacgccgaaaccggcaacaaccccgtcgtcttcgccgccaactccgtcttcaaccttgtcacgcgcccaccctacggctccaccttcttcggccgccccaccggccgcaactccgacggccgcctcatcatcgacttcatcgctcagcgcctcggcctgccgctcgtcccgccgtccctggcgcacaacgggagcttccgccaaggcgccaacttcgccgtcgggggcgccaccgctctggacgccgctttcttccacgacgggtccgatcccggcaacaagttccctctcaacaccagcttgggcgtccagctgcagtggttcgaggctctcaagccttccctctgccgcacgacccaagagtgcgaggccttcttcggcagatccctcttcttcgtgggcgaattcggggtcaacgactaccacttctccttccccaccaagagcctgcaagagatcacggcgttcgttccggaagtgatcagggccatctcaatggcaatcgagaggctgatcaagcacggggccacgagtttcgtcgttcccgggacaatcccgtcgggatgcacgccgcacattctcagctccttcgccaaagacgaccccgcggaatacaactccaccaccgactgcctggaagattacaacaagctagggatgcaccacaacctgctgctgcaggaggccctggagaagcttcggggcaggcacccggacgccatgatcgtctacgccgacctcttcggccccatcattgacatggttgagtcacctcgcaagtatgggtttgaagatgttcttaccaactgttgcggagggcctggggcacttatctgcggcgaccaaggtgcacatgtatgtgagaaaccggctgctcgtctgttctgggatgtcgcgcacttgacggaggcggcttaccgctacatcgccgatggctggctgggcagcatagactcccctgcaactgcaagagagagcaggtatcagttagtgaggtagcagaagctgccctgattcatggactgatagctatctgaagtctggcctgtctgaactgaaaaacactggaattgaaatggaagcatgcaagttt

SEQ ID NO: 17495 - protein, 381 aa, Triticum aestivum
  peptide (1)..(381): Ceres Seq. ID no. 14303072
  misc_feature (43)..(362): Pfam Name: Pfam Description:  GDSL-like Lipase/Acylhydrolase
  misc_feature (8)..(372): NCBI GI NO: 34904124 NR Description: unnamed protein product
  misc_feature (27)..(367): NCBI GI NO: 34903962 NR Description: OSJNBa0038J17.26
  misc_feature (5)..(363): NCBI GI NO: 34903994 NR Description: unnamed protein product
  misc_feature (40)..(222): NCBI GI NO: 34912612 NR Description: P0046B10.23
  misc_feature (275)..(315): NCBI GI NO: 34912612 NR Description: P0046B10.23
  misc_feature (40)..(378): NCBI GI NO: 18390045 NR Description: Enod8.1 [Medicago truncatula]
  misc_feature (120)..(359): NCBI GI NO: 15237586 NR Description: GDSL-motif lipase/hydrolase protein
  misc_feature (10)..(381): NCBI GI NO: 15232872 NR Description: early nodule-specific protein, putative
  misc_feature (40)..(324): NCBI GI NO: 15234074 NR Description: acetylesterase, putative [Arabidopsis thaliana]
  misc_feature (1)..(324): NCBI GI NO: 33147015 NR Description: putative early nodulin 8 precursor
MATKMRKLPSAVLLLLLVANLGWAWALIPSSPAGLSARRYDSIFSFGDSYAETGNNPVVFAANSVFNLVTRPPYGSTFFGRPTGRNSDGRLIIDFIAQRLGLPLVPPSLAHNGSFRQGANFAVGGATALDAAFFHDGSDPGNKFPLNTSLGVQLQWFEALKPSLCRTTQECEAFFGRSLFFVGEFGVNDYHFSFPTKSLQEITAFVPEVIRAISMAIERLIKHGATSFVVPGTIPSGCTPHILSSFAKDDPAEYNSTTDCLEDYNKLGMHHNLLLQEALEKLRGRHPDAMIVYADLFGPIIDMVESPRKYGFEDVLTNCCGGPGALICGDQGAHVCEKPAARLFWDVAHLTEAAYRYIADGWLGSIDSPATARESRYQLVR

SEQ ID NO: 17496 - protein, 377 aa, Triticum aestivum
  peptide (1)..(377): Ceres Seq. ID no. 14303073
  misc_feature (39)..(358): Pfam Name: Pfam Description:  GDSL-like Lipase/Acylhydrolase
  misc_feature (4)..(368): NCBI GI NO: 34904124 NR Description: unnamed protein product
  misc_feature (23)..(363): NCBI GI NO: 34903962 NR Description: OSJNBa0038J17.26
  misc_feature (1)..(359): NCBI GI NO: 34903994 NR Description: unnamed protein product
  misc_feature (36)..(218): NCBI GI NO: 34912612 NR Description: P0046B10.23
  misc_feature (271)..(311): NCBI GI NO: 34912612 NR Description: P0046B10.23
  misc_feature (36)..(374): NCBI GI NO: 18390045 NR Description: Enod8.1 [Medicago truncatula]
  misc_feature (116)..(355): NCBI GI NO: 15237586 NR Description: GDSL-motif lipase/hydrolase protein
  misc_feature (6)..(377): NCBI GI NO: 15232872 NR Description: early nodule-specific protein, putative
  misc_feature (36)..(320): NCBI GI NO: 15234074 NR Description: acetylesterase, putative [Arabidopsis thaliana]
  misc_feature (1)..(320): NCBI GI NO: 33147015 NR Description: putative early nodulin 8 precursor
MRKLPSAVLLLLLVANLGWAWALIPSSPAGLSARRYDSIFSFGDSYAETGNNPVVFAANSVFNLVTRPPYGSTFFGRPTGRNSDGRLIIDFIAQRLGLPLVPPSLAHNGSFRQGANFAVGGATALDAAFFHDGSDPGNKFPLNTSLGVQLQWFEALKPSLCRTTQECEAFFGRSLFFVGEFGVNDYHFSFPTKSLQEITAFVPEVIRAISMAIERLIKHGATSFVVPGTIPSGCTPHILSSFAKDDPAEYNSTTDCLEDYNKLGMHHNLLLQEALEKLRGRHPDAMIVYADLFGPIIDMVESPRKYGFEDVLTNCCGGPGALICGDQGAHVCEKPAARLFWDVAHLTEAAYRYIADGWLGSIDSPATARESRYQLVR

SEQ ID NO: 17497 - protein, 279 aa, Triticum aestivum
  peptide (1)..(279): Ceres Seq. ID no. 14303074
MGMGADPFLPRRPLRQALRLHLQLRRLLRRNRQQPRRLRRQLRLQPCHAPTLRLHLLRPPHRPQLRRPPHHRLHRSAPRPAARPAVPGAQRELPPRRQLRRRGRHRSGRRFLPRRVRSRQQVPSQHQLGRPAAVVRGSQAFPLPHDPRVRGLLRQIPLLRGRIRGQRLPLLLPHQEPARDHGVRSGSDQGHLNGNREADQARGHEFRRSRDNPVGMHAAHSQLLRQRRPRGIQLHHRLPGRLQQARDAPQPAAAGGPGEASGQAPGRHDRLRRPLRPHH

SEQ ID NO: 17498 - DNA, 1561 bp, Triticum aestivum
  misc_feature (1)..(1561): Ceres Seq. ID no. 13659644
cacgggtccgctacggataaacggtcgctactcgctagtcgtccggtgaagccgcgcaagcagctgccgccgggataaaccgtttgttggccaggtccctctatccggtttcacccctcaaattatatcgcccaagcagccgcgccgccgggcaaaaatgctctcgctgcgggcgccgccccgtactctgtcgccctcgccgtggcggagacggggccgcctcgacggtttcgccgcgccgcgttgtgtcagcgccgcgccacctgcgacaaccctagagacggctaccgcgcggccggcaggcgtctccttcccgattctggtgaatggctgcactggtaaaatgggggtatctgttgctgaggcagctacttcaaggggtcttcacctagttcctgtttcattcagtagtagagagaaccttgacaaaacaatacaaattggtgatatagatgttgagatatatggcccttctgcaagagaagatgttctttcatctgtcatcgacgaattcccagatgtcattgtggtggactacacggcgcctaattctgtgaactctaatgccgagctctattgcaagcttggtgtgccatttgtaatgggcacaactggtggcgatcagcagttactgtacaaatcagtgcaagattcaaataactacgcactaatatctccacaaatgggcaaacaggttgttgcatttcttgctgcaatggaaacaattgcggagcagtttcctggggccttttcaggctatcgtttggaggtactggaatcccatcaagcaggaaagctggacacatctggtacagctaaagctgtaattgcttgtttcgagaagttaggcgcggtctttgacatggaccggatggttaagatcagggatcctgagcaacagctttatatggtgggtgtccccgaagaacacattgaagggcatgcattccatctgtaccatctaacttctcccgatgacagcgtttcatttgagttccagcacaatgtttgtggccgttcaatctacgccgaagggtcagttgatgctgccgtatttctgtataagaaggtacaatcaatggatcctaagagaatttacaacatgattgatgtcttgcaagaaggcgatatgcggtgaagttaattgattacctcttaatggatctgagtgaaattttgaaacaaatcttcccatatcttgcggaaacacaggggattgggagggggtagtatttagtgagtagtgtggactgtggagtactagagttgatatatgtactgaactgcgaatagtttagtccagaaccttaaactgtacgaacagaagtggggcaggacgtcaatattgttcatgtgggtggtagcctggttggtactctgctccgttccataatgtaagacgttttttgaaactagtgtcaaaaaacgtgactaatgtagtgtcaaaaacatcttacaataactgttaagcaagtttttctgggcatcccgctcattcatctaaaaaaaaaaaaaaaaagctkatcgcagtaccgtcgacctygagggggggmycggtgat

SEQ ID NO: 17499 - protein, 326 aa, Triticum aestivum
  peptide (1)..(326): Ceres Seq. ID no. 15219978
  misc_feature (179)..(321): Pfam Name: Pfam Description:  Dihydrodipicolinate reductase, C-terminus
  misc_feature (28)..(326): NCBI GI NO: 18411368 NR Description: expressed protein [Arabidopsis thaliana]
  misc_feature (49)..(326): NCBI GI NO: 18406430 NR Description: expressed protein [Arabidopsis thaliana]
  misc_feature (28)..(304): NCBI GI NO: 11357603 NR Description: hypothetical protein F24G16
  misc_feature (49)..(305): NCBI GI NO: 7486478 NR Description: hypothetical protein At2g44040
  misc_feature (54)..(320): NCBI GI NO: 7531267 NR Description: DIHYDRODIPICOLINATE REDUCTASE (DHPR)
  misc_feature (50)..(320): NCBI GI NO: 15668598 NR Description: dihydrodipicolinate reductase (dapB)
  misc_feature (99)..(220): NCBI GI NO: 282117 NR Description: dipicolinate reductase homolog - Coxiella burnetii
MLSLRAPPRTLSPSPWRRRGRLDGFAAPRCVSAAPPATTLETATARPAGVSFPILVNGCTGKMGVSVAEAATSRGLHLVPVSFSSRENLDKTIQIGDIDVEIYGPSAREDVLSSVIDEFPDVIVVDYTAPNSVNSNAELYCKLGVPFVMGTTGGDQQLLYKSVQDSNNYALISPQMGKQVVAFLAAMETIAEQFPGAFSGYRLEVLESHQAGKLDTSGTAKAVIACFEKLGAVFDMDRMVKIRDPEQQLYMVGVPEEHIEGHAFHLYHLTSPDDSVSFEFQHNVCGRSIYAEGSVDAAVFLYKKVQSMDPKRIYNMIDVLQEGDMR

SEQ ID NO: 17500 - protein, 264 aa, Triticum aestivum
  peptide (1)..(264): Ceres Seq. ID no. 15219979
  misc_feature (117)..(259): Pfam Name: Pfam Description:  Dihydrodipicolinate reductase, C-terminus
  misc_feature (1)..(264): NCBI GI NO: 18411368 NR Description: expressed protein [Arabidopsis thaliana]
  misc_feature (1)..(264): NCBI GI NO: 18406430 NR Description: expressed protein [Arabidopsis thaliana]
  misc_feature (1)..(242): NCBI GI NO: 11357603 NR Description: hypothetical protein F24G16
  misc_feature (1)..(243): NCBI GI NO: 7486478 NR Description: hypothetical protein At2g44040
  misc_feature (1)..(258): NCBI GI NO: 7531267 NR Description: DIHYDRODIPICOLINATE REDUCTASE (DHPR)
  misc_feature (1)..(258): NCBI GI NO: 15668598 NR Description: dihydrodipicolinate reductase (dapB)
  misc_feature (37)..(158): NCBI GI NO: 282117 NR Description: dipicolinate reductase homolog - Coxiella burnetii
MGVSVAEAATSRGLHLVPVSFSSRENLDKTIQIGDIDVEIYGPSAREDVLSSVIDEFPDVIVVDYTAPNSVNSNAELYCKLGVPFVMGTTGGDQQLLYKSVQDSNNYALISPQMGKQVVAFLAAMETIAEQFPGAFSGYRLEVLESHQAGKLDTSGTAKAVIACFEKLGAVFDMDRMVKIRDPEQQLYMVGVPEEHIEGHAFHLYHLTSPDDSVSFEFQHNVCGRSIYAEGSVDAAVFLYKKVQSMDPKRIYNMIDVLQEGDMR

SEQ ID NO: 17501 - protein, 178 aa, Triticum aestivum
  peptide (1)..(178): Ceres Seq. ID no. 15219980
  misc_feature (31)..(173): Pfam Name: Pfam Description:  Dihydrodipicolinate reductase, C-terminus
  misc_feature (1)..(178): NCBI GI NO: 18411368 NR Description: expressed protein [Arabidopsis thaliana]
  misc_feature (1)..(178): NCBI GI NO: 18406430 NR Description: expressed protein [Arabidopsis thaliana]
  misc_feature (1)..(156): NCBI GI NO: 11357603 NR Description: hypothetical protein F24G16
  misc_feature (1)..(157): NCBI GI NO: 7486478 NR Description: hypothetical protein At2g44040
  misc_feature (1)..(172): NCBI GI NO: 7531267 NR Description: DIHYDRODIPICOLINATE REDUCTASE (DHPR)
  misc_feature (1)..(172): NCBI GI NO: 15668598 NR Description: dihydrodipicolinate reductase (dapB)
  misc_feature (1)..(72): NCBI GI NO: 282117 NR Description: dipicolinate reductase homolog - Coxiella burnetii
MGTTGGDQQLLYKSVQDSNNYALISPQMGKQVVAFLAAMETIAEQFPGAFSGYRLEVLESHQAGKLDTSGTAKAVIACFEKLGAVFDMDRMVKIRDPEQQLYMVGVPEEHIEGHAFHLYHLTSPDDSVSFEFQHNVCGRSIYAEGSVDAAVFLYKKVQSMDPKRIYNMIDVLQEGDMR

SEQ ID NO: 17502 - DNA, 1961 bp, Triticum aestivum
  misc_feature (1)..(1961): Ceres Seq. ID no. 15170647
  misc_feature (1960)..(1960): n is a, c, t, g, unknown, or other
actctatactcaaccggattgcagcttctcatctcatctcatatatatacgcgccctcccaatctcttctccgagcgcgaaatctgacagagcagtgccagaccgttgttgagcagggagtggaaggggcaattcaattcgcaatggaatccctagccgccgccacgttctcgccctcgcgcctcgccgcccaccccgccccgcccgcggctgcggcggcgggcagatcgagggcggtggcggcacgagggaggaggaggagcagcagcggcctgaggtgctcgcctaccgctgcctcgtccccgaggacgacatggacacccccagcttcctcttcgagtccgtcgagcaggggctcgaggggaccaccaacgttggtcgttacagcatggtgggagcccacccggtgatggaggtggtggccaaggagaacaaggtcaccatcatggaccacgagaaggccgaggtgacggagaagatcatggatgatcctatgcaggttcccaggagcataatggagggatggcacccgcaggagatcgaccagctccctgaggccttcagcggtggatgggttgggttcttttcctatgatacagtccgctatgtcgaaaagaagaagatacctttctctggtgctccccacgacgataggaaccttcctgatgttcacttggggctttatgacgatgttcttgtctttgacaatgttgagaagaaagtttatgtcatccattgggtaagtgtggaccgacatgcatccactgaggaagcgtataaagatggcaggtcccggttgaagcggttgctttctaaagtttacaatgctaatgtccccaagctctctccaggatttgtgaagctacatactcggcagttcggtacacccttgaataaatcgaccatgacaagtgatgaatacaagagtgctgttatgcaggctaaggagcatattctggccggtaatattttccagattgttttaagccagcgttttgagaggcgaacttatgccactccatttgaggtttaccgtgctttacgaattgtcaacccaagcccgtacatggcttatgtgcaggcgagaggctgtatcctggtagcatctagtcctgaaattcttacaaaagttgagaagggaaaggttattaaccggccacttgctgggactacccgaaggggtaagacagagcatgaagataaattgcaagaggaacaactattgaatgatcaaaagcaatgtgctgaacacattatgcttgtagacttgggaaggaatgatgttggcagggtatccaaatctggatctgtgaaggtggagaagttgatgaacattgagcggtactcccatgttatgcacatcagctccacggttagtggagagttagatgatcatctcgaaagctgggatgcactacgagcagcattgcctgttggaacagtcagtggggcaccaaaggtaaaagccatggagctaatagatcagttggaagtcacaagacgaggaccatacagtggtggtttaggagggatatcatttgatggtgacatgcttattgctcttgctctccgcaccattgtattctcaacagctccaagccacaatacgatgtactcatacaaaagctcagataggcgccgagagtgggttgctcaccttcaggctggtgcgggcattgttgctgatagtatcccagacgatgagcaaaaagaatgtgagaataaggcggctgccctagctcgggcaattgatcttgcagagtcagcttttgtagacaaagaatagagtgcttattaaattatttttgttagttgttcatcatttttcatccagtttatgttggaaagttgttcatcatttcttcacccagtacatgttgggaagaaagaagcaataaccttctgctgtcctgtgaattgaataaatctggagctataataagatgtattttggttctcng

SEQ ID NO: 17503 - protein, 490 aa, Triticum aestivum
  peptide (1)..(490): Ceres Seq. ID no. 15170648
  misc_feature (199)..(479): Pfam Name: Pfam Description:  chorismate binding enzyme
  misc_feature (1)..(490): NCBI GI NO: 5360659 NR Description: anthranilate synthase alpha 2 subunit
  misc_feature (1)..(490): NCBI GI NO: 34901980 NR Description: putative anthraniliate synthase alpha 2 subunit
  misc_feature (1)..(489): NCBI GI NO: 11268466 NR Description: anthranilate synthase (EC 4.1.3.27) alpha chain
  misc_feature (1)..(489): NCBI GI NO: 960289 NR Description: anthranilate synthase alpha subunit
  misc_feature (1)..(489): NCBI GI NO: 12830362 NR Description: anthranilate synthase alpha subunit
  misc_feature (1)..(489): NCBI GI NO: 34897346 NR Description: anthranilate synthase alpha 1 subunit
  misc_feature (1)..(489): NCBI GI NO: 5360657 NR Description: anthranilate synthase alpha 1 subunit
  misc_feature (1)..(488): NCBI GI NO: 15227604 NR Description: anthranilate synthase
  misc_feature (1)..(489): NCBI GI NO: 320552 NR Description: anthranilate synthase (EC 4
  misc_feature (1)..(489): NCBI GI NO: 15239225 NR Description: anthranilate synthase
MDTPSFLFESVEQGLEGTTNVGRYSMVGAHPVMEVVAKENKVTIMDHEKAEVTEKIMDDPMQVPRSIMEGWHPQEIDQLPEAFSGGWVGFFSYDTVRYVEKKKIPFSGAPHDDRNLPDVHLGLYDDVLVFDNVEKKVYVIHWVSVDRHASTEEAYKDGRSRLKRLLSKVYNANVPKLSPGFVKLHTRQFGTPLNKSTMTSDEYKSAVMQAKEHILAGNIFQIVLSQRFERRTYATPFEVYRALRIVNPSPYMAYVQARGCILVASSPEILTKVEKGKVINRPLAGTTRRGKTEHEDKLQEEQLLNDQKQCAEHIMLVDLGRNDVGRVSKSGSVKVEKLMNIERYSHVMHISSTVSGELDDHLESWDALRAALPVGTVSGAPKVKAMELIDQLEVTRRGPYSGGLGGISFDGDMLIALALRTIVFSTAPSHNTMYSYKSSDRRREWVAHLQAGAGIVADSIPDDEQKECENKAAALARAIDLAESAFVDKE

SEQ ID NO: 17504 - protein, 465 aa, Triticum aestivum
  peptide (1)..(465): Ceres Seq. ID no. 15170649
  misc_feature (174)..(454): Pfam Name: Pfam Description:  chorismate binding enzyme
  misc_feature (1)..(465): NCBI GI NO: 5360659 NR Description: anthranilate synthase alpha 2 subunit
  misc_feature (1)..(465): NCBI GI NO: 34901980 NR Description: putative anthraniliate synthase alpha 2 subunit
  misc_feature (1)..(464): NCBI GI NO: 11268466 NR Description: anthranilate synthase (EC 4.1.3.27) alpha chain
  misc_feature (1)..(464): NCBI GI NO: 960289 NR Description: anthranilate synthase alpha subunit
  misc_feature (1)..(464): NCBI GI NO: 12830362 NR Description: anthranilate synthase alpha subunit
  misc_feature (1)..(464): NCBI GI NO: 34897346 NR Description: anthranilate synthase alpha 1 subunit
  misc_feature (1)..(464): NCBI GI NO: 5360657 NR Description: anthranilate synthase alpha 1 subunit
  misc_feature (1)..(463): NCBI GI NO: 15227604 NR Description: anthranilate synthase
  misc_feature (1)..(464): NCBI GI NO: 320552 NR Description: anthranilate synthase (EC 4
  misc_feature (1)..(464): NCBI GI NO: 15239225 NR Description: anthranilate synthase
MVGAHPVMEVVAKENKVTIMDHEKAEVTEKIMDDPMQVPRSIMEGWHPQEIDQLPEAFSGGWVGFFSYDTVRYVEKKKIPFSGAPHDDRNLPDVHLGLYDDVLVFDNVEKKVYVIHWVSVDRHASTEEAYKDGRSRLKRLLSKVYNANVPKLSPGFVKLHTRQFGTPLNKSTMTSDEYKSAVMQAKEHILAGNIFQIVLSQRFERRTYATPFEVYRALRIVNPSPYMAYVQARGCILVASSPEILTKVEKGKVINRPLAGTTRRGKTEHEDKLQEEQLLNDQKQCAEHIMLVDLGRNDVGRVSKSGSVKVEKLMNIERYSHVMHISSTVSGELDDHLESWDALRAALPVGTVSGAPKVKAMELIDQLEVTRRGPYSGGLGGISFDGDMLIALALRTIVFSTAPSHNTMYSYKSSDRRREWVAHLQAGAGIVADSIPDDEQKECENKAAALARAIDLAESAFVDKE

SEQ ID NO: 17505 - protein, 458 aa, Triticum aestivum
  peptide (1)..(458): Ceres Seq. ID no. 15170650
  misc_feature (167)..(447): Pfam Name: Pfam Description:  chorismate binding enzyme
  misc_feature (1)..(458): NCBI GI NO: 5360659 NR Description: anthranilate synthase alpha 2 subunit
  misc_feature (1)..(458): NCBI GI NO: 34901980 NR Description: putative anthraniliate synthase alpha 2 subunit
  misc_feature (1)..(457): NCBI GI NO: 11268466 NR Description: anthranilate synthase (EC 4.1.3.27) alpha chain
  misc_feature (1)..(457): NCBI GI NO: 960289 NR Description: anthranilate synthase alpha subunit
  misc_feature (1)..(457): NCBI GI NO: 12830362 NR Description: anthranilate synthase alpha subunit
  misc_feature (1)..(457): NCBI GI NO: 34897346 NR Description: anthranilate synthase alpha 1 subunit
  misc_feature (1)..(457): NCBI GI NO: 5360657 NR Description: anthranilate synthase alpha 1 subunit
  misc_feature (1)..(456): NCBI GI NO: 15227604 NR Description: anthranilate synthase
  misc_feature (1)..(457): NCBI GI NO: 320552 NR Description: anthranilate synthase (EC 4
  misc_feature (1)..(457): NCBI GI NO: 15239225 NR Description: anthranilate synthase
MEVVAKENKVTIMDHEKAEVTEKIMDDPMQVPRSIMEGWHPQEIDQLPEAFSGGWVGFFSYDTVRYVEKKKIPFSGAPHDDRNLPDVHLGLYDDVLVFDNVEKKVYVIHWVSVDRHASTEEAYKDGRSRLKRLLSKVYNANVPKLSPGFVKLHTRQFGTPLNKSTMTSDEYKSAVMQAKEHILAGNIFQIVLSQRFERRTYATPFEVYRALRIVNPSPYMAYVQARGCILVASSPEILTKVEKGKVINRPLAGTTRRGKTEHEDKLQEEQLLNDQKQCAEHIMLVDLGRNDVGRVSKSGSVKVEKLMNIERYSHVMHISSTVSGELDDHLESWDALRAALPVGTVSGAPKVKAMELIDQLEVTRRGPYSGGLGGISFDGDMLIALALRTIVFSTAPSHNTMYSYKSSDRRREWVAHLQAGAGIVADSIPDDEQKECENKAAALARAIDLAESAFVDKE

SEQ ID NO: 17506 - DNA, 1527 bp, Triticum aestivum
  misc_feature (1)..(1527): Ceres Seq. ID no. 14313381
accgcaaatctagcggagggtcagctcgggctcggcggcgaccagagaggaggagggaagtggcgtggttctctctcgcgcgcgcgcgtgcggcggagacggagaagggcgccggctgctccaggctgtaacctctggactggagtccttgtcgcgcctagatgctccgcgcctcctcgccacagcggcaagacggcgtcctgtgggccaaggctgcttcctcggccgccctccaccagtactatgccctcccaaagaagggcaagccgcagggccgcgagtccaccgtcctcgctgccttcctgctctcctctccagagaacccactgaaccccaccgtcctctccctcgccaccggcaccaagtgcctcggtgcagcacgcctcggacctcgcggtgacctcgtccatgacgcccacgccgaggtcgtcgcccgccgcgcgctgctccgcctcatttatgccgagattggcacagacaacccaccaagttggctggttgcatctggcgctgatgggcggtggaggctgagggacgggcatcagctgcatctctacatcacccagatcccctgtggggtcatgccggtgccgccgtcatccttggaggttcgaatggaacagctggataccatggtgaatggatgcagtgacgttggattcgtgcaaaggaagccagggcgtggtgatacaacattgtcggtgagctgttttgacaaaattactcgctggtgtgtcgttgggatccaaggtgcattgctgtcacacattcttgaacccttgtatttgtccaccattaccattggacaatcacctgatggtgcacctgacgggttttgtattgaaagtaatgttgtaaaagttcttggtgctcgcctgtcctgtctatccagaaaattccctgaccctttcaaactgaacaagccactattttttgaggcacctatcccccctcaagagtttcaacagacttcaggagatataccgcctttgacttgcgggtactcaatatgctggaataaatccggtttgcatgaagttgttttaggaacaactgggagaaaacaaggtacatcttcaaaggcagcatcctcaccctccactgagtcattgctctgcaagataagattggcagaggccttcgtatcacttgaacatccattagtcacaaaattccggcatgagaaactttcttatcgtgcaattaaggacatggcttgtgagtaccagcagatgcttgagcttcttagaaaggctccattttttggccggtggcgtgctaagccagcatccgttgatttgtttacagttccacggtgataaccaaatcttgaagttctatgctgtgtccgagaggctggttcttgaagttccttgatttcaccataattttagcagttttctgtaccagctctttcaacttatttgtagcatgtatgcttgtgcacaatactgaagtattgaacagtggtagcctgtaacaaacctataaagccctgtgatgtttcgcaccatgaggtggatgttt

SEQ ID NO: 17507 - protein, 385 aa, Triticum aestivum
  peptide (1)..(385): Ceres Seq. ID no. 14313382
  misc_feature (160)..(280): Pfam Name: editase Pfam Description: Adenosine-deaminase
  misc_feature (139)..(385): NCBI GI NO: 38345564 NR Description: OSJNBa0032F06.25
  misc_feature (4)..(116): NCBI GI NO: 38345564 NR Description: OSJNBa0032F06.25
  misc_feature (160)..(280): NCBI GI NO: 25513448 NR Description: T1N6.17 protein - Arabidopsis thaliana
  misc_feature (15)..(103): NCBI GI NO: 25513448 NR Description: T1N6.17 protein - Arabidopsis thaliana
  misc_feature (272)..(349): NCBI GI NO: 25513448 NR Description: T1N6.17 protein - Arabidopsis thaliana
  misc_feature (15)..(320): NCBI GI NO: 15223473 NR Description: double-stranded RNA-specific editase -related
  misc_feature (165)..(381): NCBI GI NO: 12803835 NR Description: adenosine deaminase, tRNA-specific 1
  misc_feature (14)..(145): NCBI GI NO: 12803835 NR Description: adenosine deaminase, tRNA-specific 1
  misc_feature (165)..(381): NCBI GI NO: 6912230 NR Description: adenosine deaminase, tRNA-specific 1
  misc_feature (14)..(145): NCBI GI NO: 6912230 NR Description: adenosine deaminase, tRNA-specific 1
MLRASSPQRQDGVLWAKAASSAALHQYYALPKKGKPQGRESTVLAAFLLSSPENPLNPTVLSLATGTKCLGAARLGPRGDLVHDAHAEVVARRALLRLIYAEIGTDNPPSWLVASGADGRWRLRDGHQLHLYITQIPCGVMPVPPSSLEVRMEQLDTMVNGCSDVGFVQRKPGRGDTTLSVSCFDKITRWCVVGIQGALLSHILEPLYLSTITIGQSPDGAPDGFCIESNVVKVLGARLSCLSRKFPDPFKLNKPLFFEAPIPPQEFQQTSGDIPPLTCGYSICWNKSGLHEVVLGTTGRKQGTSSKAASSPSTESLLCKIRLAEAFVSLEHPLVTKFRHEKLSYRAIKDMACEYQQMLELLRKAPFFGRWRAKPASVDLFTVPR

SEQ ID NO: 17508 - protein, 245 aa, Triticum aestivum
  peptide (1)..(245): Ceres Seq. ID no. 14313383
  misc_feature (20)..(140): Pfam Name: editase Pfam Description: Adenosine-deaminase
  misc_feature (1)..(245): NCBI GI NO: 38345564 NR Description: OSJNBa0032F06.25
  misc_feature (20)..(140): NCBI GI NO: 25513448 NR Description: T1N6.17 protein - Arabidopsis thaliana
  misc_feature (132)..(209): NCBI GI NO: 25513448 NR Description: T1N6.17 protein - Arabidopsis thaliana
  misc_feature (1)..(180): NCBI GI NO: 15223473 NR Description: double-stranded RNA-specific editase -related
  misc_feature (25)..(241): NCBI GI NO: 12803835 NR Description: adenosine deaminase, tRNA-specific 1
  misc_feature (25)..(241): NCBI GI NO: 6912230 NR Description: adenosine deaminase, tRNA-specific 1
  misc_feature (25)..(241): NCBI GI NO: 7304859 NR Description: adenosine deaminase, tRNA-specific 1
  misc_feature (1)..(45): NCBI GI NO: 7304859 NR Description: adenosine deaminase, tRNA-specific 1
  misc_feature (1)..(235): NCBI GI NO: 19921270 NR Description: CG16889-PA [Drosophila melanogaster]
  misc_feature (1)..(42): NCBI GI NO: 34851778 NR Description: similar to Adat1 protein [Rattus norvegicus]
MPVPPSSLEVRMEQLDTMVNGCSDVGFVQRKPGRGDTTLSVSCFDKITRWCVVGIQGALLSHILEPLYLSTITIGQSPDGAPDGFCIESNVVKVLGARLSCLSRKFPDPFKLNKPLFFEAPIPPQEFQQTSGDIPPLTCGYSICWNKSGLHEVVLGTTGRKQGTSSKAASSPSTESLLCKIRLAEAFVSLEHPLVTKFRHEKLSYRAIKDMACEYQQMLELLRKAPFFGRWRAKPASVDLFTVPR

SEQ ID NO: 17509 - protein, 234 aa, Triticum aestivum
  peptide (1)..(234): Ceres Seq. ID no. 14313384
  misc_feature (9)..(129): Pfam Name: editase Pfam Description: Adenosine-deaminase
  misc_feature (1)..(234): NCBI GI NO: 38345564 NR Description: OSJNBa0032F06.25
  misc_feature (9)..(129): NCBI GI NO: 25513448 NR Description: T1N6.17 protein - Arabidopsis thaliana
  misc_feature (121)..(198): NCBI GI NO: 25513448 NR Description: T1N6.17 protein - Arabidopsis thaliana
  misc_feature (1)..(169): NCBI GI NO: 15223473 NR Description: double-stranded RNA-specific editase -related
  misc_feature (14)..(230): NCBI GI NO: 12803835 NR Description: adenosine deaminase, tRNA-specific 1
  misc_feature (14)..(230): NCBI GI NO: 6912230 NR Description: adenosine deaminase, tRNA-specific 1
  misc_feature (14)..(230): NCBI GI NO: 7304859 NR Description: adenosine deaminase, tRNA-specific 1
  misc_feature (1)..(34): NCBI GI NO: 7304859 NR Description: adenosine deaminase, tRNA-specific 1
  misc_feature (1)..(224): NCBI GI NO: 19921270 NR Description: CG16889-PA [Drosophila melanogaster]
  misc_feature (1)..(31): NCBI GI NO: 34851778 NR Description: similar to Adat1 protein [Rattus norvegicus]
MEQLDTMVNGCSDVGFVQRKPGRGDTTLSVSCFDKITRWCVVGIQGALLSHILEPLYLSTITIGQSPDGAPDGFCIESNVVKVLGARLSCLSRKFPDPFKLNKPLFFEAPIPPQEFQQTSGDIPPLTCGYSICWNKSGLHEVVLGTTGRKQGTSSKAASSPSTESLLCKIRLAEAFVSLEHPLVTKFRHEKLSYRAIKDMACEYQQMLELLRKAPFFGRWRAKPASVDLFTVPR

SEQ ID NO: 17510 - DNA, 1292 bp, Triticum aestivum
  misc_feature (1)..(1292): Ceres Seq. ID no. 14316021
attgccaactccacgcatcatcgtctcggcaattagacaccacttccaagttccaactacaaacctccggcgagcggcggacaggttcacggccatggcttcttcttcttctccgaggacgatgagagccgtgcagtacgacaggtacggcggaggagccgaaggcctcaagcatgtggaggtgccgatcccgtcgcccaagaagggcgagctgctgctcaggatggaggcggccagcatcaaccgggtggactggaagttccagaacggcaaggcgcggcccttcctgcccagcaagttccccttcacccccgtctgcgagctcgccggcgaagtcgtggagctgggcgccggagtcagcggcttcagccagggcgacaaggtcatcgccgtcaacttcccgggtggcggcgggctggccgagtacgcggtggtgccggcgtcgcaagcagcgctgaggcctccagaggtgtccgcggtggagggcgcctgcctgccgatcgccgcgttcacggcgctcgccgcgctcagggcggccggggtcggcctcgacgccggcgacggccgtcccaagaacgtgctggtgaccgcggcctcgggcggcgtcggcaccttcgccgtgcagctggcgagcctcgcggggcaccaccacgtcacggccacctgcggcgcgcgcaacctggacctcatccggagcctgggggccgacgaggcgctggactatgacaccccggagggcgccgcgctgcgcgggccgtccggcccgaagcacgacgcggtggtgcactgcggggaggggttcccgtggtcggccttcaagccggcgctggccgacgccggcggcgtggtggtggacctcaccccgcgcctcgcgtccgtcgccgtcgcggtgctccattgggtgctcttctccaggaagaagctggtgccgctgatcgcgtctgccaaggaggaggacatggaggcgctgctgggcatggtgagtcaggggaagctccgggtggtgatcgactcgcggtacccgctgagcagggcgcacgagggctgggctaagagcatgagcggccacgccaccggcaaggtcgtcgtcgacatgggcgtcgccgatgacacagagtgatgatgctagtactactacaatacgtaaattcaaagtaaatagttgcagtgataccgattgccgaagatgatagagctgctcccatctgtccaagaatgtaaagaagcccattgcgatacatcatgtgattaatgacgtcttgataatcttcaacaggctgaagtttctacag

SEQ ID NO: 17511 - protein, 372 aa, Triticum aestivum
  peptide (1)..(372): Ceres Seq. ID no. 14316022
  misc_feature (31)..(365): NCBI GI NO: 21742152 NR Description: OSJNBa0069D17.1
  misc_feature (39)..(364): NCBI GI NO: 12484050 NR Description: quinone-oxidoreductase QR1
  misc_feature (39)..(364): NCBI GI NO: 15235549 NR Description: oxidoreductase, zinc-binding dehydrogenase family
  misc_feature (39)..(364): NCBI GI NO: 24370984 NR Description: quinone-oxidoreductase homologue
  misc_feature (33)..(365): NCBI GI NO: 32487602 NR Description: OSJNBa0034E24.2
  misc_feature (33)..(365): NCBI GI NO: 38346453 NR Description: OSJNBa0018J19.14
  misc_feature (41)..(364): NCBI GI NO: 38016531 NR Description: fiber quinone-oxidoreductase
  misc_feature (32)..(365): NCBI GI NO: 38346442 NR Description: OSJNBa0018J19.3
  misc_feature (32)..(365): NCBI GI NO: 38346450 NR Description: OSJNBa0018J19.11
  misc_feature (39)..(319): NCBI GI NO: 5701738 NR Description: LEDI-4 protein [Lithospermum erythrorhizon]
LPTPRIIVSAIRHHFQVPTTNLRRAADRFTAMASSSSPRTMRAVQYDRYGGGAEGLKHVEVPIPSPKKGELLLRMEAASINRVDWKFQNGKARPFLPSKFPFTPVCELAGEVVELGAGVSGFSQGDKVIAVNFPGGGGLAEYAVVPASQAALRPPEVSAVEGACLPIAAFTALAALRAAGVGLDAGDGRPKNVLVTAASGGVGTFAVQLASLAGHHHVTATCGARNLDLIRSLGADEALDYDTPEGAALRGPSGPKHDAVVHCGEGFPWSAFKPALADAGGVVVDLTPRLASVAVAVLHWVLFSRKKLVPLIASAKEEDMEALLGMVSQGKLRVVIDSRYPLSRAHEGWAKSMSGHATGKVVVDMGVADDTE

SEQ ID NO: 17512 - protein, 341 aa, Triticum aestivum
  peptide (1)..(341): Ceres Seq. ID no. 14316023
  misc_feature (1)..(334): NCBI GI NO: 21742152 NR Description: OSJNBa0069D17.1
  misc_feature (8)..(333): NCBI GI NO: 12484050 NR Description: quinone-oxidoreductase QR1
  misc_feature (8)..(333): NCBI GI NO: 15235549 NR Description: oxidoreductase, zinc-binding dehydrogenase family
  misc_feature (8)..(333): NCBI GI NO: 24370984 NR Description: quinone-oxidoreductase homologue
  misc_feature (2)..(334): NCBI GI NO: 32487602 NR Description: OSJNBa0034E24.2
  misc_feature (2)..(334): NCBI GI NO: 38346453 NR Description: OSJNBa0018J19.14
  misc_feature (10)..(333): NCBI GI NO: 38016531 NR Description: fiber quinone-oxidoreductase
  misc_feature (1)..(334): NCBI GI NO: 38346442 NR Description: OSJNBa0018J19.3
  misc_feature (1)..(334): NCBI GI NO: 38346450 NR Description: OSJNBa0018J19.11
  misc_feature (8)..(288): NCBI GI NO: 5701738 NR Description: LEDI-4 protein [Lithospermum erythrorhizon]
MASSSSPRTMRAVQYDRYGGGAEGLKHVEVPIPSPKKGELLLRMEAASINRVDWKFQNGKARPFLPSKFPFTPVCELAGEVVELGAGVSGFSQGDKVIAVNFPGGGGLAEYAVVPASQAALRPPEVSAVEGACLPIAAFTALAALRAAGVGLDAGDGRPKNVLVTAASGGVGTFAVQLASLAGHHHVTATCGARNLDLIRSLGADEALDYDTPEGAALRGPSGPKHDAVVHCGEGFPWSAFKPALADAGGVVVDLTPRLASVAVAVLHWVLFSRKKLVPLIASAKEEDMEALLGMVSQGKLRVVIDSRYPLSRAHEGWAKSMSGHATGKVVVDMGVADDTE

SEQ ID NO: 17513 - protein, 332 aa, Triticum aestivum
  peptide (1)..(332): Ceres Seq. ID no. 14316024
  misc_feature (1)..(325): NCBI GI NO: 21742152 NR Description: OSJNBa0069D17.1
  misc_feature (1)..(324): NCBI GI NO: 12484050 NR Description: quinone-oxidoreductase QR1
  misc_feature (1)..(324): NCBI GI NO: 15235549 NR Description: oxidoreductase, zinc-binding dehydrogenase family
  misc_feature (1)..(324): NCBI GI NO: 24370984 NR Description: quinone-oxidoreductase homologue
  misc_feature (1)..(325): NCBI GI NO: 32487602 NR Description: OSJNBa0034E24.2
  misc_feature (1)..(325): NCBI GI NO: 38346453 NR Description: OSJNBa0018J19.14
  misc_feature (1)..(324): NCBI GI NO: 38016531 NR Description: fiber quinone-oxidoreductase
  misc_feature (1)..(325): NCBI GI NO: 38346442 NR Description: OSJNBa0018J19.3
  misc_feature (1)..(325): NCBI GI NO: 38346450 NR Description: OSJNBa0018J19.11
  misc_feature (1)..(279): NCBI GI NO: 5701738 NR Description: LEDI-4 protein [Lithospermum erythrorhizon]
MRAVQYDRYGGGAEGLKHVEVPIPSPKKGELLLRMEAASINRVDWKFQNGKARPFLPSKFPFTPVCELAGEVVELGAGVSGFSQGDKVIAVNFPGGGGLAEYAVVPASQAALRPPEVSAVEGACLPIAAFTALAALRAAGVGLDAGDGRPKNVLVTAASGGVGTFAVQLASLAGHHHVTATCGARNLDLIRSLGADEALDYDTPEGAALRGPSGPKHDAVVHCGEGFPWSAFKPALADAGGVVVDLTPRLASVAVAVLHWVLFSRKKLVPLIASAKEEDMEALLGMVSQGKLRVVIDSRYPLSRAHEGWAKSMSGHATGKVVVDMGVADDTE

SEQ ID NO: 17514 - DNA, 1652 bp, Triticum aestivum
  misc_feature (1)..(1652): Ceres Seq. ID no. 14313252
gcccgcccgcctccgcgaacgaaaggccaaacctctgcccccctccttggctcctcctcctcgtgactccctcctgcggcccctcccccctccctcgccggtcaaaccctaacgcgcgcacccacccacccacccgtcaatcccttctcccatggcggcgctctccgtgcctctccgcaccgcggcggccctgtcctcgtccggcgccggatcccgcgccgccgccgacccctccaaggtgtcatgcgtgaggagcacccgctccgctcattttgactgcagcttcccctccattgcggcttcctcttcatctgccaggaacattgagccacttagagctatagctacacaggcacccccggccgtcccacaatatttgagtggagagaagacgaaggttggcatcaatgggttcggacggattgggaggttggttctgagaattgcaaccagtagagatgatattgaagttgtggctgtcaatgatcctttcattgatgctaagtacatggcctatatgttcaagtatgactccactcatggcccctttaaaggatccatcaatgttgtggatgattcaaccctggagatcaatgggaagaaaatcactataacaagcaaaagagatcccgcagagattccttggggtaactttggagctgactatgttgttgaatcttctggtgtttttacaaccatcgataaagcatcggtacacttgaagggtggtgctaagaaagtggtgatatctgctccatccgcagatgctcccatgtttgtggttggagtaaatgagatgagctacgatcccaagatgaatgttgtttctaatgcaagttgtaccactaactgtcttgctcctcttgccaaggttgttcatgaagaatttggcattcttgaaggtctaatgacaactgttcacgccacaacagccacccaaaagactgttgatggtccttcaatgaaagattggagaggagggcgtggtgctggtcaaaacataattcctagctccactggtgcagcaaaggctgttgggaaagttctccctgagctaaatggaaagcttactggcatggctttccgagttccaacaccaaatgtctctgtggttgacttgacctgccggcttgagaaaagtgcctcttatgatgatgtgaaagcagccatcaaggcggcatcagagggtgcactgaaaggcattttaggctacacagatgaggatgtggtatccaacgattttgttggtgacacaaggtcaagtgtatttgatgctaatgctggcatggggctgagctcttccttcatgaagctcgtgtcgtggtacgacaacgagtggggctacagcaaccgggttcttgatctcatcgcccacatggctcttgtctccgccaagcactgatcacctccgagtgctactaataggctgcaattttgccggttctttttattttcagaatttattattgcctttgttgtgccttttgagcacaggcagaaatgggtactcggatctatgacttgcttgtagcagtggatgaaatttacaccgtagcgttatgagcacgtcgtgggatttgttgagcgaatctcatttgtatcggtggtttgatttgttgctaaagaaagaaatcacaaattgtcccctttgg

SEQ ID NO: 17515 - protein, 416 aa, Triticum aestivum
  peptide (1)..(416): Ceres Seq. ID no. 14313253
  misc_feature (231)..(392): Pfam Name: Pfam Description:  Glyceraldehyde 3-phosphate dehydrogenase
  misc_feature (3)..(416): NCBI GI NO: 15219406 NR Description: glyceraldehyde-3-phosphate dehydrogenase -related
  misc_feature (3)..(414): NCBI GI NO: 27754473 NR Description: putative glyceraldehyde-3-phosphate dehydrogenase
  misc_feature (3)..(414): NCBI GI NO: 15219206 NR Description: glyceraldehyde-3-phosphate dehydrogenase -related
  misc_feature (3)..(414): NCBI GI NO: 21618027 NR Description: putative glyceraldehyde-3-phosphate dehydrogenase
  misc_feature (47)..(414): NCBI GI NO: 18072805 NR Description: glyceraldehyde-3-phosphate dehydrogenase
  misc_feature (49)..(415): NCBI GI NO: 2129471 NR Description: glyceraldehyde-3-phosphate dehydrogenase
  misc_feature (49)..(415): NCBI GI NO: 2129472 NR Description: glyceraldehyde-3-phosphate dehydrogenase
  misc_feature (54)..(415): NCBI GI NO: 3059140 NR Description: NAD-dependent glyceraldehyde-3-phosphatedehydrogenase
  misc_feature (3)..(414): NCBI GI NO: 25284351 NR Description: hypothetical protein F3O9
  misc_feature (61)..(414): NCBI GI NO: 3059122 NR Description: glyeraldehyde-3-phosphate dehydrogenase
MAALSVPLRTAAALSSSGAGSRAAADPSKVSCVRSTRSAHFDCSFPSIAASSSSARNIEPLRAIATQAPPAVPQYLSGEKTKVGINGFGRIGRLVLRIATSRDDIEVVAVNDPFIDAKYMAYMFKYDSTHGPFKGSINVVDDSTLEINGKKITITSKRDPAEIPWGNFGADYVVESSGVFTTIDKASVHLKGGAKKVVISAPSADAPMFVVGVNEMSYDPKMNVVSNASCTTNCLAPLAKVVHEEFGILEGLMTTVHATTATQKTVDGPSMKDWRGGRGAGQNIIPSSTGAAKAVGKVLPELNGKLTGMAFRVPTPNVSVVDLTCRLEKSASYDDVKAAIKAASEGALKGILGYTDEDVVSNDFVGDTRSSVFDANAGMGLSSSFMKLVSWYDNEWGYSNRVLDLIAHMALVSAKH

SEQ ID NO: 17516 - protein, 297 aa, Triticum aestivum
  peptide (1)..(297): Ceres Seq. ID no. 14313254
  misc_feature (112)..(273): Pfam Name: Pfam Description:  Glyceraldehyde 3-phosphate dehydrogenase
  misc_feature (1)..(297): NCBI GI NO: 15219406 NR Description: glyceraldehyde-3-phosphate dehydrogenase -related
  misc_feature (1)..(295): NCBI GI NO: 27754473 NR Description: putative glyceraldehyde-3-phosphate dehydrogenase
  misc_feature (1)..(295): NCBI GI NO: 15219206 NR Description: glyceraldehyde-3-phosphate dehydrogenase -related
  misc_feature (1)..(295): NCBI GI NO: 21618027 NR Description: putative glyceraldehyde-3-phosphate dehydrogenase
  misc_feature (1)..(295): NCBI GI NO: 18072805 NR Description: glyceraldehyde-3-phosphate dehydrogenase
  misc_feature (1)..(296): NCBI GI NO: 2129471 NR Description: glyceraldehyde-3-phosphate dehydrogenase
  misc_feature (1)..(296): NCBI GI NO: 2129472 NR Description: glyceraldehyde-3-phosphate dehydrogenase
  misc_feature (1)..(296): NCBI GI NO: 3059140 NR Description: NAD-dependent glyceraldehyde-3-phosphatedehydrogenase
  misc_feature (1)..(295): NCBI GI NO: 25284351 NR Description: hypothetical protein F3O9
  misc_feature (1)..(295): NCBI GI NO: 3059122 NR Description: glyeraldehyde-3-phosphate dehydrogenase
MAYMFKYDSTHGPFKGSINVVDDSTLEINGKKITITSKRDPAEIPWGNFGADYVVESSGVFTTIDKASVHLKGGAKKVVISAPSADAPMFVVGVNEMSYDPKMNVVSNASCTTNCLAPLAKVVHEEFGILEGLMTTVHATTATQKTVDGPSMKDWRGGRGAGQNIIPSSTGAAKAVGKVLPELNGKLTGMAFRVPTPNVSVVDLTCRLEKSASYDDVKAAIKAASEGALKGILGYTDEDVVSNDFVGDTRSSVFDANAGMGLSSSFMKLVSWYDNEWGYSNRVLDLIAHMALVSAKH

SEQ ID NO: 17517 - protein, 294 aa, Triticum aestivum
  peptide (1)..(294): Ceres Seq. ID no. 14313255
  misc_feature (109)..(270): Pfam Name: Pfam Description:  Glyceraldehyde 3-phosphate dehydrogenase
  misc_feature (1)..(294): NCBI GI NO: 15219406 NR Description: glyceraldehyde-3-phosphate dehydrogenase -related
  misc_feature (1)..(292): NCBI GI NO: 27754473 NR Description: putative glyceraldehyde-3-phosphate dehydrogenase
  misc_feature (1)..(292): NCBI GI NO: 15219206 NR Description: glyceraldehyde-3-phosphate dehydrogenase -related
  misc_feature (1)..(292): NCBI GI NO: 21618027 NR Description: putative glyceraldehyde-3-phosphate dehydrogenase
  misc_feature (1)..(292): NCBI GI NO: 18072805 NR Description: glyceraldehyde-3-phosphate dehydrogenase
  misc_feature (1)..(293): NCBI GI NO: 2129471 NR Description: glyceraldehyde-3-phosphate dehydrogenase
  misc_feature (1)..(293): NCBI GI NO: 2129472 NR Description: glyceraldehyde-3-phosphate dehydrogenase
  misc_feature (1)..(293): NCBI GI NO: 3059140 NR Description: NAD-dependent glyceraldehyde-3-phosphatedehydrogenase
  misc_feature (1)..(292): NCBI GI NO: 25284351 NR Description: hypothetical protein F3O9
  misc_feature (1)..(292): NCBI GI NO: 3059122 NR Description: glyeraldehyde-3-phosphate dehydrogenase
MFKYDSTHGPFKGSINVVDDSTLEINGKKITITSKRDPAEIPWGNFGADYVVESSGVFTTIDKASVHLKGGAKKVVISAPSADAPMFVVGVNEMSYDPKMNVVSNASCTTNCLAPLAKVVHEEFGILEGLMTTVHATTATQKTVDGPSMKDWRGGRGAGQNIIPSSTGAAKAVGKVLPELNGKLTGMAFRVPTPNVSVVDLTCRLEKSASYDDVKAAIKAASEGALKGILGYTDEDVVSNDFVGDTRSSVFDANAGMGLSSSFMKLVSWYDNEWGYSNRVLDLIAHMALVSAKH

SEQ ID NO: 17518 - DNA, 1782 bp, Triticum aestivum
  misc_feature (1)..(1782): Ceres Seq. ID no. 15170175
aatgcacactcgttcagctagtagcccaacatctcttgacttttgagaaaaatggcttttgaccttgcagcggcggcagcggcagtgccatggagctacctcctgtacgggctcacgggctctgcgctcctgtggcaggcccgcctgctgctggaccggctgtggtggcgcccgcggcggcttgagcggacgctgcgcgcgcagggcgtcggcggcacgccgtaccgcttcctcatgggcgacctcaaggacttcggccggctcaacgacgaggcctgggccaagccattgccgctgcgctgccacgacatcgtcccccgcgtcatcccgttcctccacaacaacgtccgggacaacggcaagccgtgcttctcttggttcggaccggtggccaacgtggccatcactgaccctgagcttatcaaggacgtgctgtccaacaagtttggccacttccagaagccccagttcccggctctcaccaagctgctcgccaacggcctcacgacccatgagggggagaaatgggtcaagcacaggaggatcctcaatcccgctttccatcttgagaagctcaagctcatgctaccggctttttctgcaagctgtgaagagcttgtcaccagatggaaggagttgcattgttctggcggatcgtgcgaggtggatgtgtggccggagctccagaacctcaccggggatgtcatttctcgcacagctttcggcagcagttatctcgaaggaaggcggatattccaactgcagtccgagcaagctaagctctttgttggtgcggtccagaggattattattccgggttacctattcttgcccaccaagaacaatttgaaaatgcgcaaaaacaataaggaggttgaatcagttttacaaggtctaatcaataaaagaatgcgagctatggaagaaggtgaaaaatcggaaaatgatctgctaggcctgttgctagagtcaaatatgaaggacatggacgagaatggccaacctagccaaggaatggcaatggaagatgtcatcgaggagtgcaaactattctacttggcaggaatggagacaacgtcggtgctgctcacgtggacaatgattgtactaagcatgcatccggagtggcaagaccttgcgagggaggaggtcctaggtttatttaggaagaacaaacccgagtacgagggccttagccgactaaaaatggtgaccatgatccttcacgaggttcttcggttgtatccatcggctacagtttttagccgaaaaacatacaaggatatggatatcggaggggtcagatacccctcgggtgtgttcatcgaggtgccagttctatttatcaatcatgatccagacatatggggaagtgatgtcaatgagttcaaaccagaccgatttgcccaggggatttccaaggcatctaagcatccgggcgccttcttgtcatttggttgggggccacgggtgtgcatcggccagaactttgcaatgctcgaagccaagatggcactaagcatgatccttcagcatttcgagtttgagctcgcgccatcatatacgcatgcaccgcacaccgtgatgacattgcaaccaatgcatggtgcgcaaattaatctcagagctatctgactaggtacacatttaagccaatatttggttgttcttagttatcggtgtaaacaatgttggcttttgtaagatgaactctctattttaactattcgtgtaaacaatattgatttgtgtaagatgaactatgcatttgaattatctggc

SEQ ID NO: 17519 - protein, 527 aa, Triticum aestivum
  peptide (1)..(527): Ceres Seq. ID no. 15170176
  misc_feature (8)..(527): NCBI GI NO: 34912898 NR Description: putative cytochrome P450
  misc_feature (10)..(527): NCBI GI NO: 19909879 NR Description: cytochrome P450 [Oryza sativa]
  misc_feature (10)..(527): NCBI GI NO: 34912894 NR Description: putative cytochrome P450
  misc_feature (10)..(527): NCBI GI NO: 34912896 NR Description: putative cytochrome P450
  misc_feature (17)..(527): NCBI GI NO: 34912888 NR Description: putative cytochrome P450
  misc_feature (6)..(527): NCBI GI NO: 21805634 NR Description: cytochrome P450 monooxygenase CYP72A26
  misc_feature (122)..(527): NCBI GI NO: 9294385 NR Description: cytochrome P450-like protein
  misc_feature (26)..(65): NCBI GI NO: 9294385 NR Description: cytochrome P450-like protein
  misc_feature (109)..(496): NCBI GI NO: 31239217 NR Description: ENSANGP00000010558 [Anopheles gambiae]
  misc_feature (108)..(496): NCBI GI NO: 27465575 NR Description: cytochrome P450 4F4 [Rattus norvegicus]
MAFDLAAAAAAVPWSYLLYGLTGSALLWQARLLLDRLWWRPRRLERTLRAQGVGGTPYRFLMGDLKDFGRLNDEAWAKPLPLRCHDIVPRVIPFLHNNVRDNGKPCFSWFGPVANVAITDPELIKDVLSNKFGHFQKPQFPALTKLLANGLTTHEGEKWVKHRRILNPAFHLEKLKLMLPAFSASCEELVTRWKELHCSGGSCEVDVWPELQNLTGDVISRTAFGSSYLEGRRIFQLQSEQAKLFVGAVQRIIIPGYLFLPTKNNLKMRKNNKEVESVLQGLINKRMRAMEEGEKSENDLLGLLLESNMKDMDENGQPSQGMAMEDVIEECKLFYLAGMETTSVLLTWTMIVLSMHPEWQDLAREEVLGLFRKNKPEYEGLSRLKMVTMILHEVLRLYPSATVFSRKTYKDMDIGGVRYPSGVFIEVPVLFINHDPDIWGSDVNEFKPDRFAQGISKASKHPGAFLSFGWGPRVCIGQNFAMLEAKMALSMILQHFEFELAPSYTHAPHTVMTLQPMHGAQINLRAI

SEQ ID NO: 17520 - protein, 466 aa, Triticum aestivum
  peptide (1)..(466): Ceres Seq. ID no. 15170177
  misc_feature (1)..(466): NCBI GI NO: 34912898 NR Description: putative cytochrome P450
  misc_feature (1)..(466): NCBI GI NO: 19909879 NR Description: cytochrome P450 [Oryza sativa]
  misc_feature (1)..(466): NCBI GI NO: 34912894 NR Description: putative cytochrome P450
  misc_feature (1)..(466): NCBI GI NO: 34912896 NR Description: putative cytochrome P450
  misc_feature (1)..(466): NCBI GI NO: 34912888 NR Description: putative cytochrome P450
  misc_feature (1)..(466): NCBI GI NO: 21805634 NR Description: cytochrome P450 monooxygenase CYP72A26
  misc_feature (61)..(466): NCBI GI NO: 9294385 NR Description: cytochrome P450-like protein
  misc_feature (48)..(435): NCBI GI NO: 31239217 NR Description: ENSANGP00000010558 [Anopheles gambiae]
  misc_feature (47)..(435): NCBI GI NO: 27465575 NR Description: cytochrome P450 4F4 [Rattus norvegicus]
  misc_feature (48)..(466): NCBI GI NO: 29837648 NR Description: likely ortholog of rat cytochrome P450 4X1
MGDLKDFGRLNDEAWAKPLPLRCHDIVPRVIPFLHNNVRDNGKPCFSWFGPVANVAITDPELIKDVLSNKFGHFQKPQFPALTKLLANGLTTHEGEKWVKHRRILNPAFHLEKLKLMLPAFSASCEELVTRWKELHCSGGSCEVDVWPELQNLTGDVISRTAFGSSYLEGRRIFQLQSEQAKLFVGAVQRIIIPGYLFLPTKNNLKMRKNNKEVESVLQGLINKRMRAMEEGEKSENDLLGLLLESNMKDMDENGQPSQGMAMEDVIEECKLFYLAGMETTSVLLTWTMIVLSMHPEWQDLAREEVLGLFRKNKPEYEGLSRLKMVTMILHEVLRLYPSATVFSRKTYKDMDIGGVRYPSGVFIEVPVLFINHDPDIWGSDVNEFKPDRFAQGISKASKHPGAFLSFGWGPRVCIGQNFAMLEAKMALSMILQHFEFELAPSYTHAPHTVMTLQPMHGAQINLRAI

SEQ ID NO: 17521 - protein, 350 aa, Triticum aestivum
  peptide (1)..(350): Ceres Seq. ID no. 15170178
  misc_feature (1)..(350): NCBI GI NO: 34912898 NR Description: putative cytochrome P450
  misc_feature (1)..(350): NCBI GI NO: 19909879 NR Description: cytochrome P450 [Oryza sativa]
  misc_feature (1)..(350): NCBI GI NO: 34912894 NR Description: putative cytochrome P450
  misc_feature (1)..(350): NCBI GI NO: 34912896 NR Description: putative cytochrome P450
  misc_feature (1)..(350): NCBI GI NO: 34912888 NR Description: putative cytochrome P450
  misc_feature (1)..(350): NCBI GI NO: 21805634 NR Description: cytochrome P450 monooxygenase CYP72A26
  misc_feature (1)..(350): NCBI GI NO: 9294385 NR Description: cytochrome P450-like protein
  misc_feature (1)..(319): NCBI GI NO: 31239217 NR Description: ENSANGP00000010558 [Anopheles gambiae]
  misc_feature (1)..(319): NCBI GI NO: 27465575 NR Description: cytochrome P450 4F4 [Rattus norvegicus]
  misc_feature (1)..(350): NCBI GI NO: 29837648 NR Description: likely ortholog of rat cytochrome P450 4X1
MLPAFSASCEELVTRWKELHCSGGSCEVDVWPELQNLTGDVISRTAFGSSYLEGRRIFQLQSEQAKLFVGAVQRIIIPGYLFLPTKNNLKMRKNNKEVESVLQGLINKRMRAMEEGEKSENDLLGLLLESNMKDMDENGQPSQGMAMEDVIEECKLFYLAGMETTSVLLTWTMIVLSMHPEWQDLAREEVLGLFRKNKPEYEGLSRLKMVTMILHEVLRLYPSATVFSRKTYKDMDIGGVRYPSGVFIEVPVLFINHDPDIWGSDVNEFKPDRFAQGISKASKHPGAFLSFGWGPRVCIGQNFAMLEAKMALSMILQHFEFELAPSYTHAPHTVMTLQPMHGAQINLRAI

SEQ ID NO: 17522 - DNA, 1549 bp, Triticum aestivum
  misc_feature (1)..(1549): Ceres Seq. ID no. 15169565
atctgcgcctactcgcaacgccgccgcatttctccaaccctctcaccgcttcctcaccacctccaaaagctcagcaggccatggctggatagacaagcatgtccgctgatcgagcagcttaagccctccatgccctgcgctcgtgcgtgattcgcatctatgactgctcagcagagttccttgttctgaaaattcggaattagttcgcgttccgaaggctccagatctgaagttaggaattggagggtattcgagcattagttggttcgatggatcgcaagtttctgaatatggtcctgcacgagtatggcagtagaatgtattcgctgtgccgcatcaagctctccactcatctcttctatccgacagcaaaagacgcaacaacagcccatgaagatgcaaatgcaaggaagaagaagcatgggggatggccatcaacgatctcgagctgcaagcgcccgccaagtactttggtcaacttctcggtgccacccagcactgctgccgccagtaacatgcgtttcttctccctcctgcctgagcagggagagtcctctgtcatgttcactgacccttcttgcaactccgcagtctacgatatggacatgaagtctttcgttctcgcacccagctcatacttctgcaaaccgtatgattccatcaccgtgtccattaggaaccgatgcagcagtggcaatttcttggaccacgaagatgatcacggcctctacgtcatgaacagcttggacgacagctttgagttcttcaattactgcaaggttggcttatctacctatccgttgctgtacaataagtggtactggagtcctctgccgtctccaccgtcccgcaccagtcctcttgttgcagcggcggtgattgacaactccaccatatgcgcgtcatccaagaacggcacatacacctttgatatttcgagggaggtgtggagccacactggcagctgggtgctgcccttccaccgcgcagcagagtatgtccctgagcttggactctggttcggcctccaggcccctggcacctggcaaaatcgcttatgtgcatttgacctttcatcctctgccatggcggaatctgctccttcacccctgcatgattgggaatacctcgatctcctccccgacgagttgctgccggtggggcgtgccttggtgaacctgggctcgggcaagttttgcatcgcgacccactgcaggaaggataggtctgcactccaggaggaggacgagctggagaatattaggagtttgggtggaaatgggggtgtgcaaactctcttgactggcgtggaggtggtccgctgcgccgacgggctccagcttatccaccacaagtcccaacgttacaacattgaaaacttaagtatccactgtgtgctctgactcgttttattacctatccgatcatcccaatctgagccatgtagtactagttagttagctttacctagtggctggatgcatcactctgttatgattacctgtaagtcgggacttacaaaataatactcctactactttatttaaag

SEQ ID NO: 17523 - protein, 377 aa, Triticum aestivum
  peptide (1)..(377): Ceres Seq. ID no. 15169566
  misc_feature (1)..(377): NCBI GI NO: 34897052 NR Description: hypothetical protein
  misc_feature (1)..(349): NCBI GI NO: 15451604 NR Description: Hypothetical protein [Oryza sativa]
  misc_feature (1)..(350): NCBI GI NO: 38345446 NR Description: OSJNBa0042L16.1
  misc_feature (177)..(350): NCBI GI NO: 15451605 NR Description: Hypothetical protein [Oryza sativa]
  misc_feature (131)..(366): NCBI GI NO: 38344193 NR Description: OSJNBa0064G10.9
  misc_feature (161)..(376): NCBI GI NO: 34902348 NR Description: Hypothetical protein
  misc_feature (154)..(312): NCBI GI NO: 32487803 NR Description: OSJNBa0035I04.14
  misc_feature (161)..(369): NCBI GI NO: 37531434 NR Description: hypothetical protein
  misc_feature (94)..(316): NCBI GI NO: 34902338 NR Description: Unknown protein
  misc_feature (198)..(339): NCBI GI NO: 34904128 NR Description: unnamed protein product
MDRKFLNMVLHEYGSRMYSLCRIKLSTHLFYPTAKDATTAHEDANARKKKHGGWPSTISSCKRPPSTLVNFSVPPSTAAASNMRFFSLLPEQGESSVMFTDPSCNSAVYDMDMKSFVLAPSSYFCKPYDSITVSIRNRCSSGNFLDHEDDHGLYVMNSLDDSFEFFNYCKVGLSTYPLLYNKWYWSPLPSPPSRTSPLVAAAVIDNSTICASSKNGTYTFDISREVWSHTGSWVLPFHRAAEYVPELGLWFGLQAPGTWQNRLCAFDLSSSAMAESAPSPLHDWEYLDLLPDELLPVGRALVNLGSGKFCIATHCRKDRSALQEEDELENIRSLGGNGGVQTLLTGVEVVRCADGLQLIHHKSQRYNIENLSIHCVL

SEQ ID NO: 17524 - protein, 370 aa, Triticum aestivum
  peptide (1)..(370): Ceres Seq. ID no. 15169567
  misc_feature (1)..(370): NCBI GI NO: 34897052 NR Description: hypothetical protein
  misc_feature (1)..(342): NCBI GI NO: 15451604 NR Description: Hypothetical protein [Oryza sativa]
  misc_feature (1)..(343): NCBI GI NO: 38345446 NR Description: OSJNBa0042L16.1
  misc_feature (170)..(343): NCBI GI NO: 15451605 NR Description: Hypothetical protein [Oryza sativa]
  misc_feature (124)..(359): NCBI GI NO: 38344193 NR Description: OSJNBa0064G10.9
  misc_feature (154)..(369): NCBI GI NO: 34902348 NR Description: Hypothetical protein
  misc_feature (147)..(305): NCBI GI NO: 32487803 NR Description: OSJNBa0035I04.14
  misc_feature (154)..(362): NCBI GI NO: 37531434 NR Description: hypothetical protein
  misc_feature (87)..(309): NCBI GI NO: 34902338 NR Description: Unknown protein
  misc_feature (191)..(332): NCBI GI NO: 34904128 NR Description: unnamed protein product
MVLHEYGSRMYSLCRIKLSTHLFYPTAKDATTAHEDANARKKKHGGWPSTISSCKRPPSTLVNFSVPPSTAAASNMRFFSLLPEQGESSVMFTDPSCNSAVYDMDMKSFVLAPSSYFCKPYDSITVSIRNRCSSGNFLDHEDDHGLYVMNSLDDSFEFFNYCKVGLSTYPLLYNKWYWSPLPSPPSRTSPLVAAAVIDNSTICASSKNGTYTFDISREVWSHTGSWVLPFHRAAEYVPELGLWFGLQAPGTWQNRLCAFDLSSSAMAESAPSPLHDWEYLDLLPDELLPVGRALVNLGSGKFCIATHCRKDRSALQEEDELENIRSLGGNGGVQTLLTGVEVVRCADGLQLIHHKSQRYNIENLSIHCVL

SEQ ID NO: 17525 - protein, 361 aa, Triticum aestivum
  peptide (1)..(361): Ceres Seq. ID no. 15169568
  misc_feature (1)..(361): NCBI GI NO: 34897052 NR Description: hypothetical protein
  misc_feature (1)..(333): NCBI GI NO: 15451604 NR Description: Hypothetical protein [Oryza sativa]
  misc_feature (1)..(334): NCBI GI NO: 38345446 NR Description: OSJNBa0042L16.1
  misc_feature (161)..(334): NCBI GI NO: 15451605 NR Description: Hypothetical protein [Oryza sativa]
  misc_feature (115)..(350): NCBI GI NO: 38344193 NR Description: OSJNBa0064G10.9
  misc_feature (145)..(360): NCBI GI NO: 34902348 NR Description: Hypothetical protein
  misc_feature (138)..(296): NCBI GI NO: 32487803 NR Description: OSJNBa0035I04.14
  misc_feature (145)..(353): NCBI GI NO: 37531434 NR Description: hypothetical protein
  misc_feature (78)..(300): NCBI GI NO: 34902338 NR Description: Unknown protein
  misc_feature (182)..(323): NCBI GI NO: 34904128 NR Description: unnamed protein product
MYSLCRIKLSTHLFYPTAKDATTAHEDANARKKKHGGWPSTISSCKRPPSTLVNFSVPPSTAAASNMRFFSLLPEQGESSVMFTDPSCNSAVYDMDMKSFVLAPSSYFCKPYDSITVSIRNRCSSGNFLDHEDDHGLYVMNSLDDSFEFFNYCKVGLSTYPLLYNKWYWSPLPSPPSRTSPLVAAAVIDNSTICASSKNGTYTFDISREVWSHTGSWVLPFHRAAEYVPELGLWFGLQAPGTWQNRLCAFDLSSSAMAESAPSPLHDWEYLDLLPDELLPVGRALVNLGSGKFCIATHCRKDRSALQEEDELENIRSLGGNGGVQTLLTGVEVVRCADGLQLIHHKSQRYNIENLSIHCVL

SEQ ID NO: 17526 - DNA, 2707 bp, Triticum aestivum
  misc_feature (1)..(2707): Ceres Seq. ID no. 14313284
cgcccctaaacccaccctccaccattctatcccaagtataaaccctagcccagccccttatcctttcgtctccccctcccagacaccgcgccggaacccaaaccatccgaacgaccaaccaccagcgagcgccgcgacgtctgcctctcccatggcgcccgcgctgagcaggaccctgggcccgtcctcggtggcggcgctgcggccgagcccgtcgcgggggctgctgcgggccgcgctcgcgccgcaggggaggaggcccgccggcgccagaggagtcaggtgggaggccgggaggggccggctggtcggggccaggtgcgcctccgccgttgccgagaagaccgccggggaggaggaggaggccgccggcgagaagttcgagtaccaggccgaggttagccgcttgatggatttgattgttcacagcctctacagccataaggaagtgttccttcgggagcttgtaagtaatgcgagtgatgccttggataagctgagatttctcagtgtaactgacccgtccgtgctggctgatggtggtgacatggaaataaggattaaacctgaccctgatgctggcacaataactatcactgatagtggcattgggatgacaaaggatgagctcaaggactgccttggaactatcgcacaaagtggtacctccaaatttttgaaggctctgaaggagaacaaggagcttggtgcagataatggacttattggtcaatttggtgttggattttattcggcttttcttgttgcagagaaggttgtggtgtccactaagagtcccaagacagataagcagtatatatgggaagctgaggctaacagtagctcatacgttatcagggaagagactgatcctgagaaaatgctgacacgtggaacacagattactctctttttaagagaggatgataagtatgaatttgctgaccctacgaggattcaaggtctagttaagaactactcgcagtttgtttcgttccccatttttacatggcaggagaaatctagaacagttgaggttgaagaagaggagtcaaaagaagccgaagagacagcagagggtgagaaggagaagaagaagaaaactatcactgagaagtactgggattgggaattggcaaatgaaacaaagccaatatggatgagaaatccaaaggaagtcgaggaaaccgagtacaatgaattttacaagaaggcattcaatgagtttttggatcctctagctcatgcacactttacaacagagggtgaggtggaatttagaagtgttctctacatcccaggaatggcaccacttagcaatgaggagataatgaaccctaagaccaaaaatatcaggttgtatgtcaagagggttttcatttctgatgactttgatggcgagctgttccccaggtacttgagctttgtcaaaggtgttgttgactcgaatgatctccctctgaatgtttctcgtgagattcttcaagaaagtcgtattgtcaggatcatgcgcaagagacttgttaggaagacttttgatatgattcaggatattgctgacaaggataacaaggaggactacaagaaattttgggagagctttggcaaatttatgaaacttggttgcattgaggactcaggaaatcagaagcgccttgctcctttgctgcggttttattcctctaaaaatgaaacggatttgataagtctcgatcagtatgtggagaatatgcccgagacccaaaaggctatctattatattgccacagatagtcttcagagtgcaaagaccgctccattcttggaaaagctgcttcagaaagatattgaagttctataccttatcgaaccgattgatgaggtagctattcagaatctgcagacgtacaaagagaaaaagtttgttgatatcagcaaggaagacctagaattgggcgatgaggatgaggacaaggaagaaaccaagcaggaatacactcttctttgtgactggataaagcagcagctgggtgacaaagttgccaaggtccaaatttcaaagcgactcagctcttcaccatgtgttcttgtatctggcaagtttggttggtcggctaacatggaaaggcttatgaaagcacaaacgcttggtgacacatcaagcttggagttcatgagaggaagaagaatttttgaaatcaaccccgaccaccctattgtcaaggacttgagtgctgcttgcaagaacgagcctgagagcaccgaagccaagagggcagttgagttgctgtacgagactgccctgatctccagtggatacactcctgagagtccagcggagttggggggcaagatctacgagatgatgaccatcgcccttggcgggagatggggtagatccggcaccgaggaggctgagaccaatgccgacgtcgactcttctgaaggtgttgtaacggaggtcgttgagccatccgaagtcaggactgagaacgagaatgacccatggagagattagttagttctgtaggcatccattttttttaaataccctggaggtggatgagcaaaaaatagaagtatcactggagccagagtgatgatgacatcgagcgatggactgtctttgtaagaacactgagctccaaaatcttgtttgttatcgccaaaggctaaattttgtaggtgacttttttgacggccgtgaaataatttatctttattactg

SEQ ID NO: 17527 - protein, 831 aa, Triticum aestivum
  peptide (1)..(831): Ceres Seq. ID no. 14313285
  misc_feature (312)..(787): Pfam Name: Pfam Description:  Hsp90 protein
  misc_feature (103)..(820): NCBI GI NO: 15231505 NR Description: heat shock protein -related [Arabidopsis thaliana]
  misc_feature (121)..(820): NCBI GI NO: 1708316 NR Description: HEAT SHOCK COGNATE 90 KD PROTEIN
  misc_feature (122)..(820): NCBI GI NO: 1708314 NR Description: Heat shock protein 83
  misc_feature (338)..(808): NCBI GI NO: 14041148 NR Description: heat shock protein 90 [Dendronephthya klunzingeri]
  misc_feature (114)..(400): NCBI GI NO: 14041148 NR Description: heat shock protein 90 [Dendronephthya klunzingeri]
  misc_feature (118)..(831): NCBI GI NO: 63509 NR Description: hsp 108 [Gallus gallus]
  misc_feature (123)..(525): NCBI GI NO: 544242 NR Description: ENDOPLASMIN HOMOLOG PRECURSOR (GRP94 HOMOLOG)
  misc_feature (510)..(825): NCBI GI NO: 544242 NR Description: ENDOPLASMIN HOMOLOG PRECURSOR (GRP94 HOMOLOG)
  misc_feature (118)..(831): NCBI GI NO: 119359 NR Description: Endoplasmin precursor
  misc_feature (125)..(827): NCBI GI NO: 4507677 NR Description: tumor rejection antigen
APKPTLHHSIPSINPSPAPYPFVSPSQTPRRNPNHPNDQPPASAATSASPMAPALSRTLGPSSVAALRPSPSRGLLRAALAPQGRRPAGARGVRWEAGRGRLVGARCASAVAEKTAGEEEEAAGEKFEYQAEVSRLMDLIVHSLYSHKEVFLRELVSNASDALDKLRFLSVTDPSVLADGGDMEIRIKPDPDAGTITITDSGIGMTKDELKDCLGTIAQSGTSKFLKALKENKELGADNGLIGQFGVGFYSAFLVAEKVVVSTKSPKTDKQYIWEAEANSSSYVIREETDPEKMLTRGTQITLFLREDDKYEFADPTRIQGLVKNYSQFVSFPIFTWQEKSRTVEVEEEESKEAEETAEGEKEKKKKTITEKYWDWELANETKPIWMRNPKEVEETEYNEFYKKAFNEFLDPLAHAHFTTEGEVEFRSVLYIPGMAPLSNEEIMNPKTKNIRLYVKRVFISDDFDGELFPRYLSFVKGVVDSNDLPLNVSREILQESRIVRIMRKRLVRKTFDMIQDIADKDNKEDYKKFWESFGKFMKLGCIEDSGNQKRLAPLLRFYSSKNETDLISLDQYVENMPETQKAIYYIATDSLQSAKTAPFLEKLLQKDIEVLYLIEPIDEVAIQNLQTYKEKKFVDISKEDLELGDEDEDKEETKQEYTLLCDWIKQQLGDKVAKVQISKRLSSSPCVLVSGKFGWSANMERLMKAQTLGDTSSLEFMRGRRIFEINPDHPIVKDLSAACKNEPESTEAKRAVELLYETALISSGYTPESPAELGGKIYEMMTIALGGRWGRSGTEEAETNADVDSSEGVVTEVVEPSEVRTENENDPWRD

SEQ ID NO: 17528 - protein, 781 aa, Triticum aestivum
  peptide (1)..(781): Ceres Seq. ID no. 14313286
  misc_feature (262)..(737): Pfam Name: Pfam Description:  Hsp90 protein
  misc_feature (53)..(770): NCBI GI NO: 15231505 NR Description: heat shock protein -related [Arabidopsis thaliana]
  misc_feature (71)..(770): NCBI GI NO: 1708316 NR Description: HEAT SHOCK COGNATE 90 KD PROTEIN
  misc_feature (72)..(770): NCBI GI NO: 1708314 NR Description: Heat shock protein 83
  misc_feature (288)..(758): NCBI GI NO: 14041148 NR Description: heat shock protein 90 [Dendronephthya klunzingeri]
  misc_feature (64)..(350): NCBI GI NO: 14041148 NR Description: heat shock protein 90 [Dendronephthya klunzingeri]
  misc_feature (68)..(781): NCBI GI NO: 63509 NR Description: hsp 108 [Gallus gallus]
  misc_feature (73)..(475): NCBI GI NO: 544242 NR Description: ENDOPLASMIN HOMOLOG PRECURSOR (GRP94 HOMOLOG)
  misc_feature (460)..(775): NCBI GI NO: 544242 NR Description: ENDOPLASMIN HOMOLOG PRECURSOR (GRP94 HOMOLOG)
  misc_feature (68)..(781): NCBI GI NO: 119359 NR Description: Endoplasmin precursor
  misc_feature (75)..(777): NCBI GI NO: 4507677 NR Description: tumor rejection antigen
MAPALSRTLGPSSVAALRPSPSRGLLRAALAPQGRRPAGARGVRWEAGRGRLVGARCASAVAEKTAGEEEEAAGEKFEYQAEVSRLMDLIVHSLYSHKEVFLRELVSNASDALDKLRFLSVTDPSVLADGGDMEIRIKPDPDAGTITITDSGIGMTKDELKDCLGTIAQSGTSKFLKALKENKELGADNGLIGQFGVGFYSAFLVAEKVVVSTKSPKTDKQYIWEAEANSSSYVIREETDPEKMLTRGTQITLFLREDDKYEFADPTRIQGLVKNYSQFVSFPIFTWQEKSRTVEVEEEESKEAEETAEGEKEKKKKTITEKYWDWELANETKPIWMRNPKEVEETEYNEFYKKAFNEFLDPLAHAHFTTEGEVEFRSVLYIPGMAPLSNEEIMNPKTKNIRLYVKRVFISDDFDGELFPRYLSFVKGVVDSNDLPLNVSREILQESRIVRIMRKRLVRKTFDMIQDIADKDNKEDYKKFWESFGKFMKLGCIEDSGNQKRLAPLLRFYSSKNETDLISLDQYVENMPETQKAIYYIATDSLQSAKTAPFLEKLLQKDIEVLYLIEPIDEVAIQNLQTYKEKKFVDISKEDLELGDEDEDKEETKQEYTLLCDWIKQQLGDKVAKVQISKRLSSSPCVLVSGKFGWSANMERLMKAQTLGDTSSLEFMRGRRIFEINPDHPIVKDLSAACKNEPESTEAKRAVELLYETALISSGYTPESPAELGGKIYEMMTIALGGRWGRSGTEEAETNADVDSSEGVVTEVVEPSEVRTENENDPWRD

SEQ ID NO: 17529 - protein, 695 aa, Triticum aestivum
  peptide (1)..(695): Ceres Seq. ID no. 14313287
  misc_feature (176)..(651): Pfam Name: Pfam Description:  Hsp90 protein
  misc_feature (1)..(684): NCBI GI NO: 15231505 NR Description: heat shock protein -related [Arabidopsis thaliana]
  misc_feature (1)..(684): NCBI GI NO: 1708316 NR Description: HEAT SHOCK COGNATE 90 KD PROTEIN
  misc_feature (1)..(684): NCBI GI NO: 1708314 NR Description: Heat shock protein 83
  misc_feature (202)..(672): NCBI GI NO: 14041148 NR Description: heat shock protein 90 [Dendronephthya klunzingeri]
  misc_feature (1)..(264): NCBI GI NO: 14041148 NR Description: heat shock protein 90 [Dendronephthya klunzingeri]
  misc_feature (1)..(695): NCBI GI NO: 63509 NR Description: hsp 108 [Gallus gallus]
  misc_feature (1)..(389): NCBI GI NO: 544242 NR Description: ENDOPLASMIN HOMOLOG PRECURSOR (GRP94 HOMOLOG)
  misc_feature (374)..(689): NCBI GI NO: 544242 NR Description: ENDOPLASMIN HOMOLOG PRECURSOR (GRP94 HOMOLOG)
  misc_feature (1)..(695): NCBI GI NO: 119359 NR Description: Endoplasmin precursor
  misc_feature (1)..(691): NCBI GI NO: 4507677 NR Description: tumor rejection antigen
MDLIVHSLYSHKEVFLRELVSNASDALDKLRFLSVTDPSVLADGGDMEIRIKPDPDAGTITITDSGIGMTKDELKDCLGTIAQSGTSKFLKALKENKELGADNGLIGQFGVGFYSAFLVAEKVVVSTKSPKTDKQYIWEAEANSSSYVIREETDPEKMLTRGTQITLFLREDDKYEFADPTRIQGLVKNYSQFVSFPIFTWQEKSRTVEVEEEESKEAEETAEGEKEKKKKTITEKYWDWELANETKPIWMRNPKEVEETEYNEFYKKAFNEFLDPLAHAHFTTEGEVEFRSVLYIPGMAPLSNEEIMNPKTKNIRLYVKRVFISDDFDGELFPRYLSFVKGVVDSNDLPLNVSREILQESRIVRIMRKRLVRKTFDMIQDIADKDNKEDYKKFWESFGKFMKLGCIEDSGNQKRLAPLLRFYSSKNETDLISLDQYVENMPETQKAIYYIATDSLQSAKTAPFLEKLLQKDIEVLYLIEPIDEVAIQNLQTYKEKKFVDISKEDLELGDEDEDKEETKQEYTLLCDWIKQQLGDKVAKVQISKRLSSSPCVLVSGKFGWSANMERLMKAQTLGDTSSLEFMRGRRIFEINPDHPIVKDLSAACKNEPESTEAKRAVELLYETALISSGYTPESPAELGGKIYEMMTIALGGRWGRSGTEEAETNADVDSSEGVVTEVVEPSEVRTENENDPWRD

SEQ ID NO: 17530 - DNA, 1326 bp, Triticum aestivum
  misc_feature (1)..(1326): Ceres Seq. ID no. 14301839
tcttcgccacccgctccccgctccagaccgccgccgccgccgccgccgtgcgccatggtgaggctcaacgccgacctgatatggaagagcccgcacttcttcaacgccatcaaggagcgcgagctcgacctccgaggcaacaagatcgccatcatcgagaacatcggcgccaccgaggaccagtttgacactattgacttgtcggacaacgagattgtcaagcttgagaacttccctttcatgaatcgccttggcactctgttaatcaacaacaacagaattacacgtatcaatcccaaccttggtgagtttttacccaagatgcatactttggtgctgacgaacaatcgccttacaagtcttgcggagattgaccccctggcctctcttccaaagctgcaatttctcagcttactggataataccgtaactaagcaaccagattaccggttatatgtgatccacaaactgaagcatctgcgtttgctggacttcaagaaagtgaaacaacaggagagagctgacgcagcacaaaagttccactcaaaggaggcagaggaggcggcaaagaaggttgctgccaaagcttataccccagtagtgatggatgctcaaggtaccacaaaagaccagggccctaaagtagtcgctccaacgcctgcacaaatcacagctatcaaggctgctatcattaactcgcagacgcttgacgaagttacaaggcttgagaaggcattgagcactggccaagttcctgctgagtttgcgctccccaagcctgacaccaacatggctgaggcgtcagaggaagctgaagctgagaagatggagacagatggccaggaccaggaggaggatggggctgatgagcagaagcaagcagatgaaagcaccccgattcaggaggattgatgtcatgcatacacctgaatctgcctgttctcgtggggggatgaaaccatgtgcggcgactcggcgatctcgtgggggaattctcgactcggcgatctagtgtcagtatattgattgatgtatcctgtggatgctaacaacgcttttcagtacatggtactgttgtccgagtcgaggaaggtttacgcccaggggacctagatgtgttggatgttttagaagacgatgcgttgcgcgctgaatgaatgttgctgagactctactcccgcggtgtgtcgacaacgccgacttgcttgggctccattgttgttaaatttgctacgctacctattgatagatggtttttcttggaatttggatcttgctggggttgtaattcatcaggagaggatgtatctccatcagatttttggt

SEQ ID NO: 17531 - protein, 303 aa, Triticum aestivum
  peptide (1)..(303): Ceres Seq. ID no. 14301840
  misc_feature (19)..(270): NCBI GI NO: 322619 NR Description: U2 snRNP protein A' - Arabidopsis thaliana
  misc_feature (19)..(270): NCBI GI NO: 15218274 NR Description: U2 small nuclear ribonucleoprotein A, putative
  misc_feature (19)..(293): NCBI GI NO: 3955033 NR Description: U2 snRNP-specific A' protein [Salmo salar]
  misc_feature (19)..(270): NCBI GI NO: 31077165 NR Description: U2 small nuclear ribonucleoprotein A'
  misc_feature (19)..(270): NCBI GI NO: 4507121 NR Description: u2 small nuclear ribonucleoprotein polypeptide A'
  misc_feature (19)..(270): NCBI GI NO: 7263962 NR Description: bA395L14
  misc_feature (19)..(280): NCBI GI NO: 31077178 NR Description: U2 small nuclear ribonucleoprotein A'
  misc_feature (19)..(280): NCBI GI NO: 31981942 NR Description: U2 small nuclear ribonucleoprotein polypeptide A'
  misc_feature (19)..(270): NCBI GI NO: 34857187 NR Description: similar to U2 small nuclear ribonucleoproteinpolypeptide A
  misc_feature (19)..(280): NCBI GI NO: 7021537 NR Description: U2 small nuclear ribonucleoprotein A'
SSPPAPRSRPPPPPPPCAMVRLNADLIWKSPHFFNAIKERELDLRGNKIAIIENIGATEDQFDTIDLSDNEIVKLENFPFMNRLGTLLINNNRITRINPNLGEFLPKMHTLVLTNNRLTSLAEIDPLASLPKLQFLSLLDNTVTKQPDYRLYVIHKLKHLRLLDFKKVKQQERADAAQKFHSKEAEEAAKKVAAKAYTPVVMDAQGTTKDQGPKVVAPTPAQITAIKAAIINSQTLDEVTRLEKALSTGQVPAEFALPKPDTNMAEASEEAEAEKMETDGQDQEEDGADEQKQADESTPIQED

SEQ ID NO: 17532 - protein, 285 aa, Triticum aestivum
  peptide (1)..(285): Ceres Seq. ID no. 14301841
  misc_feature (1)..(252): NCBI GI NO: 322619 NR Description: U2 snRNP protein A' - Arabidopsis thaliana
  misc_feature (1)..(252): NCBI GI NO: 15218274 NR Description: U2 small nuclear ribonucleoprotein A, putative
  misc_feature (1)..(275): NCBI GI NO: 3955033 NR Description: U2 snRNP-specific A' protein [Salmo salar]
  misc_feature (1)..(252): NCBI GI NO: 31077165 NR Description: U2 small nuclear ribonucleoprotein A'
  misc_feature (1)..(252): NCBI GI NO: 4507121 NR Description: u2 small nuclear ribonucleoprotein polypeptide A'
  misc_feature (1)..(252): NCBI GI NO: 7263962 NR Description: bA395L14
  misc_feature (1)..(262): NCBI GI NO: 31077178 NR Description: U2 small nuclear ribonucleoprotein A'
  misc_feature (1)..(262): NCBI GI NO: 31981942 NR Description: U2 small nuclear ribonucleoprotein polypeptide A'
  misc_feature (1)..(252): NCBI GI NO: 34857187 NR Description: similar to U2 small nuclear ribonucleoproteinpolypeptide A
  misc_feature (1)..(262): NCBI GI NO: 7021537 NR Description: U2 small nuclear ribonucleoprotein A'
MVRLNADLIWKSPHFFNAIKERELDLRGNKIAIIENIGATEDQFDTIDLSDNEIVKLENFPFMNRLGTLLINNNRITRINPNLGEFLPKMHTLVLTNNRLTSLAEIDPLASLPKLQFLSLLDNTVTKQPDYRLYVIHKLKHLRLLDFKKVKQQERADAAQKFHSKEAEEAAKKVAAKAYTPVVMDAQGTTKDQGPKVVAPTPAQITAIKAAIINSQTLDEVTRLEKALSTGQVPAEFALPKPDTNMAEASEEAEAEKMETDGQDQEEDGADEQKQADESTPIQED

SEQ ID NO: 17533 - protein, 223 aa, Triticum aestivum
  peptide (1)..(223): Ceres Seq. ID no. 14301842
  misc_feature (1)..(190): NCBI GI NO: 322619 NR Description: U2 snRNP protein A' - Arabidopsis thaliana
  misc_feature (1)..(190): NCBI GI NO: 15218274 NR Description: U2 small nuclear ribonucleoprotein A, putative
  misc_feature (1)..(213): NCBI GI NO: 3955033 NR Description: U2 snRNP-specific A' protein [Salmo salar]
  misc_feature (1)..(190): NCBI GI NO: 31077165 NR Description: U2 small nuclear ribonucleoprotein A'
  misc_feature (1)..(190): NCBI GI NO: 4507121 NR Description: u2 small nuclear ribonucleoprotein polypeptide A'
  misc_feature (1)..(190): NCBI GI NO: 7263962 NR Description: bA395L14
  misc_feature (1)..(200): NCBI GI NO: 31077178 NR Description: U2 small nuclear ribonucleoprotein A'
  misc_feature (1)..(200): NCBI GI NO: 31981942 NR Description: U2 small nuclear ribonucleoprotein polypeptide A'
  misc_feature (1)..(190): NCBI GI NO: 34857187 NR Description: similar to U2 small nuclear ribonucleoproteinpolypeptide A
  misc_feature (1)..(200): NCBI GI NO: 7021537 NR Description: U2 small nuclear ribonucleoprotein A'
MNRLGTLLINNNRITRINPNLGEFLPKMHTLVLTNNRLTSLAEIDPLASLPKLQFLSLLDNTVTKQPDYRLYVIHKLKHLRLLDFKKVKQQERADAAQKFHSKEAEEAAKKVAAKAYTPVVMDAQGTTKDQGPKVVAPTPAQITAIKAAIINSQTLDEVTRLEKALSTGQVPAEFALPKPDTNMAEASEEAEAEKMETDGQDQEEDGADEQKQADESTPIQED

SEQ ID NO: 17534 - DNA, 1354 bp, Triticum aestivum
  misc_feature (1)..(1354): Ceres Seq. ID no. 13590307
aggtttgcagtagcgaggagtccatcccaccaagcttaaataacggccacccattcgcctcgtctcactatctctcccgttgtcgtcgcctcctcctaaaccactctccctatccccgtgtccagaagctaccccccggctccratggcggcgaaggaaccgatgcgcgtgctcgtcaccggcgccgcaggacaaatcggatatgctcttgttcccatgattgccaggggagttatgcttggtgcagaccagcctgttattctgcatatgctggatattgaatttgctgctgaagctcttaaaggcgtcaagatggagttgatcgatgccgcatttccacttctcaagggagttgttgcaacaactgatgttgtcgaggcctgcactggtgtgaatgttgcggttatggttggtggattccccaggaaggaaggaatggaaaggaaggatgttatgacgaaaaatgtttcaatctacaaagctcaagcatctgctcttgaagctcatgcagcccccaactgcaaggttttggttgttgccaacccagcaaacaccaatgctctcatcctgaaggagtttgctccatctatccctgagaagaacatcagttgtttgacccgcctagaccacaacagggcactcggtcagatttctgagagacttggtgtccaagtttctgacgtgaagaatgctattatctggggtaatcactcgtccagtcagtaccctgatgttaaccacgccactgtgaagacttccagtggagagaagcctgttcgtgaacttgttcaagatgatgaatggctaaacggggagttcattgccactgtccagcagcgtggtgctgcaatcatcaaagcgaggaagctctccagtgctctctctgctgccagctcagcttgtgatcacatccgtgactgggttctgggaaccgccgagggaacatttgtttccatgggtgtgtactctgatggttcatacggtgtgcctgctggtcttatctactccttcccagtaacgtgcagtggtggtgaatggacaattgttcaagggctcccgatcgatgagttctcgaggaagaagatggatgccaccgcccaggagctgtcggaggagaaggcgctggcctactcatgcctcgcgtaaatccacattcgaagggcagctgctcctctgatgttttgaataaatgaaaccttccgctccttagaaactctcgtctccacccagaacagccgcacatcgcgatgcatgctccttttcgctggttttcccagtgtgtatgaatgaggcttgtagctccccttttgcctgatgatttacaggacagtacatttgctggaggggggaaagg

SEQ ID NO: 17535 - protein, 333 aa, Triticum aestivum
  peptide (1)..(333): Ceres Seq. ID no. 15220958
  misc_feature (158)..(332): Pfam Name: Pfam Description:  lactate/malate dehydrogenase
  misc_feature (3)..(332): NCBI GI NO: 18202485 NR Description: Malate dehydrogenase, cytoplasmic
  misc_feature (3)..(333): NCBI GI NO: 21593565 NR Description: cytosolic malate dehydrogenase
  misc_feature (3)..(333): NCBI GI NO: 15239843 NR Description: malate dehydrogenase, cytosolic, putative
  misc_feature (3)..(332): NCBI GI NO: 10798652 NR Description: malate dehydrogenase [Nicotiana tabacum]
  misc_feature (3)..(333): NCBI GI NO: 15219721 NR Description: malate dehydrogenase, cytosolic, putative
  misc_feature (3)..(333): NCBI GI NO: 10334493 NR Description: cytosolic malate dehydrogenase [Cicer arietinum]
  misc_feature (3)..(333): NCBI GI NO: 15982948 NR Description: NAD-dependent malate dehydrogenase
  misc_feature (3)..(333): NCBI GI NO: 11133373 NR Description: Malate dehydrogenase, cytoplasmic
  misc_feature (3)..(332): NCBI GI NO: 12229778 NR Description: Malate dehydrogenase, cytoplasmic
  misc_feature (1)..(333): NCBI GI NO: 24528075 NR Description: cytosolic malate dehydrogenase
MAAKEPMRVLVTGAAGQIGYALVPMIARGVMLGADQPVILHMLDIEFAAEALKGVKMELIDAAFPLLKGVVATTDVVEACTGVNVAVMVGGFPRKEGMERKDVMTKNVSIYKAQASALEAHAAPNCKVLVVANPANTNALILKEFAPSIPEKNISCLTRLDHNRALGQISERLGVQVSDVKNAIIWGNHSSSQYPDVNHATVKTSSGEKPVRELVQDDEWLNGEFIATVQQRGAAIIKARKLSSALSAASSACDHIRDWVLGTAEGTFVSMGVYSDGSYGVPAGLIYSFPVTCSGGEWTIVQGLPIDEFSRKKMDATAQELSEEKALAYSCLA

SEQ ID NO: 17536 - protein, 327 aa, Triticum aestivum
  peptide (1)..(327): Ceres Seq. ID no. 15220959
  misc_feature (152)..(326): Pfam Name: Pfam Description:  lactate/malate dehydrogenase
  misc_feature (1)..(326): NCBI GI NO: 18202485 NR Description: Malate dehydrogenase, cytoplasmic
  misc_feature (1)..(327): NCBI GI NO: 21593565 NR Description: cytosolic malate dehydrogenase
  misc_feature (1)..(327): NCBI GI NO: 15239843 NR Description: malate dehydrogenase, cytosolic, putative
  misc_feature (1)..(326): NCBI GI NO: 10798652 NR Description: malate dehydrogenase [Nicotiana tabacum]
  misc_feature (1)..(327): NCBI GI NO: 15219721 NR Description: malate dehydrogenase, cytosolic, putative
  misc_feature (1)..(327): NCBI GI NO: 10334493 NR Description: cytosolic malate dehydrogenase [Cicer arietinum]
  misc_feature (1)..(327): NCBI GI NO: 15982948 NR Description: NAD-dependent malate dehydrogenase
  misc_feature (1)..(327): NCBI GI NO: 11133373 NR Description: Malate dehydrogenase, cytoplasmic
  misc_feature (1)..(326): NCBI GI NO: 12229778 NR Description: Malate dehydrogenase, cytoplasmic
  misc_feature (1)..(327): NCBI GI NO: 24528075 NR Description: cytosolic malate dehydrogenase
MRVLVTGAAGQIGYALVPMIARGVMLGADQPVILHMLDIEFAAEALKGVKMELIDAAFPLLKGVVATTDVVEACTGVNVAVMVGGFPRKEGMERKDVMTKNVSIYKAQASALEAHAAPNCKVLVVANPANTNALILKEFAPSIPEKNISCLTRLDHNRALGQISERLGVQVSDVKNAIIWGNHSSSQYPDVNHATVKTSSGEKPVRELVQDDEWLNGEFIATVQQRGAAIIKARKLSSALSAASSACDHIRDWVLGTAEGTFVSMGVYSDGSYGVPAGLIYSFPVTCSGGEWTIVQGLPIDEFSRKKMDATAQELSEEKALAYSCLA

SEQ ID NO: 17537 - protein, 309 aa, Triticum aestivum
  peptide (1)..(309): Ceres Seq. ID no. 15220960
  misc_feature (134)..(308): Pfam Name: Pfam Description:  lactate/malate dehydrogenase
  misc_feature (1)..(308): NCBI GI NO: 18202485 NR Description: Malate dehydrogenase, cytoplasmic
  misc_feature (1)..(309): NCBI GI NO: 21593565 NR Description: cytosolic malate dehydrogenase
  misc_feature (1)..(309): NCBI GI NO: 15239843 NR Description: malate dehydrogenase, cytosolic, putative
  misc_feature (1)..(308): NCBI GI NO: 10798652 NR Description: malate dehydrogenase [Nicotiana tabacum]
  misc_feature (1)..(309): NCBI GI NO: 15219721 NR Description: malate dehydrogenase, cytosolic, putative
  misc_feature (1)..(309): NCBI GI NO: 10334493 NR Description: cytosolic malate dehydrogenase [Cicer arietinum]
  misc_feature (1)..(309): NCBI GI NO: 15982948 NR Description: NAD-dependent malate dehydrogenase
  misc_feature (1)..(309): NCBI GI NO: 11133373 NR Description: Malate dehydrogenase, cytoplasmic
  misc_feature (1)..(308): NCBI GI NO: 12229778 NR Description: Malate dehydrogenase, cytoplasmic
  misc_feature (1)..(309): NCBI GI NO: 24528075 NR Description: cytosolic malate dehydrogenase
MIARGVMLGADQPVILHMLDIEFAAEALKGVKMELIDAAFPLLKGVVATTDVVEACTGVNVAVMVGGFPRKEGMERKDVMTKNVSIYKAQASALEAHAAPNCKVLVVANPANTNALILKEFAPSIPEKNISCLTRLDHNRALGQISERLGVQVSDVKNAIIWGNHSSSQYPDVNHATVKTSSGEKPVRELVQDDEWLNGEFIATVQQRGAAIIKARKLSSALSAASSACDHIRDWVLGTAEGTFVSMGVYSDGSYGVPAGLIYSFPVTCSGGEWTIVQGLPIDEFSRKKMDATAQELSEEKALAYSCLA

SEQ ID NO: 17538 - DNA, 1583 bp, Triticum aestivum
  misc_feature (1)..(1583): Ceres Seq. ID no. 13662164
atcctaatagaaaactaaatgctttaatgaaaatggacttccctcatgtactcacatttcgtcggtacaccattagttgtcctatgtacacatgattttcccacctcattagttacttattagcctgtccggttcatcatagttacatgattggtctcctctgtttgtcagtttcatgtggagattgttgtgtgcttctactcaaccaacatcattaacctgcaggaagtgctggtgatgttctagaagacaatcctgttggcaagttgaaggttttcgtctacgacttgccaagcaagtacaacaagaggcttgtcaccaaggatccccgatgcctcaaccacatgtttgccgctgagatattcatgcaccgtttcttgctctctagtgcagtgaggacggttaatcctgaagaggccgattggttctacgctcctgtttacactacttgtgatctaactcgtgctggacttccgttaccgttcaagtctccaaggatgatgagaagcgcgatccagttcatttcaaagaggtggcctttctggaatagaactgatggaggagatcatttctttgtcgctccacatgattttgcggcatgctttcactaccaggaagagaatgctattgcgcgtggaattcttccgttgctacgccgtgctacattggttcaaacatttggacagaagaatcatgtttgcttgaaagaggggtctattacaataccaccatttgcgccaccacagaaaatgcaggcccacttgattcctcctgatactccccgttcaatcttcgtttacttcagaggtttgttctatgacaatgggaacgaccctgagggtgggtattacgcaagaggtgctcgagcttcattgtgggagaacttcaagaataatcctctgtttgatatctccaccgaacaccctgccacttactacgaagatatgcagcgctccgtcttctgcttatgtccgttggggtgggcgccatggagtcctaggttggtggaggctgtggtttttggctgcattccagtcatcatagctgacgacatcgtgctgcctttcgcggatgcaatcccttgggacgaaattggtgtttttgttgatgaggaggatgtgccaaagcttgattcaattctgacatcgattccgattgatgatatcctaaggaagcaaagattgctcgccaacccatcaatgaagaaggccatgctgttcccgcagccagcgcaacctagagatgcattccatcagattctaaatggccttgctcgcaaactcccgcacccagagaccatatacttacaaccaggtgagaagcatctcaactggacagctgggcctgttggagacttgaagccttggtaacataaaagcttccttgcaagacctggctttgttgatcttgtgaaaagttctgtttcttttatcacctttctctgagaagtccgaagatccatagaattatacgatattgaagtgtgttatatcctctgatgtcactctaactaaaaatagtggatcttacataaacggttgtaacgttgtaactgtattaattgtataaagaagtaaagaaac

SEQ ID NO: 17539 - protein, 341 aa, Triticum aestivum
  peptide (1)..(341): Ceres Seq. ID no. 15220162
  misc_feature (1)..(281): Pfam Name: Pfam Description:  Exostosin family
  misc_feature (1)..(341): NCBI GI NO: 34907048 NR Description: contains EST D24978
  misc_feature (1)..(341): NCBI GI NO: 18424516 NR Description: (AtGUT1) NpGUT1 homolog [Arabidopsis thaliana]
  misc_feature (1)..(341): NCBI GI NO: 21592991 NR Description: unknown [Arabidopsis thaliana]
  misc_feature (1)..(341): NCBI GI NO: 15223522 NR Description: hypothetical protein [Arabidopsis thaliana]
  misc_feature (1)..(341): NCBI GI NO: 34907044 NR Description: hypothetical protein~similar to Arabidopsisthaliana chromosome 1
  misc_feature (1)..(341): NCBI GI NO: 18642697 NR Description: Unknown protein [Oryza sativa]
  misc_feature (1)..(341): NCBI GI NO: 23821292 NR Description: pectin-glucuronyltransferase
  misc_feature (1)..(341): NCBI GI NO: 10176877 NR Description: gb|AAC80624
  misc_feature (1)..(313): NCBI GI NO: 15237173 NR Description: expressed protein [Arabidopsis thaliana]
  misc_feature (1)..(313): NCBI GI NO: 25407954 NR Description: hypothetical protein At2g28110
MFAAEIFMHRFLLSSAVRTVNPEEADWFYAPVYTTCDLTRAGLPLPFKSPRMMRSAIQFISKRWPFWNRTDGGDHFFVAPHDFAACFHYQEENAIARGILPLLRRATLVQTFGQKNHVCLKEGSITIPPFAPPQKMQAHLIPPDTPRSIFVYFRGLFYDNGNDPEGGYYARGARASLWENFKNNPLFDISTEHPATYYEDMQRSVFCLCPLGWAPWSPRLVEAVVFGCIPVIIADDIVLPFADAIPWDEIGVFVDEEDVPKLDSILTSIPIDDILRKQRLLANPSMKKAMLFPQPAQPRDAFHQILNGLARKLPHPETIYLQPGEKHLNWTAGPVGDLKPW

SEQ ID NO: 17540 - protein, 334 aa, Triticum aestivum
  peptide (1)..(334): Ceres Seq. ID no. 15220163
  misc_feature (1)..(274): Pfam Name: Pfam Description:  Exostosin family
  misc_feature (1)..(334): NCBI GI NO: 34907048 NR Description: contains EST D24978
  misc_feature (1)..(334): NCBI GI NO: 18424516 NR Description: (AtGUT1) NpGUT1 homolog [Arabidopsis thaliana]
  misc_feature (1)..(334): NCBI GI NO: 21592991 NR Description: unknown [Arabidopsis thaliana]
  misc_feature (1)..(334): NCBI GI NO: 15223522 NR Description: hypothetical protein [Arabidopsis thaliana]
  misc_feature (1)..(334): NCBI GI NO: 34907044 NR Description: hypothetical protein~similar to Arabidopsisthaliana chromosome 1
  misc_feature (1)..(334): NCBI GI NO: 18642697 NR Description: Unknown protein [Oryza sativa]
  misc_feature (1)..(334): NCBI GI NO: 23821292 NR Description: pectin-glucuronyltransferase
  misc_feature (1)..(334): NCBI GI NO: 10176877 NR Description: gb|AAC80624
  misc_feature (1)..(306): NCBI GI NO: 15237173 NR Description: expressed protein [Arabidopsis thaliana]
  misc_feature (1)..(306): NCBI GI NO: 25407954 NR Description: hypothetical protein At2g28110
MHRFLLSSAVRTVNPEEADWFYAPVYTTCDLTRAGLPLPFKSPRMMRSAIQFISKRWPFWNRTDGGDHFFVAPHDFAACFHYQEENAIARGILPLLRRATLVQTFGQKNHVCLKEGSITIPPFAPPQKMQAHLIPPDTPRSIFVYFRGLFYDNGNDPEGGYYARGARASLWENFKNNPLFDISTEHPATYYEDMQRSVFCLCPLGWAPWSPRLVEAVVFGCIPVIIADDIVLPFADAIPWDEIGVFVDEEDVPKLDSILTSIPIDDILRKQRLLANPSMKKAMLFPQPAQPRDAFHQILNGLARKLPHPETIYLQPGEKHLNWTAGPVGDLKPW

SEQ ID NO: 17541 - protein, 290 aa, Triticum aestivum
  peptide (1)..(290): Ceres Seq. ID no. 15220164
  misc_feature (1)..(230): Pfam Name: Pfam Description:  Exostosin family
  misc_feature (1)..(290): NCBI GI NO: 34907048 NR Description: contains EST D24978
  misc_feature (1)..(290): NCBI GI NO: 18424516 NR Description: (AtGUT1) NpGUT1 homolog [Arabidopsis thaliana]
  misc_feature (1)..(290): NCBI GI NO: 21592991 NR Description: unknown [Arabidopsis thaliana]
  misc_feature (1)..(290): NCBI GI NO: 15223522 NR Description: hypothetical protein [Arabidopsis thaliana]
  misc_feature (1)..(290): NCBI GI NO: 34907044 NR Description: hypothetical protein~similar to Arabidopsisthaliana chromosome 1
  misc_feature (1)..(290): NCBI GI NO: 18642697 NR Description: Unknown protein [Oryza sativa]
  misc_feature (1)..(290): NCBI GI NO: 23821292 NR Description: pectin-glucuronyltransferase
  misc_feature (1)..(290): NCBI GI NO: 10176877 NR Description: gb|AAC80624
  misc_feature (1)..(262): NCBI GI NO: 15237173 NR Description: expressed protein [Arabidopsis thaliana]
  misc_feature (1)..(262): NCBI GI NO: 25407954 NR Description: hypothetical protein At2g28110
MMRSAIQFISKRWPFWNRTDGGDHFFVAPHDFAACFHYQEENAIARGILPLLRRATLVQTFGQKNHVCLKEGSITIPPFAPPQKMQAHLIPPDTPRSIFVYFRGLFYDNGNDPEGGYYARGARASLWENFKNNPLFDISTEHPATYYEDMQRSVFCLCPLGWAPWSPRLVEAVVFGCIPVIIADDIVLPFADAIPWDEIGVFVDEEDVPKLDSILTSIPIDDILRKQRLLANPSMKKAMLFPQPAQPRDAFHQILNGLARKLPHPETIYLQPGEKHLNWTAGPVGDLKPW

SEQ ID NO: 17542 - DNA, 795 bp, Triticum aestivum
  misc_feature (1)..(795): Ceres Seq. ID no. 12627322
acacttgattagctgaggaggaagagagaaaaaccatggcaataacactcaacaatggcttcaagatgcctatcattggattgggcgtgtggcgcatggaagatcttgtttcatcgggcttggttcgcagcatagggatcagcaactatgatatctttctgaccagagattgtttagcatattccaagataaagcctgctgtaaatcagattgaaactcatccatacttccagcgtgattctctagtcaaattttgtcagaagcatgggatttgtgtcactgcacacactccactaggaggtgctgcagcaaatgctgaatggtttggaacagtttcatgtttggatgaccaagttctcaaaggtctggctgaaaaatacaaaaagactgccgcccagatcagccttcgctggggaattcaaaggaacactgtggtcattcctaaatcgtcaaaactggagaggttgaaagagaactttcaggttttcgattttgagttgtctaaagaggacatggagctcattggaagtatagatagaaaatatcgaaccaatcaaccagctgtgttttggggcatagatttgtatgcgtgagaatgcccttcctaagtctgtatcatggctgtttgaccttgtgttaagattcagatttggtataagctgatctttcaggctccttagtagctcagtttatttgataatgtaaactttctttgttgatggttgaaaaatcatcttctcatcccatatccaatctcgtggactaaataagagagacttctgaatgttgttgctc

SEQ ID NO: 17543 - protein, 185 aa, Triticum aestivum
  peptide (1)..(185): Ceres Seq. ID no. 12627323
  misc_feature (19)..(185): NCBI GI NO: 15226489 NR Description: mannose 6-phosphate reductase
  misc_feature (19)..(185): NCBI GI NO: 10334991 NR Description: NADPH-dependent mannose 6-phosphate reductase
  misc_feature (19)..(185): NCBI GI NO: 15226502 NR Description: mannose 6-phosphate reductase
  misc_feature (19)..(185): NCBI GI NO: 21592829 NR Description: putative NADPH dependent mannose 6-phosphatereductase
  misc_feature (19)..(185): NCBI GI NO: 21554266 NR Description: putative NADPH dependent mannose 6-phosphatereductase
  misc_feature (19)..(185): NCBI GI NO: 1835701 NR Description: NADPH-dependent mannose 6-phosphate reductase
  misc_feature (19)..(185): NCBI GI NO: 134153 NR Description: NADP-dependent D-sorbitol-6-phosphate dehydrogenase
  misc_feature (19)..(185): NCBI GI NO: 19310924 NR Description: NADP dependent sorbitol 6-phosphate dehydrogenase
  misc_feature (19)..(185): NCBI GI NO: 19310926 NR Description: NADP dependent sorbitol 6-phosphate dehydrogenase
  misc_feature (19)..(185): NCBI GI NO: 19310934 NR Description: NADP dependent sorbitol 6-phosphate dehydrogenase
MAITLNNGFKMPIIGLGVWRMEDLVSSGLVRSIGISNYDIFLTRDCLAYSKIKPAVNQIETHPYFQRDSLVKFCQKHGICVTAHTPLGGAAANAEWFGTVSCLDDQVLKGLAEKYKKTAAQISLRWGIQRNTVVIPKSSKLERLKENFQVFDFELSKEDMELIGSIDRKYRTNQPAVFWGIDLYA

SEQ ID NO: 17544 - protein, 175 aa, Triticum aestivum
  peptide (1)..(175): Ceres Seq. ID no. 12627324
  misc_feature (9)..(175): NCBI GI NO: 15226489 NR Description: mannose 6-phosphate reductase
  misc_feature (9)..(175): NCBI GI NO: 10334991 NR Description: NADPH-dependent mannose 6-phosphate reductase
  misc_feature (9)..(175): NCBI GI NO: 15226502 NR Description: mannose 6-phosphate reductase
  misc_feature (9)..(175): NCBI GI NO: 21592829 NR Description: putative NADPH dependent mannose 6-phosphatereductase
  misc_feature (9)..(175): NCBI GI NO: 21554266 NR Description: putative NADPH dependent mannose 6-phosphatereductase
  misc_feature (9)..(175): NCBI GI NO: 1835701 NR Description: NADPH-dependent mannose 6-phosphate reductase
  misc_feature (9)..(175): NCBI GI NO: 134153 NR Description: NADP-dependent D-sorbitol-6-phosphate dehydrogenase
  misc_feature (9)..(175): NCBI GI NO: 19310924 NR Description: NADP dependent sorbitol 6-phosphate dehydrogenase
  misc_feature (9)..(175): NCBI GI NO: 19310926 NR Description: NADP dependent sorbitol 6-phosphate dehydrogenase
  misc_feature (9)..(175): NCBI GI NO: 19310934 NR Description: NADP dependent sorbitol 6-phosphate dehydrogenase
MPIIGLGVWRMEDLVSSGLVRSIGISNYDIFLTRDCLAYSKIKPAVNQIETHPYFQRDSLVKFCQKHGICVTAHTPLGGAAANAEWFGTVSCLDDQVLKGLAEKYKKTAAQISLRWGIQRNTVVIPKSSKLERLKENFQVFDFELSKEDMELIGSIDRKYRTNQPAVFWGIDLYA

SEQ ID NO: 17545 - protein, 165 aa, Triticum aestivum
  peptide (1)..(165): Ceres Seq. ID no. 12627325
  misc_feature (1)..(165): NCBI GI NO: 15226489 NR Description: mannose 6-phosphate reductase
  misc_feature (1)..(165): NCBI GI NO: 10334991 NR Description: NADPH-dependent mannose 6-phosphate reductase
  misc_feature (1)..(165): NCBI GI NO: 15226502 NR Description: mannose 6-phosphate reductase
  misc_feature (1)..(165): NCBI GI NO: 21592829 NR Description: putative NADPH dependent mannose 6-phosphatereductase
  misc_feature (1)..(165): NCBI GI NO: 21554266 NR Description: putative NADPH dependent mannose 6-phosphatereductase
  misc_feature (1)..(165): NCBI GI NO: 1835701 NR Description: NADPH-dependent mannose 6-phosphate reductase
  misc_feature (1)..(165): NCBI GI NO: 134153 NR Description: NADP-dependent D-sorbitol-6-phosphate dehydrogenase
  misc_feature (1)..(165): NCBI GI NO: 19310924 NR Description: NADP dependent sorbitol 6-phosphate dehydrogenase
  misc_feature (1)..(165): NCBI GI NO: 19310926 NR Description: NADP dependent sorbitol 6-phosphate dehydrogenase
  misc_feature (1)..(165): NCBI GI NO: 19310934 NR Description: NADP dependent sorbitol 6-phosphate dehydrogenase
MEDLVSSGLVRSIGISNYDIFLTRDCLAYSKIKPAVNQIETHPYFQRDSLVKFCQKHGICVTAHTPLGGAAANAEWFGTVSCLDDQVLKGLAEKYKKTAAQISLRWGIQRNTVVIPKSSKLERLKENFQVFDFELSKEDMELIGSIDRKYRTNQPAVFWGIDLYA

SEQ ID NO: 17546 - DNA, 1601 bp, Triticum aestivum
  misc_feature (1)..(1601): Ceres Seq. ID no. 15174852
ctcctgagtcctgacctagagttgccgccgtgccgtagcttgtggcgtcaccgacgacgcctcacccccaatccccttagcttctcacacgcgccgccgctacggctgctacctccgctgccatcgccttccccgcgtgcctgcagtttccaccccgtccgcaacctcggacactgtttctcgaggtaaaccgaaagggaggaaatcatggccaagttcaagaagaatctgaaccctcaggtcttcttggaaatatccatcgatgggcgacctgccaagagaatcacgtttgagctctttgctgatgtagttccgaagacggcagagaacttccgagcgctttgtactggtgagaaaggcctcggagaatctacaaagaagccactttattttaaaggaacacacatccatcggattatcccaggatttatggctcaggctggtgatttttccagaggagatggacgtggtggagagagcatatatggtggaaaatttccagatgaaaacttcaagttaaagcatgatcaacctggtattctttccatggcaaactctggagaaaacaccaatggatcccaattttttataacattcaaggctgtgccacatcttgatgggtattacttatttgctttagtcattttactaattttttgggacgccgataactgccacacgtgtgggcgttaaggggtctgcccacacgttttgtgtggtgcctaagaggaccagcccacacgcctacgtgtgggcaaaacaactagcgcccacacgcctctttttttcccttgcggtccctctcacacgcctacatgtgggcgaaatgcataacgcccacacgacctctctcagccacctacctcacggtcccgcacgcccagcgtgacagtcaccacgcgtccccgcagttgccatggtccggaccctcttcaatgtccgtttacctgcagttgccatgtcgctgaactacagttgccatgtcggacaactacagttgccatggttgctcaactgcagttgccatctcaggttcaagtgtcagatgccattttggacaactgcagctgttgccatgtatggtctggtttactatagttgccatgatttgaaaactttagaggttgccacctactaacactaagcagttgccatgcatggtctggtttactacagttgccatgatttgaaaaccttaggagttgccacctactaacactaggcagttaccgtgtagcgctacaaagagacatggcaaaacaacatgttcgggtaaaagagagagttgccatctgcttacaagcacactagaggcagttgccgtgtaccctgcaaaacatatggcaactgacatgttcgggtaaaaaaaagagagagttgccatctgcttacaagcacactagggcagttgccatgtacactgcaaaacgcatggcaactggcagcttgggtgtgggagaggagacgggcgtgtgggcgagatggcaaatgcccacacaccagcccttgtgcgtgagtgaaaactggtgtgtgggcgaactgctaaacgcccacacaccggcccctccgtgtggtgaaacggacgtgtgggcgaccgggtg

SEQ ID NO: 17547 - protein, 161 aa, Triticum aestivum
  peptide (1)..(161): Ceres Seq. ID no. 15174853
  misc_feature (1)..(146): NCBI GI NO: 37788310 NR Description: cyclophilin-like protein [Triticum aestivum]
  misc_feature (6)..(146): NCBI GI NO: 15229425 NR Description: cyclophylin -related protein
  misc_feature (6)..(146): NCBI GI NO: 30695789 NR Description: cyclophylin -related protein
  misc_feature (9)..(146): NCBI GI NO: 23394388 NR Description: peptidylprolyl isomerase [Phytophthora infestans]
  misc_feature (9)..(146): NCBI GI NO: 630464 NR Description: 20k cyclophilin - Toxoplasma gondii (fragment)
  misc_feature (2)..(146): NCBI GI NO: 4826932 NR Description: peptidylprolyl isomerase D (cyclophilin D); hCyP40
  misc_feature (2)..(146): NCBI GI NO: 13385854 NR Description: peptidylprolyl isomerase D (cyclophilin D)
  misc_feature (2)..(146): NCBI GI NO: 27806463 NR Description: peptidylprolyl isomerase D (cyclophilin D)
  misc_feature (9)..(146): NCBI GI NO: 34857103 NR Description: similar to peptidylprolyl isomerase D
  misc_feature (11)..(146): NCBI GI NO: 16330433 NR Description: peptidyl-prolyl cis-trans isomerase
MAKFKKNLNPQVFLEISIDGRPAKRITFELFADVVPKTAENFRALCTGEKGLGESTKKPLYFKGTHIHRIIPGFMAQAGDFSRGDGRGGESIYGGKFPDENFKLKHDQPGILSMANSGENTNGSQFFITFKAVPHLDGYYLFALVILLIFWDADNCHTCGR

SEQ ID NO: 17548 - protein, 87 aa, Triticum aestivum
  peptide (1)..(87): Ceres Seq. ID no. 15174854
  misc_feature (1)..(72): NCBI GI NO: 37788310 NR Description: cyclophilin-like protein [Triticum aestivum]
  misc_feature (1)..(72): NCBI GI NO: 15229425 NR Description: cyclophylin -related protein
  misc_feature (1)..(72): NCBI GI NO: 30695789 NR Description: cyclophylin -related protein
  misc_feature (1)..(72): NCBI GI NO: 23394388 NR Description: peptidylprolyl isomerase [Phytophthora infestans]
  misc_feature (1)..(72): NCBI GI NO: 630464 NR Description: 20k cyclophilin - Toxoplasma gondii (fragment)
  misc_feature (1)..(72): NCBI GI NO: 4826932 NR Description: peptidylprolyl isomerase D (cyclophilin D); hCyP40
  misc_feature (1)..(72): NCBI GI NO: 13385854 NR Description: peptidylprolyl isomerase D (cyclophilin D)
  misc_feature (1)..(72): NCBI GI NO: 27806463 NR Description: peptidylprolyl isomerase D (cyclophilin D)
  misc_feature (1)..(72): NCBI GI NO: 34857103 NR Description: similar to peptidylprolyl isomerase D
  misc_feature (1)..(72): NCBI GI NO: 16330433 NR Description: peptidyl-prolyl cis-trans isomerase
MAQAGDFSRGDGRGGESIYGGKFPDENFKLKHDQPGILSMANSGENTNGSQFFITFKAVPHLDGYYLFALVILLIFWDADNCHTCGR

SEQ ID NO: 17549 - DNA, 1108 bp, Triticum aestivum
  misc_feature (1)..(1108): Ceres Seq. ID no. 13659645
ctctctctccaatccgtctccctaactgcagatgatcgccggcaccccgttcccgtacctgagctgcttcgtggccaggttccggcacgacgagcgcaaggccatcgtcctgcgcgccgtcaagtgcatcttcgcctccatcaaagcgatgagctcggtggagtaccagccgtcgaccatggcgctggcgtccatcctggtcgcgcgcggcggcagggaggggacggggacggccccgaacctagaggaggagctcaaggcgatcctgggctcatcatggcagcaattacacaccgggcatgtgtattcctgctacagcgtgatgattcaggaggaggacaggtccacgcagtcgggcagggaggtggcttcctccggcgtctctgccgccgcccccgccgggagcccgggcacctccgtcgccatggccatggtccgtggaggggtggttgaacaggaccccgtggagagggctggttgaacagtagccggtggaggagcggtggaggctagatgaacatgagtccgtggatgagaagggtccattcgcctcagggccagtaggcagccagtaggaggagctgtgtgaatgttggctggagttcagctcgcactctagctgctgctaatttctgtcaccccccctagccttagcccttttttttttcattagcttgagcagtgattttggtggtggtggtggctaaatagggggcaggacttgattcttgtgattgtgcaattattgcagctgattggtaagttaggatcggaaagattttggttttcaggagatctttcccatccaggctttaaaaggctgtgtaaagaggagaggtagagagagaaagtcccagcaggagtactgcactactgctgcaaagagctctcagctcagctcaaagtgaggtgaaaagaaaagagagcacaacaaagcctaggcatgatatgagtggggagccatttttttctccttcctttgtgtacgtgtgtgtgtttggatagtgtgcgagctagctggacctctatcctctcgtcctcttctggtcactccatcagtgacaagtaatacagtacgtaatagttaagcagatattcattcattcat

SEQ ID NO: 17550 - protein, 150 aa, Triticum aestivum
  peptide (1)..(150): Ceres Seq. ID no. 13659646
LSLQSVSLTADDRRHPVPVPELLRGQVPARRAQGHRPARRQVHLRLHQSDELGGVPAVDHGAGVHPGRARRQGGDGDGPEPRGGAQGDPGLIMAAITHRACVFLLQRDDSGGGQVHAVGQGGGFLRRLCRRPRREPGHLRRHGHGPWRGG

SEQ ID NO: 17551 - protein, 149 aa, Triticum aestivum
  peptide (1)..(149): Ceres Seq. ID no. 13659647
  misc_feature (1)..(128): NCBI GI NO: 19070613 NR Description: D-type cyclin [Zea mays]
MIAGTPFPYLSCFVARFRHDERKAIVLRAVKCIFASIKAMSSVEYQPSTMALASILVARGGREGTGTAPNLEEELKAILGSSWQQLHTGHVYSCYSVMIQEEDRSTQSGREVASSGVSAAAPAGSPGTSVAMAMVRGGVVEQDPVERAG

SEQ ID NO: 17552 - protein, 110 aa, Triticum aestivum
  peptide (1)..(110): Ceres Seq. ID no. 13659648
  misc_feature (1)..(89): NCBI GI NO: 19070613 NR Description: D-type cyclin [Zea mays]
MSSVEYQPSTMALASILVARGGREGTGTAPNLEEELKAILGSSWQQLHTGHVYSCYSVMIQEEDRSTQSGREVASSGVSAAAPAGSPGTSVAMAMVRGGVVEQDPVERAG

SEQ ID NO: 17553 - DNA, 1849 bp, Triticum aestivum
  misc_feature (1)..(1849): Ceres Seq. ID no. 15169631
acttactactagtacatacagtacatataaacatatcacgtctctgcaagctgcaagccaacaagctgcctgccatggaggggtggttaagcttgtgtttcatagccggatccacgctactggcaatttggtttctcgagctctcccgtcgcaaccccaataagaagctgcctccagggccatggactctccccatcgtcggcagcctcctccacgtcgttggcgccttcccgcaccgcaccattgcagaactgtctcgccggcacgggccgctgatgcacctcaggctaggcgaagtcgccaccatggtggtctccagcgccgaggtggcggcgctggtcttgaagaccaacgaccttacgttcgcggaccggcctcgcactgtgacgcagaacatcttcggcagtggcggcaaggacatcgcctttgccccctacggcgccgcgtggcgccagatgcgcaaggtgtgcgtcatggagatcctcggctccaagcaggcgaggcgcacggagcgcatcaggactgaggaggtcggcagcctccttcgctccatcgtcagcgcctcggccgtcggcggcgccggcgctacggttaacgtcagcgagaaggtggcgatgcttagcaacgacgtcgtttcgcgggcggttttcggcgggaaggtcgcgcagcgggacgagtacatccgcgagttgggcgaggccatggagctcgtgaccggcttctgcctcgtcgacatcttcccctcgtcgcggctggtgcggtggcttagcagcgtcgagaggcgtatgaggaggagctacggccgtatgcagagcatcatcgctgacatcctcgacgagcgcaaggccgcacgagctgccggcgatggctcctgcagcaccgacgatgaggacctgctggaagtgctgctcaggctgcaggccgaggactcgttggaattccctctaaccacagagattataggcgccgtcatgtttgacatgtttgctggtggcacggataccaccgcaaccgttttggagtgggctatgtcggaactcgtgaacaatcccgaagccatgactaaagcacaactagaggtccgagaggtgcttggtgaagaccgagttatcattaccaactgtgacattgctaaactcccctacatgaggatggtcatcaaggaggttctgaggttgcatccacccattcctctagtccctcgcatggctagagatgattgcacaattatgggttatgacatgcttaaaggcaccaatgtattagttaatgtcttcgcaatttccagagattcaagatattgggaaaatcctgaagagtttaagcccaagagatttgagaacaacaatatggattacaatgtgacgtattttgaatttattccctttggggctgggcgacggcagtgccctgggatgttttttggcatgtcgacagtacacatcacattggcaaacatgttgtatcacttcaattggatgcttcctgaaggggcttgtctgacttcatttgacatgtctgagaaatttgggttgacaataagacgaagatatgacctgcagctcagagctattacacgggtgggcgtcaaagatatactgtcgaagtgatgcaaacaacatggtatctatcttgtgatgtatgttcagatatattcctcttagcgtatgaatttattacattgcatatttgcacactagaataagaaaagctcgttgggactgtactacttttcacaaattacattactttgtactacaaggcatagatatcttaattgtattagttttgtgtttgtgaacatatgaatgatgcaatatgcataaggaagtaacatggtcttttatct

SEQ ID NO: 17554 - protein, 535 aa, Triticum aestivum
  peptide (1)..(535): Ceres Seq. ID no. 15169632
  misc_feature (57)..(521): Pfam Name: Pfam Description:  Cytochrome P450
  misc_feature (25)..(527): NCBI GI NO: 13516744 NR Description: cytochrome P450 [Triticum aestivum]
  misc_feature (31)..(531): NCBI GI NO: 38174817 NR Description: putative cytochrome P450
  misc_feature (55)..(527): NCBI GI NO: 34897000 NR Description: putative cytochrome P450
  misc_feature (29)..(532): NCBI GI NO: 37534742 NR Description: putative cytochrome P450
  misc_feature (43)..(527): NCBI GI NO: 34896754 NR Description: putative cytochrome P450
  misc_feature (29)..(531): NCBI GI NO: 34914838 NR Description: putative cytochrome P450
  misc_feature (23)..(519): NCBI GI NO: 7430637 NR Description: cytochrome P450 - common tobacco
  misc_feature (15)..(533): NCBI GI NO: 37531420 NR Description: putative cytochrome P450
  misc_feature (28)..(515): NCBI GI NO: 37531412 NR Description: putative cytochrome P450
  misc_feature (28)..(521): NCBI GI NO: 30696845 NR Description: cytochrome P450 71B10 [Arabidopsis thaliana]
LLLVHTVHINISRLCKLQANKLPAMEGWLSLCFIAGSTLLAIWFLELSRRNPNKKLPPGPWTLPIVGSLLHVVGAFPHRTIAELSRRHGPLMHLRLGEVATMVVSSAEVAALVLKTNDLTFADRPRTVTQNIFGSGGKDIAFAPYGAAWRQMRKVCVMEILGSKQARRTERIRTEEVGSLLRSIVSASAVGGAGATVNVSEKVAMLSNDVVSRAVFGGKVAQRDEYIRELGEAMELVTGFCLVDIFPSSRLVRWLSSVERRMRRSYGRMQSIIADILDERKAARAAGDGSCSTDDEDLLEVLLRLQAEDSLEFPLTTEIIGAVMFDMFAGGTDTTATVLEWAMSELVNNPEAMTKAQLEVREVLGEDRVIITNCDIAKLPYMRMVIKEVLRLHPPIPLVPRMARDDCTIMGYDMLKGTNVLVNVFAISRDSRYWENPEEFKPKRFENNNMDYNVTYFEFIPFGAGRRQCPGMFFGMSTVHITLANMLYHFNWMLPEGACLTSFDMSEKFGLTIRRRYDLQLRAITRVGVKDILSK

SEQ ID NO: 17555 - protein, 511 aa, Triticum aestivum
  peptide (1)..(511): Ceres Seq. ID no. 15169633
  misc_feature (33)..(497): Pfam Name: Pfam Description:  Cytochrome P450
  misc_feature (1)..(503): NCBI GI NO: 13516744 NR Description: cytochrome P450 [Triticum aestivum]
  misc_feature (7)..(507): NCBI GI NO: 38174817 NR Description: putative cytochrome P450
  misc_feature (31)..(503): NCBI GI NO: 34897000 NR Description: putative cytochrome P450
  misc_feature (5)..(508): NCBI GI NO: 37534742 NR Description: putative cytochrome P450
  misc_feature (19)..(503): NCBI GI NO: 34896754 NR Description: putative cytochrome P450
  misc_feature (5)..(507): NCBI GI NO: 34914838 NR Description: putative cytochrome P450
  misc_feature (1)..(495): NCBI GI NO: 7430637 NR Description: cytochrome P450 - common tobacco
  misc_feature (1)..(509): NCBI GI NO: 37531420 NR Description: putative cytochrome P450
  misc_feature (4)..(491): NCBI GI NO: 37531412 NR Description: putative cytochrome P450
  misc_feature (4)..(497): NCBI GI NO: 30696845 NR Description: cytochrome P450 71B10 [Arabidopsis thaliana]
MEGWLSLCFIAGSTLLAIWFLELSRRNPNKKLPPGPWTLPIVGSLLHVVGAFPHRTIAELSRRHGPLMHLRLGEVATMVVSSAEVAALVLKTNDLTFADRPRTVTQNIFGSGGKDIAFAPYGAAWRQMRKVCVMEILGSKQARRTERIRTEEVGSLLRSIVSASAVGGAGATVNVSEKVAMLSNDVVSRAVFGGKVAQRDEYIRELGEAMELVTGFCLVDIFPSSRLVRWLSSVERRMRRSYGRMQSIIADILDERKAARAAGDGSCSTDDEDLLEVLLRLQAEDSLEFPLTTEIIGAVMFDMFAGGTDTTATVLEWAMSELVNNPEAMTKAQLEVREVLGEDRVIITNCDIAKLPYMRMVIKEVLRLHPPIPLVPRMARDDCTIMGYDMLKGTNVLVNVFAISRDSRYWENPEEFKPKRFENNNMDYNVTYFEFIPFGAGRRQCPGMFFGMSTVHITLANMLYHFNWMLPEGACLTSFDMSEKFGLTIRRRYDLQLRAITRVGVKDILSK

SEQ ID NO: 17556 - protein, 444 aa, Triticum aestivum
  peptide (1)..(444): Ceres Seq. ID no. 15169634
  misc_feature (1)..(430): Pfam Name: Pfam Description:  Cytochrome P450
  misc_feature (1)..(436): NCBI GI NO: 13516744 NR Description: cytochrome P450 [Triticum aestivum]
  misc_feature (1)..(440): NCBI GI NO: 38174817 NR Description: putative cytochrome P450
  misc_feature (1)..(436): NCBI GI NO: 34897000 NR Description: putative cytochrome P450
  misc_feature (1)..(441): NCBI GI NO: 37534742 NR Description: putative cytochrome P450
  misc_feature (1)..(436): NCBI GI NO: 34896754 NR Description: putative cytochrome P450
  misc_feature (1)..(440): NCBI GI NO: 34914838 NR Description: putative cytochrome P450
  misc_feature (1)..(428): NCBI GI NO: 7430637 NR Description: cytochrome P450 - common tobacco
  misc_feature (1)..(442): NCBI GI NO: 37531420 NR Description: putative cytochrome P450
  misc_feature (1)..(424): NCBI GI NO: 37531412 NR Description: putative cytochrome P450
  misc_feature (1)..(430): NCBI GI NO: 30696845 NR Description: cytochrome P450 71B10 [Arabidopsis thaliana]
MHLRLGEVATMVVSSAEVAALVLKTNDLTFADRPRTVTQNIFGSGGKDIAFAPYGAAWRQMRKVCVMEILGSKQARRTERIRTEEVGSLLRSIVSASAVGGAGATVNVSEKVAMLSNDVVSRAVFGGKVAQRDEYIRELGEAMELVTGFCLVDIFPSSRLVRWLSSVERRMRRSYGRMQSIIADILDERKAARAAGDGSCSTDDEDLLEVLLRLQAEDSLEFPLTTEIIGAVMFDMFAGGTDTTATVLEWAMSELVNNPEAMTKAQLEVREVLGEDRVIITNCDIAKLPYMRMVIKEVLRLHPPIPLVPRMARDDCTIMGYDMLKGTNVLVNVFAISRDSRYWENPEEFKPKRFENNNMDYNVTYFEFIPFGAGRRQCPGMFFGMSTVHITLANMLYHFNWMLPEGACLTSFDMSEKFGLTIRRRYDLQLRAITRVGVKDILSK

SEQ ID NO: 17557 - DNA, 1616 bp, Triticum aestivum
  misc_feature (1)..(1616): Ceres Seq. ID no. 14302384
ctttttcgtagcagcacctgttttatccaccacgacctcttctcctccgatcccacaagagagccgagcgaggactcgctcgaccccagccgccattgatggctcgtgccacctccgcagcgctcgcgctgctcatcttcctcctctgccggcacgcccacgccgacgcgggcacgacgctgtcgcaagggcagtcgctggcgggcaacgagaagctcctgtcagccaacggcgccttctcgctctccttcttctccccgcgcggcggcgacggctcgcgggtgtacctgggcgtcatgttcgccagggccgcggagccgaccgtgccgtgggtggccaaccgcgacgcgccggtgcgcgccacggccccgtcctactccgccaccgtcacggactccggggacctccgggtgctggagggggagcgcgtcgtgtggcggaccaacacgacctcgtcggcggggaacttcacgctgacgatccaggacacggggaacctcgtgctcgccggcggcagcggcgcgcaggcggtgcagctgtggcagagcttcgaccaccccgcggacaccttcctccccgggatgaacatcacgctggcccggcgcggcggcgccgtcgtcaggcagacgctgttccggtcgtggaggagccccgacgacccggcccccgggaacttcacgctggggcaggacccgctgggctcggcgcagctcttcatatggcgccgcggccaggacggcaaggacgtgacgcactggaggtccgggcagtgggccaagggcagcttcgtgggcatcccgtatcggccgctcaacctctacggcttccagctctccggcgacccgtcccagagcaacggcctgttctacaccttccagcgcttcaactcctcgcagtacaggttcgtgctccagcccaacggcacggagacgtgctaccagcttgtggacgccaccggcgcctgggaggtcgtctggtcgcagccgacgatgccgtgccaggcctacaacacgtgcggcccgaacgccgagtgctccgctgccgaccactgcacctgcctcagaggttttgagccgaaatccgaagaggagtacagcaacggggtgtggacgcaggggtgcgtgaggagcagccagctgacctgcagcgagaggaacgtgagcatgagcggcagcgacgcgttcgccgtcctctccggcgtgaagctgccggacctggcggcgtgggagtcggcggtcatcagcgcggacgcgtgcaggcagtggtgcctggccaactgcacgtgcaacgcgtacagctatagcggcggcaccgggtgcctgacctgggcccacgagttggtggacgtctaccagttccccagcggacagttccccaacggacaagggtttgacctgcacatcaaggtcccggcttctctattaggtaagctcatcaacgttgatgatttgttaacctttgaagttctaaattgggtttagaaaactgcagctaggaaacttctcggttgttgaggaaatgtcgataaacgcttagactgtagaaattgttgtttttgttgtgtgcttgtggcaagacttgcacgactgatttgggttgttacaacccgaaaatcc

SEQ ID NO: 17558 - protein, 460 aa, Triticum aestivum
  peptide (1)..(460): Ceres Seq. ID no. 14302385
  misc_feature (75)..(189): Pfam Name: Pfam Description:  D-mannose binding lectin
  misc_feature (1)..(444): NCBI GI NO: 34898618 NR Description: putative S-receptor kinase
  misc_feature (1)..(442): NCBI GI NO: 34898624 NR Description: putative S-receptor kinase
  misc_feature (16)..(442): NCBI GI NO: 7428022 NR Description: S-receptor kinase (EC 2
  misc_feature (3)..(444): NCBI GI NO: 4455151 NR Description: putative serine/threonine kinase (fragment)
  misc_feature (3)..(444): NCBI GI NO: 15234429 NR Description: serine/threonine kinase - like protein
  misc_feature (3)..(444): NCBI GI NO: 7434416 NR Description: serine/threonine kinase (EC 2
  misc_feature (3)..(443): NCBI GI NO: 15220540 NR Description: S-locus protein kinase, putative
  misc_feature (9)..(460): NCBI GI NO: 15220348 NR Description: receptor-related protein kinase
  misc_feature (9)..(460): NCBI GI NO: 25287698 NR Description: hypothetical protein
  misc_feature (9)..(425): NCBI GI NO: 18407151 NR Description: S-locus protein kinase, putative
MARATSAALALLIFLLCRHAHADAGTTLSQGQSLAGNEKLLSANGAFSLSFFSPRGGDGSRVYLGVMFARAAEPTVPWVANRDAPVRATAPSYSATVTDSGDLRVLEGERVVWRTNTTSSAGNFTLTIQDTGNLVLAGGSGAQAVQLWQSFDHPADTFLPGMNITLARRGGAVVRQTLFRSWRSPDDPAPGNFTLGQDPLGSAQLFIWRRGQDGKDVTHWRSGQWAKGSFVGIPYRPLNLYGFQLSGDPSQSNGLFYTFQRFNSSQYRFVLQPNGTETCYQLVDATGAWEVVWSQPTMPCQAYNTCGPNAECSAADHCTCLRGFEPKSEEEYSNGVWTQGCVRSSQLTCSERNVSMSGSDAFAVLSGVKLPDLAAWESAVISADACRQWCLANCTCNAYSYSGGTGCLTWAHELVDVYQFPSGQFPNGQGFDLHIKVPASLLGKLINVDDLLTFEVLNWV

SEQ ID NO: 17559 - protein, 394 aa, Triticum aestivum
  peptide (1)..(394): Ceres Seq. ID no. 14302386
  misc_feature (9)..(123): Pfam Name: Pfam Description:  D-mannose binding lectin
  misc_feature (1)..(378): NCBI GI NO: 34898618 NR Description: putative S-receptor kinase
  misc_feature (1)..(376): NCBI GI NO: 34898624 NR Description: putative S-receptor kinase
  misc_feature (1)..(376): NCBI GI NO: 7428022 NR Description: S-receptor kinase (EC 2
  misc_feature (1)..(378): NCBI GI NO: 4455151 NR Description: putative serine/threonine kinase (fragment)
  misc_feature (1)..(378): NCBI GI NO: 15234429 NR Description: serine/threonine kinase - like protein
  misc_feature (1)..(378): NCBI GI NO: 7434416 NR Description: serine/threonine kinase (EC 2
  misc_feature (1)..(377): NCBI GI NO: 15220540 NR Description: S-locus protein kinase, putative
  misc_feature (1)..(394): NCBI GI NO: 15220348 NR Description: receptor-related protein kinase
  misc_feature (1)..(394): NCBI GI NO: 25287698 NR Description: hypothetical protein
  misc_feature (1)..(359): NCBI GI NO: 18407151 NR Description: S-locus protein kinase, putative
MFARAAEPTVPWVANRDAPVRATAPSYSATVTDSGDLRVLEGERVVWRTNTTSSAGNFTLTIQDTGNLVLAGGSGAQAVQLWQSFDHPADTFLPGMNITLARRGGAVVRQTLFRSWRSPDDPAPGNFTLGQDPLGSAQLFIWRRGQDGKDVTHWRSGQWAKGSFVGIPYRPLNLYGFQLSGDPSQSNGLFYTFQRFNSSQYRFVLQPNGTETCYQLVDATGAWEVVWSQPTMPCQAYNTCGPNAECSAADHCTCLRGFEPKSEEEYSNGVWTQGCVRSSQLTCSERNVSMSGSDAFAVLSGVKLPDLAAWESAVISADACRQWCLANCTCNAYSYSGGTGCLTWAHELVDVYQFPSGQFPNGQGFDLHIKVPASLLGKLINVDDLLTFEVLNWV

SEQ ID NO: 17560 - protein, 356 aa, Triticum aestivum
  peptide (1)..(356): Ceres Seq. ID no. 14302387
FFVAAPVLSTTTSSPPIPQESRARTRSTPAAIDGSCHLRSARAAHLPPLPARPRRRGHDAVARAVAGGQREAPVSQRRLLALLLLPARRRRLAGVPGRHVRQGRGADRAVGGQPRRAGARHGPVLLRHRHGLRGPPGAGGGARRVADQHDLVGGELHADDPGHGEPRARRRQRRAGGAAVAELRPPRGHLPPRDEHHAGPARRRRRQADAVPVVEEPRRPGPRELHAGAGPAGLGAALHMAPRPGRQGRDALEVRAVGQGQLRGHPVSAAQPLRLPALRRPVPEQRPVLHLPALQLLAVQVRAPAQRHGDVLPACGRHRRLGGRLVAADDAVPGLQHVRPERRVLRCRPLHLPQRF

SEQ ID NO: 17561 - DNA, 1632 bp, Triticum aestivum
  misc_feature (1)..(1632): Ceres Seq. ID no. 14316013
aaaaaagaagcaaagctttcctcctccacacaacgcactcacaggctcacagcccaacacaatcaccatggccccaaccagcagcaccaaccgcggccgccgccgcgtggtcctcttaccgctgccataccaaggccacatcaaccccatgctgcgcctcgccgccgcgctgcactcccgcggcctcgcggtcactatcctccacccggagacccgcgcgccggaccgcgggaagctccctgcggactaccgcctggtcaccatcccggacagcataccgccggagctcgccgcgtccgaggacatcgcgtcgttcgtcttcgcgctgaacaagaactgtgcggcgccgttccgggactacctggccggcgcccttagagaggaggaggacggccacgtcgccttcgtggtcgccgacgtcgactggttcgcgccgctctccgtggccagggagctgggcgtggccgctctggccctcatgaccagcagcgccgccaggttcctggtgtacttggcgtacccaagcctgtgccacaagggctatttgcccgtccaagagtcgaatttcaacactacagttgaggagcttccccccttccttgtacgagacttggatcgcgtgatggacatggctcgacacctcgcgtacgccgatctcctcgctcacatcgtcgccggcgtgaggcaatcatccggcctaataatcaacacatccgaagacatggagggcatggagatcgagaggatccgcagcgagatcgcccgcccggtgttcgccgtcggccctctgcacatgatgacgccgtctctatccgtccatagcagcctactgacagaagatcgcagctgtttggactggttggacacacaacggccaaactctgtgctctacgtgagctttgggagcctggtgggcatcgacacagacgagttcttggagatggcctggggcctggccgacagccagcgcccgttcgtgtgggtggtccggccggggctggtgcacggctgtgagctcagcgcgctccctgaagagctgcaagagaagataggtagcataggtagagtagtcagttgggctccgcagcaggaggtgctgaagcatccgtctgtggtcgcttttctcacgcactgcggctggaactcggcgacggagagcatatccgaaggcgtgccgatgatatgcagaccgttgtccagcgatcagatgggcactagcaggtatgtgtgtgatgtgtggaaggtgggggttagggtggaggtggagaaccagctgaagagagggggcgtccaggcggccatcacaagactgatggaaggaaaggaaggtgaagaggtcagggaaagaatgaaagatctgaggcatgcgatgagcaagtgtactgatgaaggtgggacatctgatgttgctttgcaacgtttagtggatttcagtgtttaagctagcacttaactatttagactatggctagaaaacatgtccgtgaattgcaacagaagaaatgtctctagctcatggaccagtgcaatgcaacgggacgggagtcaagtgatgcttttttctttttgcggggacggtaaacatgctcagtgcggctcttcctcaatcatcaatgcaagatttctataaag

SEQ ID NO: 17562 - protein, 479 aa, Triticum aestivum
  peptide (1)..(479): Ceres Seq. ID no. 14316014
  misc_feature (35)..(469): Pfam Name: Pfam Description:  UDP-glucoronosyl and UDP-glucosyl transferase
  misc_feature (35)..(476): NCBI GI NO: 18033228 NR Description: UDP-glucosyltransferase BX8 [Zea mays]
  misc_feature (35)..(459): NCBI GI NO: 18033230 NR Description: UDP-glucosyltransferase BX9 [Zea mays]
  misc_feature (7)..(475): NCBI GI NO: 34897378 NR Description: putative UDP-glucosyltransferase
  misc_feature (33)..(479): NCBI GI NO: 33146633 NR Description: putative UDP-glucosyltransferase
  misc_feature (33)..(471): NCBI GI NO: 34900678 NR Description: glucuronosyl transferase-like protein
  misc_feature (23)..(476): NCBI GI NO: 34395172 NR Description: putative UDP-glucosyltransferase
  misc_feature (24)..(476): NCBI GI NO: 34900662 NR Description: glucuronosyl transferase-like protein
  misc_feature (33)..(476): NCBI GI NO: 34900682 NR Description: glucuronosyl transferase-like protein
  misc_feature (25)..(477): NCBI GI NO: 33146634 NR Description: putative UDP-glucosyltransferase
  misc_feature (36)..(477): NCBI GI NO: 15229731 NR Description: glycosyltransferase family [Arabidopsis thaliana]
KKKQSFPPPHNALTGSQPNTITMAPTSSTNRGRRRVVLLPLPYQGHINPMLRLAAALHSRGLAVTILHPETRAPDRGKLPADYRLVTIPDSIPPELAASEDIASFVFALNKNCAAPFRDYLAGALREEEDGHVAFVVADVDWFAPLSVARELGVAALALMTSSAARFLVYLAYPSLCHKGYLPVQESNFNTTVEELPPFLVRDLDRVMDMARHLAYADLLAHIVAGVRQSSGLIINTSEDMEGMEIERIRSEIARPVFAVGPLHMMTPSLSVHSSLLTEDRSCLDWLDTQRPNSVLYVSFGSLVGIDTDEFLEMAWGLADSQRPFVWVVRPGLVHGCELSALPEELQEKIGSIGRVVSWAPQQEVLKHPSVVAFLTHCGWNSATESISEGVPMICRPLSSDQMGTSRYVCDVWKVGVRVEVENQLKRGGVQAAITRLMEGKEGEEVRERMKDLRHAMSKCTDEGGTSDVALQRLVDFSV

SEQ ID NO: 17563 - protein, 457 aa, Triticum aestivum
  peptide (1)..(457): Ceres Seq. ID no. 14316015
  misc_feature (13)..(447): Pfam Name: Pfam Description:  UDP-glucoronosyl and UDP-glucosyl transferase
  misc_feature (13)..(454): NCBI GI NO: 18033228 NR Description: UDP-glucosyltransferase BX8 [Zea mays]
  misc_feature (13)..(437): NCBI GI NO: 18033230 NR Description: UDP-glucosyltransferase BX9 [Zea mays]
  misc_feature (1)..(453): NCBI GI NO: 34897378 NR Description: putative UDP-glucosyltransferase
  misc_feature (11)..(457): NCBI GI NO: 33146633 NR Description: putative UDP-glucosyltransferase
  misc_feature (11)..(449): NCBI GI NO: 34900678 NR Description: glucuronosyl transferase-like protein
  misc_feature (1)..(454): NCBI GI NO: 34395172 NR Description: putative UDP-glucosyltransferase
  misc_feature (2)..(454): NCBI GI NO: 34900662 NR Description: glucuronosyl transferase-like protein
  misc_feature (11)..(454): NCBI GI NO: 34900682 NR Description: glucuronosyl transferase-like protein
  misc_feature (3)..(455): NCBI GI NO: 33146634 NR Description: putative UDP-glucosyltransferase
  misc_feature (14)..(455): NCBI GI NO: 15229731 NR Description: glycosyltransferase family [Arabidopsis thaliana]
MAPTSSTNRGRRRVVLLPLPYQGHINPMLRLAAALHSRGLAVTILHPETRAPDRGKLPADYRLVTIPDSIPPELAASEDIASFVFALNKNCAAPFRDYLAGALREEEDGHVAFVVADVDWFAPLSVARELGVAALALMTSSAARFLVYLAYPSLCHKGYLPVQESNFNTTVEELPPFLVRDLDRVMDMARHLAYADLLAHIVAGVRQSSGLIINTSEDMEGMEIERIRSEIARPVFAVGPLHMMTPSLSVHSSLLTEDRSCLDWLDTQRPNSVLYVSFGSLVGIDTDEFLEMAWGLADSQRPFVWVVRPGLVHGCELSALPEELQEKIGSIGRVVSWAPQQEVLKHPSVVAFLTHCGWNSATESISEGVPMICRPLSSDQMGTSRYVCDVWKVGVRVEVENQLKRGGVQAAITRLMEGKEGEEVRERMKDLRHAMSKCTDEGGTSDVALQRLVDFSV

SEQ ID NO: 17564 - protein, 430 aa, Triticum aestivum
  peptide (1)..(430): Ceres Seq. ID no. 14316016
  misc_feature (1)..(420): Pfam Name: Pfam Description:  UDP-glucoronosyl and UDP-glucosyl transferase
  misc_feature (1)..(427): NCBI GI NO: 18033228 NR Description: UDP-glucosyltransferase BX8 [Zea mays]
  misc_feature (1)..(410): NCBI GI NO: 18033230 NR Description: UDP-glucosyltransferase BX9 [Zea mays]
  misc_feature (1)..(426): NCBI GI NO: 34897378 NR Description: putative UDP-glucosyltransferase
  misc_feature (1)..(430): NCBI GI NO: 33146633 NR Description: putative UDP-glucosyltransferase
  misc_feature (1)..(422): NCBI GI NO: 34900678 NR Description: glucuronosyl transferase-like protein
  misc_feature (1)..(427): NCBI GI NO: 34395172 NR Description: putative UDP-glucosyltransferase
  misc_feature (1)..(427): NCBI GI NO: 34900662 NR Description: glucuronosyl transferase-like protein
  misc_feature (1)..(427): NCBI GI NO: 34900682 NR Description: glucuronosyl transferase-like protein
  misc_feature (1)..(428): NCBI GI NO: 33146634 NR Description: putative UDP-glucosyltransferase
  misc_feature (1)..(428): NCBI GI NO: 15229731 NR Description: glycosyltransferase family [Arabidopsis thaliana]
MLRLAAALHSRGLAVTILHPETRAPDRGKLPADYRLVTIPDSIPPELAASEDIASFVFALNKNCAAPFRDYLAGALREEEDGHVAFVVADVDWFAPLSVARELGVAALALMTSSAARFLVYLAYPSLCHKGYLPVQESNFNTTVEELPPFLVRDLDRVMDMARHLAYADLLAHIVAGVRQSSGLIINTSEDMEGMEIERIRSEIARPVFAVGPLHMMTPSLSVHSSLLTEDRSCLDWLDTQRPNSVLYVSFGSLVGIDTDEFLEMAWGLADSQRPFVWVVRPGLVHGCELSALPEELQEKIGSIGRVVSWAPQQEVLKHPSVVAFLTHCGWNSATESISEGVPMICRPLSSDQMGTSRYVCDVWKVGVRVEVENQLKRGGVQAAITRLMEGKEGEEVRERMKDLRHAMSKCTDEGGTSDVALQRLVDFSV

SEQ ID NO: 17565 - DNA, 1611 bp, Triticum aestivum
  misc_feature (1)..(1611): Ceres Seq. ID no. 13598067
agaacatcctaatcgaaaactcctccatttcgtttgtatctcatctgctctgctctgctgccgctctggtctgtagatctgggaggatcagagtcagacattggggttttgtgattagactagaagaggcgcgttaatgtcgcaagaactggtgcgtacggcaatggcggccgcgcccggtgatgttccgccgcctttggccactcctgctcttcttccgcaggccaaaagggttaaggaagacccaagttttccccaagcctcgccggtggttccggccatgacggcggaagactggtccaaatggtccacacttccgcccgacctcgtccgctgcatcggcgactccctcctgtccaccaacgacctcgactgctacattcacttccgcgccgtttgccccggctggcgcgccgccgccgacgaccccatgagcgacacctccgacccccgcttccacccgcgccggtggatcgtcctcaacgaggacttccagagcgaagggaagctgctcctgctgaacactgacaacggccgcttcgtccatagaaagctcccgctgctcagcgaccactacgtcgtagccacaactcgcaatggctacttggtcctggcggacaaaagccctcctcactctgcaagcgtcctcaaccctctgaccggcgtcgtcatccgtttcatggcgcctgtgccccctgaggtgggacacgctgctgtctcccttgccagctctgccctcgggctcaccttgtttggcgactcatctcacaagatttactcggcctatcccgacaacaagagttccgtcgtccacgaggctcagcaagcagcttatgttttcttccgtaatgcggtcgtgggcggtgtctactcagacactatagggcatgccgtgattgtccgtttatgcagatcgctgatgcctccagatgcaaaccacctttgttttccagtggctttgggtagagaaatgctgcttgtcgggactgcagagagatcgttctttatttttaaaacagacatcgagttaagtaagctggaggatgtggacaccatcaacaactatgccattttcattggtcatcagaggtgcctggctgtctatgctgataagttcataggcattgaggcaaactgcatctactacactgaaaatctgggttcgtccgctcgtatatgcaagtgcggcatcaaggacagaaaagtagagaagatctctgaaactgccgatttcatcaagaaggacaagaagtttgtcctcgttgctgaccgtccttcgacgatcatcgaccttctcgccagctacaccatcaacatcccggactctcggctggccttgcaacagattccataaggcgccggcagatcttcgttcaactctggggatctcgatgaccaactgacaaggctatgctttcgctaagtaattgctcctaattactgtctagtcccctgctttgttattttggatatgccttgccttgtagtaacatgtaagaagcaggttgatcctaggttagatcacctttagtggaactaccgtttttttgtcttaaaaaaaaaaaaaaaaaagcttatcgataccgtcgacctcgagggggggcmcggtrc

SEQ ID NO: 17566 - protein, 405 aa, Triticum aestivum
  peptide (1)..(405): Ceres Seq. ID no. 15222249
  misc_feature (301)..(404): NCBI GI NO: 34897118 NR Description: hypothetical protein [Oryza sativa]
  misc_feature (84)..(165): NCBI GI NO: 34897118 NR Description: hypothetical protein [Oryza sativa]
  misc_feature (56)..(201): NCBI GI NO: 38346058 NR Description: OJ000223_09.12
  misc_feature (57)..(201): NCBI GI NO: 34393457 NR Description: hypothetical protein
  misc_feature (55)..(193): NCBI GI NO: 33146649 NR Description: F-box domain containing protein-like
  misc_feature (68)..(175): NCBI GI NO: 34393515 NR Description: F-box domain containing protein-like
  misc_feature (41)..(183): NCBI GI NO: 38175725 NR Description: hypothetical protein
  misc_feature (53)..(187): NCBI GI NO: 19225009 NR Description: putative F-box domain containing protein
  misc_feature (53)..(187): NCBI GI NO: 37536982 NR Description: hypothetical protein
MSQELVRTAMAAAPGDVPPPLATPALLPQAKRVKEDPSFPQASPVVPAMTAEDWSKWSTLPPDLVRCIGDSLLSTNDLDCYIHFRAVCPGWRAAADDPMSDTSDPRFHPRRWIVLNEDFQSEGKLLLLNTDNGRFVHRKLPLLSDHYVVATTRNGYLVLADKSPPHSASVLNPLTGVVIRFMAPVPPEVGHAAVSLASSALGLTLFGDSSHKIYSAYPDNKSSVVHEAQQAAYVFFRNAVVGGVYSDTIGHAVIVRLCRSLMPPDANHLCFPVALGREMLLVGTAERSFFIFKTDIELSKLEDVDTINNYAIFIGHQRCLAVYADKFIGIEANCIYYTENLGSSARICKCGIKDRKVEKISETADFIKKDKKFVLVADRPSTIIDLLASYTINIPDSRLALQQIP

SEQ ID NO: 17567 - protein, 396 aa, Triticum aestivum
  peptide (1)..(396): Ceres Seq. ID no. 15222250
  misc_feature (292)..(395): NCBI GI NO: 34897118 NR Description: hypothetical protein [Oryza sativa]
  misc_feature (75)..(156): NCBI GI NO: 34897118 NR Description: hypothetical protein [Oryza sativa]
  misc_feature (47)..(192): NCBI GI NO: 38346058 NR Description: OJ000223_09.12
  misc_feature (48)..(192): NCBI GI NO: 34393457 NR Description: hypothetical protein
  misc_feature (46)..(184): NCBI GI NO: 33146649 NR Description: F-box domain containing protein-like
  misc_feature (59)..(166): NCBI GI NO: 34393515 NR Description: F-box domain containing protein-like
  misc_feature (32)..(174): NCBI GI NO: 38175725 NR Description: hypothetical protein
  misc_feature (44)..(178): NCBI GI NO: 19225009 NR Description: putative F-box domain containing protein
  misc_feature (44)..(178): NCBI GI NO: 37536982 NR Description: hypothetical protein
MAAAPGDVPPPLATPALLPQAKRVKEDPSFPQASPVVPAMTAEDWSKWSTLPPDLVRCIGDSLLSTNDLDCYIHFRAVCPGWRAAADDPMSDTSDPRFHPRRWIVLNEDFQSEGKLLLLNTDNGRFVHRKLPLLSDHYVVATTRNGYLVLADKSPPHSASVLNPLTGVVIRFMAPVPPEVGHAAVSLASSALGLTLFGDSSHKIYSAYPDNKSSVVHEAQQAAYVFFRNAVVGGVYSDTIGHAVIVRLCRSLMPPDANHLCFPVALGREMLLVGTAERSFFIFKTDIELSKLEDVDTINNYAIFIGHQRCLAVYADKFIGIEANCIYYTENLGSSARICKCGIKDRKVEKISETADFIKKDKKFVLVADRPSTIIDLLASYTINIPDSRLALQQIP

SEQ ID NO: 17568 - protein, 357 aa, Triticum aestivum
  peptide (1)..(357): Ceres Seq. ID no. 15222251
  misc_feature (253)..(356): NCBI GI NO: 34897118 NR Description: hypothetical protein [Oryza sativa]
  misc_feature (36)..(117): NCBI GI NO: 34897118 NR Description: hypothetical protein [Oryza sativa]
  misc_feature (8)..(153): NCBI GI NO: 38346058 NR Description: OJ000223_09.12
  misc_feature (9)..(153): NCBI GI NO: 34393457 NR Description: hypothetical protein
  misc_feature (7)..(145): NCBI GI NO: 33146649 NR Description: F-box domain containing protein-like
  misc_feature (20)..(127): NCBI GI NO: 34393515 NR Description: F-box domain containing protein-like
  misc_feature (1)..(135): NCBI GI NO: 38175725 NR Description: hypothetical protein
  misc_feature (5)..(139): NCBI GI NO: 19225009 NR Description: putative F-box domain containing protein
  misc_feature (5)..(139): NCBI GI NO: 37536982 NR Description: hypothetical protein
MTAEDWSKWSTLPPDLVRCIGDSLLSTNDLDCYIHFRAVCPGWRAAADDPMSDTSDPRFHPRRWIVLNEDFQSEGKLLLLNTDNGRFVHRKLPLLSDHYVVATTRNGYLVLADKSPPHSASVLNPLTGVVIRFMAPVPPEVGHAAVSLASSALGLTLFGDSSHKIYSAYPDNKSSVVHEAQQAAYVFFRNAVVGGVYSDTIGHAVIVRLCRSLMPPDANHLCFPVALGREMLLVGTAERSFFIFKTDIELSKLEDVDTINNYAIFIGHQRCLAVYADKFIGIEANCIYYTENLGSSARICKCGIKDRKVEKISETADFIKKDKKFVLVADRPSTIIDLLASYTINIPDSRLALQQIP

SEQ ID NO: 17569 - DNA, 1981 bp, Triticum aestivum
  misc_feature (1)..(1981): Ceres Seq. ID no. 14307908
gtagtcgcgtgcctccacctccactacaccgcaccgcgccatcagaaggccggccgggtcggtcggtgcaaggatattgcacacacacgctcgcagacacggtgtgacagcaattgcctccggcgatgtccgtttcttggccggcgccgtcgacgtgcgcggccgccggggccctcctggccgccgcgtggctgctgtgcttcaggctgttcccggccgtggcgaggccgagaaggcgggcgatgaagacgggggcgcagctccctcccggcatcttcgggtggccggtcgtcggcgagacgctggacttcgtctcctgcgcctactccccacgccccgaggcgttcgttgacaagcgccgcctccggtacggcagcgcggtgttccggtcgcacctgttcgggtcggcgacggtagtgacggcggacgcggaggtgaaccggttcgtgctgcagagcgacgcgcggtcgttcgtaccgtggtacccgcggtcgctgacggagctcatgggcaagtcctccatcctcgtcatcaacggcagcctgcagcgccgcgtccacggcctcgtcggcgccttcttcaagtcgccgcagctcaaggcgcaggtcaccgccgacatgcagcgccgcctcgccccggcgctcgccgcctggcgcgagcagggccccggcgcgcgcctccgcatccaggaccacgccaagacgattgtgttccagatcctggtgcgggctctgatcgggctggaggcaggcccagagatgcagcagctcaagcagcaattccaggaatttattgtcggactcatgtcccttcccattaagctgccagggactaggctctacagatccctccaggccaagaagaggatggcgagggtcgtacagaggatcatacaggagaagaggaggaggagggccctggacggcggcggcgcgccgagagacgccatcgacgtgctcatgggcgacggcagtgaggagctcaccgacgagctcatatccgacaacatgatcgacttcatgatccccgccgaggactccgtgccggtgctcatcacgctcgccgtcaagttcctcagcgagtgccccctcgccttgcaacagcttgaggaggagaacatgcagctcaagatgagaaaaaccgacctgggtgaaaccttgcaatggactgactacatgtccttgtcattcacgcagcatgtgataacggagacgctgcggattgggaatatcatcagtgggatcatgcgcaaggcggtccgcgacgtcgaagtgaaggggcatctcatccccaaaggatggcgtgtgttcatgtacttccggtcggtccacctcgacgacatgctctacgaggatccctgcaagttcaatccatggaggtggaagtgtgtcaatcaacaggagaaggacatgagcactagcagcttcaccccttttggtggtgggcagaggctgtgcccgggcctggatctggccaggctggaagcttccatctttctccaccacttggtcaccagcttcaggtgggtggccgaggaggaccacatcgtcaacttccccaccgtgcgcctcaagggaggcatgcccatcagggtcaccgccaaagactagctacccgttactcggaccatcgtccttgatcaactccccgcagcagccaagccagccaaaggctcaagttacatgtgcatatacataatgctactgctacaagtatgtggtgttatccatagcaaggttaaaagccccttcaaggagtaagctagctaggcaacatctgatgtgagtacataggggggtatgttgaagtgttgtaggggagcttaattagccaaggagtagtaggtgccactgatgatcactgtggctcgttaatcatagccgagggagactctgaccgatgatgcatgctgttatagtagtataagtagtagtatagtgctggtgtcacaaggaatagatatatcatctatgtatacatg

SEQ ID NO: 17570 - protein, 494 aa, Triticum aestivum
  peptide (1)..(494): Ceres Seq. ID no. 14307909
  misc_feature (2)..(494): NCBI GI NO: 34903584 NR Description: cytochrome P450-like protein
  misc_feature (43)..(488): NCBI GI NO: 18400142 NR Description: cytochrome P450, putative (CYP90D)
  misc_feature (43)..(466): NCBI GI NO: 9294019 NR Description: cytochrome P450-like protein
  misc_feature (41)..(494): NCBI GI NO: 13878393 NR Description: Cytochrome P450 90C1 (ROTUNDIFOLIA3)
  misc_feature (41)..(494): NCBI GI NO: 18419825 NR Description: rotundifolia3 (rot3) [Arabidopsis thaliana]
  misc_feature (46)..(494): NCBI GI NO: 25282635 NR Description: cytochrome P450 like protein
  misc_feature (18)..(494): NCBI GI NO: 15239203 NR Description: cytochrome p450 90A1 [Arabidopsis thaliana]
  misc_feature (23)..(494): NCBI GI NO: 9587211 NR Description: cytochrome P450 [Vigna radiata]
  misc_feature (13)..(490): NCBI GI NO: 27127269 NR Description: cytochrome P450
  misc_feature (39)..(490): NCBI GI NO: 34902330 NR Description: Putative steroid 22-alpha-hydroxylase
MSVSWPAPSTCAAAGALLAAAWLLCFRLFPAVARPRRRAMKTGAQLPPGIFGWPVVGETLDFVSCAYSPRPEAFVDKRRLRYGSAVFRSHLFGSATVVTADAEVNRFVLQSDARSFVPWYPRSLTELMGKSSILVINGSLQRRVHGLVGAFFKSPQLKAQVTADMQRRLAPALAAWREQGPGARLRIQDHAKTIVFQILVRALIGLEAGPEMQQLKQQFQEFIVGLMSLPIKLPGTRLYRSLQAKKRMARVVQRIIQEKRRRRALDGGGAPRDAIDVLMGDGSEELTDELISDNMIDFMIPAEDSVPVLITLAVKFLSECPLALQQLEEENMQLKMRKTDLGETLQWTDYMSLSFTQHVITETLRIGNIISGIMRKAVRDVEVKGHLIPKGWRVFMYFRSVHLDDMLYEDPCKFNPWRWKCVNQQEKDMSTSSFTPFGGGQRLCPGLDLARLEASIFLHHLVTSFRWVAEEDHIVNFPTVRLKGGMPIRVTAKD

SEQ ID NO: 17571 - protein, 455 aa, Triticum aestivum
  peptide (1)..(455): Ceres Seq. ID no. 14307910
  misc_feature (1)..(455): NCBI GI NO: 34903584 NR Description: cytochrome P450-like protein
  misc_feature (4)..(449): NCBI GI NO: 18400142 NR Description: cytochrome P450, putative (CYP90D)
  misc_feature (4)..(427): NCBI GI NO: 9294019 NR Description: cytochrome P450-like protein
  misc_feature (2)..(455): NCBI GI NO: 13878393 NR Description: Cytochrome P450 90C1 (ROTUNDIFOLIA3)
  misc_feature (2)..(455): NCBI GI NO: 18419825 NR Description: rotundifolia3 (rot3) [Arabidopsis thaliana]
  misc_feature (7)..(455): NCBI GI NO: 25282635 NR Description: cytochrome P450 like protein
  misc_feature (1)..(455): NCBI GI NO: 15239203 NR Description: cytochrome p450 90A1 [Arabidopsis thaliana]
  misc_feature (1)..(455): NCBI GI NO: 9587211 NR Description: cytochrome P450 [Vigna radiata]
  misc_feature (1)..(451): NCBI GI NO: 27127269 NR Description: cytochrome P450
  misc_feature (1)..(451): NCBI GI NO: 34902330 NR Description: Putative steroid 22-alpha-hydroxylase
MKTGAQLPPGIFGWPVVGETLDFVSCAYSPRPEAFVDKRRLRYGSAVFRSHLFGSATVVTADAEVNRFVLQSDARSFVPWYPRSLTELMGKSSILVINGSLQRRVHGLVGAFFKSPQLKAQVTADMQRRLAPALAAWREQGPGARLRIQDHAKTIVFQILVRALIGLEAGPEMQQLKQQFQEFIVGLMSLPIKLPGTRLYRSLQAKKRMARVVQRIIQEKRRRRALDGGGAPRDAIDVLMGDGSEELTDELISDNMIDFMIPAEDSVPVLITLAVKFLSECPLALQQLEEENMQLKMRKTDLGETLQWTDYMSLSFTQHVITETLRIGNIISGIMRKAVRDVEVKGHLIPKGWRVFMYFRSVHLDDMLYEDPCKFNPWRWKCVNQQEKDMSTSSFTPFGGGQRLCPGLDLARLEASIFLHHLVTSFRWVAEEDHIVNFPTVRLKGGMPIRVTAKD

SEQ ID NO: 17572 - protein, 367 aa, Triticum aestivum
  peptide (1)..(367): Ceres Seq. ID no. 14307911
  misc_feature (1)..(367): NCBI GI NO: 34903584 NR Description: cytochrome P450-like protein
  misc_feature (1)..(361): NCBI GI NO: 18400142 NR Description: cytochrome P450, putative (CYP90D)
  misc_feature (1)..(339): NCBI GI NO: 9294019 NR Description: cytochrome P450-like protein
  misc_feature (1)..(367): NCBI GI NO: 13878393 NR Description: Cytochrome P450 90C1 (ROTUNDIFOLIA3)
  misc_feature (1)..(367): NCBI GI NO: 18419825 NR Description: rotundifolia3 (rot3) [Arabidopsis thaliana]
  misc_feature (1)..(367): NCBI GI NO: 25282635 NR Description: cytochrome P450 like protein
  misc_feature (1)..(367): NCBI GI NO: 15239203 NR Description: cytochrome p450 90A1 [Arabidopsis thaliana]
  misc_feature (1)..(367): NCBI GI NO: 9587211 NR Description: cytochrome P450 [Vigna radiata]
  misc_feature (1)..(363): NCBI GI NO: 27127269 NR Description: cytochrome P450
  misc_feature (1)..(363): NCBI GI NO: 34902330 NR Description: Putative steroid 22-alpha-hydroxylase
MGKSSILVINGSLQRRVHGLVGAFFKSPQLKAQVTADMQRRLAPALAAWREQGPGARLRIQDHAKTIVFQILVRALIGLEAGPEMQQLKQQFQEFIVGLMSLPIKLPGTRLYRSLQAKKRMARVVQRIIQEKRRRRALDGGGAPRDAIDVLMGDGSEELTDELISDNMIDFMIPAEDSVPVLITLAVKFLSECPLALQQLEEENMQLKMRKTDLGETLQWTDYMSLSFTQHVITETLRIGNIISGIMRKAVRDVEVKGHLIPKGWRVFMYFRSVHLDDMLYEDPCKFNPWRWKCVNQQEKDMSTSSFTPFGGGQRLCPGLDLARLEASIFLHHLVTSFRWVAEEDHIVNFPTVRLKGGMPIRVTAKD

SEQ ID NO: 17573 - DNA, 964 bp, Triticum aestivum
  misc_feature (1)..(964): Ceres Seq. ID no. 15173087
aaccattccttggacaatcttcttcctcttcccctgctatacactctagcccttcttgtccgtgcatttctccctggctttgactggttgttgatgaagctgcaggagccagccccctagctatctgtctgtctagctgctccatcgcctccggactgtccttcgggtccacccccggctccgtcatggccacgctctgcttcttcatggccgtcttcatgctgggcctcgccttcccgtaccaccactggacgacgccggggaaccacatcgggttcgtggtgctgtacgcgctcaccttcttcttcgccaacttcgggcccaactccaccaccttcatcgtgccggcggagatcttcccggcgaggctccggtcgacgtgccacggcatctccgccgccgccgggaagctgggggccatcgttgggtcgttcgggttcctgtacctggcgcagaacaaggacccggccaaggtggaccacgggtacaaggccggcatcggggtgaggaactcgctcttcatcctcgccgcctgcaacttcctgggcatgggcttcaccttctgcgcgcccgagtccaacggcatctcgctcgaggagctctccggcgagaacgacgacggcgaggcggccgcgccggcgcacgccaggacggtgcccgtgtgagacagtcctcgtcagatagtatattctgcaggtttggatggatgtatggatcattttaatggttggagcgttcaaactcaggagtcagagtacaagaataatcgtgtgatgggtcgagttgtccaggttaattcattagagttgctggtcgggttagcagtaatagggagtgatacaagttaagagtgtagtagtgcatcaaagaggcacgcatatgtacgcgatatgatggaaaactttcatgcattttggcctgtgtggactggacaatatattatacagtactaaattctatcgct

SEQ ID NO: 17574 - protein, 159 aa, Triticum aestivum
  peptide (1)..(159): Ceres Seq. ID no. 15173088
  misc_feature (6)..(143): Pfam Name: and other Pfam Description: Sugar
  misc_feature (6)..(159): NCBI GI NO: 23506605 NR Description: phosphate transporter 6
  misc_feature (1)..(14): NCBI GI NO: 23506605 NR Description: phosphate transporter 6
  misc_feature (6)..(158): NCBI GI NO: 20162455 NR Description: phosphate transporter [Oryza sativa]
  misc_feature (1)..(14): NCBI GI NO: 20162455 NR Description: phosphate transporter [Oryza sativa]
  misc_feature (6)..(158): NCBI GI NO: 23600453 NR Description: putative phosphate transporter OsPT5
  misc_feature (6)..(158): NCBI GI NO: 38344620 NR Description: OSJNBb0003A12.6
  misc_feature (1)..(14): NCBI GI NO: 23600453 NR Description: putative phosphate transporter OsPT5
  misc_feature (1)..(14): NCBI GI NO: 38344620 NR Description: OSJNBb0003A12.6
  misc_feature (6)..(150): NCBI GI NO: 37534814 NR Description: putative phosphate transporter
  misc_feature (1)..(14): NCBI GI NO: 37534814 NR Description: putative phosphate transporter
MATLCFFMAVFMLGLAFPYHHWTTPGNHIGFVVLYALTFFFANFGPNSTTFIVPAEIFPARLRSTCHGISAAAGKLGAIVGSFGFLYLAQNKDPAKVDHGYKAGIGVRNSLFILAACNFLGMGFTFCAPESNGISLEELSGENDDGEAAAPAHARTVPV

SEQ ID NO: 17575 - protein, 152 aa, Triticum aestivum
  peptide (1)..(152): Ceres Seq. ID no. 15173089
  misc_feature (1)..(136): Pfam Name: and other Pfam Description: Sugar
  misc_feature (1)..(152): NCBI GI NO: 23506605 NR Description: phosphate transporter 6
  misc_feature (1)..(151): NCBI GI NO: 20162455 NR Description: phosphate transporter [Oryza sativa]
  misc_feature (1)..(151): NCBI GI NO: 23600453 NR Description: putative phosphate transporter OsPT5
  misc_feature (1)..(151): NCBI GI NO: 38344620 NR Description: OSJNBb0003A12.6
  misc_feature (1)..(143): NCBI GI NO: 37534814 NR Description: putative phosphate transporter
  misc_feature (1)..(144): NCBI GI NO: 21429216 NR Description: putative high-affinity phosphate transporter HAPT
  misc_feature (1)..(144): NCBI GI NO: 23600459 NR Description: putative phosphate transporter OsPT6
  misc_feature (1)..(148): NCBI GI NO: 29367127 NR Description: phosphate transporter HvPT5
  misc_feature (1)..(151): NCBI GI NO: 15983299 NR Description: phosphate transporter [Oryza sativa subsp. indica]
  misc_feature (1)..(152): NCBI GI NO: 12697484 NR Description: phosphate transporter [Sesbania rostrata]
MAVFMLGLAFPYHHWTTPGNHIGFVVLYALTFFFANFGPNSTTFIVPAEIFPARLRSTCHGISAAAGKLGAIVGSFGFLYLAQNKDPAKVDHGYKAGIGVRNSLFILAACNFLGMGFTFCAPESNGISLEELSGENDDGEAAAPAHARTVPV

SEQ ID NO: 17576 - protein, 148 aa, Triticum aestivum
  peptide (1)..(148): Ceres Seq. ID no. 15173090
  misc_feature (1)..(132): Pfam Name: and other Pfam Description: Sugar
  misc_feature (1)..(148): NCBI GI NO: 23506605 NR Description: phosphate transporter 6
  misc_feature (1)..(147): NCBI GI NO: 20162455 NR Description: phosphate transporter [Oryza sativa]
  misc_feature (1)..(147): NCBI GI NO: 23600453 NR Description: putative phosphate transporter OsPT5
  misc_feature (1)..(147): NCBI GI NO: 38344620 NR Description: OSJNBb0003A12.6
  misc_feature (1)..(139): NCBI GI NO: 37534814 NR Description: putative phosphate transporter
  misc_feature (1)..(140): NCBI GI NO: 21429216 NR Description: putative high-affinity phosphate transporter HAPT
  misc_feature (1)..(140): NCBI GI NO: 23600459 NR Description: putative phosphate transporter OsPT6
  misc_feature (1)..(144): NCBI GI NO: 29367127 NR Description: phosphate transporter HvPT5
  misc_feature (1)..(147): NCBI GI NO: 15983299 NR Description: phosphate transporter [Oryza sativa subsp. indica]
  misc_feature (1)..(148): NCBI GI NO: 12697484 NR Description: phosphate transporter [Sesbania rostrata]
MLGLAFPYHHWTTPGNHIGFVVLYALTFFFANFGPNSTTFIVPAEIFPARLRSTCHGISAAAGKLGAIVGSFGFLYLAQNKDPAKVDHGYKAGIGVRNSLFILAACNFLGMGFTFCAPESNGISLEELSGENDDGEAAAPAHARTVPV

SEQ ID NO: 17577 - DNA, 764 bp, Triticum aestivum
  misc_feature (1)..(764): Ceres Seq. ID no. 13659204
aacttctccttccgttgcctccgcttcgccttttcccgttccgtccaaataaaacgctcgagctaccaaaccctaggtagggctcctttcgatccgattcgagtcgatctcagttgggtgcgagattggactggagggggatgacgatacctagtgccgagggattcctcccggcggcgagctgcctgccgtgcacggcggaggaggaaagggcgaccgtcgacgcactcacgcgggaggccgacgcgaatgtcaaagacggcgatctccgctatctcatctcacaaagctggtggaccaactggcaatcttatgtgggcttactcagttatggggagaatgacactgacattcctcttcaacctgcaagtagacctggagagattgataacagaaagcttgttttggaggaaactagcagtggcagtgaagatacagagctccaaagaaccttaagagaaggggaggactacactttggtgccacaagatgtctggagaaaactatatgactggtatgcagttgcaacggcacgcaatatatgtttttcattgtttctttagccctgtttactgcactttgtagcaggaacttggctagacctataatatcacctccgccatcctgcttgttggcattagttgttgccttttatttttctctcgcctgccactagtagttttggaccacattatgtaaatacttctgtatatgtatatcccaccatttttggtgtgtgtttgctccttggtggttggtttgtg

SEQ ID NO: 17578 - protein, 140 aa, Triticum aestivum
  peptide (1)..(140): Ceres Seq. ID no. 15219954
  misc_feature (1)..(126): NCBI GI NO: 37531290 NR Description: putative ubiquitin carboxyl terminal hydrolase
  misc_feature (1)..(127): NCBI GI NO: 30681490 NR Description: expressed protein [Arabidopsis thaliana]
  misc_feature (1)..(127): NCBI GI NO: 4115922 NR Description: contains similarity to ubiquitin carboxyl-terminalhydrolase family 2
  misc_feature (1)..(127): NCBI GI NO: 4115923 NR Description: contains similarity to ubiquitin carboxyl-terminalhydrolase family 2
  misc_feature (1)..(127): NCBI GI NO: 18413358 NR Description: expressed protein [Arabidopsis thaliana]
  misc_feature (1)..(124): NCBI GI NO: 7487639 NR Description: hypothetical protein T4F9
  misc_feature (1)..(127): NCBI GI NO: 7487641 NR Description: hypothetical protein T4F9
  misc_feature (19)..(126): NCBI GI NO: 15223316 NR Description: hypothetical protein [Arabidopsis thaliana]
  misc_feature (12)..(126): NCBI GI NO: 7487236 NR Description: probable ubiquitin carboxyl terminal hydrolase
  misc_feature (12)..(126): NCBI GI NO: 18405549 NR Description: ubiquitin-specific protease 5 (UBP5), putative
MTIPSAEGFLPAASCLPCTAEEERATVDALTREADANVKDGDLRYLISQSWWTNWQSYVGLLSYGENDTDIPLQPASRPGEIDNRKLVLEETSSGSEDTELQRTLREGEDYTLVPQDVWRKLYDWYAVATARNICFSLFL

SEQ ID NO: 17579 - DNA, 1342 bp, Triticum aestivum
  misc_feature (1)..(1342): Ceres Seq. ID no. 14303129
attattcgatcttttttccttttgcccttgtcttcttcctcgccgctcgtccccttaaaccctcccatggcggcccgcccatgctcccgcggctgccccaagctccggcgcctcctctcctccgccgccgccgcgaacctccccctcctgtgatcctagaggcgcacggccaagggctccctggcggatttggatgaatgccaccggccggccgccccatctcctctccccagcgagatctaggctgcagccccaaagagaactaaatattctccctctccaactcgcgcgagcttcgatccggtgccctgcggccggcgtccccgagaccggccccggccccaaacgcggttcccaacccgacgcccccctcccgcacgcttgcggcctccgggagcatcgcgcggtcctacatttcgttgcgggtgactcctttccgctcagtgtttatggtgccgcctgtgtaccaggagcctagtatcatgccgatcaatacaagaacggagaaggagttggaagaaaaggaggtgttatgcacgcacaaaaagcccaaagctacagggtgtgttgcccaaccgcagcaggaaactgaactcgccattgagagtgagaataaagggcatggtgatccttcaccaaaagagtctgcttgtgttgtgctgagcaatggtgaagcaaatggttgcagtgaggggcatgttcttggcaaatgtcatgtccaaattccgaagacatgactcgggtagaaaggatcattacagttcaaatattccatacaggcggtgcaaatgaagaaccagaagcaaggtcgagactggctcaactctgcagtgcaattggctggaagagtccaacatatgagtttcaagaacatggacatggccatacaaaactgttcacatgcaaggtgagtgttcttgtggagacgttcacagacactgttgtggagtgcatcagtgagcccaaaccccagaagagagctgcccaggaacaaggtgctgaaggtgtgttatggaccctcaagcgccttggtcatgtgaaatagctctagacgtcctccatcaggcgtggcgcgacgtctgtgtaccctcttgttaccatccgatccatcataagagcggtatctgatctttcttgaatccatgactcaacctgcgatcatgttgtcagctgatgcttatgcacggttaaacttgttgctctgtcggtcgtgttctaattttatattgctttagatctctatacaaacgagtgaagtgaacccatctccaatagtccaataattcttatctttagaccattctgagccatttacgaacattacagcgaatatgatcaagac

SEQ ID NO: 17580 - protein, 111 aa, Triticum aestivum
  peptide (1)..(111): Ceres Seq. ID no. 14303130
  misc_feature (32)..(104): Pfam Name: Pfam Description:  Double-stranded RNA binding motif
  misc_feature (28)..(111): NCBI GI NO: 30678637 NR Description: expressed protein [Arabidopsis thaliana]
  misc_feature (28)..(111): NCBI GI NO: 30678641 NR Description: expressed protein [Arabidopsis thaliana]
  misc_feature (19)..(110): NCBI GI NO: 32488296 NR Description: OSJNBb0065L13.5
  misc_feature (32)..(111): NCBI GI NO: 15220196 NR Description: expressed protein [Arabidopsis thaliana]
MSCPNSEDMTRVERIITVQIFHTGGANEEPEARSRLAQLCSAIGWKSPTYEFQEHGHGHTKLFTCKVSVLVETFTDTVVECISEPKPQKRAAQEQGAEGVLWTLKRLGHVK

SEQ ID NO: 17581 - protein, 103 aa, Triticum aestivum
  peptide (1)..(103): Ceres Seq. ID no. 14303131
  misc_feature (24)..(96): Pfam Name: Pfam Description:  Double-stranded RNA binding motif
  misc_feature (20)..(103): NCBI GI NO: 30678637 NR Description: expressed protein [Arabidopsis thaliana]
  misc_feature (20)..(103): NCBI GI NO: 30678641 NR Description: expressed protein [Arabidopsis thaliana]
  misc_feature (11)..(102): NCBI GI NO: 32488296 NR Description: OSJNBb0065L13.5
  misc_feature (24)..(103): NCBI GI NO: 15220196 NR Description: expressed protein [Arabidopsis thaliana]
MTRVERIITVQIFHTGGANEEPEARSRLAQLCSAIGWKSPTYEFQEHGHGHTKLFTCKVSVLVETFTDTVVECISEPKPQKRAAQEQGAEGVLWTLKRLGHVK

SEQ ID NO: 17582 - protein, 95 aa, Triticum aestivum
  peptide (1)..(95): Ceres Seq. ID no. 14303132
MVPPVYQEPSIMPINTRTEKELEEKEVLCTHKKPKATGCVAQPQQETELAIESENKGHGDPSPKESACVVLSNGEANGCSEGHVLGKCHVQIPKT

SEQ ID NO: 17583 - DNA, 1582 bp, Triticum aestivum
  misc_feature (1)..(1582): Ceres Seq. ID no. 14303185
ctggccagaccgagctgctcttcctcctccagttcagacgtggcggtttgactttctgacctcggaaacgatcgaaggcgccttccgtgggaaaaatcccggggcgattcctggagaagaagccgcggattcaggggcggtagaggagagcgcgcctcgccgttaccaggattttcgcccccgccctcgctccgatcgaggagaactttattaactactgaagataactggtagcggaatgaaggcaccatcactgcttgttcagtgtttccctggcttgcttccaagcaaggccactagttgtgtgccgattatatcagagagggatctgcatctaccatcaccagctgttgaactaatcccttcaaagagtgctcatccttacaaatatgctggagagaaggtcgatgtccaaggtcttgatgttttcaaggggaaggtcagtgtagcagatatgatagccttttccccttctgaagtagcatcatcaaagcatgatggtagtctcaaatattgggagagttccatcactattgtgaatattattaagaatgagatccgtgatgggcagctgagcttcaggggcaagcgagttctagagcttggatgtggatctggccttgctgggatttttgcctgcttgaagggtgcgtctatagttcacttccaggacacaaatgcagaaaccataagatgcagaacaatgcccaatgtgcttgcgaatcttgagcaggctcgggacagacagaacagaccatcagagagcccagttacaccatccagacagttgttagctcccgttgtccatttctatgccggggagtgggatgagctccccacaattctctcagttgtgcatccacctgcacaaccaacaaaccttagcttctctgaggatgattttatggatggctgcagtagccatgacggaagcagtatagttggtcaggaccccaggcgatcgaggaagctttctggcagccgtgcatgggagagggccagtgagactgacccagcagatggaggatacgatgtaattttgatttctgagatccctaatgcggtgaactctctaaggaagctctatgcccttatcactaagtgcctacgccctccttatggagtcttgtatgtggcttcaaagaagaacttggttggttcaaacggcggcgcaaggcagcttaaaagtttgatggaggaggaaggtgtccttggtggtcacttcttgactgagatatctgaccgggagatatggaagttctttttcaagtaaaccggcaaatgttggagctgaaaaagatgatcctggccatggcctcgtatacaaaaagaattcgtttgtctactcgcagcgctgtacataccgcgaagcttagttcgattaattctttggtgataggtccaagtatgcgtctcagttgttaaacctgcaaatgtgttggcattttaacccttttgtagatctcctatctcctaggtaactgttgagcttttgcataccgaatctatggtgctggcctatcacagcacgctatcagcaatatgtacaaatggaaatggttactgtacttgcttgtcggcc

SEQ ID NO: 17584 - protein, 344 aa, Triticum aestivum
  peptide (1)..(344): Ceres Seq. ID no. 14303186
  misc_feature (1)..(344): NCBI GI NO: 38346224 NR Description: OJ990528_30.4
  misc_feature (1)..(344): NCBI GI NO: 16226903 NR Description: At2g43320/T1O24.6 [Arabidopsis thaliana]
  misc_feature (1)..(344): NCBI GI NO: 18406207 NR Description: expressed protein [Arabidopsis thaliana]
  misc_feature (1)..(292): NCBI GI NO: 25408858 NR Description: hypothetical protein At2g43320
  misc_feature (288)..(344): NCBI GI NO: 25408858 NR Description: hypothetical protein At2g43320
  misc_feature (34)..(214): NCBI GI NO: 21554662 NR Description: unknown [Arabidopsis thaliana]
  misc_feature (262)..(344): NCBI GI NO: 21554662 NR Description: unknown [Arabidopsis thaliana]
  misc_feature (27)..(214): NCBI GI NO: 18414120 NR Description: expressed protein [Arabidopsis thaliana]
  misc_feature (262)..(344): NCBI GI NO: 18414120 NR Description: expressed protein [Arabidopsis thaliana]
  misc_feature (27)..(150): NCBI GI NO: 7485012 NR Description: hypothetical protein - Arabidopsis thaliana
MKAPSLLVQCFPGLLPSKATSCVPIISERDLHLPSPAVELIPSKSAHPYKYAGEKVDVQGLDVFKGKVSVADMIAFSPSEVASSKHDGSLKYWESSITIVNIIKNEIRDGQLSFRGKRVLELGCGSGLAGIFACLKGASIVHFQDTNAETIRCRTMPNVLANLEQARDRQNRPSESPVTPSRQLLAPVVHFYAGEWDELPTILSVVHPPAQPTNLSFSEDDFMDGCSSHDGSSIVGQDPRRSRKLSGSRAWERASETDPADGGYDVILISEIPNAVNSLRKLYALITKCLRPPYGVLYVASKKNLVGSNGGARQLKSLMEEEGVLGGHFLTEISDREIWKFFFK

SEQ ID NO: 17585 - protein, 272 aa, Triticum aestivum
  peptide (1)..(272): Ceres Seq. ID no. 14303187
  misc_feature (1)..(272): NCBI GI NO: 38346224 NR Description: OJ990528_30.4
  misc_feature (1)..(272): NCBI GI NO: 16226903 NR Description: At2g43320/T1O24.6 [Arabidopsis thaliana]
  misc_feature (1)..(272): NCBI GI NO: 18406207 NR Description: expressed protein [Arabidopsis thaliana]
  misc_feature (1)..(220): NCBI GI NO: 25408858 NR Description: hypothetical protein At2g43320
  misc_feature (216)..(272): NCBI GI NO: 25408858 NR Description: hypothetical protein At2g43320
  misc_feature (1)..(142): NCBI GI NO: 21554662 NR Description: unknown [Arabidopsis thaliana]
  misc_feature (190)..(272): NCBI GI NO: 21554662 NR Description: unknown [Arabidopsis thaliana]
  misc_feature (1)..(142): NCBI GI NO: 18414120 NR Description: expressed protein [Arabidopsis thaliana]
  misc_feature (190)..(272): NCBI GI NO: 18414120 NR Description: expressed protein [Arabidopsis thaliana]
  misc_feature (1)..(78): NCBI GI NO: 7485012 NR Description: hypothetical protein - Arabidopsis thaliana
MIAFSPSEVASSKHDGSLKYWESSITIVNIIKNEIRDGQLSFRGKRVLELGCGSGLAGIFACLKGASIVHFQDTNAETIRCRTMPNVLANLEQARDRQNRPSESPVTPSRQLLAPVVHFYAGEWDELPTILSVVHPPAQPTNLSFSEDDFMDGCSSHDGSSIVGQDPRRSRKLSGSRAWERASETDPADGGYDVILISEIPNAVNSLRKLYALITKCLRPPYGVLYVASKKNLVGSNGGARQLKSLMEEEGVLGGHFLTEISDREIWKFFFK

SEQ ID NO: 17586 - protein, 189 aa, Triticum aestivum
  peptide (1)..(189): Ceres Seq. ID no. 14303188
  misc_feature (1)..(189): NCBI GI NO: 38346224 NR Description: OJ990528_30.4
  misc_feature (1)..(189): NCBI GI NO: 16226903 NR Description: At2g43320/T1O24.6 [Arabidopsis thaliana]
  misc_feature (1)..(189): NCBI GI NO: 18406207 NR Description: expressed protein [Arabidopsis thaliana]
  misc_feature (1)..(137): NCBI GI NO: 25408858 NR Description: hypothetical protein At2g43320
  misc_feature (133)..(189): NCBI GI NO: 25408858 NR Description: hypothetical protein At2g43320
  misc_feature (1)..(59): NCBI GI NO: 21554662 NR Description: unknown [Arabidopsis thaliana]
  misc_feature (107)..(189): NCBI GI NO: 21554662 NR Description: unknown [Arabidopsis thaliana]
  misc_feature (1)..(59): NCBI GI NO: 18414120 NR Description: expressed protein [Arabidopsis thaliana]
  misc_feature (107)..(189): NCBI GI NO: 18414120 NR Description: expressed protein [Arabidopsis thaliana]
  misc_feature (107)..(168): NCBI GI NO: 7485012 NR Description: hypothetical protein - Arabidopsis thaliana
MPNVLANLEQARDRQNRPSESPVTPSRQLLAPVVHFYAGEWDELPTILSVVHPPAQPTNLSFSEDDFMDGCSSHDGSSIVGQDPRRSRKLSGSRAWERASETDPADGGYDVILISEIPNAVNSLRKLYALITKCLRPPYGVLYVASKKNLVGSNGGARQLKSLMEEEGVLGGHFLTEISDREIWKFFFK

SEQ ID NO: 17587 - DNA, 1838 bp, Triticum aestivum
  misc_feature (1)..(1838): Ceres Seq. ID no. 15178685
atactctctatcgctttgtcccctcgctccaaacccgccgccgccgccgccgccgcccacgctagggttcgctcgcacgccgccgtcgccgccccctaaccccacagcacgtcgccgatagccagccagcaatggaaaatctccccgatgaattgctcgcggacatcctccgcagttttcctccacggagtctcgcggtgtgccggagcgtctgcaagcactggtgcgctgtcgtcgatgcccgcgggctgctcctcgcggtcgcgcgtcaagttccgtgctctctgcacggcatctacgttaactacgccatgatgcgaaggtcctgattcttctcccgcgtcgctccgcggactactagcccaatcgatggcatgctcagtttcctgcctggccagctgatgcgctatcgtagcgtcctggaccaccgcaacggtctcctcctgtacgaaaacagtcaggggatgtatgtgtgcaacccagcgacacgacggtgggcgaccctgtcggagccgccgcgcacggaaacttcctacagccacctgtttttctaccgccatcgtatgtatctaatgttcgatccaactatgtctctgcactacaatgtattattcttccctgatgtgcctgagaagccaaagccaccccatcttcaacctggtgagtcacaaatttcaagagcagattacgagcatgagcgtaactctttgggatcaatggaatggccaccatacatctacccactgcaagtgttctcgtcaaaaactgggcggtgggaagagaaacaatttattcgtgaaggtgatgcagcagttactgtgtcggatgtgtggttagatgcattggcaccaagtagcagccgcaactcgcttcaacgacatgcagtccactggcgagcttcgttttatgtacattgtgactctggtttcatcatgaggttgttattggaaaaacaaaactatctagtgatcaaaacccccaaactagataccactgggtttggtgtcgatgcaactgggcgcgagacacatcttacgacatacgggtatttgggtaaatccaagcatggtgtctattacaccactttgtgtggatacacacttcaagtgtgggtattgtgcaaaacattagaatcatgtcaaacaccggagtgggagctgaagcatcaagctaaccttacaaatttaaatctacaccatgaccaacacttaagaggagaaaggtatgaaaagtgctggatcttaaatggtcggagtgaagaatccgagcatggatgggattctagtgatgacagtgccattgatttagaaggagggtcggacatggattacaaagattatcactttgccgtggacttcttgggataccatccttacaaagaaattgctttcttgggcaaccgctttcaaggatttgcttactacctggaaaactccaagttaaagtacttgggatcaccttatccaccatacctaggcaactgtgattatggtttgcgacccatactcgagtcattcatctacactccttgcatggatgatctgcttcctattcagaatgatgcatgatgagctgatacttcacttaatttgatattaagtgggcaatataggttcaaggtgggataataaccgtgcggtcgttgggatgctattttgatgattgaataatgttcttttcaacacatggacaatttggttgttgttacgttttcttttaggttctccgtattgttatgtgaacttctgagtgatgtgtttggtttcaggagttgtaaaagtcaattaatattttggttgaaacatgttaatacatacagtataattttttattgctcc

SEQ ID NO: 17588 - protein, 397 aa, Triticum aestivum
  peptide (1)..(397): Ceres Seq. ID no. 15178686
  misc_feature (117)..(392): NCBI GI NO: 31126729 NR Description: hypothetical protein
  misc_feature (1)..(152): NCBI GI NO: 31126729 NR Description: hypothetical protein
  misc_feature (32)..(387): NCBI GI NO: 38345226 NR Description: OSJNBb0021I10.9
  misc_feature (1)..(65): NCBI GI NO: 38345226 NR Description: OSJNBb0021I10.9
  misc_feature (1)..(330): NCBI GI NO: 37533730 NR Description: hypothetical protein
  misc_feature (1)..(331): NCBI GI NO: 19881684 NR Description: Hypothetical protein with F-box domain
  misc_feature (1)..(216): NCBI GI NO: 31126734 NR Description: hypothetical protein
  misc_feature (317)..(386): NCBI GI NO: 31126734 NR Description: hypothetical protein
  misc_feature (65)..(248): NCBI GI NO: 29150413 NR Description: hypothetical protein
  misc_feature (1)..(82): NCBI GI NO: 29150413 NR Description: hypothetical protein
MLSFLPGQLMRYRSVLDHRNGLLLYENSQGMYVCNPATRRWATLSEPPRTETSYSHLFFYRHRMYLMFDPTMSLHYNVLFFPDVPEKPKPPHLQPGESQISRADYEHERNSLGSMEWPPYIYPLQVFSSKTGRWEEKQFIREGDAAVTVSDVWLDALAPSSSRNSLQRHAVHWRASFYVHCDSGFIMRLLLEKQNYLVIKTPKLDTTGFGVDATGRETHLTTYGYLGKSKHGVYYTTLCGYTLQVWVLCKTLESCQTPEWELKHQANLTNLNLHHDQHLRGERYEKCWILNGRSEESEHGWDSSDDSAIDLEGGSDMDYKDYHFAVDFLGYHPYKEIAFLGNRFQGFAYYLENSKLKYLGSPYPPYLGNCDYGLRPILESFIYTPCMDDLLPIQNDA

SEQ ID NO: 17589 - protein, 388 aa, Triticum aestivum
  peptide (1)..(388): Ceres Seq. ID no. 15178687
  misc_feature (108)..(383): NCBI GI NO: 31126729 NR Description: hypothetical protein
  misc_feature (1)..(143): NCBI GI NO: 31126729 NR Description: hypothetical protein
  misc_feature (23)..(378): NCBI GI NO: 38345226 NR Description: OSJNBb0021I10.9
  misc_feature (1)..(56): NCBI GI NO: 38345226 NR Description: OSJNBb0021I10.9
  misc_feature (1)..(321): NCBI GI NO: 37533730 NR Description: hypothetical protein
  misc_feature (1)..(322): NCBI GI NO: 19881684 NR Description: Hypothetical protein with F-box domain
  misc_feature (1)..(207): NCBI GI NO: 31126734 NR Description: hypothetical protein
  misc_feature (308)..(377): NCBI GI NO: 31126734 NR Description: hypothetical protein
  misc_feature (56)..(239): NCBI GI NO: 29150413 NR Description: hypothetical protein
  misc_feature (1)..(73): NCBI GI NO: 29150413 NR Description: hypothetical protein
MRYRSVLDHRNGLLLYENSQGMYVCNPATRRWATLSEPPRTETSYSHLFFYRHRMYLMFDPTMSLHYNVLFFPDVPEKPKPPHLQPGESQISRADYEHERNSLGSMEWPPYIYPLQVFSSKTGRWEEKQFIREGDAAVTVSDVWLDALAPSSSRNSLQRHAVHWRASFYVHCDSGFIMRLLLEKQNYLVIKTPKLDTTGFGVDATGRETHLTTYGYLGKSKHGVYYTTLCGYTLQVWVLCKTLESCQTPEWELKHQANLTNLNLHHDQHLRGERYEKCWILNGRSEESEHGWDSSDDSAIDLEGGSDMDYKDYHFAVDFLGYHPYKEIAFLGNRFQGFAYYLENSKLKYLGSPYPPYLGNCDYGLRPILESFIYTPCMDDLLPIQNDA

SEQ ID NO: 17590 - protein, 367 aa, Triticum aestivum
  peptide (1)..(367): Ceres Seq. ID no. 15178688
  misc_feature (87)..(362): NCBI GI NO: 31126729 NR Description: hypothetical protein
  misc_feature (1)..(122): NCBI GI NO: 31126729 NR Description: hypothetical protein
  misc_feature (2)..(357): NCBI GI NO: 38345226 NR Description: OSJNBb0021I10.9
  misc_feature (1)..(35): NCBI GI NO: 38345226 NR Description: OSJNBb0021I10.9
  misc_feature (1)..(300): NCBI GI NO: 37533730 NR Description: hypothetical protein
  misc_feature (1)..(301): NCBI GI NO: 19881684 NR Description: Hypothetical protein with F-box domain
  misc_feature (1)..(186): NCBI GI NO: 31126734 NR Description: hypothetical protein
  misc_feature (287)..(356): NCBI GI NO: 31126734 NR Description: hypothetical protein
  misc_feature (35)..(218): NCBI GI NO: 29150413 NR Description: hypothetical protein
  misc_feature (1)..(52): NCBI GI NO: 29150413 NR Description: hypothetical protein
MYVCNPATRRWATLSEPPRTETSYSHLFFYRHRMYLMFDPTMSLHYNVLFFPDVPEKPKPPHLQPGESQISRADYEHERNSLGSMEWPPYIYPLQVFSSKTGRWEEKQFIREGDAAVTVSDVWLDALAPSSSRNSLQRHAVHWRASFYVHCDSGFIMRLLLEKQNYLVIKTPKLDTTGFGVDATGRETHLTTYGYLGKSKHGVYYTTLCGYTLQVWVLCKTLESCQTPEWELKHQANLTNLNLHHDQHLRGERYEKCWILNGRSEESEHGWDSSDDSAIDLEGGSDMDYKDYHFAVDFLGYHPYKEIAFLGNRFQGFAYYLENSKLKYLGSPYPPYLGNCDYGLRPILESFIYTPCMDDLLPIQNDA

SEQ ID NO: 17591 - DNA, 1125 bp, Triticum aestivum
  misc_feature (1)..(1125): Ceres Seq. ID no. 14301707
atcttttgtcctcctcctccgttgcgcagttggctcgcttgcttgcttgctgtaggtgagtgctgctggagacgggagccgggccgaggcggatcggggagaaggtgggaggcgggcgggtggtagatccggcgggcgtggctcgcgagaaggttggtgcgaggttggtggaggaggggagagaaggaggggatggagcggaaggcggtggtggtgtgcgcgctcgtcggcttcctcggcgtcctctccgccgcgctaggcttcgccgccgagggcacccgcgtcaaggtttcagatgtgcaaaccgactcttctccaggtgaatgcatatacccaagaagccctgcgttaggccttgggttgatgtctgcagttgcccttatggtcgcacaggctattataaatacagttgctggttgcatctgttgtaagaggcatccggttccctcagacactaactggagtgtggctctgatctcattcatcgtatcttgggtcactttcataatcgcgttccttctcctgctgaccggagccgcgctgaacgaccaaaggggccaggagaacatgtacttcggcagcttctgctacgtcgtcaagccgggggtcttctccggaggggcggtgctctccctcgcgagcgtggccctggccatagtctactacgtggccctgacgtcgtcgaaagccccgccgagctggggcccacagcagaaccagggcatctccatgggccagcccgtgatcccgcagcagagcagcgagccggtgttcgtccatgaggacacctacaaccggcaacgtttcccatgagtgatcacagccatattcaagccagccatttcgagggtcgcccatgaggacacttgcaaccggcagcagttcccgtgatcgcagtcgtagtacctaagccgtttctacggcccgcatgaacgctatgttggcgagtttggtttgtatagccctgcaggttagaacaatagcagcagtttggttaccgttattattagctaggttcatcagtcttctctttttctttgtttgagacttgagaaaggcggcggcatgcctgtttcgtcggtatggatatttgaattttaaatgaactgggtaatgttgaggttg

SEQ ID NO: 17592 - protein, 206 aa, Triticum aestivum
  peptide (1)..(206): Ceres Seq. ID no. 14301708
  misc_feature (1)..(206): NCBI GI NO: 34897938 NR Description: ESTs AU082454
  misc_feature (103)..(206): NCBI GI NO: 24413945 NR Description: contains ESTs AU082454
  misc_feature (1)..(32): NCBI GI NO: 24413945 NR Description: contains ESTs AU082454
  misc_feature (1)..(205): NCBI GI NO: 18418215 NR Description: expressed protein [Arabidopsis thaliana]
  misc_feature (30)..(205): NCBI GI NO: 10177066 NR Description: dbj|BAA92731
  misc_feature (5)..(181): NCBI GI NO: 34394069 NR Description: unknown protein
  misc_feature (5)..(180): NCBI GI NO: 18407003 NR Description: expressed protein [Arabidopsis thaliana]
  misc_feature (5)..(180): NCBI GI NO: 21554630 NR Description: unknown [Arabidopsis thaliana]
  misc_feature (5)..(181): NCBI GI NO: 18408976 NR Description: expressed protein [Arabidopsis thaliana]
  misc_feature (1)..(169): NCBI GI NO: 18391509 NR Description: expressed protein [Arabidopsis thaliana]
MERKAVVVCALVGFLGVLSAALGFAAEGTRVKVSDVQTDSSPGECIYPRSPALGLGLMSAVALMVAQAIINTVAGCICCKRHPVPSDTNWSVALISFIVSWVTFIIAFLLLLTGAALNDQRGQENMYFGSFCYVVKPGVFSGGAVLSLASVALAIVYYVALTSSKAPPSWGPQQNQGISMGQPVIPQQSSEPVFVHEDTYNRQRFP

SEQ ID NO: 17593 - protein, 149 aa, Triticum aestivum
  peptide (1)..(149): Ceres Seq. ID no. 14301709
  misc_feature (1)..(149): NCBI GI NO: 34897938 NR Description: ESTs AU082454
  misc_feature (46)..(149): NCBI GI NO: 24413945 NR Description: contains ESTs AU082454
  misc_feature (1)..(148): NCBI GI NO: 18418215 NR Description: expressed protein [Arabidopsis thaliana]
  misc_feature (1)..(148): NCBI GI NO: 10177066 NR Description: dbj|BAA92731
  misc_feature (1)..(124): NCBI GI NO: 34394069 NR Description: unknown protein
  misc_feature (1)..(123): NCBI GI NO: 18407003 NR Description: expressed protein [Arabidopsis thaliana]
  misc_feature (1)..(123): NCBI GI NO: 21554630 NR Description: unknown [Arabidopsis thaliana]
  misc_feature (1)..(124): NCBI GI NO: 18408976 NR Description: expressed protein [Arabidopsis thaliana]
  misc_feature (1)..(112): NCBI GI NO: 18391509 NR Description: expressed protein [Arabidopsis thaliana]
  misc_feature (1)..(124): NCBI GI NO: 38016521 NR Description: fiber protein Fb34 [Gossypium barbadense]
MSAVALMVAQAIINTVAGCICCKRHPVPSDTNWSVALISFIVSWVTFIIAFLLLLTGAALNDQRGQENMYFGSFCYVVKPGVFSGGAVLSLASVALAIVYYVALTSSKAPPSWGPQQNQGISMGQPVIPQQSSEPVFVHEDTYNRQRFP

SEQ ID NO: 17594 - protein, 143 aa, Triticum aestivum
  peptide (1)..(143): Ceres Seq. ID no. 14301710
  misc_feature (1)..(143): NCBI GI NO: 34897938 NR Description: ESTs AU082454
  misc_feature (40)..(143): NCBI GI NO: 24413945 NR Description: contains ESTs AU082454
  misc_feature (1)..(142): NCBI GI NO: 18418215 NR Description: expressed protein [Arabidopsis thaliana]
  misc_feature (1)..(142): NCBI GI NO: 10177066 NR Description: dbj|BAA92731
  misc_feature (1)..(118): NCBI GI NO: 34394069 NR Description: unknown protein
  misc_feature (1)..(117): NCBI GI NO: 18407003 NR Description: expressed protein [Arabidopsis thaliana]
  misc_feature (1)..(117): NCBI GI NO: 21554630 NR Description: unknown [Arabidopsis thaliana]
  misc_feature (1)..(118): NCBI GI NO: 18408976 NR Description: expressed protein [Arabidopsis thaliana]
  misc_feature (1)..(106): NCBI GI NO: 18391509 NR Description: expressed protein [Arabidopsis thaliana]
  misc_feature (1)..(118): NCBI GI NO: 38016521 NR Description: fiber protein Fb34 [Gossypium barbadense]
MVAQAIINTVAGCICCKRHPVPSDTNWSVALISFIVSWVTFIIAFLLLLTGAALNDQRGQENMYFGSFCYVVKPGVFSGGAVLSLASVALAIVYYVALTSSKAPPSWGPQQNQGISMGQPVIPQQSSEPVFVHEDTYNRQRFP

SEQ ID NO: 17595 - DNA, 857 bp, Triticum aestivum
  misc_feature (1)..(857): Ceres Seq. ID no. 14301696
ctcccggtgcgctcctttgtgattggttgctgctgctcgggatcaatgggtactcctactccataccaccatctgtctccaagaaccatcgtcaccaagatcatcagcatgaagcggcaggagccagagccgccgccgccgcccaagatcatcctgcagccacggcaccggaccagccccgcgatgtggtgcgctgccatcgtctgcttcgccttcagcgtcctcctcatcctcgccggcctggtgatcctcgtcgtcttcctgacggtgaagccaaggacgccgtccttcgacgtcgcccacgcagccctcaacagcgtctacatcggctcgcccccgccctacttcaacggcgacatgacgctgacggccaacatctccaaccccaaccgcaagatcggcgtcgtgatccagtccggcgccgtcgagctcttctttcggggcaggctggtgtcggcccaggcgctgccgtcgtttgcgcagcggcgggggcagttcacagtcctcagcgtccacatgctgtctagccaggtcgtgctaccgccggaggtggccgtggagctgctgaaccagatgaagagcaacaagatcctcttcaccatcagagggaccttcaaggtccgggaaaggttctggtcttggcactacacctaccggatgactgccatttgtgacctggagctcaccgcgcctccctctggatttctcgtacataggagatgcacaacatcaacgtgattggtacctggatgctcttttcatcttcttttgttgcatcaaattttcaaggatgtatagcagtacgaaactattttggatgtattttttttatgtaaagtaaaacccaagtaaaccac

SEQ ID NO: 17596 - protein, 245 aa, Triticum aestivum
  peptide (1)..(245): Ceres Seq. ID no. 14301697
  misc_feature (26)..(243): NCBI GI NO: 15241117 NR Description: hypothetical protein [Arabidopsis thaliana]
  misc_feature (84)..(243): NCBI GI NO: 15236740 NR Description: expressed protein [Arabidopsis thaliana]
  misc_feature (39)..(243): NCBI GI NO: 15231546 NR Description: hypothetical protein [Arabidopsis thaliana]
  misc_feature (41)..(243): NCBI GI NO: 15222151 NR Description: hypothetical protein [Arabidopsis thaliana]
  misc_feature (18)..(242): NCBI GI NO: 20804932 NR Description: P0456E05.10
  misc_feature (52)..(210): NCBI GI NO: 15242362 NR Description: hypothetical protein [Arabidopsis thaliana]
  misc_feature (42)..(226): NCBI GI NO: 38344198 NR Description: OSJNBa0064G10.14
  misc_feature (57)..(241): NCBI GI NO: 20804896 NR Description: P0497A05.21
LPVRSFVIGCCCSGSMGTPTPYHHLSPRTIVTKIISMKRQEPEPPPPPKIILQPRHRTSPAMWCAAIVCFAFSVLLILAGLVILVVFLTVKPRTPSFDVAHAALNSVYIGSPPPYFNGDMTLTANISNPNRKIGVVIQSGAVELFFRGRLVSAQALPSFAQRRGQFTVLSVHMLSSQVVLPPEVAVELLNQMKSNKILFTIRGTFKVRERFWSWHYTYRMTAICDLELTAPPSGFLVHRRCTTST

SEQ ID NO: 17597 - protein, 230 aa, Triticum aestivum
  peptide (1)..(230): Ceres Seq. ID no. 14301698
  misc_feature (11)..(228): NCBI GI NO: 15241117 NR Description: hypothetical protein [Arabidopsis thaliana]
  misc_feature (69)..(228): NCBI GI NO: 15236740 NR Description: expressed protein [Arabidopsis thaliana]
  misc_feature (24)..(228): NCBI GI NO: 15231546 NR Description: hypothetical protein [Arabidopsis thaliana]
  misc_feature (26)..(228): NCBI GI NO: 15222151 NR Description: hypothetical protein [Arabidopsis thaliana]
  misc_feature (3)..(227): NCBI GI NO: 20804932 NR Description: P0456E05.10
  misc_feature (37)..(195): NCBI GI NO: 15242362 NR Description: hypothetical protein [Arabidopsis thaliana]
  misc_feature (27)..(211): NCBI GI NO: 38344198 NR Description: OSJNBa0064G10.14
  misc_feature (42)..(226): NCBI GI NO: 20804896 NR Description: P0497A05.21
MGTPTPYHHLSPRTIVTKIISMKRQEPEPPPPPKIILQPRHRTSPAMWCAAIVCFAFSVLLILAGLVILVVFLTVKPRTPSFDVAHAALNSVYIGSPPPYFNGDMTLTANISNPNRKIGVVIQSGAVELFFRGRLVSAQALPSFAQRRGQFTVLSVHMLSSQVVLPPEVAVELLNQMKSNKILFTIRGTFKVRERFWSWHYTYRMTAICDLELTAPPSGFLVHRRCTTST

SEQ ID NO: 17598 - protein, 209 aa, Triticum aestivum
  peptide (1)..(209): Ceres Seq. ID no. 14301699
  misc_feature (1)..(207): NCBI GI NO: 15241117 NR Description: hypothetical protein [Arabidopsis thaliana]
  misc_feature (48)..(207): NCBI GI NO: 15236740 NR Description: expressed protein [Arabidopsis thaliana]
  misc_feature (3)..(207): NCBI GI NO: 15231546 NR Description: hypothetical protein [Arabidopsis thaliana]
  misc_feature (5)..(207): NCBI GI NO: 15222151 NR Description: hypothetical protein [Arabidopsis thaliana]
  misc_feature (1)..(206): NCBI GI NO: 20804932 NR Description: P0456E05.10
  misc_feature (16)..(174): NCBI GI NO: 15242362 NR Description: hypothetical protein [Arabidopsis thaliana]
  misc_feature (6)..(190): NCBI GI NO: 38344198 NR Description: OSJNBa0064G10.14
  misc_feature (21)..(205): NCBI GI NO: 20804896 NR Description: P0497A05.21
MKRQEPEPPPPPKIILQPRHRTSPAMWCAAIVCFAFSVLLILAGLVILVVFLTVKPRTPSFDVAHAALNSVYIGSPPPYFNGDMTLTANISNPNRKIGVVIQSGAVELFFRGRLVSAQALPSFAQRRGQFTVLSVHMLSSQVVLPPEVAVELLNQMKSNKILFTIRGTFKVRERFWSWHYTYRMTAICDLELTAPPSGFLVHRRCTTST

SEQ ID NO: 17599 - DNA, 1217 bp, Triticum aestivum
  misc_feature (1)..(1217): Ceres Seq. ID no. 14303126
tcacgagattttctaggctgaactgtacatgatatggcagaattagtagctcattagaagtacccttgtgattagagcaacactagcttcaaatgcatctttttctcaatcttttgtgcatagtaattaatgatgcaaaggccagggcccaaccttttctctaaaaaaatacataaaagaattctggggaacaaaaaattatcccattaaagtgcatctgaaccccattgtagtactactggttaatgaaactatcccattataataattatcacaagagctttacacacacacaaagagggctgattccttagacttatttccatcgaaacacatgaattaaaacttgcacgtaccagcttactagtatatataggatatcgcttggctgcagctttgcttttcccccggtttttataggctgtttctgggacagaaatgaccatctttgcattgcattgcattgcattgcattgcatactgaaatgaaatgaaacagggttcgatgtggaggagacttcggttgacggccccgacgacgtccaagggctggacgcatccgccgcacacatagcaaacctgctatcgtccgagccctctgatgtgaggcttgggataggcggtttcagcatgggagccgccactgcgctccactctgccgcatgttatgctcatggaaggttctcaaacggtgttgcctaccctattaccctcagcgctatcattgggttgagcggctggcttccctgctccaggaccctgaggaccaagattgagagctcacagactgctttcaggagggctgctgccttgccgataatgcttggccatggaagaggcgacgaggtagtcacgtacaggaacggcgagaggtcgtccgagtttctgcggaattcgggcttttcgtacctgaatttcaaagcctacaacggactgggccatcacaccatccctgaggaaatggacgatgtctccaagtggctcagggcaaggctcgggcttgatcgctcttgcggctaattaagtggagaagcttgtgccttggtggctgacacatgacatgagagaaatgtattgacactatagaggaggagaaggttgatatatataggttaatcatatgaagagatcacgaccggcatgtgttgatatataactcctcactactgaatttcatgttacacttatattgtactactaagagttgtaccccagct

SEQ ID NO: 17600 - protein, 129 aa, Triticum aestivum
  peptide (1)..(129): Ceres Seq. ID no. 14303127
  misc_feature (1)..(122): Pfam Name: Pfam Description:  Phospholipase/Carboxylesterase
  misc_feature (1)..(129): NCBI GI NO: 34912598 NR Description: P0046B10.16
  misc_feature (1)..(127): NCBI GI NO: 34910274 NR Description: OSJNBa0089K24.24
  misc_feature (1)..(127): NCBI GI NO: 29409364 NR Description: biostress-resistance-related protein
  misc_feature (1)..(125): NCBI GI NO: 15241251 NR Description: expressed protein [Arabidopsis thaliana]
  misc_feature (1)..(127): NCBI GI NO: 15232645 NR Description: lysophospholipase -related [Arabidopsis thaliana]
  misc_feature (1)..(125): NCBI GI NO: 28932772 NR Description: FPh1 [Gossypium hirsutum]
  misc_feature (1)..(67): NCBI GI NO: 15219072 NR Description: hypothetical protein [Arabidopsis thaliana]
  misc_feature (1)..(39): NCBI GI NO: 5903036 NR Description: F6D8.5 [Arabidopsis thaliana]
  misc_feature (1)..(127): NCBI GI NO: 25405556 NR Description: F6D8.31 [imported] - Arabidopsis thaliana
  misc_feature (1)..(125): NCBI GI NO: 25405554 NR Description: hypothetical protein F6D8.32
MGAATALHSAACYAHGRFSNGVAYPITLSAIIGLSGWLPCSRTLRTKIESSQTAFRRAAALPIMLGHGRGDEVVTYRNGERSSEFLRNSGFSYLNFKAYNGLGHHTIPEEMDDVSKWLRARLGLDRSCG

SEQ ID NO: 17601 - protein, 66 aa, Triticum aestivum
  peptide (1)..(66): Ceres Seq. ID no. 14303128
  misc_feature (1)..(59): Pfam Name: Pfam Description:  Phospholipase/Carboxylesterase
  misc_feature (1)..(66): NCBI GI NO: 34912598 NR Description: P0046B10.16
  misc_feature (1)..(64): NCBI GI NO: 34910274 NR Description: OSJNBa0089K24.24
  misc_feature (1)..(64): NCBI GI NO: 29409364 NR Description: biostress-resistance-related protein
  misc_feature (1)..(62): NCBI GI NO: 15241251 NR Description: expressed protein [Arabidopsis thaliana]
  misc_feature (1)..(64): NCBI GI NO: 15232645 NR Description: lysophospholipase -related [Arabidopsis thaliana]
  misc_feature (1)..(62): NCBI GI NO: 28932772 NR Description: FPh1 [Gossypium hirsutum]
  misc_feature (1)..(64): NCBI GI NO: 25405556 NR Description: F6D8.31 [imported] - Arabidopsis thaliana
  misc_feature (1)..(62): NCBI GI NO: 25405554 NR Description: hypothetical protein F6D8.32
  misc_feature (1)..(61): NCBI GI NO: 30695308 NR Description: phospholipase/carboxylesterase family
  misc_feature (1)..(59): NCBI GI NO: 32488391 NR Description: OSJNBa0043A12.21
MLGHGRGDEVVTYRNGERSSEFLRNSGFSYLNFKAYNGLGHHTIPEEMDDVSKWLRARLGLDRSCG

SEQ ID NO: 17602 - DNA, 1819 bp, Triticum aestivum
  misc_feature (1)..(1819): Ceres Seq. ID no. 14307871
cccgttccgtgtcggcgagccctccaccaccaccaccacctcctttccccctcctcgccctcccgcggccaccaaccggccccgatcccggatccggcgcggcagatccggatcccggcgatggcgtccacggcggcgaggcggctcagggagctgcaggggcagcccgggaacaagacgtgcgtcgactgcgcgcagaggaacccgcagtgggccagcgtctcctacggcgtcttcatgtgcctcgagtgctccggcaagcaccggggcctcggcgtgcacatcagcttcgtccgctccgtcaccatggactcctggaccgagccgcagctccgcaagatggaggccgggggcaacgaccgcctcaacgccttcctcaccgcgcggggcgtgcccaaggacacgccccacatccccaagtacaactccaacgccgccgccgcctaccgcgaccgcatcgtcgccctcgccgagggccgcgcgtggaccgacccgcccgtcgttaaggagacgcccggatctggcgcccccgcccccgccaggaggccgcccttgcccgccggagtagggggcggaggcggtggcggtggcggtggatgggacgattgggacgacgaggtccgtccggatatgcgtaggaaccaatcggccggatcgtttgctggcgctggagcggattcggggagacagccgacgaggtccaagtccactcaggacatatacaccaagcaggagcttgaggcgtcggcggccagcaaggaggattttttcgctaggagaatggcggagaacgagtccaagcctcaggggatccctccctctcagggcggcaagtacgttggcttcggatccaccccgccgccgtcggcgaacaggaacaacaacggtgctgcccagggcgatgtcatgcaggtcgtttcccagggatttggacgcctttcgcttgttgcagcatctgctgcccaatctgctgctactgttgtccaagttggcacaaaagagattcaatcaaagatgagggaagggggttatgatcagaaggtgaatgaaactgtcaatgttgtaaccaataaaactgcagagataggaagcagaacctgggggattatgaaaggagtgatggcattggcgacacaaaaggtagaggaatatgccaaggaagggggagtgggtggtggctggggtgatgattggcaacaaagggagcagcagaacaacagcaacgagccttaccgcaggtatgatcaggagaccagcaacggcaacggctggaattctccgcaagatggatcagcgaagaaccagaaccacaattccaattcttgggatgattgggatgaccaagacaagaaggaagagcctgccaagacaagccagagcagcgactcgtgggccggctgggatgatgcgaaagatgacggttttgatagttacagccatcacagcccagccaacaagggtgggagcaatcagaatggaactgcgggggggtcatattgggccgacggcggcttccgctgatgctggtctctttgtgagagccatatactttgcagagttatatgccagaaaaatgtgagcgtggttattatttcaggatacctaagtgttggagagtaaaagagttttttttttgtaagttgtctacaattgttatgtctagcggcatgttcatatggccaagcctcatttgaaactgccatccccagctattaagaagcgtcgaattgaaattgtaatctacacatacatacttcccctgcagattctttattccttgtgctgatttgtcgtagttgcaagtggcaagaggggtggc

SEQ ID NO: 17603 - protein, 506 aa, Triticum aestivum
  peptide (1)..(506): Ceres Seq. ID no. 14307872
  misc_feature (46)..(162): Pfam Name: Pfam Description:  Putative GTPase activating protein for Arf
  misc_feature (45)..(505): NCBI GI NO: 15231865 NR Description: ARF GAP-like zinc finger-containing protein
  misc_feature (45)..(500): NCBI GI NO: 10441356 NR Description: ARF GAP-like zinc finger-containing protein ZIGA2
  misc_feature (45)..(505): NCBI GI NO: 15224315 NR Description: arabidopsis pde1 suppressor 1 protein (Asp1)
  misc_feature (193)..(506): NCBI GI NO: 29367415 NR Description: ADP ribosylation GTPase-like protein
  misc_feature (41)..(497): NCBI GI NO: 31217790 NR Description: ENSANGP00000004294 [Anopheles gambiae]
  misc_feature (215)..(489): NCBI GI NO: 2286211 NR Description: putative ARF1 GTPase activating protein
  misc_feature (41)..(199): NCBI GI NO: 2286211 NR Description: putative ARF1 GTPase activating protein
  misc_feature (215)..(498): NCBI GI NO: 24663283 NR Description: GTPase-activating protein 69C CG4237-PA
  misc_feature (41)..(199): NCBI GI NO: 24663283 NR Description: GTPase-activating protein 69C CG4237-PA
  misc_feature (214)..(337): NCBI GI NO: 6319975 NR Description: Zn-finger-containing protein that functions as ADP-ribosylation factor GTPase-activating protein and is involved inregulating vesicle transport
PVPCRRALHHHHHLLSPSSPSRGHQPAPIPDPARQIRIPAMASTAARRLRELQGQPGNKTCVDCAQRNPQWASVSYGVFMCLECSGKHRGLGVHISFVRSVTMDSWTEPQLRKMEAGGNDRLNAFLTARGVPKDTPHIPKYNSNAAAAYRDRIVALAEGRAWTDPPVVKETPGSGAPAPARRPPLPAGVGGGGGGGGGGWDDWDDEVRPDMRRNQSAGSFAGAGADSGRQPTRSKSTQDIYTKQELEASAASKEDFFARRMAENESKPQGIPPSQGGKYVGFGSTPPPSANRNNNGAAQGDVMQVVSQGFGRLSLVAASAAQSAATVVQVGTKEIQSKMREGGYDQKVNETVNVVTNKTAEIGSRTWGIMKGVMALATQKVEEYAKEGGVGGGWGDDWQQREQQNNSNEPYRRYDQETSNGNGWNSPQDGSAKNQNHNSNSWDDWDDQDKKEEPAKTSQSSDSWAGWDDAKDDGFDSYSHHSPANKGGSNQNGTAGGSYWADGGFR

SEQ ID NO: 17604 - protein, 466 aa, Triticum aestivum
  peptide (1)..(466): Ceres Seq. ID no. 14307873
  misc_feature (6)..(122): Pfam Name: Pfam Description:  Putative GTPase activating protein for Arf
  misc_feature (5)..(465): NCBI GI NO: 15231865 NR Description: ARF GAP-like zinc finger-containing protein
  misc_feature (5)..(460): NCBI GI NO: 10441356 NR Description: ARF GAP-like zinc finger-containing protein ZIGA2
  misc_feature (5)..(465): NCBI GI NO: 15224315 NR Description: arabidopsis pde1 suppressor 1 protein (Asp1)
  misc_feature (153)..(466): NCBI GI NO: 29367415 NR Description: ADP ribosylation GTPase-like protein
  misc_feature (1)..(457): NCBI GI NO: 31217790 NR Description: ENSANGP00000004294 [Anopheles gambiae]
  misc_feature (175)..(449): NCBI GI NO: 2286211 NR Description: putative ARF1 GTPase activating protein
  misc_feature (1)..(159): NCBI GI NO: 2286211 NR Description: putative ARF1 GTPase activating protein
  misc_feature (175)..(458): NCBI GI NO: 24663283 NR Description: GTPase-activating protein 69C CG4237-PA
  misc_feature (1)..(159): NCBI GI NO: 24663283 NR Description: GTPase-activating protein 69C CG4237-PA
  misc_feature (174)..(297): NCBI GI NO: 6319975 NR Description: Zn-finger-containing protein that functions as ADP-ribosylation factor GTPase-activating protein and is involved inregulating vesicle transport
MASTAARRLRELQGQPGNKTCVDCAQRNPQWASVSYGVFMCLECSGKHRGLGVHISFVRSVTMDSWTEPQLRKMEAGGNDRLNAFLTARGVPKDTPHIPKYNSNAAAAYRDRIVALAEGRAWTDPPVVKETPGSGAPAPARRPPLPAGVGGGGGGGGGGWDDWDDEVRPDMRRNQSAGSFAGAGADSGRQPTRSKSTQDIYTKQELEASAASKEDFFARRMAENESKPQGIPPSQGGKYVGFGSTPPPSANRNNNGAAQGDVMQVVSQGFGRLSLVAASAAQSAATVVQVGTKEIQSKMREGGYDQKVNETVNVVTNKTAEIGSRTWGIMKGVMALATQKVEEYAKEGGVGGGWGDDWQQREQQNNSNEPYRRYDQETSNGNGWNSPQDGSAKNQNHNSNSWDDWDDQDKKEEPAKTSQSSDSWAGWDDAKDDGFDSYSHHSPANKGGSNQNGTAGGSYWADGGFR

SEQ ID NO: 17605 - protein, 427 aa, Triticum aestivum
  peptide (1)..(427): Ceres Seq. ID no. 14307874
  misc_feature (1)..(83): Pfam Name: Pfam Description:  Putative GTPase activating protein for Arf
  misc_feature (1)..(426): NCBI GI NO: 15231865 NR Description: ARF GAP-like zinc finger-containing protein
  misc_feature (1)..(421): NCBI GI NO: 10441356 NR Description: ARF GAP-like zinc finger-containing protein ZIGA2
  misc_feature (1)..(426): NCBI GI NO: 15224315 NR Description: arabidopsis pde1 suppressor 1 protein (Asp1)
  misc_feature (114)..(427): NCBI GI NO: 29367415 NR Description: ADP ribosylation GTPase-like protein
  misc_feature (1)..(418): NCBI GI NO: 31217790 NR Description: ENSANGP00000004294 [Anopheles gambiae]
  misc_feature (136)..(410): NCBI GI NO: 2286211 NR Description: putative ARF1 GTPase activating protein
  misc_feature (1)..(120): NCBI GI NO: 2286211 NR Description: putative ARF1 GTPase activating protein
  misc_feature (136)..(419): NCBI GI NO: 24663283 NR Description: GTPase-activating protein 69C CG4237-PA
  misc_feature (1)..(120): NCBI GI NO: 24663283 NR Description: GTPase-activating protein 69C CG4237-PA
  misc_feature (135)..(258): NCBI GI NO: 6319975 NR Description: Zn-finger-containing protein that functions as ADP-ribosylation factor GTPase-activating protein and is involved inregulating vesicle transport
MCLECSGKHRGLGVHISFVRSVTMDSWTEPQLRKMEAGGNDRLNAFLTARGVPKDTPHIPKYNSNAAAAYRDRIVALAEGRAWTDPPVVKETPGSGAPAPARRPPLPAGVGGGGGGGGGGWDDWDDEVRPDMRRNQSAGSFAGAGADSGRQPTRSKSTQDIYTKQELEASAASKEDFFARRMAENESKPQGIPPSQGGKYVGFGSTPPPSANRNNNGAAQGDVMQVVSQGFGRLSLVAASAAQSAATVVQVGTKEIQSKMREGGYDQKVNETVNVVTNKTAEIGSRTWGIMKGVMALATQKVEEYAKEGGVGGGWGDDWQQREQQNNSNEPYRRYDQETSNGNGWNSPQDGSAKNQNHNSNSWDDWDDQDKKEEPAKTSQSSDSWAGWDDAKDDGFDSYSHHSPANKGGSNQNGTAGGSYWADGGFR

SEQ ID NO: 17606 - DNA, 2552 bp, Triticum aestivum
  misc_feature (1)..(2552): Ceres Seq. ID no. 14303011
aaagaaccggaaggagtaggacacacctttggtcttcgctccgccgctcagttcgacgaaatgccgcattcgctccctcctcaggcaggctgtctccgcgtacacatcccacccctccccccacccttcccttcatatggatacggtggagccgtggaggtcctccggcgagacactacgatggcgctcaaagaagctctgctgcgcgtgccgcgtgcgatatggccctgggtcctctgcgccgtattccaggagaaagtatgaggatagaggcctaggtcaaggcgaaagcgcccacctacgaggctgcactcttgcccagtgatcagggtactatcggtattgggcgaacgtttggttgggcgctgctcgcaaggtgctcgaccaaatgcccaggtagagtgtgtcgactgaaatattttttatcttcttctttatctcacaatggtattaagcttgatgttgaagtttttaggatctaaatcatctacttttcatatgataattctgtgaaaaatatcaaaaagtttctaagttttgtcatgatattctgccatttattttctacttctgatggatcactatttgaaggctgaattgtagttcattatcttgctgcttgatgtatatggattagttgtaagaattgcttgtttccagtggcaatttcaaatattgtatagcaggattagcactaaatataaattcaagtgcacagtcactgtaaataaaatgaaaaatctacgccactccaaaagaaaaggttgcttctgtgctgctttaaaatgtctgaatcccatgctgaacaatttaaccagatcagaataacaagtctgctaatctagaaataataatgcctctgctagtgacaggttgttaattttattatttccactggatcccatgctaaacaatgtaacccgatcagaagaacaagtctgctaatctaatctgcgagtgacaggtttagtattatatccggatctgaatttgaccaacctttcagcctttccattgtctggtccgaagatagaaaataagaaagcatgctggccctactattgctgctgataagcagccagaagcccagaaacgacatccccgttgatcatagacaaaagaagtattgaacttccggtactttttcagcgttgtcatcctaatttgattcctgcagatccaagatctggtgtttagccttgctccaagtaaagccatagcctccaaacagatggtgcatatgaatcaaggacaaggggaaacaagctatgcacacaactccagtatccagaacgctcagcagaacaggatgaagcccctgatagaagcggccatcattgacttgtgcggcagcaaaagcaccttgttccccgaaaagatgctgattgcggacttgggctgctcttatggcccaaatgcgctagcactggtatcgactgccgtcaaggccatcatcaaccactgccttcagttccagcaaccaccacccgaagtgtgtgtgctcctcaatgaccttcctgacaatgacttcaacacggtggtgaagagcctggccacgctccgtcaaaataacaacaagcttgttgttgtgactggtgtagcaccggggtcattttacgagaggctcttcactagtgactccttgcatcttgtctgctcgtccaacagcttgcattggctctccatggtgtgaatttatcacccttcaatggatctatccattgcattacttatttattttgtaaaagaaaccttatcctcgcaggctcccgaagatctgacaatgaaccagatccctgcgtacgacatggatgagcatgctaggcgtgaaagactccctacggtccgtgaagcatatgcacgccagttcaggaaagatttcatacttttcctggagctgagagccaaagaattggttccaggaggccgaatggttgtttctcttgtagggcggccttctaatgtaaaagcctccaaattctttcacctttgggaaactctagttcagattctaagtgtcatggccttagagggtgtgatcgacaaagcgaagtttgattctttctatgtgccggtgtatggaccctctggtgaagagctgagggagatcatccaagacgagggctccttttctatcagggatatgcgggtatatgacgctacaactgatatggacagcatgctcttcaccccaagctcgtttgtgaattatctgagagccatatttgagccgataatagtcgagcattttggagaggtcatggatgaatttgtgaggaccgcggagcggcgctggagcctcgagggcagcatgcaaaacgagcgtgctaggaatccatgagctatgctggctgtatcccttgtaaaggcatgattatcaggtactttatagtacatcacatttggttaggtttattgctttatttgaggtgacaatgtgtgccaacttcattgtgtaaactacatcctgtatggtgttctgcgaagatatcgacgctcaagagattaagaatgaactatcatttatatagattagcagactgttgttgccc

SEQ ID NO: 17607 - protein, 210 aa, Triticum aestivum
  peptide (1)..(210): Ceres Seq. ID no. 14303012
  misc_feature (44)..(209): Pfam Name: Pfam Description:  SAM dependent carboxyl methyltransferase
  misc_feature (44)..(209): NCBI GI NO: 34911486 NR Description: putative S-adenosyl-L-methionine:salicylic acidcarboxyl methyltransferase
  misc_feature (1)..(193): NCBI GI NO: 13676829 NR Description: S-adenosyl-L-methionine: jasmonic acid carboxylmethyltransferase
  misc_feature (9)..(186): NCBI GI NO: 28629495 NR Description: S-adenosyl-L-methionine:benzoic acid/ salicylic acidcarboxyl methyltransferase
  misc_feature (9)..(186): NCBI GI NO: 28629497 NR Description: S-adenosyl-L-methionine:benzoic acid/ salicylic acidcarboxyl methyltransferase
  misc_feature (45)..(193): NCBI GI NO: 13235641 NR Description: S-adenosyl-L-methionine: salicylic acid carboxylmethyltransferase
  misc_feature (1)..(193): NCBI GI NO: 15223601 NR Description: S-adenosyl-L-methionine: jasmonic acid carboxylmethyltransferase
  misc_feature (9)..(186): NCBI GI NO: 23957318 NR Description: S-adenosyl-L-methionine: salicylic acidmethyltransferase
  misc_feature (9)..(210): NCBI GI NO: 15239970 NR Description: S-adenosyl-L-methionine: carboxyl methyltransferasefamily
  misc_feature (45)..(189): NCBI GI NO: 34809619 NR Description: Chain X
  misc_feature (18)..(210): NCBI GI NO: 15237695 NR Description: S-adenosyl-L-methionine: carboxyl methyltransferasefamily
MDLSIALLIYFVKETLSSQAPEDLTMNQIPAYDMDEHARRERLPTVREAYARQFRKDFILFLELRAKELVPGGRMVVSLVGRPSNVKASKFFHLWETLVQILSVMALEGVIDKAKFDSFYVPVYGPSGEELREIIQDEGSFSIRDMRVYDATTDMDSMLFTPSSFVNYLRAIFEPIIVEHFGEVMDEFVRTAERRWSLEGSMQNERARNP

SEQ ID NO: 17608 - protein, 185 aa, Triticum aestivum
  peptide (1)..(185): Ceres Seq. ID no. 14303013
  misc_feature (19)..(184): Pfam Name: Pfam Description:  SAM dependent carboxyl methyltransferase
  misc_feature (19)..(184): NCBI GI NO: 34911486 NR Description: putative S-adenosyl-L-methionine:salicylic acidcarboxyl methyltransferase
  misc_feature (1)..(168): NCBI GI NO: 13676829 NR Description: S-adenosyl-L-methionine: jasmonic acid carboxylmethyltransferase
  misc_feature (1)..(161): NCBI GI NO: 28629495 NR Description: S-adenosyl-L-methionine:benzoic acid/ salicylic acidcarboxyl methyltransferase
  misc_feature (1)..(161): NCBI GI NO: 28629497 NR Description: S-adenosyl-L-methionine:benzoic acid/ salicylic acidcarboxyl methyltransferase
  misc_feature (20)..(168): NCBI GI NO: 13235641 NR Description: S-adenosyl-L-methionine: salicylic acid carboxylmethyltransferase
  misc_feature (1)..(168): NCBI GI NO: 15223601 NR Description: S-adenosyl-L-methionine: jasmonic acid carboxylmethyltransferase
  misc_feature (1)..(161): NCBI GI NO: 23957318 NR Description: S-adenosyl-L-methionine: salicylic acidmethyltransferase
  misc_feature (1)..(185): NCBI GI NO: 15239970 NR Description: S-adenosyl-L-methionine: carboxyl methyltransferasefamily
  misc_feature (20)..(164): NCBI GI NO: 34809619 NR Description: Chain X
  misc_feature (1)..(185): NCBI GI NO: 15237695 NR Description: S-adenosyl-L-methionine: carboxyl methyltransferasefamily
MNQIPAYDMDEHARRERLPTVREAYARQFRKDFILFLELRAKELVPGGRMVVSLVGRPSNVKASKFFHLWETLVQILSVMALEGVIDKAKFDSFYVPVYGPSGEELREIIQDEGSFSIRDMRVYDATTDMDSMLFTPSSFVNYLRAIFEPIIVEHFGEVMDEFVRTAERRWSLEGSMQNERARNP

SEQ ID NO: 17609 - protein, 177 aa, Triticum aestivum
  peptide (1)..(177): Ceres Seq. ID no. 14303014
  misc_feature (11)..(176): Pfam Name: Pfam Description:  SAM dependent carboxyl methyltransferase
  misc_feature (11)..(176): NCBI GI NO: 34911486 NR Description: putative S-adenosyl-L-methionine:salicylic acidcarboxyl methyltransferase
  misc_feature (1)..(160): NCBI GI NO: 13676829 NR Description: S-adenosyl-L-methionine: jasmonic acid carboxylmethyltransferase
  misc_feature (1)..(153): NCBI GI NO: 28629495 NR Description: S-adenosyl-L-methionine:benzoic acid/ salicylic acidcarboxyl methyltransferase
  misc_feature (1)..(153): NCBI GI NO: 28629497 NR Description: S-adenosyl-L-methionine:benzoic acid/ salicylic acidcarboxyl methyltransferase
  misc_feature (12)..(160): NCBI GI NO: 13235641 NR Description: S-adenosyl-L-methionine: salicylic acid carboxylmethyltransferase
  misc_feature (1)..(160): NCBI GI NO: 15223601 NR Description: S-adenosyl-L-methionine: jasmonic acid carboxylmethyltransferase
  misc_feature (1)..(153): NCBI GI NO: 23957318 NR Description: S-adenosyl-L-methionine: salicylic acidmethyltransferase
  misc_feature (1)..(177): NCBI GI NO: 15239970 NR Description: S-adenosyl-L-methionine: carboxyl methyltransferasefamily
  misc_feature (12)..(156): NCBI GI NO: 34809619 NR Description: Chain X
  misc_feature (1)..(177): NCBI GI NO: 15237695 NR Description: S-adenosyl-L-methionine: carboxyl methyltransferasefamily
MDEHARRERLPTVREAYARQFRKDFILFLELRAKELVPGGRMVVSLVGRPSNVKASKFFHLWETLVQILSVMALEGVIDKAKFDSFYVPVYGPSGEELREIIQDEGSFSIRDMRVYDATTDMDSMLFTPSSFVNYLRAIFEPIIVEHFGEVMDEFVRTAERRWSLEGSMQNERARNP

SEQ ID NO: 17610 - DNA, 1319 bp, Triticum aestivum
  misc_feature (1)..(1319): Ceres Seq. ID no. 13663665
  misc_feature (1294)..(1294): n is a, c, t, g, unknown, or other
aatcccgtgtgcgtcccgctgttcgcttctcccgcatcccgatagcaccagcaagcaaaacccccctcccctctccatccagttccccctccccctcccccgvccgccgtcccatggcgtctctcctccgcacggccgccgcgctcgcgcccccaccgtcgtccgcccgggagacgcggcggccgtcgtgcgccgcctccctcgcctgctcccggcgcgcgccggcgagtccgctgcgcgctccgcctctgcccgggccatggcgattggggcccgatgaggccgcgcgtacggccactcagtttctctgccgatacatgagaagagatgggcatgaaggtgatgggagaacgcaaggacaagacgaacctagtatgtttgsgccagatgatgacgatggtgcaaagattcctactcaggtggaaactcttgttagaggcactgcaatagttgatgctccagaatacaagccgctcccagatctcgattaccttcaggaattgctggctattcagcagcaaggaccccgatcaataggtttctttggtacccgcaacatggggtatatgcatcaacaacttattgagatcttgagttatgccatggtcataacaaaaaatcatatattcacatctggtgcttctgggactaacgcagctgttattaggggtgctttgagagctgagaagccagaattgcttaccgtaattttgcctcaaagtctaaagaagcaacctcctgaaagccaagagctattatccaaagtacaaaacttgattgagaaacctcagtatgaccatttaccactaattgaggctagcaggttatgcaacatggacatcatctcgaaggtccaacaggtgatatgctttgcgtttcatgacagcaggctgctgatggagacctgccaggaggcaaagaacatgcggaagatcgtaacgctcttctacttggattagctagcacctcggggcgcttctcccctttttgtccgtaggccggtgaacgggatgctgtcattcctgtatacactaaagctctggagtaggttcaggtttggggcataacagtgcgtcttcgggcattttgcccattattcaaattcttggtagaaaccaaataagcttgtcgatatgtctagtctgtcagtaaagaaaataattcaagttcttattactagtaatttcaaaggctacagtattgaaaaaactgtttccactctcaatcaaaaagaaaaaggaaaaactgtttccgaaaaaaaaaaaaaaaaaagcttaatcgataccgtcgaccntcgaaggggggggcccgggtaccca

SEQ ID NO: 17611 - protein, 318 aa, Triticum aestivum
  peptide (1)..(318): Ceres Seq. ID no. 15220250
  misc_feature (37)..(318): NCBI GI NO: 30689549 NR Description: predicted protein [Arabidopsis thaliana]
  misc_feature (108)..(318): NCBI GI NO: 21537298 NR Description: unknown [Arabidopsis thaliana]
  misc_feature (108)..(318): NCBI GI NO: 15232185 NR Description: expressed protein [Arabidopsis thaliana]
  misc_feature (37)..(294): NCBI GI NO: 7486491 NR Description: hypothetical protein At2g43940
  misc_feature (100)..(259): NCBI GI NO: 34894968 NR Description: B1088D01.6
  misc_feature (164)..(318): NCBI GI NO: 13812204 NR Description: hypothetical protein [Guillardia theta]
  misc_feature (158)..(318): NCBI GI NO: 16331173 NR Description: unknown protein [Synechocystis sp. PCC 6803]
  misc_feature (168)..(318): NCBI GI NO: 37522470 NR Description: hypothetical protein gll2901
  misc_feature (182)..(318): NCBI GI NO: 23043068 NR Description: hypothetical protein
  misc_feature (186)..(318): NCBI GI NO: 17232156 NR Description: hypothetical protein [Nostoc sp. PCC 7120]
  misc_feature (34)..(34): Xaa is any aa, unknown or other
  misc_feature (127)..(127): Xaa is any aa, unknown or other
SRVRPAVRFSRIPIAPASKTPLPSPSSSPSPSPXRRPMASLLRTAAALAPPPSSARETRRPSCAASLACSRRAPASPLRAPPLPGPWRLGPDEAARTATQFLCRYMRRDGHEGDGRTQGQDEPSMFXPDDDDGAKIPTQVETLVRGTAIVDAPEYKPLPDLDYLQELLAIQQQGPRSIGFFGTRNMGYMHQQLIEILSYAMVITKNHIFTSGASGTNAAVIRGALRAEKPELLTVILPQSLKKQPPESQELLSKVQNLIEKPQYDHLPLIEASRLCNMDIISKVQQVICFAFHDSRLLMETCQEAKNMRKIVTLFYLD

SEQ ID NO: 17612 - protein, 281 aa, Triticum aestivum
  peptide (1)..(281): Ceres Seq. ID no. 15220251
  misc_feature (1)..(281): NCBI GI NO: 30689549 NR Description: predicted protein [Arabidopsis thaliana]
  misc_feature (71)..(281): NCBI GI NO: 21537298 NR Description: unknown [Arabidopsis thaliana]
  misc_feature (71)..(281): NCBI GI NO: 15232185 NR Description: expressed protein [Arabidopsis thaliana]
  misc_feature (1)..(257): NCBI GI NO: 7486491 NR Description: hypothetical protein At2g43940
  misc_feature (63)..(222): NCBI GI NO: 34894968 NR Description: B1088D01.6
  misc_feature (127)..(281): NCBI GI NO: 13812204 NR Description: hypothetical protein [Guillardia theta]
  misc_feature (121)..(281): NCBI GI NO: 16331173 NR Description: unknown protein [Synechocystis sp. PCC 6803]
  misc_feature (131)..(281): NCBI GI NO: 37522470 NR Description: hypothetical protein gll2901
  misc_feature (145)..(281): NCBI GI NO: 23043068 NR Description: hypothetical protein
  misc_feature (149)..(281): NCBI GI NO: 17232156 NR Description: hypothetical protein [Nostoc sp. PCC 7120]
  misc_feature (90)..(90): Xaa is any aa, unknown or other
MASLLRTAAALAPPPSSARETRRPSCAASLACSRRAPASPLRAPPLPGPWRLGPDEAARTATQFLCRYMRRDGHEGDGRTQGQDEPSMFXPDDDDGAKIPTQVETLVRGTAIVDAPEYKPLPDLDYLQELLAIQQQGPRSIGFFGTRNMGYMHQQLIEILSYAMVITKNHIFTSGASGTNAAVIRGALRAEKPELLTVILPQSLKKQPPESQELLSKVQNLIEKPQYDHLPLIEASRLCNMDIISKVQQVICFAFHDSRLLMETCQEAKNMRKIVTLFYLD

SEQ ID NO: 17613 - protein, 213 aa, Triticum aestivum
  peptide (1)..(213): Ceres Seq. ID no. 15220252
  misc_feature (1)..(213): NCBI GI NO: 30689549 NR Description: predicted protein [Arabidopsis thaliana]
  misc_feature (3)..(213): NCBI GI NO: 21537298 NR Description: unknown [Arabidopsis thaliana]
  misc_feature (3)..(213): NCBI GI NO: 15232185 NR Description: expressed protein [Arabidopsis thaliana]
  misc_feature (1)..(189): NCBI GI NO: 7486491 NR Description: hypothetical protein At2g43940
  misc_feature (1)..(154): NCBI GI NO: 34894968 NR Description: B1088D01.6
  misc_feature (59)..(213): NCBI GI NO: 13812204 NR Description: hypothetical protein [Guillardia theta]
  misc_feature (53)..(213): NCBI GI NO: 16331173 NR Description: unknown protein [Synechocystis sp. PCC 6803]
  misc_feature (63)..(213): NCBI GI NO: 37522470 NR Description: hypothetical protein gll2901
  misc_feature (77)..(213): NCBI GI NO: 23043068 NR Description: hypothetical protein
  misc_feature (81)..(213): NCBI GI NO: 17232156 NR Description: hypothetical protein [Nostoc sp. PCC 7120]
  misc_feature (22)..(22): Xaa is any aa, unknown or other
MRRDGHEGDGRTQGQDEPSMFXPDDDDGAKIPTQVETLVRGTAIVDAPEYKPLPDLDYLQELLAIQQQGPRSIGFFGTRNMGYMHQQLIEILSYAMVITKNHIFTSGASGTNAAVIRGALRAEKPELLTVILPQSLKKQPPESQELLSKVQNLIEKPQYDHLPLIEASRLCNMDIISKVQQVICFAFHDSRLLMETCQEAKNMRKIVTLFYLD

SEQ ID NO: 17614 - DNA, 2057 bp, Triticum aestivum
  misc_feature (1)..(2057): Ceres Seq. ID no. 14316029
gtgcagtgacagaatcacaaaaaatacagctctctgcgcactcgtccattcggcgactagtcgacgcagctgacgccaccacgcggcggcggcgcttgttcccatcgccgccaccggcatggccgagggcaccgacacggtgcgcgcgcccggcgacgcggaggagatggagaagggagagatcgcaggcgccgccgccggtgccgacggcgactccgccgcgccccagccggtggagcccacctgggctttctggatcggcaacggcaacccgcaggaggattccgccggccgggggaacaccgtccacaccttctccaccgtcgacgacttcttgagcctttacaataatatcctccaccctagtaaattgggtgtgggagctgacctccattgcttcaagaataagattgagccgaaatgcgaaggccccatatgtgctaatggaggtgcatggaccatcagttgtggcgaagggaaatcgcagccattgtggttggatacactactggcattgattggtggacaattcgaatatggtaatgaaatttgtggagcggtccttagcgtgtgtgggaagcaggaaacaatagctatatggattaaagatgctactaacgaagctgctcagctaagcattggcaagcagtggaaggaatttctggagtacaaggactcagttgagttcattgttcatgatagtgatgcaacggcagtacaatgctggtcttccacgtttcccgatgatccccttgacgtcatctacaacaaggtccccagtcactgcagccgcgtgcgctttgctgccgtctgcagatcgtggtgcactgcagcttcgcggcaccccgcgctgcctgaactcccgtggctgctcctctcaccacgcgaccgtgacacaacgaagcgcctctactgtcctgaggacagcaagatcctgtgcatctcgctcccgagcgatttcatcggcaactggttcgtcggctgtcatggtggtggctgggttgcatcattcgaaccaccaccgttcaggatcttgaacattttctccagtgttgaggttgcgctctccgagaaacagaaggggatcgtttgcccaggccgccttggccagatcatcatttggaaaatcatcttctccaaaccacccacctcaagtgactgtatcattgctgccatcaccgacaatcacggcatcgcgctctgcagggttgggtgtccgaacggtgggtggacaacaaaaggacatgtaagctacaccatggagcttgcagacatcgccttttgcaacggtaagctctatggtctcacacgggacagatgggaacttgtcaagtttgagatcggtgctgatgaagatggtgcgcccgtggtcacagccgttgatcggctagtggtcactgtcgagcaccagcagccccccagtgtctgggccaaccgggtggatgccagctacatttttgagctacacggcaagcttgcgacggcggtgaggtccccatggtcacccaacctcagacctttcttcaaagtgttcgaacttgttgacatcgacaccagcgaggggatggcacatggcacacacaaatggacagaggtgatgagcttgggtgactttgccctattcctgggtccaaacagctccaaggcggtgcatgtgtcagcagacaggcgcggcggtgtgaagagaaaccacatctactactcctaccatcgccgcttagcacagaaggaggtccttctcagcactgacctggtgttcctgacaagctccaacgctgatggtgattccgtgtactacagggaagatgaaagcttatccgcagccgtgggcggggttcataggattggggcagtaggatactatgtcaggggtagccctaatcctccagtgtggcttctccccctagcatagtggctttttatatacattgtattgcttagctgctgcacatgcctgaaaattgtaccgttagctgtataaccgtaaatgctctatggtttcaaccatgttgtatttagaacgaatgtacagcaattataattaatctgtactcatg

SEQ ID NO: 17615 - protein, 597 aa, Triticum aestivum
  peptide (1)..(597): Ceres Seq. ID no. 14316030
  misc_feature (13)..(197): Pfam Name: Pfam Description:  Eukaryotic initiation factor 4E
  misc_feature (13)..(197): NCBI GI NO: 34905982 NR Description: eukaryotic translation initiation factor 4E
  misc_feature (1)..(197): NCBI GI NO: 30923212 NR Description: Eukaryotic translation initiation factor 4E
  misc_feature (10)..(197): NCBI GI NO: 6016334 NR Description: EUKARYOTIC TRANSLATION INITIATION FACTOR 4E
  misc_feature (19)..(197): NCBI GI NO: 283021 NR Description: translation iation factor eIF-4F chain p26 -wheat
  misc_feature (15)..(197): NCBI GI NO: 25176244 NR Description: eucaryotic initiation factor 4E [Capsicum annuum]
  misc_feature (15)..(197): NCBI GI NO: 25176242 NR Description: eucaryotic initiation factor 4E [Capsicum annuum]
  misc_feature (15)..(197): NCBI GI NO: 38565045 NR Description: eukaryotic translation initiation factor 4E
  misc_feature (15)..(197): NCBI GI NO: 38565051 NR Description: eukaryotic translation initiation factor 4E
  misc_feature (13)..(197): NCBI GI NO: 15236735 NR Description: translation initiation factor eIF4E
  misc_feature (15)..(197): NCBI GI NO: 25176246 NR Description: eucaryotic initiation factor 4E [Capsicum annuum]
MAEGTDTVRAPGDAEEMEKGEIAGAAAGADGDSAAPQPVEPTWAFWIGNGNPQEDSAGRGNTVHTFSTVDDFLSLYNNILHPSKLGVGADLHCFKNKIEPKCEGPICANGGAWTISCGEGKSQPLWLDTLLALIGGQFEYGNEICGAVLSVCGKQETIAIWIKDATNEAAQLSIGKQWKEFLEYKDSVEFIVHDSDATAVQCWSSTFPDDPLDVIYNKVPSHCSRVRFAAVCRSWCTAASRHPALPELPWLLLSPRDRDTTKRLYCPEDSKILCISLPSDFIGNWFVGCHGGGWVASFEPPPFRILNIFSSVEVALSEKQKGIVCPGRLGQIIIWKIIFSKPPTSSDCIIAAITDNHGIALCRVGCPNGGWTTKGHVSYTMELADIAFCNGKLYGLTRDRWELVKFEIGADEDGAPVVTAVDRLVVTVEHQQPPSVWANRVDASYIFELHGKLATAVRSPWSPNLRPFFKVFELVDIDTSEGMAHGTHKWTEVMSLGDFALFLGPNSSKAVHVSADRRGGVKRNHIYYSYHRRLAQKEVLLSTDLVFLTSSNADGDSVYYREDESLSAAVGGVHRIGAVGYYVRGSPNPPVWLLPLA

SEQ ID NO: 17616 - protein, 581 aa, Triticum aestivum
  peptide (1)..(581): Ceres Seq. ID no. 14316031
  misc_feature (1)..(181): Pfam Name: Pfam Description:  Eukaryotic initiation factor 4E
  misc_feature (1)..(181): NCBI GI NO: 34905982 NR Description: eukaryotic translation initiation factor 4E
  misc_feature (1)..(181): NCBI GI NO: 30923212 NR Description: Eukaryotic translation initiation factor 4E
  misc_feature (1)..(181): NCBI GI NO: 6016334 NR Description: EUKARYOTIC TRANSLATION INITIATION FACTOR 4E
  misc_feature (3)..(181): NCBI GI NO: 283021 NR Description: translation iation factor eIF-4F chain p26 -wheat
  misc_feature (1)..(181): NCBI GI NO: 25176244 NR Description: eucaryotic initiation factor 4E [Capsicum annuum]
  misc_feature (1)..(181): NCBI GI NO: 25176242 NR Description: eucaryotic initiation factor 4E [Capsicum annuum]
  misc_feature (1)..(181): NCBI GI NO: 38565045 NR Description: eukaryotic translation initiation factor 4E
  misc_feature (1)..(181): NCBI GI NO: 38565051 NR Description: eukaryotic translation initiation factor 4E
  misc_feature (1)..(181): NCBI GI NO: 15236735 NR Description: translation initiation factor eIF4E
  misc_feature (1)..(181): NCBI GI NO: 25176246 NR Description: eucaryotic initiation factor 4E [Capsicum annuum]
MEKGEIAGAAAGADGDSAAPQPVEPTWAFWIGNGNPQEDSAGRGNTVHTFSTVDDFLSLYNNILHPSKLGVGADLHCFKNKIEPKCEGPICANGGAWTISCGEGKSQPLWLDTLLALIGGQFEYGNEICGAVLSVCGKQETIAIWIKDATNEAAQLSIGKQWKEFLEYKDSVEFIVHDSDATAVQCWSSTFPDDPLDVIYNKVPSHCSRVRFAAVCRSWCTAASRHPALPELPWLLLSPRDRDTTKRLYCPEDSKILCISLPSDFIGNWFVGCHGGGWVASFEPPPFRILNIFSSVEVALSEKQKGIVCPGRLGQIIIWKIIFSKPPTSSDCIIAAITDNHGIALCRVGCPNGGWTTKGHVSYTMELADIAFCNGKLYGLTRDRWELVKFEIGADEDGAPVVTAVDRLVVTVEHQQPPSVWANRVDASYIFELHGKLATAVRSPWSPNLRPFFKVFELVDIDTSEGMAHGTHKWTEVMSLGDFALFLGPNSSKAVHVSADRRGGVKRNHIYYSYHRRLAQKEVLLSTDLVFLTSSNADGDSVYYREDESLSAAVGGVHRIGAVGYYVRGSPNPPVWLLPLA

SEQ ID NO: 17617 - DNA, 1338 bp, Triticum aestivum
  misc_feature (1)..(1338): Ceres Seq. ID no. 15169519
aaagcaaagcccgcaacacgtaccaactctcctacgagctgagcgagcgaacgggagagagggtcggcgtcggagaaggaagatggatcacgcggcggacacgttccggacggacctgatgaccatcacgcggcacgtgctgaacgagcagagccggcacccggagtcgcgcggcgacctcaccatcctcctctcccacatcgtcctcggctgcaagttcgtcgcctccgccgtcaacaaggccggcctcgccaagctcaccggcctcgccggcgagaccaacgtccagggggaggagcagaagaagctggacgtgctctccaacgaggtgttcgtcaatgccctcgtcagcagcggccgcacctgcgttcttgtgtccgaggaggacgagaaggtgacgttcgtggaccctaagctccgtggaaagtactgtgtctgctttgaccccctggatggatcctccaacatcgactgcggcgtctccatcggaacgatctttgggatctacatgatcaagaaccaagacaccgtgactctggaggaagtactgcagcctgggaaggacatgattgctgccggatactgcatgtatgggagttcctgcacgcttgtcctgagcactggaaatggtgtcaacggcttcacgcttgacccctctctcggggagttcataatgactcatccagatatcaagataccgccgaaaggaaagatctattcggttaatgaagggaacgccaagaactgggacacgcctactgcaaagtacgtggagaagtgcaagtaccccacggatggttcatcacctaaatcccttagatacatcggcagcatggttgctgatgtgcaccgcaccttgctatacggcggcatatttctgtaccccgcggacaagaagagcccaagcggaaagctccgtgtgatgtatgaggtgttccccatgtcattcctgatggaggaggctggaggccagtctttcacaggcaaaggacggtcgctcgacctgatccccaccgacatccacgagagatcgccgatattcctcggcagcagcgacgacgtggaggagatcaaggcactgtacgcggaggaggccaagaaggcagggtctgcatgatgatcggcggccgtcgcgtgtgaatcgatggcgacccatgggcctttgctggcaatgtgattcgtatgtcaggcatttcttttctatacgtccgtgtcattcagtgtaatatagcgtgtggaggcctcgaacagcttcattcatgagcagccaaggcttctgcctctcacaacaatccactgatgatggcacgtaatatacctccataactacatgtttcc

SEQ ID NO: 17618 - protein, 371 aa, Triticum aestivum
  peptide (1)..(371): Ceres Seq. ID no. 15169520
  misc_feature (40)..(364): Pfam Name: Pfam Description:  Fructose-1-6-bisphosphatase
  misc_feature (28)..(366): NCBI GI NO: 6684169 NR Description: fructose-1,6-bisphosphatase [Porteresia coarctata]
  misc_feature (28)..(366): NCBI GI NO: 3913640 NR Description: FRUCTOSE-1,6-BISPHOSPHATASE, CYTOSOLIC
  misc_feature (89)..(365): NCBI GI NO: 34908588 NR Description: fructose-1,6-bisphosphatase
  misc_feature (28)..(96): NCBI GI NO: 34908588 NR Description: fructose-1,6-bisphosphatase
  misc_feature (40)..(370): NCBI GI NO: 2494417 NR Description: FRUCTOSE-1,6-BISPHOSPHATASE, CYTOSOLIC
  misc_feature (28)..(368): NCBI GI NO: 119748 NR Description: FRUCTOSE-1,6-BISPHOSPHATASE, CYTOSOLIC
  misc_feature (28)..(368): NCBI GI NO: 4741918 NR Description: cytosolic fructose-1,6-bisphosphatase
  misc_feature (28)..(368): NCBI GI NO: 20278691 NR Description: cytoplasmic fructose-1,6-bisphosphatase
  misc_feature (28)..(368): NCBI GI NO: 11139718 NR Description: cytosolic fructose-1,6-bisphosphatase
  misc_feature (40)..(368): NCBI GI NO: 5305145 NR Description: fructose-1,6-bisphosphatase [Pisum sativum]
KQSPQHVPTLLRAERANGREGRRRRRKMDHAADTFRTDLMTITRHVLNEQSRHPESRGDLTILLSHIVLGCKFVASAVNKAGLAKLTGLAGETNVQGEEQKKLDVLSNEVFVNALVSSGRTCVLVSEEDEKVTFVDPKLRGKYCVCFDPLDGSSNIDCGVSIGTIFGIYMIKNQDTVTLEEVLQPGKDMIAAGYCMYGSSCTLVLSTGNGVNGFTLDPSLGEFIMTHPDIKIPPKGKIYSVNEGNAKNWDTPTAKYVEKCKYPTDGSSPKSLRYIGSMVADVHRTLLYGGIFLYPADKKSPSGKLRVMYEVFPMSFLMEEAGGQSFTGKGRSLDLIPTDIHERSPIFLGSSDDVEEIKALYAEEAKKAGSA

SEQ ID NO: 17619 - protein, 344 aa, Triticum aestivum
  peptide (1)..(344): Ceres Seq. ID no. 15169521
  misc_feature (13)..(337): Pfam Name: Pfam Description:  Fructose-1-6-bisphosphatase
  misc_feature (1)..(339): NCBI GI NO: 6684169 NR Description: fructose-1,6-bisphosphatase [Porteresia coarctata]
  misc_feature (1)..(339): NCBI GI NO: 3913640 NR Description: FRUCTOSE-1,6-BISPHOSPHATASE, CYTOSOLIC
  misc_feature (62)..(338): NCBI GI NO: 34908588 NR Description: fructose-1,6-bisphosphatase
  misc_feature (1)..(69): NCBI GI NO: 34908588 NR Description: fructose-1,6-bisphosphatase
  misc_feature (13)..(343): NCBI GI NO: 2494417 NR Description: FRUCTOSE-1,6-BISPHOSPHATASE, CYTOSOLIC
  misc_feature (1)..(341): NCBI GI NO: 119748 NR Description: FRUCTOSE-1,6-BISPHOSPHATASE, CYTOSOLIC
  misc_feature (1)..(341): NCBI GI NO: 4741918 NR Description: cytosolic fructose-1,6-bisphosphatase
  misc_feature (1)..(341): NCBI GI NO: 20278691 NR Description: cytoplasmic fructose-1,6-bisphosphatase
  misc_feature (1)..(341): NCBI GI NO: 11139718 NR Description: cytosolic fructose-1,6-bisphosphatase
  misc_feature (13)..(341): NCBI GI NO: 5305145 NR Description: fructose-1,6-bisphosphatase [Pisum sativum]
MDHAADTFRTDLMTITRHVLNEQSRHPESRGDLTILLSHIVLGCKFVASAVNKAGLAKLTGLAGETNVQGEEQKKLDVLSNEVFVNALVSSGRTCVLVSEEDEKVTFVDPKLRGKYCVCFDPLDGSSNIDCGVSIGTIFGIYMIKNQDTVTLEEVLQPGKDMIAAGYCMYGSSCTLVLSTGNGVNGFTLDPSLGEFIMTHPDIKIPPKGKIYSVNEGNAKNWDTPTAKYVEKCKYPTDGSSPKSLRYIGSMVADVHRTLLYGGIFLYPADKKSPSGKLRVMYEVFPMSFLMEEAGGQSFTGKGRSLDLIPTDIHERSPIFLGSSDDVEEIKALYAEEAKKAGSA

SEQ ID NO: 17620 - protein, 332 aa, Triticum aestivum
  peptide (1)..(332): Ceres Seq. ID no. 15169522
  misc_feature (1)..(325): Pfam Name: Pfam Description:  Fructose-1-6-bisphosphatase
  misc_feature (1)..(327): NCBI GI NO: 6684169 NR Description: fructose-1,6-bisphosphatase [Porteresia coarctata]
  misc_feature (1)..(327): NCBI GI NO: 3913640 NR Description: FRUCTOSE-1,6-BISPHOSPHATASE, CYTOSOLIC
  misc_feature (50)..(326): NCBI GI NO: 34908588 NR Description: fructose-1,6-bisphosphatase
  misc_feature (1)..(57): NCBI GI NO: 34908588 NR Description: fructose-1,6-bisphosphatase
  misc_feature (1)..(331): NCBI GI NO: 2494417 NR Description: FRUCTOSE-1,6-BISPHOSPHATASE, CYTOSOLIC
  misc_feature (1)..(329): NCBI GI NO: 119748 NR Description: FRUCTOSE-1,6-BISPHOSPHATASE, CYTOSOLIC
  misc_feature (1)..(329): NCBI GI NO: 4741918 NR Description: cytosolic fructose-1,6-bisphosphatase
  misc_feature (1)..(329): NCBI GI NO: 20278691 NR Description: cytoplasmic fructose-1,6-bisphosphatase
  misc_feature (1)..(329): NCBI GI NO: 11139718 NR Description: cytosolic fructose-1,6-bisphosphatase
  misc_feature (1)..(329): NCBI GI NO: 5305145 NR Description: fructose-1,6-bisphosphatase [Pisum sativum]
MTITRHVLNEQSRHPESRGDLTILLSHIVLGCKFVASAVNKAGLAKLTGLAGETNVQGEEQKKLDVLSNEVFVNALVSSGRTCVLVSEEDEKVTFVDPKLRGKYCVCFDPLDGSSNIDCGVSIGTIFGIYMIKNQDTVTLEEVLQPGKDMIAAGYCMYGSSCTLVLSTGNGVNGFTLDPSLGEFIMTHPDIKIPPKGKIYSVNEGNAKNWDTPTAKYVEKCKYPTDGSSPKSLRYIGSMVADVHRTLLYGGIFLYPADKKSPSGKLRVMYEVFPMSFLMEEAGGQSFTGKGRSLDLIPTDIHERSPIFLGSSDDVEEIKALYAEEAKKAGSA

SEQ ID NO: 17621 - DNA, 1556 bp, Triticum aestivum
  misc_feature (1)..(1556): Ceres Seq. ID no. 13660024
attacctagaacatcctaatcgaaaagcaaagcagaggaaactaagcttggcagccaacggctattaatacctcaccaccttgttcgcaccatccaaagaaacagagttccagcagagaaaagtgagatctgccttcttcccccatcatggctgccatgtggtatccgatcatcggtctcctccttctcatgctcccactcgggccctcctccgccatcaagttcccactcataggcaacgtctaccctgatggccacttctatgctacgttgcagattggtaagcccttgaagccctacttcctggacatcgacactggcagcaacctcacttggctggagtgtgagcacccagatcacggctgcaagggctgcaaccagaggacaccacacccatattacaagccagcagctcataacttgatggtgagatgtgacagctggatatgtgctcaactgcgcaaagaccagcctggtagtcctcaatgccccaacagcgatccacatcgatgccactatgatatccaatatgtctccgggaggtcaaaaggcgaccttgccaacgacatgatctttatcaataggagagatgatatgaactacgttttcggatgtggatacgagcaggaggagccattagagcagccatcgccaccggcggtagatggcatccttggactcgggaggggaagcgtaggatttgtcgctcaactcaaggcacaaaagaagatagtcaggaatgtcattggacattgcctcagcatccatggaaatgggaacctgtacattggggacttcaggctgcccccaggcgacgtcacctgggcacccatgagtacatctttgccttactactcacccggcccagcaacactgctctatgacgaacagccgataagaggtagtccagcattcacgacagtatttgacagtggagccacctacacctacatgcctggccagatatacaatggccttgtttcaaaggttcaagacaccctccacaaatcatcacttaaagaggtgaaggatcgtgctctgcctcaatgctggaaaggaaaaatgccattcagatctgtcgacgatgtgaagaatgaattcaagtcactgtcgctaaaaattacccatgcccgcggcaccagcaacctggacatccctcctgaaaactacctcatcgtgacgaaagacgggaatgcgtgcttggccatcctcgatggctcgtcggatcgtgttctgaggcatctcatcttaattggagatgctatgatgcaggatctgtttgtgatatatgacaacgaggtcaaccgtatcggatgggtccgtgcacagtgcgacaggatgcaggaccttgagtctggcatcattgattcacgtctctgaataaagttcgaatcgacatagacaaaaaccttagcaacaacaaaagagtgctctcgtacggtattcaaaagattgtatggcgctcccgtttataatgaaacatgttgacatgttgaggaataaataaagtgtaaagagagaatcaagtggkaarggwtaaggggggatccagtggg

SEQ ID NO: 17622 - protein, 410 aa, Triticum aestivum
  peptide (1)..(410): Ceres Seq. ID no. 15219998
  misc_feature (1)..(410): NCBI GI NO: 7489412 NR Description: probable aspartic proteinase (EC 3
  misc_feature (1)..(410): NCBI GI NO: 7489434 NR Description: protein EEA1 - barley
  misc_feature (44)..(397): NCBI GI NO: 21805926 NR Description: nucellin-like aspartic protease [Zea mays]
  misc_feature (1)..(410): NCBI GI NO: 33340111 NR Description: nucellin-like protein [Oryza sativa]
  misc_feature (20)..(398): NCBI GI NO: 15219354 NR Description: nucellin protein, putative [Arabidopsis thaliana]
  misc_feature (21)..(402): NCBI GI NO: 30699263 NR Description: nucellin protein, putative [Arabidopsis thaliana]
  misc_feature (21)..(401): NCBI GI NO: 30699261 NR Description: nucellin protein, putative [Arabidopsis thaliana]
  misc_feature (21)..(402): NCBI GI NO: 25350204 NR Description: nucellin-like protein, 27671-25467
  misc_feature (22)..(403): NCBI GI NO: 18418224 NR Description: nucellin protein, putative [Arabidopsis thaliana]
  misc_feature (22)..(403): NCBI GI NO: 26452545 NR Description: putative nucellin [Arabidopsis thaliana]
MAAMWYPIIGLLLLMLPLGPSSAIKFPLIGNVYPDGHFYATLQIGKPLKPYFLDIDTGSNLTWLECEHPDHGCKGCNQRTPHPYYKPAAHNLMVRCDSWICAQLRKDQPGSPQCPNSDPHRCHYDIQYVSGRSKGDLANDMIFINRRDDMNYVFGCGYEQEEPLEQPSPPAVDGILGLGRGSVGFVAQLKAQKKIVRNVIGHCLSIHGNGNLYIGDFRLPPGDVTWAPMSTSLPYYSPGPATLLYDEQPIRGSPAFTTVFDSGATYTYMPGQIYNGLVSKVQDTLHKSSLKEVKDRALPQCWKGKMPFRSVDDVKNEFKSLSLKITHARGTSNLDIPPENYLIVTKDGNACLAILDGSSDRVLRHLILIGDAMMQDLFVIYDNEVNRIGWVRAQCDRMQDLESGIIDSRL

SEQ ID NO: 17623 - protein, 407 aa, Triticum aestivum
  peptide (1)..(407): Ceres Seq. ID no. 15219999
  misc_feature (1)..(407): NCBI GI NO: 7489412 NR Description: probable aspartic proteinase (EC 3
  misc_feature (1)..(407): NCBI GI NO: 7489434 NR Description: protein EEA1 - barley
  misc_feature (41)..(394): NCBI GI NO: 21805926 NR Description: nucellin-like aspartic protease [Zea mays]
  misc_feature (1)..(407): NCBI GI NO: 33340111 NR Description: nucellin-like protein [Oryza sativa]
  misc_feature (17)..(395): NCBI GI NO: 15219354 NR Description: nucellin protein, putative [Arabidopsis thaliana]
  misc_feature (18)..(399): NCBI GI NO: 30699263 NR Description: nucellin protein, putative [Arabidopsis thaliana]
  misc_feature (18)..(398): NCBI GI NO: 30699261 NR Description: nucellin protein, putative [Arabidopsis thaliana]
  misc_feature (18)..(399): NCBI GI NO: 25350204 NR Description: nucellin-like protein, 27671-25467
  misc_feature (19)..(400): NCBI GI NO: 18418224 NR Description: nucellin protein, putative [Arabidopsis thaliana]
  misc_feature (19)..(400): NCBI GI NO: 26452545 NR Description: putative nucellin [Arabidopsis thaliana]
MWYPIIGLLLLMLPLGPSSAIKFPLIGNVYPDGHFYATLQIGKPLKPYFLDIDTGSNLTWLECEHPDHGCKGCNQRTPHPYYKPAAHNLMVRCDSWICAQLRKDQPGSPQCPNSDPHRCHYDIQYVSGRSKGDLANDMIFINRRDDMNYVFGCGYEQEEPLEQPSPPAVDGILGLGRGSVGFVAQLKAQKKIVRNVIGHCLSIHGNGNLYIGDFRLPPGDVTWAPMSTSLPYYSPGPATLLYDEQPIRGSPAFTTVFDSGATYTYMPGQIYNGLVSKVQDTLHKSSLKEVKDRALPQCWKGKMPFRSVDDVKNEFKSLSLKITHARGTSNLDIPPENYLIVTKDGNACLAILDGSSDRVLRHLILIGDAMMQDLFVIYDNEVNRIGWVRAQCDRMQDLESGIIDSRL

SEQ ID NO: 17624 - protein, 396 aa, Triticum aestivum
  peptide (1)..(396): Ceres Seq. ID no. 15220000
  misc_feature (1)..(396): NCBI GI NO: 7489412 NR Description: probable aspartic proteinase (EC 3
  misc_feature (1)..(396): NCBI GI NO: 7489434 NR Description: protein EEA1 - barley
  misc_feature (30)..(383): NCBI GI NO: 21805926 NR Description: nucellin-like aspartic protease [Zea mays]
  misc_feature (1)..(396): NCBI GI NO: 33340111 NR Description: nucellin-like protein [Oryza sativa]
  misc_feature (6)..(384): NCBI GI NO: 15219354 NR Description: nucellin protein, putative [Arabidopsis thaliana]
  misc_feature (7)..(388): NCBI GI NO: 30699263 NR Description: nucellin protein, putative [Arabidopsis thaliana]
  misc_feature (7)..(387): NCBI GI NO: 30699261 NR Description: nucellin protein, putative [Arabidopsis thaliana]
  misc_feature (7)..(388): NCBI GI NO: 25350204 NR Description: nucellin-like protein, 27671-25467
  misc_feature (8)..(389): NCBI GI NO: 18418224 NR Description: nucellin protein, putative [Arabidopsis thaliana]
  misc_feature (8)..(389): NCBI GI NO: 26452545 NR Description: putative nucellin [Arabidopsis thaliana]
MLPLGPSSAIKFPLIGNVYPDGHFYATLQIGKPLKPYFLDIDTGSNLTWLECEHPDHGCKGCNQRTPHPYYKPAAHNLMVRCDSWICAQLRKDQPGSPQCPNSDPHRCHYDIQYVSGRSKGDLANDMIFINRRDDMNYVFGCGYEQEEPLEQPSPPAVDGILGLGRGSVGFVAQLKAQKKIVRNVIGHCLSIHGNGNLYIGDFRLPPGDVTWAPMSTSLPYYSPGPATLLYDEQPIRGSPAFTTVFDSGATYTYMPGQIYNGLVSKVQDTLHKSSLKEVKDRALPQCWKGKMPFRSVDDVKNEFKSLSLKITHARGTSNLDIPPENYLIVTKDGNACLAILDGSSDRVLRHLILIGDAMMQDLFVIYDNEVNRIGWVRAQCDRMQDLESGIIDSRL

SEQ ID NO: 17625 - DNA, 1621 bp, Triticum aestivum
  misc_feature (1)..(1621): Ceres Seq. ID no. 14307889
acgcacgcttccccaatcccatccagcaagcaagcagcagcgaggggtctccccgccgtcttccccgtcgccgtccgttaccgtcgtcgtcgccgcggtccagccctccggtcggcgctggttgctgacgcgtaggcgaaatccgtgcgagttctgcagatcgtcgccggcagacaatgtggggcgagagggctcatcacaggcatgggcaccatcacgaccacgttccgtccgggggttccaaggaccggcagcccaagttcatagcagacaactacagctcggtagatgaggtcattgctgcattgagagaagctgggcttgaatcatcaaatctaattcttggcatcgacttcaccaaaagcaatgaatggtcaggtaggcattcctttggaagaaaatctctgcatgccattagtggcactccaaatccatatgagcaagccatctctataattgggcgaacactatcaccttttgatgatgataacttgataccatgctttggatttggtgatgcttctacgcatgatcattctgtcttcagcttttaccaagaaaaccgtccttgccgtggttttgaggaggttcttgacagatacagacaaattgttccacatttgaacctttcaggaccaacttcttttgcacctcttatctacgcggcgatgtcagttgtcgaaagcagtaactgccaataccatgtcctcgtcatcatagctgatggacaggtgaccacttcaacttcaggtggaagattaagtccacaagaacaggcaactatacaagcgattgttgatgctagcttctatcctctttcaattgtgatggtgggggtgggcgatgggccatgggatgcaatgcagcattttgatgactgtattcctgacagagccttcgacaatttccagttcgtgaacttcactggtatcatgtcatcaagcaaggatatgtcaaagaaggaggccgcatttgcgcttgcagcgctgatggaaatacccacccaatacaaagcgactcaaggcctccgacctccagagaggcacgcacaaaacgccaaccctccgaggatccttccccctcccagcaaagttcttgaacgtgacaatattgtcgcagcttctcatactccagccgcaacctcgcagtcaaccgacgttggctacaccgtttcggatgaaaaggtatgtcccatctgcttaacgaatccaaaggacatggctttccaatgcggccatctgacatgcaaggaatgcgggccgacgctatcgacatgccccttgtgccgcgcgccaatcactgtccgtgtaaggctcttttcataaagatgatgcagacttctggaagtgaagaatcagccattcatgcaatatgttatcggcagtaatcaaggagcaagaagttgggcgggcaaggagatatgtacatgttcataaagctttactgtataacatgtccagcgccaactgtttcggctgtctgagtctgatgaataatttccatcacctcttgtgcagtttattcctgtcatcttgtaaaaaaagtagcagcagtagtcgtagttgaaaatcgtgttttcctgtaaaacctaaatgaatcaatacttcctccgtttttattg

SEQ ID NO: 17626 - protein, 382 aa, Triticum aestivum
  peptide (1)..(382): Ceres Seq. ID no. 14307890
  misc_feature (1)..(382): NCBI GI NO: 34905794 NR Description: P0401G10.23
  misc_feature (23)..(382): NCBI GI NO: 22328041 NR Description: copine-related [Arabidopsis thaliana]
  misc_feature (24)..(381): NCBI GI NO: 15232157 NR Description: copine-related [Arabidopsis thaliana]
  misc_feature (23)..(354): NCBI GI NO: 8777310 NR Description: gb|AAF01562
  misc_feature (1)..(381): NCBI GI NO: 18408863 NR Description: copine-related [Arabidopsis thaliana]
  misc_feature (1)..(381): NCBI GI NO: 30697566 NR Description: copine-related [Arabidopsis thaliana]
  misc_feature (20)..(303): NCBI GI NO: 20804894 NR Description: P0497A05.19
  misc_feature (317)..(360): NCBI GI NO: 20804894 NR Description: P0497A05.19
  misc_feature (29)..(355): NCBI GI NO: 18481708 NR Description: hypothetical protein [Sorghum bicolor]
  misc_feature (30)..(382): NCBI GI NO: 18412353 NR Description: copine-related [Arabidopsis thaliana]
MWGERAHHRHGHHHDHVPSGGSKDRQPKFIADNYSSVDEVIAALREAGLESSNLILGIDFTKSNEWSGRHSFGRKSLHAISGTPNPYEQAISIIGRTLSPFDDDNLIPCFGFGDASTHDHSVFSFYQENRPCRGFEEVLDRYRQIVPHLNLSGPTSFAPLIYAAMSVVESSNCQYHVLVIIADGQVTTSTSGGRLSPQEQATIQAIVDASFYPLSIVMVGVGDGPWDAMQHFDDCIPDRAFDNFQFVNFTGIMSSSKDMSKKEAAFALAALMEIPTQYKATQGLRPPERHAQNANPPRILPPPSKVLERDNIVAASHTPAATSQSTDVGYTVSDEKVCPICLTNPKDMAFQCGHLTCKECGPTLSTCPLCRAPITVRVRLFS

SEQ ID NO: 17627 - protein, 218 aa, Triticum aestivum
  peptide (1)..(218): Ceres Seq. ID no. 14307891
  misc_feature (1)..(218): NCBI GI NO: 34905794 NR Description: P0401G10.23
  misc_feature (1)..(218): NCBI GI NO: 22328041 NR Description: copine-related [Arabidopsis thaliana]
  misc_feature (1)..(217): NCBI GI NO: 15232157 NR Description: copine-related [Arabidopsis thaliana]
  misc_feature (1)..(190): NCBI GI NO: 8777310 NR Description: gb|AAF01562
  misc_feature (1)..(217): NCBI GI NO: 18408863 NR Description: copine-related [Arabidopsis thaliana]
  misc_feature (1)..(217): NCBI GI NO: 30697566 NR Description: copine-related [Arabidopsis thaliana]
  misc_feature (1)..(139): NCBI GI NO: 20804894 NR Description: P0497A05.19
  misc_feature (153)..(196): NCBI GI NO: 20804894 NR Description: P0497A05.19
  misc_feature (1)..(191): NCBI GI NO: 18481708 NR Description: hypothetical protein [Sorghum bicolor]
  misc_feature (1)..(218): NCBI GI NO: 18412353 NR Description: copine-related [Arabidopsis thaliana]
MSVVESSNCQYHVLVIIADGQVTTSTSGGRLSPQEQATIQAIVDASFYPLSIVMVGVGDGPWDAMQHFDDCIPDRAFDNFQFVNFTGIMSSSKDMSKKEAAFALAALMEIPTQYKATQGLRPPERHAQNANPPRILPPPSKVLERDNIVAASHTPAATSQSTDVGYTVSDEKVCPICLTNPKDMAFQCGHLTCKECGPTLSTCPLCRAPITVRVRLFS

SEQ ID NO: 17628 - DNA, 1766 bp, Triticum aestivum
  misc_feature (1)..(1766): Ceres Seq. ID no. 13659615
aaaaaatagaaactccccgacgacttgctcctcctccccctcacttccctcccccatcttggaccgttgcacaccgatctcgcgccggcccccaaatcgccggcgaagcccgcctccgcctccgtcccccgccgcgccgatctgctcgcaagattcgtaggccggaggaggaggacgaggaagggaggaagttgagttcttgttggtttcttccgcgggagccgaccgcacatgccaacaaccccccggagcagaagccaagctaggaccaccaggtcttggatcttgtcaggcatggacttcggtgacacgagacgcaagcctaatttcgccggaaagatcgcggtggctgctgccctcactgttatgtgcatacttgtgttgaagcagtctcctggttttggcggcactagcgtgttctctcgccatgaaactggggtgactcatgtgctggtgactggaggtgctggatacattggctcacatgctactcttcgtctccttacggacaactaccgagttaccattgtggataacctttcgagagggaacatgggagctgtcagagctctccagaggttgtttccagagcctgggaggcttcagtttatatacactgatttaggcgatccgaaagctgtgaacaaaatgttttcggagaacgcgtttgatgctgttatgcacttcgctgctgttgcttatgttggtgagagcacgcaggagccactaaggtactaccacaacataacatcaaatacgttgacagtgcttgaggcaatggcagcacataatgtaaaaactctgatttactcgagtacttgtgcaacatatggtgaacctgacacaatgcctattgtagaaacaactcctcagatacctatcaatccatacgggaaggcaaaaaagatgtccgaggacatcattctagatttctcaaagaaatcgaacatggctgtgatgatcttaagatacttcaatgtgattggatcggaccctgaggggcgccttggggaagctccaaggcctgaactgcgtgagcatggaaggatttctggtgcgtgttttgatgcagcatcaggaatcattccagggctaaaggttcgaggaacggactaccctaccgctgatggaacttgcgtaagggactacatcgatgtcacagatcttgttgatgcccatgtcaaagctcttggtaaagctgagcctagcaaagttggaatctacaatgtcggcacagggaaaggtaggtcagtgaaggagtttgtagaagcgtgcaagaaggcgactggagcaaccatcaaggttgactacctcgatcggagagctggggattacgccgaagtatacagcaacccggccaagatccgcgatgagctgaactggacagcccaacacacggacctccgtgagagccttgcgacggcctggaaatggcagaaggcgcacccgggcggatacgggtcggcctgatcccgtgctcggtaggttcaacgcaagttcgccaacacagacccacaggtccatgtgcagtgatatggccttgagaacactggtccttcaccgtagacacgtagcaggcagccacagaagtgtagtgatgttatttcgcagcacctggaagaagatacagagagaatggcctgcctggcttagaagaaatcatatatagttttcttttttcttttcttttcgtcagtgacatttaatttattttgctgttcgttggctgaggcataatatatgacacaaatacggagttgtgctgt

SEQ ID NO: 17629 - protein, 412 aa, Triticum aestivum
  peptide (1)..(412): Ceres Seq. ID no. 13659616
  misc_feature (73)..(405): Pfam Name: Pfam Description:  NAD dependent epimerase/dehydratase family
  misc_feature (22)..(412): NCBI GI NO: 26106016 NR Description: UDP-galactose 4-epimerase-like protein
  misc_feature (21)..(411): NCBI GI NO: 27529690 NR Description: UDP-galactose 4-epimerase-like protein
  misc_feature (6)..(410): NCBI GI NO: 22329866 NR Description: NAD-dependent epimerase/dehydratase family
  misc_feature (6)..(410): NCBI GI NO: 24417398 NR Description: unknown [Arabidopsis thaliana]
  misc_feature (1)..(410): NCBI GI NO: 25553524 NR Description: UDP-galactose 4-epimerase-like protein
  misc_feature (22)..(410): NCBI GI NO: 27260937 NR Description: OJ1417_E01.21
  misc_feature (35)..(412): NCBI GI NO: 15237098 NR Description: NAD-dependent epimerase/dehydratase family
  misc_feature (22)..(411): NCBI GI NO: 15241503 NR Description: NAD-dependent epimerase/dehydratase family
  misc_feature (35)..(412): NCBI GI NO: 7437275 NR Description: probable UDPglucose 4-epimerase (EC 5.1.3.2)
  misc_feature (19)..(188): NCBI GI NO: 5852089 NR Description: zwh12.1 [Oryza sativa (indica cultivar-group)]
MPTTPRSRSQARTTRSWILSGMDFGDTRRKPNFAGKIAVAAALTVMCILVLKQSPGFGGTSVFSRHETGVTHVLVTGGAGYIGSHATLRLLTDNYRVTIVDNLSRGNMGAVRALQRLFPEPGRLQFIYTDLGDPKAVNKMFSENAFDAVMHFAAVAYVGESTQEPLRYYHNITSNTLTVLEAMAAHNVKTLIYSSTCATYGEPDTMPIVETTPQIPINPYGKAKKMSEDIILDFSKKSNMAVMILRYFNVIGSDPEGRLGEAPRPELREHGRISGACFDAASGIIPGLKVRGTDYPTADGTCVRDYIDVTDLVDAHVKALGKAEPSKVGIYNVGTGKGRSVKEFVEACKKATGATIKVDYLDRRAGDYAEVYSNPAKIRDELNWTAQHTDLRESLATAWKWQKAHPGGYGSA

SEQ ID NO: 17630 - protein, 391 aa, Triticum aestivum
  peptide (1)..(391): Ceres Seq. ID no. 13659617
  misc_feature (52)..(384): Pfam Name: Pfam Description:  NAD dependent epimerase/dehydratase family
  misc_feature (1)..(391): NCBI GI NO: 26106016 NR Description: UDP-galactose 4-epimerase-like protein
  misc_feature (1)..(390): NCBI GI NO: 27529690 NR Description: UDP-galactose 4-epimerase-like protein
  misc_feature (1)..(389): NCBI GI NO: 22329866 NR Description: NAD-dependent epimerase/dehydratase family
  misc_feature (1)..(389): NCBI GI NO: 24417398 NR Description: unknown [Arabidopsis thaliana]
  misc_feature (1)..(389): NCBI GI NO: 25553524 NR Description: UDP-galactose 4-epimerase-like protein
  misc_feature (1)..(389): NCBI GI NO: 27260937 NR Description: OJ1417_E01.21
  misc_feature (14)..(391): NCBI GI NO: 15237098 NR Description: NAD-dependent epimerase/dehydratase family
  misc_feature (1)..(390): NCBI GI NO: 15241503 NR Description: NAD-dependent epimerase/dehydratase family
  misc_feature (14)..(391): NCBI GI NO: 7437275 NR Description: probable UDPglucose 4-epimerase (EC 5.1.3.2)
  misc_feature (1)..(167): NCBI GI NO: 5852089 NR Description: zwh12.1 [Oryza sativa (indica cultivar-group)]
MDFGDTRRKPNFAGKIAVAAALTVMCILVLKQSPGFGGTSVFSRHETGVTHVLVTGGAGYIGSHATLRLLTDNYRVTIVDNLSRGNMGAVRALQRLFPEPGRLQFIYTDLGDPKAVNKMFSENAFDAVMHFAAVAYVGESTQEPLRYYHNITSNTLTVLEAMAAHNVKTLIYSSTCATYGEPDTMPIVETTPQIPINPYGKAKKMSEDIILDFSKKSNMAVMILRYFNVIGSDPEGRLGEAPRPELREHGRISGACFDAASGIIPGLKVRGTDYPTADGTCVRDYIDVTDLVDAHVKALGKAEPSKVGIYNVGTGKGRSVKEFVEACKKATGATIKVDYLDRRAGDYAEVYSNPAKIRDELNWTAQHTDLRESLATAWKWQKAHPGGYGSA

SEQ ID NO: 17631 - protein, 367 aa, Triticum aestivum
  peptide (1)..(367): Ceres Seq. ID no. 13659618
  misc_feature (28)..(360): Pfam Name: Pfam Description:  NAD dependent epimerase/dehydratase family
  misc_feature (1)..(367): NCBI GI NO: 26106016 NR Description: UDP-galactose 4-epimerase-like protein
  misc_feature (1)..(366): NCBI GI NO: 27529690 NR Description: UDP-galactose 4-epimerase-like protein
  misc_feature (1)..(365): NCBI GI NO: 22329866 NR Description: NAD-dependent epimerase/dehydratase family
  misc_feature (1)..(365): NCBI GI NO: 24417398 NR Description: unknown [Arabidopsis thaliana]
  misc_feature (1)..(365): NCBI GI NO: 25553524 NR Description: UDP-galactose 4-epimerase-like protein
  misc_feature (1)..(365): NCBI GI NO: 27260937 NR Description: OJ1417_E01.21
  misc_feature (1)..(367): NCBI GI NO: 15237098 NR Description: NAD-dependent epimerase/dehydratase family
  misc_feature (1)..(366): NCBI GI NO: 15241503 NR Description: NAD-dependent epimerase/dehydratase family
  misc_feature (1)..(367): NCBI GI NO: 7437275 NR Description: probable UDPglucose 4-epimerase (EC 5.1.3.2)
  misc_feature (1)..(143): NCBI GI NO: 5852089 NR Description: zwh12.1 [Oryza sativa (indica cultivar-group)]
MCILVLKQSPGFGGTSVFSRHETGVTHVLVTGGAGYIGSHATLRLLTDNYRVTIVDNLSRGNMGAVRALQRLFPEPGRLQFIYTDLGDPKAVNKMFSENAFDAVMHFAAVAYVGESTQEPLRYYHNITSNTLTVLEAMAAHNVKTLIYSSTCATYGEPDTMPIVETTPQIPINPYGKAKKMSEDIILDFSKKSNMAVMILRYFNVIGSDPEGRLGEAPRPELREHGRISGACFDAASGIIPGLKVRGTDYPTADGTCVRDYIDVTDLVDAHVKALGKAEPSKVGIYNVGTGKGRSVKEFVEACKKATGATIKVDYLDRRAGDYAEVYSNPAKIRDELNWTAQHTDLRESLATAWKWQKAHPGGYGSA

SEQ ID NO: 17632 - DNA, 870 bp, Triticum aestivum
  misc_feature (1)..(870): Ceres Seq. ID no. 14313370
gaaaccgaagctcggctttggaaatctggggaaggcgacgagcaatccgaggagctccgcccctcttcttctcccccacccccactggcgacggcgacggaggcgagggtgaaaattccccaccaaccggagcgcgtgcttgctgatggaggtctcggccaggctccgcccgccgcccgccgcctcgacggcgccgccccgccgcggcggagggcccctgcgactgcgacggctgctcccttcgtctcggcccgcctcccgcgcggtctccgccaagatcagagcaagtgcaattaatgacctgcaaagaagcaagagtagcctggaagcactgttctgctacgacaaagctgttccagaggagaatatcgggaaacctgctggcctagatttggaaaagaagaatgttgggaagaatcctccatgcgtgcgctgcgaaactaaaggtgctgtgctgtgcgcaacctgcgctggttcaggcttgtacgtcgactcgataatggaaagccaaggaattatcgtaaaagtcagatgcctaggctgcggaggaactggaagcatcatgtgctccacatgcggaggccgtggacacacctgaattgtctgttgatgtttctcacaaacaaggcaatgaaattcaagtagcatcctcttggtgtacgtccatcatcgccgggaactatcatttttgcagtaatctgtatacattttactgacgattcatagttgaacgatgttcagagcatgctgcgaacaatttcactgtactaaaggattcgatgctgagtcgggtgttgtaccttgagtctacttagttcagagcgtgtgacatcgttttgcttttgtatcaaaaattgtttcagttgtaac

SEQ ID NO: 17633 - protein, 150 aa, Triticum aestivum
  peptide (1)..(150): Ceres Seq. ID no. 14313371
  misc_feature (10)..(149): NCBI GI NO: 15238662 NR Description: expressed protein [Arabidopsis thaliana]
  misc_feature (29)..(149): NCBI GI NO: 21554941 NR Description: unknown [Arabidopsis thaliana]
MEVSARLRPPPAASTAPPRRGGGPLRLRRLLPSSRPASRAVSAKIRASAINDLQRSKSSLEALFCYDKAVPEENIGKPAGLDLEKKNVGKNPPCVRCETKGAVLCATCAGSGLYVDSIMESQGIIVKVRCLGCGGTGSIMCSTCGGRGHT

SEQ ID NO: 17634 - protein, 98 aa, Triticum aestivum
  peptide (1)..(98): Ceres Seq. ID no. 14313372
ETEARLWKSGEGDEQSEELRPSSSPPPPLATATEARVKIPHQPERVLADGGLGQAPPAARRLDGAAPPRRRAPATATAAPFVSARLPRGLRQDQSKCN

SEQ ID NO: 17635 - DNA, 1572 bp, Triticum aestivum
  misc_feature (1)..(1572): Ceres Seq. ID no. 14303205
acacaaacttgttttcgattcctgctgctgtaggctgtagctcccccaaatctcatccaccggccggccctaatggcgctcccagatgaacttctggaggagatcttcctccgcctccccgcggccgccgacctcgcccgcgcctccacggcctgcgtctccttccgccgcgtcatcaccggccatcccttcctccgccggttccgcaccctccacccgccgtccctcctcggcatcctctgcggcggcctcatccccgcccagccgccccacccttccgccgcagcggcagccacctacgccgacgccgacttgtcgtgctcctttatgcccccaccccgcgaccgctggcgccaccgcgacggccgcgcccttttctcccccgccctcgaggggatcggcggcgactacagccctagccacctggtcacggagttcgccgtctgcgaccccctgcaccgtcgttacctcctgctgcctgccctccccgaccttctagtcggtcaagtccataggccggacatcgtggactgcgaggccttcctcgctcctcctggccctgacgacgttggggctgactggtcgtcattcagagtcatgtacttggtgcgttgcacagccaagctcttgctcttcgtcttctccacctgcgccggacaatggctcgctaatcctgttacagttgacgtgtttcgatgcggggcggcgttgcaccgcttctacgcccatggctgcttctattgggaggttttccggtctaacaagttgctcgtgctcgatgcgcgcaggatagagttctccactgttgacctcccgcctccacctggccctgatgtgcgaaagatggccattgtagaggcaggaggaggaaggcttgggatgcttactatctctgagcatcctgaacctggtgcagatcatctcctgtatgccgtacagtctaaggatgtgaatggcagaaaccagtggcaatccaagtcagtaatttatttgccggaaaattatcgctatggcatcatgggtgtagctggtggatacttactcctaactgggtatccagaagacgacatgccaatcagctatttttcactgaatctccagaattttcaggttgagtgcttctgtcagactggtgataaagtcatttttggtgacctgtatgccgatctcccaccgtccttgtccccaccaactctttgaactggacctcccagagaatgcgctgatggcaaagactcgcaagcgtgactaatgtcatgttaaggagaataaatgtaagaacttttgaaagggtgaaagtggtttgcactcgacagcaacttgcagctaagagaagaagaaggcagaagttgttgatgaccggcgcatccaccattttttcttgttaaaattctcacgacgtttctgctttttgttgcagtacttttatgcctggcaagagactagactatcttattatgccgctttgtttgaactgagtgctaggtaagctttgcggcttcagcaaccctggaaatagtttgcttttggtggtgtatgattctagtatcagtatgtatgtatggcataccc

SEQ ID NO: 17636 - protein, 375 aa, Triticum aestivum
  peptide (1)..(375): Ceres Seq. ID no. 14303206
  misc_feature (1)..(46): Pfam Name: Pfam Description:  F-box domain
  misc_feature (1)..(251): NCBI GI NO: 34393354 NR Description: hypothetical protein
  misc_feature (1)..(213): NCBI GI NO: 34393351 NR Description: hypothetical protein
  misc_feature (1)..(348): NCBI GI NO: 37530886 NR Description: hypothetical protein
  misc_feature (1)..(351): NCBI GI NO: 37530888 NR Description: hypothetical protein
  misc_feature (1)..(199): NCBI GI NO: 32480316 NR Description: OSJNBa0042D13.1
  misc_feature (62)..(375): NCBI GI NO: 32480316 NR Description: OSJNBa0042D13.1
  misc_feature (1)..(199): NCBI GI NO: 34393352 NR Description: hypothetical protein
  misc_feature (155)..(375): NCBI GI NO: 34393354 NR Description: hypothetical protein
  misc_feature (1)..(359): NCBI GI NO: 34914580 NR Description: P0455H0310.25
  misc_feature (1)..(277): NCBI GI NO: 34914942 NR Description: B1096D03.38
MALPDELLEEIFLRLPAAADLARASTACVSFRRVITGHPFLRRFRTLHPPSLLGILCGGLIPAQPPHPSAAAAATYADADLSCSFMPPPRDRWRHRDGRALFSPALEGIGGDYSPSHLVTEFAVCDPLHRRYLLLPALPDLLVGQVHRPDIVDCEAFLAPPGPDDVGADWSSFRVMYLVRCTAKLLLFVFSTCAGQWLANPVTVDVFRCGAALHRFYAHGCFYWEVFRSNKLLVLDARRIEFSTVDLPPPPGPDVRKMAIVEAGGGRLGMLTISEHPEPGADHLLYAVQSKDVNGRNQWQSKSVIYLPENYRYGIMGVAGGYLLLTGYPEDDMPISYFSLNLQNFQVECFCQTGDKVIFGDLYADLPPSLSPPTL

SEQ ID NO: 17637 - protein, 290 aa, Triticum aestivum
  peptide (1)..(290): Ceres Seq. ID no. 14303207
  misc_feature (1)..(166): NCBI GI NO: 34393354 NR Description: hypothetical protein
  misc_feature (1)..(128): NCBI GI NO: 34393351 NR Description: hypothetical protein
  misc_feature (1)..(263): NCBI GI NO: 37530886 NR Description: hypothetical protein
  misc_feature (1)..(266): NCBI GI NO: 37530888 NR Description: hypothetical protein
  misc_feature (1)..(114): NCBI GI NO: 32480316 NR Description: OSJNBa0042D13.1
  misc_feature (1)..(290): NCBI GI NO: 32480316 NR Description: OSJNBa0042D13.1
  misc_feature (1)..(114): NCBI GI NO: 34393352 NR Description: hypothetical protein
  misc_feature (70)..(290): NCBI GI NO: 34393354 NR Description: hypothetical protein
  misc_feature (1)..(274): NCBI GI NO: 34914580 NR Description: P0455H0310.25
  misc_feature (1)..(192): NCBI GI NO: 34914942 NR Description: B1096D03.38
MPPPRDRWRHRDGRALFSPALEGIGGDYSPSHLVTEFAVCDPLHRRYLLLPALPDLLVGQVHRPDIVDCEAFLAPPGPDDVGADWSSFRVMYLVRCTAKLLLFVFSTCAGQWLANPVTVDVFRCGAALHRFYAHGCFYWEVFRSNKLLVLDARRIEFSTVDLPPPPGPDVRKMAIVEAGGGRLGMLTISEHPEPGADHLLYAVQSKDVNGRNQWQSKSVIYLPENYRYGIMGVAGGYLLLTGYPEDDMPISYFSLNLQNFQVECFCQTGDKVIFGDLYADLPPSLSPPTL

SEQ ID NO: 17638 - protein, 200 aa, Triticum aestivum
  peptide (1)..(200): Ceres Seq. ID no. 14303208
  misc_feature (1)..(76): NCBI GI NO: 34393354 NR Description: hypothetical protein
  misc_feature (1)..(38): NCBI GI NO: 34393351 NR Description: hypothetical protein
  misc_feature (1)..(173): NCBI GI NO: 37530886 NR Description: hypothetical protein
  misc_feature (1)..(176): NCBI GI NO: 37530888 NR Description: hypothetical protein
  misc_feature (1)..(24): NCBI GI NO: 32480316 NR Description: OSJNBa0042D13.1
  misc_feature (1)..(200): NCBI GI NO: 32480316 NR Description: OSJNBa0042D13.1
  misc_feature (1)..(24): NCBI GI NO: 34393352 NR Description: hypothetical protein
  misc_feature (1)..(200): NCBI GI NO: 34393354 NR Description: hypothetical protein
  misc_feature (1)..(184): NCBI GI NO: 34914580 NR Description: P0455H0310.25
  misc_feature (1)..(102): NCBI GI NO: 34914942 NR Description: B1096D03.38
MYLVRCTAKLLLFVFSTCAGQWLANPVTVDVFRCGAALHRFYAHGCFYWEVFRSNKLLVLDARRIEFSTVDLPPPPGPDVRKMAIVEAGGGRLGMLTISEHPEPGADHLLYAVQSKDVNGRNQWQSKSVIYLPENYRYGIMGVAGGYLLLTGYPEDDMPISYFSLNLQNFQVECFCQTGDKVIFGDLYADLPPSLSPPTL

SEQ ID NO: 17639 - DNA, 2315 bp, Triticum aestivum
  misc_feature (1)..(2315): Ceres Seq. ID no. 14303002
atgttgagctagggtttagtcttgtagtactagatacagggtttaggatccgggaggagcccggctcccctcccaaaccgctctcatgtcgtcttcctcccaagtaagggttgggactctggttccctttgttgaaggcaaatctgggtcaccgagtgcgtcgtcgctgccaatgccaagcattcccatcttcaagggctccaatgtcgtcgggaggagtaatttggtggctgttgacaagagggtcagccgcaagcatttgagcctgcgcgccttgcctgatggctctctcgaagtcgttgtggaggggccaaatcccattgttgtccgatcagagggtcagagaagaaaagtttgtgctcagcagagagccaagattatgcacgatgatgtcctggagctgattcccggtgaatattttatgaagtatgtgaatatgagtgatgagcgtaaaagttccacatcagtcgaatcacatgacttaaagaaagggaagaggcatagcgaggaagatagtgtagttgcaaagagaaatcgacaagttatggaagatgaggctttggcaagaacatcgcaggaaagctttgcagaagagagtacatctgttactgaggtagtaagttcacttgatagtgctggttcttccgagagaaacaaagagagaacacattctgtcggccctttgaaagatgtacttccgttgacttttcgactcatgcgtgtccaacgtcttccatcatggactaacacttcaacagttaccattccggatgtcatacagggtgaagtgcttcttgctgtactctcaaattatatggtggacatggattggttgcttactgcatgtccaagtctaaggaaagttccacatgtcctagttctgcatggagaagatggtgcttcattggagcgcttgaagaaaacgaagcctgcaaattggatccttcacaagcccccgctcccaatatcatttggaacacatcattcgaaggccatgctgcttgtatatcctcaagggattcgtgttgttgttcacactgcaaatttgatacatgttgactggaataacaaaagtcagggattatggacgcaagattttccatggaagaaagcaaatgatacgagtacaaatattggttttgagaatgacctggttgattatctcagggcacttaagtggcctgagttcagggtaaatctcccagttgccggtgatgtcaacatcaatgcagcattctttcggaaatttgattatagtagctcaacggtcaggttgatcggatctgttcctggttatcatgtcggtcccaatatgaaaaagtggggccatatgaagcttaggagtgttcttgaagagtgcgtatttgaaaagcagttttgcaagtcaccacttatttatcagttttcgtccttggggtcacttgatgagaaatggatgagtgagtttgcatgttcgttatcagctggtaaagcagatgatggatcacagttgggtattgggaaaccactgattgtatggccaacagtggaggatgttaggtgctcaatagagggctatgcagctggcagttgcattccaagtcctcaaaagaatgttgagaaagatttcttgcgaaaatattggtccaggtggaaagcagaccacgtaggccgttgccgtgctatgccgcacataaaaacttttactcgctacaatggtcaaaatattgcatggtttctgcttacctcatcaaatttaagcaaagctgcttggggagcactgcagaagaacaatacacagctgacgatacgatcatatgagttaggtgtattgttcttgcccaaaactctccagtctgttccacaattttcatgcacagacaagagccgctcaaacctggataaacttgcccttggtaagaacatcaagaccaagctggtgacactttgctggaaaggtgatgaagaaaaggatccatctgcagaagttgtgagattgccagtgccatatcaagtccctccacaactctacggcccggaagatgtcccatggtcgtgggatcggaggtacacgaagaaggatgtgtatggttcagtctggccacgccatggctagcttagctgagctgcgtgccgatgattattaagcgtgttcaggtccacaggaacctggtgtatgttgattgatcactggtggaatcatcggttataggacctgattgctcgtgcaccctgtttctaggcctctcgctctcagccaactgtgggagaaaccataagcaatggaacgaacatttggttgacagaattatttggaacgttggatattttgagct

SEQ ID NO: 17640 - protein, 669 aa, Triticum aestivum
  peptide (1)..(669): Ceres Seq. ID no. 14303003
  misc_feature (204)..(642): Pfam Name: Pfam Description:  Tyrosyl-DNA phosphodiesterase
  misc_feature (1)..(669): NCBI GI NO: 33146648 NR Description: putative tyrosyl-DNA phosphodiesterase
  misc_feature (184)..(667): NCBI GI NO: 22326821 NR Description: expressed protein [Arabidopsis thaliana]
  misc_feature (31)..(130): NCBI GI NO: 22326821 NR Description: expressed protein [Arabidopsis thaliana]
  misc_feature (184)..(667): NCBI GI NO: 17381098 NR Description: unknown protein [Arabidopsis thaliana]
  misc_feature (31)..(130): NCBI GI NO: 17381098 NR Description: unknown protein [Arabidopsis thaliana]
  misc_feature (184)..(645): NCBI GI NO: 11357893 NR Description: hypothetical protein F8M21
  misc_feature (31)..(130): NCBI GI NO: 11357893 NR Description: hypothetical protein F8M21
  misc_feature (205)..(579): NCBI GI NO: 20127586 NR Description: tyrosyl-DNA phosphodiesterase 1
  misc_feature (632)..(665): NCBI GI NO: 20127586 NR Description: tyrosyl-DNA phosphodiesterase 1
  misc_feature (205)..(582): NCBI GI NO: 28373796 NR Description: Chain A
MSSSSQVRVGTLVPFVEGKSGSPSASSLPMPSIPIFKGSNVVGRSNLVAVDKRVSRKHLSLRALPDGSLEVVVEGPNPIVVRSEGQRRKVCAQQRAKIMHDDVLELIPGEYFMKYVNMSDERKSSTSVESHDLKKGKRHSEEDSVVAKRNRQVMEDEALARTSQESFAEESTSVTEVVSSLDSAGSSERNKERTHSVGPLKDVLPLTFRLMRVQRLPSWTNTSTVTIPDVIQGEVLLAVLSNYMVDMDWLLTACPSLRKVPHVLVLHGEDGASLERLKKTKPANWILHKPPLPISFGTHHSKAMLLVYPQGIRVVVHTANLIHVDWNNKSQGLWTQDFPWKKANDTSTNIGFENDLVDYLRALKWPEFRVNLPVAGDVNINAAFFRKFDYSSSTVRLIGSVPGYHVGPNMKKWGHMKLRSVLEECVFEKQFCKSPLIYQFSSLGSLDEKWMSEFACSLSAGKADDGSQLGIGKPLIVWPTVEDVRCSIEGYAAGSCIPSPQKNVEKDFLRKYWSRWKADHVGRCRAMPHIKTFTRYNGQNIAWFLLTSSNLSKAAWGALQKNNTQLTIRSYELGVLFLPKTLQSVPQFSCTDKSRSNLDKLALGKNIKTKLVTLCWKGDEEKDPSAEVVRLPVPYQVPPQLYGPEDVPWSWDRRYTKKDVYGSVWPRHG

SEQ ID NO: 17641 - protein, 640 aa, Triticum aestivum
  peptide (1)..(640): Ceres Seq. ID no. 14303004
  misc_feature (175)..(613): Pfam Name: Pfam Description:  Tyrosyl-DNA phosphodiesterase
  misc_feature (1)..(640): NCBI GI NO: 33146648 NR Description: putative tyrosyl-DNA phosphodiesterase
  misc_feature (155)..(638): NCBI GI NO: 22326821 NR Description: expressed protein [Arabidopsis thaliana]
  misc_feature (2)..(101): NCBI GI NO: 22326821 NR Description: expressed protein [Arabidopsis thaliana]
  misc_feature (155)..(638): NCBI GI NO: 17381098 NR Description: unknown protein [Arabidopsis thaliana]
  misc_feature (2)..(101): NCBI GI NO: 17381098 NR Description: unknown protein [Arabidopsis thaliana]
  misc_feature (155)..(616): NCBI GI NO: 11357893 NR Description: hypothetical protein F8M21
  misc_feature (2)..(101): NCBI GI NO: 11357893 NR Description: hypothetical protein F8M21
  misc_feature (176)..(550): NCBI GI NO: 20127586 NR Description: tyrosyl-DNA phosphodiesterase 1
  misc_feature (603)..(636): NCBI GI NO: 20127586 NR Description: tyrosyl-DNA phosphodiesterase 1
  misc_feature (176)..(553): NCBI GI NO: 28373796 NR Description: Chain A
MPSIPIFKGSNVVGRSNLVAVDKRVSRKHLSLRALPDGSLEVVVEGPNPIVVRSEGQRRKVCAQQRAKIMHDDVLELIPGEYFMKYVNMSDERKSSTSVESHDLKKGKRHSEEDSVVAKRNRQVMEDEALARTSQESFAEESTSVTEVVSSLDSAGSSERNKERTHSVGPLKDVLPLTFRLMRVQRLPSWTNTSTVTIPDVIQGEVLLAVLSNYMVDMDWLLTACPSLRKVPHVLVLHGEDGASLERLKKTKPANWILHKPPLPISFGTHHSKAMLLVYPQGIRVVVHTANLIHVDWNNKSQGLWTQDFPWKKANDTSTNIGFENDLVDYLRALKWPEFRVNLPVAGDVNINAAFFRKFDYSSSTVRLIGSVPGYHVGPNMKKWGHMKLRSVLEECVFEKQFCKSPLIYQFSSLGSLDEKWMSEFACSLSAGKADDGSQLGIGKPLIVWPTVEDVRCSIEGYAAGSCIPSPQKNVEKDFLRKYWSRWKADHVGRCRAMPHIKTFTRYNGQNIAWFLLTSSNLSKAAWGALQKNNTQLTIRSYELGVLFLPKTLQSVPQFSCTDKSRSNLDKLALGKNIKTKLVTLCWKGDEEKDPSAEVVRLPVPYQVPPQLYGPEDVPWSWDRRYTKKDVYGSVWPRHG

SEQ ID NO: 17642 - protein, 571 aa, Triticum aestivum
  peptide (1)..(571): Ceres Seq. ID no. 14303005
  misc_feature (106)..(544): Pfam Name: Pfam Description:  Tyrosyl-DNA phosphodiesterase
  misc_feature (1)..(571): NCBI GI NO: 33146648 NR Description: putative tyrosyl-DNA phosphodiesterase
  misc_feature (86)..(569): NCBI GI NO: 22326821 NR Description: expressed protein [Arabidopsis thaliana]
  misc_feature (1)..(32): NCBI GI NO: 22326821 NR Description: expressed protein [Arabidopsis thaliana]
  misc_feature (86)..(569): NCBI GI NO: 17381098 NR Description: unknown protein [Arabidopsis thaliana]
  misc_feature (1)..(32): NCBI GI NO: 17381098 NR Description: unknown protein [Arabidopsis thaliana]
  misc_feature (86)..(547): NCBI GI NO: 11357893 NR Description: hypothetical protein F8M21
  misc_feature (1)..(32): NCBI GI NO: 11357893 NR Description: hypothetical protein F8M21
  misc_feature (107)..(481): NCBI GI NO: 20127586 NR Description: tyrosyl-DNA phosphodiesterase 1
  misc_feature (534)..(567): NCBI GI NO: 20127586 NR Description: tyrosyl-DNA phosphodiesterase 1
  misc_feature (107)..(484): NCBI GI NO: 28373796 NR Description: Chain A
MHDDVLELIPGEYFMKYVNMSDERKSSTSVESHDLKKGKRHSEEDSVVAKRNRQVMEDEALARTSQESFAEESTSVTEVVSSLDSAGSSERNKERTHSVGPLKDVLPLTFRLMRVQRLPSWTNTSTVTIPDVIQGEVLLAVLSNYMVDMDWLLTACPSLRKVPHVLVLHGEDGASLERLKKTKPANWILHKPPLPISFGTHHSKAMLLVYPQGIRVVVHTANLIHVDWNNKSQGLWTQDFPWKKANDTSTNIGFENDLVDYLRALKWPEFRVNLPVAGDVNINAAFFRKFDYSSSTVRLIGSVPGYHVGPNMKKWGHMKLRSVLEECVFEKQFCKSPLIYQFSSLGSLDEKWMSEFACSLSAGKADDGSQLGIGKPLIVWPTVEDVRCSIEGYAAGSCIPSPQKNVEKDFLRKYWSRWKADHVGRCRAMPHIKTFTRYNGQNIAWFLLTSSNLSKAAWGALQKNNTQLTIRSYELGVLFLPKTLQSVPQFSCTDKSRSNLDKLALGKNIKTKLVTLCWKGDEEKDPSAEVVRLPVPYQVPPQLYGPEDVPWSWDRRYTKKDVYGSVWPRHG

SEQ ID NO: 17643 - DNA, 1616 bp, Triticum aestivum
  misc_feature (1)..(1616): Ceres Seq. ID no. 15224908
aaactcctttttttcctgacacggctagctaagcttgaaccgactgctggacgacggagagggagaccaaggccgagcagacgccggcgggatcccaactgaattgtgaggggggccgccgaggcggcggatggcgccctcgttgctcgtctcggcgagccaaatcctcgccgttgccggccggggaggccgtaggcggcgtctggtcatcgccaactccggcggtgccggcgctcccccgaagctggtgactttcctcggcaagggaggctccggcaagaccacggcggccgccatcgccgctcagtattatgctagtgaaggcctgaagacatgcctggttatacagtcacaagacccgacagcagagcaattgatgggctgtaagatcgggaactcgctcacagaatgtgctgctaatctttcgaccattaagcttgagaccagtaaaatgctacttgagccccttgaccggttgaagaaagtagatgcccagagcaatctcactcaaggagttcttgaggggattgtaggggaggaacttggagtcttacctggaatggattcgatctgctcagtcttgtctcttcagaagctgctcaacttcttttcagttggaacgaatagtccacagggggaatttgatgtcgtagtgtatgactgcaataatacagaggaatttctacggctcactggtgctactgagagggcaagatcttacttgaagtatgtgagggagctagcagagaagactgacataggaagactggcgtcgccatcgttactgaaactgatttatgatgccgcgagaccaagtggtagaactggtgaagtaagaatgagtgcagagatatggaatgaaatcgaacaacttcttgagaaaatctcgctttggtttgctgatccctcaaaacttgcgtgcttcctcgtcatggacccgagaggatcaatctcggtgtcctctgcgctaagatactggggttgcaccatccaagctggcgcgcaaatatgtggagcatttggttatgctgaagacccttctgaaatgcaccaaggagttgctgagaagtttttgccattgtctttctcgtttctgccatttgtaccaactgattcttctgcggattggggcagagcgttaaattcattgaatcaaaatacaaaggggctgttgaggaatgcaagcaaggtttatccttcagttagttttgattctgcacagaagtcggtgacccttttcatgccaggatttgacaagtctgaaatcaaactatatcagtataggggcggttcggagctactgatcgaagccggcgaccagaggcgcgtaattaagctgccaccggcgatgcaggggaaggtcggtggcgccaagttcgtcgacaggaatcttgtcattaccatccggtaggcggcagcagggccttgggtgatccggaaatcggagcacaggctcgagaaaccaaaccggtggagaaccgtgcagcaccgtaatgtaaacccgatatagaccggttcctggtgatgtctgtcagcatcgtttttccattttgctgtaaacatggtgagatttctcacaacggcattatagaagtggaagaaaaagggcagtccac

SEQ ID NO: 17644 - protein, 426 aa, Triticum aestivum
  peptide (1)..(426): Ceres Seq. ID no. 15224909
  misc_feature (39)..(333): Pfam Name: Pfam Description:  Anion-transporting ATPase
  misc_feature (99)..(426): NCBI GI NO: 25518771 NR Description: hypothetical protein F14G11
  misc_feature (38)..(59): NCBI GI NO: 25518771 NR Description: hypothetical protein F14G11
  misc_feature (108)..(426): NCBI GI NO: 15222640 NR Description: hypothetical protein [Arabidopsis thaliana]
  misc_feature (169)..(424): NCBI GI NO: 23125737 NR Description: COG0003: Oxyanion-translocating ATPase
  misc_feature (39)..(327): NCBI GI NO: 23125737 NR Description: COG0003: Oxyanion-translocating ATPase
  misc_feature (169)..(424): NCBI GI NO: 17231973 NR Description: hypothetical protein [Nostoc sp. PCC 7120]
  misc_feature (41)..(295): NCBI GI NO: 23039777 NR Description: COG0003: Oxyanion-translocating ATPase
  misc_feature (38)..(423): NCBI GI NO: 22970345 NR Description: hypothetical protein [Chloroflexus aurantiacus]
  misc_feature (39)..(295): NCBI GI NO: 16329406 NR Description: hypothetical protein [Synechocystis sp. PCC 6803]
  misc_feature (244)..(424): NCBI GI NO: 23039777 NR Description: COG0003: Oxyanion-translocating ATPase
MAPSLLVSASQILAVAGRGGRRRRLVIANSGGAGAPPKLVTFLGKGGSGKTTAAAIAAQYYASEGLKTCLVIQSQDPTAEQLMGCKIGNSLTECAANLSTIKLETSKMLLEPLDRLKKVDAQSNLTQGVLEGIVGEELGVLPGMDSICSVLSLQKLLNFFSVGTNSPQGEFDVVVYDCNNTEEFLRLTGATERARSYLKYVRELAEKTDIGRLASPSLLKLIYDAARPSGRTGEVRMSAEIWNEIEQLLEKISLWFADPSKLACFLVMDPRGSISVSSALRYWGCTIQAGAQICGAFGYAEDPSEMHQGVAEKFLPLSFSFLPFVPTDSSADWGRALNSLNQNTKGLLRNASKVYPSVSFDSAQKSVTLFMPGFDKSEIKLYQYRGGSELLIEAGDQRRVIKLPPAMQGKVGGAKFVDRNLVITIR

SEQ ID NO: 17645 - protein, 344 aa, Triticum aestivum
  peptide (1)..(344): Ceres Seq. ID no. 15224910
  misc_feature (1)..(251): Pfam Name: Pfam Description:  Anion-transporting ATPase
  misc_feature (17)..(344): NCBI GI NO: 25518771 NR Description: hypothetical protein F14G11
  misc_feature (26)..(344): NCBI GI NO: 15222640 NR Description: hypothetical protein [Arabidopsis thaliana]
  misc_feature (87)..(342): NCBI GI NO: 23125737 NR Description: COG0003: Oxyanion-translocating ATPase
  misc_feature (1)..(245): NCBI GI NO: 23125737 NR Description: COG0003: Oxyanion-translocating ATPase
  misc_feature (87)..(342): NCBI GI NO: 17231973 NR Description: hypothetical protein [Nostoc sp. PCC 7120]
  misc_feature (1)..(213): NCBI GI NO: 23039777 NR Description: COG0003: Oxyanion-translocating ATPase
  misc_feature (1)..(341): NCBI GI NO: 22970345 NR Description: hypothetical protein [Chloroflexus aurantiacus]
  misc_feature (1)..(213): NCBI GI NO: 16329406 NR Description: hypothetical protein [Synechocystis sp. PCC 6803]
  misc_feature (162)..(342): NCBI GI NO: 23039777 NR Description: COG0003: Oxyanion-translocating ATPase
  misc_feature (1)..(334): NCBI GI NO: 21673808 NR Description: ArsA ATPase family protein
MGCKIGNSLTECAANLSTIKLETSKMLLEPLDRLKKVDAQSNLTQGVLEGIVGEELGVLPGMDSICSVLSLQKLLNFFSVGTNSPQGEFDVVVYDCNNTEEFLRLTGATERARSYLKYVRELAEKTDIGRLASPSLLKLIYDAARPSGRTGEVRMSAEIWNEIEQLLEKISLWFADPSKLACFLVMDPRGSISVSSALRYWGCTIQAGAQICGAFGYAEDPSEMHQGVAEKFLPLSFSFLPFVPTDSSADWGRALNSLNQNTKGLLRNASKVYPSVSFDSAQKSVTLFMPGFDKSEIKLYQYRGGSELLIEAGDQRRVIKLPPAMQGKVGGAKFVDRNLVITIR

SEQ ID NO: 17646 - protein, 319 aa, Triticum aestivum
  peptide (1)..(319): Ceres Seq. ID no. 15224911
  misc_feature (1)..(226): Pfam Name: Pfam Description:  Anion-transporting ATPase
  misc_feature (1)..(319): NCBI GI NO: 25518771 NR Description: hypothetical protein F14G11
  misc_feature (1)..(319): NCBI GI NO: 15222640 NR Description: hypothetical protein [Arabidopsis thaliana]
  misc_feature (62)..(317): NCBI GI NO: 23125737 NR Description: COG0003: Oxyanion-translocating ATPase
  misc_feature (1)..(220): NCBI GI NO: 23125737 NR Description: COG0003: Oxyanion-translocating ATPase
  misc_feature (62)..(317): NCBI GI NO: 17231973 NR Description: hypothetical protein [Nostoc sp. PCC 7120]
  misc_feature (1)..(188): NCBI GI NO: 23039777 NR Description: COG0003: Oxyanion-translocating ATPase
  misc_feature (1)..(316): NCBI GI NO: 22970345 NR Description: hypothetical protein [Chloroflexus aurantiacus]
  misc_feature (1)..(188): NCBI GI NO: 16329406 NR Description: hypothetical protein [Synechocystis sp. PCC 6803]
  misc_feature (137)..(317): NCBI GI NO: 23039777 NR Description: COG0003: Oxyanion-translocating ATPase
  misc_feature (1)..(309): NCBI GI NO: 21673808 NR Description: ArsA ATPase family protein
MLLEPLDRLKKVDAQSNLTQGVLEGIVGEELGVLPGMDSICSVLSLQKLLNFFSVGTNSPQGEFDVVVYDCNNTEEFLRLTGATERARSYLKYVRELAEKTDIGRLASPSLLKLIYDAARPSGRTGEVRMSAEIWNEIEQLLEKISLWFADPSKLACFLVMDPRGSISVSSALRYWGCTIQAGAQICGAFGYAEDPSEMHQGVAEKFLPLSFSFLPFVPTDSSADWGRALNSLNQNTKGLLRNASKVYPSVSFDSAQKSVTLFMPGFDKSEIKLYQYRGGSELLIEAGDQRRVIKLPPAMQGKVGGAKFVDRNLVITIR

SEQ ID NO: 17647 - DNA, 954 bp, Triticum aestivum
  misc_feature (1)..(954): Ceres Seq. ID no. 14301680
agcattttgagaaaataaaattggacagagaaccatcaacccaaaaattgaggagaagcagcaggtgctccgcctctgccgccgccggtgacccgccgtagcagccgctcgccccgccgcccctgaccctcttcaatctactgttccattccaccccgacccaaaccaaacacacactaaacaccggcgccgacctctcctaggtttcgtcccatctcaccggagatggccggggcagcgtcgtcggtagcgcccgttctcgtcatctgcttgctttctcttgctctcttcctccacaggtgccggagctgtgaggctgtggagagagagaggacgttggcaatgatcaagccggatggtttgtctggcaactacaaggaaaaaatcaaggaggccatcttggggtctggatttgatatcatagaagaggcagttgtccatctggatgcagagagggcatcactcttctatgctgaacatgccgatagaagcttcttcaacagcctagtgaagtacatgacgagtggtccagtttgtgctatggttctggaaagccctgatgccatttcacgctggcgaaatttgatagggccaactgatgcaagaaaggctaaaacttcacaccctgacagcattagagcaatgtgcggcttggactctgagaaaaattgtgtgcatggttcagattcaccgcaatctgcagccagagagatttcgtttttcttcagagatgataaatctgaagcgctggaacatgacgagctgtagacaattggcatgtatcctcaaaaggcagataatttttgaagtttgatttgccccttccagctattagttgatgaaaatgtctgtacatcacatatgttgatctgacatcaaacttctccagttgatagcttcatcccttggttgccaaaggctgtgacggtgaaatcaccacagcgaaattttgtc

SEQ ID NO: 17648 - protein, 180 aa, Triticum aestivum
  peptide (1)..(180): Ceres Seq. ID no. 14301681
  misc_feature (35)..(108): Pfam Name: Pfam Description:  Nucleoside diphosphate kinase
  misc_feature (8)..(108): NCBI GI NO: 8778480 NR Description: F1L3.7 [Arabidopsis thaliana]
  misc_feature (97)..(134): NCBI GI NO: 8778480 NR Description: F1L3.7 [Arabidopsis thaliana]
  misc_feature (136)..(169): NCBI GI NO: 8778480 NR Description: F1L3.7 [Arabidopsis thaliana]
  misc_feature (40)..(169): NCBI GI NO: 15220107 NR Description: hypothetical protein [Arabidopsis thaliana]
  misc_feature (40)..(134): NCBI GI NO: 9665132 NR Description: Unknown protein [Arabidopsis thaliana]
  misc_feature (33)..(167): NCBI GI NO: 38181932 NR Description: Unknown (protein for MGC:75677)
  misc_feature (35)..(167): NCBI GI NO: 18079349 NR Description: expressed in non-metastatic cells 5 [Mus musculus]
  misc_feature (35)..(167): NCBI GI NO: 32700087 NR Description: Nucleoside diphosphate kinase homolog 5
  misc_feature (35)..(167): NCBI GI NO: 15606713 NR Description: nucleoside diphosphate kinase [Aquifex aeolicus]
  misc_feature (35)..(171): NCBI GI NO: 27363898 NR Description: Nucleoside diphosphate kinase
MAGAASSVAPVLVICLLSLALFLHRCRSCEAVERERTLAMIKPDGLSGNYKEKIKEAILGSGFDIIEEAVVHLDAERASLFYAEHADRSFFNSLVKYMTSGPVCAMVLESPDAISRWRNLIGPTDARKAKTSHPDSIRAMCGLDSEKNCVHGSDSPQSAAREISFFFRDDKSEALEHDEL

SEQ ID NO: 17649 - protein, 141 aa, Triticum aestivum
  peptide (1)..(141): Ceres Seq. ID no. 14301682
  misc_feature (1)..(69): Pfam Name: Pfam Description:  Nucleoside diphosphate kinase
  misc_feature (1)..(69): NCBI GI NO: 8778480 NR Description: F1L3.7 [Arabidopsis thaliana]
  misc_feature (58)..(95): NCBI GI NO: 8778480 NR Description: F1L3.7 [Arabidopsis thaliana]
  misc_feature (97)..(130): NCBI GI NO: 8778480 NR Description: F1L3.7 [Arabidopsis thaliana]
  misc_feature (1)..(130): NCBI GI NO: 15220107 NR Description: hypothetical protein [Arabidopsis thaliana]
  misc_feature (1)..(95): NCBI GI NO: 9665132 NR Description: Unknown protein [Arabidopsis thaliana]
  misc_feature (1)..(128): NCBI GI NO: 38181932 NR Description: Unknown (protein for MGC:75677)
  misc_feature (1)..(128): NCBI GI NO: 18079349 NR Description: expressed in non-metastatic cells 5 [Mus musculus]
  misc_feature (1)..(128): NCBI GI NO: 32700087 NR Description: Nucleoside diphosphate kinase homolog 5
  misc_feature (1)..(128): NCBI GI NO: 15606713 NR Description: nucleoside diphosphate kinase [Aquifex aeolicus]
  misc_feature (1)..(132): NCBI GI NO: 27363898 NR Description: Nucleoside diphosphate kinase
MIKPDGLSGNYKEKIKEAILGSGFDIIEEAVVHLDAERASLFYAEHADRSFFNSLVKYMTSGPVCAMVLESPDAISRWRNLIGPTDARKAKTSHPDSIRAMCGLDSEKNCVHGSDSPQSAAREISFFFRDDKSEALEHDEL

SEQ ID NO: 17650 - DNA, 1619 bp, Triticum aestivum
  misc_feature (1)..(1619): Ceres Seq. ID no. 15170659
aggttagggaaacgctaccaaatccctccctccgctctcttcttcctcgccgcggtgattctttcctcactccccaccccagcccgctcggcgcttgctcactactgatctcacggggagggcccggcggccaatcgccgcctccagcatcgtcgagcctcgcgcctcacgcctcctcctctcactcccgagccggcaaccgcggcagcaggagcggcgagaggagggcaaggcgaagacccgagaggacgcaatggagtacagaagagtgaaggatcaggagagttatgacgccatatctcagaaggacatagaaagccctgatgggaggtctctttctagcactgcagcaacttccccccttggcaccgtaggaggttcgaagggcaagaatagctggaagcaaaagtctattgtaacaattgcattgacattactaacaagttcccaggcaatactgattgtgtggtcaaaaagagctggaaagtatgaatatagtgtcacaacagcaaatttttcggtggaagctttaaaatgtctattatcacttctagccctgtacagaacatggaacagtcaaggtgttacagaagataataggttaagtacatcatttgatgaagttagtgtttatcctatccctgccgtactttacatggtaaagaatctattgcagtattacatcttcgcctatgtggatgcaccagcttaccagatcctgaagaacctgaatattatcagcactggtgtcttataccgtatcattttaaagaaaaaattaagtgaaattcagtgggctgcatttattctcttatgtgctggctgcactacggctcagctaaacccctcatcagaccatgttcttcaaacgccaattcaaggttggatgatggccattgtgatggctcttctaagtggttttgctggggtatacacagaagctataataaaaaaacgtccttcgagaaacatcaatgtgcagaatttctggctgtacatttttggaatgctcttcaacttagttgccatttgtgttcaggactttgatgctgtcatgaacaaaggcttttttcatggctactcatttattacacttctgatgattcttaaccatgcactcagtggcattgctgtatcaatggtgatgaagtatgctgacaatattgtcaaggtgtattcaacttcagtcgcaatgcttctgacggcaattgtatcggtcttcttgttcggcttcaacctatcccttgcattcttcctcggatctacggtcgtttcaatctcggtgtatctgcattctgtcgggaagccacagcagcagaaatgagttcctcccccatctttctttccaagattggcagcgagcgcctcgatgcggcgtcgtggaacggattatggacggcacggcagcatcgaaggggaataggcttcgttctaggtcatggcactgttgttgaggcaaggcgattcgcccggtgacatattcaggttcaccatccgtttgaactgcttctttggtggcatacctggctcacttttgcttcgtgaccagggtggatgacatacgctagtttcttatctgggtaggccggcgagaatgcgagacgctggctatcttcttc

SEQ ID NO: 17651 - protein, 356 aa, Triticum aestivum
  peptide (1)..(356): Ceres Seq. ID no. 15170660
  misc_feature (115)..(336): Pfam Name: Pfam Description:  Nucleotide-sugar transporter
  misc_feature (1)..(356): NCBI GI NO: 34393556 NR Description: putative CMP-sialic acid transporter
  misc_feature (1)..(289): NCBI GI NO: 30690310 NR Description: hypothetical protein [Arabidopsis thaliana]
  misc_feature (55)..(347): NCBI GI NO: 18422134 NR Description: CMP-sialic acid transporter-related protein
  misc_feature (66)..(347): NCBI GI NO: 10177360 NR Description: CMP-sialic acid transporter-like protein
  misc_feature (252)..(351): NCBI GI NO: 7488414 NR Description: UDP-galactose transport protein homolog F23E12
  misc_feature (59)..(354): NCBI GI NO: 5453621 NR Description: solute carrier family 35
  misc_feature (59)..(354): NCBI GI NO: 6755558 NR Description: solute carrier family 35
  misc_feature (59)..(354): NCBI GI NO: 18252814 NR Description: CMP-sialic acid transporter [Canis familiaris]
  misc_feature (29)..(348): NCBI GI NO: 39579880 NR Description: Hypothetical protein CBG24372
  misc_feature (59)..(356): NCBI GI NO: 23559235 NR Description: CMP-sialic acid transporter [Oryzias latipes]
MEYRRVKDQESYDAISQKDIESPDGRSLSSTAATSPLGTVGGSKGKNSWKQKSIVTIALTLLTSSQAILIVWSKRAGKYEYSVTTANFSVEALKCLLSLLALYRTWNSQGVTEDNRLSTSFDEVSVYPIPAVLYMVKNLLQYYIFAYVDAPAYQILKNLNIISTGVLYRIILKKKLSEIQWAAFILLCAGCTTAQLNPSSDHVLQTPIQGWMMAIVMALLSGFAGVYTEAIIKKRPSRNINVQNFWLYIFGMLFNLVAICVQDFDAVMNKGFFHGYSFITLLMILNHALSGIAVSMVMKYADNIVKVYSTSVAMLLTAIVSVFLFGFNLSLAFFLGSTVVSISVYLHSVGKPQQQK

SEQ ID NO: 17652 - protein, 222 aa, Triticum aestivum
  peptide (1)..(222): Ceres Seq. ID no. 15170661
  misc_feature (1)..(202): Pfam Name: Pfam Description:  Nucleotide-sugar transporter
  misc_feature (1)..(222): NCBI GI NO: 34393556 NR Description: putative CMP-sialic acid transporter
  misc_feature (1)..(155): NCBI GI NO: 30690310 NR Description: hypothetical protein [Arabidopsis thaliana]
  misc_feature (1)..(213): NCBI GI NO: 18422134 NR Description: CMP-sialic acid transporter-related protein
  misc_feature (1)..(213): NCBI GI NO: 10177360 NR Description: CMP-sialic acid transporter-like protein
  misc_feature (118)..(217): NCBI GI NO: 7488414 NR Description: UDP-galactose transport protein homolog F23E12
  misc_feature (1)..(220): NCBI GI NO: 5453621 NR Description: solute carrier family 35
  misc_feature (1)..(220): NCBI GI NO: 6755558 NR Description: solute carrier family 35
  misc_feature (1)..(220): NCBI GI NO: 18252814 NR Description: CMP-sialic acid transporter [Canis familiaris]
  misc_feature (1)..(214): NCBI GI NO: 39579880 NR Description: Hypothetical protein CBG24372
  misc_feature (1)..(222): NCBI GI NO: 23559235 NR Description: CMP-sialic acid transporter [Oryzias latipes]
MVKNLLQYYIFAYVDAPAYQILKNLNIISTGVLYRIILKKKLSEIQWAAFILLCAGCTTAQLNPSSDHVLQTPIQGWMMAIVMALLSGFAGVYTEAIIKKRPSRNINVQNFWLYIFGMLFNLVAICVQDFDAVMNKGFFHGYSFITLLMILNHALSGIAVSMVMKYADNIVKVYSTSVAMLLTAIVSVFLFGFNLSLAFFLGSTVVSISVYLHSVGKPQQQK

SEQ ID NO: 17653 - DNA, 2061 bp, Triticum aestivum
  misc_feature (1)..(2061): Ceres Seq. ID no. 15169557
atcgtaggcccggcgcttcccccctcattctgttgtgcccaggatccttcgcgcctgctgcgatctggattcggatgatcaatcgagcagcttttcgtccggttcttcctggatgatcctctatctggttggggatttttcttcgatcggcttgtcctcttaagagaaagaacgctgcaatttctttgacacacatctccaagttcatcattctctgtctctgctcaaccaataatacagacttcagtcacacataaagaaatgggtcacaccattggagttgcagatgatgaaatagcagacataccatgttcagatgcttcaccaattctgaccgaatatcacatcacagtccctacccttcacgatggactaatgcaaggggcagaccagcacgagagacggcttctggatgtcctcaaagcaacgccttcagtgcaatggctgaaggacatcaacgtctgcggtccactgggaaaaattcagctgccatcgatcggcgtccaccgctacctccatgtccacttcatcagaacagtcgactggagctcactgctcgccatctgcaagaaccacctcaagcatcctctcaacatcgccctactcatctggctgctatgcgtcgccgccgccggcgccatgctaggactgctcctgttggggctgctgaacaaggcattcccttccagggccttgaggcaccactggatagagatcgacaaccagatcctcaacgccctcttcacgctcatgagcatctaccagcatcccatcctcgtccaccacctcgttctcctctgccggtggcggccggaggacgccgcccagctaaggaaggtgtactgcaagaatggcgcccgccgtcccaacgagcgagcgcacatgtccttcgtggtggccctcctccacgtcacctgcatctcgcagtacatggagtgcagcctctactggggctacccaagcaggtcgcgctccgagctcgcggagaacttcttcttcatcctcggcgtcgccgcgccggtcgtcgccggcgctcacgcggtgtacagccctctaggcagagacgacgacgccgccgccgcctcctgcgaagagaccaagcagctccacgcagccggagccgaagaatcgccggaagaaatgacggtggtcggcaacccgatgtgggcgggggagctgctggactgcggcgaggacccggcggcgtgctacctgtcgttcctctgcaccttctgcgtgttcggctggaacatggagcggctggggctgggcaacatgtacatgcacacggccatgttcctgctgctgtgcgtcgcgcccttctgggtgttcaacgtcacggcgctcagcatccacgactacgccctcagcgatgccttcggcgccgccggggtggtgctctgcttcctcgggctcctgtacgggggcttctggaggatgcagatgaggaagcggctcgggctgccccggagcaggtggtgctgcggctcgtcgtcgctgacggactacgcgcagtggctcctctgctggccgtgcgcgctcgcgcaggaggtgcgcacggcgaacctgtacgacccgaggggcgacggcggtttctacgggaagctggtggacggcggtgacccggagcgagggccggacgtgccggtctccgctgaagtgcaggaggtggtcggcggtgttgtcaatccgacggtggacggcgagatgatcccgcccgtgcagccggtggtggagtctggacggcagaggcaagccggccacgaagaaattgttgcaaatggcagtagcgtccagctcaaaagttgaccgcagctgttggatggtgactgatgctgtagagtattcgcaagctgacggatatattcttcctttttgggggatcgatgtcaccattttgacattgttatgctcctggtttgtcatgctctgcacgggactttaggtcgttataagtcattagttagtccagttttattcagatcagctaccttgacactccaacagatgtcatctttcatcgattcttttcgtattgcacgttactggaagaagaagaac

SEQ ID NO: 17654 - protein, 515 aa, Triticum aestivum
  peptide (1)..(515): Ceres Seq. ID no. 15169558
  misc_feature (299)..(432): Pfam Name: Pfam Description:  Protein of unknown function, DUF614
  misc_feature (9)..(515): NCBI GI NO: 34907898 NR Description: P0439E11.13
  misc_feature (91)..(281): NCBI GI NO: 17064778 NR Description: Unknown protein [Arabidopsis thaliana]
  misc_feature (278)..(438): NCBI GI NO: 17064778 NR Description: Unknown protein [Arabidopsis thaliana]
  misc_feature (91)..(438): NCBI GI NO: 15239077 NR Description: hypothetical protein [Arabidopsis thaliana]
  misc_feature (91)..(311): NCBI GI NO: 10176747 NR Description: gb|AAF01523
  misc_feature (91)..(278): NCBI GI NO: 15228414 NR Description: expressed protein [Arabidopsis thaliana]
  misc_feature (280)..(448): NCBI GI NO: 18391271 NR Description: expressed protein [Arabidopsis thaliana]
MGHTIGVADDEIADIPCSDASPILTEYHITVPTLHDGLMQGADQHERRLLDVLKATPSVQWLKDINVCGPLGKIQLPSIGVHRYLHVHFIRTVDWSSLLAICKNHLKHPLNIALLIWLLCVAAAGAMLGLLLLGLLNKAFPSRALRHHWIEIDNQILNALFTLMSIYQHPILVHHLVLLCRWRPEDAAQLRKVYCKNGARRPNERAHMSFVVALLHVTCISQYMECSLYWGYPSRSRSELAENFFFILGVAAPVVAGAHAVYSPLGRDDDAAAASCEETKQLHAAGAEESPEEMTVVGNPMWAGELLDCGEDPAACYLSFLCTFCVFGWNMERLGLGNMYMHTAMFLLLCVAPFWVFNVTALSIHDYALSDAFGAAGVVLCFLGLLYGGFWRMQMRKRLGLPRSRWCCGSSSLTDYAQWLLCWPCALAQEVRTANLYDPRGDGGFYGKLVDGGDPERGPDVPVSAEVQEVVGGVVNPTVDGEMIPPVQPVVESGRQRQAGHEEIVANGSSVQLKS

SEQ ID NO: 17655 - protein, 477 aa, Triticum aestivum
  peptide (1)..(477): Ceres Seq. ID no. 15169559
  misc_feature (261)..(394): Pfam Name: Pfam Description:  Protein of unknown function, DUF614
  misc_feature (1)..(477): NCBI GI NO: 34907898 NR Description: P0439E11.13
  misc_feature (53)..(243): NCBI GI NO: 17064778 NR Description: Unknown protein [Arabidopsis thaliana]
  misc_feature (240)..(400): NCBI GI NO: 17064778 NR Description: Unknown protein [Arabidopsis thaliana]
  misc_feature (53)..(400): NCBI GI NO: 15239077 NR Description: hypothetical protein [Arabidopsis thaliana]
  misc_feature (53)..(273): NCBI GI NO: 10176747 NR Description: gb|AAF01523
  misc_feature (53)..(240): NCBI GI NO: 15228414 NR Description: expressed protein [Arabidopsis thaliana]
  misc_feature (242)..(410): NCBI GI NO: 18391271 NR Description: expressed protein [Arabidopsis thaliana]
MQGADQHERRLLDVLKATPSVQWLKDINVCGPLGKIQLPSIGVHRYLHVHFIRTVDWSSLLAICKNHLKHPLNIALLIWLLCVAAAGAMLGLLLLGLLNKAFPSRALRHHWIEIDNQILNALFTLMSIYQHPILVHHLVLLCRWRPEDAAQLRKVYCKNGARRPNERAHMSFVVALLHVTCISQYMECSLYWGYPSRSRSELAENFFFILGVAAPVVAGAHAVYSPLGRDDDAAAASCEETKQLHAAGAEESPEEMTVVGNPMWAGELLDCGEDPAACYLSFLCTFCVFGWNMERLGLGNMYMHTAMFLLLCVAPFWVFNVTALSIHDYALSDAFGAAGVVLCFLGLLYGGFWRMQMRKRLGLPRSRWCCGSSSLTDYAQWLLCWPCALAQEVRTANLYDPRGDGGFYGKLVDGGDPERGPDVPVSAEVQEVVGGVVNPTVDGEMIPPVQPVVESGRQRQAGHEEIVANGSSVQLKS

SEQ ID NO: 17656 - protein, 437 aa, Triticum aestivum
  peptide (1)..(437): Ceres Seq. ID no. 15169560
MFRCFTNSDRISHHSPYPSRWTNARGRPARETASGCPQSNAFSAMAEGHQRLRSTGKNSAAIDRRPPLPPCPLHQNSRLELTARHLQEPPQASSQHRPTHLAAMRRRRRRHARTAPVGAAEQGIPFQGLEAPLDRDRQPDPQRPLHAHEHLPASHPRPPPRSPLPVAAGGRRPAKEGVLQEWRPPSQRASAHVLRGGPPPRHLHLAVHGVQPLLGLPKQVALRARGELLLHPRRRRAGRRRRSRGVQPSRQRRRRRRRLLRRDQAAPRSRSRRIAGRNDGGRQPDVGGGAAGLRRGPGGVLPVVPLHLLRVRLEHGAAGAGQHVHAHGHVPAAVRRALLGVQRHGAQHPRLRPQRCLRRRRGGALLPRAPVRGLLEDADEEAARAAPEQVVLRLVVADGLRAVAPLLAVRARAGGAHGEPVRPEGRRRFLREAGGRR

SEQ ID NO: 17657 - DNA, 1059 bp, Triticum aestivum
  misc_feature (1)..(1059): Ceres Seq. ID no. 14307883
acttgtagtggcccactgtgaaaggccagcgtctggctcctctgctcctcctcatcccctccgccgccgcgctgctgctcaaccagaacggagagcttgcaagatcagcgttgcggtccacacgctcggccccgcaaggtcgccgcctctgtgaaggccgccccaccgaataagaagaaggggaagaaaccaaacctcgtcatgaagagcttccctgtggccggcggccgcagcgtctccctcgccctcttctccgatgtctccaacagccgggagctcctagatctgatgcagtcagggaagctggagccggaggccgcttttctcaatgcatcactggtgccgggcgtgttcccggtcctcgcggcggcgcacaaagcgctgctctccaagtcgagggagtcgctgaccacgagaaccctgcactcggagcttgtctataattgctctggctcgaagcatataactgagtccctaaagcggtgcggtatcgctgatgacacgcagtatatccttgcggctcggtttgatgcttcagatgaagagatgaaagctctggaaaagctcatcagcggaaccgagattgatctgtcggaattggagacaagagcagaccaaccaaagattctgaagcaatacaaaataactccacaagaattatcaatatctacactgccagaggcaatcgtgtgcaggattgctgctcgagacgccctctgaggtcttaaaaacgatggccaggacgttctgcagctgtgtgtgtcaaattctttggacgatcaccgcatctgccgcacctcctgtcgatggtcaagctcgtggcggcaggatgtttcaactcatgaacttaggaattgcattacggtaacattcagtcctggatgctgtagcgacaactgaataatatgtatggtcacaggctcacggcttgagtgtttctaagatcacttcatcaagatttaatgcaagcaaccttcagttgatatcgcgatgttgactcggatctgttgtttcggtgacactgcagaacatgagtaaaatcagcgaaatatgtgtggc

SEQ ID NO: 17658 - protein, 172 aa, Triticum aestivum
  peptide (1)..(172): Ceres Seq. ID no. 14307884
  misc_feature (1)..(172): NCBI GI NO: 34895710 NR Description: P0019D06.12
  misc_feature (1)..(172): NCBI GI NO: 38454120 NR Description: At4g34412 [Arabidopsis thaliana]
  misc_feature (1)..(133): NCBI GI NO: 22329156 NR Description: hypothetical protein [Arabidopsis thaliana]
  misc_feature (13)..(172): NCBI GI NO: 39794363 NR Description: Unknown (protein for MGC:75657)
  misc_feature (12)..(172): NCBI GI NO: 28175286 NR Description: Unknown (protein for MGC:53277) [Xenopus laevis]
  misc_feature (10)..(170): NCBI GI NO: 39588478 NR Description: Hypothetical protein CBG20111
  misc_feature (10)..(170): NCBI GI NO: 17542786 NR Description: i-121 L1 (4F949) [Caenorhabditis elegans]
  misc_feature (12)..(172): NCBI GI NO: 7705590 NR Description: CGI-121 protein; PRPK
  misc_feature (12)..(172): NCBI GI NO: 27712192 NR Description: similar to RIKEN cDNA 1810034M08
  misc_feature (12)..(172): NCBI GI NO: 12001980 NR Description: My019 protein [Homo sapiens]
MKSFPVAGGRSVSLALFSDVSNSRELLDLMQSGKLEPEAAFLNASLVPGVFPVLAAAHKALLSKSRESLTTRTLHSELVYNCSGSKHITESLKRCGIADDTQYILAARFDASDEEMKALEKLISGTEIDLSELETRADQPKILKQYKITPQELSISTLPEAIVCRIAARDAL

SEQ ID NO: 17659 - protein, 143 aa, Triticum aestivum
  peptide (1)..(143): Ceres Seq. ID no. 14307885
  misc_feature (1)..(143): NCBI GI NO: 34895710 NR Description: P0019D06.12
  misc_feature (1)..(143): NCBI GI NO: 38454120 NR Description: At4g34412 [Arabidopsis thaliana]
  misc_feature (1)..(104): NCBI GI NO: 22329156 NR Description: hypothetical protein [Arabidopsis thaliana]
  misc_feature (1)..(143): NCBI GI NO: 39794363 NR Description: Unknown (protein for MGC:75657)
  misc_feature (1)..(143): NCBI GI NO: 28175286 NR Description: Unknown (protein for MGC:53277) [Xenopus laevis]
  misc_feature (1)..(141): NCBI GI NO: 39588478 NR Description: Hypothetical protein CBG20111
  misc_feature (1)..(141): NCBI GI NO: 17542786 NR Description: i-121 L1 (4F949) [Caenorhabditis elegans]
  misc_feature (1)..(143): NCBI GI NO: 7705590 NR Description: CGI-121 protein; PRPK
  misc_feature (1)..(143): NCBI GI NO: 27712192 NR Description: similar to RIKEN cDNA 1810034M08
  misc_feature (1)..(143): NCBI GI NO: 12001980 NR Description: My019 protein [Homo sapiens]
MQSGKLEPEAAFLNASLVPGVFPVLAAAHKALLSKSRESLTTRTLHSELVYNCSGSKHITESLKRCGIADDTQYILAARFDASDEEMKALEKLISGTEIDLSELETRADQPKILKQYKITPQELSISTLPEAIVCRIAARDAL

SEQ ID NO: 17660 - DNA, 2403 bp, Triticum aestivum
  misc_feature (1)..(2403): Ceres Seq. ID no. 15178728
aaaaagctaggagaggtccaagataccagctggaccttggttccctttttttttttcttggctcattgtaaggtcctgccagccatctgcgttcgtggcgaccggcgcaagagagcgtggggttttgggagcattagaatcaatcatctggttttatttccttggtgcgctggggcgaaattgtttcaggtgccgtgttcatggcccaagggtattgattggtggggatcccggcgcttgcgacggttttgtgcaaggcagcctgttgcttcctgtaaatcagaaaaaggcaagtcttggattttttgcgatcacaatctcaggtccctagaaatcaagagaagcaaccgtaatcgccggagttggtgaggcaaggggttgcctggattttcgcaagaacaggggcgttacagattgaggaatccctccggtcacttccagttgattattgggcttggacatggagaggcagaccagcttccgcctgggcgcgctggagaagctcaagagcttccgggggatggacaacttccggcggagcaaggacagccccggcaagcgcggtgacacgccgctccacctcgcggcgagggccggcaacgtctccaacgtccagaggatccttgccgaatccggccaggagatggccggcgagctggccgcccggccgaaccaggacggggagacggcgctgtacgtggccgccgacaaggggcacacggaggtggtgcgcgagatcttgaaggtgtctgatatgcagacggcggggatcaaggccagcaacagcttcgacgccttccacatcgcggcgaagcagggccatctggatgttctgaaggagctgctgcaggcctttcctgctcttgctatgactacaaactctgtaaacgccacagctttggaaactgctgccattcagggtcacattgatattgtcaacctcctactgaaaactgatgctagccttgccaaaattgcgagaaataatgggaaaacagttttgcattccgcggcgaggatgggccatgtggaagttgtaagatccttgttaaataaggatccagggattggtttaagaacagacaagaaggggcagacggcgctgcatatggcgtccaaaggaacgaatgctgaaattgtggttgagttgttgaagcctgatttctcagttagccatctagaagataacaaggggaacaggccactgcatgttgcgactcggaagggcaatatcgttatagtgcagactctactgtcagttgaggggattgatgtcaatgcagttaacaggtctggagagactgctcttgccattgctgagaagatgaacaaccaagaactcgtcaacattctgagagacgccggcggcgtcgtaactgcaaaagagccagtgcatcctgcaaacccggcaaagcagctgaagcaaaccgtgagtgatatcaggcacgacgtccagtcccagatcaagcagacacggcagaccaagatgcaggtccagaagatcaagagcaggctggagaagctccacatcggcggcctgaacaacgccatcaactccaacaccgtggtggcggtgctcatcgccaccgtcgccttcgctgccatattcaccgtgcccggcaacttcgtggaggacatgagccaggcgccccccggcatgtcgctggggcaggcgtacgtggccagcgaaccggccttcataatgttcctggtgttcgactcgctggcgctcttcatctcgctcgccgtcgtggtcgtccagacgtcgctgatcgtggtggagcagaaggccaagcggaggatggtcttcgtgatgaacaagctcatgtggctggcgtgcctcttcatctccgcggcgttcatagcgctgacctacgtcgtggtcggccgcggcgactggtggctggcctggtgcaccatggtgatcggcgcggtgatcatgctcaccaccctcggctccatgtgctactgcatcgtggcgcacaggatggaggagaagagcatgaggaagatcaggaaggcctccgcgagccagtcccggtcatggtccatgccggtcgactcggacccggagctgatcaacaccgagtacaagaagatgtacgcgttgtaggtcagggtgacgatcgcgtcgcggggatctgtacatagttattatcatcaaggcgctgtttcgctcgagtctcttcgatcgaatgatgaataacgttcagtggggttttgacattttgacatgaaccgaaggtacttttgctgctgaaacaatatcacctcagctgtgcttgtattgcagcctggatggagataaggcacctggatctgtctgttgcatgctgtatggactcgtggtagtccttgtaagtggcttcttgtggatgaaccaaacccaattctcaccggatc

SEQ ID NO: 17661 - protein, 550 aa, Triticum aestivum
  peptide (1)..(550): Ceres Seq. ID no. 15178729
  misc_feature (176)..(208): Pfam Name: Pfam Description:  Ankyrin repeat
  misc_feature (1)..(550): NCBI GI NO: 15225141 NR Description: ankyrin repeat protein family
  misc_feature (1)..(550): NCBI GI NO: 15220595 NR Description: ankyrin repeat protein family
  misc_feature (28)..(550): NCBI GI NO: 15222993 NR Description: ankyrin repeat protein family
  misc_feature (25)..(550): NCBI GI NO: 24796797 NR Description: putative ankyrin repeat containing protein
  misc_feature (27)..(550): NCBI GI NO: 15238604 NR Description: ankyrin repeat protein family
  misc_feature (27)..(550): NCBI GI NO: 11357168 NR Description: ankyrin-like protein - Arabidopsis thaliana
  misc_feature (27)..(550): NCBI GI NO: 30679697 NR Description: ankyrin repeat protein family
  misc_feature (28)..(550): NCBI GI NO: 15230470 NR Description: ankyrin repeat protein family
  misc_feature (28)..(550): NCBI GI NO: 21553618 NR Description: ankyrin-like protein [Arabidopsis thaliana]
  misc_feature (32)..(550): NCBI GI NO: 34908074 NR Description: P0506B12.26
MERQTSFRLGALEKLKSFRGMDNFRRSKDSPGKRGDTPLHLAARAGNVSNVQRILAESGQEMAGELAARPNQDGETALYVAADKGHTEVVREILKVSDMQTAGIKASNSFDAFHIAAKQGHLDVLKELLQAFPALAMTTNSVNATALETAAIQGHIDIVNLLLKTDASLAKIARNNGKTVLHSAARMGHVEVVRSLLNKDPGIGLRTDKKGQTALHMASKGTNAEIVVELLKPDFSVSHLEDNKGNRPLHVATRKGNIVIVQTLLSVEGIDVNAVNRSGETALAIAEKMNNQELVNILRDAGGVVTAKEPVHPANPAKQLKQTVSDIRHDVQSQIKQTRQTKMQVQKIKSRLEKLHIGGLNNAINSNTVVAVLIATVAFAAIFTVPGNFVEDMSQAPPGMSLGQAYVASEPAFIMFLVFDSLALFISLAVVVVQTSLIVVEQKAKRRMVFVMNKLMWLACLFISAAFIALTYVVVGRGDWWLAWCTMVIGAVIMLTTLGSMCYCIVAHRMEEKSMRKIRKASASQSRSWSMPVDSDPELINTEYKKMYAL

SEQ ID NO: 17662 - protein, 530 aa, Triticum aestivum
  peptide (1)..(530): Ceres Seq. ID no. 15178730
  misc_feature (156)..(188): Pfam Name: Pfam Description:  Ankyrin repeat
  misc_feature (1)..(530): NCBI GI NO: 15225141 NR Description: ankyrin repeat protein family
  misc_feature (1)..(530): NCBI GI NO: 15220595 NR Description: ankyrin repeat protein family
  misc_feature (8)..(530): NCBI GI NO: 15222993 NR Description: ankyrin repeat protein family
  misc_feature (5)..(530): NCBI GI NO: 24796797 NR Description: putative ankyrin repeat containing protein
  misc_feature (7)..(530): NCBI GI NO: 15238604 NR Description: ankyrin repeat protein family
  misc_feature (7)..(530): NCBI GI NO: 11357168 NR Description: ankyrin-like protein - Arabidopsis thaliana
  misc_feature (7)..(530): NCBI GI NO: 30679697 NR Description: ankyrin repeat protein family
  misc_feature (8)..(530): NCBI GI NO: 15230470 NR Description: ankyrin repeat protein family
  misc_feature (8)..(530): NCBI GI NO: 21553618 NR Description: ankyrin-like protein [Arabidopsis thaliana]
  misc_feature (12)..(530): NCBI GI NO: 34908074 NR Description: P0506B12.26
MDNFRRSKDSPGKRGDTPLHLAARAGNVSNVQRILAESGQEMAGELAARPNQDGETALYVAADKGHTEVVREILKVSDMQTAGIKASNSFDAFHIAAKQGHLDVLKELLQAFPALAMTTNSVNATALETAAIQGHIDIVNLLLKTDASLAKIARNNGKTVLHSAARMGHVEVVRSLLNKDPGIGLRTDKKGQTALHMASKGTNAEIVVELLKPDFSVSHLEDNKGNRPLHVATRKGNIVIVQTLLSVEGIDVNAVNRSGETALAIAEKMNNQELVNILRDAGGVVTAKEPVHPANPAKQLKQTVSDIRHDVQSQIKQTRQTKMQVQKIKSRLEKLHIGGLNNAINSNTVVAVLIATVAFAAIFTVPGNFVEDMSQAPPGMSLGQAYVASEPAFIMFLVFDSLALFISLAVVVVQTSLIVVEQKAKRRMVFVMNKLMWLACLFISAAFIALTYVVVGRGDWWLAWCTMVIGAVIMLTTLGSMCYCIVAHRMEEKSMRKIRKASASQSRSWSMPVDSDPELINTEYKKMYAL

SEQ ID NO: 17663 - protein, 489 aa, Triticum aestivum
  peptide (1)..(489): Ceres Seq. ID no. 15178731
  misc_feature (115)..(147): Pfam Name: Pfam Description:  Ankyrin repeat
  misc_feature (1)..(489): NCBI GI NO: 15225141 NR Description: ankyrin repeat protein family
  misc_feature (1)..(489): NCBI GI NO: 15220595 NR Description: ankyrin repeat protein family
  misc_feature (1)..(489): NCBI GI NO: 15222993 NR Description: ankyrin repeat protein family
  misc_feature (1)..(489): NCBI GI NO: 24796797 NR Description: putative ankyrin repeat containing protein
  misc_feature (1)..(489): NCBI GI NO: 15238604 NR Description: ankyrin repeat protein family
  misc_feature (1)..(489): NCBI GI NO: 11357168 NR Description: ankyrin-like protein - Arabidopsis thaliana
  misc_feature (1)..(489): NCBI GI NO: 30679697 NR Description: ankyrin repeat protein family
  misc_feature (1)..(489): NCBI GI NO: 15230470 NR Description: ankyrin repeat protein family
  misc_feature (1)..(489): NCBI GI NO: 21553618 NR Description: ankyrin-like protein [Arabidopsis thaliana]
  misc_feature (1)..(489): NCBI GI NO: 34908074 NR Description: P0506B12.26
MAGELAARPNQDGETALYVAADKGHTEVVREILKVSDMQTAGIKASNSFDAFHIAAKQGHLDVLKELLQAFPALAMTTNSVNATALETAAIQGHIDIVNLLLKTDASLAKIARNNGKTVLHSAARMGHVEVVRSLLNKDPGIGLRTDKKGQTALHMASKGTNAEIVVELLKPDFSVSHLEDNKGNRPLHVATRKGNIVIVQTLLSVEGIDVNAVNRSGETALAIAEKMNNQELVNILRDAGGVVTAKEPVHPANPAKQLKQTVSDIRHDVQSQIKQTRQTKMQVQKIKSRLEKLHIGGLNNAINSNTVVAVLIATVAFAAIFTVPGNFVEDMSQAPPGMSLGQAYVASEPAFIMFLVFDSLALFISLAVVVVQTSLIVVEQKAKRRMVFVMNKLMWLACLFISAAFIALTYVVVGRGDWWLAWCTMVIGAVIMLTTLGSMCYCIVAHRMEEKSMRKIRKASASQSRSWSMPVDSDPELINTEYKKMYAL

SEQ ID NO: 17664 - DNA, 2162 bp, Triticum aestivum
  misc_feature (1)..(2162): Ceres Seq. ID no. 15170171
cccagatctccccgcccgcctctccctcgctccccaccccgcgccgcaatggccgacgagcccctcgacgcgtcgccggcgcccgcggcccccgctgcggcgtcggaccccgccccctcccccgtgcccgccccagcccccgcacccgcgcccgcggcgaccgcatccctggtcctccggccgcggcgggagtcgttcgagcacggcctcctgccgatccccaagctggtcttcccggagggcacgctcacgcaaaccctagcgcagctcagggcgaagctcgcggcgccgggggccgggcgcgtgggcgccgcggcgctcgcggaggcgctgcagatccccgccgaccaggccgcgctcgcgctcgggacgctcgccgcggtcctccccggcgaaggcgacggccccgccgcggacggcgcgtgggcggccgacctccgcgacgtgctcctcttcctctacatccagtcctacaagcgcctcgtgccgcgcgcccacaaggactcgccgtccgtcgccgacgtctggccctccacctccgccttcgacggctatctctccgcgctgtccccgatccagcttgtacgcagtaatagccgtcggtttatgccttcgcaagcagatgaagaagctcatcagttatcttatttacaaaagcatatggccaatgttttaactcttttggcagattctgttgatggagagggtgatgaatctatggtactgacaatggagacttttgagcaccttggattcttgttgcagttctccgaaggaactcctttaagccaagctgctccattttttgcgaattctgatccagacatgcctgctgctcctgttccggctactcaagttcatgactggattctgcagaatatagcttcttccttggaatatactgcagaaaaagctataaccaaggaaaacaatcaacggagtgtatctgatcctgatgtggcaatggctgatgctgtcacaaatacaagaatccagagcagctcatcaactggtgcttctgtgcaaaacaatcctggatactaccgaaatacatcttttgtggagggtatctccaaaacttctgttgtcaaacacgggtctgatattaaagggcattcaataaaggttttgaactgccatgattctgttatctacatcctagcccctctcaaatatgctacggtgtatggatgttctgacacaactgttgttcttggtgctattggcaaggtggtaaaagttgagcattgtgaacgtgtgcaaatagttgtggcttctaaaagaatttgtattgccaattgtcgagaatgtatcttctacttgggagtaaatcaccaaccacttatcgtgggggacaaccataaattacaagttgctccatttaatacttgttatccacaacttggggagcatttggcacaagttggtgtggaccctaacgtcaacaagtgggatcaaccttttgtgctgggagttgttgatccacacgattcattatctcatcctgcaggggtttctgatgtccaagccgagtctgccacttgtctagatcctgatctattcacagacttcatgattcctagttggtttgaggcagaaggtcctaccaaatacaatccatttacgttacctgaagtttactgggcatcacagaggaaaaagaatgcttccctggaagacattcaaaagaatatacgagagctggagcttgatgataaccggaaaaaagaattggcatgtgcccttcatgctcaattcaaggactggctatatgcttcaggaaatatccgccagctttactgtttgcaaggcgaataagcatatatgatcttcatccgtaagtgcttaggcacacctgtgaagattgtgcatcctttgcccggtccccttccatagtccagtcctgtccatccgaccgcatcatccacgctgacttctcgtcgactgagctgattcaaccatgtagtgtttgtcaatgtaaaagaaataatgtactgcccattttgtctattaattttgatcggcttccccttgtgttggttgtggttggtgcaaggatctaaatgggggtttggtagtttcatatttatatcctttgtaacatatacgaccatgaaagcggttactcgattctttagtggaaataaacatttttttgctcg

SEQ ID NO: 17665 - protein, 605 aa, Triticum aestivum
  peptide (1)..(605): Ceres Seq. ID no. 15170172
  misc_feature (36)..(605): NCBI GI NO: 18410836 NR Description: expressed protein [Arabidopsis thaliana]
  misc_feature (194)..(605): NCBI GI NO: 30688947 NR Description: expressed protein [Arabidopsis thaliana]
  misc_feature (44)..(134): NCBI GI NO: 30688947 NR Description: expressed protein [Arabidopsis thaliana]
  misc_feature (194)..(591): NCBI GI NO: 7452467 NR Description: hypothetical protein At2g42230
  misc_feature (44)..(134): NCBI GI NO: 7452467 NR Description: hypothetical protein At2g42230
  misc_feature (198)..(605): NCBI GI NO: 11280529 NR Description: hypothetical protein T10K17
  misc_feature (143)..(599): NCBI GI NO: 8922517 NR Description: hypothetical protein FLJ10560 [Homo sapiens]
  misc_feature (357)..(599): NCBI GI NO: 34869310 NR Description: similar to hypothetical protein FLJ10560
  misc_feature (278)..(593): NCBI GI NO: 29250580 NR Description: GLP_254_3153_1495 [Giardia lamblia ATCC 50803]
  misc_feature (4)..(61): NCBI GI NO: 30387315 NR Description: unknown [Choristoneura fumiferana MNPV]
PRSPRPPLPRSPPRAAMADEPLDASPAPAAPAAASDPAPSPVPAPAPAPAPAATASLVLRPRRESFEHGLLPIPKLVFPEGTLTQTLAQLRAKLAAPGAGRVGAAALAEALQIPADQAALALGTLAAVLPGEGDGPAADGAWAADLRDVLLFLYIQSYKRLVPRAHKDSPSVADVWPSTSAFDGYLSALSPIQLVRSNSRRFMPSQADEEAHQLSYLQKHMANVLTLLADSVDGEGDESMVLTMETFEHLGFLLQFSEGTPLSQAAPFFANSDPDMPAAPVPATQVHDWILQNIASSLEYTAEKAITKENNQRSVSDPDVAMADAVTNTRIQSSSSTGASVQNNPGYYRNTSFVEGISKTSVVKHGSDIKGHSIKVLNCHDSVIYILAPLKYATVYGCSDTTVVLGAIGKVVKVEHCERVQIVVASKRICIANCRECIFYLGVNHQPLIVGDNHKLQVAPFNTCYPQLGEHLAQVGVDPNVNKWDQPFVLGVVDPHDSLSHPAGVSDVQAESATCLDPDLFTDFMIPSWFEAEGPTKYNPFTLPEVYWASQRKKNASLEDIQKNIRELELDDNRKKELACALHAQFKDWLYASGNIRQLYCLQGE

SEQ ID NO: 17666 - protein, 589 aa, Triticum aestivum
  peptide (1)..(589): Ceres Seq. ID no. 15170173
  misc_feature (20)..(589): NCBI GI NO: 18410836 NR Description: expressed protein [Arabidopsis thaliana]
  misc_feature (178)..(589): NCBI GI NO: 30688947 NR Description: expressed protein [Arabidopsis thaliana]
  misc_feature (28)..(118): NCBI GI NO: 30688947 NR Description: expressed protein [Arabidopsis thaliana]
  misc_feature (178)..(575): NCBI GI NO: 7452467 NR Description: hypothetical protein At2g42230
  misc_feature (28)..(118): NCBI GI NO: 7452467 NR Description: hypothetical protein At2g42230
  misc_feature (182)..(589): NCBI GI NO: 11280529 NR Description: hypothetical protein T10K17
  misc_feature (127)..(583): NCBI GI NO: 8922517 NR Description: hypothetical protein FLJ10560 [Homo sapiens]
  misc_feature (341)..(583): NCBI GI NO: 34869310 NR Description: similar to hypothetical protein FLJ10560
  misc_feature (262)..(577): NCBI GI NO: 29250580 NR Description: GLP_254_3153_1495 [Giardia lamblia ATCC 50803]
  misc_feature (1)..(45): NCBI GI NO: 30387315 NR Description: unknown [Choristoneura fumiferana MNPV]
MADEPLDASPAPAAPAAASDPAPSPVPAPAPAPAPAATASLVLRPRRESFEHGLLPIPKLVFPEGTLTQTLAQLRAKLAAPGAGRVGAAALAEALQIPADQAALALGTLAAVLPGEGDGPAADGAWAADLRDVLLFLYIQSYKRLVPRAHKDSPSVADVWPSTSAFDGYLSALSPIQLVRSNSRRFMPSQADEEAHQLSYLQKHMANVLTLLADSVDGEGDESMVLTMETFEHLGFLLQFSEGTPLSQAAPFFANSDPDMPAAPVPATQVHDWILQNIASSLEYTAEKAITKENNQRSVSDPDVAMADAVTNTRIQSSSSTGASVQNNPGYYRNTSFVEGISKTSVVKHGSDIKGHSIKVLNCHDSVIYILAPLKYATVYGCSDTTVVLGAIGKVVKVEHCERVQIVVASKRICIANCRECIFYLGVNHQPLIVGDNHKLQVAPFNTCYPQLGEHLAQVGVDPNVNKWDQPFVLGVVDPHDSLSHPAGVSDVQAESATCLDPDLFTDFMIPSWFEAEGPTKYNPFTLPEVYWASQRKKNASLEDIQKNIRELELDDNRKKELACALHAQFKDWLYASGNIRQLYCLQGE

SEQ ID NO: 17667 - protein, 403 aa, Triticum aestivum
  peptide (1)..(403): Ceres Seq. ID no. 15170174
  misc_feature (1)..(403): NCBI GI NO: 18410836 NR Description: expressed protein [Arabidopsis thaliana]
  misc_feature (1)..(403): NCBI GI NO: 30688947 NR Description: expressed protein [Arabidopsis thaliana]
  misc_feature (1)..(389): NCBI GI NO: 7452467 NR Description: hypothetical protein At2g42230
  misc_feature (1)..(403): NCBI GI NO: 11280529 NR Description: hypothetical protein T10K17
  misc_feature (1)..(397): NCBI GI NO: 8922517 NR Description: hypothetical protein FLJ10560 [Homo sapiens]
  misc_feature (155)..(397): NCBI GI NO: 34869310 NR Description: similar to hypothetical protein FLJ10560
  misc_feature (76)..(391): NCBI GI NO: 29250580 NR Description: GLP_254_3153_1495 [Giardia lamblia ATCC 50803]
MPSQADEEAHQLSYLQKHMANVLTLLADSVDGEGDESMVLTMETFEHLGFLLQFSEGTPLSQAAPFFANSDPDMPAAPVPATQVHDWILQNIASSLEYTAEKAITKENNQRSVSDPDVAMADAVTNTRIQSSSSTGASVQNNPGYYRNTSFVEGISKTSVVKHGSDIKGHSIKVLNCHDSVIYILAPLKYATVYGCSDTTVVLGAIGKVVKVEHCERVQIVVASKRICIANCRECIFYLGVNHQPLIVGDNHKLQVAPFNTCYPQLGEHLAQVGVDPNVNKWDQPFVLGVVDPHDSLSHPAGVSDVQAESATCLDPDLFTDFMIPSWFEAEGPTKYNPFTLPEVYWASQRKKNASLEDIQKNIRELELDDNRKKELACALHAQFKDWLYASGNIRQLYCLQGE

SEQ ID NO: 17668 - DNA, 1640 bp, Triticum aestivum
  misc_feature (1)..(1640): Ceres Seq. ID no. 12784444
aagtttgacagtcgccacttctcaaagcgaagaaagaaacatcgagaaaagaaagcgagagaagcgctccaagtcgtgactcgtcggccatggcgcagccgtcggcggcggcgaggaagccctcggcagcgccaaccgtcgtcctgacacttgtcctggccctcgcctccgcgagcctcctcttcctcctagtccacctgtccccttcgtcgccatccgcgcacccgcacccccaccgccgcctccgcctgcgtggtgcccacctcaggcacggaggcgccaccccgcaccagatcccgttcgaccccgtcatcgccgacctcgagcaccgcctggacgaccgcgagtgggagcgcctggctgccgcggggctgcacgcgccgggcatggagtctgcccccgtcccagaggacctcgcagactatgaggacgagtacatcaatgacgccgcgcggttcaacatgacgctgcgcgtggcggcgctcttccccaagatcgacgtggaccccgccgacgacgccgtgacgggcgccgagctggccgcgtggaatctcgcgtccgcgcggcgggaggtgctgcaccgcaccgcccgggagctcgacctgcacgaccgcgaccacgacggccgcgtcgccttctccgagtacgagaggcccagctgggcttggcggttcgacgataataactcaaccagtgatgggatgggatggtggaaggaggggcacttcaatgctgcggatatggacggtgacggctttctaaatctgacggagtttaacaacttcttacatccagctgatactaccaacccaaagctaatacattggttgtgcaaagaagaagtcagggaaagagacaaagataatgacgggaagctcaatttccaagagttttataatggattgttttattcagttcgacattacgatgatgaaacttcaacagatgactccaatggctctgatgcaccggctagaaaatcgttttcacagcttgatctggataatgatgggcttttgtcagcagacgagctaaaacctatcatcggaaaactccatccagcagaaaacttctatgccaagcaacaagctgactatgtgatatcacaggctgacacaaacaaagatggacagctgagtttgaatgagatgattgagaacccctatgtattttacagtgctttattcacagaagatgattatgggtctcatgacgagctccggtagttccttcaagtaggtggtattcaggacctttcaacgcttggttagacatttgctgcagatatatatcttcaatgatctgttggccccatctactgccttgccaagcacatttcaggcgatttccatgtataacacaagcgtgcatttccacacgcctgttttagcaacagagcattcatttgttacattaagagttcttgaattagtttcatgttttgcatggcaagttagcattggttcttccatatatagtttttggtgtgcaaaagtaggttgttgttccaggatcacacacttgtaaactatgaaaaccaggaaggtgcagctgtagggcttgtatgtatgtaactggcattcctgaaccctatctgtaaacattgtgaagttatgttctatgaaagtgattctattctg

SEQ ID NO: 17669 - protein, 378 aa, Triticum aestivum
  peptide (1)..(378): Ceres Seq. ID no. 12784445
  misc_feature (208)..(236): Pfam Name: Pfam Description:  EF hand
  misc_feature (49)..(378): NCBI GI NO: 18415883 NR Description: expressed protein; protein id: At5g08580
  misc_feature (44)..(377): NCBI GI NO: 15234272 NR Description: putative calcium binding protein
  misc_feature (21)..(378): NCBI GI NO: 38345557 NR Description: OSJNBa0032F06.6
  misc_feature (203)..(378): NCBI GI NO: 34914276 NR Description: B1151A10.4
  misc_feature (67)..(234): NCBI GI NO: 34914276 NR Description: B1151A10.4
  misc_feature (114)..(377): NCBI GI NO: 4506457 NR Description: reticulocalbin 2, EF-hand calcium binding domain
  misc_feature (128)..(376): NCBI GI NO: 2809324 NR Description: calumenin [Homo sapiens]
  misc_feature (128)..(376): NCBI GI NO: 4502551 NR Description: calumenin precursor [Homo sapiens]
  misc_feature (128)..(376): NCBI GI NO: 30583871 NR Description: Homo sapiens calumenin [synthetic construct]
  misc_feature (128)..(376): NCBI GI NO: 6680840 NR Description: calumenin [Mus musculus]
MAQPSAAARKPSAAPTVVLTLVLALASASLLFLLVHLSPSSPSAHPHPHRRLRLRGAHLRHGGATPHQIPFDPVIADLEHRLDDREWERLAAAGLHAPGMESAPVPEDLADYEDEYINDAARFNMTLRVAALFPKIDVDPADDAVTGAELAAWNLASARREVLHRTARELDLHDRDHDGRVAFSEYERPSWAWRFDDNNSTSDGMGWWKEGHFNAADMDGDGFLNLTEFNNFLHPADTTNPKLIHWLCKEEVRERDKDNDGKLNFQEFYNGLFYSVRHYDDETSTDDSNGSDAPARKSFSQLDLDNDGLLSADELKPIIGKLHPAENFYAKQQADYVISQADTNKDGQLSLNEMIENPYVFYSALFTEDDYGSHDELR

SEQ ID NO: 17670 - protein, 279 aa, Triticum aestivum
  peptide (1)..(279): Ceres Seq. ID no. 12784446
  misc_feature (109)..(137): Pfam Name: Pfam Description:  EF hand
  misc_feature (1)..(279): NCBI GI NO: 18415883 NR Description: expressed protein; protein id: At5g08580
  misc_feature (1)..(278): NCBI GI NO: 15234272 NR Description: putative calcium binding protein
  misc_feature (1)..(279): NCBI GI NO: 38345557 NR Description: OSJNBa0032F06.6
  misc_feature (104)..(279): NCBI GI NO: 34914276 NR Description: B1151A10.4
  misc_feature (1)..(135): NCBI GI NO: 34914276 NR Description: B1151A10.4
  misc_feature (15)..(278): NCBI GI NO: 4506457 NR Description: reticulocalbin 2, EF-hand calcium binding domain
  misc_feature (29)..(277): NCBI GI NO: 2809324 NR Description: calumenin [Homo sapiens]
  misc_feature (29)..(277): NCBI GI NO: 4502551 NR Description: calumenin precursor [Homo sapiens]
  misc_feature (29)..(277): NCBI GI NO: 30583871 NR Description: Homo sapiens calumenin [synthetic construct]
  misc_feature (29)..(277): NCBI GI NO: 6680840 NR Description: calumenin [Mus musculus]
MESAPVPEDLADYEDEYINDAARFNMTLRVAALFPKIDVDPADDAVTGAELAAWNLASARREVLHRTARELDLHDRDHDGRVAFSEYERPSWAWRFDDNNSTSDGMGWWKEGHFNAADMDGDGFLNLTEFNNFLHPADTTNPKLIHWLCKEEVRERDKDNDGKLNFQEFYNGLFYSVRHYDDETSTDDSNGSDAPARKSFSQLDLDNDGLLSADELKPIIGKLHPAENFYAKQQADYVISQADTNKDGQLSLNEMIENPYVFYSALFTEDDYGSHDELR

SEQ ID NO: 17671 - protein, 254 aa, Triticum aestivum
  peptide (1)..(254): Ceres Seq. ID no. 12784447
  misc_feature (84)..(112): Pfam Name: Pfam Description:  EF hand
  misc_feature (1)..(254): NCBI GI NO: 18415883 NR Description: expressed protein; protein id: At5g08580
  misc_feature (1)..(253): NCBI GI NO: 15234272 NR Description: putative calcium binding protein
  misc_feature (1)..(254): NCBI GI NO: 38345557 NR Description: OSJNBa0032F06.6
  misc_feature (79)..(254): NCBI GI NO: 34914276 NR Description: B1151A10.4
  misc_feature (1)..(110): NCBI GI NO: 34914276 NR Description: B1151A10.4
  misc_feature (1)..(253): NCBI GI NO: 4506457 NR Description: reticulocalbin 2, EF-hand calcium binding domain
  misc_feature (4)..(252): NCBI GI NO: 2809324 NR Description: calumenin [Homo sapiens]
  misc_feature (4)..(252): NCBI GI NO: 4502551 NR Description: calumenin precursor [Homo sapiens]
  misc_feature (4)..(252): NCBI GI NO: 30583871 NR Description: Homo sapiens calumenin [synthetic construct]
  misc_feature (4)..(252): NCBI GI NO: 6680840 NR Description: calumenin [Mus musculus]
MTLRVAALFPKIDVDPADDAVTGAELAAWNLASARREVLHRTARELDLHDRDHDGRVAFSEYERPSWAWRFDDNNSTSDGMGWWKEGHFNAADMDGDGFLNLTEFNNFLHPADTTNPKLIHWLCKEEVRERDKDNDGKLNFQEFYNGLFYSVRHYDDETSTDDSNGSDAPARKSFSQLDLDNDGLLSADELKPIIGKLHPAENFYAKQQADYVISQADTNKDGQLSLNEMIENPYVFYSALFTEDDYGSHDELR

SEQ ID NO: 17672 - DNA, 1334 bp, Triticum aestivum
  misc_feature (1)..(1334): Ceres Seq. ID no. 13659957
acggttcgcccaaacagggtatccccttatcctccttcgtcccagcccccaatccctagcccctcctttccaccgtccgtaccgccgccagcgaccagaagcgctcaaggacctcggcaatctcctgatccggtgggaaatcgtcaacgagccagaccagatccaccggagcaatcaagaatgtgagcaaaaagaatgtgccaagcgtgaggttgctcgctctcgtgataattacatgtcatggagtgatgattgtaccaagtatatgcttgagtggtatatcgagaagcaaagggacaagccaccaaccttcaagtggaaggcacaacaccatctacaatgtgctaatgatttgaatgacaagtttggaattacagctacagcgaaacaagttgatcgacactttaggtcattcaaggagaaatggaagtggataaagctagcaaaggggaggagtggatatggcttcgataaagtacttaacaaatttaacattgacaagtcagagaaatcaccaagcaagcttggcaaaataaaatttaactaccttactcattccatcaagttttatcatctcttggaagaactgtttagtgactcatctcatgcggatggctcacttgctattgatgtgaataatgcaagtgagaatgtggaatctgatggtagtagtgaaacaagcagccacacatccactgctgaacaaggtcttagtgattctgacatgattgcacccaacagtccagcagaaggcactagctcaaatctgaagcgcaagcatgttaaagcaccacataagaagaaaccaaaggtcaaggcgcgtcgagccagagtgttagatgatgatgtggcagcgagcattgtgagtcttgctgaaactgtgaaatctgccgcccctattcagccaatagcagctacagaccctaatgccaatctttggaagcacattgagtcgctaactctcccagcaaatgagaaaattgagttagcaacctatcttgctaagccagaacaagaagttttccgtggtttcctgaattgtgctagcgaccagacttttaatgcttgggtccttgattatttcgcgcacaagtacgacggcaaagatcccgcaactgctgatccatcaatctgaatgacatgtttggtggctttcttttggcaagtgcttttgtagtctacttagctgctttccatgcacttatgctaagtggattcctgtgctctaagggtgtttagagggtcttaccttttgtaatgcattgctgtagcacaaatctgaattaagctagtttgtaagaaattacttgatggtggatggccttgtgcatgct

SEQ ID NO: 17673 - protein, 377 aa, Triticum aestivum
  peptide (1)..(377): Ceres Seq. ID no. 13659958
  misc_feature (42)..(364): NCBI GI NO: 21397269 NR Description: Unknown protein
  misc_feature (74)..(364): NCBI GI NO: 38344112 NR Description: OSJNBb0050O03.9
RFAQTGYPLILLRPSPQSLAPPFHRPYRRQRPEALKDLGNLLIRWEIVNEPDQIHRSNQECEQKECAKREVARSRDNYMSWSDDCTKYMLEWYIEKQRDKPPTFKWKAQHHLQCANDLNDKFGITATAKQVDRHFRSFKEKWKWIKLAKGRSGYGFDKVLNKFNIDKSEKSPSKLGKIKFNYLTHSIKFYHLLEELFSDSSHADGSLAIDVNNASENVESDGSSETSSHTSTAEQGLSDSDMIAPNSPAEGTSSNLKRKHVKAPHKKKPKVKARRARVLDDDVAASIVSLAETVKSAAPIQPIAATDPNANLWKHIESLTLPANEKIELATYLAKPEQEVFRGFLNCASDQTFNAWVLDYFAHKYDGKDPATADPSI

SEQ ID NO: 17674 - protein, 299 aa, Triticum aestivum
  peptide (1)..(299): Ceres Seq. ID no. 13659959
  misc_feature (1)..(286): NCBI GI NO: 21397269 NR Description: Unknown protein
  misc_feature (1)..(286): NCBI GI NO: 38344112 NR Description: OSJNBb0050O03.9
MSWSDDCTKYMLEWYIEKQRDKPPTFKWKAQHHLQCANDLNDKFGITATAKQVDRHFRSFKEKWKWIKLAKGRSGYGFDKVLNKFNIDKSEKSPSKLGKIKFNYLTHSIKFYHLLEELFSDSSHADGSLAIDVNNASENVESDGSSETSSHTSTAEQGLSDSDMIAPNSPAEGTSSNLKRKHVKAPHKKKPKVKARRARVLDDDVAASIVSLAETVKSAAPIQPIAATDPNANLWKHIESLTLPANEKIELATYLAKPEQEVFRGFLNCASDQTFNAWVLDYFAHKYDGKDPATADPSI

SEQ ID NO: 17675 - protein, 289 aa, Triticum aestivum
  peptide (1)..(289): Ceres Seq. ID no. 13659960
  misc_feature (1)..(276): NCBI GI NO: 21397269 NR Description: Unknown protein
  misc_feature (1)..(276): NCBI GI NO: 38344112 NR Description: OSJNBb0050O03.9
MLEWYIEKQRDKPPTFKWKAQHHLQCANDLNDKFGITATAKQVDRHFRSFKEKWKWIKLAKGRSGYGFDKVLNKFNIDKSEKSPSKLGKIKFNYLTHSIKFYHLLEELFSDSSHADGSLAIDVNNASENVESDGSSETSSHTSTAEQGLSDSDMIAPNSPAEGTSSNLKRKHVKAPHKKKPKVKARRARVLDDDVAASIVSLAETVKSAAPIQPIAATDPNANLWKHIESLTLPANEKIELATYLAKPEQEVFRGFLNCASDQTFNAWVLDYFAHKYDGKDPATADPSI

SEQ ID NO: 17676 - DNA, 2027 bp, Triticum aestivum
  misc_feature (1)..(2027): Ceres Seq. ID no. 14313366
tccgcccgatccccttccgccccctcccgacgatcgcccccgctcgtcccaccgcggtgggcgatcgctcctctcctccgtgcgcgcgattcctgaggcgaggcgaccgacaccagattccgccggccggcccacctcccccgcttcgccgatcggatcgcgtgctccatgaggtagaggtgacgataaagcatagttgttgacttagcttgcagtggttctttatcgaagctaaggcagataataattggcgttatggcatatcgaatggtatgcgctccccaagtcattgatctcgagtctgagcgagggcatcctcatgttcattctgaaagtttaattcacaatgggaatgatttgtccgaccaaggcagtcaatatactgtcagagttgtaggcaatgctatgaatgctggtctttctgatacacagggttactacaatatgagcatgaatcatccacatcagcctgttcatagttctccgccaaatttaggcgttgattcaggttttgtcttcccatcaaatatgtacaacccttgcatgtcaacatctatgaacagatatgtctctcatgctcagagctttggattgcctttaaaccaagttgtctcaggaagtatgtatggaagtactagaaatgaaaatgtcagcgaaactgctagaggattcattaaaaggaaaaatgccgcagtggcaggaacttgtcattttgttaatggatctgcaagctcaagctcatcctctcatacatctcaaaatcctacacataggccatgggatccttcttttgagtcaaatgtttttcctaatgtcacaccattcaacccatcagaatatcatagccacagcacttggccatctgtggaaggatcttccattactggatcaaatgggtttaatttgatggctgctcacccagaatcagcacagcatggtaactatacatttcaatcaagtcatgctagtcagtgctttcaacctgccagcactacttgggtttcccaggctgcaactggaattgtggaaggagtaccacagtggtcatacatcaatgcaatgtctagtgttccaggcagatttgcacattcaggggccacagaaatagtgaatggaggctttcatgaatatcagaatggcccttcaaccatttctcaagggcatttaccttattttcatcaacatgctgtgcatagcatgcaacctcataatccactggatcatacacgagtgcaagtcccttaccaacaaggccacaataatggcatcttgcatagtggggtaaatcattctggtaaccggttccacttgagtccaagaactccaggtctcttctctaattctgagcggtcttttgggcctccacagcatccgttcctggtgaacccagttaatcataggaacttaagaattttgccacctctgcagcatggtgcaatcatggatttttcgaggttgtatgaggggtcaaatgtagtagatgagcatagagatatgcgtctagatatagacagcatgacctatgaggagcttttagcattagaagagcacattggagacgtcaatacaggtctggcaaaaagccacattgtagataaattgaagactagcttatatgtgccaggagcaacctgcgtgtctaatcagtcatctgaaccttccacagagaatgaggcttgcataatatgccaggaggagtacgaggctgaggactgcgttggaatcctggattgtggccacagataccatgcggtgtgcttaaaacagtggctgacggtaaagaacctatgccccatctgcaagacaacagctttgtctgcgggtagaagaagttgataacaaacaggattaatctttatcagttatttgcttgacaaacattcagatcaattttgtacataagaagcggtagactattctgctacctgtatttgttgttcaccttgtgattgggagtaactcggcttccaaaaactgtacagacataacattgatcgttctattcaaatgtagaatgtttataaatt

SEQ ID NO: 17677 - protein, 526 aa, Triticum aestivum
  peptide (1)..(526): Ceres Seq. ID no. 14313367
  misc_feature (475)..(515): Pfam Name: RING finger Pfam Description: Zinc finger, C3HC4 type
  misc_feature (212)..(526): NCBI GI NO: 34910942 NR Description: putative U2 snRNP auxiliary factor
  misc_feature (91)..(123): NCBI GI NO: 34910942 NR Description: putative U2 snRNP auxiliary factor
  misc_feature (366)..(496): NCBI GI NO: 4768982 NR Description: hypothetical protein [Oryza sativa]
  misc_feature (152)..(520): NCBI GI NO: 18400621 NR Description: zinc finger
  misc_feature (152)..(520): NCBI GI NO: 8777490 NR Description: RING-finger protein (C-terminal)-like
  misc_feature (69)..(525): NCBI GI NO: 22330219 NR Description: zinc finger
  misc_feature (69)..(525): NCBI GI NO: 20466834 NR Description: unknown protein [Arabidopsis thaliana]
  misc_feature (22)..(526): NCBI GI NO: 30687050 NR Description: zinc finger
  misc_feature (380)..(525): NCBI GI NO: 11358785 NR Description: RING-H2 finger protein RHG1a
  misc_feature (263)..(525): NCBI GI NO: 1076498 NR Description: RING finger protein Pzf - soybean (fragment)
MAYRMVCAPQVIDLESERGHPHVHSESLIHNGNDLSDQGSQYTVRVVGNAMNAGLSDTQGYYNMSMNHPHQPVHSSPPNLGVDSGFVFPSNMYNPCMSTSMNRYVSHAQSFGLPLNQVVSGSMYGSTRNENVSETARGFIKRKNAAVAGTCHFVNGSASSSSSSHTSQNPTHRPWDPSFESNVFPNVTPFNPSEYHSHSTWPSVEGSSITGSNGFNLMAAHPESAQHGNYTFQSSHASQCFQPASTTWVSQAATGIVEGVPQWSYINAMSSVPGRFAHSGATEIVNGGFHEYQNGPSTISQGHLPYFHQHAVHSMQPHNPLDHTRVQVPYQQGHNNGILHSGVNHSGNRFHLSPRTPGLFSNSERSFGPPQHPFLVNPVNHRNLRILPPLQHGAIMDFSRLYEGSNVVDEHRDMRLDIDSMTYEELLALEEHIGDVNTGLAKSHIVDKLKTSLYVPGATCVSNQSSEPSTENEACIICQEEYEAEDCVGILDCGHRYHAVCLKQWLTVKNLCPICKTTALSAGRRS

SEQ ID NO: 17678 - protein, 522 aa, Triticum aestivum
  peptide (1)..(522): Ceres Seq. ID no. 14313368
  misc_feature (471)..(511): Pfam Name: RING finger Pfam Description: Zinc finger, C3HC4 type
  misc_feature (208)..(522): NCBI GI NO: 34910942 NR Description: putative U2 snRNP auxiliary factor
  misc_feature (87)..(119): NCBI GI NO: 34910942 NR Description: putative U2 snRNP auxiliary factor
  misc_feature (362)..(492): NCBI GI NO: 4768982 NR Description: hypothetical protein [Oryza sativa]
  misc_feature (148)..(516): NCBI GI NO: 18400621 NR Description: zinc finger
  misc_feature (148)..(516): NCBI GI NO: 8777490 NR Description: RING-finger protein (C-terminal)-like
  misc_feature (65)..(521): NCBI GI NO: 22330219 NR Description: zinc finger
  misc_feature (65)..(521): NCBI GI NO: 20466834 NR Description: unknown protein [Arabidopsis thaliana]
  misc_feature (18)..(522): NCBI GI NO: 30687050 NR Description: zinc finger
  misc_feature (376)..(521): NCBI GI NO: 11358785 NR Description: RING-H2 finger protein RHG1a
  misc_feature (259)..(521): NCBI GI NO: 1076498 NR Description: RING finger protein Pzf - soybean (fragment)
MVCAPQVIDLESERGHPHVHSESLIHNGNDLSDQGSQYTVRVVGNAMNAGLSDTQGYYNMSMNHPHQPVHSSPPNLGVDSGFVFPSNMYNPCMSTSMNRYVSHAQSFGLPLNQVVSGSMYGSTRNENVSETARGFIKRKNAAVAGTCHFVNGSASSSSSSHTSQNPTHRPWDPSFESNVFPNVTPFNPSEYHSHSTWPSVEGSSITGSNGFNLMAAHPESAQHGNYTFQSSHASQCFQPASTTWVSQAATGIVEGVPQWSYINAMSSVPGRFAHSGATEIVNGGFHEYQNGPSTISQGHLPYFHQHAVHSMQPHNPLDHTRVQVPYQQGHNNGILHSGVNHSGNRFHLSPRTPGLFSNSERSFGPPQHPFLVNPVNHRNLRILPPLQHGAIMDFSRLYEGSNVVDEHRDMRLDIDSMTYEELLALEEHIGDVNTGLAKSHIVDKLKTSLYVPGATCVSNQSSEPSTENEACIICQEEYEAEDCVGILDCGHRYHAVCLKQWLTVKNLCPICKTTALSAGRRS

SEQ ID NO: 17679 - protein, 476 aa, Triticum aestivum
  peptide (1)..(476): Ceres Seq. ID no. 14313369
  misc_feature (425)..(465): Pfam Name: RING finger Pfam Description: Zinc finger, C3HC4 type
  misc_feature (162)..(476): NCBI GI NO: 34910942 NR Description: putative U2 snRNP auxiliary factor
  misc_feature (41)..(73): NCBI GI NO: 34910942 NR Description: putative U2 snRNP auxiliary factor
  misc_feature (316)..(446): NCBI GI NO: 4768982 NR Description: hypothetical protein [Oryza sativa]
  misc_feature (102)..(470): NCBI GI NO: 18400621 NR Description: zinc finger
  misc_feature (102)..(470): NCBI GI NO: 8777490 NR Description: RING-finger protein (C-terminal)-like
  misc_feature (19)..(475): NCBI GI NO: 22330219 NR Description: zinc finger
  misc_feature (19)..(475): NCBI GI NO: 20466834 NR Description: unknown protein [Arabidopsis thaliana]
  misc_feature (1)..(476): NCBI GI NO: 30687050 NR Description: zinc finger
  misc_feature (330)..(475): NCBI GI NO: 11358785 NR Description: RING-H2 finger protein RHG1a
  misc_feature (213)..(475): NCBI GI NO: 1076498 NR Description: RING finger protein Pzf - soybean (fragment)
MNAGLSDTQGYYNMSMNHPHQPVHSSPPNLGVDSGFVFPSNMYNPCMSTSMNRYVSHAQSFGLPLNQVVSGSMYGSTRNENVSETARGFIKRKNAAVAGTCHFVNGSASSSSSSHTSQNPTHRPWDPSFESNVFPNVTPFNPSEYHSHSTWPSVEGSSITGSNGFNLMAAHPESAQHGNYTFQSSHASQCFQPASTTWVSQAATGIVEGVPQWSYINAMSSVPGRFAHSGATEIVNGGFHEYQNGPSTISQGHLPYFHQHAVHSMQPHNPLDHTRVQVPYQQGHNNGILHSGVNHSGNRFHLSPRTPGLFSNSERSFGPPQHPFLVNPVNHRNLRILPPLQHGAIMDFSRLYEGSNVVDEHRDMRLDIDSMTYEELLALEEHIGDVNTGLAKSHIVDKLKTSLYVPGATCVSNQSSEPSTENEACIICQEEYEAEDCVGILDCGHRYHAVCLKQWLTVKNLCPICKTTALSAGRRS

SEQ ID NO: 17680 - DNA, 1509 bp, Triticum aestivum
  misc_feature (1)..(1509): Ceres Seq. ID no. 14313264
aagagtctctgtgcacgttgccacccttttttctccctttcccatccccatctttcgtccagccctccccgccccctcccccctctcgccgcggaccccatccgccccccgccgccgccgccgccgccgttgacactacccgcgaatctccttcttccgagtggcggagaggaggcatggcactccggaggctgcttcaggggattgtcctaccgcggacgacgggccggcatgttggggcatcgttttccacggaggctggggagactatccgcgcaaccctgtttcccggtgatggcatcgggcctgagatcgccgagtcggtcaagcaggtattcaatgttgcaggtgtaccgatagaatgggaagaacattatgttggtacggaagttgatcccagaacagagagctttttgacatgggagagcctggagtctgtgcgtagaaacaaagttggcttgaaaggtcctatggctacacctattggaaaaggccaccgttctttgaatcttacattaaggaaagaacttggactctacgccaatgtcagaccttgcaacagcctcccaggctacaagactagatatgatgatgtgaaccttgtgacaatccgtgaaaatactgaaggagagtatagtggccttgagcatcaggttgtgaggggtgttgtggaaagtttgaaaattattacccgccaagcaagtttgagagtggcagagtatgctttccattatgccaaagccaatggcagggagagggtctctgcgatacataaagctaatatcatgaggaaaacagacggacttttcctcaagtgttgccgtgaagtagctgagaagtaccctgaaatcacatatgaggaagtcattattgacaattgctgcatgacactcgtgaagaatcctggtacatttgatgtattagtgatgccaaatctgtatggtgacattattagtgatctatgtgctggtttgatcggaggattgggcttaactcccagctgcaacattggtgaaggtggcatttgtctggcagaggctgttcatggttctgcacctgatatctctggcaagaaccttgcaaacccaactgctcttatgttgagtgctgttatgatgttgcgccacttgcaattcaatgaccaagcagaccggatccacaatgccatcctccagacaattgccgaggggaagtacagaaccgctgatcttggtgggaagtcatcaacatcagactacacaaaagcagtttgcgatcatatctgagcaccagctgctctttctctcgattatttgcctcccacctaattttgttgcataccaggagctttagcctgagtaggttaagtggcaggcacctcgatttccttgggtgttaagacaccatttaaggctcctgaataattctcgcattcttgtccttggaaaagttttaccagcattgcagtcaagctgaagaatcgtatgtaataatcattggcagcatcagcgcatataatttgttcgttct

SEQ ID NO: 17681 - protein, 420 aa, Triticum aestivum
  peptide (1)..(420): Ceres Seq. ID no. 14313265
  misc_feature (91)..(416): Pfam Name: Pfam Description:  Isocitrate/isopropylmalate dehydrogenase
  misc_feature (59)..(420): NCBI GI NO: 34903262 NR Description: unnamed protein product
  misc_feature (62)..(420): NCBI GI NO: 7431333 NR Description: probable isocitrate dehydrogenase (NAD) (EC1
  misc_feature (92)..(420): NCBI GI NO: 28974492 NR Description: NAD-dependent isocitrate dehydrogenase alpha subunit
  misc_feature (90)..(420): NCBI GI NO: 11251553 NR Description: 3-isopropylmalate dehydrogenase-like protein -Arabidopsis thaliana
  misc_feature (90)..(420): NCBI GI NO: 18414179 NR Description: isocitrate dehydrogenase
  misc_feature (76)..(397): NCBI GI NO: 266463 NR Description: 3-isopropylmalate dehydrogenase
  misc_feature (76)..(397): NCBI GI NO: 7427677 NR Description: 3-isopropylmalate dehydrogenase (EC 1
  misc_feature (73)..(420): NCBI GI NO: 21536667 NR Description: putative (NAD+) isocitrate dehydrogenase
  misc_feature (73)..(420): NCBI GI NO: 30681023 NR Description: isocitrate dehydrogenase
  misc_feature (27)..(420): NCBI GI NO: 31206479 NR Description: ENSANGP00000023556 [Anopheles gambiae]
ESLCTLPPFFLPFPSPSFVQPSPPPPPSRRGPHPPPAAAAAAVDTTRESPSSEWRRGGMALRRLLQGIVLPRTTGRHVGASFSTEAGETIRATLFPGDGIGPEIAESVKQVFNVAGVPIEWEEHYVGTEVDPRTESFLTWESLESVRRNKVGLKGPMATPIGKGHRSLNLTLRKELGLYANVRPCNSLPGYKTRYDDVNLVTIRENTEGEYSGLEHQVVRGVVESLKIITRQASLRVAEYAFHYAKANGRERVSAIHKANIMRKTDGLFLKCCREVAEKYPEITYEEVIIDNCCMTLVKNPGTFDVLVMPNLYGDIISDLCAGLIGGLGLTPSCNIGEGGICLAEAVHGSAPDISGKNLANPTALMLSAVMMLRHLQFNDQADRIHNAILQTIAEGKYRTADLGGKSSTSDYTKAVCDHI

SEQ ID NO: 17682 - protein, 362 aa, Triticum aestivum
  peptide (1)..(362): Ceres Seq. ID no. 14313266
  misc_feature (33)..(358): Pfam Name: Pfam Description:  Isocitrate/isopropylmalate dehydrogenase
  misc_feature (1)..(362): NCBI GI NO: 34903262 NR Description: unnamed protein product
  misc_feature (4)..(362): NCBI GI NO: 7431333 NR Description: probable isocitrate dehydrogenase (NAD) (EC1
  misc_feature (34)..(362): NCBI GI NO: 28974492 NR Description: NAD-dependent isocitrate dehydrogenase alpha subunit
  misc_feature (32)..(362): NCBI GI NO: 11251553 NR Description: 3-isopropylmalate dehydrogenase-like protein -Arabidopsis thaliana
  misc_feature (32)..(362): NCBI GI NO: 18414179 NR Description: isocitrate dehydrogenase
  misc_feature (18)..(339): NCBI GI NO: 266463 NR Description: 3-isopropylmalate dehydrogenase
  misc_feature (18)..(339): NCBI GI NO: 7427677 NR Description: 3-isopropylmalate dehydrogenase (EC 1
  misc_feature (15)..(362): NCBI GI NO: 21536667 NR Description: putative (NAD+) isocitrate dehydrogenase
  misc_feature (15)..(362): NCBI GI NO: 30681023 NR Description: isocitrate dehydrogenase
  misc_feature (1)..(362): NCBI GI NO: 31206479 NR Description: ENSANGP00000023556 [Anopheles gambiae]
MALRRLLQGIVLPRTTGRHVGASFSTEAGETIRATLFPGDGIGPEIAESVKQVFNVAGVPIEWEEHYVGTEVDPRTESFLTWESLESVRRNKVGLKGPMATPIGKGHRSLNLTLRKELGLYANVRPCNSLPGYKTRYDDVNLVTIRENTEGEYSGLEHQVVRGVVESLKIITRQASLRVAEYAFHYAKANGRERVSAIHKANIMRKTDGLFLKCCREVAEKYPEITYEEVIIDNCCMTLVKNPGTFDVLVMPNLYGDIISDLCAGLIGGLGLTPSCNIGEGGICLAEAVHGSAPDISGKNLANPTALMLSAVMMLRHLQFNDQADRIHNAILQTIAEGKYRTADLGGKSSTSDYTKAVCDHI

SEQ ID NO: 17683 - protein, 264 aa, Triticum aestivum
  peptide (1)..(264): Ceres Seq. ID no. 14313267
  misc_feature (1)..(260): Pfam Name: Pfam Description:  Isocitrate/isopropylmalate dehydrogenase
  misc_feature (1)..(264): NCBI GI NO: 34903262 NR Description: unnamed protein product
  misc_feature (1)..(264): NCBI GI NO: 7431333 NR Description: probable isocitrate dehydrogenase (NAD) (EC1
  misc_feature (1)..(264): NCBI GI NO: 28974492 NR Description: NAD-dependent isocitrate dehydrogenase alpha subunit
  misc_feature (1)..(264): NCBI GI NO: 11251553 NR Description: 3-isopropylmalate dehydrogenase-like protein -Arabidopsis thaliana
  misc_feature (1)..(264): NCBI GI NO: 18414179 NR Description: isocitrate dehydrogenase
  misc_feature (1)..(241): NCBI GI NO: 266463 NR Description: 3-isopropylmalate dehydrogenase
  misc_feature (1)..(241): NCBI GI NO: 7427677 NR Description: 3-isopropylmalate dehydrogenase (EC 1
  misc_feature (1)..(264): NCBI GI NO: 21536667 NR Description: putative (NAD+) isocitrate dehydrogenase
  misc_feature (1)..(264): NCBI GI NO: 30681023 NR Description: isocitrate dehydrogenase
  misc_feature (1)..(264): NCBI GI NO: 31206479 NR Description: ENSANGP00000023556 [Anopheles gambiae]
MATPIGKGHRSLNLTLRKELGLYANVRPCNSLPGYKTRYDDVNLVTIRENTEGEYSGLEHQVVRGVVESLKIITRQASLRVAEYAFHYAKANGRERVSAIHKANIMRKTDGLFLKCCREVAEKYPEITYEEVIIDNCCMTLVKNPGTFDVLVMPNLYGDIISDLCAGLIGGLGLTPSCNIGEGGICLAEAVHGSAPDISGKNLANPTALMLSAVMMLRHLQFNDQADRIHNAILQTIAEGKYRTADLGGKSSTSDYTKAVCDHI

SEQ ID NO: 17684 - DNA, 2019 bp, Triticum aestivum
  misc_feature (1)..(2019): Ceres Seq. ID no. 14303201
tttttttccttcttccctttctctgggtttcaagctctggttcgttctcgtcaggctcaggggtcagggcaagaggaagcaactggttggctggctgctgctgatccatgaacgtcccggtgggcttcatcgccaagctctggagcctcgtgtcattcttgcccttcttcgtcctcctcctgctgctcggctccgccaaagctcttttgatcggcccggtcgtcgcggccatcgttttcctcggcgattcagccgtcatcatcggcctgtggcctgcgcatttcgtctggacgtactgctgcgtgctagccacgaagcgaattgggccggttctgaagatccttgccgtggtattcctgccactgccgttgctcctgttgccggtgcttggcattgtagggagccttctggttggtatcggttatggagtgttcactcccctcatggcgacttttgaggctgttggcgagggtgtcgcggacaagctctctcattgctttttggatggtactgctagcacaataaggggagcttgtatggtggtgcgtgatgttaccgacttctgcttccactcatacttctccttcatggacgagctttccgagaaaatgggggatgacgaagaacctactgacatcaagttgtcttatctaccgcggagcttccttgttgcgctggttgccgttcctctggatgtattgatgattactggggtggcattgtggaaaagcccctgcatgttgttgaaaggatggcaaagactctgcgaggatctagtagggagggaagggccttttctagagactgtttgtgtccctttcgctggtttggccattatattgtggccgcttgccgtcattgcaggagtgattgcatcatttcttagcagcttcttctttggcctccatgctggattaattgcttatcaggaggcttcatttcaaatggggctatcatacatgatctctgcagtagcattgtatgatgaatacacaaatgatcttctttatttgagagaaggttcttgtttgccaaggcccaagtaccggaaagcgggttctgcgaagtatgagaccggccgcaacaaagatgagcacaacgttacagctgcatctgcagagaagcaacatcaaggccagcgtaagcataggagggttctacaccggtcaaagacattcatggaaactatccaaagactaagacccattcaaatatgggattggctcttccgatcttgcgagataaatgggaggatattactgagcgagggactgataagctctgaagatatagaggaatttataaccaaaggaaagggaaagaagctgagcataaaactacctgcctggtgcatccttcactgtctgatacgatccgcgaaacacgacacgcacggtttgctcatatctgatgacgttgaggtgaccaacttcaattggccaaaggacaaggtgttcgactggatgctcggaccactgctggttctgaaggagcagatgaagaaactggagctcaccgaagacgaggagctgtgcttgcagaagctcatcatgacgaacgcgaacgaaaaaccgtcggattgggacgactgcggtttcccgtcaagcgacggcgtgaagagagctcagctacaggcgatcatcagaaggttgcaagggatcgtggccaatatgtcccggataccgagcttcaggagacggttcatgagcctggccagggcactgtacctggaggcgatcgacgcgggcaccatcgacgggtcgcggaaggtggagcgcaaggtcaaggctgacatcgcctccgaggaacttcagagcagagatgtcggagatacgaagggttcatcgaatgggacgtctgtggacgttgacatggtctgatgttgttgtgctgtgcaaacatattcttttgcagaactctctacctgctgcgatgtgcattagttgttttattagacgttggtaacacacatcacgcaacgcgtggacacgatggatgactgtgcctgctgggatcaag

SEQ ID NO: 17685 - protein, 590 aa, Triticum aestivum
  peptide (1)..(590): Ceres Seq. ID no. 14303202
  misc_feature (1)..(553): NCBI GI NO: 15235450 NR Description: hypothetical protein [Arabidopsis thaliana]
  misc_feature (1)..(542): NCBI GI NO: 38345330 NR Description: OSJNBa0081L15.3
  misc_feature (1)..(583): NCBI GI NO: 27311557 NR Description: Unknown protein [Arabidopsis thaliana]
  misc_feature (1)..(583): NCBI GI NO: 30688768 NR Description: expressed protein [Arabidopsis thaliana]
  misc_feature (1)..(586): NCBI GI NO: 30693640 NR Description: expressed protein [Arabidopsis thaliana]
  misc_feature (1)..(586): NCBI GI NO: 9758091 NR Description: dbj|BAA95714
  misc_feature (4)..(545): NCBI GI NO: 38344840 NR Description: OSJNBa0064H22.21
  misc_feature (15)..(514): NCBI GI NO: 15234594 NR Description: hypothetical protein [Arabidopsis thaliana]
  misc_feature (99)..(482): NCBI GI NO: 7939511 NR Description: emb|CAB40985
  misc_feature (367)..(583): NCBI GI NO: 7939511 NR Description: emb|CAB40985
MNVPVGFIAKLWSLVSFLPFFVLLLLLGSAKALLIGPVVAAIVFLGDSAVIIGLWPAHFVWTYCCVLATKRIGPVLKILAVVFLPLPLLLLPVLGIVGSLLVGIGYGVFTPLMATFEAVGEGVADKLSHCFLDGTASTIRGACMVVRDVTDFCFHSYFSFMDELSEKMGDDEEPTDIKLSYLPRSFLVALVAVPLDVLMITGVALWKSPCMLLKGWQRLCEDLVGREGPFLETVCVPFAGLAIILWPLAVIAGVIASFLSSFFFGLHAGLIAYQEASFQMGLSYMISAVALYDEYTNDLLYLREGSCLPRPKYRKAGSAKYETGRNKDEHNVTAASAEKQHQGQRKHRRVLHRSKTFMETIQRLRPIQIWDWLFRSCEINGRILLSEGLISSEDIEEFITKGKGKKLSIKLPAWCILHCLIRSAKHDTHGLLISDDVEVTNFNWPKDKVFDWMLGPLLVLKEQMKKLELTEDEELCLQKLIMTNANEKPSDWDDCGFPSSDGVKRAQLQAIIRRLQGIVANMSRIPSFRRRFMSLARALYLEAIDAGTIDGSRKVERKVKADIASEELQSRDVGDTKGSSNGTSVDVDMV

SEQ ID NO: 17686 - protein, 478 aa, Triticum aestivum
  peptide (1)..(478): Ceres Seq. ID no. 14303203
  misc_feature (1)..(441): NCBI GI NO: 15235450 NR Description: hypothetical protein [Arabidopsis thaliana]
  misc_feature (1)..(430): NCBI GI NO: 38345330 NR Description: OSJNBa0081L15.3
  misc_feature (1)..(471): NCBI GI NO: 27311557 NR Description: Unknown protein [Arabidopsis thaliana]
  misc_feature (1)..(471): NCBI GI NO: 30688768 NR Description: expressed protein [Arabidopsis thaliana]
  misc_feature (1)..(474): NCBI GI NO: 30693640 NR Description: expressed protein [Arabidopsis thaliana]
  misc_feature (1)..(474): NCBI GI NO: 9758091 NR Description: dbj|BAA95714
  misc_feature (1)..(433): NCBI GI NO: 38344840 NR Description: OSJNBa0064H22.21
  misc_feature (1)..(402): NCBI GI NO: 15234594 NR Description: hypothetical protein [Arabidopsis thaliana]
  misc_feature (1)..(370): NCBI GI NO: 7939511 NR Description: emb|CAB40985
  misc_feature (255)..(471): NCBI GI NO: 7939511 NR Description: emb|CAB40985
MATFEAVGEGVADKLSHCFLDGTASTIRGACMVVRDVTDFCFHSYFSFMDELSEKMGDDEEPTDIKLSYLPRSFLVALVAVPLDVLMITGVALWKSPCMLLKGWQRLCEDLVGREGPFLETVCVPFAGLAIILWPLAVIAGVIASFLSSFFFGLHAGLIAYQEASFQMGLSYMISAVALYDEYTNDLLYLREGSCLPRPKYRKAGSAKYETGRNKDEHNVTAASAEKQHQGQRKHRRVLHRSKTFMETIQRLRPIQIWDWLFRSCEINGRILLSEGLISSEDIEEFITKGKGKKLSIKLPAWCILHCLIRSAKHDTHGLLISDDVEVTNFNWPKDKVFDWMLGPLLVLKEQMKKLELTEDEELCLQKLIMTNANEKPSDWDDCGFPSSDGVKRAQLQAIIRRLQGIVANMSRIPSFRRRFMSLARALYLEAIDAGTIDGSRKVERKVKADIASEELQSRDVGDTKGSSNGTSVDVDMV

SEQ ID NO: 17687 - protein, 447 aa, Triticum aestivum
  peptide (1)..(447): Ceres Seq. ID no. 14303204
  misc_feature (1)..(410): NCBI GI NO: 15235450 NR Description: hypothetical protein [Arabidopsis thaliana]
  misc_feature (1)..(399): NCBI GI NO: 38345330 NR Description: OSJNBa0081L15.3
  misc_feature (1)..(440): NCBI GI NO: 27311557 NR Description: Unknown protein [Arabidopsis thaliana]
  misc_feature (1)..(440): NCBI GI NO: 30688768 NR Description: expressed protein [Arabidopsis thaliana]
  misc_feature (1)..(443): NCBI GI NO: 30693640 NR Description: expressed protein [Arabidopsis thaliana]
  misc_feature (1)..(443): NCBI GI NO: 9758091 NR Description: dbj|BAA95714
  misc_feature (1)..(402): NCBI GI NO: 38344840 NR Description: OSJNBa0064H22.21
  misc_feature (1)..(371): NCBI GI NO: 15234594 NR Description: hypothetical protein [Arabidopsis thaliana]
  misc_feature (1)..(339): NCBI GI NO: 7939511 NR Description: emb|CAB40985
  misc_feature (224)..(440): NCBI GI NO: 7939511 NR Description: emb|CAB40985
MVVRDVTDFCFHSYFSFMDELSEKMGDDEEPTDIKLSYLPRSFLVALVAVPLDVLMITGVALWKSPCMLLKGWQRLCEDLVGREGPFLETVCVPFAGLAIILWPLAVIAGVIASFLSSFFFGLHAGLIAYQEASFQMGLSYMISAVALYDEYTNDLLYLREGSCLPRPKYRKAGSAKYETGRNKDEHNVTAASAEKQHQGQRKHRRVLHRSKTFMETIQRLRPIQIWDWLFRSCEINGRILLSEGLISSEDIEEFITKGKGKKLSIKLPAWCILHCLIRSAKHDTHGLLISDDVEVTNFNWPKDKVFDWMLGPLLVLKEQMKKLELTEDEELCLQKLIMTNANEKPSDWDDCGFPSSDGVKRAQLQAIIRRLQGIVANMSRIPSFRRRFMSLARALYLEAIDAGTIDGSRKVERKVKADIASEELQSRDVGDTKGSSNGTSVDVDMV

SEQ ID NO: 17688 - DNA, 1778 bp, Triticum aestivum
  misc_feature (1)..(1778): Ceres Seq. ID no. 15170139
ctagtttcccatcctgccgcatctcttttcgccgctgattctcgcgaaagcgcaccatggcttcaacgcccgtcgaccgccatctctctctacacgcggatcgtgaggagggcccgacaaggaacacggtgttcctggcgtagttaagctgctattggagacaccctccggcttcgcaattttctcttttgccgaggattacctcgacaaagatatccagatcatctggcttcacgacttccaaatgtttgaggacaaatccagtgccattaaccttactacccggcgattaggcgccaaactcgcccagatgatcatgaagtgctccttctatgatgacaaactagttgttggaaggtctgaatataaagaaataattgaagaatcactgggtctaacctgtgtgtacaatgatcatgtgatggaggtgatgtggggtctgcagaatctcatgcatacttcttttcctgaagaaaaatctaagatgtctagggatgaccagctcctcgtgagcaaaggattgtatatggtcttagatcgacacggcattaagatcaaggcagagatgcttaatgagcatattattaagaagacccgcgatgtacgtaatactgatttacgtgaagatgcagttgcaattgtgttgcacgaaatggttgatgcctatttcgaggagttttctaaaattgataccgaggaatggagtttattcaaactagcattagctttgaaagtaatgattgatcctcatggaggacttaaagctggtgacccttatgagatgttcacacatgacgagttaatagtgatggggcgtgacgcatctaaatatgaaggtactcttgataagaaaactgtcttggcaatgtacaatgacgctgttgttctccgtgaggacaagatggatttgctgtacgaattggactgcttggttgaggaggctaaaggagcactggaaactgaagaagtgctggagaagcttgcaacattaagtgttgactccaagcagcaaactgactgtacatcttcaacagcggtgagtctgacagtacccaaccaaagcagcatctataaggagcaacactgtcctatcacagcagatgcagatggcgcggagatctcgccaaccactccagatgaagttactgctgaaagggatgctgtccgggaaaatacacaggctcaagaaactactgctgaaggaagaaaggagatcggtactgctgaaggaagaatgaacctcggtactgctgaaggaagaatgaaccttggtactgctggaggaagaataaacctcggtactgctgaaggaagaaaggagctcagtcgcattattgctcagaaggtgcccccttgtcattatcaagaatggaagcctcttcacattccgcagctcattccaaccactccatatggtgcggagatcttgccaaccactccaaatgaagttactgctgaaaggaatgctgtccgggaaaatacgcaggctcaagaaactaccgctgaaggaagaaaggagatcggtcacattcttggtcagtagttagccctgcgttgttatcttgacagtggtaactctcttcacgactagtgtgttccacttcccgcaacagactgctagcgtctcccacttctactagtcgctacctaagttgtttaggcgcttccactgattacgttgataatggcatgccttctcaggagtgccaagcttctcctaattatgcccctcgacatttgtattgcctaggtacctatgaaatgctttttgttatttg

SEQ ID NO: 17689 - protein, 432 aa, Triticum aestivum
  peptide (1)..(432): Ceres Seq. ID no. 15170140
  misc_feature (1)..(93): NCBI GI NO: 38175544 NR Description: hypothetical protein
  misc_feature (1)..(167): NCBI GI NO: 33945887 NR Description: SAR DNA-binding protein-like protein
  misc_feature (76)..(235): NCBI GI NO: 38175544 NR Description: hypothetical protein
MFEDKSSAINLTTRRLGAKLAQMIMKCSFYDDKLVVGRSEYKEIIEESLGLTCVYNDHVMEVMWGLQNLMHTSFPEEKSKMSRDDQLLVSKGLYMVLDRHGIKIKAEMLNEHIIKKTRDVRNTDLREDAVAIVLHEMVDAYFEEFSKIDTEEWSLFKLALALKVMIDPHGGLKAGDPYEMFTHDELIVMGRDASKYEGTLDKKTVLAMYNDAVVLREDKMDLLYELDCLVEEAKGALETEEVLEKLATLSVDSKQQTDCTSSTAVSLTVPNQSSIYKEQHCPITADADGAEISPTTPDEVTAERDAVRENTQAQETTAEGRKEIGTAEGRMNLGTAEGRMNLGTAGGRINLGTAEGRKELSRIIAQKVPPCHYQEWKPLHIPQLIPTTPYGAEILPTTPNEVTAERNAVRENTQAQETTAEGRKEIGHILGQ

SEQ ID NO: 17690 - protein, 410 aa, Triticum aestivum
  peptide (1)..(410): Ceres Seq. ID no. 15170141
  misc_feature (1)..(71): NCBI GI NO: 38175544 NR Description: hypothetical protein
  misc_feature (1)..(145): NCBI GI NO: 33945887 NR Description: SAR DNA-binding protein-like protein
  misc_feature (54)..(213): NCBI GI NO: 38175544 NR Description: hypothetical protein
MIMKCSFYDDKLVVGRSEYKEIIEESLGLTCVYNDHVMEVMWGLQNLMHTSFPEEKSKMSRDDQLLVSKGLYMVLDRHGIKIKAEMLNEHIIKKTRDVRNTDLREDAVAIVLHEMVDAYFEEFSKIDTEEWSLFKLALALKVMIDPHGGLKAGDPYEMFTHDELIVMGRDASKYEGTLDKKTVLAMYNDAVVLREDKMDLLYELDCLVEEAKGALETEEVLEKLATLSVDSKQQTDCTSSTAVSLTVPNQSSIYKEQHCPITADADGAEISPTTPDEVTAERDAVRENTQAQETTAEGRKEIGTAEGRMNLGTAEGRMNLGTAGGRINLGTAEGRKELSRIIAQKVPPCHYQEWKPLHIPQLIPTTPYGAEILPTTPNEVTAERNAVRENTQAQETTAEGRKEIGHILGQ

SEQ ID NO: 17691 - protein, 408 aa, Triticum aestivum
  peptide (1)..(408): Ceres Seq. ID no. 15170142
  misc_feature (1)..(69): NCBI GI NO: 38175544 NR Description: hypothetical protein
  misc_feature (1)..(143): NCBI GI NO: 33945887 NR Description: SAR DNA-binding protein-like protein
  misc_feature (52)..(211): NCBI GI NO: 38175544 NR Description: hypothetical protein
MKCSFYDDKLVVGRSEYKEIIEESLGLTCVYNDHVMEVMWGLQNLMHTSFPEEKSKMSRDDQLLVSKGLYMVLDRHGIKIKAEMLNEHIIKKTRDVRNTDLREDAVAIVLHEMVDAYFEEFSKIDTEEWSLFKLALALKVMIDPHGGLKAGDPYEMFTHDELIVMGRDASKYEGTLDKKTVLAMYNDAVVLREDKMDLLYELDCLVEEAKGALETEEVLEKLATLSVDSKQQTDCTSSTAVSLTVPNQSSIYKEQHCPITADADGAEISPTTPDEVTAERDAVRENTQAQETTAEGRKEIGTAEGRMNLGTAEGRMNLGTAGGRINLGTAEGRKELSRIIAQKVPPCHYQEWKPLHIPQLIPTTPYGAEILPTTPNEVTAERNAVRENTQAQETTAEGRKEIGHILGQ

SEQ ID NO: 17692 - DNA, 1988 bp, Triticum aestivum
  misc_feature (1)..(1988): Ceres Seq. ID no. 14313373
acacatctcaccacgccacaaacaccaaagagaggtgtactacgagggagtgagaggcgcccggctcgcctgcgtccgtctccacttctcgcgagcccggcgtcacccgccgccgggcacgcaccacgctcaacgccaaagaaaatagtgtaggtcgtgtaggcgaaggccgacctgcaaactaaacactagtcgatcaagatggtggtggagggatacgaagccgacaagaacatccagatatggaaggtgaagaagctgatcaaggggctggacggggcgaggggcaacggcacgagcatgatctcgctcatcataccgccgcgcgaccaggtgtcccgcgtcgccaagatgctgggcgacgagtacgggaccgcctccaacatcaagagccgggtgaaccgccagtccgtgctggccgccataacctccgcccagcagaggctcaagctctacagccgggtgccccccaacggcctcgtgctctacacgggcaccgtcgtcaccgacgacggcaaggagaagaaggtcaccttcgacttcgagcccttccggcccatcaacgcgtcgctctacctctgcgataacaagttccacaccgagccgctgaacgagctcctcgagtccgacgacaggttcggcttcatcgccatggacggcaacggcacgctctacggcacgctgagcggcaacagccgggaggtggtgtacaagttcagcgtggatctgcccaagaagcacgggcggggagggcagtcggcgctccggttcgcgcgcctgcgtatggagaagcggcacaactacctgcgcaaggcggccgagctggccacgcacttcttcaccaaccccgccaccaaccagcccaacgtggtcgggctcatcctggccggctccgccgatttcaagaccgagctgggcaagtccgagatgttcgaccagcggctccaggccaagataatcaagtcggtcgacgtgtcgtacggcggggagagcggcttcaaccaggccattgagatgtctgtggaggtcctctccgaggccaagttcgtccaggagaagaagctccttcgcaagtacttcgaggagataagccaggacaccgggaagtacgtcctgggcgtgcaggacaccatggcggccctcgagatgggcgcggtccacacgctgatcgtgtgggagaacctcgacgtcaggcggtacgagctgaagaactccgccacgggggagacggtggtgaagtacatcaacggcggccaggaggcggaccagagcaacctcggtgtcgacgaggcggcgtgcggggagctggacgtcgtcgacagggtgctgctgctggagtggttcgccgagaactaccagcaatacggctgcaagctggagttcgtcaccaacaggtcccaggaaggatcgcagttctgccggggcttcggcggcatcggcgggatcctccgctacccggcggacgtcgccgcctacaacgacgacgacgacgacgacatgctggatgacgacgtctatgaaggcctcgaatagcaatcaactgaagcttcactgcacacggtctgggaggagcctgcgctggccccgaccgcgccgccgggacgagaccctgctgaaacatccaaacgatcggtgcaagggaaacgaggaggtgggacagaagaaaggatctcagcaattatagttcggaccttgagcaaagcacgatgatggcgttgatggtttggagttgaaggtctcttcctctctggatccatcccttcaaatttggttatgctactaagcagccgtggctgccttctcttgctgcatcagagaatatgcttattagagtcgtattagttgcgagtgtgagagtggtgttccttataatctactcctgagtcgccttatgagcttatatgctactacaacaactgcttgaaataatgttgtgtattattgtgttcgattttatatgtgagatttattgctatggtaagatactg

SEQ ID NO: 17693 - protein, 443 aa, Triticum aestivum
  peptide (1)..(443): Ceres Seq. ID no. 14313374
  misc_feature (7)..(141): Pfam Name: Pfam Description:  eRF1 domain 1
  misc_feature (2)..(440): NCBI GI NO: 34907268 NR Description: putative peptide chain release factor subunit 1
  misc_feature (4)..(437): NCBI GI NO: 34393599 NR Description: putative eukaryotic peptide chain release factor subunit 1-3
  misc_feature (7)..(436): NCBI GI NO: 549010 NR Description: Eukaryotic peptide chain release factor subunit 1-3
  misc_feature (7)..(436): NCBI GI NO: 15222115 NR Description: eukaryotic peptide chain release factor subunit 1 -related
  misc_feature (9)..(437): NCBI GI NO: 15238829 NR Description: eukaryotic release factor 1 homolog (gb|AAA91169
  misc_feature (9)..(437): NCBI GI NO: 1155261 NR Description: eukaryotic release factor 1 homolog
  misc_feature (9)..(437): NCBI GI NO: 15215863 NR Description: AT5g47880/MCA23_22 [Arabidopsis thaliana]
  misc_feature (7)..(437): NCBI GI NO: 18250310 NR Description: eukaryotic release factor 1
  misc_feature (8)..(439): NCBI GI NO: 38174104 NR Description: Unknown (protein for MGC:75958)
  misc_feature (8)..(439): NCBI GI NO: 39594301 NR Description: Hypothetical protein CBG18934
MVVEGYEADKNIQIWKVKKLIKGLDGARGNGTSMISLIIPPRDQVSRVAKMLGDEYGTASNIKSRVNRQSVLAAITSAQQRLKLYSRVPPNGLVLYTGTVVTDDGKEKKVTFDFEPFRPINASLYLCDNKFHTEPLNELLESDDRFGFIAMDGNGTLYGTLSGNSREVVYKFSVDLPKKHGRGGQSALRFARLRMEKRHNYLRKAAELATHFFTNPATNQPNVVGLILAGSADFKTELGKSEMFDQRLQAKIIKSVDVSYGGESGFNQAIEMSVEVLSEAKFVQEKKLLRKYFEEISQDTGKYVLGVQDTMAALEMGAVHTLIVWENLDVRRYELKNSATGETVVKYINGGQEADQSNLGVDEAACGELDVVDRVLLLEWFAENYQQYGCKLEFVTNRSQEGSQFCRGFGGIGGILRYPADVAAYNDDDDDDMLDDDVYEGLE

SEQ ID NO: 17694 - protein, 410 aa, Triticum aestivum
  peptide (1)..(410): Ceres Seq. ID no. 14313375
  misc_feature (1)..(108): Pfam Name: Pfam Description:  eRF1 domain 1
  misc_feature (1)..(407): NCBI GI NO: 34907268 NR Description: putative peptide chain release factor subunit 1
  misc_feature (1)..(404): NCBI GI NO: 34393599 NR Description: putative eukaryotic peptide chain release factor subunit 1-3
  misc_feature (1)..(403): NCBI GI NO: 549010 NR Description: Eukaryotic peptide chain release factor subunit 1-3
  misc_feature (1)..(403): NCBI GI NO: 15222115 NR Description: eukaryotic peptide chain release factor subunit 1 -related
  misc_feature (1)..(404): NCBI GI NO: 15238829 NR Description: eukaryotic release factor 1 homolog (gb|AAA91169
  misc_feature (1)..(404): NCBI GI NO: 1155261 NR Description: eukaryotic release factor 1 homolog
  misc_feature (1)..(404): NCBI GI NO: 15215863 NR Description: AT5g47880/MCA23_22 [Arabidopsis thaliana]
  misc_feature (1)..(404): NCBI GI NO: 18250310 NR Description: eukaryotic release factor 1
  misc_feature (1)..(406): NCBI GI NO: 38174104 NR Description: Unknown (protein for MGC:75958)
  misc_feature (1)..(406): NCBI GI NO: 39594301 NR Description: Hypothetical protein CBG18934
MISLIIPPRDQVSRVAKMLGDEYGTASNIKSRVNRQSVLAAITSAQQRLKLYSRVPPNGLVLYTGTVVTDDGKEKKVTFDFEPFRPINASLYLCDNKFHTEPLNELLESDDRFGFIAMDGNGTLYGTLSGNSREVVYKFSVDLPKKHGRGGQSALRFARLRMEKRHNYLRKAAELATHFFTNPATNQPNVVGLILAGSADFKTELGKSEMFDQRLQAKIIKSVDVSYGGESGFNQAIEMSVEVLSEAKFVQEKKLLRKYFEEISQDTGKYVLGVQDTMAALEMGAVHTLIVWENLDVRRYELKNSATGETVVKYINGGQEADQSNLGVDEAACGELDVVDRVLLLEWFAENYQQYGCKLEFVTNRSQEGSQFCRGFGGIGGILRYPADVAAYNDDDDDDMLDDDVYEGLE

SEQ ID NO: 17695 - protein, 393 aa, Triticum aestivum
  peptide (1)..(393): Ceres Seq. ID no. 14313376
  misc_feature (1)..(91): Pfam Name: Pfam Description:  eRF1 domain 1
  misc_feature (1)..(390): NCBI GI NO: 34907268 NR Description: putative peptide chain release factor subunit 1
  misc_feature (1)..(387): NCBI GI NO: 34393599 NR Description: putative eukaryotic peptide chain release factor subunit 1-3
  misc_feature (1)..(386): NCBI GI NO: 549010 NR Description: Eukaryotic peptide chain release factor subunit 1-3
  misc_feature (1)..(386): NCBI GI NO: 15222115 NR Description: eukaryotic peptide chain release factor subunit 1 -related
  misc_feature (1)..(387): NCBI GI NO: 15238829 NR Description: eukaryotic release factor 1 homolog (gb|AAA91169
  misc_feature (1)..(387): NCBI GI NO: 1155261 NR Description: eukaryotic release factor 1 homolog
  misc_feature (1)..(387): NCBI GI NO: 15215863 NR Description: AT5g47880/MCA23_22 [Arabidopsis thaliana]
  misc_feature (1)..(387): NCBI GI NO: 18250310 NR Description: eukaryotic release factor 1
  misc_feature (1)..(389): NCBI GI NO: 38174104 NR Description: Unknown (protein for MGC:75958)
  misc_feature (1)..(389): NCBI GI NO: 39594301 NR Description: Hypothetical protein CBG18934
MLGDEYGTASNIKSRVNRQSVLAAITSAQQRLKLYSRVPPNGLVLYTGTVVTDDGKEKKVTFDFEPFRPINASLYLCDNKFHTEPLNELLESDDRFGFIAMDGNGTLYGTLSGNSREVVYKFSVDLPKKHGRGGQSALRFARLRMEKRHNYLRKAAELATHFFTNPATNQPNVVGLILAGSADFKTELGKSEMFDQRLQAKIIKSVDVSYGGESGFNQAIEMSVEVLSEAKFVQEKKLLRKYFEEISQDTGKYVLGVQDTMAALEMGAVHTLIVWENLDVRRYELKNSATGETVVKYINGGQEADQSNLGVDEAACGELDVVDRVLLLEWFAENYQQYGCKLEFVTNRSQEGSQFCRGFGGIGGILRYPADVAAYNDDDDDDMLDDDVYEGLE

SEQ ID NO: 17696 - DNA, 1736 bp, Triticum aestivum
  misc_feature (1)..(1736): Ceres Seq. ID no. 13660287
aatctctcttctcctagctaccaacccttacgagcatcatggctggcggggacgagcatgagcatgacgcgccgggtcggctggagagcatcctgacggacaagtcggcgccgctcgcggagcgcgcgtgggcggcgggagcggtcgagctccggctgctgtcgcggctggcggcgcccgcggtagtggtgtacatgatcaactacgtcatgtccatgtccacacagatcttctccggccacctcgggaacctggagctcgccaccgcctcgctcggcaacaccggcgtccagaccttcgcctacggcctcatgctaggtatgggcagtgcagtggagaccctctgcgggcaggcgtacggtgcacacaagtacgacatgctcggaatttacctacaacgctctatcgttctgttgggcttaactggcataccacttgctgtgatgtacgccttctcggagccactcctcttgttgatgggacagtcaccggagatagcccgtgccgcatcgatcttcgtttacggcctgattcctcagatcttcgcgtacgctgtcaacttcccgattcagaagttcctgcaggcgcagagcatcgtcctgccaagtgcttacatctcaacggcaacactcattctacatgtgttgatgagttgggtgctcatatacaaggttggccttgggctgctcggtgcctccttggtgctgagcgtgagctggtggatcatggtcgccgcgcaatttgtgtacatcatcgtcagcccgacatgccggcacacgtggacggggttcaattggcaggccttctccggtttgccgagtttcttcaagctctccgccgcgtctgcggtgatgttgtgccttgagacatggtactttcaggtgctggtgatcattgctggattgctccccaaccctgagattgccctggattccctctctatatgtatgacaatttatggttgggtgttcatgatctcagttgggttcaacgccgctgcaagtgtaagagtgagcaatgagcttggcgccggcaacccgaagtctgcatttttctctgtgtgggtcgtgaccgggatctctgcaacaatctctaccatccttgctgttgtgatcctttgccttcgcaaccacatcagctacttgttcacagatggtgaagcagtttcggatgcggtggcggatctctgcccatttctcgccgtcacactcgttctcggtggcatccaacctgtactaacaggtgttgctgttggatgtggatggcaacaatttgtttcttacgtgaacatcggctcttactacatcgtaggtgttccacttggtgttgttcttggatttttcttcaatcttggcgcaaagggtatttggggtggtttgattgggggaacggccttgcagacagtcattctattatgggtcaccataagaacggactggacgaaagaggtagaggaggcacataaaaggttgaacaagtgggatgataagaatgagcccctccttacaggcttcaaggacaataactaatgagtgggtcagtctagatgtcttttttcacctcaacagcacataagcatgctggtttcgagaatcgctgtcagcgtgggggtgggagggactggattcaggtgttttaaatctcacataaatttatgtcccgatttggatgacatgccaattataggcttattagtatatattgtagtcttggttaaarraaaaaaaaaaaaagct

SEQ ID NO: 17697 - protein, 496 aa, Triticum aestivum
  peptide (1)..(496): Ceres Seq. ID no. 15220690
  misc_feature (13)..(489): NCBI GI NO: 15233127 NR Description: MATE efflux protein family [Arabidopsis thaliana]
  misc_feature (13)..(489): NCBI GI NO: 20466556 NR Description: integral membrane protein, putative
  misc_feature (14)..(489): NCBI GI NO: 18407368 NR Description: MATE efflux protein family [Arabidopsis thaliana]
  misc_feature (14)..(489): NCBI GI NO: 15081773 NR Description: At1g61890/F8K4_9 [Arabidopsis thaliana]
  misc_feature (10)..(489): NCBI GI NO: 15221073 NR Description: MATE efflux protein family [Arabidopsis thaliana]
  misc_feature (10)..(489): NCBI GI NO: 22655139 NR Description: unknown protein [Arabidopsis thaliana]
  misc_feature (15)..(488): NCBI GI NO: 18415793 NR Description: MATE efflux protein family [Arabidopsis thaliana]
  misc_feature (15)..(488): NCBI GI NO: 21553843 NR Description: unknown [Arabidopsis thaliana]
  misc_feature (15)..(450): NCBI GI NO: 7487826 NR Description: hypothetical protein T8O5
  misc_feature (58)..(480): NCBI GI NO: 15234633 NR Description: MATE efflux protein family [Arabidopsis thaliana]
MAGGDEHEHDAPGRLESILTDKSAPLAERAWAAGAVELRLLSRLAAPAVVVYMINYVMSMSTQIFSGHLGNLELATASLGNTGVQTFAYGLMLGMGSAVETLCGQAYGAHKYDMLGIYLQRSIVLLGLTGIPLAVMYAFSEPLLLLMGQSPEIARAASIFVYGLIPQIFAYAVNFPIQKFLQAQSIVLPSAYISTATLILHVLMSWVLIYKVGLGLLGASLVLSVSWWIMVAAQFVYIIVSPTCRHTWTGFNWQAFSGLPSFFKLSAASAVMLCLETWYFQVLVIIAGLLPNPEIALDSLSICMTIYGWVFMISVGFNAAASVRVSNELGAGNPKSAFFSVWVVTGISATISTILAVVILCLRNHISYLFTDGEAVSDAVADLCPFLAVTLVLGGIQPVLTGVAVGCGWQQFVSYVNIGSYYIVGVPLGVVLGFFFNLGAKGIWGGLIGGTALQTVILLWVTIRTDWTKEVEEAHKRLNKWDDKNEPLLTGFKDNN

SEQ ID NO: 17698 - protein, 444 aa, Triticum aestivum
  peptide (1)..(444): Ceres Seq. ID no. 15220691
  misc_feature (1)..(437): NCBI GI NO: 15233127 NR Description: MATE efflux protein family [Arabidopsis thaliana]
  misc_feature (1)..(437): NCBI GI NO: 20466556 NR Description: integral membrane protein, putative
  misc_feature (1)..(437): NCBI GI NO: 18407368 NR Description: MATE efflux protein family [Arabidopsis thaliana]
  misc_feature (1)..(437): NCBI GI NO: 15081773 NR Description: At1g61890/F8K4_9 [Arabidopsis thaliana]
  misc_feature (1)..(437): NCBI GI NO: 15221073 NR Description: MATE efflux protein family [Arabidopsis thaliana]
  misc_feature (1)..(437): NCBI GI NO: 22655139 NR Description: unknown protein [Arabidopsis thaliana]
  misc_feature (1)..(436): NCBI GI NO: 18415793 NR Description: MATE efflux protein family [Arabidopsis thaliana]
  misc_feature (1)..(436): NCBI GI NO: 21553843 NR Description: unknown [Arabidopsis thaliana]
  misc_feature (1)..(398): NCBI GI NO: 7487826 NR Description: hypothetical protein T8O5
  misc_feature (6)..(428): NCBI GI NO: 15234633 NR Description: MATE efflux protein family [Arabidopsis thaliana]
MINYVMSMSTQIFSGHLGNLELATASLGNTGVQTFAYGLMLGMGSAVETLCGQAYGAHKYDMLGIYLQRSIVLLGLTGIPLAVMYAFSEPLLLLMGQSPEIARAASIFVYGLIPQIFAYAVNFPIQKFLQAQSIVLPSAYISTATLILHVLMSWVLIYKVGLGLLGASLVLSVSWWIMVAAQFVYIIVSPTCRHTWTGFNWQAFSGLPSFFKLSAASAVMLCLETWYFQVLVIIAGLLPNPEIALDSLSICMTIYGWVFMISVGFNAAASVRVSNELGAGNPKSAFFSVWVVTGISATISTILAVVILCLRNHISYLFTDGEAVSDAVADLCPFLAVTLVLGGIQPVLTGVAVGCGWQQFVSYVNIGSYYIVGVPLGVVLGFFFNLGAKGIWGGLIGGTALQTVILLWVTIRTDWTKEVEEAHKRLNKWDDKNEPLLTGFKDNN

SEQ ID NO: 17699 - protein, 439 aa, Triticum aestivum
  peptide (1)..(439): Ceres Seq. ID no. 15220692
  misc_feature (1)..(432): NCBI GI NO: 15233127 NR Description: MATE efflux protein family [Arabidopsis thaliana]
  misc_feature (1)..(432): NCBI GI NO: 20466556 NR Description: integral membrane protein, putative
  misc_feature (1)..(432): NCBI GI NO: 18407368 NR Description: MATE efflux protein family [Arabidopsis thaliana]
  misc_feature (1)..(432): NCBI GI NO: 15081773 NR Description: At1g61890/F8K4_9 [Arabidopsis thaliana]
  misc_feature (1)..(432): NCBI GI NO: 15221073 NR Description: MATE efflux protein family [Arabidopsis thaliana]
  misc_feature (1)..(432): NCBI GI NO: 22655139 NR Description: unknown protein [Arabidopsis thaliana]
  misc_feature (1)..(431): NCBI GI NO: 18415793 NR Description: MATE efflux protein family [Arabidopsis thaliana]
  misc_feature (1)..(431): NCBI GI NO: 21553843 NR Description: unknown [Arabidopsis thaliana]
  misc_feature (1)..(393): NCBI GI NO: 7487826 NR Description: hypothetical protein T8O5
  misc_feature (1)..(423): NCBI GI NO: 15234633 NR Description: MATE efflux protein family [Arabidopsis thaliana]
MSMSTQIFSGHLGNLELATASLGNTGVQTFAYGLMLGMGSAVETLCGQAYGAHKYDMLGIYLQRSIVLLGLTGIPLAVMYAFSEPLLLLMGQSPEIARAASIFVYGLIPQIFAYAVNFPIQKFLQAQSIVLPSAYISTATLILHVLMSWVLIYKVGLGLLGASLVLSVSWWIMVAAQFVYIIVSPTCRHTWTGFNWQAFSGLPSFFKLSAASAVMLCLETWYFQVLVIIAGLLPNPEIALDSLSICMTIYGWVFMISVGFNAAASVRVSNELGAGNPKSAFFSVWVVTGISATISTILAVVILCLRNHISYLFTDGEAVSDAVADLCPFLAVTLVLGGIQPVLTGVAVGCGWQQFVSYVNIGSYYIVGVPLGVVLGFFFNLGAKGIWGGLIGGTALQTVILLWVTIRTDWTKEVEEAHKRLNKWDDKNEPLLTGFKDNN

SEQ ID NO: 17700 - DNA, 754 bp, Triticum aestivum
  misc_feature (1)..(754): Ceres Seq. ID no. 13598076
agcaagccttagctagttagctttacacagcctccattgaagtgcaagaaccaaatccttagcttacacgtccatcaaacacctcagttggctaccatccgttggagagatgaacacgttgtgcgccaagcccatggggttctctggtggcgtgaagtgccagcggcgggcgcgggtgagggtgtcggccgtggcggcggcgccggagagggtgacgatgtacgacgtgctggcggtggggaacgcggcggggccggaggagatcaaggcggcgtacaggcgcgccgcgcggcggtggcacccggacgcgtgcccgggcggcgccgaccggttcatgagggcgcgcgaggcctacgaggtgctctccgaccccgagcgcaggcggggctacgacatccagctgcgctgtggcgcgggcgcgggcgccgccgggtcccgctccagccccgcgccgcgcgcgggcttcgccgactgggaagcacagctggccgggctgcagtggcggatggcggacacgcgaggcgaaacgtgggggagcaggatgcgccgcggcgccgcgcagccgacattgttctaatctctaaaccgcagcgccggctcgtgctctgtgttttctactgtagtactgtatattctacgtagtttcgccttgttctctccttccattccattttacgcggtgggattcggttggtgatgaaactgtatagtgtagtacagacagtgtacaaaagtacggtagtttttttctttg

SEQ ID NO: 17701 - protein, 155 aa, Triticum aestivum
  peptide (1)..(155): Ceres Seq. ID no. 13598077
  misc_feature (38)..(96): Pfam Name: Pfam Description:  DnaJ domain
  misc_feature (33)..(147): NCBI GI NO: 15236355 NR Description: DnaJ protein family [Arabidopsis thaliana]
  misc_feature (33)..(147): NCBI GI NO: 6691127 NR Description: DnaJ-like protein [Arabidopsis thaliana]
  misc_feature (38)..(146): NCBI GI NO: 22298332 NR Description: heat shock protein
  misc_feature (38)..(108): NCBI GI NO: 29840088 NR Description: dnaJ protein [Chlamydophila caviae GPIC]
  misc_feature (33)..(145): NCBI GI NO: 34894012 NR Description: P0672D08.16
  misc_feature (38)..(113): NCBI GI NO: 9910416 NR Description: DnaJ homolog, subfamily B, member 8
  misc_feature (38)..(151): NCBI GI NO: 33864560 NR Description: DnaJ protein [Synechococcus sp. WH 8102]
  misc_feature (38)..(119): NCBI GI NO: 20805917 NR Description: DnaJ [Meiothermus ruber]
  misc_feature (38)..(135): NCBI GI NO: 44590 NR Description: DnaJ [Mycobacterium tuberculosis]
  misc_feature (38)..(135): NCBI GI NO: 15607493 NR Description: dnaJ [Mycobacterium tuberculosis H37Rv]
MNTLCAKPMGFSGGVKCQRRARVRVSAVAAAPERVTMYDVLAVGNAAGPEEIKAAYRRAARRWHPDACPGGADRFMRAREAYEVLSDPERRRGYDIQLRCGAGAGAAGSRSSPAPRAGFADWEAQLAGLQWRMADTRGETWGSRMRRGAAQPTLF

SEQ ID NO: 17702 - protein, 147 aa, Triticum aestivum
  peptide (1)..(147): Ceres Seq. ID no. 13598078
  misc_feature (30)..(88): Pfam Name: Pfam Description:  DnaJ domain
  misc_feature (25)..(139): NCBI GI NO: 15236355 NR Description: DnaJ protein family [Arabidopsis thaliana]
  misc_feature (25)..(139): NCBI GI NO: 6691127 NR Description: DnaJ-like protein [Arabidopsis thaliana]
  misc_feature (30)..(138): NCBI GI NO: 22298332 NR Description: heat shock protein
  misc_feature (30)..(100): NCBI GI NO: 29840088 NR Description: dnaJ protein [Chlamydophila caviae GPIC]
  misc_feature (25)..(137): NCBI GI NO: 34894012 NR Description: P0672D08.16
  misc_feature (30)..(105): NCBI GI NO: 9910416 NR Description: DnaJ homolog, subfamily B, member 8
  misc_feature (30)..(143): NCBI GI NO: 33864560 NR Description: DnaJ protein [Synechococcus sp. WH 8102]
  misc_feature (30)..(111): NCBI GI NO: 20805917 NR Description: DnaJ [Meiothermus ruber]
  misc_feature (30)..(127): NCBI GI NO: 44590 NR Description: DnaJ [Mycobacterium tuberculosis]
  misc_feature (30)..(127): NCBI GI NO: 15607493 NR Description: dnaJ [Mycobacterium tuberculosis H37Rv]
MGFSGGVKCQRRARVRVSAVAAAPERVTMYDVLAVGNAAGPEEIKAAYRRAARRWHPDACPGGADRFMRAREAYEVLSDPERRRGYDIQLRCGAGAGAAGSRSSPAPRAGFADWEAQLAGLQWRMADTRGETWGSRMRRGAAQPTLF

SEQ ID NO: 17703 - protein, 119 aa, Triticum aestivum
  peptide (1)..(119): Ceres Seq. ID no. 13598079
  misc_feature (2)..(60): Pfam Name: Pfam Description:  DnaJ domain
  misc_feature (1)..(111): NCBI GI NO: 15236355 NR Description: DnaJ protein family [Arabidopsis thaliana]
  misc_feature (1)..(111): NCBI GI NO: 6691127 NR Description: DnaJ-like protein [Arabidopsis thaliana]
  misc_feature (2)..(110): NCBI GI NO: 22298332 NR Description: heat shock protein
  misc_feature (2)..(72): NCBI GI NO: 29840088 NR Description: dnaJ protein [Chlamydophila caviae GPIC]
  misc_feature (1)..(109): NCBI GI NO: 34894012 NR Description: P0672D08.16
  misc_feature (2)..(77): NCBI GI NO: 9910416 NR Description: DnaJ homolog, subfamily B, member 8
  misc_feature (2)..(115): NCBI GI NO: 33864560 NR Description: DnaJ protein [Synechococcus sp. WH 8102]
  misc_feature (2)..(83): NCBI GI NO: 20805917 NR Description: DnaJ [Meiothermus ruber]
  misc_feature (2)..(99): NCBI GI NO: 44590 NR Description: DnaJ [Mycobacterium tuberculosis]
  misc_feature (2)..(99): NCBI GI NO: 15607493 NR Description: dnaJ [Mycobacterium tuberculosis H37Rv]
MYDVLAVGNAAGPEEIKAAYRRAARRWHPDACPGGADRFMRAREAYEVLSDPERRRGYDIQLRCGAGAGAAGSRSSPAPRAGFADWEAQLAGLQWRMADTRGETWGSRMRRGAAQPTLF

SEQ ID NO: 17704 - DNA, 775 bp, Triticum aestivum
  misc_feature (1)..(775): Ceres Seq. ID no. 13660635
atgtaaaatctaactacaccaattcattctactgggatactctcccagtaccaccatttctaggcgatgactatggaagaaccattgacatttgttcctccatgatgatcaatggctcgaccatatgcatatcctctgtcgagaagggcgctggcacctacaccttttgatatagtgacaaagttatggactcaggctgggaatttgggtgctgcccttctacggcaaagcagagtatgttcccgagctcaacctttcgttcgctctatctgctgacagcccccaccgcttgtgcgctttaacctgcacttcaatgcaccatgggggcccaccagcattgcagcatacttttgatgagctcgacctgccggagaattggtcgccatacaagtgccacctggttaacctgggctcaggcaacttttgcatcatttccttctgtaagaccatgaactgtgagtttgccgtcttcaccggcgtggaggtgaaaccctgcatcaatggcgacggtcctctccggatgatcaagcacctgtctaagagtttcagccttggatctcatagcatcaaaagtgtgctctgaaccatctaattgattgcctggatgccgatatggaacttagtctgtaatctgtgctattttgttttctgcctcttagctgttctaaagcccgctgctgtttatcggtcttgatatgctgcatttaatccgacagcgcatgactatgtaaagactatttgcttaaatgatttttaaacttgcttaagttcattg

SEQ ID NO: 17705 - protein, 89 aa, Triticum aestivum
  peptide (1)..(89): Ceres Seq. ID no. 13660636
  misc_feature (1)..(84): NCBI GI NO: 34902348 NR Description: Hypothetical protein
  misc_feature (1)..(76): NCBI GI NO: 34897052 NR Description: hypothetical protein
  misc_feature (1)..(89): NCBI GI NO: 38344193 NR Description: OSJNBa0064G10.9
  misc_feature (1)..(42): NCBI GI NO: 15451605 NR Description: Hypothetical protein [Oryza sativa]
  misc_feature (1)..(66): NCBI GI NO: 15451604 NR Description: Hypothetical protein [Oryza sativa]
  misc_feature (1)..(66): NCBI GI NO: 38345446 NR Description: OSJNBa0042L16.1
  misc_feature (1)..(45): NCBI GI NO: 34898928 NR Description: OJ1316_A04.17
  misc_feature (1)..(66): NCBI GI NO: 34907072 NR Description: OSJNBa0093F16.25
  misc_feature (1)..(58): NCBI GI NO: 37531434 NR Description: hypothetical protein
MHHGGPPALQHTFDELDLPENWSPYKCHLVNLGSGNFCIISFCKTMNCEFAVFTGVEVKPCINGDGPLRMIKHLSKSFSLGSHSIKSVL

SEQ ID NO: 17706 - protein, 55 aa, Triticum aestivum
  peptide (1)..(55): Ceres Seq. ID no. 13660637
VKSNYTNSFYWDTLPVPPFLGDDYGRTIDICSSMMINGSTICISSVEKGAGTYTF

SEQ ID NO: 17707 - protein, 54 aa, Triticum aestivum
  peptide (1)..(54): Ceres Seq. ID no. 13660638
MARPYAYPLSRRALAPTPFDIVTKLWTQAGNLGAALLRQSRVCSRAQPFVRSIC

SEQ ID NO: 17708 - DNA, 1877 bp, Triticum aestivum
  misc_feature (1)..(1877): Ceres Seq. ID no. 14301689
tccaattcgagatagaagcgcgggatcccctccccgcgcgccctattctgtgtggacagatccattgagaggcgcccttgattcctggctgttgtatcatggggttgctagctctgaagatgctcatgtctaggcggcgggatagcaagcatctttgcggccagattcaagcccgtaatagattggttacttcagtggttaaaagaaagatctcttcatgccaacacaataacaatcaaggttgcaagagagtggcattttcaggggcagaccttccagaggacatctggcgccatatacattccctactgccgctgcgagatgctgcccgtgttgcctgcgtatctcatgcatttttacgttcctggaaatgccatcccaacctctccttcactaggaaagcactgggcctgaatagaattccacgtcaaagtgatgtaattgcaagggatctcactatgaaagtcgaccacattctcaaaaaacactcaggcaaaggagttaagaaattcaggatcgaattacacatgccagttgatccctgctatcttaatagctggcttcagattgctgctgaactacgggttgaggaactcgccgttgttctaccttcaacctgcaatgcaaatgactacgatttcccttgtgcactttttgttgatgatgggtgtagaaacgcaatagagcatctctgccttggcggttgtgccttccatcccacagctggatttggttacttgagaaagctgcggctgttttgggtgcatattacggtggatgaattagaatgccttatttccaaatctccagctttggagcacttggcactcaagtattgctatacgatcacttacctgaagatacctagcctgctacagcatctcagctacctgatggtagctgcatgcgctaatctgcagacaatagagtgtaaagctccaaatctctccactttttacttcagtggtcgacaagttgaacttctgtttggatgttcagttcaagtgaagaccatggaaatgcgttgttctactcagtgtaacaccatttataatgcttgtgccaacctgccatccattgtgccaaatattgaaactctcagcatatcttctgttagtgaggtggtcaatataccaatcgtgcctgtaaaattcctccacctcaagtatctgtctatttctcttgaaggaaatggggctttttccccagactatgattacttttctctggtttctttgctggatgcttgtcctgtcttggaaactttcaacttgtttgtgtcacaggatcgcatgaaacacgattcggttcttggagacccgtcgtcacgtcttaggcagatgcctgaataccgccacgacaacattaagaatgtgaggattattgggttttgctctgcgaagagcatggtcgagctggcatgccatattctcgagaatgcaacatcactcgagtgccttactttggacacgatacgtgctttcagtattgacagacacattcacaaaactggtgaatgtggccacataggcaggcatatgatcagagaagcacgtaaggcgctcttggctgtcaaaagatatatcgtgggaatagttccctccacggtcaagttaaatgtcttgcagccttgcaagctatgccatgctttggctgcttagatgtggcaatatcataaatttgtaaattacattgttgactgaacactgttgcatgagttgccacttgcagcaggaatgtccaaacgggtcacttaaacaccagcgtagaagtatagggacaagcaattatggtatttgatatataaaagaagatatcaggaactatttagtattgtagctgttgatatattttcttataaaattcggtcaggattt

SEQ ID NO: 17709 - protein, 520 aa, Triticum aestivum
  peptide (1)..(520): Ceres Seq. ID no. 14301690
  misc_feature (59)..(101): Pfam Name: Pfam Description:  F-box domain
  misc_feature (1)..(516): NCBI GI NO: 38605785 NR Description: OSJNBa0044K18.28
  misc_feature (73)..(516): NCBI GI NO: 5803254 NR Description: ESTs C97429
  misc_feature (300)..(516): NCBI GI NO: 38605781 NR Description: OSJNBa0044K18.24
  misc_feature (1)..(195): NCBI GI NO: 38605781 NR Description: OSJNBa0044K18.24
  misc_feature (262)..(516): NCBI GI NO: 39545842 NR Description: OSJNBb0060E08.13
  misc_feature (59)..(258): NCBI GI NO: 39545842 NR Description: OSJNBb0060E08.13
  misc_feature (224)..(516): NCBI GI NO: 39545843 NR Description: OSJNBb0060E08.14
  misc_feature (46)..(142): NCBI GI NO: 39545843 NR Description: OSJNBb0060E08.14
  misc_feature (59)..(465): NCBI GI NO: 37536392 NR Description: hypothetical protein
  misc_feature (178)..(342): NCBI GI NO: 37533804 NR Description: hypothetical protein
MGLLALKMLMSRRRDSKHLCGQIQARNRLVTSVVKRKISSCQHNNNQGCKRVAFSGADLPEDIWRHIHSLLPLRDAARVACVSHAFLRSWKCHPNLSFTRKALGLNRIPRQSDVIARDLTMKVDHILKKHSGKGVKKFRIELHMPVDPCYLNSWLQIAAELRVEELAVVLPSTCNANDYDFPCALFVDDGCRNAIEHLCLGGCAFHPTAGFGYLRKLRLFWVHITVDELECLISKSPALEHLALKYCYTITYLKIPSLLQHLSYLMVAACANLQTIECKAPNLSTFYFSGRQVELLFGCSVQVKTMEMRCSTQCNTIYNACANLPSIVPNIETLSISSVSEVVNIPIVPVKFLHLKYLSISLEGNGAFSPDYDYFSLVSLLDACPVLETFNLFVSQDRMKHDSVLGDPSSRLRQMPEYRHDNIKNVRIIGFCSAKSMVELACHILENATSLECLTLDTIRAFSIDRHIHKTGECGHIGRHMIREARKALLAVKRYIVGIVPSTVKLNVLQPCKLCHALAA

SEQ ID NO: 17710 - protein, 513 aa, Triticum aestivum
  peptide (1)..(513): Ceres Seq. ID no. 14301691
  misc_feature (52)..(94): Pfam Name: Pfam Description:  F-box domain
  misc_feature (1)..(509): NCBI GI NO: 38605785 NR Description: OSJNBa0044K18.28
  misc_feature (66)..(509): NCBI GI NO: 5803254 NR Description: ESTs C97429
  misc_feature (293)..(509): NCBI GI NO: 38605781 NR Description: OSJNBa0044K18.24
  misc_feature (1)..(188): NCBI GI NO: 38605781 NR Description: OSJNBa0044K18.24
  misc_feature (255)..(509): NCBI GI NO: 39545842 NR Description: OSJNBb0060E08.13
  misc_feature (52)..(251): NCBI GI NO: 39545842 NR Description: OSJNBb0060E08.13
  misc_feature (217)..(509): NCBI GI NO: 39545843 NR Description: OSJNBb0060E08.14
  misc_feature (39)..(135): NCBI GI NO: 39545843 NR Description: OSJNBb0060E08.14
  misc_feature (52)..(458): NCBI GI NO: 37536392 NR Description: hypothetical protein
  misc_feature (171)..(335): NCBI GI NO: 37533804 NR Description: hypothetical protein
MLMSRRRDSKHLCGQIQARNRLVTSVVKRKISSCQHNNNQGCKRVAFSGADLPEDIWRHIHSLLPLRDAARVACVSHAFLRSWKCHPNLSFTRKALGLNRIPRQSDVIARDLTMKVDHILKKHSGKGVKKFRIELHMPVDPCYLNSWLQIAAELRVEELAVVLPSTCNANDYDFPCALFVDDGCRNAIEHLCLGGCAFHPTAGFGYLRKLRLFWVHITVDELECLISKSPALEHLALKYCYTITYLKIPSLLQHLSYLMVAACANLQTIECKAPNLSTFYFSGRQVELLFGCSVQVKTMEMRCSTQCNTIYNACANLPSIVPNIETLSISSVSEVVNIPIVPVKFLHLKYLSISLEGNGAFSPDYDYFSLVSLLDACPVLETFNLFVSQDRMKHDSVLGDPSSRLRQMPEYRHDNIKNVRIIGFCSAKSMVELACHILENATSLECLTLDTIRAFSIDRHIHKTGECGHIGRHMIREARKALLAVKRYIVGIVPSTVKLNVLQPCKLCHALAA

SEQ ID NO: 17711 - protein, 511 aa, Triticum aestivum
  peptide (1)..(511): Ceres Seq. ID no. 14301692
  misc_feature (50)..(92): Pfam Name: Pfam Description:  F-box domain
  misc_feature (1)..(507): NCBI GI NO: 38605785 NR Description: OSJNBa0044K18.28
  misc_feature (64)..(507): NCBI GI NO: 5803254 NR Description: ESTs C97429
  misc_feature (291)..(507): NCBI GI NO: 38605781 NR Description: OSJNBa0044K18.24
  misc_feature (1)..(186): NCBI GI NO: 38605781 NR Description: OSJNBa0044K18.24
  misc_feature (253)..(507): NCBI GI NO: 39545842 NR Description: OSJNBb0060E08.13
  misc_feature (50)..(249): NCBI GI NO: 39545842 NR Description: OSJNBb0060E08.13
  misc_feature (215)..(507): NCBI GI NO: 39545843 NR Description: OSJNBb0060E08.14
  misc_feature (37)..(133): NCBI GI NO: 39545843 NR Description: OSJNBb0060E08.14
  misc_feature (50)..(456): NCBI GI NO: 37536392 NR Description: hypothetical protein
  misc_feature (169)..(333): NCBI GI NO: 37533804 NR Description: hypothetical protein
MSRRRDSKHLCGQIQARNRLVTSVVKRKISSCQHNNNQGCKRVAFSGADLPEDIWRHIHSLLPLRDAARVACVSHAFLRSWKCHPNLSFTRKALGLNRIPRQSDVIARDLTMKVDHILKKHSGKGVKKFRIELHMPVDPCYLNSWLQIAAELRVEELAVVLPSTCNANDYDFPCALFVDDGCRNAIEHLCLGGCAFHPTAGFGYLRKLRLFWVHITVDELECLISKSPALEHLALKYCYTITYLKIPSLLQHLSYLMVAACANLQTIECKAPNLSTFYFSGRQVELLFGCSVQVKTMEMRCSTQCNTIYNACANLPSIVPNIETLSISSVSEVVNIPIVPVKFLHLKYLSISLEGNGAFSPDYDYFSLVSLLDACPVLETFNLFVSQDRMKHDSVLGDPSSRLRQMPEYRHDNIKNVRIIGFCSAKSMVELACHILENATSLECLTLDTIRAFSIDRHIHKTGECGHIGRHMIREARKALLAVKRYIVGIVPSTVKLNVLQPCKLCHALAA

SEQ ID NO: 17712 - DNA, 1481 bp, Triticum aestivum
  misc_feature (1)..(1481): Ceres Seq. ID no. 15176966
ggcccactgcccacgcgcacccggtcgccgtcacgctagcctcgcttcgcctcctccgtccgccgcgccgtcgtttccgcggccgtcgcgctcccgcctccccacgacgacaaaacgccccacgcgccgtgcgcccgcgcgaatatacccaccacggcaccaccccaccattcccctcgccgccgagccgcgcccctctcgcacacactgccacatcccccagaccccgggcaaatatcgccatggccgcctccgcggcgccactccgggccgcgctcgcccgcagccccgcccccgccgccgcgcgcgctccgcccggcttcctcccactccctccccgcgcccgccgcgtccgcctcggtccggtcgccctcgtctccgggagggggaggaggatccgcgcggaggcgacggcgaggacgcggcaggagaaggagcagcaggaggccgaggtgtccgccgtcgaggactccttcgccgtcagggaggcggccgcagctcctcccccggaagaaggtggattcgatgaggagctcaccctcgccggcgaggacggcgactgggtcgtcaggttcgagcagtccttcaacgtattcctcacggatactgtcatctttatactcgatattctgtaccgcgaccgcgactacgccaggttcttcgtgctcgagacaatcgccagggtgccctatttcgcgtttatatcggtgcttcacttgtacgagacctttggctggtcgagaagagctgataacatcaaagtgcactttgctgaaagcatgaatgagttccatcacctcttaatcatggaagcattgggtggcaactctgtatggcttgatcgctttcttgcgcggtttagcgcctttttttactacttcgtcactgttggcatgtacatgctgagcccaagaatggcataccacttttctgaatgtgttgagaggcatgcatactcaacttatgacaagttccttaagctcaacggagaggagttgaaaaaactaccagctccagaggtggctgtaaactattacatgaatgaggatctctacatgtttgatgagtttcaaacatcaagagctccaaattctaggaggcctaaagttgataacttgtatgatgtattcgtgaatgtacgggacgatgaggcggagcattgcaagacaatgaaggcttgtcaaacgcatgaaaccctccgttctcctcatgccgtgcagagctcagtagaagctgatgcagaatgattctgtcaagaagtcccttggaaatgaagactgaccggttgtacgtacctccgtgctatagcgtcgtagagtatcatactaaattttggtgatatattgtattccatcctttttctcccttctcttcgtatgtagacattagccagactttcttacttgtgaatcttacatagggaatataggtttataaatgcatcacatatttacaatgagagacgtgcattgtttgtcagg

SEQ ID NO: 17713 - protein, 414 aa, Triticum aestivum
  peptide (1)..(414): Ceres Seq. ID no. 15176967
  misc_feature (167)..(380): Pfam Name: Pfam Description:  Alternative oxidase
  misc_feature (167)..(383): NCBI GI NO: 9837152 NR Description: oxidase [Triticum aestivum]
  misc_feature (88)..(414): NCBI GI NO: 21105122 NR Description: oxidase [Oryza sativa (japonica cultivar-group)]
  misc_feature (130)..(414): NCBI GI NO: 3929647 NR Description: Immutans protein [Arabidopsis thaliana]
  misc_feature (130)..(414): NCBI GI NO: 18415888 NR Description: alternative oxidase, putative (IMMUTANS)
  misc_feature (133)..(403): NCBI GI NO: 9937103 NR Description: plastid terminal oxidase [Capsicum annuum]
  misc_feature (121)..(403): NCBI GI NO: 9937099 NR Description: plastid terminal oxidase [Lycopersicon esculentum]
  misc_feature (130)..(414): NCBI GI NO: 7486836 NR Description: hypothetical protein T10I14
  misc_feature (198)..(412): NCBI GI NO: 37520170 NR Description: oxidase [Gloeobacter violaceus]
  misc_feature (199)..(403): NCBI GI NO: 17229588 NR Description: oxidase [Nostoc sp. PCC 7120]
  misc_feature (182)..(399): NCBI GI NO: 20149254 NR Description: quinol-to-oxygen oxidoreductase
PTAHAHPVAVTLASLRLLRPPRRRFRGRRAPASPRRQNAPRAVRPREYTHHGTTPPFPSPPSRAPLAHTATSPRPRANIAMAASAAPLRAALARSPAPAAARAPPGFLPLPPRARRVRLGPVALVSGRGRRIRAEATARTRQEKEQQEAEVSAVEDSFAVREAAAAPPPEEGGFDEELTLAGEDGDWVVRFEQSFNVFLTDTVIFILDILYRDRDYARFFVLETIARVPYFAFISVLHLYETFGWSRRADNIKVHFAESMNEFHHLLIMEALGGNSVWLDRFLARFSAFFYYFVTVGMYMLSPRMAYHFSECVERHAYSTYDKFLKLNGEELKKLPAPEVAVNYYMNEDLYMFDEFQTSRAPNSRRPKVDNLYDVFVNVRDDEAEHCKTMKACQTHETLRSPHAVQSSVEADAE

SEQ ID NO: 17714 - protein, 334 aa, Triticum aestivum
  peptide (1)..(334): Ceres Seq. ID no. 15176968
  misc_feature (87)..(300): Pfam Name: Pfam Description:  Alternative oxidase
  misc_feature (87)..(303): NCBI GI NO: 9837152 NR Description: oxidase [Triticum aestivum]
  misc_feature (8)..(334): NCBI GI NO: 21105122 NR Description: oxidase [Oryza sativa (japonica cultivar-group)]
  misc_feature (50)..(334): NCBI GI NO: 3929647 NR Description: Immutans protein [Arabidopsis thaliana]
  misc_feature (50)..(334): NCBI GI NO: 18415888 NR Description: alternative oxidase, putative (IMMUTANS)
  misc_feature (53)..(323): NCBI GI NO: 9937103 NR Description: plastid terminal oxidase [Capsicum annuum]
  misc_feature (41)..(323): NCBI GI NO: 9937099 NR Description: plastid terminal oxidase [Lycopersicon esculentum]
  misc_feature (50)..(334): NCBI GI NO: 7486836 NR Description: hypothetical protein T10I14
  misc_feature (118)..(332): NCBI GI NO: 37520170 NR Description: oxidase [Gloeobacter violaceus]
  misc_feature (119)..(323): NCBI GI NO: 17229588 NR Description: oxidase [Nostoc sp. PCC 7120]
  misc_feature (102)..(319): NCBI GI NO: 20149254 NR Description: quinol-to-oxygen oxidoreductase
MAASAAPLRAALARSPAPAAARAPPGFLPLPPRARRVRLGPVALVSGRGRRIRAEATARTRQEKEQQEAEVSAVEDSFAVREAAAAPPPEEGGFDEELTLAGEDGDWVVRFEQSFNVFLTDTVIFILDILYRDRDYARFFVLETIARVPYFAFISVLHLYETFGWSRRADNIKVHFAESMNEFHHLLIMEALGGNSVWLDRFLARFSAFFYYFVTVGMYMLSPRMAYHFSECVERHAYSTYDKFLKLNGEELKKLPAPEVAVNYYMNEDLYMFDEFQTSRAPNSRRPKVDNLYDVFVNVRDDEAEHCKTMKACQTHETLRSPHAVQSSVEADAE

SEQ ID NO: 17715 - DNA, 856 bp, Triticum aestivum
  misc_feature (1)..(856): Ceres Seq. ID no. 13659500
actagtgcctaccggaagtccacaacacacctttgccgtctcccctctccttttatatttgtctcatgcaagcttataatcgctcaaagacaagacgagaagagcaagaagagaagcatatgacgcagatggaggagctcgtgcaccagtgcgacatggaggtcatgaagatggccatgctcaagcacgagcagacattcaggcagcaggtgcatgatctacaccggctgtaccgagtccagaagcagctcatgggcgaccagagcgggcgcccgtcggtgccaccctgccatcaggtgcagcggcgcagggagcacccccgccggccggagctgagcctgcagctccctgtcgacgacgacgagtacgccgtcgtcagcggcggcacaggccgcctagcgacgccgccgtccatggagagcgaggacgagctggagctgacgctggccgtcggcggcggcggcgggaacggcggcagcagccggagccagaggaggaggcgggagagtgcgacggactgctccggcagaagaagcccacagacgccgtcttcgtcgaccgactccgacgacgcgctccgcacggtgccgcaccaccagagggcgacggcgtgtgatctccggggaggggtgatggtgtcgaagcagccgcaatggctggtgcgctgtctcagccttaggatggcttgatcgatttcacgacgagacctctactgtagacttttgttaaattgctaccggtttccccgcgtggttactggtactccctcctctgtcccataatagcgttttttacactacactagtgtcaaaaacactcttatattataagacggagggaatagtaaattagattg

SEQ ID NO: 17716 - protein, 207 aa, Triticum aestivum
  peptide (1)..(207): Ceres Seq. ID no. 13659501
  misc_feature (22)..(169): NCBI GI NO: 15240736 NR Description: expressed protein [Arabidopsis thaliana]
  misc_feature (22)..(65): NCBI GI NO: 17027268 NR Description: hypothetical protein
MQAYNRSKTRREEQEEKHMTQMEELVHQCDMEVMKMAMLKHEQTFRQQVHDLHRLYRVQKQLMGDQSGRPSVPPCHQVQRRREHPRRPELSLQLPVDDDEYAVVSGGTGRLATPPSMESEDELELTLAVGGGGGNGGSSRSQRRRRESATDCSGRRSPQTPSSSTDSDDALRTVPHHQRATACDLRGGVMVSKQPQWLVRCLSLRMA

SEQ ID NO: 17717 - protein, 189 aa, Triticum aestivum
  peptide (1)..(189): Ceres Seq. ID no. 13659502
  misc_feature (4)..(151): NCBI GI NO: 15240736 NR Description: expressed protein [Arabidopsis thaliana]
  misc_feature (4)..(47): NCBI GI NO: 17027268 NR Description: hypothetical protein
MTQMEELVHQCDMEVMKMAMLKHEQTFRQQVHDLHRLYRVQKQLMGDQSGRPSVPPCHQVQRRREHPRRPELSLQLPVDDDEYAVVSGGTGRLATPPSMESEDELELTLAVGGGGGNGGSSRSQRRRRESATDCSGRRSPQTPSSSTDSDDALRTVPHHQRATACDLRGGVMVSKQPQWLVRCLSLRMA

SEQ ID NO: 17718 - protein, 186 aa, Triticum aestivum
  peptide (1)..(186): Ceres Seq. ID no. 13659503
  misc_feature (1)..(148): NCBI GI NO: 15240736 NR Description: expressed protein [Arabidopsis thaliana]
  misc_feature (1)..(44): NCBI GI NO: 17027268 NR Description: hypothetical protein
MEELVHQCDMEVMKMAMLKHEQTFRQQVHDLHRLYRVQKQLMGDQSGRPSVPPCHQVQRRREHPRRPELSLQLPVDDDEYAVVSGGTGRLATPPSMESEDELELTLAVGGGGGNGGSSRSQRRRRESATDCSGRRSPQTPSSSTDSDDALRTVPHHQRATACDLRGGVMVSKQPQWLVRCLSLRMA

SEQ ID NO: 17719 - DNA, 1476 bp, Triticum aestivum
  misc_feature (1)..(1476): Ceres Seq. ID no. 13664061
cgcgttgcgtttgcgttgcccaccccccgccgcaactctctcatccatcgcatccccgcgcctcctaccgccatcccatccaactcctcttccccacgcacgcgcttcgcgcctcaaatagcacgaacggggcaatggcagcggcgcggccctgttgcagcagcagccaccggcaatcgcgcctcctcgtcctcgccgcctgcgcgtcgcccacgccgctgctgctgctttagccgtccccgacttccgctccgaggtgatcgctcccccggccggatgggtgatctgggcgtccgggttgtgggcagaggctgcgccgcgccgatggagccgcgcaaggagatggtggcgccgtcgctggagcagcaggggcagcagcagcatcctcccctcttcatggatttctcccgacgagatggagtcgcagatggcggcaacgggcggaagcggccgcgcgagaccgtggcgccgccggcacgcctcttctccctacaggcgccgcagggttctcccgggcacaaggtgatacacctggcgcagctgcaccggcggccggcggcgacgggcctgcggctcgacttcgacgagggaggctcggagcacgtggcgtgcacgtcgtcgacgtcgtcccttctccccggcgagctcgccgctcagtgcgggcggcacaacaacgagatcgaccggctgctccaggaacacgcggagagactccggcttgcgctggccgacacgaggcgtcggcagaaccgctcgctgctgggcgccgcagaggcgctggccgccggcgggtcagggaggtggaggcggagaccttcaaggcggcacggcgcggcgtcgagctggaggagcggctggccaggctgagggcggaggcggcgtcgtggcaagccaaggcaatgtccgaccagtccacggcggccgcgctgcacgcgcagttgcagcaggaagcggccacagcgcaggcgaggagtggcaaggccgccgaggaggccgagggagcggcggacgacgccgagtccggcttcatcgaccctgacagggtggtggaggtggtggccccgccaccggccaggccgtgccgcgcgtgccggctccggccggccaccaccgtgctgctcccctgcaggcacctctgcgtgtgcgccgcgtgcgatcccggcgcctctgcctcccaagccggcaccgccgccgccgcggcctgccccgcgtgccgctgccccatcaccggcaccgtgcaggtcttcttcgcgtgaaacgggtccccgccggatcatgaaatcagaaccatggaaaagctgtagtagatcagatcagacagggtgcataattccttcctctcttttctcccgtgctagtgaactgatccctccatgatcgcttcacctcttttgctggtgatctagtaaatctttactaatttgatttgaatcttgcgtgacagtttttactgctagcaacgcgttgattaggtgg

SEQ ID NO: 17720 - protein, 288 aa, Triticum aestivum
  peptide (1)..(288): Ceres Seq. ID no. 13664062
  misc_feature (94)..(279): NCBI GI NO: 37536932 NR Description: hypothetical protein
  misc_feature (125)..(260): NCBI GI NO: 7485189 NR Description: hypothetical protein - Arabidopsis thaliana
  misc_feature (125)..(260): NCBI GI NO: 30684141 NR Description: conserved hypothetical protein
  misc_feature (146)..(258): NCBI GI NO: 18398566 NR Description: expressed protein [Arabidopsis thaliana]
  misc_feature (216)..(263): NCBI GI NO: 21740631 NR Description: OSJNBb0012E08.13
  misc_feature (216)..(263): NCBI GI NO: 38346144 NR Description: OSJNBb0118P14.4
  misc_feature (203)..(258): NCBI GI NO: 30694694 NR Description: expressed protein [Arabidopsis thaliana]
  misc_feature (203)..(258): NCBI GI NO: 30694690 NR Description: expressed protein [Arabidopsis thaliana]
  misc_feature (215)..(258): NCBI GI NO: 18399792 NR Description: expressed protein [Arabidopsis thaliana]
  misc_feature (215)..(258): NCBI GI NO: 21617976 NR Description: unknown [Arabidopsis thaliana]
RVAFALPTPRRNSLIHRIPAPPTAIPSNSSSPRTRFAPQIARTGQWQRRGPVAAAATGNRASSSSPPARRPRRCCCFSRPRLPLRGDRSPGRMGDLGVRVVGRGCAAPMEPRKEMVAPSLEQQGQQQHPPLFMDFSRRDGVADGGNGRKRPRETVAPPARLFSLQAPQGSPGHKVIHLAQLHRRPAATGLRLDFDEGGSEHVACTSSTSSLLPGELAAQCGRHNNEIDRLLQEHAERLRLALADTRRRQNRSLLGAAEALAAGGSGRWRRRPSRRHGAASSWRSGWPG

SEQ ID NO: 17721 - protein, 196 aa, Triticum aestivum
  peptide (1)..(196): Ceres Seq. ID no. 13664063
  misc_feature (2)..(187): NCBI GI NO: 37536932 NR Description: hypothetical protein
  misc_feature (33)..(168): NCBI GI NO: 7485189 NR Description: hypothetical protein - Arabidopsis thaliana
  misc_feature (33)..(168): NCBI GI NO: 30684141 NR Description: conserved hypothetical protein
  misc_feature (54)..(166): NCBI GI NO: 18398566 NR Description: expressed protein [Arabidopsis thaliana]
  misc_feature (124)..(171): NCBI GI NO: 21740631 NR Description: OSJNBb0012E08.13
  misc_feature (124)..(171): NCBI GI NO: 38346144 NR Description: OSJNBb0118P14.4
  misc_feature (111)..(166): NCBI GI NO: 30694694 NR Description: expressed protein [Arabidopsis thaliana]
  misc_feature (111)..(166): NCBI GI NO: 30694690 NR Description: expressed protein [Arabidopsis thaliana]
  misc_feature (123)..(166): NCBI GI NO: 18399792 NR Description: expressed protein [Arabidopsis thaliana]
  misc_feature (123)..(166): NCBI GI NO: 21617976 NR Description: unknown [Arabidopsis thaliana]
MGDLGVRVVGRGCAAPMEPRKEMVAPSLEQQGQQQHPPLFMDFSRRDGVADGGNGRKRPRETVAPPARLFSLQAPQGSPGHKVIHLAQLHRRPAATGLRLDFDEGGSEHVACTSSTSSLLPGELAAQCGRHNNEIDRLLQEHAERLRLALADTRRRQNRSLLGAAEALAAGGSGRWRRRPSRRHGAASSWRSGWPG

SEQ ID NO: 17722 - protein, 180 aa, Triticum aestivum
  peptide (1)..(180): Ceres Seq. ID no. 13664064
  misc_feature (1)..(171): NCBI GI NO: 37536932 NR Description: hypothetical protein
  misc_feature (17)..(152): NCBI GI NO: 7485189 NR Description: hypothetical protein - Arabidopsis thaliana
  misc_feature (17)..(152): NCBI GI NO: 30684141 NR Description: conserved hypothetical protein
  misc_feature (38)..(150): NCBI GI NO: 18398566 NR Description: expressed protein [Arabidopsis thaliana]
  misc_feature (108)..(155): NCBI GI NO: 21740631 NR Description: OSJNBb0012E08.13
  misc_feature (108)..(155): NCBI GI NO: 38346144 NR Description: OSJNBb0118P14.4
  misc_feature (95)..(150): NCBI GI NO: 30694694 NR Description: expressed protein [Arabidopsis thaliana]
  misc_feature (95)..(150): NCBI GI NO: 30694690 NR Description: expressed protein [Arabidopsis thaliana]
  misc_feature (107)..(150): NCBI GI NO: 18399792 NR Description: expressed protein [Arabidopsis thaliana]
  misc_feature (107)..(150): NCBI GI NO: 21617976 NR Description: unknown [Arabidopsis thaliana]
MEPRKEMVAPSLEQQGQQQHPPLFMDFSRRDGVADGGNGRKRPRETVAPPARLFSLQAPQGSPGHKVIHLAQLHRRPAATGLRLDFDEGGSEHVACTSSTSSLLPGELAAQCGRHNNEIDRLLQEHAERLRLALADTRRRQNRSLLGAAEALAAGGSGRWRRRPSRRHGAASSWRSGWPG

SEQ ID NO: 17723 - DNA, 1735 bp, Triticum aestivum
  misc_feature (1)..(1735): Ceres Seq. ID no. 14302343
  misc_feature (594)..(594): n is a, c, t, g, unknown, or other
tcaatttgggctctggtgtttaatttcgttagccttcttcctccgctcgtgtcgtcgtctccaccacttcctagccacgtctctgtcttcctctccctctcgttctccatctcgttacctctctgctgccaacccgacccaaggttgttcgtcgccagcatgggtctggcgaaggatggcgccgagatggaggagggcacattggagattggcatagagtataggactgtctccggtgtggcagggccattggttattttggacaaagtaaagggcccaaagtatcaggagattgtgaacatccgattgggagatggcaccactcgtcgtggtcaagtcctcgaagttgatggtgaaaaagctgttgtgcaggtatttgaaggtacttcagggatagacaacaagtatactactgtgcagttcacaggcgaggttttgaaaactcctgtctcacttgatatgcttggacgcatttttaatggttctggaaaacctattgataatggcccccctatattgcccgaggcttacttggatatttctggaagttctatcaacccaagtgagagaacctatccagaagagatgattcanacaggaatatccaccattgatgtcatgaactcgattgctcgagggcaaaaaattcctcttttctctgctgctggacttcctcataatgaaattgctgctcaaatttgtcgtcaagctggcctcgttaaaaggttggagcaaagcaagcatgcagcagaggaaggtgaagaagacaatttcgcaattgtgtttgctgctatgggagtaaacatggaaacggcacaatttttcaagcgtgacttcgaagaaaatggttcgatggagcgggtcacacttttcctgaatttggcaaatgaccccactattgagcgtattatcactcctcgaattgccctaacgactgctgaatatttggcatatgaatgtgggaagcatgttcttgtgattctgacagatatgagctcatatgccgatgcacttcgtgaggtctcagcagcacgagaagaggtacctggtaggcgtggttatcctgggtatatgtatactgatctggccaccatatatgagcgagctgggcgtatcgagggaagaaaaggatcaattactcaaattcctattcttacaatgcctaatgatgatatcactcatccaactcctgatcttacgggatacattaccgaagggcagatatatattgacagacagcttcataatagacagatatacccacccatcaacgtcctgccatctctttctcgtctgatgaagagtgctattggtgaaggtatgacacgccgggatcattcagatgtgtccaatcagctgtatgccaactacgccattgggaaggatgttcaagccatgaaagcagttgtcggagaggaggctctttcatctgaggacctgctctatttagaattcctcgacaagtttgagaggaaatttgtagcgcaaggagcatatgatactcggaacatttttcagtcacttgatctggcatggacattgctacgcatattcccccgtgaacttctccaccgtattcctgcgaagaccttggatcagttctacagcagagatgccacccattgatccattttgttcataaaaattcatttttttcatgatgaacagcttgaataagagaagaatccaaacttgtatcattttgctacgttatatagtcagatcctattcttcc

SEQ ID NO: 17724 - protein, 541 aa, Triticum aestivum
  peptide (1)..(541): Ceres Seq. ID no. 14302344
  misc_feature (257)..(436): Pfam Name: Pfam Description:  ATP synthase alpha/beta family
  misc_feature (62)..(541): NCBI GI NO: 2493132 NR Description: Vacuolar ATP synthase subunit B isoform 2
  misc_feature (54)..(541): NCBI GI NO: 2493131 NR Description: Vacuolar ATP synthase subunit B isoform 1
  misc_feature (54)..(541): NCBI GI NO: 14150751 NR Description: vacuolar ATPase B subunit [Oryza sativa]
  misc_feature (54)..(541): NCBI GI NO: 15233891 NR Description: probable H+-transporting ATPase
  misc_feature (54)..(539): NCBI GI NO: 2493129 NR Description: Vacuolar ATP synthase subunit B isoform 1
  misc_feature (54)..(541): NCBI GI NO: 26986106 NR Description: vacuolar ATPase subunit B
  misc_feature (53)..(540): NCBI GI NO: 81637 NR Description: H+-exporting ATPase (EC 3
  misc_feature (54)..(541): NCBI GI NO: 11266665 NR Description: H+-transporting two-sector ATPase (EC 3
  misc_feature (56)..(540): NCBI GI NO: 17065080 NR Description: Unknown protein [Arabidopsis thaliana]
  misc_feature (47)..(541): NCBI GI NO: 162723 NR Description: vacuolar H+-ATPase
  misc_feature (198)..(198): Xaa is any aa, unknown or other
SIWALVFNFVSLLPPLVSSSPPLPSHVSVFLSLSFSISLPLCCQPDPRLFVASMGLAKDGAEMEEGTLEIGIEYRTVSGVAGPLVILDKVKGPKYQEIVNIRLGDGTTRRGQVLEVDGEKAVVQVFEGTSGIDNKYTTVQFTGEVLKTPVSLDMLGRIFNGSGKPIDNGPPILPEAYLDISGSSINPSERTYPEEMIXTGISTIDVMNSIARGQKIPLFSAAGLPHNEIAAQICRQAGLVKRLEQSKHAAEEGEEDNFAIVFAAMGVNMETAQFFKRDFEENGSMERVTLFLNLANDPTIERIITPRIALTTAEYLAYECGKHVLVILTDMSSYADALREVSAAREEVPGRRGYPGYMYTDLATIYERAGRIEGRKGSITQIPILTMPNDDITHPTPDLTGYITEGQIYIDRQLHNRQIYPPINVLPSLSRLMKSAIGEGMTRRDHSDVSNQLYANYAIGKDVQAMKAVVGEEALSSEDLLYLEFLDKFERKFVAQGAYDTRNIFQSLDLAWTLLRIFPRELLHRIPAKTLDQFYSRDATH

SEQ ID NO: 17725 - protein, 488 aa, Triticum aestivum
  peptide (1)..(488): Ceres Seq. ID no. 14302345
  misc_feature (204)..(383): Pfam Name: Pfam Description:  ATP synthase alpha/beta family
  misc_feature (9)..(488): NCBI GI NO: 2493132 NR Description: Vacuolar ATP synthase subunit B isoform 2
  misc_feature (1)..(488): NCBI GI NO: 2493131 NR Description: Vacuolar ATP synthase subunit B isoform 1
  misc_feature (1)..(488): NCBI GI NO: 14150751 NR Description: vacuolar ATPase B subunit [Oryza sativa]
  misc_feature (1)..(488): NCBI GI NO: 15233891 NR Description: probable H+-transporting ATPase
  misc_feature (1)..(486): NCBI GI NO: 2493129 NR Description: Vacuolar ATP synthase subunit B isoform 1
  misc_feature (1)..(488): NCBI GI NO: 26986106 NR Description: vacuolar ATPase subunit B
  misc_feature (1)..(487): NCBI GI NO: 81637 NR Description: H+-exporting ATPase (EC 3
  misc_feature (1)..(488): NCBI GI NO: 11266665 NR Description: H+-transporting two-sector ATPase (EC 3
  misc_feature (3)..(487): NCBI GI NO: 17065080 NR Description: Unknown protein [Arabidopsis thaliana]
  misc_feature (1)..(488): NCBI GI NO: 162723 NR Description: vacuolar H+-ATPase
  misc_feature (145)..(145): Xaa is any aa, unknown or other
MGLAKDGAEMEEGTLEIGIEYRTVSGVAGPLVILDKVKGPKYQEIVNIRLGDGTTRRGQVLEVDGEKAVVQVFEGTSGIDNKYTTVQFTGEVLKTPVSLDMLGRIFNGSGKPIDNGPPILPEAYLDISGSSINPSERTYPEEMIXTGISTIDVMNSIARGQKIPLFSAAGLPHNEIAAQICRQAGLVKRLEQSKHAAEEGEEDNFAIVFAAMGVNMETAQFFKRDFEENGSMERVTLFLNLANDPTIERIITPRIALTTAEYLAYECGKHVLVILTDMSSYADALREVSAAREEVPGRRGYPGYMYTDLATIYERAGRIEGRKGSITQIPILTMPNDDITHPTPDLTGYITEGQIYIDRQLHNRQIYPPINVLPSLSRLMKSAIGEGMTRRDHSDVSNQLYANYAIGKDVQAMKAVVGEEALSSEDLLYLEFLDKFERKFVAQGAYDTRNIFQSLDLAWTLLRIFPRELLHRIPAKTLDQFYSRDATH

SEQ ID NO: 17726 - protein, 479 aa, Triticum aestivum
  peptide (1)..(479): Ceres Seq. ID no. 14302346
  misc_feature (195)..(374): Pfam Name: Pfam Description:  ATP synthase alpha/beta family
  misc_feature (1)..(479): NCBI GI NO: 2493132 NR Description: Vacuolar ATP synthase subunit B isoform 2
  misc_feature (1)..(479): NCBI GI NO: 2493131 NR Description: Vacuolar ATP synthase subunit B isoform 1
  misc_feature (1)..(479): NCBI GI NO: 14150751 NR Description: vacuolar ATPase B subunit [Oryza sativa]
  misc_feature (1)..(479): NCBI GI NO: 15233891 NR Description: probable H+-transporting ATPase
  misc_feature (1)..(477): NCBI GI NO: 2493129 NR Description: Vacuolar ATP synthase subunit B isoform 1
  misc_feature (1)..(479): NCBI GI NO: 26986106 NR Description: vacuolar ATPase subunit B
  misc_feature (1)..(478): NCBI GI NO: 81637 NR Description: H+-exporting ATPase (EC 3
  misc_feature (1)..(479): NCBI GI NO: 11266665 NR Description: H+-transporting two-sector ATPase (EC 3
  misc_feature (1)..(478): NCBI GI NO: 17065080 NR Description: Unknown protein [Arabidopsis thaliana]
  misc_feature (1)..(479): NCBI GI NO: 162723 NR Description: vacuolar H+-ATPase
  misc_feature (136)..(136): Xaa is any aa, unknown or other
MEEGTLEIGIEYRTVSGVAGPLVILDKVKGPKYQEIVNIRLGDGTTRRGQVLEVDGEKAVVQVFEGTSGIDNKYTTVQFTGEVLKTPVSLDMLGRIFNGSGKPIDNGPPILPEAYLDISGSSINPSERTYPEEMIXTGISTIDVMNSIARGQKIPLFSAAGLPHNEIAAQICRQAGLVKRLEQSKHAAEEGEEDNFAIVFAAMGVNMETAQFFKRDFEENGSMERVTLFLNLANDPTIERIITPRIALTTAEYLAYECGKHVLVILTDMSSYADALREVSAAREEVPGRRGYPGYMYTDLATIYERAGRIEGRKGSITQIPILTMPNDDITHPTPDLTGYITEGQIYIDRQLHNRQIYPPINVLPSLSRLMKSAIGEGMTRRDHSDVSNQLYANYAIGKDVQAMKAVVGEEALSSEDLLYLEFLDKFERKFVAQGAYDTRNIFQSLDLAWTLLRIFPRELLHRIPAKTLDQFYSRDATH

SEQ ID NO: 17727 - DNA, 1218 bp, Triticum aestivum
  misc_feature (1)..(1218): Ceres Seq. ID no. 14313358
acacaagcactgccttccttccctagtcattgggaaggagaagaacacacagttagatacatccatctgatctgcttagttaccgtgctctgtactcctgatcaggatggcagaagggctcttctccatggctcacccgtgggcctccgcctttggcatcctaggcaacatcatatccttcctggtgttcctcgcgcccacgccgacgttcctgcgggtgtaccggaagaagtcgacggaggggttcagcgcggtgccgtacgtggtggcgctcttcagctgcatgctgtggatcttctacgcgctggtcaagaccaactccagcccgctgctcaccatcaacgcctttggctgcgtcgtcgagggcttctacatcctgctctacgtggtgtacgcgcccaggcacgccaggcaccgcgccctcgccttcttcctcctcctcgacgtcgccgccttcgccctcatcgtcgccgtcaccgtgttcctcgtgccccagcccagccgcgtcaaggtcctcggcagcgtctgcctcgccttctccatggccgtcttcgtcgccccgctcagcgtcatcttcgtggtgatcaagaccaagagcgccgagtacatgcccttctcgctctccttcttcctcaccctcagcgccgtcgcctggttcttctatggcctcttcaccaaggacatctacgtcaccctcccgaacgtgggcgggttcttctttggggtggcccagatgacgctctacttctgctaccgcaagccggacacgtcggccctggtgctgccgacggggatccacgacgtgtccacggagccggcggcgcagcaggaggtggagctgccggagggcacccacccggcggtggccatgctgacggtgagcacgctgccgatgctggcggagctgcagaagatggagcaggagatcagctcgcccaccccgcgcaagggctacatcaaggctttctgatccgatcgagatgaccgatgcacgcacgggcgcatgcattcaggagatgaatcaatcgctaatgattggcgaaccgaccgccagcagagatacgtttatatagttcttaatttcagtcgttcgtttgtaatggtctgtactagtagcacagtcgtgtgtgtgttgtcgtccaagggtctgatataccggccggccgggcaagtaattcatctaccaatccacgtgccctgggaaataaagttataaac

SEQ ID NO: 17728 - protein, 327 aa, Triticum aestivum
  peptide (1)..(327): Ceres Seq. ID no. 14313359
  misc_feature (232)..(315): Pfam Name: Pfam Description:  Glycoprotein GG/GX
TQALPSFPSHWEGEEHTVRYIHLICLVTVLCTPDQDGRRALLHGSPVGLRLWHPRQHHILPGVPRAHADVPAGVPEEVDGGVQRGAVRGGALQLHAVDLLRAGQDQLQPAAHHQRLWLRRRGLLHPALRGVRAQARQAPRPRLLPPPRRRRLRPHRRRHRVPRAPAQPRQGPRQRLPRLLHGRLRRPAQRHLRGDQDQERRVHALLALLLPHPQRRRLVLLWPLHQGHLRHPPERGRVLLWGGPDDALLLLPQAGHVGPGAADGDPRRVHGAGGAAGGGAAGGHPPGGGHADGEHAADAGGAAEDGAGDQLAHPAQGLHQGFLIRSR

SEQ ID NO: 17729 - protein, 287 aa, Triticum aestivum
  peptide (1)..(287): Ceres Seq. ID no. 14313360
  misc_feature (16)..(101): Pfam Name: Pfam Description:  MtN3/saliva family
  misc_feature (4)..(250): NCBI GI NO: 15240040 NR Description: nodulin MtN3 family protein [Arabidopsis thaliana]
  misc_feature (4)..(250): NCBI GI NO: 21593422 NR Description: senescence-associated protein (SAG29)
  misc_feature (13)..(234): NCBI GI NO: 15241265 NR Description: nodulin MtN3 family protein [Arabidopsis thaliana]
  misc_feature (13)..(224): NCBI GI NO: 1619602 NR Description: MtN3 [Medicago truncatula]
  misc_feature (12)..(217): NCBI GI NO: 15241278 NR Description: nodulin MtN3 family protein [Arabidopsis thaliana]
  misc_feature (12)..(217): NCBI GI NO: 21593109 NR Description: MtN3-like protein [Arabidopsis thaliana]
  misc_feature (5)..(222): NCBI GI NO: 15229019 NR Description: nodulin MtN3 family protein [Arabidopsis thaliana]
  misc_feature (5)..(258): NCBI GI NO: 15237803 NR Description: nodulin MtN3 family protein [Arabidopsis thaliana]
  misc_feature (12)..(217): NCBI GI NO: 14715258 NR Description: N3 like protein [Medicago truncatula]
  misc_feature (13)..(225): NCBI GI NO: 15234863 NR Description: nodulin MtN3 family protein [Arabidopsis thaliana]
MAEGLFSMAHPWASAFGILGNIISFLVFLAPTPTFLRVYRKKSTEGFSAVPYVVALFSCMLWIFYALVKTNSSPLLTINAFGCVVEGFYILLYVVYAPRHARHRALAFFLLLDVAAFALIVAVTVFLVPQPSRVKVLGSVCLAFSMAVFVAPLSVIFVVIKTKSAEYMPFSLSFFLTLSAVAWFFYGLFTKDIYVTLPNVGGFFFGVAQMTLYFCYRKPDTSALVLPTGIHDVSTEPAAQQEVELPEGTHPAVAMLTVSTLPMLAELQKMEQEISSPTPRKGYIKAF

SEQ ID NO: 17730 - protein, 280 aa, Triticum aestivum
  peptide (1)..(280): Ceres Seq. ID no. 14313361
  misc_feature (9)..(94): Pfam Name: Pfam Description:  MtN3/saliva family
  misc_feature (1)..(243): NCBI GI NO: 15240040 NR Description: nodulin MtN3 family protein [Arabidopsis thaliana]
  misc_feature (1)..(243): NCBI GI NO: 21593422 NR Description: senescence-associated protein (SAG29)
  misc_feature (6)..(227): NCBI GI NO: 15241265 NR Description: nodulin MtN3 family protein [Arabidopsis thaliana]
  misc_feature (6)..(217): NCBI GI NO: 1619602 NR Description: MtN3 [Medicago truncatula]
  misc_feature (5)..(210): NCBI GI NO: 15241278 NR Description: nodulin MtN3 family protein [Arabidopsis thaliana]
  misc_feature (5)..(210): NCBI GI NO: 21593109 NR Description: MtN3-like protein [Arabidopsis thaliana]
  misc_feature (1)..(215): NCBI GI NO: 15229019 NR Description: nodulin MtN3 family protein [Arabidopsis thaliana]
  misc_feature (1)..(251): NCBI GI NO: 15237803 NR Description: nodulin MtN3 family protein [Arabidopsis thaliana]
  misc_feature (5)..(210): NCBI GI NO: 14715258 NR Description: N3 like protein [Medicago truncatula]
  misc_feature (6)..(218): NCBI GI NO: 15234863 NR Description: nodulin MtN3 family protein [Arabidopsis thaliana]
MAHPWASAFGILGNIISFLVFLAPTPTFLRVYRKKSTEGFSAVPYVVALFSCMLWIFYALVKTNSSPLLTINAFGCVVEGFYILLYVVYAPRHARHRALAFFLLLDVAAFALIVAVTVFLVPQPSRVKVLGSVCLAFSMAVFVAPLSVIFVVIKTKSAEYMPFSLSFFLTLSAVAWFFYGLFTKDIYVTLPNVGGFFFGVAQMTLYFCYRKPDTSALVLPTGIHDVSTEPAAQQEVELPEGTHPAVAMLTVSTLPMLAELQKMEQEISSPTPRKGYIKAF

SEQ ID NO: 17731 - DNA, 1677 bp, Triticum aestivum
  misc_feature (1)..(1677): Ceres Seq. ID no. 13598075
actacaataagcggcgcctttttcgtctagcatccctcgtgtgtgtgtctccacggtcaaatcgggataaagcaacggcgacgtcatggcctcgccggcgacgccgaggccggcgctgatccggccgcgggcctcgcgcagccgctcccagttgggcgccgtcagcctcgcttccgaccacgccgccgccacggcctcctcgggccgccgccgcgacttcgtcttcgtcgtcaacccctccggcgccaatggccggacgggcaagcagtggaagcagctgctccccttcctccacacccgcctcgccgaccaatgcaacatttgcgagtgcatcacatcgggcccgtcgcacgccatagatgtcacgagggaggctataaaggacggcgctgatgctgtgatcgccgttggcggggatgggacgcttcatgaggtggtgaatggcttcttttggaaaggaagcccggtccgtgctcttgatcgagggcctgaccacttgacggcgcttggtctcatcccacttggaactggctcagactttgctaggacatttggctggtcaaatgatccccatcaggcgattgatcgaattgtgagaggagttaaatcaaaactagacattggcatgatggaaggtccaaatggagatccacatttctttataaatgttgctgatatccatctgagtgccaaggcaggttattttgcttctatgtacaagagatttggcaacttatgttatgttctgggagctttaagaggcttttggggacatagtaatcgagatttgagaataaaggtgaatggaggggaatggagaacagttgataaagtcactgctctatgcgtaggaaatgccaagtactttggaggtggcatgaagattactccaacagttgatccttttagcggtgaccttcaggttgttattatacaagatttcaagtggtacagttttcttcttaagctacataggctttatggaggcacacacttaacggtgaatggcgtgtcatcaataagagttcaatcaattgaagtggtagaggtggtgcctaacggcgacgtctttgtgcaatctgacggggagcatttcggttttcttccgaccaaattctcagttctgcctggtgcagtagatttcttcagctagatcgctgtgctgtttcttcctgttggatgttgacagacagaagatgcatgatccttggccgacttgctctgttcacctagatcacgacgttcttcctcctgttacgctagcttaagatgacgcggcaatcaggttgctccactcactcatcttctggtctgatatggtagtacggacatgaaacaaattactgctgtgcagcggcacccaccatgtatttctatgcctgcatgcagcatacagtagccgagtcgtcgatgttcatagacaagccgtagagtcacagcacagcggccatgagtgtaaatttcacaattgtttcttcagtcttgtgagtaccgtgtgcaatgatacggctgcttgttgttcgaacagctgaagtgcctgcagatccagtgtgaagttgatgcatttcccaacctccaaggtaaatgctgtcgcgaaagctctgtaacttttactctgccccctggttgagtgtactccacaagtgtgagaaaataatctagtgcttcttttggagt

SEQ ID NO: 17732 - protein, 355 aa, Triticum aestivum
  peptide (1)..(355): Ceres Seq. ID no. 15222252
  misc_feature (44)..(183): Pfam Name: presumed Pfam Description: Diacylglycerol kinase catalytic domain
  misc_feature (33)..(355): NCBI GI NO: 18406971 NR Description: expressed protein [Arabidopsis thaliana]
  misc_feature (33)..(202): NCBI GI NO: 14423554 NR Description: Unknown protein [Arabidopsis thaliana]
  misc_feature (36)..(351): NCBI GI NO: 33413155 NR Description: hypothetical protein [Thermotoga sp. RQ2]
  misc_feature (46)..(351): NCBI GI NO: 15643126 NR Description: conserved hypothetical protein
  misc_feature (48)..(351): NCBI GI NO: 13472344 NR Description: hypothetical protein [Mesorhizobium loti]
  misc_feature (47)..(335): NCBI GI NO: 20809116 NR Description: conserved hypothetical protein
  misc_feature (79)..(351): NCBI GI NO: 17230373 NR Description: hypothetical protein [Nostoc sp. PCC 7120]
  misc_feature (48)..(351): NCBI GI NO: 15614516 NR Description: BH1953~unknown conserved protein
  misc_feature (81)..(354): NCBI GI NO: 22964447 NR Description: hypothetical protein [Rhodopseudomonas palustris]
  misc_feature (47)..(351): NCBI GI NO: 27365613 NR Description: Conserved hypothetical protein
MASPATPRPALIRPRASRSRSQLGAVSLASDHAAATASSGRRRDFVFVVNPSGANGRTGKQWKQLLPFLHTRLADQCNICECITSGPSHAIDVTREAIKDGADAVIAVGGDGTLHEVVNGFFWKGSPVRALDRGPDHLTALGLIPLGTGSDFARTFGWSNDPHQAIDRIVRGVKSKLDIGMMEGPNGDPHFFINVADIHLSAKAGYFASMYKRFGNLCYVLGALRGFWGHSNRDLRIKVNGGEWRTVDKVTALCVGNAKYFGGGMKITPTVDPFSGDLQVVIIQDFKWYSFLLKLHRLYGGTHLTVNGVSSIRVQSIEVVEVVPNGDVFVQSDGEHFGFLPTKFSVLPGAVDFFS

SEQ ID NO: 17733 - DNA, 1638 bp, Triticum aestivum
  misc_feature (1)..(1638): Ceres Seq. ID no. 13660029
acctagaacatcctaatcgaaaaagcaaacacttccccgtcctcgacgcaaactagcaacctcaagagaacagaccagcttcttctccaagtccagttccttctacccattggccggccgccattgagagtttgcttcctccgctccgtgtcatctctgcaggaaatccgccatcgctcgcccgggtgtactgaccatgtctgccatgcaatcatcgtatcttcctgctaccactgagtcaattgcaatggctcaggaagctaaggatgcttcagagtccattttaatcctctaccgtgtgcttgaagacccgtcttcttcttcagatgcagttagaacaaaagaagttgccattacaaatctgacaaactatctcacaaaagagaacagagccgaggagcttaggaatctgttgacccagctcaggccatttttcgcactgattcccaaggcaaagaccgcaaagattgtacgtggcatcattgatgccgtttccaagatacctggaacatctgatcttcagatctcactctgcaaggagatggtggaatggacacgggcagagaaacgtaccttcctcaggcagcgtgtggaagcaagactagcagcccttcttttggaaagtcaggagtacactgaagctcttacccttcttcctggtcttatcaaggaagtgaggaggctggatgacaggttgcttcttgttgacattgaccttctggagagcaaactccatttctctctaaggaaccttccaaaggccaaggcttctctgactgccgcaagaactgcagcgaatgccatttatgttccgccagcgcagcagggcactattgacctgcagagtggaatccttcatgccgaagagaaggattacaagaccgcctacagttacttctttgaagcgtttgaagggtttaatgcactggacgaccctaaggccatcttctgcttgaagtacatgcttctgtgcaagataatggtcaaccaagctgatgatgttgcaggagtaatctcgtctaaggcaggcctgaagtatgttggtcctgatgtggatgctatgaaagctgttgcggatgcctactcgaaacgatctctcaagtactttgaaaccgctcttggtgactacaaggcccagctggaggaggatcctattgtccacaggcacctctcgtctctgtatgataccctcctggagcagaacctgtgcaggctgattgaagcctactcaagggtggagattgcgcacgtagcagagatgatcgagctgccaatcgagcatgttgagaagaagctgtcacagatgatcctggacaagaaattcgcagggactctggatcagggtgcgggctgcctcatcatcttcgaagacgccaagacggaggcgatcttccctgctacgctcgaaacaatttcgaatgtggggaaggttgtcgagagcctttacatgaggtcagcaaagatcatggcttgaggagatgttttgttccccagttaaatcttacacttgagctctgctagagtctccaggacatgaaatgcctgtgtgttgccattatttattgcttgcaaattgtcttctgttagctctataaaatgtctatgtctgcgtgatggaaatacagttagcacttgctg

SEQ ID NO: 17734 - protein, 425 aa, Triticum aestivum
  peptide (1)..(425): Ceres Seq. ID no. 15220004
  misc_feature (287)..(391): Pfam Name: Pfam Description:  PCI domain
  misc_feature (1)..(425): NCBI GI NO: 38344536 NR Description: OSJNBa0027P08.4
  misc_feature (11)..(425): NCBI GI NO: 15218845 NR Description: 26S proteasome regulatory subunit (RPN6), putative
  misc_feature (11)..(418): NCBI GI NO: 25332510 NR Description: 19S proteosome subunit 9
  misc_feature (116)..(425): NCBI GI NO: 38093742 NR Description: putative proteosome subunit
  misc_feature (17)..(423): NCBI GI NO: 17137740 NR Description: Proteasome p44.5 subunit CG10149-PB
  misc_feature (34)..(423): NCBI GI NO: 31242521 NR Description: ENSANGP00000015227 [Anopheles gambiae]
  misc_feature (24)..(423): NCBI GI NO: 26342168 NR Description: unnamed protein product [Mus musculus]
  misc_feature (24)..(423): NCBI GI NO: 33585718 NR Description: Unknown (protein for IMAGE:3964625) [Mus musculus]
  misc_feature (24)..(423): NCBI GI NO: 2150046 NR Description: 26S proteasome subunit 9 [Homo sapiens]
  misc_feature (24)..(423): NCBI GI NO: 28872725 NR Description: proteasome 26S non-ATPase subunit 11
MSAMQSSYLPATTESIAMAQEAKDASESILILYRVLEDPSSSSDAVRTKEVAITNLTNYLTKENRAEELRNLLTQLRPFFALIPKAKTAKIVRGIIDAVSKIPGTSDLQISLCKEMVEWTRAEKRTFLRQRVEARLAALLLESQEYTEALTLLPGLIKEVRRLDDRLLLVDIDLLESKLHFSLRNLPKAKASLTAARTAANAIYVPPAQQGTIDLQSGILHAEEKDYKTAYSYFFEAFEGFNALDDPKAIFCLKYMLLCKIMVNQADDVAGVISSKAGLKYVGPDVDAMKAVADAYSKRSLKYFETALGDYKAQLEEDPIVHRHLSSLYDTLLEQNLCRLIEAYSRVEIAHVAEMIELPIEHVEKKLSQMILDKKFAGTLDQGAGCLIIFEDAKTEAIFPATLETISNVGKVVESLYMRSAKIMA

SEQ ID NO: 17735 - protein, 422 aa, Triticum aestivum
  peptide (1)..(422): Ceres Seq. ID no. 15220005
  misc_feature (284)..(388): Pfam Name: Pfam Description:  PCI domain
  misc_feature (1)..(422): NCBI GI NO: 38344536 NR Description: OSJNBa0027P08.4
  misc_feature (8)..(422): NCBI GI NO: 15218845 NR Description: 26S proteasome regulatory subunit (RPN6), putative
  misc_feature (8)..(415): NCBI GI NO: 25332510 NR Description: 19S proteosome subunit 9
  misc_feature (113)..(422): NCBI GI NO: 38093742 NR Description: putative proteosome subunit
  misc_feature (14)..(420): NCBI GI NO: 17137740 NR Description: Proteasome p44.5 subunit CG10149-PB
  misc_feature (31)..(420): NCBI GI NO: 31242521 NR Description: ENSANGP00000015227 [Anopheles gambiae]
  misc_feature (21)..(420): NCBI GI NO: 26342168 NR Description: unnamed protein product [Mus musculus]
  misc_feature (21)..(420): NCBI GI NO: 33585718 NR Description: Unknown (protein for IMAGE:3964625) [Mus musculus]
  misc_feature (21)..(420): NCBI GI NO: 2150046 NR Description: 26S proteasome subunit 9 [Homo sapiens]
  misc_feature (21)..(420): NCBI GI NO: 28872725 NR Description: proteasome 26S non-ATPase subunit 11
MQSSYLPATTESIAMAQEAKDASESILILYRVLEDPSSSSDAVRTKEVAITNLTNYLTKENRAEELRNLLTQLRPFFALIPKAKTAKIVRGIIDAVSKIPGTSDLQISLCKEMVEWTRAEKRTFLRQRVEARLAALLLESQEYTEALTLLPGLIKEVRRLDDRLLLVDIDLLESKLHFSLRNLPKAKASLTAARTAANAIYVPPAQQGTIDLQSGILHAEEKDYKTAYSYFFEAFEGFNALDDPKAIFCLKYMLLCKIMVNQADDVAGVISSKAGLKYVGPDVDAMKAVADAYSKRSLKYFETALGDYKAQLEEDPIVHRHLSSLYDTLLEQNLCRLIEAYSRVEIAHVAEMIELPIEHVEKKLSQMILDKKFAGTLDQGAGCLIIFEDAKTEAIFPATLETISNVGKVVESLYMRSAKIMA

SEQ ID NO: 17736 - protein, 408 aa, Triticum aestivum
  peptide (1)..(408): Ceres Seq. ID no. 15220006
  misc_feature (270)..(374): Pfam Name: Pfam Description:  PCI domain
  misc_feature (1)..(408): NCBI GI NO: 38344536 NR Description: OSJNBa0027P08.4
  misc_feature (1)..(408): NCBI GI NO: 15218845 NR Description: 26S proteasome regulatory subunit (RPN6), putative
  misc_feature (1)..(401): NCBI GI NO: 25332510 NR Description: 19S proteosome subunit 9
  misc_feature (99)..(408): NCBI GI NO: 38093742 NR Description: putative proteosome subunit
  misc_feature (1)..(406): NCBI GI NO: 17137740 NR Description: Proteasome p44.5 subunit CG10149-PB
  misc_feature (17)..(406): NCBI GI NO: 31242521 NR Description: ENSANGP00000015227 [Anopheles gambiae]
  misc_feature (7)..(406): NCBI GI NO: 26342168 NR Description: unnamed protein product [Mus musculus]
  misc_feature (7)..(406): NCBI GI NO: 33585718 NR Description: Unknown (protein for IMAGE:3964625) [Mus musculus]
  misc_feature (7)..(406): NCBI GI NO: 2150046 NR Description: 26S proteasome subunit 9 [Homo sapiens]
  misc_feature (7)..(406): NCBI GI NO: 28872725 NR Description: proteasome 26S non-ATPase subunit 11
MAQEAKDASESILILYRVLEDPSSSSDAVRTKEVAITNLTNYLTKENRAEELRNLLTQLRPFFALIPKAKTAKIVRGIIDAVSKIPGTSDLQISLCKEMVEWTRAEKRTFLRQRVEARLAALLLESQEYTEALTLLPGLIKEVRRLDDRLLLVDIDLLESKLHFSLRNLPKAKASLTAARTAANAIYVPPAQQGTIDLQSGILHAEEKDYKTAYSYFFEAFEGFNALDDPKAIFCLKYMLLCKIMVNQADDVAGVISSKAGLKYVGPDVDAMKAVADAYSKRSLKYFETALGDYKAQLEEDPIVHRHLSSLYDTLLEQNLCRLIEAYSRVEIAHVAEMIELPIEHVEKKLSQMILDKKFAGTLDQGAGCLIIFEDAKTEAIFPATLETISNVGKVVESLYMRSAKIMA

SEQ ID NO: 17737 - DNA, 1866 bp, Triticum aestivum
  misc_feature (1)..(1866): Ceres Seq. ID no. 15174867
atcagtcgacatcgccacaggttgccgctagcagcagttaatcactactcagctggcctattaactcactgatccttctgctaagctgcttgatagttcgactgcattaattccctcgcaccccaccccacgcatggctccaccgtcgcagtgcttcgacgccatgcacagcgcggccaacaatggcgccgccccggcggtggctgacgcaaagccgcagtgccccgccgtgctcgacgccgacgtgttccggcgccagggacacgaggtcatcgacttcattgccgagtactacggcggcatgggggactaccccgtgcaccccagcgtcacgcccggcttccttcgcaatgtgctccccgcggaggcgccgtcccgcccggagcccgacgcgttcggctccgcgctgcgggacgtccgcgacctcatcctcccgggcatgacgcactggcagagcccccgccacttcgcgcacttcccggcgtccagcagcaccgtcggggccctcggggaggcgctcattgccggcatcaacgtggtgcccttcacgtgggccgcctcgccggccgccaccgagctggagatggtggtcgtggactggctcggcaaggcgctgcatttgccggagagcctcctgttcgccggcggcggcgggggcacgcttctgggcacctcgtgcgaggccatactctgcgccctcgtcgccgccagggacaagaagctcgccgagatcggcgagaggaggatcggcgaccttgtcgtctactgctccgaccagacccatttcgccttccgcaaggctgcgcgcatcgccgggatcccgcgggaccactgccgcgcgatacacacgtgccgcgaagacatgttcgcgctctcgcccacggagctgcaggccgccatgcaggccgacgtggacgccgggctggtgccgctgttcctgtgcgcgaccgtcgggaccacccagacgaccgccgttgaccccatcggcaagctctgcaccgtggcggcgtcccacggcgtgtgggtccacgtcgacgcggcctacaccggctcggcgctggtctgcccggagttccggcacgtgatcgacggcgtagaggccgtggactcgttcagcatgaacgcccacaagtggctcctggccaacaacgactgctgcgcgatgtgggtgaagaggccgagcgagctcgtggcggcgctgggcacggagcaggagtacatcctcaaggacgcggcgtcgaaggggcacgacgtggtggactacaaggactggaccatgacgctgacccgccggtttcgcgcgctcaagatgtggctcgtgctccgctgctacggcgtggacggcctgcgcgaccacatccgctcccacgtgcgcatggccgaggcgttcgaggacatggtgcgggccgacgagaggttcgaggtggtgacggacaggcagttcgcgctggtgtgcttccggctccggtcgccggagaggttcggcggcgagaagacggccaacgagctcaaccggggcctgctcgaggaggtgaacgcggtcggcccgggcccgtacatgagctccgcgaacgtgggcggcgtctacatgctcaggtgcgccgtcgggagcacgctcacggaggagcaccacgtcgctgacgcatggaaggtggtccaggatcgggcctcggtaatcctccggaaaatggaaattatttacagcgtgcttggttaaagttcgggcgaggtgaatatatatgtttctctatgtaaaatctacctgcagacattacttgatcctaattaagtctcgacctcaattaggtcgtcggaaccatgcggatttgtatttgatatttatatatatgaagcaatttactggtt

SEQ ID NO: 17738 - protein, 527 aa, Triticum aestivum
  peptide (1)..(527): Ceres Seq. ID no. 15174868
  misc_feature (68)..(445): Pfam Name: Pfam Description:  Pyridoxal-dependent decarboxylase conserved domain
  misc_feature (1)..(518): NCBI GI NO: 34909906 NR Description: putative tyrosine/DOPA decarboxylase
  misc_feature (1)..(522): NCBI GI NO: 37533712 NR Description: putative Tyrosine/DOPA decarboxylase 2
  misc_feature (34)..(492): NCBI GI NO: 1717826 NR Description: Tyrosine/DOPA decarboxylase 2
  misc_feature (456)..(518): NCBI GI NO: 1717826 NR Description: Tyrosine/DOPA decarboxylase 2
  misc_feature (34)..(516): NCBI GI NO: 12620328 NR Description: tyrosine/dopa decarboxylase
  misc_feature (34)..(492): NCBI GI NO: 3282525 NR Description: tyrosine/dopa decarboxylase [Papaver somniferum]
  misc_feature (456)..(518): NCBI GI NO: 3282525 NR Description: tyrosine/dopa decarboxylase [Papaver somniferum]
  misc_feature (34)..(492): NCBI GI NO: 22261822 NR Description: Tyrosine/DOPA decarboxylase 3
  misc_feature (456)..(520): NCBI GI NO: 22261822 NR Description: Tyrosine/DOPA decarboxylase 3
  misc_feature (15)..(520): NCBI GI NO: 3282527 NR Description: tyrosine/dopa decarboxylase [Papaver somniferum]
MAPPSQCFDAMHSAANNGAAPAVADAKPQCPAVLDADVFRRQGHEVIDFIAEYYGGMGDYPVHPSVTPGFLRNVLPAEAPSRPEPDAFGSALRDVRDLILPGMTHWQSPRHFAHFPASSSTVGALGEALIAGINVVPFTWAASPAATELEMVVVDWLGKALHLPESLLFAGGGGGTLLGTSCEAILCALVAARDKKLAEIGERRIGDLVVYCSDQTHFAFRKAARIAGIPRDHCRAIHTCREDMFALSPTELQAAMQADVDAGLVPLFLCATVGTTQTTAVDPIGKLCTVAASHGVWVHVDAAYTGSALVCPEFRHVIDGVEAVDSFSMNAHKWLLANNDCCAMWVKRPSELVAALGTEQEYILKDAASKGHDVVDYKDWTMTLTRRFRALKMWLVLRCYGVDGLRDHIRSHVRMAEAFEDMVRADERFEVVTDRQFALVCFRLRSPERFGGEKTANELNRGLLEEVNAVGPGPYMSSANVGGVYMLRCAVGSTLTEEHHVADAWKVVQDRASVILRKMEIIYSVLG

SEQ ID NO: 17739 - protein, 517 aa, Triticum aestivum
  peptide (1)..(517): Ceres Seq. ID no. 15174869
  misc_feature (58)..(435): Pfam Name: Pfam Description:  Pyridoxal-dependent decarboxylase conserved domain
  misc_feature (1)..(508): NCBI GI NO: 34909906 NR Description: putative tyrosine/DOPA decarboxylase
  misc_feature (1)..(512): NCBI GI NO: 37533712 NR Description: putative Tyrosine/DOPA decarboxylase 2
  misc_feature (24)..(482): NCBI GI NO: 1717826 NR Description: Tyrosine/DOPA decarboxylase 2
  misc_feature (446)..(508): NCBI GI NO: 1717826 NR Description: Tyrosine/DOPA decarboxylase 2
  misc_feature (24)..(506): NCBI GI NO: 12620328 NR Description: tyrosine/dopa decarboxylase
  misc_feature (24)..(482): NCBI GI NO: 3282525 NR Description: tyrosine/dopa decarboxylase [Papaver somniferum]
  misc_feature (446)..(508): NCBI GI NO: 3282525 NR Description: tyrosine/dopa decarboxylase [Papaver somniferum]
  misc_feature (24)..(482): NCBI GI NO: 22261822 NR Description: Tyrosine/DOPA decarboxylase 3
  misc_feature (446)..(510): NCBI GI NO: 22261822 NR Description: Tyrosine/DOPA decarboxylase 3
  misc_feature (5)..(510): NCBI GI NO: 3282527 NR Description: tyrosine/dopa decarboxylase [Papaver somniferum]
MHSAANNGAAPAVADAKPQCPAVLDADVFRRQGHEVIDFIAEYYGGMGDYPVHPSVTPGFLRNVLPAEAPSRPEPDAFGSALRDVRDLILPGMTHWQSPRHFAHFPASSSTVGALGEALIAGINVVPFTWAASPAATELEMVVVDWLGKALHLPESLLFAGGGGGTLLGTSCEAILCALVAARDKKLAEIGERRIGDLVVYCSDQTHFAFRKAARIAGIPRDHCRAIHTCREDMFALSPTELQAAMQADVDAGLVPLFLCATVGTTQTTAVDPIGKLCTVAASHGVWVHVDAAYTGSALVCPEFRHVIDGVEAVDSFSMNAHKWLLANNDCCAMWVKRPSELVAALGTEQEYILKDAASKGHDVVDYKDWTMTLTRRFRALKMWLVLRCYGVDGLRDHIRSHVRMAEAFEDMVRADERFEVVTDRQFALVCFRLRSPERFGGEKTANELNRGLLEEVNAVGPGPYMSSANVGGVYMLRCAVGSTLTEEHHVADAWKVVQDRASVILRKMEIIYSVLG

SEQ ID NO: 17740 - protein, 471 aa, Triticum aestivum
  peptide (1)..(471): Ceres Seq. ID no. 15174870
  misc_feature (12)..(389): Pfam Name: Pfam Description:  Pyridoxal-dependent decarboxylase conserved domain
  misc_feature (1)..(462): NCBI GI NO: 34909906 NR Description: putative tyrosine/DOPA decarboxylase
  misc_feature (1)..(466): NCBI GI NO: 37533712 NR Description: putative Tyrosine/DOPA decarboxylase 2
  misc_feature (1)..(436): NCBI GI NO: 1717826 NR Description: Tyrosine/DOPA decarboxylase 2
  misc_feature (400)..(462): NCBI GI NO: 1717826 NR Description: Tyrosine/DOPA decarboxylase 2
  misc_feature (1)..(460): NCBI GI NO: 12620328 NR Description: tyrosine/dopa decarboxylase
  misc_feature (1)..(436): NCBI GI NO: 3282525 NR Description: tyrosine/dopa decarboxylase [Papaver somniferum]
  misc_feature (400)..(462): NCBI GI NO: 3282525 NR Description: tyrosine/dopa decarboxylase [Papaver somniferum]
  misc_feature (1)..(436): NCBI GI NO: 22261822 NR Description: Tyrosine/DOPA decarboxylase 3
  misc_feature (400)..(464): NCBI GI NO: 22261822 NR Description: Tyrosine/DOPA decarboxylase 3
  misc_feature (1)..(464): NCBI GI NO: 3282527 NR Description: tyrosine/dopa decarboxylase [Papaver somniferum]
MGDYPVHPSVTPGFLRNVLPAEAPSRPEPDAFGSALRDVRDLILPGMTHWQSPRHFAHFPASSSTVGALGEALIAGINVVPFTWAASPAATELEMVVVDWLGKALHLPESLLFAGGGGGTLLGTSCEAILCALVAARDKKLAEIGERRIGDLVVYCSDQTHFAFRKAARIAGIPRDHCRAIHTCREDMFALSPTELQAAMQADVDAGLVPLFLCATVGTTQTTAVDPIGKLCTVAASHGVWVHVDAAYTGSALVCPEFRHVIDGVEAVDSFSMNAHKWLLANNDCCAMWVKRPSELVAALGTEQEYILKDAASKGHDVVDYKDWTMTLTRRFRALKMWLVLRCYGVDGLRDHIRSHVRMAEAFEDMVRADERFEVVTDRQFALVCFRLRSPERFGGEKTANELNRGLLEEVNAVGPGPYMSSANVGGVYMLRCAVGSTLTEEHHVADAWKVVQDRASVILRKMEIIYSVLG

SEQ ID NO: 17741 - DNA, 1392 bp, Triticum aestivum
  misc_feature (1)..(1392): Ceres Seq. ID no. 14301936
cacactcagaacactagctactgtcctgccattctgctccgcgcttatcttcctcagcttcccaagtctgcctaagcatcaaacgctagcacgtccaagccgagaagttccaagcatgtggaagtttcttgcagcaacggcgctgccgatcctggtctcgctgctcgccgtgcgcgcgcgcggcgtcgacgactacacggcgttcgtgtacgccgggtgctcgcaggcgcgctacgacgccggcacccagtacgccgcggacgtcgacaccgtgctctcgaccctcaccgacaccgcggcctccaccccctacgccaactacacccccccgtccggcgccgccacgggcctagtcggcctctaccagtgccgctccgacctcccggccgccgtctgcggcgtctgcgtgaaggcgtccgcctccaagctctcctccctctgcaactcggccgccggcggcgcggtgcagctgcgcgcgtgcttcgtccgctacggcaacgactcgttcctcgggaagccggacaacacggtgctgttcaagaagtgcggcggcgagagcggggacgccggcgtcgcggcgctgcgcgacgcggcgctcggagcgctccaggccgcgtcgtcccccgcggccggcggctcgtaccgcgcaggcgcggccgggtacgtgcaggccatgtcgcagtgcgtgggggacctcggcgccaaggcctgcaccgactgcgtctccgtcgccgcctcgcagctcaaggccggctgcggcgacgcctccgccggggaggtctacctcggcaagtgctacgcgcgcttctggtccaatgccggcaccggcaccggcgggaccacccccggaggaggcaacgtcatcggcggcggtaacgccggccccatcggtgacggcggcaatggcatcgctggcggaggcaatggcatcgccggcggcggcaccgtcggcgtcccgggcgcaggcagcggatacggatacgggttcgtgccgcgtccgtacggcgacgtccaagatggttccgggaagaccctcgccatcatcatcggcatcgtggcggcggcggccatcatcatcatcttcctctccttcgtccgaagagcccgcgccgccaatggcaaaagctaagctaagggttgcagcagggatggtcgccactcgccactattagctcagatttggatcggtcggtggcttttggcttcggcgttgctttagtatctctccttttatcttttatggtctcttttgccgtgccagaaaaacaaagggaggccatgccgccactgtgccgaagtagggaactgaagattccagctgcatgctactagccactaaggaaaatattactacgcaagaataagaagatatatatttgttgaagtgaccac

SEQ ID NO: 17742 - protein, 375 aa, Triticum aestivum
  peptide (1)..(375): Ceres Seq. ID no. 14301937
  misc_feature (119)..(171): Pfam Name: Pfam Description:  Domain of unknown function DUF26
  misc_feature (42)..(279): NCBI GI NO: 18379273 NR Description: expressed protein [Arabidopsis thaliana]
  misc_feature (320)..(374): NCBI GI NO: 18379273 NR Description: expressed protein [Arabidopsis thaliana]
  misc_feature (42)..(279): NCBI GI NO: 21554153 NR Description: unknown [Arabidopsis thaliana]
  misc_feature (320)..(374): NCBI GI NO: 21554153 NR Description: unknown [Arabidopsis thaliana]
  misc_feature (68)..(302): NCBI GI NO: 18409653 NR Description: expressed protein [Arabidopsis thaliana]
  misc_feature (335)..(365): NCBI GI NO: 18409653 NR Description: expressed protein [Arabidopsis thaliana]
  misc_feature (38)..(269): NCBI GI NO: 30693130 NR Description: expressed protein [Arabidopsis thaliana]
  misc_feature (340)..(374): NCBI GI NO: 30693130 NR Description: expressed protein [Arabidopsis thaliana]
  misc_feature (68)..(302): NCBI GI NO: 21593606 NR Description: unknown [Arabidopsis thaliana]
  misc_feature (335)..(365): NCBI GI NO: 21593606 NR Description: unknown [Arabidopsis thaliana]
TLRTLATVLPFCSALIFLSFPSLPKHQTLARPSREVPSMWKFLAATALPILVSLLAVRARGVDDYTAFVYAGCSQARYDAGTQYAADVDTVLSTLTDTAASTPYANYTPPSGAATGLVGLYQCRSDLPAAVCGVCVKASASKLSSLCNSAAGGAVQLRACFVRYGNDSFLGKPDNTVLFKKCGGESGDAGVAALRDAALGALQAASSPAAGGSYRAGAAGYVQAMSQCVGDLGAKACTDCVSVAASQLKAGCGDASAGEVYLGKCYARFWSNAGTGTGGTTPGGGNVIGGGNAGPIGDGGNGIAGGGNGIAGGGTVGVPGAGSGYGYGFVPRPYGDVQDGSGKTLAIIIGIVAAAAIIIIFLSFVRRARAANGKS

SEQ ID NO: 17743 - protein, 337 aa, Triticum aestivum
  peptide (1)..(337): Ceres Seq. ID no. 14301938
  misc_feature (81)..(133): Pfam Name: Pfam Description:  Domain of unknown function DUF26
  misc_feature (4)..(241): NCBI GI NO: 18379273 NR Description: expressed protein [Arabidopsis thaliana]
  misc_feature (282)..(336): NCBI GI NO: 18379273 NR Description: expressed protein [Arabidopsis thaliana]
  misc_feature (4)..(241): NCBI GI NO: 21554153 NR Description: unknown [Arabidopsis thaliana]
  misc_feature (282)..(336): NCBI GI NO: 21554153 NR Description: unknown [Arabidopsis thaliana]
  misc_feature (30)..(264): NCBI GI NO: 18409653 NR Description: expressed protein [Arabidopsis thaliana]
  misc_feature (297)..(327): NCBI GI NO: 18409653 NR Description: expressed protein [Arabidopsis thaliana]
  misc_feature (1)..(231): NCBI GI NO: 30693130 NR Description: expressed protein [Arabidopsis thaliana]
  misc_feature (302)..(336): NCBI GI NO: 30693130 NR Description: expressed protein [Arabidopsis thaliana]
  misc_feature (30)..(264): NCBI GI NO: 21593606 NR Description: unknown [Arabidopsis thaliana]
  misc_feature (297)..(327): NCBI GI NO: 21593606 NR Description: unknown [Arabidopsis thaliana]
MWKFLAATALPILVSLLAVRARGVDDYTAFVYAGCSQARYDAGTQYAADVDTVLSTLTDTAASTPYANYTPPSGAATGLVGLYQCRSDLPAAVCGVCVKASASKLSSLCNSAAGGAVQLRACFVRYGNDSFLGKPDNTVLFKKCGGESGDAGVAALRDAALGALQAASSPAAGGSYRAGAAGYVQAMSQCVGDLGAKACTDCVSVAASQLKAGCGDASAGEVYLGKCYARFWSNAGTGTGGTTPGGGNVIGGGNAGPIGDGGNGIAGGGNGIAGGGTVGVPGAGSGYGYGFVPRPYGDVQDGSGKTLAIIIGIVAAAAIIIIFLSFVRRARAANGKS

SEQ ID NO: 17744 - DNA, 901 bp, Triticum aestivum
  misc_feature (1)..(901): Ceres Seq. ID no. 12627162
  misc_feature (534)..(534): n is a, c, t, g, unknown, or other
aaccgcaaagcgaggcaatccatcctcctctccggcggccgcgcgagagagagcgatctccggccacgagaggcgggcgggaccacgagagcctccgccgcccaccaaagccgcggagaaccgcaccggacgccttgtatctccgcccattctcaaaggtcttgaaacatggtggccatgtcaacgcttgccgctggatcgttgccgggaactgtggtccccaatggtcttctaacaaggaggtttcaaggctcacaatttcagacaactcaagttaaccgcatctcatttgagcgggaagtttctactaaagcaacactgaggagtgtaaaatgcagtgctcaaacccaaagtgttcagcgcaaatcttcaaccgcgactgtcaaacgatctgaccccaaaggaaaggttcaaggacctaagttggacgatggaagcggtgggttccctccgttccgtttcggcaaaggaggcggcggaggtggaggcggtgggggtggtagcagctactttggcgggttcctcctcttcacnatcgtgctgctcctggattacctcaaggagtttgagaagtacctgctcgctcgaaagcatcgtgccggagacgacgatgacgcgggctatgacacgagcggtgggatgctaggacaatcaccatgatgagtcttgttagcagtagtcgtccctagctactagaagtgcatcagtcagttaactggctttggttacgttacataaccttatcttggaaaattcatgcctatgcagagctcaaaatatttataggattgtgtggtgagatgcttaaacttgatgccatctggctgttgtgccgaagtatgaagaaattccatctatgtacaacaaaggttttgctactagaaatttccatgtctggatc

SEQ ID NO: 17745 - protein, 163 aa, Triticum aestivum
  peptide (1)..(163): Ceres Seq. ID no. 12627163
  misc_feature (55)..(134): NCBI GI NO: 25372889 NR Description: protein F26G16.9 [imported] - Arabidopsis thaliana
  misc_feature (53)..(134): NCBI GI NO: 18405726 NR Description: expressed protein; protein id: At1g56200
  misc_feature (122)..(122): Xaa is any aa, unknown or other
MVAMSTLAAGSLPGTVVPNGLLTRRFQGSQFQTTQVNRISFEREVSTKATLRSVKCSAQTQSVQRKSSTATVKRSDPKGKVQGPKLDDGSGGFPPFRFGKGGGGGGGGGGGSSYFGGFLLFXIVLLLDYLKEFEKYLLARKHRAGDDDDAGYDTSGGMLGQSP

SEQ ID NO: 17746 - protein, 160 aa, Triticum aestivum
  peptide (1)..(160): Ceres Seq. ID no. 12627164
  misc_feature (52)..(131): NCBI GI NO: 25372889 NR Description: protein F26G16.9 [imported] - Arabidopsis thaliana
  misc_feature (50)..(131): NCBI GI NO: 18405726 NR Description: expressed protein; protein id: At1g56200
  misc_feature (119)..(119): Xaa is any aa, unknown or other
MSTLAAGSLPGTVVPNGLLTRRFQGSQFQTTQVNRISFEREVSTKATLRSVKCSAQTQSVQRKSSTATVKRSDPKGKVQGPKLDDGSGGFPPFRFGKGGGGGGGGGGGSSYFGGFLLFXIVLLLDYLKEFEKYLLARKHRAGDDDDAGYDTSGGMLGQSP

SEQ ID NO: 17747 - protein, 91 aa, Triticum aestivum
  peptide (1)..(91): Ceres Seq. ID no. 12627165
PQSEAIHPPLRRPRERERSPATRGGRDHESLRRPPKPRRTAPDALYLRPFSKVLKHGGHVNACRWIVAGNCGPQWSSNKEVSRLTISDNSS

SEQ ID NO: 17748 - DNA, 1853 bp, Triticum aestivum
  misc_feature (1)..(1853): Ceres Seq. ID no. 13598695
atgagccagggtggcaatggcatgcctaacttaattcctgtttgattccctcctgctgcttattagttagctgccaaattgcctccaaaatatagctcgctggcaaatatggaacgcatgcatgtaattaacatggttgatttgtctatgcaatgtggatactcctatatggagtagtacgctactgcacacccgtatttggaagcattttacttcctcattgattaggatatatctcgcttgattaactccttgtttatgtgtagctatataggtgcgtcactcccttgctatgcgctcgttaaatatacgtcgtccagggattttcctatcgatcggctcgatcttgcttccactactcgatccattgaaacgatggtgaagacgagggccggtgccgtccggccgtgggcgcttctcgctcttgctctcctcctcatcgccggcagctgcgtggaggcggcggacgagcaggcggcgaacggcggtggcaggaggaggaggacgcatcgacgttccgcggcggcggtcgcggacatgatggtgcccatcaccttcctcaacgcctccgtcgagaagggcgccgtgtgtatggatgggacgccggccgcttacgacctggacccgggctccggggcagggagcaagagctggatcgtcaacctcgagggaggcgggtggtgcaacaacgcgaggacgtgcaggttccggacaaggactcaccatggctcctccaacttcatggagcggcagatcgccttcaccggcatcatgagcgccagccccgccgagaatcctgatttctacaactggaaccgggtgaagatccgctactgcgacagcgcctccttcgccggcgacaccttcgacaagggtaccgggctctacttccgggggcagcggatttgggaggaagccatccagcacctcctctccatcgggatggcgtcggccgaccgggcgcttctcacgggctgctccgccggtgggctggcggcgatactccactgcgaccagttcggcgccttcttcgccggccgaagcaccaccgtcaagtgcctcgccgacgcaggcctcttcctcgacgccgttgatgtttccgggggccgcagcttgagatcttactacggcgacattgtagccatgcagggagtggctccaaaccttccgcccacctgcaccgatcacctcgacgccacctcgtgcttcttccctcagaatataatcgacagcatcaagacccccatcttcttgctcaacgcagcctacgacgtctggcagattgaggaaagcctggccccaagcaaagccgaccccagccgcgcctggcgagcctgcaagttcaaccgctcggcctgcaacgcgtctcagataaacttcctgcaaggtttcagagatcagatggtggcatccgtgagaggcttctccggttccaagagcaacgggctcttcataaactcgtgtttcgcccactgccagtccgaactgccggccacctggaatggcacccctgccattcagaacaagaggatcgcgaaatctgtcggcgattggtactttggccgggccgaagtgaaggcgatcgattgcccatacccttgcgacaacacatgccgcaacatcatataagaagatcttgcaagcaagggccgattcgaacctcatgattaggatttagaactcgaggcaagtatttgttagtttttcataaagacttcacttcaggccggatatatgtctttgtgtatgatgtaattatgaaggtctcctcagaataaacttgttaaatgtaaaaaaaaaaaaaaaaaagcttatcgataccgtcgacctcgagggggggcccggtacccaat

SEQ ID NO: 17749 - protein, 456 aa, Triticum aestivum
  peptide (1)..(456): Ceres Seq. ID no. 15222399
  misc_feature (78)..(442): Pfam Name: Pfam Description:  Pectinacetylesterase
  misc_feature (53)..(456): NCBI GI NO: 34894654 NR Description: P0028G04.28
  misc_feature (94)..(456): NCBI GI NO: 15226462 NR Description: pectinacetylesterase, putative
  misc_feature (51)..(456): NCBI GI NO: 28392968 NR Description: putative pectinacetylesterase
  misc_feature (94)..(456): NCBI GI NO: 18397406 NR Description: pectinacetylesterase, putative
  misc_feature (51)..(455): NCBI GI NO: 34913332 NR Description: putative pectin acetylesterase precursor
  misc_feature (95)..(456): NCBI GI NO: 25347293 NR Description: probable pectinacetylesterase precursor T8L23.6
  misc_feature (95)..(456): NCBI GI NO: 30696158 NR Description: pectinacetylesterase, putative
  misc_feature (95)..(456): NCBI GI NO: 21703105 NR Description: At1g57590/T8L23_6 [Arabidopsis thaliana]
  misc_feature (94)..(456): NCBI GI NO: 7487997 NR Description: pectin acetylesterase homolog F21E10
  misc_feature (51)..(456): NCBI GI NO: 15228677 NR Description: pectinacetylesterase family [Arabidopsis thaliana]
MCSYIGASLPCYALVKYTSSRDFPIDRLDLASTTRSIETMVKTRAGAVRPWALLALALLLIAGSCVEAADEQAANGGGRRRRTHRRSAAAVADMMVPITFLNASVEKGAVCMDGTPAAYDLDPGSGAGSKSWIVNLEGGGWCNNARTCRFRTRTHHGSSNFMERQIAFTGIMSASPAENPDFYNWNRVKIRYCDSASFAGDTFDKGTGLYFRGQRIWEEAIQHLLSIGMASADRALLTGCSAGGLAAILHCDQFGAFFAGRSTTVKCLADAGLFLDAVDVSGGRSLRSYYGDIVAMQGVAPNLPPTCTDHLDATSCFFPQNIIDSIKTPIFLLNAAYDVWQIEESLAPSKADPSRAWRACKFNRSACNASQINFLQGFRDQMVASVRGFSGSKSNGLFINSCFAHCQSELPATWNGTPAIQNKRIAKSVGDWYFGRAEVKAIDCPYPCDNTCRNII

SEQ ID NO: 17750 - protein, 417 aa, Triticum aestivum
  peptide (1)..(417): Ceres Seq. ID no. 15222400
  misc_feature (39)..(403): Pfam Name: Pfam Description:  Pectinacetylesterase
  misc_feature (14)..(417): NCBI GI NO: 34894654 NR Description: P0028G04.28
  misc_feature (55)..(417): NCBI GI NO: 15226462 NR Description: pectinacetylesterase, putative
  misc_feature (12)..(417): NCBI GI NO: 28392968 NR Description: putative pectinacetylesterase
  misc_feature (55)..(417): NCBI GI NO: 18397406 NR Description: pectinacetylesterase, putative
  misc_feature (12)..(416): NCBI GI NO: 34913332 NR Description: putative pectin acetylesterase precursor
  misc_feature (56)..(417): NCBI GI NO: 25347293 NR Description: probable pectinacetylesterase precursor T8L23.6
  misc_feature (56)..(417): NCBI GI NO: 30696158 NR Description: pectinacetylesterase, putative
  misc_feature (56)..(417): NCBI GI NO: 21703105 NR Description: At1g57590/T8L23_6 [Arabidopsis thaliana]
  misc_feature (55)..(417): NCBI GI NO: 7487997 NR Description: pectin acetylesterase homolog F21E10
  misc_feature (12)..(417): NCBI GI NO: 15228677 NR Description: pectinacetylesterase family [Arabidopsis thaliana]
MVKTRAGAVRPWALLALALLLIAGSCVEAADEQAANGGGRRRRTHRRSAAAVADMMVPITFLNASVEKGAVCMDGTPAAYDLDPGSGAGSKSWIVNLEGGGWCNNARTCRFRTRTHHGSSNFMERQIAFTGIMSASPAENPDFYNWNRVKIRYCDSASFAGDTFDKGTGLYFRGQRIWEEAIQHLLSIGMASADRALLTGCSAGGLAAILHCDQFGAFFAGRSTTVKCLADAGLFLDAVDVSGGRSLRSYYGDIVAMQGVAPNLPPTCTDHLDATSCFFPQNIIDSIKTPIFLLNAAYDVWQIEESLAPSKADPSRAWRACKFNRSACNASQINFLQGFRDQMVASVRGFSGSKSNGLFINSCFAHCQSELPATWNGTPAIQNKRIAKSVGDWYFGRAEVKAIDCPYPCDNTCRNII

SEQ ID NO: 17751 - protein, 363 aa, Triticum aestivum
  peptide (1)..(363): Ceres Seq. ID no. 15222401
  misc_feature (1)..(349): Pfam Name: Pfam Description:  Pectinacetylesterase
  misc_feature (1)..(363): NCBI GI NO: 34894654 NR Description: P0028G04.28
  misc_feature (1)..(363): NCBI GI NO: 15226462 NR Description: pectinacetylesterase, putative
  misc_feature (1)..(363): NCBI GI NO: 28392968 NR Description: putative pectinacetylesterase
  misc_feature (1)..(363): NCBI GI NO: 18397406 NR Description: pectinacetylesterase, putative
  misc_feature (1)..(362): NCBI GI NO: 34913332 NR Description: putative pectin acetylesterase precursor
  misc_feature (2)..(363): NCBI GI NO: 25347293 NR Description: probable pectinacetylesterase precursor T8L23.6
  misc_feature (2)..(363): NCBI GI NO: 30696158 NR Description: pectinacetylesterase, putative
  misc_feature (2)..(363): NCBI GI NO: 21703105 NR Description: At1g57590/T8L23_6 [Arabidopsis thaliana]
  misc_feature (1)..(363): NCBI GI NO: 7487997 NR Description: pectin acetylesterase homolog F21E10
  misc_feature (1)..(363): NCBI GI NO: 15228677 NR Description: pectinacetylesterase family [Arabidopsis thaliana]
MMVPITFLNASVEKGAVCMDGTPAAYDLDPGSGAGSKSWIVNLEGGGWCNNARTCRFRTRTHHGSSNFMERQIAFTGIMSASPAENPDFYNWNRVKIRYCDSASFAGDTFDKGTGLYFRGQRIWEEAIQHLLSIGMASADRALLTGCSAGGLAAILHCDQFGAFFAGRSTTVKCLADAGLFLDAVDVSGGRSLRSYYGDIVAMQGVAPNLPPTCTDHLDATSCFFPQNIIDSIKTPIFLLNAAYDVWQIEESLAPSKADPSRAWRACKFNRSACNASQINFLQGFRDQMVASVRGFSGSKSNGLFINSCFAHCQSELPATWNGTPAIQNKRIAKSVGDWYFGRAEVKAIDCPYPCDNTCRNII

SEQ ID NO: 17752 - DNA, 838 bp, Triticum aestivum
  misc_feature (1)..(838): Ceres Seq. ID no. 13660639
atagccgcccgcgccactagtccactagagtagaacagagtgccgagccaacttcgcccaagagccaagaagcttccgagctccctcagttcccccacgagaaacacccttccgctgaagatcaagctgcagcggcgagcgatggctctagcccggaggttcctgttcctcttccctgccgccgtcctgacatggctcgcctcggcctccgcgtcgccctttctgtcggacagagtattccaggccagcaccggatccacgtgaggagcttgctgcagaccaagagggactgccctatagactttgagtaccagaactacacaatcatcacaagcaggtgcaaagggccacaatcgccccctacggaatgttgtgatgctttcaagaaatttgcatgcccatttgccgtgtacatcaacaaccagagcactaactgtgcagacacaatgttaacctacatcaacggccgtggctcatacccagcaggaatgttcgctgccgagtgcctaaaaggcaagcaaggggtttcttgcgaaggcatcccagggatagacaccggcgtgccaagcggcgggcgacgagctcacgggatttcaggtcgtttgatcgctctcttgtgtggactaggaggattgctgttccattgagtgataccttgcacttctccaaagatggaatgtttgtcggttggaagttgtaagtagtaaggctcatttgcttctccttgacgctctcttggtgtagtgactggacaattggcttttccaagcgatatctcttcagaaactccttaatacttgactaacacctcttaaaaatgcatttggttactattccg

SEQ ID NO: 17753 - protein, 151 aa, Triticum aestivum
  peptide (1)..(151): Ceres Seq. ID no. 13660640
  misc_feature (25)..(114): NCBI GI NO: 15241141 NR Description: expressed protein [Arabidopsis thaliana]
  misc_feature (25)..(150): NCBI GI NO: 3868853 NR Description: GPI-anchored protein [Vigna radiata]
  misc_feature (20)..(117): NCBI GI NO: 30681101 NR Description: expressed protein [Arabidopsis thaliana]
  misc_feature (25)..(117): NCBI GI NO: 15235244 NR Description: GPI-anchored protein -related
  misc_feature (20)..(117): NCBI GI NO: 38603910 NR Description: At4g28280 [Arabidopsis thaliana]
  misc_feature (34)..(117): NCBI GI NO: 25337807 NR Description: hypothetical protein At2g20700
  misc_feature (34)..(114): NCBI GI NO: 10241672 NR Description: hypothetical protein
  misc_feature (32)..(114): NCBI GI NO: 10241671 NR Description: hypothetical protein
  misc_feature (32)..(114): NCBI GI NO: 38345028 NR Description: OSJNBa0029H02.12
  misc_feature (34)..(114): NCBI GI NO: 38345027 NR Description: OSJNBa0029H02.11
MARLGLRVALSVGQSIPGQHRIHVRSLLQTKRDCPIDFEYQNYTIITSRCKGPQSPPTECCDAFKKFACPFAVYINNQSTNCADTMLTYINGRGSYPAGMFAAECLKGKQGVSCEGIPGIDTGVPSGGRRAHGISGRLIALLCGLGGLLFH

SEQ ID NO: 17754 - DNA, 1088 bp, Triticum aestivum
  misc_feature (1)..(1088): Ceres Seq. ID no. 15169533
ataacaaaacatggctcccctgactcccagacttgtggtgcccatagatgtgaagaagaagccatgggagcagaaggttcgtctccataaccgctggcatccggatatccctcctgttgctgatgtaactgaaggggaattattccgtgttgagatggtcgattggactggaggacgggttagagatgatgactctgcagatgatatcaaatttctggacctcaaaattattcaagaagggactgctgaatggcaaaaaattgcaaatgaagcagcaagaactattcctggaagagagaatggggggaattgtgacataaagaatctaagcagaggttccaaagtttatctaccagtatttgttgacggagcaaatctgagtactggcgatatgcacttttcccaaggtgatggtgaagtgtcattttgcggagcaatagaaatgagtggattccttgagctaaagtgtgagatcataagaggtgggatgaaggaatacttgactcctgttggtccaacagcacttcatgtgaatcctatctttgagataggtccagtggagccacgtttctcagaatggttagtctttgagggcatcagtgtagatgagtcggggaaacagcatttccttgatgcatcagttgcatacaagcgtgcagttctcaatgccattgagtatctttccagatttgggtactccaaggagcaggtctatcttttactgtcatgctgtccatgtgagggtaggatatctggaatagtagacgcccctaatgcagtggcgacacttgcgatccctacagcaatattcgaccaggatataaagccaaaacgcctggggcatggaccgaaattgagaagacttccggatgttctgagatgaaggtgcagtagacaccttcctgtaacacaggaccaatatcatgtttagaatatctaacaataaatctaaataatcatctttagtattccacaaccatctatgtttgtgcaacacgaatgtggacgtgttgttgtaatatggggtttcttgtttctcgatacttgataatttatatatcagacaatcgacgtatatgaaggcaccc

SEQ ID NO: 17755 - protein, 290 aa, Triticum aestivum
  peptide (1)..(290): Ceres Seq. ID no. 15169534
  misc_feature (8)..(94): Pfam Name: Pfam Description:  Acetamidase/Formamidase family
  misc_feature (74)..(290): NCBI GI NO: 34909818 NR Description: putative formamidase
  misc_feature (1)..(94): NCBI GI NO: 34909818 NR Description: putative formamidase
  misc_feature (74)..(290): NCBI GI NO: 18420069 NR Description: formamidase - like protein [Arabidopsis thaliana]
  misc_feature (1)..(71): NCBI GI NO: 18420069 NR Description: formamidase - like protein [Arabidopsis thaliana]
  misc_feature (74)..(290): NCBI GI NO: 21592429 NR Description: formamidase-like protein [Arabidopsis thaliana]
  misc_feature (1)..(71): NCBI GI NO: 21592429 NR Description: formamidase-like protein [Arabidopsis thaliana]
  misc_feature (74)..(290): NCBI GI NO: 18420071 NR Description: formamidase - like protein [Arabidopsis thaliana]
  misc_feature (1)..(94): NCBI GI NO: 18420071 NR Description: formamidase - like protein [Arabidopsis thaliana]
  misc_feature (74)..(290): NCBI GI NO: 14334654 NR Description: putative formamidase [Arabidopsis thaliana]
  misc_feature (1)..(94): NCBI GI NO: 14334654 NR Description: putative formamidase [Arabidopsis thaliana]
MAPLTPRLVVPIDVKKKPWEQKVRLHNRWHPDIPPVADVTEGELFRVEMVDWTGGRVRDDDSADDIKFLDLKIIQEGTAEWQKIANEAARTIPGRENGGNCDIKNLSRGSKVYLPVFVDGANLSTGDMHFSQGDGEVSFCGAIEMSGFLELKCEIIRGGMKEYLTPVGPTALHVNPIFEIGPVEPRFSEWLVFEGISVDESGKQHFLDASVAYKRAVLNAIEYLSRFGYSKEQVYLLLSCCPCEGRISGIVDAPNAVATLAIPTAIFDQDIKPKRLGHGPKLRRLPDVLR

SEQ ID NO: 17756 - protein, 242 aa, Triticum aestivum
  peptide (1)..(242): Ceres Seq. ID no. 15169535
  misc_feature (26)..(222): Pfam Name: Pfam Description:  Acetamidase/Formamidase family
  misc_feature (26)..(242): NCBI GI NO: 34909818 NR Description: putative formamidase
  misc_feature (1)..(46): NCBI GI NO: 34909818 NR Description: putative formamidase
  misc_feature (26)..(242): NCBI GI NO: 18420069 NR Description: formamidase - like protein [Arabidopsis thaliana]
  misc_feature (1)..(23): NCBI GI NO: 18420069 NR Description: formamidase - like protein [Arabidopsis thaliana]
  misc_feature (26)..(242): NCBI GI NO: 21592429 NR Description: formamidase-like protein [Arabidopsis thaliana]
  misc_feature (1)..(23): NCBI GI NO: 21592429 NR Description: formamidase-like protein [Arabidopsis thaliana]
  misc_feature (26)..(242): NCBI GI NO: 18420071 NR Description: formamidase - like protein [Arabidopsis thaliana]
  misc_feature (1)..(46): NCBI GI NO: 18420071 NR Description: formamidase - like protein [Arabidopsis thaliana]
  misc_feature (26)..(242): NCBI GI NO: 14334654 NR Description: putative formamidase [Arabidopsis thaliana]
  misc_feature (1)..(46): NCBI GI NO: 14334654 NR Description: putative formamidase [Arabidopsis thaliana]
MVDWTGGRVRDDDSADDIKFLDLKIIQEGTAEWQKIANEAARTIPGRENGGNCDIKNLSRGSKVYLPVFVDGANLSTGDMHFSQGDGEVSFCGAIEMSGFLELKCEIIRGGMKEYLTPVGPTALHVNPIFEIGPVEPRFSEWLVFEGISVDESGKQHFLDASVAYKRAVLNAIEYLSRFGYSKEQVYLLLSCCPCEGRISGIVDAPNAVATLAIPTAIFDQDIKPKRLGHGPKLRRLPDVLR

SEQ ID NO: 17757 - protein, 163 aa, Triticum aestivum
  peptide (1)..(163): Ceres Seq. ID no. 15169536
  misc_feature (1)..(143): Pfam Name: Pfam Description:  Acetamidase/Formamidase family
  misc_feature (1)..(163): NCBI GI NO: 34909818 NR Description: putative formamidase
  misc_feature (1)..(163): NCBI GI NO: 18420069 NR Description: formamidase - like protein [Arabidopsis thaliana]
  misc_feature (1)..(163): NCBI GI NO: 21592429 NR Description: formamidase-like protein [Arabidopsis thaliana]
  misc_feature (1)..(163): NCBI GI NO: 18420071 NR Description: formamidase - like protein [Arabidopsis thaliana]
  misc_feature (1)..(163): NCBI GI NO: 14334654 NR Description: putative formamidase [Arabidopsis thaliana]
  misc_feature (1)..(163): NCBI GI NO: 7488106 NR Description: probable formamidase (EC 3
  misc_feature (1)..(106): NCBI GI NO: 7488107 NR Description: probable formamidase (EC 3
  misc_feature (1)..(161): NCBI GI NO: 3913682 NR Description: Formamidase (Formamide amidohydrolase)
  misc_feature (1)..(155): NCBI GI NO: 33592607 NR Description: formamidase [Bordetella pertussis]
  misc_feature (1)..(146): NCBI GI NO: 32421387 NR Description: hypothetical protein [Neurospora crassa]
MHFSQGDGEVSFCGAIEMSGFLELKCEIIRGGMKEYLTPVGPTALHVNPIFEIGPVEPRFSEWLVFEGISVDESGKQHFLDASVAYKRAVLNAIEYLSRFGYSKEQVYLLLSCCPCEGRISGIVDAPNAVATLAIPTAIFDQDIKPKRLGHGPKLRRLPDVLR

SEQ ID NO: 17758 - DNA, 843 bp, Triticum aestivum
  misc_feature (1)..(843): Ceres Seq. ID no. 13545965
atcgaccatctccggctcgctcgtcgcccacccccaccctctcatcctccctccctcccccgaccgattttgacgactcctttgacctctcgcgctgtccctcccccgccccgccccgcctgcgtcgccgcgccaagctccaggcgcccccgccccctggtcggtggattccatggccaacagcaacctcccccgccggatcatcaaggagacgcagcggctgctcagcgaaccagcgccggggatcagcgcctcgccgtcggaggagaacatgcgctacttcaatgtcatggtccttggccccgcgcagtcgccctacgaaggtggagtcttcaagcttgaacttttcttacccgaggaatatccgatggctgctcctaaagttaggtttctcacaaaaatataccatcccaacattgacaagcttggtagaatatgcctcgacatcctaaaggacaagtggagtccagctcttcagatacgcactgttcttcttagcattcaggcactgctgagcgccccaaacccagatgatcccctctcagaaaacgtcgcaaaacactggaaatccaatgaagctgaagctgttgagacagcgaaggaatggactcgtatgtatgccagtggcgcatgacaagctaacgctgttatggatgtaataacaccgtgtcatagttgggcctaatcgaaaaccatttgcttgataaaaacacacttgaaatgatttgcgatggacgaatgtatccagagtggcatcatttctagttggtggttgtatttgtggtgcgtgttctggcacgcttcataacttgctgcttatagaacatgctctgtttctcgttc

SEQ ID NO: 17759 - protein, 153 aa, Triticum aestivum
  peptide (1)..(153): Ceres Seq. ID no. 13545966
  misc_feature (1)..(153): NCBI GI NO: 18394416 NR Description: ubiquitin-conjugating enzyme, putative
  misc_feature (1)..(153): NCBI GI NO: 34911052 NR Description: ubiquitin-conjugating enzyme E2
  misc_feature (1)..(153): NCBI GI NO: 18412149 NR Description: ubiquitin-conjugating enzyme, putative
  misc_feature (1)..(153): NCBI GI NO: 5381319 NR Description: ubiquitin-conjugating enzyme E2
  misc_feature (1)..(141): NCBI GI NO: 25293666 NR Description: hypothetical protein F9K20.8
  misc_feature (1)..(150): NCBI GI NO: 28174992 NR Description: similar to ubiquitin-conjugating enzyme E2N
  misc_feature (4)..(150): NCBI GI NO: 16758810 NR Description: ubiquitin-conjugating enzyme E2N
  misc_feature (4)..(150): NCBI GI NO: 4507793 NR Description: ubiquitin-conjugating enzyme E2N
  misc_feature (4)..(150): NCBI GI NO: 30583959 NR Description: Homo sapiens ubiquitin-conjugating enzyme E2N
  misc_feature (4)..(150): NCBI GI NO: 27882519 NR Description: Similar to ubiquitin-conjugating enzyme E2N
MANSNLPRRIIKETQRLLSEPAPGISASPSEENMRYFNVMVLGPAQSPYEGGVFKLELFLPEEYPMAAPKVRFLTKIYHPNIDKLGRICLDILKDKWSPALQIRTVLLSIQALLSAPNPDDPLSENVAKHWKSNEAEAVETAKEWTRMYASGA

SEQ ID NO: 17760 - protein, 149 aa, Triticum aestivum
  peptide (1)..(149): Ceres Seq. ID no. 13545967
RPSPARSSPTPTLSSSLPPPTDFDDSFDLSRCPSPAPPRLRRRAKLQAPPPPGRWIPWPTATSPAGSSRRRSGCSANQRRGSAPRRRRRTCATSMSWSLAPRSRPTKVESSSLNFSYPRNIRWLLLKLGFSQKYTIPTLTSLVEYASTS

SEQ ID NO: 17761 - protein, 120 aa, Triticum aestivum
  peptide (1)..(120): Ceres Seq. ID no. 13545968
  misc_feature (1)..(120): NCBI GI NO: 18394416 NR Description: ubiquitin-conjugating enzyme, putative
  misc_feature (1)..(120): NCBI GI NO: 34911052 NR Description: ubiquitin-conjugating enzyme E2
  misc_feature (1)..(120): NCBI GI NO: 18412149 NR Description: ubiquitin-conjugating enzyme, putative
  misc_feature (1)..(120): NCBI GI NO: 5381319 NR Description: ubiquitin-conjugating enzyme E2
  misc_feature (1)..(108): NCBI GI NO: 25293666 NR Description: hypothetical protein F9K20.8
  misc_feature (1)..(117): NCBI GI NO: 28174992 NR Description: similar to ubiquitin-conjugating enzyme E2N
  misc_feature (1)..(117): NCBI GI NO: 16758810 NR Description: ubiquitin-conjugating enzyme E2N
  misc_feature (1)..(117): NCBI GI NO: 4507793 NR Description: ubiquitin-conjugating enzyme E2N
  misc_feature (1)..(117): NCBI GI NO: 30583959 NR Description: Homo sapiens ubiquitin-conjugating enzyme E2N
  misc_feature (1)..(117): NCBI GI NO: 27882519 NR Description: Similar to ubiquitin-conjugating enzyme E2N
MRYFNVMVLGPAQSPYEGGVFKLELFLPEEYPMAAPKVRFLTKIYHPNIDKLGRICLDILKDKWSPALQIRTVLLSIQALLSAPNPDDPLSENVAKHWKSNEAEAVETAKEWTRMYASGA

SEQ ID NO: 17762 - DNA, 1478 bp, Triticum aestivum
  misc_feature (1)..(1478): Ceres Seq. ID no. 15178724
ccatcgaggcggccacgagaactgggtgacgaacaaagcccctgcagctcgtctctcgtcttctccgccgccatggcctccgacctcgggcaaccgtcgccggcgaaacgcccgccgacggcgcccaccacgattaccgctatcggcgaagacctcctttgcgagatcttcctcctccttccctccctcccgagcctcgtccgcgccgccctcgcctgccgcaccttcctccacgccgtccgttcgtcccccgccttccgccgccgattccgggcactccacccgccgcagatccttggcttcttttgcgacccgggccgcgaagccgtccctcccttcgtccccctccgcagccgctccgacccggacatcgccgccgccgtccgcggcgccgatttcctcctcacccggatcccagaagacagcggcgattccaccctcgggtgggagctgcagagcttccacggcggctacgtcgtcctcgtcaacaacgccaccgaccagatcgctgcctacaaccccctcacgcaggcactgcatctcatcccccacccacccgaagatatcatcttctccatctcccctgagttccacatcctcttgtcggaagaggaccagagggtgttccgtatggtctgtgtccaacaccaggacacgccgagcctcgccgtcttctcaaccgcgaccagggagtggcaggttttgccgtgggtggagaccccgccacaacctgaaggcgacatccgcttgttctaccatggcacgcagctgaatggatttgtttactggaaacacgcgagccaagcctatgtgctcgctctcaacaccgcgacaatgcaattctctagagtgaacttgccgcatttcttggcagagatagatcatatgctgtttaggcttggtcagaccaaggatgggaagctctgtatggttgcagcagatgactctgacccaaagataggaacgcttgttgttcgtgtctggggagccgatgatgacggtgttgagaagtggatgctggaagatactttttcactgagtaaatttgttgatgtcaccaagtcttcaacagagtatgataccacggtgcagattgaggcattcgtcgatggctttctgtacctctgtattaagtatggtgagcataccgagtctctggtatccctctgcctggaaacaggaaagctaaacaagatatttgatgatacatatacaagccctgctcatccctacatcatgtcatggcctccttctttggtttgcaacaaggaggattcacaaaccaagattactggaggcagtgttgaggacgctggttctgtgggcacaaaagaaactccctctgttttagtcacagcgccacaatcgcacaaaattgattgatgacgatgaagccaaagtcatggagatagagttttttttactttgtattggggatgataaaaactcagcaagcaaaatcactgcatatgcataac

SEQ ID NO: 17763 - protein, 460 aa, Triticum aestivum
  peptide (1)..(460): Ceres Seq. ID no. 15178725
  misc_feature (50)..(92): Pfam Name: Pfam Description:  F-box domain
  misc_feature (199)..(422): NCBI GI NO: 34901902 NR Description: OSJNBa0036M16.17
  misc_feature (43)..(182): NCBI GI NO: 34901902 NR Description: OSJNBa0036M16.17
  misc_feature (50)..(351): NCBI GI NO: 34914580 NR Description: P0455H0310.25
  misc_feature (34)..(378): NCBI GI NO: 34914942 NR Description: B1096D03.38
  misc_feature (33)..(193): NCBI GI NO: 34393354 NR Description: hypothetical protein
  misc_feature (23)..(138): NCBI GI NO: 34914940 NR Description: B1096D03.37
  misc_feature (39)..(238): NCBI GI NO: 34393351 NR Description: hypothetical protein
  misc_feature (39)..(189): NCBI GI NO: 34393352 NR Description: hypothetical protein
  misc_feature (36)..(187): NCBI GI NO: 37530924 NR Description: unknown protein
  misc_feature (45)..(193): NCBI GI NO: 32480316 NR Description: OSJNBa0042D13.1
PSRRPRELGDEQSPCSSSLVFSAAMASDLGQPSPAKRPPTAPTTITAIGEDLLCEIFLLLPSLPSLVRAALACRTFLHAVRSSPAFRRRFRALHPPQILGFFCDPGREAVPPFVPLRSRSDPDIAAAVRGADFLLTRIPEDSGDSTLGWELQSFHGGYVVLVNNATDQIAAYNPLTQALHLIPHPPEDIIFSISPEFHILLSEEDQRVFRMVCVQHQDTPSLAVFSTATREWQVLPWVETPPQPEGDIRLFYHGTQLNGFVYWKHASQAYVLALNTATMQFSRVNLPHFLAEIDHMLFRLGQTKDGKLCMVAADDSDPKIGTLVVRVWGADDDGVEKWMLEDTFSLSKFVDVTKSSTEYDTTVQIEAFVDGFLYLCIKYGEHTESLVSLCLETGKLNKIFDDTYTSPAHPYIMSWPPSLVCNKEDSQTKITGGSVEDAGSVGTKETPSVLVTAPQSHKID

SEQ ID NO: 17764 - protein, 436 aa, Triticum aestivum
  peptide (1)..(436): Ceres Seq. ID no. 15178726
  misc_feature (26)..(68): Pfam Name: Pfam Description:  F-box domain
  misc_feature (175)..(398): NCBI GI NO: 34901902 NR Description: OSJNBa0036M16.17
  misc_feature (19)..(158): NCBI GI NO: 34901902 NR Description: OSJNBa0036M16.17
  misc_feature (26)..(327): NCBI GI NO: 34914580 NR Description: P0455H0310.25
  misc_feature (10)..(354): NCBI GI NO: 34914942 NR Description: B1096D03.38
  misc_feature (9)..(169): NCBI GI NO: 34393354 NR Description: hypothetical protein
  misc_feature (1)..(114): NCBI GI NO: 34914940 NR Description: B1096D03.37
  misc_feature (15)..(214): NCBI GI NO: 34393351 NR Description: hypothetical protein
  misc_feature (15)..(165): NCBI GI NO: 34393352 NR Description: hypothetical protein
  misc_feature (12)..(163): NCBI GI NO: 37530924 NR Description: unknown protein
  misc_feature (21)..(169): NCBI GI NO: 32480316 NR Description: OSJNBa0042D13.1
MASDLGQPSPAKRPPTAPTTITAIGEDLLCEIFLLLPSLPSLVRAALACRTFLHAVRSSPAFRRRFRALHPPQILGFFCDPGREAVPPFVPLRSRSDPDIAAAVRGADFLLTRIPEDSGDSTLGWELQSFHGGYVVLVNNATDQIAAYNPLTQALHLIPHPPEDIIFSISPEFHILLSEEDQRVFRMVCVQHQDTPSLAVFSTATREWQVLPWVETPPQPEGDIRLFYHGTQLNGFVYWKHASQAYVLALNTATMQFSRVNLPHFLAEIDHMLFRLGQTKDGKLCMVAADDSDPKIGTLVVRVWGADDDGVEKWMLEDTFSLSKFVDVTKSSTEYDTTVQIEAFVDGFLYLCIKYGEHTESLVSLCLETGKLNKIFDDTYTSPAHPYIMSWPPSLVCNKEDSQTKITGGSVEDAGSVGTKETPSVLVTAPQSHKID

SEQ ID NO: 17765 - protein, 256 aa, Triticum aestivum
  peptide (1)..(256): Ceres Seq. ID no. 15178727
  misc_feature (48)..(199): Pfam Name: Pfam Description:  Equine herpesvirus glycoprotein gp2
  misc_feature (28)..(233): NCBI GI NO: 32699068 NR Description: hypothetical protein FLJ35107 [Homo sapiens]
  misc_feature (10)..(256): NCBI GI NO: 13592175 NR Description: ppg3 [Leishmania major]
  misc_feature (10)..(256): NCBI GI NO: 13592175 NR Description: ppg3 [Leishmania major]
  misc_feature (11)..(231): NCBI GI NO: 11359723 NR Description: proteophosphoglycan, membrane-associated
  misc_feature (10)..(231): NCBI GI NO: 5420387 NR Description: proteophosphoglycan [Leishmania major]
  misc_feature (10)..(231): NCBI GI NO: 13592175 NR Description: ppg3 [Leishmania major]
  misc_feature (11)..(231): NCBI GI NO: 5420387 NR Description: proteophosphoglycan [Leishmania major]
  misc_feature (10)..(200): NCBI GI NO: 11359723 NR Description: proteophosphoglycan, membrane-associated
  misc_feature (10)..(237): NCBI GI NO: 13592175 NR Description: ppg3 [Leishmania major]
  misc_feature (10)..(256): NCBI GI NO: 13592175 NR Description: ppg3 [Leishmania major]
HRGGHENWVTNKAPAARLSSSPPPWPPTSGNRRRRNARRRRPPRLPLSAKTSFARSSSSFPPSRASSAPPSPAAPSSTPSVRPPPSAADSGHSTRRRSLASFATRAAKPSLPSSPSAAAPTRTSPPPSAAPISSSPGSQKTAAIPPSGGSCRASTAATSSSSTTPPTRSLPTTPSRRHCISSPTHPKISSSPSPLSSTSSCRKRTRGCSVWSVSNTRTRRASPSSQPRPGSGRFCRGWRPRHNLKATSACSTMARS

SEQ ID NO: 17766 - DNA, 2010 bp, Triticum aestivum
  misc_feature (1)..(2010): Ceres Seq. ID no. 14301836
aacttttttcccctcgtcgtccccacttttttttctcccactccgcccccgattctccccaatcccctctcgccgccgccaggaggcagcaccggaatcgcggcgaccgaagatcccctccgacccacgccaaggaatcccgccgatccgctcgcgcctcccggatggccctgcaccagcaccacgcggggtcggcgtccgggtcggcgtcggcgtccagctccagttcggggctgcacctgcccgcctcgcccttcggggacaccacccacaccaagctcttcgtcgggggcctcgcctgggagaccaccagcgagaggctccgccgcttctacgagcgcttcggggacatcctcgaggccgtcgtcatcaccgaccgccactccggccgctccaaaggatacggcttcgtgacgttccgcgatgccgaggcggccaccaaggcctgcgaggaaccgtcgccggtcatcgatggcaggcgggccaactgtaacctggcgtcgctaggtcgcgcccagccttccacacccctcgggcggccacgatcagctggctcctactttggtgttcctgtcccaaggggcatttatgtaggtggttatggtcagcaccgaccccttccgcttgggtactaccagtaccagggatttccggttccacaatacagttactccgcatatggcaccgactacatctatccacagggtacattaaacccatatgttggtcagcaatatgttccagtttacggtgtctcagctgcagcaaatactgctaaccaaccatttagccaattgagcccatccatttctggtgggggcaacggctatccgatgatgcatggttacagtatgccaggaaatcaatttgtgcatctcactgggtcaaacttaattaattcatccccaacaaatcgtcccaccattcaggctccctttttagtagcagcaccggttccctcccatccacacttagttgtaccagcccactcacctcagtttacacaagctagtggttcagactaaagagcaagctgaactatgcacccaacaatttataccttgaggtaactttagtttgcagcaggactaaaagaacagtgctgctgtatttgcagcacttgttcttacctggaaaaaaatcatccttgtattcataaggttgtccttatcatggttgacatatgtacctggagatcatgaactgtcccgatggatggggcggtatcgcaagagcgacggctgctcttatcagtttggcttggttaaaatcctgtcctggtgggggactgtgatcgtcgatgtctagatacagcattattgattctgtatctgacaagtcatggatatatggtggatgctggaatggagtccagcaccctgtaagtttgactaatccaaggggattagtcatgatggcactcttaagaatcagggatgagtcacgatttgatggcactgagatgagtatccatctgaagagtcgccaagttagtgtgctttagtgtcgcaaagtttgagtcttgcacaagcaaaagtcagtgtcatgatctatcactctggtttggcactaggcctattgatagccacattatggatttacaatgctccgcttgaccgtaagcaggatgttcagtttgcccaaagggtggccggagatggtcctgcgtctgtaccaatttccccttagagcttctctgcgttattacacaattattgatcagatcaaggtgcattttgatccgtgttacagttggtgtcggttcaagaaccactgttgttttgtaatatgtcccagaagttctaatttagattcatgatgccctgagcttggtagctccaagatcggagtcttgttgtacttgaataataataaatccatctgctctgagtccagtgattgggtgcctgtcataatggattttcatgaacttggtggcatgaaaagatgtactgttggtacaattgagctgtgtgttaactcaagaaaaatagtttgtgaacaatgttc

SEQ ID NO: 17767 - protein, 340 aa, Triticum aestivum
  peptide (1)..(340): Ceres Seq. ID no. 14301837
  misc_feature (93)..(150): Pfam Name: a.k.a. RRM, RBD, or RNP domain Pfam Description: RNA recognition motif.
  misc_feature (76)..(340): NCBI GI NO: 22330665 NR Description: RNA recognition motif (RRM)-containing protein
  misc_feature (72)..(340): NCBI GI NO: 18394923 NR Description: RNA recognition motif (RRM)-containing protein
  misc_feature (72)..(340): NCBI GI NO: 23505939 NR Description: At1g20880/F9H16_14 [Arabidopsis thaliana]
  misc_feature (72)..(340): NCBI GI NO: 15010636 NR Description: At1g20880/F9H16_14 [Arabidopsis thaliana]
  misc_feature (224)..(340): NCBI GI NO: 25406448 NR Description: probable RNA-binding protein, 24808-23340
  misc_feature (76)..(176): NCBI GI NO: 25406448 NR Description: probable RNA-binding protein, 24808-23340
  misc_feature (72)..(331): NCBI GI NO: 25518498 NR Description: hypothetical protein F9H16
  misc_feature (85)..(293): NCBI GI NO: 34907334 NR Description: P0698A10.29
  misc_feature (87)..(295): NCBI GI NO: 14532532 NR Description: At1g33470/F10C21_14 [Arabidopsis thaliana]
  misc_feature (83)..(340): NCBI GI NO: 25518109 NR Description: T16E15.6 protein - Arabidopsis thaliana
LFSPRRPHFFFSHSAPDSPQSPLAAARRQHRNRGDRRSPPTHAKESRRSARASRMALHQHHAGSASGSASASSSSSGLHLPASPFGDTTHTKLFVGGLAWETTSERLRRFYERFGDILEAVVITDRHSGRSKGYGFVTFRDAEAATKACEEPSPVIDGRRANCNLASLGRAQPSTPLGRPRSAGSYFGVPVPRGIYVGGYGQHRPLPLGYYQYQGFPVPQYSYSAYGTDYIYPQGTLNPYVGQQYVPVYGVSAAANTANQPFSQLSPSISGGGNGYPMMHGYSMPGNQFVHLTGSNLINSSPTNRPTIQAPFLVAAPVPSHPHLVVPAHSPQFTQASGSD

SEQ ID NO: 17768 - protein, 286 aa, Triticum aestivum
  peptide (1)..(286): Ceres Seq. ID no. 14301838
  misc_feature (39)..(96): Pfam Name: a.k.a. RRM, RBD, or RNP domain Pfam Description: RNA recognition motif.
  misc_feature (22)..(286): NCBI GI NO: 22330665 NR Description: RNA recognition motif (RRM)-containing protein
  misc_feature (18)..(286): NCBI GI NO: 18394923 NR Description: RNA recognition motif (RRM)-containing protein
  misc_feature (18)..(286): NCBI GI NO: 23505939 NR Description: At1g20880/F9H16_14 [Arabidopsis thaliana]
  misc_feature (18)..(286): NCBI GI NO: 15010636 NR Description: At1g20880/F9H16_14 [Arabidopsis thaliana]
  misc_feature (170)..(286): NCBI GI NO: 25406448 NR Description: probable RNA-binding protein, 24808-23340
  misc_feature (22)..(122): NCBI GI NO: 25406448 NR Description: probable RNA-binding protein, 24808-23340
  misc_feature (18)..(277): NCBI GI NO: 25518498 NR Description: hypothetical protein F9H16
  misc_feature (31)..(239): NCBI GI NO: 34907334 NR Description: P0698A10.29
  misc_feature (33)..(241): NCBI GI NO: 14532532 NR Description: At1g33470/F10C21_14 [Arabidopsis thaliana]
  misc_feature (29)..(286): NCBI GI NO: 25518109 NR Description: T16E15.6 protein - Arabidopsis thaliana
MALHQHHAGSASGSASASSSSSGLHLPASPFGDTTHTKLFVGGLAWETTSERLRRFYERFGDILEAVVITDRHSGRSKGYGFVTFRDAEAATKACEEPSPVIDGRRANCNLASLGRAQPSTPLGRPRSAGSYFGVPVPRGIYVGGYGQHRPLPLGYYQYQGFPVPQYSYSAYGTDYIYPQGTLNPYVGQQYVPVYGVSAAANTANQPFSQLSPSISGGGNGYPMMHGYSMPGNQFVHLTGSNLINSSPTNRPTIQAPFLVAAPVPSHPHLVVPAHSPQFTQASGSD

SEQ ID NO: 17769 - DNA, 2424 bp, Triticum aestivum
  misc_feature (1)..(2424): Ceres Seq. ID no. 13660025
attacctagaacatcctaatcgaaaagtgaagcccgtttgaagctccctccagagcatgtccactgagactttttagagaaagaagaagagtcaactcaacgctgaacggcagcgagcatactctctgctcatcacaagcttagcttccacttctggctgcttgtctactgtcgccaattcctcatgccatgctccacctgcacgcgagtctctcccacggcgatctccgccacctcttcctcctcccggacagtgctccgcatactccccttccgctccccgcgcgggccgtatggacgcgggctctgccttcctggctccataaggtgcactgcggaggtcgttgacgcggcaatgcacgcgcccaagccgccggagcccaagccgcgcgtcctggtcgccggcggggggatcggcggcctcaccttcgcgctcgcggccaggcggaagggcttccaggtgctcgtgctggaaaaggacatgagcgmcgtccgcggggagggcaagtaccggggccccatccagctgcagagcaacgcgctcgccgtcctcgaggccgtcgacatgcccgccgcggaccagatcatggacgccggatgcatcaccggcgaccgcgtcaacgggatcgtcgacggcatctccggctcctggtacatcaagtttgataccttcactcctgctgctgacagagggctcccggtcacaagggtcattagccgcatgacgctgcagcagattcttgcccgtgcagtcggcgacgacgctataatgaacgattgccacgttgtcgactttactgataatggcaacaaggtcaccgcgatattggaggatgggcggaaatttgaaggtgatctcttggttggagcagatggcatatggtcaaaggtgaggaagtcgctttttggcgaaacggatgcatcttattcagaatacacttgctacaccggaattgcagactttgtgcctcctgatattgacacagtcgggtaccgagtgtttcttggtcacaaacaatatttcgtctcctcagacgttggtggtggtaaaatgcagtggtatgcatttcacaaggaacctgctggtggtacttatcctgagaatggcaaaaagaaaagactgctcgagatatttagcggttggtgtgataatgtcattgatctgctaaatgcaactgaggaggaagcaattcttcgccgggatatatacgatcggccacctactatcaactgggggaaaggtcgtgtcaccttgcttggtgactctgtccatgctatgcagccaaatctgggacagggtggctgcatggctattgaggatggttaccagctggctgtagagcttgagaaggcctgggaagagagtgtcaagtctagaactcctgtggacgttatttcctccttgaggagttatgagaaggagagaaagctacgtgttgctatcatacatggattggcaagaatggcggcaatcatggctaccacttacagaccatatctaggtgtgggtctgggacctttgtcgtttttgacaaagttgaggataccgcatcctggaagagttggtggcagatttttcatcaaggttggaatgcctttgatgctgagctggattttaggtggcaacagctcaaagctagaaggaagaccgttaagttgccggctttctgacaaggcaagcaaccagcttggtcgatggtttcaggatgacgatgcattggaacaagctatgggtggagagtggtacctcttccctatgagctctggagatgactctgccttgcagcccattcgtttgatcagggatgaacagaggacactctctattggaagcaaaccagatccgagcaattctgattcttcgttgtcgttccccttgccacaagtatcagagatccatgctactatcacatgcaagaataagggtttctatttgaccgatctcggaagcgagcatggtacatggtttaacgacaacgaaggcagacgctaccggttacctccgaacttcccagttcgtttccacccttctgatgccattgagtttggttcagataagaaggccatgttccgggtgaaagtgctcagcacgcttccatacgactccgcgagaggtggagaagttctgcaggcagcatgagtggggacttcagcgacaccttgtcaccagccactgtacagcattcttcagtaaacagccgacactgcatcatcgccaaggaaagaaaaagaattgtaatttttgcactcatccagatatcccagaacaggattttgaatagcttctgacagaattactacgttgcagttctacgaaaaagaactgagggtgtacaataggggtaggcaattttagctgttgccactgtaatactgtacccagtacagtacattgttgtgcctattaacacgtgttcatactgc

SEQ ID NO: 17770 - protein, 651 aa, Triticum aestivum
  peptide (1)..(651): Ceres Seq. ID no. 15220001
  misc_feature (222)..(426): Pfam Name: Pfam Description:  Monooxygenase
  misc_feature (1)..(651): NCBI GI NO: 38344835 NR Description: OSJNBa0064H22.16
  misc_feature (67)..(616): NCBI GI NO: 13442816 NR Description: zeaxanthin epoxidase
  misc_feature (38)..(651): NCBI GI NO: 5902708 NR Description: Zeaxanthin epoxidase, chloroplast precursor
  misc_feature (62)..(643): NCBI GI NO: 5902707 NR Description: Zeaxanthin epoxidase, chloroplast precursor
  misc_feature (67)..(646): NCBI GI NO: 10444088 NR Description: zeaxanthin epoxidase [Arabidopsis thaliana]
  misc_feature (67)..(646): NCBI GI NO: 30698272 NR Description: zeaxanthin epoxidase precursor (LOS6/ABA1)(ZEP)
  misc_feature (51)..(650): NCBI GI NO: 17402597 NR Description: zeaxanthin epoxidase [Citrus unshiu]
  misc_feature (69)..(638): NCBI GI NO: 9857294 NR Description: CpABA1 [Vigna unguiculata]
  misc_feature (67)..(646): NCBI GI NO: 9857296 NR Description: AtABA1 [Arabidopsis thaliana]
  misc_feature (62)..(650): NCBI GI NO: 5902706 NR Description: Zeaxanthin epoxidase, chloroplast precursor
  misc_feature (102)..(102): Xaa is any aa, unknown or other
MPCSTCTRVSPTAISATSSSSRTVLRILPFRSPRGPYGRGLCLPGSIRCTAEVVDAAMHAPKPPEPKPRVLVAGGGIGGLTFALAARRKGFQVLVLEKDMSXVRGEGKYRGPIQLQSNALAVLEAVDMPAADQIMDAGCITGDRVNGIVDGISGSWYIKFDTFTPAADRGLPVTRVISRMTLQQILARAVGDDAIMNDCHVVDFTDNGNKVTAILEDGRKFEGDLLVGADGIWSKVRKSLFGETDASYSEYTCYTGIADFVPPDIDTVGYRVFLGHKQYFVSSDVGGGKMQWYAFHKEPAGGTYPENGKKKRLLEIFSGWCDNVIDLLNATEEEAILRRDIYDRPPTINWGKGRVTLLGDSVHAMQPNLGQGGCMAIEDGYQLAVELEKAWEESVKSRTPVDVISSLRSYEKERKLRVAIIHGLARMAAIMATTYRPYLGVGLGPLSFLTKLRIPHPGRVGGRFFIKVGMPLMLSWILGGNSSKLEGRPLSCRLSDKASNQLGRWFQDDDALEQAMGGEWYLFPMSSGDDSALQPIRLIRDEQRTLSIGSKPDPSNSDSSLSFPLPQVSEIHATITCKNKGFYLTDLGSEHGTWFNDNEGRRYRLPPNFPVRFHPSDAIEFGSDKKAMFRVKVLSTLPYDSARGGEVLQAA

SEQ ID NO: 17771 - protein, 594 aa, Triticum aestivum
  peptide (1)..(594): Ceres Seq. ID no. 15220002
  misc_feature (165)..(369): Pfam Name: Pfam Description:  Monooxygenase
  misc_feature (1)..(594): NCBI GI NO: 38344835 NR Description: OSJNBa0064H22.16
  misc_feature (10)..(559): NCBI GI NO: 13442816 NR Description: zeaxanthin epoxidase
  misc_feature (1)..(594): NCBI GI NO: 5902708 NR Description: Zeaxanthin epoxidase, chloroplast precursor
  misc_feature (5)..(586): NCBI GI NO: 5902707 NR Description: Zeaxanthin epoxidase, chloroplast precursor
  misc_feature (10)..(589): NCBI GI NO: 10444088 NR Description: zeaxanthin epoxidase [Arabidopsis thaliana]
  misc_feature (10)..(589): NCBI GI NO: 30698272 NR Description: zeaxanthin epoxidase precursor (LOS6/ABA1)(ZEP)
  misc_feature (1)..(593): NCBI GI NO: 17402597 NR Description: zeaxanthin epoxidase [Citrus unshiu]
  misc_feature (12)..(581): NCBI GI NO: 9857294 NR Description: CpABA1 [Vigna unguiculata]
  misc_feature (10)..(589): NCBI GI NO: 9857296 NR Description: AtABA1 [Arabidopsis thaliana]
  misc_feature (5)..(593): NCBI GI NO: 5902706 NR Description: Zeaxanthin epoxidase, chloroplast precursor
  misc_feature (45)..(45): Xaa is any aa, unknown or other
MHAPKPPEPKPRVLVAGGGIGGLTFALAARRKGFQVLVLEKDMSXVRGEGKYRGPIQLQSNALAVLEAVDMPAADQIMDAGCITGDRVNGIVDGISGSWYIKFDTFTPAADRGLPVTRVISRMTLQQILARAVGDDAIMNDCHVVDFTDNGNKVTAILEDGRKFEGDLLVGADGIWSKVRKSLFGETDASYSEYTCYTGIADFVPPDIDTVGYRVFLGHKQYFVSSDVGGGKMQWYAFHKEPAGGTYPENGKKKRLLEIFSGWCDNVIDLLNATEEEAILRRDIYDRPPTINWGKGRVTLLGDSVHAMQPNLGQGGCMAIEDGYQLAVELEKAWEESVKSRTPVDVISSLRSYEKERKLRVAIIHGLARMAAIMATTYRPYLGVGLGPLSFLTKLRIPHPGRVGGRFFIKVGMPLMLSWILGGNSSKLEGRPLSCRLSDKASNQLGRWFQDDDALEQAMGGEWYLFPMSSGDDSALQPIRLIRDEQRTLSIGSKPDPSNSDSSLSFPLPQVSEIHATITCKNKGFYLTDLGSEHGTWFNDNEGRRYRLPPNFPVRFHPSDAIEFGSDKKAMFRVKVLSTLPYDSARGGEVLQAA

SEQ ID NO: 17772 - protein, 552 aa, Triticum aestivum
  peptide (1)..(552): Ceres Seq. ID no. 15220003
  misc_feature (123)..(327): Pfam Name: Pfam Description:  Monooxygenase
  misc_feature (1)..(552): NCBI GI NO: 38344835 NR Description: OSJNBa0064H22.16
  misc_feature (1)..(517): NCBI GI NO: 13442816 NR Description: zeaxanthin epoxidase
  misc_feature (1)..(552): NCBI GI NO: 5902708 NR Description: Zeaxanthin epoxidase, chloroplast precursor
  misc_feature (1)..(544): NCBI GI NO: 5902707 NR Description: Zeaxanthin epoxidase, chloroplast precursor
  misc_feature (1)..(547): NCBI GI NO: 10444088 NR Description: zeaxanthin epoxidase [Arabidopsis thaliana]
  misc_feature (1)..(547): NCBI GI NO: 30698272 NR Description: zeaxanthin epoxidase precursor (LOS6/ABA1)(ZEP)
  misc_feature (1)..(551): NCBI GI NO: 17402597 NR Description: zeaxanthin epoxidase [Citrus unshiu]
  misc_feature (1)..(539): NCBI GI NO: 9857294 NR Description: CpABA1 [Vigna unguiculata]
  misc_feature (1)..(547): NCBI GI NO: 9857296 NR Description: AtABA1 [Arabidopsis thaliana]
  misc_feature (1)..(551): NCBI GI NO: 5902706 NR Description: Zeaxanthin epoxidase, chloroplast precursor
  misc_feature (3)..(3): Xaa is any aa, unknown or other
MSXVRGEGKYRGPIQLQSNALAVLEAVDMPAADQIMDAGCITGDRVNGIVDGISGSWYIKFDTFTPAADRGLPVTRVISRMTLQQILARAVGDDAIMNDCHVVDFTDNGNKVTAILEDGRKFEGDLLVGADGIWSKVRKSLFGETDASYSEYTCYTGIADFVPPDIDTVGYRVFLGHKQYFVSSDVGGGKMQWYAFHKEPAGGTYPENGKKKRLLEIFSGWCDNVIDLLNATEEEAILRRDIYDRPPTINWGKGRVTLLGDSVHAMQPNLGQGGCMAIEDGYQLAVELEKAWEESVKSRTPVDVISSLRSYEKERKLRVAIIHGLARMAAIMATTYRPYLGVGLGPLSFLTKLRIPHPGRVGGRFFIKVGMPLMLSWILGGNSSKLEGRPLSCRLSDKASNQLGRWFQDDDALEQAMGGEWYLFPMSSGDDSALQPIRLIRDEQRTLSIGSKPDPSNSDSSLSFPLPQVSEIHATITCKNKGFYLTDLGSEHGTWFNDNEGRRYRLPPNFPVRFHPSDAIEFGSDKKAMFRVKVLSTLPYDSARGGEVLQAA

SEQ ID NO: 17773 - DNA, 1552 bp, Triticum aestivum
  misc_feature (1)..(1552): Ceres Seq. ID no. 14313292
agaacccacacacctcctctgtattttctccctctttaaacccacaaatctctgtctgtccttacactcagagagaccatcaaaatggttgcggaggcgaagcagaacggcgtggccaccatggcgggcagcaaggtgcagctgatgtcggtgaagcgcggcgagccgacgctggtgtcgccggcggaggccacgccgacgggggagcagtactacctgtccaacctggaccagaacatcgcggtgatcgtgcagaccgtgtactgcttcaagtgcccatcgggccgcggcaacgaaggtgccgcggacgcgctccgggccgcgctggctcgcgtgctcgtccactaccacccgctcgccggccgcctcggcatcagcccggagatgaagctcatcgtggagtgcaccggcgagggcgtcccgttcgtggaggctgaggccgcttgcgacctcgccctcatcggggacctctccaccccggaccccgccgcgctgggccagctcgtgtactccgtccccggcgccaagagcatcctcgagatgccgcccatgacggcgcaggtgaccaggtttgaatgtggcggcttcagcatcgggttggccatgaaccactgcatgttcgacggtctgggcgccatggagttcgtcaactcctgggccgagatggcgcgcggcgccacggagctcaccgtgccaccgttcctcgaccgctccgtgctccgcgcgcgcgaccctccggtgatctccaacccgcaccacgagttcgaggagatcgctgacgtctcggaaatggcggcgctctacggcggccaggagctggtgtaccgctccttctgcttcgacccggacaggcttgagcgcgtccgcggcctcgccctcgccgacggggatctcgagcgctgcaccaccttcgaggcgctctccggcctcgtctggcgcgctcgcacccgcgcgctggggctcgcgccggagcagcagacgaagctgctgttcgccgtggacgggcgccgccgcttcgtgcctccgctcccaaaggggtacttcgggaacggcatcgtgctgaccaacgccctagcgacggcgggggatctgctgtcggcgccggtgtcgcgcgcggccgggaaggtgcaggaggccgtgcggatggtgacggacgagtatatgcggtcggcggtggactattttgaggcgacgcgctcgcggccatcgctggcgtcgacgctgctcatcaccacgtggtcgcggctcgcgttcaacggcgccgacttcggctggggcgagccgaccatgtccgggccagtcacgctgccggagaaggaggtcatactcttcctcgcgcacggcaaggagaggaagagcatcaacgtgctgctcggcctgccggcgtccgccatggacactttccaagagctcatggacgagatatgatcggcccagaccgattggatacgtcagcgactgcgctcggtgtttctatgcttgttttgcatgtgtttgttacttgttagcatggttatgttaattgtattattaagtgtgcgtcatttaattg

SEQ ID NO: 17774 - protein, 447 aa, Triticum aestivum
  peptide (1)..(447): Ceres Seq. ID no. 14313293
  misc_feature (21)..(442): Pfam Name: Pfam Description:  Transferase family
  misc_feature (2)..(442): NCBI GI NO: 30693723 NR Description: transferase family [Arabidopsis thaliana]
  misc_feature (8)..(442): NCBI GI NO: 30693725 NR Description: transferase family [Arabidopsis thaliana]
  misc_feature (23)..(445): NCBI GI NO: 15242820 NR Description: transferase family [Arabidopsis thaliana]
  misc_feature (23)..(445): NCBI GI NO: 21553692 NR Description: acyltransferase-like protein
  misc_feature (9)..(447): NCBI GI NO: 20161743 NR Description: N-hydroxycinnamoyl/benzoyltransferase-like protein
  misc_feature (23)..(444): NCBI GI NO: 34222064 NR Description: At3g48720 [Arabidopsis thaliana]
  misc_feature (23)..(444): NCBI GI NO: 15229017 NR Description: transferase family [Arabidopsis thaliana]
  misc_feature (20)..(445): NCBI GI NO: 22854880 NR Description: benzoyl coenzyme A: benzyl alcohol benzoyltransferase
  misc_feature (20)..(445): NCBI GI NO: 7489142 NR Description: hsr201 protein
  misc_feature (13)..(447): NCBI GI NO: 37535814 NR Description: putative hypersensitivity-related (hsr)protein
MVAEAKQNGVATMAGSKVQLMSVKRGEPTLVSPAEATPTGEQYYLSNLDQNIAVIVQTVYCFKCPSGRGNEGAADALRAALARVLVHYHPLAGRLGISPEMKLIVECTGEGVPFVEAEAACDLALIGDLSTPDPAALGQLVYSVPGAKSILEMPPMTAQVTRFECGGFSIGLAMNHCMFDGLGAMEFVNSWAEMARGATELTVPPFLDRSVLRARDPPVISNPHHEFEEIADVSEMAALYGGQELVYRSFCFDPDRLERVRGLALADGDLERCTTFEALSGLVWRARTRALGLAPEQQTKLLFAVDGRRRFVPPLPKGYFGNGIVLTNALATAGDLLSAPVSRAAGKVQEAVRMVTDEYMRSAVDYFEATRSRPSLASTLLITTWSRLAFNGADFGWGEPTMSGPVTLPEKEVILFLAHGKERKSINVLLGLPASAMDTFQELMDEI

SEQ ID NO: 17775 - protein, 435 aa, Triticum aestivum
  peptide (1)..(435): Ceres Seq. ID no. 14313294
  misc_feature (9)..(430): Pfam Name: Pfam Description:  Transferase family
  misc_feature (1)..(430): NCBI GI NO: 30693723 NR Description: transferase family [Arabidopsis thaliana]
  misc_feature (1)..(430): NCBI GI NO: 30693725 NR Description: transferase family [Arabidopsis thaliana]
  misc_feature (11)..(433): NCBI GI NO: 15242820 NR Description: transferase family [Arabidopsis thaliana]
  misc_feature (11)..(433): NCBI GI NO: 21553692 NR Description: acyltransferase-like protein
  misc_feature (1)..(435): NCBI GI NO: 20161743 NR Description: N-hydroxycinnamoyl/benzoyltransferase-like protein
  misc_feature (11)..(432): NCBI GI NO: 34222064 NR Description: At3g48720 [Arabidopsis thaliana]
  misc_feature (11)..(432): NCBI GI NO: 15229017 NR Description: transferase family [Arabidopsis thaliana]
  misc_feature (8)..(433): NCBI GI NO: 22854880 NR Description: benzoyl coenzyme A: benzyl alcohol benzoyltransferase
  misc_feature (8)..(433): NCBI GI NO: 7489142 NR Description: hsr201 protein
  misc_feature (1)..(435): NCBI GI NO: 37535814 NR Description: putative hypersensitivity-related (hsr)protein
MAGSKVQLMSVKRGEPTLVSPAEATPTGEQYYLSNLDQNIAVIVQTVYCFKCPSGRGNEGAADALRAALARVLVHYHPLAGRLGISPEMKLIVECTGEGVPFVEAEAACDLALIGDLSTPDPAALGQLVYSVPGAKSILEMPPMTAQVTRFECGGFSIGLAMNHCMFDGLGAMEFVNSWAEMARGATELTVPPFLDRSVLRARDPPVISNPHHEFEEIADVSEMAALYGGQELVYRSFCFDPDRLERVRGLALADGDLERCTTFEALSGLVWRARTRALGLAPEQQTKLLFAVDGRRRFVPPLPKGYFGNGIVLTNALATAGDLLSAPVSRAAGKVQEAVRMVTDEYMRSAVDYFEATRSRPSLASTLLITTWSRLAFNGADFGWGEPTMSGPVTLPEKEVILFLAHGKERKSINVLLGLPASAMDTFQELMDEI

SEQ ID NO: 17776 - protein, 427 aa, Triticum aestivum
  peptide (1)..(427): Ceres Seq. ID no. 14313295
  misc_feature (1)..(422): Pfam Name: Pfam Description:  Transferase family
  misc_feature (1)..(422): NCBI GI NO: 30693723 NR Description: transferase family [Arabidopsis thaliana]
  misc_feature (1)..(422): NCBI GI NO: 30693725 NR Description: transferase family [Arabidopsis thaliana]
  misc_feature (3)..(425): NCBI GI NO: 15242820 NR Description: transferase family [Arabidopsis thaliana]
  misc_feature (3)..(425): NCBI GI NO: 21553692 NR Description: acyltransferase-like protein
  misc_feature (1)..(427): NCBI GI NO: 20161743 NR Description: N-hydroxycinnamoyl/benzoyltransferase-like protein
  misc_feature (3)..(424): NCBI GI NO: 34222064 NR Description: At3g48720 [Arabidopsis thaliana]
  misc_feature (3)..(424): NCBI GI NO: 15229017 NR Description: transferase family [Arabidopsis thaliana]
  misc_feature (1)..(425): NCBI GI NO: 22854880 NR Description: benzoyl coenzyme A: benzyl alcohol benzoyltransferase
  misc_feature (1)..(425): NCBI GI NO: 7489142 NR Description: hsr201 protein
  misc_feature (1)..(427): NCBI GI NO: 37535814 NR Description: putative hypersensitivity-related (hsr)protein
MSVKRGEPTLVSPAEATPTGEQYYLSNLDQNIAVIVQTVYCFKCPSGRGNEGAADALRAALARVLVHYHPLAGRLGISPEMKLIVECTGEGVPFVEAEAACDLALIGDLSTPDPAALGQLVYSVPGAKSILEMPPMTAQVTRFECGGFSIGLAMNHCMFDGLGAMEFVNSWAEMARGATELTVPPFLDRSVLRARDPPVISNPHHEFEEIADVSEMAALYGGQELVYRSFCFDPDRLERVRGLALADGDLERCTTFEALSGLVWRARTRALGLAPEQQTKLLFAVDGRRRFVPPLPKGYFGNGIVLTNALATAGDLLSAPVSRAAGKVQEAVRMVTDEYMRSAVDYFEATRSRPSLASTLLITTWSRLAFNGADFGWGEPTMSGPVTLPEKEVILFLAHGKERKSINVLLGLPASAMDTFQELMDEI

SEQ ID NO: 17777 - DNA, 857 bp, Triticum aestivum
  misc_feature (1)..(857): Ceres Seq. ID no. 14313232
aaaaacgatcagaaaaccacaaccaggagcaacaggaatgggttcctttgctaatggccagaatggttcggagcttggcatccagatgccggccatggggagcagcgcggtgccggagcctcccacaacatctgtagcagcaagatgtccacggctggacatggccatggtggccaccagagctgcagccctcgtgatggcgctgctctcaatgtcgctcatggtctccgccaagcaacggggtagtctcatcatctttggcatcgagattccactgtatgccaaatggtccctctctgattcgctgaaatccttggttgggctatctgcggcagcagctgcctactctctggcacaacttctgtcgattgcgtacaaggccttgaagaaagtccctgtggttccatccaggcgctatgcctggatgctgttagctggtgatcaggtctttgcgtatgcgatgttgagcggggggtcagcagcggcggccgtcgcaaatttgaaccgcaccggcatccggcacacggcgcttcccaacttctgcaagcccttgccacgtttctgcgacctatcagcagcctccatcgcgtgcgcctttctcagctgcgccttccttgccgcatccgctgtaatcgatgttatctggctgtcaaatctgtgagaatgtgagatagatggtggcaaactagtacaccccttggcagggagttcaactttcagggtgctgtgcctttagatgatgtgccgaacctgaacctgtaaagtgtcctgaagtcctgtgagttggctgcttgtacaaattggagcccccttggtgcaatggatggcatcacctggatgttgattgttgatttgct

SEQ ID NO: 17778 - protein, 219 aa, Triticum aestivum
  peptide (1)..(219): Ceres Seq. ID no. 14313233
  misc_feature (50)..(149): Pfam Name: DUF588 Pfam Description: Domain of unknown function
  misc_feature (13)..(149): NCBI GI NO: 34910750 NR Description: P0022F10.21
  misc_feature (51)..(217): NCBI GI NO: 15228175 NR Description: Arabidopsis hypothetical integral membrane proteincommon family
  misc_feature (53)..(217): NCBI GI NO: 7715593 NR Description: F20B17.20 [Arabidopsis thaliana]
  misc_feature (53)..(127): NCBI GI NO: 15219983 NR Description: hypothetical integral membrane protein commonfamily
  misc_feature (153)..(217): NCBI GI NO: 15219983 NR Description: hypothetical integral membrane protein commonfamily
KTIRKPQPGATGMGSFANGQNGSELGIQMPAMGSSAVPEPPTTSVAARCPRLDMAMVATRAAALVMALLSMSLMVSAKQRGSLIIFGIEIPLYAKWSLSDSLKSLVGLSAAAAAYSLAQLLSIAYKALKKVPVVPSRRYAWMLLAGDQVFAYAMLSGGSAAAAVANLNRTGIRHTALPNFCKPLPRFCDLSAASIACAFLSCAFLAASAVIDVIWLSNL

SEQ ID NO: 17779 - protein, 207 aa, Triticum aestivum
  peptide (1)..(207): Ceres Seq. ID no. 14313234
  misc_feature (38)..(137): Pfam Name: DUF588 Pfam Description: Domain of unknown function
  misc_feature (1)..(137): NCBI GI NO: 34910750 NR Description: P0022F10.21
  misc_feature (39)..(205): NCBI GI NO: 15228175 NR Description: Arabidopsis hypothetical integral membrane proteincommon family
  misc_feature (41)..(205): NCBI GI NO: 7715593 NR Description: F20B17.20 [Arabidopsis thaliana]
  misc_feature (41)..(115): NCBI GI NO: 15219983 NR Description: hypothetical integral membrane protein commonfamily
  misc_feature (141)..(205): NCBI GI NO: 15219983 NR Description: hypothetical integral membrane protein commonfamily
MGSFANGQNGSELGIQMPAMGSSAVPEPPTTSVAARCPRLDMAMVATRAAALVMALLSMSLMVSAKQRGSLIIFGIEIPLYAKWSLSDSLKSLVGLSAAAAAYSLAQLLSIAYKALKKVPVVPSRRYAWMLLAGDQVFAYAMLSGGSAAAAVANLNRTGIRHTALPNFCKPLPRFCDLSAASIACAFLSCAFLAASAVIDVIWLSNL

SEQ ID NO: 17780 - protein, 191 aa, Triticum aestivum
  peptide (1)..(191): Ceres Seq. ID no. 14313235
  misc_feature (22)..(121): Pfam Name: DUF588 Pfam Description: Domain of unknown function
  misc_feature (1)..(121): NCBI GI NO: 34910750 NR Description: P0022F10.21
  misc_feature (23)..(189): NCBI GI NO: 15228175 NR Description: Arabidopsis hypothetical integral membrane proteincommon family
  misc_feature (25)..(189): NCBI GI NO: 7715593 NR Description: F20B17.20 [Arabidopsis thaliana]
  misc_feature (25)..(99): NCBI GI NO: 15219983 NR Description: hypothetical integral membrane protein commonfamily
  misc_feature (125)..(189): NCBI GI NO: 15219983 NR Description: hypothetical integral membrane protein commonfamily
MPAMGSSAVPEPPTTSVAARCPRLDMAMVATRAAALVMALLSMSLMVSAKQRGSLIIFGIEIPLYAKWSLSDSLKSLVGLSAAAAAYSLAQLLSIAYKALKKVPVVPSRRYAWMLLAGDQVFAYAMLSGGSAAAAVANLNRTGIRHTALPNFCKPLPRFCDLSAASIACAFLSCAFLAASAVIDVIWLSNL

SEQ ID NO: 17781 - DNA, 1451 bp, Triticum aestivum
  misc_feature (1)..(1451): Ceres Seq. ID no. 13660544
catcctaatcgaaaaaaccgatcatagaaatatctcctttcttctttccttttgctttgcacacatactagtgggcagtggcaccggcagcaagtagtctattcatctcagatctgaagttcactccctctcccggtgttctcttcccagcgtggatcctaaatcgcggacgccggacgaggagcgttcctctccaagttgtaatcgatcgcatcggcagcttcttacatcatcagcaattaatggccaccggaggtatgaccctggagagcctaccgaacgagctaccattagacttcttgagcaaaatcacaaataacttctccggtgagctactacttggtcagggcgcgttcgggtcagtttataaggggatcctggacgatggagtggttgctgtgaagaagctcgcagaaaattcgcctgtaccacgtgacacaatattcgcgaatgaggttcagaatattatggtgctcgagcatgaaaatatcgtcaagttggttgcctactgccgggaagcacaaaacaaattggtgcagagcaacggacgatatattattgcagagatcactgacactgtactctgctatgaatacttgcctaaggggagccttcacaagaatctttttggtgaatccagtagcattgattgggatatgcgctttaaaataataaagggaatatgtgaaggtatacattttctacataccttgcctagtcccgttctccatttgggtctgaagccttagaatatactactgggtgacaacatgacaccgaaaattgcggattttggtttctccagaatattcggccaagatcaaacccgaaagaacacacgaagtgtcgtgggatcgattgggtacatggccccggagtatctgtacaatggcgaaatctcggctcggtcagacatatatagtttaggcctaatcataatggagatatccacgagagagatgaatagttctagcactgaccagaagcatgcaaggaaatatattgatggagtaaaagaaaattggacactggagaaaataatgtgtgagtacattgagttagaagaacatggtttcaatcaagtagaagcatgtatcaatattggtctacagtgtgtagagattgatcagaagaagagaccttccatagagaacattgtcaatatgctcaataagcttccagtgagcgaggaggtctccctgtccacgtgagcacaaaacatcccacttttcagtgagagatgccgaacatcaagtaaaacaagatcagtgctacaaaagtggatgatgaaaccaatgtttgcattcaataaagcaagccatgatggcctttttgtaaaaaagtattaatgagaagtgtattgtgaacatgacccattgatatcacacaattgcaaatatatttagttttactcaaaaaaaaaaaaaaaaaagcttatcgataccgtcgac

SEQ ID NO: 17782 - protein, 168 aa, Triticum aestivum
  peptide (1)..(168): Ceres Seq. ID no. 13660545
  misc_feature (117)..(168): NCBI GI NO: 37532178 NR Description: putative receptor-like protein kinase
  misc_feature (15)..(102): NCBI GI NO: 37532178 NR Description: putative receptor-like protein kinase
  misc_feature (11)..(168): NCBI GI NO: 38344521 NR Description: OSJNBa0016N04.14
  misc_feature (14)..(168): NCBI GI NO: 21728344 NR Description: stem rust resistance protein Rpg1
  misc_feature (14)..(168): NCBI GI NO: 21929723 NR Description: barley stem rust resistance protein
  misc_feature (14)..(168): NCBI GI NO: 21929729 NR Description: barley stem rust resistance protein
  misc_feature (144)..(168): NCBI GI NO: 38344522 NR Description: OSJNBa0016N04.15
  misc_feature (11)..(132): NCBI GI NO: 38344522 NR Description: OSJNBa0016N04.15
  misc_feature (51)..(168): NCBI GI NO: 21724199 NR Description: stem rust resistance protein
  misc_feature (14)..(168): NCBI GI NO: 21929723 NR Description: barley stem rust resistance protein
MATGGMTLESLPNELPLDFLSKITNNFSGELLLGQGAFGSVYKGILDDGVVAVKKLAENSPVPRDTIFANEVQNIMVLEHENIVKLVAYCREAQNKLVQSNGRYIIAEITDTVLCYEYLPKGSLHKNLFGESSSIDWDMRFKIIKGICEGIHFLHTLPSPVLHLGLKP

SEQ ID NO: 17783 - protein, 163 aa, Triticum aestivum
  peptide (1)..(163): Ceres Seq. ID no. 13660546
  misc_feature (112)..(163): NCBI GI NO: 37532178 NR Description: putative receptor-like protein kinase
  misc_feature (10)..(97): NCBI GI NO: 37532178 NR Description: putative receptor-like protein kinase
  misc_feature (6)..(163): NCBI GI NO: 38344521 NR Description: OSJNBa0016N04.14
  misc_feature (9)..(163): NCBI GI NO: 21728344 NR Description: stem rust resistance protein Rpg1
  misc_feature (9)..(163): NCBI GI NO: 21929723 NR Description: barley stem rust resistance protein
  misc_feature (9)..(163): NCBI GI NO: 21929729 NR Description: barley stem rust resistance protein
  misc_feature (139)..(163): NCBI GI NO: 38344522 NR Description: OSJNBa0016N04.15
  misc_feature (6)..(127): NCBI GI NO: 38344522 NR Description: OSJNBa0016N04.15
  misc_feature (46)..(163): NCBI GI NO: 21724199 NR Description: stem rust resistance protein
  misc_feature (9)..(163): NCBI GI NO: 21929723 NR Description: barley stem rust resistance protein
MTLESLPNELPLDFLSKITNNFSGELLLGQGAFGSVYKGILDDGVVAVKKLAENSPVPRDTIFANEVQNIMVLEHENIVKLVAYCREAQNKLVQSNGRYIIAEITDTVLCYEYLPKGSLHKNLFGESSSIDWDMRFKIIKGICEGIHFLHTLPSPVLHLGLKP

SEQ ID NO: 17784 - protein, 146 aa, Triticum aestivum
  peptide (1)..(146): Ceres Seq. ID no. 13660547
  misc_feature (1)..(133): NCBI GI NO: 37532178 NR Description: putative receptor-like protein kinase
  misc_feature (1)..(136): NCBI GI NO: 38344521 NR Description: OSJNBa0016N04.14
  misc_feature (1)..(138): NCBI GI NO: 21728344 NR Description: stem rust resistance protein Rpg1
  misc_feature (1)..(138): NCBI GI NO: 21929729 NR Description: barley stem rust resistance protein
  misc_feature (1)..(138): NCBI GI NO: 21929723 NR Description: barley stem rust resistance protein
  misc_feature (1)..(145): NCBI GI NO: 38344522 NR Description: OSJNBa0016N04.15
  misc_feature (1)..(146): NCBI GI NO: 21724199 NR Description: stem rust resistance protein
  misc_feature (1)..(144): NCBI GI NO: 21929723 NR Description: barley stem rust resistance protein
  misc_feature (1)..(144): NCBI GI NO: 21929729 NR Description: barley stem rust resistance protein
  misc_feature (1)..(144): NCBI GI NO: 21728344 NR Description: stem rust resistance protein Rpg1
MTPKIADFGFSRIFGQDQTRKNTRSVVGSIGYMAPEYLYNGEISARSDIYSLGLIIMEISTREMNSSSTDQKHARKYIDGVKENWTLEKIMCEYIELEEHGFNQVEACINIGLQCVEIDQKKRPSIENIVNMLNKLPVSEEVSLST

SEQ ID NO: 17785 - DNA, 463 bp, Triticum aestivum
  misc_feature (1)..(463): Ceres Seq. ID no. 13660548
atgtcgtcttcctcgccaccacaccacaccactgcagtgccgtcgcgtcatctcccacctctcccatcgggccagcggaagcagcagctgcgtgcggaaccaaccatgctccccttcctcctctccctccttctcctcaccggcgccgcggcgggggtacagggccacgacgacgcggcggcgcggcggacgatggaggagttcgccggcttccccgcctccgacgacggcgagggcggccgcgcctcccccttgcgcgtagactccgaaagtcthdagcgccagattgatgaactggcctcgttctccgactcgccggcgcrgtcggtgacgcgtgttctgtacagcgacaaggatgtgcaagctcgaaggtatattaaagggataatgaaacagcttggcctctctgttcgagaagatgccgttggcaacatatttggccgctgggtgggtyctgaggcag

SEQ ID NO: 17786 - protein, 154 aa, Triticum aestivum
  peptide (1)..(154): Ceres Seq. ID no. 13660549
  misc_feature (96)..(153): Pfam Name: Pfam Description:  Peptidase family M20/M25/M40
  misc_feature (37)..(153): NCBI GI NO: 22327548 NR Description: N-carbamyl-L-amino acid hydrolase, putative
  misc_feature (65)..(153): NCBI GI NO: 10178199 NR Description: N-carbamyl-L-amino acid amidohydrolase-like
  misc_feature (85)..(151): NCBI GI NO: 16802580 NR Description: similar to N-carbamyl-L-amino acid amidohydrolase
  misc_feature (85)..(151): NCBI GI NO: 16799616 NR Description: similar to N-carbamyl-L-amino acid amidohydrolase
  misc_feature (92)..(92): Xaa is any aa, unknown or other
  misc_feature (93)..(93): Xaa is any aa, unknown or other
  misc_feature (108)..(108): Xaa is any aa, unknown or other
  misc_feature (152)..(152): Xaa is any aa, unknown or other
MSSSSPPHHTTAVPSRHLPPLPSGQRKQQLRAEPTMLPFLLSLLLLTGAAAGVQGHDDAAARRTMEEFAGFPASDDGEGGRASPLRVDSESXXRQIDELASFSDSPAXSVTRVLYSDKDVQARRYIKGIMKQLGLSVREDAVGNIFGRWVGXEA

SEQ ID NO: 17787 - protein, 119 aa, Triticum aestivum
  peptide (1)..(119): Ceres Seq. ID no. 13660550
  misc_feature (61)..(118): Pfam Name: Pfam Description:  Peptidase family M20/M25/M40
  misc_feature (2)..(118): NCBI GI NO: 22327548 NR Description: N-carbamyl-L-amino acid hydrolase, putative
  misc_feature (30)..(118): NCBI GI NO: 10178199 NR Description: N-carbamyl-L-amino acid amidohydrolase-like
  misc_feature (50)..(116): NCBI GI NO: 16802580 NR Description: similar to N-carbamyl-L-amino acid amidohydrolase
  misc_feature (50)..(116): NCBI GI NO: 16799616 NR Description: similar to N-carbamyl-L-amino acid amidohydrolase
  misc_feature (57)..(57): Xaa is any aa, unknown or other
  misc_feature (58)..(58): Xaa is any aa, unknown or other
  misc_feature (73)..(73): Xaa is any aa, unknown or other
  misc_feature (117)..(117): Xaa is any aa, unknown or other
MLPFLLSLLLLTGAAAGVQGHDDAAARRTMEEFAGFPASDDGEGGRASPLRVDSESXXRQIDELASFSDSPAXSVTRVLYSDKDVQARRYIKGIMKQLGLSVREDAVGNIFGRWVGXEA

SEQ ID NO: 17788 - protein, 95 aa, Triticum aestivum
  peptide (1)..(95): Ceres Seq. ID no. 13660551
  misc_feature (92)..(92): Xaa is any aa, unknown or other
VVFLATTPHHCSAVASSPTSPIGPAEAAAACGTNHAPLPPLPPSPHRRRGGGTGPRRRGGAADDGGVRRLPRLRRRRGRPRLPLARRLRKSXAPD

SEQ ID NO: 17789 - DNA, 1432 bp, Triticum aestivum
  misc_feature (1)..(1432): Ceres Seq. ID no. 14302378
acccaatccatccctccgagcctttccactccactccgtgcgcccccaaccacgccgcacacttctcgcggcctccaaaacccaaatccctgaccgccggcggcggcgatgctcctctgccaccgcatcctccctcgcctcctctccctcccctccagcgccacctcgaaactcctcatccgcccctcccgcctccctcctcgccgccccttcctgcctcgctgcgccgtgctctctcagcttgcggccccccaaactgtagaccacgccgacgccgaagaatccgctgaccacctcgacgccgaagagccgcaggagccccaggagccgcaggaggtgctggtaaagctccccctcgaccggctcttcctgccaccgggggcgagcgtgaccccgggggacgaggaggtcgtgaccgcgcgtgtcctcaagggttccaacatcgtgctgggcacgtacgcgcggggcgatgcgcaggtggttaacgcggatttcataaagagcagcgtgcgacccgatgactgccccagggatgggctgcccgagttcgcgctcgtcggccgctccaacgtcggcaagtcgtcactgctcaactcgctcgtccgccgcaagcgcctcgcgctcacctccaagaaacctggcaagacccagtgtatcaatcattttaaaataaatgacagttggtaccttgttgacttgcctggttatggatatgcttcagcaccacaggtagctcgtaaagattgggatgagtttactagaaattacttccttagcagggataatctggtgtcagtttttctccttatagatgcaagtattcctgctaagaagattgatcttgactatgctagttggcttgggcaaaacaaggtcccaatgaccctcgtgttcacaaagtgcgacaagcgcaagaagaagaaaaatggcggcaagagaccggaagaaaacgtagaatgcttccagagtctgattcgcgaatattttgaggcggcgcctccgtggataatgacgagcagcgtaacgaaccaaggcagagacgagatacttctgcacatgtctcagctcagaaactattggcgcaagcattaagaggaggaattacaagagtaggactgaagcaatagcaaaccgcatgcaggcggcagccgcacctttgcaatcaggatttcaccaaccaatccgccttgccttttgagctgttgattgtccacgattgcatgatgattactcaatcaacaggaaggccgagaatacagacaagccgctgaaatcaactaccctgtttttttcttctatatttgtacaaccgtacagtctcaacgttttgtctttgttactttctgattataagattgtgcgtcctgtatgtagattaaagaaactcccgtgtcagctaatcatcatcgggaatcccacacgtttgtttgtc

SEQ ID NO: 17790 - protein, 327 aa, Triticum aestivum
  peptide (1)..(327): Ceres Seq. ID no. 14302379
  misc_feature (146)..(284): Pfam Name: Pfam Description:  GTPase of unknown function
  misc_feature (21)..(327): NCBI GI NO: 34910170 NR Description: putative GTP-binding protein
  misc_feature (79)..(327): NCBI GI NO: 15239069 NR Description: GTP-binding protein -related
  misc_feature (80)..(327): NCBI GI NO: 21592799 NR Description: putative GTP-binding protein
  misc_feature (86)..(324): NCBI GI NO: 18400109 NR Description: nucleotide-binding protein -related
  misc_feature (106)..(324): NCBI GI NO: 25306612 NR Description: probable nucleotide-binding protein
  misc_feature (202)..(324): NCBI GI NO: 20330773 NR Description: Putative nucleotide binding protein
  misc_feature (106)..(201): NCBI GI NO: 20330773 NR Description: Putative nucleotide binding protein
  misc_feature (124)..(314): NCBI GI NO: 31194343 NR Description: ENSANGP00000000181 [Anopheles gambiae]
  misc_feature (123)..(320): NCBI GI NO: 29346493 NR Description: putative GTP-binding protein
  misc_feature (123)..(322): NCBI GI NO: 34762743 NR Description: GTP-binding protein
MLLCHRILPRLLSLPSSATSKLLIRPSRLPPRRPFLPRCAVLSQLAAPQTVDHADAEESADHLDAEEPQEPQEPQEVLVKLPLDRLFLPPGASVTPGDEEVVTARVLKGSNIVLGTYARGDAQVVNADFIKSSVRPDDCPRDGLPEFALVGRSNVGKSSLLNSLVRRKRLALTSKKPGKTQCINHFKINDSWYLVDLPGYGYASAPQVARKDWDEFTRNYFLSRDNLVSVFLLIDASIPAKKIDLDYASWLGQNKVPMTLVFTKCDKRKKKKNGGKRPEENVECFQSLIREYFEAAPPWIMTSSVTNQGRDEILLHMSQLRNYWRKH

SEQ ID NO: 17791 - DNA, 1653 bp, Triticum aestivum
  misc_feature (1)..(1653): Ceres Seq. ID no. 13660693
aggagcatcatttttcttagagtcgctcaagctgagtaagccaacccaagctcaatggcggcgaatcagcagcaatcgacccgctcggaaccctagcctggcccgccgagtcgccatggcatgccctccttgcccgccgtcgccgctcgccagggtgcggctcgacgacgtggcgccccacgacggcgcggccgccccgggctacgcgcgcgccgtcggcgccctcgccgcctcgctcgcccgccgcggcgccgccgtgctcgagctccccgccgcggacgcggccgtcgtccgctgcgccctcgagtccgcccgcgccttcttccgcggccgccacgccgcctacctctaccgcgccgggaggactttggaagatggagagttgtcccctgcttgcatggctgatgctttcagatgtttgggcaaagcagcccgggccgccctctgtgcaatagcacggcacctgcgcctacgtaccgacgtattcaatcaattagttgatgatactccactgccggttaacgaggtctcctcatcagagttgctggtagcatattctcatgaacagctccaaagtggtctgacactcatgggatgtcccagcaggtcctcaatgcctcaagttgataggggatttgtgacgctagttgcttccgataatccaggaattgaggtttgtgacccaaatggccattggtacctagctgatggggtttcaggcccaaataatctattgcttctgactggaagggccctaagtcacgttactgctggtctttgcccaatttcccagtacagggtcactaatgaaaatagggcatcactcacctttaggttggtgcctcatgccaacgctatattggattgctctccaattttagctgctgggcattgcatacgacaggtgtaccaacccatacctgcaggccaatttatggatgattcttatgctgaagagcacgctgtttccagtcacttggaagaaccttctgaatctcagggcaactttgttagtgatccatcgctgagaagtgtcctgtcagaccctctgtctggggcttttcttgaagatgctatggttctccaatgtgggcactcatttggtggcgtcatgctgaagaaagtcattgaaatggctagatgcaccatttgcaatggagaagttgacccatcctccttgtttcctaatctcgctttaagagcagtagctacggtggtgaagatggaggatgacaggagactgtttcataacgccgctcttcggaagcgcaggaaagatgtgaccgagcatacggatgtggtgaagcggagtgggagtcgcaaaggaaacagtgagcttgctctggatgctgaaagcccggtggcattcaagggtgtgcagtacccatttgtagtgggcgagagggtcctgatcatggggaacaaaaggacgcccgagaaatttgtcgggaaggaggcggtcatcacttcacagtgtctgaatggctggtatcttgtgaaggcgctcgacagcggagagagcacacggcttcagtaccggtcgctgaagaaagtgccggggctgcaactgcagacgcaagcgaggctgcagcccctggcatttctcggaggcagacaataagagacggcgatgacggatcatgtgtggaccat

SEQ ID NO: 17792 - protein, 539 aa, Triticum aestivum
  peptide (1)..(539): Ceres Seq. ID no. 13660694
  misc_feature (109)..(518): NCBI GI NO: 30685540 NR Description: expressed protein [Arabidopsis thaliana]
  misc_feature (47)..(518): NCBI GI NO: 11994201 NR Description: gb|AAF35943
  misc_feature (109)..(435): NCBI GI NO: 20453175 NR Description: At3g19895 [Arabidopsis thaliana]
  misc_feature (47)..(278): NCBI GI NO: 20453175 NR Description: At3g19895 [Arabidopsis thaliana]
  misc_feature (342)..(517): NCBI GI NO: 28876015 NR Description: hypothetical protein
  misc_feature (341)..(518): NCBI GI NO: 30688352 NR Description: expressed protein [Arabidopsis thaliana]
  misc_feature (341)..(518): NCBI GI NO: 27413505 NR Description: hypothetical protein [Arabidopsis thaliana]
  misc_feature (114)..(319): NCBI GI NO: 15230647 NR Description: expressed protein [Arabidopsis thaliana]
  misc_feature (49)..(111): NCBI GI NO: 15230647 NR Description: expressed protein [Arabidopsis thaliana]
  misc_feature (115)..(352): NCBI GI NO: 33146537 NR Description: unknown protein
GASFFLESLKLSKPTQAQWRRISSNRPARNPSLARRVAMACPPCPPSPLARVRLDDVAPHDGAAAPGYARAVGALAASLARRGAAVLELPAADAAVVRCALESARAFFRGRHAAYLYRAGRTLEDGELSPACMADAFRCLGKAARAALCAIARHLRLRTDVFNQLVDDTPLPVNEVSSSELLVAYSHEQLQSGLTLMGCPSRSSMPQVDRGFVTLVASDNPGIEVCDPNGHWYLADGVSGPNNLLLLTGRALSHVTAGLCPISQYRVTNENRASLTFRLVPHANAILDCSPILAAGHCIRQVYQPIPAGQFMDDSYAEEHAVSSHLEEPSESQGNFVSDPSLRSVLSDPLSGAFLEDAMVLQCGHSFGGVMLKKVIEMARCTICNGEVDPSSLFPNLALRAVATVVKMEDDRRLFHNAALRKRRKDVTEHTDVVKRSGSRKGNSELALDAESPVAFKGVQYPFVVGERVLIMGNKRTPEKFVGKEAVITSQCLNGWYLVKALDSGESTRLQYRSLKKVPGLQLQTQARLQPLAFLGGRQ

SEQ ID NO: 17793 - protein, 501 aa, Triticum aestivum
  peptide (1)..(501): Ceres Seq. ID no. 13660695
  misc_feature (71)..(480): NCBI GI NO: 30685540 NR Description: expressed protein [Arabidopsis thaliana]
  misc_feature (9)..(480): NCBI GI NO: 11994201 NR Description: gb|AAF35943
  misc_feature (71)..(397): NCBI GI NO: 20453175 NR Description: At3g19895 [Arabidopsis thaliana]
  misc_feature (9)..(240): NCBI GI NO: 20453175 NR Description: At3g19895 [Arabidopsis thaliana]
  misc_feature (304)..(479): NCBI GI NO: 28876015 NR Description: hypothetical protein
  misc_feature (303)..(480): NCBI GI NO: 30688352 NR Description: expressed protein [Arabidopsis thaliana]
  misc_feature (303)..(480): NCBI GI NO: 27413505 NR Description: hypothetical protein [Arabidopsis thaliana]
  misc_feature (76)..(281): NCBI GI NO: 15230647 NR Description: expressed protein [Arabidopsis thaliana]
  misc_feature (11)..(73): NCBI GI NO: 15230647 NR Description: expressed protein [Arabidopsis thaliana]
  misc_feature (77)..(314): NCBI GI NO: 33146537 NR Description: unknown protein
MACPPCPPSPLARVRLDDVAPHDGAAAPGYARAVGALAASLARRGAAVLELPAADAAVVRCALESARAFFRGRHAAYLYRAGRTLEDGELSPACMADAFRCLGKAARAALCAIARHLRLRTDVFNQLVDDTPLPVNEVSSSELLVAYSHEQLQSGLTLMGCPSRSSMPQVDRGFVTLVASDNPGIEVCDPNGHWYLADGVSGPNNLLLLTGRALSHVTAGLCPISQYRVTNENRASLTFRLVPHANAILDCSPILAAGHCIRQVYQPIPAGQFMDDSYAEEHAVSSHLEEPSESQGNFVSDPSLRSVLSDPLSGAFLEDAMVLQCGHSFGGVMLKKVIEMARCTICNGEVDPSSLFPNLALRAVATVVKMEDDRRLFHNAALRKRRKDVTEHTDVVKRSGSRKGNSELALDAESPVAFKGVQYPFVVGERVLIMGNKRTPEKFVGKEAVITSQCLNGWYLVKALDSGESTRLQYRSLKKVPGLQLQTQARLQPLAFLGGRQ

SEQ ID NO: 17794 - protein, 407 aa, Triticum aestivum
  peptide (1)..(407): Ceres Seq. ID no. 13660696
  misc_feature (1)..(386): NCBI GI NO: 30685540 NR Description: expressed protein [Arabidopsis thaliana]
  misc_feature (1)..(386): NCBI GI NO: 11994201 NR Description: gb|AAF35943
  misc_feature (1)..(303): NCBI GI NO: 20453175 NR Description: At3g19895 [Arabidopsis thaliana]
  misc_feature (1)..(146): NCBI GI NO: 20453175 NR Description: At3g19895 [Arabidopsis thaliana]
  misc_feature (210)..(385): NCBI GI NO: 28876015 NR Description: hypothetical protein
  misc_feature (209)..(386): NCBI GI NO: 30688352 NR Description: expressed protein [Arabidopsis thaliana]
  misc_feature (209)..(386): NCBI GI NO: 27413505 NR Description: hypothetical protein [Arabidopsis thaliana]
  misc_feature (1)..(187): NCBI GI NO: 15230647 NR Description: expressed protein [Arabidopsis thaliana]
  misc_feature (1)..(220): NCBI GI NO: 33146537 NR Description: unknown protein
  misc_feature (1)..(220): NCBI GI NO: 33146538 NR Description: unknown protein
MADAFRCLGKAARAALCAIARHLRLRTDVFNQLVDDTPLPVNEVSSSELLVAYSHEQLQSGLTLMGCPSRSSMPQVDRGFVTLVASDNPGIEVCDPNGHWYLADGVSGPNNLLLLTGRALSHVTAGLCPISQYRVTNENRASLTFRLVPHANAILDCSPILAAGHCIRQVYQPIPAGQFMDDSYAEEHAVSSHLEEPSESQGNFVSDPSLRSVLSDPLSGAFLEDAMVLQCGHSFGGVMLKKVIEMARCTICNGEVDPSSLFPNLALRAVATVVKMEDDRRLFHNAALRKRRKDVTEHTDVVKRSGSRKGNSELALDAESPVAFKGVQYPFVVGERVLIMGNKRTPEKFVGKEAVITSQCLNGWYLVKALDSGESTRLQYRSLKKVPGLQLQTQARLQPLAFLGGRQ

SEQ ID NO: 17795 - DNA, 2018 bp, Triticum aestivum
  misc_feature (1)..(2018): Ceres Seq. ID no. 15176862
cccattggccgcgcccacggacgcaggccgacagtttcccgtcctgcccctccctcgtcgctagtcgttgcttgctccgattttccacccacaatccggggcaaaacacccggggagcgaagcaagaaaccgagggctctcctcccaggcgcggatctaccagcctaccagggcgcggaccgcgcgaggctctggccttccgctcctccagcatgaggggaaaaaagatgatatatggattctccatttcccttatcctcatcaacctggcttccataatggagcgggctgatgagaatctcctccccgctgtttacaaggaagtcagtgccgccttcgatgctggtcctactgatctggggtaccttacgtttataatgaactttctgaagtccatagcatctcccttggcaggtgtccttgctcttcagtatgatcgccccactattcttgcggtcggaactgtcttctgggctctatcaacaggggccgttggtgtcagccagtattttcagcaggttgcattctggagaggtgtaaatggtgttggacttgccattgtcataccatcacttcagtccttcattgctgatagctacagagagggcacccgtggcgccggatttggtttgttgagtctcattggctcaataggtggtataggaggaagtattgtggcgacagttatggctggaagggattattggggatttcctggatggcggtttgcatttattgtggtcgcgtttgcaagcttgttgattgggcttcttgtttacttttacaccgttgatcctagaaaaacatctccagggaattttggtgacgacgacacccatgagaggtcacgtttggttggtaacagtgttttccctccactgtccatctggaaggattcatggataacagcaagatctgtcatgaaagtgcggacatttcaaatcatcgtcctgcaaggcatagtcggctccttgccatggactgctgtcgttttcttcacaatgtggtttgagctaattggtttcgataacaaaagctcggcggggttaaacagcctattcgccatcggctgcgcgagtgggtcatttcttggtggagtaattgcagaccgcgtgtcaagacactacccggattcaggccgcatcatgtgtgctcagttcagtgccttcatgtgcatccctttcacatggatcctcctcacggtcatcccgcagtcggtcgactactggtacagctacgccgtcacgctgttcctgatggggctcaccataagttggtgcgccacctgcgcaaacaacccgatgttcgcggaggtggtccctcccaagcaccgcaccatgatctacgcgtttgaccgcgcgttcgagggctccttctcctcgctggccgctcctgccgtcggcatggtgaccgagagggtatatggctacaacgcaaagacggtgaatctagcggacgggtcggtggcaggggcgtatgcgctctcgagagggctgctgaccatgatgattgttccttttggtctgtgctgcctgttctacaccccgctgtactttgtgttcaagcgcgaccgtgagaacgcgaggttggcggccagtgccaaggatctggagctaatgtgatgctccgcggtttttttttatcagctgcagtgttcgttaatgcggttagttgattcagcttggggttgaaatggtgcagttgacagaatactacaggtttcaccttcttcagacagatgagaagtacaccttcagacaaatgaaaagaaatacacgagtacaccttcagacagatgacaagatatacacgggtagagtcggtgattttaattttgtcaattagagaggatatatattgtactaatacattgtgtaggtaaataaatggcagctgtcatgttcaatctcaccgcaattaggatttattttttcttttgtcgcctgtaatcctgagctgaatttttggatgaagatggcattgcccctgatcctgaagtaatgaactaaacttggttc

SEQ ID NO: 17796 - protein, 539 aa, Triticum aestivum
  peptide (1)..(539): Ceres Seq. ID no. 15176863
  misc_feature (67)..(539): NCBI GI NO: 15234530 NR Description: transporter - related [Arabidopsis thaliana]
  misc_feature (229)..(539): NCBI GI NO: 34393426 NR Description: membrane transporter PFB0275w-like protein
  misc_feature (92)..(538): NCBI GI NO: 15224194 NR Description: transporter - related [Arabidopsis thaliana]
  misc_feature (81)..(531): NCBI GI NO: 15238089 NR Description: transporter - related [Arabidopsis thaliana]
  misc_feature (81)..(531): NCBI GI NO: 15218229 NR Description: transporter - related [Arabidopsis thaliana]
  misc_feature (156)..(531): NCBI GI NO: 11358310 NR Description: hypothetical protein T31P16
  misc_feature (68)..(520): NCBI GI NO: 23480447 NR Description: major facilitator superfamily protein
  misc_feature (70)..(321): NCBI GI NO: 23593282 NR Description: hypothetical protein, conserved
  misc_feature (314)..(523): NCBI GI NO: 23593282 NR Description: hypothetical protein, conserved
  misc_feature (70)..(321): NCBI GI NO: 7494336 NR Description: membrane transporter PFB0275w - malaria parasite
HWPRPRTQADSFPSCPSLVASRCLLRFSTHNPGQNTRGAKQETEGSPPRRGSTSLPGRGPREALAFRSSSMRGKKMIYGFSISLILINLASIMERADENLLPAVYKEVSAAFDAGPTDLGYLTFIMNFLKSIASPLAGVLALQYDRPTILAVGTVFWALSTGAVGVSQYFQQVAFWRGVNGVGLAIVIPSLQSFIADSYREGTRGAGFGLLSLIGSIGGIGGSIVATVMAGRDYWGFPGWRFAFIVVAFASLLIGLLVYFYTVDPRKTSPGNFGDDDTHERSRLVGNSVFPPLSIWKDSWITARSVMKVRTFQIIVLQGIVGSLPWTAVVFFTMWFELIGFDNKSSAGLNSLFAIGCASGSFLGGVIADRVSRHYPDSGRIMCAQFSAFMCIPFTWILLTVIPQSVDYWYSYAVTLFLMGLTISWCATCANNPMFAEVVPPKHRTMIYAFDRAFEGSFSSLAAPAVGMVTERVYGYNAKTVNLADGSVAGAYALSRGLLTMMIVPFGLCCLFYTPLYFVFKRDRENARLAASAKDLELM

SEQ ID NO: 17797 - protein, 469 aa, Triticum aestivum
  peptide (1)..(469): Ceres Seq. ID no. 15176864
  misc_feature (1)..(469): NCBI GI NO: 15234530 NR Description: transporter - related [Arabidopsis thaliana]
  misc_feature (159)..(469): NCBI GI NO: 34393426 NR Description: membrane transporter PFB0275w-like protein
  misc_feature (22)..(468): NCBI GI NO: 15224194 NR Description: transporter - related [Arabidopsis thaliana]
  misc_feature (11)..(461): NCBI GI NO: 15238089 NR Description: transporter - related [Arabidopsis thaliana]
  misc_feature (11)..(461): NCBI GI NO: 15218229 NR Description: transporter - related [Arabidopsis thaliana]
  misc_feature (86)..(461): NCBI GI NO: 11358310 NR Description: hypothetical protein T31P16
  misc_feature (1)..(450): NCBI GI NO: 23480447 NR Description: major facilitator superfamily protein
  misc_feature (1)..(251): NCBI GI NO: 23593282 NR Description: hypothetical protein, conserved
  misc_feature (244)..(453): NCBI GI NO: 23593282 NR Description: hypothetical protein, conserved
  misc_feature (1)..(251): NCBI GI NO: 7494336 NR Description: membrane transporter PFB0275w - malaria parasite
MRGKKMIYGFSISLILINLASIMERADENLLPAVYKEVSAAFDAGPTDLGYLTFIMNFLKSIASPLAGVLALQYDRPTILAVGTVFWALSTGAVGVSQYFQQVAFWRGVNGVGLAIVIPSLQSFIADSYREGTRGAGFGLLSLIGSIGGIGGSIVATVMAGRDYWGFPGWRFAFIVVAFASLLIGLLVYFYTVDPRKTSPGNFGDDDTHERSRLVGNSVFPPLSIWKDSWITARSVMKVRTFQIIVLQGIVGSLPWTAVVFFTMWFELIGFDNKSSAGLNSLFAIGCASGSFLGGVIADRVSRHYPDSGRIMCAQFSAFMCIPFTWILLTVIPQSVDYWYSYAVTLFLMGLTISWCATCANNPMFAEVVPPKHRTMIYAFDRAFEGSFSSLAAPAVGMVTERVYGYNAKTVNLADGSVAGAYALSRGLLTMMIVPFGLCCLFYTPLYFVFKRDRENARLAASAKDLELM

SEQ ID NO: 17798 - protein, 464 aa, Triticum aestivum
  peptide (1)..(464): Ceres Seq. ID no. 15176865
  misc_feature (1)..(464): NCBI GI NO: 15234530 NR Description: transporter - related [Arabidopsis thaliana]
  misc_feature (154)..(464): NCBI GI NO: 34393426 NR Description: membrane transporter PFB0275w-like protein
  misc_feature (17)..(463): NCBI GI NO: 15224194 NR Description: transporter - related [Arabidopsis thaliana]
  misc_feature (6)..(456): NCBI GI NO: 15238089 NR Description: transporter - related [Arabidopsis thaliana]
  misc_feature (6)..(456): NCBI GI NO: 15218229 NR Description: transporter - related [Arabidopsis thaliana]
  misc_feature (81)..(456): NCBI GI NO: 11358310 NR Description: hypothetical protein T31P16
  misc_feature (1)..(445): NCBI GI NO: 23480447 NR Description: major facilitator superfamily protein
  misc_feature (1)..(246): NCBI GI NO: 23593282 NR Description: hypothetical protein, conserved
  misc_feature (239)..(448): NCBI GI NO: 23593282 NR Description: hypothetical protein, conserved
  misc_feature (1)..(246): NCBI GI NO: 7494336 NR Description: membrane transporter PFB0275w - malaria parasite
MIYGFSISLILINLASIMERADENLLPAVYKEVSAAFDAGPTDLGYLTFIMNFLKSIASPLAGVLALQYDRPTILAVGTVFWALSTGAVGVSQYFQQVAFWRGVNGVGLAIVIPSLQSFIADSYREGTRGAGFGLLSLIGSIGGIGGSIVATVMAGRDYWGFPGWRFAFIVVAFASLLIGLLVYFYTVDPRKTSPGNFGDDDTHERSRLVGNSVFPPLSIWKDSWITARSVMKVRTFQIIVLQGIVGSLPWTAVVFFTMWFELIGFDNKSSAGLNSLFAIGCASGSFLGGVIADRVSRHYPDSGRIMCAQFSAFMCIPFTWILLTVIPQSVDYWYSYAVTLFLMGLTISWCATCANNPMFAEVVPPKHRTMIYAFDRAFEGSFSSLAAPAVGMVTERVYGYNAKTVNLADGSVAGAYALSRGLLTMMIVPFGLCCLFYTPLYFVFKRDRENARLAASAKDLELM

SEQ ID NO: 17799 - DNA, 2031 bp, Triticum aestivum
  misc_feature (1)..(2031): Ceres Seq. ID no. 14313288
tttgccctgatcataccggtagctggtacacacattcatacatacattcttcttcagcatccactcattgctagctagcttgcgaggcagtgtgtgagctgttagtttgagcgggagaagctgggtggacggagagcacggcgctagctagcttgctggtgcaagatgaggagccgtggtagcttcgctctgaaccatgcggtggcgtttctcgtgtggtggatggtgcattgcggcagtgagctcgttgccgccgtgcctcctgatggttggtacgattacactgcccacacggactgcagaggccgcccggagccggcgcagtacaacggcgggattctcaagtacggcaacggcgacgacccgaacgggtacaagacgacggagactggcgtcctgtccccggcgttcgtggtctacaacctcaacaagtccacaatgtacaccttctcaggctgggtgaagctggaaggctctccctcggctctgatcaccgcgaggctggccccggacaactccggcacacggtgcatcgggacggtcctcgccaggagcgactgctgggcgttcctcaagggtggcttcgtcctcgactggccaactcagacctccgtcatcttcttccagaatgctgataggaccccgatgaagatcaccactgcgagcgcctcgctccagccgttcacgacggatcaatggtcgatgcaccagaaagatacgatccggaagaggaggaagaggatggccaccgtccacgtcgccgacccgcacggcacccgggtggtcggcgcgtcggtgtccgtgcagcagacggctaaggacttcccgcttgggtcggcgatcgcctccaccatcctgggcaacgacgcgtaccagaagtggttcgtggaccggttcaacgcggcggtgttcgaggacgagctcaagtggtactcgacggagccggcgtcggggctgctccggttcgacgtgccggaccagatgctggcgttcgtgcggtcgcaccgggtgatggtgcgcgggcacaacatcttctgggagaaccaggacgccacgccccggtgggtcaagggcctgtcgccggacgacctccgctccgccgtgaacacgcgcatccagagcctcatgacccgctaccgcggcgagttcgcgcactgggacgtcaacaacgagatgctgcacttcaacttctacgagcagcggctgggccccaacgccaccatggagttcttcagcgtggcgcaggacgccgacccgctcgccacgctcttcatgaacgagtacaacgtggtggagacctgcgacgacgtgtcctcgaccgtcgacgcgtacgtggcccgactcaaggacctccgggccggcggcgccgtgctggaggggatcggcctcgagggccacttctccaagcccaacatcccctacatgagggccgtgctcgacaagctggccacgctcaacctgcccatctggttcaccgagatcgacatcaacaacaagttcgacgcgcagacgcaggccgtgtacctggagcaggtgctgcgggaggcgtacgcgcacccggcggtgagcggcgtcatgctctggacggcgctgcacgagaacgggtgctaccagatgtgcctcacggactggaacctcaagaacctgcccgtcggggacgtcgtcgaccgcctgctgcaggagtggcagacggggcaggtcgccgggccgacggacgtgcacggcgcctacagcttcagcggctacctcggcgagtacgtggtcaccgtgaacgccggcaacacgtcgaagcaggccaccttctcgctgtccccaggggacgagaccaggcacatcaccgttcagatatgacactggttgtgtcgtagtatatgtgagtggccggtggcacgctgtactgcccgcacttgttgtttcgggcttctacctgcgatgacacatatcgtcgcttgtgggtagtggttactaaactatatactcgagcaaacgattatgtcttcgaaaaaacaaaacaaatgattatgacatggt

SEQ ID NO: 17800 - protein, 561 aa, Triticum aestivum
  peptide (1)..(561): Ceres Seq. ID no. 14313289
  misc_feature (211)..(504): Pfam Name: Pfam Description:  Glycosyl hydrolase family 10
  misc_feature (34)..(561): NCBI GI NO: 28416709 NR Description: At4g38650 [Arabidopsis thaliana]
  misc_feature (150)..(561): NCBI GI NO: 15233983 NR Description: glycosyl hydrolase family 10
  misc_feature (87)..(555): NCBI GI NO: 23429644 NR Description: endoxylanase [Carica papaya]
  misc_feature (37)..(59): NCBI GI NO: 23429644 NR Description: endoxylanase [Carica papaya]
  misc_feature (84)..(556): NCBI GI NO: 15235131 NR Description: glycosyl hydrolase family 10
  misc_feature (84)..(554): NCBI GI NO: 7485619 NR Description: hypothetical protein F17I5
  misc_feature (84)..(554): NCBI GI NO: 30689830 NR Description: glycosyl hydrolase family 10
  misc_feature (84)..(547): NCBI GI NO: 15235134 NR Description: glycosyl hydrolase family 10
  misc_feature (59)..(545): NCBI GI NO: 37533262 NR Description: putative 1,4-beta-xylanase
  misc_feature (80)..(549): NCBI GI NO: 37533260 NR Description: putative 1,4-beta-xylanase
MRSRGSFALNHAVAFLVWWMVHCGSELVAAVPPDGWYDYTAHTDCRGRPEPAQYNGGILKYGNGDDPNGYKTTETGVLSPAFVVYNLNKSTMYTFSGWVKLEGSPSALITARLAPDNSGTRCIGTVLARSDCWAFLKGGFVLDWPTQTSVIFFQNADRTPMKITTASASLQPFTTDQWSMHQKDTIRKRRKRMATVHVADPHGTRVVGASVSVQQTAKDFPLGSAIASTILGNDAYQKWFVDRFNAAVFEDELKWYSTEPASGLLRFDVPDQMLAFVRSHRVMVRGHNIFWENQDATPRWVKGLSPDDLRSAVNTRIQSLMTRYRGEFAHWDVNNEMLHFNFYEQRLGPNATMEFFSVAQDADPLATLFMNEYNVVETCDDVSSTVDAYVARLKDLRAGGAVLEGIGLEGHFSKPNIPYMRAVLDKLATLNLPIWFTEIDINNKFDAQTQAVYLEQVLREAYAHPAVSGVMLWTALHENGCYQMCLTDWNLKNLPVGDVVDRLLQEWQTGQVAGPTDVHGAYSFSGYLGEYVVTVNAGNTSKQATFSLSPGDETRHITVQI

SEQ ID NO: 17801 - protein, 542 aa, Triticum aestivum
  peptide (1)..(542): Ceres Seq. ID no. 14313290
  misc_feature (192)..(485): Pfam Name: Pfam Description:  Glycosyl hydrolase family 10
  misc_feature (15)..(542): NCBI GI NO: 28416709 NR Description: At4g38650 [Arabidopsis thaliana]
  misc_feature (131)..(542): NCBI GI NO: 15233983 NR Description: glycosyl hydrolase family 10
  misc_feature (68)..(536): NCBI GI NO: 23429644 NR Description: endoxylanase [Carica papaya]
  misc_feature (18)..(40): NCBI GI NO: 23429644 NR Description: endoxylanase [Carica papaya]
  misc_feature (65)..(537): NCBI GI NO: 15235131 NR Description: glycosyl hydrolase family 10
  misc_feature (65)..(535): NCBI GI NO: 7485619 NR Description: hypothetical protein F17I5
  misc_feature (65)..(535): NCBI GI NO: 30689830 NR Description: glycosyl hydrolase family 10
  misc_feature (65)..(528): NCBI GI NO: 15235134 NR Description: glycosyl hydrolase family 10
  misc_feature (40)..(526): NCBI GI NO: 37533262 NR Description: putative 1,4-beta-xylanase
  misc_feature (61)..(530): NCBI GI NO: 37533260 NR Description: putative 1,4-beta-xylanase
MVHCGSELVAAVPPDGWYDYTAHTDCRGRPEPAQYNGGILKYGNGDDPNGYKTTETGVLSPAFVVYNLNKSTMYTFSGWVKLEGSPSALITARLAPDNSGTRCIGTVLARSDCWAFLKGGFVLDWPTQTSVIFFQNADRTPMKITTASASLQPFTTDQWSMHQKDTIRKRRKRMATVHVADPHGTRVVGASVSVQQTAKDFPLGSAIASTILGNDAYQKWFVDRFNAAVFEDELKWYSTEPASGLLRFDVPDQMLAFVRSHRVMVRGHNIFWENQDATPRWVKGLSPDDLRSAVNTRIQSLMTRYRGEFAHWDVNNEMLHFNFYEQRLGPNATMEFFSVAQDADPLATLFMNEYNVVETCDDVSSTVDAYVARLKDLRAGGAVLEGIGLEGHFSKPNIPYMRAVLDKLATLNLPIWFTEIDINNKFDAQTQAVYLEQVLREAYAHPAVSGVMLWTALHENGCYQMCLTDWNLKNLPVGDVVDRLLQEWQTGQVAGPTDVHGAYSFSGYLGEYVVTVNAGNTSKQATFSLSPGDETRHITVQI

SEQ ID NO: 17802 - protein, 470 aa, Triticum aestivum
  peptide (1)..(470): Ceres Seq. ID no. 14313291
  misc_feature (120)..(413): Pfam Name: Pfam Description:  Glycosyl hydrolase family 10
  misc_feature (1)..(470): NCBI GI NO: 28416709 NR Description: At4g38650 [Arabidopsis thaliana]
  misc_feature (59)..(470): NCBI GI NO: 15233983 NR Description: glycosyl hydrolase family 10
  misc_feature (1)..(464): NCBI GI NO: 23429644 NR Description: endoxylanase [Carica papaya]
  misc_feature (1)..(465): NCBI GI NO: 15235131 NR Description: glycosyl hydrolase family 10
  misc_feature (1)..(463): NCBI GI NO: 7485619 NR Description: hypothetical protein F17I5
  misc_feature (1)..(463): NCBI GI NO: 30689830 NR Description: glycosyl hydrolase family 10
  misc_feature (1)..(456): NCBI GI NO: 15235134 NR Description: glycosyl hydrolase family 10
  misc_feature (1)..(454): NCBI GI NO: 37533262 NR Description: putative 1,4-beta-xylanase
  misc_feature (1)..(458): NCBI GI NO: 37533260 NR Description: putative 1,4-beta-xylanase
  misc_feature (2)..(458): NCBI GI NO: 40363757 NR Description: putative 1,4-beta-xylanase [Triticum aestivum]
MYTFSGWVKLEGSPSALITARLAPDNSGTRCIGTVLARSDCWAFLKGGFVLDWPTQTSVIFFQNADRTPMKITTASASLQPFTTDQWSMHQKDTIRKRRKRMATVHVADPHGTRVVGASVSVQQTAKDFPLGSAIASTILGNDAYQKWFVDRFNAAVFEDELKWYSTEPASGLLRFDVPDQMLAFVRSHRVMVRGHNIFWENQDATPRWVKGLSPDDLRSAVNTRIQSLMTRYRGEFAHWDVNNEMLHFNFYEQRLGPNATMEFFSVAQDADPLATLFMNEYNVVETCDDVSSTVDAYVARLKDLRAGGAVLEGIGLEGHFSKPNIPYMRAVLDKLATLNLPIWFTEIDINNKFDAQTQAVYLEQVLREAYAHPAVSGVMLWTALHENGCYQMCLTDWNLKNLPVGDVVDRLLQEWQTGQVAGPTDVHGAYSFSGYLGEYVVTVNAGNTSKQATFSLSPGDETRHITVQI

SEQ ID NO: 17803 - DNA, 1667 bp, Triticum aestivum
  misc_feature (1)..(1667): Ceres Seq. ID no. 14301676
ctcgcctctcacccccacacagagctgccaaaacattctgcaacaagcagagagagcgagacaaaacatgtcgtggactactcgtgtccctctcctcgtcggcgccacctccatctgcttcctctccgccgccgcggcgtccaactacacctcgttacgccccggccaccacctcctgacccagctctcgcaatggcgggagcactacctgtccgacgcttcctcgcacgccgccggcaccgggggcgtgcgccggcacaccgtcctcgcgtgggtcctggccttcctggccgcgtccgtgtcgagcgccggcggcgtcgggggcgggtcgctgttcctgcccatcctgaacctggtggcggggctgaccctgaagcgcgccaccacctactcctccttcatggtcaccggcggcgccgcgtcgaacgtgctctacaacctctggcgcgcgcggggccggccggcgctgatcgactacgacatcgcactgctgttccagccgtgcctgctcctgggcgtcagcgtcggggtggtgtgcaacgtcatgttcccggagtggctcatcacggcgctcttctcgctgttcctcgccttctgcaccgccaagacgtgccgcgccggggccaagatctggcggtccgagagcgccggcgcccccgccaccgccaccgccgcgcgtcacgaccacaaggagcccctgcttctcggcggcctcccgcagcccgtccaggacgacgggggccaagcagctcgcaatggcggctctggcgccggcgccggcgctgggttcccgtggaaggacgtggcggtgctcctggtggtgtggctctgcttcttcctgctccacgtcttcatcggagataagcacgggaagggagtgatcagcataaagccctgcggagtggcatactggcttgccaccgtgtcccaggtgcctttcgccgtggctttcacagcctatatcatatacgcaaagaggaagaagcaggttgcacatcaccacgaagatggcaaggcacattcttctgtgcacacgaagacggagaccttgccggcgctcgcgctcccgctggccgctttcgtgaccggatctctgagcggcctcttcggcatcggcggagggctgcttctcaaccctgtcctccttcagatcgggatacccccgcagacggcggcggcgacgtcttcgttcatggtgctgttctgcgcgtccatgtcgatggtccagttcatcctgctgggcatggacgggatcggggaggcctcggtctacgcggggatatgcttcgtcgcctcgatcgccggggtggtcttgatcgagcgggtcgtcaggaagtccgggcgggtgtcgatgatcgtcttcttggtcaccgccatcatggcgctcagcactgtgatcgtcacctgcttcggagccctagatgtctggacgcaatacactggcggagcgtacatggggttcaagctaccttgtacgtagtttacccatgcatatatgagagcatgggtgagaggtgcttagttactaattgcttcttctggcttggcgtttatgtcttttctgaagaaaggttttgttcgtggtgttgctatggctgtttatgggctatatataattttgtgtgaataaatatatgcttctggaatgaagcttacatggcactgcg

SEQ ID NO: 17804 - protein, 492 aa, Triticum aestivum
  peptide (1)..(492): Ceres Seq. ID no. 14301677
  misc_feature (10)..(491): NCBI GI NO: 34908754 NR Description: P0415A04.10
  misc_feature (29)..(491): NCBI GI NO: 15220600 NR Description: expressed protein [Arabidopsis thaliana]
  misc_feature (48)..(491): NCBI GI NO: 15220419 NR Description: expressed protein [Arabidopsis thaliana]
  misc_feature (63)..(491): NCBI GI NO: 6554197 NR Description: T23J18.20 [Arabidopsis thaliana]
  misc_feature (38)..(421): NCBI GI NO: 15233579 NR Description: hypothetical protein [Arabidopsis thaliana]
  misc_feature (441)..(491): NCBI GI NO: 15233579 NR Description: hypothetical protein [Arabidopsis thaliana]
  misc_feature (98)..(491): NCBI GI NO: 11358507 NR Description: membrane protein
  misc_feature (87)..(473): NCBI GI NO: 34908752 NR Description: P0415A04.9
  misc_feature (363)..(491): NCBI GI NO: 15233581 NR Description: hypothetical protein [Arabidopsis thaliana]
  misc_feature (115)..(212): NCBI GI NO: 15233581 NR Description: hypothetical protein [Arabidopsis thaliana]
SPLTPTQSCQNILQQAERARQNMSWTTRVPLLVGATSICFLSAAAASNYTSLRPGHHLLTQLSQWREHYLSDASSHAAGTGGVRRHTVLAWVLAFLAASVSSAGGVGGGSLFLPILNLVAGLTLKRATTYSSFMVTGGAASNVLYNLWRARGRPALIDYDIALLFQPCLLLGVSVGVVCNVMFPEWLITALFSLFLAFCTAKTCRAGAKIWRSESAGAPATATAARHDHKEPLLLGGLPQPVQDDGGQAARNGGSGAGAGAGFPWKDVAVLLVVWLCFFLLHVFIGDKHGKGVISIKPCGVAYWLATVSQVPFAVAFTAYIIYAKRKKQVAHHHEDGKAHSSVHTKTETLPALALPLAAFVTGSLSGLFGIGGGLLLNPVLLQIGIPPQTAAATSSFMVLFCASMSMVQFILLGMDGIGEASVYAGICFVASIAGVVLIERVVRKSGRVSMIVFLVTAIMALSTVIVTCFGALDVWTQYTGGAYMGFKLPCT

SEQ ID NO: 17805 - protein, 470 aa, Triticum aestivum
  peptide (1)..(470): Ceres Seq. ID no. 14301678
  misc_feature (1)..(469): NCBI GI NO: 34908754 NR Description: P0415A04.10
  misc_feature (7)..(469): NCBI GI NO: 15220600 NR Description: expressed protein [Arabidopsis thaliana]
  misc_feature (26)..(469): NCBI GI NO: 15220419 NR Description: expressed protein [Arabidopsis thaliana]
  misc_feature (41)..(469): NCBI GI NO: 6554197 NR Description: T23J18.20 [Arabidopsis thaliana]
  misc_feature (16)..(399): NCBI GI NO: 15233579 NR Description: hypothetical protein [Arabidopsis thaliana]
  misc_feature (419)..(469): NCBI GI NO: 15233579 NR Description: hypothetical protein [Arabidopsis thaliana]
  misc_feature (76)..(469): NCBI GI NO: 11358507 NR Description: membrane protein
  misc_feature (65)..(451): NCBI GI NO: 34908752 NR Description: P0415A04.9
  misc_feature (341)..(469): NCBI GI NO: 15233581 NR Description: hypothetical protein [Arabidopsis thaliana]
  misc_feature (93)..(190): NCBI GI NO: 15233581 NR Description: hypothetical protein [Arabidopsis thaliana]
MSWTTRVPLLVGATSICFLSAAAASNYTSLRPGHHLLTQLSQWREHYLSDASSHAAGTGGVRRHTVLAWVLAFLAASVSSAGGVGGGSLFLPILNLVAGLTLKRATTYSSFMVTGGAASNVLYNLWRARGRPALIDYDIALLFQPCLLLGVSVGVVCNVMFPEWLITALFSLFLAFCTAKTCRAGAKIWRSESAGAPATATAARHDHKEPLLLGGLPQPVQDDGGQAARNGGSGAGAGAGFPWKDVAVLLVVWLCFFLLHVFIGDKHGKGVISIKPCGVAYWLATVSQVPFAVAFTAYIIYAKRKKQVAHHHEDGKAHSSVHTKTETLPALALPLAAFVTGSLSGLFGIGGGLLLNPVLLQIGIPPQTAAATSSFMVLFCASMSMVQFILLGMDGIGEASVYAGICFVASIAGVVLIERVVRKSGRVSMIVFLVTAIMALSTVIVTCFGALDVWTQYTGGAYMGFKLPCT

SEQ ID NO: 17806 - protein, 359 aa, Triticum aestivum
  peptide (1)..(359): Ceres Seq. ID no. 14301679
  misc_feature (1)..(358): NCBI GI NO: 34908754 NR Description: P0415A04.10
  misc_feature (1)..(358): NCBI GI NO: 15220600 NR Description: expressed protein [Arabidopsis thaliana]
  misc_feature (1)..(358): NCBI GI NO: 15220419 NR Description: expressed protein [Arabidopsis thaliana]
  misc_feature (1)..(358): NCBI GI NO: 6554197 NR Description: T23J18.20 [Arabidopsis thaliana]
  misc_feature (1)..(288): NCBI GI NO: 15233579 NR Description: hypothetical protein [Arabidopsis thaliana]
  misc_feature (308)..(358): NCBI GI NO: 15233579 NR Description: hypothetical protein [Arabidopsis thaliana]
  misc_feature (1)..(358): NCBI GI NO: 11358507 NR Description: membrane protein
  misc_feature (1)..(340): NCBI GI NO: 34908752 NR Description: P0415A04.9
  misc_feature (230)..(358): NCBI GI NO: 15233581 NR Description: hypothetical protein [Arabidopsis thaliana]
  misc_feature (1)..(79): NCBI GI NO: 15233581 NR Description: hypothetical protein [Arabidopsis thaliana]
MVTGGAASNVLYNLWRARGRPALIDYDIALLFQPCLLLGVSVGVVCNVMFPEWLITALFSLFLAFCTAKTCRAGAKIWRSESAGAPATATAARHDHKEPLLLGGLPQPVQDDGGQAARNGGSGAGAGAGFPWKDVAVLLVVWLCFFLLHVFIGDKHGKGVISIKPCGVAYWLATVSQVPFAVAFTAYIIYAKRKKQVAHHHEDGKAHSSVHTKTETLPALALPLAAFVTGSLSGLFGIGGGLLLNPVLLQIGIPPQTAAATSSFMVLFCASMSMVQFILLGMDGIGEASVYAGICFVASIAGVVLIERVVRKSGRVSMIVFLVTAIMALSTVIVTCFGALDVWTQYTGGAYMGFKLPCT

SEQ ID NO: 17807 - DNA, 1670 bp, Triticum aestivum
  misc_feature (1)..(1670): Ceres Seq. ID no. 13660269
aatcgcccgccctcgctccccatcaaccccttcctagctagctagcgaagcaccagtttgggcagccgccgggcaggatggaagggctggacgtgtaccagcactaccgcttgaaccctacagatgtggacgccgtgacttactacctgccacgcctcatcgccggccagacgctgcacggcgccgataaattcatccaccacgtcgacatctacagctgcgagcccaaggatctggccgcccggattgcgcccgtgccgcaggccgccagcagcggcgaccgcttcttcttcaccacgcgcaagagcaagaacggaagcaaaacccagagcgtgcgcaccgccggcggcggcacctggaccgtcaacgctaccacggccgtcaaacacgccggagtcgaggtcggcgagaggaagaacctgtcgttcaggaagaagggcaagtccaccggttgggtcatggaggagtacaaatgcttgctgccagaggccgtcgtcgccgacggggtgaaggtgttctgcaagatccacttggctcagcatcctcctgacgcggcccgccaggaatcagccgcgtacaagcatcaagcagaaccgcaaccagaggccgtgactgcgagcatgcacgcacagaagaggccagcaatagctcccgccgccgatcctcatccgccgcgccccaacaagaggatgcgaggatcagtccctgtccccgcacctgccccaccgtcgttcttgacgtatgatgaggcagcgagtgcaatgtatggcccgctggctcgtaccatcttccctgttcaagatgctctggatataccagcgtcaatcgaaggtccttcagcatcatgcgagtccactacaacatccaaccactccggcgttgcttcttcctcagataatatgcagcgacaagctcaagctactgagatttcctcccagtcagatgtgctggagtctgtcaagaattacagccaacaacagatgattgttcctgaggctggctcaagcattgcaaggagcacatatgaagaggatgtctttcagccattggagcctctttccgatttgccgggtggggaggcagatggttttgacattgaagaactaatgagaatgatggaagacgacccaattgaggttgagacggtcactggagccaacactggcgtggagatgggccaacaggaacctctgtacctggataccttggaccaaggcatgctggaggacatgctgcagtccgattgcccttacccaatgtcgggatcagaggatcgggccatgcacaaccctgccttccatgatgctgacaaagagaagaggtacaatgccgcgtcggatcttgacgctccatcgcttcagggacaggaccactcgttcaaacagcccttcgatccatttgaagcagcatggaaggccgaagaggcgcacgagaaggagaagagggacaatcttcacgctggaccgcttggaggacacaacaacttcttctggcctgcaagtgtctattaagtccgatgttgaaattgttttcaaagtgtatacgaggatactcactggctgatatattagttcgtccttatacgatcgccacacgtgtacctctgagcaatttgctccacttgttcatgtaagctaaaactgttgttgttcttcttgcccctctgatgg

SEQ ID NO: 17808 - protein, 477 aa, Triticum aestivum
  peptide (1)..(477): Ceres Seq. ID no. 13660270
  misc_feature (10)..(132): Pfam Name: NAM Pfam Description: No apical meristem
  misc_feature (198)..(358): NCBI GI NO: 27960760 NR Description: dehydration-responsive AP2 domain transcriptionalactivator
  misc_feature (198)..(358): NCBI GI NO: 30313898 NR Description: AP2 transcriptional activator DRF1.1
  misc_feature (360)..(411): NCBI GI NO: 27960760 NR Description: dehydration-responsive AP2 domain transcriptionalactivator
  misc_feature (360)..(411): NCBI GI NO: 30313898 NR Description: AP2 transcriptional activator DRF1.1
  misc_feature (222)..(335): NCBI GI NO: 27960757 NR Description: AP2 domain protein [Hordeum vulgare]
  misc_feature (1)..(198): NCBI GI NO: 34911090 NR Description: OJ1117_G01.12
MEGLDVYQHYRLNPTDVDAVTYYLPRLIAGQTLHGADKFIHHVDIYSCEPKDLAARIAPVPQAASSGDRFFFTTRKSKNGSKTQSVRTAGGGTWTVNATTAVKHAGVEVGERKNLSFRKKGKSTGWVMEEYKCLLPEAVVADGVKVFCKIHLAQHPPDAARQESAAYKHQAEPQPEAVTASMHAQKRPAIAPAADPHPPRPNKRMRGSVPVPAPAPPSFLTYDEAASAMYGPLARTIFPVQDALDIPASIEGPSASCESTTTSNHSGVASSSDNMQRQAQATEISSQSDVLESVKNYSQQQMIVPEAGSSIARSTYEEDVFQPLEPLSDLPGGEADGFDIEELMRMMEDDPIEVETVTGANTGVEMGQQEPLYLDTLDQGMLEDMLQSDCPYPMSGSEDRAMHNPAFHDADKEKRYNAASDLDAPSLQGQDHSFKQPFDPFEAAWKAEEAHEKEKRDNLHAGPLGGHNNFFWPASVY

SEQ ID NO: 17809 - protein, 350 aa, Triticum aestivum
  peptide (1)..(350): Ceres Seq. ID no. 13660271
  misc_feature (71)..(231): NCBI GI NO: 27960760 NR Description: dehydration-responsive AP2 domain transcriptionalactivator
  misc_feature (71)..(231): NCBI GI NO: 30313898 NR Description: AP2 transcriptional activator DRF1.1
  misc_feature (233)..(284): NCBI GI NO: 27960760 NR Description: dehydration-responsive AP2 domain transcriptionalactivator
  misc_feature (233)..(284): NCBI GI NO: 30313898 NR Description: AP2 transcriptional activator DRF1.1
  misc_feature (95)..(208): NCBI GI NO: 27960757 NR Description: AP2 domain protein [Hordeum vulgare]
  misc_feature (1)..(71): NCBI GI NO: 34911090 NR Description: OJ1117_G01.12
MEEYKCLLPEAVVADGVKVFCKIHLAQHPPDAARQESAAYKHQAEPQPEAVTASMHAQKRPAIAPAADPHPPRPNKRMRGSVPVPAPAPPSFLTYDEAASAMYGPLARTIFPVQDALDIPASIEGPSASCESTTTSNHSGVASSSDNMQRQAQATEISSQSDVLESVKNYSQQQMIVPEAGSSIARSTYEEDVFQPLEPLSDLPGGEADGFDIEELMRMMEDDPIEVETVTGANTGVEMGQQEPLYLDTLDQGMLEDMLQSDCPYPMSGSEDRAMHNPAFHDADKEKRYNAASDLDAPSLQGQDHSFKQPFDPFEAAWKAEEAHEKEKRDNLHAGPLGGHNNFFWPASVY

SEQ ID NO: 17810 - protein, 296 aa, Triticum aestivum
  peptide (1)..(296): Ceres Seq. ID no. 13660272
  misc_feature (17)..(177): NCBI GI NO: 27960760 NR Description: dehydration-responsive AP2 domain transcriptionalactivator
  misc_feature (17)..(177): NCBI GI NO: 30313898 NR Description: AP2 transcriptional activator DRF1.1
  misc_feature (179)..(230): NCBI GI NO: 27960760 NR Description: dehydration-responsive AP2 domain transcriptionalactivator
  misc_feature (179)..(230): NCBI GI NO: 30313898 NR Description: AP2 transcriptional activator DRF1.1
  misc_feature (41)..(154): NCBI GI NO: 27960757 NR Description: AP2 domain protein [Hordeum vulgare]
  misc_feature (1)..(17): NCBI GI NO: 34911090 NR Description: OJ1117_G01.12
MHAQKRPAIAPAADPHPPRPNKRMRGSVPVPAPAPPSFLTYDEAASAMYGPLARTIFPVQDALDIPASIEGPSASCESTTTSNHSGVASSSDNMQRQAQATEISSQSDVLESVKNYSQQQMIVPEAGSSIARSTYEEDVFQPLEPLSDLPGGEADGFDIEELMRMMEDDPIEVETVTGANTGVEMGQQEPLYLDTLDQGMLEDMLQSDCPYPMSGSEDRAMHNPAFHDADKEKRYNAASDLDAPSLQGQDHSFKQPFDPFEAAWKAEEAHEKEKRDNLHAGPLGGHNNFFWPASVY

SEQ ID NO: 17811 - DNA, 1436 bp, Triticum aestivum
  misc_feature (1)..(1436): Ceres Seq. ID no. 13500573
ggagatgctctgacgtgtgactttaccacagcaagtcggagaatctggttttgactctccctcgccggcggccggcgccgtgctcccgcagcggcgcagcccccgtgtccaaccccaacatctacgccccgttgagtcacgtgccgtgcccgcacgaacacctgctcccatatccctggccgcgctccgcgctaccgcggcgatcgggcgtccactgcccagtcgagcaccttccctcgccgtacgaatatggcccctgttcccgctcctatcgcgcgcctccccctcctccctcgccgtgtccacacccccctccctcatccccgaccgtcagcaccggcggaggcacgacacaccgcgcgcacgagggcgccgcagcggatcggaggagtggatccggggggaagggagacggcgcggggtagcggcacatcactccggagcacggggcgactggcgcggcgggcgccatggctaaaaaggcgcggcatgtgaaccaccctagttgacattttgcttcgcctgatgcgtatccggttgctggattgactcgtacgcttccagggctcggataagggggggttcttcacggagtacggcgaggcgacccgataccaggtcggcgaagtggtcggcaaaggcagctacggcgtcgtggcgtctgccgtcgacacccacaccggcgagagcgtcgccatcaaaaagatcgacgacgtcttcgagcatgtcgccgacgccacccgcattctccgcgagatcaagctgctccgccttctgcgccatccagacatcgtccagatcaagcacatcatgctcccgccgtcgcgccgcgaattccgtgacatctacataatcttcgagctcatggagtccgacctccaccaggtcatcaaggccaacgacgacctcagcccggagcaccatcagttctttttctaccagctgcttcgtgggatgaagtacatacacgctgccaatgtcttccaccgggacctcaagcccaagaacattctagccaatgccgattgcaagctcaagatttgcgacttcggccttgctcgggtttccttcaatgacaccccgtccgcgatattctggacggattatgtagcaacaaggtggtatcgtgctccagaattatgtggctccttcttttcaaagtatactcctgcgattgatatttggagcataggatgtatatttgcagaaatgcttacagggaggccgctctttcctggcaaaaatgtggtacatcaattggatctcatgactgatctactcggcactccttcggcagaatctatttctagggtgagttcaattccccgcttctaaaataaataaatcagttagagacttatctcgtgcgtgatttatttaccaactctttgtgcttgtggttaccatttcctttatcaagatgaaatattcctgcg

SEQ ID NO: 17812 - protein, 174 aa, Triticum aestivum
  peptide (1)..(174): Ceres Seq. ID no. 13500574
  misc_feature (1)..(168): Pfam Name: Pfam Description:  Protein kinase domain
  misc_feature (1)..(168): NCBI GI NO: 15220976 NR Description: mitogen-activated protein kinase
  misc_feature (1)..(168): NCBI GI NO: 9294059 NR Description: MAP kinase [Arabidopsis thaliana]
  misc_feature (1)..(168): NCBI GI NO: 18401750 NR Description: mitogen-activated protein kinase
  misc_feature (1)..(168): NCBI GI NO: 15239634 NR Description: mitogen-activated protein kinase
  misc_feature (1)..(168): NCBI GI NO: 17064906 NR Description: Unknown protein [Arabidopsis thaliana]
  misc_feature (1)..(168): NCBI GI NO: 37594657 NR Description: mitogen activated protein kinase 6 [Zea mays]
  misc_feature (1)..(168): NCBI GI NO: 18410420 NR Description: mitogen-activated protein kinase
  misc_feature (1)..(168): NCBI GI NO: 25406284 NR Description: probable MAP kinase F25P22.9
  misc_feature (1)..(168): NCBI GI NO: 7106542 NR Description: ATMPK8 [Arabidopsis thaliana]
  misc_feature (1)..(168): NCBI GI NO: 5815410 NR Description: blast and wounding induced mitogen-activatedprotein kinase
MLPPSRREFRDIYIIFELMESDLHQVIKANDDLSPEHHQFFFYQLLRGMKYIHAANVFHRDLKPKNILANADCKLKICDFGLARVSFNDTPSAIFWTDYVATRWYRAPELCGSFFSKYTPAIDIWSIGCIFAEMLTGRPLFPGKNVVHQLDLMTDLLGTPSAESISRVSSIPRF

SEQ ID NO: 17813 - protein, 156 aa, Triticum aestivum
  peptide (1)..(156): Ceres Seq. ID no. 13500575
  misc_feature (1)..(150): Pfam Name: Pfam Description:  Protein kinase domain
  misc_feature (1)..(150): NCBI GI NO: 15220976 NR Description: mitogen-activated protein kinase
  misc_feature (1)..(150): NCBI GI NO: 9294059 NR Description: MAP kinase [Arabidopsis thaliana]
  misc_feature (1)..(150): NCBI GI NO: 18401750 NR Description: mitogen-activated protein kinase
  misc_feature (1)..(150): NCBI GI NO: 15239634 NR Description: mitogen-activated protein kinase
  misc_feature (1)..(150): NCBI GI NO: 17064906 NR Description: Unknown protein [Arabidopsis thaliana]
  misc_feature (1)..(150): NCBI GI NO: 37594657 NR Description: mitogen activated protein kinase 6 [Zea mays]
  misc_feature (1)..(150): NCBI GI NO: 18410420 NR Description: mitogen-activated protein kinase
  misc_feature (1)..(150): NCBI GI NO: 25406284 NR Description: probable MAP kinase F25P22.9
  misc_feature (1)..(150): NCBI GI NO: 7106542 NR Description: ATMPK8 [Arabidopsis thaliana]
  misc_feature (1)..(150): NCBI GI NO: 5815410 NR Description: blast and wounding induced mitogen-activatedprotein kinase
MESDLHQVIKANDDLSPEHHQFFFYQLLRGMKYIHAANVFHRDLKPKNILANADCKLKICDFGLARVSFNDTPSAIFWTDYVATRWYRAPELCGSFFSKYTPAIDIWSIGCIFAEMLTGRPLFPGKNVVHQLDLMTDLLGTPSAESISRVSSIPRF

SEQ ID NO: 17814 - protein, 126 aa, Triticum aestivum
  peptide (1)..(126): Ceres Seq. ID no. 13500576
  misc_feature (1)..(120): Pfam Name: Pfam Description:  Protein kinase domain
  misc_feature (1)..(120): NCBI GI NO: 15220976 NR Description: mitogen-activated protein kinase
  misc_feature (1)..(120): NCBI GI NO: 9294059 NR Description: MAP kinase [Arabidopsis thaliana]
  misc_feature (1)..(120): NCBI GI NO: 18401750 NR Description: mitogen-activated protein kinase
  misc_feature (1)..(120): NCBI GI NO: 15239634 NR Description: mitogen-activated protein kinase
  misc_feature (1)..(120): NCBI GI NO: 17064906 NR Description: Unknown protein [Arabidopsis thaliana]
  misc_feature (1)..(120): NCBI GI NO: 37594657 NR Description: mitogen activated protein kinase 6 [Zea mays]
  misc_feature (1)..(120): NCBI GI NO: 18410420 NR Description: mitogen-activated protein kinase
  misc_feature (1)..(120): NCBI GI NO: 25406284 NR Description: probable MAP kinase F25P22.9
  misc_feature (1)..(120): NCBI GI NO: 7106542 NR Description: ATMPK8 [Arabidopsis thaliana]
  misc_feature (1)..(120): NCBI GI NO: 5815410 NR Description: blast and wounding induced mitogen-activatedprotein kinase
MKYIHAANVFHRDLKPKNILANADCKLKICDFGLARVSFNDTPSAIFWTDYVATRWYRAPELCGSFFSKYTPAIDIWSIGCIFAEMLTGRPLFPGKNVVHQLDLMTDLLGTPSAESISRVSSIPRF

SEQ ID NO: 17815 - DNA, 875 bp, Triticum aestivum
  misc_feature (1)..(875): Ceres Seq. ID no. 14301449
accacccacttcctgcagctcgcaaccaagcctcccaaccagctgagagctagcaggagcagcaagcgaaccaacgactcctccggtcgctcgtcggagccaggcaaggcaacgcagcatgtgtaacctcatcacgatcccgtcggtcgcctggctgcgccgcgccgtgcgccggtggcgcgcccgccgctccacctccaccccggtgccggcggggcacgtcgcggtctgcgcggacggcgcgcggttcatgggtgcggctggcgcacctcagccaccccgcgttcctggagctgctcaggcaggcggaggaggagtacggcttcccgtccggcgcctccggccctgtcgcactcccctgcgacgaggaccgcctccgcgacgtcctccgccgcgtctcttcctcgtccgactccacggagccgcgccgctcctccttctgccgccgccgcggcgactcgcggccgctgctgcaggcggtggccttcctgtgagcgcgcccgcgcggcggcaccgaacgatccagcaacgcagcgcccaatttctgggtgccagagcagcaactggtgacagactcagcactccggacgcgggaaaaagacgaaggccatcaagaccgttcgggccagcgtggcggcgtgctcccgtgccgtgcccagcgtattgccggccggcgatcgggcgcgtactggagctgcgtagtacagtgcgtgatggggaagtgatgttacatgctagtaactgattgattgaggaaggcgacgattttttgggttctttttctctgtaacgaccactcaactcgcctgtgcaaatccttgccgaggcataggagtaaattaattaataaagatttgattgattgttcttgctgc

SEQ ID NO: 17816 - protein, 208 aa, Triticum aestivum
  peptide (1)..(208): Ceres Seq. ID no. 14301450
  misc_feature (1)..(41): NCBI GI NO: 38346069 NR Description: OSJNBa0084K01.9
MCNLITIPSVAWLRRAVRRWRARRSTSTPVPAGHVAVCADGARFMGAAGAPQPPRVPGAAQAGGGGVRLPVRRLRPCRTPLRRGPPPRRPPPRLFLVRLHGAAPLLLLPPPRRLAAAAAGGGLPVSAPARRHRTIQQRSAQFLGARAATGDRLSTPDAGKRRRPSRPFGPAWRRAPVPCPAYCRPAIGRVLELRSTVRDGEVMLHASN

SEQ ID NO: 17817 - protein, 164 aa, Triticum aestivum
  peptide (1)..(164): Ceres Seq. ID no. 14301451
MGAAGAPQPPRVPGAAQAGGGGVRLPVRRLRPCRTPLRRGPPPRRPPPRLFLVRLHGAAPLLLLPPPRRLAAAAAGGGLPVSAPARRHRTIQQRSAQFLGARAATGDRLSTPDAGKRRRPSRPFGPAWRRAPVPCPAYCRPAIGRVLELRSTVRDGEVMLHASN

SEQ ID NO: 17818 - DNA, 1079 bp, Triticum aestivum
  misc_feature (1)..(1079): Ceres Seq. ID no. 13660443
aaaccctccccaaaaccctagctgattcggggaactagggttcctccccgcctccaccgccgccgccgccaagctcccgccgagctcagaagatacttaccatgggtaagtcaagcaagaagtctgctgttgcggttgcacctgctgctgggctggtcccagatggaaaatctttaaagaaaggcaagaggaatgcggaagatgacatcgagaaggctgtcagtgccaagaagcagaaaactgcacctgagaaggccgtgcctgtgaagaatgatcttaaagtcaagaagctccctccaaagaaggtcgagagcagcagttctgatgaggattcttcagaatccgaggacgaggtgacggttcaaccaaagaaggctgcaccgtctgctaaacaggagtccagttttgatagcagcgatgagagcagttctgatgacgaacctgcaaaaaagcctgctactgcttcaaagaaacctgctgcacttgctagcaatggttcaaagaaagtcaagtctgacagcagcagctctgacagcagctctgatgaggatgtgatggtcccacccaagaaggctgcacaatctgctaaacaggagtccagctctgatggtagtgacgagagcagctctgatgatgaacctgcaaagaagtctgctgccacttcaaagaaacctgctgcaaagactgaagattcagatagcagcagctctgatgaggatgaagatatgcttcccgctaaagcaccagcagcagccaagaagattgacgaatccagtgaaagttccgattttggtagctctgctctgatgatgccgtcagagcacaacttgctcgttttcagcatgaggaagaagatgatttgacagggagcaacacagcttgcttgttttgtttctctgtagcaagttattctataaatactgaacactatgcaaggaaatcagcagctgccattgttcaagaatgtactaattctctgaacattgttttgtttttctatagcaagttatttctataaatactgaacactgcaaggaaatcagcagctttcattgttaagagaatgagctaattctctg

SEQ ID NO: 17819 - protein, 253 aa, Triticum aestivum
  peptide (1)..(253): Ceres Seq. ID no. 13660444
  misc_feature (71)..(207): Pfam Name: Pfam Description:  Lipoprotein amino terminal region
  misc_feature (1)..(208): NCBI GI NO: 38344339 NR Description: OSJNBa0058K23.21
  misc_feature (1)..(229): NCBI GI NO: 40253662 NR Description: putative nucleolin
  misc_feature (1)..(234): NCBI GI NO: 38344339 NR Description: OSJNBa0058K23.21
  misc_feature (1)..(234): NCBI GI NO: 15229678 NR Description: nucleolin, putative [Arabidopsis thaliana]
  misc_feature (1)..(229): NCBI GI NO: 15222009 NR Description: nucleolin, putative [Arabidopsis thaliana]
  misc_feature (1)..(208): NCBI GI NO: 21700195 NR Description: tobacco nucleolin [Nicotiana tabacum]
  misc_feature (1)..(229): NCBI GI NO: 21700195 NR Description: tobacco nucleolin [Nicotiana tabacum]
  misc_feature (23)..(228): NCBI GI NO: 9294322 NR Description: contains similarity to nucleolin
  misc_feature (1)..(234): NCBI GI NO: 7440063 NR Description: nucleolin homolog nuM1 - alfalfa
  misc_feature (1)..(229): NCBI GI NO: 40253662 NR Description: putative nucleolin
MGKSSKKSAVAVAPAAGLVPDGKSLKKGKRNAEDDIEKAVSAKKQKTAPEKAVPVKNDLKVKKLPPKKVESSSSDEDSSESEDEVTVQPKKAAPSAKQESSFDSSDESSSDDEPAKKPATASKKPAALASNGSKKVKSDSSSSDSSSDEDVMVPPKKAAQSAKQESSSDGSDESSSDDEPAKKSAATSKKPAAKTEDSDSSSSDEDEDMLPAKAPAAAKKIDESSESSDFGSSALMMPSEHNLLVFSMRKKMI

SEQ ID NO: 17820 - DNA, 1273 bp, Triticum aestivum
  misc_feature (1)..(1273): Ceres Seq. ID no. 14302998
ctccactctaggaagcaatctagctagctatcaaggcgcctagccatgtccaacccgtacaccttcctcaggcctcatatagatcgtcctttcttccccttccaaagaagcctagtctctccatcctctcccccaaaacaagcactccctctcctaagccttctcccttcgagccatgatcacagcaagatccttggttgtgggtatgccggtgatgatgatcatcatcaacttaagaaggaagatgaggatgtgaacatctcactccaaattgggccgccgaatccgaaccccgcgcctaatcttttaaggagtactgtgagtgatggtggttgcgatgatgcaacaggaacaacacaggatcagtgtggtggtggcgatcacagcagggcggacgagcaggaggaagaggaagacgacgatgatgatgccgccggtgatggtctttgttcggagtactttgccgctggtaagcttaccaagggcaagtattggatccctacccccgctcagatcctcattgggcccactcacttcgcctgcccggtgtgctgcaagaccttcagcagatacaacaacctgcagatgcacatgtggggacacgggtcgcagtaccgccgcgggcctgactccctccgcggcacgcagccggcggcgatgctccggctgccgtgcttctgctgcgcgccggggtgccggagccacgtggaccacccgcgggcgcggccgctcaaggacttccggacgctgcagacgcactacaagcgcaggcactgtgccaagccattcctctgccgcaagtgcggcaaggcgctcgccgtgcgcggcgactggcgaactcacgagaagaactgcggccgccggtggcactgcacctgcggctctgacttcaagcacaagcgctcgctcaaggatcacattcgggccttcgggcaggaccacgtcgagcggccgcccgccgccaaaatgtgaccgtcgagagccacggacgataaatatgcatggccaaacggcctgccagtgattatacgattgcttgtgcaatattaggggaccgattgatttgggtatccatggtattctccttcgcataataagcattactatgttactagctgctagctgaactcagtttgattattacacttttttttaactattttgttcttattcaagtgctatgtgcgtattttagcgtgttaatcgtagacttgtaagttatggcaacttaatttgttcagtaatattcttattttgtatttgtttcatggtc

SEQ ID NO: 17821 - protein, 308 aa, Triticum aestivum
  peptide (1)..(308): Ceres Seq. ID no. 14302999
  misc_feature (274)..(299): Pfam Name: Pfam Description:  Zinc finger, C2H2 type
  misc_feature (58)..(299): NCBI GI NO: 15230370 NR Description: zinc finger - like protein [Arabidopsis thaliana]
  misc_feature (58)..(299): NCBI GI NO: 28973719 NR Description: putative zinc finger protein
  misc_feature (6)..(300): NCBI GI NO: 9294415 NR Description: zinc finger-like protein [Arabidopsis thaliana]
  misc_feature (6)..(300): NCBI GI NO: 30685975 NR Description: DNA-binding protein -related
  misc_feature (25)..(300): NCBI GI NO: 15223781 NR Description: expressed protein [Arabidopsis thaliana]
  misc_feature (130)..(303): NCBI GI NO: 30693123 NR Description: transparent testa 1 (TT1) protein
  misc_feature (130)..(303): NCBI GI NO: 18253283 NR Description: transparent testa 1 [Arabidopsis thaliana]
  misc_feature (34)..(308): NCBI GI NO: 34908460 NR Description: P0683F02.21
  misc_feature (148)..(303): NCBI GI NO: 15223175 NR Description: WIP3 protein [Arabidopsis thaliana]
  misc_feature (127)..(299): NCBI GI NO: 18376601 NR Description: WIP1 protein [Glycine max]
MSNPYTFLRPHIDRPFFPFQRSLVSPSSPPKQALPLLSLLPSSHDHSKILGCGYAGDDDHHQLKKEDEDVNISLQIGPPNPNPAPNLLRSTVSDGGCDDATGTTQDQCGGGDHSRADEQEEEEDDDDDAAGDGLCSEYFAAGKLTKGKYWIPTPAQILIGPTHFACPVCCKTFSRYNNLQMHMWGHGSQYRRGPDSLRGTQPAAMLRLPCFCCAPGCRSHVDHPRARPLKDFRTLQTHYKRRHCAKPFLCRKCGKALAVRGDWRTHEKNCGRRWHCTCGSDFKHKRSLKDHIRAFGQDHVERPPAAKM

SEQ ID NO: 17822 - protein, 232 aa, Triticum aestivum
  peptide (1)..(232): Ceres Seq. ID no. 14303000
  misc_feature (71)..(195): Pfam Name: Pfam Description:  Equine herpesvirus glycoprotein gp2
MVVAMMQQEQHRISVVVAITAGRTSRRKRKTTMMMPPVMVFVRSTLPLVSLPRASIGSLPPLRSSLGPLTSPARCAARPSADTTTCRCTCGDTGRSTAAGLTPSAARSRRRCSGCRASAARRGAGATWTTRGRGRSRTSGRCRRTTSAGTVPSHSSAASAARRSPCAATGELTRRTAAAGGTAPAALTSSTSARSRITFGPSGRTTSSGRPPPKCDRREPRTINMHGQTACQ

SEQ ID NO: 17823 - protein, 228 aa, Triticum aestivum
  peptide (1)..(228): Ceres Seq. ID no. 14303001
  misc_feature (67)..(191): Pfam Name: Pfam Description:  Equine herpesvirus glycoprotein gp2
MMQQEQHRISVVVAITAGRTSRRKRKTTMMMPPVMVFVRSTLPLVSLPRASIGSLPPLRSSLGPLTSPARCAARPSADTTTCRCTCGDTGRSTAAGLTPSAARSRRRCSGCRASAARRGAGATWTTRGRGRSRTSGRCRRTTSAGTVPSHSSAASAARRSPCAATGELTRRTAAAGGTAPAALTSSTSARSRITFGPSGRTTSSGRPPPKCDRREPRTINMHGQTACQ

SEQ ID NO: 17824 - DNA, 1655 bp, Triticum aestivum
  misc_feature (1)..(1655): Ceres Seq. ID no. 14308045
acccgatgcgcctggctggctttcgattgatcacacgagacatgtagaaaccacatgcgtttccaacctagttagatagaaggatggacgccttggcggggctctcggcctttgccgcggtggcgctgccgctcctcctgctgtacagcgtgcaccggtggaggaaccctcggtgcaacggccggctcccgccggggtccatgggcctcccgctcgtcggcgagacgttccagttcttctccccggacgcctccttggacgtccctcgcttcatccgagacaggctcacgaggtacggcccgatcttcaagacgagcgtggtggggcacccggtggtggtgtcggcggacgaggagctgaaccacatggtgttccagcaggagggggagctgttccagagctggtacccggactcgttcgtggagatcctcggccgcgacaacgtcggggagcagaagggcaccatgttcaagtacctcaagaacatggtgctcaggttcttcggcccggagagcctcaaggagtccatcctccgcgacgtccagcgcgccgtctgcagctcgctctgcacctggtccaccctgccggccgtcgacttcaaagaagccgtctccaccatggtgtttgaactttcggcgagcaagctgctcggcctggagccgtcgaggtccaaggttctacggaagagcttcttcgacttcgttctagggctcatctccttcccgctctacctgccaggaacagcctactacgcatgcatgcagggacggatgagtgtaatggaggtgctgcagcaggtgttggaggagaggacgagatcagctgaggcggccggaggaggggaagcacggtgccacggcgacttcctggactacgtcgtccaggagatcaccaaggagaagccggtcctgacggagggaatggcgctggacctcctgtttgtgctcctcttcgccagcttccacaccacgtcgctggccatcaccctggccgtcaagctcctcaccgacaaccctcgcgtcctggaggaactcacggtggagcatgaaacgattctgaacgagcgtgaggcaggcggtgagactgatggcgacagacttacatggaaagagtacaaatccatgacattcacatcccaggtgataaacgagacggtccgactggccaacattgcgcctggcatcttcagaaagacactgaaagatgtacagttcagagtctacacaattccagctggatggggagtgatggtctgccctctcgcggtgcacctgaatccagatatttaccctgaccccctcaccttcaatccttcaaggtttaaggataaactagaggcaaaccgtgggtcaagacacttcatggctttcggaggaggtctccggtcctgtgttggagcagacttcagcaagctacaaatggccattttccttcactttcttgtcaccaaatataggtggatacaactaggtggaggcaagatagtccggtgtccagggctggaatttcctgatggttacctcattcagattagacagagagactaatcaacacctgctttcaagtcatgctagcagtaggaaaagcttatatcacacgtgtacaattgttctagcatgttgtttgatgaaataacagttgtgcagaagtattat

SEQ ID NO: 17825 - protein, 487 aa, Triticum aestivum
  peptide (1)..(487): Ceres Seq. ID no. 14308046
  misc_feature (213)..(483): Pfam Name: Pfam Description:  Cytochrome P450
  misc_feature (1)..(486): NCBI GI NO: 38567916 NR Description: OSJNBa0088I22.12
  misc_feature (1)..(483): NCBI GI NO: 20520627 NR Description: putative cytochrome P450
  misc_feature (11)..(483): NCBI GI NO: 38567920 NR Description: OSJNBa0088I22.16
  misc_feature (13)..(487): NCBI GI NO: 30682922 NR Description: cytochrome P450, putative [Arabidopsis thaliana]
  misc_feature (13)..(487): NCBI GI NO: 9502380 NR Description: T12C24.27 [Arabidopsis thaliana]
  misc_feature (7)..(486): NCBI GI NO: 18483228 NR Description: putative cytochrome P450-like protein
  misc_feature (1)..(414): NCBI GI NO: 38567917 NR Description: OSJNBa0088I22.13
  misc_feature (143)..(462): NCBI GI NO: 28564842 NR Description: putative cytochrome P450
  misc_feature (28)..(157): NCBI GI NO: 28564842 NR Description: putative cytochrome P450
  misc_feature (79)..(483): NCBI GI NO: 27764671 NR Description: putative hydroxylase
MDALAGLSAFAAVALPLLLLYSVHRWRNPRCNGRLPPGSMGLPLVGETFQFFSPDASLDVPRFIRDRLTRYGPIFKTSVVGHPVVVSADEELNHMVFQQEGELFQSWYPDSFVEILGRDNVGEQKGTMFKYLKNMVLRFFGPESLKESILRDVQRAVCSSLCTWSTLPAVDFKEAVSTMVFELSASKLLGLEPSRSKVLRKSFFDFVLGLISFPLYLPGTAYYACMQGRMSVMEVLQQVLEERTRSAEAAGGGEARCHGDFLDYVVQEITKEKPVLTEGMALDLLFVLLFASFHTTSLAITLAVKLLTDNPRVLEELTVEHETILNEREAGGETDGDRLTWKEYKSMTFTSQVINETVRLANIAPGIFRKTLKDVQFRVYTIPAGWGVMVCPLAVHLNPDIYPDPLTFNPSRFKDKLEANRGSRHFMAFGGGLRSCVGADFSKLQMAIFLHFLVTKYRWIQLGGGKIVRCPGLEFPDGYLIQIRQRD

SEQ ID NO: 17826 - protein, 448 aa, Triticum aestivum
  peptide (1)..(448): Ceres Seq. ID no. 14308047
  misc_feature (174)..(444): Pfam Name: Pfam Description:  Cytochrome P450
  misc_feature (1)..(447): NCBI GI NO: 38567916 NR Description: OSJNBa0088I22.12
  misc_feature (1)..(444): NCBI GI NO: 20520627 NR Description: putative cytochrome P450
  misc_feature (1)..(444): NCBI GI NO: 38567920 NR Description: OSJNBa0088I22.16
  misc_feature (1)..(448): NCBI GI NO: 30682922 NR Description: cytochrome P450, putative [Arabidopsis thaliana]
  misc_feature (1)..(448): NCBI GI NO: 9502380 NR Description: T12C24.27 [Arabidopsis thaliana]
  misc_feature (1)..(447): NCBI GI NO: 18483228 NR Description: putative cytochrome P450-like protein
  misc_feature (1)..(375): NCBI GI NO: 38567917 NR Description: OSJNBa0088I22.13
  misc_feature (104)..(423): NCBI GI NO: 28564842 NR Description: putative cytochrome P450
  misc_feature (1)..(118): NCBI GI NO: 28564842 NR Description: putative cytochrome P450
  misc_feature (40)..(444): NCBI GI NO: 27764671 NR Description: putative hydroxylase
MGLPLVGETFQFFSPDASLDVPRFIRDRLTRYGPIFKTSVVGHPVVVSADEELNHMVFQQEGELFQSWYPDSFVEILGRDNVGEQKGTMFKYLKNMVLRFFGPESLKESILRDVQRAVCSSLCTWSTLPAVDFKEAVSTMVFELSASKLLGLEPSRSKVLRKSFFDFVLGLISFPLYLPGTAYYACMQGRMSVMEVLQQVLEERTRSAEAAGGGEARCHGDFLDYVVQEITKEKPVLTEGMALDLLFVLLFASFHTTSLAITLAVKLLTDNPRVLEELTVEHETILNEREAGGETDGDRLTWKEYKSMTFTSQVINETVRLANIAPGIFRKTLKDVQFRVYTIPAGWGVMVCPLAVHLNPDIYPDPLTFNPSRFKDKLEANRGSRHFMAFGGGLRSCVGADFSKLQMAIFLHFLVTKYRWIQLGGGKIVRCPGLEFPDGYLIQIRQRD

SEQ ID NO: 17827 - protein, 393 aa, Triticum aestivum
  peptide (1)..(393): Ceres Seq. ID no. 14308048
  misc_feature (119)..(389): Pfam Name: Pfam Description:  Cytochrome P450
  misc_feature (1)..(392): NCBI GI NO: 38567916 NR Description: OSJNBa0088I22.12
  misc_feature (1)..(389): NCBI GI NO: 20520627 NR Description: putative cytochrome P450
  misc_feature (1)..(389): NCBI GI NO: 38567920 NR Description: OSJNBa0088I22.16
  misc_feature (1)..(393): NCBI GI NO: 30682922 NR Description: cytochrome P450, putative [Arabidopsis thaliana]
  misc_feature (1)..(393): NCBI GI NO: 9502380 NR Description: T12C24.27 [Arabidopsis thaliana]
  misc_feature (1)..(392): NCBI GI NO: 18483228 NR Description: putative cytochrome P450-like protein
  misc_feature (1)..(320): NCBI GI NO: 38567917 NR Description: OSJNBa0088I22.13
  misc_feature (49)..(368): NCBI GI NO: 28564842 NR Description: putative cytochrome P450
  misc_feature (1)..(63): NCBI GI NO: 28564842 NR Description: putative cytochrome P450
  misc_feature (1)..(389): NCBI GI NO: 27764671 NR Description: putative hydroxylase
MVFQQEGELFQSWYPDSFVEILGRDNVGEQKGTMFKYLKNMVLRFFGPESLKESILRDVQRAVCSSLCTWSTLPAVDFKEAVSTMVFELSASKLLGLEPSRSKVLRKSFFDFVLGLISFPLYLPGTAYYACMQGRMSVMEVLQQVLEERTRSAEAAGGGEARCHGDFLDYVVQEITKEKPVLTEGMALDLLFVLLFASFHTTSLAITLAVKLLTDNPRVLEELTVEHETILNEREAGGETDGDRLTWKEYKSMTFTSQVINETVRLANIAPGIFRKTLKDVQFRVYTIPAGWGVMVCPLAVHLNPDIYPDPLTFNPSRFKDKLEANRGSRHFMAFGGGLRSCVGADFSKLQMAIFLHFLVTKYRWIQLGGGKIVRCPGLEFPDGYLIQIRQRD

SEQ ID NO: 17828 - DNA, 721 bp, Triticum aestivum
  misc_feature (1)..(721): Ceres Seq. ID no. 12783233
atgtaggttctttcttccgctccggtcctggaatttgggcagccagcactgagccttcatcaccccttccgccagaggcaaagcaagactctgaactaactgaagggactgttttgactggctgtgaagaaggcccaaggaggaggcggccatgagcgagtctgggcagaggtcgagggcgtggccaccgggggacgccgcgatgacgccgtccgagccggctgcggccgcggacgcgacgggcgaggcgacgacgctgagggacttcggcacgtccatggacgccatctccttcggcttcgcggccacggccatcctcatctccatcttcctcctcatggccatcttcgagcacctcatcaggccccaggccttccaggcgccggccgactccccgggcggcagacgccggcgtggccaccgctcgcccggcaaaccccggagcccgcccatggtgcagacggtgctgcaggcggcggacctgtcggtgctgatgccggggcagcggtacccgacctacctcgcgcagccggcgccattgccgccgccgtgccccagggagggggtgcactggccgccgcacgaccaccaccgctcccacatgccaccctgaccatctcactcggtcgaaagtttcgttcagtttttgtacagcgggagattgttgtaaaagccggagaatgtgaacaaaaatcctggtttgttgtcggtgccgttctcc

SEQ ID NO: 17829 - protein, 153 aa, Triticum aestivum
  peptide (1)..(153): Ceres Seq. ID no. 12783234
  misc_feature (4)..(153): NCBI GI NO: 34907352 NR Description: P0471B04.10
  misc_feature (41)..(142): NCBI GI NO: 22329455 NR Description: hypothetical protein; protein id: At1g09812.1
MSESGQRSRAWPPGDAAMTPSEPAAAADATGEATTLRDFGTSMDAISFGFAATAILISIFLLMAIFEHLIRPQAFQAPADSPGGRRRRGHRSPGKPRSPPMVQTVLQAADLSVLMPGQRYPTYLAQPAPLPPPCPREGVHWPPHDHHRSHMPP

SEQ ID NO: 17830 - protein, 136 aa, Triticum aestivum
  peptide (1)..(136): Ceres Seq. ID no. 12783235
  misc_feature (1)..(136): NCBI GI NO: 34907352 NR Description: P0471B04.10
  misc_feature (24)..(125): NCBI GI NO: 22329455 NR Description: hypothetical protein; protein id: At1g09812.1
MTPSEPAAAADATGEATTLRDFGTSMDAISFGFAATAILISIFLLMAIFEHLIRPQAFQAPADSPGGRRRRGHRSPGKPRSPPMVQTVLQAADLSVLMPGQRYPTYLAQPAPLPPPCPREGVHWPPHDHHRSHMPP

SEQ ID NO: 17831 - protein, 111 aa, Triticum aestivum
  peptide (1)..(111): Ceres Seq. ID no. 12783236
  misc_feature (1)..(111): NCBI GI NO: 34907352 NR Description: P0471B04.10
  misc_feature (1)..(100): NCBI GI NO: 22329455 NR Description: hypothetical protein; protein id: At1g09812.1
MDAISFGFAATAILISIFLLMAIFEHLIRPQAFQAPADSPGGRRRRGHRSPGKPRSPPMVQTVLQAADLSVLMPGQRYPTYLAQPAPLPPPCPREGVHWPPHDHHRSHMPP

SEQ ID NO: 17832 - DNA, 462 bp, Triticum aestivum
  misc_feature (1)..(462): Ceres Seq. ID no. 13660322
attatttcaaaaaactcctccgtattttcgtctactactccgaattaataataatcccgcaaaatctctccgtccccagctactcccccggatccgatcgccaccgccggaatatccgatctctctgccgccgccgccgcccgagacctgctcgtcggaattccccgcggcggcgcatgtcgctggcgtgcgggctgccgctgctggagtgtgtctactgcctggggtgcgcgcggtgggcgtggaagcggtgcgtccactccggccaccacgacagcgccacctggggccacgccgccgccgccgacttcgcgcccgtgccccgcatgtgccgcctcgtcatggccaactacgccccgcccgacctcctcgccgccccgccgctcctcctcgacccctcaaacgtcgtgcgccgccgcacctacgccgacacggggggccgcgtcacgccctacctcgtct

SEQ ID NO: 17833 - protein, 153 aa, Triticum aestivum
  peptide (1)..(153): Ceres Seq. ID no. 13660323
  misc_feature (86)..(147): NCBI GI NO: 7949115 NR Description: Ser/Arg-related nuclear matrix protein
  misc_feature (86)..(147): NCBI GI NO: 23274133 NR Description: Similar to serine/arginine repetitive matrix 1
  misc_feature (86)..(147): NCBI GI NO: 34872074 NR Description: similar to Ser/Arg-related nuclear matrix protein
  misc_feature (91)..(152): NCBI GI NO: 23274133 NR Description: Similar to serine/arginine repetitive matrix 1
  misc_feature (19)..(55): NCBI GI NO: 81286 NR Description: extensin - Volvox carteri (fragment)
LFQKTPPYFRLLLRINNNPAKSLRPQLLPRIRSPPPEYPISLPPPPPETCSSEFPAAAHVAGVRAAAAGVCLLPGVRAVGVEAVRPLRPPRQRHLGPRRRRRLRARAPHVPPRHGQLRPARPPRRPAAPPRPLKRRAPPHLRRHGGPRHALPR

SEQ ID NO: 17834 - protein, 153 aa, Triticum aestivum
  peptide (1)..(153): Ceres Seq. ID no. 13660324
  misc_feature (59)..(152): NCBI GI NO: 7486555 NR Description: hypothetical protein F6N23
  misc_feature (59)..(152): NCBI GI NO: 30678658 NR Description: calmodulin-binding heat-shock protein
  misc_feature (59)..(152): NCBI GI NO: 34901742 NR Description: P0434A03.37
  misc_feature (59)..(152): NCBI GI NO: 15229078 NR Description: calmodulin-binding heat-shock protein
  misc_feature (59)..(152): NCBI GI NO: 7489106 NR Description: calmodulin-binding heat-shock protein
  misc_feature (59)..(152): NCBI GI NO: 15240318 NR Description: calmodulin-binding heat-shock protein
  misc_feature (59)..(152): NCBI GI NO: 9757980 NR Description: calmodulin-binding heat-shock protein
  misc_feature (25)..(58): NCBI GI NO: 7949115 NR Description: Ser/Arg-related nuclear matrix protein
  misc_feature (25)..(58): NCBI GI NO: 23274133 NR Description: Similar to serine/arginine repetitive matrix 1
  misc_feature (25)..(58): NCBI GI NO: 34872074 NR Description: similar to Ser/Arg-related nuclear matrix protein
YFKKLLRIFVYYSELIIIPQNLSVPSYSPGSDRHRRNIRSLCRRRRPRPARRNSPRRRMSLACGLPLLECVYCLGCARWAWKRCVHSGHHDSATWGHAAAADFAPVPRMCRLVMANYAPPDLLAAPPLLLDPSNVVRRRTYADTGGRVTPYLV

SEQ ID NO: 17835 - protein, 95 aa, Triticum aestivum
  peptide (1)..(95): Ceres Seq. ID no. 13660325
  misc_feature (1)..(94): NCBI GI NO: 7486555 NR Description: hypothetical protein F6N23
  misc_feature (1)..(94): NCBI GI NO: 30678658 NR Description: calmodulin-binding heat-shock protein
  misc_feature (1)..(94): NCBI GI NO: 34901742 NR Description: P0434A03.37
  misc_feature (1)..(94): NCBI GI NO: 15229078 NR Description: calmodulin-binding heat-shock protein
  misc_feature (1)..(94): NCBI GI NO: 7489106 NR Description: calmodulin-binding heat-shock protein
  misc_feature (1)..(94): NCBI GI NO: 15240318 NR Description: calmodulin-binding heat-shock protein
  misc_feature (1)..(94): NCBI GI NO: 9757980 NR Description: calmodulin-binding heat-shock protein
  misc_feature (1)..(57): NCBI GI NO: 13324799 NR Description: putative calmodulin-binding heat-shock protein
MSLACGLPLLECVYCLGCARWAWKRCVHSGHHDSATWGHAAAADFAPVPRMCRLVMANYAPPDLLAAPPLLLDPSNVVRRRTYADTGGRVTPYLV

SEQ ID NO: 17836 - DNA, 1204 bp, Triticum aestivum
  misc_feature (1)..(1204): Ceres Seq. ID no. 15169545
ctagtaaaaccgaccagagccgcaacaaacactatcgaaccgaagccggaggtctggcgattcgaccctcgagaggcggccgagccgagcagacgccatggaccgcgagtggggctccaagcccggcagcggcggcgccgccacctcccagaatgaggccatcgaccggcgggagcgcctgcgccgcctcgcgctcgagaccatcgacctcgccaaggacccctacttcatgcgaaaccatctcggcagctatgagtgcaagctctgcctgacgctccacaacaacgaggggaactacctcgcgcacacgcaggggaagcggcaccagaccaacctcgccaagcgtgccgcccgcgaggccaaggacgcgcccgcgcagccccagccaaacaagcgcaagctcgcgccccgcaagtctgttaagattggcagacctggatatacagtaactaaacagtatgatcctgacacgaagcaacactcttttctctttgagattgagtatcctgaaatcgaagataatagcaagccaaggcaccgtttcatggcatcatatgaacagaaaatccaatcttgggataagaggtaccaatatctgctttttgcagcggagccctatgaagtcattggctttaagataccaagcacagagattgacaaatcaacagacaagtttttctcgtattgggatccggacaagaagtcatacattctgcaactatacttcaagccaagagcaccggagattaacagacaaccagcagctcctggtactgtcccaaatgggacaggaggccctcctggtgctccaccaaggccaccatcccagccacaggctctgccgccacctccaccgaatgcacctatgggaatgccccctaggatcccgccaccaccaatgagcggtcttcaacctccaccccctccgcctccgcttgcaaatggtcctccgcgttcaataccacctccacctccttctggtggtccaatggctaactttactcctggagcacctccgccacgctttccgatgcaaggctaccctggacctcagcagtaggtgatctgagtgtgggcaagagagatcaggctacaaattttgaacacttgctttatccaaaccagtatgtgctacattgttgtctgaaattttactgtataagcagattaaattatttaagtgcgctttcaagcaaagcattct

SEQ ID NO: 17837 - protein, 320 aa, Triticum aestivum
  peptide (1)..(320): Ceres Seq. ID no. 15169546
  misc_feature (212)..(304): Pfam Name: Pfam Description:  Formin Homology 2 Domain
  misc_feature (49)..(320): NCBI GI NO: 34902138 NR Description: hypothetical protein
  misc_feature (1)..(52): NCBI GI NO: 34902138 NR Description: hypothetical protein
  misc_feature (1)..(276): NCBI GI NO: 18403023 NR Description: spliceosome associated protein-family
  misc_feature (1)..(276): NCBI GI NO: 7488346 NR Description: probable spliceosome-associated protein SAP62homolog T26B15
  misc_feature (6)..(318): NCBI GI NO: 27371271 NR Description: Similar to splicing factor 3a, subunit 2, 66kDa
  misc_feature (6)..(318): NCBI GI NO: 21361376 NR Description: splicing factor 3a, subunit 2, 66kDa
  misc_feature (6)..(318): NCBI GI NO: 30931324 NR Description: Unknown (protein for MGC:64703) [Mus musculus]
  misc_feature (6)..(318): NCBI GI NO: 627605 NR Description: spliceosome-associated protein SAP 62 - human
  misc_feature (6)..(318): NCBI GI NO: 34862283 NR Description: similar to Splicing factor 3A subunit 2
  misc_feature (6)..(318): NCBI GI NO: 10800150 NR Description: splicing factor 3a, subunit 2
MDREWGSKPGSGGAATSQNEAIDRRERLRRLALETIDLAKDPYFMRNHLGSYECKLCLTLHNNEGNYLAHTQGKRHQTNLAKRAAREAKDAPAQPQPNKRKLAPRKSVKIGRPGYTVTKQYDPDTKQHSFLFEIEYPEIEDNSKPRHRFMASYEQKIQSWDKRYQYLLFAAEPYEVIGFKIPSTEIDKSTDKFFSYWDPDKKSYILQLYFKPRAPEINRQPAAPGTVPNGTGGPPGAPPRPPSQPQALPPPPPNAPMGMPPRIPPPPMSGLQPPPPPPPLANGPPRSIPPPPPSGGPMANFTPGAPPPRFPMQGYPGPQQ

SEQ ID NO: 17838 - protein, 276 aa, Triticum aestivum
  peptide (1)..(276): Ceres Seq. ID no. 15169547
  misc_feature (168)..(260): Pfam Name: Pfam Description:  Formin Homology 2 Domain
  misc_feature (5)..(276): NCBI GI NO: 34902138 NR Description: hypothetical protein
  misc_feature (1)..(232): NCBI GI NO: 18403023 NR Description: spliceosome associated protein-family
  misc_feature (1)..(232): NCBI GI NO: 7488346 NR Description: probable spliceosome-associated protein SAP62homolog T26B15
  misc_feature (1)..(274): NCBI GI NO: 27371271 NR Description: Similar to splicing factor 3a, subunit 2, 66kDa
  misc_feature (1)..(274): NCBI GI NO: 21361376 NR Description: splicing factor 3a, subunit 2, 66kDa
  misc_feature (1)..(274): NCBI GI NO: 30931324 NR Description: Unknown (protein for MGC:64703) [Mus musculus]
  misc_feature (1)..(274): NCBI GI NO: 627605 NR Description: spliceosome-associated protein SAP 62 - human
  misc_feature (1)..(274): NCBI GI NO: 34862283 NR Description: similar to Splicing factor 3A subunit 2
  misc_feature (1)..(274): NCBI GI NO: 10800150 NR Description: splicing factor 3a, subunit 2
  misc_feature (1)..(167): NCBI GI NO: 7498869 NR Description: hypothetical protein F11A10
MRNHLGSYECKLCLTLHNNEGNYLAHTQGKRHQTNLAKRAAREAKDAPAQPQPNKRKLAPRKSVKIGRPGYTVTKQYDPDTKQHSFLFEIEYPEIEDNSKPRHRFMASYEQKIQSWDKRYQYLLFAAEPYEVIGFKIPSTEIDKSTDKFFSYWDPDKKSYILQLYFKPRAPEINRQPAAPGTVPNGTGGPPGAPPRPPSQPQALPPPPPNAPMGMPPRIPPPPMSGLQPPPPPPPLANGPPRSIPPPPPSGGPMANFTPGAPPPRFPMQGYPGPQQ

SEQ ID NO: 17839 - protein, 171 aa, Triticum aestivum
  peptide (1)..(171): Ceres Seq. ID no. 15169548
  misc_feature (63)..(155): Pfam Name: Pfam Description:  Formin Homology 2 Domain
  misc_feature (1)..(171): NCBI GI NO: 34902138 NR Description: hypothetical protein
  misc_feature (1)..(127): NCBI GI NO: 18403023 NR Description: spliceosome associated protein-family
  misc_feature (1)..(127): NCBI GI NO: 7488346 NR Description: probable spliceosome-associated protein SAP62homolog T26B15
  misc_feature (1)..(169): NCBI GI NO: 27371271 NR Description: Similar to splicing factor 3a, subunit 2, 66kDa
  misc_feature (1)..(169): NCBI GI NO: 21361376 NR Description: splicing factor 3a, subunit 2, 66kDa
  misc_feature (1)..(169): NCBI GI NO: 30931324 NR Description: Unknown (protein for MGC:64703) [Mus musculus]
  misc_feature (1)..(169): NCBI GI NO: 627605 NR Description: spliceosome-associated protein SAP 62 - human
  misc_feature (1)..(169): NCBI GI NO: 34862283 NR Description: similar to Splicing factor 3A subunit 2
  misc_feature (1)..(169): NCBI GI NO: 10800150 NR Description: splicing factor 3a, subunit 2
  misc_feature (1)..(62): NCBI GI NO: 7498869 NR Description: hypothetical protein F11A10
MASYEQKIQSWDKRYQYLLFAAEPYEVIGFKIPSTEIDKSTDKFFSYWDPDKKSYILQLYFKPRAPEINRQPAAPGTVPNGTGGPPGAPPRPPSQPQALPPPPPNAPMGMPPRIPPPPMSGLQPPPPPPPLANGPPRSIPPPPPSGGPMANFTPGAPPPRFPMQGYPGPQQ

SEQ ID NO: 17840 - DNA, 1993 bp, Triticum aestivum
  misc_feature (1)..(1993): Ceres Seq. ID no. 13660790
acctagaacatcctaatcaaaaaggcagcgtagcagaagcatttccggcaccgaaatttccatcgatctgaacgcccccaccggccggtcgaccctccaccaccacctaccggccccgtcgccgtcgccgtcgtctccagccccccctccgcccccaaaaccctagccccggccccggccccgccgcccccagagcccccaccatgtccaccaacggcagctccccgagggtcagggacacggagagcagcctggagaaggtgaagcggcagctgtcgacgggatccgggaggtacctgctgcagggccccctgctgaagcgatctgagacgctacggaaatggaacgaaagatggataatattggacccaacgtctggcaagatggaatacaaacttcggaggaatgaaactgctgttaagggaaccattctatttgatgcttcaagcaccattactttgtctcctgtaaattttcaaggcatgccaaagtatgacggatgctgtttctacattggaactcctcagaaaaaggattactttctttgcgctgaaactcctggtgctgccaaagcttgggtatctacattgcatgcaactcagttagtactacaagcgcataaagaggcagtaaattctttagctgggaatggctctccttctacattaggcacggttgctactgcagttgctaatgctaatgcaactgctttggaggcaatgaaggagatagatgcagcactgaaggtttcaatgagggcagctcttgggttgggtacaaataattcgaatgtgggtcaacttgatgatttgactatcatgaaggagactctccgagtgaaagatgaggagttgcagcatttggctaaggacattcgtgctcgtgacgccacaattcaggaaattgcagagaagttaacagagaccgcagaggctgcagaagcagcagcttctgcagctcatacaatcgatgaacagagacggcttctatgttcagagattgagcgtctgaaaaaagcaatggaaacacaaatggaacaatccatgcttaagctacggcaatctgaagagaaggtaattagcctgagcaaagagaacgaccagttgctgaaggaaagagacgccgcatttcaggaagcatatatgtggcgcactgaactaggaaaagctagagagcaagcagtgatacaggaagcagcaattgcccgagcagaggaaaaggtaagggtgtctgaagcggatgccgcggttcggcatcaaggaagctgctgaaaatttgcatgctgctgagaaagaaaaagaagaacttctagcccttattggtgttctccaatcacaagtgcagagagaacaaagcagcacgaagcaagtatgcgaggagagatccgagtcatgctccggcgccgacaactcccctccgctgacgaagcacgtcgacgcatcggacgacgacgtggacaaggcgtgcgtgagcgattcgagatcggtcttggtctcgagcgagagcacggaggtccagctggccgtggatggggtggacatccgccccatcggcgacccagagtggggcagcttccagcagccggaagcgctgattgccgacgtgcgggaggtctccccggaggcggaaggcagcagcctggatatcccggtggtcaacccggcaccggccaatgatcatatgcagggaggggcaacacatccctgaaggcctggaggtcttggagctgaccattgctttcttgggtggtttgtgattattgaggagactggcagggatttgaatcctctcgagaattacttttgtgtttttctttttgcgctgtttccgggttgtgtctccgttgtatttaagtatgcaactcaataaaaagatgatagcggtttgtcgtgtgattgtaaattattattcacgtcaaaaaaaaaaaaaaaaaagcttatcgattgtttaaacacaataaagtyggamcksgagggggggcccggtacccaat

SEQ ID NO: 17841 - protein, 355 aa, Triticum aestivum
  peptide (1)..(355): Ceres Seq. ID no. 15220057
  misc_feature (32)..(134): Pfam Name: Pfam Description:  PH domain
  misc_feature (1)..(350): NCBI GI NO: 40538917 NR Description: putative PH domain containing protein
  misc_feature (1)..(350): NCBI GI NO: 34394392 NR Description: unknown protein
  misc_feature (1)..(350): NCBI GI NO: 30684745 NR Description: expressed protein [Arabidopsis thaliana]
  misc_feature (104)..(350): NCBI GI NO: 34394393 NR Description: unknown protein
  misc_feature (131)..(350): NCBI GI NO: 25408106 NR Description: hypothetical protein At2g30880
  misc_feature (9)..(345): NCBI GI NO: 25408106 NR Description: hypothetical protein At2g30880
MSTNGSSPRVRDTESSLEKVKRQLSTGSGRYLLQGPLLKRSETLRKWNERWIILDPTSGKMEYKLRRNETAVKGTILFDASSTITLSPVNFQGMPKYDGCCFYIGTPQKKDYFLCAETPGAAKAWVSTLHATQLVLQAHKEAVNSLAGNGSPSTLGTVATAVANANATALEAMKEIDAALKVSMRAALGLGTNNSNVGQLDDLTIMKETLRVKDEELQHLAKDIRARDATIQEIAEKLTETAEAAEAAASAAHTIDEQRRLLCSEIERLKKAMETQMEQSMLKLRQSEEKVISLSKENDQLLKERDAAFQEAYMWRTELGKAREQAVIQEAAIARAEEKVRVSEADAAVRHQGSC

SEQ ID NO: 17842 - protein, 295 aa, Triticum aestivum
  peptide (1)..(295): Ceres Seq. ID no. 15220058
  misc_feature (1)..(74): Pfam Name: Pfam Description:  PH domain
  misc_feature (1)..(290): NCBI GI NO: 40538917 NR Description: putative PH domain containing protein
  misc_feature (1)..(290): NCBI GI NO: 34394392 NR Description: unknown protein
  misc_feature (1)..(290): NCBI GI NO: 30684745 NR Description: expressed protein [Arabidopsis thaliana]
  misc_feature (44)..(290): NCBI GI NO: 34394393 NR Description: unknown protein
  misc_feature (71)..(290): NCBI GI NO: 25408106 NR Description: hypothetical protein At2g30880
  misc_feature (1)..(285): NCBI GI NO: 25408106 NR Description: hypothetical protein At2g30880
MEYKLRRNETAVKGTILFDASSTITLSPVNFQGMPKYDGCCFYIGTPQKKDYFLCAETPGAAKAWVSTLHATQLVLQAHKEAVNSLAGNGSPSTLGTVATAVANANATALEAMKEIDAALKVSMRAALGLGTNNSNVGQLDDLTIMKETLRVKDEELQHLAKDIRARDATIQEIAEKLTETAEAAEAAASAAHTIDEQRRLLCSEIERLKKAMETQMEQSMLKLRQSEEKVISLSKENDQLLKERDAAFQEAYMWRTELGKAREQAVIQEAAIARAEEKVRVSEADAAVRHQGSC

SEQ ID NO: 17843 - protein, 262 aa, Triticum aestivum
  peptide (1)..(262): Ceres Seq. ID no. 15220059
  misc_feature (1)..(257): NCBI GI NO: 40538917 NR Description: putative PH domain containing protein
  misc_feature (1)..(257): NCBI GI NO: 34394392 NR Description: unknown protein
  misc_feature (1)..(257): NCBI GI NO: 30684745 NR Description: expressed protein [Arabidopsis thaliana]
  misc_feature (11)..(257): NCBI GI NO: 34394393 NR Description: unknown protein
  misc_feature (38)..(257): NCBI GI NO: 25408106 NR Description: hypothetical protein At2g30880
  misc_feature (1)..(252): NCBI GI NO: 25408106 NR Description: hypothetical protein At2g30880
MPKYDGCCFYIGTPQKKDYFLCAETPGAAKAWVSTLHATQLVLQAHKEAVNSLAGNGSPSTLGTVATAVANANATALEAMKEIDAALKVSMRAALGLGTNNSNVGQLDDLTIMKETLRVKDEELQHLAKDIRARDATIQEIAEKLTETAEAAEAAASAAHTIDEQRRLLCSEIERLKKAMETQMEQSMLKLRQSEEKVISLSKENDQLLKERDAAFQEAYMWRTELGKAREQAVIQEAAIARAEEKVRVSEADAAVRHQGSC

SEQ ID NO: 17844 - DNA, 1652 bp, Triticum aestivum
  misc_feature (1)..(1652): Ceres Seq. ID no. 13660333
gaacatcctaatcgaaaaaaatgcccccgaacagctgccgcgcaccgccatgccctctgcatcgacggccaccaaccagctccccttcctcctctcacctccccagcagatcacgcggcgagggaacgaagcccaccaccgacaaactcctccttctcttccagcttcccctcctccggcgccggtcctgcggcggccatggggatggtgcgggcggcgtggtttctgctcctgttggcgttgctcgcggcggcggacgcaaggaggcagaagggcggcgagacggcctgcgacaaggggtgggagtgcagcggcagcaggttctgctgcaacgagaccatcaccgactacttcaaggcctaccagttcgaggagctcttcgccaagcgcaacaactccctcgcccacgccgccggcttctgggactacaaggccttcatcaccgccgcggccctctacgagcctcgtgggttcggcaccaccggcggcagggagatgagcatgaaggaggtcgccgccttcctcggccacgtcggcgccaagacctcgtgtggatatagtctagctgacggtggttcattggcttggggtctttgctacaaccatgaaatgagcccaagccagagctactgtgacgacagcaacgaattataccgttgtgctgaaggagttgagtactatggtcgaggcgcccttcctgtttactggaactacaactatggtatcgtgggtaagggtatcaagcaggatctgttgaaccacccagagttattggaacaaaatgccactctagcatttgaagcagcgatctggaggtggatgactccaatgaagaggaagcagccatcagcccatgatgcctttgttggcaactggaaaccaaccaagaaagacactttgtccaagaggtatcctggcttcggtgcgacaatgaacattttgtatggtgatgccatctgtggtaaagggtccattgataatatgaatggcattatatcccactatcaacattatcttgatttgatgggagttggtgctcagcactctggagataacttggattgtgccgaccaagtgccattcaatccatcatcaaagagtcccgactcataaccaagttgcatgtcagatccatgtatattccccctgtacatttgaggtgcagctatcttgcatccgcaacgatagaagtattgtgtgcaattctatatgatagtactccctccgtttttatttagtccgcatattagctttggtcaaagtcaagctttgtaaactttgactaagtttataaacaaaaatattaacatatacaataaaaaatcaataccactagattcattattgaatgtactttcacatcatatagatttgttatggtaaatgtttatatatttttctataaatttggtcaaactttgcaaagtttgacttcggtcaaacctaatatgcagactgaataaaaacggagggagtatttattagtagctctgaggacgactgttgcatttgtgtagtctgtaacctatttatgtaagcccgtaaccttctctcattttgtgtttttgccatgtatattacagcagagaactcgcatttgaacacatgatgacttccttgtaaattatattacttctgttactaaaggtggg

SEQ ID NO: 17845 - protein, 370 aa, Triticum aestivum
  peptide (1)..(370): Ceres Seq. ID no. 15220020
  misc_feature (76)..(370): NCBI GI NO: 27817867 NR Description: OJ1081_B12.16
  misc_feature (79)..(365): NCBI GI NO: 15221283 NR Description: glycosyl hydrolase family 19 (chitinase)
  misc_feature (66)..(368): NCBI GI NO: 32401253 NR Description: class VII chitinase precursor [Gossypium hirsutum]
  misc_feature (93)..(370): NCBI GI NO: 15228911 NR Description: glycosyl hydrolase family 19 (chitinase)
  misc_feature (89)..(361): NCBI GI NO: 7798632 NR Description: class I chitinase [Arabis holboellii]
  misc_feature (97)..(361): NCBI GI NO: 17932710 NR Description: putative chitinase [Musa acuminata]
  misc_feature (89)..(361): NCBI GI NO: 7798664 NR Description: class I chitinase [Arabis lignifera]
  misc_feature (89)..(361): NCBI GI NO: 7798670 NR Description: class I chitinase [Arabis microphylla]
  misc_feature (89)..(361): NCBI GI NO: 7798644 NR Description: class I chitinase [Arabis fecunda]
  misc_feature (89)..(361): NCBI GI NO: 7798678 NR Description: class I chitinase [Arabis parishii]
EHPNRKKCPRTAAAHRHALCIDGHQPAPLPPLTSPADHAARERSPPPTNSSFSSSFPSSGAGPAAAMGMVRAAWFLLLLALLAAADARRQKGGETACDKGWECSGSRFCCNETITDYFKAYQFEELFAKRNNSLAHAAGFWDYKAFITAAALYEPRGFGTTGGREMSMKEVAAFLGHVGAKTSCGYSLADGGSLAWGLCYNHEMSPSQSYCDDSNELYRCAEGVEYYGRGALPVYWNYNYGIVGKGIKQDLLNHPELLEQNATLAFEAAIWRWMTPMKRKQPSAHDAFVGNWKPTKKDTLSKRYPGFGATMNILYGDAICGKGSIDNMNGIISHYQHYLDLMGVGAQHSGDNLDCADQVPFNPSSKSPDS

SEQ ID NO: 17846 - protein, 304 aa, Triticum aestivum
  peptide (1)..(304): Ceres Seq. ID no. 15220021
  misc_feature (10)..(304): NCBI GI NO: 27817867 NR Description: OJ1081_B12.16
  misc_feature (13)..(299): NCBI GI NO: 15221283 NR Description: glycosyl hydrolase family 19 (chitinase)
  misc_feature (1)..(302): NCBI GI NO: 32401253 NR Description: class VII chitinase precursor [Gossypium hirsutum]
  misc_feature (27)..(304): NCBI GI NO: 15228911 NR Description: glycosyl hydrolase family 19 (chitinase)
  misc_feature (23)..(295): NCBI GI NO: 7798632 NR Description: class I chitinase [Arabis holboellii]
  misc_feature (31)..(295): NCBI GI NO: 17932710 NR Description: putative chitinase [Musa acuminata]
  misc_feature (23)..(295): NCBI GI NO: 7798664 NR Description: class I chitinase [Arabis lignifera]
  misc_feature (23)..(295): NCBI GI NO: 7798670 NR Description: class I chitinase [Arabis microphylla]
  misc_feature (23)..(295): NCBI GI NO: 7798644 NR Description: class I chitinase [Arabis fecunda]
  misc_feature (23)..(295): NCBI GI NO: 7798678 NR Description: class I chitinase [Arabis parishii]
MGMVRAAWFLLLLALLAAADARRQKGGETACDKGWECSGSRFCCNETITDYFKAYQFEELFAKRNNSLAHAAGFWDYKAFITAAALYEPRGFGTTGGREMSMKEVAAFLGHVGAKTSCGYSLADGGSLAWGLCYNHEMSPSQSYCDDSNELYRCAEGVEYYGRGALPVYWNYNYGIVGKGIKQDLLNHPELLEQNATLAFEAAIWRWMTPMKRKQPSAHDAFVGNWKPTKKDTLSKRYPGFGATMNILYGDAICGKGSIDNMNGIISHYQHYLDLMGVGAQHSGDNLDCADQVPFNPSSKSPDS

SEQ ID NO: 17847 - protein, 302 aa, Triticum aestivum
  peptide (1)..(302): Ceres Seq. ID no. 15220022
  misc_feature (8)..(302): NCBI GI NO: 27817867 NR Description: OJ1081_B12.16
  misc_feature (11)..(297): NCBI GI NO: 15221283 NR Description: glycosyl hydrolase family 19 (chitinase)
  misc_feature (1)..(300): NCBI GI NO: 32401253 NR Description: class VII chitinase precursor [Gossypium hirsutum]
  misc_feature (25)..(302): NCBI GI NO: 15228911 NR Description: glycosyl hydrolase family 19 (chitinase)
  misc_feature (21)..(293): NCBI GI NO: 7798632 NR Description: class I chitinase [Arabis holboellii]
  misc_feature (29)..(293): NCBI GI NO: 17932710 NR Description: putative chitinase [Musa acuminata]
  misc_feature (21)..(293): NCBI GI NO: 7798664 NR Description: class I chitinase [Arabis lignifera]
  misc_feature (21)..(293): NCBI GI NO: 7798670 NR Description: class I chitinase [Arabis microphylla]
  misc_feature (21)..(293): NCBI GI NO: 7798644 NR Description: class I chitinase [Arabis fecunda]
  misc_feature (21)..(293): NCBI GI NO: 7798678 NR Description: class I chitinase [Arabis parishii]
MVRAAWFLLLLALLAAADARRQKGGETACDKGWECSGSRFCCNETITDYFKAYQFEELFAKRNNSLAHAAGFWDYKAFITAAALYEPRGFGTTGGREMSMKEVAAFLGHVGAKTSCGYSLADGGSLAWGLCYNHEMSPSQSYCDDSNELYRCAEGVEYYGRGALPVYWNYNYGIVGKGIKQDLLNHPELLEQNATLAFEAAIWRWMTPMKRKQPSAHDAFVGNWKPTKKDTLSKRYPGFGATMNILYGDAICGKGSIDNMNGIISHYQHYLDLMGVGAQHSGDNLDCADQVPFNPSSKSPDS

SEQ ID NO: 17848 - DNA, 882 bp, Triticum aestivum
  misc_feature (1)..(882): Ceres Seq. ID no. 13660334
aaaggcaaaccccaagaaaccccaaccggccaccaccaccaccacctcccgtcccgaccccgagacaaacacctcccactcgcggccatgcccccctgccaccgccgctgctgactagccatctgcgccgcgaccggtcaacatctatctcgccggaacatctgaatcaacatggacccggcccaggaggagctcgagcgccgcagccgctacctcagctcgctcgttcgccgcaccaggctcgacgacccgccccagccggagccggagccggagcgagagctcaaggtggagcggaaatcggcggcggagcccagcggcggggagggcaaggccgctaagccggaggccaaggacaacagggaggcggcgaaggtcaaaggggacgccgcgagcggggaggggaggaaggtggcggtgcgggtgcgcgcggcggacatgccgctggcgctgcagcggcgcgcgatctggatcgcccgggaggtcgtcctctccacgccgcgcctcgagagcaagcgcctcgcgctcgcgctcaagaaggaattcgacacgacatacgggcctgcttggcactgcattgtcggcacaagctttggctcctacgtcactcactccttaggaggcttcctgtacttttccgttgacaaggcgtacattcttctcttcagaaccgctgtcgagccactgagtaaaccgtgatgaggcctggaacctatcttctcacacacaagtgtagatttagcgcaaatgtgtaatttaaactgctgttttaggagctcgacggtagcaagtgtaagcagtggagaaggatcacctctccgcatacagaagtgtagcaaacatgcctctatgacctttaagtatctacgtaagctgctgctg

SEQ ID NO: 17849 - protein, 175 aa, Triticum aestivum
  peptide (1)..(175): Ceres Seq. ID no. 13660335
  misc_feature (83)..(168): Pfam Name: Pfam Description:  Dynein light chain type 1
  misc_feature (1)..(173): NCBI GI NO: 38567715 NR Description: B1358B12.13
  misc_feature (83)..(174): NCBI GI NO: 15220678 NR Description: dynein light subunit lc6, flagellar outer arm
  misc_feature (35)..(173): NCBI GI NO: 15241269 NR Description: dynein light chain - like protein
  misc_feature (8)..(169): NCBI GI NO: 34913978 NR Description: dynein light chain - like protein
  misc_feature (50)..(167): NCBI GI NO: 34902908 NR Description: unnamed protein product
  misc_feature (80)..(166): NCBI GI NO: 28829295 NR Description: similar to Anthocidaris crassispina (Sea urchin)
  misc_feature (53)..(167): NCBI GI NO: 28466885 NR Description: At4g15930 [Arabidopsis thaliana]
  misc_feature (85)..(167): NCBI GI NO: 5305389 NR Description: dynein light chain 2 [Schistosoma japonicum]
  misc_feature (85)..(167): NCBI GI NO: 2811014 NR Description: DYNEIN LIGHT CHAIN LC6, FLAGELLAR OUTER ARM
  misc_feature (74)..(167): NCBI GI NO: 15234756 NR Description: dynein light chain like protein
MDPAQEELERRSRYLSSLVRRTRLDDPPQPEPEPERELKVERKSAAEPSGGEGKAAKPEAKDNREAAKVKGDAASGEGRKVAVRVRAADMPLALQRRAIWIAREVVLSTPRLESKRLALALKKEFDTTYGPAWHCIVGTSFGSYVTHSLGGFLYFSVDKAYILLFRTAVEPLSKP

SEQ ID NO: 17850 - protein, 112 aa, Triticum aestivum
  peptide (1)..(112): Ceres Seq. ID no. 13660336
  misc_feature (10)..(107): Pfam Name: Pfam Description:  Caudal like protein activation region
  misc_feature (3)..(112): NCBI GI NO: 15609976 NR Description: infB [Mycobacterium tuberculosis H37Rv]
  misc_feature (1)..(112): NCBI GI NO: 23019271 NR Description: hypothetical protein [Thermobifida fusca]
  misc_feature (4)..(112): NCBI GI NO: 15827818 NR Description: initiation factor IF-2 [Mycobacterium leprae]
  misc_feature (10)..(112): NCBI GI NO: 25028434 NR Description: putative translation initiation factor IF-2
  misc_feature (4)..(112): NCBI GI NO: 9790179 NR Description: proline-rich protein MP5
  misc_feature (72)..(112): NCBI GI NO: 1076731 NR Description: RNA binding protein - barley
  misc_feature (11)..(112): NCBI GI NO: 3915138 NR Description: TonB protein
  misc_feature (4)..(112): NCBI GI NO: 19553189 NR Description: translation initiation factor 2
  misc_feature (7)..(112): NCBI GI NO: 29829093 NR Description: putative translation initiation factor IF-2
  misc_feature (82)..(112): NCBI GI NO: 7024451 NR Description: glycine-rich RNA-binding protein [Citrus unshiu]
RQTPRNPNRPPPPPPPVPTPRQTPPTRGHAPLPPPLLTSHLRRDRSTSISPEHLNQHGPGPGGARAPQPLPQLARSPHQARRPAPAGAGAGARAQGGAEIGGGAQRRGGQGR

SEQ ID NO: 17851 - DNA, 996 bp, Triticum aestivum
  misc_feature (1)..(996): Ceres Seq. ID no. 12780822
atacttctctagtttatactaccccggatccccttgctttgcgcgcgctagtaggagtacgccgcctgccgccatctccgttagactagtcgccagcgccatatggaggactacggcggcgtggcgagcctggtggcgtccggggtggtgttgtggtcgacggcgttcctgctgctgcgggcgctgctccccaagcgctcctacgacttctgcaaccgcgcggtctccaccatgcacgccgtcgccggcgtcgccctcggctgcctctccgtgcaggactgggcctcccccgtctcccccgtcgcctcaccctcctcgccaagccagatgagggcgctggcggtgacgctgtcctacatgatctacgacggggcgtgctgccacctgagcggcgacgcgcggttggacaacgccttgcaccacctcatcagcatcgtcggcctcgccgccggcctcgcctaccagaggtgtgggacggagctggtggcgtgcctgctcgtcacggagatatccagcccgctgctgcacctcagggagatgctcaaggagctcggcgtcaaggacacggacctcaacctcctcgtcgacatcctgttcgcggtgaccttctcggtggcacggatggtttgcgggacgtacgtcacctaccgcactgtcacggctgacaaccccatcctcatcaaggcgatggcgacgagcttgctgctggtgagcgcctactggttcttgaggatcctcaggatggtcaggcacaagattgggaagaagaggctggcgtccaaagccgccggcaaggaatctatgtgatgccacaagtggtgtctcgccgcaattattgttgaaaatgcacgttatgtagtagtactactatctagcgcattaatcgtgtggtgggtaaaggatgatgtcccaagcatgagatgcatgtattctggtcattttcattttattaatgtgcatgaactgttaatgtcacaagcatgagctgtttcgctc

SEQ ID NO: 17852 - protein, 234 aa, Triticum aestivum
  peptide (1)..(234): Ceres Seq. ID no. 12780823
  misc_feature (11)..(230): NCBI GI NO: 34903030 NR Description: unnamed protein product
  misc_feature (2)..(227): NCBI GI NO: 30693154 NR Description: expressed protein [Arabidopsis thaliana]
  misc_feature (10)..(227): NCBI GI NO: 22330031 NR Description: hypothetical protein; protein id: At1g45010
  misc_feature (2)..(206): NCBI GI NO: 15219511 NR Description: hypothetical protein; protein id: At1g35170.1
  misc_feature (2)..(163): NCBI GI NO: 25518603 NR Description: hypothetical protein T32G9
  misc_feature (18)..(232): NCBI GI NO: 27661880 NR Description: hypothetical protein XP_236191 [Rattus norvegicus]
  misc_feature (18)..(232): NCBI GI NO: 34535216 NR Description: unnamed protein product [Homo sapiens]
  misc_feature (10)..(83): NCBI GI NO: 25405881 NR Description: protein F27F5.9 [imported] - Arabidopsis thaliana
  misc_feature (114)..(163): NCBI GI NO: 25405881 NR Description: protein F27F5.9 [imported] - Arabidopsis thaliana
MEDYGGVASLVASGVVLWSTAFLLLRALLPKRSYDFCNRAVSTMHAVAGVALGCLSVQDWASPVSPVASPSSPSQMRALAVTLSYMIYDGACCHLSGDARLDNALHHLISIVGLAAGLAYQRCGTELVACLLVTEISSPLLHLREMLKELGVKDTDLNLLVDILFAVTFSVARMVCGTYVTYRTVTADNPILIKAMATSLLLVSAYWFLRILRMVRHKIGKKRLASKAAGKESM

SEQ ID NO: 17853 - protein, 191 aa, Triticum aestivum
  peptide (1)..(191): Ceres Seq. ID no. 12780824
  misc_feature (1)..(187): NCBI GI NO: 34903030 NR Description: unnamed protein product
  misc_feature (1)..(184): NCBI GI NO: 30693154 NR Description: expressed protein [Arabidopsis thaliana]
  misc_feature (1)..(184): NCBI GI NO: 22330031 NR Description: hypothetical protein; protein id: At1g45010
  misc_feature (1)..(163): NCBI GI NO: 15219511 NR Description: hypothetical protein; protein id: At1g35170.1
  misc_feature (1)..(120): NCBI GI NO: 25518603 NR Description: hypothetical protein T32G9
  misc_feature (1)..(189): NCBI GI NO: 27661880 NR Description: hypothetical protein XP_236191 [Rattus norvegicus]
  misc_feature (1)..(189): NCBI GI NO: 34535216 NR Description: unnamed protein product [Homo sapiens]
  misc_feature (1)..(40): NCBI GI NO: 25405881 NR Description: protein F27F5.9 [imported] - Arabidopsis thaliana
  misc_feature (71)..(120): NCBI GI NO: 25405881 NR Description: protein F27F5.9 [imported] - Arabidopsis thaliana
MHAVAGVALGCLSVQDWASPVSPVASPSSPSQMRALAVTLSYMIYDGACCHLSGDARLDNALHHLISIVGLAAGLAYQRCGTELVACLLVTEISSPLLHLREMLKELGVKDTDLNLLVDILFAVTFSVARMVCGTYVTYRTVTADNPILIKAMATSLLLVSAYWFLRILRMVRHKIGKKRLASKAAGKESM

SEQ ID NO: 17854 - protein, 159 aa, Triticum aestivum
  peptide (1)..(159): Ceres Seq. ID no. 12780825
  misc_feature (1)..(155): NCBI GI NO: 34903030 NR Description: unnamed protein product
  misc_feature (1)..(152): NCBI GI NO: 30693154 NR Description: expressed protein [Arabidopsis thaliana]
  misc_feature (1)..(152): NCBI GI NO: 22330031 NR Description: hypothetical protein; protein id: At1g45010
  misc_feature (1)..(131): NCBI GI NO: 15219511 NR Description: hypothetical protein; protein id: At1g35170.1
  misc_feature (1)..(88): NCBI GI NO: 25518603 NR Description: hypothetical protein T32G9
  misc_feature (1)..(157): NCBI GI NO: 27661880 NR Description: hypothetical protein XP_236191 [Rattus norvegicus]
  misc_feature (1)..(157): NCBI GI NO: 34535216 NR Description: unnamed protein product [Homo sapiens]
  misc_feature (39)..(88): NCBI GI NO: 25405881 NR Description: protein F27F5.9 [imported] - Arabidopsis thaliana
MRALAVTLSYMIYDGACCHLSGDARLDNALHHLISIVGLAAGLAYQRCGTELVACLLVTEISSPLLHLREMLKELGVKDTDLNLLVDILFAVTFSVARMVCGTYVTYRTVTADNPILIKAMATSLLLVSAYWFLRILRMVRHKIGKKRLASKAAGKESM

SEQ ID NO: 17855 - DNA, 2112 bp, Triticum aestivum
  misc_feature (1)..(2112): Ceres Seq. ID no. 13660894
aaaaaagaactcattgccacagttgaatgaatgccgccgccactttcactgctccacgcgcgcaagctccacgcgacgctcctcaagtccggtcaccatggcgacgcctaccgctgcaacctcctcctccgcgcctacacccgcggcggcgcactggccgacgcccgccacctactgbacctcatgccgtccccgaccctcgtctcctacaacaccgtcctctccggctacgcctcctcctcgacccccggcctccttgacgccgccctgcacctgctagacgggatgcccgaaagggactcctggtcctggaacaccgccatatctggccttgcacgcgccggccgggctcgcgacgcgctgcgaaggttcctgcagatgacgcgcacccccgtggcgccggacgctttcacgtactccatcgtctcgccgtgctgtggcgttgacctaggatccgcgggtcaggtccacgcgcgggctctcaaggccggggtgttcgcggacgcctgcgtcggcactagtttcatcaagctgtacgcagagctgggcctgatggaggatgcacgcaaggtgttcgattgtatgccgctgagagatctagtgtcatggaatgtgctcctggactgcggtgtgaggtccggcgaagcaggatcatgtatgaaggagtttcttagcatgaccggctgcggggttcggcctgatgagttcacctttgccactgtcttgaatggtttggctgagcggtctgcaggtctagaggcaatgcaggtacactcagttattctaaaatctggatatcttagggatcttttcctatgcaattgtttgctggacgtgtacgggagatgcggttacgttgacttggccaagaagctgtttgatgctatgcttgagaaggatgttgtgtcgtggaccgctgtgatttcagggcttgcagcctgcggttaccaggctgatgccttcgacatattttgccagatgctgaaagctgcaatgctgcccaattcattcacatttgggagcatagtaagctcatgtgcatatgtgaatgaccttggcagtgggaggcagtgtcatgctcttgctgtcaagcatgggttagaacttgttcctatagttgccagctgttttatcgatatgtactcaaagtgcgccaagatggatgatgcaataagaatgtttgagatcatgccacagagagacattgtatcttggaatgcaatgatatgtggattagctcagaatggtcaatcagcgagatctcttgagctgtatgatgaaatgatgcgacttcattgtgaatcggtcaccccaaactcagtaacttttgtgagtgtcctgagcgcatgcagccatgctggtaatgtccaaaaaggttgcagctactttactcaaatggttaatgacttccacatcgrgaaccaatttcagagcactacacttgccttatcgatctctttgcgcgagctggatggttagatgaagcagaagagatcatttcaaacttacctttcaaacatgatgctgttatcctgggcaccatgcttaatggctgcagaaaatatggtaaccttgacatggctaagcgctttgctaagaggcttctagtgaataatccagataatgcatcggccatttttctactctcaaatatgtacattgcaaatgaagaatggagtaatgcctcggagctgagggatgctgcgatttcaagtggaactcataaagtcatggggaatagctggattgatgttggtggtcatgtacaatgtttcagagcgggttctagtccagatgcataattcgaacatatatatgatgttctgcaacaacttcagttgatgatggtagatgctgacaagctggtcacacagattaactccttatgtacttatattaacagtgagtagtgacaactatgctttattttgatgagtttcaaattcaaattaagtagtatgtgctacttgggttgtttttgcaagaccgatttggatagtatttatatgcgagaaggttagttatttatgcaatgcaacctactacgtcagtcaaaahaaaaaaaaaaaaagcttatcgataccgwcgacctcgagggggggcccggtaccc

SEQ ID NO: 17856 - protein, 482 aa, Triticum aestivum
  peptide (1)..(482): Ceres Seq. ID no. 15220063
  misc_feature (362)..(396): Pfam Name: Pfam Description:  PPR repeat
  misc_feature (29)..(457): NCBI GI NO: 15235115 NR Description: pentatricopeptide (PPR) repeat-containing protein
  misc_feature (7)..(65): NCBI GI NO: 15235115 NR Description: pentatricopeptide (PPR) repeat-containing protein
  misc_feature (61)..(462): NCBI GI NO: 38423978 NR Description: PPR-repeat protein-like
  misc_feature (13)..(82): NCBI GI NO: 38423978 NR Description: PPR-repeat protein-like
  misc_feature (74)..(482): NCBI GI NO: 15226150 NR Description: pentatricopeptide (PPR) repeat-containing protein
  misc_feature (11)..(84): NCBI GI NO: 15226150 NR Description: pentatricopeptide (PPR) repeat-containing protein
  misc_feature (12)..(86): NCBI GI NO: 38423978 NR Description: PPR-repeat protein-like
  misc_feature (74)..(462): NCBI GI NO: 34915012 NR Description: P0458A05.10
  misc_feature (11)..(66): NCBI GI NO: 34915012 NR Description: P0458A05.10
  misc_feature (82)..(482): NCBI GI NO: 15234095 NR Description: pentatricopeptide (PPR) repeat-containing protein
  misc_feature (50)..(50): Xaa is any aa, unknown or other
  misc_feature (463)..(463): Xaa is any aa, unknown or other
MPPPLSLLHARKLHATLLKSGHHGDAYRCNLLLRAYTRGGALADARHLLXLMPSPTLVSYNTVLSGYASSSTPGLLDAALHLLDGMPERDSWSWNTAISGLARAGRARDALRRFLQMTRTPVAPDAFTYSIVSPCCGVDLGSAGQVHARALKAGVFADACVGTSFIKLYAELGLMEDARKVFDCMPLRDLVSWNVLLDCGVRSGEAGSCMKEFLSMTGCGVRPDEFTFATVLNGLAERSAGLEAMQVHSVILKSGYLRDLFLCNCLLDVYGRCGYVDLAKKLFDAMLEKDVVSWTAVISGLAACGYQADAFDIFCQMLKAAMLPNSFTFGSIVSSCAYVNDLGSGRQCHALAVKHGLELVPIVASCFIDMYSKCAKMDDAIRMFEIMPQRDIVSWNAMICGLAQNGQSARSLELYDEMMRLHCESVTPNSVTFVSVLSACSHAGNVQKGCSYFTQMVNDFHIXNQFQSTTLALSISLRELDG

SEQ ID NO: 17857 - protein, 431 aa, Triticum aestivum
  peptide (1)..(431): Ceres Seq. ID no. 15220064
  misc_feature (311)..(345): Pfam Name: Pfam Description:  PPR repeat
  misc_feature (1)..(406): NCBI GI NO: 15235115 NR Description: pentatricopeptide (PPR) repeat-containing protein
  misc_feature (1)..(14): NCBI GI NO: 15235115 NR Description: pentatricopeptide (PPR) repeat-containing protein
  misc_feature (10)..(411): NCBI GI NO: 38423978 NR Description: PPR-repeat protein-like
  misc_feature (1)..(31): NCBI GI NO: 38423978 NR Description: PPR-repeat protein-like
  misc_feature (23)..(431): NCBI GI NO: 15226150 NR Description: pentatricopeptide (PPR) repeat-containing protein
  misc_feature (1)..(33): NCBI GI NO: 15226150 NR Description: pentatricopeptide (PPR) repeat-containing protein
  misc_feature (1)..(35): NCBI GI NO: 38423978 NR Description: PPR-repeat protein-like
  misc_feature (23)..(411): NCBI GI NO: 34915012 NR Description: P0458A05.10
  misc_feature (1)..(15): NCBI GI NO: 34915012 NR Description: P0458A05.10
  misc_feature (31)..(431): NCBI GI NO: 15234095 NR Description: pentatricopeptide (PPR) repeat-containing protein
  misc_feature (412)..(412): Xaa is any aa, unknown or other
MPSPTLVSYNTVLSGYASSSTPGLLDAALHLLDGMPERDSWSWNTAISGLARAGRARDALRRFLQMTRTPVAPDAFTYSIVSPCCGVDLGSAGQVHARALKAGVFADACVGTSFIKLYAELGLMEDARKVFDCMPLRDLVSWNVLLDCGVRSGEAGSCMKEFLSMTGCGVRPDEFTFATVLNGLAERSAGLEAMQVHSVILKSGYLRDLFLCNCLLDVYGRCGYVDLAKKLFDAMLEKDVVSWTAVISGLAACGYQADAFDIFCQMLKAAMLPNSFTFGSIVSSCAYVNDLGSGRQCHALAVKHGLELVPIVASCFIDMYSKCAKMDDAIRMFEIMPQRDIVSWNAMICGLAQNGQSARSLELYDEMMRLHCESVTPNSVTFVSVLSACSHAGNVQKGCSYFTQMVNDFHIXNQFQSTTLALSISLRELDG

SEQ ID NO: 17858 - protein, 397 aa, Triticum aestivum
  peptide (1)..(397): Ceres Seq. ID no. 15220065
  misc_feature (277)..(311): Pfam Name: Pfam Description:  PPR repeat
  misc_feature (1)..(372): NCBI GI NO: 15235115 NR Description: pentatricopeptide (PPR) repeat-containing protein
  misc_feature (1)..(377): NCBI GI NO: 38423978 NR Description: PPR-repeat protein-like
  misc_feature (1)..(397): NCBI GI NO: 15226150 NR Description: pentatricopeptide (PPR) repeat-containing protein
  misc_feature (1)..(377): NCBI GI NO: 34915012 NR Description: P0458A05.10
  misc_feature (1)..(397): NCBI GI NO: 15234095 NR Description: pentatricopeptide (PPR) repeat-containing protein
  misc_feature (1)..(379): NCBI GI NO: 38423978 NR Description: PPR-repeat protein-like
  misc_feature (1)..(397): NCBI GI NO: 34914806 NR Description: B1045D11.13
  misc_feature (1)..(377): NCBI GI NO: 15228590 NR Description: pentatricopeptide (PPR) repeat-containing protein
  misc_feature (1)..(371): NCBI GI NO: 33146592 NR Description: putative pentatricopeptide
  misc_feature (1)..(382): NCBI GI NO: 37536800 NR Description: putative PPR-repeat protein
  misc_feature (378)..(378): Xaa is any aa, unknown or other
MPERDSWSWNTAISGLARAGRARDALRRFLQMTRTPVAPDAFTYSIVSPCCGVDLGSAGQVHARALKAGVFADACVGTSFIKLYAELGLMEDARKVFDCMPLRDLVSWNVLLDCGVRSGEAGSCMKEFLSMTGCGVRPDEFTFATVLNGLAERSAGLEAMQVHSVILKSGYLRDLFLCNCLLDVYGRCGYVDLAKKLFDAMLEKDVVSWTAVISGLAACGYQADAFDIFCQMLKAAMLPNSFTFGSIVSSCAYVNDLGSGRQCHALAVKHGLELVPIVASCFIDMYSKCAKMDDAIRMFEIMPQRDIVSWNAMICGLAQNGQSARSLELYDEMMRLHCESVTPNSVTFVSVLSACSHAGNVQKGCSYFTQMVNDFHIXNQFQSTTLALSISLRELDG

SEQ ID NO: 17859 - DNA, 488 bp, Triticum aestivum
  misc_feature (1)..(488): Ceres Seq. ID no. 13660895
  misc_feature (306)..(306): n is a, c, t, g, unknown, or other
actgacaacttattaattcggccacatcgccgcctgtcccagccagccagtccaacccgcccgccgtccaacaccccgcgcgcacaccaccgccgccgccgtcgaccccttcctccctcgcacccatggcgttcgcactcaaggcctccgcctcccccgccctcgccgctgcctcctcggcggcgtcgtccccctccttctcggccgcctccgcggcgccgaggggccgcgccgccgcggcgaggagggtctcgctccgcggggccgcgcaccccgttgccgccatcagggcgtccgccaccgccngtggccggggacaagcgcaccatctccggcacgttcaccaacctcaaggagcaggacaagatcgcgttcatcccgttcatcgtcgccggcgaccccgacttggcgaccacggcgaaggcgctaaaggttctcgatgcgtgtggttctgatgtgatcgaattgggcgtgccgtactctgatcc

SEQ ID NO: 17860 - protein, 162 aa, Triticum aestivum
  peptide (1)..(162): Ceres Seq. ID no. 13660896
  misc_feature (17)..(105): Pfam Name: Pfam Description:  Formin Homology 2 Domain
  misc_feature (76)..(161): NCBI GI NO: 34393530 NR Description: putative tryptophan synthase alpha chain
  misc_feature (44)..(161): NCBI GI NO: 11993325 NR Description: indole-3-glycerol phosphate lyase [Zea mays]
  misc_feature (103)..(161): NCBI GI NO: 34897224 NR Description: putative indole-3-glycerol phosphate lyase
  misc_feature (74)..(161): NCBI GI NO: 18410104 NR Description: tryptophan synthase, alpha subunit (TSA1)
  misc_feature (74)..(161): NCBI GI NO: 21593559 NR Description: tryptophan synthase alpha chain
  misc_feature (104)..(161): NCBI GI NO: 11993326 NR Description: putative tryptophan synthase alpha [Zea mays]
  misc_feature (104)..(161): NCBI GI NO: 11993328 NR Description: putative tryptophan synthase alpha [Zea mays]
  misc_feature (110)..(161): NCBI GI NO: 15235430 NR Description: tryptophan synthase, alpha subunit
  misc_feature (67)..(161): NCBI GI NO: 34897218 NR Description: putative indole-3-glycerol phosphate lyase
  misc_feature (67)..(161): NCBI GI NO: 34897216 NR Description: putative indole-3-glycerol phosphate lyase
  misc_feature (102)..(102): Xaa is any aa, unknown or other
TDNLLIRPHRRLSQPASPTRPPSNTPRAHHRRRRRPLPPSHPWRSHSRPPPPPPSPLPPRRRRPPPSRPPPRRRGAAPPRRGGSRSAGPRTPLPPSGRPPPXVAGDKRTISGTFTNLKEQDKIAFIPFIVAGDPDLATTAKALKVLDACGSDVIELGVPYSD

SEQ ID NO: 17861 - protein, 109 aa, Triticum aestivum
  peptide (1)..(109): Ceres Seq. ID no. 13660897
  misc_feature (1)..(65): NCBI GI NO: 34393530 NR Description: putative tryptophan synthase alpha chain
  misc_feature (61)..(61): Xaa is any aa, unknown or other
MAFALKASASPALAAASSAASSPSFSAASAAPRGRAAAARRVSLRGAAHPVAAIRASATAXGRGQAHHLRHVHQPQGAGQDRVHPVHRRRRPRLGDHGEGAKGSRCVWF

SEQ ID NO: 17862 - DNA, 1892 bp, Triticum aestivum
  misc_feature (1)..(1892): Ceres Seq. ID no. 13660898
ctagctcagatcccccatcgcacccctcctccctcatccccatctcctcgccgccgccgccacctcctccccgtcctctgcaccactcctcgtcgccaacctcgccgccgccacctcttccccgtcccctgcaccactccctgatccctcctccggccccatccccggccatccccggccatccgtcccagtcgctgctctctctcggttcagtgagatgggatccactcccgcagccgccgctccaccctcaccgtcaacgacccatgccgccgccgcacaccaccgcgccctcccctcaccttggccccaagtcgggcagtgcgaggcggcgcttccagaccgcgatggccgcaaccttgcccactccgatctggatccatggtgcactccttcctccctctggatcgatggccgcagcctcgccgatggatccagcgcctgccggagacgagggctgccagatccgcgacctgggacgctcctcctgtaggatacgggagcagcacaccgcaccctgcagtcgtcggtccgggacgagcgcagcagctcgaggaagccggcgacaaacgccggcgctcctctgctccatcgacctggacggctgctactccgccaaagacgccgcctacaggaggtgctctactcttgcgcatgtctggtggcgtctccggcgcagtggtacttcttgaggtgactggcgtgacggcggctgtgtatggcggtgaccacaagctctccggtccggcttgtggggattgtcagcggcaaggcagagcggaacacggacgtgtccttcacgctcgacgacggcaccggccgtatcgacttcatcagatgcctggagcagaaggtgattccataatgcaaggtggctgactaggcggtgctcatcaacgcctactgcccctctcgccccctaaagcgcaactacatgtatgcttatacttccagccaaactcaacaacctcatcgacggtccgtgctgctgcctcccacaagtgttgatgtatgtagagaagctggtgagttgatgtgtagcttcatttgcctaatataagtgtaatctaactgctcagagctcaagataacctgtgatatgacatgctacggtactaattggaacatttctgatgcctgggagccacccgtccttagtttctgctttggttactcgctgtgctttgtgattaagtgagctgttgtaatctccgtactagcttacaagttggaatgcaaaattgcttgtgtcaatgctatgtgtagttgtgtcgtgtgtactactttgaaacgtcggtctatggttgtagaagctctactttatgctaatacttgcttggtccttcatatcaaagcttgcatgtactgtagaagctctactttatgctaatacttgcttgtgtaacatttttcatggcatacttctaaatggacaagtacgtgcgacttccagcgtcaacgatgatgcggaccatatgttcaactgcagccccatccattgcatcgacacaaagatgttttgcatcagcctgtcattgctaagggagaagcgggacttggagaggaaatctttccattaagcagattacatgtttggttgctgtgaagtaccagataggctagttctatttttttcacgtcctggagtatttcagcagcgccatgcaaatgcattagcgttaggtttctgattcaccttttgtaaaaacttagttagcccgcagtcagtcagtagtagctcagccagccagccagcctcaaatagtattgctggaatgaatgcttgtaatataataacattgcacgttgctttgaaaatgtatgagaactgggctaggcctaagataacttgtggtgtgatgtgttgtaatgtcaatggcataatatttttt

SEQ ID NO: 17863 - protein, 229 aa, Triticum aestivum
  peptide (1)..(229): Ceres Seq. ID no. 13660899
  misc_feature (4)..(147): Pfam Name: Pfam Description:  Extensin-like region
  misc_feature (2)..(152): NCBI GI NO: 15240851 NR Description: expressed protein [Arabidopsis thaliana]
  misc_feature (4)..(158): NCBI GI NO: 39586348 NR Description: Hypothetical protein CBG21646
  misc_feature (4)..(147): NCBI GI NO: 15240851 NR Description: expressed protein [Arabidopsis thaliana]
  misc_feature (2)..(175): NCBI GI NO: 15242969 NR Description: formin homology 2 (FH2) domain-containing protein
  misc_feature (2)..(133): NCBI GI NO: 3204132 NR Description: extensin [Cicer arietinum]
  misc_feature (1)..(145): NCBI GI NO: 99861 NR Description: extensin - almond
  misc_feature (13)..(150): NCBI GI NO: 30387315 NR Description: unknown [Choristoneura fumiferana MNPV]
  misc_feature (2)..(147): NCBI GI NO: 6523547 NR Description: hydroxyproline-rich glycoprotein DZ-HRGP
  misc_feature (2)..(145): NCBI GI NO: 7488674 NR Description: extensin homolog HRGP2 - soybean (fragment)
  misc_feature (4)..(147): NCBI GI NO: 99861 NR Description: extensin - almond
SSDPPSHPSSLIPISSPPPPPPPRPLHHSSSPTSPPPPLPRPLHHSLIPPPAPSPAIPGHPSQSLLSLGSVRWDPLPQPPLHPHRQRPMPPPHTTAPSPHLGPKSGSARRRFQTAMAATLPTPIWIHGALLPPSGSMAAASPMDPAPAGDEGCQIRDLGRSSCRIREQHTAPCSRRSGTSAAARGSRRQTPALLCSIDLDGCYSAKDAAYRRCSTLAHVWWRLRRSGTS

SEQ ID NO: 17864 - protein, 165 aa, Triticum aestivum
  peptide (1)..(165): Ceres Seq. ID no. 13660900
MVHSFLPLDRWPQPRRWIQRLPETRAARSATWDAPPVGYGSSTPHPAVVGPGRAQQLEEAGDKRRRSSAPSTWTAATPPKTPPTGGALLLRMSGGVSGAVVLLEVTGVTAAVYGGDHKLSGPACGDCQRQGRAEHGRVLHARRRHRPYRLHQMPGAEGDSIMQGG

SEQ ID NO: 17865 - protein, 141 aa, Triticum aestivum
  peptide (1)..(141): Ceres Seq. ID no. 13660901
  misc_feature (1)..(59): Pfam Name: Pfam Description:  Extensin-like region
  misc_feature (1)..(64): NCBI GI NO: 15240851 NR Description: expressed protein [Arabidopsis thaliana]
  misc_feature (1)..(70): NCBI GI NO: 39586348 NR Description: Hypothetical protein CBG21646
  misc_feature (1)..(59): NCBI GI NO: 15240851 NR Description: expressed protein [Arabidopsis thaliana]
  misc_feature (1)..(87): NCBI GI NO: 15242969 NR Description: formin homology 2 (FH2) domain-containing protein
  misc_feature (1)..(45): NCBI GI NO: 3204132 NR Description: extensin [Cicer arietinum]
  misc_feature (1)..(57): NCBI GI NO: 99861 NR Description: extensin - almond
  misc_feature (1)..(62): NCBI GI NO: 30387315 NR Description: unknown [Choristoneura fumiferana MNPV]
  misc_feature (1)..(59): NCBI GI NO: 6523547 NR Description: hydroxyproline-rich glycoprotein DZ-HRGP
  misc_feature (1)..(57): NCBI GI NO: 7488674 NR Description: extensin homolog HRGP2 - soybean (fragment)
  misc_feature (1)..(59): NCBI GI NO: 99861 NR Description: extensin - almond
MPPPHTTAPSPHLGPKSGSARRRFQTAMAATLPTPIWIHGALLPPSGSMAAASPMDPAPAGDEGCQIRDLGRSSCRIREQHTAPCSRRSGTSAAARGSRRQTPALLCSIDLDGCYSAKDAAYRRCSTLAHVWWRLRRSGTS

SEQ ID NO: 17866 - DNA, 1758 bp, Triticum aestivum
  misc_feature (1)..(1758): Ceres Seq. ID no. 14303079
acacgacgcctctctcccgttcacccgtcccgattccggatcactccctctcctctcctctcttctccactcccccgccgagatatttcacgcggcccgcccgccatgtcgctgctcgccgtcgtcaccagccgcgccgcgcccgtgcgcccgctccgcgcctcggcggcctcgggagaggcggcggcggccgccgcggaccagccgggggagcggaggccggtcaagataatactgcccaagaagaagccgcagaagtggtccacggggatggagccggggtcgtacggcggcggcccgaccaccatcaagccgcgcaagtactggatggggaaggaggaccgcgaccccattggcaacaccgacgacttcatctggaacaagaacttcctcccccacatggagcgcgtcatcgccaacggcggtacggacacgcccgccaccatcccccgcgtcacgccggcggacgaggactcagggtttctaagcttcaaccgcgcaatggaccttgacagtgtggatgttgatctgagcaaggagcttatggcaccggccaagtcaatcttgcagacgcagctcaaggctgcccgccgtggtcgatccactagcgttgaggctgtcaatagacccacctacattagatggaagctagctccgactcgacgggagcaggagcaatgggaccgagcgaccagggcaaccaccggtggcattgatgtcatactaagggagtcgcagcagaaagtgcagctgaaaggggaccctaaggtggtggcagctgaggccagagagcaatacctgaagttgaaagaaaggttgcagctgcttactttaggtattggtggcgtcggggtggtttctgcttatgtttcatacactcctgaaattgctgcgagctttagtgcagggctgattggatctctggtgtatctccgcatgcttggaaccagtgtggattctttagcgggtggaactaaagcagctgccaagggcgctgcggcacagccaagattgcttattccaatggttcttgtgatgatgtacaatcgatggaatgcgtaagtagatcaagtcttttaaaatacttcctctgcctcttgaactgcaaaaacgtcttatatttagaggcagagggagtattttctgctgaaatattttcgtaatatgtcaaacaaacaaaaaaaaacgtacatgcatgtttgcctttgctttttctgatgcaggatactggttccagagtacggcttcatgcacctggagttgatacccatgctccttgggttctttacctacaagattgctatgtttactcaagcgattcaggaatcagtacctgatgctggaaaccgcgaagtttgaacactgttttggctaatagaaaaacaaagagaaggtcttattaaaggttttagaagagtctaatctggggcctggagatgccgccaggtacgtagatgagatgcacgctgaggctgaggatactgtctgaacatattaccaacattccgcggagaaagtttactttgttgactgtacaaaagggagttggccaacacaaattcaagttccgtgtagtgtacacctttgaacttttggtgcactgaccccgactcctatggttgagctggcatctaacattatttacgcaaggaggtcggcaggattcggatcagtacagaatgtaaatagcgcgagctgtcaatatactagctcgggaagctctatattttacaaagtgctaaaaaaatgatatattac

SEQ ID NO: 17867 - protein, 353 aa, Triticum aestivum
  peptide (1)..(353): Ceres Seq. ID no. 14303080
  misc_feature (206)..(352): NCBI GI NO: 34911056 NR Description: P0007F06.23
  misc_feature (36)..(155): NCBI GI NO: 34911056 NR Description: P0007F06.23
  misc_feature (67)..(353): NCBI GI NO: 21593011 NR Description: unknown [Arabidopsis thaliana]
  misc_feature (67)..(353): NCBI GI NO: 18402535 NR Description: expressed protein [Arabidopsis thaliana]
  misc_feature (265)..(351): NCBI GI NO: 114706 NR Description: ATP synthase protein I
  misc_feature (236)..(350): NCBI GI NO: 33863740 NR Description: possible H+-transporting ATP synthase
TRRLSPVHPSRFRITPSPLLSSPLPRRDISRGPPAMSLLAVVTSRAAPVRPLRASAASGEAAAAAADQPGERRPVKIILPKKKPQKWSTGMEPGSYGGGPTTIKPRKYWMGKEDRDPIGNTDDFIWNKNFLPHMERVIANGGTDTPATIPRVTPADEDSGFLSFNRAMDLDSVDVDLSKELMAPAKSILQTQLKAARRGRSTSVEAVNRPTYIRWKLAPTRREQEQWDRATRATTGGIDVILRESQQKVQLKGDPKVVAAEAREQYLKLKERLQLLTLGIGGVGVVSAYVSYTPEIAASFSAGLIGSLVYLRMLGTSVDSLAGGTKAAAKGAAAQPRLLIPMVLVMMYNRWNA

SEQ ID NO: 17868 - protein, 318 aa, Triticum aestivum
  peptide (1)..(318): Ceres Seq. ID no. 14303081
  misc_feature (171)..(317): NCBI GI NO: 34911056 NR Description: P0007F06.23
  misc_feature (1)..(120): NCBI GI NO: 34911056 NR Description: P0007F06.23
  misc_feature (32)..(318): NCBI GI NO: 21593011 NR Description: unknown [Arabidopsis thaliana]
  misc_feature (32)..(318): NCBI GI NO: 18402535 NR Description: expressed protein [Arabidopsis thaliana]
  misc_feature (230)..(316): NCBI GI NO: 114706 NR Description: ATP synthase protein I
  misc_feature (201)..(315): NCBI GI NO: 33863740 NR Description: possible H+-transporting ATP synthase
MSLLAVVTSRAAPVRPLRASAASGEAAAAAADQPGERRPVKIILPKKKPQKWSTGMEPGSYGGGPTTIKPRKYWMGKEDRDPIGNTDDFIWNKNFLPHMERVIANGGTDTPATIPRVTPADEDSGFLSFNRAMDLDSVDVDLSKELMAPAKSILQTQLKAARRGRSTSVEAVNRPTYIRWKLAPTRREQEQWDRATRATTGGIDVILRESQQKVQLKGDPKVVAAEAREQYLKLKERLQLLTLGIGGVGVVSAYVSYTPEIAASFSAGLIGSLVYLRMLGTSVDSLAGGTKAAAKGAAAQPRLLIPMVLVMMYNRWNA

SEQ ID NO: 17869 - protein, 263 aa, Triticum aestivum
  peptide (1)..(263): Ceres Seq. ID no. 14303082
  misc_feature (116)..(262): NCBI GI NO: 34911056 NR Description: P0007F06.23
  misc_feature (1)..(65): NCBI GI NO: 34911056 NR Description: P0007F06.23
  misc_feature (1)..(263): NCBI GI NO: 21593011 NR Description: unknown [Arabidopsis thaliana]
  misc_feature (1)..(263): NCBI GI NO: 18402535 NR Description: expressed protein [Arabidopsis thaliana]
  misc_feature (175)..(261): NCBI GI NO: 114706 NR Description: ATP synthase protein I
  misc_feature (146)..(260): NCBI GI NO: 33863740 NR Description: possible H+-transporting ATP synthase
MEPGSYGGGPTTIKPRKYWMGKEDRDPIGNTDDFIWNKNFLPHMERVIANGGTDTPATIPRVTPADEDSGFLSFNRAMDLDSVDVDLSKELMAPAKSILQTQLKAARRGRSTSVEAVNRPTYIRWKLAPTRREQEQWDRATRATTGGIDVILRESQQKVQLKGDPKVVAAEAREQYLKLKERLQLLTLGIGGVGVVSAYVSYTPEIAASFSAGLIGSLVYLRMLGTSVDSLAGGTKAAAKGAAAQPRLLIPMVLVMMYNRWNA

SEQ ID NO: 17870 - DNA, 1876 bp, Triticum aestivum
  misc_feature (1)..(1876): Ceres Seq. ID no. 14307892
atattcccgagagagaaagaatccagcccccacccgccgccgcgccgctgatagcgagcgtgacagagtcctcccccattaaacccccccgcccgccgccgcgtccaccgccaccgccagaccacgcagcccgcaatcgccgaccgaggcaccgccggtggtcggagaagcgctacgaacgccgaggacgcgcgccatggagggcagagcgccgctgctgccccggcgccaagaggcggccaagagcggcgggtggcgttgcggggcggcggcggcggaggccaggaaggtcgcgcacgtggcgctgccgatggcggccgtgagcgtggcgcagtacgccgtgcaggtggcctccaacatgatggtcggccacctccccgggggcgtgctggcgctctccgcctccgccatcgccacctccctcgcctccgtatccggattcagcctcctcattggaatgtcaaacggcttagaaactctctgtggtcaagcttacggggccgaacaatatggcagattgggagtgcaaacctacagagctatggtcaccctgacggctgtcagcattccaatctcacttctctggatattcatgggaaaactcctgaccctcataggccaggaccccgtgatctcgcatgaagccgggagatacataatgtggttgattccggccctctttgcatatgctgtcagccagcccctaacaaagttcttacagtctcagagtctgataatccctatgctctggtcctccattgcaacattgctcttgcacattcctgtttgctggttattggtgttcaagaccagccttgggtacattggagccgctttggcgataagcgtatcatactggttgaacgtgttcatgcttgttgcgtacatcggatgctcaaactcttgtaaggagacattctcgcctcccacactcgatgctttcagtggagtgggtgtgttcatgcgcttagccctgccgtctgcactaatgttatgttttgaatggtggtcatttgaggtcattattcttctgtctggacttctacccaatccagagctgcaaacttcagttctttctacatgcatgacaacaatcacattgatgtatactatagcgtacggaattggtgctgctggaagcactcgtgtatcaaatgaattaggtgctgggaatcctgaaggtgctcgactggctgtccgcgttgtgatgtctattgctgtgactgaggcagttctcatcactggggcactgttagcatcccagcacatcttgggctacgcatacagcagtgataaggaggttgttgattatgtcaatgcaatggttccgttcatctgcatctcagttgctgctgatagcctacaaggagttctctcaggtatcgctcgagggtgcgggtcgcagcacctgggcgcctatgttaacctcggttcgttctatctgtttgggattccaatgtccctcctactcgggtttgttctgaagatgggaggaaaggggctctggatgggcatttcctgcggctccatagtgcaattcctacttctgtccggcatagtgttcttcagcaactggcaaaagatgtctgacaatgcgagggagagggttttcggcggaaccccggcggagaaggagcctttgatgtctgatgtaacgggcgctgcctaattttctcgcgagttgctcaatcccttgacccgaacttgaagcggacgacacggcagcttaatcttgtcgctgtagatgacagtctcagagatgtgtgtatatagagaggcgagtttgctgaagaaccgaagaacttaagaactaactggtgcccgtagttgtaatgttgcaattttgctgaggtcggaaaagaatgatacatacagt

SEQ ID NO: 17871 - protein, 490 aa, Triticum aestivum
  peptide (1)..(490): Ceres Seq. ID no. 14307893
  misc_feature (261)..(424): Pfam Name: Pfam Description:  MatE
  misc_feature (73)..(466): NCBI GI NO: 34911248 NR Description: P0445E10.22
  misc_feature (7)..(471): NCBI GI NO: 15218070 NR Description: MATE efflux protein family [Arabidopsis thaliana]
  misc_feature (23)..(471): NCBI GI NO: 22329577 NR Description: MATE efflux protein family [Arabidopsis thaliana]
  misc_feature (11)..(480): NCBI GI NO: 15223961 NR Description: MATE efflux protein family [Arabidopsis thaliana]
  misc_feature (7)..(461): NCBI GI NO: 25511632 NR Description: F9L1.11 protein - Arabidopsis thaliana
  misc_feature (23)..(471): NCBI GI NO: 15218068 NR Description: MATE efflux protein family [Arabidopsis thaliana]
  misc_feature (23)..(461): NCBI GI NO: 25518548 NR Description: hypothetical protein F9L1
  misc_feature (7)..(471): NCBI GI NO: 18394206 NR Description: MATE efflux protein - related
  misc_feature (23)..(461): NCBI GI NO: 25518472 NR Description: hypothetical protein F9L1.9
  misc_feature (7)..(461): NCBI GI NO: 25518684 NR Description: hypothetical protein F9L1.12
MEGRAPLLPRRQEAAKSGGWRCGAAAAEARKVAHVALPMAAVSVAQYAVQVASNMMVGHLPGGVLALSASAIATSLASVSGFSLLIGMSNGLETLCGQAYGAEQYGRLGVQTYRAMVTLTAVSIPISLLWIFMGKLLTLIGQDPVISHEAGRYIMWLIPALFAYAVSQPLTKFLQSQSLIIPMLWSSIATLLLHIPVCWLLVFKTSLGYIGAALAISVSYWLNVFMLVAYIGCSNSCKETFSPPTLDAFSGVGVFMRLALPSALMLCFEWWSFEVIILLSGLLPNPELQTSVLSTCMTTITLMYTIAYGIGAAGSTRVSNELGAGNPEGARLAVRVVMSIAVTEAVLITGALLASQHILGYAYSSDKEVVDYVNAMVPFICISVAADSLQGVLSGIARGCGSQHLGAYVNLGSFYLFGIPMSLLLGFVLKMGGKGLWMGISCGSIVQFLLLSGIVFFSNWQKMSDNARERVFGGTPAEKEPLMSDVTGAA

SEQ ID NO: 17872 - protein, 452 aa, Triticum aestivum
  peptide (1)..(452): Ceres Seq. ID no. 14307894
  misc_feature (223)..(386): Pfam Name: Pfam Description:  MatE
  misc_feature (35)..(428): NCBI GI NO: 34911248 NR Description: P0445E10.22
  misc_feature (1)..(433): NCBI GI NO: 15218070 NR Description: MATE efflux protein family [Arabidopsis thaliana]
  misc_feature (1)..(433): NCBI GI NO: 22329577 NR Description: MATE efflux protein family [Arabidopsis thaliana]
  misc_feature (1)..(442): NCBI GI NO: 15223961 NR Description: MATE efflux protein family [Arabidopsis thaliana]
  misc_feature (1)..(423): NCBI GI NO: 25511632 NR Description: F9L1.11 protein - Arabidopsis thaliana
  misc_feature (1)..(433): NCBI GI NO: 15218068 NR Description: MATE efflux protein family [Arabidopsis thaliana]
  misc_feature (1)..(423): NCBI GI NO: 25518548 NR Description: hypothetical protein F9L1
  misc_feature (1)..(433): NCBI GI NO: 18394206 NR Description: MATE efflux protein - related
  misc_feature (1)..(423): NCBI GI NO: 25518472 NR Description: hypothetical protein F9L1.9
  misc_feature (1)..(423): NCBI GI NO: 25518684 NR Description: hypothetical protein F9L1.12
MAAVSVAQYAVQVASNMMVGHLPGGVLALSASAIATSLASVSGFSLLIGMSNGLETLCGQAYGAEQYGRLGVQTYRAMVTLTAVSIPISLLWIFMGKLLTLIGQDPVISHEAGRYIMWLIPALFAYAVSQPLTKFLQSQSLIIPMLWSSIATLLLHIPVCWLLVFKTSLGYIGAALAISVSYWLNVFMLVAYIGCSNSCKETFSPPTLDAFSGVGVFMRLALPSALMLCFEWWSFEVIILLSGLLPNPELQTSVLSTCMTTITLMYTIAYGIGAAGSTRVSNELGAGNPEGARLAVRVVMSIAVTEAVLITGALLASQHILGYAYSSDKEVVDYVNAMVPFICISVAADSLQGVLSGIARGCGSQHLGAYVNLGSFYLFGIPMSLLLGFVLKMGGKGLWMGISCGSIVQFLLLSGIVFFSNWQKMSDNARERVFGGTPAEKEPLMSDVTGAA

SEQ ID NO: 17873 - protein, 436 aa, Triticum aestivum
  peptide (1)..(436): Ceres Seq. ID no. 14307895
  misc_feature (207)..(370): Pfam Name: Pfam Description:  MatE
  misc_feature (19)..(412): NCBI GI NO: 34911248 NR Description: P0445E10.22
  misc_feature (1)..(417): NCBI GI NO: 15218070 NR Description: MATE efflux protein family [Arabidopsis thaliana]
  misc_feature (1)..(417): NCBI GI NO: 22329577 NR Description: MATE efflux protein family [Arabidopsis thaliana]
  misc_feature (1)..(426): NCBI GI NO: 15223961 NR Description: MATE efflux protein family [Arabidopsis thaliana]
  misc_feature (1)..(407): NCBI GI NO: 25511632 NR Description: F9L1.11 protein - Arabidopsis thaliana
  misc_feature (1)..(417): NCBI GI NO: 15218068 NR Description: MATE efflux protein family [Arabidopsis thaliana]
  misc_feature (1)..(407): NCBI GI NO: 25518548 NR Description: hypothetical protein F9L1
  misc_feature (1)..(417): NCBI GI NO: 18394206 NR Description: MATE efflux protein - related
  misc_feature (1)..(407): NCBI GI NO: 25518472 NR Description: hypothetical protein F9L1.9
  misc_feature (1)..(407): NCBI GI NO: 25518684 NR Description: hypothetical protein F9L1.12
MMVGHLPGGVLALSASAIATSLASVSGFSLLIGMSNGLETLCGQAYGAEQYGRLGVQTYRAMVTLTAVSIPISLLWIFMGKLLTLIGQDPVISHEAGRYIMWLIPALFAYAVSQPLTKFLQSQSLIIPMLWSSIATLLLHIPVCWLLVFKTSLGYIGAALAISVSYWLNVFMLVAYIGCSNSCKETFSPPTLDAFSGVGVFMRLALPSALMLCFEWWSFEVIILLSGLLPNPELQTSVLSTCMTTITLMYTIAYGIGAAGSTRVSNELGAGNPEGARLAVRVVMSIAVTEAVLITGALLASQHILGYAYSSDKEVVDYVNAMVPFICISVAADSLQGVLSGIARGCGSQHLGAYVNLGSFYLFGIPMSLLLGFVLKMGGKGLWMGISCGSIVQFLLLSGIVFFSNWQKMSDNARERVFGGTPAEKEPLMSDVTGAA

SEQ ID NO: 17874 - DNA, 1649 bp, Triticum aestivum
  misc_feature (1)..(1649): Ceres Seq. ID no. 13660260
cattacctagaacatcctaatcgaaaagttgctgtagtccaaccaaaagtagctgacgggctcccttgtttgtatgtcccccactcccggcgaccgcgagcctctcgtccactcccgacaccgagccgaaagccgcgtggattcgccgcccgatccagcgatggattcagcctccagagttgccccgccgccggtcagcgctggtgtccgcgtccgcgcgccgctggtagagtccgtctcctgttactgcagattagatacaggccttaaaactgtcgtggatgctagaaaatttgcttctggagcaaagatgtgcatgcaacctgatgtcaaacaaaccaagcgcaagtcaaggggctcgcggaaggagaggtgccgagctcaagcaccacttttgcctggccttcctgatgatcttgcaattgcctgtcttatacgggttccacgagtggaacaccccaatctccggacagtttgtaaaagatggaaccgccttttgtcaggaaattactattattccttgcgcaagaaactcagcatggcagaagaatgggtttatgtctttaaaagggatcgtgaggggaaaatatcctggcatgccttcgatccactgaaccagctctggaagtcccttccacctgttccaccagagtattcagaagcgttgggttttggctgtgctgttctgagtggttgctatctgtacttatttggcggtaaggatcctttgaggggctctatgagacgtgttgtattttacaatgcccggaccaacaaatggcatcgagctccagatatgttacgaaagcgacacttttttggttcctgtgttataaacaattgtctatatgttgctggtggagagtgtgaaggcatacaaaggactcttcagtctgctgaagtttatgaccctaataggaacagatgggtctgcatccctgagatgaacaacgggatggtgcctttcatcggagttgtatatgatgacaagtggttcctaaaagggcttgactcccatcgccaagtgacatgtgaagtgtacctaccgtcatccaatttgtggtcaaccattgatgatgaaatggttacaggttggcgaaacccaagcatttccttcaatggacgtctctattcatctgattgccgggatggctgcaagcttagagtctatgatgcaaacacaggaacatgggcacgattcatagacagcaggcaccatctaggcagctcacgagccttcgaagccgcaggcttggtgtctttaaatggtaagctttgcattattcgcaacaacatgagcatcactcttgttgatatcttggatccaacaatgagtatcgagaccgacagtgcatgcatgtggaaaactgttgcgcgtaagggtcagcacaagtcatttgtggcaaacttgtggtcgaccattgcaggacgtaacctgaagagtcacataatccattgtcaggtgctgcaaatttgagttcagctgttgcgaatcgggacatgatgaaatcagcgaaacaacacctccattacaagatcaaatgctcaccgcctgaacaaatctttgtacatttgattactagaagctgcaattcaagattctggcaatatcatgagctctctatatatattaatgaattttgaagtgc

SEQ ID NO: 17875 - protein, 467 aa, Triticum aestivum
  peptide (1)..(467): Ceres Seq. ID no. 15220687
  misc_feature (197)..(243): Pfam Name: Pfam Description:  Kelch motif
  misc_feature (30)..(467): NCBI GI NO: 37534254 NR Description: unknown protein
  misc_feature (52)..(467): NCBI GI NO: 19071626 NR Description: putative Kelch motif containing protein
  misc_feature (30)..(466): NCBI GI NO: 18405298 NR Description: Kelch repeat containing F-box protein family
  misc_feature (30)..(434): NCBI GI NO: 25405811 NR Description: unknown protein, 58496-60308
  misc_feature (95)..(432): NCBI GI NO: 7487225 NR Description: hypothetical protein T1F15
  misc_feature (95)..(432): NCBI GI NO: 15220452 NR Description: Kelch repeat containing F-box protein family
  misc_feature (104)..(415): NCBI GI NO: 18411974 NR Description: SKP1 interacting partner 4 (SKIP4), putative
  misc_feature (104)..(415): NCBI GI NO: 26453288 NR Description: putative SKP1 interacting partner 4 SKIP4
  misc_feature (94)..(373): NCBI GI NO: 18397351 NR Description: Kelch repeat containing F-box protein family
  misc_feature (83)..(373): NCBI GI NO: 5679844 NR Description: l1332.8 [Oryza sativa (indica cultivar-group)]
MSPTPGDREPLVHSRHRAESRVDSPPDPAMDSASRVAPPPVSAGVRVRAPLVESVSCYCRLDTGLKTVVDARKFASGAKMCMQPDVKQTKRKSRGSRKERCRAQAPLLPGLPDDLAIACLIRVPRVEHPNLRTVCKRWNRLLSGNYYYSLRKKLSMAEEWVYVFKRDREGKISWHAFDPLNQLWKSLPPVPPEYSEALGFGCAVLSGCYLYLFGGKDPLRGSMRRVVFYNARTNKWHRAPDMLRKRHFFGSCVINNCLYVAGGECEGIQRTLQSAEVYDPNRNRWVCIPEMNNGMVPFIGVVYDDKWFLKGLDSHRQVTCEVYLPSSNLWSTIDDEMVTGWRNPSISFNGRLYSSDCRDGCKLRVYDANTGTWARFIDSRHHLGSSRAFEAAGLVSLNGKLCIIRNNMSITLVDILDPTMSIETDSACMWKTVARKGQHKSFVANLWSTIAGRNLKSHIIHCQVLQI

SEQ ID NO: 17876 - protein, 438 aa, Triticum aestivum
  peptide (1)..(438): Ceres Seq. ID no. 15220688
  misc_feature (168)..(214): Pfam Name: Pfam Description:  Kelch motif
  misc_feature (1)..(438): NCBI GI NO: 37534254 NR Description: unknown protein
  misc_feature (23)..(438): NCBI GI NO: 19071626 NR Description: putative Kelch motif containing protein
  misc_feature (1)..(437): NCBI GI NO: 18405298 NR Description: Kelch repeat containing F-box protein family
  misc_feature (1)..(405): NCBI GI NO: 25405811 NR Description: unknown protein, 58496-60308
  misc_feature (66)..(403): NCBI GI NO: 7487225 NR Description: hypothetical protein T1F15
  misc_feature (66)..(403): NCBI GI NO: 15220452 NR Description: Kelch repeat containing F-box protein family
  misc_feature (75)..(386): NCBI GI NO: 18411974 NR Description: SKP1 interacting partner 4 (SKIP4), putative
  misc_feature (75)..(386): NCBI GI NO: 26453288 NR Description: putative SKP1 interacting partner 4 SKIP4
  misc_feature (65)..(344): NCBI GI NO: 18397351 NR Description: Kelch repeat containing F-box protein family
  misc_feature (54)..(344): NCBI GI NO: 5679844 NR Description: l1332.8 [Oryza sativa (indica cultivar-group)]
MDSASRVAPPPVSAGVRVRAPLVESVSCYCRLDTGLKTVVDARKFASGAKMCMQPDVKQTKRKSRGSRKERCRAQAPLLPGLPDDLAIACLIRVPRVEHPNLRTVCKRWNRLLSGNYYYSLRKKLSMAEEWVYVFKRDREGKISWHAFDPLNQLWKSLPPVPPEYSEALGFGCAVLSGCYLYLFGGKDPLRGSMRRVVFYNARTNKWHRAPDMLRKRHFFGSCVINNCLYVAGGECEGIQRTLQSAEVYDPNRNRWVCIPEMNNGMVPFIGVVYDDKWFLKGLDSHRQVTCEVYLPSSNLWSTIDDEMVTGWRNPSISFNGRLYSSDCRDGCKLRVYDANTGTWARFIDSRHHLGSSRAFEAAGLVSLNGKLCIIRNNMSITLVDILDPTMSIETDSACMWKTVARKGQHKSFVANLWSTIAGRNLKSHIIHCQVLQI

SEQ ID NO: 17877 - protein, 388 aa, Triticum aestivum
  peptide (1)..(388): Ceres Seq. ID no. 15220689
  misc_feature (118)..(164): Pfam Name: Pfam Description:  Kelch motif
  misc_feature (1)..(388): NCBI GI NO: 37534254 NR Description: unknown protein
  misc_feature (1)..(388): NCBI GI NO: 19071626 NR Description: putative Kelch motif containing protein
  misc_feature (1)..(387): NCBI GI NO: 18405298 NR Description: Kelch repeat containing F-box protein family
  misc_feature (1)..(355): NCBI GI NO: 25405811 NR Description: unknown protein, 58496-60308
  misc_feature (16)..(353): NCBI GI NO: 7487225 NR Description: hypothetical protein T1F15
  misc_feature (16)..(353): NCBI GI NO: 15220452 NR Description: Kelch repeat containing F-box protein family
  misc_feature (25)..(336): NCBI GI NO: 18411974 NR Description: SKP1 interacting partner 4 (SKIP4), putative
  misc_feature (25)..(336): NCBI GI NO: 26453288 NR Description: putative SKP1 interacting partner 4 SKIP4
  misc_feature (15)..(294): NCBI GI NO: 18397351 NR Description: Kelch repeat containing F-box protein family
  misc_feature (4)..(294): NCBI GI NO: 5679844 NR Description: l1332.8 [Oryza sativa (indica cultivar-group)]
MCMQPDVKQTKRKSRGSRKERCRAQAPLLPGLPDDLAIACLIRVPRVEHPNLRTVCKRWNRLLSGNYYYSLRKKLSMAEEWVYVFKRDREGKISWHAFDPLNQLWKSLPPVPPEYSEALGFGCAVLSGCYLYLFGGKDPLRGSMRRVVFYNARTNKWHRAPDMLRKRHFFGSCVINNCLYVAGGECEGIQRTLQSAEVYDPNRNRWVCIPEMNNGMVPFIGVVYDDKWFLKGLDSHRQVTCEVYLPSSNLWSTIDDEMVTGWRNPSISFNGRLYSSDCRDGCKLRVYDANTGTWARFIDSRHHLGSSRAFEAAGLVSLNGKLCIIRNNMSITLVDILDPTMSIETDSACMWKTVARKGQHKSFVANLWSTIAGRNLKSHIIHCQVLQI

SEQ ID NO: 17878 - DNA, 1458 bp, Triticum aestivum
  misc_feature (1)..(1458): Ceres Seq. ID no. 14303006
ctccgtcattaccaaggtaattgcactgcccagcatgcatcttcgtcttaatccactctatcggtgcttcgtcttgcgtcccgtggcagcctgtgccgccatgcctgttgcctaatttcctactgatgcagtatcgcaatgcactcctgagctgacagttttagattttagcaagtgcctgtgcatctcccggcctgctcactcgcctctgttttgagttcctagctttcttttcgagaaattacaccctgctttgccgacagagattctcgctgctagtacgagattatttatttataaactgatgtctgcttcggcctctgcttttctgaattttgttgccacgcgtagtacagtagtactggaagattgcaagctctggttttctgaatattcgagctgcttcagatcgagttcagaagtttttctgaattccgtgccattattaatttggaagttgagagcgcaggaaggaagatgggctcgttggaggcgacgcgggcggagctggggctggcggtgctgtacctgaacaaggcggaggctcgggacaagatctgcagggccatccagtacggctccaagttcatcagcaacggccagcccggcaccgcgcagaacgtcgacaagtccaccaccttggctcgcaaggtcttccgcctcctcaagtgggtgaacgatctgcacgccctcatcagcccggccgccaaagggacccctctcacgctggtcttgcttgggaagtccaagaatgcgctgctgtcgactttcctgttcctggaccagttcgtgtggctaggaagatcggggatttaccagaacaaggagcgcacggaccgcatcgccaggatgtccctctactgctggatggcctcctccgtctgtgcaagtctagtcgagcttggtgagctcaagagactatcaaaggcgatgaggaagcgcgccaaggagcttaggggcgccgacaaatacgaggacgagcagtacctggggaagatgaagcagtcggacgaccggctgctggcgctggtgaaggcgggcatggacgtggtggtggccgtggggctgctgcagctggcgcccaagaagatcacccccagggtcaccggggccttcggcttcgtcacctccctcatctcctgctaccagcaactcccgtcccgcgctcccctggccaaactcaaggcgtgaggaacggacgctacaccatgcatgctagtccagatgctgcctccgcttaactcaagccgatgctgtgctccagcatggaatccgagatgttttattcctgtgtacgtagcagtatagaatgatgatgtcgattgtctgtacgtacggtttttatacatatacatgtacacggtatatgctatgaatagtagtaatggacatggtatgtctggtcgatcatgtgttggtgcatgctgcttatatatgccaacagtgttgccacttgcg

SEQ ID NO: 17879 - protein, 237 aa, Triticum aestivum
  peptide (1)..(237): Ceres Seq. ID no. 14303007
  misc_feature (11)..(226): Pfam Name: PEX11 Pfam Description: Peroxisomal biogenesis factor 11
  misc_feature (1)..(235): NCBI GI NO: 18378887 NR Description: expressed protein [Arabidopsis thaliana]
  misc_feature (1)..(228): NCBI GI NO: 8489788 NR Description: unknown [Lycopersicon esculentum]
  misc_feature (1)..(229): NCBI GI NO: 18406877 NR Description: expressed protein [Arabidopsis thaliana]
  misc_feature (1)..(224): NCBI GI NO: 7486466 NR Description: hypothetical protein At2g45740
  misc_feature (1)..(232): NCBI GI NO: 30695340 NR Description: expressed protein [Arabidopsis thaliana]
  misc_feature (1)..(232): NCBI GI NO: 11358250 NR Description: hypothetical protein T27I15_160 - Arabidopsisthaliana
  misc_feature (1)..(230): NCBI GI NO: 25553559 NR Description: OSJNBa0038F22.7
  misc_feature (1)..(231): NCBI GI NO: 34898026 NR Description: ESTs AU064537
  misc_feature (131)..(229): NCBI GI NO: 14335058 NR Description: At2g45740/F4I18.28 [Arabidopsis thaliana]
MGSLEATRAELGLAVLYLNKAEARDKICRAIQYGSKFISNGQPGTAQNVDKSTTLARKVFRLLKWVNDLHALISPAAKGTPLTLVLLGKSKNALLSTFLFLDQFVWLGRSGIYQNKERTDRIARMSLYCWMASSVCASLVELGELKRLSKAMRKRAKELRGADKYEDEQYLGKMKQSDDRLLALVKAGMDVVVAVGLLQLAPKKITPRVTGAFGFVTSLISCYQQLPSRAPLAKLKA

SEQ ID NO: 17880 - DNA, 1498 bp, Triticum aestivum
  misc_feature (1)..(1498): Ceres Seq. ID no. 15169541
aacaaaagcaccacccccacccgccttccttcctgccttcctgccctcagtcagccggagccggattgctcctcccgccatggcgctcctcaccgatctcctcaacctcgacctcaccgactccacggagaagatcatcgccgagtacatatggatcggcggatctggcatggatctcaggagcaaggccaggaccctccccggcccggtcacggatcccagcaagctgcccaagtggaactacgacggctccagcaccggccaggcccccggcgaggacagcgaggtcatcctgtacccacaggccatcttcaaggacccgttcaggaagggcaacaacatccttgtcatgtgcgattgctacaccccagctggagtgccaatccccaccaacaagagatacaacgctgccaagatctttagcaaccctgatgttgccaaggaggagccatggtatggtattgagcaggagtacaccctcctacagaaggacatcaactggcctctcggctggcctgttggtggattccctggtcctcagggtccttactactgtagtattggtgctgacaagtcgtttgggcgtgacatagttgacgctcactacaaggcctgcctctttgccggtgtcaacatcagtggcatcaatggcgaggtcatgcccggacagtgggagttccaagtcggcccgactgttggcatttctgctggcgaccaagtgtgggtcgctcgctaccttcttgagaggatcactgagatcgccggagttgtcgtcacatttgaccccaagcccatcccaggcgactggaacggtgctggtgctcacacaaactacagtaccgagtcgatgaggaaggacggcgggttcaaggtcatcgtggatgccgtggagaagctcaagctcaagcacaaggagcacatcgccgcctacggcgagggcaacgagcgccgcctcaccggcaagcacgagaccgccgacatcaacaccttcagctggggcgtcgcaaaccgtggcgcgtcggtgcgcgtgggccgggagacggagcagaacggcaagggctacttcgaggaccgccggccggcgtccaacatggacccatacgtggtcacctcgatgatcgccgagaccaccatcctgtggaagccctgaagccgatcggcgccgatcgccgtgcgatgatcagtgatgggttgggttggatttggtgggtggccactggaggatttggacgaaattcttccaacatatttgattttccgtttggttgcatactacgcgtagtccgcttaggtaggtcgcatcatcgtcgtcgtcgtcatgcatcagggtgtctggtcgctcttctctcgtctctgggtggtgggtggcaagaggcgtgtcaaacacacaaggctactattgattgttttcccttgccgtttgggtgctctggtcctcgtgtaatcatcaattgatatggtaataaaatggtccgtaccgctgccgtggtaccacacc

SEQ ID NO: 17881 - protein, 382 aa, Triticum aestivum
  peptide (1)..(382): Ceres Seq. ID no. 15169542
  misc_feature (129)..(381): Pfam Name: Pfam Description:  Glutamine synthetase, catalytic domain
  misc_feature (11)..(382): NCBI GI NO: 322833 NR Description: glutamate-ammonia ligase (EC 6
  misc_feature (27)..(382): NCBI GI NO: 729590 NR Description: GLUTAMINE SYNTHETASE
  misc_feature (27)..(382): NCBI GI NO: 286122 NR Description: glutamine synthetase [Zea mays]
  misc_feature (27)..(382): NCBI GI NO: 286124 NR Description: glutamine synthetase [Zea mays]
  misc_feature (27)..(382): NCBI GI NO: 121349 NR Description: Glutamine synthetase shoot isozyme
  misc_feature (27)..(382): NCBI GI NO: 585203 NR Description: GLUTAMINE SYNTHETASE ROOT ISOZYME 3
  misc_feature (27)..(382): NCBI GI NO: 585204 NR Description: GLUTAMINE SYNTHETASE ROOT ISOZYME 4
  misc_feature (27)..(382): NCBI GI NO: 1835154 NR Description: glutamine synthetase [Medicago truncatula]
  misc_feature (27)..(382): NCBI GI NO: 481914 NR Description: glutamate-ammonia ligase (EC 6.3.1.2) - rape
  misc_feature (27)..(382): NCBI GI NO: 417060 NR Description: Glutamine synthetase nodule isozyme
TKAPPPPAFLPAFLPSVSRSRIAPPAMALLTDLLNLDLTDSTEKIIAEYIWIGGSGMDLRSKARTLPGPVTDPSKLPKWNYDGSSTGQAPGEDSEVILYPQAIFKDPFRKGNNILVMCDCYTPAGVPIPTNKRYNAAKIFSNPDVAKEEPWYGIEQEYTLLQKDINWPLGWPVGGFPGPQGPYYCSIGADKSFGRDIVDAHYKACLFAGVNISGINGEVMPGQWEFQVGPTVGISAGDQVWVARYLLERITEIAGVVVTFDPKPIPGDWNGAGAHTNYSTESMRKDGGFKVIVDAVEKLKLKHKEHIAAYGEGNERRLTGKHETADINTFSWGVANRGASVRVGRETEQNGKGYFEDRRPASNMDPYVVTSMIAETTILWKP

SEQ ID NO: 17882 - protein, 356 aa, Triticum aestivum
  peptide (1)..(356): Ceres Seq. ID no. 15169543
  misc_feature (103)..(355): Pfam Name: Pfam Description:  Glutamine synthetase, catalytic domain
  misc_feature (1)..(356): NCBI GI NO: 322833 NR Description: glutamate-ammonia ligase (EC 6
  misc_feature (1)..(356): NCBI GI NO: 729590 NR Description: GLUTAMINE SYNTHETASE
  misc_feature (1)..(356): NCBI GI NO: 286122 NR Description: glutamine synthetase [Zea mays]
  misc_feature (1)..(356): NCBI GI NO: 286124 NR Description: glutamine synthetase [Zea mays]
  misc_feature (1)..(356): NCBI GI NO: 121349 NR Description: Glutamine synthetase shoot isozyme
  misc_feature (1)..(356): NCBI GI NO: 585203 NR Description: GLUTAMINE SYNTHETASE ROOT ISOZYME 3
  misc_feature (1)..(356): NCBI GI NO: 585204 NR Description: GLUTAMINE SYNTHETASE ROOT ISOZYME 4
  misc_feature (1)..(356): NCBI GI NO: 1835154 NR Description: glutamine synthetase [Medicago truncatula]
  misc_feature (1)..(356): NCBI GI NO: 481914 NR Description: glutamate-ammonia ligase (EC 6.3.1.2) - rape
  misc_feature (1)..(356): NCBI GI NO: 417060 NR Description: Glutamine synthetase nodule isozyme
MALLTDLLNLDLTDSTEKIIAEYIWIGGSGMDLRSKARTLPGPVTDPSKLPKWNYDGSSTGQAPGEDSEVILYPQAIFKDPFRKGNNILVMCDCYTPAGVPIPTNKRYNAAKIFSNPDVAKEEPWYGIEQEYTLLQKDINWPLGWPVGGFPGPQGPYYCSIGADKSFGRDIVDAHYKACLFAGVNISGINGEVMPGQWEFQVGPTVGISAGDQVWVARYLLERITEIAGVVVTFDPKPIPGDWNGAGAHTNYSTESMRKDGGFKVIVDAVEKLKLKHKEHIAAYGEGNERRLTGKHETADINTFSWGVANRGASVRVGRETEQNGKGYFEDRRPASNMDPYVVTSMIAETTILWKP

SEQ ID NO: 17883 - protein, 326 aa, Triticum aestivum
  peptide (1)..(326): Ceres Seq. ID no. 15169544
  misc_feature (73)..(325): Pfam Name: Pfam Description:  Glutamine synthetase, catalytic domain
  misc_feature (1)..(326): NCBI GI NO: 322833 NR Description: glutamate-ammonia ligase (EC 6
  misc_feature (1)..(326): NCBI GI NO: 729590 NR Description: GLUTAMINE SYNTHETASE
  misc_feature (1)..(326): NCBI GI NO: 286122 NR Description: glutamine synthetase [Zea mays]
  misc_feature (1)..(326): NCBI GI NO: 286124 NR Description: glutamine synthetase [Zea mays]
  misc_feature (1)..(326): NCBI GI NO: 121349 NR Description: Glutamine synthetase shoot isozyme
  misc_feature (1)..(326): NCBI GI NO: 585203 NR Description: GLUTAMINE SYNTHETASE ROOT ISOZYME 3
  misc_feature (1)..(326): NCBI GI NO: 585204 NR Description: GLUTAMINE SYNTHETASE ROOT ISOZYME 4
  misc_feature (1)..(326): NCBI GI NO: 1835154 NR Description: glutamine synthetase [Medicago truncatula]
  misc_feature (1)..(326): NCBI GI NO: 481914 NR Description: glutamate-ammonia ligase (EC 6.3.1.2) - rape
  misc_feature (1)..(326): NCBI GI NO: 417060 NR Description: Glutamine synthetase nodule isozyme
MDLRSKARTLPGPVTDPSKLPKWNYDGSSTGQAPGEDSEVILYPQAIFKDPFRKGNNILVMCDCYTPAGVPIPTNKRYNAAKIFSNPDVAKEEPWYGIEQEYTLLQKDINWPLGWPVGGFPGPQGPYYCSIGADKSFGRDIVDAHYKACLFAGVNISGINGEVMPGQWEFQVGPTVGISAGDQVWVARYLLERITEIAGVVVTFDPKPIPGDWNGAGAHTNYSTESMRKDGGFKVIVDAVEKLKLKHKEHIAAYGEGNERRLTGKHETADINTFSWGVANRGASVRVGRETEQNGKGYFEDRRPASNMDPYVVTSMIAETTILWKP

SEQ ID NO: 17884 - DNA, 2194 bp, Triticum aestivum
  misc_feature (1)..(2194): Ceres Seq. ID no. 13660912
cccccctccactgatcatctcatctctttcttcttggtgcctccccccctggtttttgcttctgccactccatgtctcaatcttctcctttcttttccattgcccccgcacatgctggagcaggagggcaagctgcggctgccgctctcctgctccgttgccctgccgctcagctgccacctgccattcactgcttccgtctggctaaagtgtcgcctgccaagacactgagctcgcacctggtgcttccgcgcgccacactctcctcctttgcaaacgctgacgatggctccggtgcaaactcagatgcctcgggggagcagagcggaggatccgaactgtcagagatggcaaaggcattccatatttcaccacggatggccatgtcaatctctgtggtgattgcatttgcagctctcactgttcccctggccatgcgctcactgctcttccatgggacgaccaagatgaaggtgctggcatatctgaccctcttgtcaggattctacatggcatggaacattggagccaatgatgtggcaaatgccatggggacgtcggtcggatctggggctttgactctccggcaggcagtgttgactgcagctgtgctagagttctctggtgcattccttatgggcacccatgtcaccagcaccatgcagaagggcatcctcgtcacatccgtcttccaaggaaatgattctctgctctttgctggattgctgtcctccctcgctgctgctggtacatggttgcaggttgcttcctcttatggctggcctgtgtcaactacccattgtattgttggggctatggttggttttgggctggtatatggaggggtcaatgcagttttctggagctccttggctagagtatcttcatcatggcttatttctcctctgatgggtgctgcagtctcatttcttgtttacaagtgcatacgcaggttcgtgtacagcgcaccaaatccaggtcaagctgcagctgcttctgcacctattgcagtttttactggtgtcactgcaatctcgtttgccgctttccctctcagcaagacattttccattgccgttctgcaagcattagtatgtggggcaataggagctgtctttgttagcagggcaatcaaaaaacagcttggtgatctactgtcttcggaagcagaaaagatagcaacagctgacaatacagatgttcagcaaggtggatttgacgtcgctggccctagaggagctcaactgcagattgtctacggcgtatttggctacatgcaggtcctgtcagcatgcttcatgtcattcgctcatggaggcaatgatgtctccaatgccatagggcctctggccgcagctttgtctcttcttcaaggcgtagcaagcagcgctgagatagtcataccgactgaagtccttgcttggggtggttttggaattgtcgcagggcttacaatgtggggttatagagtcatagcaacaattggcaagaaaatcaccgaattaacacccacaagggggttcgcagcagagtttgcggccgcttctgtggtcttgtttgcatctaagcttgggttgccaatatctgctacacatacacttgttggtgcagtgatgggtgtaggatttgcaagaggtctcaacagagtcagagcagagactgttcgtgaaattgtggtctcctgggtggtcacaattccagttggtgctttgctatcagtcatctatacattaatcttgaccaagattctgaaatactttatgtgagtgctttgtgagatacagttgctgttttgagaggtccagccgttgtccctaaattttttatgctgtaaaagaatgtgtaacagtgaatagatgagccagctccgggagtttccagcagagaaattgaaaagatttgtcagagaaaataatcattttcctggcaacaaaacatgattaggataaagggtttacggtaaataatcatgtttgagactcccagcttcttcatcttttatctctaatgtaccacctatatgactatatctttatattttcttccagaaggtggaatatttcaatttcttgtagagatatgattaattgatcatacataatagacaatggttcgtctcactacccttgtaattatgccacattgacgattttgctgtttcagcgccactataaatgtgaatctttttctttgg

SEQ ID NO: 17885 - protein, 564 aa, Triticum aestivum
  peptide (1)..(564): Ceres Seq. ID no. 15220696
  misc_feature (151)..(549): Pfam Name: Pfam Description:  Phosphate transporter family
  misc_feature (54)..(564): NCBI GI NO: 22450125 NR Description: phosphate hydrogen transporter [Spinacia oleracea]
  misc_feature (1)..(564): NCBI GI NO: 30688378 NR Description: phosphate transporter -related
  misc_feature (1)..(564): NCBI GI NO: 30688383 NR Description: phosphate transporter -related
  misc_feature (47)..(564): NCBI GI NO: 24079961 NR Description: phosphate transporter PHT2-1 [Medicago truncatula]
  misc_feature (54)..(564): NCBI GI NO: 7522208 NR Description: probable phosphate permease - common ice plant
  misc_feature (133)..(556): NCBI GI NO: 15618590 NR Description: Phosphate Permease
  misc_feature (329)..(552): NCBI GI NO: 28897192 NR Description: pho4 family protein
  misc_feature (135)..(330): NCBI GI NO: 28897192 NR Description: pho4 family protein
  misc_feature (329)..(552): NCBI GI NO: 15642438 NR Description: pho4 family protein [Vibrio cholerae]
  misc_feature (120)..(330): NCBI GI NO: 15642438 NR Description: pho4 family protein [Vibrio cholerae]
MSQSSPFFSIAPAHAGAGGQAAAAALLLRCPAAQLPPAIHCFRLAKVSPAKTLSSHLVLPRATLSSFANADDGSGANSDASGEQSGGSELSEMAKAFHISPRMAMSISVVIAFAALTVPLAMRSLLFHGTTKMKVLAYLTLLSGFYMAWNIGANDVANAMGTSVGSGALTLRQAVLTAAVLEFSGAFLMGTHVTSTMQKGILVTSVFQGNDSLLFAGLLSSLAAAGTWLQVASSYGWPVSTTHCIVGAMVGFGLVYGGVNAVFWSSLARVSSSWLISPLMGAAVSFLVYKCIRRFVYSAPNPGQAAAASAPIAVFTGVTAISFAAFPLSKTFSIAVLQALVCGAIGAVFVSRAIKKQLGDLLSSEAEKIATADNTDVQQGGFDVAGPRGAQLQIVYGVFGYMQVLSACFMSFAHGGNDVSNAIGPLAAALSLLQGVASSAEIVIPTEVLAWGGFGIVAGLTMWGYRVIATIGKKITELTPTRGFAAEFAAASVVLFASKLGLPISATHTLVGAVMGVGFARGLNRVRAETVREIVVSWVVTIPVGALLSVIYTLILTKILKYFM

SEQ ID NO: 17886 - protein, 472 aa, Triticum aestivum
  peptide (1)..(472): Ceres Seq. ID no. 15220697
  misc_feature (59)..(457): Pfam Name: Pfam Description:  Phosphate transporter family
  misc_feature (1)..(472): NCBI GI NO: 22450125 NR Description: phosphate hydrogen transporter [Spinacia oleracea]
  misc_feature (1)..(472): NCBI GI NO: 30688378 NR Description: phosphate transporter -related
  misc_feature (1)..(472): NCBI GI NO: 30688383 NR Description: phosphate transporter -related
  misc_feature (1)..(472): NCBI GI NO: 24079961 NR Description: phosphate transporter PHT2-1 [Medicago truncatula]
  misc_feature (1)..(472): NCBI GI NO: 7522208 NR Description: probable phosphate permease - common ice plant
  misc_feature (41)..(464): NCBI GI NO: 15618590 NR Description: Phosphate Permease
  misc_feature (237)..(460): NCBI GI NO: 28897192 NR Description: pho4 family protein
  misc_feature (43)..(238): NCBI GI NO: 28897192 NR Description: pho4 family protein
  misc_feature (237)..(460): NCBI GI NO: 15642438 NR Description: pho4 family protein [Vibrio cholerae]
  misc_feature (28)..(238): NCBI GI NO: 15642438 NR Description: pho4 family protein [Vibrio cholerae]
MAKAFHISPRMAMSISVVIAFAALTVPLAMRSLLFHGTTKMKVLAYLTLLSGFYMAWNIGANDVANAMGTSVGSGALTLRQAVLTAAVLEFSGAFLMGTHVTSTMQKGILVTSVFQGNDSLLFAGLLSSLAAAGTWLQVASSYGWPVSTTHCIVGAMVGFGLVYGGVNAVFWSSLARVSSSWLISPLMGAAVSFLVYKCIRRFVYSAPNPGQAAAASAPIAVFTGVTAISFAAFPLSKTFSIAVLQALVCGAIGAVFVSRAIKKQLGDLLSSEAEKIATADNTDVQQGGFDVAGPRGAQLQIVYGVFGYMQVLSACFMSFAHGGNDVSNAIGPLAAALSLLQGVASSAEIVIPTEVLAWGGFGIVAGLTMWGYRVIATIGKKITELTPTRGFAAEFAAASVVLFASKLGLPISATHTLVGAVMGVGFARGLNRVRAETVREIVVSWVVTIPVGALLSVIYTLILTKILKYFM

SEQ ID NO: 17887 - protein, 462 aa, Triticum aestivum
  peptide (1)..(462): Ceres Seq. ID no. 15220698
  misc_feature (49)..(447): Pfam Name: Pfam Description:  Phosphate transporter family
  misc_feature (1)..(462): NCBI GI NO: 22450125 NR Description: phosphate hydrogen transporter [Spinacia oleracea]
  misc_feature (1)..(462): NCBI GI NO: 30688378 NR Description: phosphate transporter -related
  misc_feature (1)..(462): NCBI GI NO: 30688383 NR Description: phosphate transporter -related
  misc_feature (1)..(462): NCBI GI NO: 24079961 NR Description: phosphate transporter PHT2-1 [Medicago truncatula]
  misc_feature (1)..(462): NCBI GI NO: 7522208 NR Description: probable phosphate permease - common ice plant
  misc_feature (31)..(454): NCBI GI NO: 15618590 NR Description: Phosphate Permease
  misc_feature (227)..(450): NCBI GI NO: 28897192 NR Description: pho4 family protein
  misc_feature (33)..(228): NCBI GI NO: 28897192 NR Description: pho4 family protein
  misc_feature (227)..(450): NCBI GI NO: 15642438 NR Description: pho4 family protein [Vibrio cholerae]
  misc_feature (18)..(228): NCBI GI NO: 15642438 NR Description: pho4 family protein [Vibrio cholerae]
MAMSISVVIAFAALTVPLAMRSLLFHGTTKMKVLAYLTLLSGFYMAWNIGANDVANAMGTSVGSGALTLRQAVLTAAVLEFSGAFLMGTHVTSTMQKGILVTSVFQGNDSLLFAGLLSSLAAAGTWLQVASSYGWPVSTTHCIVGAMVGFGLVYGGVNAVFWSSLARVSSSWLISPLMGAAVSFLVYKCIRRFVYSAPNPGQAAAASAPIAVFTGVTAISFAAFPLSKTFSIAVLQALVCGAIGAVFVSRAIKKQLGDLLSSEAEKIATADNTDVQQGGFDVAGPRGAQLQIVYGVFGYMQVLSACFMSFAHGGNDVSNAIGPLAAALSLLQGVASSAEIVIPTEVLAWGGFGIVAGLTMWGYRVIATIGKKITELTPTRGFAAEFAAASVVLFASKLGLPISATHTLVGAVMGVGFARGLNRVRAETVREIVVSWVVTIPVGALLSVIYTLILTKILKYFM

SEQ ID NO: 17888 - DNA, 1551 bp, Triticum aestivum
  misc_feature (1)..(1551): Ceres Seq. ID no. 13664395
gcagatttgtttgccatcttttggggttttcttgatgagttcttggttggtatgagtggagtggtttgcgattctctttttcctgcttggaggaaggattaggttcttccatttcttgctgggtccgtgctcttgtgtgggcgtctagcttcttccatttcttgttgcattcctgctgatctctgtgggtgccagagatgagcgtaccgcacctgttccggtgtccgatcagcctggacatcttcacggacccggtgacgctctgcacggggcagacgtacgaccgtcaatgcatcgagcggtggctcgctgacggccaccgcacctgccccgtcacaatgcaggccctcggcgacgccgacaccaccgtgctcgtgcccaaccgcaccctgcgccacctcatcgagcgctggctctccgccgccaccgaccacagcctcccggagtcggcggacgacgatccatcgcttgcggcgctcaagcggtgcctccagtccgacgccacctccgccgccgccaagatcggcgcgctcaagaaggtcttggcgctggcgtccgagtccgacgtcggccgcgcgtgcatgctgcagctggggttcctctgcgtgctcctgccgctcgtcttccacgccgcgccgaccgcgccagcgcagcgccacgcggaggcggaggagctcgcgctgcagtgcgcgctcagcctcatgccgtcgaacgccgccgcgccgcagctggactgcctcaacatgctcaagaaggaggacaacctggcgtccttcgtccggctgctggggcgaggcagcggccgggccaaggcaggcctgtgccgcctcctggagaccgtcgccacggccgcggcgacgcgggacctggcgctcgtcgtggccgcctcgccgcgcgtgtggcaggcgctcctgccgctcctgcagcagcacgccggcccggcccccgacgcgcgcgcctcggaggctgcagtgcgcgcgatcgctgcggtctgcgcggccgagccggcgcgtggcagtgccatccaccacggcgcggtcggcgcgctcttcaggcacctgtcgtggtgggcgtacggcaagggcggcggggccgtgtccagcgcgctggcggcggtggaggcgctggcggagacggaggccggccggagggcggtggcgcgcgcgcccggcgcaacgcggattctcgtgaggcacgtgttcatgatgtcatcgagcaacgacgggagcgagcacgcggcggcggcgctgctagccgtgtgcagggagtcgcgggcggcgcggagcgaggcggtgggcgccggggtggtgacgcagctgctgctgctgcttcagagccagtgcggcgccagggctaaggccaaggcgagggcgctgctgaagctgctcaaatccaggtgaactagagctgagtactcattagagttagcgaggatttagatgttcttgtaagctgtaagtttctgcgtcaagaatgtctgccaatgacatggtattcaattccgggcaatttatgtagtaactctgggggattaaattgcccgggcgtttt

SEQ ID NO: 17889 - protein, 400 aa, Triticum aestivum
  peptide (1)..(400): Ceres Seq. ID no. 13664396
  misc_feature (2)..(73): Pfam Name: Pfam Description:  U-box domain
  misc_feature (9)..(399): NCBI GI NO: 38344067 NR Description: OSJNBa0006B20.11
  misc_feature (1)..(397): NCBI GI NO: 38344067 NR Description: OSJNBa0006B20.11
  misc_feature (1)..(398): NCBI GI NO: 15222819 NR Description: expressed protein [Arabidopsis thaliana]
  misc_feature (1)..(398): NCBI GI NO: 26451730 NR Description: unknown protein [Arabidopsis thaliana]
  misc_feature (1)..(398): NCBI GI NO: 18402223 NR Description: expressed protein [Arabidopsis thaliana]
  misc_feature (1)..(400): NCBI GI NO: 15237755 NR Description: expressed protein [Arabidopsis thaliana]
  misc_feature (1)..(396): NCBI GI NO: 25408431 NR Description: hypothetical protein At2g35930
  misc_feature (1)..(396): NCBI GI NO: 30686609 NR Description: expressed protein [Arabidopsis thaliana]
  misc_feature (1)..(396): NCBI GI NO: 21741126 NR Description: OSJNBa0070M12.4
  misc_feature (1)..(375): NCBI GI NO: 39545718 NR Description: OSJNBa0033G16.8
MSVPHLFRCPISLDIFTDPVTLCTGQTYDRQCIERWLADGHRTCPVTMQALGDADTTVLVPNRTLRHLIERWLSAATDHSLPESADDDPSLAALKRCLQSDATSAAAKIGALKKVLALASESDVGRACMLQLGFLCVLLPLVFHAAPTAPAQRHAEAEELALQCALSLMPSNAAAPQLDCLNMLKKEDNLASFVRLLGRGSGRAKAGLCRLLETVATAAATRDLALVVAASPRVWQALLPLLQQHAGPAPDARASEAAVRAIAAVCAAEPARGSAIHHGAVGALFRHLSWWAYGKGGGAVSSALAAVEALAETEAGRRAVARAPGATRILVRHVFMMSSSNDGSEHAAAALLAVCRESRAARSEAVGAGVVTQLLLLLQSQCGARAKAKARALLKLLKSR

SEQ ID NO: 17890 - protein, 353 aa, Triticum aestivum
  peptide (1)..(353): Ceres Seq. ID no. 13664397
  misc_feature (1)..(352): NCBI GI NO: 38344067 NR Description: OSJNBa0006B20.11
  misc_feature (1)..(350): NCBI GI NO: 38344067 NR Description: OSJNBa0006B20.11
  misc_feature (1)..(351): NCBI GI NO: 15222819 NR Description: expressed protein [Arabidopsis thaliana]
  misc_feature (1)..(351): NCBI GI NO: 26451730 NR Description: unknown protein [Arabidopsis thaliana]
  misc_feature (1)..(351): NCBI GI NO: 18402223 NR Description: expressed protein [Arabidopsis thaliana]
  misc_feature (1)..(353): NCBI GI NO: 15237755 NR Description: expressed protein [Arabidopsis thaliana]
  misc_feature (1)..(349): NCBI GI NO: 25408431 NR Description: hypothetical protein At2g35930
  misc_feature (1)..(349): NCBI GI NO: 30686609 NR Description: expressed protein [Arabidopsis thaliana]
  misc_feature (1)..(349): NCBI GI NO: 21741126 NR Description: OSJNBa0070M12.4
  misc_feature (1)..(328): NCBI GI NO: 39545718 NR Description: OSJNBa0033G16.8
MQALGDADTTVLVPNRTLRHLIERWLSAATDHSLPESADDDPSLAALKRCLQSDATSAAAKIGALKKVLALASESDVGRACMLQLGFLCVLLPLVFHAAPTAPAQRHAEAEELALQCALSLMPSNAAAPQLDCLNMLKKEDNLASFVRLLGRGSGRAKAGLCRLLETVATAAATRDLALVVAASPRVWQALLPLLQQHAGPAPDARASEAAVRAIAAVCAAEPARGSAIHHGAVGALFRHLSWWAYGKGGGAVSSALAAVEALAETEAGRRAVARAPGATRILVRHVFMMSSSNDGSEHAAAALLAVCRESRAARSEAVGAGVVTQLLLLLQSQCGARAKAKARALLKLLKSR

SEQ ID NO: 17891 - protein, 272 aa, Triticum aestivum
  peptide (1)..(272): Ceres Seq. ID no. 13664398
  misc_feature (1)..(271): NCBI GI NO: 38344067 NR Description: OSJNBa0006B20.11
  misc_feature (1)..(269): NCBI GI NO: 38344067 NR Description: OSJNBa0006B20.11
  misc_feature (1)..(270): NCBI GI NO: 15222819 NR Description: expressed protein [Arabidopsis thaliana]
  misc_feature (1)..(270): NCBI GI NO: 26451730 NR Description: unknown protein [Arabidopsis thaliana]
  misc_feature (1)..(270): NCBI GI NO: 18402223 NR Description: expressed protein [Arabidopsis thaliana]
  misc_feature (1)..(272): NCBI GI NO: 15237755 NR Description: expressed protein [Arabidopsis thaliana]
  misc_feature (1)..(268): NCBI GI NO: 25408431 NR Description: hypothetical protein At2g35930
  misc_feature (1)..(268): NCBI GI NO: 30686609 NR Description: expressed protein [Arabidopsis thaliana]
  misc_feature (1)..(268): NCBI GI NO: 21741126 NR Description: OSJNBa0070M12.4
  misc_feature (1)..(247): NCBI GI NO: 39545718 NR Description: OSJNBa0033G16.8
MLQLGFLCVLLPLVFHAAPTAPAQRHAEAEELALQCALSLMPSNAAAPQLDCLNMLKKEDNLASFVRLLGRGSGRAKAGLCRLLETVATAAATRDLALVVAASPRVWQALLPLLQQHAGPAPDARASEAAVRAIAAVCAAEPARGSAIHHGAVGALFRHLSWWAYGKGGGAVSSALAAVEALAETEAGRRAVARAPGATRILVRHVFMMSSSNDGSEHAAAALLAVCRESRAARSEAVGAGVVTQLLLLLQSQCGARAKAKARALLKLLKSR

SEQ ID NO: 17892 - DNA, 1742 bp, Triticum aestivum
  misc_feature (1)..(1742): Ceres Seq. ID no. 15169619
tggagtttggaaggaaatcttgggtggctgcagtcctctgatccttctcattctggaggcgtattcagtacaaaccaatattctggttggtgattgtcagcatggagatggcaagtagcgccaagtggtttgctgtggctcttgttttcatcactgtgatcctactcagggtcataagaggaaggaggatggccgctgctccagccagtgagaaaccacctccacctgtggtgaatggttttgctttactaggacttctacctaggcttcttacaatggaccttcgaactaagataaattgcctgcacgataagtatggcagtgtgttcacagttagtccttttggactaactaatgtaacctttctgatcggcccggaggtccaatcccatttctttcaagggttggagtcagagattaaccatggcaatcttcttgagttccttgtgctgatgtttggacaagagataggtcaaggtgtcgatgcagccactcggactgagcagtcccgcttttatctcgatgcattaaagcaatccaagttgaggagacatcttgatccaatgcttcaagaggtcgagagctactttggcaaatggggcctggaaggagaagttgatttaaaacatgagtttgaagagttgctcatgttgatatcgagccgatgtctactaggaaaagaggttcgggagaagatgtttgatgagttctataaactatttcgtgatgtcgaaaatggagtgaacatgatcagtgtcttcttcccatatattccaattcctgcaaaccgtaggcgtgacaaagcacgtcttaagctcatcgaattactttctggaactgtgaggtcacgtaagagctccccctcagtggaggaagatgtgctacaaagattgatagattccaagtataaagacggccgctccacaacggaaacagaggtaaccgggatgatcattgcattgatctttggtggaaagcacacaagttccctcgctagtacctggaccggagcttgcctactcacccatccaaagttcttagcggctgcatcccaggagcaaaaggaaatcatgatgaaatacgaggacaaaatagaatatgatgccttgttagagatgaatacccttcataattgtatcaaagaggcacttcggttgaacccaccaacaacaatgttggttcgcaaggcacttaaacatttcacagtgcggacaagacaaggccaagagtatggcattcccaaggggcatactcttgcaagtcccataatacaaaacaattacttgccttacatttataaggaccccgaggtatatgatccagatcggtttggtcccgtaaggcaggaggacgtggttggcggcaagttttcttatacatcctttggtggtggaaggcatttttgcagtggggatgcctatgcttacatgcaagttaaagttatatggagccacttgctcaacaactttgatctcaaattattatctccttatcccaagactgactggagtaagttaatcccagagcctcaagggaatatgatggttagctacaagagacgccagctgctaggctagcttgctatatatatcatttgcatgaggagcaccggcttgcatgcttgtgtttgtatgggtgcatcacttattacttgtatttgtgtatgtttttatgattgtaataattttcagtaacccttggatgagctatatatggtcttctcatagtgtgtgccactagtg

SEQ ID NO: 17893 - protein, 491 aa, Triticum aestivum
  peptide (1)..(491): Ceres Seq. ID no. 15169620
  misc_feature (1)..(489): NCBI GI NO: 34901524 NR Description: putative cytochrome P450
  misc_feature (12)..(490): NCBI GI NO: 5921924 NR Description: Cytochrome P450 51
  misc_feature (12)..(490): NCBI GI NO: 27542762 NR Description: cytochrome P450-like protein [Sorghum bicolor]
  misc_feature (1)..(489): NCBI GI NO: 18000074 NR Description: obtusifoliol-14-demethylase [Nicotiana tabacum]
  misc_feature (14)..(489): NCBI GI NO: 27461067 NR Description: obtusifoliol-14-demethylase [Nicotiana tabacum]
  misc_feature (40)..(490): NCBI GI NO: 6166036 NR Description: Cytochrome P450 51
  misc_feature (1)..(489): NCBI GI NO: 15221075 NR Description: obtusifoliol 14-demethylase (CYP51)
  misc_feature (71)..(490): NCBI GI NO: 4586676 NR Description: sterol 14-demethylase
  misc_feature (1)..(487): NCBI GI NO: 21618866 NR Description: cytochrome P450, 51 [Mus musculus]
  misc_feature (71)..(488): NCBI GI NO: 28395121 NR Description: lanosterol 14 alpha demethylase; ERG11
MEMASSAKWFAVALVFITVILLRVIRGRRMAAAPASEKPPPPVVNGFALLGLLPRLLTMDLRTKINCLHDKYGSVFTVSPFGLTNVTFLIGPEVQSHFFQGLESEINHGNLLEFLVLMFGQEIGQGVDAATRTEQSRFYLDALKQSKLRRHLDPMLQEVESYFGKWGLEGEVDLKHEFEELLMLISSRCLLGKEVREKMFDEFYKLFRDVENGVNMISVFFPYIPIPANRRRDKARLKLIELLSGTVRSRKSSPSVEEDVLQRLIDSKYKDGRSTTETEVTGMIIALIFGGKHTSSLASTWTGACLLTHPKFLAAASQEQKEIMMKYEDKIEYDALLEMNTLHNCIKEALRLNPPTTMLVRKALKHFTVRTRQGQEYGIPKGHTLASPIIQNNYLPYIYKDPEVYDPDRFGPVRQEDVVGGKFSYTSFGGGRHFCSGDAYAYMQVKVIWSHLLNNFDLKLLSPYPKTDWSKLIPEPQGNMMVSYKRRQLLG

SEQ ID NO: 17894 - protein, 489 aa, Triticum aestivum
  peptide (1)..(489): Ceres Seq. ID no. 15169621
  misc_feature (1)..(487): NCBI GI NO: 34901524 NR Description: putative cytochrome P450
  misc_feature (10)..(488): NCBI GI NO: 5921924 NR Description: Cytochrome P450 51
  misc_feature (10)..(488): NCBI GI NO: 27542762 NR Description: cytochrome P450-like protein [Sorghum bicolor]
  misc_feature (1)..(487): NCBI GI NO: 18000074 NR Description: obtusifoliol-14-demethylase [Nicotiana tabacum]
  misc_feature (12)..(487): NCBI GI NO: 27461067 NR Description: obtusifoliol-14-demethylase [Nicotiana tabacum]
  misc_feature (38)..(488): NCBI GI NO: 6166036 NR Description: Cytochrome P450 51
  misc_feature (1)..(487): NCBI GI NO: 15221075 NR Description: obtusifoliol 14-demethylase (CYP51)
  misc_feature (69)..(488): NCBI GI NO: 4586676 NR Description: sterol 14-demethylase
  misc_feature (1)..(485): NCBI GI NO: 21618866 NR Description: cytochrome P450, 51 [Mus musculus]
  misc_feature (69)..(486): NCBI GI NO: 28395121 NR Description: lanosterol 14 alpha demethylase; ERG11
MASSAKWFAVALVFITVILLRVIRGRRMAAAPASEKPPPPVVNGFALLGLLPRLLTMDLRTKINCLHDKYGSVFTVSPFGLTNVTFLIGPEVQSHFFQGLESEINHGNLLEFLVLMFGQEIGQGVDAATRTEQSRFYLDALKQSKLRRHLDPMLQEVESYFGKWGLEGEVDLKHEFEELLMLISSRCLLGKEVREKMFDEFYKLFRDVENGVNMISVFFPYIPIPANRRRDKARLKLIELLSGTVRSRKSSPSVEEDVLQRLIDSKYKDGRSTTETEVTGMIIALIFGGKHTSSLASTWTGACLLTHPKFLAAASQEQKEIMMKYEDKIEYDALLEMNTLHNCIKEALRLNPPTTMLVRKALKHFTVRTRQGQEYGIPKGHTLASPIIQNNYLPYIYKDPEVYDPDRFGPVRQEDVVGGKFSYTSFGGGRHFCSGDAYAYMQVKVIWSHLLNNFDLKLLSPYPKTDWSKLIPEPQGNMMVSYKRRQLLG

SEQ ID NO: 17895 - protein, 462 aa, Triticum aestivum
  peptide (1)..(462): Ceres Seq. ID no. 15169622
  misc_feature (1)..(460): NCBI GI NO: 34901524 NR Description: putative cytochrome P450
  misc_feature (1)..(461): NCBI GI NO: 5921924 NR Description: Cytochrome P450 51
  misc_feature (1)..(461): NCBI GI NO: 27542762 NR Description: cytochrome P450-like protein [Sorghum bicolor]
  misc_feature (1)..(460): NCBI GI NO: 18000074 NR Description: obtusifoliol-14-demethylase [Nicotiana tabacum]
  misc_feature (1)..(460): NCBI GI NO: 27461067 NR Description: obtusifoliol-14-demethylase [Nicotiana tabacum]
  misc_feature (11)..(461): NCBI GI NO: 6166036 NR Description: Cytochrome P450 51
  misc_feature (1)..(460): NCBI GI NO: 15221075 NR Description: obtusifoliol 14-demethylase (CYP51)
  misc_feature (42)..(461): NCBI GI NO: 4586676 NR Description: sterol 14-demethylase
  misc_feature (1)..(458): NCBI GI NO: 21618866 NR Description: cytochrome P450, 51 [Mus musculus]
  misc_feature (42)..(459): NCBI GI NO: 28395121 NR Description: lanosterol 14 alpha demethylase; ERG11
MAAAPASEKPPPPVVNGFALLGLLPRLLTMDLRTKINCLHDKYGSVFTVSPFGLTNVTFLIGPEVQSHFFQGLESEINHGNLLEFLVLMFGQEIGQGVDAATRTEQSRFYLDALKQSKLRRHLDPMLQEVESYFGKWGLEGEVDLKHEFEELLMLISSRCLLGKEVREKMFDEFYKLFRDVENGVNMISVFFPYIPIPANRRRDKARLKLIELLSGTVRSRKSSPSVEEDVLQRLIDSKYKDGRSTTETEVTGMIIALIFGGKHTSSLASTWTGACLLTHPKFLAAASQEQKEIMMKYEDKIEYDALLEMNTLHNCIKEALRLNPPTTMLVRKALKHFTVRTRQGQEYGIPKGHTLASPIIQNNYLPYIYKDPEVYDPDRFGPVRQEDVVGGKFSYTSFGGGRHFCSGDAYAYMQVKVIWSHLLNNFDLKLLSPYPKTDWSKLIPEPQGNMMVSYKRRQLLG

SEQ ID NO: 17896 - DNA, 1197 bp, Triticum aestivum
  misc_feature (1)..(1197): Ceres Seq. ID no. 13663748
gaccaacttggagcctccctgttcttaaaaaatcaaccaacttgccagcgaacgagcgaccaccgacggctcctcgtcgccgccggtgatcgaggtgggccccgcaggccggatctcgggaggaggaggaggagcaatgtcgcgggcgtcgctgtccccgtcgtcgtcgggcgacgaggaggaggaggacgacgagggggtcgacgggtaccgcaagggcggataccacgccgtcctcctcctcctcctcgcctccccgcggccacacctcgactcgctccctcgagatcatctgttccatccttttgaggctgagatggcggctaccttcaatgttaatgctgaggcaggccttaaaaagcttgatggctaccttctgtctcgcagttacatctctggataccaagcttccaaggatgacttggctgtgtattcagagttctcagttgctccaccatcaacttgcaccaatgttgcaaggtggtacaatcacattgatgcactcctgaagctgagtggagttactgcccctggtcaaggtgtgaaggttctgtcatcagttgtccctgaaacctcaactactgatgttgctgaggctcctgcagctgatgatgacgatgacagcgatgttgacctttttggagaggaaaccgaggaggagaaaaaggcagctgaagagcgcgctgccaaagcaaaggcttctaccaagaagaaagaatctggcaagtcatcagttttgcttgatgttaagccatgggacgatgagaccgacatggtcaagctggaggaagctgtccgaagcatcaagatggagggccttctgtggggtgcttccaagctcatgcccgttggatatggcatcaagaagctccagattatgatgaccatcattgatgacctcgtctctgtcgacactcttattgaagaccatctctgcgttgaaccagccaacgagtacatccagagctgtgacattgttgccttcaacaaaatctaaatcttcctgaggcaggtgatggcggtgggcgcacaatatatctacagttttctgttgccgtgatggtgtcgtagctaaagcaagcataacatatctgccctgtgaggtttttggaccttagatcgagttgattcgtagtattactactgagtgttatttgcttcgtatgaaatgagacaatgtggttggattcctgttgc

SEQ ID NO: 17897 - protein, 286 aa, Triticum aestivum
  peptide (1)..(286): Ceres Seq. ID no. 13663749
  misc_feature (197)..(286): Pfam Name: Pfam Description:  EF-1 guanine nucleotide exchange domain
  misc_feature (61)..(286): NCBI GI NO: 7711024 NR Description: putative elongation factor 1 beta
  misc_feature (61)..(286): NCBI GI NO: 6166140 NR Description: ELONGATION FACTOR 1-BETA (EF-1-BETA)
  misc_feature (61)..(286): NCBI GI NO: 3894214 NR Description: elongation factor 1 beta 2
  misc_feature (61)..(286): NCBI GI NO: 6015064 NR Description: ELONGATION FACTOR 1-BETA (EF-1-BETA)
  misc_feature (61)..(286): NCBI GI NO: 38232568 NR Description: translational elongation factor 1 subunit Bbeta
  misc_feature (61)..(286): NCBI GI NO: 25299531 NR Description: probable elongation factor 1-beta
  misc_feature (61)..(286): NCBI GI NO: 30691619 NR Description: elongation factor 1-beta -related
  misc_feature (61)..(286): NCBI GI NO: 15224107 NR Description: elongation factor beta-1 -related
  misc_feature (61)..(286): NCBI GI NO: 21593028 NR Description: putative  elongation factor beta-1
  misc_feature (61)..(286): NCBI GI NO: 480620 NR Description: translation elongation factor eEF-1 beta-A1 chain -Arabidopsis thaliana
MSRASLSPSSSGDEEEEDDEGVDGYRKGGYHAVLLLLLASPRPHLDSLPRDHLFHPFEAEMAATFNVNAEAGLKKLDGYLLSRSYISGYQASKDDLAVYSEFSVAPPSTCTNVARWYNHIDALLKLSGVTAPGQGVKVLSSVVPETSTTDVAEAPAADDDDDSDVDLFGEETEEEKKAAEERAAKAKASTKKKESGKSSVLLDVKPWDDETDMVKLEEAVRSIKMEGLLWGASKLMPVGYGIKKLQIMMTIIDDLVSVDTLIEDHLCVEPANEYIQSCDIVAFNKI

SEQ ID NO: 17898 - protein, 226 aa, Triticum aestivum
  peptide (1)..(226): Ceres Seq. ID no. 13663750
  misc_feature (137)..(226): Pfam Name: Pfam Description:  EF-1 guanine nucleotide exchange domain
  misc_feature (1)..(226): NCBI GI NO: 7711024 NR Description: putative elongation factor 1 beta
  misc_feature (1)..(226): NCBI GI NO: 6166140 NR Description: ELONGATION FACTOR 1-BETA (EF-1-BETA)
  misc_feature (1)..(226): NCBI GI NO: 3894214 NR Description: elongation factor 1 beta 2
  misc_feature (1)..(226): NCBI GI NO: 6015064 NR Description: ELONGATION FACTOR 1-BETA (EF-1-BETA)
  misc_feature (1)..(226): NCBI GI NO: 38232568 NR Description: translational elongation factor 1 subunit Bbeta
  misc_feature (1)..(226): NCBI GI NO: 25299531 NR Description: probable elongation factor 1-beta
  misc_feature (1)..(226): NCBI GI NO: 30691619 NR Description: elongation factor 1-beta -related
  misc_feature (1)..(226): NCBI GI NO: 15224107 NR Description: elongation factor beta-1 -related
  misc_feature (1)..(226): NCBI GI NO: 21593028 NR Description: putative  elongation factor beta-1
  misc_feature (1)..(226): NCBI GI NO: 480620 NR Description: translation elongation factor eEF-1 beta-A1 chain -Arabidopsis thaliana
MAATFNVNAEAGLKKLDGYLLSRSYISGYQASKDDLAVYSEFSVAPPSTCTNVARWYNHIDALLKLSGVTAPGQGVKVLSSVVPETSTTDVAEAPAADDDDDSDVDLFGEETEEEKKAAEERAAKAKASTKKKESGKSSVLLDVKPWDDETDMVKLEEAVRSIKMEGLLWGASKLMPVGYGIKKLQIMMTIIDDLVSVDTLIEDHLCVEPANEYIQSCDIVAFNKI

SEQ ID NO: 17899 - DNA, 813 bp, Triticum aestivum
  misc_feature (1)..(813): Ceres Seq. ID no. 13663751
gcatccaacccctcctgctgctgctgtgttgcccgtgttgccgccccgaccgccgcctccaccacccacccacccacaccgcgccggcctcttccccctgtcccgtctccctcatggcctccgccgccgcatccgccgtctccttcgccaggcccgtcaaggcaatcaatgccaactcggtctccttctctgctccaaggaaaggcaatgtatccttccgtcttcagccagttccccagagattttctgtttcctgtgctgccaaaaaggagacagtagaaaaggtttgtgatattgtgaagagccagcttgcgcttgctgacgacactgtagtttctggctcctctacgtttgctgatcttggtgccgattccttggacacggttgagattgtcatgggcctcgaggaggctttcgggatcagcgtggaggagtcgagtgcgcagaccatcgcaacggtggaagacgccgccaacctcatcgacagccttgttgcaaactaaacatatttctttgcaataatgggctacccactgcaatcgttgctgctggagatgatcccgtttgacgtgctagattttactgtggagagtcggtgacatctgtatcagtgtttttgcctgtcttgccatattaagacattatttattaagcgaatgttgaaggaattttttcttgttgaagctgtgttggagactgatttcagggtctgaacatgctgtgctggaattaactacccctgtctttcttgggttcaaagaaaaaaaaaaaaaaaaaagcttatcgataccgtcgacctcgagggggggcccg

SEQ ID NO: 17900 - protein, 166 aa, Triticum aestivum
  peptide (1)..(166): Ceres Seq. ID no. 13663752
  misc_feature (93)..(160): Pfam Name: Pfam Description:  Phosphopantetheine attachment site
  misc_feature (38)..(164): NCBI GI NO: 113169 NR Description: Acyl carrier protein II, chloroplast precursor
  misc_feature (38)..(165): NCBI GI NO: 113172 NR Description: Acyl carrier protein III, chloroplast precursor
  misc_feature (52)..(165): NCBI GI NO: 7442270 NR Description: acyl carrier protein - maize
  misc_feature (38)..(165): NCBI GI NO: 16518983 NR Description: acyl carrier protein [Olea europaea]
  misc_feature (60)..(165): NCBI GI NO: 166975 NR Description: acyl carrier protein III precursor
  misc_feature (38)..(165): NCBI GI NO: 4457219 NR Description: acyl carrier protein [Capsicum chinense]
  misc_feature (38)..(163): NCBI GI NO: 5669599 NR Description: acyl carrier protein [Coriandrum sativum]
  misc_feature (40)..(163): NCBI GI NO: 30102979 NR Description: putative acyl carrier protein, 3'-partial
  misc_feature (38)..(164): NCBI GI NO: 20137323 NR Description: Acyl carrier protein 1, chloroplast precursor
  misc_feature (60)..(164): NCBI GI NO: 2465010 NR Description: acyl carrier protein [Fragaria vesca]
IQPLLLLLCCPCCRPDRRLHHPPTHTAPASSPCPVSLMASAAASAVSFARPVKAINANSVSFSAPRKGNVSFRLQPVPQRFSVSCAAKKETVEKVCDIVKSQLALADDTVVSGSSTFADLGADSLDTVEIVMGLEEAFGISVEESSAQTIATVEDAANLIDSLVAN

SEQ ID NO: 17901 - protein, 129 aa, Triticum aestivum
  peptide (1)..(129): Ceres Seq. ID no. 13663753
  misc_feature (56)..(123): Pfam Name: Pfam Description:  Phosphopantetheine attachment site
  misc_feature (1)..(127): NCBI GI NO: 113169 NR Description: Acyl carrier protein II, chloroplast precursor
  misc_feature (1)..(128): NCBI GI NO: 113172 NR Description: Acyl carrier protein III, chloroplast precursor
  misc_feature (15)..(128): NCBI GI NO: 7442270 NR Description: acyl carrier protein - maize
  misc_feature (1)..(128): NCBI GI NO: 16518983 NR Description: acyl carrier protein [Olea europaea]
  misc_feature (23)..(128): NCBI GI NO: 166975 NR Description: acyl carrier protein III precursor
  misc_feature (1)..(128): NCBI GI NO: 4457219 NR Description: acyl carrier protein [Capsicum chinense]
  misc_feature (1)..(126): NCBI GI NO: 5669599 NR Description: acyl carrier protein [Coriandrum sativum]
  misc_feature (3)..(126): NCBI GI NO: 30102979 NR Description: putative acyl carrier protein, 3'-partial
  misc_feature (1)..(127): NCBI GI NO: 20137323 NR Description: Acyl carrier protein 1, chloroplast precursor
  misc_feature (23)..(127): NCBI GI NO: 2465010 NR Description: acyl carrier protein [Fragaria vesca]
MASAAASAVSFARPVKAINANSVSFSAPRKGNVSFRLQPVPQRFSVSCAAKKETVEKVCDIVKSQLALADDTVVSGSSTFADLGADSLDTVEIVMGLEEAFGISVEESSAQTIATVEDAANLIDSLVAN

SEQ ID NO: 17902 - protein, 96 aa, Triticum aestivum
  peptide (1)..(96): Ceres Seq. ID no. 13663754
  misc_feature (2)..(25): NCBI GI NO: 6523547 NR Description: hydroxyproline-rich glycoprotein DZ-HRGP
  misc_feature (2)..(25): NCBI GI NO: 6523547 NR Description: hydroxyproline-rich glycoprotein DZ-HRGP
  misc_feature (2)..(25): NCBI GI NO: 6523547 NR Description: hydroxyproline-rich glycoprotein DZ-HRGP
  misc_feature (2)..(25): NCBI GI NO: 6523547 NR Description: hydroxyproline-rich glycoprotein DZ-HRGP
  misc_feature (2)..(25): NCBI GI NO: 6523547 NR Description: hydroxyproline-rich glycoprotein DZ-HRGP
  misc_feature (2)..(25): NCBI GI NO: 6523547 NR Description: hydroxyproline-rich glycoprotein DZ-HRGP
  misc_feature (2)..(25): NCBI GI NO: 11068076 NR Description: PxORF73 peptide [Plutella xylostella granulovirus]
  misc_feature (2)..(25): NCBI GI NO: 21322711 NR Description: pherophorin-dz1 protein
  misc_feature (2)..(25): NCBI GI NO: 21322711 NR Description: pherophorin-dz1 protein
HPTPPAAAVLPVLPPRPPPPPPTHPHRAGLFPLSRLPHGLRRRIRRLLRQARQGNQCQLGLLLCSKERQCILPSSASSPEIFCFLCCQKGDSRKGL

SEQ ID NO: 17903 - DNA, 1894 bp, Triticum aestivum
  misc_feature (1)..(1894): Ceres Seq. ID no. 15169623
aacccaaattaacagtagcccgcggcggcctgcgcgtgagcgatgcccgccgcggcattcgcctccgcgttcgcgtctcctcctcctccgtgggccccacgaccgcctcctcgccacgccagcctccgcctgcccccgccaaggagcagcagcaacaacagcggcggcggcggaggggacaagcccaccacctcgtgggtcagccccgactggctgacgtcgctgtctcgctcggtgctcggccgggggaacgacgactcggggatacccgtcgcctccgccaagctcgacgacgtgcaggacctcctcgggggcgcgctcttcctgccgctcttcaagtggttccgcgaggaagggcccgtctaccgcctcgccgcggggccgcgcgacttcgtcatcgtcagcgaccccgccgtagccaagcacgtcctccgcgggtacggcacgcggtacgagaaggggctcgtcgccgaggtctccgagttcctctttggctctgggttcgccatcgccgagggagcgctctggacggtgagacgtagagcagttgtaccatctctacacaaaagatttctctcagtaatggtcgataaagtgttctgtaaatgtgctgagagattggtggaaaagctcgagacttatgctttgagtggtgaacctgttaatatggaagcgaggttttcgcaaatgacgttagatgtgattggtttatccttgttcaactacaactttgattccctcacatcagatagtcctgttattgatgctgtttacactgcactcaaagaagcagaggctcgttctacagatcttttaccatactggcagatcgatttgctgtgcaagattgtccctagacagataaaagcagaaaaagcagttaacacaataaggaataccgttgaagacctaattacaaaatgcaaggcaattgtagatgctgaaaatgaacagattgagggtgaagaatatgtcagcagtttgcagttacgtgatgatctattgtcaatgttagttgctggtcatgaaacaacaggttctgtactgacatggaccatttatcttctcagtaagggtccagtagcactaaggaaagcccaagatgaggtagatcgtgttctacaaggtagactccccagatatgaagatgtaaaagagctgaagtacttgatgcgctgtatcaatgagtccatgcggctatacccacatcctcctgtgctgatacggcgtgcactagttgatgatgtgcttcctggaaactacaaggttaagactggtcaagatgttatgatttctgtgtacaatatacacagatcacccgaggtatgggacagagcagatgaattcattccagagagatttgatttggagggtcccattccaaatgagtcaaacactgatttcaggtttatcccttttagtggaggtcctcgaaaatgtgttggagatcagtttgctcttttagaagcaattgtggcacttgcaattgtcatacaaaagatggacattcagcttgtggcagatcaaaaaatcagcatgaccactggggccactatccatacaaccaatggactgtatatgaatgtaagtctgcgtaaagttgagcaagaagctgacttagcactgagtccatcgggctagacaaaagcaaagcaaaacagggtgggattagtacaggcagaggcaacagaattgtcaatacgtgagatgcctctgcaattaaatttggacatgtttggaatgtttccttgtccagaaatttgagatacctctcttcagttcttgtatcttttcagcaggttccagctatcaatggctaataggttgcgtaaactgtaaagaaatggatcattgacttgctgattttgacagttaatgtaaatcggtggtacct

SEQ ID NO: 17904 - protein, 532 aa, Triticum aestivum
  peptide (1)..(532): Ceres Seq. ID no. 15169624
  misc_feature (1)..(334): NCBI GI NO: 37536604 NR Description: putative cytochrome P450 monooxygenase
  misc_feature (305)..(515): NCBI GI NO: 37536604 NR Description: putative cytochrome P450 monooxygenase
  misc_feature (3)..(334): NCBI GI NO: 40218379 NR Description: chloroplast carotenoid epsilon-ring hydroxylase
  misc_feature (305)..(518): NCBI GI NO: 40218379 NR Description: chloroplast carotenoid epsilon-ring hydroxylase
  misc_feature (3)..(334): NCBI GI NO: 20258842 NR Description: putative cytochrome P450 [Arabidopsis thaliana]
  misc_feature (305)..(518): NCBI GI NO: 20258842 NR Description: putative cytochrome P450 [Arabidopsis thaliana]
  misc_feature (3)..(334): NCBI GI NO: 15231755 NR Description: cytochrome p450 family [Arabidopsis thaliana]
  misc_feature (305)..(518): NCBI GI NO: 15231755 NR Description: cytochrome p450 family [Arabidopsis thaliana]
  misc_feature (69)..(333): NCBI GI NO: 18398119 NR Description: cytochrome P450, putative [Arabidopsis thaliana]
  misc_feature (69)..(333): NCBI GI NO: 25282642 NR Description: probable cytochrome P450
MPAAAFASAFASPPPPWAPRPPPRHASLRLPPPRSSSNNSGGGGGDKPTTSWVSPDWLTSLSRSVLGRGNDDSGIPVASAKLDDVQDLLGGALFLPLFKWFREEGPVYRLAAGPRDFVIVSDPAVAKHVLRGYGTRYEKGLVAEVSEFLFGSGFAIAEGALWTVRRRAVVPSLHKRFLSVMVDKVFCKCAERLVEKLETYALSGEPVNMEARFSQMTLDVIGLSLFNYNFDSLTSDSPVIDAVYTALKEAEARSTDLLPYWQIDLLCKIVPRQIKAEKAVNTIRNTVEDLITKCKAIVDAENEQIEGEEYVSSLQLRDDLLSMLVAGHETTGSVLTWTIYLLSKGPVALRKAQDEVDRVLQGRLPRYEDVKELKYLMRCINESMRLYPHPPVLIRRALVDDVLPGNYKVKTGQDVMISVYNIHRSPEVWDRADEFIPERFDLEGPIPNESNTDFRFIPFSGGPRKCVGDQFALLEAIVALAIVIQKMDIQLVADQKISMTTGATIHTTNGLYMNVSLRKVEQEADLALSPSG

SEQ ID NO: 17905 - protein, 352 aa, Triticum aestivum
  peptide (1)..(352): Ceres Seq. ID no. 15169625
  misc_feature (1)..(154): NCBI GI NO: 37536604 NR Description: putative cytochrome P450 monooxygenase
  misc_feature (125)..(335): NCBI GI NO: 37536604 NR Description: putative cytochrome P450 monooxygenase
  misc_feature (1)..(154): NCBI GI NO: 40218379 NR Description: chloroplast carotenoid epsilon-ring hydroxylase
  misc_feature (125)..(338): NCBI GI NO: 40218379 NR Description: chloroplast carotenoid epsilon-ring hydroxylase
  misc_feature (1)..(154): NCBI GI NO: 20258842 NR Description: putative cytochrome P450 [Arabidopsis thaliana]
  misc_feature (125)..(338): NCBI GI NO: 20258842 NR Description: putative cytochrome P450 [Arabidopsis thaliana]
  misc_feature (1)..(154): NCBI GI NO: 15231755 NR Description: cytochrome p450 family [Arabidopsis thaliana]
  misc_feature (125)..(338): NCBI GI NO: 15231755 NR Description: cytochrome p450 family [Arabidopsis thaliana]
  misc_feature (1)..(153): NCBI GI NO: 18398119 NR Description: cytochrome P450, putative [Arabidopsis thaliana]
  misc_feature (1)..(153): NCBI GI NO: 25282642 NR Description: probable cytochrome P450
MVDKVFCKCAERLVEKLETYALSGEPVNMEARFSQMTLDVIGLSLFNYNFDSLTSDSPVIDAVYTALKEAEARSTDLLPYWQIDLLCKIVPRQIKAEKAVNTIRNTVEDLITKCKAIVDAENEQIEGEEYVSSLQLRDDLLSMLVAGHETTGSVLTWTIYLLSKGPVALRKAQDEVDRVLQGRLPRYEDVKELKYLMRCINESMRLYPHPPVLIRRALVDDVLPGNYKVKTGQDVMISVYNIHRSPEVWDRADEFIPERFDLEGPIPNESNTDFRFIPFSGGPRKCVGDQFALLEAIVALAIVIQKMDIQLVADQKISMTTGATIHTTNGLYMNVSLRKVEQEADLALSPSG

SEQ ID NO: 17906 - protein, 324 aa, Triticum aestivum
  peptide (1)..(324): Ceres Seq. ID no. 15169626
  misc_feature (1)..(126): NCBI GI NO: 37536604 NR Description: putative cytochrome P450 monooxygenase
  misc_feature (97)..(307): NCBI GI NO: 37536604 NR Description: putative cytochrome P450 monooxygenase
  misc_feature (1)..(126): NCBI GI NO: 40218379 NR Description: chloroplast carotenoid epsilon-ring hydroxylase
  misc_feature (97)..(310): NCBI GI NO: 40218379 NR Description: chloroplast carotenoid epsilon-ring hydroxylase
  misc_feature (1)..(126): NCBI GI NO: 20258842 NR Description: putative cytochrome P450 [Arabidopsis thaliana]
  misc_feature (97)..(310): NCBI GI NO: 20258842 NR Description: putative cytochrome P450 [Arabidopsis thaliana]
  misc_feature (1)..(126): NCBI GI NO: 15231755 NR Description: cytochrome p450 family [Arabidopsis thaliana]
  misc_feature (97)..(310): NCBI GI NO: 15231755 NR Description: cytochrome p450 family [Arabidopsis thaliana]
  misc_feature (1)..(125): NCBI GI NO: 18398119 NR Description: cytochrome P450, putative [Arabidopsis thaliana]
  misc_feature (1)..(125): NCBI GI NO: 25282642 NR Description: probable cytochrome P450
MEARFSQMTLDVIGLSLFNYNFDSLTSDSPVIDAVYTALKEAEARSTDLLPYWQIDLLCKIVPRQIKAEKAVNTIRNTVEDLITKCKAIVDAENEQIEGEEYVSSLQLRDDLLSMLVAGHETTGSVLTWTIYLLSKGPVALRKAQDEVDRVLQGRLPRYEDVKELKYLMRCINESMRLYPHPPVLIRRALVDDVLPGNYKVKTGQDVMISVYNIHRSPEVWDRADEFIPERFDLEGPIPNESNTDFRFIPFSGGPRKCVGDQFALLEAIVALAIVIQKMDIQLVADQKISMTTGATIHTTNGLYMNVSLRKVEQEADLALSPSG

SEQ ID NO: 17907 - DNA, 1073 bp, Triticum aestivum
  misc_feature (1)..(1073): Ceres Seq. ID no. 13664032
gattgacgcgcttccactcctgttcttggagccgctgattcggagccttccgggtctggttggtgctgggttttttgatcggcttttgagttgaccggagaagggaggagctgctgctctgtttcttggctaacttcggtgggcggcgatgccggactccgacaacgactccggcgggccgagcaacgcggacttctcgtcgcccaaggagcaggacaggttcctgccgatcgccaacgtgagccggatcatgaagaaggcgctgccggccaacgccaagatctccaaggacgccaaggagacggtgcaggagtgcgtgtccgagttcatctccttcatcaccggcgaggcctccgacaagtgccagcgcgagaagcgcaagaccatcaacggcgacgacctgctgtgggccatgaccacgctcggcttcgaggactacatggagccgctcaagctctacctgcacaagttccgcgagctcgagggcgagaaggccgtcggcgccggcggcgttggcgcgttaccctcccccggcggctccagctcgcagcagagggagtcgacgccaaggaacaatgcgggaggcggtgaggccggcggctacggcggcatgtacggtggcgccggggcaggaggcagcggcggcggcatgttcatgatgatggggcagcccatgtacgggtccccgccggcggcagggtaccaacatccgcagcatcaccaccagatgatgacgggagggcaaggcgggtacggctacggcgacgccggcgccggcggcgggtcttcgtcgtcctcagggttcggcaggcaagacagggcatgaccgtcccagcttgcacgagcttgttcgttggcgtatctgttttactggtaaccggagttgccaacggccagccgccaggccagttaatctctacagtaccttttttgtgttctaaatgcggtttaagtcggtcaattttattccaaattagcagcaccagcgcgactagttgcatttagcccgctactgtaaatgggctactgacaaggtgcatttacatacaaaaattaatggcaagtgcattttg

SEQ ID NO: 17908 - protein, 225 aa, Triticum aestivum
  peptide (1)..(225): Ceres Seq. ID no. 13664033
  misc_feature (1)..(158): NCBI GI NO: 15233475 NR Description: CCAAT-binding transcription factor subunit A
  misc_feature (1)..(167): NCBI GI NO: 15238156 NR Description: expressed protein [Arabidopsis thaliana]
  misc_feature (5)..(167): NCBI GI NO: 2398529 NR Description: Transcription factor [Arabidopsis thaliana]
  misc_feature (1)..(133): NCBI GI NO: 30409461 NR Description: NF-YB [Oryza sativa (japonica cultivar-group)]
  misc_feature (1)..(133): NCBI GI NO: 18404885 NR Description: CCAAT-binding transcription factor subunit -related
  misc_feature (6)..(133): NCBI GI NO: 22380 NR Description: CAAT-box DNA binding protein subunit B (NF-YB)
  misc_feature (6)..(133): NCBI GI NO: 115840 NR Description: CCAAT-BINDING TRANSCRIPTION FACTOR SUBUNIT A
  misc_feature (6)..(153): NCBI GI NO: 15231796 NR Description: transcription factor NF-Y
  misc_feature (1)..(156): NCBI GI NO: 30409459 NR Description: NF-YB [Oryza sativa (japonica cultivar-group)]
  misc_feature (6)..(134): NCBI GI NO: 17979253 NR Description: At2g37060/T2N18.18 [Arabidopsis thaliana]
MPDSDNDSGGPSNADFSSPKEQDRFLPIANVSRIMKKALPANAKISKDAKETVQECVSEFISFITGEASDKCQREKRKTINGDDLLWAMTTLGFEDYMEPLKLYLHKFRELEGEKAVGAGGVGALPSPGGSSSQQRESTPRNNAGGGEAGGYGGMYGGAGAGGSGGGMFMMMGQPMYGSPPAAGYQHPQHHHQMMTGGQGGYGYGDAGAGGGSSSSSGFGRQDRA

SEQ ID NO: 17909 - protein, 191 aa, Triticum aestivum
  peptide (1)..(191): Ceres Seq. ID no. 13664034
  misc_feature (1)..(124): NCBI GI NO: 15233475 NR Description: CCAAT-binding transcription factor subunit A
  misc_feature (1)..(133): NCBI GI NO: 15238156 NR Description: expressed protein [Arabidopsis thaliana]
  misc_feature (1)..(133): NCBI GI NO: 2398529 NR Description: Transcription factor [Arabidopsis thaliana]
  misc_feature (1)..(99): NCBI GI NO: 30409461 NR Description: NF-YB [Oryza sativa (japonica cultivar-group)]
  misc_feature (1)..(99): NCBI GI NO: 18404885 NR Description: CCAAT-binding transcription factor subunit -related
  misc_feature (1)..(99): NCBI GI NO: 22380 NR Description: CAAT-box DNA binding protein subunit B (NF-YB)
  misc_feature (1)..(99): NCBI GI NO: 115840 NR Description: CCAAT-BINDING TRANSCRIPTION FACTOR SUBUNIT A
  misc_feature (1)..(119): NCBI GI NO: 15231796 NR Description: transcription factor NF-Y
  misc_feature (1)..(122): NCBI GI NO: 30409459 NR Description: NF-YB [Oryza sativa (japonica cultivar-group)]
  misc_feature (1)..(100): NCBI GI NO: 17979253 NR Description: At2g37060/T2N18.18 [Arabidopsis thaliana]
MKKALPANAKISKDAKETVQECVSEFISFITGEASDKCQREKRKTINGDDLLWAMTTLGFEDYMEPLKLYLHKFRELEGEKAVGAGGVGALPSPGGSSSQQRESTPRNNAGGGEAGGYGGMYGGAGAGGSGGGMFMMMGQPMYGSPPAAGYQHPQHHHQMMTGGQGGYGYGDAGAGGGSSSSSGFGRQDRA

SEQ ID NO: 17910 - protein, 137 aa, Triticum aestivum
  peptide (1)..(137): Ceres Seq. ID no. 13664035
  misc_feature (1)..(70): NCBI GI NO: 15233475 NR Description: CCAAT-binding transcription factor subunit A
  misc_feature (1)..(79): NCBI GI NO: 15238156 NR Description: expressed protein [Arabidopsis thaliana]
  misc_feature (1)..(79): NCBI GI NO: 2398529 NR Description: Transcription factor [Arabidopsis thaliana]
  misc_feature (1)..(45): NCBI GI NO: 30409461 NR Description: NF-YB [Oryza sativa (japonica cultivar-group)]
  misc_feature (1)..(45): NCBI GI NO: 18404885 NR Description: CCAAT-binding transcription factor subunit -related
  misc_feature (1)..(45): NCBI GI NO: 22380 NR Description: CAAT-box DNA binding protein subunit B (NF-YB)
  misc_feature (1)..(45): NCBI GI NO: 115840 NR Description: CCAAT-BINDING TRANSCRIPTION FACTOR SUBUNIT A
  misc_feature (1)..(65): NCBI GI NO: 15231796 NR Description: transcription factor NF-Y
  misc_feature (1)..(68): NCBI GI NO: 30409459 NR Description: NF-YB [Oryza sativa (japonica cultivar-group)]
  misc_feature (1)..(46): NCBI GI NO: 17979253 NR Description: At2g37060/T2N18.18 [Arabidopsis thaliana]
MTTLGFEDYMEPLKLYLHKFRELEGEKAVGAGGVGALPSPGGSSSQQRESTPRNNAGGGEAGGYGGMYGGAGAGGSGGGMFMMMGQPMYGSPPAAGYQHPQHHHQMMTGGQGGYGYGDAGAGGGSSSSSGFGRQDRA

SEQ ID NO: 17911 - DNA, 1584 bp, Triticum aestivum
  misc_feature (1)..(1584): Ceres Seq. ID no. 13661001
atcactcgcaccccgcgaatactcttctcttcccttctcttctcttctcttctccgcacagcatcactgcctccggccgtgtcgagcaaaccaaaccaaaatctcctgagttgtctcgctcgcctcatcaatccttggcgtcgctagcttcatctggaggcgaggaggcggacggtttgaacccgatcatggatatggcgcacgagagggactcgagcagcgaggaggaggtgatggccggcgacctccgccgcgggccgtggacggtggaggaggacatcctgctcgtcaactacatcgccgctcacggcgagggccgctggaactcgctcgcccgatcagcaggtctgaagcgcaccggcaagagctgccgcctcaggtggctcaactacctccgccccgacctccggcgcggcagcatcaccccgcaggagcagctgctcatcctcgagctgcactcgcggtggggcaaccgctggtccaagatcgcgcagcacctccccgggcgcaccgacaacgagatcaagaactactggcgcacgcgcgtgcagaagcacgccaagcagctcaagtgcgacgtcaacagccagcagttcaaggacgtcatgcgctacctctggatgccccgcctcgtcgagcgcatccaggccgccgccacggccgacgcggtgcaggccgccgctgacacgcccctgtcgtggcagcacggcgccgacgacgctctctacgagtcaccggagctccctgtcgacgcgtgctggccaacggagtacgccgccgtggccggcgggcagctgcccaacgcctcggtcgcggagctgtcgagcactactaccgccggctcttcctcgccgtccaccacggactctggcgccggcgcccagcccagctggcctgcagcagtcgacggtgccgagtggttcaccaccgcctgcgacgcctccagcgccgccgccaccatatgcgacacggaccagctgatccagcagcaggcaccgtcccagcccgcgggtgcgtggacgtccgagccgctgccgagcctcgggttccccgagctgggcgtcgcggacttcgagatgggcagcttcgacgtagacagcatctggagcatggacgacttgtggaacacgcagccgcagttcgtgtgaaaagtcaagacggtggcatggaaatcctcagctgcgacggtgcccgcgggggggcgtgcggcctccgggtccggggacgcgtagcagatccagcggagggaaacggattagaagaagaaggagaggaaccacctgggactgggaggattaaaacaagactaatttaccctgcacgtgaagatctcccggcctgttctgctccagttctgcgccgtcttgtctcctgtgttaatttattactacgtacaagggtaaacagatacgtaaaagtgtagcagaagcagatgatctactagtgttagctgtgccgccgttaattatgctatgttccgtttaatcttactcattcttttcgagtgattactactacatatttaagtacaaaaaaaaaaaaaaaaaagcttatcgataccgtcgacctcgagggggggcccgg

SEQ ID NO: 17912 - protein, 381 aa, Triticum aestivum
  peptide (1)..(381): Ceres Seq. ID no. 13661002
  misc_feature (84)..(131): Pfam Name: Pfam Description:  Myb-like DNA-binding domain
  misc_feature (78)..(231): NCBI GI NO: 19073328 NR Description: typical P-type R2R3 Myb protein [Sorghum bicolor]
  misc_feature (71)..(380): NCBI GI NO: 7446183 NR Description: ABA-induced myb-related protein Cpm10 -Craterostigma plantagineum
  misc_feature (71)..(380): NCBI GI NO: 7446184 NR Description: myb-related protein Cpm5
  misc_feature (62)..(380): NCBI GI NO: 7446185 NR Description: dehydration-induced myb-related protein Cpm7 -Craterostigma plantagineum
  misc_feature (69)..(368): NCBI GI NO: 34898110 NR Description: putative typical P-type R2R3 Myb protein
  misc_feature (69)..(221): NCBI GI NO: 19073334 NR Description: typical P-type R2R3 Myb protein [Sorghum bicolor]
  misc_feature (73)..(296): NCBI GI NO: 34894466 NR Description: putative dehydration-induced myb-related proteinCpm7
  misc_feature (68)..(234): NCBI GI NO: 15240518 NR Description: myb family transcription factor
  misc_feature (69)..(229): NCBI GI NO: 15230731 NR Description: myb family transcription factor (MYB108)
  misc_feature (76)..(220): NCBI GI NO: 13177578 NR Description: Myb transcription factor JAMyb [Oryza sativa]
HSHPANTLLFPSLLFSSPHSITASGRVEQTKPKSPELSRSPHQSLASLASSGGEEADGLNPIMDMAHERDSSSEEEVMAGDLRRGPWTVEEDILLVNYIAAHGEGRWNSLARSAGLKRTGKSCRLRWLNYLRPDLRRGSITPQEQLLILELHSRWGNRWSKIAQHLPGRTDNEIKNYWRTRVQKHAKQLKCDVNSQQFKDVMRYLWMPRLVERIQAAATADAVQAAADTPLSWQHGADDALYESPELPVDACWPTEYAAVAGGQLPNASVAELSSTTTAGSSSPSTTDSGAGAQPSWPAAVDGAEWFTTACDASSAAATICDTDQLIQQQAPSQPAGAWTSEPLPSLGFPELGVADFEMGSFDVDSIWSMDDLWNTQPQFV

SEQ ID NO: 17913 - protein, 319 aa, Triticum aestivum
  peptide (1)..(319): Ceres Seq. ID no. 13661003
  misc_feature (22)..(69): Pfam Name: Pfam Description:  Myb-like DNA-binding domain
  misc_feature (16)..(169): NCBI GI NO: 19073328 NR Description: typical P-type R2R3 Myb protein [Sorghum bicolor]
  misc_feature (9)..(318): NCBI GI NO: 7446183 NR Description: ABA-induced myb-related protein Cpm10 -Craterostigma plantagineum
  misc_feature (9)..(318): NCBI GI NO: 7446184 NR Description: myb-related protein Cpm5
  misc_feature (1)..(318): NCBI GI NO: 7446185 NR Description: dehydration-induced myb-related protein Cpm7 -Craterostigma plantagineum
  misc_feature (7)..(306): NCBI GI NO: 34898110 NR Description: putative typical P-type R2R3 Myb protein
  misc_feature (7)..(159): NCBI GI NO: 19073334 NR Description: typical P-type R2R3 Myb protein [Sorghum bicolor]
  misc_feature (11)..(234): NCBI GI NO: 34894466 NR Description: putative dehydration-induced myb-related proteinCpm7
  misc_feature (6)..(172): NCBI GI NO: 15240518 NR Description: myb family transcription factor
  misc_feature (7)..(167): NCBI GI NO: 15230731 NR Description: myb family transcription factor (MYB108)
  misc_feature (14)..(158): NCBI GI NO: 13177578 NR Description: Myb transcription factor JAMyb [Oryza sativa]
MDMAHERDSSSEEEVMAGDLRRGPWTVEEDILLVNYIAAHGEGRWNSLARSAGLKRTGKSCRLRWLNYLRPDLRRGSITPQEQLLILELHSRWGNRWSKIAQHLPGRTDNEIKNYWRTRVQKHAKQLKCDVNSQQFKDVMRYLWMPRLVERIQAAATADAVQAAADTPLSWQHGADDALYESPELPVDACWPTEYAAVAGGQLPNASVAELSSTTTAGSSSPSTTDSGAGAQPSWPAAVDGAEWFTTACDASSAAATICDTDQLIQQQAPSQPAGAWTSEPLPSLGFPELGVADFEMGSFDVDSIWSMDDLWNTQPQFV

SEQ ID NO: 17914 - protein, 317 aa, Triticum aestivum
  peptide (1)..(317): Ceres Seq. ID no. 13661004
  misc_feature (20)..(67): Pfam Name: Pfam Description:  Myb-like DNA-binding domain
  misc_feature (14)..(167): NCBI GI NO: 19073328 NR Description: typical P-type R2R3 Myb protein [Sorghum bicolor]
  misc_feature (7)..(316): NCBI GI NO: 7446183 NR Description: ABA-induced myb-related protein Cpm10 -Craterostigma plantagineum
  misc_feature (7)..(316): NCBI GI NO: 7446184 NR Description: myb-related protein Cpm5
  misc_feature (1)..(316): NCBI GI NO: 7446185 NR Description: dehydration-induced myb-related protein Cpm7 -Craterostigma plantagineum
  misc_feature (5)..(304): NCBI GI NO: 34898110 NR Description: putative typical P-type R2R3 Myb protein
  misc_feature (5)..(157): NCBI GI NO: 19073334 NR Description: typical P-type R2R3 Myb protein [Sorghum bicolor]
  misc_feature (9)..(232): NCBI GI NO: 34894466 NR Description: putative dehydration-induced myb-related proteinCpm7
  misc_feature (4)..(170): NCBI GI NO: 15240518 NR Description: myb family transcription factor
  misc_feature (5)..(165): NCBI GI NO: 15230731 NR Description: myb family transcription factor (MYB108)
  misc_feature (12)..(156): NCBI GI NO: 13177578 NR Description: Myb transcription factor JAMyb [Oryza sativa]
MAHERDSSSEEEVMAGDLRRGPWTVEEDILLVNYIAAHGEGRWNSLARSAGLKRTGKSCRLRWLNYLRPDLRRGSITPQEQLLILELHSRWGNRWSKIAQHLPGRTDNEIKNYWRTRVQKHAKQLKCDVNSQQFKDVMRYLWMPRLVERIQAAATADAVQAAADTPLSWQHGADDALYESPELPVDACWPTEYAAVAGGQLPNASVAELSSTTTAGSSSPSTTDSGAGAQPSWPAAVDGAEWFTTACDASSAAATICDTDQLIQQQAPSQPAGAWTSEPLPSLGFPELGVADFEMGSFDVDSIWSMDDLWNTQPQFV

SEQ ID NO: 17915 - DNA, 580 bp, Triticum aestivum
  misc_feature (1)..(580): Ceres Seq. ID no. 12622913
ggcacggaggcgccaccggcggccccacggggacgcacggcgccgccgccgccgcgggcaccgggcagctccagccgaccagggacgaccacaagaccgacggtgtcctgcgccgctccggcagttccagctccagctcgtctgaggacgacggcgctggcgggaggaggaagaaagggatgaaggagaagatcaaggagaagctccccggcggagcccacaaggacgccaccgggcagcagcacacgccggcggccggcgagtacgccgggaccggcaccggcacgcacggcgcggaggccaccggcgagaagaagggcgtcatggacaagatcaaggagaagcttcccggcgggcagcactaagctaagatgggcagctagcgatcgacctgtgtctgtgttcgcctgttcggtcaaagctctgtcgcatgcatgcgtacttctacatgcgttcctacgggataaataatcggcgccgatcgaggtgccggagtatatatgttgtgtgtgtgacgtatttgtggaccccgtacgtgtacatgtatttgtatctccatcgtaataaagcgctcgtttat

SEQ ID NO: 17916 - protein, 120 aa, Triticum aestivum
  peptide (1)..(120): Ceres Seq. ID no. 12622914
  misc_feature (1)..(120): Pfam Name: Pfam Description:  Dehydrin
  misc_feature (1)..(120): NCBI GI NO: 6017930 NR Description: dehydrin; Dhn2 [Hordeum vulgare]
  misc_feature (1)..(120): NCBI GI NO: 118486 NR Description: DEHYDRIN DHN2 (B9)
  misc_feature (1)..(120): NCBI GI NO: 4105105 NR Description: dehydrin 2 [Hordeum vulgare]
  misc_feature (1)..(120): NCBI GI NO: 118483 NR Description: DEHYDRIN DHN1 (B8)
  misc_feature (1)..(120): NCBI GI NO: 421976 NR Description: dehydrin 7 - barley
  misc_feature (3)..(120): NCBI GI NO: 7442078 NR Description: dehydrin - barley
  misc_feature (1)..(120): NCBI GI NO: 82684 NR Description: dehydrin 3 - maize
  misc_feature (1)..(120): NCBI GI NO: 118484 NR Description: DEHYDRIN DHN1 (M3) (RAB-17 PROTEIN)
  misc_feature (16)..(120): NCBI GI NO: 7489645 NR Description: dehydrin DHN2 - sorghum (fragment)
  misc_feature (1)..(120): NCBI GI NO: 100918 NR Description: RAB-17 protein - maize
HGGATGGPTGTHGAAAAAGTGQLQPTRDDHKTDGVLRRSGSSSSSSSEDDGAGGRRKKGMKEKIKEKLPGGAHKDATGQQHTPAAGEYAGTGTGTHGAEATGEKKGVMDKIKEKLPGGQH

SEQ ID NO: 17917 - protein, 61 aa, Triticum aestivum
  peptide (1)..(61): Ceres Seq. ID no. 12622915
  misc_feature (1)..(61): Pfam Name: Pfam Description:  Dehydrin
  misc_feature (1)..(61): NCBI GI NO: 6017930 NR Description: dehydrin; Dhn2 [Hordeum vulgare]
  misc_feature (1)..(61): NCBI GI NO: 118486 NR Description: DEHYDRIN DHN2 (B9)
  misc_feature (1)..(61): NCBI GI NO: 4105105 NR Description: dehydrin 2 [Hordeum vulgare]
  misc_feature (1)..(61): NCBI GI NO: 118483 NR Description: DEHYDRIN DHN1 (B8)
  misc_feature (1)..(61): NCBI GI NO: 421976 NR Description: dehydrin 7 - barley
  misc_feature (1)..(61): NCBI GI NO: 7442078 NR Description: dehydrin - barley
  misc_feature (1)..(61): NCBI GI NO: 82684 NR Description: dehydrin 3 - maize
  misc_feature (1)..(61): NCBI GI NO: 118484 NR Description: DEHYDRIN DHN1 (M3) (RAB-17 PROTEIN)
  misc_feature (1)..(61): NCBI GI NO: 7489645 NR Description: dehydrin DHN2 - sorghum (fragment)
  misc_feature (1)..(61): NCBI GI NO: 100918 NR Description: RAB-17 protein - maize
MKEKIKEKLPGGAHKDATGQQHTPAAGEYAGTGTGTHGAEATGEKKGVMDKIKEKLPGGQH

SEQ ID NO: 17918 - protein, 60 aa, Triticum aestivum
  peptide (1)..(60): Ceres Seq. ID no. 12622916
GTEAPPAAPRGRTAPPPPRAPGSSSRPGTTTRPTVSCAAPAVPAPARLRTTALAGGGRKG

SEQ ID NO: 17919 - DNA, 1529 bp, Triticum aestivum
  misc_feature (1)..(1529): Ceres Seq. ID no. 14303161
ctttaacagcataccctaaactggttacctatattcatcccattgcatctatctctattcaagggtgccaacacactccaaataaattgtagtacaatgcatcaaacaatgattcaaatactttccataatccaccacaggttaggttaattttttaggaatacattgcatgtcaaatgattcaaatattatcagagctctttatggtgaatgctgatagttatgcaagttagtttaagtaattttaccacatgcatggagatggtagcatcagctgcatgacgcataccttctgaattatgtaattcctccattgcggttgtcccctagttcttttagatatttcataccttattttgttgtccagccattttttgtattaagatctcattagttgttagggtttagttggtacctcaacacaaagtcggtcagcactgagtaaagttcatcatatcatcaattggcttgttaactgccactgttttgattgtttagaatgctgtatcgctgtcttttattcactcttcaccgcttgcaggtacctgagaaacatggcagtggtggccatttaagttactttcttgttgtatgcgcaattggtggagtggtaactgtctattgtatgcttgaaaaaactcagtatgtggatgttgatgaagatgtagtacttcctgactttgttgactggtctgctgcgcctgcatttgttgatatggttcatccaagctacaatttccattgcggttccttctgggctgtcgttgctgttaaatccattgaggcggagtatgccataaaaaatggtgtggttttgaatttgtcagttcaacaagttatagactgtgctgccattgagggctgcaaaggttcttcccttatgaaggcctatagatacatcaaggttgctggcttgaccactgaagagtcatatcctggcccaccatccccaggcaggtcatttttgcatggtctgtttcgtggttattgccggatggagggcaagcctgttgctgtgagaattgaaggtgttcagagggtacgggccacggaggatcacttgatgagagctcttcaatcttcccctgttgctgtgtatgttaacgtaaatgaccgatttagaaaataccgcggggagggttatcttgatatcaatgactgcccacctcgttctgtaaagcctgggggaaggcatgttcttttgctagtaggctatggcaccgacagcgatggcaccaaatactggaaggtaatgaatacttgggggacatggtggggtaagcatggttacggcaagtttatcagggatggtcacccacacggtgtggcaggtatcaccgagtacaatgggtttaggcccgtgctcagcaagagctgttgcaagtaggttggttttaggcaagtagtttggttttaggcctgtgctcagcaagagctgttgcaagtagtttggttttaggtgcaaccctagaagtctgaatatgtaactctgacagccttttactgtgagcggcaaatataacctgctg

SEQ ID NO: 17920 - protein, 295 aa, Triticum aestivum
  peptide (1)..(295): Ceres Seq. ID no. 14303162
  misc_feature (58)..(279): Pfam Name: Pfam Description:  Papain family cysteine protease
  misc_feature (54)..(279): NCBI GI NO: 7435828 NR Description: fruit bromelain (EC 3
  misc_feature (54)..(279): NCBI GI NO: 7489849 NR Description: fruit bromelain (EC 3
  misc_feature (44)..(279): NCBI GI NO: 7435824 NR Description: ananain (EC 3.4.22.31) precursor AN11 - pineapple
  misc_feature (58)..(282): NCBI GI NO: 40255291 NR Description: cathepsin L-like [Mus musculus]
  misc_feature (44)..(279): NCBI GI NO: 7435820 NR Description: probable stem bromelain (EC 3
  misc_feature (51)..(279): NCBI GI NO: 13432122 NR Description: Ananain precursor
  misc_feature (82)..(288): NCBI GI NO: 18396939 NR Description: cysteine protease [Arabidopsis thaliana]
  misc_feature (44)..(279): NCBI GI NO: 7435822 NR Description: ananain (EC 3.4.22.31) AN8 precursor - pineapple
  misc_feature (63)..(288): NCBI GI NO: 18403438 NR Description: cysteine proteinase [Arabidopsis thaliana]
  misc_feature (58)..(279): NCBI GI NO: 5761329 NR Description: cysteine endopeptidase [Oryza sativa]
MLYRCLLFTLHRLQVPEKHGSGGHLSYFLVVCAIGGVVTVYCMLEKTQYVDVDEDVVLPDFVDWSAAPAFVDMVHPSYNFHCGSFWAVVAVKSIEAEYAIKNGVVLNLSVQQVIDCAAIEGCKGSSLMKAYRYIKVAGLTTEESYPGPPSPGRSFLHGLFRGYCRMEGKPVAVRIEGVQRVRATEDHLMRALQSSPVAVYVNVNDRFRKYRGEGYLDINDCPPRSVKPGGRHVLLLVGYGTDSDGTKYWKVMNTWGTWWGKHGYGKFIRDGHPHGVAGITEYNGFRPVLSKSCCK

SEQ ID NO: 17921 - protein, 253 aa, Triticum aestivum
  peptide (1)..(253): Ceres Seq. ID no. 14303163
  misc_feature (16)..(237): Pfam Name: Pfam Description:  Papain family cysteine protease
  misc_feature (12)..(237): NCBI GI NO: 7435828 NR Description: fruit bromelain (EC 3
  misc_feature (12)..(237): NCBI GI NO: 7489849 NR Description: fruit bromelain (EC 3
  misc_feature (2)..(237): NCBI GI NO: 7435824 NR Description: ananain (EC 3.4.22.31) precursor AN11 - pineapple
  misc_feature (16)..(240): NCBI GI NO: 40255291 NR Description: cathepsin L-like [Mus musculus]
  misc_feature (2)..(237): NCBI GI NO: 7435820 NR Description: probable stem bromelain (EC 3
  misc_feature (9)..(237): NCBI GI NO: 13432122 NR Description: Ananain precursor
  misc_feature (40)..(246): NCBI GI NO: 18396939 NR Description: cysteine protease [Arabidopsis thaliana]
  misc_feature (2)..(237): NCBI GI NO: 7435822 NR Description: ananain (EC 3.4.22.31) AN8 precursor - pineapple
  misc_feature (21)..(246): NCBI GI NO: 18403438 NR Description: cysteine proteinase [Arabidopsis thaliana]
  misc_feature (16)..(237): NCBI GI NO: 5761329 NR Description: cysteine endopeptidase [Oryza sativa]
MLEKTQYVDVDEDVVLPDFVDWSAAPAFVDMVHPSYNFHCGSFWAVVAVKSIEAEYAIKNGVVLNLSVQQVIDCAAIEGCKGSSLMKAYRYIKVAGLTTEESYPGPPSPGRSFLHGLFRGYCRMEGKPVAVRIEGVQRVRATEDHLMRALQSSPVAVYVNVNDRFRKYRGEGYLDINDCPPRSVKPGGRHVLLLVGYGTDSDGTKYWKVMNTWGTWWGKHGYGKFIRDGHPHGVAGITEYNGFRPVLSKSCCK

SEQ ID NO: 17922 - protein, 223 aa, Triticum aestivum
  peptide (1)..(223): Ceres Seq. ID no. 14303164
  misc_feature (1)..(207): Pfam Name: Pfam Description:  Papain family cysteine protease
  misc_feature (1)..(207): NCBI GI NO: 7435828 NR Description: fruit bromelain (EC 3
  misc_feature (1)..(207): NCBI GI NO: 7489849 NR Description: fruit bromelain (EC 3
  misc_feature (1)..(207): NCBI GI NO: 7435824 NR Description: ananain (EC 3.4.22.31) precursor AN11 - pineapple
  misc_feature (1)..(210): NCBI GI NO: 40255291 NR Description: cathepsin L-like [Mus musculus]
  misc_feature (1)..(207): NCBI GI NO: 7435820 NR Description: probable stem bromelain (EC 3
  misc_feature (1)..(207): NCBI GI NO: 13432122 NR Description: Ananain precursor
  misc_feature (10)..(216): NCBI GI NO: 18396939 NR Description: cysteine protease [Arabidopsis thaliana]
  misc_feature (1)..(207): NCBI GI NO: 7435822 NR Description: ananain (EC 3.4.22.31) AN8 precursor - pineapple
  misc_feature (1)..(216): NCBI GI NO: 18403438 NR Description: cysteine proteinase [Arabidopsis thaliana]
  misc_feature (1)..(207): NCBI GI NO: 5761329 NR Description: cysteine endopeptidase [Oryza sativa]
MVHPSYNFHCGSFWAVVAVKSIEAEYAIKNGVVLNLSVQQVIDCAAIEGCKGSSLMKAYRYIKVAGLTTEESYPGPPSPGRSFLHGLFRGYCRMEGKPVAVRIEGVQRVRATEDHLMRALQSSPVAVYVNVNDRFRKYRGEGYLDINDCPPRSVKPGGRHVLLLVGYGTDSDGTKYWKVMNTWGTWWGKHGYGKFIRDGHPHGVAGITEYNGFRPVLSKSCCK

SEQ ID NO: 17923 - DNA, 1712 bp, Triticum aestivum
  misc_feature (1)..(1712): Ceres Seq. ID no. 14302990
atcaggaaaaagaaaacccttcctccttcctccctccctcgctcgcacgcccaaaaagcccaaccaaccgcccggccccgacccccgaccaaacccgcaccggacgccgcgcgcgggcgctcgcgagagagggacgggagcggccgccgcgcctcgcgcctcgctcgctcgctcgccgacgcggtccggcggtggtgggggcctcgccgcgatggattgggcggcggtggcgtacacggcggccgcgctgctgtgcgccgcggcggccaccgtcatcacgctcggccacatctaccgccacctgctccactacgccgagcccatcttccagcgcttcatcgtccgcatcatcttcatggtcccggtctatgcagtgatgtcatttatttcccttatcctaccagacaatgcaatatattttacctctatccgagaaatctatgatgcttgggtcatctacaatttcttttcactctgcttggcatgggtgggaggacctggtgctgtggtggtgagtttgaatggccgaaccctgaaaccatcgtggtttctgatgacttgctgtttcccggctattcctctagatgggcgttttatacggagatgcaaacaaggctgtttgcagtttgttattcttaagcctatcctggtggttattaccttcatcctttatgctaaaggaaaatatgaagatggaaacttcagtgtcaaccaatcctatttatacatcactattatttacacaatctcatactcgatggcgttatatgctcttgcattgttctatgcggcatgcagagatctactccggccatataatcctgtcccaaagtttattataatcaaatcagttgtgtttctcacatactggcagggtgtcctggttttccttgctgccaagtctcgatttatcaagaatgctgaaaaagctgctgatctccagaactatgtattgtgcgttgagatgctcatagcagccattgggcacctatttgcctttccttacaaggagtatgcaggtgcaaatgctcgcccttcgggtggcttcagggaaagccttcttcatgctttaaaattcaacgatttctaccacgacactgttcaccagtttgctcctacctacaacgaatatgtgctgtacaaccacaatgagggagagagtgcaccaacaaagtttccttcagggagcgccgtgccaagtgtccgggatgtggagttggccggcatcaccgtgatgccgccctcaaatagtccagtgacctcaagcgtgtcatccaaccacgtagaccaggacgagtcaatgaccactccgatcaggaacaaagtggacccgcctggaggaatgtacgacctcacggacctgctcgacgtggacttgtctagctaccccgccaaggttcctgcgatctctgatgtaagaaaacaatgaccaggtgcgacagccaatgtgtctcggtagcgactgggggaaattgtggccttccattttgtcatagataacgctgtaaaaatgtgtgtgtactacttccggttccagcctttccccattgaagaaggggggtttattcatgactgcactgcagctgtgcgcacggcctctctcgccctactcttcgacatagttgttttggtgcgttgtgagctcaaggtgaactgttgtgacatgagactatgaataccatactaatagtttgctgatagcagttttggtg

SEQ ID NO: 17924 - protein, 475 aa, Triticum aestivum
  peptide (1)..(475): Ceres Seq. ID no. 14302991
  misc_feature (74)..(352): Pfam Name: Pfam Description:  Domain of unknown function
  misc_feature (71)..(475): NCBI GI NO: 34897328 NR Description: putative organic solute transporter [Oryza sativa]
  misc_feature (73)..(475): NCBI GI NO: 34900750 NR Description: OJ1341_A08.33
  misc_feature (82)..(471): NCBI GI NO: 30690265 NR Description: expressed protein [Arabidopsis thaliana]
  misc_feature (82)..(468): NCBI GI NO: 6671963 NR Description: unknown protein [Arabidopsis thaliana]
  misc_feature (150)..(471): NCBI GI NO: 7485938 NR Description: hypothetical protein F21E10
  misc_feature (82)..(150): NCBI GI NO: 7485938 NR Description: hypothetical protein F21E10
  misc_feature (197)..(468): NCBI GI NO: 15230584 NR Description: expressed protein [Arabidopsis thaliana]
  misc_feature (82)..(146): NCBI GI NO: 15230584 NR Description: expressed protein [Arabidopsis thaliana]
  misc_feature (84)..(357): NCBI GI NO: 25148028 NR Description: putative protein
  misc_feature (23)..(408): NCBI GI NO: 26341248 NR Description: unnamed protein product [Mus musculus]
SGKRKPFLLPPSLARTPKKPNQPPGPDPRPNPHRTPRAGARERGTGAAAAPRASLARSPTRSGGGGGLAAMDWAAVAYTAAALLCAAAATVITLGHIYRHLLHYAEPIFQRFIVRIIFMVPVYAVMSFISLILPDNAIYFTSIREIYDAWVIYNFFSLCLAWVGGPGAVVVSLNGRTLKPSWFLMTCCFPAIPLDGRFIRRCKQGCLQFVILKPILVVITFILYAKGKYEDGNFSVNQSYLYITIIYTISYSMALYALALFYAACRDLLRPYNPVPKFIIIKSVVFLTYWQGVLVFLAAKSRFIKNAEKAADLQNYVLCVEMLIAAIGHLFAFPYKEYAGANARPSGGFRESLLHALKFNDFYHDTVHQFAPTYNEYVLYNHNEGESAPTKFPSGSAVPSVRDVELAGITVMPPSNSPVTSSVSSNHVDQDESMTTPIRNKVDPPGGMYDLTDLLDVDLSSYPAKVPAISDVRKQ

SEQ ID NO: 17925 - protein, 405 aa, Triticum aestivum
  peptide (1)..(405): Ceres Seq. ID no. 14302992
  misc_feature (4)..(282): Pfam Name: Pfam Description:  Domain of unknown function
  misc_feature (1)..(405): NCBI GI NO: 34897328 NR Description: putative organic solute transporter [Oryza sativa]
  misc_feature (3)..(405): NCBI GI NO: 34900750 NR Description: OJ1341_A08.33
  misc_feature (12)..(401): NCBI GI NO: 30690265 NR Description: expressed protein [Arabidopsis thaliana]
  misc_feature (12)..(398): NCBI GI NO: 6671963 NR Description: unknown protein [Arabidopsis thaliana]
  misc_feature (80)..(401): NCBI GI NO: 7485938 NR Description: hypothetical protein F21E10
  misc_feature (12)..(80): NCBI GI NO: 7485938 NR Description: hypothetical protein F21E10
  misc_feature (127)..(398): NCBI GI NO: 15230584 NR Description: expressed protein [Arabidopsis thaliana]
  misc_feature (12)..(76): NCBI GI NO: 15230584 NR Description: expressed protein [Arabidopsis thaliana]
  misc_feature (14)..(287): NCBI GI NO: 25148028 NR Description: putative protein
  misc_feature (1)..(338): NCBI GI NO: 26341248 NR Description: unnamed protein product [Mus musculus]
MDWAAVAYTAAALLCAAAATVITLGHIYRHLLHYAEPIFQRFIVRIIFMVPVYAVMSFISLILPDNAIYFTSIREIYDAWVIYNFFSLCLAWVGGPGAVVVSLNGRTLKPSWFLMTCCFPAIPLDGRFIRRCKQGCLQFVILKPILVVITFILYAKGKYEDGNFSVNQSYLYITIIYTISYSMALYALALFYAACRDLLRPYNPVPKFIIIKSVVFLTYWQGVLVFLAAKSRFIKNAEKAADLQNYVLCVEMLIAAIGHLFAFPYKEYAGANARPSGGFRESLLHALKFNDFYHDTVHQFAPTYNEYVLYNHNEGESAPTKFPSGSAVPSVRDVELAGITVMPPSNSPVTSSVSSNHVDQDESMTTPIRNKVDPPGGMYDLTDLLDVDLSSYPAKVPAISDVRKQ

SEQ ID NO: 17926 - protein, 357 aa, Triticum aestivum
  peptide (1)..(357): Ceres Seq. ID no. 14302993
  misc_feature (1)..(234): Pfam Name: Pfam Description:  Domain of unknown function
  misc_feature (1)..(357): NCBI GI NO: 34897328 NR Description: putative organic solute transporter [Oryza sativa]
  misc_feature (1)..(357): NCBI GI NO: 34900750 NR Description: OJ1341_A08.33
  misc_feature (1)..(353): NCBI GI NO: 30690265 NR Description: expressed protein [Arabidopsis thaliana]
  misc_feature (1)..(350): NCBI GI NO: 6671963 NR Description: unknown protein [Arabidopsis thaliana]
  misc_feature (32)..(353): NCBI GI NO: 7485938 NR Description: hypothetical protein F21E10
  misc_feature (1)..(32): NCBI GI NO: 7485938 NR Description: hypothetical protein F21E10
  misc_feature (79)..(350): NCBI GI NO: 15230584 NR Description: expressed protein [Arabidopsis thaliana]
  misc_feature (1)..(28): NCBI GI NO: 15230584 NR Description: expressed protein [Arabidopsis thaliana]
  misc_feature (1)..(239): NCBI GI NO: 25148028 NR Description: putative protein
  misc_feature (1)..(290): NCBI GI NO: 26341248 NR Description: unnamed protein product [Mus musculus]
MVPVYAVMSFISLILPDNAIYFTSIREIYDAWVIYNFFSLCLAWVGGPGAVVVSLNGRTLKPSWFLMTCCFPAIPLDGRFIRRCKQGCLQFVILKPILVVITFILYAKGKYEDGNFSVNQSYLYITIIYTISYSMALYALALFYAACRDLLRPYNPVPKFIIIKSVVFLTYWQGVLVFLAAKSRFIKNAEKAADLQNYVLCVEMLIAAIGHLFAFPYKEYAGANARPSGGFRESLLHALKFNDFYHDTVHQFAPTYNEYVLYNHNEGESAPTKFPSGSAVPSVRDVELAGITVMPPSNSPVTSSVSSNHVDQDESMTTPIRNKVDPPGGMYDLTDLLDVDLSSYPAKVPAISDVRKQ

SEQ ID NO: 17927 - DNA, 1830 bp, Triticum aestivum
  misc_feature (1)..(1830): Ceres Seq. ID no. 13660129
actaaagggaacaaaagctgcagctccgccgcggyggcggccgctctataactastgkakcccccggkctgcakrtaattcgcrcgacgaccattacctagaacatcctaatckaaracgcctcacaatctctctccctctctctgtctccagcgcggggtgagctgagccatggctgagctgccgctcgcggggggcttgctggacctccgccccggcaagctctccccgaagcccccgcccccgccgctgcccatgcccggcgcggatgccccggcctcgccgcggccggagctgcgcgtcgacgagccgaatccacagattccacacacggcagctgacgccggtgagacgctggcctcgtcggaggcgccggtaccgaccgtcggctccggtgtcggtgtctgtgtcgaagcggagtccgagctggctggtggaagggcggttctcccggccgattgccagctcgatactgacggcaatggagttgagcttggtgccttggaggagagtgggactgtggtatcggacacgacggcgccggctggtttggaggaggtggatgcggatgcgggagcttcgccggaaggctctgccactcaggattctgacactggcgtggatgcagagtctagaggcgacgaccaaggggccacggaatccagagttaccatcccaccaacagcgggagaagttcacaacaaggtggattgggaaaagaacacttcagaagtgaagagttctgataagacggctccagtagcctcatcagcgcttttgttgacgtcaggtgctgcaatcttgcctcatccttcgaaggcagcgacaggcggagaagatgcttattttattgaagactatggttggtttggtgtggcagatggagttggtcagtggtcatttgaaggaatcaacgcagggctttatgcaagagagcttatggatggctgtaaaaaggtaattgcggaaagtgaaggaggctctgagcttgcgcctgagcaagttctctccaaggctgcagcagaagcaagctctcctggttcttcgactgtcttagttgctcactttgatggccagcttcttcatgtatcaaatattggagactcggggtttctggtgataaggaatggagaagtatgcgcaaaatcaaaaccaatggtttatggcttcaattttccacatcaaatcgagaaaggggttgatcccttaacccttgtagagaattataccattgacatagaggaaggcgatatcattatagcagcgaccgatggcctcttcgacaacgtctacgaacaagaaatggcagccatgatctcgaaatctttgcaggcagatctaaagccagcggagatggccgagcaccttgctgccagggcacatgaggtggggaggtctggagcagggagaagcccattttcagactctgccgtcgcggcgggttacctaggtttcagcggggggaaactggacgacacagccatcgttgtgtcgattgtccggagatccgaagcttgagctatagaaggcccccgaggtgacaagctattttggttgcaggcagctgcacgcactgtctatgaaagcgttgcatcagtagttcagaaactgcgacacgtgcaaagttcgcctgtgtaaagtagtctagttcaagaaccacaattcgcctatctaagtgatataaatttaagtttggtgttggtgctgtgtgtaaattttgggctgtagaaatatgatgcatgaaaatgtaattttgtgctcttgaatcgtgaggaagtggtaggaaggaaccaagccatctagtcaaagttgaaatataatcatgcattt

SEQ ID NO: 17928 - protein, 448 aa, Triticum aestivum
  peptide (1)..(448): Ceres Seq. ID no. 15220012
  misc_feature (216)..(412): Pfam Name: Pfam Description:  Protein phosphatase 2C
  misc_feature (216)..(447): NCBI GI NO: 37533570 NR Description: putative protein phosphatase 2C
  misc_feature (45)..(232): NCBI GI NO: 37533570 NR Description: putative protein phosphatase 2C
  misc_feature (1)..(174): NCBI GI NO: 37533570 NR Description: putative protein phosphatase 2C
  misc_feature (44)..(444): NCBI GI NO: 18418226 NR Description: protein phosphatase 2C (PP2C) -related
  misc_feature (151)..(444): NCBI GI NO: 7485658 NR Description: hypothetical protein F17M5
  misc_feature (189)..(446): NCBI GI NO: 15240071 NR Description: expressed protein [Arabidopsis thaliana]
  misc_feature (190)..(447): NCBI GI NO: 25366932 NR Description: hypothetical protein dl4315c
  misc_feature (190)..(447): NCBI GI NO: 30683717 NR Description: expressed protein [Arabidopsis thaliana]
  misc_feature (195)..(444): NCBI GI NO: 34896100 NR Description: B1189A09.35
  misc_feature (202)..(443): NCBI GI NO: 18402284 NR Description: expressed protein [Arabidopsis thaliana]
MAELPLAGGLLDLRPGKLSPKPPPPPLPMPGADAPASPRPELRVDEPNPQIPHTAADAGETLASSEAPVPTVGSGVGVCVEAESELAGGRAVLPADCQLDTDGNGVELGALEESGTVVSDTTAPAGLEEVDADAGASPEGSATQDSDTGVDAESRGDDQGATESRVTIPPTAGEVHNKVDWEKNTSEVKSSDKTAPVASSALLLTSGAAILPHPSKAATGGEDAYFIEDYGWFGVADGVGQWSFEGINAGLYARELMDGCKKVIAESEGGSELAPEQVLSKAAAEASSPGSSTVLVAHFDGQLLHVSNIGDSGFLVIRNGEVCAKSKPMVYGFNFPHQIEKGVDPLTLVENYTIDIEEGDIIIAATDGLFDNVYEQEMAAMISKSLQADLKPAEMAEHLAARAHEVGRSGAGRSPFSDSAVAAGYLGFSGGKLDDTAIVVSIVRRSEA

SEQ ID NO: 17929 - protein, 420 aa, Triticum aestivum
  peptide (1)..(420): Ceres Seq. ID no. 15220013
  misc_feature (188)..(384): Pfam Name: Pfam Description:  Protein phosphatase 2C
  misc_feature (188)..(419): NCBI GI NO: 37533570 NR Description: putative protein phosphatase 2C
  misc_feature (17)..(204): NCBI GI NO: 37533570 NR Description: putative protein phosphatase 2C
  misc_feature (1)..(146): NCBI GI NO: 37533570 NR Description: putative protein phosphatase 2C
  misc_feature (16)..(416): NCBI GI NO: 18418226 NR Description: protein phosphatase 2C (PP2C) -related
  misc_feature (123)..(416): NCBI GI NO: 7485658 NR Description: hypothetical protein F17M5
  misc_feature (161)..(418): NCBI GI NO: 15240071 NR Description: expressed protein [Arabidopsis thaliana]
  misc_feature (162)..(419): NCBI GI NO: 25366932 NR Description: hypothetical protein dl4315c
  misc_feature (162)..(419): NCBI GI NO: 30683717 NR Description: expressed protein [Arabidopsis thaliana]
  misc_feature (167)..(416): NCBI GI NO: 34896100 NR Description: B1189A09.35
  misc_feature (174)..(415): NCBI GI NO: 18402284 NR Description: expressed protein [Arabidopsis thaliana]
MPGADAPASPRPELRVDEPNPQIPHTAADAGETLASSEAPVPTVGSGVGVCVEAESELAGGRAVLPADCQLDTDGNGVELGALEESGTVVSDTTAPAGLEEVDADAGASPEGSATQDSDTGVDAESRGDDQGATESRVTIPPTAGEVHNKVDWEKNTSEVKSSDKTAPVASSALLLTSGAAILPHPSKAATGGEDAYFIEDYGWFGVADGVGQWSFEGINAGLYARELMDGCKKVIAESEGGSELAPEQVLSKAAAEASSPGSSTVLVAHFDGQLLHVSNIGDSGFLVIRNGEVCAKSKPMVYGFNFPHQIEKGVDPLTLVENYTIDIEEGDIIIAATDGLFDNVYEQEMAAMISKSLQADLKPAEMAEHLAARAHEVGRSGAGRSPFSDSAVAAGYLGFSGGKLDDTAIVVSIVRRSEA

SEQ ID NO: 17930 - DNA, 732 bp, Triticum aestivum
  misc_feature (1)..(732): Ceres Seq. ID no. 13660311
ctctccagcctctgcctgtcccctccaccctgcctgcagcctccccctcgtctcctccgttcccgattaaatcgcaatccaaaacctctcccccggaactccagcccccgtgccccgcctcgccccgccatgtcgccggccgctggaggcgccgcgcccacgcaaccggcggccagcgccgccccggcgccgacggtgatcgccgcgccgccgccgccccaggccccgtcgcgggagaacccgcgcgatccggccgcgcaggcggagggggccgatcccggcaatgcggcggcgaggaagacggcgtggaacgtgccgccgccgcccccggcacccgtcggcggcatcatgggcggcgacgagtcgtggccggcgctcgccgacacggccgcgcgggcctggcccaagtcctcctcctccgactccctcaagtccctctccgacggctccgccccctccgcgccggaggatccgattgtgccactggtgccgctgccgcagccacagtcagtttctactctgatctccactgcctcaagtccaggctctgcctctacttctcctcctcccactgccaccaccacggcctcgccgccacagaacagcagcacaggccagccaattttagttcggcatggtggcagtaacggtggtaacaatggagagggcggcggtggcaatgtgagcactcatagccagagcactggtaattacagtagtgatgggaacagc

SEQ ID NO: 17931 - protein, 244 aa, Triticum aestivum
  peptide (1)..(244): Ceres Seq. ID no. 13660312
  misc_feature (8)..(110): Pfam Name: Pfam Description:  Extensin-like region
  misc_feature (44)..(242): NCBI GI NO: 32526660 NR Description: unknown protein
  misc_feature (7)..(224): NCBI GI NO: 31414574 NR Description: large tegument protein
  misc_feature (6)..(207): NCBI GI NO: 1076802 NR Description: extensin-like protein - maize
  misc_feature (7)..(199): NCBI GI NO: 81286 NR Description: extensin - Volvox carteri (fragment)
  misc_feature (7)..(207): NCBI GI NO: 27375632 NR Description: blr0521 [Bradyrhizobium japonicum]
  misc_feature (2)..(202): NCBI GI NO: 23017082 NR Description: hypothetical protein [Thermobifida fusca]
  misc_feature (7)..(210): NCBI GI NO: 1076802 NR Description: extensin-like protein - maize
  misc_feature (9)..(222): NCBI GI NO: 5305335 NR Description: proline-rich mucin homolog
  misc_feature (7)..(199): NCBI GI NO: 1076211 NR Description: hypothetical protein VSP-3 - Chlamydomonasreinhardtii
  misc_feature (8)..(112): NCBI GI NO: 28912428 NR Description: serine-proline rich repeat protein
LSSLCLSPPPCLQPPPRLLRSRLNRNPKPLPRNSSPRAPPRPAMSPAAGGAAPTQPAASAAPAPTVIAAPPPPQAPSRENPRDPAAQAEGADPGNAAARKTAWNVPPPPPAPVGGIMGGDESWPALADTAARAWPKSSSSDSLKSLSDGSAPSAPEDPIVPLVPLPQPQSVSTLISTASSPGSASTSPPPTATTTASPPQNSSTGQPILVRHGGSNGGNNGEGGGGNVSTHSQSTGNYSSDGNS

SEQ ID NO: 17932 - protein, 214 aa, Triticum aestivum
  peptide (1)..(214): Ceres Seq. ID no. 13660313
  misc_feature (35)..(88): Pfam Name: 20 copies Pfam Description: Collagen triple helix repeat
LQPLPVPSTLPAASPSSPPFPIKSQSKTSPPELQPPCPASPRHVAGRWRRRAHATGGQRRPGADGDRRAAAAPGPVAGEPARSGRAGGGGRSRQCGGEEDGVERAAAAPGTRRRHHGRRRVVAGARRHGRAGLAQVLLLRLPQVPLRRLRPLRAGGSDCATGAAAAATVSFYSDLHCLKSRLCLYFSSSHCHHHGLAATEQQHRPANFSSAWWQ

SEQ ID NO: 17933 - protein, 201 aa, Triticum aestivum
  peptide (1)..(201): Ceres Seq. ID no. 13660314
  misc_feature (1)..(67): Pfam Name: Pfam Description:  Extensin-like region
  misc_feature (1)..(199): NCBI GI NO: 32526660 NR Description: unknown protein
  misc_feature (1)..(181): NCBI GI NO: 31414574 NR Description: large tegument protein
  misc_feature (1)..(164): NCBI GI NO: 1076802 NR Description: extensin-like protein - maize
  misc_feature (1)..(156): NCBI GI NO: 81286 NR Description: extensin - Volvox carteri (fragment)
  misc_feature (1)..(164): NCBI GI NO: 27375632 NR Description: blr0521 [Bradyrhizobium japonicum]
  misc_feature (1)..(159): NCBI GI NO: 23017082 NR Description: hypothetical protein [Thermobifida fusca]
  misc_feature (1)..(167): NCBI GI NO: 1076802 NR Description: extensin-like protein - maize
  misc_feature (1)..(179): NCBI GI NO: 5305335 NR Description: proline-rich mucin homolog
  misc_feature (1)..(156): NCBI GI NO: 1076211 NR Description: hypothetical protein VSP-3 - Chlamydomonasreinhardtii
  misc_feature (1)..(69): NCBI GI NO: 28912428 NR Description: serine-proline rich repeat protein
MSPAAGGAAPTQPAASAAPAPTVIAAPPPPQAPSRENPRDPAAQAEGADPGNAAARKTAWNVPPPPPAPVGGIMGGDESWPALADTAARAWPKSSSSDSLKSLSDGSAPSAPEDPIVPLVPLPQPQSVSTLISTASSPGSASTSPPPTATTTASPPQNSSTGQPILVRHGGSNGGNNGEGGGGNVSTHSQSTGNYSSDGNS

SEQ ID NO: 17934 - DNA, 1909 bp, Triticum aestivum
  misc_feature (1)..(1909): Ceres Seq. ID no. 15169561
atcccccatcatctatcgccagagaaatctctaggcacaatggctcacacccctggctcgtcctcacgacctcatggtcccctccccggcgactgggcgaggtactccgtctcgcgcctctggctgagcgagctgcagaggcaggggtaccttccccccaccggcgctcgttcctgtccgcacaagactgatttccatggatggccaagcatttgtcgagaacttccctgctccaaacaacgaagagagggtatgcttcgtgccttccttctccagggtctgggttttcccgttcacccattcctgcaaggtctattggaattttacgggatccagctccacaaccttacccaagaatccatactacatatttgcggcttcgtggcgctttgtgagatattcctgagttgcaaggcccactttgatctatggagaaaatatttttgccttgttcctcgtacccatgaaaggtcaatctttgaagtaggccgggccaaggtctggcggatagctgggacagggtgtcccatcgggacccatgaaaagatcctgaagaatggacctcataatggttctaaatcaaagatgtccccctctatccagtccggagagggctacccgaatactccagcgccccgctaaagaagcagttcaattggtgacccaagagtccttccaagagaacaatgcagaggtgcgccttctagccaccaatgtttggttgctagctcacagcaaactgaccatggtcaaggtaatggccattgccatatttcggtgcgggcaacaatttcagcaaagaatgcatcctttgtggtgctacaacgggacgagcgacgcgacccgctacaagtgacaagggaccgacaaccaagcggctatggccaagatactagccgacctcttcaagggagaggaagaagacttagttcagctgggtattcgggacgggtgctccagctacaatccgcctgaatgggtaagttttaatcccttgttttaagttcaaagactgtgtctggacattcgtcggatctattccccttttgaacagagttggaggcctcggatcgaatccgtctattcccaattccccacagccagaatatcattatcatgatgatgacccgaggtatcatgtcgatccgaagacatctttcgatttcgaggacggggtcttttatcaagagagccttgacgacaccaaggtcaccctaacagtggaccatcccggggcacttccttcttctataggtcgtcgcactgcgcgcctatggaaggagcatgagatatgacggcctcgacccgtaatggggcgtccaagcagaaggcctccgctggagcggcaatgatggccccctcggctcaaagaagaaaagttccttggcgctaatccggagactctctgggcgtgccgaggcgcaatcccaaccttggatcttcggcgcaggctagggaccatgttggtcctgcggtgaccagcgccctccggaggatcctgacgaagtctcggtcaccaattctgaagtagaaagtgtgatgaatcactgttaggcataatcttgagtttgtgtctagttttctagttggcttgcatgccacgtaggtaagctaagttttagttttgatagtactagttggtatacagtttggttgagtccaacgtgttaggtatcctgatgctagtagtactaggatgagtcggtataggattaacttagcggcttcccgttggttttgtggagtcgtacgtggaagagcttatggctgagtccggtttggactcaagagcattagtcggttggtccttgcatgtaaattttcccgtgaagggctgcagctttgtaacgtggggggggaaaattgaaaagaaataaaaagaagaaggggcccgacccgttcccttggg

SEQ ID NO: 17935 - protein, 213 aa, Triticum aestivum
  peptide (1)..(213): Ceres Seq. ID no. 15169562
  misc_feature (32)..(173): Pfam Name: Pfam Description:  Putative gypsy type transposon
  misc_feature (30)..(173): NCBI GI NO: 5902448 NR Description: orf3 [Oryza sativa (japonica cultivar-group)]
  misc_feature (30)..(173): NCBI GI NO: 34906434 NR Description: putative gypsy-type retrotransposon RIRE2 orf3
  misc_feature (30)..(173): NCBI GI NO: 34906278 NR Description: putative gypsy-type retrotransposon RIRE2 orf3
  misc_feature (5)..(149): NCBI GI NO: 33113962 NR Description: putative gypsy-type retrotransposon [Zea mays]
  misc_feature (32)..(173): NCBI GI NO: 37533226 NR Description: hypothetical protein similar to putativeretroelement
  misc_feature (30)..(173): NCBI GI NO: 34894224 NR Description: putative gypsy-type retrotransposon RIRE2 orf3
  misc_feature (30)..(173): NCBI GI NO: 38344379 NR Description: OSJNBb0054B09.1
  misc_feature (30)..(173): NCBI GI NO: 37536648 NR Description: gypsy-type retrotransposon RIRE2 protein
  misc_feature (30)..(173): NCBI GI NO: 38346694 NR Description: OSJNBa0080E14.10
  misc_feature (30)..(173): NCBI GI NO: 23477826 NR Description: Putative gypsy-type retrotransposon RIRE2
IPHHLSPEKSLGTMAHTPGSSSRPHGPLPGDWARYSVSRLWLSELQRQGYLPPTGARSCPHKTDFHGWPSICRELPCSKQRREGMLRAFLLQGLGFPVHPFLQGLLEFYGIQLHNLTQESILHICGFVALCEIFLSCKAHFDLWRKYFCLVPRTHERSIFEVGRAKVWRIAGTGCPIGTHEKILKNGPHNGSKSKMSPSIQSGEGYPNTPAPR

SEQ ID NO: 17936 - protein, 200 aa, Triticum aestivum
  peptide (1)..(200): Ceres Seq. ID no. 15169563
  misc_feature (19)..(160): Pfam Name: Pfam Description:  Putative gypsy type transposon
  misc_feature (17)..(160): NCBI GI NO: 5902448 NR Description: orf3 [Oryza sativa (japonica cultivar-group)]
  misc_feature (17)..(160): NCBI GI NO: 34906434 NR Description: putative gypsy-type retrotransposon RIRE2 orf3
  misc_feature (17)..(160): NCBI GI NO: 34906278 NR Description: putative gypsy-type retrotransposon RIRE2 orf3
  misc_feature (1)..(136): NCBI GI NO: 33113962 NR Description: putative gypsy-type retrotransposon [Zea mays]
  misc_feature (19)..(160): NCBI GI NO: 37533226 NR Description: hypothetical protein similar to putativeretroelement
  misc_feature (17)..(160): NCBI GI NO: 34894224 NR Description: putative gypsy-type retrotransposon RIRE2 orf3
  misc_feature (17)..(160): NCBI GI NO: 38344379 NR Description: OSJNBb0054B09.1
  misc_feature (17)..(160): NCBI GI NO: 37536648 NR Description: gypsy-type retrotransposon RIRE2 protein
  misc_feature (17)..(160): NCBI GI NO: 38346694 NR Description: OSJNBa0080E14.10
  misc_feature (17)..(160): NCBI GI NO: 23477826 NR Description: Putative gypsy-type retrotransposon RIRE2
MAHTPGSSSRPHGPLPGDWARYSVSRLWLSELQRQGYLPPTGARSCPHKTDFHGWPSICRELPCSKQRREGMLRAFLLQGLGFPVHPFLQGLLEFYGIQLHNLTQESILHICGFVALCEIFLSCKAHFDLWRKYFCLVPRTHERSIFEVGRAKVWRIAGTGCPIGTHEKILKNGPHNGSKSKMSPSIQSGEGYPNTPAPR

SEQ ID NO: 17937 - protein, 129 aa, Triticum aestivum
  peptide (1)..(129): Ceres Seq. ID no. 15169564
  misc_feature (1)..(89): Pfam Name: Pfam Description:  Putative gypsy type transposon
  misc_feature (1)..(89): NCBI GI NO: 5902448 NR Description: orf3 [Oryza sativa (japonica cultivar-group)]
  misc_feature (1)..(89): NCBI GI NO: 34906434 NR Description: putative gypsy-type retrotransposon RIRE2 orf3
  misc_feature (1)..(89): NCBI GI NO: 34906278 NR Description: putative gypsy-type retrotransposon RIRE2 orf3
  misc_feature (1)..(65): NCBI GI NO: 33113962 NR Description: putative gypsy-type retrotransposon [Zea mays]
  misc_feature (1)..(89): NCBI GI NO: 37533226 NR Description: hypothetical protein similar to putativeretroelement
  misc_feature (1)..(89): NCBI GI NO: 34894224 NR Description: putative gypsy-type retrotransposon RIRE2 orf3
  misc_feature (1)..(89): NCBI GI NO: 38344379 NR Description: OSJNBb0054B09.1
  misc_feature (1)..(89): NCBI GI NO: 37536648 NR Description: gypsy-type retrotransposon RIRE2 protein
  misc_feature (1)..(89): NCBI GI NO: 38346694 NR Description: OSJNBa0080E14.10
  misc_feature (1)..(89): NCBI GI NO: 23477826 NR Description: Putative gypsy-type retrotransposon RIRE2
MLRAFLLQGLGFPVHPFLQGLLEFYGIQLHNLTQESILHICGFVALCEIFLSCKAHFDLWRKYFCLVPRTHERSIFEVGRAKVWRIAGTGCPIGTHEKILKNGPHNGSKSKMSPSIQSGEGYPNTPAPR

SEQ ID NO: 17938 - DNA, 2251 bp, Triticum aestivum
  misc_feature (1)..(2251): Ceres Seq. ID no. 13501807
tttttttctccccttcgatatccccgataaaacctccatctccatccccatccccgcccctcctatcgccacttcgccagccagctcgcccgcccgcccgcctagtcttctccgaaggaaggaacgaaggaaggaagcggccgcacgctcatggccctctcctgcatgaggtgcccggcggcggcggccggcggcggccccctcgcgcgccgcccgcaaccgccgccctcctcgtccctcgccttctccttcgccagatgcggagccgccaaggggtggcgcatccacgccgtcgccgggaaaggagtgaaagctcccatggatgctgtggagaacgctgtcgcccccgccgccccgtcaacggtggcaaatggcacttcttcagcaatcaccgtcgaggaatttgaagatttagcctctctagtgaaggatgatgaggcgtcggttagcatcaccgtagttggagcgtctggtgaccttgcgaagaagaagatatttcctgcccttttcgctctttactatgaaggttgtcttcccaagcatttctccatctttggctatgcgcggagtaaaatgacagatgctgaactgagagacatggtcagcaaaacactgacttgcaggattgataaaagggagaactgtagtgagaaaatggaagagtttctgaaacgatgcttctaccactcaggtcaatatgactcagaggaagatttcagggagctaggcaagaagatcaaacaacatgagggtcccagagtatctaaccatcttttctacttgtcgatacctccaaatatattcctggatgttgtaaaatgtgcaagcaaatcagcatcatctgtgagtggctggacaagggtaattgttgaaaaaccctttggccgggactcagagtcttctgctgccctaacgaaaggtctgaagcagtacctgacagaggaccaaatcttcaggattgaccattacttgggaaaggaactggtggagaacttgtctgtccttcgcttctcgaatcttgtttttgagcctctgtggtcaaggcaatatattaggaatgtgcaactgatattctcggaagactttggcactgaagggcgaggagggtactttgatagctatggtattatccgagacataatgcagaatcatcttcttcagatactagctctatttgcaatggaaactcctattagcttggaagcagaggacatacgaaatgagaaggttaaagttttgcgctccatgaagccattgcgactagaagatgtggtaataggacagtataaaagtcatacaaagggtggtattacataccctggatacactgaagataagacggtgcccaagggtagtctgactccaacatttgctgcagctgcgctttttataaataacgctagatgggatggagttccctttctcatgaaggctggaaaagctttgcatactaaacaggctgagattagagtacagtttcgacatgttcctggaaatctctacaaggggtcttttggaaccgatcttgacagggctactaatgaacttgtgatacgcgtgcaaccagatgaaggaatttacctaaagattaacaacaagattcctggtcttggtatgagactagataggagtaatctgaatcttcactatgcagcaaggtaccccaaggagataccagatgcgtacgagaggctcctgctcgacgcgatagaaggagagcgaaggctcttcatccggtcggacgagctggacgcagcgtgggagctcttcacgcccctcctgaaggagctggagcagaagcggatggcccccgagctatacccctacgggagccgcgggcccatgggcgcccactacctggcagccaagtacaaggtgagatggggcgacctgggtggctcggaacactaggaagagagcgtggtttcacacgggaggtgatgatttctgtttttggcgtcgcaatttctgcaaaaggccttgcagcgcacgcccagctagtgggggtgtgcgaggaacagatctgaataagggtgagcggttggcgatgcttgtgttcatcgatcgatcgaccgtgagtgagtatatttgttggtaccactggcttacatattctatgattcttaagaggaagcccagagcagaaagctcattcatcctggctgttcgtcggctcatttggttgtctggctgggccgggctgttgtattgggactgctgattgtgtaactgcaaaagctgttacttcttt

SEQ ID NO: 17939 - protein, 586 aa, Triticum aestivum
  peptide (1)..(586): Ceres Seq. ID no. 15223152
  misc_feature (96)..(581): NCBI GI NO: 9955555 NR Description: glucose-6-phosphate 1-dehydrogenase
  misc_feature (96)..(581): NCBI GI NO: 22326761 NR Description: glucose-6-phosphate 1-dehydrogenase
  misc_feature (96)..(581): NCBI GI NO: 18086448 NR Description: AT5g13110/T19L5_70 [Arabidopsis thaliana]
  misc_feature (43)..(581): NCBI GI NO: 9392607 NR Description: plastidic glucose 6-phosphate dehydrogenase
  misc_feature (96)..(581): NCBI GI NO: 2146735 NR Description: glucose-6-phosphate 1-dehydrogenase (EC 1
  misc_feature (43)..(581): NCBI GI NO: 3023817 NR Description: Glucose-6-phosphate 1-dehydrogenase
  misc_feature (95)..(581): NCBI GI NO: 5734502 NR Description: glucose-6-phosphate 1-dehydrogenase
  misc_feature (95)..(581): NCBI GI NO: 24745908 NR Description: glucose 6-phosphate dehydrogenase
  misc_feature (26)..(581): NCBI GI NO: 15221719 NR Description: glucose-6-phosphate 1-dehydrogenase
  misc_feature (72)..(585): NCBI GI NO: 7431270 NR Description: glucose-6-phosphate 1-dehydrogenase (EC 1
MALSCMRCPAAAAGGGPLARRPQPPPSSSLAFSFARCGAAKGWRIHAVAGKGVKAPMDAVENAVAPAAPSTVANGTSSAITVEEFEDLASLVKDDEASVSITVVGASGDLAKKKIFPALFALYYEGCLPKHFSIFGYARSKMTDAELRDMVSKTLTCRIDKRENCSEKMEEFLKRCFYHSGQYDSEEDFRELGKKIKQHEGPRVSNHLFYLSIPPNIFLDVVKCASKSASSVSGWTRVIVEKPFGRDSESSAALTKGLKQYLTEDQIFRIDHYLGKELVENLSVLRFSNLVFEPLWSRQYIRNVQLIFSEDFGTEGRGGYFDSYGIIRDIMQNHLLQILALFAMETPISLEAEDIRNEKVKVLRSMKPLRLEDVVIGQYKSHTKGGITYPGYTEDKTVPKGSLTPTFAAAALFINNARWDGVPFLMKAGKALHTKQAEIRVQFRHVPGNLYKGSFGTDLDRATNELVIRVQPDEGIYLKINNKIPGLGMRLDRSNLNLHYAARYPKEIPDAYERLLLDAIEGERRLFIRSDELDAAWELFTPLLKELEQKRMAPELYPYGSRGPMGAHYLAAKYKVRWGDLGGSEH

SEQ ID NO: 17940 - protein, 581 aa, Triticum aestivum
  peptide (1)..(581): Ceres Seq. ID no. 15223153
  misc_feature (91)..(576): NCBI GI NO: 9955555 NR Description: glucose-6-phosphate 1-dehydrogenase
  misc_feature (91)..(576): NCBI GI NO: 22326761 NR Description: glucose-6-phosphate 1-dehydrogenase
  misc_feature (91)..(576): NCBI GI NO: 18086448 NR Description: AT5g13110/T19L5_70 [Arabidopsis thaliana]
  misc_feature (38)..(576): NCBI GI NO: 9392607 NR Description: plastidic glucose 6-phosphate dehydrogenase
  misc_feature (91)..(576): NCBI GI NO: 2146735 NR Description: glucose-6-phosphate 1-dehydrogenase (EC 1
  misc_feature (38)..(576): NCBI GI NO: 3023817 NR Description: Glucose-6-phosphate 1-dehydrogenase
  misc_feature (90)..(576): NCBI GI NO: 5734502 NR Description: glucose-6-phosphate 1-dehydrogenase
  misc_feature (90)..(576): NCBI GI NO: 24745908 NR Description: glucose 6-phosphate dehydrogenase
  misc_feature (21)..(576): NCBI GI NO: 15221719 NR Description: glucose-6-phosphate 1-dehydrogenase
  misc_feature (67)..(580): NCBI GI NO: 7431270 NR Description: glucose-6-phosphate 1-dehydrogenase (EC 1
MRCPAAAAGGGPLARRPQPPPSSSLAFSFARCGAAKGWRIHAVAGKGVKAPMDAVENAVAPAAPSTVANGTSSAITVEEFEDLASLVKDDEASVSITVVGASGDLAKKKIFPALFALYYEGCLPKHFSIFGYARSKMTDAELRDMVSKTLTCRIDKRENCSEKMEEFLKRCFYHSGQYDSEEDFRELGKKIKQHEGPRVSNHLFYLSIPPNIFLDVVKCASKSASSVSGWTRVIVEKPFGRDSESSAALTKGLKQYLTEDQIFRIDHYLGKELVENLSVLRFSNLVFEPLWSRQYIRNVQLIFSEDFGTEGRGGYFDSYGIIRDIMQNHLLQILALFAMETPISLEAEDIRNEKVKVLRSMKPLRLEDVVIGQYKSHTKGGITYPGYTEDKTVPKGSLTPTFAAAALFINNARWDGVPFLMKAGKALHTKQAEIRVQFRHVPGNLYKGSFGTDLDRATNELVIRVQPDEGIYLKINNKIPGLGMRLDRSNLNLHYAARYPKEIPDAYERLLLDAIEGERRLFIRSDELDAAWELFTPLLKELEQKRMAPELYPYGSRGPMGAHYLAAKYKVRWGDLGGSEH

SEQ ID NO: 17941 - protein, 530 aa, Triticum aestivum
  peptide (1)..(530): Ceres Seq. ID no. 15223154
  misc_feature (40)..(525): NCBI GI NO: 9955555 NR Description: glucose-6-phosphate 1-dehydrogenase
  misc_feature (40)..(525): NCBI GI NO: 22326761 NR Description: glucose-6-phosphate 1-dehydrogenase
  misc_feature (40)..(525): NCBI GI NO: 18086448 NR Description: AT5g13110/T19L5_70 [Arabidopsis thaliana]
  misc_feature (1)..(525): NCBI GI NO: 9392607 NR Description: plastidic glucose 6-phosphate dehydrogenase
  misc_feature (40)..(525): NCBI GI NO: 2146735 NR Description: glucose-6-phosphate 1-dehydrogenase (EC 1
  misc_feature (1)..(525): NCBI GI NO: 3023817 NR Description: Glucose-6-phosphate 1-dehydrogenase
  misc_feature (39)..(525): NCBI GI NO: 5734502 NR Description: glucose-6-phosphate 1-dehydrogenase
  misc_feature (39)..(525): NCBI GI NO: 24745908 NR Description: glucose 6-phosphate dehydrogenase
  misc_feature (1)..(525): NCBI GI NO: 15221719 NR Description: glucose-6-phosphate 1-dehydrogenase
  misc_feature (16)..(529): NCBI GI NO: 7431270 NR Description: glucose-6-phosphate 1-dehydrogenase (EC 1
MDAVENAVAPAAPSTVANGTSSAITVEEFEDLASLVKDDEASVSITVVGASGDLAKKKIFPALFALYYEGCLPKHFSIFGYARSKMTDAELRDMVSKTLTCRIDKRENCSEKMEEFLKRCFYHSGQYDSEEDFRELGKKIKQHEGPRVSNHLFYLSIPPNIFLDVVKCASKSASSVSGWTRVIVEKPFGRDSESSAALTKGLKQYLTEDQIFRIDHYLGKELVENLSVLRFSNLVFEPLWSRQYIRNVQLIFSEDFGTEGRGGYFDSYGIIRDIMQNHLLQILALFAMETPISLEAEDIRNEKVKVLRSMKPLRLEDVVIGQYKSHTKGGITYPGYTEDKTVPKGSLTPTFAAAALFINNARWDGVPFLMKAGKALHTKQAEIRVQFRHVPGNLYKGSFGTDLDRATNELVIRVQPDEGIYLKINNKIPGLGMRLDRSNLNLHYAARYPKEIPDAYERLLLDAIEGERRLFIRSDELDAAWELFTPLLKELEQKRMAPELYPYGSRGPMGAHYLAAKYKVRWGDLGGSEH

SEQ ID NO: 17942 - DNA, 738 bp, Triticum aestivum
  misc_feature (1)..(738): Ceres Seq. ID no. 12622778
gatttttcattatgtagtttattctttttcgtgctaatggggcatgttttaatttctatgcagttacaggcgcattgtagaatacaaaacagcttactattcattctatttgccggtcggttgtgcactgctgttgtccggtgggagtttggatgattatgttcaagtgaagcatatcctagttgaaatgggtatttacttccaaattcaggacgattatcttgactgttttggtgatccagaagttatgggcaagattggaactgatatcgaagacttcaagtgctcttggctgtttgttcaagcactagtgcgtgtcgatgagaggcaaaaagacatcttatttgaaaattacgggaaatcagatcctgcttgtgttgcaaaagtgaaggcgctgtataaagagctcaatctggaggcggtgttctctgagtacgaaagggagatttacgaaaagctgatctcagacatcgaagcgcagccgaatgaagctgtgcaggcagtgttgaaatcgtttttgcataaaatctacagaaggatgaagtaggaatgttcttgcgtacaaagagattgttgggtggaatgagttctttggtgtcggcgcatgcaagatgaatagtagtattaaatacttatgaataagcagtatgactgatcatattgaatagtcagagtttttgctttatattcgcgaacaacaaagcatttccatgcaaaagaacagaatataagaaattt

SEQ ID NO: 17943 - protein, 119 aa, Triticum aestivum
  peptide (1)..(119): Ceres Seq. ID no. 12622779
  misc_feature (1)..(82): Pfam Name: Pfam Description:  Polyprenyl synthetase
  misc_feature (1)..(119): NCBI GI NO: 34911444 NR Description: putative farnesyl-pyrophosphate synthetase
  misc_feature (1)..(119): NCBI GI NO: 34911542 NR Description: putative farnesyl-pyrophosphate synthetase
  misc_feature (1)..(119): NCBI GI NO: 1346033 NR Description: Farnesyl pyrophosphate synthetase
  misc_feature (1)..(119): NCBI GI NO: 33340604 NR Description: truncated geranylgeranyl-diphosphate synthase
  misc_feature (1)..(119): NCBI GI NO: 4115416 NR Description: farnesyl diphosphate synthase
  misc_feature (1)..(119): NCBI GI NO: 25458583 NR Description: probable farnesyl pyrophosphate synthase
  misc_feature (1)..(119): NCBI GI NO: 18958450 NR Description: farnesyl pyrophosphare synthase [Musa acuminata]
  misc_feature (1)..(119): NCBI GI NO: 7433992 NR Description: farnesyl-pyrophosphate synthetase
  misc_feature (1)..(119): NCBI GI NO: 14573639 NR Description: farnesyldiphosphate synthase
  misc_feature (1)..(119): NCBI GI NO: 1346028 NR Description: Farnesyl pyrophosphate synthetase 1
MGIYFQIQDDYLDCFGDPEVMGKIGTDIEDFKCSWLFVQALVRVDERQKDILFENYGKSDPACVAKVKALYKELNLEAVFSEYEREIYEKLISDIEAQPNEAVQAVLKSFLHKIYRRMK

SEQ ID NO: 17944 - protein, 99 aa, Triticum aestivum
  peptide (1)..(99): Ceres Seq. ID no. 12622780
  misc_feature (1)..(62): Pfam Name: Pfam Description:  Polyprenyl synthetase
  misc_feature (1)..(99): NCBI GI NO: 34911444 NR Description: putative farnesyl-pyrophosphate synthetase
  misc_feature (1)..(99): NCBI GI NO: 34911542 NR Description: putative farnesyl-pyrophosphate synthetase
  misc_feature (1)..(99): NCBI GI NO: 1346033 NR Description: Farnesyl pyrophosphate synthetase
  misc_feature (1)..(99): NCBI GI NO: 33340604 NR Description: truncated geranylgeranyl-diphosphate synthase
  misc_feature (1)..(99): NCBI GI NO: 4115416 NR Description: farnesyl diphosphate synthase
  misc_feature (1)..(99): NCBI GI NO: 25458583 NR Description: probable farnesyl pyrophosphate synthase
  misc_feature (1)..(99): NCBI GI NO: 18958450 NR Description: farnesyl pyrophosphare synthase [Musa acuminata]
  misc_feature (1)..(99): NCBI GI NO: 7433992 NR Description: farnesyl-pyrophosphate synthetase
  misc_feature (1)..(99): NCBI GI NO: 14573639 NR Description: farnesyldiphosphate synthase
  misc_feature (1)..(99): NCBI GI NO: 1346028 NR Description: Farnesyl pyrophosphate synthetase 1
MGKIGTDIEDFKCSWLFVQALVRVDERQKDILFENYGKSDPACVAKVKALYKELNLEAVFSEYEREIYEKLISDIEAQPNEAVQAVLKSFLHKIYRRMK

SEQ ID NO: 17945 - DNA, 2080 bp, Triticum aestivum
  misc_feature (1)..(2080): Ceres Seq. ID no. 13659971
gaaatagttttcgcagagccgttaagctcacctccttcgaggccggctgctccacctccacctccacctaatccccattcgcctcgcctccccgcccaccgccaccacccgtcgatggcggccatcaagccgccgccgcctgaccggccgccgcaggccgcgcggctgccgtccccttcctcttcctcctcggcggtggcggcggccaagcgaggcgccacaggctcccgcgggctgctcatggggcgctacgagctgggccgcgtcctgggcaaaggcaccttcgccaaggtgtaccacgcgcggcacgtgcagaccggcgagagcgtggccatcaaggtgctcgaccgggagaaggccgtgcggagcggcctcgtctcgcacatcaagcgcgagatcgccgtgctccgctgcgtgcgccaccccaacatcgtgcacctcttcgaggtcatggccaccaagaccaagatctacttcgtcatggagctcgtccgcggcggcgagctcttctcccgcgtctccaagggccgcctcaaggaggacattgcgcgccgctacttccagcacctcatctccgccgtcggcttctgccacacccgcggggtcttccaccgggacctcaagccggagaacctcctcgtcgacgaggcgggcaacctcaaggtgtccgacttcggcctctccgccgtcgccgagccgttccagccagagggtctcctccacaccttctgcggcacgccggcctacgtcgcgcccgaagtcctcgcccgccgtggatacgaaggcgccaaggccgacatatggtcctgcggtgtcatcctctttgttctcatggccggatacctccctttccatgaccagaacctcatggccatgtaccgtaaggtttacaagggagagttccgatgtccaaggtggttctccaaggaccttactagcttgatcatgcgttttcttgacacaaacccaagcaccaggatcaccttgccggaggtcatggagagccggtggttcaagaaaggtttccggccagtcaagttctatattgaagatgaccagctgtacaacgtcattgatgccgagaatgatatgctcgacttgggtctccctgaccctcttcctcaaccattgcttcctccaccttcatctccatctccgcaagaagttgatggagatgactcagggtcagaatccgacgcatcagtcgtgtcctgccctgccacatcgtcatttgaagagcgccacaggctccgcgggccactcccacgccccgcaagccttaacgcgtttgatatcatatcattctcaaggggattcaacttgtcggggctgtttgaggaaaaaggggacgaggtgagattcatctcgagtgaacctatgtcgggcattataacgaaattagaggagatcgcaaatgtgaagagcttcgcggtgcggaagaaggattggcgggtgagcctagagggcacaagggaaggggttaaggggccactaacaatctgcgcggagatatttgaactcacaccctcccttgtagtagtggaggtaaaaaagaaggcgggggataaggaagagtatgatgatttctgcaacaaggaattgaagccaggaatgcagcatcttgtgcaccagatggccccagttccaattacacctaccatttctgagtaggccgaaaggccttcaaggtaacaggcgccaccgcccctagagctaacggggatagggggagcgactctccaagctagaaagaaactggagtcgggtgcaactgacaggagcaagagttcttgtagtctcgggcactgacgatgatgagcgcggttacttggttaactctggagagcatacgtaatgttatccgagacgggagctagattgtggctgtatatggtgtcaccctagctgctgtttaaatgtttgtacttttctctacttaatttgctgatgatgattgtgtatgtactcccgctgttggtttatcagcagaaccgaataattttgggcaatcgttaattcaaggaccaaactgattgaggaataaattgggtgcaacatgcattgcatgcaccctttggcc

SEQ ID NO: 17946 - protein, 556 aa, Triticum aestivum
  peptide (1)..(556): Ceres Seq. ID no. 15219995
  misc_feature (84)..(338): Pfam Name: Pfam Description:  Protein kinase domain
  misc_feature (39)..(556): NCBI GI NO: 3928519 NR Description: wpk4 protein kinase [Triticum aestivum]
  misc_feature (39)..(556): NCBI GI NO: 626040 NR Description: protein kinase SNF1 homolog wpk4-p58 - wheat
  misc_feature (39)..(549): NCBI GI NO: 6651177 NR Description: protein kinase PK4 [Zea mays]
  misc_feature (50)..(556): NCBI GI NO: 5821067 NR Description: OsPK4 [Oryza sativa]
  misc_feature (39)..(556): NCBI GI NO: 34909718 NR Description: OsPK7 [Oryza sativa (japonica cultivar-group)]
  misc_feature (77)..(359): NCBI GI NO: 15233981 NR Description: CBL-interacting protein kinase 12
  misc_feature (388)..(541): NCBI GI NO: 15233981 NR Description: CBL-interacting protein kinase 12
  misc_feature (5)..(354): NCBI GI NO: 15218854 NR Description: CBL-interacting protein kinase 18
  misc_feature (387)..(544): NCBI GI NO: 15218854 NR Description: CBL-interacting protein kinase 18
  misc_feature (70)..(359): NCBI GI NO: 15242507 NR Description: CBL-interacting protein kinase 19
EIVFAEPLSSPPSRPAAPPPPPPNPHSPRLPAHRHHPSMAAIKPPPPDRPPQAARLPSPSSSSSAVAAAKRGATGSRGLLMGRYELGRVLGKGTFAKVYHARHVQTGESVAIKVLDREKAVRSGLVSHIKREIAVLRCVRHPNIVHLFEVMATKTKIYFVMELVRGGELFSRVSKGRLKEDIARRYFQHLISAVGFCHTRGVFHRDLKPENLLVDEAGNLKVSDFGLSAVAEPFQPEGLLHTFCGTPAYVAPEVLARRGYEGAKADIWSCGVILFVLMAGYLPFHDQNLMAMYRKVYKGEFRCPRWFSKDLTSLIMRFLDTNPSTRITLPEVMESRWFKKGFRPVKFYIEDDQLYNVIDAENDMLDLGLPDPLPQPLLPPPSSPSPQEVDGDDSGSESDASVVSCPATSSFEERHRLRGPLPRPASLNAFDIISFSRGFNLSGLFEEKGDEVRFISSEPMSGIITKLEEIANVKSFAVRKKDWRVSLEGTREGVKGPLTICAEIFELTPSLVVVEVKKKAGDKEEYDDFCNKELKPGMQHLVHQMAPVPITPTISE

SEQ ID NO: 17947 - protein, 518 aa, Triticum aestivum
  peptide (1)..(518): Ceres Seq. ID no. 15219996
  misc_feature (46)..(300): Pfam Name: Pfam Description:  Protein kinase domain
  misc_feature (1)..(518): NCBI GI NO: 3928519 NR Description: wpk4 protein kinase [Triticum aestivum]
  misc_feature (1)..(518): NCBI GI NO: 626040 NR Description: protein kinase SNF1 homolog wpk4-p58 - wheat
  misc_feature (1)..(511): NCBI GI NO: 6651177 NR Description: protein kinase PK4 [Zea mays]
  misc_feature (12)..(518): NCBI GI NO: 5821067 NR Description: OsPK4 [Oryza sativa]
  misc_feature (1)..(518): NCBI GI NO: 34909718 NR Description: OsPK7 [Oryza sativa (japonica cultivar-group)]
  misc_feature (39)..(321): NCBI GI NO: 15233981 NR Description: CBL-interacting protein kinase 12
  misc_feature (350)..(503): NCBI GI NO: 15233981 NR Description: CBL-interacting protein kinase 12
  misc_feature (1)..(316): NCBI GI NO: 15218854 NR Description: CBL-interacting protein kinase 18
  misc_feature (349)..(506): NCBI GI NO: 15218854 NR Description: CBL-interacting protein kinase 18
  misc_feature (32)..(321): NCBI GI NO: 15242507 NR Description: CBL-interacting protein kinase 19
MAAIKPPPPDRPPQAARLPSPSSSSSAVAAAKRGATGSRGLLMGRYELGRVLGKGTFAKVYHARHVQTGESVAIKVLDREKAVRSGLVSHIKREIAVLRCVRHPNIVHLFEVMATKTKIYFVMELVRGGELFSRVSKGRLKEDIARRYFQHLISAVGFCHTRGVFHRDLKPENLLVDEAGNLKVSDFGLSAVAEPFQPEGLLHTFCGTPAYVAPEVLARRGYEGAKADIWSCGVILFVLMAGYLPFHDQNLMAMYRKVYKGEFRCPRWFSKDLTSLIMRFLDTNPSTRITLPEVMESRWFKKGFRPVKFYIEDDQLYNVIDAENDMLDLGLPDPLPQPLLPPPSSPSPQEVDGDDSGSESDASVVSCPATSSFEERHRLRGPLPRPASLNAFDIISFSRGFNLSGLFEEKGDEVRFISSEPMSGIITKLEEIANVKSFAVRKKDWRVSLEGTREGVKGPLTICAEIFELTPSLVVVEVKKKAGDKEEYDDFCNKELKPGMQHLVHQMAPVPITPTISE

SEQ ID NO: 17948 - protein, 476 aa, Triticum aestivum
  peptide (1)..(476): Ceres Seq. ID no. 15219997
  misc_feature (4)..(258): Pfam Name: Pfam Description:  Protein kinase domain
  misc_feature (1)..(476): NCBI GI NO: 3928519 NR Description: wpk4 protein kinase [Triticum aestivum]
  misc_feature (1)..(476): NCBI GI NO: 626040 NR Description: protein kinase SNF1 homolog wpk4-p58 - wheat
  misc_feature (1)..(469): NCBI GI NO: 6651177 NR Description: protein kinase PK4 [Zea mays]
  misc_feature (1)..(476): NCBI GI NO: 5821067 NR Description: OsPK4 [Oryza sativa]
  misc_feature (1)..(476): NCBI GI NO: 34909718 NR Description: OsPK7 [Oryza sativa (japonica cultivar-group)]
  misc_feature (1)..(279): NCBI GI NO: 15233981 NR Description: CBL-interacting protein kinase 12
  misc_feature (308)..(461): NCBI GI NO: 15233981 NR Description: CBL-interacting protein kinase 12
  misc_feature (1)..(274): NCBI GI NO: 15218854 NR Description: CBL-interacting protein kinase 18
  misc_feature (307)..(464): NCBI GI NO: 15218854 NR Description: CBL-interacting protein kinase 18
  misc_feature (1)..(279): NCBI GI NO: 15242507 NR Description: CBL-interacting protein kinase 19
MGRYELGRVLGKGTFAKVYHARHVQTGESVAIKVLDREKAVRSGLVSHIKREIAVLRCVRHPNIVHLFEVMATKTKIYFVMELVRGGELFSRVSKGRLKEDIARRYFQHLISAVGFCHTRGVFHRDLKPENLLVDEAGNLKVSDFGLSAVAEPFQPEGLLHTFCGTPAYVAPEVLARRGYEGAKADIWSCGVILFVLMAGYLPFHDQNLMAMYRKVYKGEFRCPRWFSKDLTSLIMRFLDTNPSTRITLPEVMESRWFKKGFRPVKFYIEDDQLYNVIDAENDMLDLGLPDPLPQPLLPPPSSPSPQEVDGDDSGSESDASVVSCPATSSFEERHRLRGPLPRPASLNAFDIISFSRGFNLSGLFEEKGDEVRFISSEPMSGIITKLEEIANVKSFAVRKKDWRVSLEGTREGVKGPLTICAEIFELTPSLVVVEVKKKAGDKEEYDDFCNKELKPGMQHLVHQMAPVPITPTISE

SEQ ID NO: 17949 - DNA, 1204 bp, Triticum aestivum
  misc_feature (1)..(1204): Ceres Seq. ID no. 14303652
aaaaccaatcgtacgctcgctcgctcatcaatttcagcagccattccacgaccgcccagagaagactcgcctcctcccgagctcccctctccgtcctcgtcgtctccctctcccgcttccccccacccaaccaacacgctacgccaggcgcgagaggcaccagcggccatgaagggcggcggagccatcaggagcggcggcgggggaggcggcgggctgatgcggacgcggctgcggctccccgtggtgctcctctcctgctccctcttcttcctcgccggcttcctcggctccctcctcttcacccaggatccgcagggggaggaggacgtggagcggccgctgcggagggagcggctcatggaggcggtctggccggagatggcgtacggggagtccggcgagcccacgccctccttgatcccttaccagattttgagctggcaaccccgtgcattatattttccacaatttgcaacagcagaacagtgtgagaatgtagtaaaaactgcgaaggcacggcttaggccatcaacattggccttaaggaaaggagaaagcgaggagactaccaaaggaataaggacaagctcaggcacattccttagtgccgaagaagatccaactggagcccttgcagaaattgaaacgaagattgcaaaggctaccatgatgccaagaagtcatggagagccatttaatgtccttctgtatgagattggacagaagtatgcttcacactatgatgcatttgacccggctcaatatggtccacaaaaaagtcaaagggtggcatctttcttgctctacctcacggatgtcgaggaaggtggagaaaccatgttcccatatgagaatggggataatatgaacataggctacgactacgaacagtgcatcggcttaaaggtgaaaccgaggaagggggatggcctcttgttttactcccttatgctaaatggtaccattgatccgacttcacttcatggaagctgcccagtggtcaaaggagagaaatgggtcgccacaaaatggattagagacagaggctccacgtcctaaatagatcaacacatacatagtaatcatttttttctacaccatcttgtacctgtacattacatttattcaatttccatcggccttcatgaaccagtgaggtaggggaaaaaacaacttgcagtttccatctgctaatttgacg

SEQ ID NO: 17950 - protein, 353 aa, Triticum aestivum
  peptide (1)..(353): Ceres Seq. ID no. 14303653
  misc_feature (229)..(348): Pfam Name: II Pfam Description: 2OG-Fe
  misc_feature (59)..(349): NCBI GI NO: 14488368 NR Description: putative dioxygenase
  misc_feature (78)..(349): NCBI GI NO: 40809925 NR Description: prolyl 4-hydroxylase [Nicotiana tabacum]
  misc_feature (75)..(349): NCBI GI NO: 18418321 NR Description: oxidoreductase, 2OG-Fe(II) oxygenase family
  misc_feature (128)..(324): NCBI GI NO: 7485609 NR Description: hypothetical protein F17I5
  misc_feature (77)..(349): NCBI GI NO: 30681957 NR Description: oxidoreductase -related [Arabidopsis thaliana]
  misc_feature (146)..(349): NCBI GI NO: 29150365 NR Description: putative oxidoreductase
  misc_feature (139)..(349): NCBI GI NO: 30689216 NR Description: oxidoreductase, 2OG-Fe(II) oxygenase family
  misc_feature (144)..(346): NCBI GI NO: 21537370 NR Description: putative prolyl 4-hydroxylase, alpha subunit
  misc_feature (147)..(349): NCBI GI NO: 28393447 NR Description: putative prolyl 4-hydroxylase
  misc_feature (144)..(346): NCBI GI NO: 18394842 NR Description: oxidoreductase, 2OG-Fe(II) oxygenase family
KTNRTLARSSISAAIPRPPREDSPPPELPSPSSSSPSPASPHPTNTLRQAREAPAAMKGGGAIRSGGGGGGGLMRTRLRLPVVLLSCSLFFLAGFLGSLLFTQDPQGEEDVERPLRRERLMEAVWPEMAYGESGEPTPSLIPYQILSWQPRALYFPQFATAEQCENVVKTAKARLRPSTLALRKGESEETTKGIRTSSGTFLSAEEDPTGALAEIETKIAKATMMPRSHGEPFNVLLYEIGQKYASHYDAFDPAQYGPQKSQRVASFLLYLTDVEEGGETMFPYENGDNMNIGYDYEQCIGLKVKPRKGDGLLFYSLMLNGTIDPTSLHGSCPVVKGEKWVATKWIRDRGSTS

SEQ ID NO: 17951 - protein, 297 aa, Triticum aestivum
  peptide (1)..(297): Ceres Seq. ID no. 14303654
  misc_feature (173)..(292): Pfam Name: II Pfam Description: 2OG-Fe
  misc_feature (3)..(293): NCBI GI NO: 14488368 NR Description: putative dioxygenase
  misc_feature (22)..(293): NCBI GI NO: 40809925 NR Description: prolyl 4-hydroxylase [Nicotiana tabacum]
  misc_feature (19)..(293): NCBI GI NO: 18418321 NR Description: oxidoreductase, 2OG-Fe(II) oxygenase family
  misc_feature (72)..(268): NCBI GI NO: 7485609 NR Description: hypothetical protein F17I5
  misc_feature (21)..(293): NCBI GI NO: 30681957 NR Description: oxidoreductase -related [Arabidopsis thaliana]
  misc_feature (90)..(293): NCBI GI NO: 29150365 NR Description: putative oxidoreductase
  misc_feature (83)..(293): NCBI GI NO: 30689216 NR Description: oxidoreductase, 2OG-Fe(II) oxygenase family
  misc_feature (88)..(290): NCBI GI NO: 21537370 NR Description: putative prolyl 4-hydroxylase, alpha subunit
  misc_feature (91)..(293): NCBI GI NO: 28393447 NR Description: putative prolyl 4-hydroxylase
  misc_feature (88)..(290): NCBI GI NO: 18394842 NR Description: oxidoreductase, 2OG-Fe(II) oxygenase family
MKGGGAIRSGGGGGGGLMRTRLRLPVVLLSCSLFFLAGFLGSLLFTQDPQGEEDVERPLRRERLMEAVWPEMAYGESGEPTPSLIPYQILSWQPRALYFPQFATAEQCENVVKTAKARLRPSTLALRKGESEETTKGIRTSSGTFLSAEEDPTGALAEIETKIAKATMMPRSHGEPFNVLLYEIGQKYASHYDAFDPAQYGPQKSQRVASFLLYLTDVEEGGETMFPYENGDNMNIGYDYEQCIGLKVKPRKGDGLLFYSLMLNGTIDPTSLHGSCPVVKGEKWVATKWIRDRGSTS

SEQ ID NO: 17952 - protein, 280 aa, Triticum aestivum
  peptide (1)..(280): Ceres Seq. ID no. 14303655
  misc_feature (156)..(275): Pfam Name: II Pfam Description: 2OG-Fe
  misc_feature (1)..(276): NCBI GI NO: 14488368 NR Description: putative dioxygenase
  misc_feature (5)..(276): NCBI GI NO: 40809925 NR Description: prolyl 4-hydroxylase [Nicotiana tabacum]
  misc_feature (2)..(276): NCBI GI NO: 18418321 NR Description: oxidoreductase, 2OG-Fe(II) oxygenase family
  misc_feature (55)..(251): NCBI GI NO: 7485609 NR Description: hypothetical protein F17I5
  misc_feature (4)..(276): NCBI GI NO: 30681957 NR Description: oxidoreductase -related [Arabidopsis thaliana]
  misc_feature (73)..(276): NCBI GI NO: 29150365 NR Description: putative oxidoreductase
  misc_feature (66)..(276): NCBI GI NO: 30689216 NR Description: oxidoreductase, 2OG-Fe(II) oxygenase family
  misc_feature (71)..(273): NCBI GI NO: 21537370 NR Description: putative prolyl 4-hydroxylase, alpha subunit
  misc_feature (74)..(276): NCBI GI NO: 28393447 NR Description: putative prolyl 4-hydroxylase
  misc_feature (71)..(273): NCBI GI NO: 18394842 NR Description: oxidoreductase, 2OG-Fe(II) oxygenase family
MRTRLRLPVVLLSCSLFFLAGFLGSLLFTQDPQGEEDVERPLRRERLMEAVWPEMAYGESGEPTPSLIPYQILSWQPRALYFPQFATAEQCENVVKTAKARLRPSTLALRKGESEETTKGIRTSSGTFLSAEEDPTGALAEIETKIAKATMMPRSHGEPFNVLLYEIGQKYASHYDAFDPAQYGPQKSQRVASFLLYLTDVEEGGETMFPYENGDNMNIGYDYEQCIGLKVKPRKGDGLLFYSLMLNGTIDPTSLHGSCPVVKGEKWVATKWIRDRGSTS

SEQ ID NO: 17953 - DNA, 1389 bp, Triticum aestivum
  misc_feature (1)..(1389): Ceres Seq. ID no. 13663942
atacttctggctagtcaaactgtgatccctcgctcctccgcaccgccgccgccgctgcgatgtccaccgccgccgccgccgccggccgaggtctcaaatccgtctcccgcgccgccttctcctggaagccgacgggccgggcgcagcagacgctcgcggcggcggtgagcaggtcgggcgtgggactccactcgggcgcgcgcgccaccgccaggttgctccctgcgcgcgccggcgaggggaggtacttcgtcgtggaggaggcgagggtggcggcggaggcggggaatgccgagccacagtctccgctctgcaccacgctgcggagcgggagcggcggcgcgcgggtgcgcacggtggagcacctgctctcggccatggaggcgttcggtgtcgacaactgccgcgtcgaggtcagcggcggcgatgagatccctttgcttgatggatcagcgcaagagtgggtggaggccattcggggtgcaggtctgtgtgcggccgaggatatcggtggacagaagttggagaaactggcacccaagatcgacgagcctgtttacctgcgtaaggacgattgctttgtagctgcattcccttcctcgcaaatccacatcacctatggaattgattttccaaaggcgccagcgattggttgtcaatggttcaatactttcctggatgctgatatatactcaagcaagatagctcctgcaagaactttctgtatttttgaagaggttgaaaaaatgcgtgatgccgggcttataaaaggaggatcactggaaaatgctatggtttgcagtatgtctggtggttggcttaacccaccacttcgttttgatgatgaaccttgccgccacaagattttagatcttataggtgacttctcacttcttgcacggaatggcagccagggttttccaattgctcatgtagttgcctacaaggctggccatgccctgcacaccagtttcctacaccatttatcgggggagaccagtgtggaccaaggaacgcttgcttggtgatcttgaagcgtgtgcatgtggagcgggtactgttcatatgttggtgatagtgatgctcgacaggaagacggcagatttcagcatataccgtactaataaccatctgatggccctcgccctcactctgacagtcggaccggttgtactgtacatctcctccatctttggcaagtgatttctttagttcacgagccatatacagtatcattatcacatgctttggggagattgatccgaagaattatgtttgtacaccatgtgttatagttgtacctgaacacgtttcagtaaaaaaaaaaaaaaaaaagcttatcgataccgtcgactgtttaaacacaataaagttggaacgggagggggg

SEQ ID NO: 17954 - protein, 322 aa, Triticum aestivum
  peptide (1)..(322): Ceres Seq. ID no. 13663943
  misc_feature (29)..(314): Pfam Name: Pfam Description:  UDP-3-O-acyl N-acetylglycosamine deacetylase
  misc_feature (7)..(321): NCBI GI NO: 34902272 NR Description: Hypothetical protein
  misc_feature (7)..(247): NCBI GI NO: 35190846 NR Description: OJ1743A09.22
  misc_feature (14)..(310): NCBI GI NO: 26451306 NR Description: unknown protein [Arabidopsis thaliana]
  misc_feature (14)..(296): NCBI GI NO: 25518320 NR Description: hypothetical protein F4F7.1
  misc_feature (14)..(296): NCBI GI NO: 25518507 NR Description: hypothetical protein F4F7.4
  misc_feature (14)..(296): NCBI GI NO: 30689101 NR Description: expressed protein [Arabidopsis thaliana]
  misc_feature (14)..(296): NCBI GI NO: 15221839 NR Description: F5A9.8 [Arabidopsis thaliana]
  misc_feature (14)..(272): NCBI GI NO: 15221809 NR Description: F5A9.18 [Arabidopsis thaliana]
  misc_feature (29)..(302): NCBI GI NO: 17229762 NR Description: UDP-3-O-acyl N-acetylglucosamine deacetylase
  misc_feature (14)..(251): NCBI GI NO: 20453133 NR Description: At1g25190/F4F7_4 [Arabidopsis thaliana]
MSTAAAAAGRGLKSVSRAAFSWKPTGRAQQTLAAAVSRSGVGLHSGARATARLLPARAGEGRYFVVEEARVAAEAGNAEPQSPLCTTLRSGSGGARVRTVEHLLSAMEAFGVDNCRVEVSGGDEIPLLDGSAQEWVEAIRGAGLCAAEDIGGQKLEKLAPKIDEPVYLRKDDCFVAAFPSSQIHITYGIDFPKAPAIGCQWFNTFLDADIYSSKIAPARTFCIFEEVEKMRDAGLIKGGSLENAMVCSMSGGWLNPPLRFDDEPCRHKILDLIGDFSLLARNGSQGFPIAHVVAYKAGHALHTSFLHHLSGETSVDQGTLAW

SEQ ID NO: 17955 - protein, 216 aa, Triticum aestivum
  peptide (1)..(216): Ceres Seq. ID no. 13663944
  misc_feature (1)..(208): Pfam Name: Pfam Description:  UDP-3-O-acyl N-acetylglycosamine deacetylase
  misc_feature (1)..(215): NCBI GI NO: 34902272 NR Description: Hypothetical protein
  misc_feature (1)..(141): NCBI GI NO: 35190846 NR Description: OJ1743A09.22
  misc_feature (1)..(204): NCBI GI NO: 26451306 NR Description: unknown protein [Arabidopsis thaliana]
  misc_feature (1)..(190): NCBI GI NO: 25518320 NR Description: hypothetical protein F4F7.1
  misc_feature (1)..(190): NCBI GI NO: 25518507 NR Description: hypothetical protein F4F7.4
  misc_feature (1)..(190): NCBI GI NO: 30689101 NR Description: expressed protein [Arabidopsis thaliana]
  misc_feature (1)..(190): NCBI GI NO: 15221839 NR Description: F5A9.8 [Arabidopsis thaliana]
  misc_feature (1)..(166): NCBI GI NO: 15221809 NR Description: F5A9.18 [Arabidopsis thaliana]
  misc_feature (1)..(196): NCBI GI NO: 17229762 NR Description: UDP-3-O-acyl N-acetylglucosamine deacetylase
  misc_feature (1)..(145): NCBI GI NO: 20453133 NR Description: At1g25190/F4F7_4 [Arabidopsis thaliana]
MEAFGVDNCRVEVSGGDEIPLLDGSAQEWVEAIRGAGLCAAEDIGGQKLEKLAPKIDEPVYLRKDDCFVAAFPSSQIHITYGIDFPKAPAIGCQWFNTFLDADIYSSKIAPARTFCIFEEVEKMRDAGLIKGGSLENAMVCSMSGGWLNPPLRFDDEPCRHKILDLIGDFSLLARNGSQGFPIAHVVAYKAGHALHTSFLHHLSGETSVDQGTLAW

SEQ ID NO: 17956 - DNA, 1472 bp, Triticum aestivum
  misc_feature (1)..(1472): Ceres Seq. ID no. 13660172
  misc_feature (537)..(537): n is a, c, t, g, unknown, or other
cattcctatgatagtatcttttttctgaaataattgccagggtagtattggtttgatgcaaagtacaatcccttgatttgttgaagaatgttttttatattccctaacattcatttgcttggcaagatagagtcttgtccgaatgaagaagttcttctatgaagacaaagatttgatttgagaaaattagtttcgtgaagagaagataaagagagttgtattgggtagtccatgagaagattaaatgaagcgaagttcatttgaagtacttttgagacttttcaaacattgaggaacttgaagcgaatgattttacgaagatgctctttatgaggatcaccgtacttagtcattatacaagaaatttgtacaagaaacttggatactagggcctggacatgtagctgtgttttgcaacacttgcttccatgttgatggaaaatgtgtgtaagttgttgactgtgcgtcgtcaagattcatagagggcacactgcatttgaactgtgatggtaacatgagaggcccacacactctatngaatacttcttgccctcttttttgtctgttatcccattaatttcatttatcctactttgtctaatgaagtcgttatacgcagggagccccgagggtttgcatttgtggagtttgttgacccttatgatgcctctgatgcacaatatcacttgaaccacacagtattttttggccgagagataactgttgttgttgctgccgagtcacggaaaaggccagatgatatgcgtaatagggctagaatcagggggtattctggtgaacctgaaaggcgtcattcccgttatgggaggtctcgttcccgttcatgttcctactctcctcgctatcggggccgtcctcggtcaaggtcaaggtcaaggtcatactctcctgctccaagacggcgagatgactactctgcttccccgccaagatcacatcacacacagtctcctaggcgtctgccaaaagaacatgaagaagacgagcggagatcctattctcctgctggtagaggtggcggcgagcgtgatgccaatactaatggaaagaggtcaccaccatctgacattgatggatcacctccacgcatccggaggtcacccaggcaatcctcaggatcacccgtggggtcgcgctcaaggtcccctgaagcttctcctgcccgcagcgactgatgaaattggtgcctcccatattgccgcgtctcccacagcggcgcggccatgtactctatctctagcttcattgtctgagtaaaacccatctgggatgtgttggctagtgttgcggtgcctctttagttagcagatatgactggttggctgttcttttgctgcttggtgttgttgaaccttgtaccatggtagtgttttaatgtgaactgagccacaactgagccacaattgtgtttggatttgtgattttaaatgcattttgaatgcctttaactt

SEQ ID NO: 17957 - protein, 173 aa, Triticum aestivum
  peptide (1)..(173): Ceres Seq. ID no. 13660173
MICVIGLESGGILVNLKGVIPVMGGLVPVHVPTLLAIGAVLGQGQGQGHTLLLQDGEMTTLLPRQDHITHSLLGVCQKNMKKTSGDPILLLVEVAASVMPILMERGHHHLTLMDHLHASGGHPGNPQDHPWGRAQGPLKLLLPAATDEIGASHIAASPTAARPCTLSLASLSE

SEQ ID NO: 17958 - protein, 151 aa, Triticum aestivum
  peptide (1)..(151): Ceres Seq. ID no. 13660174
MGGLVPVHVPTLLAIGAVLGQGQGQGHTLLLQDGEMTTLLPRQDHITHSLLGVCQKNMKKTSGDPILLLVEVAASVMPILMERGHHHLTLMDHLHASGGHPGNPQDHPWGRAQGPLKLLLPAATDEIGASHIAASPTAARPCTLSLASLSE

SEQ ID NO: 17959 - protein, 144 aa, Triticum aestivum
  peptide (1)..(144): Ceres Seq. ID no. 13660175
  misc_feature (1)..(144): NCBI GI NO: 32352198 NR Description: pre-mRNA splicing factor
  misc_feature (1)..(140): NCBI GI NO: 9843657 NR Description: SC35-like splicing factor SCL30, 30 kD
  misc_feature (1)..(140): NCBI GI NO: 18410283 NR Description: arginine/serine-rich protein SCL30
  misc_feature (1)..(88): NCBI GI NO: 31249706 NR Description: putative splicing factor
  misc_feature (1)..(143): NCBI GI NO: 11358835 NR Description: serine/arginine-rich protein
  misc_feature (1)..(144): NCBI GI NO: 15293081 NR Description: unknown protein [Arabidopsis thaliana]
  misc_feature (1)..(143): NCBI GI NO: 11358671 NR Description: probable RNA binding protein - Arabidopsis thaliana
  misc_feature (1)..(135): NCBI GI NO: 9843661 NR Description: SC35-like splicing factor SCL30a, 30a kD
  misc_feature (1)..(135): NCBI GI NO: 15231285 NR Description: arginine/serine-rich splicing factor SCL30a
  misc_feature (1)..(92): NCBI GI NO: 18405316 NR Description: arginine/serine-rich protein
MRNRARIRGYSGEPERRHSRYGRSRSRSCSYSPRYRGRPRSRSRSRSYSPAPRRRDDYSASPPRSHHTQSPRRLPKEHEEDERRSYSPAGRGGGERDANTNGKRSPPSDIDGSPPRIRRSPRQSSGSPVGSRSRSPEASPARSD

SEQ ID NO: 17960 - DNA, 1734 bp, Triticum aestivum
  misc_feature (1)..(1734): Ceres Seq. ID no. 14303539
acggtttccaccagatgtgtactcgtgcggtgtgtgcccgcgcacttctggcagcactgcgcacagcgcacgtagagcgtcgttcatcggcacatcaacttttcatggctctgtatgtctccggaatctaccatggcacactgtcacagaagatcaacatcctctgattgcccgatccagcgtgccagcaaaagagcaaagcgtcatcctaggtacaggcgtacagccattagccagacaccactccttgcttccagttccaccccgcgctcgtagaagcacctcccaacggagaccgatggccgctgctaagccagcctgctccgctcccgccaattccgccgacgcagccaaaccggcggcggcgccagaacccgagcagcagctgctggaggtggcggaggaggaggtggtcgtctacttcaagcccaacgccaagtgccgcgtcgacctccgcctccgctcgctgcacccgacgctccccgtcgccttcaaggtgcagacctcctccccgctcaagttcctcgtcagcccgccgcgcggcgccctgcagccgctctccacggccaccatccgcgtcgtgctccgcccgcagccgcacgcgccgccgtccttcccgcgctcccgcgccgaccgcttcctcgtcctctcctccctctccgccgcgcacctcgactccgcggcctccgtgcccggcggcgccggcgtcggcatcggcgccatccgcctccgcgtgttcttcggcgggccctacctgctccgcctcgccgcggacgccggggactccgcggccgtgcgcctcatcctgcgccggcagccgcacctcctgccggttctcgaccccgaggcggccgtgccggacgccgagccgtgggcgccgctgcacgcggctgccgcgcggggcgactgcggagaggtgaggaggctggggcaggaggcgctcgcggcgcgcgacaaggacggcaggacggctctgcacgttgcggccgccgccggggaagcagaggccgtggcagagctggtggacatgggcgccgactccgccgcggccgacgcgcgcgggcggactccgctggacgtggcacgagagaagggctacaaggaggtggtggacgtgctgcagcggtgggagcaggtgatgacggcggcgaggcggggcgacctccggagcctggagttcctcctcagcaagcgcacgggcctccgcggccgcgaccagtacgggctgacggcgctccacgtggccgccatcaagggccactgcgacgccatcgccctgctggcggggtcggggtgcatggacgtggagtgcgaggacgtggaagggcaccggccgctgcacctcgccgtcgagggcggctgcgccgacgccgtcgacctgctgctcgacatgggcgccgacgcccacgccaggaccaagcggggcgccacgccgctccagatggccgacaccatgggctatgacgacatctcgaagctgctgcgcgcccggggcgccgacgaggcggcggcggcggcggcggcaggtgacgcgcagctgtgcatcgcgtcgtcgtcttcctcgtcgatatcctgtgcataaggcctggtttgcgtctcccattcagagttgatcgcaaagacaatgttaatactgcactgtataggtgacagaagtgattactgttttttttctgtggctgttgatatggacttaacaataagatgggactttgcgttcccctgagcagttct

SEQ ID NO: 17961 - protein, 526 aa, Triticum aestivum
  peptide (1)..(526): Ceres Seq. ID no. 14303540
  misc_feature (441)..(473): Pfam Name: Pfam Description:  Ankyrin repeat
  misc_feature (100)..(526): NCBI GI NO: 34907942 NR Description: B1088C09.19
  misc_feature (297)..(500): NCBI GI NO: 18312929 NR Description: hypothetical protein with 4 ankyrin repeats
  misc_feature (250)..(525): NCBI GI NO: 29244412 NR Description: hypothetical protein A130096K20 [Mus musculus]
  misc_feature (256)..(498): NCBI GI NO: 23055190 NR Description: hypothetical protein [Geobacter metallireducens]
  misc_feature (321)..(495): NCBI GI NO: 28274852 NR Description: ankyrin repeat protein E4_2 [synthetic construct]
  misc_feature (321)..(495): NCBI GI NO: 28274854 NR Description: ankyrin repeat protein E4_8 [synthetic construct]
  misc_feature (294)..(509): NCBI GI NO: 34883007 NR Description: similar to ankyrin 3, epithelial isoform b
  misc_feature (293)..(500): NCBI GI NO: 27461955 NR Description: tankyrase 1 [Gallus gallus]
  misc_feature (293)..(499): NCBI GI NO: 27461955 NR Description: tankyrase 1 [Gallus gallus]
  misc_feature (382)..(499): NCBI GI NO: 28373837 NR Description: Chain A
RFPPDVYSCGVCPRTSGSTAHSARRASFIGTSTFHGSVCLRNLPWHTVTEDQHPLIARSSVPAKEQSVILGTGVQPLARHHSLLPVPPRARRSTSQRRPMAAAKPACSAPANSADAAKPAAAPEPEQQLLEVAEEEVVVYFKPNAKCRVDLRLRSLHPTLPVAFKVQTSSPLKFLVSPPRGALQPLSTATIRVVLRPQPHAPPSFPRSRADRFLVLSSLSAAHLDSAASVPGGAGVGIGAIRLRVFFGGPYLLRLAADAGDSAAVRLILRRQPHLLPVLDPEAAVPDAEPWAPLHAAAARGDCGEVRRLGQEALAARDKDGRTALHVAAAAGEAEAVAELVDMGADSAAADARGRTPLDVAREKGYKEVVDVLQRWEQVMTAARRGDLRSLEFLLSKRTGLRGRDQYGLTALHVAAIKGHCDAIALLAGSGCMDVECEDVEGHRPLHLAVEGGCADAVDLLLDMGADAHARTKRGATPLQMADTMGYDDISKLLRARGADEAAAAAAAGDAQLCIASSSSSSISCA

SEQ ID NO: 17962 - protein, 427 aa, Triticum aestivum
  peptide (1)..(427): Ceres Seq. ID no. 14303541
  misc_feature (342)..(374): Pfam Name: Pfam Description:  Ankyrin repeat
  misc_feature (1)..(427): NCBI GI NO: 34907942 NR Description: B1088C09.19
  misc_feature (198)..(401): NCBI GI NO: 18312929 NR Description: hypothetical protein with 4 ankyrin repeats
  misc_feature (151)..(426): NCBI GI NO: 29244412 NR Description: hypothetical protein A130096K20 [Mus musculus]
  misc_feature (157)..(399): NCBI GI NO: 23055190 NR Description: hypothetical protein [Geobacter metallireducens]
  misc_feature (222)..(396): NCBI GI NO: 28274852 NR Description: ankyrin repeat protein E4_2 [synthetic construct]
  misc_feature (222)..(396): NCBI GI NO: 28274854 NR Description: ankyrin repeat protein E4_8 [synthetic construct]
  misc_feature (195)..(410): NCBI GI NO: 34883007 NR Description: similar to ankyrin 3, epithelial isoform b
  misc_feature (194)..(401): NCBI GI NO: 27461955 NR Description: tankyrase 1 [Gallus gallus]
  misc_feature (194)..(400): NCBI GI NO: 27461955 NR Description: tankyrase 1 [Gallus gallus]
  misc_feature (283)..(400): NCBI GI NO: 28373837 NR Description: Chain A
MAAAKPACSAPANSADAAKPAAAPEPEQQLLEVAEEEVVVYFKPNAKCRVDLRLRSLHPTLPVAFKVQTSSPLKFLVSPPRGALQPLSTATIRVVLRPQPHAPPSFPRSRADRFLVLSSLSAAHLDSAASVPGGAGVGIGAIRLRVFFGGPYLLRLAADAGDSAAVRLILRRQPHLLPVLDPEAAVPDAEPWAPLHAAAARGDCGEVRRLGQEALAARDKDGRTALHVAAAAGEAEAVAELVDMGADSAAADARGRTPLDVAREKGYKEVVDVLQRWEQVMTAARRGDLRSLEFLLSKRTGLRGRDQYGLTALHVAAIKGHCDAIALLAGSGCMDVECEDVEGHRPLHLAVEGGCADAVDLLLDMGADAHARTKRGATPLQMADTMGYDDISKLLRARGADEAAAAAAAGDAQLCIASSSSSSISCA

SEQ ID NO: 17963 - DNA, 1909 bp, Triticum aestivum
  misc_feature (1)..(1909): Ceres Seq. ID no. 13500385
agaacatcctaatcgaaaaatccacagcaacagcttcctcttcctcctcagacccaccctcgctacctcctagctgcatctgctgctaagctccgcctccacccgcgcgctgtctgctagctcgtcgcgttgaaggtcgttcaggagcattttgaaggttgaaagtaaccttcggctgttggaagatgtatcgggccaagagagccgcattgtcaccaaaggtgaagcgccgtgtcggcaagtatgagctcggccgcaccatcggggaagggacctttgcaaaggtcaggttcgcaaagaacactgaaactatggagcctgttgctatcaaaatcctcgacaaggagaaggttcagaagctcagattggttgaacagattaggcgcgaaatttgtactatgaagttaataaagcatcctaatgttgttcgactgcacgaggtgatgggaagtaaagcaagaattttcattgttctggaatacattactggaggggaactctttgataccatttataccaatggaaggttgaaagaagaggaggcacgcaaatactttcagcaactgataaatgccgttgactattgccacagcaggggtgtgtatcacagagatttgaagttagaaaatttgttgcttgatgctgctggaaacctcaaagtgtccgacttcggtttaagtgctttaactgagcaagtgaaggctgacgggttgctgcacacaacatgcgggactccgaactatgttgctcctgaggtgattgaggatagaggttatgatggtgcagctgcagatatctggtcttgcggggtaatcctttttattctgcttgccgggtttttacctttcgaggatgaaaacatcatcgccctttataagaagatctcagaagctcaattcacatgtccctcttggttttctactggagctaagaagctgatcaccagaattctggaccctaatcctgcaactcgtatcaccattcctcagatactggaggatccttggttcaaaaagggattcaagccacctgtttttgacgataagtatgaaactagctttgatgatgtctatgctgcatttggagactcagaggaccagcatgtgaaagaggagactgaacataagccaacctcaatgaatgcatttgaactgatttcactgaatcagggactgaatctggacaacttgttcgaggcaaaggaggagcataaaagagagacacgattcacctcgcaatgccctccaaaagaaatcatcagcaagattgcagaagctgcaaggccacttggttttgacattcagaagaaaaactacaagatgcggatggagaacccgaaagcaggtagaaaaggcaatctcaatgttgcaaccgaggtgtttcaagtagctccatccctacatgtggttgagctgaaaaaggcgaagggggatactctggaatttcaaatgttctacagatctctgtcgacccagctcaaggacgtagtttggaagtgcggcggcgaggtagaagataacggcaccgcggcatgaagcacgttttccatgtacatagtccctactgtagttcatatgtgggatggatggcgggtgggctgcggaatgggttgtgcagatcgagttctttcgttggtttgttaatgatgatgatgatgatgaataggctccgatgaaacagcgggcgcgcagcccactgtggaagagcctatctatggcttcgttagtttgcttattattacatattcatggtccagagggagattaaagctagaggcgaaaggccgattgttgtaagattgtattggtaggaggttatattgaacagcgcaatgtgttgaactttgttctctactctacttagcattgtactgtagctatagccggaataataaataaataaaccgctg

SEQ ID NO: 17964 - protein, 449 aa, Triticum aestivum
  peptide (1)..(449): Ceres Seq. ID no. 13500386
  misc_feature (20)..(275): Pfam Name: Pfam Description:  Protein kinase domain
  misc_feature (1)..(444): NCBI GI NO: 22324433 NR Description: putative serine/threonine kinase
  misc_feature (12)..(437): NCBI GI NO: 7446372 NR Description: probable serine/threonine kinase (EC 2
  misc_feature (12)..(437): NCBI GI NO: 7446371 NR Description: probable serine/threonine kinase (EC 2
  misc_feature (12)..(436): NCBI GI NO: 30683336 NR Description: CBL-interacting protein kinase 3
  misc_feature (11)..(439): NCBI GI NO: 30688193 NR Description: NAF specific protein kinase family
  misc_feature (14)..(447): NCBI GI NO: 18397430 NR Description: CBL-interacting protein kinase 23
  misc_feature (16)..(437): NCBI GI NO: 34902248 NR Description: Putative serine/threonine kinase
  misc_feature (14)..(447): NCBI GI NO: 25387051 NR Description: probable serine/threonine kinase
  misc_feature (1)..(444): NCBI GI NO: 15223317 NR Description: CBL-interacting protein kinase 9
  misc_feature (1)..(444): NCBI GI NO: 14423524 NR Description: similar to wpk4 protein kinase
MYRAKRAALSPKVKRRVGKYELGRTIGEGTFAKVRFAKNTETMEPVAIKILDKEKVQKLRLVEQIRREICTMKLIKHPNVVRLHEVMGSKARIFIVLEYITGGELFDTIYTNGRLKEEEARKYFQQLINAVDYCHSRGVYHRDLKLENLLLDAAGNLKVSDFGLSALTEQVKADGLLHTTCGTPNYVAPEVIEDRGYDGAAADIWSCGVILFILLAGFLPFEDENIIALYKKISEAQFTCPSWFSTGAKKLITRILDPNPATRITIPQILEDPWFKKGFKPPVFDDKYETSFDDVYAAFGDSEDQHVKEETEHKPTSMNAFELISLNQGLNLDNLFEAKEEHKRETRFTSQCPPKEIISKIAEAARPLGFDIQKKNYKMRMENPKAGRKGNLNVATEVFQVAPSLHVVELKKAKGDTLEFQMFYRSLSTQLKDVVWKCGGEVEDNGTAA

SEQ ID NO: 17965 - protein, 407 aa, Triticum aestivum
  peptide (1)..(407): Ceres Seq. ID no. 13500387
  misc_feature (1)..(233): Pfam Name: Pfam Description:  Protein kinase domain
  misc_feature (1)..(402): NCBI GI NO: 22324433 NR Description: putative serine/threonine kinase
  misc_feature (1)..(395): NCBI GI NO: 7446372 NR Description: probable serine/threonine kinase (EC 2
  misc_feature (1)..(395): NCBI GI NO: 7446371 NR Description: probable serine/threonine kinase (EC 2
  misc_feature (1)..(394): NCBI GI NO: 30683336 NR Description: CBL-interacting protein kinase 3
  misc_feature (1)..(397): NCBI GI NO: 30688193 NR Description: NAF specific protein kinase family
  misc_feature (1)..(405): NCBI GI NO: 18397430 NR Description: CBL-interacting protein kinase 23
  misc_feature (1)..(395): NCBI GI NO: 34902248 NR Description: Putative serine/threonine kinase
  misc_feature (1)..(405): NCBI GI NO: 25387051 NR Description: probable serine/threonine kinase
  misc_feature (1)..(402): NCBI GI NO: 15223317 NR Description: CBL-interacting protein kinase 9
  misc_feature (1)..(402): NCBI GI NO: 14423524 NR Description: similar to wpk4 protein kinase
MEPVAIKILDKEKVQKLRLVEQIRREICTMKLIKHPNVVRLHEVMGSKARIFIVLEYITGGELFDTIYTNGRLKEEEARKYFQQLINAVDYCHSRGVYHRDLKLENLLLDAAGNLKVSDFGLSALTEQVKADGLLHTTCGTPNYVAPEVIEDRGYDGAAADIWSCGVILFILLAGFLPFEDENIIALYKKISEAQFTCPSWFSTGAKKLITRILDPNPATRITIPQILEDPWFKKGFKPPVFDDKYETSFDDVYAAFGDSEDQHVKEETEHKPTSMNAFELISLNQGLNLDNLFEAKEEHKRETRFTSQCPPKEIISKIAEAARPLGFDIQKKNYKMRMENPKAGRKGNLNVATEVFQVAPSLHVVELKKAKGDTLEFQMFYRSLSTQLKDVVWKCGGEVEDNGTAA

SEQ ID NO: 17966 - protein, 378 aa, Triticum aestivum
  peptide (1)..(378): Ceres Seq. ID no. 13500388
  misc_feature (1)..(204): Pfam Name: Pfam Description:  Protein kinase domain
  misc_feature (1)..(373): NCBI GI NO: 22324433 NR Description: putative serine/threonine kinase
  misc_feature (1)..(366): NCBI GI NO: 7446372 NR Description: probable serine/threonine kinase (EC 2
  misc_feature (1)..(366): NCBI GI NO: 7446371 NR Description: probable serine/threonine kinase (EC 2
  misc_feature (1)..(365): NCBI GI NO: 30683336 NR Description: CBL-interacting protein kinase 3
  misc_feature (1)..(368): NCBI GI NO: 30688193 NR Description: NAF specific protein kinase family
  misc_feature (1)..(376): NCBI GI NO: 18397430 NR Description: CBL-interacting protein kinase 23
  misc_feature (1)..(366): NCBI GI NO: 34902248 NR Description: Putative serine/threonine kinase
  misc_feature (1)..(376): NCBI GI NO: 25387051 NR Description: probable serine/threonine kinase
  misc_feature (1)..(373): NCBI GI NO: 15223317 NR Description: CBL-interacting protein kinase 9
  misc_feature (1)..(373): NCBI GI NO: 14423524 NR Description: similar to wpk4 protein kinase
MKLIKHPNVVRLHEVMGSKARIFIVLEYITGGELFDTIYTNGRLKEEEARKYFQQLINAVDYCHSRGVYHRDLKLENLLLDAAGNLKVSDFGLSALTEQVKADGLLHTTCGTPNYVAPEVIEDRGYDGAAADIWSCGVILFILLAGFLPFEDENIIALYKKISEAQFTCPSWFSTGAKKLITRILDPNPATRITIPQILEDPWFKKGFKPPVFDDKYETSFDDVYAAFGDSEDQHVKEETEHKPTSMNAFELISLNQGLNLDNLFEAKEEHKRETRFTSQCPPKEIISKIAEAARPLGFDIQKKNYKMRMENPKAGRKGNLNVATEVFQVAPSLHVVELKKAKGDTLEFQMFYRSLSTQLKDVVWKCGGEVEDNGTAA

SEQ ID NO: 17967 - DNA, 622 bp, Triticum aestivum
  misc_feature (1)..(622): Ceres Seq. ID no. 13660351
tcggtatagcagctcccgtccactaccttgctcctcgccgcaatccccacattcatagcgagaatccccaaatcccaaccctgactgacgaccggcggatctgttccggcgcctcctcccgccgtcgaccatggcgtcttccaactccggcggcatccccatcaatgtggaacaggattcggacggctcggcccagagcacagctgatatgactgcttttgtgcaaaatcttctagttcagatgcaaaccaggttccaaactatgtcagagaacatcattacaaagatagatgaaatgggtgcaagaatcgatgaattggagttgagcataaatgacctcaaggctgaaatgggcagcgatggtatgacccctactaaagtgaaggacgaagaatcaaagccagcagacagctctgcctgagtcaagcagaagtagcagaagcaagtcgtattagtcttgggttcatgtcaatatcatcagccattcatcactaacttcatgcatgttatgagatgttattcgcactgttatatgcatttgagatatgcagtacctttcgatgagagatttctctgtacgcattgatgcttgctgagtggtctgctataaattttagtactc

SEQ ID NO: 17968 - protein, 96 aa, Triticum aestivum
  peptide (1)..(96): Ceres Seq. ID no. 13660352
  misc_feature (4)..(96): NCBI GI NO: 11862947 NR Description: hypothetical protein
  misc_feature (4)..(96): NCBI GI NO: 32352188 NR Description: hypothetical protein
  misc_feature (1)..(96): NCBI GI NO: 38349095 NR Description: heat shock factor binding protein 2 [Zea mays]
  misc_feature (4)..(96): NCBI GI NO: 34898646 NR Description: contains ESTs C73279
  misc_feature (16)..(95): NCBI GI NO: 20257532 NR Description: heat shock factor-binding protein 1 [Zea mays]
  misc_feature (16)..(95): NCBI GI NO: 26453171 NR Description: unknown protein [Arabidopsis thaliana]
  misc_feature (16)..(59): NCBI GI NO: 30683411 NR Description: expressed protein [Arabidopsis thaliana]
  misc_feature (12)..(83): NCBI GI NO: 24583901 NR Description: CG5446-PA [Drosophila melanogaster]
  misc_feature (12)..(83): NCBI GI NO: 30523296 NR Description: HSBP1-like protein [Drosophila yakuba]
  misc_feature (16)..(83): NCBI GI NO: 30523300 NR Description: HSBP1-like protein [Drosophila simulans]
MASSNSGGIPINVEQDSDGSAQSTADMTAFVQNLLVQMQTRFQTMSENIITKIDEMGARIDELELSINDLKAEMGSDGMTPTKVKDEESKPADSSA

SEQ ID NO: 17969 - protein, 70 aa, Triticum aestivum
  peptide (1)..(70): Ceres Seq. ID no. 13660353
  misc_feature (1)..(70): NCBI GI NO: 11862947 NR Description: hypothetical protein
  misc_feature (1)..(70): NCBI GI NO: 32352188 NR Description: hypothetical protein
  misc_feature (1)..(70): NCBI GI NO: 38349095 NR Description: heat shock factor binding protein 2 [Zea mays]
  misc_feature (1)..(70): NCBI GI NO: 34898646 NR Description: contains ESTs C73279
  misc_feature (1)..(69): NCBI GI NO: 20257532 NR Description: heat shock factor-binding protein 1 [Zea mays]
  misc_feature (1)..(69): NCBI GI NO: 26453171 NR Description: unknown protein [Arabidopsis thaliana]
  misc_feature (1)..(33): NCBI GI NO: 30683411 NR Description: expressed protein [Arabidopsis thaliana]
  misc_feature (1)..(57): NCBI GI NO: 24583901 NR Description: CG5446-PA [Drosophila melanogaster]
  misc_feature (1)..(57): NCBI GI NO: 30523296 NR Description: HSBP1-like protein [Drosophila yakuba]
  misc_feature (1)..(57): NCBI GI NO: 30523300 NR Description: HSBP1-like protein [Drosophila simulans]
MTAFVQNLLVQMQTRFQTMSENIITKIDEMGARIDELELSINDLKAEMGSDGMTPTKVKDEESKPADSSA

SEQ ID NO: 17970 - protein, 69 aa, Triticum aestivum
  peptide (1)..(69): Ceres Seq. ID no. 13660354
GIAAPVHYLAPRRNPHIHSENPQIPTLTDDRRICSGASSRRRPWRLPTPAASPSMWNRIRTARPRAQLI

SEQ ID NO: 17971 - DNA, 987 bp, Triticum aestivum
  misc_feature (1)..(987): Ceres Seq. ID no. 13660598
atgcgcagaccgtgggtgggaggcccacgcgtctgtgagattacgtgatatttcggccaagaatccacctacgcgtagttctgccgcacgttacgtggataaaaaggcaggaccgttcggggggcgaagaattgcgcacagcaaccaaccgtgtcagggaaggaattgaggcgagcgagagagaaccccacatcacatggcgaacggcgtgggctcggcgaaggcggagatctgcgccgggctgggcatgccgatggcggagctggagcaggtgttccggcgctacgacgccaacggcgacggcaagatctcggcggacgagctggcgtccgtgctgctcgcgctgggcgcgcccccgggggccaggggaggtgcagagcatgatggaggagatggacgccgacagggacggcttcgtcgacctccacgagttcgccgccttccactgcgggccctgcaagggcggcgcggccgcagacgccaaggagcaggaggccgccacggaggcggagctcaaggaggccttccggatgtacgacgccgaccgcaacgggctcatctccgcgcgggagcttcaccgcgtgctccgccagctcggggagaagtgctccgttgctgactgctcgcgcatgattcgatccgtcgacgccgacggcgacggcagcgtcaacttcgaggaattcaagaagatgatgggcggcggagggaggagctaggtcggtaagggccggccatgagcaaacaatgctgcatctgcatgcctcgttgagggttttgttcctccatggtgcttaatttaatttaattaatctcaaagtgaaaggcttaggctccccgtaatgcgaatactaatgatgatgcgggtgaagtgattaattatgtaaatctaatcttctagtagtagtagtactactaatgatgatgggtgtactaagaaatttggtctggggttgtttgcaatgaattagaactcgtttgaaactcttc

SEQ ID NO: 17972 - protein, 140 aa, Triticum aestivum
  peptide (1)..(140): Ceres Seq. ID no. 13660599
  misc_feature (6)..(140): NCBI GI NO: 29367367 NR Description: calmodulin-related protein
  misc_feature (21)..(61): NCBI GI NO: 34895640 NR Description: OSJNBa0083M16.33
  misc_feature (20)..(50): NCBI GI NO: 15240340 NR Description: calmodulin-related protein 2, touch-induced (TCH2)
  misc_feature (20)..(52): NCBI GI NO: 14589311 NR Description: calcium binding protein [Sesbania rostrata]
  misc_feature (22)..(52): NCBI GI NO: 6901654 NR Description: calcium-binding protein [Olea europaea]
  misc_feature (22)..(52): NCBI GI NO: 14423648 NR Description: Calcium-binding allergen Ole e 8 (PCA18/PCA23)
  misc_feature (20)..(50): NCBI GI NO: 18408502 NR Description: calmodulin-related protein, putative
  misc_feature (25)..(51): NCBI GI NO: 13397927 NR Description: putative calmodulin-related protein
  misc_feature (20)..(50): NCBI GI NO: 21618074 NR Description: calmodulin-related protein [Arabidopsis thaliana]
  misc_feature (22)..(51): NCBI GI NO: 15221030 NR Description: calcium-binding protein, putative
MANGVGSAKAEICAGLGMPMAELEQVFRRYDANGDGKISADELASVLLALGAPPGARGGAEHDGGDGRRQGRLRRPPRVRRLPLRALQGRRGRRRQGAGGRHGGGAQGGLPDVRRRPQRAHLRAGASPRAPPARGEVLRC

SEQ ID NO: 17973 - protein, 123 aa, Triticum aestivum
  peptide (1)..(123): Ceres Seq. ID no. 13660600
  misc_feature (1)..(123): NCBI GI NO: 29367367 NR Description: calmodulin-related protein
  misc_feature (4)..(44): NCBI GI NO: 34895640 NR Description: OSJNBa0083M16.33
  misc_feature (3)..(33): NCBI GI NO: 15240340 NR Description: calmodulin-related protein 2, touch-induced (TCH2)
  misc_feature (3)..(35): NCBI GI NO: 14589311 NR Description: calcium binding protein [Sesbania rostrata]
  misc_feature (5)..(35): NCBI GI NO: 6901654 NR Description: calcium-binding protein [Olea europaea]
  misc_feature (5)..(35): NCBI GI NO: 14423648 NR Description: Calcium-binding allergen Ole e 8 (PCA18/PCA23)
  misc_feature (3)..(33): NCBI GI NO: 18408502 NR Description: calmodulin-related protein, putative
  misc_feature (8)..(34): NCBI GI NO: 13397927 NR Description: putative calmodulin-related protein
  misc_feature (3)..(33): NCBI GI NO: 21618074 NR Description: calmodulin-related protein [Arabidopsis thaliana]
  misc_feature (5)..(34): NCBI GI NO: 15221030 NR Description: calcium-binding protein, putative
MPMAELEQVFRRYDANGDGKISADELASVLLALGAPPGARGGAEHDGGDGRRQGRLRRPPRVRRLPLRALQGRRGRRRQGAGGRHGGGAQGGLPDVRRRPQRAHLRAGASPRAPPARGEVLRC

SEQ ID NO: 17974 - protein, 121 aa, Triticum aestivum
  peptide (1)..(121): Ceres Seq. ID no. 13660601
  misc_feature (1)..(121): NCBI GI NO: 29367367 NR Description: calmodulin-related protein
  misc_feature (2)..(42): NCBI GI NO: 34895640 NR Description: OSJNBa0083M16.33
  misc_feature (1)..(31): NCBI GI NO: 15240340 NR Description: calmodulin-related protein 2, touch-induced (TCH2)
  misc_feature (1)..(33): NCBI GI NO: 14589311 NR Description: calcium binding protein [Sesbania rostrata]
  misc_feature (3)..(33): NCBI GI NO: 6901654 NR Description: calcium-binding protein [Olea europaea]
  misc_feature (3)..(33): NCBI GI NO: 14423648 NR Description: Calcium-binding allergen Ole e 8 (PCA18/PCA23)
  misc_feature (1)..(31): NCBI GI NO: 18408502 NR Description: calmodulin-related protein, putative
  misc_feature (6)..(32): NCBI GI NO: 13397927 NR Description: putative calmodulin-related protein
  misc_feature (1)..(31): NCBI GI NO: 21618074 NR Description: calmodulin-related protein [Arabidopsis thaliana]
  misc_feature (3)..(32): NCBI GI NO: 15221030 NR Description: calcium-binding protein, putative
MAELEQVFRRYDANGDGKISADELASVLLALGAPPGARGGAEHDGGDGRRQGRLRRPPRVRRLPLRALQGRRGRRRQGAGGRHGGGAQGGLPDVRRRPQRAHLRAGASPRAPPARGEVLRC

SEQ ID NO: 17975 - protein, 111 aa, Triticum aestivum
  peptide (1)..(111): Ceres Seq. ID no. 13660602
  misc_feature (80)..(108): Pfam Name: Pfam Description:  EF hand
  misc_feature (1)..(105): NCBI GI NO: 34895640 NR Description: OSJNBa0083M16.33
  misc_feature (1)..(109): NCBI GI NO: 15240340 NR Description: calmodulin-related protein 2, touch-induced (TCH2)
  misc_feature (1)..(105): NCBI GI NO: 6901654 NR Description: calcium-binding protein [Olea europaea]
  misc_feature (1)..(105): NCBI GI NO: 14589311 NR Description: calcium binding protein [Sesbania rostrata]
  misc_feature (1)..(105): NCBI GI NO: 14423648 NR Description: Calcium-binding allergen Ole e 8 (PCA18/PCA23)
  misc_feature (1)..(105): NCBI GI NO: 13397927 NR Description: putative calmodulin-related protein
  misc_feature (1)..(105): NCBI GI NO: 18408502 NR Description: calmodulin-related protein, putative
  misc_feature (1)..(105): NCBI GI NO: 21618074 NR Description: calmodulin-related protein [Arabidopsis thaliana]
  misc_feature (1)..(105): NCBI GI NO: 15221030 NR Description: calcium-binding protein, putative
  misc_feature (1)..(110): NCBI GI NO: 15221781 NR Description: polcalcin
MMEEMDADRDGFVDLHEFAAFHCGPCKGGAAADAKEQEAATEAELKEAFRMYDADRNGLISARELHRVLRQLGEKCSVADCSRMIRSVDADGDGSVNFEEFKKMMGGGGRS

SEQ ID NO: 17976 - DNA, 1729 bp, Triticum aestivum
  misc_feature (1)..(1729): Ceres Seq. ID no. 13579945
gtccatcacccatcagttcctcccccctttgtctcatcccagttcctccccccaccaagaacctagggttagggttagggaggcggcggctgctttattcccgatcccgcccgatcgccatggtcatcgcaggcgagccagagccggaggaggtggccgtcatgttctccgataggttgagggcggaggaggagaccgtcgtcttccccggctgggtgatgctggatcgcatcggccgcacccactgcgacggcgacctaggagctgctcgtgaggctgtcaacgggaacaagaccgccgttcaagtcgagatggacagcggccactccttctacgtgtccttcaccctcgcgcctcctccacaaggggcctcttaccttgatctccactggccgctggaaggctcagccaaatccgtgcccccctacaagcagcctgcctatcccttcgtccgggcaatcgacaaggacctcgtcctcttccacatctccatcccgagcctgcctcaccgcaacttcgtcccgccagatctgttcgtctacaatgccgctggtcaccccccctcggtgcagcagctccctctgtacaggagaaggtcattcctcagggttaacttcaccacaggcatcctgcggcgccaaaacggcagctacatcgtttccgacctcaatgtctacccaaaaaaggagggcactggtaataattccatgtgcgccgaactctgcgtcttcaactccaatacacgggcgtggagcttcttcagcaaggatgctccgcagccccaggaccagagcaatggccagttccccaccctctggtcaaccgaccatgtgcttgcttttgacggccgtttcctgtgctgggttgactacttcagcggtgtcctgctatccgacttctccaatctgcgctcccgggtgctccacttcgtccctttccctggagaaggagagtaccctgctaaggtacgggttcaaaggtgcttcccagacagattccgaagcgtgtccatcagcaacggcaagatgtgcttcgtccacattgacaatgacttccatgagagaatccacactggctcgcaagggcagcagcctcgcaaaaaaatcaccatttggactttgaacatgatggatggtaactccaggttcaagtgggagccacatcatgtgatcgacctggatcgtctttggctgacacctagtgtacctcggcgtcttcctgagtatccaatcatcgcccccaataacccggatgttctgtactgcctgttaaggaagcaggaatttcatggtgaggcctccatgatcatggttgacatgaaccctgcatctccgtggttgtgtactccatatatcaatcggcggtctgtgcatgtgaaagatcacaaaagcgagtttcctaatatgcccctccttccaactgtcttcttcaaataccttgaaagttcaacagggatgccatgggacaatgacaagtttgcaactcgtccttcaaagaaattaaggtctgcaacgtgtgaagacctggagtctggtgactggtgttgaacatttcgggtatgctcatattgaaaatgatgtttgtcagtggtctggtacagttagaaccaagtcaggcaaaatatggcattgatgtgatgaagatgatgcactgatgttatctatttgagtgaacgatgcatgttcctgtaatcgtatgtttaattaagagccagtatgttttaagatcc

SEQ ID NO: 17977 - protein, 514 aa, Triticum aestivum
  peptide (1)..(514): Ceres Seq. ID no. 13579946
  misc_feature (69)..(456): NCBI GI NO: 34910284 NR Description: OSJNBa0089K24.29
PSPISSSPLCLIPVPPPTKNLGLGLGRRRLLYSRSRPIAMVIAGEPEPEEVAVMFSDRLRAEEETVVFPGWVMLDRIGRTHCDGDLGAAREAVNGNKTAVQVEMDSGHSFYVSFTLAPPPQGASYLDLHWPLEGSAKSVPPYKQPAYPFVRAIDKDLVLFHISIPSLPHRNFVPPDLFVYNAAGHPPSVQQLPLYRRRSFLRVNFTTGILRRQNGSYIVSDLNVYPKKEGTGNNSMCAELCVFNSNTRAWSFFSKDAPQPQDQSNGQFPTLWSTDHVLAFDGRFLCWVDYFSGVLLSDFSNLRSRVLHFVPFPGEGEYPAKVRVQRCFPDRFRSVSISNGKMCFVHIDNDFHERIHTGSQGQQPRKKITIWTLNMMDGNSRFKWEPHHVIDLDRLWLTPSVPRRLPEYPIIAPNNPDVLYCLLRKQEFHGEASMIMVDMNPASPWLCTPYINRRSVHVKDHKSEFPNMPLLPTVFFKYLESSTGMPWDNDKFATRPSKKLRSATCEDLESGDWC

SEQ ID NO: 17978 - protein, 475 aa, Triticum aestivum
  peptide (1)..(475): Ceres Seq. ID no. 13579947
  misc_feature (30)..(417): NCBI GI NO: 34910284 NR Description: OSJNBa0089K24.29
MVIAGEPEPEEVAVMFSDRLRAEEETVVFPGWVMLDRIGRTHCDGDLGAAREAVNGNKTAVQVEMDSGHSFYVSFTLAPPPQGASYLDLHWPLEGSAKSVPPYKQPAYPFVRAIDKDLVLFHISIPSLPHRNFVPPDLFVYNAAGHPPSVQQLPLYRRRSFLRVNFTTGILRRQNGSYIVSDLNVYPKKEGTGNNSMCAELCVFNSNTRAWSFFSKDAPQPQDQSNGQFPTLWSTDHVLAFDGRFLCWVDYFSGVLLSDFSNLRSRVLHFVPFPGEGEYPAKVRVQRCFPDRFRSVSISNGKMCFVHIDNDFHERIHTGSQGQQPRKKITIWTLNMMDGNSRFKWEPHHVIDLDRLWLTPSVPRRLPEYPIIAPNNPDVLYCLLRKQEFHGEASMIMVDMNPASPWLCTPYINRRSVHVKDHKSEFPNMPLLPTVFFKYLESSTGMPWDNDKFATRPSKKLRSATCEDLESGDWC

SEQ ID NO: 17979 - protein, 461 aa, Triticum aestivum
  peptide (1)..(461): Ceres Seq. ID no. 13579948
  misc_feature (16)..(403): NCBI GI NO: 34910284 NR Description: OSJNBa0089K24.29
MFSDRLRAEEETVVFPGWVMLDRIGRTHCDGDLGAAREAVNGNKTAVQVEMDSGHSFYVSFTLAPPPQGASYLDLHWPLEGSAKSVPPYKQPAYPFVRAIDKDLVLFHISIPSLPHRNFVPPDLFVYNAAGHPPSVQQLPLYRRRSFLRVNFTTGILRRQNGSYIVSDLNVYPKKEGTGNNSMCAELCVFNSNTRAWSFFSKDAPQPQDQSNGQFPTLWSTDHVLAFDGRFLCWVDYFSGVLLSDFSNLRSRVLHFVPFPGEGEYPAKVRVQRCFPDRFRSVSISNGKMCFVHIDNDFHERIHTGSQGQQPRKKITIWTLNMMDGNSRFKWEPHHVIDLDRLWLTPSVPRRLPEYPIIAPNNPDVLYCLLRKQEFHGEASMIMVDMNPASPWLCTPYINRRSVHVKDHKSEFPNMPLLPTVFFKYLESSTGMPWDNDKFATRPSKKLRSATCEDLESGDWC

SEQ ID NO: 17980 - DNA, 496 bp, Triticum aestivum
  misc_feature (1)..(496): Ceres Seq. ID no. 13663935
aaaaacctccaaaacaattccaattcctcccctcccacagttccactccatccctcgcccccgcccctcctcgctccggagcctcctcccgggccaccgccatgctgcccgcgcgcttcctcaagctctcgctgctacgccgcctcggcaccgcccgtgcggccggagtgcccccgccgtggcagaccaggcaatttccggtgcggggttaccagcctcgaggttattctaccggaggaagctccaagtatgatagaccgatgagacagtttgctgaagataacgagtcaaattctcagccactaatatattacattgtcccatctgccattctagcctttgttggactagccacttatgttcactataatgatgagaggcgtgcagttcccttaggtaaacaagcacagcagaccagtattcccaaaaggtgcactaccaacagacctgcaatcggaggaccatttaagctctatgatacagaaaacaatgtggt

SEQ ID NO: 17981 - protein, 164 aa, Triticum aestivum
  peptide (1)..(164): Ceres Seq. ID no. 13663936
  misc_feature (110)..(163): Pfam Name: Pfam Description:  SCO1/SenC
  misc_feature (34)..(163): NCBI GI NO: 26450269 NR Description: unknown protein [Arabidopsis thaliana]
  misc_feature (34)..(163): NCBI GI NO: 18420515 NR Description: expressed protein [Arabidopsis thaliana]
  misc_feature (85)..(163): NCBI GI NO: 7487210 NR Description: hypothetical protein T19P19
KPPKQFQFLPSHSSTPSLAPAPPRSGASSRATAMLPARFLKLSLLRRLGTARAAGVPPPWQTRQFPVRGYQPRGYSTGGSSKYDRPMRQFAEDNESNSQPLIYYIVPSAILAFVGLATYVHYNDERRAVPLGKQAQQTSIPKRCTTNRPAIGGPFKLYDTENNV

SEQ ID NO: 17982 - protein, 131 aa, Triticum aestivum
  peptide (1)..(131): Ceres Seq. ID no. 13663937
  misc_feature (77)..(130): Pfam Name: Pfam Description:  SCO1/SenC
  misc_feature (1)..(130): NCBI GI NO: 26450269 NR Description: unknown protein [Arabidopsis thaliana]
  misc_feature (1)..(130): NCBI GI NO: 18420515 NR Description: expressed protein [Arabidopsis thaliana]
  misc_feature (52)..(130): NCBI GI NO: 7487210 NR Description: hypothetical protein T19P19
MLPARFLKLSLLRRLGTARAAGVPPPWQTRQFPVRGYQPRGYSTGGSSKYDRPMRQFAEDNESNSQPLIYYIVPSAILAFVGLATYVHYNDERRAVPLGKQAQQTSIPKRCTTNRPAIGGPFKLYDTENNV

SEQ ID NO: 17983 - protein, 87 aa, Triticum aestivum
  peptide (1)..(87): Ceres Seq. ID no. 13663938
KNLQNNSNSSPPTVPLHPSPPPLLAPEPPPGPPPCCPRASSSSRCYAASAPPVRPECPRRGRPGNFRCGVTSLEVILPEEAPSMIDR

SEQ ID NO: 17984 - DNA, 1515 bp, Triticum aestivum
  misc_feature (1)..(1515): Ceres Seq. ID no. 14302511
acccaaccaggcaaccaccacatcccggctccaactcctacatcgtgcgcgttccaactccggtagcgtactcctcctcagaaaaaactccggtggcgtactactagaaaacagcagagacggctgtgccctgctccaccttctcgccggtgccttctgctcgaggcaaacgaaacccatcctcctcctcctgcccctctctcccacgcttcccccttcgtctccgtcgaggagaggcgaggcgaggcgaggcggcgacgatgcaggtgaagcagaaggtctacgagctctacaaggggacggtggagcgggtcacgggcccgcgcactgtctcggcgttcctcgagaagggcgtcctctccgtccccgagttcatcctcgccggcgacaacctcgtatccaagtgccccacctggtcctgggaggcgggcgatccgagcaagagaaagccatacctcccctccgataagcagttcctcgtcaccaggaacgtgccctgcctaagacgagctgtggcggtcgaggaagagtatgatgcagcgggagctgaggttgttctcgatgatgatgaggatggcgaaggctggctcgcaacacatgggctgcaagcatcagagtcaaaagaggaggaagacataccgtctatggatacattggacatagggaaagttgaagagatcaaatctatcccctcctactttggtgctggtgaaaagccagatgacgaggaggatatacctgatatggacacctatgaagacacaggagatcattccacagctacccctcagccttcatattttgtcgcagaagagcctgatgatgacaacattcttctcaccagaacatatgatgtcagcatcacatatgacaagtactaccaaactccacgtgtctggcttacaggctatgatgaggcaagaatgccattaaagcctgaacttgtgtttcaagatatcagtcaagaccatgcacacaaaacggtgactatcgaagaccaccctcacttgttagtgggacagcacgcttcagtgcatccttgcaagcacgctgctgtgatgaaaaagatcattgatgttatagtgtctcaaggaggtgcaccagaagttgacaagtaccttttcatatttctgaaattcatggcttctgtcatacccaccattgagtatgattacactatggacttcgatctgggcagtacaagcacataagtcgcccattgaagaaaagctgaaacttccaagaaggcaggctggtcattgtcgccgaataattgctgctcttcggaaggatctgtacattgtgtccgtgtgtgttggttcgtctggaaatgaactttcaattgtaaactctgatgctctgcaggaagattgtgccgatttgtcctcttacggtgcagcgccgcactgatgacatttgtgattcttcgccaacaaatctgaattttgttgaaaaactgaaggatagtaaaatccctgcactgaaaaaaaaaaaaaaaaaaaaaaaaaaaaaaag

SEQ ID NO: 17985 - protein, 316 aa, Triticum aestivum
  peptide (1)..(316): Ceres Seq. ID no. 14302512
  misc_feature (6)..(161): Pfam Name: Pfam Description:  Autophagocytosis associated protein
  misc_feature (1)..(315): NCBI GI NO: 34903638 NR Description: B1015E06.2
  misc_feature (1)..(316): NCBI GI NO: 18424474 NR Description: autophagocytosis protein - like
  misc_feature (1)..(316): NCBI GI NO: 21595613 NR Description: autophagocytosis protein-like
  misc_feature (1)..(311): NCBI GI NO: 9758466 NR Description: autophagocytosis protein AUT1-like
  misc_feature (1)..(235): NCBI GI NO: 37536838 NR Description: autophagocytosis protein AUT1-like
  misc_feature (4)..(167): NCBI GI NO: 28828597 NR Description: hypothetical protein [Dictyostelium discoideum]
  misc_feature (187)..(310): NCBI GI NO: 28828597 NR Description: hypothetical protein [Dictyostelium discoideum]
  misc_feature (13)..(311): NCBI GI NO: 34785406 NR Description: Unknown (protein for MGC:64156) [Danio rerio]
  misc_feature (5)..(311): NCBI GI NO: 13385890 NR Description: RIKEN cDNA 2610016C12 [Mus musculus]
  misc_feature (5)..(311): NCBI GI NO: 19705511 NR Description: preconditioning-inducible gene 1 protein
MQVKQKVYELYKGTVERVTGPRTVSAFLEKGVLSVPEFILAGDNLVSKCPTWSWEAGDPSKRKPYLPSDKQFLVTRNVPCLRRAVAVEEEYDAAGAEVVLDDDEDGEGWLATHGLQASESKEEEDIPSMDTLDIGKVEEIKSIPSYFGAGEKPDDEEDIPDMDTYEDTGDHSTATPQPSYFVAEEPDDDNILLTRTYDVSITYDKYYQTPRVWLTGYDEARMPLKPELVFQDISQDHAHKTVTIEDHPHLLVGQHASVHPCKHAAVMKKIIDVIVSQGGAPEVDKYLFIFLKFMASVIPTIEYDYTMDFDLGSTST

SEQ ID NO: 17986 - protein, 188 aa, Triticum aestivum
  peptide (1)..(188): Ceres Seq. ID no. 14302513
  misc_feature (61)..(179): Pfam Name: Pfam Description:  Autophagocytosis associated protein
  misc_feature (1)..(187): NCBI GI NO: 34903638 NR Description: B1015E06.2
  misc_feature (1)..(188): NCBI GI NO: 18424474 NR Description: autophagocytosis protein - like
  misc_feature (1)..(188): NCBI GI NO: 21595613 NR Description: autophagocytosis protein-like
  misc_feature (1)..(183): NCBI GI NO: 9758466 NR Description: autophagocytosis protein AUT1-like
  misc_feature (1)..(107): NCBI GI NO: 37536838 NR Description: autophagocytosis protein AUT1-like
  misc_feature (1)..(39): NCBI GI NO: 28828597 NR Description: hypothetical protein [Dictyostelium discoideum]
  misc_feature (59)..(182): NCBI GI NO: 28828597 NR Description: hypothetical protein [Dictyostelium discoideum]
  misc_feature (1)..(183): NCBI GI NO: 34785406 NR Description: Unknown (protein for MGC:64156) [Danio rerio]
  misc_feature (1)..(183): NCBI GI NO: 13385890 NR Description: RIKEN cDNA 2610016C12 [Mus musculus]
  misc_feature (1)..(183): NCBI GI NO: 19705511 NR Description: preconditioning-inducible gene 1 protein
MDTLDIGKVEEIKSIPSYFGAGEKPDDEEDIPDMDTYEDTGDHSTATPQPSYFVAEEPDDDNILLTRTYDVSITYDKYYQTPRVWLTGYDEARMPLKPELVFQDISQDHAHKTVTIEDHPHLLVGQHASVHPCKHAAVMKKIIDVIVSQGGAPEVDKYLFIFLKFMASVIPTIEYDYTMDFDLGSTST

SEQ ID NO: 17987 - DNA, 434 bp, Triticum aestivum
  misc_feature (1)..(434): Ceres Seq. ID no. 13663708
agcaaaactcaccggtatctagccaagttagctcgagctccattgtcacaatacgagcgtctacacacccacattgcacctccagggccaggccaacctcgaacgccatggaagcccctctgcaccagctggcccccatgcagcaagcactgctcgcccgtcctcagaactgcaagcacgacgccgcggcgaccatggccgcgacggacatggcgtgcctccagcagcagcagcagctgatgcagctgcagccggcggtggcgaacccgaacacgccctcgggcgcggcacgggagcagtgcccgcggtgcgcgtctcacgacaccaagttctgctactacaacaactacaacacgtcgcagccgcgccacttctgccgcgcctgccgccgctactggacgctcgggggctcctccgcaacgtcccatcggggc

SEQ ID NO: 17988 - protein, 144 aa, Triticum aestivum
  peptide (1)..(144): Ceres Seq. ID no. 13663709
  misc_feature (93)..(141): Pfam Name: Pfam Description:  Dof domain, zinc finger
  misc_feature (47)..(141): NCBI GI NO: 4996648 NR Description: Dof zinc finger protein [Oryza sativa]
  misc_feature (61)..(137): NCBI GI NO: 1346559 NR Description: DNA-BINDING PROTEIN MNB1A
  misc_feature (20)..(137): NCBI GI NO: 25352305 NR Description: probable DOF zinc finger protein
  misc_feature (20)..(137): NCBI GI NO: 30684022 NR Description: Dof zinc finger protein [Arabidopsis thaliana]
  misc_feature (81)..(137): NCBI GI NO: 21538787 NR Description: dof zinc finger protein
  misc_feature (86)..(137): NCBI GI NO: 2130124 NR Description: DNA-binding protein Dof2 - maize (fragment)
  misc_feature (41)..(137): NCBI GI NO: 30680246 NR Description: Dof zinc finger protein [Arabidopsis thaliana]
  misc_feature (63)..(137): NCBI GI NO: 22329829 NR Description: Dof zinc finger protein [Arabidopsis thaliana]
  misc_feature (74)..(137): NCBI GI NO: 15218846 NR Description: Dof zinc finger protein [Arabidopsis thaliana]
  misc_feature (41)..(137): NCBI GI NO: 25406987 NR Description: hypothetical protein
QNSPVSSQVSSSSIVTIRASTHPHCTSRARPTSNAMEAPLHQLAPMQQALLARPQNCKHDAAATMAATDMACLQQQQQLMQLQPAVANPNTPSGAAREQCPRCASHDTKFCYYNNYNTSQPRHFCRACRRYWTLGGSSATSHRG

SEQ ID NO: 17989 - protein, 109 aa, Triticum aestivum
  peptide (1)..(109): Ceres Seq. ID no. 13663710
  misc_feature (58)..(106): Pfam Name: Pfam Description:  Dof domain, zinc finger
  misc_feature (12)..(106): NCBI GI NO: 4996648 NR Description: Dof zinc finger protein [Oryza sativa]
  misc_feature (26)..(102): NCBI GI NO: 1346559 NR Description: DNA-BINDING PROTEIN MNB1A
  misc_feature (1)..(102): NCBI GI NO: 25352305 NR Description: probable DOF zinc finger protein
  misc_feature (1)..(102): NCBI GI NO: 30684022 NR Description: Dof zinc finger protein [Arabidopsis thaliana]
  misc_feature (46)..(102): NCBI GI NO: 21538787 NR Description: dof zinc finger protein
  misc_feature (51)..(102): NCBI GI NO: 2130124 NR Description: DNA-binding protein Dof2 - maize (fragment)
  misc_feature (6)..(102): NCBI GI NO: 30680246 NR Description: Dof zinc finger protein [Arabidopsis thaliana]
  misc_feature (28)..(102): NCBI GI NO: 22329829 NR Description: Dof zinc finger protein [Arabidopsis thaliana]
  misc_feature (39)..(102): NCBI GI NO: 15218846 NR Description: Dof zinc finger protein [Arabidopsis thaliana]
  misc_feature (6)..(102): NCBI GI NO: 25406987 NR Description: hypothetical protein
MEAPLHQLAPMQQALLARPQNCKHDAAATMAATDMACLQQQQQLMQLQPAVANPNTPSGAAREQCPRCASHDTKFCYYNNYNTSQPRHFCRACRRYWTLGGSSATSHRG

SEQ ID NO: 17990 - protein, 99 aa, Triticum aestivum
  peptide (1)..(99): Ceres Seq. ID no. 13663711
  misc_feature (48)..(96): Pfam Name: Pfam Description:  Dof domain, zinc finger
  misc_feature (2)..(96): NCBI GI NO: 4996648 NR Description: Dof zinc finger protein [Oryza sativa]
  misc_feature (16)..(92): NCBI GI NO: 1346559 NR Description: DNA-BINDING PROTEIN MNB1A
  misc_feature (1)..(92): NCBI GI NO: 25352305 NR Description: probable DOF zinc finger protein
  misc_feature (1)..(92): NCBI GI NO: 30684022 NR Description: Dof zinc finger protein [Arabidopsis thaliana]
  misc_feature (36)..(92): NCBI GI NO: 21538787 NR Description: dof zinc finger protein
  misc_feature (41)..(92): NCBI GI NO: 2130124 NR Description: DNA-binding protein Dof2 - maize (fragment)
  misc_feature (1)..(92): NCBI GI NO: 30680246 NR Description: Dof zinc finger protein [Arabidopsis thaliana]
  misc_feature (18)..(92): NCBI GI NO: 22329829 NR Description: Dof zinc finger protein [Arabidopsis thaliana]
  misc_feature (29)..(92): NCBI GI NO: 15218846 NR Description: Dof zinc finger protein [Arabidopsis thaliana]
  misc_feature (1)..(92): NCBI GI NO: 25406987 NR Description: hypothetical protein
MQQALLARPQNCKHDAAATMAATDMACLQQQQQLMQLQPAVANPNTPSGAAREQCPRCASHDTKFCYYNNYNTSQPRHFCRACRRYWTLGGSSATSHRG

SEQ ID NO: 17991 - DNA, 860 bp, Triticum aestivum
  misc_feature (1)..(860): Ceres Seq. ID no. 12627045
aatcgattgggttgggttgggtttgcgggtggaccgatgacggtggccgccgcacgctgcctcattctcacccccacaatctcctcctcctccgccgttctccggctcccccggatcgcccgccgccgcccgctctcctgctcggcctcgccgctcgccgtgttcgccaccatggagtcgccgcccgagggctaccgcaccaacgtcggcatctgcctcgccgaccccaccctcaccaagatcttctccgcgtccaggatcgacatccccacggcgtggcagatgcctcagggtgggatagacccaggggaagagccacgagcagctgccatcagggaattgagggaagaaaccggtgttagatctgccgaggttgtcgccgaggcccccaattggttgacatatgatttccccgcggatgtcaaagacaagctgaatgctaggtggggaaccaactggaagggccaggctcagaagtggtttctatttaggcttacggggggtgatgacgagatcaacctgatgggcgatggatccgagaagccggagttctccgagtgggcatggatgacccctcagcaagtgattgagaaggctgttgatttcaagaaacctgtctacaaggagacactgaagcacttcgccccatatctacagtcagatccaacagcttcgtcatagactttgcagtctcccacgggctttatacgtagaggggctgtgtcaatcaataatttctcaaaaatgtattggggccacggagtatttctagaacgtctggcgtatcgccgccgcctgctatcccggcattggatccccgtagcccgatcatgcgcaacgagatgagtacgttgtgtcgc

SEQ ID NO: 17992 - protein, 226 aa, Triticum aestivum
  peptide (1)..(226): Ceres Seq. ID no. 12627046
  misc_feature (65)..(213): Pfam Name: Pfam Description:  NUDIX domain
  misc_feature (13)..(226): NCBI GI NO: 7489414 NR Description: probable bis
  misc_feature (36)..(219): NCBI GI NO: 15228345 NR Description: putative diadenosine 5'
  misc_feature (56)..(218): NCBI GI NO: 1888557 NR Description: diadenosine 5',5'''-P1,P4-tetraphosphate hydrolase
  misc_feature (57)..(218): NCBI GI NO: 14488439 NR Description: Chain A
  misc_feature (36)..(219): NCBI GI NO: 8567796 NR Description: diadenosine 5'
  misc_feature (39)..(217): NCBI GI NO: 15240003 NR Description: diadenosine 5
  misc_feature (58)..(225): NCBI GI NO: 15220667 NR Description: diadenosine 5
  misc_feature (65)..(218): NCBI GI NO: 22959957 NR Description: hypothetical protein [Rhodobacter sphaeroides]
  misc_feature (65)..(220): NCBI GI NO: 23015122 NR Description: hypothetical protein
  misc_feature (65)..(222): NCBI GI NO: 22967686 NR Description: hypothetical protein [Rhodospirillum rubrum]
NRLGWVGFAGGPMTVAAARCLILTPTISSSSAVLRLPRIARRRPLSCSASPLAVFATMESPPEGYRTNVGICLADPTLTKIFSASRIDIPTAWQMPQGGIDPGEEPRAAAIRELREETGVRSAEVVAEAPNWLTYDFPADVKDKLNARWGTNWKGQAQKWFLFRLTGGDDEINLMGDGSEKPEFSEWAWMTPQQVIEKAVDFKKPVYKETLKHFAPYLQSDPTASS

SEQ ID NO: 17993 - protein, 214 aa, Triticum aestivum
  peptide (1)..(214): Ceres Seq. ID no. 12627047
  misc_feature (53)..(201): Pfam Name: Pfam Description:  NUDIX domain
  misc_feature (1)..(214): NCBI GI NO: 7489414 NR Description: probable bis
  misc_feature (24)..(207): NCBI GI NO: 15228345 NR Description: putative diadenosine 5'
  misc_feature (44)..(206): NCBI GI NO: 1888557 NR Description: diadenosine 5',5'''-P1,P4-tetraphosphate hydrolase
  misc_feature (45)..(206): NCBI GI NO: 14488439 NR Description: Chain A
  misc_feature (24)..(207): NCBI GI NO: 8567796 NR Description: diadenosine 5'
  misc_feature (27)..(205): NCBI GI NO: 15240003 NR Description: diadenosine 5
  misc_feature (46)..(213): NCBI GI NO: 15220667 NR Description: diadenosine 5
  misc_feature (53)..(206): NCBI GI NO: 22959957 NR Description: hypothetical protein [Rhodobacter sphaeroides]
  misc_feature (53)..(208): NCBI GI NO: 23015122 NR Description: hypothetical protein
  misc_feature (53)..(210): NCBI GI NO: 22967686 NR Description: hypothetical protein [Rhodospirillum rubrum]
MTVAAARCLILTPTISSSSAVLRLPRIARRRPLSCSASPLAVFATMESPPEGYRTNVGICLADPTLTKIFSASRIDIPTAWQMPQGGIDPGEEPRAAAIRELREETGVRSAEVVAEAPNWLTYDFPADVKDKLNARWGTNWKGQAQKWFLFRLTGGDDEINLMGDGSEKPEFSEWAWMTPQQVIEKAVDFKKPVYKETLKHFAPYLQSDPTASS

SEQ ID NO: 17994 - protein, 169 aa, Triticum aestivum
  peptide (1)..(169): Ceres Seq. ID no. 12627048
  misc_feature (8)..(156): Pfam Name: Pfam Description:  NUDIX domain
  misc_feature (1)..(169): NCBI GI NO: 7489414 NR Description: probable bis
  misc_feature (1)..(162): NCBI GI NO: 15228345 NR Description: putative diadenosine 5'
  misc_feature (1)..(161): NCBI GI NO: 1888557 NR Description: diadenosine 5',5'''-P1,P4-tetraphosphate hydrolase
  misc_feature (1)..(161): NCBI GI NO: 14488439 NR Description: Chain A
  misc_feature (1)..(162): NCBI GI NO: 8567796 NR Description: diadenosine 5'
  misc_feature (1)..(160): NCBI GI NO: 15240003 NR Description: diadenosine 5
  misc_feature (1)..(168): NCBI GI NO: 15220667 NR Description: diadenosine 5
  misc_feature (8)..(161): NCBI GI NO: 22959957 NR Description: hypothetical protein [Rhodobacter sphaeroides]
  misc_feature (8)..(163): NCBI GI NO: 23015122 NR Description: hypothetical protein
  misc_feature (8)..(165): NCBI GI NO: 22967686 NR Description: hypothetical protein [Rhodospirillum rubrum]
MESPPEGYRTNVGICLADPTLTKIFSASRIDIPTAWQMPQGGIDPGEEPRAAAIRELREETGVRSAEVVAEAPNWLTYDFPADVKDKLNARWGTNWKGQAQKWFLFRLTGGDDEINLMGDGSEKPEFSEWAWMTPQQVIEKAVDFKKPVYKETLKHFAPYLQSDPTASS

SEQ ID NO: 17995 - DNA, 682 bp, Triticum aestivum
  misc_feature (1)..(682): Ceres Seq. ID no. 12784091
atccgccgcgcgcggtgcagcttctcgtggatttccccctagctagctagagccacagctacagcaatggaagctctcgcctcgtcgccgcgggctctcttcgcccgcaccgcctctccgacgacggcgctggtcacgccagcaagatggacgccgtcatcgagcaggcgtgtcaaggccgccgccgccgccgagccggccggcgaggcgaagccggctgccgcagcggcgccgtcggcacccaagaagatcctcaagaagaagcccgtatactccatgaagaaagggcagatcgtgcgcgtcgagaaagaaaagtatctgaacagcatcaattacctatcagtggggcacccacccttctacaaggggctagactacatatatgaagaccgcggcgaggttttggacatcagaatctttgaagagaccggagagtatgctctgatcgcgtgggtggggattccaaccccgccggcatggctcccaacttatatgctcatcaagtcagacaaactcgactacgagaggatatgattgttggatgagcagttgcaagggagaacgatgttctctgaataaatcaatgttgctatgtggccatgttgtgacattgctccatggatgcaaaacgaagcagttgtaaattgaagaaacaatagtgaaatatatccaaagttttttt

SEQ ID NO: 17996 - protein, 155 aa, Triticum aestivum
  peptide (1)..(155): Ceres Seq. ID no. 12784092
  misc_feature (12)..(155): NCBI GI NO: 18410719 NR Description: expressed protein; protein id: At1g74880
  misc_feature (1)..(138): NCBI GI NO: 34905786 NR Description: P0401G10.19
MEALASSPRALFARTASPTTALVTPARWTPSSSRRVKAAAAAEPAGEAKPAAAAAPSAPKKILKKKPVYSMKKGQIVRVEKEKYLNSINYLSVGHPPFYKGLDYIYEDRGEVLDIRIFEETGEYALIAWVGIPTPPAWLPTYMLIKSDKLDYERI

SEQ ID NO: 17997 - protein, 85 aa, Triticum aestivum
  peptide (1)..(85): Ceres Seq. ID no. 12784093
  misc_feature (1)..(85): NCBI GI NO: 18410719 NR Description: expressed protein; protein id: At1g74880
  misc_feature (1)..(68): NCBI GI NO: 34905786 NR Description: P0401G10.19
MKKGQIVRVEKEKYLNSINYLSVGHPPFYKGLDYIYEDRGEVLDIRIFEETGEYALIAWVGIPTPPAWLPTYMLIKSDKLDYERI

SEQ ID NO: 17998 - protein, 79 aa, Triticum aestivum
  peptide (1)..(79): Ceres Seq. ID no. 12784094
MDAVIEQACQGRRRRRAGRRGEAGCRSGAVGTQEDPQEEARILHEERADRARRERKVSEQHQLPISGAPTLLQGARLHI

SEQ ID NO: 17999 - DNA, 739 bp, Triticum aestivum
  misc_feature (1)..(739): Ceres Seq. ID no. 12622129
agaggaaatcaatcaagaaggcgaggaggagcatcgtcggcgatggaggggtgggacaagggcacgaagagcgtggtgggcgagatcccgctgctgtcgacgcgggcgggcccccgggacggcgatccgtggcggcagcggctcaaggaggagtaccgcgccttcatcgcctacacctccgtcaacaaggccaaggacaatgactggttcagcatctccgccgccaacccggagggcacccgctgggagggtacctgctggtacgtccacaacctccgccgttacgagttccccctccagttagacatccccgtcgcctaccctcaggtcgcccccgagatcgagctccccaccctcgacggcaagacccacaagatgtaccgcggagggaagatctgcctcaccgtgcacttcaagccgctgtgggccaagaactgcccgcggttcgggctcgcgcacgctctctgcctcgggctcgcgccgtggctcgctgcggaggtgcccatcctggtcgattcgggcatggtgaagcacaaggacgacgaggctgctcctgcagatgccgctgctgcgtctggttctgccgctgcctcttagttgcaagacagttacagtatgtcttttctgttgttgctgacagtgacagttacagtatgatggttgtcaaggggattggaggattgaaaatccactcggttgtggactaataagagcaagcaatacatatactctagttgtc

SEQ ID NO: 18000 - protein, 198 aa, Triticum aestivum
  peptide (1)..(198): Ceres Seq. ID no. 12622130
  misc_feature (15)..(198): NCBI GI NO: 37532272 NR Description: unknown protein
  misc_feature (15)..(188): NCBI GI NO: 18396376 NR Description: expressed protein; protein id: At1g27530
  misc_feature (15)..(188): NCBI GI NO: 24899705 NR Description: Similar to CGI-126 protein [Arabidopsis thaliana]
  misc_feature (19)..(180): NCBI GI NO: 6831734 NR Description: Protein CGI-126 (Protein HSPC155)
  misc_feature (19)..(180): NCBI GI NO: 7705481 NR Description: hypothetical protein HSPC155 [Homo sapiens]
  misc_feature (19)..(180): NCBI GI NO: 13384768 NR Description: RIKEN cDNA 1110021H02; EST AA062310 [Mus musculus]
  misc_feature (19)..(180): NCBI GI NO: 13528771 NR Description: Similar to hypothetical protein [Homo sapiens]
  misc_feature (19)..(180): NCBI GI NO: 19922352 NR Description: CG8386-PA [Drosophila melanogaster]
  misc_feature (19)..(179): NCBI GI NO: 39590862 NR Description: Hypothetical protein CBG10119
  misc_feature (19)..(161): NCBI GI NO: 34880929 NR Description: similar to RIKEN cDNA 1110021H02; EST AA062310
RGNQSRRRGGASSAMEGWDKGTKSVVGEIPLLSTRAGPRDGDPWRQRLKEEYRAFIAYTSVNKAKDNDWFSISAANPEGTRWEGTCWYVHNLRRYEFPLQLDIPVAYPQVAPEIELPTLDGKTHKMYRGGKICLTVHFKPLWAKNCPRFGLAHALCLGLAPWLAAEVPILVDSGMVKHKDDEAAPADAAAASGSAAAS

SEQ ID NO: 18001 - protein, 184 aa, Triticum aestivum
  peptide (1)..(184): Ceres Seq. ID no. 12622131
  misc_feature (1)..(184): NCBI GI NO: 37532272 NR Description: unknown protein
  misc_feature (1)..(174): NCBI GI NO: 18396376 NR Description: expressed protein; protein id: At1g27530
  misc_feature (1)..(174): NCBI GI NO: 24899705 NR Description: Similar to CGI-126 protein [Arabidopsis thaliana]
  misc_feature (5)..(166): NCBI GI NO: 6831734 NR Description: Protein CGI-126 (Protein HSPC155)
  misc_feature (5)..(166): NCBI GI NO: 7705481 NR Description: hypothetical protein HSPC155 [Homo sapiens]
  misc_feature (5)..(166): NCBI GI NO: 13384768 NR Description: RIKEN cDNA 1110021H02; EST AA062310 [Mus musculus]
  misc_feature (5)..(166): NCBI GI NO: 13528771 NR Description: Similar to hypothetical protein [Homo sapiens]
  misc_feature (5)..(166): NCBI GI NO: 19922352 NR Description: CG8386-PA [Drosophila melanogaster]
  misc_feature (5)..(165): NCBI GI NO: 39590862 NR Description: Hypothetical protein CBG10119
  misc_feature (5)..(147): NCBI GI NO: 34880929 NR Description: similar to RIKEN cDNA 1110021H02; EST AA062310
MEGWDKGTKSVVGEIPLLSTRAGPRDGDPWRQRLKEEYRAFIAYTSVNKAKDNDWFSISAANPEGTRWEGTCWYVHNLRRYEFPLQLDIPVAYPQVAPEIELPTLDGKTHKMYRGGKICLTVHFKPLWAKNCPRFGLAHALCLGLAPWLAAEVPILVDSGMVKHKDDEAAPADAAAASGSAAAS

SEQ ID NO: 18002 - protein, 100 aa, Triticum aestivum
  peptide (1)..(100): Ceres Seq. ID no. 12622132
  misc_feature (17)..(100): Pfam Name: Pfam Description:  Cupin
  misc_feature (12)..(100): NCBI GI NO: 38175466 NR Description: putative high-affinity potassium transporter
  misc_feature (33)..(100): NCBI GI NO: 29250754 NR Description: GLP_49_64409_65443 [Giardia lamblia ATCC 50803]
  misc_feature (33)..(100): NCBI GI NO: 29250754 NR Description: GLP_49_64409_65443 [Giardia lamblia ATCC 50803]
EEINQEGEEEHRRRWRGGTRARRAWWARSRCCRRGRAPGTAIRGGSGSRRSTAPSSPTPPSTRPRTMTGSASPPPTRRAPAGRVPAGTSTTSAVTSSPSS

SEQ ID NO: 18003 - DNA, 915 bp, Triticum aestivum
  misc_feature (1)..(915): Ceres Seq. ID no. 15225803
ccatccattccggttccacctcctccgctcgtctcctactctcccgccatggccaccgcagcgcgcgccgtcgccgccgccgcgcgcccggcgcggccggtgctccagccgcggcgcctcccgtgcccatccgctcgccccgcgcggcctcgcgtcggccgcgccgtccgctgcatggcgcggcggcccgacgcctcgtactcgccgctgcggccggggcagggcggggaccgcgcgcccacggagatggcgccgctgttccccggctgcgactacgagcactggctcatcgtcatggacaagcccggcggcgagggcgccaccaagcaccagatgatcgactgctacatccagaccctcgccaaggtcgtgggcagcgaggaggagtcgaagaagaggatctacaacgtgtcctgtgagcgctactttgggtttgggtgcgagattgacgaggaaacgtccaacaagctggaaggcctcccgggtgttctttttgtgcttccggattcctatgttgatgctgagaacaaggactatggtgccgagttatttgtgaacggagagatcgtccaacgatcaccggaaaggcagagaagggtggagccggtgcctcagagagctcaagatagaccgcgttacagcgaccggactcgctatgtgaagaggagggagaaccaggcctaccaacggtgacatgtccccgtcggtgtaccgcacaagtggcccactgctatcgctccttgccctagatatagcaactgctccacgcccgaaatgcccctcgtcgtctttgctgcattgtagcctcgccatatctgggcgtttttttcttcacgaactgtaggttaaggactgcatgtactactgtgagtgacttgttccgttgttttggtaacggtatcttggtttgcggcg

SEQ ID NO: 18004 - protein, 230 aa, Triticum aestivum
  peptide (1)..(230): Ceres Seq. ID no. 15225804
  misc_feature (18)..(230): NCBI GI NO: 38344141 NR Description: OSJNBa0041A02.8
  misc_feature (37)..(226): NCBI GI NO: 34897972 NR Description: putative plastid protein
  misc_feature (34)..(225): NCBI GI NO: 2440029 NR Description: DAL1 protein [Arabidopsis thaliana]
  misc_feature (34)..(225): NCBI GI NO: 15226108 NR Description: plastid protein [Arabidopsis thaliana]
  misc_feature (35)..(225): NCBI GI NO: 25370552 NR Description: DAG protein homolog
  misc_feature (34)..(225): NCBI GI NO: 21617909 NR Description: plastid protein [Arabidopsis thaliana]
  misc_feature (56)..(225): NCBI GI NO: 15223247 NR Description: plastid protein -related [Arabidopsis thaliana]
  misc_feature (47)..(225): NCBI GI NO: 15226934 NR Description: expressed protein [Arabidopsis thaliana]
  misc_feature (16)..(230): NCBI GI NO: 38636775 NR Description: putative DAG protein
  misc_feature (40)..(230): NCBI GI NO: 6014904 NR Description: DAG PROTEIN, CHLOROPLAST PRECURSOR
PSIPVPPPPLVSYSPAMATAARAVAAAARPARPVLQPRRLPCPSARPARPRVGRAVRCMARRPDASYSPLRPGQGGDRAPTEMAPLFPGCDYEHWLIVMDKPGGEGATKHQMIDCYIQTLAKVVGSEEESKKRIYNVSCERYFGFGCEIDEETSNKLEGLPGVLFVLPDSYVDAENKDYGAELFVNGEIVQRSPERQRRVEPVPQRAQDRPRYSDRTRYVKRRENQAYQR

SEQ ID NO: 18005 - protein, 214 aa, Triticum aestivum
  peptide (1)..(214): Ceres Seq. ID no. 15225805
  misc_feature (2)..(214): NCBI GI NO: 38344141 NR Description: OSJNBa0041A02.8
  misc_feature (21)..(210): NCBI GI NO: 34897972 NR Description: putative plastid protein
  misc_feature (18)..(209): NCBI GI NO: 2440029 NR Description: DAL1 protein [Arabidopsis thaliana]
  misc_feature (18)..(209): NCBI GI NO: 15226108 NR Description: plastid protein [Arabidopsis thaliana]
  misc_feature (19)..(209): NCBI GI NO: 25370552 NR Description: DAG protein homolog
  misc_feature (18)..(209): NCBI GI NO: 21617909 NR Description: plastid protein [Arabidopsis thaliana]
  misc_feature (40)..(209): NCBI GI NO: 15223247 NR Description: plastid protein -related [Arabidopsis thaliana]
  misc_feature (31)..(209): NCBI GI NO: 15226934 NR Description: expressed protein [Arabidopsis thaliana]
  misc_feature (1)..(214): NCBI GI NO: 38636775 NR Description: putative DAG protein
  misc_feature (24)..(214): NCBI GI NO: 6014904 NR Description: DAG PROTEIN, CHLOROPLAST PRECURSOR
MATAARAVAAAARPARPVLQPRRLPCPSARPARPRVGRAVRCMARRPDASYSPLRPGQGGDRAPTEMAPLFPGCDYEHWLIVMDKPGGEGATKHQMIDCYIQTLAKVVGSEEESKKRIYNVSCERYFGFGCEIDEETSNKLEGLPGVLFVLPDSYVDAENKDYGAELFVNGEIVQRSPERQRRVEPVPQRAQDRPRYSDRTRYVKRRENQAYQR

SEQ ID NO: 18006 - protein, 172 aa, Triticum aestivum
  peptide (1)..(172): Ceres Seq. ID no. 15225806
  misc_feature (1)..(172): NCBI GI NO: 38344141 NR Description: OSJNBa0041A02.8
  misc_feature (1)..(168): NCBI GI NO: 34897972 NR Description: putative plastid protein
  misc_feature (1)..(167): NCBI GI NO: 2440029 NR Description: DAL1 protein [Arabidopsis thaliana]
  misc_feature (1)..(167): NCBI GI NO: 15226108 NR Description: plastid protein [Arabidopsis thaliana]
  misc_feature (1)..(167): NCBI GI NO: 25370552 NR Description: DAG protein homolog
  misc_feature (1)..(167): NCBI GI NO: 21617909 NR Description: plastid protein [Arabidopsis thaliana]
  misc_feature (1)..(167): NCBI GI NO: 15223247 NR Description: plastid protein -related [Arabidopsis thaliana]
  misc_feature (1)..(167): NCBI GI NO: 15226934 NR Description: expressed protein [Arabidopsis thaliana]
  misc_feature (1)..(172): NCBI GI NO: 38636775 NR Description: putative DAG protein
  misc_feature (1)..(172): NCBI GI NO: 6014904 NR Description: DAG PROTEIN, CHLOROPLAST PRECURSOR
MARRPDASYSPLRPGQGGDRAPTEMAPLFPGCDYEHWLIVMDKPGGEGATKHQMIDCYIQTLAKVVGSEEESKKRIYNVSCERYFGFGCEIDEETSNKLEGLPGVLFVLPDSYVDAENKDYGAELFVNGEIVQRSPERQRRVEPVPQRAQDRPRYSDRTRYVKRRENQAYQR

SEQ ID NO: 18007 - DNA, 1476 bp, Triticum aestivum
  misc_feature (1)..(1476): Ceres Seq. ID no. 15176114
aacccaggtcgcgcacaaatccgccgcgcacgcacacaacctccatctcttcccccccccccccccccctcctctccctcccgcagaaccctagctctccacaagcctcttcgtcggcgatggcggcggctgagaacgccggggacgtggcggcgggggagagccgcaagctgttcgtgggtggcatcccgtcctcagcgcaggagacggagctgcggggccactttgcccgcttcggtgcggtgcgctcaatcgtcgtgatgcgggacaaggagtcgggccacggccgcgggttcgggttcgtcgagttcgaggacgaagaagcggccgccaaggcgctcggtgacggggagaggcccaagcacttcatctgcggccgactggtcgacgttaagagggcgcgtgctagacctccgcggaacttgggcgagcaacctgtgcatcagcatcagcatcagcatcagctggaacagggtccggttcagggtcaccaagacgctggggacagtaccggggccagtagtgacagtatgagctatgcttcaaagaaggtattcattggtggtttgcgtgacaacatcacagaggaggagttcagagcttactttgaggcgtttggcactgtaacagatgttgttgtgatatacgacagcctgacaagcaggtcaaggggttttggttttgtcacctttgattctgaggaagctgtgagaaaggtgatgaggcaaagctttcatgacttgaaagggacaagggtggaagcaaagatcgctatccccaaggatgctcagtattaccgtaatggccgaggtcgtggctcaagaacctttggtggaaggggtcctgttggctttgatggttcaacataccaaccgtacaataaccgacatggtttctacaatggctatatgccacaacctgttcccacacatccctactatcatggcctctattttggtatgggaggcaatccctatgcaaatgcatatccaaaccatgcagtcatggcaaatgttccaaacatggtggcaaggcgtccagtatatagcccatatcccccaatgtatcctggctatggttttgcatacagaagtggttatgcgggtgctgcgccttctgttccgtatggcgttaatggtggcagggattacatgaatgaccaagactctatggatgtacaagaacttgacagcgctgctaccattgctacaaagtttgaatacatgaagctaggttcacaatgacgttctgcagggcaaatatttctacactgatgacagcgggaagtcgcaactgtgaagacatgagctgagattctttggttgacaagtacatcattggaaattatcaacttacccccattccttgtttcaactgcatgtagactgaaaacattcaagtttcaactggctgttgagctcacatgccttgtaccaatgcttaaatccttttaatgtatcagaatcagaacatttg

SEQ ID NO: 18008 - protein, 413 aa, Triticum aestivum
  peptide (1)..(413): Ceres Seq. ID no. 15176115
  misc_feature (184)..(253): Pfam Name: a.k.a. RRM, RBD, or RNP domain Pfam Description: RNA recognition motif.
  misc_feature (37)..(413): NCBI GI NO: 28201305 NR Description: putative RNA binding protein
  misc_feature (56)..(381): NCBI GI NO: 37535274 NR Description: putative RNA-binding protein
  misc_feature (156)..(389): NCBI GI NO: 22328624 NR Description: heterogeneous nuclear ribonucleoprotein
  misc_feature (56)..(136): NCBI GI NO: 22328624 NR Description: heterogeneous nuclear ribonucleoprotein
  misc_feature (156)..(376): NCBI GI NO: 15226106 NR Description: heterogeneous nuclear ribonucleoprotein
  misc_feature (56)..(136): NCBI GI NO: 15226106 NR Description: heterogeneous nuclear ribonucleoprotein
  misc_feature (163)..(264): NCBI GI NO: 40539059 NR Description: putative RNA binding protein
  misc_feature (53)..(136): NCBI GI NO: 40539059 NR Description: putative RNA binding protein
  misc_feature (56)..(350): NCBI GI NO: 15217975 NR Description: RNA-binding protein [Arabidopsis thaliana]
  misc_feature (56)..(350): NCBI GI NO: 25456498 NR Description: RNA binding protein
PRSRTNPPRTHTTSISSPPPPPLLSLPQNPSSPQASSSAMAAAENAGDVAAGESRKLFVGGIPSSAQETELRGHFARFGAVRSIVVMRDKESGHGRGFGFVEFEDEEAAAKALGDGERPKHFICGRLVDVKRARARPPRNLGEQPVHQHQHQHQLEQGPVQGHQDAGDSTGASSDSMSYASKKVFIGGLRDNITEEEFRAYFEAFGTVTDVVVIYDSLTSRSRGFGFVTFDSEEAVRKVMRQSFHDLKGTRVEAKIAIPKDAQYYRNGRGRGSRTFGGRGPVGFDGSTYQPYNNRHGFYNGYMPQPVPTHPYYHGLYFGMGGNPYANAYPNHAVMANVPNMVARRPVYSPYPPMYPGYGFAYRSGYAGAAPSVPYGVNGGRDYMNDQDSMDVQELDSAATIATKFEYMKLGSQ

SEQ ID NO: 18009 - protein, 374 aa, Triticum aestivum
  peptide (1)..(374): Ceres Seq. ID no. 15176116
  misc_feature (145)..(214): Pfam Name: a.k.a. RRM, RBD, or RNP domain Pfam Description: RNA recognition motif.
  misc_feature (1)..(374): NCBI GI NO: 28201305 NR Description: putative RNA binding protein
  misc_feature (17)..(342): NCBI GI NO: 37535274 NR Description: putative RNA-binding protein
  misc_feature (117)..(350): NCBI GI NO: 22328624 NR Description: heterogeneous nuclear ribonucleoprotein
  misc_feature (17)..(97): NCBI GI NO: 22328624 NR Description: heterogeneous nuclear ribonucleoprotein
  misc_feature (117)..(337): NCBI GI NO: 15226106 NR Description: heterogeneous nuclear ribonucleoprotein
  misc_feature (17)..(97): NCBI GI NO: 15226106 NR Description: heterogeneous nuclear ribonucleoprotein
  misc_feature (124)..(225): NCBI GI NO: 40539059 NR Description: putative RNA binding protein
  misc_feature (14)..(97): NCBI GI NO: 40539059 NR Description: putative RNA binding protein
  misc_feature (17)..(311): NCBI GI NO: 15217975 NR Description: RNA-binding protein [Arabidopsis thaliana]
  misc_feature (17)..(311): NCBI GI NO: 25456498 NR Description: RNA binding protein
MAAAENAGDVAAGESRKLFVGGIPSSAQETELRGHFARFGAVRSIVVMRDKESGHGRGFGFVEFEDEEAAAKALGDGERPKHFICGRLVDVKRARARPPRNLGEQPVHQHQHQHQLEQGPVQGHQDAGDSTGASSDSMSYASKKVFIGGLRDNITEEEFRAYFEAFGTVTDVVVIYDSLTSRSRGFGFVTFDSEEAVRKVMRQSFHDLKGTRVEAKIAIPKDAQYYRNGRGRGSRTFGGRGPVGFDGSTYQPYNNRHGFYNGYMPQPVPTHPYYHGLYFGMGGNPYANAYPNHAVMANVPNMVARRPVYSPYPPMYPGYGFAYRSGYAGAAPSVPYGVNGGRDYMNDQDSMDVQELDSAATIATKFEYMKLGSQ

SEQ ID NO: 18010 - protein, 327 aa, Triticum aestivum
  peptide (1)..(327): Ceres Seq. ID no. 15176117
  misc_feature (98)..(167): Pfam Name: a.k.a. RRM, RBD, or RNP domain Pfam Description: RNA recognition motif.
  misc_feature (1)..(327): NCBI GI NO: 28201305 NR Description: putative RNA binding protein
  misc_feature (1)..(295): NCBI GI NO: 37535274 NR Description: putative RNA-binding protein
  misc_feature (70)..(303): NCBI GI NO: 22328624 NR Description: heterogeneous nuclear ribonucleoprotein
  misc_feature (1)..(50): NCBI GI NO: 22328624 NR Description: heterogeneous nuclear ribonucleoprotein
  misc_feature (70)..(290): NCBI GI NO: 15226106 NR Description: heterogeneous nuclear ribonucleoprotein
  misc_feature (1)..(50): NCBI GI NO: 15226106 NR Description: heterogeneous nuclear ribonucleoprotein
  misc_feature (77)..(178): NCBI GI NO: 40539059 NR Description: putative RNA binding protein
  misc_feature (1)..(50): NCBI GI NO: 40539059 NR Description: putative RNA binding protein
  misc_feature (1)..(264): NCBI GI NO: 15217975 NR Description: RNA-binding protein [Arabidopsis thaliana]
  misc_feature (1)..(264): NCBI GI NO: 25456498 NR Description: RNA binding protein
MRDKESGHGRGFGFVEFEDEEAAAKALGDGERPKHFICGRLVDVKRARARPPRNLGEQPVHQHQHQHQLEQGPVQGHQDAGDSTGASSDSMSYASKKVFIGGLRDNITEEEFRAYFEAFGTVTDVVVIYDSLTSRSRGFGFVTFDSEEAVRKVMRQSFHDLKGTRVEAKIAIPKDAQYYRNGRGRGSRTFGGRGPVGFDGSTYQPYNNRHGFYNGYMPQPVPTHPYYHGLYFGMGGNPYANAYPNHAVMANVPNMVARRPVYSPYPPMYPGYGFAYRSGYAGAAPSVPYGVNGGRDYMNDQDSMDVQELDSAATIATKFEYMKLGSQ

SEQ ID NO: 18011 - DNA, 1603 bp, Triticum aestivum
  misc_feature (1)..(1603): Ceres Seq. ID no. 13663832
  misc_feature (1496)..(1496): n is a, c, t, g, unknown, or other
  misc_feature (1497)..(1497): n is a, c, t, g, unknown, or other
  misc_feature (1498)..(1498): n is a, c, t, g, unknown, or other
  misc_feature (1127)..(1127): n is a, c, t, g, unknown, or other
ctagaacatcctaatcgaaaaatcaaatctttacacgttatcagccatgctagcctcgaccaacagagcacgaacaagaagagacgagaaggtgagatggcagggatgaacctgcatagaatcgccactgcccttgttcgattcatttgacgggagatccgtcgatctgccagacgccacagtgctggtgttcctcgccattggggcccaggcaacggccgccgtggtcgtcgtggtcgtcaggatcaccctggccccgccgccgcagagcaggcaggaccaagcaacccatctgccgccgtccaccacgcctaccaggcacccccgatgccggccttcgtcgctccgcaaatggactgggctcccgccgatgcagcagccctgttcctgggagaggaggacttcttcgacgccgctcaggccccgccaccgcccgggatcttctccggcaacggcatggacgtaggcgtggccttctgtctggtgcacggatacgccccttgccctgcccgcgatttctgccccgtgcacgggtacgggccgtgccctccaccgccggccactccaccaccagaaccggaggtcatcgacgagccgctcgcctacccggacctcccaatgccgacgcccgccgacgaagacgaggagcacttcgcccctccaggctatggccctgtgcccgccatgatggagtgggaggtgacgccgaacgaagaggaggagcagtggctcaactccgttgtgaagcaggagccaaccacgccggcggagaccaaagaacccggcgccaccatccccgacctcaacactgccacctgcgtgaagatcgaggaagcggcgtcgtcttccaaggccccagcatctccgccgcctccgcccccggcaagcccgctaacgcctccaccggcggctccccggatcctttgcccgtttcgcggcggcgctggagcagcaccgccccggcctccgctccggctcctgggcccctgcaggcctccacctccccggctacgccgcggggggaccctcctcctcctgaagatcgccggcgctgggcgccatcggcggcggccggcgggatcccgtggaggtggcggtggaaagggggggakkkmmycsaavcgccncccchccwtcccagtcccccttatccgctcgatgtctccatcagtggcgccgccatgggcctgggccgaaaggcctcgtgggctgtggcccatgttgcaacgactaggaaaaaaatacccaacgggttataggctagattgcagaaaaatccttttattatcgggatttcgtgcattagtccaactactagcactaatttagtgcttgtcatgttttagccccgtaaatttgggaattcgcagatacgttcaactactagtgctgtaattaagtattgtcatgttttagaccttgtatctcgatgtggttatatattgtactcgattaaattgtgtattgatgtttagaccatattatttctwhtdkdnnnaaaaaaaaaaaaaaaaaaaaaaaaaaaaaaaaaaaaaaaaaaataaaaaaaaaaaaaaaaargtttatcgataccgycaacctcaagggggggcccggwacccaa

SEQ ID NO: 18012 - protein, 333 aa, Triticum aestivum
  peptide (1)..(333): Ceres Seq. ID no. 15220254
  misc_feature (1)..(317): Pfam Name: Pfam Description:  Formin Homology 2 Domain
  misc_feature (1)..(317): NCBI GI NO: 15222464 NR Description: formin homology 2 (FH2) domain-containing protein
  misc_feature (1)..(226): NCBI GI NO: 40741074 NR Description: hypothetical protein AN8715.2
  misc_feature (1)..(226): NCBI GI NO: 20138131 NR Description: Vegetative cell wall protein gp1 precursor
  misc_feature (1)..(228): NCBI GI NO: 5305335 NR Description: proline-rich mucin homolog
  misc_feature (1)..(285): NCBI GI NO: 15240851 NR Description: expressed protein [Arabidopsis thaliana]
  misc_feature (74)..(226): NCBI GI NO: 15219860 NR Description: proline-rich protein family [Arabidopsis thaliana]
  misc_feature (77)..(253): NCBI GI NO: 93052 NR Description: 61K protein
  misc_feature (77)..(253): NCBI GI NO: 9627751 NR Description: viral capsid associated protein
  misc_feature (58)..(226): NCBI GI NO: 11994732 NR Description: contains similarity to cell wall-plasma membranelinker protein~gene_id:MKA23
  misc_feature (76)..(253): NCBI GI NO: 23577835 NR Description: ORF1629
  misc_feature (262)..(262): Xaa is any aa, unknown or other
  misc_feature (263)..(263): Xaa is any aa, unknown or other
  misc_feature (264)..(264): Xaa is any aa, unknown or other
  misc_feature (265)..(265): Xaa is any aa, unknown or other
  misc_feature (267)..(267): Xaa is any aa, unknown or other
  misc_feature (269)..(269): Xaa is any aa, unknown or other
  misc_feature (270)..(270): Xaa is any aa, unknown or other
MPAFVAPQMDWAPADAAALFLGEEDFFDAAQAPPPPGIFSGNGMDVGVAFCLVHGYAPCPARDFCPVHGYGPCPPPPATPPPEPEVIDEPLAYPDLPMPTPADEDEEHFAPPGYGPVPAMMEWEVTPNEEEEQWLNSVVKQEPTTPAETKEPGATIPDLNTATCVKIEEAASSSKAPASPPPPPPASPLTPPPAAPRILCPFRGGAGAAPPRPPLRLLGPCRPPPPRLRRGGTLLLLKIAGAGRHRRRPAGSRGGGGGKGGXXXXRXPXXPVPLIRSMSPSVAPPWAWAERPRGLWPMLQRLGKKYPTGYRLDCRKILLLSGFRALVQLLALI

SEQ ID NO: 18013 - protein, 325 aa, Triticum aestivum
  peptide (1)..(325): Ceres Seq. ID no. 15220255
  misc_feature (1)..(309): Pfam Name: Pfam Description:  Formin Homology 2 Domain
  misc_feature (1)..(309): NCBI GI NO: 15222464 NR Description: formin homology 2 (FH2) domain-containing protein
  misc_feature (1)..(218): NCBI GI NO: 40741074 NR Description: hypothetical protein AN8715.2
  misc_feature (1)..(218): NCBI GI NO: 20138131 NR Description: Vegetative cell wall protein gp1 precursor
  misc_feature (1)..(220): NCBI GI NO: 5305335 NR Description: proline-rich mucin homolog
  misc_feature (1)..(277): NCBI GI NO: 15240851 NR Description: expressed protein [Arabidopsis thaliana]
  misc_feature (66)..(218): NCBI GI NO: 15219860 NR Description: proline-rich protein family [Arabidopsis thaliana]
  misc_feature (69)..(245): NCBI GI NO: 93052 NR Description: 61K protein
  misc_feature (69)..(245): NCBI GI NO: 9627751 NR Description: viral capsid associated protein
  misc_feature (50)..(218): NCBI GI NO: 11994732 NR Description: contains similarity to cell wall-plasma membranelinker protein~gene_id:MKA23
  misc_feature (68)..(245): NCBI GI NO: 23577835 NR Description: ORF1629
  misc_feature (254)..(254): Xaa is any aa, unknown or other
  misc_feature (255)..(255): Xaa is any aa, unknown or other
  misc_feature (256)..(256): Xaa is any aa, unknown or other
  misc_feature (257)..(257): Xaa is any aa, unknown or other
  misc_feature (259)..(259): Xaa is any aa, unknown or other
  misc_feature (261)..(261): Xaa is any aa, unknown or other
  misc_feature (262)..(262): Xaa is any aa, unknown or other
MDWAPADAAALFLGEEDFFDAAQAPPPPGIFSGNGMDVGVAFCLVHGYAPCPARDFCPVHGYGPCPPPPATPPPEPEVIDEPLAYPDLPMPTPADEDEEHFAPPGYGPVPAMMEWEVTPNEEEEQWLNSVVKQEPTTPAETKEPGATIPDLNTATCVKIEEAASSSKAPASPPPPPPASPLTPPPAAPRILCPFRGGAGAAPPRPPLRLLGPCRPPPPRLRRGGTLLLLKIAGAGRHRRRPAGSRGGGGGKGGXXXXRXPXXPVPLIRSMSPSVAPPWAWAERPRGLWPMLQRLGKKYPTGYRLDCRKILLLSGFRALVQLLALI

SEQ ID NO: 18014 - protein, 290 aa, Triticum aestivum
  peptide (1)..(290): Ceres Seq. ID no. 15220256
  misc_feature (1)..(274): Pfam Name: Pfam Description:  Formin Homology 2 Domain
  misc_feature (1)..(274): NCBI GI NO: 15222464 NR Description: formin homology 2 (FH2) domain-containing protein
  misc_feature (1)..(183): NCBI GI NO: 40741074 NR Description: hypothetical protein AN8715.2
  misc_feature (1)..(183): NCBI GI NO: 20138131 NR Description: Vegetative cell wall protein gp1 precursor
  misc_feature (1)..(185): NCBI GI NO: 5305335 NR Description: proline-rich mucin homolog
  misc_feature (1)..(242): NCBI GI NO: 15240851 NR Description: expressed protein [Arabidopsis thaliana]
  misc_feature (31)..(183): NCBI GI NO: 15219860 NR Description: proline-rich protein family [Arabidopsis thaliana]
  misc_feature (34)..(210): NCBI GI NO: 93052 NR Description: 61K protein
  misc_feature (34)..(210): NCBI GI NO: 9627751 NR Description: viral capsid associated protein
  misc_feature (15)..(183): NCBI GI NO: 11994732 NR Description: contains similarity to cell wall-plasma membranelinker protein~gene_id:MKA23
  misc_feature (33)..(210): NCBI GI NO: 23577835 NR Description: ORF1629
  misc_feature (219)..(219): Xaa is any aa, unknown or other
  misc_feature (220)..(220): Xaa is any aa, unknown or other
  misc_feature (221)..(221): Xaa is any aa, unknown or other
  misc_feature (222)..(222): Xaa is any aa, unknown or other
  misc_feature (224)..(224): Xaa is any aa, unknown or other
  misc_feature (226)..(226): Xaa is any aa, unknown or other
  misc_feature (227)..(227): Xaa is any aa, unknown or other
MDVGVAFCLVHGYAPCPARDFCPVHGYGPCPPPPATPPPEPEVIDEPLAYPDLPMPTPADEDEEHFAPPGYGPVPAMMEWEVTPNEEEEQWLNSVVKQEPTTPAETKEPGATIPDLNTATCVKIEEAASSSKAPASPPPPPPASPLTPPPAAPRILCPFRGGAGAAPPRPPLRLLGPCRPPPPRLRRGGTLLLLKIAGAGRHRRRPAGSRGGGGGKGGXXXXRXPXXPVPLIRSMSPSVAPPWAWAERPRGLWPMLQRLGKKYPTGYRLDCRKILLLSGFRALVQLLALI

SEQ ID NO: 18015 - DNA, 1128 bp, Triticum aestivum
  misc_feature (1)..(1128): Ceres Seq. ID no. 13660155
atccactactcacctagtcacctgcgttgtgtgtgtgcagctggtgctctgtcttccactcttccgttcatcgtctaggcgctgtccaacctgtcaagatggaatcctacgccaacggagccaaatttgattgcttgctgtttgacatggatgacaccctctacccactgatcttaggaatcaacttagcctgccgcaacaacatccaagactacatgctgaacaagcttcagatcgaggagagcctggtccccaagatgtgcctggatctgtacaaagaatatggaactacgatggccggtctgaagcttatgggttacgaattcgactacgacgaattccacgccagcgtgcacggtaaattgccatacgagaagctgaagccggaccctgtcctgaggaacctgctgctttcgatgccacagaggaaaatcatattcaccaattctgacgaggcccacgcggcgaccgtcctggagaagatggggctggagggatgcttcgaggggatcatatgcttcgagaccctgaaccccaagaatccaggtgacacagacgctagctctggcaagagggtcctctgcaagccgtccctggagtccatggaagccgtggtggagatcgccaagctcgaccccaagaagacagtgttcttcgacgacagcccgcgcaacatcgcctcagggaaagcggcaggcttccataccgtcatcgtagggagctcggcgctcgtgcccggggcggacgtggcgctagagagcatccacaacatcagggaggcgctgccggagctgtgggaggcgggcggcgaccacgtcgaggccgccgtcgacatccggtccgccgccgtggccgagaccacggtgctcgcgtgagccgccggcgctgcctgccagatgattaatatgcttcgtccgccttgactatattaacacaaaaaaggcggaggcgaacgactgaatccaggaaaaacccgtatatgctatggtttactcgaccatgatccatggtgatcagtgatcactgatgaatgcgtaggtattaaatgtacaggtgtactacttgtgtactgatgtgatcgaaacaccgtaataataagcaccgtaaatcttaaagattcgctcattg

SEQ ID NO: 18016 - protein, 258 aa, Triticum aestivum
  peptide (1)..(258): Ceres Seq. ID no. 15220014
  misc_feature (10)..(209): Pfam Name: Pfam Description:  haloacid dehalogenase-like hydrolase
  misc_feature (1)..(251): NCBI GI NO: 34913328 NR Description: contains ESTsAU088644
  misc_feature (1)..(149): NCBI GI NO: 40714684 NR Description: expressed protein
  misc_feature (151)..(258): NCBI GI NO: 40714684 NR Description: expressed protein
  misc_feature (7)..(252): NCBI GI NO: 11279021 NR Description: hypothetical protein F21F14
  misc_feature (9)..(148): NCBI GI NO: 7406669 NR Description: putative ripening-related protein [Vitis vinifera]
  misc_feature (160)..(258): NCBI GI NO: 7406669 NR Description: putative ripening-related protein [Vitis vinifera]
  misc_feature (8)..(152): NCBI GI NO: 30697234 NR Description: haloacid dehalogenase-like hydrolase family
  misc_feature (148)..(254): NCBI GI NO: 30697234 NR Description: haloacid dehalogenase-like hydrolase family
  misc_feature (27)..(252): NCBI GI NO: 30695534 NR Description: haloacid dehalogenase-related hydrolase family
  misc_feature (8)..(152): NCBI GI NO: 30697236 NR Description: haloacid dehalogenase-like hydrolase family
MESYANGAKFDCLLFDMDDTLYPLILGINLACRNNIQDYMLNKLQIEESLVPKMCLDLYKEYGTTMAGLKLMGYEFDYDEFHASVHGKLPYEKLKPDPVLRNLLLSMPQRKIIFTNSDEAHAATVLEKMGLEGCFEGIICFETLNPKNPGDTDASSGKRVLCKPSLESMEAVVEIAKLDPKKTVFFDDSPRNIASGKAAGFHTVIVGSSALVPGADVALESIHNIREALPELWEAGGDHVEAAVDIRSAAVAETTVLA

SEQ ID NO: 18017 - protein, 242 aa, Triticum aestivum
  peptide (1)..(242): Ceres Seq. ID no. 15220015
  misc_feature (1)..(193): Pfam Name: Pfam Description:  haloacid dehalogenase-like hydrolase
  misc_feature (1)..(235): NCBI GI NO: 34913328 NR Description: contains ESTsAU088644
  misc_feature (1)..(133): NCBI GI NO: 40714684 NR Description: expressed protein
  misc_feature (135)..(242): NCBI GI NO: 40714684 NR Description: expressed protein
  misc_feature (1)..(236): NCBI GI NO: 11279021 NR Description: hypothetical protein F21F14
  misc_feature (1)..(132): NCBI GI NO: 7406669 NR Description: putative ripening-related protein [Vitis vinifera]
  misc_feature (144)..(242): NCBI GI NO: 7406669 NR Description: putative ripening-related protein [Vitis vinifera]
  misc_feature (1)..(136): NCBI GI NO: 30697234 NR Description: haloacid dehalogenase-like hydrolase family
  misc_feature (132)..(238): NCBI GI NO: 30697234 NR Description: haloacid dehalogenase-like hydrolase family
  misc_feature (11)..(236): NCBI GI NO: 30695534 NR Description: haloacid dehalogenase-related hydrolase family
  misc_feature (1)..(136): NCBI GI NO: 30697236 NR Description: haloacid dehalogenase-like hydrolase family
MDDTLYPLILGINLACRNNIQDYMLNKLQIEESLVPKMCLDLYKEYGTTMAGLKLMGYEFDYDEFHASVHGKLPYEKLKPDPVLRNLLLSMPQRKIIFTNSDEAHAATVLEKMGLEGCFEGIICFETLNPKNPGDTDASSGKRVLCKPSLESMEAVVEIAKLDPKKTVFFDDSPRNIASGKAAGFHTVIVGSSALVPGADVALESIHNIREALPELWEAGGDHVEAAVDIRSAAVAETTVLA

SEQ ID NO: 18018 - protein, 219 aa, Triticum aestivum
  peptide (1)..(219): Ceres Seq. ID no. 15220016
  misc_feature (1)..(170): Pfam Name: Pfam Description:  haloacid dehalogenase-like hydrolase
  misc_feature (1)..(212): NCBI GI NO: 34913328 NR Description: contains ESTsAU088644
  misc_feature (1)..(110): NCBI GI NO: 40714684 NR Description: expressed protein
  misc_feature (112)..(219): NCBI GI NO: 40714684 NR Description: expressed protein
  misc_feature (1)..(213): NCBI GI NO: 11279021 NR Description: hypothetical protein F21F14
  misc_feature (1)..(109): NCBI GI NO: 7406669 NR Description: putative ripening-related protein [Vitis vinifera]
  misc_feature (121)..(219): NCBI GI NO: 7406669 NR Description: putative ripening-related protein [Vitis vinifera]
  misc_feature (1)..(113): NCBI GI NO: 30697234 NR Description: haloacid dehalogenase-like hydrolase family
  misc_feature (109)..(215): NCBI GI NO: 30697234 NR Description: haloacid dehalogenase-like hydrolase family
  misc_feature (1)..(213): NCBI GI NO: 30695534 NR Description: haloacid dehalogenase-related hydrolase family
  misc_feature (1)..(113): NCBI GI NO: 30697236 NR Description: haloacid dehalogenase-like hydrolase family
MLNKLQIEESLVPKMCLDLYKEYGTTMAGLKLMGYEFDYDEFHASVHGKLPYEKLKPDPVLRNLLLSMPQRKIIFTNSDEAHAATVLEKMGLEGCFEGIICFETLNPKNPGDTDASSGKRVLCKPSLESMEAVVEIAKLDPKKTVFFDDSPRNIASGKAAGFHTVIVGSSALVPGADVALESIHNIREALPELWEAGGDHVEAAVDIRSAAVAETTVLA

SEQ ID NO: 18019 - DNA, 1827 bp, Triticum aestivum
  misc_feature (1)..(1827): Ceres Seq. ID no. 15170107
gaccggttaaacacacttcgacgctgacgggtgggcctcacgtggcaggaacggaaacacaccgcgaagctttggctaatccaacccacagagacggcgcgcatggcgaccgcggcggcggcggcggtggcgtcgctccggtacttcccctcttccgtcaggaaccgcagctatcccggaactatcggcggcggcgctgtggtcacgttttctccgcggcggggccgctgtgcgacggcggccgtggccgcgccttcgcgggaggcggagccggcctcctcgctcggggacctcacccgcgtagacttccccatcctcgaccaggaatttgatggtaacaaattagtttacttcgacaatggtgcaacatcacagaaaccctctcatgtgatgaaagccttagacgactactaccgattttataattcgaatgttcaccgtggcattcatgctctcagcgcaaaggctactgatgcatatgagagtgcaagaaggaaagttgcaaatttcgtcaatgcggctgatagtagagagattatttttactcgtaatgctacagaagctatcaatttagtagcttattcatggggcctatctaacttaaaacaaggagatgagattattcttacagttgcagagcatcatagtgcgattgttccttggcaatttgtatcccaaaaaactggtgctgtcctaaagtatgttgggctgactaaagaagaggttccagacatggagcagttaaaagggcttctgtcaagcaagacaaagattgttgttgtccatcatgtttcaaacgtcctgggttcaatgcttcctattgaggaggtcgtatcatgtgcaaacaaagttggagctaaagttcttgtagatgcttgtcaaagtgttcctcatatgccagttgatgttcagaagcttggtgcagattttcttgttgcatcctcgcataagatgtgtggccctacaggcgtcggattcttgcatggaaaatttgagatcttgtcatctatggagcctttcttaggtggtggtgaaatgattgcagatgtgttcgaagacaaatctacatatgctgagccgccttctagatttgaggctggaactcctgcaattggagaagctataggattgggggttgcgatagattatctgtcacactttggcatgcagacgatccacgagtatgagaaagagttggggtcgtacctttatgagagccttctctccgttccaaatgttcgtatctatggtccagcgccttctgcaagtgatcaccgtgctcctttatgttctttcaatgttgagaatgttcatccaacagatattgccgaaattcttgatctccagcatggcatagcgattcggtcagggcatcattgtgcacagattttgcatcgcacccttggtatcaatgcgagcgcccgtgctagtcttcacttttacaacacaaaagaggaggtggatgccttcatccatgggctaaaagctaccattgatttccttacttcccaccactagttcagttcagttagcaaacattagcttcctcgttgtctctcactagttgaagtgcgatagaaggcctacctgctcaaactgtctgatgtctttcagctttttcgtgtaaaccatgcacgggcaagtttatctactccagtactcttgccctctggaagtttcgagataaagtactgtcggctatgtagcctgggcggctccgtttatttcctatatataaaccgtattatacctggaccgttggccagttcatctgtaatttacgatctgtcaataactccataacagtaagcatggtggatacttgtg

SEQ ID NO: 18020 - protein, 471 aa, Triticum aestivum
  peptide (1)..(471): Ceres Seq. ID no. 15170108
  misc_feature (92)..(456): Pfam Name: Pfam Description:  Aminotransferase class-V
  misc_feature (23)..(469): NCBI GI NO: 22329419 NR Description: nitrogen fixation protein. putative  (NifS)
  misc_feature (57)..(466): NCBI GI NO: 23129616 NR Description: hypothetical protein [Nostoc punctiforme]
  misc_feature (57)..(466): NCBI GI NO: 17229987 NR Description: probable aminotransferase [Nostoc sp. PCC 7120]
  misc_feature (23)..(362): NCBI GI NO: 6664318 NR Description: T27G7.17 [Arabidopsis thaliana]
  misc_feature (350)..(469): NCBI GI NO: 6664318 NR Description: T27G7.17 [Arabidopsis thaliana]
  misc_feature (61)..(469): NCBI GI NO: 34765746 NR Description: SufS [Synechococcus sp. PCC 7002]
  misc_feature (57)..(468): NCBI GI NO: 22299611 NR Description: cysteine desulfurase
  misc_feature (60)..(466): NCBI GI NO: 23040580 NR Description: hypothetical protein
  misc_feature (60)..(468): NCBI GI NO: 16331747 NR Description: NifS protein [Synechocystis sp. PCC 6803]
  misc_feature (49)..(457): NCBI GI NO: 22989826 NR Description: hypothetical protein [Burkholderia fungorum]
MATAAAAAVASLRYFPSSVRNRSYPGTIGGGAVVTFSPRRGRCATAAVAAPSREAEPASSLGDLTRVDFPILDQEFDGNKLVYFDNGATSQKPSHVMKALDDYYRFYNSNVHRGIHALSAKATDAYESARRKVANFVNAADSREIIFTRNATEAINLVAYSWGLSNLKQGDEIILTVAEHHSAIVPWQFVSQKTGAVLKYVGLTKEEVPDMEQLKGLLSSKTKIVVVHHVSNVLGSMLPIEEVVSCANKVGAKVLVDACQSVPHMPVDVQKLGADFLVASSHKMCGPTGVGFLHGKFEILSSMEPFLGGGEMIADVFEDKSTYAEPPSRFEAGTPAIGEAIGLGVAIDYLSHFGMQTIHEYEKELGSYLYESLLSVPNVRIYGPAPSASDHRAPLCSFNVENVHPTDIAEILDLQHGIAIRSGHHCAQILHRTLGINASARASLHFYNTKEEVDAFIHGLKATIDFLTSHH

SEQ ID NO: 18021 - protein, 375 aa, Triticum aestivum
  peptide (1)..(375): Ceres Seq. ID no. 15170109
  misc_feature (1)..(360): Pfam Name: Pfam Description:  Aminotransferase class-V
  misc_feature (1)..(373): NCBI GI NO: 22329419 NR Description: nitrogen fixation protein. putative  (NifS)
  misc_feature (1)..(370): NCBI GI NO: 23129616 NR Description: hypothetical protein [Nostoc punctiforme]
  misc_feature (1)..(370): NCBI GI NO: 17229987 NR Description: probable aminotransferase [Nostoc sp. PCC 7120]
  misc_feature (1)..(266): NCBI GI NO: 6664318 NR Description: T27G7.17 [Arabidopsis thaliana]
  misc_feature (254)..(373): NCBI GI NO: 6664318 NR Description: T27G7.17 [Arabidopsis thaliana]
  misc_feature (1)..(373): NCBI GI NO: 34765746 NR Description: SufS [Synechococcus sp. PCC 7002]
  misc_feature (1)..(372): NCBI GI NO: 22299611 NR Description: cysteine desulfurase
  misc_feature (1)..(370): NCBI GI NO: 23040580 NR Description: hypothetical protein
  misc_feature (1)..(372): NCBI GI NO: 16331747 NR Description: NifS protein [Synechocystis sp. PCC 6803]
  misc_feature (1)..(361): NCBI GI NO: 22989826 NR Description: hypothetical protein [Burkholderia fungorum]
MKALDDYYRFYNSNVHRGIHALSAKATDAYESARRKVANFVNAADSREIIFTRNATEAINLVAYSWGLSNLKQGDEIILTVAEHHSAIVPWQFVSQKTGAVLKYVGLTKEEVPDMEQLKGLLSSKTKIVVVHHVSNVLGSMLPIEEVVSCANKVGAKVLVDACQSVPHMPVDVQKLGADFLVASSHKMCGPTGVGFLHGKFEILSSMEPFLGGGEMIADVFEDKSTYAEPPSRFEAGTPAIGEAIGLGVAIDYLSHFGMQTIHEYEKELGSYLYESLLSVPNVRIYGPAPSASDHRAPLCSFNVENVHPTDIAEILDLQHGIAIRSGHHCAQILHRTLGINASARASLHFYNTKEEVDAFIHGLKATIDFLTSHH

SEQ ID NO: 18022 - protein, 261 aa, Triticum aestivum
  peptide (1)..(261): Ceres Seq. ID no. 15170110
  misc_feature (1)..(246): Pfam Name: Pfam Description:  Aminotransferase class-V
  misc_feature (1)..(259): NCBI GI NO: 22329419 NR Description: nitrogen fixation protein. putative  (NifS)
  misc_feature (1)..(256): NCBI GI NO: 23129616 NR Description: hypothetical protein [Nostoc punctiforme]
  misc_feature (1)..(256): NCBI GI NO: 17229987 NR Description: probable aminotransferase [Nostoc sp. PCC 7120]
  misc_feature (1)..(152): NCBI GI NO: 6664318 NR Description: T27G7.17 [Arabidopsis thaliana]
  misc_feature (140)..(259): NCBI GI NO: 6664318 NR Description: T27G7.17 [Arabidopsis thaliana]
  misc_feature (1)..(259): NCBI GI NO: 34765746 NR Description: SufS [Synechococcus sp. PCC 7002]
  misc_feature (1)..(258): NCBI GI NO: 22299611 NR Description: cysteine desulfurase
  misc_feature (1)..(256): NCBI GI NO: 23040580 NR Description: hypothetical protein
  misc_feature (1)..(258): NCBI GI NO: 16331747 NR Description: NifS protein [Synechocystis sp. PCC 6803]
  misc_feature (1)..(247): NCBI GI NO: 22989826 NR Description: hypothetical protein [Burkholderia fungorum]
MEQLKGLLSSKTKIVVVHHVSNVLGSMLPIEEVVSCANKVGAKVLVDACQSVPHMPVDVQKLGADFLVASSHKMCGPTGVGFLHGKFEILSSMEPFLGGGEMIADVFEDKSTYAEPPSRFEAGTPAIGEAIGLGVAIDYLSHFGMQTIHEYEKELGSYLYESLLSVPNVRIYGPAPSASDHRAPLCSFNVENVHPTDIAEILDLQHGIAIRSGHHCAQILHRTLGINASARASLHFYNTKEEVDAFIHGLKATIDFLTSHH

SEQ ID NO: 18023 - DNA, 913 bp, Triticum aestivum
  misc_feature (1)..(913): Ceres Seq. ID no. 15172974
ccattttccccattcgttgggagtcaggacgagggagggaagagcccctgacgatgtcggtgccggaggcggggcaatcggcggggagggacgagcaggagatggacaattacgagcagcaccagaccagagtgctcatggcgctgatgcagggcttgtgcgccgcgaggtaccgcaaggccgacaacaccccctgcctcgtcgaccagggcctctacctgggttctgttggagcagcactgaacaacgaggctctgaagagcttgaacatcacccacatcttggttgttgccagatcactgaatcccgcctttccagcagaatttacatacaagaagatcgaggtacttgacagcccagacactgatttgggaaagcatttcggtgaatgctttactttcatagatgagggtatctgcactggtggcaatgtgctggttcactgctttgcaggtcggtcacggagtgtcacagttgttcttgcatatcttatgaagaagcatcagatgagcctgcaaagtgccatgtcactagttagaagcaaacgacctcaaatagcacccaatgcgggctttatatcccagctggtgaactttgagaagtctctgcaagatgcatggatccatgggaggattccgtaaagagagacctgaaggggactggaatatcaccaaagaactagccatgtgcagggaagtgtggaagttagctatccacgtgcagggaagtgtggaagttagctagccacgtgccagaaccatggctaggttttgagatcttataggtttcaattctagcttaccccaacttgtttgggactgaaaggctttgttgttgtgcatggatccaagtattagatgtcattggtaccatgactcaattgtattaatcgtattcactaagttttcactcg

SEQ ID NO: 18024 - protein, 212 aa, Triticum aestivum
  peptide (1)..(212): Ceres Seq. ID no. 15172975
  misc_feature (64)..(201): Pfam Name: Pfam Description:  Dual specificity phosphatase, catalytic domain
  misc_feature (18)..(203): NCBI GI NO: 34905574 NR Description: hypothetical protein~similar to Arabidopsisthaliana chromosome 3
  misc_feature (18)..(203): NCBI GI NO: 15229482 NR Description: dual-specificity protein phosphatase
  misc_feature (34)..(203): NCBI GI NO: 9294518 NR Description: dual-specificity protein phosphatase-like protein
  misc_feature (67)..(203): NCBI GI NO: 30679726 NR Description: dual-specificity protein phosphatase -related
  misc_feature (67)..(203): NCBI GI NO: 18397475 NR Description: dual-specificity protein phosphatase -related
  misc_feature (71)..(200): NCBI GI NO: 18254478 NR Description: dual specificity phosphatase 19
  misc_feature (71)..(212): NCBI GI NO: 21624338 NR Description: dual-specificity phosphatase SKRP1 [Mus musculus]
  misc_feature (71)..(212): NCBI GI NO: 13277360 NR Description: dual specificity phosphatase 19 [Mus musculus]
  misc_feature (71)..(212): NCBI GI NO: 12845353 NR Description: unnamed protein product [Mus musculus]
  misc_feature (67)..(200): NCBI GI NO: 24643332 NR Description: CG14211-PB [Drosophila melanogaster]
IFPIRWESGRGREEPLTMSVPEAGQSAGRDEQEMDNYEQHQTRVLMALMQGLCAARYRKADNTPCLVDQGLYLGSVGAALNNEALKSLNITHILVVARSLNPAFPAEFTYKKIEVLDSPDTDLGKHFGECFTFIDEGICTGGNVLVHCFAGRSRSVTVVLAYLMKKHQMSLQSAMSLVRSKRPQIAPNAGFISQLVNFEKSLQDAWIHGRIP

SEQ ID NO: 18025 - protein, 195 aa, Triticum aestivum
  peptide (1)..(195): Ceres Seq. ID no. 15172976
  misc_feature (47)..(184): Pfam Name: Pfam Description:  Dual specificity phosphatase, catalytic domain
  misc_feature (1)..(186): NCBI GI NO: 34905574 NR Description: hypothetical protein~similar to Arabidopsisthaliana chromosome 3
  misc_feature (1)..(186): NCBI GI NO: 15229482 NR Description: dual-specificity protein phosphatase
  misc_feature (17)..(186): NCBI GI NO: 9294518 NR Description: dual-specificity protein phosphatase-like protein
  misc_feature (50)..(186): NCBI GI NO: 30679726 NR Description: dual-specificity protein phosphatase -related
  misc_feature (50)..(186): NCBI GI NO: 18397475 NR Description: dual-specificity protein phosphatase -related
  misc_feature (54)..(183): NCBI GI NO: 18254478 NR Description: dual specificity phosphatase 19
  misc_feature (54)..(195): NCBI GI NO: 21624338 NR Description: dual-specificity phosphatase SKRP1 [Mus musculus]
  misc_feature (54)..(195): NCBI GI NO: 13277360 NR Description: dual specificity phosphatase 19 [Mus musculus]
  misc_feature (54)..(195): NCBI GI NO: 12845353 NR Description: unnamed protein product [Mus musculus]
  misc_feature (50)..(183): NCBI GI NO: 24643332 NR Description: CG14211-PB [Drosophila melanogaster]
MSVPEAGQSAGRDEQEMDNYEQHQTRVLMALMQGLCAARYRKADNTPCLVDQGLYLGSVGAALNNEALKSLNITHILVVARSLNPAFPAEFTYKKIEVLDSPDTDLGKHFGECFTFIDEGICTGGNVLVHCFAGRSRSVTVVLAYLMKKHQMSLQSAMSLVRSKRPQIAPNAGFISQLVNFEKSLQDAWIHGRIP

SEQ ID NO: 18026 - protein, 179 aa, Triticum aestivum
  peptide (1)..(179): Ceres Seq. ID no. 15172977
  misc_feature (31)..(168): Pfam Name: Pfam Description:  Dual specificity phosphatase, catalytic domain
  misc_feature (1)..(170): NCBI GI NO: 34905574 NR Description: hypothetical protein~similar to Arabidopsisthaliana chromosome 3
  misc_feature (1)..(170): NCBI GI NO: 15229482 NR Description: dual-specificity protein phosphatase
  misc_feature (1)..(170): NCBI GI NO: 9294518 NR Description: dual-specificity protein phosphatase-like protein
  misc_feature (34)..(170): NCBI GI NO: 30679726 NR Description: dual-specificity protein phosphatase -related
  misc_feature (34)..(170): NCBI GI NO: 18397475 NR Description: dual-specificity protein phosphatase -related
  misc_feature (38)..(167): NCBI GI NO: 18254478 NR Description: dual specificity phosphatase 19
  misc_feature (38)..(179): NCBI GI NO: 21624338 NR Description: dual-specificity phosphatase SKRP1 [Mus musculus]
  misc_feature (38)..(179): NCBI GI NO: 13277360 NR Description: dual specificity phosphatase 19 [Mus musculus]
  misc_feature (38)..(179): NCBI GI NO: 12845353 NR Description: unnamed protein product [Mus musculus]
  misc_feature (34)..(167): NCBI GI NO: 24643332 NR Description: CG14211-PB [Drosophila melanogaster]
MDNYEQHQTRVLMALMQGLCAARYRKADNTPCLVDQGLYLGSVGAALNNEALKSLNITHILVVARSLNPAFPAEFTYKKIEVLDSPDTDLGKHFGECFTFIDEGICTGGNVLVHCFAGRSRSVTVVLAYLMKKHQMSLQSAMSLVRSKRPQIAPNAGFISQLVNFEKSLQDAWIHGRIP

SEQ ID NO: 18027 - DNA, 2128 bp, Triticum aestivum
  misc_feature (1)..(2128): Ceres Seq. ID no. 15170135
tcacgctctcggtttcctttcgtctcgtcccgttccgccgtcccgtgccggaccgccccacccaccacctccacctcccactccggagcagttcacagtctccactccacctcccacctataagtttcctcatcgccaccattcctcgtcccgttctcagttcctcactcccccccttccacaatcccctcgcttcgcacggcgaagcagccagagccagagcccgccttccagaaccagcccgcccgccatggcgagcttcgcgaggcaggagcaccagttcctcgccgagctcggcctcgcgccgcgcaacccgggctccttcgcctgcggcgcctggggcggctcgggccccgtcgtcaccaccaccaaccctagcaacaacgaggtcattgctgaggtcgtcgaggcgtccatggacgactacgagaaggggatgagcgcctgcttcgacgccgccaagacctggatggctgttccggcaccaaaacgaggagaaattgttaggcagattggtgatgcactgagagcaaagcttcatcaccttggcagacttctctcactcgagatggggaaaattctccctgaaggaattggggaggttcaggaaattattgacatgtgtgattatgctgtggggctaagtcgtcagctaaatggatccatcataccatctgaactcccaaaccatatgatgatggaggtctggaatcctcttggagttgttggtgtcatcactgcattcaatttcccttgcgccgtgctgggttggaatgcttgcattgctttggtgtgcggcaactgtgttgtctggaagggcgctccaactactccattgatcactatcgcaatgactaaaatagtggctagtgtatttgaaaagaacaacttgccaagtgcaatcttcacagctttttgtgggggtgctgaaattggccaagcaattgctcttgacacaaggatacctttggtttcattcacaggaagtacaaaggtaggtcaaatggttcagcaacaggttagcgcgagatttggtaaatgccttcttgaacttagtgggaacaacgccattattgtcatggatgatgcagacattccactagctgtgcgttctgttctgtttgctgctgttggcacagcaggacagcgatgcactacatgtcgtaggctgcttcttcacgaaagcatatatcaaacatttcttgatcaacttgttgaggtttataaacaagtccgtattggggatcctatggaaaagggcaccttgctgggaccactgcacactactacatcaaaggaaagctttttgaaaggcatccaaactatcaaatcccagggaggaaaaatccttttaggaggatctgctattgaatcagaagggaactttgttcagccaacaattgtggaaatttcacctgatgcgccagttgtgagggaagaattgtttggtcctgtcctttatgccatgaaatttctgacactgaaggaagcaattgaaatcaacaattctgttcctcaaggattgagcagttctatatttacaaggaaaccggatgctattttcaagtggattgggcctcatggcagtgattgtggtatagtgaatgtaaacatacccactaatggtgctgaaattggtggagcttttggtggagaaaaagcaaccggtggtgggcgagaagctggaagtgattcttggaagcagtacatgaggagggccacttgtacaatcaactatggaagcgagctgcctctagcacagggaattaactttggctagtttggtgctgaaggactgccagtgaaacgtcgtgctgcagcatggggattggggataatgtgttgagatatctggagcgtgcagccatcatcttcaggaaattctctgtgtcgatcattgcacccaaattgcgacgctgctgctgagtacatataataagagatgtgttgatctcatgtatgcattgttcatgccttttggcatgtttagccatctgtgccctggacctagtctattaataaactggaaaaatagcatatcttccggtgagagtaacattttacgcatgctaccttgagatcggactgctcgaaataaaaggagatcgtagccttcaggccgttgtgt

SEQ ID NO: 18028 - protein, 592 aa, Triticum aestivum
  peptide (1)..(592): Ceres Seq. ID no. 15170136
  misc_feature (84)..(592): NCBI GI NO: 11995457 NR Description: aldehyde dehydrogenase [Oryza sativa]
  misc_feature (87)..(592): NCBI GI NO: 25090068 NR Description: Aldehyde dehydrogenase family 7 member A1
  misc_feature (88)..(592): NCBI GI NO: 15221042 NR Description: aldehyde dehydrogenase, putative (ALDH)
  misc_feature (94)..(592): NCBI GI NO: 118514 NR Description: Aldehyde dehydrogenase family 7 member A1
  misc_feature (88)..(574): NCBI GI NO: 25090053 NR Description: Aldehyde dehydrogenase family 7 member A1
  misc_feature (84)..(592): NCBI GI NO: 29893325 NR Description: aldehyde dehydrogenase family 7 member A1
  misc_feature (83)..(592): NCBI GI NO: 19525534 NR Description: aldehyde dehydrogenase Aldh7B6 [Tortula ruralis]
  misc_feature (91)..(591): NCBI GI NO: 27882244 NR Description: Similar to aldehyde dehydrogenase 7 family
  misc_feature (84)..(591): NCBI GI NO: 25090047 NR Description: Putative aldehyde dehydrogenase family 7 member A1homolog
  misc_feature (91)..(591): NCBI GI NO: 20070418 NR Description: aldehyde dehydrogenase family 7, member A1
HALGFLSSRPVPPSRAGPPHPPPPPPTPEQFTVSTPPPTYKFPHRHHSSSRSQFLTPPLPQSPRFARRSSQSQSPPSRTSPPAMASFARQEHQFLAELGLAPRNPGSFACGAWGGSGPVVTTTNPSNNEVIAEVVEASMDDYEKGMSACFDAAKTWMAVPAPKRGEIVRQIGDALRAKLHHLGRLLSLEMGKILPEGIGEVQEIIDMCDYAVGLSRQLNGSIIPSELPNHMMMEVWNPLGVVGVITAFNFPCAVLGWNACIALVCGNCVVWKGAPTTPLITIAMTKIVASVFEKNNLPSAIFTAFCGGAEIGQAIALDTRIPLVSFTGSTKVGQMVQQQVSARFGKCLLELSGNNAIIVMDDADIPLAVRSVLFAAVGTAGQRCTTCRRLLLHESIYQTFLDQLVEVYKQVRIGDPMEKGTLLGPLHTTTSKESFLKGIQTIKSQGGKILLGGSAIESEGNFVQPTIVEISPDAPVVREELFGPVLYAMKFLTLKEAIEINNSVPQGLSSSIFTRKPDAIFKWIGPHGSDCGIVNVNIPTNGAEIGGAFGGEKATGGGREAGSDSWKQYMRRATCTINYGSELPLAQGINFG

SEQ ID NO: 18029 - protein, 509 aa, Triticum aestivum
  peptide (1)..(509): Ceres Seq. ID no. 15170137
  misc_feature (1)..(509): NCBI GI NO: 11995457 NR Description: aldehyde dehydrogenase [Oryza sativa]
  misc_feature (4)..(509): NCBI GI NO: 25090068 NR Description: Aldehyde dehydrogenase family 7 member A1
  misc_feature (5)..(509): NCBI GI NO: 15221042 NR Description: aldehyde dehydrogenase, putative (ALDH)
  misc_feature (11)..(509): NCBI GI NO: 118514 NR Description: Aldehyde dehydrogenase family 7 member A1
  misc_feature (5)..(491): NCBI GI NO: 25090053 NR Description: Aldehyde dehydrogenase family 7 member A1
  misc_feature (1)..(509): NCBI GI NO: 29893325 NR Description: aldehyde dehydrogenase family 7 member A1
  misc_feature (1)..(509): NCBI GI NO: 19525534 NR Description: aldehyde dehydrogenase Aldh7B6 [Tortula ruralis]
  misc_feature (8)..(508): NCBI GI NO: 27882244 NR Description: Similar to aldehyde dehydrogenase 7 family
  misc_feature (1)..(508): NCBI GI NO: 25090047 NR Description: Putative aldehyde dehydrogenase family 7 member A1homolog
  misc_feature (8)..(508): NCBI GI NO: 20070418 NR Description: aldehyde dehydrogenase family 7, member A1
MASFARQEHQFLAELGLAPRNPGSFACGAWGGSGPVVTTTNPSNNEVIAEVVEASMDDYEKGMSACFDAAKTWMAVPAPKRGEIVRQIGDALRAKLHHLGRLLSLEMGKILPEGIGEVQEIIDMCDYAVGLSRQLNGSIIPSELPNHMMMEVWNPLGVVGVITAFNFPCAVLGWNACIALVCGNCVVWKGAPTTPLITIAMTKIVASVFEKNNLPSAIFTAFCGGAEIGQAIALDTRIPLVSFTGSTKVGQMVQQQVSARFGKCLLELSGNNAIIVMDDADIPLAVRSVLFAAVGTAGQRCTTCRRLLLHESIYQTFLDQLVEVYKQVRIGDPMEKGTLLGPLHTTTSKESFLKGIQTIKSQGGKILLGGSAIESEGNFVQPTIVEISPDAPVVREELFGPVLYAMKFLTLKEAIEINNSVPQGLSSSIFTRKPDAIFKWIGPHGSDCGIVNVNIPTNGAEIGGAFGGEKATGGGREAGSDSWKQYMRRATCTINYGSELPLAQGINFG

SEQ ID NO: 18030 - protein, 454 aa, Triticum aestivum
  peptide (1)..(454): Ceres Seq. ID no. 15170138
  misc_feature (1)..(454): NCBI GI NO: 11995457 NR Description: aldehyde dehydrogenase [Oryza sativa]
  misc_feature (1)..(454): NCBI GI NO: 25090068 NR Description: Aldehyde dehydrogenase family 7 member A1
  misc_feature (1)..(454): NCBI GI NO: 15221042 NR Description: aldehyde dehydrogenase, putative (ALDH)
  misc_feature (1)..(454): NCBI GI NO: 118514 NR Description: Aldehyde dehydrogenase family 7 member A1
  misc_feature (1)..(436): NCBI GI NO: 25090053 NR Description: Aldehyde dehydrogenase family 7 member A1
  misc_feature (1)..(454): NCBI GI NO: 29893325 NR Description: aldehyde dehydrogenase family 7 member A1
  misc_feature (1)..(454): NCBI GI NO: 19525534 NR Description: aldehyde dehydrogenase Aldh7B6 [Tortula ruralis]
  misc_feature (1)..(453): NCBI GI NO: 27882244 NR Description: Similar to aldehyde dehydrogenase 7 family
  misc_feature (1)..(453): NCBI GI NO: 25090047 NR Description: Putative aldehyde dehydrogenase family 7 member A1homolog
  misc_feature (1)..(453): NCBI GI NO: 20070418 NR Description: aldehyde dehydrogenase family 7, member A1
MDDYEKGMSACFDAAKTWMAVPAPKRGEIVRQIGDALRAKLHHLGRLLSLEMGKILPEGIGEVQEIIDMCDYAVGLSRQLNGSIIPSELPNHMMMEVWNPLGVVGVITAFNFPCAVLGWNACIALVCGNCVVWKGAPTTPLITIAMTKIVASVFEKNNLPSAIFTAFCGGAEIGQAIALDTRIPLVSFTGSTKVGQMVQQQVSARFGKCLLELSGNNAIIVMDDADIPLAVRSVLFAAVGTAGQRCTTCRRLLLHESIYQTFLDQLVEVYKQVRIGDPMEKGTLLGPLHTTTSKESFLKGIQTIKSQGGKILLGGSAIESEGNFVQPTIVEISPDAPVVREELFGPVLYAMKFLTLKEAIEINNSVPQGLSSSIFTRKPDAIFKWIGPHGSDCGIVNVNIPTNGAEIGGAFGGEKATGGGREAGSDSWKQYMRRATCTINYGSELPLAQGINFG

SEQ ID NO: 18031 - DNA, 1091 bp, Triticum aestivum
  misc_feature (1)..(1091): Ceres Seq. ID no. 12623011
agagtcgcaacgaaaccaaacaaaccacccgagtcgaccgcttcgagaagcctcgccaccaaggcacccagacccagacctcctcccgggaatcggaaccgcgtcccagccagccccaacccattcgtcgctcccctgatccatccggcgacgcggcggagcgaggaaccaaggctcgagcagcgggcgggcgggcggagaggagccggagagatggcggagaacccgcagctgttcgggaacgggatgcccgtgcccttccacggcgagatgttcgtcctcgcccgcgacggcgtcgagttccacgtcgacaagatcccctcggcgcccggcggtcacgcaaaaacaaagggcaccatatacctgtctaacataaggatggtgtttgtcgccgccaagcctgttgggaacttctttgcctttgatatgcccctgctgtacgtgcacggtgagaagttcaaccaaccgatatttcactgcaacaatatttctggattcgttgagccggttgttccagagagccagaacagggctctgtactcgacccacaccttcaagatcttgttcaaggaaggtggatgtggtacctttgtgccactcttcctgaacctgataacatcagtgcggcgctacaatcagtttgaagcccagcctgctactgtgccccgtgtggaccccatgcaggcagcgcaaactcctgtcgacgacatgatgcgccatgcgtatgtcgatccacatgatcctaccaagatcttcctccagcagcccgcaccggaatcccagctgaggaggagaaactaccacggccccgcggacaacgcgtactgatgctttggcctgattgcgaagtgcatgtgttttcgatgatctatgtggcgcacacgagcaatatatctgtttggtgtcattctggtgattctcactgaaggatgtgatggaagtatagtagtgtgatgatgatgtcagacaattgtgtgcttcactgttggattcaatccagatctaagtataataatgtacatacaaggtgatctgctggattgtatgttgctgatctcgtcgtatagagttaagaattggtctgaatgctg

SEQ ID NO: 18032 - protein, 275 aa, Triticum aestivum
  peptide (1)..(275): Ceres Seq. ID no. 12623012
  misc_feature (72)..(273): NCBI GI NO: 15239148 NR Description: putative protein; protein id: At5g11680
  misc_feature (72)..(268): NCBI GI NO: 23479181 NR Description: arabinogalactan protein [Plasmodium yoelii yoelii]
  misc_feature (72)..(260): NCBI GI NO: 23619609 NR Description: hypothetical protein [Plasmodium falciparum 3D7]
  misc_feature (80)..(260): NCBI GI NO: 39597760 NR Description: Hypothetical protein CBG14242
  misc_feature (97)..(233): NCBI GI NO: 19115900 NR Description: hypothetical protein [Schizosaccharomyces pombe]
RVATKPNKPPESTASRSLATKAPRPRPPPGNRNRVPASPNPFVAPLIHPATRRSEEPRLEQRAGGRRGAGEMAENPQLFGNGMPVPFHGEMFVLARDGVEFHVDKIPSAPGGHAKTKGTIYLSNIRMVFVAAKPVGNFFAFDMPLLYVHGEKFNQPIFHCNNISGFVEPVVPESQNRALYSTHTFKILFKEGGCGTFVPLFLNLITSVRRYNQFEAQPATVPRVDPMQAAQTPVDDMMRHAYVDPHDPTKIFLQQPAPESQLRRRNYHGPADNAY

SEQ ID NO: 18033 - protein, 204 aa, Triticum aestivum
  peptide (1)..(204): Ceres Seq. ID no. 12623013
  misc_feature (1)..(202): NCBI GI NO: 15239148 NR Description: putative protein; protein id: At5g11680
  misc_feature (1)..(197): NCBI GI NO: 23479181 NR Description: arabinogalactan protein [Plasmodium yoelii yoelii]
  misc_feature (1)..(189): NCBI GI NO: 23619609 NR Description: hypothetical protein [Plasmodium falciparum 3D7]
  misc_feature (9)..(189): NCBI GI NO: 39597760 NR Description: Hypothetical protein CBG14242
  misc_feature (26)..(162): NCBI GI NO: 19115900 NR Description: hypothetical protein [Schizosaccharomyces pombe]
MAENPQLFGNGMPVPFHGEMFVLARDGVEFHVDKIPSAPGGHAKTKGTIYLSNIRMVFVAAKPVGNFFAFDMPLLYVHGEKFNQPIFHCNNISGFVEPVVPESQNRALYSTHTFKILFKEGGCGTFVPLFLNLITSVRRYNQFEAQPATVPRVDPMQAAQTPVDDMMRHAYVDPHDPTKIFLQQPAPESQLRRRNYHGPADNAY

SEQ ID NO: 18034 - protein, 193 aa, Triticum aestivum
  peptide (1)..(193): Ceres Seq. ID no. 12623014
  misc_feature (1)..(191): NCBI GI NO: 15239148 NR Description: putative protein; protein id: At5g11680
  misc_feature (1)..(186): NCBI GI NO: 23479181 NR Description: arabinogalactan protein [Plasmodium yoelii yoelii]
  misc_feature (1)..(178): NCBI GI NO: 23619609 NR Description: hypothetical protein [Plasmodium falciparum 3D7]
  misc_feature (1)..(178): NCBI GI NO: 39597760 NR Description: Hypothetical protein CBG14242
  misc_feature (15)..(151): NCBI GI NO: 19115900 NR Description: hypothetical protein [Schizosaccharomyces pombe]
MPVPFHGEMFVLARDGVEFHVDKIPSAPGGHAKTKGTIYLSNIRMVFVAAKPVGNFFAFDMPLLYVHGEKFNQPIFHCNNISGFVEPVVPESQNRALYSTHTFKILFKEGGCGTFVPLFLNLITSVRRYNQFEAQPATVPRVDPMQAAQTPVDDMMRHAYVDPHDPTKIFLQQPAPESQLRRRNYHGPADNAY

SEQ ID NO: 18035 - DNA, 1100 bp, Triticum aestivum
  misc_feature (1)..(1100): Ceres Seq. ID no. 13660597
aatcaggcaatgttttgctagtggttctgtggaatattttctcctttgtcctaatcaaactcagctattaggtacttcacaggtctgttatcaccctggaaaggtatattgctatttggtccaccaggaacaggaaagacaatgctggcaaaagctgtggctaccgagtgcaaaacaacttttttcaacatttcagcctcatcaattgtcagcaaatggcgtggtgactcggagaaactagtaaaagtcttatttgagcttgcaaggcatcatgcaccatctaccattttccttgatgagattgatgctatcattagccaacgtggtgaagctcgtagtgaacatgaagccagtcggcgactgaagactgaactattaatacagatggatgggttgactaagacagatgagcttgtttttgttctggcggccacaaatttaccatgggaactagatgcagcaatgttacgccgattggaaaaacgtattcttgtgcccttaccagaggcagaagctaggcatgctatgtttgaagagttccttccatcgactccagacacaatgaagattccatatgatgttcttgtggagaacactgaaggatattccggctctgatatacgccttgtttgtaaggaggcagcaatgcaaccacttagacggttaatggcagttctagaaggcagacaagaagaaatgccagaggatgagttgcctgaagttggcccaatagcggcagaagatatcgaacttgccttgaggaatacacggccgtctgctcatctccatgcacatagatatgagaaattcaatcaagattatggcagccatgtcattggctaaaggtgagcagtgaaaacaaggcttttgaccgcccgccttaggtttgtctaagcatgcctagaacatctttttgcaggagcatgttgatatgacctcgtttgcaccctgtatggagctttagtattcgtcggcagaaaggataattaccatccatgtatttccagctcgtaagcattgcttgtgcataatatttattccatcatcatgtatattaccatttatatcacaagcaataagccctttgggcattcaagctc

SEQ ID NO: 18036 - protein, 233 aa, Triticum aestivum
  peptide (1)..(233): Ceres Seq. ID no. 15220043
  misc_feature (1)..(173): Pfam Name: AAA Pfam Description: ATPase family associated with various cellular activities
  misc_feature (1)..(232): NCBI GI NO: 34911050 NR Description: putative katanin
  misc_feature (1)..(232): NCBI GI NO: 32352152 NR Description: katanin [Oryza sativa (japonica cultivar-group)]
  misc_feature (1)..(232): NCBI GI NO: 34909678 NR Description: katanin p60 subunit A 1-like
  misc_feature (1)..(232): NCBI GI NO: 18403587 NR Description: katanin -related [Arabidopsis thaliana]
  misc_feature (1)..(232): NCBI GI NO: 25408335 NR Description: probable katanin [imported] - Arabidopsis thaliana
  misc_feature (1)..(229): NCBI GI NO: 34190544 NR Description: Unknown (protein for MGC:33211) [Homo sapiens]
  misc_feature (1)..(229): NCBI GI NO: 11071772 NR Description: probable AAA ATPase [Leishmania major]
  misc_feature (1)..(229): NCBI GI NO: 31241707 NR Description: ENSANGP00000018492 [Anopheles gambiae]
  misc_feature (1)..(229): NCBI GI NO: 15220118 NR Description: CAD ATPase (AAA1) [Arabidopsis thaliana]
  misc_feature (1)..(229): NCBI GI NO: 19909896 NR Description: katanin [Arabidopsis thaliana]
MLAKAVATECKTTFFNISASSIVSKWRGDSEKLVKVLFELARHHAPSTIFLDEIDAIISQRGEARSEHEASRRLKTELLIQMDGLTKTDELVFVLAATNLPWELDAAMLRRLEKRILVPLPEAEARHAMFEEFLPSTPDTMKIPYDVLVENTEGYSGSDIRLVCKEAAMQPLRRLMAVLEGRQEEMPEDELPEVGPIAAEDIELALRNTRPSAHLHAHRYEKFNQDYGSHVIG

SEQ ID NO: 18037 - protein, 152 aa, Triticum aestivum
  peptide (1)..(152): Ceres Seq. ID no. 15220044
  misc_feature (1)..(92): Pfam Name: AAA Pfam Description: ATPase family associated with various cellular activities
  misc_feature (1)..(151): NCBI GI NO: 34911050 NR Description: putative katanin
  misc_feature (1)..(151): NCBI GI NO: 32352152 NR Description: katanin [Oryza sativa (japonica cultivar-group)]
  misc_feature (1)..(151): NCBI GI NO: 34909678 NR Description: katanin p60 subunit A 1-like
  misc_feature (1)..(151): NCBI GI NO: 18403587 NR Description: katanin -related [Arabidopsis thaliana]
  misc_feature (1)..(151): NCBI GI NO: 25408335 NR Description: probable katanin [imported] - Arabidopsis thaliana
  misc_feature (1)..(148): NCBI GI NO: 34190544 NR Description: Unknown (protein for MGC:33211) [Homo sapiens]
  misc_feature (1)..(148): NCBI GI NO: 11071772 NR Description: probable AAA ATPase [Leishmania major]
  misc_feature (1)..(148): NCBI GI NO: 31241707 NR Description: ENSANGP00000018492 [Anopheles gambiae]
  misc_feature (1)..(148): NCBI GI NO: 15220118 NR Description: CAD ATPase (AAA1) [Arabidopsis thaliana]
  misc_feature (1)..(148): NCBI GI NO: 19909896 NR Description: katanin [Arabidopsis thaliana]
MDGLTKTDELVFVLAATNLPWELDAAMLRRLEKRILVPLPEAEARHAMFEEFLPSTPDTMKIPYDVLVENTEGYSGSDIRLVCKEAAMQPLRRLMAVLEGRQEEMPEDELPEVGPIAAEDIELALRNTRPSAHLHAHRYEKFNQDYGSHVIG

SEQ ID NO: 18038 - protein, 126 aa, Triticum aestivum
  peptide (1)..(126): Ceres Seq. ID no. 15220045
  misc_feature (1)..(66): Pfam Name: AAA Pfam Description: ATPase family associated with various cellular activities
  misc_feature (1)..(125): NCBI GI NO: 34911050 NR Description: putative katanin
  misc_feature (1)..(125): NCBI GI NO: 32352152 NR Description: katanin [Oryza sativa (japonica cultivar-group)]
  misc_feature (1)..(125): NCBI GI NO: 34909678 NR Description: katanin p60 subunit A 1-like
  misc_feature (1)..(125): NCBI GI NO: 18403587 NR Description: katanin -related [Arabidopsis thaliana]
  misc_feature (1)..(125): NCBI GI NO: 25408335 NR Description: probable katanin [imported] - Arabidopsis thaliana
  misc_feature (1)..(122): NCBI GI NO: 34190544 NR Description: Unknown (protein for MGC:33211) [Homo sapiens]
  misc_feature (1)..(122): NCBI GI NO: 11071772 NR Description: probable AAA ATPase [Leishmania major]
  misc_feature (1)..(122): NCBI GI NO: 31241707 NR Description: ENSANGP00000018492 [Anopheles gambiae]
  misc_feature (1)..(122): NCBI GI NO: 15220118 NR Description: CAD ATPase (AAA1) [Arabidopsis thaliana]
  misc_feature (1)..(122): NCBI GI NO: 19909896 NR Description: katanin [Arabidopsis thaliana]
MLRRLEKRILVPLPEAEARHAMFEEFLPSTPDTMKIPYDVLVENTEGYSGSDIRLVCKEAAMQPLRRLMAVLEGRQEEMPEDELPEVGPIAAEDIELALRNTRPSAHLHAHRYEKFNQDYGSHVIG

SEQ ID NO: 18039 - DNA, 778 bp, Triticum aestivum
  misc_feature (1)..(778): Ceres Seq. ID no. 13660340
acacacactcactcaagccagcgccactcgcaccacagtcatccactcacaagctaagctagcggcgcagtagctcacttcagtccagtcggcatggcggctccgaggggcgcggcagtggtgctggcgatggtgctcgcggccatggtggtggcgccgccggcgacggtgcacgcggccatatcctgctccacggtgtacagcacgctgatgccgtgcctgcagtacgtgcagcagggcggttcgccggcccggggctgctgcaccggcatccagaacctgctggcggaggccaacaacagccccgaccgccgcaccatctgcggctgcctcaagaacgtcgccaacggcgcctccggcgggccctacatcacccgcgccgccgcgctcccctccaagtgcaacgtcgccctcccctacaagatcagccccagcgtcgactgcaactcgatccactgaacgaactgaagcgccttggcccgtgtgtcgacgtacgtctgccgtgcgaggagtcccatgtccggagaataaattgctgctactagtactgaagcttagctaggccttggcggccagatccgtgtcgttctacctagtcgtcgtgtgtggttttagggtcgatggatctgtgtgcatgcagtccatggtgttctggcctgggtgtcggtaggctccgcaagcagagcagagtggtgaactgatattgtgtgcgtcgtactatgcgcgtgcctatgtaatgtgcgtgctttatctataaactatccctcgttaagtatct

SEQ ID NO: 18040 - protein, 121 aa, Triticum aestivum
  peptide (1)..(121): Ceres Seq. ID no. 13660341
  misc_feature (32)..(117): Pfam Name: Pfam Description:  Protease inhibitor/seed storage/LTP family
  misc_feature (1)..(121): NCBI GI NO: 6492243 NR Description: lipid transfer protein [Hordeum vulgare]
  misc_feature (3)..(121): NCBI GI NO: 34907830 NR Description: putative lipid transfer protein
  misc_feature (5)..(121): NCBI GI NO: 7438275 NR Description: lipid transfer protein LPT II - rice
  misc_feature (5)..(121): NCBI GI NO: 2497746 NR Description: NONSPECIFIC LIPID-TRANSFER PROTEIN 2 PRECURSOR
  misc_feature (5)..(121): NCBI GI NO: 2497747 NR Description: NONSPECIFIC LIPID-TRANSFER PROTEIN 3 PRECURSOR
  misc_feature (5)..(118): NCBI GI NO: 32966061 NR Description: lipid transfer protein LPT1
  misc_feature (8)..(120): NCBI GI NO: 28194086 NR Description: lipid transfer protein isoform 4 [Vitis vinifera]
  misc_feature (7)..(121): NCBI GI NO: 7438279 NR Description: phospholipid transfer protein - rice
  misc_feature (5)..(120): NCBI GI NO: 2506826 NR Description: Nonspecific lipid-transfer protein 1 precursor
  misc_feature (8)..(120): NCBI GI NO: 28193997 NR Description: nonspecific lipid transfer protein 1
MAAPRGAAVVLAMVLAAMVVAPPATVHAAISCSTVYSTLMPCLQYVQQGGSPARGCCTGIQNLLAEANNSPDRRTICGCLKNVANGASGGPYITRAAALPSKCNVALPYKISPSVDCNSIH

SEQ ID NO: 18041 - protein, 109 aa, Triticum aestivum
  peptide (1)..(109): Ceres Seq. ID no. 13660342
  misc_feature (20)..(105): Pfam Name: Pfam Description:  Protease inhibitor/seed storage/LTP family
  misc_feature (1)..(109): NCBI GI NO: 6492243 NR Description: lipid transfer protein [Hordeum vulgare]
  misc_feature (1)..(109): NCBI GI NO: 34907830 NR Description: putative lipid transfer protein
  misc_feature (1)..(109): NCBI GI NO: 7438275 NR Description: lipid transfer protein LPT II - rice
  misc_feature (1)..(109): NCBI GI NO: 2497746 NR Description: NONSPECIFIC LIPID-TRANSFER PROTEIN 2 PRECURSOR
  misc_feature (1)..(109): NCBI GI NO: 2497747 NR Description: NONSPECIFIC LIPID-TRANSFER PROTEIN 3 PRECURSOR
  misc_feature (1)..(106): NCBI GI NO: 32966061 NR Description: lipid transfer protein LPT1
  misc_feature (1)..(108): NCBI GI NO: 28194086 NR Description: lipid transfer protein isoform 4 [Vitis vinifera]
  misc_feature (1)..(109): NCBI GI NO: 7438279 NR Description: phospholipid transfer protein - rice
  misc_feature (1)..(108): NCBI GI NO: 2506826 NR Description: Nonspecific lipid-transfer protein 1 precursor
  misc_feature (1)..(108): NCBI GI NO: 28193997 NR Description: nonspecific lipid transfer protein 1
MVLAAMVVAPPATVHAAISCSTVYSTLMPCLQYVQQGGSPARGCCTGIQNLLAEANNSPDRRTICGCLKNVANGASGGPYITRAAALPSKCNVALPYKISPSVDCNSIH

SEQ ID NO: 18042 - protein, 104 aa, Triticum aestivum
  peptide (1)..(104): Ceres Seq. ID no. 13660343
  misc_feature (15)..(100): Pfam Name: Pfam Description:  Protease inhibitor/seed storage/LTP family
  misc_feature (1)..(104): NCBI GI NO: 6492243 NR Description: lipid transfer protein [Hordeum vulgare]
  misc_feature (1)..(104): NCBI GI NO: 34907830 NR Description: putative lipid transfer protein
  misc_feature (1)..(104): NCBI GI NO: 7438275 NR Description: lipid transfer protein LPT II - rice
  misc_feature (1)..(104): NCBI GI NO: 2497746 NR Description: NONSPECIFIC LIPID-TRANSFER PROTEIN 2 PRECURSOR
  misc_feature (1)..(104): NCBI GI NO: 2497747 NR Description: NONSPECIFIC LIPID-TRANSFER PROTEIN 3 PRECURSOR
  misc_feature (1)..(101): NCBI GI NO: 32966061 NR Description: lipid transfer protein LPT1
  misc_feature (1)..(103): NCBI GI NO: 28194086 NR Description: lipid transfer protein isoform 4 [Vitis vinifera]
  misc_feature (1)..(104): NCBI GI NO: 7438279 NR Description: phospholipid transfer protein - rice
  misc_feature (1)..(103): NCBI GI NO: 2506826 NR Description: Nonspecific lipid-transfer protein 1 precursor
  misc_feature (1)..(103): NCBI GI NO: 28193997 NR Description: nonspecific lipid transfer protein 1
MVVAPPATVHAAISCSTVYSTLMPCLQYVQQGGSPARGCCTGIQNLLAEANNSPDRRTICGCLKNVANGASGGPYITRAAALPSKCNVALPYKISPSVDCNSIH

SEQ ID NO: 18043 - DNA, 1296 bp, Triticum aestivum
  misc_feature (1)..(1296): Ceres Seq. ID no. 13659759
gcatatctgcacacggtagcctactggtctcttcatccattgctgaggtgacaaagctagctgcattggattggagcgcaagaagatggagggggagacgaccaagaggctggccacgctggtgggctgcaactacgtgggcacgcgctacgagctccgcggctgcatcaacgacgtcgacgccgtgcgggacaccctcgtcgcccgcttcggcttcgcgccggccgacgtcgccgtgctcaccgacgggcgcggcgccgaggtgctcccgacgggagccaacatccggcgcgcgctggcggacatggtcgcccgcgccgctcccggggacgtgctcttcttccactacagcggccacggcacgctcgtcccgccgcaccacggcgactccggcgcggaggaggaagcgatcgtgccgaccgacttcaacctcatcacggacgtggacttccggcagctggtggaccgggtgccgccgggcgcgagcttcaccattgtgtccgactcgtgtcacagcggcggcctcatcgaccaggagaaggaacagatcgggccctccgtcggctccgaccccagcgcggggtccacggcgcccgcgcgcaccgcccggttccttccctacggcgcgatcctcgaccacctctccgccgtctcgggcatgccttcctcccaccacgtcgccgaccacctcgtggcgctcttcggcgccgatgccagcgccaagttccacgttcacggcggcagcggcaacggcagcaccccgtccaccacacccgcaccggcgccaacgccgccgcgcccggacgagggcatcctgctgagcgggtgccagacgaacgagacctcagcggacgtgccggcgtacgaggccagcggaggcaaggcatgcggggcgttcagtagcgcggtgcagagcgtgctggcggcgcaccctgcgccgctgagcaaccgggagctcgtggcgaaggccagggcggtgctggaagagcaggggttcgagcagcacccgtgtctctactgtaccgacgccaacgccgaggcacggttcctttcgcaggacaagaaggaggagacagcggtgggcgcggcaagcccggccatgtcggcggcgctgctgtagagcacgttcagctcacgagctacggagcgggcatgcgtttcatgtgtcgtgttttactgtttctgcgcacgtcgaattgaatgaggggccaaactcacgtgctatattgtttgtgtgtggatcaagtttataagtgtgtgtattatatatacacggatttgttatgactcacttgc

SEQ ID NO: 18044 - protein, 344 aa, Triticum aestivum
  peptide (1)..(344): Ceres Seq. ID no. 13659760
  misc_feature (8)..(324): Pfam Name: Pfam Description:  Caspase domain
  misc_feature (2)..(324): NCBI GI NO: 15237648 NR Description: putative latex-abundant protein
  misc_feature (7)..(324): NCBI GI NO: 21554334 NR Description: latex-abundant protein-like [Arabidopsis thaliana]
  misc_feature (6)..(176): NCBI GI NO: 15219345 NR Description: putative latex-abundant protein
  misc_feature (237)..(322): NCBI GI NO: 15219345 NR Description: putative latex-abundant protein
  misc_feature (6)..(176): NCBI GI NO: 33304380 NR Description: metacaspase 7 [Arabidopsis thaliana]
  misc_feature (237)..(322): NCBI GI NO: 33304380 NR Description: metacaspase 7 [Arabidopsis thaliana]
  misc_feature (13)..(158): NCBI GI NO: 23343885 NR Description: metacaspase 1 [Lycopersicon esculentum]
  misc_feature (239)..(322): NCBI GI NO: 23343885 NR Description: metacaspase 1 [Lycopersicon esculentum]
  misc_feature (10)..(213): NCBI GI NO: 15219340 NR Description: hypothetical protein common family
  misc_feature (239)..(322): NCBI GI NO: 15219340 NR Description: hypothetical protein common family
MEGETTKRLATLVGCNYVGTRYELRGCINDVDAVRDTLVARFGFAPADVAVLTDGRGAEVLPTGANIRRALADMVARAAPGDVLFFHYSGHGTLVPPHHGDSGAEEEAIVPTDFNLITDVDFRQLVDRVPPGASFTIVSDSCHSGGLIDQEKEQIGPSVGSDPSAGSTAPARTARFLPYGAILDHLSAVSGMPSSHHVADHLVALFGADASAKFHVHGGSGNGSTPSTTPAPAPTPPRPDEGILLSGCQTNETSADVPAYEASGGKACGAFSSAVQSVLAAHPAPLSNRELVAKARAVLEEQGFEQHPCLYCTDANAEARFLSQDKKEETAVGAASPAMSAALL

SEQ ID NO: 18045 - protein, 272 aa, Triticum aestivum
  peptide (1)..(272): Ceres Seq. ID no. 13659761
  misc_feature (42)..(272): Pfam Name: Pfam Description:  Equine herpesvirus glycoprotein gp2
  misc_feature (27)..(272): NCBI GI NO: 11360318 NR Description: probable mucin DKFZp434C196.1 - human (fragment)
  misc_feature (42)..(272): NCBI GI NO: 11360494 NR Description: antifreeze glycopeptide AFGP polyprotein precursor
  misc_feature (43)..(272): NCBI GI NO: 11360494 NR Description: antifreeze glycopeptide AFGP polyprotein precursor
  misc_feature (38)..(258): NCBI GI NO: 28574039 NR Description: Salivary gland secretion 1 CG3047-PA
  misc_feature (42)..(272): NCBI GI NO: 11360494 NR Description: antifreeze glycopeptide AFGP polyprotein precursor
  misc_feature (43)..(272): NCBI GI NO: 11360494 NR Description: antifreeze glycopeptide AFGP polyprotein precursor
  misc_feature (66)..(272): NCBI GI NO: 15240933 NR Description: expressed protein [Arabidopsis thaliana]
  misc_feature (38)..(272): NCBI GI NO: 28574039 NR Description: Salivary gland secretion 1 CG3047-PA
  misc_feature (38)..(272): NCBI GI NO: 28574039 NR Description: Salivary gland secretion 1 CG3047-PA
  misc_feature (38)..(272): NCBI GI NO: 28574039 NR Description: Salivary gland secretion 1 CG3047-PA
ISAHGSLLVSSSIAEVTKLAALDWSARRWRGRRPRGWPRWWAATTWARATSSAAASTTSTPCGTPSSPASASRRPTSPCSPTGAAPRCSRREPTSGARWRTWSPAPLPGTCSSSTTAATARSSRRTTATPARRRKRSCRPTSTSSRTWTSGSWWTGCRRARASPLCPTRVTAAASSTRRRNRSGPPSAPTPARGPRRPRAPPGSFPTARSSTTSPPSRACLPPTTSPTTSWRSSAPMPAPSSTFTAAAATAAPRPPHPHRRQRRRARTRASC

SEQ ID NO: 18046 - protein, 271 aa, Triticum aestivum
  peptide (1)..(271): Ceres Seq. ID no. 13659762
  misc_feature (1)..(251): Pfam Name: Pfam Description:  Caspase domain
  misc_feature (1)..(251): NCBI GI NO: 15237648 NR Description: putative latex-abundant protein
  misc_feature (1)..(251): NCBI GI NO: 21554334 NR Description: latex-abundant protein-like [Arabidopsis thaliana]
  misc_feature (1)..(103): NCBI GI NO: 15219345 NR Description: putative latex-abundant protein
  misc_feature (164)..(249): NCBI GI NO: 15219345 NR Description: putative latex-abundant protein
  misc_feature (1)..(103): NCBI GI NO: 33304380 NR Description: metacaspase 7 [Arabidopsis thaliana]
  misc_feature (164)..(249): NCBI GI NO: 33304380 NR Description: metacaspase 7 [Arabidopsis thaliana]
  misc_feature (1)..(85): NCBI GI NO: 23343885 NR Description: metacaspase 1 [Lycopersicon esculentum]
  misc_feature (166)..(249): NCBI GI NO: 23343885 NR Description: metacaspase 1 [Lycopersicon esculentum]
  misc_feature (1)..(140): NCBI GI NO: 15219340 NR Description: hypothetical protein common family
  misc_feature (166)..(249): NCBI GI NO: 15219340 NR Description: hypothetical protein common family
MVARAAPGDVLFFHYSGHGTLVPPHHGDSGAEEEAIVPTDFNLITDVDFRQLVDRVPPGASFTIVSDSCHSGGLIDQEKEQIGPSVGSDPSAGSTAPARTARFLPYGAILDHLSAVSGMPSSHHVADHLVALFGADASAKFHVHGGSGNGSTPSTTPAPAPTPPRPDEGILLSGCQTNETSADVPAYEASGGKACGAFSSAVQSVLAAHPAPLSNRELVAKARAVLEEQGFEQHPCLYCTDANAEARFLSQDKKEETAVGAASPAMSAALL

SEQ ID NO: 18047 - DNA, 1140 bp, Triticum aestivum
  misc_feature (1)..(1140): Ceres Seq. ID no. 14302860
accactcgaccagagtccacagtccacagtccatagtccgtccacagtgtactgaccaagtagtgctcagaattcagggagcccaccgccatggcttcccctaagcttctcctcctgctcgccaccctcctcccaagctgcggcctcctcctggcggacttcgccccgatgaccctcaccgtggtgaacaactgcgcgtacccgatttggccgggcatccaggggagcgccggcagcgaggtcctggaggggggcggcttcttcctcccgtcgctctcccaccgctccttcccggcgcccacccacgcctggtccggccgcatctgggcgcgcaccggctgcacgcctgcaggggccgggcagctccgctgcgccacgggcgactgcggcgggcggctccagtgcgggggcctcggcggcgcggcgcccgccacgctggcgcaggtctccctccaccacggcggcgacgaccagtcgtcgtacggggtgagcgtggtggacggcttcaacgtgggactgtcggttaccccgcacgagggccgcggcaactgccccgtcctcgcctgccgcaaggacctgacgcagagctgccccggcgagctgcaggtgcgcgcggcggcgggcggcggcgtggccgcgtgcaagagcggctgcctggccttcggcaccgacgagctgtgctgccgcaacgcgtacaacagcccggccgcctgccgcccctccaagtactcggacttcttcaagaacgagtgcccgcaggccttcacctacgcgcatgacagcccctcgctcacccaccagtgctccgcgccgcgcgagctcaaggtcatcttctgccactagactagaggtagtccagcggcgctcgcggtgccgccgccggccgtcagcagctatgtctgggtctgggatcgatgtggtgtagtgcgtgtcatctcatctgtcatgtgtgagtgttcgattaggctttggagactgccaggctgaccggagtgcttggtgtagttcgtgctctgtaggcgttcacctctcgtctagtagtatggtgttagctgctctgattccagtctgaaataacatgtttagatgggcattgatctgatcacatgtttcaatcacgccttttgtgcatttgagttc

SEQ ID NO: 18048 - protein, 250 aa, Triticum aestivum
  peptide (1)..(250): Ceres Seq. ID no. 14302861
  misc_feature (33)..(250): Pfam Name: Pfam Description:  Thaumatin family
  misc_feature (1)..(250): NCBI GI NO: 34908134 NR Description: osmotin-like protein
  misc_feature (1)..(250): NCBI GI NO: 2501182 NR Description: OSMOTIN-LIKE PROTEIN PRECURSOR
  misc_feature (7)..(250): NCBI GI NO: 5823278 NR Description: osmotin-like protein [Benincasa hispida]
  misc_feature (1)..(250): NCBI GI NO: 27373045 NR Description: cytokinin-binding protein [Brassica oleracea]
  misc_feature (1)..(250): NCBI GI NO: 15226956 NR Description: osmotin-like protein, putative
  misc_feature (1)..(250): NCBI GI NO: 21554129 NR Description: putative thaumatin [Arabidopsis thaliana]
  misc_feature (29)..(250): NCBI GI NO: 27373047 NR Description: cytokinin binding protein [Arabidopsis thaliana]
  misc_feature (19)..(249): NCBI GI NO: 7442175 NR Description: thaumatin-like protein - turnip
  misc_feature (19)..(249): NCBI GI NO: 2129751 NR Description: thaumatin-like protein - Arabidopsis thaliana
  misc_feature (19)..(249): NCBI GI NO: 15221033 NR Description: thaumatin-like protein [Arabidopsis thaliana]
MASPKLLLLLATLLPSCGLLLADFAPMTLTVVNNCAYPIWPGIQGSAGSEVLEGGGFFLPSLSHRSFPAPTHAWSGRIWARTGCTPAGAGQLRCATGDCGGRLQCGGLGGAAPATLAQVSLHHGGDDQSSYGVSVVDGFNVGLSVTPHEGRGNCPVLACRKDLTQSCPGELQVRAAAGGGVAACKSGCLAFGTDELCCRNAYNSPAACRPSKYSDFFKNECPQAFTYAHDSPSLTHQCSAPRELKVIFCH

SEQ ID NO: 18049 - protein, 224 aa, Triticum aestivum
  peptide (1)..(224): Ceres Seq. ID no. 14302862
  misc_feature (7)..(224): Pfam Name: Pfam Description:  Thaumatin family
  misc_feature (1)..(224): NCBI GI NO: 34908134 NR Description: osmotin-like protein
  misc_feature (1)..(224): NCBI GI NO: 2501182 NR Description: OSMOTIN-LIKE PROTEIN PRECURSOR
  misc_feature (1)..(224): NCBI GI NO: 5823278 NR Description: osmotin-like protein [Benincasa hispida]
  misc_feature (1)..(224): NCBI GI NO: 27373045 NR Description: cytokinin-binding protein [Brassica oleracea]
  misc_feature (1)..(224): NCBI GI NO: 15226956 NR Description: osmotin-like protein, putative
  misc_feature (1)..(224): NCBI GI NO: 21554129 NR Description: putative thaumatin [Arabidopsis thaliana]
  misc_feature (3)..(224): NCBI GI NO: 27373047 NR Description: cytokinin binding protein [Arabidopsis thaliana]
  misc_feature (1)..(223): NCBI GI NO: 7442175 NR Description: thaumatin-like protein - turnip
  misc_feature (1)..(223): NCBI GI NO: 2129751 NR Description: thaumatin-like protein - Arabidopsis thaliana
  misc_feature (1)..(223): NCBI GI NO: 15221033 NR Description: thaumatin-like protein [Arabidopsis thaliana]
MTLTVVNNCAYPIWPGIQGSAGSEVLEGGGFFLPSLSHRSFPAPTHAWSGRIWARTGCTPAGAGQLRCATGDCGGRLQCGGLGGAAPATLAQVSLHHGGDDQSSYGVSVVDGFNVGLSVTPHEGRGNCPVLACRKDLTQSCPGELQVRAAAGGGVAACKSGCLAFGTDELCCRNAYNSPAACRPSKYSDFFKNECPQAFTYAHDSPSLTHQCSAPRELKVIFCH

SEQ ID NO: 18050 - DNA, 1266 bp, Triticum aestivum
  misc_feature (1)..(1266): Ceres Seq. ID no. 14301898
cactccacatcccactccaaagctttgcttggctctcccgtacctgacctctccttccatcgaggcaatcccagtgctcctcctcccctctatcgtccatggactgctctagttccaaagagacgccaccgcacaaggcgtggtggaccggcgagacggtggcggtggtgacgggggccaaccgtggcattgggcacgcgctggccgcgcgcctggcggagcaggggctgtccgtggtgctcacggcgcgggacgaggcccgcggggaggccgccgccgccgagctccgcgccaggggtctcccgtccgtgcggttccgccgcctcgacgtcaccgactccgcctctgtcgccgccttcgcctcctggatccgcgacgatgtcggcggcctcgacattctggtgaacaatgccggggtatcgttcaacgagatcgacaccaactcggtggagcatgctgagacggtcctcaagaccaacttttacggagccaagatgctcatcgaggcgctcctgccccttttccgtcgatcctctgggaccagccggatcctgaacctcagctcccagcttggccttctcaataaggtgagggacccgtcgttgaggagcatgctgctggacgagggcaggctgacggagcagcaggtcgaggccatggcgtcgcggttcctggcgcaggtgaaggacgggacgtggcaggaccacgggtggccggccgtgtggacggactacgcggtctccaagctggccctcaacgcctactcccgcctcctcgccgcgcggctgcggggggccgtagctgtcaactgcttctgccccgggttcacgcggacagacatgacgcgggggtggggcaagcgcaccgccgaggaggccggccgcgtcgccgcggggctcgcgctgctgccccccgccgacctccccacaggcaagttcttcaagtggtccacgccgcagctctactccaagctctgacgacgacaccgcgcgctgcatggcggagctgtgcgtagctgcacgcttacgatttggcaagaaaaagatggccgtttgtcccaaaatgcaactccatctcctcaccaagcttgatgcctccgaactatcacgcccgtacagttctcgaagattcgtgctcgtcttttgacaggatagcctatcaccctccactttgtagaacagagcatgtagaaacaaaaaagctctcctcccttcctgctgtaacagagcatgtaccacaaataattcttaattgtgtttacaaagt

SEQ ID NO: 18051 - protein, 292 aa, Triticum aestivum
  peptide (1)..(292): Ceres Seq. ID no. 14301899
  misc_feature (1)..(292): NCBI GI NO: 21740778 NR Description: OSJNBa0067K08.7
  misc_feature (15)..(292): NCBI GI NO: 15231739 NR Description: short-chain dehydrogenase/reductase family protein
  misc_feature (11)..(281): NCBI GI NO: 34907100 NR Description: putative carbonyl reductase-like protein
  misc_feature (12)..(281): NCBI GI NO: 15241346 NR Description: short-chain dehydrogenase/reductase family protein
  misc_feature (12)..(281): NCBI GI NO: 15240361 NR Description: short-chain dehydrogenase/reductase family protein
  misc_feature (12)..(281): NCBI GI NO: 10176876 NR Description: carbonyl reductase-like protein
  misc_feature (118)..(281): NCBI GI NO: 34559416 NR Description: (-)-isopiperitenone reductase [Mentha x piperita]
  misc_feature (22)..(108): NCBI GI NO: 34559416 NR Description: (-)-isopiperitenone reductase [Mentha x piperita]
  misc_feature (21)..(282): NCBI GI NO: 27413160 NR Description: carbonyl reductase 3 [Mus musculus]
  misc_feature (21)..(280): NCBI GI NO: 485271 NR Description: NADPH:secondary-alcohol oxidoreductase
MDCSSSKETPPHKAWWTGETVAVVTGANRGIGHALAARLAEQGLSVVLTARDEARGEAAAAELRARGLPSVRFRRLDVTDSASVAAFASWIRDDVGGLDILVNNAGVSFNEIDTNSVEHAETVLKTNFYGAKMLIEALLPLFRRSSGTSRILNLSSQLGLLNKVRDPSLRSMLLDEGRLTEQQVEAMASRFLAQVKDGTWQDHGWPAVWTDYAVSKLALNAYSRLLAARLRGAVAVNCFCPGFTRTDMTRGWGKRTAEEAGRVAAGLALLPPADLPTGKFFKWSTPQLYSKL

SEQ ID NO: 18052 - protein, 160 aa, Triticum aestivum
  peptide (1)..(160): Ceres Seq. ID no. 14301900
  misc_feature (1)..(160): NCBI GI NO: 21740778 NR Description: OSJNBa0067K08.7
  misc_feature (1)..(160): NCBI GI NO: 15231739 NR Description: short-chain dehydrogenase/reductase family protein
  misc_feature (1)..(149): NCBI GI NO: 34907100 NR Description: putative carbonyl reductase-like protein
  misc_feature (1)..(149): NCBI GI NO: 15241346 NR Description: short-chain dehydrogenase/reductase family protein
  misc_feature (1)..(149): NCBI GI NO: 15240361 NR Description: short-chain dehydrogenase/reductase family protein
  misc_feature (1)..(149): NCBI GI NO: 10176876 NR Description: carbonyl reductase-like protein
  misc_feature (1)..(149): NCBI GI NO: 34559416 NR Description: (-)-isopiperitenone reductase [Mentha x piperita]
  misc_feature (1)..(150): NCBI GI NO: 27413160 NR Description: carbonyl reductase 3 [Mus musculus]
  misc_feature (1)..(148): NCBI GI NO: 485271 NR Description: NADPH:secondary-alcohol oxidoreductase
  misc_feature (1)..(150): NCBI GI NO: 34867654 NR Description: similar to carbonyl reductase 3
MLIEALLPLFRRSSGTSRILNLSSQLGLLNKVRDPSLRSMLLDEGRLTEQQVEAMASRFLAQVKDGTWQDHGWPAVWTDYAVSKLALNAYSRLLAARLRGAVAVNCFCPGFTRTDMTRGWGKRTAEEAGRVAAGLALLPPADLPTGKFFKWSTPQLYSKL

SEQ ID NO: 18053 - DNA, 858 bp, Triticum aestivum
  misc_feature (1)..(858): Ceres Seq. ID no. 13660855
atcctgtccgggagcacggagccgcttcgttatccgctggccgctgctgctgcttctctgcgagtgagcgagtgaggaaagaggacggcgacgatggccggcatggcggcgctgcagggcgccatgggggcgctctccgtctcggccgcgagcaccagcgcattctggggcaacccgctcgccgccaccttctccgccgcgccgtctggggtcagattcatggccaagacaagcccaattgaaatgaggcttaagcgatgggaacggaagaagtgtaagccaaacagtcttcctatgctgcacaagatgcatgttagggtcggcgacacggtgcaggtcatcgcaggccgtgagaaaggtaaagttggggaagtcgtacggctttataagcacaacagcactgtgatagtgaaggatctgaacttgaagtcaaagcacaagaaaggcactgaggatgaaccgggtgaaattgtcatgattgaaggccccattcatagctcgaacatgatgctctactcaaaggagaagaacgtgacgagtagggttgggcacaaaatcctcgaggatggcaccaaggtccgctacctgaagaagaccggtgaagtaatcgacagcgttgacaactgggtgaaggtgttcaaggaaggagattctgagtcatcatcgtagtatggaaatgctgcgcatgctctcaaccttagctgcgcttattgctgcccaaacgcttactcggctggtgccactgcttgtactgtcagtttttttctagcttcagagcctcttttgtaaattactactactactacaaagttgtcaccatttttgcaacgcttggtccaacaagaaggccttcgtttt

SEQ ID NO: 18054 - protein, 191 aa, Triticum aestivum
  peptide (1)..(191): Ceres Seq. ID no. 13660856
  misc_feature (74)..(107): Pfam Name: Pfam Description:  KOW motif
  misc_feature (4)..(190): NCBI GI NO: 132819 NR Description: 50S RIBOSOMAL PROTEIN L24, CHLOROPLAST PRECURSOR
  misc_feature (1)..(190): NCBI GI NO: 30696483 NR Description: 50S ribosomal protein L24, chloroplast precursor
  misc_feature (1)..(190): NCBI GI NO: 1694974 NR Description: plastid ribosomal protein [Arabidopsis thaliana]
  misc_feature (4)..(191): NCBI GI NO: 400989 NR Description: 50S RIBOSOMAL PROTEIN L24, CHLOROPLAST PRECURSOR
  misc_feature (1)..(190): NCBI GI NO: 132821 NR Description: 50S RIBOSOMAL PROTEIN L24, CHLOROPLAST PRECURSOR
  misc_feature (1)..(104): NCBI GI NO: 30696487 NR Description: 50S ribosomal protein L24, chloroplast precursor
  misc_feature (123)..(190): NCBI GI NO: 30696487 NR Description: 50S ribosomal protein L24, chloroplast precursor
  misc_feature (62)..(173): NCBI GI NO: 22297636 NR Description: 50S ribosomal protein L24
  misc_feature (58)..(173): NCBI GI NO: 23042779 NR Description: hypothetical protein
  misc_feature (62)..(173): NCBI GI NO: 23124117 NR Description: hypothetical protein [Nostoc punctiforme]
MAGMAALQGAMGALSVSAASTSAFWGNPLAATFSAAPSGVRFMAKTSPIEMRLKRWERKKCKPNSLPMLHKMHVRVGDTVQVIAGREKGKVGEVVRLYKHNSTVIVKDLNLKSKHKKGTEDEPGEIVMIEGPIHSSNMMLYSKEKNVTSRVGHKILEDGTKVRYLKKTGEVIDSVDNWVKVFKEGDSESSS

SEQ ID NO: 18055 - protein, 188 aa, Triticum aestivum
  peptide (1)..(188): Ceres Seq. ID no. 13660857
  misc_feature (71)..(104): Pfam Name: Pfam Description:  KOW motif
  misc_feature (1)..(187): NCBI GI NO: 132819 NR Description: 50S RIBOSOMAL PROTEIN L24, CHLOROPLAST PRECURSOR
  misc_feature (1)..(187): NCBI GI NO: 30696483 NR Description: 50S ribosomal protein L24, chloroplast precursor
  misc_feature (1)..(187): NCBI GI NO: 1694974 NR Description: plastid ribosomal protein [Arabidopsis thaliana]
  misc_feature (1)..(188): NCBI GI NO: 400989 NR Description: 50S RIBOSOMAL PROTEIN L24, CHLOROPLAST PRECURSOR
  misc_feature (1)..(187): NCBI GI NO: 132821 NR Description: 50S RIBOSOMAL PROTEIN L24, CHLOROPLAST PRECURSOR
  misc_feature (1)..(101): NCBI GI NO: 30696487 NR Description: 50S ribosomal protein L24, chloroplast precursor
  misc_feature (120)..(187): NCBI GI NO: 30696487 NR Description: 50S ribosomal protein L24, chloroplast precursor
  misc_feature (59)..(170): NCBI GI NO: 22297636 NR Description: 50S ribosomal protein L24
  misc_feature (55)..(170): NCBI GI NO: 23042779 NR Description: hypothetical protein
  misc_feature (59)..(170): NCBI GI NO: 23124117 NR Description: hypothetical protein [Nostoc punctiforme]
MAALQGAMGALSVSAASTSAFWGNPLAATFSAAPSGVRFMAKTSPIEMRLKRWERKKCKPNSLPMLHKMHVRVGDTVQVIAGREKGKVGEVVRLYKHNSTVIVKDLNLKSKHKKGTEDEPGEIVMIEGPIHSSNMMLYSKEKNVTSRVGHKILEDGTKVRYLKKTGEVIDSVDNWVKVFKEGDSESSS

SEQ ID NO: 18056 - protein, 181 aa, Triticum aestivum
  peptide (1)..(181): Ceres Seq. ID no. 13660858
  misc_feature (64)..(97): Pfam Name: Pfam Description:  KOW motif
  misc_feature (1)..(180): NCBI GI NO: 132819 NR Description: 50S RIBOSOMAL PROTEIN L24, CHLOROPLAST PRECURSOR
  misc_feature (1)..(180): NCBI GI NO: 30696483 NR Description: 50S ribosomal protein L24, chloroplast precursor
  misc_feature (1)..(180): NCBI GI NO: 1694974 NR Description: plastid ribosomal protein [Arabidopsis thaliana]
  misc_feature (1)..(181): NCBI GI NO: 400989 NR Description: 50S RIBOSOMAL PROTEIN L24, CHLOROPLAST PRECURSOR
  misc_feature (1)..(180): NCBI GI NO: 132821 NR Description: 50S RIBOSOMAL PROTEIN L24, CHLOROPLAST PRECURSOR
  misc_feature (1)..(94): NCBI GI NO: 30696487 NR Description: 50S ribosomal protein L24, chloroplast precursor
  misc_feature (113)..(180): NCBI GI NO: 30696487 NR Description: 50S ribosomal protein L24, chloroplast precursor
  misc_feature (52)..(163): NCBI GI NO: 22297636 NR Description: 50S ribosomal protein L24
  misc_feature (48)..(163): NCBI GI NO: 23042779 NR Description: hypothetical protein
  misc_feature (52)..(163): NCBI GI NO: 23124117 NR Description: hypothetical protein [Nostoc punctiforme]
MGALSVSAASTSAFWGNPLAATFSAAPSGVRFMAKTSPIEMRLKRWERKKCKPNSLPMLHKMHVRVGDTVQVIAGREKGKVGEVVRLYKHNSTVIVKDLNLKSKHKKGTEDEPGEIVMIEGPIHSSNMMLYSKEKNVTSRVGHKILEDGTKVRYLKKTGEVIDSVDNWVKVFKEGDSESSS

SEQ ID NO: 18057 - DNA, 1297 bp, Triticum aestivum
  misc_feature (1)..(1297): Ceres Seq. ID no. 14301693
attaatttctttcctccagtcttctctgacctccctctcccccccaccctgcgcaagtgcacagtgggtcagtgccgcggcgagctccctcccccagcctcggcctccccgcccgatctggtcgccccccgcccgcggacgcgccccccgccaaaccctagggcctcgccgcgccgccgcgcgaaggggcgcctcgctgcgccgctcgcccgcgatggaccccgccccgcagctcaaggccgagccctggcgcccgccgccccgcgccggcgcggccggcgggcgcgcggcgggggaggcctcctccgccgtcacgggccagagcagcggcagccgcccgcggaggaggcagcgggagcctcccgcgtccgaggacgactcggcctccgccaggcctgtctccacctccggcggcggcggcggcggccaggatttgactgatgcagaagcaaagcgtttcaaggcaaataaatccagtgatgataatggtagtgtcagaaaagatgctgaagctgattcaagaaatgctagtaaggctgttgaccaaaatcccccgccaccaaagcaagatttcatccatgtgagggcaagaaggggtcaagcaactgacagccatagccttgcagaaagggcacggcgtgagaaaataaccgagcggatgaaaattctccaagatcttgtccctggatgtaataaggttattgggaaagcatcagtccttgatgagataatcaattatgtccaagctttggaacgccaaattgagttcctgtccatgaagctcgaggcggttaacgcccatgcccatgctcacaacggagttgaaacatttccaactaaagacttcgctgcgccggcatacaacacagctccagggttaacatttgacccgcaaacaccaagggagtacgcccagggctcgccggctgcagaatggcttcacatgcagattggtggcacctacgaaagagtgacgtgagcagaacaaaagtccagggtggcgcccaacaaagcgtgccatgaatcctcggccaagcaacccccactttcataccgtagatcatttttttttgcgccaccatctcgttccaaatgcggttttattcatagtttttggagctgtaattgccggtagagacgtcagacatgtatttagagagaaccgccgagcacggtgcctttttgttttgaccttcggattcaggactgttcctcatgtattcgcaaccttcatgtattccatggatttctgtagctggtaatcattcttaagatgaaaggaagcgacttttttttt

SEQ ID NO: 18058 - protein, 325 aa, Triticum aestivum
  peptide (1)..(325): Ceres Seq. ID no. 14301694
  misc_feature (201)..(251): Pfam Name: Pfam Description:  Helix-loop-helix DNA-binding domain
  misc_feature (72)..(325): NCBI GI NO: 29150361 NR Description: hypothetical protein
  misc_feature (124)..(325): NCBI GI NO: 33339703 NR Description: MYC1 [Catharanthus roseus]
  misc_feature (124)..(325): NCBI GI NO: 18406408 NR Description: bHLH protein [Arabidopsis thaliana]
  misc_feature (124)..(325): NCBI GI NO: 21592490 NR Description: unknown [Arabidopsis thaliana]
  misc_feature (88)..(325): NCBI GI NO: 15241896 NR Description: bHLH protein family [Arabidopsis thaliana]
  misc_feature (124)..(281): NCBI GI NO: 25404871 NR Description: protein T30E16.21
  misc_feature (124)..(281): NCBI GI NO: 30696324 NR Description: bHLH protein [Arabidopsis thaliana]
  misc_feature (124)..(281): NCBI GI NO: 25453562 NR Description: helix-loop-helix protein homolog
  misc_feature (87)..(272): NCBI GI NO: 34906952 NR Description: DNA-binding protein-like protein
  misc_feature (111)..(288): NCBI GI NO: 15239013 NR Description: bHLH protein family [Arabidopsis thaliana]
LISFLQSSLTSLSPPPCASAQWVSAAASSLPQPRPPRPIWSPPARGRAPRQTLGPRRAAARRGASLRRSPAMDPAPQLKAEPWRPPPRAGAAGGRAAGEASSAVTGQSSGSRPRRRQREPPASEDDSASARPVSTSGGGGGGQDLTDAEAKRFKANKSSDDNGSVRKDAEADSRNASKAVDQNPPPPKQDFIHVRARRGQATDSHSLAERARREKITERMKILQDLVPGCNKVIGKASVLDEIINYVQALERQIEFLSMKLEAVNAHAHAHNGVETFPTKDFAAPAYNTAPGLTFDPQTPREYAQGSPAAEWLHMQIGGTYERVT

SEQ ID NO: 18059 - protein, 254 aa, Triticum aestivum
  peptide (1)..(254): Ceres Seq. ID no. 14301695
  misc_feature (130)..(180): Pfam Name: Pfam Description:  Helix-loop-helix DNA-binding domain
  misc_feature (1)..(254): NCBI GI NO: 29150361 NR Description: hypothetical protein
  misc_feature (53)..(254): NCBI GI NO: 33339703 NR Description: MYC1 [Catharanthus roseus]
  misc_feature (53)..(254): NCBI GI NO: 18406408 NR Description: bHLH protein [Arabidopsis thaliana]
  misc_feature (53)..(254): NCBI GI NO: 21592490 NR Description: unknown [Arabidopsis thaliana]
  misc_feature (17)..(254): NCBI GI NO: 15241896 NR Description: bHLH protein family [Arabidopsis thaliana]
  misc_feature (53)..(210): NCBI GI NO: 25404871 NR Description: protein T30E16.21
  misc_feature (53)..(210): NCBI GI NO: 25453562 NR Description: helix-loop-helix protein homolog
  misc_feature (53)..(210): NCBI GI NO: 30696324 NR Description: bHLH protein [Arabidopsis thaliana]
  misc_feature (16)..(201): NCBI GI NO: 34906952 NR Description: DNA-binding protein-like protein
  misc_feature (40)..(217): NCBI GI NO: 15239013 NR Description: bHLH protein family [Arabidopsis thaliana]
MDPAPQLKAEPWRPPPRAGAAGGRAAGEASSAVTGQSSGSRPRRRQREPPASEDDSASARPVSTSGGGGGGQDLTDAEAKRFKANKSSDDNGSVRKDAEADSRNASKAVDQNPPPPKQDFIHVRARRGQATDSHSLAERARREKITERMKILQDLVPGCNKVIGKASVLDEIINYVQALERQIEFLSMKLEAVNAHAHAHNGVETFPTKDFAAPAYNTAPGLTFDPQTPREYAQGSPAAEWLHMQIGGTYERVT

SEQ ID NO: 18060 - DNA, 1568 bp, Triticum aestivum
  misc_feature (1)..(1568): Ceres Seq. ID no. 14303531
aatataatttcgtaatcgccgaccgttgcctctcctccccccttccccgctccaccctgcccagccaacggctaccgtctccacgagagaaaagggggagatggcggcggagagccctagatccgcgccacggcggacaccggccgccaagagcggcgcgggcctgctcagcccccggttccgctcggcggcggagctggccggctgggacgaggagtccatcctcctcgctgcgctcgtcgtcgaggacaccccggtccgcgagtcccgccgcaagaggcggccctccggctcctccaccgcgggcggcagcgccggatctaacaccaggaagcggaggtcgcggaggcagtcggcggatgaggcaccgataccgcccgtggcgcttgtgctcgacgacgacgagaagccgaatgacaatgaagttgccaagaaggaggtgaagcaggcggaggaggagaaggagaaggtttctgtcgtggagggaaaggagaagtccggatctaccaaggaaggagaagcagcggcgaccggcgagctgccgtgcatggatcggctaagggaggagctatcttgcgctatttgcttggatgtctgctttcagccaagtaccacgccttgtggtcacagcttttgcatgcaatgcttaaaacatgccgcctctaagtgtggaaagcggtgcccaaaatgccgtcagttaatcagtaattcaagatcttgcactatcaacacagtactttggaacaccatccaactcctatttcctagcgaagttgaggcgaggaagagctccatggcctcatcctcagcaagcaaggacgatgtgaagcaaagcctgccaagaagcaacaactatacacaagttggcattaggaacaccagtggcagtagcagcttcaccacacaggactacactagaataggcaacagcaccaggagctccttagcagcagacggcagaagaagtatgccggtcccaggaaccatgaacaccagcagtgggagctttgacacacagggtaggagcacaagaagcagagacagtggcagaggctttgtccgggcgtcagagttggttggcaccaggagttcagcgcggtcaggccaatctgacgacgcttcacttgcatacaggttgcagcaggaggagttcatgacggctttcgataatgatgggggagagaggcagccacagaacaccatatctactgcccgagcaaatttgagagctatggcttcccgggccgagagggcagttctccttcgtgctcgtggctggcctctttagttttgactgattttcagtttcccagtacctgaatctttctctggaagaatgtagcataagtaccatggtgtgatcaatcacttgtattgtgtgaaagtaaaacgatgacaagccagccatatgtgtttcctgtaatacacacaaatttagattgctttactagataatggtcgtatagccctgcattttctctagctggattaaggaatttctcgatccggtagttagatcaaagaactcttttacatttttggaattataaaggaagctatttttttgg

SEQ ID NO: 18061 - protein, 395 aa, Triticum aestivum
  peptide (1)..(395): Ceres Seq. ID no. 14303532
  misc_feature (159)..(197): Pfam Name: RING finger Pfam Description: Zinc finger, C3HC4 type
  misc_feature (1)..(347): NCBI GI NO: 11994635 NR Description: gene_id:K1G2
  misc_feature (1)..(347): NCBI GI NO: 15232143 NR Description: zinc finger
  misc_feature (155)..(230): NCBI GI NO: 21554128 NR Description: unknown [Arabidopsis thaliana]
  misc_feature (155)..(230): NCBI GI NO: 18394639 NR Description: RING finger protein family [Arabidopsis thaliana]
  misc_feature (99)..(247): NCBI GI NO: 10439066 NR Description: unnamed protein product [Homo sapiens]
  misc_feature (99)..(247): NCBI GI NO: 21750228 NR Description: unnamed protein product [Homo sapiens]
  misc_feature (99)..(247): NCBI GI NO: 37622896 NR Description: ring finger protein 127 [Homo sapiens]
  misc_feature (99)..(219): NCBI GI NO: 23487732 NR Description: zinc finger protein-related
  misc_feature (99)..(247): NCBI GI NO: 26449305 NR Description: hypothetical protein [Macaca fascicularis]
  misc_feature (54)..(222): NCBI GI NO: 10438137 NR Description: unnamed protein product [Homo sapiens]
MAAESPRSAPRRTPAAKSGAGLLSPRFRSAAELAGWDEESILLAALVVEDTPVRESRRKRRPSGSSTAGGSAGSNTRKRRSRRQSADEAPIPPVALVLDDDEKPNDNEVAKKEVKQAEEEKEKVSVVEGKEKSGSTKEGEAAATGELPCMDRLREELSCAICLDVCFQPSTTPCGHSFCMQCLKHAASKCGKRCPKCRQLISNSRSCTINTVLWNTIQLLFPSEVEARKSSMASSSASKDDVKQSLPRSNNYTQVGIRNTSGSSSFTTQDYTRIGNSTRSSLAADGRRSMPVPGTMNTSSGSFDTQGRSTRSRDSGRGFVRASELVGTRSSARSGQSDDASLAYRLQQEEFMTAFDNDGGERQPQNTISTARANLRAMASRAERAVLLRARGWPL

SEQ ID NO: 18062 - protein, 246 aa, Triticum aestivum
  peptide (1)..(246): Ceres Seq. ID no. 14303533
  misc_feature (10)..(48): Pfam Name: RING finger Pfam Description: Zinc finger, C3HC4 type
  misc_feature (1)..(198): NCBI GI NO: 11994635 NR Description: gene_id:K1G2
  misc_feature (1)..(198): NCBI GI NO: 15232143 NR Description: zinc finger
  misc_feature (6)..(81): NCBI GI NO: 21554128 NR Description: unknown [Arabidopsis thaliana]
  misc_feature (6)..(81): NCBI GI NO: 18394639 NR Description: RING finger protein family [Arabidopsis thaliana]
  misc_feature (1)..(98): NCBI GI NO: 10439066 NR Description: unnamed protein product [Homo sapiens]
  misc_feature (1)..(98): NCBI GI NO: 21750228 NR Description: unnamed protein product [Homo sapiens]
  misc_feature (1)..(98): NCBI GI NO: 37622896 NR Description: ring finger protein 127 [Homo sapiens]
  misc_feature (1)..(70): NCBI GI NO: 23487732 NR Description: zinc finger protein-related
  misc_feature (1)..(98): NCBI GI NO: 26449305 NR Description: hypothetical protein [Macaca fascicularis]
  misc_feature (1)..(73): NCBI GI NO: 10438137 NR Description: unnamed protein product [Homo sapiens]
MDRLREELSCAICLDVCFQPSTTPCGHSFCMQCLKHAASKCGKRCPKCRQLISNSRSCTINTVLWNTIQLLFPSEVEARKSSMASSSASKDDVKQSLPRSNNYTQVGIRNTSGSSSFTTQDYTRIGNSTRSSLAADGRRSMPVPGTMNTSSGSFDTQGRSTRSRDSGRGFVRASELVGTRSSARSGQSDDASLAYRLQQEEFMTAFDNDGGERQPQNTISTARANLRAMASRAERAVLLRARGWPL

SEQ ID NO: 18063 - protein, 216 aa, Triticum aestivum
  peptide (1)..(216): Ceres Seq. ID no. 14303534
  misc_feature (1)..(168): NCBI GI NO: 11994635 NR Description: gene_id:K1G2
  misc_feature (1)..(168): NCBI GI NO: 15232143 NR Description: zinc finger
  misc_feature (1)..(51): NCBI GI NO: 21554128 NR Description: unknown [Arabidopsis thaliana]
  misc_feature (1)..(51): NCBI GI NO: 18394639 NR Description: RING finger protein family [Arabidopsis thaliana]
  misc_feature (1)..(68): NCBI GI NO: 10439066 NR Description: unnamed protein product [Homo sapiens]
  misc_feature (1)..(68): NCBI GI NO: 21750228 NR Description: unnamed protein product [Homo sapiens]
  misc_feature (1)..(68): NCBI GI NO: 37622896 NR Description: ring finger protein 127 [Homo sapiens]
  misc_feature (1)..(40): NCBI GI NO: 23487732 NR Description: zinc finger protein-related
  misc_feature (1)..(68): NCBI GI NO: 26449305 NR Description: hypothetical protein [Macaca fascicularis]
  misc_feature (1)..(43): NCBI GI NO: 10438137 NR Description: unnamed protein product [Homo sapiens]
MQCLKHAASKCGKRCPKCRQLISNSRSCTINTVLWNTIQLLFPSEVEARKSSMASSSASKDDVKQSLPRSNNYTQVGIRNTSGSSSFTTQDYTRIGNSTRSSLAADGRRSMPVPGTMNTSSGSFDTQGRSTRSRDSGRGFVRASELVGTRSSARSGQSDDASLAYRLQQEEFMTAFDNDGGERQPQNTISTARANLRAMASRAERAVLLRARGWPL

SEQ ID NO: 18064 - DNA, 1450 bp, Triticum aestivum
  misc_feature (1)..(1450): Ceres Seq. ID no. 13660685
gctgaccggacgaattgccccgtcgtctcttggtagcgacgggcatccaacaagaccgaccgaatcgcgatggagacctgggtccgcgccgccgtggaggccatccactcgtctcgagcccaagccgtcatctatctcgccggcggcgcctcccaggcgctcggttggctcctgtccgtgcccggcgcttctggcagcgtcctcgaggtcgtcgtgccctactccagggcctccatggcgcagctgctcggcaagttgcccctgcaattcacaagcaagcaggccgcggaggacatggcactggccgcgttcaaccgtgccctgaagctttctgggccaggtctacaagtaatgggtgttggatttactgggtcactcgctagcgcacgcccaaaacatggtgaccacaggttttatgtgtcaacgcgcacgcaaaattgcctcaggmcatcacatgtaacattgtcgaagggtttacggagcagagaggaagaagacaaggtctcaagctgttttgtgcttaaggcaatcgcagatgcatgcagaatttctgcaaccattcagtcagacgttcaagaacctgaaattccaaaagaaagtgtggaacaatttgatgaagaccaagagctccagcaagttattgatggtcaagtctgcatgaaagtttaccactttgctgatccaacggaaaagaacttcgacaggaaactaattctacctggttcattcaatcccttgcatgatggccaccttaggttgttagaagttgcatcaagcatgtgtgatgatgggtttccgtgctttgagatatcagcaataaatgcggacaaaccccccctgtctattgcagaaattaagcgccgtgtcgagcaattcagaaaagcagggaagaatgtgatcatatctaaccaaccgtacttttataagaaagcagaacttttcccaggcagtgcttttataattggtgcagacactgcagctaggcttgtaaatcctaagtattatggaggtgactacaacagaatgctggagattcttcttgaatgtaaaagcactggcacaacatttctggttggtggtcgagagattgaaggagtattcaaggtccttgaagaattaaatattccaacagagttgaaggacatgtttatctctataccagaggagaagttccgcatagacatttcatctactgaattaagaaaaaaacaagggctctgatgtctcgaacacttggtcctatcctacaccagattcaagatgtttttctcttgggcgaagctttgcaaatagtcatggcagtgtttgatttcgtagttttgccatgcaaataataactgttatgtttgtattagtaaaggcaaaaacacattccattagtactacagatgtcagaaggcgatggtggccctgttatttttttcttgaaacgccatgtaatctttctgtt

SEQ ID NO: 18065 - protein, 383 aa, Triticum aestivum
  peptide (1)..(383): Ceres Seq. ID no. 15220049
  misc_feature (5)..(382): NCBI GI NO: 30677890 NR Description: expressed protein [Arabidopsis thaliana]
  misc_feature (150)..(271): NCBI GI NO: 34911372 NR Description: P0034C09.17
  misc_feature (1)..(95): NCBI GI NO: 34911372 NR Description: P0034C09.17
  misc_feature (309)..(382): NCBI GI NO: 34911372 NR Description: P0034C09.17
  misc_feature (5)..(382): NCBI GI NO: 30677893 NR Description: expressed protein [Arabidopsis thaliana]
  misc_feature (5)..(382): NCBI GI NO: 21537099 NR Description: unknown [Arabidopsis thaliana]
  misc_feature (5)..(382): NCBI GI NO: 26451899 NR Description: unknown protein [Arabidopsis thaliana]
  misc_feature (2)..(382): NCBI GI NO: 9294466 NR Description: gb|AAD14522
  misc_feature (2)..(382): NCBI GI NO: 15232221 NR Description: expressed protein [Arabidopsis thaliana]
  misc_feature (5)..(152): NCBI GI NO: 25371182 NR Description: hypothetical protein At2g01220
  misc_feature (127)..(127): Xaa is any aa, unknown or other
METWVRAAVEAIHSSRAQAVIYLAGGASQALGWLLSVPGASGSVLEVVVPYSRASMAQLLGKLPLQFTSKQAAEDMALAAFNRALKLSGPGLQVMGVGFTGSLASARPKHGDHRFYVSTRTQNCLRXSHVTLSKGLRSREEEDKVSSCFVLKAIADACRISATIQSDVQEPEIPKESVEQFDEDQELQQVIDGQVCMKVYHFADPTEKNFDRKLILPGSFNPLHDGHLRLLEVASSMCDDGFPCFEISAINADKPPLSIAEIKRRVEQFRKAGKNVIISNQPYFYKKAELFPGSAFIIGADTAARLVNPKYYGGDYNRMLEILLECKSTGTTFLVGGREIEGVFKVLEELNIPTELKDMFISIPEEKFRIDISSTELRKKQGL

SEQ ID NO: 18066 - protein, 328 aa, Triticum aestivum
  peptide (1)..(328): Ceres Seq. ID no. 15220050
  misc_feature (1)..(327): NCBI GI NO: 30677890 NR Description: expressed protein [Arabidopsis thaliana]
  misc_feature (95)..(216): NCBI GI NO: 34911372 NR Description: P0034C09.17
  misc_feature (1)..(40): NCBI GI NO: 34911372 NR Description: P0034C09.17
  misc_feature (254)..(327): NCBI GI NO: 34911372 NR Description: P0034C09.17
  misc_feature (1)..(327): NCBI GI NO: 30677893 NR Description: expressed protein [Arabidopsis thaliana]
  misc_feature (1)..(327): NCBI GI NO: 21537099 NR Description: unknown [Arabidopsis thaliana]
  misc_feature (1)..(327): NCBI GI NO: 26451899 NR Description: unknown protein [Arabidopsis thaliana]
  misc_feature (1)..(327): NCBI GI NO: 9294466 NR Description: gb|AAD14522
  misc_feature (1)..(327): NCBI GI NO: 15232221 NR Description: expressed protein [Arabidopsis thaliana]
  misc_feature (1)..(97): NCBI GI NO: 25371182 NR Description: hypothetical protein At2g01220
  misc_feature (72)..(72): Xaa is any aa, unknown or other
MAQLLGKLPLQFTSKQAAEDMALAAFNRALKLSGPGLQVMGVGFTGSLASARPKHGDHRFYVSTRTQNCLRXSHVTLSKGLRSREEEDKVSSCFVLKAIADACRISATIQSDVQEPEIPKESVEQFDEDQELQQVIDGQVCMKVYHFADPTEKNFDRKLILPGSFNPLHDGHLRLLEVASSMCDDGFPCFEISAINADKPPLSIAEIKRRVEQFRKAGKNVIISNQPYFYKKAELFPGSAFIIGADTAARLVNPKYYGGDYNRMLEILLECKSTGTTFLVGGREIEGVFKVLEELNIPTELKDMFISIPEEKFRIDISSTELRKKQGL

SEQ ID NO: 18067 - protein, 308 aa, Triticum aestivum
  peptide (1)..(308): Ceres Seq. ID no. 15220051
  misc_feature (1)..(307): NCBI GI NO: 30677890 NR Description: expressed protein [Arabidopsis thaliana]
  misc_feature (75)..(196): NCBI GI NO: 34911372 NR Description: P0034C09.17
  misc_feature (1)..(20): NCBI GI NO: 34911372 NR Description: P0034C09.17
  misc_feature (234)..(307): NCBI GI NO: 34911372 NR Description: P0034C09.17
  misc_feature (1)..(307): NCBI GI NO: 30677893 NR Description: expressed protein [Arabidopsis thaliana]
  misc_feature (1)..(307): NCBI GI NO: 21537099 NR Description: unknown [Arabidopsis thaliana]
  misc_feature (1)..(307): NCBI GI NO: 26451899 NR Description: unknown protein [Arabidopsis thaliana]
  misc_feature (1)..(307): NCBI GI NO: 9294466 NR Description: gb|AAD14522
  misc_feature (1)..(307): NCBI GI NO: 15232221 NR Description: expressed protein [Arabidopsis thaliana]
  misc_feature (1)..(77): NCBI GI NO: 25371182 NR Description: hypothetical protein At2g01220
  misc_feature (52)..(52): Xaa is any aa, unknown or other
MALAAFNRALKLSGPGLQVMGVGFTGSLASARPKHGDHRFYVSTRTQNCLRXSHVTLSKGLRSREEEDKVSSCFVLKAIADACRISATIQSDVQEPEIPKESVEQFDEDQELQQVIDGQVCMKVYHFADPTEKNFDRKLILPGSFNPLHDGHLRLLEVASSMCDDGFPCFEISAINADKPPLSIAEIKRRVEQFRKAGKNVIISNQPYFYKKAELFPGSAFIIGADTAARLVNPKYYGGDYNRMLEILLECKSTGTTFLVGGREIEGVFKVLEELNIPTELKDMFISIPEEKFRIDISSTELRKKQGL

SEQ ID NO: 18068 - DNA, 1762 bp, Triticum aestivum
  misc_feature (1)..(1762): Ceres Seq. ID no. 13664123
cgtattgaggtgatgcgttccctctgcaaggttttggactcaaacttcgaagataagttaaaagaactgggtcaatggaggagcttgacgagggaacgatagaatggaaaacggtcgagagcagattagagcggacgatacagacgctacttgaggtcagagatgagagatataagcagctgaaagagtgtgggactaaggtcatacaacagtggaaatcaaacgatgcaccagcatcaagaatcgttgatttttcagaagccttagcattttatgatgctgcatcggcaacagagtcatccacacagctcactggaagcaaagctctcaacatcgattcaattaagaatataaataaggaaattcttttgcaaaactcactagagctgaagaaattgaaaggaaagtttgacaggctcaagaataagttgttttctctgattcacaagaaccatcttcagttgagtctggcggattttgtttttgaaatgaaagttgagtcgaataaagattatttttctgcatgcaagaagttgaaagaggcgatctcaaatgtcaaagctcaggttgttaagaggaaggaaataattatgagaacagagatgctgaaattggctatagatcaatcaatgcccctggcaaatatcgaagggttcatccaagtgatcaaaagacaggtggatgtgttggttcaggatgaagggaaaccttacatttatgattgtgaagatataaattcaattctcgataagctccaatctattgcttctgagaagaaggctccgcaaaattcaggttccaagctgagaataaaagaacttgttccggaaaagggaatgcaggagaaagcttcaggaacctcaagagcaagttttagtctgtctgctgctaatgcgggtaaggaatctcgagagaagcccgcagcatgtctgagatcaagctcaaggctcaaggagaagcgaactcaaccggaactgcgaggaacaatgagtctgtctgtccaagtccttccacagcaggaatcatcaagctcccaaagtggagaagaagatcactcaggggaaacctcaagagcgagttccagtctgtctgctgctaatgcgttcaaggaatctggtgctgctgctcaaaagaagcccgcagctggtctgagatcaagttcgaggctcaaggagaagcaagctcaaccaaaactgcaaagaaagacgagagtgtctgtccaagtctttccacagcaggaatcatcaagctcccaaagtggagaagaagatcactcaggggaaagctcgctgcctgttgaaccgcaattgatagcttcattgccaccacatccaaggcagcccaggactcgaagagtggaaataccacctggtgaaggatgacaaaagctgacaaggtccgcaacttgatggaagtgaacatccaaaataaggggccagggctaggcgtaaggaattaaaaagcaacaaaaaacagagtgaatccaccagagtgagtgaatcggtagaagagggggcaataacatgaataacatacaagatccagaagcaagtctgttgtaggaatcttttgccaacaaacagaagattttgcgctgtaggaatcatgtagcgatcagatcagatgcagtagtcaaaattttgccaacagtagccaaaaattttctacttttttttgttgctcgcctgatttttcmcatatatggtcagatgcagtggggatttttttcgaaagtttttgccctgcagttgatttactgccc

SEQ ID NO: 18069 - protein, 435 aa, Triticum aestivum
  peptide (1)..(435): Ceres Seq. ID no. 15220727
  misc_feature (13)..(184): Pfam Name: MAP65/ASE1 family Pfam Description: Microtubule associated protein
MEELDEGTIEWKTVESRLERTIQTLLEVRDERYKQLKECGTKVIQQWKSNDAPASRIVDFSEALAFYDAASATESSTQLTGSKALNIDSIKNINKEILLQNSLELKKLKGKFDRLKNKLFSLIHKNHLQLSLADFVFEMKVESNKDYFSACKKLKEAISNVKAQVVKRKEIIMRTEMLKLAIDQSMPLANIEGFIQVIKRQVDVLVQDEGKPYIYDCEDINSILDKLQSIASEKKAPQNSGSKLRIKELVPEKGMQEKASGTSRASFSLSAANAGKESREKPAACLRSSSRLKEKRTQPELRGTMSLSVQVLPQQESSSSQSGEEDHSGETSRASSSLSAANAFKESGAAAQKKPAAGLRSSSRLKEKQAQPKLQRKTRVSVQVFPQQESSSSQSGEEDHSGESSLPVEPQLIASLPPHPRQPRTRRVEIPPGEG

SEQ ID NO: 18070 - protein, 297 aa, Triticum aestivum
  peptide (1)..(297): Ceres Seq. ID no. 15220728
MKVESNKDYFSACKKLKEAISNVKAQVVKRKEIIMRTEMLKLAIDQSMPLANIEGFIQVIKRQVDVLVQDEGKPYIYDCEDINSILDKLQSIASEKKAPQNSGSKLRIKELVPEKGMQEKASGTSRASFSLSAANAGKESREKPAACLRSSSRLKEKRTQPELRGTMSLSVQVLPQQESSSSQSGEEDHSGETSRASSSLSAANAFKESGAAAQKKPAAGLRSSSRLKEKQAQPKLQRKTRVSVQVFPQQESSSSQSGEEDHSGESSLPVEPQLIASLPPHPRQPRTRRVEIPPGEG

SEQ ID NO: 18071 - protein, 263 aa, Triticum aestivum
  peptide (1)..(263): Ceres Seq. ID no. 15220729
MRTEMLKLAIDQSMPLANIEGFIQVIKRQVDVLVQDEGKPYIYDCEDINSILDKLQSIASEKKAPQNSGSKLRIKELVPEKGMQEKASGTSRASFSLSAANAGKESREKPAACLRSSSRLKEKRTQPELRGTMSLSVQVLPQQESSSSQSGEEDHSGETSRASSSLSAANAFKESGAAAQKKPAAGLRSSSRLKEKQAQPKLQRKTRVSVQVFPQQESSSSQSGEEDHSGESSLPVEPQLIASLPPHPRQPRTRRVEIPPGEG

SEQ ID NO: 18072 - DNA, 911 bp, Triticum aestivum
  misc_feature (1)..(911): Ceres Seq. ID no. 12621905
cttccccgtgagctcgtgcgcctcgcagtcgtcgtgtggtagtcgcttcccccggctggactccttcctccgtgtccgtcgccttcgcctccccagatccggtccctatggcgaggaatccgggctgcgccgtctacataggtaacttggatgaaaaggtctcggagagggttttgtatgagattcttattcagatctctgggcaagacaaggcctcttcaaatgtcaatgttcctgtaacacctaaaatgaacccactaccaaatccacctcaaccaatgagatttggtgatactcctgtgtcacaacatagagtggtaaatggtaggattgcaggctatggtgtttctccaaatcattcttatgatttccattcccaagcatcaagtggggtagcaagtagaggattaagtgatggtacatatgattatagtagacgtgtatttggttctgttctgaatgatgttagccgtcgagctgacagacaaccagttccatacccgtcctactagcatactgagctccaatgaatgaaacatcggccagtgcagccattgttgtctcagcccttccgtagggtcatctgggtacttgccattacatccatgtaaatatggcttatggtagtgaatgtgcgtgtctgtctggttgttctgttgttttctgcatggtatggaggcctgtcgctgatggttaggttccatgccttatcttcctgataggatattgcccccactaatgttgctgtagtactttccctagtcatagggatggggttaccgtattctcagttcaaaatatgtgaactagtatgttatttgttgtttgtcatgtgagttggatctgtattatgttgggacatgaatgggtaaaaaaccctacaaatctgccatctgtctttaaacttatcc

SEQ ID NO: 18073 - protein, 134 aa, Triticum aestivum
  peptide (1)..(134): Ceres Seq. ID no. 12621906
  misc_feature (30)..(109): NCBI GI NO: 34907328 NR Description: P0698A10.26
  misc_feature (1)..(29): NCBI GI NO: 34907328 NR Description: P0698A10.26
MARNPGCAVYIGNLDEKVSERVLYEILIQISGQDKASSNVNVPVTPKMNPLPNPPQPMRFGDTPVSQHRVVNGRIAGYGVSPNHSYDFHSQASSGVASRGLSDGTYDYSRRVFGSVLNDVSRRADRQPVPYPSY

SEQ ID NO: 18074 - protein, 87 aa, Triticum aestivum
  peptide (1)..(87): Ceres Seq. ID no. 12621907
  misc_feature (1)..(62): NCBI GI NO: 34907328 NR Description: P0698A10.26
MNPLPNPPQPMRFGDTPVSQHRVVNGRIAGYGVSPNHSYDFHSQASSGVASRGLSDGTYDYSRRVFGSVLNDVSRRADRQPVPYPSY

SEQ ID NO: 18075 - protein, 77 aa, Triticum aestivum
  peptide (1)..(77): Ceres Seq. ID no. 12621908
  misc_feature (1)..(52): NCBI GI NO: 34907328 NR Description: P0698A10.26
MRFGDTPVSQHRVVNGRIAGYGVSPNHSYDFHSQASSGVASRGLSDGTYDYSRRVFGSVLNDVSRRADRQPVPYPSY

SEQ ID NO: 18076 - DNA, 1962 bp, Triticum aestivum
  misc_feature (1)..(1962): Ceres Seq. ID no. 13664013
catagcttcattccgtctcgatctctgccttctcctgagagactcgtatcagtcggctgcccaccatcgccggtccaagaagccgcctgctcgtcggctactccgccgccccactcgcccatccacccacctcccttccccggattcaggaccggatcggccttcccctctgtagatggacatcacaatcaattccttgacgtacaaaggttcgattccagatgcaattaatcaatcaagaagggagaaaaaactctttgtaatttacatatcaggtcaagatgaaacctcaagtagtttggaacagtctacattggttgatgaacatgtggctgcagtgataagcagatgttgcatattcttgcaactaaaacaaggcaatgttgacgcgcttcaattttcagctatctatccacagaagtctgtcccaagtatatctgtcgttggactgaatggtgctatgctatggaatcatgaggggtatattagcccagaagagcttaaggaaagcattgataaagcttgggctgcacttcaactgcaggagacagcggcaaccctgttagctgcatcacttgcttcaagaatgtctgaacctgcgaatactgcttcgacaactatgcctggtgaagatggttcatctacttcagaaaatcattccaattcatcaggtcaatcctcagagtcttctgcagtccgtgggtttgctaattctactgctttggtagcacaaccacctagtagcacaagccatgctgaacttctcaagacaagtaaaatcccaaaatcagattcagctccatgcaacataaccgctgaggaaaagctagattcagcatgtcaggctctgttgccagattttccagcaagctcaaatgtggacagttccacagatccaaatcagacaggcagtacaccttcgccaaaaaggaagaatatggtggatgggaatagccctaaagttccctccaagccagcttctagcataccaactaggagtactccacagttgcctgtggaacaagataaggcaactactagcagagctattgaagtgaccacagattctgcaaagacagatgatattcagctggccattcgtatgcctgatggacctagtctgcagattaaactgacaaaagaagatgttttaaggaaggtgaagacttttgtggatgaaaaccaagatagtgggattggatcatataatcttgcaatgctttatcctagaaaagtgttcacggaacaagatctggaaaccacattgtatgagctgggtattgaaacccgccaggcccttgttgtcgttccgaatcgtcaatctgttaaagtggtaaggcaccaatcgtcattgccatccagtgatctggatcgcactggggctacagacaggtcgggtggttggggttttctgggggcagcgttatcatacgtgaatccattgtcctacttgagaggaaatcccaccccatcaaatcctgatcgactgggaaatgaaggctcgcagcagtacagaccgaactctgaatcccaacctcttcgtagtgatggaagtcaacaaacagctactcatagctctggaaataccttgagaaggcggccccgacagttcggtggcaacattcacactctaagcagtgaagaacaagatccatctgataatagaaatgtcttctggaatgggaattctacagagtttggaggtgatgaaaagaaataggggatgaccggactgcatcgaagttagatgatacttgaaccatttaatggggaaataaatatgttgggaacgaactgaggtgttaaactacagtgcttatacatatgtttggaacaaattgaggtgttaaattacagtgcttatacataacaagtaatatggcacgtgcaaccctagaatttactttgttcaccccaggaatgacctttgttatttccgtacgagcatatataatttgatgt

SEQ ID NO: 18077 - protein, 514 aa, Triticum aestivum
  peptide (1)..(514): Ceres Seq. ID no. 13664014
  misc_feature (298)..(379): Pfam Name: Pfam Description:  UBX domain
  misc_feature (5)..(510): NCBI GI NO: 20147205 NR Description: MFL8.1/MFL8.1 [Arabidopsis thaliana]
  misc_feature (5)..(510): NCBI GI NO: 30689298 NR Description: expressed protein [Arabidopsis thaliana]
  misc_feature (5)..(441): NCBI GI NO: 25408846 NR Description: hypothetical protein At2g43210
  misc_feature (283)..(507): NCBI GI NO: 40555755 NR Description: Unknown (protein for MGC:73362) [Danio rerio]
  misc_feature (10)..(195): NCBI GI NO: 40555755 NR Description: Unknown (protein for MGC:73362) [Danio rerio]
  misc_feature (305)..(500): NCBI GI NO: 24307965 NR Description: UBX domain containing 2
  misc_feature (8)..(192): NCBI GI NO: 24307965 NR Description: UBX domain containing 2
  misc_feature (305)..(500): NCBI GI NO: 1663704 NR Description: KIAA0242 protein [Homo sapiens]
  misc_feature (8)..(192): NCBI GI NO: 1663704 NR Description: KIAA0242 protein [Homo sapiens]
  misc_feature (8)..(195): NCBI GI NO: 23956178 NR Description: RIKEN cDNA 1300013G12 [Mus musculus]
MDITINSLTYKGSIPDAINQSRREKKLFVIYISGQDETSSSLEQSTLVDEHVAAVISRCCIFLQLKQGNVDALQFSAIYPQKSVPSISVVGLNGAMLWNHEGYISPEELKESIDKAWAALQLQETAATLLAASLASRMSEPANTASTTMPGEDGSSTSENHSNSSGQSSESSAVRGFANSTALVAQPPSSTSHAELLKTSKIPKSDSAPCNITAEEKLDSACQALLPDFPASSNVDSSTDPNQTGSTPSPKRKNMVDGNSPKVPSKPASSIPTRSTPQLPVEQDKATTSRAIEVTTDSAKTDDIQLAIRMPDGPSLQIKLTKEDVLRKVKTFVDENQDSGIGSYNLAMLYPRKVFTEQDLETTLYELGIETRQALVVVPNRQSVKVVRHQSSLPSSDLDRTGATDRSGGWGFLGAALSYVNPLSYLRGNPTPSNPDRLGNEGSQQYRPNSESQPLRSDGSQQTATHSSGNTLRRRPRQFGGNIHTLSSEEQDPSDNRNVFWNGNSTEFGGDEKK

SEQ ID NO: 18078 - protein, 419 aa, Triticum aestivum
  peptide (1)..(419): Ceres Seq. ID no. 13664015
  misc_feature (203)..(284): Pfam Name: Pfam Description:  UBX domain
  misc_feature (1)..(415): NCBI GI NO: 20147205 NR Description: MFL8.1/MFL8.1 [Arabidopsis thaliana]
  misc_feature (1)..(415): NCBI GI NO: 30689298 NR Description: expressed protein [Arabidopsis thaliana]
  misc_feature (1)..(346): NCBI GI NO: 25408846 NR Description: hypothetical protein At2g43210
  misc_feature (188)..(412): NCBI GI NO: 40555755 NR Description: Unknown (protein for MGC:73362) [Danio rerio]
  misc_feature (1)..(100): NCBI GI NO: 40555755 NR Description: Unknown (protein for MGC:73362) [Danio rerio]
  misc_feature (210)..(405): NCBI GI NO: 24307965 NR Description: UBX domain containing 2
  misc_feature (1)..(97): NCBI GI NO: 24307965 NR Description: UBX domain containing 2
  misc_feature (210)..(405): NCBI GI NO: 1663704 NR Description: KIAA0242 protein [Homo sapiens]
  misc_feature (1)..(97): NCBI GI NO: 1663704 NR Description: KIAA0242 protein [Homo sapiens]
  misc_feature (1)..(100): NCBI GI NO: 23956178 NR Description: RIKEN cDNA 1300013G12 [Mus musculus]
MLWNHEGYISPEELKESIDKAWAALQLQETAATLLAASLASRMSEPANTASTTMPGEDGSSTSENHSNSSGQSSESSAVRGFANSTALVAQPPSSTSHAELLKTSKIPKSDSAPCNITAEEKLDSACQALLPDFPASSNVDSSTDPNQTGSTPSPKRKNMVDGNSPKVPSKPASSIPTRSTPQLPVEQDKATTSRAIEVTTDSAKTDDIQLAIRMPDGPSLQIKLTKEDVLRKVKTFVDENQDSGIGSYNLAMLYPRKVFTEQDLETTLYELGIETRQALVVVPNRQSVKVVRHQSSLPSSDLDRTGATDRSGGWGFLGAALSYVNPLSYLRGNPTPSNPDRLGNEGSQQYRPNSESQPLRSDGSQQTATHSSGNTLRRRPRQFGGNIHTLSSEEQDPSDNRNVFWNGNSTEFGGDEKK

SEQ ID NO: 18079 - protein, 377 aa, Triticum aestivum
  peptide (1)..(377): Ceres Seq. ID no. 13664016
  misc_feature (161)..(242): Pfam Name: Pfam Description:  UBX domain
  misc_feature (1)..(373): NCBI GI NO: 20147205 NR Description: MFL8.1/MFL8.1 [Arabidopsis thaliana]
  misc_feature (1)..(373): NCBI GI NO: 30689298 NR Description: expressed protein [Arabidopsis thaliana]
  misc_feature (1)..(304): NCBI GI NO: 25408846 NR Description: hypothetical protein At2g43210
  misc_feature (146)..(370): NCBI GI NO: 40555755 NR Description: Unknown (protein for MGC:73362) [Danio rerio]
  misc_feature (1)..(58): NCBI GI NO: 40555755 NR Description: Unknown (protein for MGC:73362) [Danio rerio]
  misc_feature (168)..(363): NCBI GI NO: 24307965 NR Description: UBX domain containing 2
  misc_feature (1)..(55): NCBI GI NO: 24307965 NR Description: UBX domain containing 2
  misc_feature (168)..(363): NCBI GI NO: 1663704 NR Description: KIAA0242 protein [Homo sapiens]
  misc_feature (1)..(55): NCBI GI NO: 1663704 NR Description: KIAA0242 protein [Homo sapiens]
  misc_feature (1)..(58): NCBI GI NO: 23956178 NR Description: RIKEN cDNA 1300013G12 [Mus musculus]
MSEPANTASTTMPGEDGSSTSENHSNSSGQSSESSAVRGFANSTALVAQPPSSTSHAELLKTSKIPKSDSAPCNITAEEKLDSACQALLPDFPASSNVDSSTDPNQTGSTPSPKRKNMVDGNSPKVPSKPASSIPTRSTPQLPVEQDKATTSRAIEVTTDSAKTDDIQLAIRMPDGPSLQIKLTKEDVLRKVKTFVDENQDSGIGSYNLAMLYPRKVFTEQDLETTLYELGIETRQALVVVPNRQSVKVVRHQSSLPSSDLDRTGATDRSGGWGFLGAALSYVNPLSYLRGNPTPSNPDRLGNEGSQQYRPNSESQPLRSDGSQQTATHSSGNTLRRRPRQFGGNIHTLSSEEQDPSDNRNVFWNGNSTEFGGDEKK

SEQ ID NO: 18080 - DNA, 1542 bp, Triticum aestivum
  misc_feature (1)..(1542): Ceres Seq. ID no. 12613390
ccaaacaaacgccaccgtcttccccacctctcccgtccccggtccggtccaccaaccgcctccaggccgcaaccatgcacggccgccgccatctggcggcctccctggcgagagccctgtcccaggccccctcccgctccatctcctccaccccgtccctcctccaaaccctcgacccgaccccgcagtcccctcccctcgccgcgcccgcggcggggcggctcgcggagatgcggaggcggctgcaggcggagacgccgtcgctgggggacttcgcgtactcggtggaggtggggacgcggaagaagccgctgcccaagcccaagtggatgaaggagacgatccccggcggggccaagtacgcggccatcaaggccaagctgcgggagctgaagctgcacactgtctgcgaggaggcgcgctgccccaacctcggcgagtgctggtcgggcggcgagaccggcaccgccactgccaccatcatgatcctcggtgacacctgcacgcgtggatgcagattttgcaatgtcaagacatcacgaacccctcctccaccagatcctaatgagcctgccaatgttgcgcaagctattgcatcgtggggccttgaatatatagtcatcacaagtgtggaccgggatgatttacctgatcaggggagcggccattttgctgaaacagtacagaggttgaagactttaaagccagatatgcttattgaagcgcttgttcctgatttccaaggagatcgaagttgtgtagaaaaggtagcaacttccgggttgcatgtttttgcacacaatattgaaacggtggaagagcttcaaagaagtgtgcgagaccaccgtgcaaattttaagcaatcaatggatgttctgaaaatggcgaaggagtatgcccctcctggcaccctcacaaagacatcagtcatgctgggttgtggggagactcccgatcaggttatcagcacaatggaaaaggtgcgagctgctggtgttgatgtcattacatttggtcagtacatgaggccgtcaaagcgacatatgccagtgtctgagtatattacacctgaagccttcgagaactaccgcgcccttggtgttgaaatgggatttcgttatgttgcatctggtccgatggttcggtcctcctacaaagcaggcgaattctacatcaaagccatgatcgaagatgaccgagcaaaatcaggtgctgttgcagaatcaagttcatagttgacacacctccagtcattgacatggctacgctgcaaataagatgttctaattggagaaacatgtttgtctttttacatcttggtaaaactgatattctttttgagagaataaattcttctgcctcttcacttcaaaaaattatttacatttcttcatactatctcctcctttgtactactatacgtggctataatcatccattgtaagttgtaacagtagcagggatagagtccgtcaatgtaccccaccgaatattattgaggccattattgtgcctcatgtgatgtgcttgtacagagttttg

SEQ ID NO: 18081 - protein, 410 aa, Triticum aestivum
  peptide (1)..(410): Ceres Seq. ID no. 12613391
  misc_feature (161)..(327): Pfam Name: Pfam Description:  Radical SAM superfamily
  misc_feature (25)..(402): NCBI GI NO: 38347101 NR Description: OSJNBa0006M15.16
  misc_feature (25)..(402): NCBI GI NO: 15226412 NR Description: lipoic acid synthase (LIP1); protein id:At2g20860
  misc_feature (48)..(400): NCBI GI NO: 13873338 NR Description: lipoic acid synthase [Bruguiera gymnorrhiza]
  misc_feature (107)..(407): NCBI GI NO: 33989742 NR Description: Unknown (protein for MGC:66080) [Danio rerio]
  misc_feature (67)..(401): NCBI GI NO: 17737685 NR Description: Lipoic acid synthase CG5231-PA
  misc_feature (99)..(402): NCBI GI NO: 18415808 NR Description: lipoic acid synthase - like protein
  misc_feature (99)..(402): NCBI GI NO: 21553591 NR Description: lipoic acid synthase-like protein
  misc_feature (107)..(405): NCBI GI NO: 13277380 NR Description: lipoic acid synthetase [Mus musculus]
  misc_feature (34)..(410): NCBI GI NO: 31211147 NR Description: ENSANGP00000016313 [Anopheles gambiae]
  misc_feature (107)..(405): NCBI GI NO: 26327671 NR Description: unnamed protein product [Mus musculus]
KQTPPSSPPLPSPVRSTNRLQAATMHGRRHLAASLARALSQAPSRSISSTPSLLQTLDPTPQSPPLAAPAAGRLAEMRRRLQAETPSLGDFAYSVEVGTRKKPLPKPKWMKETIPGGAKYAAIKAKLRELKLHTVCEEARCPNLGECWSGGETGTATATIMILGDTCTRGCRFCNVKTSRTPPPPDPNEPANVAQAIASWGLEYIVITSVDRDDLPDQGSGHFAETVQRLKTLKPDMLIEALVPDFQGDRSCVEKVATSGLHVFAHNIETVEELQRSVRDHRANFKQSMDVLKMAKEYAPPGTLTKTSVMLGCGETPDQVISTMEKVRAAGVDVITFGQYMRPSKRHMPVSEYITPEAFENYRALGVEMGFRYVASGPMVRSSYKAGEFYIKAMIEDDRAKSGAVAESSS

SEQ ID NO: 18082 - protein, 386 aa, Triticum aestivum
  peptide (1)..(386): Ceres Seq. ID no. 12613392
  misc_feature (137)..(303): Pfam Name: Pfam Description:  Radical SAM superfamily
  misc_feature (1)..(378): NCBI GI NO: 38347101 NR Description: OSJNBa0006M15.16
  misc_feature (1)..(378): NCBI GI NO: 15226412 NR Description: lipoic acid synthase (LIP1); protein id:At2g20860
  misc_feature (24)..(376): NCBI GI NO: 13873338 NR Description: lipoic acid synthase [Bruguiera gymnorrhiza]
  misc_feature (83)..(383): NCBI GI NO: 33989742 NR Description: Unknown (protein for MGC:66080) [Danio rerio]
  misc_feature (43)..(377): NCBI GI NO: 17737685 NR Description: Lipoic acid synthase CG5231-PA
  misc_feature (75)..(378): NCBI GI NO: 18415808 NR Description: lipoic acid synthase - like protein
  misc_feature (75)..(378): NCBI GI NO: 21553591 NR Description: lipoic acid synthase-like protein
  misc_feature (83)..(381): NCBI GI NO: 13277380 NR Description: lipoic acid synthetase [Mus musculus]
  misc_feature (10)..(386): NCBI GI NO: 31211147 NR Description: ENSANGP00000016313 [Anopheles gambiae]
  misc_feature (83)..(381): NCBI GI NO: 26327671 NR Description: unnamed protein product [Mus musculus]
MHGRRHLAASLARALSQAPSRSISSTPSLLQTLDPTPQSPPLAAPAAGRLAEMRRRLQAETPSLGDFAYSVEVGTRKKPLPKPKWMKETIPGGAKYAAIKAKLRELKLHTVCEEARCPNLGECWSGGETGTATATIMILGDTCTRGCRFCNVKTSRTPPPPDPNEPANVAQAIASWGLEYIVITSVDRDDLPDQGSGHFAETVQRLKTLKPDMLIEALVPDFQGDRSCVEKVATSGLHVFAHNIETVEELQRSVRDHRANFKQSMDVLKMAKEYAPPGTLTKTSVMLGCGETPDQVISTMEKVRAAGVDVITFGQYMRPSKRHMPVSEYITPEAFENYRALGVEMGFRYVASGPMVRSSYKAGEFYIKAMIEDDRAKSGAVAESSS

SEQ ID NO: 18083 - protein, 334 aa, Triticum aestivum
  peptide (1)..(334): Ceres Seq. ID no. 12613393
  misc_feature (85)..(251): Pfam Name: Pfam Description:  Radical SAM superfamily
  misc_feature (1)..(326): NCBI GI NO: 38347101 NR Description: OSJNBa0006M15.16
  misc_feature (1)..(326): NCBI GI NO: 15226412 NR Description: lipoic acid synthase (LIP1); protein id:At2g20860
  misc_feature (1)..(324): NCBI GI NO: 13873338 NR Description: lipoic acid synthase [Bruguiera gymnorrhiza]
  misc_feature (31)..(331): NCBI GI NO: 33989742 NR Description: Unknown (protein for MGC:66080) [Danio rerio]
  misc_feature (1)..(325): NCBI GI NO: 17737685 NR Description: Lipoic acid synthase CG5231-PA
  misc_feature (23)..(326): NCBI GI NO: 18415808 NR Description: lipoic acid synthase - like protein
  misc_feature (23)..(326): NCBI GI NO: 21553591 NR Description: lipoic acid synthase-like protein
  misc_feature (31)..(329): NCBI GI NO: 13277380 NR Description: lipoic acid synthetase [Mus musculus]
  misc_feature (1)..(334): NCBI GI NO: 31211147 NR Description: ENSANGP00000016313 [Anopheles gambiae]
  misc_feature (31)..(329): NCBI GI NO: 26327671 NR Description: unnamed protein product [Mus musculus]
MRRRLQAETPSLGDFAYSVEVGTRKKPLPKPKWMKETIPGGAKYAAIKAKLRELKLHTVCEEARCPNLGECWSGGETGTATATIMILGDTCTRGCRFCNVKTSRTPPPPDPNEPANVAQAIASWGLEYIVITSVDRDDLPDQGSGHFAETVQRLKTLKPDMLIEALVPDFQGDRSCVEKVATSGLHVFAHNIETVEELQRSVRDHRANFKQSMDVLKMAKEYAPPGTLTKTSVMLGCGETPDQVISTMEKVRAAGVDVITFGQYMRPSKRHMPVSEYITPEAFENYRALGVEMGFRYVASGPMVRSSYKAGEFYIKAMIEDDRAKSGAVAESSS

SEQ ID NO: 18084 - DNA, 1623 bp, Triticum aestivum
  misc_feature (1)..(1623): Ceres Seq. ID no. 13653980
acacattacatgttccattccagtgcacgtaccgcccactgcagtttctgcaaacgtttaaaaaacaaggtagtactagtaggagtatgaccagggggggacgaatctgtacgggatcgcggcgagattcacccggcgccaccctcccctccctgtaacgtcgttatacaagtgtacttatctcgggggaccctataagggaggcggctcgggcagctccaagcgccagcgaaccaaccacgaggacacggcgagatgcagcgcgccgcggcctccctcgcctcctcccgctccgcggctgcctgggcgtgctcctccacctcgcgccatgccatcgcctcctgctcggccaccgcccgccgcgacgccgtcgtgcctctccggattcgcgggcagcagcaggttcccctccactccatgtccctgtcgctgctctcgcggagacggcctgcgcggacggcaaaagcggcggctgctgcggcggaactggcaccggcgtcggacgaggtggccgcgggcggcggcattgccggcacggtgcagctcggcgccatgatcgtcgcctggtacctcctcaacatctacttcaacatctacaacaagcaggttctccaggtgctgccattgccgctcccctacaccatcaccgccttccagctcgccttcggctcgctcgtcatcttcttcatgtgggccacaaagctccaccccgtgcccaagctctccgccgcacagctggccaagatcgcgccgctggccgccgggcacatgctgggcacggtgttcaccaacatgagcctgggcaaggtagccgtctccttcacgcacaccgtcaaggcgtccgagcccttcttcaccgtgctgctctccgccttcttcctcggtgaggtgccgtcgccgctggtgctgggctcgctggtgccgatcgtcggcggcgtcgccctggcatcgctgaccgaggtctccttcaactgggtcggattctggagcgccatggcgtcgaatctgctcaaccagaccaggaatgtgctcagcaagcgcctcctcggcggcgaagaggaggagttcatggacgacataaacctcttctcggtgatcaccgtgctgtccttcctcctatccttgcctctgatgatctttgcagaaggggtcagcttctccccagcgttcctccagagcaccggcctgaacctgcaggagctgtgcgtgagggcggccctggccggcctctgcttccatggctaccagaagctgtcgtacatgatcctggcgagggtgtcgcccgtgacccactccgtggccaactgcgtcaagcgtgtggtggtcatcgtctcctccgtcctcttcttccggacgcccatctcgcctgtcaacgcactggggactggtgcggcacttgcgggagtttacctgtactccaggctcaagaaaacaaagccaaagagctcatgaagacattctgatacaggtttttgtggtacaagattaaatcgatatagttattcagagagaaaatgtattgagataggttgtacagaacttgccacggccagtagtacacttgtactacaggccacagcagcttctttcagtagtaacaggaccaaactgctggtcttgaag

SEQ ID NO: 18085 - protein, 398 aa, Triticum aestivum
  peptide (1)..(398): Ceres Seq. ID no. 13653981
  misc_feature (106)..(233): Pfam Name: Pfam Description:  Integral membrane protein DUF6
  misc_feature (211)..(375): NCBI GI NO: 15528718 NR Description: putative phosphoenolpyruvate/phosphate translocator
  misc_feature (1)..(127): NCBI GI NO: 15528718 NR Description: putative phosphoenolpyruvate/phosphate translocator
  misc_feature (117)..(212): NCBI GI NO: 15528718 NR Description: putative phosphoenolpyruvate/phosphate translocator
  misc_feature (1)..(396): NCBI GI NO: 7489742 NR Description: glucose-6-phosphate/ phosphate-translocatorprecursor homolog
  misc_feature (62)..(396): NCBI GI NO: 13991929 NR Description: phosphoenolpyruvate/phosphate translocator
  misc_feature (1)..(396): NCBI GI NO: 7489743 NR Description: glucose-6-phosphate/ phosphate-translocatorprecursor homolog
  misc_feature (51)..(396): NCBI GI NO: 1706110 NR Description: Triose phosphate/phosphate translocator
  misc_feature (23)..(396): NCBI GI NO: 29647427 NR Description: putative phosphoenolpyruvate/phosphate translocator
  misc_feature (68)..(396): NCBI GI NO: 7489170 NR Description: phosphate/ phosphoenolpyruvate translocatorprecursor
  misc_feature (26)..(396): NCBI GI NO: 21554233 NR Description: phosphate/ phosphoenolpyruvate translocatorprecursor
MQRAAASLASSRSAAAWACSSTSRHAIASCSATARRDAVVPLRIRGQQQVPLHSMSLSLLSRRRPARTAKAAAAAAELAPASDEVAAGGGIAGTVQLGAMIVAWYLLNIYFNIYNKQVLQVLPLPLPYTITAFQLAFGSLVIFFMWATKLHPVPKLSAAQLAKIAPLAAGHMLGTVFTNMSLGKVAVSFTHTVKASEPFFTVLLSAFFLGEVPSPLVLGSLVPIVGGVALASLTEVSFNWVGFWSAMASNLLNQTRNVLSKRLLGGEEEEFMDDINLFSVITVLSFLLSLPLMIFAEGVSFSPAFLQSTGLNLQELCVRAALAGLCFHGYQKLSYMILARVSPVTHSVANCVKRVVVIVSSVLFFRTPISPVNALGTGAALAGVYLYSRLKKTKPKSS

SEQ ID NO: 18086 - protein, 344 aa, Triticum aestivum
  peptide (1)..(344): Ceres Seq. ID no. 13653982
  misc_feature (52)..(179): Pfam Name: Pfam Description:  Integral membrane protein DUF6
  misc_feature (157)..(321): NCBI GI NO: 15528718 NR Description: putative phosphoenolpyruvate/phosphate translocator
  misc_feature (1)..(73): NCBI GI NO: 15528718 NR Description: putative phosphoenolpyruvate/phosphate translocator
  misc_feature (63)..(158): NCBI GI NO: 15528718 NR Description: putative phosphoenolpyruvate/phosphate translocator
  misc_feature (1)..(342): NCBI GI NO: 7489742 NR Description: glucose-6-phosphate/ phosphate-translocatorprecursor homolog
  misc_feature (8)..(342): NCBI GI NO: 13991929 NR Description: phosphoenolpyruvate/phosphate translocator
  misc_feature (1)..(342): NCBI GI NO: 7489743 NR Description: glucose-6-phosphate/ phosphate-translocatorprecursor homolog
  misc_feature (1)..(342): NCBI GI NO: 1706110 NR Description: Triose phosphate/phosphate translocator
  misc_feature (1)..(342): NCBI GI NO: 29647427 NR Description: putative phosphoenolpyruvate/phosphate translocator
  misc_feature (14)..(342): NCBI GI NO: 7489170 NR Description: phosphate/ phosphoenolpyruvate translocatorprecursor
  misc_feature (1)..(342): NCBI GI NO: 21554233 NR Description: phosphate/ phosphoenolpyruvate translocatorprecursor
MSLSLLSRRRPARTAKAAAAAAELAPASDEVAAGGGIAGTVQLGAMIVAWYLLNIYFNIYNKQVLQVLPLPLPYTITAFQLAFGSLVIFFMWATKLHPVPKLSAAQLAKIAPLAAGHMLGTVFTNMSLGKVAVSFTHTVKASEPFFTVLLSAFFLGEVPSPLVLGSLVPIVGGVALASLTEVSFNWVGFWSAMASNLLNQTRNVLSKRLLGGEEEEFMDDINLFSVITVLSFLLSLPLMIFAEGVSFSPAFLQSTGLNLQELCVRAALAGLCFHGYQKLSYMILARVSPVTHSVANCVKRVVVIVSSVLFFRTPISPVNALGTGAALAGVYLYSRLKKTKPKSS

SEQ ID NO: 18087 - protein, 299 aa, Triticum aestivum
  peptide (1)..(299): Ceres Seq. ID no. 13653983
  misc_feature (7)..(134): Pfam Name: Pfam Description:  Integral membrane protein DUF6
  misc_feature (112)..(276): NCBI GI NO: 15528718 NR Description: putative phosphoenolpyruvate/phosphate translocator
  misc_feature (1)..(28): NCBI GI NO: 15528718 NR Description: putative phosphoenolpyruvate/phosphate translocator
  misc_feature (18)..(113): NCBI GI NO: 15528718 NR Description: putative phosphoenolpyruvate/phosphate translocator
  misc_feature (1)..(297): NCBI GI NO: 7489742 NR Description: glucose-6-phosphate/ phosphate-translocatorprecursor homolog
  misc_feature (1)..(297): NCBI GI NO: 13991929 NR Description: phosphoenolpyruvate/phosphate translocator
  misc_feature (1)..(297): NCBI GI NO: 7489743 NR Description: glucose-6-phosphate/ phosphate-translocatorprecursor homolog
  misc_feature (1)..(297): NCBI GI NO: 1706110 NR Description: Triose phosphate/phosphate translocator
  misc_feature (1)..(297): NCBI GI NO: 29647427 NR Description: putative phosphoenolpyruvate/phosphate translocator
  misc_feature (1)..(297): NCBI GI NO: 7489170 NR Description: phosphate/ phosphoenolpyruvate translocatorprecursor
  misc_feature (1)..(297): NCBI GI NO: 21554233 NR Description: phosphate/ phosphoenolpyruvate translocatorprecursor
MIVAWYLLNIYFNIYNKQVLQVLPLPLPYTITAFQLAFGSLVIFFMWATKLHPVPKLSAAQLAKIAPLAAGHMLGTVFTNMSLGKVAVSFTHTVKASEPFFTVLLSAFFLGEVPSPLVLGSLVPIVGGVALASLTEVSFNWVGFWSAMASNLLNQTRNVLSKRLLGGEEEEFMDDINLFSVITVLSFLLSLPLMIFAEGVSFSPAFLQSTGLNLQELCVRAALAGLCFHGYQKLSYMILARVSPVTHSVANCVKRVVVIVSSVLFFRTPISPVNALGTGAALAGVYLYSRLKKTKPKSS

SEQ ID NO: 18088 - DNA, 1048 bp, Triticum aestivum
  misc_feature (1)..(1048): Ceres Seq. ID no. 12587797
ggatgctggagccaccgctccaaaacacacagaaacacacacacagcttcttgctttctcaaacactgatcttgcagcttcagcgtcgtccaccgtcggaaagaaggcatggcgggcgcatcctcgtggtcgtcgtcctgctcatgcacgtcgtcgctcggctccttggatgacgacgacgtggtctgcgtggtgaaaccgggttcccccggggcggcagagggcagcgtcaagttcctgtgcagctacgggggtatgatccttccacgccaccccgacgccgccctccgttacgtcggcggcaacaaccgcgtcctctccgtcgaccgctccctccaattttacgagctgcaacggaagctgatggacatgtgcggatgcgaggcgatgagcctgcggtgccagctgccgacggaggacctggacgcgctcgtctccgtcacgaccaacgacgacctcggccacctgctggaggagtacgacgccgctagcagggaccggctccagccgctcaagataagggcgttcctgttcccaaggtccaaaacgccgcctctctcgccgtccaccccgtcgtccaggccaacaccggcgtacgtccgccaccagcaccacacggctcgcccccctccggctcgtgtgcattcgggccaccggcgcccacaccagctcctgctcctccacaacggcagtcggttgcaataacagcgggattagcagccgcgtgctggtgtattagcttggcagtcgtgagatcgtccatggggcgctgtgccgctgtcacagatttgtaagccctgctttgcatgtttcataacatatactccctccgttcccaaatatttgtctttctaggcatttcaaatgaaaacaacatatgaatgtatgtagacatattttagagtgtagattcacttattttgctccgtatgtagtcacttgttgaaatctctagaaagacaaatattttaaaacggagggagtacatactactgtagtaacagacttattagcttggcttattttaaataagattcagagtctgtcc

SEQ ID NO: 18089 - protein, 198 aa, Triticum aestivum
  peptide (1)..(198): Ceres Seq. ID no. 12587798
  misc_feature (55)..(127): Pfam Name: Pfam Description:  PB1 domain
  misc_feature (22)..(127): NCBI GI NO: 20067163 NR Description: susceptibility antioxidant protein [Oryza sativa]
  misc_feature (40)..(176): NCBI GI NO: 15223211 NR Description: unknown protein; protein id: At1g70640.1
  misc_feature (40)..(160): NCBI GI NO: 9293928 NR Description: gb|AAF04880
  misc_feature (40)..(160): NCBI GI NO: 15231568 NR Description: unknown protein; protein id: At3g26510.1
  misc_feature (40)..(177): NCBI GI NO: 15242653 NR Description: unknown protein; protein id: At5g63130.1
  misc_feature (38)..(161): NCBI GI NO: 15228362 NR Description: putative protein; protein id: At3g48240.1
  misc_feature (41)..(158): NCBI GI NO: 15237703 NR Description: putative protein; protein id: At5g64430
  misc_feature (41)..(180): NCBI GI NO: 15242462 NR Description: putative protein; protein id: At5g09620.1
  misc_feature (20)..(145): NCBI GI NO: 25407315 NR Description: hypothetical protein AT4g05150
  misc_feature (20)..(145): NCBI GI NO: 18412822 NR Description: putative protein; protein id: At4g05150
MAGASSWSSSCSCTSSLGSLDDDDVVCVVKPGSPGAAEGSVKFLCSYGGMILPRHPDAALRYVGGNNRVLSVDRSLQFYELQRKLMDMCGCEAMSLRCQLPTEDLDALVSVTTNDDLGHLLEEYDAASRDRLQPLKIRAFLFPRSKTPPLSPSTPSSRPTPAYVRHQHHTARPPPARVHSGHRRPHQLLLLHNGSRLQ

SEQ ID NO: 18090 - protein, 149 aa, Triticum aestivum
  peptide (1)..(149): Ceres Seq. ID no. 12587799
  misc_feature (6)..(78): Pfam Name: Pfam Description:  PB1 domain
  misc_feature (1)..(78): NCBI GI NO: 20067163 NR Description: susceptibility antioxidant protein [Oryza sativa]
  misc_feature (1)..(127): NCBI GI NO: 15223211 NR Description: unknown protein; protein id: At1g70640.1
  misc_feature (1)..(111): NCBI GI NO: 9293928 NR Description: gb|AAF04880
  misc_feature (1)..(111): NCBI GI NO: 15231568 NR Description: unknown protein; protein id: At3g26510.1
  misc_feature (1)..(128): NCBI GI NO: 15242653 NR Description: unknown protein; protein id: At5g63130.1
  misc_feature (1)..(112): NCBI GI NO: 15228362 NR Description: putative protein; protein id: At3g48240.1
  misc_feature (1)..(109): NCBI GI NO: 15237703 NR Description: putative protein; protein id: At5g64430
  misc_feature (1)..(131): NCBI GI NO: 15242462 NR Description: putative protein; protein id: At5g09620.1
  misc_feature (1)..(96): NCBI GI NO: 25407315 NR Description: hypothetical protein AT4g05150
  misc_feature (1)..(96): NCBI GI NO: 18412822 NR Description: putative protein; protein id: At4g05150
MILPRHPDAALRYVGGNNRVLSVDRSLQFYELQRKLMDMCGCEAMSLRCQLPTEDLDALVSVTTNDDLGHLLEEYDAASRDRLQPLKIRAFLFPRSKTPPLSPSTPSSRPTPAYVRHQHHTARPPPARVHSGHRRPHQLLLLHNGSRLQ

SEQ ID NO: 18091 - protein, 113 aa, Triticum aestivum
  peptide (1)..(113): Ceres Seq. ID no. 12587800
  misc_feature (1)..(42): NCBI GI NO: 20067163 NR Description: susceptibility antioxidant protein [Oryza sativa]
  misc_feature (1)..(91): NCBI GI NO: 15223211 NR Description: unknown protein; protein id: At1g70640.1
  misc_feature (1)..(75): NCBI GI NO: 9293928 NR Description: gb|AAF04880
  misc_feature (1)..(75): NCBI GI NO: 15231568 NR Description: unknown protein; protein id: At3g26510.1
  misc_feature (1)..(92): NCBI GI NO: 15242653 NR Description: unknown protein; protein id: At5g63130.1
  misc_feature (1)..(76): NCBI GI NO: 15228362 NR Description: putative protein; protein id: At3g48240.1
  misc_feature (1)..(73): NCBI GI NO: 15237703 NR Description: putative protein; protein id: At5g64430
  misc_feature (1)..(95): NCBI GI NO: 15242462 NR Description: putative protein; protein id: At5g09620.1
  misc_feature (1)..(60): NCBI GI NO: 25407315 NR Description: hypothetical protein AT4g05150
  misc_feature (1)..(60): NCBI GI NO: 18412822 NR Description: putative protein; protein id: At4g05150
MDMCGCEAMSLRCQLPTEDLDALVSVTTNDDLGHLLEEYDAASRDRLQPLKIRAFLFPRSKTPPLSPSTPSSRPTPAYVRHQHHTARPPPARVHSGHRRPHQLLLLHNGSRLQ

SEQ ID NO: 18092 - DNA, 1674 bp, Triticum aestivum
  misc_feature (1)..(1674): Ceres Seq. ID no. 12779098
atttaagagcctcgctagtcctttcatcatcaaaccccacacacgcacacgcgcgcgcgcacacacacacaaaaaaaaagcagagagggaggagatggccggagacgggcgtcgcgtggtggtcttccccttcccgttccacggccacgccacccccctcctccgcctcgccagcgttctccacacccgcggcttcgcggtgaccatcttccacaccgagctccgggcgcccgacccggccgagtaccccgcggactaccgcttcgtgcccctgcgcgtggacgtgcccccggagctgatggcgtccgaggacatcgcggggatggtcacggccatgagcgagtactccgaggcgcccttcaaggaacgcctgaccgcggcgctcgccgaggaaggcgccggtgtccggtgcgtcatcgccgacgtcgcctggtacaaggccctgtcggtgtccagcgccctcggcgtgccggcgatgggcgtcatgacggccagcgccgccaactaccgggtctacatggcgtacccgatgttgattgagaagggctacctgcctgtacaagaggcgcgcagggaggatctggtccaggagctgccgccgtaccgtgtgaaagatctgctacggctcgaggcatccagcctccagggcttcgccgacctgctccggaacaccatcgaggcaccgcgccagtccgcaggcctcatattcaacaccttgagggccattgaggccgacgacctggacacgatccgccaggaggagtccctcccggtcttcgccctcgcccctctccacaagctggcgccgccgggcaacaccagcagcagcctgtacggcgagacgcaggcggaccgcgagtgcctcgattggctcgacacgcaggaaccaggcagtgtggtgtacgtgagcttcgggagcctggccgccatggacccgcacgagttcgtggagctggcgtgggggctcgccgccagcaagcggccgttcctctgggtcgtcaggcccacgctcatccgcggctacgagtccggccagctgcccgacgggctcgacgagcagatccgtgatcatggcaggctcgtcagctgggcaccgcaggtggaggtgctcgcccaccctgcggtaggcgccttcatcacgcacagcggctggaactccacggtggaagccgtgtcggagggcgtgccgatgatatgcctcccgttgcacggagaccagttcagcaacgccaggtacgtgtgcgatgtctggaaggtgggagtggagatcgaggcgtcgtcggcggctgggcagaacctggagagagggaagatcaaggctgccatcgacaagattgtgcacgacaaagggattagagagaggatggatgccttcaaattagctgcagatgaagcagttaactcccaaactgaggtgaaagctttggttgatctcataaactcgttttaattaattcagagccttccacttcatatacctcacttaattatgtaatcatcatccatctttggcgatcgacctactgtactgctactccaccctctgtaataagtattcgatttccataccccttttcttttaatgtctccaactgtgatgattgattccaaatgtgatgatttctccaaatgtgatggttgattcgaataaagaaaagcttattttccaagtgt

SEQ ID NO: 18093 - protein, 482 aa, Triticum aestivum
  peptide (1)..(482): Ceres Seq. ID no. 12779099
  misc_feature (38)..(479): Pfam Name: Pfam Description:  UDP-glucoronosyl and UDP-glucosyl transferase
  misc_feature (33)..(482): NCBI GI NO: 18033230 NR Description: UDP-glucosyltransferase BX9 [Zea mays]
  misc_feature (33)..(482): NCBI GI NO: 18033228 NR Description: UDP-glucosyltransferase BX8 [Zea mays]
  misc_feature (34)..(476): NCBI GI NO: 34897378 NR Description: putative UDP-glucosyltransferase
  misc_feature (33)..(480): NCBI GI NO: 34900662 NR Description: glucuronosyl transferase-like protein
  misc_feature (22)..(481): NCBI GI NO: 33146634 NR Description: putative UDP-glucosyltransferase
  misc_feature (37)..(481): NCBI GI NO: 33146633 NR Description: putative UDP-glucosyltransferase
  misc_feature (37)..(468): NCBI GI NO: 34900678 NR Description: glucuronosyl transferase-like protein
  misc_feature (37)..(482): NCBI GI NO: 34395172 NR Description: putative UDP-glucosyltransferase
  misc_feature (36)..(481): NCBI GI NO: 15228174 NR Description: glucuronosyl transferase - like protein
  misc_feature (37)..(450): NCBI GI NO: 15228176 NR Description: glucuronosyl transferase - like protein
FKSLASPFIIKPHTRTRARAHTHKKKAEREEMAGDGRRVVVFPFPFHGHATPLLRLASVLHTRGFAVTIFHTELRAPDPAEYPADYRFVPLRVDVPPELMASEDIAGMVTAMSEYSEAPFKERLTAALAEEGAGVRCVIADVAWYKALSVSSALGVPAMGVMTASAANYRVYMAYPMLIEKGYLPVQEARREDLVQELPPYRVKDLLRLEASSLQGFADLLRNTIEAPRQSAGLIFNTLRAIEADDLDTIRQEESLPVFALAPLHKLAPPGNTSSSLYGETQADRECLDWLDTQEPGSVVYVSFGSLAAMDPHEFVELAWGLAASKRPFLWVVRPTLIRGYESGQLPDGLDEQIRDHGRLVSWAPQVEVLAHPAVGAFITHSGWNSTVEAVSEGVPMICLPLHGDQFSNARYVCDVWKVGVEIEASSAAGQNLERGKIKAAIDKIVHDKGIRERMDAFKLAADEAVNSQTEVKALVDLINSF

SEQ ID NO: 18094 - protein, 451 aa, Triticum aestivum
  peptide (1)..(451): Ceres Seq. ID no. 12779100
  misc_feature (7)..(448): Pfam Name: Pfam Description:  UDP-glucoronosyl and UDP-glucosyl transferase
  misc_feature (2)..(451): NCBI GI NO: 18033230 NR Description: UDP-glucosyltransferase BX9 [Zea mays]
  misc_feature (2)..(451): NCBI GI NO: 18033228 NR Description: UDP-glucosyltransferase BX8 [Zea mays]
  misc_feature (3)..(445): NCBI GI NO: 34897378 NR Description: putative UDP-glucosyltransferase
  misc_feature (2)..(449): NCBI GI NO: 34900662 NR Description: glucuronosyl transferase-like protein
  misc_feature (1)..(450): NCBI GI NO: 33146634 NR Description: putative UDP-glucosyltransferase
  misc_feature (6)..(450): NCBI GI NO: 33146633 NR Description: putative UDP-glucosyltransferase
  misc_feature (6)..(437): NCBI GI NO: 34900678 NR Description: glucuronosyl transferase-like protein
  misc_feature (6)..(451): NCBI GI NO: 34395172 NR Description: putative UDP-glucosyltransferase
  misc_feature (5)..(450): NCBI GI NO: 15228174 NR Description: glucuronosyl transferase - like protein
  misc_feature (6)..(419): NCBI GI NO: 15228176 NR Description: glucuronosyl transferase - like protein
MAGDGRRVVVFPFPFHGHATPLLRLASVLHTRGFAVTIFHTELRAPDPAEYPADYRFVPLRVDVPPELMASEDIAGMVTAMSEYSEAPFKERLTAALAEEGAGVRCVIADVAWYKALSVSSALGVPAMGVMTASAANYRVYMAYPMLIEKGYLPVQEARREDLVQELPPYRVKDLLRLEASSLQGFADLLRNTIEAPRQSAGLIFNTLRAIEADDLDTIRQEESLPVFALAPLHKLAPPGNTSSSLYGETQADRECLDWLDTQEPGSVVYVSFGSLAAMDPHEFVELAWGLAASKRPFLWVVRPTLIRGYESGQLPDGLDEQIRDHGRLVSWAPQVEVLAHPAVGAFITHSGWNSTVEAVSEGVPMICLPLHGDQFSNARYVCDVWKVGVEIEASSAAGQNLERGKIKAAIDKIVHDKGIRERMDAFKLAADEAVNSQTEVKALVDLINSF

SEQ ID NO: 18095 - protein, 383 aa, Triticum aestivum
  peptide (1)..(383): Ceres Seq. ID no. 12779101
  misc_feature (1)..(380): Pfam Name: Pfam Description:  UDP-glucoronosyl and UDP-glucosyl transferase
  misc_feature (1)..(383): NCBI GI NO: 18033230 NR Description: UDP-glucosyltransferase BX9 [Zea mays]
  misc_feature (1)..(383): NCBI GI NO: 18033228 NR Description: UDP-glucosyltransferase BX8 [Zea mays]
  misc_feature (1)..(377): NCBI GI NO: 34897378 NR Description: putative UDP-glucosyltransferase
  misc_feature (1)..(381): NCBI GI NO: 34900662 NR Description: glucuronosyl transferase-like protein
  misc_feature (1)..(382): NCBI GI NO: 33146634 NR Description: putative UDP-glucosyltransferase
  misc_feature (1)..(382): NCBI GI NO: 33146633 NR Description: putative UDP-glucosyltransferase
  misc_feature (1)..(369): NCBI GI NO: 34900678 NR Description: glucuronosyl transferase-like protein
  misc_feature (1)..(383): NCBI GI NO: 34395172 NR Description: putative UDP-glucosyltransferase
  misc_feature (1)..(382): NCBI GI NO: 15228174 NR Description: glucuronosyl transferase - like protein
  misc_feature (1)..(351): NCBI GI NO: 15228176 NR Description: glucuronosyl transferase - like protein
MASEDIAGMVTAMSEYSEAPFKERLTAALAEEGAGVRCVIADVAWYKALSVSSALGVPAMGVMTASAANYRVYMAYPMLIEKGYLPVQEARREDLVQELPPYRVKDLLRLEASSLQGFADLLRNTIEAPRQSAGLIFNTLRAIEADDLDTIRQEESLPVFALAPLHKLAPPGNTSSSLYGETQADRECLDWLDTQEPGSVVYVSFGSLAAMDPHEFVELAWGLAASKRPFLWVVRPTLIRGYESGQLPDGLDEQIRDHGRLVSWAPQVEVLAHPAVGAFITHSGWNSTVEAVSEGVPMICLPLHGDQFSNARYVCDVWKVGVEIEASSAAGQNLERGKIKAAIDKIVHDKGIRERMDAFKLAADEAVNSQTEVKALVDLINSF

SEQ ID NO: 18096 - DNA, 1864 bp, Triticum aestivum
  misc_feature (1)..(1864): Ceres Seq. ID no. 13502947
accaccaccaccaattcgcaacctctcctcccccgttctcctcattgtcctcgcgccccgctccgctccgacggccaaccgctccacacaccactagcctgcctgcctgcctgccgccaaggcaagatggtgaagatctgctgccttggggctggctatgtgggtggcccaacaatggcggtcattgccctcaagtgtcctgacattcaggtggttgtggtagatatcaccaagtcccggattgatgcctggaacagtgacacactgccaatctatgagcctggccttgatgaagtcgtgaagcagtgccgtggaaagaacctcttcttcagcaatgacattgagaagcatgttagtgaagctgacatcatctttgtgtcggtaaacaccccaaccaagacccgtggtcttggagctggtaaggctgctgatctcacttactgggaaagtgcagctcgcatgattgctgatgtggccaaatcagacaagatcgtggtggagaagtccactgttccagtcaagactgctgaggcaattgagaagatcttgacccacaacagcaatggcatcaacttccagatcctctccaacccggagttccttgctgagggtactgctatccaagacctatttaaccctgaccgtgttcttattggaggacgtgagacccctgaaggtcagaaggctgttcagacgctgaaggctgtgtatgcgcattgggttcctgaggatcagattctgacaaccaacttatggtctgcggagctgtcgaagcttgcagccaatgcgttcttggcccagaggatctcctctgtgaatgccatgtcagccctctgcgaggccactggtgcaaatgtttctgaggtgtcctatgccgtgggcaaggactctaggattggcccaaagtttttgaatgccagtgttggatttggaggctcttgcttccagaaggatatcctcaacctggtttacatctgtgagtgcaatggcctcccagaggtcgccaactactggaagcaggtgatcaagatcaatgactaccagaagagccggttcgtgaaccgtgttgtttcctctatgttcaacacggttgcgaacaagaagattgcggtgcttggttttgcattcaagaaggatactggtgacactagggagactccagctattgatgtctgcaagggtctgcttggtgacaaggctaagatcagcatttatgatcctcaggtgactgaagaccaaatccagcgtgaccttgcgatgaacaaatttgactgggaccaccctgttcatctccagccaatgagccccaccactacaaagcaagtctcggttacctgggatgcatatgaggcgaccaaggatgcccatggcatctgcatcatgactgagtgggatgagttcaagactctggactacaaaaagatctacaacagcatgcagaagcccgcctttgtttttgatggccgcaacgttgttgactctgagaagctgagggagattggcttcattgtctactccattggcaagccactcgacggttggctcaaggacatgcctgctgtggcttaaataaactctgataaagggaggagatccgcctcgggtgaatccatgagcagctatcgatagggattcagcttgttatttctctttatagtcgctgtttatcttgtgccagaaaatcagatgtcatttatttttcttccttgagtgtttcttcggggtttacagtgttagaatggtatagtcactgggatgtgccattcctttggtccattgtcacagctttgtagctaatgtctgttgttgcatctttatcatgttactggtgttcatcctgctggttatacatgtggcttcagat

SEQ ID NO: 18097 - protein, 522 aa, Triticum aestivum
  peptide (1)..(522): Ceres Seq. ID no. 15223206
  misc_feature (44)..(242): Pfam Name: Pfam Description:  UDP-glucose/GDP-mannose dehydrogenase family
  misc_feature (43)..(522): NCBI GI NO: 13236672 NR Description: putative UDP-glucose dehydrogenase [Oryza sativa]
  misc_feature (43)..(522): NCBI GI NO: 6136119 NR Description: UDP-GLUCOSE 6-DEHYDROGENASE
  misc_feature (43)..(522): NCBI GI NO: 15228687 NR Description: UDP-glucose dehydrogenase -related
  misc_feature (43)..(522): NCBI GI NO: 21618158 NR Description: UDP-glucose dehydrogenase, putative
  misc_feature (43)..(522): NCBI GI NO: 29028306 NR Description: UDP-glucose dehydrogenase [Colocasia esculenta]
  misc_feature (43)..(522): NCBI GI NO: 15983404 NR Description: AT3g29360/MUO10_6 [Arabidopsis thaliana]
  misc_feature (43)..(522): NCBI GI NO: 15242316 NR Description: UDP-glucose dehydrogenase-related protein
  misc_feature (43)..(520): NCBI GI NO: 15241704 NR Description: UDP-glucose dehydrogenase-related protein
  misc_feature (43)..(520): NCBI GI NO: 30102540 NR Description: At5g39320 [Arabidopsis thaliana]
  misc_feature (43)..(522): NCBI GI NO: 6164591 NR Description: UDP-glucose dehydrogenase
TTTTNSQPLLPRSPHCPRAPLRSDGQPLHTPLACLPACRQGKMVKICCLGAGYVGGPTMAVIALKCPDIQVVVVDITKSRIDAWNSDTLPIYEPGLDEVVKQCRGKNLFFSNDIEKHVSEADIIFVSVNTPTKTRGLGAGKAADLTYWESAARMIADVAKSDKIVVEKSTVPVKTAEAIEKILTHNSNGINFQILSNPEFLAEGTAIQDLFNPDRVLIGGRETPEGQKAVQTLKAVYAHWVPEDQILTTNLWSAELSKLAANAFLAQRISSVNAMSALCEATGANVSEVSYAVGKDSRIGPKFLNASVGFGGSCFQKDILNLVYICECNGLPEVANYWKQVIKINDYQKSRFVNRVVSSMFNTVANKKIAVLGFAFKKDTGDTRETPAIDVCKGLLGDKAKISIYDPQVTEDQIQRDLAMNKFDWDHPVHLQPMSPTTTKQVSVTWDAYEATKDAHGICIMTEWDEFKTLDYKKIYNSMQKPAFVFDGRNVVDSEKLREIGFIVYSIGKPLDGWLKDMPAVA

SEQ ID NO: 18098 - protein, 480 aa, Triticum aestivum
  peptide (1)..(480): Ceres Seq. ID no. 15223207
  misc_feature (2)..(200): Pfam Name: Pfam Description:  UDP-glucose/GDP-mannose dehydrogenase family
  misc_feature (1)..(480): NCBI GI NO: 13236672 NR Description: putative UDP-glucose dehydrogenase [Oryza sativa]
  misc_feature (1)..(480): NCBI GI NO: 6136119 NR Description: UDP-GLUCOSE 6-DEHYDROGENASE
  misc_feature (1)..(480): NCBI GI NO: 15228687 NR Description: UDP-glucose dehydrogenase -related
  misc_feature (1)..(480): NCBI GI NO: 21618158 NR Description: UDP-glucose dehydrogenase, putative
  misc_feature (1)..(480): NCBI GI NO: 29028306 NR Description: UDP-glucose dehydrogenase [Colocasia esculenta]
  misc_feature (1)..(480): NCBI GI NO: 15983404 NR Description: AT3g29360/MUO10_6 [Arabidopsis thaliana]
  misc_feature (1)..(480): NCBI GI NO: 15242316 NR Description: UDP-glucose dehydrogenase-related protein
  misc_feature (1)..(478): NCBI GI NO: 15241704 NR Description: UDP-glucose dehydrogenase-related protein
  misc_feature (1)..(478): NCBI GI NO: 30102540 NR Description: At5g39320 [Arabidopsis thaliana]
  misc_feature (1)..(480): NCBI GI NO: 6164591 NR Description: UDP-glucose dehydrogenase
MVKICCLGAGYVGGPTMAVIALKCPDIQVVVVDITKSRIDAWNSDTLPIYEPGLDEVVKQCRGKNLFFSNDIEKHVSEADIIFVSVNTPTKTRGLGAGKAADLTYWESAARMIADVAKSDKIVVEKSTVPVKTAEAIEKILTHNSNGINFQILSNPEFLAEGTAIQDLFNPDRVLIGGRETPEGQKAVQTLKAVYAHWVPEDQILTTNLWSAELSKLAANAFLAQRISSVNAMSALCEATGANVSEVSYAVGKDSRIGPKFLNASVGFGGSCFQKDILNLVYICECNGLPEVANYWKQVIKINDYQKSRFVNRVVSSMFNTVANKKIAVLGFAFKKDTGDTRETPAIDVCKGLLGDKAKISIYDPQVTEDQIQRDLAMNKFDWDHPVHLQPMSPTTTKQVSVTWDAYEATKDAHGICIMTEWDEFKTLDYKKIYNSMQKPAFVFDGRNVVDSEKLREIGFIVYSIGKPLDGWLKDMPAVA

SEQ ID NO: 18099 - protein, 464 aa, Triticum aestivum
  peptide (1)..(464): Ceres Seq. ID no. 15223208
  misc_feature (1)..(184): Pfam Name: Pfam Description:  UDP-glucose/GDP-mannose dehydrogenase family
  misc_feature (1)..(464): NCBI GI NO: 13236672 NR Description: putative UDP-glucose dehydrogenase [Oryza sativa]
  misc_feature (1)..(464): NCBI GI NO: 6136119 NR Description: UDP-GLUCOSE 6-DEHYDROGENASE
  misc_feature (1)..(464): NCBI GI NO: 15228687 NR Description: UDP-glucose dehydrogenase -related
  misc_feature (1)..(464): NCBI GI NO: 21618158 NR Description: UDP-glucose dehydrogenase, putative
  misc_feature (1)..(464): NCBI GI NO: 29028306 NR Description: UDP-glucose dehydrogenase [Colocasia esculenta]
  misc_feature (1)..(464): NCBI GI NO: 15983404 NR Description: AT3g29360/MUO10_6 [Arabidopsis thaliana]
  misc_feature (1)..(464): NCBI GI NO: 15242316 NR Description: UDP-glucose dehydrogenase-related protein
  misc_feature (1)..(462): NCBI GI NO: 15241704 NR Description: UDP-glucose dehydrogenase-related protein
  misc_feature (1)..(462): NCBI GI NO: 30102540 NR Description: At5g39320 [Arabidopsis thaliana]
  misc_feature (1)..(464): NCBI GI NO: 6164591 NR Description: UDP-glucose dehydrogenase
MAVIALKCPDIQVVVVDITKSRIDAWNSDTLPIYEPGLDEVVKQCRGKNLFFSNDIEKHVSEADIIFVSVNTPTKTRGLGAGKAADLTYWESAARMIADVAKSDKIVVEKSTVPVKTAEAIEKILTHNSNGINFQILSNPEFLAEGTAIQDLFNPDRVLIGGRETPEGQKAVQTLKAVYAHWVPEDQILTTNLWSAELSKLAANAFLAQRISSVNAMSALCEATGANVSEVSYAVGKDSRIGPKFLNASVGFGGSCFQKDILNLVYICECNGLPEVANYWKQVIKINDYQKSRFVNRVVSSMFNTVANKKIAVLGFAFKKDTGDTRETPAIDVCKGLLGDKAKISIYDPQVTEDQIQRDLAMNKFDWDHPVHLQPMSPTTTKQVSVTWDAYEATKDAHGICIMTEWDEFKTLDYKKIYNSMQKPAFVFDGRNVVDSEKLREIGFIVYSIGKPLDGWLKDMPAVA

SEQ ID NO: 18100 - DNA, 1305 bp, Triticum aestivum
  misc_feature (1)..(1305): Ceres Seq. ID no. 13595877
attccaagctgcctaccgcacacactagccgcgagcagtaccatcactactggccaaaacgtgaccccctccagtcaacttcctcgtcgccaccacacgaccgcacctctcccatggcgtcctcctcgccgccgcacgtcgtggaggacgtgcccccgttcctgcagctcctcagcgacggcacggtgatccgcttcactgacgcctacccgctccccatcccgtcgccgccgcccggccagcccgtcgtcgactggaaggacgttctgtacgacgccagccacggcctcaagctccgcatctacaggccggcggcggcctcctcctccgggaacaagctcccggtgatcgtctacttccacggcggcgggtacagcatcggtagcttcgacatgcccaacttccatgcgtgctgcgtccgcctcgccggcgagctccccgctttggtgctctctgcagactaccgcctcgcccccgagcaccgcttccccgcgggtctcgacgacgcggcgaacgtcgtgtcctgggtgcgcgcccaggcagcggctgttggggacaacgccgacccatggctctcggagacggcgaacttcggccgggtgttcgtcgccggggactcggccggcgggggcgtcgtccaccacacggccgtccgcctcgcgtcgggccggctaggccccctcgaccccgttcgcgtcgccgggtgcgcgatgctctgcccgatgttcggcggggaggagaggacggcgtcggaggcggagttcccgccgggcccgttcctgtcgctgccggcggtcgaccaggcgtggcgcctggtgctgccgcctgggtccacgagggaccacccgctggccaacccgttcggcccggacagcccggcccttgacggcgtcgcgctgcctccgatgctcgttgtggccgccgcgcgcgacctgctgcgcgaccgcgccgcggactatgccgcgaggctcaaggccatggggaagccggtggagctcgtggagttcgaggggcagcaccacgggttcttcgcggtcgagccgtacggcgacgccggcagcgaggtggtccggctcgtcaaacggtttgtctacggcaacggcggcgcctccgactaaattggagatcgagcaaagctgttgagggctcctttgattcaaaggatatctttagaatttttgaaggattgaaatttttaggaattttttttatattggccttttgattcatagaattggatcctataggaatttatcctatgaaatcttttgtattacatttcataggaaatctaacatccacttc

SEQ ID NO: 18101 - protein, 371 aa, Triticum aestivum
  peptide (1)..(371): Ceres Seq. ID no. 13595878
  misc_feature (101)..(158): Pfam Name: Pfam Description:  Carboxylesterase
  misc_feature (38)..(368): NCBI GI NO: 27819508 NR Description: putative esterase
  misc_feature (35)..(364): NCBI GI NO: 34899930 NR Description: OJ1714_H10.49
  misc_feature (44)..(371): NCBI GI NO: 34895938 NR Description: P0030H07.40
  misc_feature (36)..(363): NCBI GI NO: 34899932 NR Description: putative cell death associated protein
  misc_feature (44)..(363): NCBI GI NO: 15240090 NR Description: expressed protein [Arabidopsis thaliana]
  misc_feature (74)..(369): NCBI GI NO: 34393714 NR Description: putative esterase
  misc_feature (87)..(363): NCBI GI NO: 15229905 NR Description: expressed protein [Arabidopsis thaliana]
  misc_feature (113)..(364): NCBI GI NO: 15229371 NR Description: expressed protein [Arabidopsis thaliana]
  misc_feature (199)..(352): NCBI GI NO: 5509944 NR Description: esterase HDE [petroleum-degrading bacterium HD-1]
  misc_feature (96)..(211): NCBI GI NO: 5509944 NR Description: esterase HDE [petroleum-degrading bacterium HD-1]
SKLPTAHTSREQYHHYWPKRDPLQSTSSSPPHDRTSPMASSSPPHVVEDVPPFLQLLSDGTVIRFTDAYPLPIPSPPPGQPVVDWKDVLYDASHGLKLRIYRPAAASSSGNKLPVIVYFHGGGYSIGSFDMPNFHACCVRLAGELPALVLSADYRLAPEHRFPAGLDDAANVVSWVRAQAAAVGDNADPWLSETANFGRVFVAGDSAGGGVVHHTAVRLASGRLGPLDPVRVAGCAMLCPMFGGEERTASEAEFPPGPFLSLPAVDQAWRLVLPPGSTRDHPLANPFGPDSPALDGVALPPMLVVAAARDLLRDRAADYAARLKAMGKPVELVEFEGQHHGFFAVEPYGDAGSEVVRLVKRFVYGNGGASD

SEQ ID NO: 18102 - protein, 334 aa, Triticum aestivum
  peptide (1)..(334): Ceres Seq. ID no. 13595879
  misc_feature (64)..(121): Pfam Name: Pfam Description:  Carboxylesterase
  misc_feature (1)..(331): NCBI GI NO: 27819508 NR Description: putative esterase
  misc_feature (1)..(327): NCBI GI NO: 34899930 NR Description: OJ1714_H10.49
  misc_feature (7)..(334): NCBI GI NO: 34895938 NR Description: P0030H07.40
  misc_feature (1)..(326): NCBI GI NO: 34899932 NR Description: putative cell death associated protein
  misc_feature (7)..(326): NCBI GI NO: 15240090 NR Description: expressed protein [Arabidopsis thaliana]
  misc_feature (37)..(332): NCBI GI NO: 34393714 NR Description: putative esterase
  misc_feature (50)..(326): NCBI GI NO: 15229905 NR Description: expressed protein [Arabidopsis thaliana]
  misc_feature (76)..(327): NCBI GI NO: 15229371 NR Description: expressed protein [Arabidopsis thaliana]
  misc_feature (162)..(315): NCBI GI NO: 5509944 NR Description: esterase HDE [petroleum-degrading bacterium HD-1]
  misc_feature (59)..(174): NCBI GI NO: 5509944 NR Description: esterase HDE [petroleum-degrading bacterium HD-1]
MASSSPPHVVEDVPPFLQLLSDGTVIRFTDAYPLPIPSPPPGQPVVDWKDVLYDASHGLKLRIYRPAAASSSGNKLPVIVYFHGGGYSIGSFDMPNFHACCVRLAGELPALVLSADYRLAPEHRFPAGLDDAANVVSWVRAQAAAVGDNADPWLSETANFGRVFVAGDSAGGGVVHHTAVRLASGRLGPLDPVRVAGCAMLCPMFGGEERTASEAEFPPGPFLSLPAVDQAWRLVLPPGSTRDHPLANPFGPDSPALDGVALPPMLVVAAARDLLRDRAADYAARLKAMGKPVELVEFEGQHHGFFAVEPYGDAGSEVVRLVKRFVYGNGGASD

SEQ ID NO: 18103 - protein, 241 aa, Triticum aestivum
  peptide (1)..(241): Ceres Seq. ID no. 13595880
  misc_feature (1)..(238): NCBI GI NO: 27819508 NR Description: putative esterase
  misc_feature (1)..(234): NCBI GI NO: 34899930 NR Description: OJ1714_H10.49
  misc_feature (1)..(241): NCBI GI NO: 34895938 NR Description: P0030H07.40
  misc_feature (1)..(233): NCBI GI NO: 34899932 NR Description: putative cell death associated protein
  misc_feature (1)..(233): NCBI GI NO: 15240090 NR Description: expressed protein [Arabidopsis thaliana]
  misc_feature (1)..(239): NCBI GI NO: 34393714 NR Description: putative esterase
  misc_feature (1)..(233): NCBI GI NO: 15229905 NR Description: expressed protein [Arabidopsis thaliana]
  misc_feature (1)..(234): NCBI GI NO: 15229371 NR Description: expressed protein [Arabidopsis thaliana]
  misc_feature (69)..(222): NCBI GI NO: 5509944 NR Description: esterase HDE [petroleum-degrading bacterium HD-1]
  misc_feature (1)..(81): NCBI GI NO: 5509944 NR Description: esterase HDE [petroleum-degrading bacterium HD-1]
MPNFHACCVRLAGELPALVLSADYRLAPEHRFPAGLDDAANVVSWVRAQAAAVGDNADPWLSETANFGRVFVAGDSAGGGVVHHTAVRLASGRLGPLDPVRVAGCAMLCPMFGGEERTASEAEFPPGPFLSLPAVDQAWRLVLPPGSTRDHPLANPFGPDSPALDGVALPPMLVVAAARDLLRDRAADYAARLKAMGKPVELVEFEGQHHGFFAVEPYGDAGSEVVRLVKRFVYGNGGASD

SEQ ID NO: 18104 - DNA, 1173 bp, Triticum aestivum
  misc_feature (1)..(1173): Ceres Seq. ID no. 12625120
ccaactcaacccaatccaacgtcccgtccgccgctgaaagcacccctcccagtcccagcagccgccttgctccccttgtttccactacgctttggatccatcgatcgatcgagccttctccagttagcctttcccgccacctaaaaaggcaccccacgtctccatccatccatgtgcggcggcgccatcatctacgactacatcccggcgcaccgccgccgggtgtccaccgccgacttctggcccgacgccgaccattccgacgcccacagcgccgcccccgacaaagcgccgcgcgcgaagcgggggcggacgaaccagtaccgcggcatccggcagcggccgtggggcaagtgggcggcggagatccgcgaccccgtgaagggcgtccgcgtctggctcggcacctaccccaccgccgaggccgccgcgcgcgcctacgaccgcgccgcgcgccgcatcaggggcgccaaggccaaggtcaacttccccaacgagatcctggtcggcgcgcccgcgcacgaggccccgtgcacgatggcggccgtgctcccttcccccaagaaagaggaggagcccgcggcgtgctcctgcgaggaggtgaaggcgctctccgaggagctgatggcgtacgagagctacatgagcttcctcggggtcccctacatggagggcggggccgcggccgcggccgcccctgccgccgtcggtgtcgccgccgaggatgcaccggccgagctatggagcttcgaggacagctactacccggggcctctggggctctgattgtgtcgtgctcgtagtctcctgccagtcgcagaaaacagagtcgattcgctctttcccttgtgttttgttgaattcattttttctctctttgttactgtggtgaatgcctcaatgtaatctcacaaattttccatgtaaattttatcaacggaaagcgctcttccccgacgcacgggcggtgctgctgcaacgctgcatccttctgttggacacgcggcgtggggaactacttcggatcgtctagagatgaacaggttggccaagtgagagtgtgagacgactactcccactggaactgctgtgtgcctctccaacctgtgggctgacgttaccagtggcagccctattggtttctttatatatgaaaatcggagaggaaaagcc

SEQ ID NO: 18105 - protein, 266 aa, Triticum aestivum
  peptide (1)..(266): Ceres Seq. ID no. 12625121
  misc_feature (48)..(211): Pfam Name: Pfam Description:  HlyD family secretion protein
NSTQSNVPSAAESTPPSPSSRLAPLVSTTLWIHRSIEPSPVSLSRHLKRHPTSPSIHVRRRHHLRLHPGAPPPGVHRRLLARRRPFRRPQRRPRQSAAREAGADEPVPRHPAAAVGQVGGGDPRPREGRPRLARHLPHRRGRRARLRPRRAPHQGRQGQGQLPQRDPGRRARARGPVHDGGRAPFPQERGGARGVLLRGGEGALRGADGVRELHELPRGPLHGGRGRGRGRPCRRRCRRRGCTGRAMELRGQLLPGASGALIVSCS

SEQ ID NO: 18106 - protein, 204 aa, Triticum aestivum
  peptide (1)..(204): Ceres Seq. ID no. 12625122
  misc_feature (49)..(109): Pfam Name: Pfam Description:  AP2 domain
  misc_feature (1)..(199): NCBI GI NO: 34894554 NR Description: B1011A07.25
  misc_feature (1)..(109): NCBI GI NO: 28274830 NR Description: ethylene response factor 2
  misc_feature (132)..(195): NCBI GI NO: 28274830 NR Description: ethylene response factor 2
  misc_feature (1)..(109): NCBI GI NO: 40557189 NR Description: ethylene-binding protein [Lycopersicon esculentum]
  misc_feature (132)..(195): NCBI GI NO: 40557189 NR Description: ethylene-binding protein [Lycopersicon esculentum]
  misc_feature (19)..(109): NCBI GI NO: 7489226 NR Description: AP2 domain protein homolog - potato
  misc_feature (132)..(195): NCBI GI NO: 7489226 NR Description: AP2 domain protein homolog - potato
  misc_feature (38)..(128): NCBI GI NO: 30961941 NR Description: C-repeat/DRE-binding factor [Nicotiana tabacum]
  misc_feature (136)..(203): NCBI GI NO: 30961941 NR Description: C-repeat/DRE-binding factor [Nicotiana tabacum]
  misc_feature (23)..(109): NCBI GI NO: 22074046 NR Description: transcription factor JERF1
MCGGAIIYDYIPAHRRRVSTADFWPDADHSDAHSAAPDKAPRAKRGRTNQYRGIRQRPWGKWAAEIRDPVKGVRVWLGTYPTAEAAARAYDRAARRIRGAKAKVNFPNEILVGAPAHEAPCTMAAVLPSPKKEEEPAACSCEEVKALSEELMAYESYMSFLGVPYMEGGAAAAAAPAAVGVAAEDAPAELWSFEDSYYPGPLGL

SEQ ID NO: 18107 - DNA, 933 bp, Triticum aestivum
  misc_feature (1)..(933): Ceres Seq. ID no. 13654038
ggccctctctggtcagatcaaatcgagcctgcccttctcgctcgcgtccccactccatttccctttcccccgaggaggctgccgccgtgacctgagagcacacgcacgcaccatgtggcgccgcctccaaaccctagcccccgccctccaccgcgctgccgccgcagccggcgcggccccctccccggccagcgcccgggccgctcccctctccacggcggtcgcggccttccgccgcactgggcccctcctctctgcggacaagccggcggcggcagggacgagtgtggaggacgtcatgcccatagccacggggttggagcgcgaggagctcgaggcggagctccaggggaagaagcgcttcgacatggatcctcctgtcggtcccttcggtaccaaggaggcaccagccgtcattgagtcctattttgacaagagaatagtaggttgccctggtgatgaaggagaggatgagcatgacgtcatatggttctggttgaaaaaagatgagccacatgaatgcccagtctgctcacaatactttgtgcttaaggtcattggtgatggtggaaatccagatgggcatgatgatgatgatgatggtcatcaccactaaggatgcctcgtggttctgaaaataagaattttatgaggcatatgatttcgcttacgcgttctaagcaccagactgctccacggcatccttgtttatgaatatacatttggccatcaagcaggcggtagttgtcgccttaggtttttttgtggaaacaaaactcttttcagatttgtccagtgcatgtgttatggagcatcatcaaataagagatgactgcagagaatttttacttttgctactgagtggccatcgggtgtgatggacctgaccaattcaatcatgcaagaatttatgctgtgcggtttgcagggggg

SEQ ID NO: 18108 - protein, 204 aa, Triticum aestivum
  peptide (1)..(204): Ceres Seq. ID no. 15219608
  misc_feature (83)..(189): Pfam Name: Pfam Description:  Cytochrome c oxidase subunit Vb
  misc_feature (38)..(204): NCBI GI NO: 34912592 NR Description: cytochrome c oxidase subunit Vb precursor
  misc_feature (38)..(204): NCBI GI NO: 5803264 NR Description: ESTs AU057456
  misc_feature (38)..(204): NCBI GI NO: 15232644 NR Description: cytochrome c oxidase subunit Vb -related
  misc_feature (38)..(203): NCBI GI NO: 15220092 NR Description: cytochrome c oxidase subunit -related
  misc_feature (38)..(203): NCBI GI NO: 21592567 NR Description: cytochrome c oxidase subunit, putative
  misc_feature (73)..(183): NCBI GI NO: 6753500 NR Description: cytochrome c oxidase, subunit Vb [Mus musculus]
  misc_feature (73)..(183): NCBI GI NO: 55992 NR Description: cytochrome c oxidase subunit VIa (AA 1 - 118)
  misc_feature (73)..(183): NCBI GI NO: 16758362 NR Description: cytochrome c oxidase subunit Vb
  misc_feature (73)..(183): NCBI GI NO: 12842467 NR Description: unnamed protein product [Mus musculus]
  misc_feature (73)..(183): NCBI GI NO: 473729 NR Description: cytochrome c oxidase subunit Vb
ALSGQIKSSLPFSLASPLHFPFPRGGCRRDLRAHARTMWRRLQTLAPALHRAAAAAGAAPSPASARAAPLSTAVAAFRRTGPLLSADKPAAAGTSVEDVMPIATGLEREELEAELQGKKRFDMDPPVGPFGTKEAPAVIESYFDKRIVGCPGDEGEDEHDVIWFWLKKDEPHECPVCSQYFVLKVIGDGGNPDGHDDDDDGHHH

SEQ ID NO: 18109 - protein, 167 aa, Triticum aestivum
  peptide (1)..(167): Ceres Seq. ID no. 15219609
  misc_feature (46)..(152): Pfam Name: Pfam Description:  Cytochrome c oxidase subunit Vb
  misc_feature (1)..(167): NCBI GI NO: 34912592 NR Description: cytochrome c oxidase subunit Vb precursor
  misc_feature (1)..(167): NCBI GI NO: 5803264 NR Description: ESTs AU057456
  misc_feature (1)..(167): NCBI GI NO: 15232644 NR Description: cytochrome c oxidase subunit Vb -related
  misc_feature (1)..(166): NCBI GI NO: 15220092 NR Description: cytochrome c oxidase subunit -related
  misc_feature (1)..(166): NCBI GI NO: 21592567 NR Description: cytochrome c oxidase subunit, putative
  misc_feature (36)..(146): NCBI GI NO: 6753500 NR Description: cytochrome c oxidase, subunit Vb [Mus musculus]
  misc_feature (36)..(146): NCBI GI NO: 55992 NR Description: cytochrome c oxidase subunit VIa (AA 1 - 118)
  misc_feature (36)..(146): NCBI GI NO: 16758362 NR Description: cytochrome c oxidase subunit Vb
  misc_feature (36)..(146): NCBI GI NO: 12842467 NR Description: unnamed protein product [Mus musculus]
  misc_feature (36)..(146): NCBI GI NO: 473729 NR Description: cytochrome c oxidase subunit Vb
MWRRLQTLAPALHRAAAAAGAAPSPASARAAPLSTAVAAFRRTGPLLSADKPAAAGTSVEDVMPIATGLEREELEAELQGKKRFDMDPPVGPFGTKEAPAVIESYFDKRIVGCPGDEGEDEHDVIWFWLKKDEPHECPVCSQYFVLKVIGDGGNPDGHDDDDDGHHH

SEQ ID NO: 18110 - protein, 105 aa, Triticum aestivum
  peptide (1)..(105): Ceres Seq. ID no. 15219610
  misc_feature (1)..(90): Pfam Name: Pfam Description:  Cytochrome c oxidase subunit Vb
  misc_feature (1)..(105): NCBI GI NO: 34912592 NR Description: cytochrome c oxidase subunit Vb precursor
  misc_feature (1)..(105): NCBI GI NO: 5803264 NR Description: ESTs AU057456
  misc_feature (1)..(105): NCBI GI NO: 15232644 NR Description: cytochrome c oxidase subunit Vb -related
  misc_feature (1)..(104): NCBI GI NO: 15220092 NR Description: cytochrome c oxidase subunit -related
  misc_feature (1)..(104): NCBI GI NO: 21592567 NR Description: cytochrome c oxidase subunit, putative
  misc_feature (1)..(84): NCBI GI NO: 6753500 NR Description: cytochrome c oxidase, subunit Vb [Mus musculus]
  misc_feature (1)..(84): NCBI GI NO: 55992 NR Description: cytochrome c oxidase subunit VIa (AA 1 - 118)
  misc_feature (1)..(84): NCBI GI NO: 16758362 NR Description: cytochrome c oxidase subunit Vb
  misc_feature (1)..(84): NCBI GI NO: 12842467 NR Description: unnamed protein product [Mus musculus]
  misc_feature (1)..(84): NCBI GI NO: 473729 NR Description: cytochrome c oxidase subunit Vb
MPIATGLEREELEAELQGKKRFDMDPPVGPFGTKEAPAVIESYFDKRIVGCPGDEGEDEHDVIWFWLKKDEPHECPVCSQYFVLKVIGDGGNPDGHDDDDDGHHH

SEQ ID NO: 18111 - DNA, 1133 bp, Triticum aestivum
  misc_feature (1)..(1133): Ceres Seq. ID no. 13595881
aaaacccctcgaccacgaaaaccctaaaccctctccgccgccgccgccagccatggccctcttcgccgccgcccgccgcgcggcctcctcctcgctccccctcctccgcgcctccgcctccgcctcccgcggcgcggcctcccgtggcgcggccctgctccgccccctggccgccgccgcggcccggccgatgcccttctcctcggcgaccgcgctgaagccgagctccgacgacgagctcctccgcatcgtcaaggccgagatcaagttcgccgaggactgcgacgaccacgaccgggttgaggaggtcccagatagcttccctttcaaaatcagcgacaagaaggggcttaatgacatcactcttacaagaacttaccagggtgagaagatcgaggttctggtttttatgcccaacctagtcactggagacgagccagagcatgaccaggacgaggatgacaaggagaaagatgatgatcaggatgacggcgagaagcccccgaagtccagccttcccctcacagtcaccatcaccaagagtgaaggcccaagcctcgagttcacctgcacggcctatcctgacgagatcctcatcgataccttgtccgtgaagcagccctctgagaagttgggagaggactacattgcatacgagggtcctgacttcaatgacctggacgagaacctgcagagggcattccacaagtacctggagctgcgcgggatcacgcccatgacgacaaacttcctgcacgagtacatgatcaacaaggacagccgggagtacctgttttggctgaacaagctcaaggatttcgtcaagcagtaatgtagagattgcaagttatgatccctagcataaagacgagccaatgtgctttgcacatcctgttctgagaccttcgggcttcggaactccaaactgctccgtgtttagtacacgatgacgatgtgtatgcttagcatcgtgttttagattgctttttttggcagtgtggaaatgaccgggtgatgttagagttgaaaacctgggtagttcttcagatagaacacttcgttaagtagcgtgctatttttttctgaacaaataattatgctctgtgtgcgtgaaggtttacgcacagtgtttc

SEQ ID NO: 18112 - protein, 276 aa, Triticum aestivum
  peptide (1)..(276): Ceres Seq. ID no. 13595882
  misc_feature (84)..(274): Pfam Name: Pfam Description:  Mitochondrial glycoprotein
  misc_feature (18)..(275): NCBI GI NO: 34895730 NR Description: P0019D06.23
  misc_feature (18)..(274): NCBI GI NO: 34895740 NR Description: P0019D06.28
  misc_feature (54)..(275): NCBI GI NO: 15239320 NR Description: expressed protein [Arabidopsis thaliana]
  misc_feature (16)..(276): NCBI GI NO: 11357566 NR Description: hypothetical protein F1I16
  misc_feature (17)..(276): NCBI GI NO: 18410318 NR Description: expressed protein [Arabidopsis thaliana]
  misc_feature (18)..(276): NCBI GI NO: 18405164 NR Description: expressed protein [Arabidopsis thaliana]
  misc_feature (21)..(276): NCBI GI NO: 7487698 NR Description: hypothetical protein At2g39790
  misc_feature (18)..(276): NCBI GI NO: 21593469 NR Description: unknown [Arabidopsis thaliana]
  misc_feature (18)..(276): NCBI GI NO: 15241669 NR Description: expressed protein [Arabidopsis thaliana]
  misc_feature (18)..(276): NCBI GI NO: 21592321 NR Description: unknown [Arabidopsis thaliana]
KPLDHENPKPSPPPPPAMALFAAARRAASSSLPLLRASASASRGAASRGAALLRPLAAAAARPMPFSSATALKPSSDDELLRIVKAEIKFAEDCDDHDRVEEVPDSFPFKISDKKGLNDITLTRTYQGEKIEVLVFMPNLVTGDEPEHDQDEDDKEKDDDQDDGEKPPKSSLPLTVTITKSEGPSLEFTCTAYPDEILIDTLSVKQPSEKLGEDYIAYEGPDFNDLDENLQRAFHKYLELRGITPMTTNFLHEYMINKDSREYLFWLNKLKDFVKQ

SEQ ID NO: 18113 - protein, 259 aa, Triticum aestivum
  peptide (1)..(259): Ceres Seq. ID no. 13595883
  misc_feature (67)..(257): Pfam Name: Pfam Description:  Mitochondrial glycoprotein
  misc_feature (1)..(258): NCBI GI NO: 34895730 NR Description: P0019D06.23
  misc_feature (1)..(257): NCBI GI NO: 34895740 NR Description: P0019D06.28
  misc_feature (37)..(258): NCBI GI NO: 15239320 NR Description: expressed protein [Arabidopsis thaliana]
  misc_feature (1)..(259): NCBI GI NO: 11357566 NR Description: hypothetical protein F1I16
  misc_feature (1)..(259): NCBI GI NO: 18410318 NR Description: expressed protein [Arabidopsis thaliana]
  misc_feature (1)..(259): NCBI GI NO: 18405164 NR Description: expressed protein [Arabidopsis thaliana]
  misc_feature (4)..(259): NCBI GI NO: 7487698 NR Description: hypothetical protein At2g39790
  misc_feature (1)..(259): NCBI GI NO: 21593469 NR Description: unknown [Arabidopsis thaliana]
  misc_feature (1)..(259): NCBI GI NO: 15241669 NR Description: expressed protein [Arabidopsis thaliana]
  misc_feature (1)..(259): NCBI GI NO: 21592321 NR Description: unknown [Arabidopsis thaliana]
MALFAAARRAASSSLPLLRASASASRGAASRGAALLRPLAAAAARPMPFSSATALKPSSDDELLRIVKAEIKFAEDCDDHDRVEEVPDSFPFKISDKKGLNDITLTRTYQGEKIEVLVFMPNLVTGDEPEHDQDEDDKEKDDDQDDGEKPPKSSLPLTVTITKSEGPSLEFTCTAYPDEILIDTLSVKQPSEKLGEDYIAYEGPDFNDLDENLQRAFHKYLELRGITPMTTNFLHEYMINKDSREYLFWLNKLKDFVKQ

SEQ ID NO: 18114 - protein, 213 aa, Triticum aestivum
  peptide (1)..(213): Ceres Seq. ID no. 13595884
  misc_feature (21)..(211): Pfam Name: Pfam Description:  Mitochondrial glycoprotein
  misc_feature (1)..(212): NCBI GI NO: 34895730 NR Description: P0019D06.23
  misc_feature (1)..(211): NCBI GI NO: 34895740 NR Description: P0019D06.28
  misc_feature (1)..(212): NCBI GI NO: 15239320 NR Description: expressed protein [Arabidopsis thaliana]
  misc_feature (1)..(213): NCBI GI NO: 11357566 NR Description: hypothetical protein F1I16
  misc_feature (1)..(213): NCBI GI NO: 18410318 NR Description: expressed protein [Arabidopsis thaliana]
  misc_feature (1)..(213): NCBI GI NO: 18405164 NR Description: expressed protein [Arabidopsis thaliana]
  misc_feature (1)..(213): NCBI GI NO: 7487698 NR Description: hypothetical protein At2g39790
  misc_feature (1)..(213): NCBI GI NO: 21593469 NR Description: unknown [Arabidopsis thaliana]
  misc_feature (1)..(213): NCBI GI NO: 15241669 NR Description: expressed protein [Arabidopsis thaliana]
  misc_feature (1)..(213): NCBI GI NO: 21592321 NR Description: unknown [Arabidopsis thaliana]
MPFSSATALKPSSDDELLRIVKAEIKFAEDCDDHDRVEEVPDSFPFKISDKKGLNDITLTRTYQGEKIEVLVFMPNLVTGDEPEHDQDEDDKEKDDDQDDGEKPPKSSLPLTVTITKSEGPSLEFTCTAYPDEILIDTLSVKQPSEKLGEDYIAYEGPDFNDLDENLQRAFHKYLELRGITPMTTNFLHEYMINKDSREYLFWLNKLKDFVKQ

SEQ ID NO: 18115 - DNA, 1705 bp, Triticum aestivum
  misc_feature (1)..(1705): Ceres Seq. ID no. 13595885
ctaatcgaaaaacccgcttttccctttttctctcatctagaacccccaagaccgggctcactcgccccctcggacctgctagggatggcacgcgccgctgccgccaacctgcgtggcctggtcggcattgcagcggcgggccggaggcgggtgaccgcctccgtcgcgccaccccgcgcgtcgcccggcgggcgcgcattccgggccgtggcctcaggctccgggggcaggacgactcctgaatcctcctcttcgtcctcgccggccctaccacagctgcagccgcggcgcggcttggcgacgagacgagcggtgctgcgtaacttgattagcggcggcttagagagtgaggatggtaagctgagctgcggatattcaagttttaaagggaggagacctactatggaggatcgctacgatgtaaagttcgctaaaatgaagggacagtcagttagcttgtttggtgtatttgatggtcatgcaggagcacttgccgctgaatatctaaaggaacatctgcttgacaaccttatcgagcatcctcagttcctgagaaacccaaagcttgctctgaagacgaccttcctgaaaactgatgctgatttcttagagtcggtaaccactccttatagggaggatggttcgactgctttggctgctgttctggttggtgaccaaatttatgtagcaaatgttggtgattcacgtgctatcgctttaaaaggtggcaaagctatcccactctcagatgaccataaacctaacttaaaggatgagagaacgagaattgagaatgctggaggtggtgttagttatgatggttttacttggagggttgatggaattctggcaatgtcccgtgcatttggcaaccgttcattgaagaattatgtgatagcagagcctgacattcaggaaacgcaggtcagcagtgacttggaatacctggttctcgctacagatggtctttgggatgtcgtgcaaaatgaggatgttatttcacttatgagagcaacggacgagcctgaggtggcggcagtgaagctgacggaaatggcccactctcggcacagctcagacaacattacatgcattgtggtgggatttcaccactgaacagcgtatgatacgtgaccgatattggtggcagtgaagttttttcacttcctctctgatctatggctggtataagacttccaacggctgtgaaagaaactggccaattgttggatctttttgtagggaattttttgcatctgattatcacttagtgaaattgcatcagatccgttaggagttgggtccacaaaatcaacaaaatggagaaggcctagggcatactactactaccactacaccacaacatcatcatatctttataattgaaggagtgtggagtattttctttagtgttttgtgttcagtttagtttattcacaaaaccgaggtctacatggcatactcatgtcatgagatcctaaattggatctagaacttgcaaactacatatttctttgttgcttttatgcaccacgctgaaatatgtatatctgaagtacaaagattatccggaatcttttactctagtattttttttgcgaataaatcttttactctagtatgctggacaaaattcaaaaattaacactagacatgtgttattcagattcgcaccttctgattgtactctatttatttcaaagtg

SEQ ID NO: 18116 - protein, 371 aa, Triticum aestivum
  peptide (1)..(371): Ceres Seq. ID no. 13595886
  misc_feature (121)..(362): Pfam Name: Pfam Description:  Protein phosphatase 2C
  misc_feature (41)..(371): NCBI GI NO: 18423476 NR Description: protein phosphatase 2C (PP2C), putative
  misc_feature (41)..(371): NCBI GI NO: 18086420 NR Description: AT5g53140/MFH8_8 [Arabidopsis thaliana]
  misc_feature (135)..(371): NCBI GI NO: 9757995 NR Description: protein phosphatase 2C-like [Arabidopsis thaliana]
  misc_feature (135)..(371): NCBI GI NO: 34912708 NR Description: putative protein phosphatase 2C-like protein
  misc_feature (110)..(369): NCBI GI NO: 20146110 NR Description: protein phosphatase 2C
  misc_feature (110)..(369): NCBI GI NO: 30689144 NR Description: protein phosphatase 2C (PP2C), putative
  misc_feature (110)..(371): NCBI GI NO: 38345197 NR Description: OSJNBa0015K02.7
  misc_feature (111)..(369): NCBI GI NO: 18416366 NR Description: protein phosphatase 2C (PP2C) -related
  misc_feature (111)..(369): NCBI GI NO: 15238651 NR Description: protein phosphatase 2C (PP2C), putative
  misc_feature (69)..(369): NCBI GI NO: 30693757 NR Description: protein phosphatase 2C (PP2C), putative
LIEKPAFPFFSHLEPPRPGSLAPSDLLGMARAAAANLRGLVGIAAAGRRRVTASVAPPRASPGGRAFRAVASGSGGRTTPESSSSSSPALPQLQPRRGLATRRAVLRNLISGGLESEDGKLSCGYSSFKGRRPTMEDRYDVKFAKMKGQSVSLFGVFDGHAGALAAEYLKEHLLDNLIEHPQFLRNPKLALKTTFLKTDADFLESVTTPYREDGSTALAAVLVGDQIYVANVGDSRAIALKGGKAIPLSDDHKPNLKDERTRIENAGGGVSYDGFTWRVDGILAMSRAFGNRSLKNYVIAEPDIQETQVSSDLEYLVLATDGLWDVVQNEDVISLMRATDEPEVAAVKLTEMAHSRHSSDNITCIVVGFHH

SEQ ID NO: 18117 - protein, 343 aa, Triticum aestivum
  peptide (1)..(343): Ceres Seq. ID no. 13595887
  misc_feature (93)..(334): Pfam Name: Pfam Description:  Protein phosphatase 2C
  misc_feature (13)..(343): NCBI GI NO: 18423476 NR Description: protein phosphatase 2C (PP2C), putative
  misc_feature (13)..(343): NCBI GI NO: 18086420 NR Description: AT5g53140/MFH8_8 [Arabidopsis thaliana]
  misc_feature (107)..(343): NCBI GI NO: 9757995 NR Description: protein phosphatase 2C-like [Arabidopsis thaliana]
  misc_feature (107)..(343): NCBI GI NO: 34912708 NR Description: putative protein phosphatase 2C-like protein
  misc_feature (82)..(341): NCBI GI NO: 20146110 NR Description: protein phosphatase 2C
  misc_feature (82)..(341): NCBI GI NO: 30689144 NR Description: protein phosphatase 2C (PP2C), putative
  misc_feature (82)..(343): NCBI GI NO: 38345197 NR Description: OSJNBa0015K02.7
  misc_feature (83)..(341): NCBI GI NO: 18416366 NR Description: protein phosphatase 2C (PP2C) -related
  misc_feature (83)..(341): NCBI GI NO: 15238651 NR Description: protein phosphatase 2C (PP2C), putative
  misc_feature (41)..(341): NCBI GI NO: 30693757 NR Description: protein phosphatase 2C (PP2C), putative
MARAAAANLRGLVGIAAAGRRRVTASVAPPRASPGGRAFRAVASGSGGRTTPESSSSSSPALPQLQPRRGLATRRAVLRNLISGGLESEDGKLSCGYSSFKGRRPTMEDRYDVKFAKMKGQSVSLFGVFDGHAGALAAEYLKEHLLDNLIEHPQFLRNPKLALKTTFLKTDADFLESVTTPYREDGSTALAAVLVGDQIYVANVGDSRAIALKGGKAIPLSDDHKPNLKDERTRIENAGGGVSYDGFTWRVDGILAMSRAFGNRSLKNYVIAEPDIQETQVSSDLEYLVLATDGLWDVVQNEDVISLMRATDEPEVAAVKLTEMAHSRHSSDNITCIVVGFHH

SEQ ID NO: 18118 - protein, 237 aa, Triticum aestivum
  peptide (1)..(237): Ceres Seq. ID no. 13595888
  misc_feature (1)..(228): Pfam Name: Pfam Description:  Protein phosphatase 2C
  misc_feature (1)..(237): NCBI GI NO: 18423476 NR Description: protein phosphatase 2C (PP2C), putative
  misc_feature (1)..(237): NCBI GI NO: 18086420 NR Description: AT5g53140/MFH8_8 [Arabidopsis thaliana]
  misc_feature (1)..(237): NCBI GI NO: 9757995 NR Description: protein phosphatase 2C-like [Arabidopsis thaliana]
  misc_feature (1)..(237): NCBI GI NO: 34912708 NR Description: putative protein phosphatase 2C-like protein
  misc_feature (1)..(235): NCBI GI NO: 20146110 NR Description: protein phosphatase 2C
  misc_feature (1)..(235): NCBI GI NO: 30689144 NR Description: protein phosphatase 2C (PP2C), putative
  misc_feature (1)..(237): NCBI GI NO: 38345197 NR Description: OSJNBa0015K02.7
  misc_feature (1)..(235): NCBI GI NO: 18416366 NR Description: protein phosphatase 2C (PP2C) -related
  misc_feature (1)..(235): NCBI GI NO: 15238651 NR Description: protein phosphatase 2C (PP2C), putative
  misc_feature (1)..(235): NCBI GI NO: 30693757 NR Description: protein phosphatase 2C (PP2C), putative
MEDRYDVKFAKMKGQSVSLFGVFDGHAGALAAEYLKEHLLDNLIEHPQFLRNPKLALKTTFLKTDADFLESVTTPYREDGSTALAAVLVGDQIYVANVGDSRAIALKGGKAIPLSDDHKPNLKDERTRIENAGGGVSYDGFTWRVDGILAMSRAFGNRSLKNYVIAEPDIQETQVSSDLEYLVLATDGLWDVVQNEDVISLMRATDEPEVAAVKLTEMAHSRHSSDNITCIVVGFHH

SEQ ID NO: 18119 - DNA, 1064 bp, Triticum aestivum
  misc_feature (1)..(1064): Ceres Seq. ID no. 12613415
ataaacgccctcgccggcccctctctctctctcatccatcctcaccgccgcaatcctcaactccccaccttcacccagatccacagagcagcagagagatcgccggagtatcaggccgaggaagaagacagttcagccagcccgatctcaagtcaccatggtggtcgcgctcggccccggcaggttctacggcggcggcctcccgcgcccgcgcgtcttccccggagaccgcgtcgacccgccggcgcccgtcaccgacgcgctcctctgctgggcgcgcgacgcgcactggtccatgggcgggctcggcgccaagcgcctccgcctgcagggccgcatcgagggcaacctcgtcaagctccgccgcaccgcgcgccgcgacgctcgggtctccgccaagtccgccaagtccaaggtccgcgctgcggggcacgggcccgcccctgccaccctcgacgacgcgctcggctccgacgacgacgactccgaggacgaggcggaggtcgcggcccaggagaaggcgatgcggcgcgaggtggtggatgacgacgaggactccgagtccggtgagtccgagggcgagggggtgccgctcgtcaccatcgccgccgccgccaagaggaagcgcgtcaggaagctctccgacgagttcgaccgcatagccgccgcgcagctggagggcggcgcgaagaagaagccgctgaggaagaaggctgctgctcctgctccggccgctgaggcaccggcgaagaagtcgctgaagaggaaggcggtggcgccggcggctggggctgcggcgaggacctcaccgaagaggaaggctgctgaggcgccggcggcaaggaggacctcgccgaggtcgaagcactgatggataggtgctcgtttccatttgcaatccctgttcttggttcgtcagatcggtggctctagcgattgtggtatgatctcggagatgcagtatgctgtgtgttcgttgaaatgcttgaatggaatctagtttcatgtctctatgtatgaatcaaatccctcaaaatgtgtctgatcaaacctgagttatcctg

SEQ ID NO: 18120 - protein, 237 aa, Triticum aestivum
  peptide (1)..(237): Ceres Seq. ID no. 12613416
  misc_feature (106)..(227): Pfam Name: Pfam Description:  MARCKS family
  misc_feature (1)..(237): NCBI GI NO: 34897956 NR Description: contains ESTsAU058449
  misc_feature (3)..(140): NCBI GI NO: 7486199 NR Description: hypothetical protein F26K10
  misc_feature (3)..(140): NCBI GI NO: 18417168 NR Description: expressed protein; protein id: At4g28310
MVVALGPGRFYGGGLPRPRVFPGDRVDPPAPVTDALLCWARDAHWSMGGLGAKRLRLQGRIEGNLVKLRRTARRDARVSAKSAKSKVRAAGHGPAPATLDDALGSDDDDSEDEAEVAAQEKAMRREVVDDDEDSESGESEGEGVPLVTIAAAAKRKRVRKLSDEFDRIAAAQLEGGAKKKPLRKKAAAPAPAAEAPAKKSLKRKAVAPAAGAAARTSPKRKAAEAPAARRTSPRSKH

SEQ ID NO: 18121 - protein, 219 aa, Triticum aestivum
  peptide (1)..(219): Ceres Seq. ID no. 12613417
  misc_feature (13)..(219): Pfam Name: Pfam Description:  Glycoprotein GG/GX
  misc_feature (10)..(219): NCBI GI NO: 11359723 NR Description: proteophosphoglycan, membrane-associated
  misc_feature (10)..(219): NCBI GI NO: 5420387 NR Description: proteophosphoglycan [Leishmania major]
  misc_feature (33)..(218): NCBI GI NO: 38345019 NR Description: OSJNBa0029H02.3
  misc_feature (4)..(219): NCBI GI NO: 11360318 NR Description: probable mucin DKFZp434C196.1 - human (fragment)
  misc_feature (1)..(219): NCBI GI NO: 28972153 NR Description: mKIAA0324 protein [Mus musculus]
  misc_feature (25)..(219): NCBI GI NO: 11359723 NR Description: proteophosphoglycan, membrane-associated
  misc_feature (10)..(219): NCBI GI NO: 13592175 NR Description: ppg3 [Leishmania major]
  misc_feature (54)..(219): NCBI GI NO: 38175466 NR Description: putative high-affinity potassium transporter
  misc_feature (6)..(219): NCBI GI NO: 13592175 NR Description: ppg3 [Leishmania major]
  misc_feature (10)..(219): NCBI GI NO: 13592175 NR Description: ppg3 [Leishmania major]
KRPRRPLSLSHPSSPPQSSTPHLHPDPQSSREIAGVSGRGRRQFSQPDLKSPWWSRSAPAGSTAAASRARASSPETASTRRRPSPTRSSAGRATRTGPWAGSAPSASACRAASRATSSSSAAPRAATLGSPPSPPSPRSALRGTGPPLPPSTTRSAPTTTTPRTRRRSRPRRRRCGARWWMTTRTPSPVSPRARGCRSSPSPPPPRGSASGSSPTSSTA

SEQ ID NO: 18122 - protein, 191 aa, Triticum aestivum
  peptide (1)..(191): Ceres Seq. ID no. 12613418
  misc_feature (60)..(181): Pfam Name: Pfam Description:  MARCKS family
  misc_feature (1)..(191): NCBI GI NO: 34897956 NR Description: contains ESTsAU058449
  misc_feature (1)..(94): NCBI GI NO: 7486199 NR Description: hypothetical protein F26K10
  misc_feature (1)..(94): NCBI GI NO: 18417168 NR Description: expressed protein; protein id: At4g28310
MGGLGAKRLRLQGRIEGNLVKLRRTARRDARVSAKSAKSKVRAAGHGPAPATLDDALGSDDDDSEDEAEVAAQEKAMRREVVDDDEDSESGESEGEGVPLVTIAAAAKRKRVRKLSDEFDRIAAAQLEGGAKKKPLRKKAAAPAPAAEAPAKKSLKRKAVAPAAGAAARTSPKRKAAEAPAARRTSPRSKH

SEQ ID NO: 18123 - DNA, 678 bp, Triticum aestivum
  misc_feature (1)..(678): Ceres Seq. ID no. 13654484
tagaatcactcgttccctgtccctcttcctgtgtgcggcgccgccgccgcgcacaggccacatctcctcgccctcttcctgatgtcgagtcgaggcaccagatcttcaaagcttgcctcaggaagtctcctctggccaaggatattgatctgagtgctctggccaagtacacccaagggttcagcggtgctgatatcacggaaatttgccagcgtgcttgcaaatacgccatcagggagaacatcgagaaggacatcgagagggagaggaggaggaaggacaaccctgaagccatggaggaggatgaggtggatgaggtcgctgagatcagggctgctcacttcgaggagtcgatgaagtatgcacgcaggagtgtgagcgatgccgacatccgcaagtaccaggcccttgcccagactctgcagcagtctcgtggtttcggcagcgagttccggttccctgatcagccggccgcgggccccgcctcttctgctgccgccgacccttttgcatccgctgccgcagcagctgaagatgacgacttatatagctaaattctcgttgttgtgcccttcacttacccgtgttttccttcgtatactgttatgttttgctctggtatgcaagacacggtcaaactatgtacttaaaattattattgggatgcactgatattcg

SEQ ID NO: 18124 - protein, 183 aa, Triticum aestivum
  peptide (1)..(183): Ceres Seq. ID no. 13654485
  misc_feature (24)..(78): Pfam Name: AAA Pfam Description: ATPase family associated with various cellular activities
  misc_feature (24)..(183): NCBI GI NO: 37534770 NR Description: putative endoplasmic reticulum membrane fusionprotein
  misc_feature (24)..(183): NCBI GI NO: 11265361 NR Description: transitional endoplasmic reticulum ATPase -Arabidopsis thaliana
  misc_feature (24)..(183): NCBI GI NO: 18414193 NR Description: transitional endoplasmic reticulum ATPase -related
  misc_feature (24)..(183): NCBI GI NO: 2492504 NR Description: Cell division cycle protein 48 homolog
  misc_feature (24)..(183): NCBI GI NO: 15232776 NR Description: transitional endoplasmic reticulum ATPase -related
  misc_feature (24)..(183): NCBI GI NO: 15231775 NR Description: CDC48 - like protein [Arabidopsis thaliana]
  misc_feature (24)..(183): NCBI GI NO: 1705678 NR Description: CELL DIVISION CYCLE PROTEIN 48 HOMOLOG
  misc_feature (24)..(183): NCBI GI NO: 30013699 NR Description: CDC48-like protein [Mirabilis jalapa]
  misc_feature (24)..(183): NCBI GI NO: 38455496 NR Description: cell division cycle protein 48
  misc_feature (24)..(182): NCBI GI NO: 11265337 NR Description: hypothetical protein DKFZp434K0126
ESLVPCPSSCVRRRRRAQATSPRPLPDVESRHQIFKACLRKSPLAKDIDLSALAKYTQGFSGADITEICQRACKYAIRENIEKDIERERRRKDNPEAMEEDEVDEVAEIRAAHFEESMKYARRSVSDADIRKYQALAQTLQQSRGFGSEFRFPDQPAAGPASSAAADPFASAAAAAEDDDLYS

SEQ ID NO: 18125 - protein, 96 aa, Triticum aestivum
  peptide (1)..(96): Ceres Seq. ID no. 13654486
MPTSASTRPLPRLCSSLVVSAASSGSLISRPRAPPLLLPPTLLHPLPQQLKMTTYIAKFSLLCPSLTRVFLRILLCFALVCKTRSNYVLKIIIGMH

SEQ ID NO: 18126 - protein, 86 aa, Triticum aestivum
  peptide (1)..(86): Ceres Seq. ID no. 13654487
  misc_feature (1)..(86): NCBI GI NO: 37534770 NR Description: putative endoplasmic reticulum membrane fusionprotein
  misc_feature (1)..(86): NCBI GI NO: 11265361 NR Description: transitional endoplasmic reticulum ATPase -Arabidopsis thaliana
  misc_feature (1)..(86): NCBI GI NO: 18414193 NR Description: transitional endoplasmic reticulum ATPase -related
  misc_feature (1)..(86): NCBI GI NO: 2492504 NR Description: Cell division cycle protein 48 homolog
  misc_feature (1)..(86): NCBI GI NO: 15232776 NR Description: transitional endoplasmic reticulum ATPase -related
  misc_feature (1)..(86): NCBI GI NO: 15231775 NR Description: CDC48 - like protein [Arabidopsis thaliana]
  misc_feature (1)..(86): NCBI GI NO: 1705678 NR Description: CELL DIVISION CYCLE PROTEIN 48 HOMOLOG
  misc_feature (1)..(86): NCBI GI NO: 30013699 NR Description: CDC48-like protein [Mirabilis jalapa]
  misc_feature (1)..(86): NCBI GI NO: 38455496 NR Description: cell division cycle protein 48
  misc_feature (1)..(85): NCBI GI NO: 11265337 NR Description: hypothetical protein DKFZp434K0126
MEEDEVDEVAEIRAAHFEESMKYARRSVSDADIRKYQALAQTLQQSRGFGSEFRFPDQPAAGPASSAAADPFASAAAAAEDDDLYS

SEQ ID NO: 18127 - DNA, 1258 bp, Triticum aestivum
  misc_feature (1)..(1258): Ceres Seq. ID no. 13596304
aaaaacaaccaagaaatctcacgacgcgtcctcctcccactcctctcctcccccctctcgccatggccggccgcctcctcgccgcccctctcctcctctttgtgctcctccagctccccgtgccgtcccaggtgcgcgcgtacccgctcgcggcggcacactctggtcggtgcccaaggccggaggagaggccgccgccgttcctccaggggctccggcgaacctgccgcacctcgacggaggggcacccggccgaggaggttaatggggaggaacttatcagagagttgggtggaaaggagtacactgctgtcctcttctatgcatcatggtgccctttctctcatagaatgagaccaatcttcgacgatcttagctcaatgtatccacatattaagcacttggctgtagaacagtccaacgtgatgccaacagttttatcaagatatggtgtccgcagccttccttctatactaatagctcatgagtcatatgcattttggcctcttgttgccaaagatctcaactcactggtcaacttctactctgctgttactggacaagaaccagttgcatatcttggtccacggaagtggatcacaaccgaaagaagcacacagtatgtgaagctttggaatggttcagtcagcgaatcagtgaagggcgagccctacctagcattcagcatcttctttatttgcctaagggtgttctcgttcttcttcccaaagttcttcgcctgcatcaaaggcttgtgggcccaatacttccggcacgccaactttggagtccttgccaaattgacgcagctgctcgaatgtgtgccccatgccgtggatgtaaggaagatgtggagcaaatggaggctcatggttggagccataaacatgagagtctgggcatcatctctagcttcggtgtctcttggtgggcaatcttctccccgagctgctagattggattgatggtttggattttaatgtcgggcgggagagcatgcgggctgtttgaattgcgctggatgtggaagctcctataactcacatgaacatgtagtgaaacatcttgtttgtagcatgtaaatcttagggatactgttgagcctgtgtagaccacactgtaacattaatcatgagtaccaattgtcatagtttttgagcaactgggcacacatcataagcccttttactatttttcacatgtaatctgcaattgcagtatgttcatctgtcttgtactaataagtgaaagacattcc

SEQ ID NO: 18128 - protein, 320 aa, Triticum aestivum
  peptide (1)..(320): Ceres Seq. ID no. 13596305
  misc_feature (71)..(316): NCBI GI NO: 18396691 NR Description: expressed protein [Arabidopsis thaliana]
  misc_feature (67)..(316): NCBI GI NO: 18418521 NR Description: expressed protein [Arabidopsis thaliana]
  misc_feature (67)..(316): NCBI GI NO: 21536613 NR Description: contains similarity to protein disulfide isomerase-related protein
  misc_feature (63)..(317): NCBI GI NO: 30103009 NR Description: unknown protein
  misc_feature (67)..(316): NCBI GI NO: 9758894 NR Description: contains similarity to protein disulfide isomerase-related protein~gene_id:MRG7
  misc_feature (100)..(313): NCBI GI NO: 18399435 NR Description: expressed protein [Arabidopsis thaliana]
  misc_feature (48)..(313): NCBI GI NO: 29367467 NR Description: disulfide isomerase-like protein
  misc_feature (71)..(202): NCBI GI NO: 6006856 NR Description: unknown protein [Arabidopsis thaliana]
  misc_feature (57)..(185): NCBI GI NO: 15236643 NR Description: protein disulfide isomerase -related
  misc_feature (141)..(316): NCBI GI NO: 6006856 NR Description: unknown protein [Arabidopsis thaliana]
KQPRNLTTRPPPTPLLPPLAMAGRLLAAPLLLFVLLQLPVPSQVRAYPLAAAHSGRCPRPEERPPPFLQGLRRTCRTSTEGHPAEEVNGEELIRELGGKEYTAVLFYASWCPFSHRMRPIFDDLSSMYPHIKHLAVEQSNVMPTVLSRYGVRSLPSILIAHESYAFWPLVAKDLNSLVNFYSAVTGQEPVAYLGPRKWITTERSTQYVKLWNGSVSESVKGEPYLAFSIFFICLRVFSFFFPKFFACIKGLWAQYFRHANFGVLAKLTQLLECVPHAVDVRKMWSKWRLMVGAINMRVWASSLASVSLGGQSSPRAARLD

SEQ ID NO: 18129 - protein, 300 aa, Triticum aestivum
  peptide (1)..(300): Ceres Seq. ID no. 13596306
  misc_feature (51)..(296): NCBI GI NO: 18396691 NR Description: expressed protein [Arabidopsis thaliana]
  misc_feature (47)..(296): NCBI GI NO: 18418521 NR Description: expressed protein [Arabidopsis thaliana]
  misc_feature (47)..(296): NCBI GI NO: 21536613 NR Description: contains similarity to protein disulfide isomerase-related protein
  misc_feature (43)..(297): NCBI GI NO: 30103009 NR Description: unknown protein
  misc_feature (47)..(296): NCBI GI NO: 9758894 NR Description: contains similarity to protein disulfide isomerase-related protein~gene_id:MRG7
  misc_feature (80)..(293): NCBI GI NO: 18399435 NR Description: expressed protein [Arabidopsis thaliana]
  misc_feature (28)..(293): NCBI GI NO: 29367467 NR Description: disulfide isomerase-like protein
  misc_feature (51)..(182): NCBI GI NO: 6006856 NR Description: unknown protein [Arabidopsis thaliana]
  misc_feature (37)..(165): NCBI GI NO: 15236643 NR Description: protein disulfide isomerase -related
  misc_feature (121)..(296): NCBI GI NO: 6006856 NR Description: unknown protein [Arabidopsis thaliana]
MAGRLLAAPLLLFVLLQLPVPSQVRAYPLAAAHSGRCPRPEERPPPFLQGLRRTCRTSTEGHPAEEVNGEELIRELGGKEYTAVLFYASWCPFSHRMRPIFDDLSSMYPHIKHLAVEQSNVMPTVLSRYGVRSLPSILIAHESYAFWPLVAKDLNSLVNFYSAVTGQEPVAYLGPRKWITTERSTQYVKLWNGSVSESVKGEPYLAFSIFFICLRVFSFFFPKFFACIKGLWAQYFRHANFGVLAKLTQLLECVPHAVDVRKMWSKWRLMVGAINMRVWASSLASVSLGGQSSPRAARLD

SEQ ID NO: 18130 - protein, 204 aa, Triticum aestivum
  peptide (1)..(204): Ceres Seq. ID no. 13596307
  misc_feature (1)..(200): NCBI GI NO: 18396691 NR Description: expressed protein [Arabidopsis thaliana]
  misc_feature (1)..(200): NCBI GI NO: 18418521 NR Description: expressed protein [Arabidopsis thaliana]
  misc_feature (1)..(200): NCBI GI NO: 21536613 NR Description: contains similarity to protein disulfide isomerase-related protein
  misc_feature (1)..(201): NCBI GI NO: 30103009 NR Description: unknown protein
  misc_feature (1)..(200): NCBI GI NO: 9758894 NR Description: contains similarity to protein disulfide isomerase-related protein~gene_id:MRG7
  misc_feature (1)..(197): NCBI GI NO: 18399435 NR Description: expressed protein [Arabidopsis thaliana]
  misc_feature (1)..(197): NCBI GI NO: 29367467 NR Description: disulfide isomerase-like protein
  misc_feature (1)..(86): NCBI GI NO: 6006856 NR Description: unknown protein [Arabidopsis thaliana]
  misc_feature (1)..(69): NCBI GI NO: 15236643 NR Description: protein disulfide isomerase -related
  misc_feature (25)..(200): NCBI GI NO: 6006856 NR Description: unknown protein [Arabidopsis thaliana]
MRPIFDDLSSMYPHIKHLAVEQSNVMPTVLSRYGVRSLPSILIAHESYAFWPLVAKDLNSLVNFYSAVTGQEPVAYLGPRKWITTERSTQYVKLWNGSVSESVKGEPYLAFSIFFICLRVFSFFFPKFFACIKGLWAQYFRHANFGVLAKLTQLLECVPHAVDVRKMWSKWRLMVGAINMRVWASSLASVSLGGQSSPRAARLD

SEQ ID NO: 18131 - DNA, 1050 bp, Triticum aestivum
  misc_feature (1)..(1050): Ceres Seq. ID no. 14301603
gaaaccattaacaatccccaccatacacacccgcgaggctcaatcatcgcaccactggatcggcaggcaccgcagcaatggcggcagcgaccggaggcggcggcagcagtgaggaggcgctgacgctgctggggttctggacgagcccgttcgcgctgcgggcgcggttcgcgctgaacctcaagggcatcccctacgagtacgtggaggaggacctgttcggcgagcggggcaagagcccgctcctcgtcgcctccaacccggcccacggcgggaaggtgcccgtgctcatccacggcggccgccccgtcgccgagtcgctggtcatcctggagtacatcgacgaggcgttcccggagcgcctcccgcgcctcctgcccccgcccgacgacccgcacggccgcgccgccgcccggttctgggcggcctacgtcgaccagaagctgctcccgacgtgggccccgctctacggcgggaggacggccgaggagcgggcgggcgcggcgagggaggtcgtcgccgtgctggaggcgttcgagggggagctcggggacaggggcttcttcggcggggacggcgtggggctggtggacgtggcgctcggcgggttcctcgggtggctgcgcgcgtcgcaggccatgtgcggcgtgcggaccatcgaccccgccaggacgccgcggctggcggcgtgggcggagcggttcggcgcgctggacggcgtgagggagatcgtgccggacgcggcgccgctggtggagtacaacctcatgaagcgggctcgcctaggcctgccgtatcttccgccgcatcagtcgcagtaaaaaaccgctagtaaattccaaggcgtgtagctggatccatcgcgcgcaaaggaactgaactgaatttgaatctgatcccttaagccggtggattctttagttattctactgcagtagagtaacaagtctgtgttcttgtttggaactctgattttctgcgatggaccgattcaagaaatgtagccacagaactgccttctccaatggaaagaaaaaaagtagtaccatc

SEQ ID NO: 18132 - protein, 247 aa, Triticum aestivum
  peptide (1)..(247): Ceres Seq. ID no. 14301604
  misc_feature (103)..(213): Pfam Name: Pfam Description:  Glutathione S-transferase, C-terminal domain
  misc_feature (6)..(239): NCBI GI NO: 11385525 NR Description: glutathione S-transferase GST 37 [Zea mays]
  misc_feature (15)..(243): NCBI GI NO: 11385495 NR Description: glutathione S-transferase GST 22 [Zea mays]
  misc_feature (15)..(236): NCBI GI NO: 11385535 NR Description: glutathione S-transferase GST 42 [Zea mays]
  misc_feature (10)..(236): NCBI GI NO: 37536340 NR Description: putative glutathione S-transferase
  misc_feature (10)..(236): NCBI GI NO: 37536338 NR Description: putative glutathione S-transferase
  misc_feature (12)..(236): NCBI GI NO: 11177837 NR Description: putative glutathione S-transferase OsGSTU2
  misc_feature (9)..(228): NCBI GI NO: 37536360 NR Description: putative glutathione S-transferase
  misc_feature (13)..(228): NCBI GI NO: 8052535 NR Description: F3F9.13 [Arabidopsis thaliana]
  misc_feature (1)..(90): NCBI GI NO: 15430719 NR Description: putative glutathione S-transferase OsGSTU11
  misc_feature (12)..(246): NCBI GI NO: 30697685 NR Description: glutathione transferase, putative
MAAATGGGGSSEEALTLLGFWTSPFALRARFALNLKGIPYEYVEEDLFGERGKSPLLVASNPAHGGKVPVLIHGGRPVAESLVILEYIDEAFPERLPRLLPPPDDPHGRAAARFWAAYVDQKLLPTWAPLYGGRTAEERAGAAREVVAVLEAFEGELGDRGFFGGDGVGLVDVALGGFLGWLRASQAMCGVRTIDPARTPRLAAWAERFGALDGVREIVPDAAPLVEYNLMKRARLGLPYLPPHQSQ

SEQ ID NO: 18133 - DNA, 1184 bp, Triticum aestivum
  misc_feature (1)..(1184): Ceres Seq. ID no. 13591198
acctaaccaaagccgcaccacacgtcccgaggcaggcgaaggggcagagagggagcggccatggcggcggtggtcggcgtcctcgcgctgcagggctcctacaacgagcacatggccgcgctgaggaggatcggggccaagggggtggaggtgcggaaggcggagcagctgcttggcatcgactccctcatcatccccggcggcgagagcaccaccatggccaagctcgccaacttccacaacctctttcctgcacttcgagagtttgtcggcacaggaaaacccgtatggggaacctgtgctgggctcatcttccttgctaacaaggcagtagggcagaaaacaggaggccaggagcttgttggtggactagattgtactgtccaccgtaacttttttggtagccagcttcaaagcttcgaaacagaactttcagtgccaatgcttgcagagaaggaaggagggagtcatacatgccgtggcgtatttatacgagcacctgctatcctagaagtaggccaggatgttgaagtattagccgattgccctgttcctgctggcagacccagcattacaataacatctggcgagggtttggaggaccaagtgtactccaaagatcgggtgattgttgcagttcggcaagggaacatccttgccaccgcattccacccagagctaacatcagactctagatggcatcgcctcttcttggacatggacaaagaatctcaagcaaaggccttggctgcgctatcgctatctgcatcctcaaacgatgcagatgttgggtcgaagaataaggctcctgatctacccattttcgagtagagctaggaaacccgaaatttgattatccggttggtgacaggaaaggattctgggcatttgttatgcccagtccaaagaatatttttggcgtcaaagctgtgccaatcaaaataatggccattgtgctccaaacactatgatattgctatgacaaggaggctgaccagttggattgggtctgtgtgtcagtagtacttttttcgaaaaggggtgctttattacttaaaagatttaagcattacacctggcctctgcataactgagatgcacacaaccaacgtcactgtagtactacgcgtctcgtgaatgcctgaatggtgatgtatgtttgtcatggttttcatgtcagcttg

SEQ ID NO: 18134 - protein, 256 aa, Triticum aestivum
  peptide (1)..(256): Ceres Seq. ID no. 13591199
  misc_feature (7)..(223): Pfam Name: Pfam Description:  SNO glutamine amidotransferase family
  misc_feature (5)..(256): NCBI GI NO: 18424366 NR Description: imidazoleglycerol-phosphate synthase subunit H -like
  misc_feature (5)..(256): NCBI GI NO: 9757756 NR Description: amidotransferase hisH-like protein
  misc_feature (1)..(159): NCBI GI NO: 23017678 NR Description: hypothetical protein [Thermobifida fusca]
  misc_feature (190)..(222): NCBI GI NO: 23017678 NR Description: hypothetical protein [Thermobifida fusca]
  misc_feature (1)..(160): NCBI GI NO: 39654645 NR Description: Chain A
  misc_feature (169)..(232): NCBI GI NO: 39654645 NR Description: Chain A
  misc_feature (5)..(160): NCBI GI NO: 15612586 NR Description: amidotransferase [Bacillus halodurans]
  misc_feature (178)..(230): NCBI GI NO: 15612586 NR Description: amidotransferase [Bacillus halodurans]
  misc_feature (5)..(161): NCBI GI NO: 16077080 NR Description: similar to hypothetical proteins
  misc_feature (169)..(229): NCBI GI NO: 16077080 NR Description: similar to hypothetical proteins
MAAVVGVLALQGSYNEHMAALRRIGAKGVEVRKAEQLLGIDSLIIPGGESTTMAKLANFHNLFPALREFVGTGKPVWGTCAGLIFLANKAVGQKTGGQELVGGLDCTVHRNFFGSQLQSFETELSVPMLAEKEGGSHTCRGVFIRAPAILEVGQDVEVLADCPVPAGRPSITITSGEGLEDQVYSKDRVIVAVRQGNILATAFHPELTSDSRWHRLFLDMDKESQAKALAALSLSASSNDADVGSKNKAPDLPIFE

SEQ ID NO: 18135 - protein, 239 aa, Triticum aestivum
  peptide (1)..(239): Ceres Seq. ID no. 13591200
  misc_feature (1)..(206): Pfam Name: Pfam Description:  SNO glutamine amidotransferase family
  misc_feature (1)..(239): NCBI GI NO: 18424366 NR Description: imidazoleglycerol-phosphate synthase subunit H -like
  misc_feature (1)..(239): NCBI GI NO: 9757756 NR Description: amidotransferase hisH-like protein
  misc_feature (1)..(142): NCBI GI NO: 23017678 NR Description: hypothetical protein [Thermobifida fusca]
  misc_feature (173)..(205): NCBI GI NO: 23017678 NR Description: hypothetical protein [Thermobifida fusca]
  misc_feature (1)..(143): NCBI GI NO: 39654645 NR Description: Chain A
  misc_feature (152)..(215): NCBI GI NO: 39654645 NR Description: Chain A
  misc_feature (1)..(143): NCBI GI NO: 15612586 NR Description: amidotransferase [Bacillus halodurans]
  misc_feature (161)..(213): NCBI GI NO: 15612586 NR Description: amidotransferase [Bacillus halodurans]
  misc_feature (1)..(144): NCBI GI NO: 16077080 NR Description: similar to hypothetical proteins
  misc_feature (152)..(212): NCBI GI NO: 16077080 NR Description: similar to hypothetical proteins
MAALRRIGAKGVEVRKAEQLLGIDSLIIPGGESTTMAKLANFHNLFPALREFVGTGKPVWGTCAGLIFLANKAVGQKTGGQELVGGLDCTVHRNFFGSQLQSFETELSVPMLAEKEGGSHTCRGVFIRAPAILEVGQDVEVLADCPVPAGRPSITITSGEGLEDQVYSKDRVIVAVRQGNILATAFHPELTSDSRWHRLFLDMDKESQAKALAALSLSASSNDADVGSKNKAPDLPIFE

SEQ ID NO: 18136 - protein, 204 aa, Triticum aestivum
  peptide (1)..(204): Ceres Seq. ID no. 13591201
  misc_feature (1)..(171): Pfam Name: Pfam Description:  SNO glutamine amidotransferase family
  misc_feature (1)..(204): NCBI GI NO: 18424366 NR Description: imidazoleglycerol-phosphate synthase subunit H -like
  misc_feature (1)..(204): NCBI GI NO: 9757756 NR Description: amidotransferase hisH-like protein
  misc_feature (1)..(107): NCBI GI NO: 23017678 NR Description: hypothetical protein [Thermobifida fusca]
  misc_feature (138)..(170): NCBI GI NO: 23017678 NR Description: hypothetical protein [Thermobifida fusca]
  misc_feature (1)..(108): NCBI GI NO: 39654645 NR Description: Chain A
  misc_feature (117)..(180): NCBI GI NO: 39654645 NR Description: Chain A
  misc_feature (1)..(108): NCBI GI NO: 15612586 NR Description: amidotransferase [Bacillus halodurans]
  misc_feature (126)..(178): NCBI GI NO: 15612586 NR Description: amidotransferase [Bacillus halodurans]
  misc_feature (1)..(109): NCBI GI NO: 16077080 NR Description: similar to hypothetical proteins
  misc_feature (117)..(177): NCBI GI NO: 16077080 NR Description: similar to hypothetical proteins
MAKLANFHNLFPALREFVGTGKPVWGTCAGLIFLANKAVGQKTGGQELVGGLDCTVHRNFFGSQLQSFETELSVPMLAEKEGGSHTCRGVFIRAPAILEVGQDVEVLADCPVPAGRPSITITSGEGLEDQVYSKDRVIVAVRQGNILATAFHPELTSDSRWHRLFLDMDKESQAKALAALSLSASSNDADVGSKNKAPDLPIFE

SEQ ID NO: 18137 - DNA, 1541 bp, Triticum aestivum
  misc_feature (1)..(1541): Ceres Seq. ID no. 13595916
cttagactcgcctcgcctcccttctttgctcagtcttctcggatctccggctcaaattcgtctcccgaatccccagttccaggttctcggaggagggggggaaaccatgggcagcttcgccaagctggccaagaggtgcgtggagacggaggcgccggtcatggtgaagatacaagagctgcttcgaggggccacggatgtgatgtcgcttgcgcagggaattgtttattggcaacctcctgagacagccctgaacaaggtcaaggaaattgtatgggaaccagcaaccagtaaatatggtgctgatgatggccttcccgagcttcgagaagcacttctcgagaagcttcgcagagagaataagctaaccaagtcatctgttatggtgaccgctggtgcaaatcaggcttttgtaaacctggttctgaccctttgcgatgctggtgattcagttgtcatgttcgcaccatactatttcaattccttcatgtcattccagatgactggcgtcactgatatattagttggtgctagcaatcccaagactcttcatcctgatgttgattggttggagaaggtgctgaaagaaaataaccctatccctaaacttgttactgttgtcaatccgggaaacccatctggagcttttattcccaagcctatgctacagagaatttcagacctgtgcaggaatgctggtgcatggctggtggttgacaacacctatgagtacttcatgtatgataaaatggagcactactgcctagaggatgatcatattgtcaaccttttctcgttctcaaaggcttatggcatgatggggtggcgagtaggatacattgcatatccaagtgaagccgatggtttccacgcgcagctccttaaggtgcaagataacatacctatctgtgcttccatcatcgggcagcgcctggctctatactcattggaggccggcccagagtggatcagggaaagggtgaatgatctcgtgaaaaaccgcgagctgcttgtggaagcaatgtctccccttggtgaggatgctgtcaagggtggggagggtgccatctatctctgggctaaactaccagataactgttcagacgactttgaggttgtcaggtggctcgcgaccaagcacggcgtcgcagtgatccccgggagcgccagcggaggccccggatacatccgtgtttcttttggaggactgaaagaagaagacacaaggctcgccggcgagaggctaaggcggggattgcaagagctggtgaccgatgggatggtacagtaacaacagcccaccgtatgtaagacagtaagagtacatttctacattcagatcacacaagtccgattttttcgacgatatgattctgctgggattagttcattcagaggagcaaaagcaccatatatccaagtcttttgtatcttacagaatcaccatgctggaggtgcccaataggaatggcaattggtgtagtgagaattggggcaaaataaaaagccatccagtggtgtcgtaaacacaataaagtggg

SEQ ID NO: 18138 - protein, 429 aa, Triticum aestivum
  peptide (1)..(429): Ceres Seq. ID no. 15221689
  misc_feature (114)..(419): Pfam Name: Pfam Description:  Aminotransferase class I and II
  misc_feature (36)..(429): NCBI GI NO: 34906130 NR Description: putative aspartate transaminase
  misc_feature (36)..(429): NCBI GI NO: 15220119 NR Description: aminotransferase family [Arabidopsis thaliana]
  misc_feature (42)..(423): NCBI GI NO: 23123920 NR Description: hypothetical protein [Nostoc punctiforme]
  misc_feature (45)..(426): NCBI GI NO: 17228534 NR Description: probable aspartate aminotransferase
  misc_feature (50)..(422): NCBI GI NO: 16331997 NR Description: aspartate aminotransferase
  misc_feature (52)..(426): NCBI GI NO: 33863300 NR Description: Aminotransferases class-I
  misc_feature (45)..(419): NCBI GI NO: 34810106 NR Description: Chain A
  misc_feature (53)..(422): NCBI GI NO: 15606968 NR Description: aspartate aminotransferase [Aquifex aeolicus]
  misc_feature (67)..(416): NCBI GI NO: 39995195 NR Description: aminotransferase, classes I and II
  misc_feature (53)..(419): NCBI GI NO: 15826454 NR Description: Chain A
LDSPRLPSLLSLLGSPAQIRLPNPQFQVLGGGGETMGSFAKLAKRCVETEAPVMVKIQELLRGATDVMSLAQGIVYWQPPETALNKVKEIVWEPATSKYGADDGLPELREALLEKLRRENKLTKSSVMVTAGANQAFVNLVLTLCDAGDSVVMFAPYYFNSFMSFQMTGVTDILVGASNPKTLHPDVDWLEKVLKENNPIPKLVTVVNPGNPSGAFIPKPMLQRISDLCRNAGAWLVVDNTYEYFMYDKMEHYCLEDDHIVNLFSFSKAYGMMGWRVGYIAYPSEADGFHAQLLKVQDNIPICASIIGQRLALYSLEAGPEWIRERVNDLVKNRELLVEAMSPLGEDAVKGGEGAIYLWAKLPDNCSDDFEVVRWLATKHGVAVIPGSASGGPGYIRVSFGGLKEEDTRLAGERLRRGLQELVTDGMVQ

SEQ ID NO: 18139 - protein, 394 aa, Triticum aestivum
  peptide (1)..(394): Ceres Seq. ID no. 15221690
  misc_feature (79)..(384): Pfam Name: Pfam Description:  Aminotransferase class I and II
  misc_feature (1)..(394): NCBI GI NO: 34906130 NR Description: putative aspartate transaminase
  misc_feature (1)..(394): NCBI GI NO: 15220119 NR Description: aminotransferase family [Arabidopsis thaliana]
  misc_feature (7)..(388): NCBI GI NO: 23123920 NR Description: hypothetical protein [Nostoc punctiforme]
  misc_feature (10)..(391): NCBI GI NO: 17228534 NR Description: probable aspartate aminotransferase
  misc_feature (15)..(387): NCBI GI NO: 16331997 NR Description: aspartate aminotransferase
  misc_feature (17)..(391): NCBI GI NO: 33863300 NR Description: Aminotransferases class-I
  misc_feature (10)..(384): NCBI GI NO: 34810106 NR Description: Chain A
  misc_feature (18)..(387): NCBI GI NO: 15606968 NR Description: aspartate aminotransferase [Aquifex aeolicus]
  misc_feature (32)..(381): NCBI GI NO: 39995195 NR Description: aminotransferase, classes I and II
  misc_feature (18)..(384): NCBI GI NO: 15826454 NR Description: Chain A
MGSFAKLAKRCVETEAPVMVKIQELLRGATDVMSLAQGIVYWQPPETALNKVKEIVWEPATSKYGADDGLPELREALLEKLRRENKLTKSSVMVTAGANQAFVNLVLTLCDAGDSVVMFAPYYFNSFMSFQMTGVTDILVGASNPKTLHPDVDWLEKVLKENNPIPKLVTVVNPGNPSGAFIPKPMLQRISDLCRNAGAWLVVDNTYEYFMYDKMEHYCLEDDHIVNLFSFSKAYGMMGWRVGYIAYPSEADGFHAQLLKVQDNIPICASIIGQRLALYSLEAGPEWIRERVNDLVKNRELLVEAMSPLGEDAVKGGEGAIYLWAKLPDNCSDDFEVVRWLATKHGVAVIPGSASGGPGYIRVSFGGLKEEDTRLAGERLRRGLQELVTDGMVQ

SEQ ID NO: 18140 - protein, 376 aa, Triticum aestivum
  peptide (1)..(376): Ceres Seq. ID no. 15221691
  misc_feature (61)..(366): Pfam Name: Pfam Description:  Aminotransferase class I and II
  misc_feature (1)..(376): NCBI GI NO: 34906130 NR Description: putative aspartate transaminase
  misc_feature (1)..(376): NCBI GI NO: 15220119 NR Description: aminotransferase family [Arabidopsis thaliana]
  misc_feature (1)..(370): NCBI GI NO: 23123920 NR Description: hypothetical protein [Nostoc punctiforme]
  misc_feature (1)..(373): NCBI GI NO: 17228534 NR Description: probable aspartate aminotransferase
  misc_feature (1)..(369): NCBI GI NO: 16331997 NR Description: aspartate aminotransferase
  misc_feature (1)..(373): NCBI GI NO: 33863300 NR Description: Aminotransferases class-I
  misc_feature (1)..(366): NCBI GI NO: 34810106 NR Description: Chain A
  misc_feature (1)..(369): NCBI GI NO: 15606968 NR Description: aspartate aminotransferase [Aquifex aeolicus]
  misc_feature (14)..(363): NCBI GI NO: 39995195 NR Description: aminotransferase, classes I and II
  misc_feature (1)..(366): NCBI GI NO: 15826454 NR Description: Chain A
MVKIQELLRGATDVMSLAQGIVYWQPPETALNKVKEIVWEPATSKYGADDGLPELREALLEKLRRENKLTKSSVMVTAGANQAFVNLVLTLCDAGDSVVMFAPYYFNSFMSFQMTGVTDILVGASNPKTLHPDVDWLEKVLKENNPIPKLVTVVNPGNPSGAFIPKPMLQRISDLCRNAGAWLVVDNTYEYFMYDKMEHYCLEDDHIVNLFSFSKAYGMMGWRVGYIAYPSEADGFHAQLLKVQDNIPICASIIGQRLALYSLEAGPEWIRERVNDLVKNRELLVEAMSPLGEDAVKGGEGAIYLWAKLPDNCSDDFEVVRWLATKHGVAVIPGSASGGPGYIRVSFGGLKEEDTRLAGERLRRGLQELVTDGMVQ

SEQ ID NO: 18141 - DNA, 971 bp, Triticum aestivum
  misc_feature (1)..(971): Ceres Seq. ID no. 13654046
cccaacaaacctctttcccctccccgcatcccaagcctcccagctccatcgccacacgctcgaacccactcctctcacgctcaagcgcacaccgcaccaaccagagcagccatggctctcaccggcggcgccaccaccgcagcgtgcatcctcgtcctcctcgcgctcgccgacgccgcgggggcggctacccgggcgccagcgccggcgccggcgccggactgcatggaggcgttgattagcctcgcagactgcctcgactatgtgacgcccagcaccaagtcggctcggccttccaaggcttgctgcacggaggtgaagaccgccgtcggcacccccgccaccgtgaagtgcctctgcgctgccatggacgccaagacaactccgataccgatcaacatgacacgggtgctcgctctccccaccgcctgcggccaatccgcctccgtcttgaacaagtgccacgctgcacatgggccgggtggtgctcctgctgaagcaccgtcaccttcagcatccagtggcggcgcgaccgcttcaccaccgaaggcgaatgtggcggcgaggtctccgggcggctccgccaccgttctcttggcaactgtggtgacttcgctgctcgccttctattacctctgagggccaacatctcagcctctctcacgtgttatgttgcacagaccttgtgactctgcgttgcgcggtgttgtaatctgagtttactttgtttatcgggatgggttattatcatgtagtgtcgtggactgaatattgagtgcgtagtaaattgcaatgtaccgtggactgggtattttgaagtcgttgccagttatgacactttatttacttttgaatgcgcaaaaaaaaaaaaaaaaaaaaaaaaaaaaaaaaaaaaaaaaaaaaaaaaaaaaaaaaccaaaaaaaaaaaaaaaaaggtttttcgatcccgccaaccccgaggggggccccgg

SEQ ID NO: 18142 - protein, 212 aa, Triticum aestivum
  peptide (1)..(212): Ceres Seq. ID no. 13654047
  misc_feature (50)..(212): NCBI GI NO: 33146785 NR Description: unknown protein
  misc_feature (50)..(171): NCBI GI NO: 34913126 NR Description: hypothetical protein~predicted by FGENESH etc.
  misc_feature (44)..(208): NCBI GI NO: 18424785 NR Description: protease inhibitor/seed storage/lipid transfer
  misc_feature (42)..(181): NCBI GI NO: 34394120 NR Description: hypothetical protein
  misc_feature (44)..(208): NCBI GI NO: 21618136 NR Description: nonspecific lipid-transfer protein-like protein
  misc_feature (44)..(181): NCBI GI NO: 10176956 NR Description: contains similarity to nonspecific lipid-transferprotein~gene_id:MHJ24
  misc_feature (57)..(207): NCBI GI NO: 7487610 NR Description: hypothetical protein T3F12
  misc_feature (38)..(211): NCBI GI NO: 25553595 NR Description: OJ1656_E11.26
  misc_feature (51)..(197): NCBI GI NO: 18407534 NR Description: protease inhibitor/seed storage/lipid transfer
  misc_feature (51)..(197): NCBI GI NO: 21592774 NR Description: unknown [Arabidopsis thaliana]
PNKPLSPPRIPSLPAPSPHARTHSSHAQAHTAPTRAAMALTGGATTAACILVLLALADAAGAATRAPAPAPAPDCMEALISLADCLDYVTPSTKSARPSKACCTEVKTAVGTPATVKCLCAAMDAKTTPIPINMTRVLALPTACGQSASVLNKCHAAHGPGGAPAEAPSPSASSGGATASPPKANVAARSPGGSATVLLATVVTSLLAFYYL

SEQ ID NO: 18143 - protein, 175 aa, Triticum aestivum; identical to SEQ ID NO: 6986
  peptide (1)..(175): Ceres Seq. ID no. 13654048
  misc_feature (13)..(175): NCBI GI NO: 33146785 NR Description: unknown protein
  misc_feature (13)..(134): NCBI GI NO: 34913126 NR Description: hypothetical protein~predicted by FGENESH etc.
  misc_feature (7)..(171): NCBI GI NO: 18424785 NR Description: protease inhibitor/seed storage/lipid transfer
  misc_feature (5)..(144): NCBI GI NO: 34394120 NR Description: hypothetical protein
  misc_feature (7)..(171): NCBI GI NO: 21618136 NR Description: nonspecific lipid-transfer protein-like protein
  misc_feature (7)..(144): NCBI GI NO: 10176956 NR Description: contains similarity to nonspecific lipid-transferprotein~gene_id:MHJ24
  misc_feature (20)..(170): NCBI GI NO: 7487610 NR Description: hypothetical protein T3F12
  misc_feature (1)..(174): NCBI GI NO: 25553595 NR Description: OJ1656_E11.26
  misc_feature (14)..(160): NCBI GI NO: 18407534 NR Description: protease inhibitor/seed storage/lipid transfer
  misc_feature (14)..(160): NCBI GI NO: 21592774 NR Description: unknown [Arabidopsis thaliana]

SEQ ID NO: 18144 - protein, 137 aa, Triticum aestivum; identical to SEQ ID NO: 6987
  peptide (1)..(137): Ceres Seq. ID no. 13654049
  misc_feature (1)..(137): NCBI GI NO: 33146785 NR Description: unknown protein
  misc_feature (1)..(96): NCBI GI NO: 34913126 NR Description: hypothetical protein~predicted by FGENESH etc.
  misc_feature (1)..(133): NCBI GI NO: 18424785 NR Description: protease inhibitor/seed storage/lipid transfer
  misc_feature (1)..(106): NCBI GI NO: 34394120 NR Description: hypothetical protein
  misc_feature (1)..(133): NCBI GI NO: 21618136 NR Description: nonspecific lipid-transfer protein-like protein
  misc_feature (1)..(106): NCBI GI NO: 10176956 NR Description: contains similarity to nonspecific lipid-transferprotein~gene_id:MHJ24
  misc_feature (1)..(132): NCBI GI NO: 7487610 NR Description: hypothetical protein T3F12
  misc_feature (1)..(136): NCBI GI NO: 25553595 NR Description: OJ1656_E11.26
  misc_feature (1)..(122): NCBI GI NO: 18407534 NR Description: protease inhibitor/seed storage/lipid transfer
  misc_feature (1)..(122): NCBI GI NO: 21592774 NR Description: unknown [Arabidopsis thaliana]

SEQ ID NO: 18145 - DNA, 2296 bp, Triticum aestivum
  misc_feature (1)..(2296): Ceres Seq. ID no. 14301924
ctcccttcgcctccgagaagctcggtctcacctcacgcaccaccaacgcggcggcgttctcccctccaccgtgccgaccgaccccgagcggcgccgcggctgacccagcgcgatgtggcgccatgcagcggcccggcggtcggcgcagatccggcggctcctttccacgtccgccccctcggcgggcgccgtgcgcggcccctgcatcgtgcacaagcgcggcaccgacatcctccacgacccctggtacaacaaggacacggcgttccccctcacggagcgggaccgcctcggcctccggggcctgctcccgccgcgggtcatgtcgttcgagcagcagtacgagcgcttcataaactcgtaccattcgctggagcacaacacgcagggggagcccgattccgtggtctcgctggccaagtggaggatccttaacaggctgcacgaccggaacgagacgttgtactacagggtgctaattgacaatatcaaggatttcgcgcccataatatacacccctactgtcggcttggtctgcgaaaactacagcgggctgttcaggcgtccccgcgggatgtacttcagtgcaaaggataaaggggagatgatgtcgatgatttacaactggccagcagagaaggttgacatgatagttgtgactgacgggagtcgcattctaggtttaggtgatcttggagttcaaggcataggtatacctattggtaaacttgatgtttatgttgcagctgctggtatcaacccacagaaggttctcccaataatgcttgatgtgggaacaaataatgaagaactccttgaagacaagctatatttaggattgaggcaacctaggttggaaggagaggaatacttagctgttgtagatgagttcatggaagctgttcatgcacgctggccgaaagcaattgtgcagtttgaagacttccaaatgaaatgggcatttgaaactcttcagaggtatcggagccgattttgcatgttcaatgatgacgtgcaggggacagcaggagttgctctagctggtctacttggagctgttagagcacaaggtcgaccgctcgcagattttactaagcagaagatagttgtggtgggagctggaagtgctgggataggtgtgcttaacatggctaaacatgcaatgttaaggatgccagggacccataaaattggagaactgggtgaaggacacaatcaattctgggttctggacaaagatggccttattaccaaaagtagaaaagatctggatccagctgttgctcgttttgctagaggttatggtcctgaagaggtcgaagatctccatgagggggctagtcttgttgaagtggtcaagaaagtgaagcctcatgtccttttaggactatctggagttggcgggatatttaacgaggaggttctcaaggctatgaaagaatctgactccccctgccctgcaatttttgcaatgtccaacccaactactaaagctgaatgtacgcctgaagatgtattcaagcatgttggagaaaatgcagtatttgccagtggaagccctttcagcaatgttactttaagcaatggtagaaaaggctatgctaatcaagcaaacaacatgtatctgtttcctgggattggtttaggagcccttctgtcaggtgctcggcatatttcggatggcatgctccatgctgcagctgagtgccttgcttcatacatcacagatgatgcgattcgaaaaggaatcctctttccttcaatttcaagtatcaggcacatcaccgcacgtgtcggcgctgcagtcgcccgtgctgccgttgatgaagatctggccgagggatgctctgacttggatcctcgggacctcaggagcatgtcagagtcggatacggtggattacgtggctcggaagatgtggtaccctgtttacagcccactcgtcaacgacaaatagtgttcgacgaagcacacccgaagagacgtatcaggcacatacatttgttctgatcagtgaatacttcgctatttcggtttagctgctctacttgggagtatttcagcagatactgctgccacgtctactggctatattgttgcctcatttgtttacgttgacaggttcatcaaacattgctcaattttgggacccgttgagctacagttatgtcccatgtggtaggacttgaataaatgtcagatgttggcagtctgtctcctgcatcgtcgttgttggcgtatgtctcttgcatcgccaggtaatacgagattgcaaaccgattttgtgttccaaaac

SEQ ID NO: 18146 - protein, 614 aa, Triticum aestivum
  peptide (1)..(614): Ceres Seq. ID no. 14301925
  misc_feature (301)..(531): Pfam Name: Pfam Description:  Malic enzyme, NAD binding domain
  misc_feature (18)..(531): NCBI GI NO: 37535816 NR Description: putative mitochondrial NAD+-dependent malic enzymeprotein
  misc_feature (1)..(613): NCBI GI NO: 585452 NR Description: NAD-DEPENDENT MALIC ENZYME 59 KDA ISOFORM
  misc_feature (5)..(614): NCBI GI NO: 6382043 NR Description: F6N23.16 gene product [Arabidopsis thaliana]
  misc_feature (5)..(614): NCBI GI NO: 30678679 NR Description: malate oxidoreductase -related
  misc_feature (5)..(614): NCBI GI NO: 7431221 NR Description: malate dehydrogenase (decarboxylating) (EC1
  misc_feature (30)..(614): NCBI GI NO: 34393731 NR Description: putative malate dehydrogenase
  misc_feature (3)..(614): NCBI GI NO: 585451 NR Description: NAD-DEPENDENT MALIC ENZYME 62 KDA ISOFORM
  misc_feature (14)..(611): NCBI GI NO: 15225438 NR Description: malate oxidoreductase (malic enzyme), putative
  misc_feature (32)..(614): NCBI GI NO: 585450 NR Description: NAD-DEPENDENT MALIC ENZYME 65 KDA ISOFORM
  misc_feature (37)..(575): NCBI GI NO: 7431231 NR Description: malate dehydrogenase
MWRHAAARRSAQIRRLLSTSAPSAGAVRGPCIVHKRGTDILHDPWYNKDTAFPLTERDRLGLRGLLPPRVMSFEQQYERFINSYHSLEHNTQGEPDSVVSLAKWRILNRLHDRNETLYYRVLIDNIKDFAPIIYTPTVGLVCENYSGLFRRPRGMYFSAKDKGEMMSMIYNWPAEKVDMIVVTDGSRILGLGDLGVQGIGIPIGKLDVYVAAAGINPQKVLPIMLDVGTNNEELLEDKLYLGLRQPRLEGEEYLAVVDEFMEAVHARWPKAIVQFEDFQMKWAFETLQRYRSRFCMFNDDVQGTAGVALAGLLGAVRAQGRPLADFTKQKIVVVGAGSAGIGVLNMAKHAMLRMPGTHKIGELGEGHNQFWVLDKDGLITKSRKDLDPAVARFARGYGPEEVEDLHEGASLVEVVKKVKPHVLLGLSGVGGIFNEEVLKAMKESDSPCPAIFAMSNPTTKAECTPEDVFKHVGENAVFASGSPFSNVTLSNGRKGYANQANNMYLFPGIGLGALLSGARHISDGMLHAAAECLASYITDDAIRKGILFPSISSIRHITARVGAAVARAAVDEDLAEGCSDLDPRDLRSMSESDTVDYVARKMWYPVYSPLVNDK

SEQ ID NO: 18147 - protein, 544 aa, Triticum aestivum
  peptide (1)..(544): Ceres Seq. ID no. 14301926
  misc_feature (231)..(461): Pfam Name: Pfam Description:  Malic enzyme, NAD binding domain
  misc_feature (1)..(461): NCBI GI NO: 37535816 NR Description: putative mitochondrial NAD+-dependent malic enzymeprotein
  misc_feature (1)..(543): NCBI GI NO: 585452 NR Description: NAD-DEPENDENT MALIC ENZYME 59 KDA ISOFORM
  misc_feature (1)..(544): NCBI GI NO: 6382043 NR Description: F6N23.16 gene product [Arabidopsis thaliana]
  misc_feature (1)..(544): NCBI GI NO: 30678679 NR Description: malate oxidoreductase -related
  misc_feature (1)..(544): NCBI GI NO: 7431221 NR Description: malate dehydrogenase (decarboxylating) (EC1
  misc_feature (1)..(544): NCBI GI NO: 34393731 NR Description: putative malate dehydrogenase
  misc_feature (1)..(544): NCBI GI NO: 585451 NR Description: NAD-DEPENDENT MALIC ENZYME 62 KDA ISOFORM
  misc_feature (1)..(541): NCBI GI NO: 15225438 NR Description: malate oxidoreductase (malic enzyme), putative
  misc_feature (1)..(544): NCBI GI NO: 585450 NR Description: NAD-DEPENDENT MALIC ENZYME 65 KDA ISOFORM
  misc_feature (1)..(505): NCBI GI NO: 7431231 NR Description: malate dehydrogenase
MSFEQQYERFINSYHSLEHNTQGEPDSVVSLAKWRILNRLHDRNETLYYRVLIDNIKDFAPIIYTPTVGLVCENYSGLFRRPRGMYFSAKDKGEMMSMIYNWPAEKVDMIVVTDGSRILGLGDLGVQGIGIPIGKLDVYVAAAGINPQKVLPIMLDVGTNNEELLEDKLYLGLRQPRLEGEEYLAVVDEFMEAVHARWPKAIVQFEDFQMKWAFETLQRYRSRFCMFNDDVQGTAGVALAGLLGAVRAQGRPLADFTKQKIVVVGAGSAGIGVLNMAKHAMLRMPGTHKIGELGEGHNQFWVLDKDGLITKSRKDLDPAVARFARGYGPEEVEDLHEGASLVEVVKKVKPHVLLGLSGVGGIFNEEVLKAMKESDSPCPAIFAMSNPTTKAECTPEDVFKHVGENAVFASGSPFSNVTLSNGRKGYANQANNMYLFPGIGLGALLSGARHISDGMLHAAAECLASYITDDAIRKGILFPSISSIRHITARVGAAVARAAVDEDLAEGCSDLDPRDLRSMSESDTVDYVARKMWYPVYSPLVNDK

SEQ ID NO: 18148 - protein, 460 aa, Triticum aestivum
  peptide (1)..(460): Ceres Seq. ID no. 14301927
  misc_feature (147)..(377): Pfam Name: Pfam Description:  Malic enzyme, NAD binding domain
  misc_feature (1)..(377): NCBI GI NO: 37535816 NR Description: putative mitochondrial NAD+-dependent malic enzymeprotein
  misc_feature (1)..(459): NCBI GI NO: 585452 NR Description: NAD-DEPENDENT MALIC ENZYME 59 KDA ISOFORM
  misc_feature (1)..(460): NCBI GI NO: 6382043 NR Description: F6N23.16 gene product [Arabidopsis thaliana]
  misc_feature (1)..(460): NCBI GI NO: 30678679 NR Description: malate oxidoreductase -related
  misc_feature (1)..(460): NCBI GI NO: 7431221 NR Description: malate dehydrogenase (decarboxylating) (EC1
  misc_feature (1)..(460): NCBI GI NO: 34393731 NR Description: putative malate dehydrogenase
  misc_feature (1)..(460): NCBI GI NO: 585451 NR Description: NAD-DEPENDENT MALIC ENZYME 62 KDA ISOFORM
  misc_feature (1)..(457): NCBI GI NO: 15225438 NR Description: malate oxidoreductase (malic enzyme), putative
  misc_feature (1)..(460): NCBI GI NO: 585450 NR Description: NAD-DEPENDENT MALIC ENZYME 65 KDA ISOFORM
  misc_feature (1)..(421): NCBI GI NO: 7431231 NR Description: malate dehydrogenase
MYFSAKDKGEMMSMIYNWPAEKVDMIVVTDGSRILGLGDLGVQGIGIPIGKLDVYVAAAGINPQKVLPIMLDVGTNNEELLEDKLYLGLRQPRLEGEEYLAVVDEFMEAVHARWPKAIVQFEDFQMKWAFETLQRYRSRFCMFNDDVQGTAGVALAGLLGAVRAQGRPLADFTKQKIVVVGAGSAGIGVLNMAKHAMLRMPGTHKIGELGEGHNQFWVLDKDGLITKSRKDLDPAVARFARGYGPEEVEDLHEGASLVEVVKKVKPHVLLGLSGVGGIFNEEVLKAMKESDSPCPAIFAMSNPTTKAECTPEDVFKHVGENAVFASGSPFSNVTLSNGRKGYANQANNMYLFPGIGLGALLSGARHISDGMLHAAAECLASYITDDAIRKGILFPSISSIRHITARVGAAVARAAVDEDLAEGCSDLDPRDLRSMSESDTVDYVARKMWYPVYSPLVNDK

SEQ ID NO: 18149 - DNA, 1960 bp, Triticum aestivum
  misc_feature (1)..(1960): Ceres Seq. ID no. 14301920
  misc_feature (848)..(848): n is a, c, t, g, unknown, or other
ataccaagtgaggaagaaaaacgacaccaaattatacgagcatctccatctcctctcccctcgcgcaaagggaggagggagaggccatccactccacggcgccgatcgatcggagcagcggagaggacggcgcgcgcgtcggcgatgcggaagggcccgtcgcggtcggggtcggcgcggcaccagcagttccgcgcccgtgccaagacccgcgtcgacgacctccaggacatgttctccggcctccagtacgcccgcaaggaggcccgctccaccgacgccgtcctcctcgaggcccagctccaccagatgctccgcgagtggcgcgccgagctcagcgtcccgtcccccgcctcctccctccaggcagggaacaacaaccgggacccgtcggatccgccgtccgagacaccgcggccgccgcagctggcgccggccgaggaggaggacgacgccaccagcaagctcgtcgagcagaagccccggccgtccgctaatcagactcacaagcacccgcggggagaccaggacatgaagccggagccgcgcgaggaagcgatcgcgcatccagtgacggtggcgcagcagccgccgtcgctgggtccgggagtcatcaccactccagctagtgccgggttccacgatcagatgtactatgtgaaccaggagcttagtgttgaggattttctttacgacgatgattacaagataaaccttcctgggtccaatccagaaatcctcaataaccttgaagggattggtcatcaagaatatctgcagttcaatttgccacaagagttgccccctaatgcatatcttgatatgaacaactatgggcagaatgctgnagatggtttcctccacatgtcagacttgctcacaacaatgtctccagcacctgcttcatttctgaggccaaagtgcgctctctgggactgccctcgtcctgctcaaggatctgaaagctggcaagattactgcagcatgtaccatgctgaattggccgtgaaggaagagggccctccaggcacaatgcctgtgatccgcccgagaggtattgatctaaaagatggccctttgtttgctgctcttagtgcgaaaatccaaggaaagcatgtcggtgttcctgtctgtgaaggggctgcaactacgaagtccccttggaatgcacctgaacttttcgacctttacatctttgaaggtgaatctatgagagaatggcttttctttgacaaaccaagaagggcattcgacagtggaaaccggaagcaaaggtcactgccagattacaacggccgtggctggcatgaatcaaggaagcaggtgatgaaagactttgggggtctaaagaggtcatactacatggatccacagccatccagcagctacgaatggcacctctatgagtacgagatcaatgaccgcgacgcttttgccttataccggctcgaattcaagtcttcggaagcaaagaagagtgctaagtcaaaattcacttgcagtccactgattgaaatccagcagcaaatggtcaggctgagcgcagacggtcacgtggagaacaagcggactgcccgtgtgcggacacaggatgtcagcacaaacatctacccggttcagaacaacacggctcaggccagtgctccggacgcttaccaggcagcgtcgcaggtggaccagatgacgtttttgaacggcagtgttgtttatgggcctcatctcccatatggctactcgaccgaaggaggtgacttctattggaactcaaatgacggggcttgataaaaccatcttcgacttgtggcatattttcggcttcaagttctaaccgtatcagctgtaattaaggggtctactttattggcaatggcctccataatttctattgggaatggcctccgtgattctaactgtaatggttgggccaaatttaaatttacaggaaacgtctctttgaggc

SEQ ID NO: 18150 - protein, 593 aa, Triticum aestivum
  peptide (1)..(593): Ceres Seq. ID no. 14301921
  misc_feature (53)..(593): NCBI GI NO: 34909602 NR Description: P0435B05.21
  misc_feature (248)..(524): NCBI GI NO: 15218694 NR Description: expressed protein [Arabidopsis thaliana]
  misc_feature (50)..(164): NCBI GI NO: 15218694 NR Description: expressed protein [Arabidopsis thaliana]
  misc_feature (71)..(510): NCBI GI NO: 25370817 NR Description: hypothetical protein At2g42400
  misc_feature (148)..(510): NCBI GI NO: 18405962 NR Description: expressed protein [Arabidopsis thaliana]
  misc_feature (392)..(524): NCBI GI NO: 6691215 NR Description: F1K23.24 [Arabidopsis thaliana]
  misc_feature (71)..(273): NCBI GI NO: 18405962 NR Description: expressed protein [Arabidopsis thaliana]
  misc_feature (283)..(283): Xaa is any aa, unknown or other
IPSEEEKRHQIIRASPSPLPSRKGRRERPSTPRRRSIGAAERTARASAMRKGPSRSGSARHQQFRARAKTRVDDLQDMFSGLQYARKEARSTDAVLLEAQLHQMLREWRAELSVPSPASSLQAGNNNRDPSDPPSETPRPPQLAPAEEEDDATSKLVEQKPRPSANQTHKHPRGDQDMKPEPREEAIAHPVTVAQQPPSLGPGVITTPASAGFHDQMYYVNQELSVEDFLYDDDYKINLPGSNPEILNNLEGIGHQEYLQFNLPQELPPNAYLDMNNYGQNAXDGFLHMSDLLTTMSPAPASFLRPKCALWDCPRPAQGSESWQDYCSMYHAELAVKEEGPPGTMPVIRPRGIDLKDGPLFAALSAKIQGKHVGVPVCEGAATTKSPWNAPELFDLYIFEGESMREWLFFDKPRRAFDSGNRKQRSLPDYNGRGWHESRKQVMKDFGGLKRSYYMDPQPSSSYEWHLYEYEINDRDAFALYRLEFKSSEAKKSAKSKFTCSPLIEIQQQMVRLSADGHVENKRTARVRTQDVSTNIYPVQNNTAQASAPDAYQAASQVDQMTFLNGSVVYGPHLPYGYSTEGGDFYWNSNDGA

SEQ ID NO: 18151 - protein, 545 aa, Triticum aestivum
  peptide (1)..(545): Ceres Seq. ID no. 14301922
  misc_feature (5)..(545): NCBI GI NO: 34909602 NR Description: P0435B05.21
  misc_feature (200)..(476): NCBI GI NO: 15218694 NR Description: expressed protein [Arabidopsis thaliana]
  misc_feature (2)..(116): NCBI GI NO: 15218694 NR Description: expressed protein [Arabidopsis thaliana]
  misc_feature (23)..(462): NCBI GI NO: 25370817 NR Description: hypothetical protein At2g42400
  misc_feature (100)..(462): NCBI GI NO: 18405962 NR Description: expressed protein [Arabidopsis thaliana]
  misc_feature (344)..(476): NCBI GI NO: 6691215 NR Description: F1K23.24 [Arabidopsis thaliana]
  misc_feature (23)..(225): NCBI GI NO: 18405962 NR Description: expressed protein [Arabidopsis thaliana]
  misc_feature (235)..(235): Xaa is any aa, unknown or other
MRKGPSRSGSARHQQFRARAKTRVDDLQDMFSGLQYARKEARSTDAVLLEAQLHQMLREWRAELSVPSPASSLQAGNNNRDPSDPPSETPRPPQLAPAEEEDDATSKLVEQKPRPSANQTHKHPRGDQDMKPEPREEAIAHPVTVAQQPPSLGPGVITTPASAGFHDQMYYVNQELSVEDFLYDDDYKINLPGSNPEILNNLEGIGHQEYLQFNLPQELPPNAYLDMNNYGQNAXDGFLHMSDLLTTMSPAPASFLRPKCALWDCPRPAQGSESWQDYCSMYHAELAVKEEGPPGTMPVIRPRGIDLKDGPLFAALSAKIQGKHVGVPVCEGAATTKSPWNAPELFDLYIFEGESMREWLFFDKPRRAFDSGNRKQRSLPDYNGRGWHESRKQVMKDFGGLKRSYYMDPQPSSSYEWHLYEYEINDRDAFALYRLEFKSSEAKKSAKSKFTCSPLIEIQQQMVRLSADGHVENKRTARVRTQDVSTNIYPVQNNTAQASAPDAYQAASQVDQMTFLNGSVVYGPHLPYGYSTEGGDFYWNSNDGA

SEQ ID NO: 18152 - protein, 516 aa, Triticum aestivum
  peptide (1)..(516): Ceres Seq. ID no. 14301923
  misc_feature (1)..(516): NCBI GI NO: 34909602 NR Description: P0435B05.21
  misc_feature (171)..(447): NCBI GI NO: 15218694 NR Description: expressed protein [Arabidopsis thaliana]
  misc_feature (1)..(87): NCBI GI NO: 15218694 NR Description: expressed protein [Arabidopsis thaliana]
  misc_feature (1)..(433): NCBI GI NO: 25370817 NR Description: hypothetical protein At2g42400
  misc_feature (71)..(433): NCBI GI NO: 18405962 NR Description: expressed protein [Arabidopsis thaliana]
  misc_feature (315)..(447): NCBI GI NO: 6691215 NR Description: F1K23.24 [Arabidopsis thaliana]
  misc_feature (1)..(196): NCBI GI NO: 18405962 NR Description: expressed protein [Arabidopsis thaliana]
  misc_feature (206)..(206): Xaa is any aa, unknown or other
MFSGLQYARKEARSTDAVLLEAQLHQMLREWRAELSVPSPASSLQAGNNNRDPSDPPSETPRPPQLAPAEEEDDATSKLVEQKPRPSANQTHKHPRGDQDMKPEPREEAIAHPVTVAQQPPSLGPGVITTPASAGFHDQMYYVNQELSVEDFLYDDDYKINLPGSNPEILNNLEGIGHQEYLQFNLPQELPPNAYLDMNNYGQNAXDGFLHMSDLLTTMSPAPASFLRPKCALWDCPRPAQGSESWQDYCSMYHAELAVKEEGPPGTMPVIRPRGIDLKDGPLFAALSAKIQGKHVGVPVCEGAATTKSPWNAPELFDLYIFEGESMREWLFFDKPRRAFDSGNRKQRSLPDYNGRGWHESRKQVMKDFGGLKRSYYMDPQPSSSYEWHLYEYEINDRDAFALYRLEFKSSEAKKSAKSKFTCSPLIEIQQQMVRLSADGHVENKRTARVRTQDVSTNIYPVQNNTAQASAPDAYQAASQVDQMTFLNGSVVYGPHLPYGYSTEGGDFYWNSNDGA

SEQ ID NO: 18153 - DNA, 1501 bp, Triticum aestivum
  misc_feature (1)..(1501): Ceres Seq. ID no. 13654054
  misc_feature (1484)..(1484): n is a, c, t, g, unknown, or other
agttacaactaacaagtgtggccatgtgcgtgctcctccccatctgggccattccccccgatctccccacttcactaaaccctacccacctcgccgccgcgtaaacccccacccatcccgccgcgcggcccatctccagcgcacaaccaacgccaacgcgaacgccgccgccgctaccgccatggcggccgcctcgagaagtcttctcgcacgcctccgccacctctccctcgccgggccccgcctccccccttgccgcctcttctccgcggagcctctcgtctcccatcccgacgacgacgatgccggcgccggcggcgagggcggaggccggatcatagaggcgcgtcctgctgtcatgggcccggattcccggcggaccggcgtgatcggcgtgaagtgcggcatgtcggcgatgtgggacaagtggggggccaaggttcccatcaccgtcctctgggtcgacgacaatgtcgtctgccaggtcaagaccgccgagaaggaggggttctacgcgctgcagctcggagcaggccaaaagaaggaaaagcatctaacaaagcctgaagtgggccactttagatcacaaggagtccctcttaagagaaaattaaaggagtttcctgttactgaggatgcacttcttcctgttggaacaaccatctcgggttcgtcattttgtacctgggcaatttgtggatgtcattggaatcacaaagggaaaaggttttgcgggtggcatgaaaagacatggttttagtgggatgcctgcatcacatggtgcttctttatcacatcgcagcatcggttctacaggtcaaagggatgctcctggcagggttttcaaaaacaggaaaatgcctgggcgcatgggtggtgttcaacgcacggtgaaaaatgtatgggtttaccaaattgaccctgccaggaacttactgtatctgaaaggccaggttcctggtcctcaaggcagctttcttttcgtcaaggactctatttacaagaaacccgacagagctttcctgccattccctacgtacttctcacaagaaggcgagttggaagacatggagccgctcattgctgatcttggtgacgtcgacccgttcatggcagcagattaagactaggacaaatttcgaagaatcccttttgctttcagtgcagtgttgacaatcccacgtgattgtctgttaaattttgcattggatatatgagtagctcctgggttacaagagttaccccgttactgacctgccagatcaatgttgttccatgtacattacctggcatatatgccagggccctgactcagttagggttttgagctgattgtttggtcgactgagtggatcttattttgtttaataagttgtgtaagctatgattcagatagatatataaaatcgaaaatctctattccgaggttactattctagtttcaaaaaaaaaaaaaaaaaagcttatcgataccgtcgacctcngaggggggggccccggt

SEQ ID NO: 18154 - protein, 252 aa, Triticum aestivum
  peptide (1)..(252): Ceres Seq. ID no. 15219611
  misc_feature (133)..(252): Pfam Name: Pfam Description:  Ribosomal protein L3
  misc_feature (61)..(252): NCBI GI NO: 34902796 NR Description: unnamed protein product
  misc_feature (61)..(252): NCBI GI NO: 18401521 NR Description: ribosomal protein L3p family
  misc_feature (74)..(251): NCBI GI NO: 23108389 NR Description: hypothetical protein
  misc_feature (126)..(245): NCBI GI NO: 22956505 NR Description: hypothetical protein [Rhodobacter sphaeroides]
  misc_feature (121)..(245): NCBI GI NO: 17987040 NR Description: LSU ribosomal protein L3P [Brucella melitensis]
  misc_feature (126)..(245): NCBI GI NO: 15889242 NR Description: AGR_C_3555p [Agrobacterium tumefaciens]
  misc_feature (126)..(245): NCBI GI NO: 15965109 NR Description: PROBABLE 50S RIBOSOMAL PROTEIN L3
  misc_feature (126)..(245): NCBI GI NO: 23502110 NR Description: ribosomal protein L3 [Brucella suis 1330]
  misc_feature (126)..(245): NCBI GI NO: 40741279 NR Description: hypothetical protein AN4308.2
  misc_feature (126)..(226): NCBI GI NO: 13470551 NR Description: 50S ribosomal protein L3 [Mesorhizobium loti]
VTTNKCGHVRAPPHLGHSPRSPHFTKPYPPRRRVNPHPSRRAAHLQRTTNANANAAAATAMAAASRSLLARLRHLSLAGPRLPPCRLFSAEPLVSHPDDDDAGAGGEGGGRIIEARPAVMGPDSRRTGVIGVKCGMSAMWDKWGAKVPITVLWVDDNVVCQVKTAEKEGFYALQLGAGQKKEKHLTKPEVGHFRSQGVPLKRKLKEFPVTEDALLPVGTTISGSSFCTWAICGCHWNHKGKRFCGWHEKTWF

SEQ ID NO: 18155 - protein, 192 aa, Triticum aestivum
  peptide (1)..(192): Ceres Seq. ID no. 15219612
  misc_feature (73)..(192): Pfam Name: Pfam Description:  Ribosomal protein L3
  misc_feature (1)..(192): NCBI GI NO: 34902796 NR Description: unnamed protein product
  misc_feature (1)..(192): NCBI GI NO: 18401521 NR Description: ribosomal protein L3p family
  misc_feature (14)..(191): NCBI GI NO: 23108389 NR Description: hypothetical protein
  misc_feature (66)..(185): NCBI GI NO: 22956505 NR Description: hypothetical protein [Rhodobacter sphaeroides]
  misc_feature (61)..(185): NCBI GI NO: 17987040 NR Description: LSU ribosomal protein L3P [Brucella melitensis]
  misc_feature (66)..(185): NCBI GI NO: 15889242 NR Description: AGR_C_3555p [Agrobacterium tumefaciens]
  misc_feature (66)..(185): NCBI GI NO: 15965109 NR Description: PROBABLE 50S RIBOSOMAL PROTEIN L3
  misc_feature (66)..(185): NCBI GI NO: 23502110 NR Description: ribosomal protein L3 [Brucella suis 1330]
  misc_feature (66)..(185): NCBI GI NO: 40741279 NR Description: hypothetical protein AN4308.2
  misc_feature (66)..(166): NCBI GI NO: 13470551 NR Description: 50S ribosomal protein L3 [Mesorhizobium loti]
MAAASRSLLARLRHLSLAGPRLPPCRLFSAEPLVSHPDDDDAGAGGEGGGRIIEARPAVMGPDSRRTGVIGVKCGMSAMWDKWGAKVPITVLWVDDNVVCQVKTAEKEGFYALQLGAGQKKEKHLTKPEVGHFRSQGVPLKRKLKEFPVTEDALLPVGTTISGSSFCTWAICGCHWNHKGKRFCGWHEKTWF

SEQ ID NO: 18156 - protein, 162 aa, Triticum aestivum
  peptide (1)..(162): Ceres Seq. ID no. 15219613
  misc_feature (12)..(118): Pfam Name: Pfam Description:  Ribosomal protein L3
  misc_feature (12)..(162): NCBI GI NO: 34902796 NR Description: unnamed protein product
  misc_feature (12)..(162): NCBI GI NO: 18401521 NR Description: ribosomal protein L3p family
  misc_feature (14)..(144): NCBI GI NO: 23108389 NR Description: hypothetical protein
  misc_feature (30)..(162): NCBI GI NO: 21450877 NR Description: putative ribosomal protein L3
  misc_feature (14)..(131): NCBI GI NO: 22956505 NR Description: hypothetical protein [Rhodobacter sphaeroides]
  misc_feature (14)..(131): NCBI GI NO: 17987040 NR Description: LSU ribosomal protein L3P [Brucella melitensis]
  misc_feature (14)..(121): NCBI GI NO: 15889242 NR Description: AGR_C_3555p [Agrobacterium tumefaciens]
  misc_feature (14)..(121): NCBI GI NO: 15965109 NR Description: PROBABLE 50S RIBOSOMAL PROTEIN L3
  misc_feature (14)..(131): NCBI GI NO: 23502110 NR Description: ribosomal protein L3 [Brucella suis 1330]
  misc_feature (15)..(125): NCBI GI NO: 40741279 NR Description: hypothetical protein AN4308.2
MHFFLLEQPSRVRHFVPGQFVDVIGITKGKGFAGGMKRHGFSGMPASHGASLSHRSIGSTGQRDAPGRVFKNRKMPGRMGGVQRTVKNVWVYQIDPARNLLYLKGQVPGPQGSFLFVKDSIYKKPDRAFLPFPTYFSQEGELEDMEPLIADLGDVDPFMAAD

SEQ ID NO: 18157 - DNA, 1938 bp, Triticum aestivum
  misc_feature (1)..(1938): Ceres Seq. ID no. 14303309
atatattcccactctctccgtcggcatcctcttatttttagttatcatctatcacatccgccttcttcttcccctacacgccttacgtgcaccgcgtatataatggaagcaagttaacggagggagcaccaccgggcaacacaccacgtacggcgcttcaccgaggacaagcttggaagagggatcgatcgacaatggcgtctgctgcgctcccggcggcggcggcggcagcggtcgagcccaagaagaagagcaacttcaagtacgcctgcacctgcgccctctccgcttccatggccaccgtcgtcctcggctatgacgtcggggtgatgagcggggcgtcgctctacatcaaggaggacctgcggctgacggacgtgcaggtggagatcatgatgggcatcctcagcgtctacgcgctcctcggctcgttcgccggggccaggacgtccgactggatcggccgccgctacaccgtcatcatcgccgccgccatcttcttcgccggctccttggtcatgggcttcgccgtcaactacgtcatgttcatgttcggccgcttcgtctgcggcatgggcgtcggcttcgccatcatggtcgcgcccgtctacaccgccgaggtcgccccggcctccacccgcggcctcctcacctccttcaccgaggtcttcatcaacgtcggcatcctcctcggctacgtctccaacttcgccttcgcgcgcctcccgcaccacatcaactggcgcatcatgctcggcatcggcgccgtcccctcggccttgctcgcgctcatggtgctcggcatgccggagtcgccccggtggctcgtgatgaagggccgcctcgccgacgccagggtcgtgctcgagaagacctccgacacgccagaggaggccgtggagcgccttgaccaaatcaaggctgccgccggcatcccccgcgaccttgacggcgacgtggtcgccgtgcccaagagaaaaggcggtgacgagaagcaggtgtggaaggagctcatcttttcgcccaccccggtcatgcgccgcatactgctcgcggcgctcggcgtccatttcttccagcaggcgactggctccgactcggtcgtgctctacagcccacgcgtgttcaagagcgccggcatcaccggcgacaaccacctgctcggcgtcacatgcgccatgggggtcaccaagactctcttcatccttttggccaccttccaaatcgaccgtgtcggccggcggccgctgctgctcaccagcaccgccggcatgctcgtctgtctcatcggcctcggcacgggcctcaccgtcgtgggccagcacccggacgagaagatcacgtgggcagtcggcctgtgcatcgcctccaccttggcctacgtgtccttcttctccatgggcctcggccccatcaccagcgtctacgtctccgaggtcttcccgctgcgggtgcgcgcgctcggcttcgcgctcggcgtcgcctgcaaccgcgtcaccagcgccgccatctccatgaccttcctctccttgtccaaggccatcaccatcggcggcagcttcttcctctacgccggcctcgctgcgctcggctggctttacttctacgccttcgttcccgagacgcgcgggcagccgcttgaggacatagggaagcttttcggcatgaaggacgccgccgtcgaagacgacgacaccgccaccaaagacaagcaggtgaaagcagctgtggagatgaactagctaacgtacggccggagagtgggtttcctcctaacatgcatgcatgcatgcaagggatggatcaccatccattgggggttcttttgagtttcctgctacttctttcttgggtttttgatcaaattcgtcctgttttcgggatgtttcattgtgtcttttatttttccaccaaagtgtatcagaatgtttcgtcgcc

SEQ ID NO: 18158 - protein, 515 aa, Triticum aestivum
  peptide (1)..(515): Ceres Seq. ID no. 14303310
  misc_feature (28)..(489): Pfam Name: and other Pfam Description: Sugar
  misc_feature (1)..(511): NCBI GI NO: 16118827 NR Description: putative sugar transporter [Oryza sativa]
  misc_feature (1)..(511): NCBI GI NO: 34393630 NR Description: putative sorbitol transporter
  misc_feature (11)..(510): NCBI GI NO: 34393631 NR Description: putative sorbitol transporter
  misc_feature (43)..(504): NCBI GI NO: 34905902 NR Description: similar to myo-inositol transporter 2
  misc_feature (16)..(490): NCBI GI NO: 30025133 NR Description: putative sorbitol transporter [Prunus cerasus]
  misc_feature (12)..(508): NCBI GI NO: 15226682 NR Description: mannitol transporter, putative
  misc_feature (12)..(508): NCBI GI NO: 15226696 NR Description: mannitol transporter, putative
  misc_feature (10)..(489): NCBI GI NO: 13129489 NR Description: Putative sugar transporter [Oryza sativa]
  misc_feature (23)..(489): NCBI GI NO: 37533402 NR Description: putative mannitol transporter protein
  misc_feature (17)..(514): NCBI GI NO: 21742093 NR Description: OSJNBa0074L08.15
MASAALPAAAAAAVEPKKKSNFKYACTCALSASMATVVLGYDVGVMSGASLYIKEDLRLTDVQVEIMMGILSVYALLGSFAGARTSDWIGRRYTVIIAAAIFFAGSLVMGFAVNYVMFMFGRFVCGMGVGFAIMVAPVYTAEVAPASTRGLLTSFTEVFINVGILLGYVSNFAFARLPHHINWRIMLGIGAVPSALLALMVLGMPESPRWLVMKGRLADARVVLEKTSDTPEEAVERLDQIKAAAGIPRDLDGDVVAVPKRKGGDEKQVWKELIFSPTPVMRRILLAALGVHFFQQATGSDSVVLYSPRVFKSAGITGDNHLLGVTCAMGVTKTLFILLATFQIDRVGRRPLLLTSTAGMLVCLIGLGTGLTVVGQHPDEKITWAVGLCIASTLAYVSFFSMGLGPITSVYVSEVFPLRVRALGFALGVACNRVTSAAISMTFLSLSKAITIGGSFFLYAGLAALGWLYFYAFVPETRGQPLEDIGKLFGMKDAAVEDDDTATKDKQVKAAVEMN

SEQ ID NO: 18159 - protein, 482 aa, Triticum aestivum
  peptide (1)..(482): Ceres Seq. ID no. 14303311
  misc_feature (1)..(456): Pfam Name: and other Pfam Description: Sugar
  misc_feature (1)..(478): NCBI GI NO: 16118827 NR Description: putative sugar transporter [Oryza sativa]
  misc_feature (1)..(478): NCBI GI NO: 34393630 NR Description: putative sorbitol transporter
  misc_feature (1)..(477): NCBI GI NO: 34393631 NR Description: putative sorbitol transporter
  misc_feature (10)..(471): NCBI GI NO: 34905902 NR Description: similar to myo-inositol transporter 2
  misc_feature (1)..(457): NCBI GI NO: 30025133 NR Description: putative sorbitol transporter [Prunus cerasus]
  misc_feature (1)..(475): NCBI GI NO: 15226682 NR Description: mannitol transporter, putative
  misc_feature (1)..(475): NCBI GI NO: 15226696 NR Description: mannitol transporter, putative
  misc_feature (1)..(456): NCBI GI NO: 13129489 NR Description: Putative sugar transporter [Oryza sativa]
  misc_feature (1)..(456): NCBI GI NO: 37533402 NR Description: putative mannitol transporter protein
  misc_feature (1)..(481): NCBI GI NO: 21742093 NR Description: OSJNBa0074L08.15
MATVVLGYDVGVMSGASLYIKEDLRLTDVQVEIMMGILSVYALLGSFAGARTSDWIGRRYTVIIAAAIFFAGSLVMGFAVNYVMFMFGRFVCGMGVGFAIMVAPVYTAEVAPASTRGLLTSFTEVFINVGILLGYVSNFAFARLPHHINWRIMLGIGAVPSALLALMVLGMPESPRWLVMKGRLADARVVLEKTSDTPEEAVERLDQIKAAAGIPRDLDGDVVAVPKRKGGDEKQVWKELIFSPTPVMRRILLAALGVHFFQQATGSDSVVLYSPRVFKSAGITGDNHLLGVTCAMGVTKTLFILLATFQIDRVGRRPLLLTSTAGMLVCLIGLGTGLTVVGQHPDEKITWAVGLCIASTLAYVSFFSMGLGPITSVYVSEVFPLRVRALGFALGVACNRVTSAAISMTFLSLSKAITIGGSFFLYAGLAALGWLYFYAFVPETRGQPLEDIGKLFGMKDAAVEDDDTATKDKQVKAAVEMN

SEQ ID NO: 18160 - protein, 470 aa, Triticum aestivum
  peptide (1)..(470): Ceres Seq. ID no. 14303312
  misc_feature (1)..(444): Pfam Name: and other Pfam Description: Sugar
  misc_feature (1)..(466): NCBI GI NO: 16118827 NR Description: putative sugar transporter [Oryza sativa]
  misc_feature (1)..(466): NCBI GI NO: 34393630 NR Description: putative sorbitol transporter
  misc_feature (1)..(465): NCBI GI NO: 34393631 NR Description: putative sorbitol transporter
  misc_feature (1)..(459): NCBI GI NO: 34905902 NR Description: similar to myo-inositol transporter 2
  misc_feature (1)..(445): NCBI GI NO: 30025133 NR Description: putative sorbitol transporter [Prunus cerasus]
  misc_feature (1)..(463): NCBI GI NO: 15226682 NR Description: mannitol transporter, putative
  misc_feature (1)..(463): NCBI GI NO: 15226696 NR Description: mannitol transporter, putative
  misc_feature (1)..(444): NCBI GI NO: 13129489 NR Description: Putative sugar transporter [Oryza sativa]
  misc_feature (1)..(444): NCBI GI NO: 37533402 NR Description: putative mannitol transporter protein
  misc_feature (1)..(469): NCBI GI NO: 21742093 NR Description: OSJNBa0074L08.15
MSGASLYIKEDLRLTDVQVEIMMGILSVYALLGSFAGARTSDWIGRRYTVIIAAAIFFAGSLVMGFAVNYVMFMFGRFVCGMGVGFAIMVAPVYTAEVAPASTRGLLTSFTEVFINVGILLGYVSNFAFARLPHHINWRIMLGIGAVPSALLALMVLGMPESPRWLVMKGRLADARVVLEKTSDTPEEAVERLDQIKAAAGIPRDLDGDVVAVPKRKGGDEKQVWKELIFSPTPVMRRILLAALGVHFFQQATGSDSVVLYSPRVFKSAGITGDNHLLGVTCAMGVTKTLFILLATFQIDRVGRRPLLLTSTAGMLVCLIGLGTGLTVVGQHPDEKITWAVGLCIASTLAYVSFFSMGLGPITSVYVSEVFPLRVRALGFALGVACNRVTSAAISMTFLSLSKAITIGGSFFLYAGLAALGWLYFYAFVPETRGQPLEDIGKLFGMKDAAVEDDDTATKDKQVKAAVEMN

SEQ ID NO: 18161 - DNA, 1482 bp, Triticum aestivum
  misc_feature (1)..(1482): Ceres Seq. ID no. 14301916
gagagagagatgaaggtctgtaccctcgcttaaacactctcgcctacccggctcgaccccccctcccatcttctccttcgccaagaacaccaccgcagccaccacgatcgatctcgtgctcgtgcgcggtgcgctggagcggcggctggggtgggcggtggccgccatgatcccgtgaaggaggaggggaggggatagataggtggctgtgtgacaaaggggccggatcgatgtacaagaaccagctgcaggagctggcgcagaggagctgcttcagcctgccgtcgtacgtgtgcacgcgggaggggcccgaccatgcgccccgcttcaaggccaccgtcaccttcaacggcgagaccttccacgggcccacctgctgcaccacgctccgccaggccgagcacgccgccgccgaggtcgcgctcgcccgcctctccacccgcgggccatccacctacctcaccgccagagtcctcgacgagaccggggtgtacaagaacctgctgcaggagacagcgcaccgggcggggctgaagctgccggcctacaccaccgtgcgctccggcccgggccactcgccggtcttcgcctccagcgtggagctcgctggcctcagcttcgccggcgacgccgccaggaccaagaagcaggcggagaagaacgctgccatgaccgcctggtccgcccttaagcagatgccggaggcgcgcaaggagcccggcaacggctgtgtcggcgaggagcaggagcactggtcgtagccagagtgctcgccgccctgaagcagcgctgcgatgtcaatgcggcgtcgcccttaccgaagcagcactgcctcgccggctcttcttcgtcctctgctccgaacccgtcgctctacagccaccaatggctgcctctgagctcccatgctgcacagcccaggacgcgccacgtgcagccgcagccggccggccccaggatactgcctccgctgcacatgctgcagcgaccggcgccgtccacctcccgtcacggcggcgagctggagcggcagaggaggatcgatgcggccgagctggtgcagatgctggagagggccatggtgacgaacagagaagaggcaatgccgtcggcgccgtgctactacccgcacgtcccggcgtaccaccacgccggcgcggcgccaagatacttcgccgcgggcggattccactcgccggcgatggcagtgagcgtgcggtcggtgatcccgatgtgctccgcgccgccttcgccgccgcagccggccgcggccaccaaggatgaccatgatgatgaccggaacgacccggcagcacctgcagagcactaggcggcgaggcgtgagctcgcggctgccaggttttgaagatcaagaagacgaggaaagattccgaggttcagtagctatatgatgagatcagtctggttgtagaagggaattttgatcgcaagttcctctgtctaagcttgtgtaagtgaccg

SEQ ID NO: 18162 - protein, 176 aa, Triticum aestivum
  peptide (1)..(176): Ceres Seq. ID no. 14301917
  misc_feature (2)..(68): Pfam Name: Pfam Description:  Double-stranded RNA binding motif
  misc_feature (1)..(176): NCBI GI NO: 11994159 NR Description: gb|AAD20688
  misc_feature (1)..(176): NCBI GI NO: 15231653 NR Description: hypothetical protein [Arabidopsis thaliana]
  misc_feature (1)..(176): NCBI GI NO: 40788412 NR Description: hypothetical protein
  misc_feature (1)..(156): NCBI GI NO: 18401724 NR Description: expressed protein [Arabidopsis thaliana]
  misc_feature (1)..(156): NCBI GI NO: 30693732 NR Description: expressed protein [Arabidopsis thaliana]
  misc_feature (1)..(158): NCBI GI NO: 9759153 NR Description: gb|AAD20688
  misc_feature (1)..(173): NCBI GI NO: 37535422 NR Description: putative extensin
  misc_feature (1)..(154): NCBI GI NO: 18389232 NR Description: unknown protein [Arabidopsis thaliana]
  misc_feature (1)..(154): NCBI GI NO: 22331912 NR Description: expressed protein [Arabidopsis thaliana]
  misc_feature (1)..(165): NCBI GI NO: 8346542 NR Description: BcpLH protein [Brassica rapa]
MYKNQLQELAQRSCFSLPSYVCTREGPDHAPRFKATVTFNGETFHGPTCCTTLRQAEHAAAEVALARLSTRGPSTYLTARVLDETGVYKNLLQETAHRAGLKLPAYTTVRSGPGHSPVFASSVELAGLSFAGDAARTKKQAEKNAAMTAWSALKQMPEARKEPGNGCVGEEQEHWS

SEQ ID NO: 18163 - protein, 132 aa, Triticum aestivum
  peptide (1)..(132): Ceres Seq. ID no. 14301918
  misc_feature (1)..(126): NCBI GI NO: 40788412 NR Description: hypothetical protein
  misc_feature (1)..(123): NCBI GI NO: 27375632 NR Description: blr0521 [Bradyrhizobium japonicum]
  misc_feature (1)..(33): NCBI GI NO: 9843651 NR Description: SRM102 [Arabidopsis thaliana]
  misc_feature (1)..(33): NCBI GI NO: 30684163 NR Description: proline-rich protein -related
  misc_feature (1)..(33): NCBI GI NO: 25408026 NR Description: probable proline-rich protein
  misc_feature (1)..(126): NCBI GI NO: 31414574 NR Description: large tegument protein
  misc_feature (1)..(69): NCBI GI NO: 28493118 NR Description: unknown [Tropheryma whipplei str. Twist]
  misc_feature (1)..(56): NCBI GI NO: 25143299 NR Description: pre-mRNA splicing SR protein related (68
  misc_feature (1)..(88): NCBI GI NO: 22962211 NR Description: hypothetical protein [Rhodopseudomonas palustris]
  misc_feature (1)..(87): NCBI GI NO: 30984464 NR Description: very large tegument protein
MAASELPCCTAQDAPRAAAAGRPQDTASAAHAAATGAVHLPSRRRAGAAEEDRCGRAGADAGEGHGDEQRRGNAVGAVLLPARPGVPPRRRGAKILRRGRIPLAGDGSERAVGDPDVLRAAFAAAAGRGHQG

SEQ ID NO: 18164 - protein, 117 aa, Triticum aestivum
  peptide (1)..(117): Ceres Seq. ID no. 14301919
  misc_feature (75)..(96): NCBI GI NO: 11994159 NR Description: gb|AAD20688
  misc_feature (75)..(96): NCBI GI NO: 15231653 NR Description: hypothetical protein [Arabidopsis thaliana]
MLQRPAPSTSRHGGELERQRRIDAAELVQMLERAMVTNREEAMPSAPCYYPHVPAYHHAGAAPRYFAAGGFHSPAMAVSVRSVIPMCSAPPSPPQPAAATKDDHDDDRNDPAAPAEH

SEQ ID NO: 18165 - DNA, 1774 bp, Triticum aestivum
  misc_feature (1)..(1774): Ceres Seq. ID no. 15178464
ccccaaaccaagcagagcctacttgtctccctccgcgaatctctccctcccacgctgatctcaatctgcccgtccctccacgggcccgcgccgcctccctccctccatccccgccgcatcgccggcggcctcagcttcgcacgctccgatggtgccgagattggtctcttgctagtgctggcggctcaacctgcagaccgcggcaccgccatggaggctccgctgacggtgcagattgtcgagttcaacaccaaggtgatgcaagaggagctgaagaagctggggctcaaggtcaaccaccatgaggccaacatcacgttcctcaagtctgagatctatgctatcgaagagtcgattgctgacctgacaattaaacgtggaaagaaggttgtagcttcaagtaatggtacatcagttcaagaagctgaacagcgtacaattgaaagcatatgtaatcaggacaagacagcagcttcgcttatatgccagctcaagaaacgtcattccacacaaatatcaacaatgccaatgatgaaagatatccttggtgttgtggctaccttaggaaaaacaaatgatgataatctaagcagcctactctcagagtacttgggaatagacaatatgcttggtctcgtttgcaagacttatgatggcataaagagtcttgaaacatatggcacagaaggcaacattgataagaaaagtggtattcatggactgggtggctcaattggaaagattctgcatgggaggtttaccgtgttttgtcttgaaaacataaggccattttctggagaagttgtgattgatgatccacaaagatatcttatgctgcgtaaaccaaggttgcctaacggggagtctcctcctggttttcttggtttcgcagtaaatatgatacttatggaccaggcatacttgagttgtctcacaccccatggccatggtcttagggagactttgttttacagtttgttttctcatttacaagtttataagactacagctgatctacggcgtgctattcccttcataaatgatggtgcggtttctctagatggtggtatattgaggcctaatggttcattctgccttggtgataggaaagatgttgaagtgaaatttactgtagctttaagctctggggattcaaacacacctggaagtatcactgaaatggaagagcaagtcaaactgaagaactgggagaaggaaaggtttgttgaggatataaaaagggaggaagatttgttaaagcaagttaaggactcattcagcaatcaaaagcaacagcttctggactatatcactcaatcgccagcgtcaaagagggtgcagggttcaccaaccattcgctcacctgcaactccgggaagtaatccatttgcagcaactcctgggcgtaacccgtttacatcaactcctggaagtcacccgtttgctacaactccgggaggcaacccatttgcagctactactcctggaggtcacccgattgcagcaactcctggaagtcacccgatcgcagcaactcctggaaatatttcgtttgcagtcaagcctccccacatgcgctgacagcgtgtaaatgtccgcatgcgatttccttttgctgggagtttgtcatgctctggttctatccatacgtaaccaactgcattttgcgaagttcttaacgctagattctagtgcacagtagggatgcgaaaagttagtacataaccaccgacttttgttcataagttggggcctgtctctggtcacttattcg

SEQ ID NO: 18166 - protein, 526 aa, Triticum aestivum
  peptide (1)..(526): Ceres Seq. ID no. 15178465
  misc_feature (82)..(450): NCBI GI NO: 18408807 NR Description: expressed protein [Arabidopsis thaliana]
  misc_feature (133)..(266): NCBI GI NO: 34904396 NR Description: unnamed protein product
  misc_feature (364)..(467): NCBI GI NO: 34904396 NR Description: unnamed protein product
  misc_feature (82)..(446): NCBI GI NO: 11285606 NR Description: hypothetical protein F2K15
  misc_feature (138)..(432): NCBI GI NO: 15237930 NR Description: hypothetical protein [Arabidopsis thaliana]
  misc_feature (252)..(406): NCBI GI NO: 10177087 NR Description: contains similarity to En/Spm-like transposonprotein~gene_id:MOP9
  misc_feature (138)..(216): NCBI GI NO: 10177087 NR Description: contains similarity to En/Spm-like transposonprotein~gene_id:MOP9
PQTKQSLLVSLRESLPPTLISICPSLHGPAPPPSLHPRRIAGGLSFARSDGAEIGLLLVLAAQPADRGTAMEAPLTVQIVEFNTKVMQEELKKLGLKVNHHEANITFLKSEIYAIEESIADLTIKRGKKVVASSNGTSVQEAEQRTIESICNQDKTAASLICQLKKRHSTQISTMPMMKDILGVVATLGKTNDDNLSSLLSEYLGIDNMLGLVCKTYDGIKSLETYGTEGNIDKKSGIHGLGGSIGKILHGRFTVFCLENIRPFSGEVVIDDPQRYLMLRKPRLPNGESPPGFLGFAVNMILMDQAYLSCLTPHGHGLRETLFYSLFSHLQVYKTTADLRRAIPFINDGAVSLDGGILRPNGSFCLGDRKDVEVKFTVALSSGDSNTPGSITEMEEQVKLKNWEKERFVEDIKREEDLLKQVKDSFSNQKQQLLDYITQSPASKRVQGSPTIRSPATPGSNPFAATPGRNPFTSTPGSHPFATTPGGNPFAATTPGGHPIAATPGSHPIAATPGNISFAVKPPHMR

SEQ ID NO: 18167 - protein, 456 aa, Triticum aestivum
  peptide (1)..(456): Ceres Seq. ID no. 15178466
  misc_feature (12)..(380): NCBI GI NO: 18408807 NR Description: expressed protein [Arabidopsis thaliana]
  misc_feature (63)..(196): NCBI GI NO: 34904396 NR Description: unnamed protein product
  misc_feature (294)..(397): NCBI GI NO: 34904396 NR Description: unnamed protein product
  misc_feature (12)..(376): NCBI GI NO: 11285606 NR Description: hypothetical protein F2K15
  misc_feature (68)..(362): NCBI GI NO: 15237930 NR Description: hypothetical protein [Arabidopsis thaliana]
  misc_feature (182)..(336): NCBI GI NO: 10177087 NR Description: contains similarity to En/Spm-like transposonprotein~gene_id:MOP9
  misc_feature (68)..(146): NCBI GI NO: 10177087 NR Description: contains similarity to En/Spm-like transposonprotein~gene_id:MOP9
MEAPLTVQIVEFNTKVMQEELKKLGLKVNHHEANITFLKSEIYAIEESIADLTIKRGKKVVASSNGTSVQEAEQRTIESICNQDKTAASLICQLKKRHSTQISTMPMMKDILGVVATLGKTNDDNLSSLLSEYLGIDNMLGLVCKTYDGIKSLETYGTEGNIDKKSGIHGLGGSIGKILHGRFTVFCLENIRPFSGEVVIDDPQRYLMLRKPRLPNGESPPGFLGFAVNMILMDQAYLSCLTPHGHGLRETLFYSLFSHLQVYKTTADLRRAIPFINDGAVSLDGGILRPNGSFCLGDRKDVEVKFTVALSSGDSNTPGSITEMEEQVKLKNWEKERFVEDIKREEDLLKQVKDSFSNQKQQLLDYITQSPASKRVQGSPTIRSPATPGSNPFAATPGRNPFTSTPGSHPFATTPGGNPFAATTPGGHPIAATPGSHPIAATPGNISFAVKPPHMR

SEQ ID NO: 18168 - protein, 440 aa, Triticum aestivum
  peptide (1)..(440): Ceres Seq. ID no. 15178467
  misc_feature (1)..(364): NCBI GI NO: 18408807 NR Description: expressed protein [Arabidopsis thaliana]
  misc_feature (47)..(180): NCBI GI NO: 34904396 NR Description: unnamed protein product
  misc_feature (278)..(381): NCBI GI NO: 34904396 NR Description: unnamed protein product
  misc_feature (1)..(360): NCBI GI NO: 11285606 NR Description: hypothetical protein F2K15
  misc_feature (52)..(346): NCBI GI NO: 15237930 NR Description: hypothetical protein [Arabidopsis thaliana]
  misc_feature (166)..(320): NCBI GI NO: 10177087 NR Description: contains similarity to En/Spm-like transposonprotein~gene_id:MOP9
  misc_feature (52)..(130): NCBI GI NO: 10177087 NR Description: contains similarity to En/Spm-like transposonprotein~gene_id:MOP9
MQEELKKLGLKVNHHEANITFLKSEIYAIEESIADLTIKRGKKVVASSNGTSVQEAEQRTIESICNQDKTAASLICQLKKRHSTQISTMPMMKDILGVVATLGKTNDDNLSSLLSEYLGIDNMLGLVCKTYDGIKSLETYGTEGNIDKKSGIHGLGGSIGKILHGRFTVFCLENIRPFSGEVVIDDPQRYLMLRKPRLPNGESPPGFLGFAVNMILMDQAYLSCLTPHGHGLRETLFYSLFSHLQVYKTTADLRRAIPFINDGAVSLDGGILRPNGSFCLGDRKDVEVKFTVALSSGDSNTPGSITEMEEQVKLKNWEKERFVEDIKREEDLLKQVKDSFSNQKQQLLDYITQSPASKRVQGSPTIRSPATPGSNPFAATPGRNPFTSTPGSHPFATTPGGNPFAATTPGGHPIAATPGSHPIAATPGNISFAVKPPHMR

SEQ ID NO: 18169 - DNA, 1414 bp, Triticum aestivum
  misc_feature (1)..(1414): Ceres Seq. ID no. 14301932
aaaaaaatttcgattcgcacactgtgcagccaaaagccgagagagagctcgagctcagctccccactccccccatccccccgaggccccaaccctaagcccctcgccgggccccaatgtcgaggccggcggccgcggccgcagcggcgctgctggttatcctcgcggcggcgggcggcgcggcggcgaagaccacgatcgagccctgctccagcgccgactcgtgcgcggcgctgctcggctactcgctctacgccgacatgaaggtctccgaggtggcggcgctcttcggcgcggacccggcggcgctgctggcggccaacgcgctcgacttcgcctcccccggcgccgccaaccggatcctccccgcggggctcctcctccgcgtccccacccgctgcgcctgcgccgacggcgtccgcaagtccgtctccgtccgctacaccgcgcgccccgccgatacgctcgccaccgtcgccgacgtcgtcttcgcgggcctcgcctccgccgaccagatccgcagcgccaacgggctcgccgaggccgacccggacgcgctgctcgacgccggccagattctcgtcgtccccttcccctgcgtctgcctcaactccaccgacaacaacctccccgccgtctacctctcctatctcgtgcgggtcggggacaccgtgcaatccatcgccgccacccacgccaccactgtcacggatctcagcaatgtgaatgccatggggagccccgtcgtggcacccggcgacatccttgcagttccattatcagcatgtgcgtctacatttcctaactttgcttcggactatggattgcttgtggcaaacgggacctatgcactaactgctggtaactgtgtagaatgcagctgtgggccaggggatctcaatctgtactgcactccagcttcattaggaacgtcatgttcaagtatgcagtgctccaatagcagtctaatgcttggtaatgtgactacccagcccaccagcggtggctgcggtgtctcgtcttgcaactatgctggcttcgttaacggaagcattaccacatcgctgtcctcgggtcttcaacctacatgccctggaccgcatcaagttcctccactcatggagccgtccaccgcggcaatccacgactcgtaccttgctccatcaccttcgccaggacctggggaggcaggtggtgctgttcccggctcgtctgaccctggagcgtcctcccattctcttgctggaagcctctcgccctcggtgcataaactgcatcaaatgatcctcattctttctctagtcttctacctgcatatgtgaattcttctgtaggaatattattggatgtatttgtatcggacggggccctcatttgggcccggtggaacctcgacggcaaggttttctggctcc

SEQ ID NO: 18170 - protein, 401 aa, Triticum aestivum
  peptide (1)..(401): Ceres Seq. ID no. 14301933
  misc_feature (178)..(220): Pfam Name: Pfam Description:  LysM domain
  misc_feature (3)..(380): NCBI GI NO: 18395044 NR Description: expressed protein [Arabidopsis thaliana]
  misc_feature (1)..(378): NCBI GI NO: 30699276 NR Description: expressed protein [Arabidopsis thaliana]
  misc_feature (3)..(315): NCBI GI NO: 30687570 NR Description: expressed protein [Arabidopsis thaliana]
  misc_feature (1)..(378): NCBI GI NO: 25406518 NR Description: unknown protein T5M16.22
  misc_feature (31)..(339): NCBI GI NO: 28207683 NR Description: Erwinia induced protein 1 [Solanum tuberosum]
  misc_feature (1)..(325): NCBI GI NO: 22758281 NR Description: Unknown protein
  misc_feature (31)..(326): NCBI GI NO: 18398317 NR Description: delta-8 sphingolipid desaturase
  misc_feature (31)..(326): NCBI GI NO: 21593990 NR Description: unknown [Arabidopsis thaliana]
  misc_feature (293)..(378): NCBI GI NO: 32420163 NR Description: predicted protein [Neurospora crassa]
  misc_feature (326)..(382): NCBI GI NO: 1076211 NR Description: hypothetical protein VSP-3 - Chlamydomonasreinhardtii
MSRPAAAAAAALLVILAAAGGAAAKTTIEPCSSADSCAALLGYSLYADMKVSEVAALFGADPAALLAANALDFASPGAANRILPAGLLLRVPTRCACADGVRKSVSVRYTARPADTLATVADVVFAGLASADQIRSANGLAEADPDALLDAGQILVVPFPCVCLNSTDNNLPAVYLSYLVRVGDTVQSIAATHATTVTDLSNVNAMGSPVVAPGDILAVPLSACASTFPNFASDYGLLVANGTYALTAGNCVECSCGPGDLNLYCTPASLGTSCSSMQCSNSSLMLGNVTTQPTSGGCGVSSCNYAGFVNGSITTSLSSGLQPTCPGPHQVPPLMEPSTAAIHDSYLAPSPSPGPGEAGGAVPGSSDPGASSHSLAGSLSPSVHKLHQMILILSLVFYLHM

SEQ ID NO: 18171 - protein, 353 aa, Triticum aestivum
  peptide (1)..(353): Ceres Seq. ID no. 14301934
  misc_feature (130)..(172): Pfam Name: Pfam Description:  LysM domain
  misc_feature (1)..(332): NCBI GI NO: 18395044 NR Description: expressed protein [Arabidopsis thaliana]
  misc_feature (1)..(330): NCBI GI NO: 30699276 NR Description: expressed protein [Arabidopsis thaliana]
  misc_feature (1)..(267): NCBI GI NO: 30687570 NR Description: expressed protein [Arabidopsis thaliana]
  misc_feature (1)..(330): NCBI GI NO: 25406518 NR Description: unknown protein T5M16.22
  misc_feature (1)..(291): NCBI GI NO: 28207683 NR Description: Erwinia induced protein 1 [Solanum tuberosum]
  misc_feature (1)..(277): NCBI GI NO: 22758281 NR Description: Unknown protein
  misc_feature (1)..(278): NCBI GI NO: 18398317 NR Description: delta-8 sphingolipid desaturase
  misc_feature (1)..(278): NCBI GI NO: 21593990 NR Description: unknown [Arabidopsis thaliana]
  misc_feature (245)..(330): NCBI GI NO: 32420163 NR Description: predicted protein [Neurospora crassa]
  misc_feature (278)..(334): NCBI GI NO: 1076211 NR Description: hypothetical protein VSP-3 - Chlamydomonasreinhardtii
MKVSEVAALFGADPAALLAANALDFASPGAANRILPAGLLLRVPTRCACADGVRKSVSVRYTARPADTLATVADVVFAGLASADQIRSANGLAEADPDALLDAGQILVVPFPCVCLNSTDNNLPAVYLSYLVRVGDTVQSIAATHATTVTDLSNVNAMGSPVVAPGDILAVPLSACASTFPNFASDYGLLVANGTYALTAGNCVECSCGPGDLNLYCTPASLGTSCSSMQCSNSSLMLGNVTTQPTSGGCGVSSCNYAGFVNGSITTSLSSGLQPTCPGPHQVPPLMEPSTAAIHDSYLAPSPSPGPGEAGGAVPGSSDPGASSHSLAGSLSPSVHKLHQMILILSLVFYLHM

SEQ ID NO: 18172 - protein, 267 aa, Triticum aestivum
  peptide (1)..(267): Ceres Seq. ID no. 14301935
  misc_feature (100)..(195): Pfam Name: Pfam Description:  Sperm histone P2
KKISIRTLCSQKPRESSSSAPHSPHPPEAPTLSPSPGPNVEAGGRGRSGAAGYPRGGGRRGGEDHDRALLQRRLVRGAARLLALRRHEGLRGGGALRRGPGGAAGGQRARLRLPRRRQPDPPRGAPPPRPHPLRLRRRRPQVRLRPLHRAPRRYARHRRRRRLRGPRLRRPDPQRQRARRGRPGRAARRRPDSRRPLPLRLPQLHRQQPPRRLPLLSRAGRGHRAIHRRHPRHHCHGSQQCECHGEPRRGTRRHPCSSIISMCVYIS

SEQ ID NO: 18173 - DNA, 1143 bp, Triticum aestivum
  misc_feature (1)..(1143): Ceres Seq. ID no. 15227260
gaacctcaccaaaaaaaaagcccgcaccacctctcctcccccgccgccaccgccggcaaccaccggatccggagaagaaagaggcagcgcccggcgaagcgaagcgggggaagagatggtgggcactccgtcctcgccggtggtgaacgtgtacccgctcgccaactacacgttcggcaccaaggaggccaagatggagaaggacacctccgtcgccgaccgcctcgctcgcatgaaggtcaactacatgaaagaaggaatgcgaacaagtgttgaagcaatcctattggtgcaagagcacaaccacccccacatactgttgttgcaaattggaaacacattttgcaaacttcccggtggacggttgaagcctggagaaagtgaaattgagggcctgaaaaggaagctgtgcagcaagcttgcagttaactcaccttcctttccacctaactggcaggttggagagtgtgttgctgaatggtggaggccaaactttgaaaccgtgatgtatccttactgccctccacatataacaaagcccaaggagtgcaagaagcttttcattgttcacctaactgaaagggagtatttcgctgttccaaggaacttgaagctacttgctgttccactgtttgaactatatgacaatgttcagcggtacggaccagtgatttccaccatcccgcagcagctgtccaggttccagttcaacatggtgagctcgtaatcaatggtggcgatgagatgcgaggattagtcgagtataagatgtactgagatggatcttggacgaagcaccaaactactagatgctgatcaacttagcatgactcgttatttagtcgccgattttcataaactagatgctcattccgactgccttttatttggcgacgcgtgctgttaatgaagctcaggctggttagatacgtggtgtattattgtttggatggtaatcggttgttcctccggtgcggtgcggtgcgctaatctgttcctgtgtacgtactgtaggcgatggccggagatgtatgcctgtaacgtacgtacgtaggcgatgtatgcctgtaattgctatggtctgctgtagtactagtggctacggtgcatgggttcgtcgtcactgacgctatgcattttagg

SEQ ID NO: 18174 - protein, 241 aa, Triticum aestivum
  peptide (1)..(241): Ceres Seq. ID no. 15227261
  misc_feature (88)..(214): Pfam Name: Pfam Description:  NUDIX domain
  misc_feature (39)..(241): NCBI GI NO: 32488646 NR Description: OSJNBa0032F06.22
  misc_feature (45)..(241): NCBI GI NO: 30686923 NR Description: expressed protein [Arabidopsis thaliana]
  misc_feature (17)..(236): NCBI GI NO: 31418817 NR Description: Unknown (protein for MGC:63966) [Danio rerio]
  misc_feature (47)..(239): NCBI GI NO: 18417474 NR Description: mRNA cleavage factor subunit - like protein
  misc_feature (17)..(236): NCBI GI NO: 5901926 NR Description: cleavage and polyadenylation specific factor 5
  misc_feature (17)..(236): NCBI GI NO: 31873228 NR Description: hypothetical protein [Homo sapiens]
  misc_feature (45)..(185): NCBI GI NO: 7486820 NR Description: hypothetical protein M7J2
  misc_feature (48)..(236): NCBI GI NO: 13386106 NR Description: cleavage and polyadenylation specific factor 5
  misc_feature (45)..(185): NCBI GI NO: 25354611 NR Description: hypothetical protein AT4g25550
  misc_feature (48)..(239): NCBI GI NO: 32421925 NR Description: hypothetical protein [Neurospora crassa]
NLTKKKARTTSPPPPPPPATTGSGEERGSARRSEAGEEMVGTPSSPVVNVYPLANYTFGTKEAKMEKDTSVADRLARMKVNYMKEGMRTSVEAILLVQEHNHPHILLLQIGNTFCKLPGGRLKPGESEIEGLKRKLCSKLAVNSPSFPPNWQVGECVAEWWRPNFETVMYPYCPPHITKPKECKKLFIVHLTEREYFAVPRNLKLLAVPLFELYDNVQRYGPVISTIPQQLSRFQFNMVSS

SEQ ID NO: 18175 - protein, 203 aa, Triticum aestivum
  peptide (1)..(203): Ceres Seq. ID no. 15227262
  misc_feature (50)..(176): Pfam Name: Pfam Description:  NUDIX domain
  misc_feature (1)..(203): NCBI GI NO: 32488646 NR Description: OSJNBa0032F06.22
  misc_feature (7)..(203): NCBI GI NO: 30686923 NR Description: expressed protein [Arabidopsis thaliana]
  misc_feature (1)..(198): NCBI GI NO: 31418817 NR Description: Unknown (protein for MGC:63966) [Danio rerio]
  misc_feature (9)..(201): NCBI GI NO: 18417474 NR Description: mRNA cleavage factor subunit - like protein
  misc_feature (1)..(198): NCBI GI NO: 5901926 NR Description: cleavage and polyadenylation specific factor 5
  misc_feature (1)..(198): NCBI GI NO: 31873228 NR Description: hypothetical protein [Homo sapiens]
  misc_feature (7)..(147): NCBI GI NO: 7486820 NR Description: hypothetical protein M7J2
  misc_feature (10)..(198): NCBI GI NO: 13386106 NR Description: cleavage and polyadenylation specific factor 5
  misc_feature (7)..(147): NCBI GI NO: 25354611 NR Description: hypothetical protein AT4g25550
  misc_feature (10)..(201): NCBI GI NO: 32421925 NR Description: hypothetical protein [Neurospora crassa]
MVGTPSSPVVNVYPLANYTFGTKEAKMEKDTSVADRLARMKVNYMKEGMRTSVEAILLVQEHNHPHILLLQIGNTFCKLPGGRLKPGESEIEGLKRKLCSKLAVNSPSFPPNWQVGECVAEWWRPNFETVMYPYCPPHITKPKECKKLFIVHLTEREYFAVPRNLKLLAVPLFELYDNVQRYGPVISTIPQQLSRFQFNMVSS

SEQ ID NO: 18176 - protein, 177 aa, Triticum aestivum
  peptide (1)..(177): Ceres Seq. ID no. 15227263
  misc_feature (24)..(150): Pfam Name: Pfam Description:  NUDIX domain
  misc_feature (1)..(177): NCBI GI NO: 32488646 NR Description: OSJNBa0032F06.22
  misc_feature (1)..(177): NCBI GI NO: 30686923 NR Description: expressed protein [Arabidopsis thaliana]
  misc_feature (1)..(172): NCBI GI NO: 31418817 NR Description: Unknown (protein for MGC:63966) [Danio rerio]
  misc_feature (1)..(175): NCBI GI NO: 18417474 NR Description: mRNA cleavage factor subunit - like protein
  misc_feature (1)..(172): NCBI GI NO: 5901926 NR Description: cleavage and polyadenylation specific factor 5
  misc_feature (1)..(172): NCBI GI NO: 31873228 NR Description: hypothetical protein [Homo sapiens]
  misc_feature (1)..(121): NCBI GI NO: 7486820 NR Description: hypothetical protein M7J2
  misc_feature (1)..(172): NCBI GI NO: 13386106 NR Description: cleavage and polyadenylation specific factor 5
  misc_feature (1)..(121): NCBI GI NO: 25354611 NR Description: hypothetical protein AT4g25550
  misc_feature (1)..(175): NCBI GI NO: 32421925 NR Description: hypothetical protein [Neurospora crassa]
MEKDTSVADRLARMKVNYMKEGMRTSVEAILLVQEHNHPHILLLQIGNTFCKLPGGRLKPGESEIEGLKRKLCSKLAVNSPSFPPNWQVGECVAEWWRPNFETVMYPYCPPHITKPKECKKLFIVHLTEREYFAVPRNLKLLAVPLFELYDNVQRYGPVISTIPQQLSRFQFNMVSS

SEQ ID NO: 18177 - DNA, 1132 bp, Triticum aestivum
  misc_feature (1)..(1132): Ceres Seq. ID no. 13595919
atcatcacccaacagcactcaaccagagcagagcattcgccactgtagctagcactcgcggcgtgcgggcagggacacggcgagcatgggttcgaggtacgaggtggaggtgacggtgggctcggcgcgggacctcaagaacgtcaactggcgcaacggcgacctgcagccctacgccgtgctctgggtcgacgacggccccaagtgctcctcccgcgtcgacctggacaacggcgagagcccggtctgggacgagaagctcaccgtcccgctcccgccgtccaccgcccgcctcgaggacgccgtcctccgcatcgacgtcgtccacgccaacgccggcgggggcaccaagccgctcgtggggtccgcgcgcctccctctgcgcgacgtcctcgacgacgccggcctcggcggccgcgcgtcccgcacgctccgcctcaagcgcccctccggccggccccagggccgcctcgacgtccgcgtcgccgtccgcgaggccgccgcccgctactacgaccccgcctacccgccgccctacggccagagccagccccagtcccgcgacccctacgcggccccggcgccgtacggctcgggcgggtacgggtatggccagcagcagccgtacgccgcgccgccgtccggctacccggccgcctacggcgccgccgcgccaccgcagcccgccgggtaccctgccgcctacggaggcggcgcgcagccggcgtacggcgccgctcctgcccccgcgtacgggtcggtgagtgaccctgctgcgaagaagaaggggatggggatgggggcggggctggcggtgggcgcggcggcgggggtgctgggcgggctggcgctggcggaaggggcgagctacctggaggacaagatcgaggacgacgtggcggagaaggtggaggacgacctggccggcggcggctacgacgacgacgactactagagaaaacgaaaacgatgggcacctcctgagagattgttgtacacgctggtgctgactagccagcatcttctttgcttttattctggccggatttgttgaataaatacgcgaaacaaattagcaaaaaaaaaaaaaaaaaagcttatcgataccgtcgactgtttaaacacaataaag

SEQ ID NO: 18178 - protein, 289 aa, Triticum aestivum
  peptide (1)..(289): Ceres Seq. ID no. 13595920
  misc_feature (7)..(95): Pfam Name: Pfam Description:  C2 domain
  misc_feature (6)..(287): NCBI GI NO: 34908388 NR Description: P0529E05.20
  misc_feature (6)..(176): NCBI GI NO: 10176862 NR Description: emb|CAB80929
  misc_feature (6)..(176): NCBI GI NO: 30689212 NR Description: C2 domain-containing protein
  misc_feature (6)..(250): NCBI GI NO: 18390752 NR Description: shock protein SRC2 family [Arabidopsis thaliana]
  misc_feature (7)..(262): NCBI GI NO: 7488714 NR Description: shock protein SRC2 - soybean
MGSRYEVEVTVGSARDLKNVNWRNGDLQPYAVLWVDDGPKCSSRVDLDNGESPVWDEKLTVPLPPSTARLEDAVLRIDVVHANAGGGTKPLVGSARLPLRDVLDDAGLGGRASRTLRLKRPSGRPQGRLDVRVAVREAAARYYDPAYPPPYGQSQPQSRDPYAAPAPYGSGGYGYGQQQPYAAPPSGYPAAYGAAAPPQPAGYPAAYGGGAQPAYGAAPAPAYGSVSDPAAKKKGMGMGAGLAVGAAAGVLGGLALAEGASYLEDKIEDDVAEKVEDDLAGGGYDDDDY

SEQ ID NO: 18179 - DNA, 1453 bp, Triticum aestivum
  misc_feature (1)..(1453): Ceres Seq. ID no. 14302764
attcgactcgacgccctcggttcacacacactgatcagctcagctacagcctacagagtacagacccaacccaactccgggagacaacagagcagagcacggcgagaatgctgctgaacccggcctcggaggcgctggtgctcgacagcatcaggcagcacctcatggaggacacggcggcgccggcgccggaggcgaggaggcagcggccggcctactgccgcagcgccagcttcgggagcctggtggccgaccagtggagcgagtcgctcccgttccgcgccgacgactccgacgacatggtcgtctacggcgcgctccgcgacgccttctcctgcggctggctccccgacggctccttcgccgccgtcaagccggagcccctcctgccttccccggactcctgctacgtcggcttcctcgagccggagacgcctccggccacgtccccgggagagagcgaggaggaggccgccgcggcgttcatgggcgaggcggccgcggccgcggcgagggggaagcactaccgcggggtgaggcagcggccgtggggcaagttcgcggcggagatccgggacccggccaagaacggcgcgcgcgtgtggctcggcacctacgacaccgccgaggacgccgccgtggcctacgaccgcgccgcgtaccgcatgcgcggctcccgcgccctcctcaacttcccgctccgcatcggctccgagatcgccgccgcgcacgccgcggccgcggccgccggggacaagcggccttcccccgagccggcgacctcagactcgtcgtcgtcctcctcctcctccgggtccccgaaaagaaggaagaggggcgaggccgcggccgcgtccatggccatggcgctggtgccgccgccctcgcagctgagccggccggcccaggcgtggtaccccgcggcgccggtggagcaggtggccatggcgccgcgcgcgcagcagctggtcagctaggccccgctcgccagcccccgggcgcacgatcggtcgtaaaagcacacaatgcgcaagtgcaatggattcgccagcaagtgcatggacgcgacagcaacaggagcccgcctttcactggtgcacggtgcaaggtggtgatggcaatggagagcgatggcgagcgagcgagcgagcaatcaggcaaagcaaccttggcgacggctccatttggatatttggatgggtcgagccgtcgacaacggaagataagctcggagcaactgggtgctgcaatttggcctggaatgatagttcctcctctctccactgctcggtgcaactcgcccaagtggatcaaagcgaaactgtgccagtatcggatcgtcgtggttccttctgagtcgtagggttatattttgtcactgtcagagtgcgtgtggtaaaaattacaaactcgtgaatcgtgatcgagcataatggaacttgtgaaactttac

SEQ ID NO: 18180 - protein, 324 aa, Triticum aestivum
  peptide (1)..(324): Ceres Seq. ID no. 14302765
  misc_feature (172)..(237): Pfam Name: Pfam Description:  AP2 domain
  misc_feature (33)..(323): NCBI GI NO: 38346167 NR Description: OSJNBa0079A21.14
  misc_feature (36)..(313): NCBI GI NO: 14140141 NR Description: putative AP2-related transcription factor
  misc_feature (36)..(323): NCBI GI NO: 7528276 NR Description: AP2-related transcription factor
  misc_feature (70)..(282): NCBI GI NO: 8809571 NR Description: ethylene-responsive element binding factor
  misc_feature (77)..(282): NCBI GI NO: 7489113 NR Description: DNA binding protein EREBP-2 - common tobacco
  misc_feature (36)..(290): NCBI GI NO: 21264420 NR Description: Ethylene responsive element binding factor 1
  misc_feature (36)..(290): NCBI GI NO: 25350258 NR Description: ethylene responsive element binding factor 1
  misc_feature (152)..(288): NCBI GI NO: 7489123 NR Description: ethylene-responsive transcription factor ERF1 -common tobacco
  misc_feature (58)..(126): NCBI GI NO: 7489123 NR Description: ethylene-responsive transcription factor ERF1 -common tobacco
  misc_feature (69)..(290): NCBI GI NO: 25350257 NR Description: EREBP-2 protein [imported] - Arabidopsis thaliana
STRRPRFTHTDQLSYSLQSTDPTQLRETTEQSTARMLLNPASEALVLDSIRQHLMEDTAAPAPEARRQRPAYCRSASFGSLVADQWSESLPFRADDSDDMVVYGALRDAFSCGWLPDGSFAAVKPEPLLPSPDSCYVGFLEPETPPATSPGESEEEAAAAFMGEAAAAAARGKHYRGVRQRPWGKFAAEIRDPAKNGARVWLGTYDTAEDAAVAYDRAAYRMRGSRALLNFPLRIGSEIAAAHAAAAAAGDKRPSPEPATSDSSSSSSSSGSPKRRKRGEAAAASMAMALVPPPSQLSRPAQAWYPAAPVEQVAMAPRAQQLVS

SEQ ID NO: 18181 - protein, 289 aa, Triticum aestivum
  peptide (1)..(289): Ceres Seq. ID no. 14302766
  misc_feature (137)..(202): Pfam Name: Pfam Description:  AP2 domain
  misc_feature (1)..(288): NCBI GI NO: 38346167 NR Description: OSJNBa0079A21.14
  misc_feature (1)..(278): NCBI GI NO: 14140141 NR Description: putative AP2-related transcription factor
  misc_feature (1)..(288): NCBI GI NO: 7528276 NR Description: AP2-related transcription factor
  misc_feature (35)..(247): NCBI GI NO: 8809571 NR Description: ethylene-responsive element binding factor
  misc_feature (42)..(247): NCBI GI NO: 7489113 NR Description: DNA binding protein EREBP-2 - common tobacco
  misc_feature (1)..(255): NCBI GI NO: 21264420 NR Description: Ethylene responsive element binding factor 1
  misc_feature (1)..(255): NCBI GI NO: 25350258 NR Description: ethylene responsive element binding factor 1
  misc_feature (117)..(253): NCBI GI NO: 7489123 NR Description: ethylene-responsive transcription factor ERF1 -common tobacco
  misc_feature (23)..(91): NCBI GI NO: 7489123 NR Description: ethylene-responsive transcription factor ERF1 -common tobacco
  misc_feature (34)..(255): NCBI GI NO: 25350257 NR Description: EREBP-2 protein [imported] - Arabidopsis thaliana
MLLNPASEALVLDSIRQHLMEDTAAPAPEARRQRPAYCRSASFGSLVADQWSESLPFRADDSDDMVVYGALRDAFSCGWLPDGSFAAVKPEPLLPSPDSCYVGFLEPETPPATSPGESEEEAAAAFMGEAAAAAARGKHYRGVRQRPWGKFAAEIRDPAKNGARVWLGTYDTAEDAAVAYDRAAYRMRGSRALLNFPLRIGSEIAAAHAAAAAAGDKRPSPEPATSDSSSSSSSSGSPKRRKRGEAAAASMAMALVPPPSQLSRPAQAWYPAAPVEQVAMAPRAQQLVS

SEQ ID NO: 18182 - protein, 270 aa, Triticum aestivum
  peptide (1)..(270): Ceres Seq. ID no. 14302767
  misc_feature (118)..(183): Pfam Name: Pfam Description:  AP2 domain
  misc_feature (1)..(269): NCBI GI NO: 38346167 NR Description: OSJNBa0079A21.14
  misc_feature (1)..(259): NCBI GI NO: 14140141 NR Description: putative AP2-related transcription factor
  misc_feature (1)..(269): NCBI GI NO: 7528276 NR Description: AP2-related transcription factor
  misc_feature (16)..(228): NCBI GI NO: 8809571 NR Description: ethylene-responsive element binding factor
  misc_feature (23)..(228): NCBI GI NO: 7489113 NR Description: DNA binding protein EREBP-2 - common tobacco
  misc_feature (1)..(236): NCBI GI NO: 21264420 NR Description: Ethylene responsive element binding factor 1
  misc_feature (1)..(236): NCBI GI NO: 25350258 NR Description: ethylene responsive element binding factor 1
  misc_feature (98)..(234): NCBI GI NO: 7489123 NR Description: ethylene-responsive transcription factor ERF1 -common tobacco
  misc_feature (4)..(72): NCBI GI NO: 7489123 NR Description: ethylene-responsive transcription factor ERF1 -common tobacco
  misc_feature (15)..(236): NCBI GI NO: 25350257 NR Description: EREBP-2 protein [imported] - Arabidopsis thaliana
MEDTAAPAPEARRQRPAYCRSASFGSLVADQWSESLPFRADDSDDMVVYGALRDAFSCGWLPDGSFAAVKPEPLLPSPDSCYVGFLEPETPPATSPGESEEEAAAAFMGEAAAAAARGKHYRGVRQRPWGKFAAEIRDPAKNGARVWLGTYDTAEDAAVAYDRAAYRMRGSRALLNFPLRIGSEIAAAHAAAAAAGDKRPSPEPATSDSSSSSSSSGSPKRRKRGEAAAASMAMALVPPPSQLSRPAQAWYPAAPVEQVAMAPRAQQLVS

SEQ ID NO: 18183 - DNA, 1993 bp, Triticum aestivum
  misc_feature (1)..(1993): Ceres Seq. ID no. 13595900
gctcaaaccctagctaccaatccccgcaattcctcccctggcccaggttcctccgtagctggatgcccccaacctaggcggcggctcggtggcgtgtgtgcgtgcgcggccgccgatggagccgcgcgtgggtaacaagtaccgcctcggccgcaagctcggcagcggctcgttcggggagatctacctcggtactaacgtgcagaccaacgaggaggtcgcgattaagcttgaaaatgtgaagacaaagcatcctcagttgctgtatgagtcaaagttgtacagagtactgcagggcggaactgggatttcaaatgtcaagtggtttggtgttgagggtgactacaatgttcttgttatggatgtgttggggccaagccttgaagatcttttcagcttttgcaacagaaaactgtcgctcaaaactgttctgatgcttgctgatcaaatgatcaaccgagttgaatttatacattcaaagtccttcttgcatcgagatataaagccagacaattttctcatgggccttggaaagagagcaaatcaggtatatatgattgactttggactggcaaagaaatatagggacacgtcaacgcaccagcacattccataccgggagaacaaaaatttgactgggacagctcgatatgcgagtgtaagcacccatctcggaattgaacaaagcagaagggatgacatggagtctcttggatatgtactcatgtacttcttgagaggaagtctcccatggcagggtttaaaagccggtacgaagaaacaaaagtatgagaaaatcagcgaacggaagattgccacttcaattgaggctttgtgtcgtggatacccttctgaatttcagtcattcttccattactgccgcgcactgcgttttgaagacagtccagactatcaatacctgaagagattgttcagagatctttttattcgagagggattccagtttgattatgtttttgactggaccattcttaaataccagcagtcacaaatgaccagtgctccaccacgtgctattgccgctgctgcaggacaaagctcggggatggctccaattgcaagtaataatagactgtcagccaccgaagagggaagaagtgggtggtcagatgatcctacacgacgtcaagttccacctacaggaataaatgcaggcagcttagcgaaacagaagtcaccagttagaccagatgtgtccgcaccaaaggaagctgtgttgtccagttcgacttttttgggtcggtcaggcgtgtcctcaaggcgacctgctgtttgtagtagccgagatttgccaagcagtgaggctgaaccatcgcgtagtcgtgcaccagacgtgagtccagggacgttccagagaaactcagccccacggaggacctcacagacgcttgactactctgaccccaggcacaagtctaacagcaacaactacgagtccactataaggggcatccggggcctaaatttcaatgccaacgataggatccactactagtatcttctggatcctaaaaagcatgtataatatgtgatctgctgaagttaaagtggggagtgaggccatactttccgagctactctcctaccatagtaccatgtgatccacaagctacgtgctggagcggtgaggcagtttactgacgcaaagaaacgggggctggctggcaaaataaagggtctgcgacagccatggccctaaaatagcacgttgggcctatgttttagcctctctgtacaggttttcttttgtgcgttgagatgttgctttcgtacttttcacataatattatgttttaagatatttaccttactgtcatgtctagtatgtttacattggaatgccttgttggcttgagcaggtaaaaaaaaaaaaaaaaaaaaaaaaaaaaaaaaaaaaaaaaaaaaaaaaaagaaaaaaaaaaaaaaaaaagcttatcgataccgtcgacctcgagggggggcccggtaccca

SEQ ID NO: 18184 - protein, 466 aa, Triticum aestivum
  peptide (1)..(466): Ceres Seq. ID no. 13595901
  misc_feature (158)..(466): NCBI GI NO: 20161073 NR Description: putative casein kinase
  misc_feature (1)..(167): NCBI GI NO: 20161073 NR Description: putative casein kinase
  misc_feature (1)..(458): NCBI GI NO: 15218569 NR Description: casein kinase, putative [Arabidopsis thaliana]
  misc_feature (1)..(465): NCBI GI NO: 15236114 NR Description: casein kinase, putative [Arabidopsis thaliana]
  misc_feature (1)..(427): NCBI GI NO: 22327902 NR Description: casein kinase, putative [Arabidopsis thaliana]
  misc_feature (1)..(384): NCBI GI NO: 549973 NR Description: casein kinase I-like protein
  misc_feature (40)..(458): NCBI GI NO: 6635385 NR Description: casein kinase I-like protein [Brassica oleracea]
  misc_feature (1)..(398): NCBI GI NO: 15224781 NR Description: casein kinase, putative [Arabidopsis thaliana]
  misc_feature (1)..(454): NCBI GI NO: 30678728 NR Description: protein kinase (ADK1) [Arabidopsis thaliana]
  misc_feature (1)..(410): NCBI GI NO: 15240091 NR Description: casein kinase, putative [Arabidopsis thaliana]
MEPRVGNKYRLGRKLGSGSFGEIYLGTNVQTNEEVAIKLENVKTKHPQLLYESKLYRVLQGGTGISNVKWFGVEGDYNVLVMDVLGPSLEDLFSFCNRKLSLKTVLMLADQMINRVEFIHSKSFLHRDIKPDNFLMGLGKRANQVYMIDFGLAKKYRDTSTHQHIPYRENKNLTGTARYASVSTHLGIEQSRRDDMESLGYVLMYFLRGSLPWQGLKAGTKKQKYEKISERKIATSIEALCRGYPSEFQSFFHYCRALRFEDSPDYQYLKRLFRDLFIREGFQFDYVFDWTILKYQQSQMTSAPPRAIAAAAGQSSGMAPIASNNRLSATEEGRSGWSDDPTRRQVPPTGINAGSLAKQKSPVRPDVSAPKEAVLSSSTFLGRSGVSSRRPAVCSSRDLPSSEAEPSRSRAPDVSPGTFQRNSAPRRTSQTLDYSDPRHKSNSNNYESTIRGIRGLNFNANDRIHY

SEQ ID NO: 18185 - protein, 385 aa, Triticum aestivum
  peptide (1)..(385): Ceres Seq. ID no. 13595902
  misc_feature (77)..(385): NCBI GI NO: 20161073 NR Description: putative casein kinase
  misc_feature (1)..(86): NCBI GI NO: 20161073 NR Description: putative casein kinase
  misc_feature (1)..(377): NCBI GI NO: 15218569 NR Description: casein kinase, putative [Arabidopsis thaliana]
  misc_feature (1)..(384): NCBI GI NO: 15236114 NR Description: casein kinase, putative [Arabidopsis thaliana]
  misc_feature (1)..(346): NCBI GI NO: 22327902 NR Description: casein kinase, putative [Arabidopsis thaliana]
  misc_feature (1)..(303): NCBI GI NO: 549973 NR Description: casein kinase I-like protein
  misc_feature (1)..(377): NCBI GI NO: 6635385 NR Description: casein kinase I-like protein [Brassica oleracea]
  misc_feature (1)..(317): NCBI GI NO: 15224781 NR Description: casein kinase, putative [Arabidopsis thaliana]
  misc_feature (1)..(373): NCBI GI NO: 30678728 NR Description: protein kinase (ADK1) [Arabidopsis thaliana]
  misc_feature (1)..(329): NCBI GI NO: 15240091 NR Description: casein kinase, putative [Arabidopsis thaliana]
MDVLGPSLEDLFSFCNRKLSLKTVLMLADQMINRVEFIHSKSFLHRDIKPDNFLMGLGKRANQVYMIDFGLAKKYRDTSTHQHIPYRENKNLTGTARYASVSTHLGIEQSRRDDMESLGYVLMYFLRGSLPWQGLKAGTKKQKYEKISERKIATSIEALCRGYPSEFQSFFHYCRALRFEDSPDYQYLKRLFRDLFIREGFQFDYVFDWTILKYQQSQMTSAPPRAIAAAAGQSSGMAPIASNNRLSATEEGRSGWSDDPTRRQVPPTGINAGSLAKQKSPVRPDVSAPKEAVLSSSTFLGRSGVSSRRPAVCSSRDLPSSEAEPSRSRAPDVSPGTFQRNSAPRRTSQTLDYSDPRHKSNSNNYESTIRGIRGLNFNANDRIHY

SEQ ID NO: 18186 - protein, 360 aa, Triticum aestivum
  peptide (1)..(360): Ceres Seq. ID no. 13595903
  misc_feature (52)..(360): NCBI GI NO: 20161073 NR Description: putative casein kinase
  misc_feature (1)..(61): NCBI GI NO: 20161073 NR Description: putative casein kinase
  misc_feature (1)..(352): NCBI GI NO: 15218569 NR Description: casein kinase, putative [Arabidopsis thaliana]
  misc_feature (1)..(359): NCBI GI NO: 15236114 NR Description: casein kinase, putative [Arabidopsis thaliana]
  misc_feature (1)..(321): NCBI GI NO: 22327902 NR Description: casein kinase, putative [Arabidopsis thaliana]
  misc_feature (1)..(278): NCBI GI NO: 549973 NR Description: casein kinase I-like protein
  misc_feature (1)..(352): NCBI GI NO: 6635385 NR Description: casein kinase I-like protein [Brassica oleracea]
  misc_feature (1)..(292): NCBI GI NO: 15224781 NR Description: casein kinase, putative [Arabidopsis thaliana]
  misc_feature (1)..(348): NCBI GI NO: 30678728 NR Description: protein kinase (ADK1) [Arabidopsis thaliana]
  misc_feature (1)..(304): NCBI GI NO: 15240091 NR Description: casein kinase, putative [Arabidopsis thaliana]
MLADQMINRVEFIHSKSFLHRDIKPDNFLMGLGKRANQVYMIDFGLAKKYRDTSTHQHIPYRENKNLTGTARYASVSTHLGIEQSRRDDMESLGYVLMYFLRGSLPWQGLKAGTKKQKYEKISERKIATSIEALCRGYPSEFQSFFHYCRALRFEDSPDYQYLKRLFRDLFIREGFQFDYVFDWTILKYQQSQMTSAPPRAIAAAAGQSSGMAPIASNNRLSATEEGRSGWSDDPTRRQVPPTGINAGSLAKQKSPVRPDVSAPKEAVLSSSTFLGRSGVSSRRPAVCSSRDLPSSEAEPSRSRAPDVSPGTFQRNSAPRRTSQTLDYSDPRHKSNSNNYESTIRGIRGLNFNANDRIHY

SEQ ID NO: 18187 - DNA, 1401 bp, Triticum aestivum
  misc_feature (1)..(1401): Ceres Seq. ID no. 13585143
aaagctgagagcagttcgtcaataaataagttctccagaaaccccgaaaccccgcgaccaccgcctcgccgcttacacgaccgagtgcgccgacggacgacacctccactaccgcctgtcgcccctcgccgcgcgcgaccgacgcccaccgcgttacgatggtgaccgacgcggccgcgctggcggtcgtgaaggccgcgcgccccgtcttccgcggcgcccacgacggcgtggcgttcgccgcaaacgccgccttcctcgccgccggatactccttatgcgccgtcggccctgccgcgctcgccgaccccctccccgcagttgacgaggaggtgggaattgatgggtggaacactatggacaattgctatgcctttctgtactccaaggaggaggagggcaagaagaagcgcattttagtgaaatgtctagtgattgatgacttccttgctattgatgcgctggatcttgaggcacaacacaaggaaccctgcaatgttcagataaatgtgaaggatttcttctctgaagaacagcccaagaattataaggatatgtacaagaattttgcgggcttcatcaatacccttaactcaagcttgttagttgaattggatggtaagaatgctgctgctgctgccgcccagaagcctgatcttgagggcagttcatcaataaacagttctgaaaatgttctgccggatacaaggactactgaacctgctggcctgatatatcctccagtagctccgtttggtcatgatgacaccttccctgctcctggtgctggcttctaccctcacagtggtgggccgggtggtagtatgcacgttggcccaaatgatccacgcttctttccttcaaatccttttcctgctccttttggtggccctgggagtgttccacctggtgtccgttacgatccaatcggcccgcccgatgttccaggatttgaaccatctcgctttgtgaggcgttcgaggcatccaggtggaagcactcacccagacctcgagttcttccagcaaggcccagacttctgagactcggcttcatgccacctgcaccctgcgctgaatgactctgctttgtttgtgctgcgctcatgaactttttttcagtagaccctgcttgggaagttggaaacatgaatgtaaacttttgtatttaccttccagacaatgctttgtgacggttgactgtacaattgtatatagacctgtcttcgtatccctctgtgcttcttacctaaactattggtgcgactaccaacatctgcaatgtctgcctcgtagttatccagtagccccaaaatttgctcgcagtttctccgtatgcagtatcaccgcaaaatgttcctctgtatctacgggcgctccaagcgaaatcttgttttaatat

SEQ ID NO: 18188 - protein, 294 aa, Triticum aestivum
  peptide (1)..(294): Ceres Seq. ID no. 13585144
  misc_feature (1)..(292): NCBI GI NO: 34898580 NR Description: P0534A03.16
  misc_feature (1)..(294): NCBI GI NO: 15232382 NR Description: proteasome inhibitor, putative
  misc_feature (231)..(294): NCBI GI NO: 7489377 NR Description: hypothetical protein - barley (fragment)
  misc_feature (1)..(153): NCBI GI NO: 15221211 NR Description: hypothetical protein [Arabidopsis thaliana]
MVTDAAALAVVKAARPVFRGAHDGVAFAANAAFLAAGYSLCAVGPAALADPLPAVDEEVGIDGWNTMDNCYAFLYSKEEEGKKKRILVKCLVIDDFLAIDALDLEAQHKEPCNVQINVKDFFSEEQPKNYKDMYKNFAGFINTLNSSLLVELDGKNAAAAAAQKPDLEGSSSINSSENVLPDTRTTEPAGLIYPPVAPFGHDDTFPAPGAGFYPHSGGPGGSMHVGPNDPRFFPSNPFPAPFGGPGSVPPGVRYDPIGPPDVPGFEPSRFVRRSRHPGGSTHPDLEFFQQGPDF

SEQ ID NO: 18189 - protein, 228 aa, Triticum aestivum
  peptide (1)..(228): Ceres Seq. ID no. 13585145
  misc_feature (1)..(226): NCBI GI NO: 34898580 NR Description: P0534A03.16
  misc_feature (1)..(228): NCBI GI NO: 15232382 NR Description: proteasome inhibitor, putative
  misc_feature (165)..(228): NCBI GI NO: 7489377 NR Description: hypothetical protein - barley (fragment)
  misc_feature (1)..(87): NCBI GI NO: 15221211 NR Description: hypothetical protein [Arabidopsis thaliana]
MDNCYAFLYSKEEEGKKKRILVKCLVIDDFLAIDALDLEAQHKEPCNVQINVKDFFSEEQPKNYKDMYKNFAGFINTLNSSLLVELDGKNAAAAAAQKPDLEGSSSINSSENVLPDTRTTEPAGLIYPPVAPFGHDDTFPAPGAGFYPHSGGPGGSMHVGPNDPRFFPSNPFPAPFGGPGSVPPGVRYDPIGPPDVPGFEPSRFVRRSRHPGGSTHPDLEFFQQGPDF

SEQ ID NO: 18190 - protein, 162 aa, Triticum aestivum
  peptide (1)..(162): Ceres Seq. ID no. 13585146
  misc_feature (1)..(160): NCBI GI NO: 34898580 NR Description: P0534A03.16
  misc_feature (1)..(162): NCBI GI NO: 15232382 NR Description: proteasome inhibitor, putative
  misc_feature (99)..(162): NCBI GI NO: 7489377 NR Description: hypothetical protein - barley (fragment)
  misc_feature (1)..(21): NCBI GI NO: 15221211 NR Description: hypothetical protein [Arabidopsis thaliana]
MYKNFAGFINTLNSSLLVELDGKNAAAAAAQKPDLEGSSSINSSENVLPDTRTTEPAGLIYPPVAPFGHDDTFPAPGAGFYPHSGGPGGSMHVGPNDPRFFPSNPFPAPFGGPGSVPPGVRYDPIGPPDVPGFEPSRFVRRSRHPGGSTHPDLEFFQQGPDF

SEQ ID NO: 18191 - DNA, 1474 bp, Triticum aestivum
  misc_feature (1)..(1474): Ceres Seq. ID no. 13654431
gttagaaaatttccagccctgcccctccccggcgccggcgaccaccgccgcagccgccacctcctccaggagcgccggcgtcgcccgtccgcacccggcggcggcggcggaggcagcgatggcgaggcaagaggccgtgggggccgccacgggggtggacttccacctgccggacgagatcctggccgtgatccccactgacccgtacgagcagctggacgtcgcccgcaagatcacctccatggccatcgcgtcccgcgtctcccgcctcgaggccgacgtcgcgcgcctccgcagggacctcgccgaccgcgaccgcggcgaggccgacctccgcgcccgcctcgccgactccgacgcccgcctcctcgccgcgctcgacgagaacgcgaagctggtgaaggagagggacacgctcgccctgacggccaagaagctgtcgaggaacttggcaaagttagaggcatttaagaagcagttgatgaaatcgctgagtgaagataatttattgcaattgtcagaaacaggtgaagatcgtgatgtagatgcagaaaataatgggaccgctcgaattccttcctggaaagatgaagtttcaagcagtcacacctcttcaaatacttccagcagatccacaatcaccgaatcagcccaaggataccagttctcaatcacaccatatgtagccccccaaataactcctggttcaacaccaattatttcatcctctagtggttccccactagcatattcaactggtccatccactccgaagttctattctggtccaacatcgcctacaagatcacgttctgaagaccaatcggcattttcatcatggaatggatcaagtcatcagtattcagcccctgtctctcctcaacgccgctcatttgcagggcgacctcgtatagatggaaaggaattcttccgacaagcacggacacgactatcttatgagcaatttggagcattcttggcaaatattaaggaatttaatgcacagaaacaatcgcgagaggacaccttgtcgaaagcagaggagatttttggaacagagcacaaagacttgtacatttctttccagaatatgcttaaccgcaaccaatcgtgaacctgtcataggctgccgtatttcttcttttgaacaagctggtttagttcatcggtatgtctcttcggtttaaacgacggtaccattctgctggggtaataattcctatgccaggccatctgtttccaagagagcgtgtatcgttggagttctcgttgatcacaagatcatctccttagaaatctgtgcataggccattgtagttttggtgtggccatcctcaataacatgatgtaaatgggtatggtcatgcatgcattcaacaaggaaaagtttcttttctttttgcgaacaagtggaagttgagactgtcagatatattggtctgtgtaattgacttgtgaattgaagctcgttttc

SEQ ID NO: 18192 - protein, 370 aa, Triticum aestivum
  peptide (1)..(370): Ceres Seq. ID no. 15219652
  misc_feature (40)..(271): NCBI GI NO: 38344261 NR Description: OSJNBa0008M17.14
  misc_feature (50)..(365): NCBI GI NO: 15222835 NR Description: expressed protein [Arabidopsis thaliana]
  misc_feature (52)..(368): NCBI GI NO: 30684901 NR Description: expressed protein [Arabidopsis thaliana]
  misc_feature (94)..(370): NCBI GI NO: 38344261 NR Description: OSJNBa0008M17.14
  misc_feature (45)..(368): NCBI GI NO: 18414476 NR Description: expressed protein [Arabidopsis thaliana]
  misc_feature (41)..(340): NCBI GI NO: 7485048 NR Description: hypothetical protein - Arabidopsis thaliana
  misc_feature (50)..(300): NCBI GI NO: 25404089 NR Description: hypothetical protein T6H22.12
  misc_feature (30)..(295): NCBI GI NO: 34909876 NR Description: B1143G03.2
  misc_feature (61)..(168): NCBI GI NO: 23613663 NR Description: hypothetical protein, conserved
  misc_feature (300)..(368): NCBI GI NO: 23613663 NR Description: hypothetical protein, conserved
LENFQPCPSPAPATTAAAATSSRSAGVARPHPAAAAEAAMARQEAVGAATGVDFHLPDEILAVIPTDPYEQLDVARKITSMAIASRVSRLEADVARLRRDLADRDRGEADLRARLADSDARLLAALDENAKLVKERDTLALTAKKLSRNLAKLEAFKKQLMKSLSEDNLLQLSETGEDRDVDAENNGTARIPSWKDEVSSSHTSSNTSSRSTITESAQGYQFSITPYVAPQITPGSTPIISSSSGSPLAYSTGPSTPKFYSGPTSPTRSRSEDQSAFSSWNGSSHQYSAPVSPQRRSFAGRPRIDGKEFFRQARTRLSYEQFGAFLANIKEFNAQKQSREDTLSKAEEIFGTEHKDLYISFQNMLNRNQS

SEQ ID NO: 18193 - protein, 331 aa, Triticum aestivum
  peptide (1)..(331): Ceres Seq. ID no. 15219653
  misc_feature (1)..(232): NCBI GI NO: 38344261 NR Description: OSJNBa0008M17.14
  misc_feature (11)..(326): NCBI GI NO: 15222835 NR Description: expressed protein [Arabidopsis thaliana]
  misc_feature (13)..(329): NCBI GI NO: 30684901 NR Description: expressed protein [Arabidopsis thaliana]
  misc_feature (55)..(331): NCBI GI NO: 38344261 NR Description: OSJNBa0008M17.14
  misc_feature (6)..(329): NCBI GI NO: 18414476 NR Description: expressed protein [Arabidopsis thaliana]
  misc_feature (2)..(301): NCBI GI NO: 7485048 NR Description: hypothetical protein - Arabidopsis thaliana
  misc_feature (11)..(261): NCBI GI NO: 25404089 NR Description: hypothetical protein T6H22.12
  misc_feature (1)..(256): NCBI GI NO: 34909876 NR Description: B1143G03.2
  misc_feature (22)..(129): NCBI GI NO: 23613663 NR Description: hypothetical protein, conserved
  misc_feature (261)..(329): NCBI GI NO: 23613663 NR Description: hypothetical protein, conserved
MARQEAVGAATGVDFHLPDEILAVIPTDPYEQLDVARKITSMAIASRVSRLEADVARLRRDLADRDRGEADLRARLADSDARLLAALDENAKLVKERDTLALTAKKLSRNLAKLEAFKKQLMKSLSEDNLLQLSETGEDRDVDAENNGTARIPSWKDEVSSSHTSSNTSSRSTITESAQGYQFSITPYVAPQITPGSTPIISSSSGSPLAYSTGPSTPKFYSGPTSPTRSRSEDQSAFSSWNGSSHQYSAPVSPQRRSFAGRPRIDGKEFFRQARTRLSYEQFGAFLANIKEFNAQKQSREDTLSKAEEIFGTEHKDLYISFQNMLNRNQS

SEQ ID NO: 18194 - protein, 290 aa, Triticum aestivum
  peptide (1)..(290): Ceres Seq. ID no. 15219654
  misc_feature (1)..(191): NCBI GI NO: 38344261 NR Description: OSJNBa0008M17.14
  misc_feature (1)..(285): NCBI GI NO: 15222835 NR Description: expressed protein [Arabidopsis thaliana]
  misc_feature (1)..(288): NCBI GI NO: 30684901 NR Description: expressed protein [Arabidopsis thaliana]
  misc_feature (14)..(290): NCBI GI NO: 38344261 NR Description: OSJNBa0008M17.14
  misc_feature (1)..(288): NCBI GI NO: 18414476 NR Description: expressed protein [Arabidopsis thaliana]
  misc_feature (1)..(260): NCBI GI NO: 7485048 NR Description: hypothetical protein - Arabidopsis thaliana
  misc_feature (1)..(220): NCBI GI NO: 25404089 NR Description: hypothetical protein T6H22.12
  misc_feature (1)..(215): NCBI GI NO: 34909876 NR Description: B1143G03.2
  misc_feature (1)..(88): NCBI GI NO: 23613663 NR Description: hypothetical protein, conserved
  misc_feature (220)..(288): NCBI GI NO: 23613663 NR Description: hypothetical protein, conserved
MAIASRVSRLEADVARLRRDLADRDRGEADLRARLADSDARLLAALDENAKLVKERDTLALTAKKLSRNLAKLEAFKKQLMKSLSEDNLLQLSETGEDRDVDAENNGTARIPSWKDEVSSSHTSSNTSSRSTITESAQGYQFSITPYVAPQITPGSTPIISSSSGSPLAYSTGPSTPKFYSGPTSPTRSRSEDQSAFSSWNGSSHQYSAPVSPQRRSFAGRPRIDGKEFFRQARTRLSYEQFGAFLANIKEFNAQKQSREDTLSKAEEIFGTEHKDLYISFQNMLNRNQS

SEQ ID NO: 18195 - DNA, 1314 bp, Triticum aestivum
  misc_feature (1)..(1314): Ceres Seq. ID no. 13595922
aaaaaccggcagcgcgcgttcttgctcgggtctcgtctcggaagaaagattccagcaccgagagctcgaggccgacgactcaccttttggaaaggcggggttcttctgaggaccttgcatctccagtagatcgggcgcgtccactgttcccaggaccagagcatcgcacttggcaaagcagaggagaagatggacgctcgcggcggagacgcatcggccattgccctgctgctgtgcgcttgctttctcaccgcccttgcatgtgacagcaatggtgccaagtttgcgtacagcggtcctcttggccccgatcactgggggggattggaccccaacttcacgcgctgcgccatggggacgtaccagtctccggttgatatcaagaccagcgacgtggtttacaacccgatgctggggcctcttcacagggaatacaccgctgcgaatgctaccctcgtagacaacatcttcaacatcgcgctgcgatgcgaggatgctgctgggacggtgcagatcgacggggtgaagtacaagctggacaatatccattggcactctccttcagagcacaccatcaacggcgagaggtttgcggtggagcagcacatggttcacttcagtgacgacggcaacatatccgttgtgtcgatcctgtaccggctcggcaggccagaccctttcctcatgcagctgcaggataagctatcggagctctacgtggaggcctgcagggccgagaaaggtgctccgatccccaccggagtagtaaacatgtggcagctgcggcgttacgccaacatgtactaccggtacgtcgggtcgctgaccacgccgccgtgcaccgagaacatcatctggaacatccacggcagggtgagggagatggcgttggggcaggctgccgccctgatcgcgcccctggaggaaggctaccggcgcaacaacaggccgacgcagccgctcaacggccgcaccgtgcagttctaccgcaggttctggaagaagaaggggagcgggaagccgtaagggctggtcgatgcgcctcgatcgatgtttggagatgatgatgatgctgcagtctctctcgtctttgctctcggttcaggacaaagttatagtagtcgtttatctatctgcaagtcgtgttagcatataggtctgctttataggtttgctttatcgcttatcggtcttactctgaatttggttaagtgttaggtctttcgtgtctgtaaatgcgtccgggagggttgatgtgatcgatccttcttttgtctacaaaaaaagttaagctaatcaagaaagtttcactcc

SEQ ID NO: 18196 - protein, 278 aa, Triticum aestivum
  peptide (1)..(278): Ceres Seq. ID no. 13595923
  misc_feature (39)..(267): Pfam Name: Pfam Description:  Eukaryotic-type carbonic anhydrase
  misc_feature (1)..(278): NCBI GI NO: 38346319 NR Description: OJ000126_13.1
  misc_feature (11)..(277): NCBI GI NO: 30693687 NR Description: carbonic anhydrase (CAH1) [Arabidopsis thaliana]
  misc_feature (11)..(229): NCBI GI NO: 30693691 NR Description: carbonic anhydrase (CAH1) [Arabidopsis thaliana]
  misc_feature (39)..(267): NCBI GI NO: 15223122 NR Description: storage protein -related [Arabidopsis thaliana]
  misc_feature (26)..(267): NCBI GI NO: 25291473 NR Description: probable carbonic anhydrase
  misc_feature (6)..(266): NCBI GI NO: 34904986 NR Description: putative carbonic anhydrase precursor
  misc_feature (11)..(268): NCBI GI NO: 7271963 NR Description: dioscorin B [Dioscorea alata]
  misc_feature (13)..(273): NCBI GI NO: 29468280 NR Description: nectarin III
  misc_feature (26)..(273): NCBI GI NO: 15223097 NR Description: carbonic anhydrase -related [Arabidopsis thaliana]
  misc_feature (9)..(266): NCBI GI NO: 37806288 NR Description: putative dioscorin
MDARGGDASAIALLLCACFLTALACDSNGAKFAYSGPLGPDHWGGLDPNFTRCAMGTYQSPVDIKTSDVVYNPMLGPLHREYTAANATLVDNIFNIALRCEDAAGTVQIDGVKYKLDNIHWHSPSEHTINGERFAVEQHMVHFSDDGNISVVSILYRLGRPDPFLMQLQDKLSELYVEACRAEKGAPIPTGVVNMWQLRRYANMYYRYVGSLTTPPCTENIIWNIHGRVREMALGQAAALIAPLEEGYRRNNRPTQPLNGRTVQFYRRFWKKKGSGKP

SEQ ID NO: 18197 - protein, 224 aa, Triticum aestivum
  peptide (1)..(224): Ceres Seq. ID no. 13595924
  misc_feature (1)..(213): Pfam Name: Pfam Description:  Eukaryotic-type carbonic anhydrase
  misc_feature (1)..(224): NCBI GI NO: 38346319 NR Description: OJ000126_13.1
  misc_feature (1)..(223): NCBI GI NO: 30693687 NR Description: carbonic anhydrase (CAH1) [Arabidopsis thaliana]
  misc_feature (1)..(175): NCBI GI NO: 30693691 NR Description: carbonic anhydrase (CAH1) [Arabidopsis thaliana]
  misc_feature (1)..(213): NCBI GI NO: 15223122 NR Description: storage protein -related [Arabidopsis thaliana]
  misc_feature (1)..(213): NCBI GI NO: 25291473 NR Description: probable carbonic anhydrase
  misc_feature (1)..(212): NCBI GI NO: 34904986 NR Description: putative carbonic anhydrase precursor
  misc_feature (1)..(214): NCBI GI NO: 7271963 NR Description: dioscorin B [Dioscorea alata]
  misc_feature (1)..(219): NCBI GI NO: 29468280 NR Description: nectarin III
  misc_feature (1)..(219): NCBI GI NO: 15223097 NR Description: carbonic anhydrase -related [Arabidopsis thaliana]
  misc_feature (1)..(212): NCBI GI NO: 37806288 NR Description: putative dioscorin
MGTYQSPVDIKTSDVVYNPMLGPLHREYTAANATLVDNIFNIALRCEDAAGTVQIDGVKYKLDNIHWHSPSEHTINGERFAVEQHMVHFSDDGNISVVSILYRLGRPDPFLMQLQDKLSELYVEACRAEKGAPIPTGVVNMWQLRRYANMYYRYVGSLTTPPCTENIIWNIHGRVREMALGQAAALIAPLEEGYRRNNRPTQPLNGRTVQFYRRFWKKKGSGKP

SEQ ID NO: 18198 - protein, 205 aa, Triticum aestivum
  peptide (1)..(205): Ceres Seq. ID no. 13595925
  misc_feature (1)..(194): Pfam Name: Pfam Description:  Eukaryotic-type carbonic anhydrase
  misc_feature (1)..(205): NCBI GI NO: 38346319 NR Description: OJ000126_13.1
  misc_feature (1)..(204): NCBI GI NO: 30693687 NR Description: carbonic anhydrase (CAH1) [Arabidopsis thaliana]
  misc_feature (1)..(156): NCBI GI NO: 30693691 NR Description: carbonic anhydrase (CAH1) [Arabidopsis thaliana]
  misc_feature (1)..(194): NCBI GI NO: 15223122 NR Description: storage protein -related [Arabidopsis thaliana]
  misc_feature (1)..(194): NCBI GI NO: 25291473 NR Description: probable carbonic anhydrase
  misc_feature (1)..(193): NCBI GI NO: 34904986 NR Description: putative carbonic anhydrase precursor
  misc_feature (1)..(195): NCBI GI NO: 7271963 NR Description: dioscorin B [Dioscorea alata]
  misc_feature (1)..(200): NCBI GI NO: 29468280 NR Description: nectarin III
  misc_feature (1)..(200): NCBI GI NO: 15223097 NR Description: carbonic anhydrase -related [Arabidopsis thaliana]
  misc_feature (1)..(193): NCBI GI NO: 37806288 NR Description: putative dioscorin
MLGPLHREYTAANATLVDNIFNIALRCEDAAGTVQIDGVKYKLDNIHWHSPSEHTINGERFAVEQHMVHFSDDGNISVVSILYRLGRPDPFLMQLQDKLSELYVEACRAEKGAPIPTGVVNMWQLRRYANMYYRYVGSLTTPPCTENIIWNIHGRVREMALGQAAALIAPLEEGYRRNNRPTQPLNGRTVQFYRRFWKKKGSGKP

SEQ ID NO: 18199 - DNA, 2068 bp, Triticum aestivum
  misc_feature (1)..(2068): Ceres Seq. ID no. 14303297
accaaaccagcacacgtcaacggaacagcttagcaaaatccccaccaaggtgtagaatattccccaaaaccccacgtcccctccctctgccgccgctcccactccaccagtgtgccacccggatcgatcgatcgattgacagcgatggacacccacatcggctccgtcgacgggccgtcgccggcggcggtgaacggcgcggtcggctgcccggcgtccgcgccggggtgcccgatcatgtcctcccaccccgtggtcttcgccgtgcccggggacttcaacctcacgctgctcgaccacctcgtcgacgagcccgggctgcgcctcgtcggctgctgcaacgagctcaacgctggctacgcggccgacggctacgcgcgggcccgcggcgtcggcgcctgcgcggtcaccttcaccgtcggcggcctcagcgtgctcaacgccatcgccggcgcctacagcgagaacctgcccgtcatctgcatcgccggcgggcccaactccaacgactacggcaccaaccgcatcctccaccacaccatcggcatcccggacttctcgcaggagctgcgctgcttccagaccgtcacctgccaccaggcggtggtgaccaacctggacgacgcgcacgagcagatcgacacggccatcgccacggcgctcagggagagcaagccggtgtacctcagcatcagctgcaacctccccgggctacctcaccccaccttcacccgtgacccagtccctttcttcctcgcccccaagatgagcaacaagatggggctcgaggctgcagtggaggcaaccgtcgagttcctgaacaaggcggtgaagccagtgcttgtcgccggccccaaactgcgcgtggccaaggcggggaaggccttcgtcgaccttgtggacgccagtggctatgcctatgctataatgccatcggccaagggctttgtgccagagacgcacccccacttcctcggcacctactggggcgccgtcagcacggccttctgcgccgagatcgtcgagtcggccgacgcctacctcttcgcaggccccatcttcaacgactacagctctgttggctactcgttcctgctcaagaaggacaaggccatcatcgtgcagcctgagcgtgtcatcgtcgggaacggcccggcattcggctgcgtcatgatgaaggagtacctgtctgcattggccaagcgggttcagaagaacaccaccgcctacgagaactacaagaggatcttcgtgcctgagggccatccgctgaagggcgaggcgaacgagccgctgcgtgtcaatgtgctcttcaagcacatccaggacatgctgacgggtgatagtgcagtgctcgctgagaccggtgactcctggttcaactgccagaagctcaagctgcccgagggctgcgggtatgaattccaaatgcagtatggctcgattggatggtcagtgggtgcattgctcgggtacgcgcaaggggcgagtgacaagcgtgtcatagcctgcattggtgatgggagcttccaggtgacagcacaggatgtgtcaactatgctgcggtgcgaacagaacagcataatcttcctgatcaacaatggcgggtacacgatcgaggtggagatccacgacgggccttacaatgtcatcaagaactggaactacaccgcccttgtggaggccatccacaacggggagggcaaatgctggactgccaaggtgaagtgcgaggaggagctgacggcggcgatagagacggcgctgggggagaagaaggactctctgtgcttcatcgaggtgatcgcgcacaaggacgacaccagcaaagagcttctggaatggggctccagggtctctgctgccaactccaggccacccaacccccagtagaccaagcacgcctgcatcactagtagtcgcatccagcagcacgttgccatcaaataatgttgaacagtttatctttgctcttctgttatgttcttagttttgtgcctactagttacttgtgagctgtggccatcgcctgtgttctatcctgccaatgctaagaagatcatgagat

SEQ ID NO: 18200 - protein, 582 aa, Triticum aestivum
  peptide (1)..(582): Ceres Seq. ID no. 14303298
  misc_feature (217)..(366): Pfam Name: Pfam Description:  Thiamine pyrophosphate enzyme, central domain
  misc_feature (38)..(582): NCBI GI NO: 19851522 NR Description: pyruvate decarboxylase [Zea mays]
  misc_feature (1)..(36): NCBI GI NO: 19851522 NR Description: pyruvate decarboxylase [Zea mays]
  misc_feature (38)..(582): NCBI GI NO: 19851524 NR Description: pyruvate decarboxylase [Zea mays]
  misc_feature (1)..(36): NCBI GI NO: 19851524 NR Description: pyruvate decarboxylase [Zea mays]
  misc_feature (11)..(582): NCBI GI NO: 1706328 NR Description: Pyruvate decarboxylase isozyme 2 (PDC)
  misc_feature (1)..(43): NCBI GI NO: 1706328 NR Description: Pyruvate decarboxylase isozyme 2 (PDC)
  misc_feature (38)..(582): NCBI GI NO: 24745919 NR Description: pyruvate decarboxylase [Solanum tuberosum]
  misc_feature (38)..(582): NCBI GI NO: 29373077 NR Description: pyruvate decarboxylase 1 [Lotus corniculatus]
  misc_feature (38)..(582): NCBI GI NO: 10732644 NR Description: pyruvate decarboxylase 1 [Vitis vinifera]
  misc_feature (38)..(582): NCBI GI NO: 10121330 NR Description: pyruvate decarboxylase [Fragaria x ananassa]
MDTHIGSVDGPSPAAVNGAVGCPASAPGCPIMSSHPVVFAVPGDFNLTLLDHLVDEPGLRLVGCCNELNAGYAADGYARARGVGACAVTFTVGGLSVLNAIAGAYSENLPVICIAGGPNSNDYGTNRILHHTIGIPDFSQELRCFQTVTCHQAVVTNLDDAHEQIDTAIATALRESKPVYLSISCNLPGLPHPTFTRDPVPFFLAPKMSNKMGLEAAVEATVEFLNKAVKPVLVAGPKLRVAKAGKAFVDLVDASGYAYAIMPSAKGFVPETHPHFLGTYWGAVSTAFCAEIVESADAYLFAGPIFNDYSSVGYSFLLKKDKAIIVQPERVIVGNGPAFGCVMMKEYLSALAKRVQKNTTAYENYKRIFVPEGHPLKGEANEPLRVNVLFKHIQDMLTGDSAVLAETGDSWFNCQKLKLPEGCGYEFQMQYGSIGWSVGALLGYAQGASDKRVIACIGDGSFQVTAQDVSTMLRCEQNSIIFLINNGGYTIEVEIHDGPYNVIKNWNYTALVEAIHNGEGKCWTAKVKCEEELTAAIETALGEKKDSLCFIEVIAHKDDTSKELLEWGSRVSAANSRPPNPQ

SEQ ID NO: 18201 - protein, 551 aa, Triticum aestivum
  peptide (1)..(551): Ceres Seq. ID no. 14303299
  misc_feature (186)..(335): Pfam Name: Pfam Description:  Thiamine pyrophosphate enzyme, central domain
  misc_feature (7)..(551): NCBI GI NO: 19851522 NR Description: pyruvate decarboxylase [Zea mays]
  misc_feature (7)..(551): NCBI GI NO: 19851524 NR Description: pyruvate decarboxylase [Zea mays]
  misc_feature (1)..(551): NCBI GI NO: 1706328 NR Description: Pyruvate decarboxylase isozyme 2 (PDC)
  misc_feature (1)..(12): NCBI GI NO: 1706328 NR Description: Pyruvate decarboxylase isozyme 2 (PDC)
  misc_feature (7)..(551): NCBI GI NO: 24745919 NR Description: pyruvate decarboxylase [Solanum tuberosum]
  misc_feature (7)..(551): NCBI GI NO: 29373077 NR Description: pyruvate decarboxylase 1 [Lotus corniculatus]
  misc_feature (7)..(551): NCBI GI NO: 10732644 NR Description: pyruvate decarboxylase 1 [Vitis vinifera]
  misc_feature (7)..(551): NCBI GI NO: 10121330 NR Description: pyruvate decarboxylase [Fragaria x ananassa]
  misc_feature (7)..(551): NCBI GI NO: 3970823 NR Description: pyruvate decarboxylase [Zea mays]
  misc_feature (7)..(551): NCBI GI NO: 118390 NR Description: Pyruvate decarboxylase isozyme 1 (PDC)
MSSHPVVFAVPGDFNLTLLDHLVDEPGLRLVGCCNELNAGYAADGYARARGVGACAVTFTVGGLSVLNAIAGAYSENLPVICIAGGPNSNDYGTNRILHHTIGIPDFSQELRCFQTVTCHQAVVTNLDDAHEQIDTAIATALRESKPVYLSISCNLPGLPHPTFTRDPVPFFLAPKMSNKMGLEAAVEATVEFLNKAVKPVLVAGPKLRVAKAGKAFVDLVDASGYAYAIMPSAKGFVPETHPHFLGTYWGAVSTAFCAEIVESADAYLFAGPIFNDYSSVGYSFLLKKDKAIIVQPERVIVGNGPAFGCVMMKEYLSALAKRVQKNTTAYENYKRIFVPEGHPLKGEANEPLRVNVLFKHIQDMLTGDSAVLAETGDSWFNCQKLKLPEGCGYEFQMQYGSIGWSVGALLGYAQGASDKRVIACIGDGSFQVTAQDVSTMLRCEQNSIIFLINNGGYTIEVEIHDGPYNVIKNWNYTALVEAIHNGEGKCWTAKVKCEEELTAAIETALGEKKDSLCFIEVIAHKDDTSKELLEWGSRVSAANSRPPNPQ

SEQ ID NO: 18202 - protein, 375 aa, Triticum aestivum
  peptide (1)..(375): Ceres Seq. ID no. 14303300
  misc_feature (10)..(159): Pfam Name: Pfam Description:  Thiamine pyrophosphate enzyme, central domain
  misc_feature (1)..(375): NCBI GI NO: 19851522 NR Description: pyruvate decarboxylase [Zea mays]
  misc_feature (1)..(375): NCBI GI NO: 19851524 NR Description: pyruvate decarboxylase [Zea mays]
  misc_feature (1)..(375): NCBI GI NO: 1706328 NR Description: Pyruvate decarboxylase isozyme 2 (PDC)
  misc_feature (1)..(375): NCBI GI NO: 24745919 NR Description: pyruvate decarboxylase [Solanum tuberosum]
  misc_feature (1)..(375): NCBI GI NO: 29373077 NR Description: pyruvate decarboxylase 1 [Lotus corniculatus]
  misc_feature (1)..(375): NCBI GI NO: 10732644 NR Description: pyruvate decarboxylase 1 [Vitis vinifera]
  misc_feature (1)..(375): NCBI GI NO: 10121330 NR Description: pyruvate decarboxylase [Fragaria x ananassa]
  misc_feature (1)..(375): NCBI GI NO: 3970823 NR Description: pyruvate decarboxylase [Zea mays]
  misc_feature (1)..(375): NCBI GI NO: 118390 NR Description: Pyruvate decarboxylase isozyme 1 (PDC)
  misc_feature (1)..(375): NCBI GI NO: 17225598 NR Description: pyruvate decarboxylase [Fragaria x ananassa]
MSNKMGLEAAVEATVEFLNKAVKPVLVAGPKLRVAKAGKAFVDLVDASGYAYAIMPSAKGFVPETHPHFLGTYWGAVSTAFCAEIVESADAYLFAGPIFNDYSSVGYSFLLKKDKAIIVQPERVIVGNGPAFGCVMMKEYLSALAKRVQKNTTAYENYKRIFVPEGHPLKGEANEPLRVNVLFKHIQDMLTGDSAVLAETGDSWFNCQKLKLPEGCGYEFQMQYGSIGWSVGALLGYAQGASDKRVIACIGDGSFQVTAQDVSTMLRCEQNSIIFLINNGGYTIEVEIHDGPYNVIKNWNYTALVEAIHNGEGKCWTAKVKCEEELTAAIETALGEKKDSLCFIEVIAHKDDTSKELLEWGSRVSAANSRPPNPQ

SEQ ID NO: 18203 - DNA, 1232 bp, Triticum aestivum
  misc_feature (1)..(1232): Ceres Seq. ID no. 15226126
gaaagaatccaccttattgcccagtgcatcgttttttgactagtcctcgtcgtggttaacaccgcaccaaccaagctgaggagttgaagttcgagacattctcgactgccggctgccgccccctcttctacggctccacttccaagtgccaaagcggccacgccacaaccacaacaatggcgcttccagcgacctcgtggctgctcatctccctcctcctcgccgtgacgccagcccctagcacctgtgaggagagcgtgcgcatcgcgggcgcaggcggcttgctgcagtgctacccggcgccggcgctcaccaacgccactaacggcacggcgtttcgcgccaccctgctcccgctcctcggctctctcccctccgccgccgcgcccacgggcttcgcctccctacggtccgtcactcgcggggagcgcgcgttggcgcgggggctctgcttcggcaactccacggtgccgtccgagtgcgcccggtgcctgtccgccgcggctgggaacctcacagctggctgcggcgccaccagccggcgccccggcatctggagcgaccggtgcttcgtcggctacgccgacaccaacgcatcctcgtcaaacgaagacggcttccgcgcgcgcgtcctcctcccgggcgacgacgccgtccctcgctctgtggccagcaccaaatccttctactacgcccacctgcacgatgtactcgtcgccatggagaaggacgtggcgcggcgcgcggccgcgaacatctccgggccgcggatgctggccacagcggaggagaccaactccgacagcgcggtgagcagaacagtgcacgttctggcgcagtgcgggagggaccgcacggcggcggcctgcgtccggtgcctacagaactcggtgcaggccgtgcactgggacctcaacgctgcccgcgtcgacggtggcgtggcggccgcggtggtgggcttcaactgctacatgcggtttgaggtctccactgcagtgggtggcgacactatcactggcgttatgctactggtggcattcgtgctatgtatatttacaggaggcgcatgtgggtgtttgtgtcctgtaccctgatgaagttgagaaagaaggataaaattcgttgcaacgatatcagagatcaggaacgcaataaaaccttatgttccaattaagtttcttattgcatactctgtatatcttaatgggaaacgcttcctctcagtagtctgc

SEQ ID NO: 18204 - protein, 305 aa, Triticum aestivum
  peptide (1)..(305): Ceres Seq. ID no. 15226127
  misc_feature (86)..(142): Pfam Name: Pfam Description:  Domain of unknown function DUF26
  misc_feature (38)..(271): NCBI GI NO: 27476077 NR Description: Hypothetical protein
  misc_feature (1)..(276): NCBI GI NO: 34910012 NR Description: P0413G02.7
  misc_feature (37)..(295): NCBI GI NO: 34910014 NR Description: P0413G02.8
  misc_feature (50)..(167): NCBI GI NO: 34909980 NR Description: P0490D09.14
MALPATSWLLISLLLAVTPAPSTCEESVRIAGAGGLLQCYPAPALTNATNGTAFRATLLPLLGSLPSAAAPTGFASLRSVTRGERALARGLCFGNSTVPSECARCLSAAAGNLTAGCGATSRRPGIWSDRCFVGYADTNASSSNEDGFRARVLLPGDDAVPRSVASTKSFYYAHLHDVLVAMEKDVARRAAANISGPRMLATAEETNSDSAVSRTVHVLAQCGRDRTAAACVRCLQNSVQAVHWDLNAARVDGGVAAAVVGFNCYMRFEVSTAVGGDTITGVMLLVAFVLCIFTGGACGCLCPVP

SEQ ID NO: 18205 - DNA, 1430 bp, Triticum aestivum
  misc_feature (1)..(1430): Ceres Seq. ID no. 13598272
aaaaaaacctagatgccacaccctatcccagccgcagccgccgccgccgtcgccgccgccgccgctgcaaccgccgccttcgattccgtgaaattggaggggaagacaattggatctgtctgccgcaggaggagtggggagaaatagattgaaggcgcgacagttcctgaatgttgtgatggagaggtatggcactggcggtgccggtggcagcttgtatacggtcagtcgcatcgacgccaaggaacacctcttctaccgatccacggccgaagcacaggcagcagaaaaatcaaggttcgatatggagtgcatctggcgaatgcctacgtccaggctcaggttcgaagcataccgctcggatgacaagaggctcaatttcctgcccttctatggacgacgcagcggcggcgatagcaagatgctctgcatggacgccgctggccacaccgtgctctgtgatgccgctggcctctctgtcatgccggctccctgccttaacgaacccaaggttgacagccctgtttctttctccatcacccgcaccaacgtggaaacccccaatcgcgccgatgctctctacgtcctcgacagatttgtcacgagccgcaactccttcaacttcgaggcactcatgtttggcgagaagacctgggactgggttcggcttccaccgccgccctatgtcaacaacccggcctacaactccacatccatccagtcctacacgctcctggctgatggctccaccatttgcatctcctcccctcggcacagcctcgtcggcacctactgcttcgacacgattagctgtaagtggagcaaggctggccgctgggcgcttcccttgtacggccgggctgagcatgtacctgagctgggcaacctctggttcggcatggccgacaacagcccccacaatttttccgcattggacctctccaacctagacggggctccaaagttgcttcaagactggcaagaccttgacccgcctgaggattgggtgcagatgaggtgcagcctgctgtacctgggcgcgggcaagttttgcataaccaaattcttcaacatcggggacccagacacagaggacaacacaaccgctgctgtgctcaccggagtggaggtgctgtgtggagtttctggtggggaggtggtgcacggaggatcgtccgaactccagatgatcaagcacaagtcttttatcagctatgacggcatccagtgcgtcctctgaaatacgtactagggaagtcgttaaaacgagagcaaatgaattatgagcattttagaagacggccgagtggttgttttcgttgcagctgtttccattggaagccttgttcgttttgtggatctattttccgctgggattgggttgatctccaccatttcttctgctagagaaatatagtcctagcactttt

SEQ ID NO: 18206 - protein, 353 aa, Triticum aestivum
  peptide (1)..(353): Ceres Seq. ID no. 13598273
  misc_feature (1)..(342): NCBI GI NO: 34907072 NR Description: OSJNBa0093F16.25
  misc_feature (1)..(319): NCBI GI NO: 38345446 NR Description: OSJNBa0042L16.1
  misc_feature (157)..(342): NCBI GI NO: 34902348 NR Description: Hypothetical protein
  misc_feature (79)..(342): NCBI GI NO: 15451604 NR Description: Hypothetical protein [Oryza sativa]
  misc_feature (107)..(353): NCBI GI NO: 38344193 NR Description: OSJNBa0064G10.9
  misc_feature (79)..(318): NCBI GI NO: 37531434 NR Description: hypothetical protein
  misc_feature (133)..(335): NCBI GI NO: 15451605 NR Description: Hypothetical protein [Oryza sativa]
  misc_feature (115)..(272): NCBI GI NO: 34907070 NR Description: OSJNBa0093F16.24
  misc_feature (159)..(305): NCBI GI NO: 34904128 NR Description: unnamed protein product
  misc_feature (203)..(342): NCBI GI NO: 27818009 NR Description: OSJNBb0041J06.17
MERYGTGGAGGSLYTVSRIDAKEHLFYRSTAEAQAAEKSRFDMECIWRMPTSRLRFEAYRSDDKRLNFLPFYGRRSGGDSKMLCMDAAGHTVLCDAAGLSVMPAPCLNEPKVDSPVSFSITRTNVETPNRADALYVLDRFVTSRNSFNFEALMFGEKTWDWVRLPPPPYVNNPAYNSTSIQSYTLLADGSTICISSPRHSLVGTYCFDTISCKWSKAGRWALPLYGRAEHVPELGNLWFGMADNSPHNFSALDLSNLDGAPKLLQDWQDLDPPEDWVQMRCSLLYLGAGKFCITKFFNIGDPDTEDNTTAAVLTGVEVLCGVSGGEVVHGGSSELQMIKHKSFISYDGIQCVL

SEQ ID NO: 18207 - protein, 311 aa, Triticum aestivum
  peptide (1)..(311): Ceres Seq. ID no. 13598274
  misc_feature (1)..(300): NCBI GI NO: 34907072 NR Description: OSJNBa0093F16.25
  misc_feature (1)..(277): NCBI GI NO: 38345446 NR Description: OSJNBa0042L16.1
  misc_feature (115)..(300): NCBI GI NO: 34902348 NR Description: Hypothetical protein
  misc_feature (37)..(300): NCBI GI NO: 15451604 NR Description: Hypothetical protein [Oryza sativa]
  misc_feature (65)..(311): NCBI GI NO: 38344193 NR Description: OSJNBa0064G10.9
  misc_feature (37)..(276): NCBI GI NO: 37531434 NR Description: hypothetical protein
  misc_feature (91)..(293): NCBI GI NO: 15451605 NR Description: Hypothetical protein [Oryza sativa]
  misc_feature (73)..(230): NCBI GI NO: 34907070 NR Description: OSJNBa0093F16.24
  misc_feature (117)..(263): NCBI GI NO: 34904128 NR Description: unnamed protein product
  misc_feature (161)..(300): NCBI GI NO: 27818009 NR Description: OSJNBb0041J06.17
MECIWRMPTSRLRFEAYRSDDKRLNFLPFYGRRSGGDSKMLCMDAAGHTVLCDAAGLSVMPAPCLNEPKVDSPVSFSITRTNVETPNRADALYVLDRFVTSRNSFNFEALMFGEKTWDWVRLPPPPYVNNPAYNSTSIQSYTLLADGSTICISSPRHSLVGTYCFDTISCKWSKAGRWALPLYGRAEHVPELGNLWFGMADNSPHNFSALDLSNLDGAPKLLQDWQDLDPPEDWVQMRCSLLYLGAGKFCITKFFNIGDPDTEDNTTAAVLTGVEVLCGVSGGEVVHGGSSELQMIKHKSFISYDGIQCVL

SEQ ID NO: 18208 - protein, 305 aa, Triticum aestivum
  peptide (1)..(305): Ceres Seq. ID no. 13598275
  misc_feature (1)..(294): NCBI GI NO: 34907072 NR Description: OSJNBa0093F16.25
  misc_feature (1)..(271): NCBI GI NO: 38345446 NR Description: OSJNBa0042L16.1
  misc_feature (109)..(294): NCBI GI NO: 34902348 NR Description: Hypothetical protein
  misc_feature (31)..(294): NCBI GI NO: 15451604 NR Description: Hypothetical protein [Oryza sativa]
  misc_feature (59)..(305): NCBI GI NO: 38344193 NR Description: OSJNBa0064G10.9
  misc_feature (31)..(270): NCBI GI NO: 37531434 NR Description: hypothetical protein
  misc_feature (85)..(287): NCBI GI NO: 15451605 NR Description: Hypothetical protein [Oryza sativa]
  misc_feature (67)..(224): NCBI GI NO: 34907070 NR Description: OSJNBa0093F16.24
  misc_feature (111)..(257): NCBI GI NO: 34904128 NR Description: unnamed protein product
  misc_feature (155)..(294): NCBI GI NO: 27818009 NR Description: OSJNBb0041J06.17
MPTSRLRFEAYRSDDKRLNFLPFYGRRSGGDSKMLCMDAAGHTVLCDAAGLSVMPAPCLNEPKVDSPVSFSITRTNVETPNRADALYVLDRFVTSRNSFNFEALMFGEKTWDWVRLPPPPYVNNPAYNSTSIQSYTLLADGSTICISSPRHSLVGTYCFDTISCKWSKAGRWALPLYGRAEHVPELGNLWFGMADNSPHNFSALDLSNLDGAPKLLQDWQDLDPPEDWVQMRCSLLYLGAGKFCITKFFNIGDPDTEDNTTAAVLTGVEVLCGVSGGEVVHGGSSELQMIKHKSFISYDGIQCVL

SEQ ID NO: 18209 - DNA, 1101 bp, Triticum aestivum
  misc_feature (1)..(1101): Ceres Seq. ID no. 15173621
gccaagagcacttgccaatcacttgcaccccaaaagaagtttttgccgagagcacttgccaatcacttgcacctcaaaaggctttcttgctgccacagctgaatccatggcgaaatgcgggctgctgctcctgttcattgcgttcctcttgccggcggcacgtgcgacatcgtgccaccccgatgacctccgtgcgctacggggcttcgccggaaacctcagcggtggggctgtcctcctccgtgctgcctggtccggtgcctcctgctgcgtctgggaaggcgtgaactgcgatggcactagcggccgtgtcacggcgctgcggctccctgggcacggccttgtggggctcatcccaggagcatccttggcaggccttgcacggctagaggagctcaaccttgccaacaacaaactggtcggcaccatcccatcatggattggcgagcttgatcacctttgctacttggatctgtcggataattcattggttggcgaggtacccaagagtttgatacggctcaagggtcttgtcatcgctggtcattcactaggtatggtttttactaacatgccattgtatgtgaagcgtaatagaagaacacttgatgaacaaccaaatacaatatctgggagcaacaacactgtcagatctgggagcaccaacgttgtttctgggaatgacaacactgtcatatccgggaataacaacaatgtggctgggagcaacaacactgtcataaccgggaacgacaataccgtaactggtagcaaccatgttgtatctggggacaaacatatcgtgactgacaataacaatgccgtatccgggaacgacaataatgtatccgggagcttccataccgtatccgggagccacaatactgtatctgggaccaacaacactgtatctgggagcaaccatgtcgtatctgggagcaacaaggtcgtaggagatgaatgatttgtaagtgaattgtttgcatcttccttgacggagctcatgtggttgtccaatttcagtgtagcccacaatcacttgggtggggtcaatagtgttatgtaacttcatggatatatatagcatcttatttctacttt

SEQ ID NO: 18210 - protein, 320 aa, Triticum aestivum
  peptide (1)..(320): Ceres Seq. ID no. 15173622
  misc_feature (190)..(315): Pfam Name: Pfam Description:  Histidine kinase-
  misc_feature (203)..(319): NCBI GI NO: 7573548 NR Description: ice recrystallisation inhibition protein
  misc_feature (41)..(163): NCBI GI NO: 34899380 NR Description: contains ESTsAU056601
  misc_feature (72)..(252): NCBI GI NO: 34899380 NR Description: contains ESTsAU056601
  misc_feature (41)..(320): NCBI GI NO: 15238872 NR Description: leucine-rich repeat transmembrane protein kinase
  misc_feature (41)..(320): NCBI GI NO: 15228969 NR Description: disease resistance protein family
  misc_feature (38)..(178): NCBI GI NO: 15233013 NR Description: leucine-rich repeat transmembrane protein kinase
  misc_feature (41)..(320): NCBI GI NO: 34911420 NR Description: putative leucine rich repeat containing proteinkinase
  misc_feature (33)..(171): NCBI GI NO: 34895882 NR Description: putative protein kinase Xa21
  misc_feature (15)..(211): NCBI GI NO: 18642534 NR Description: candidate plant disease resistance protein
  misc_feature (29)..(264): NCBI GI NO: 27497120 NR Description: floral organ regulator 2
PRALANHLHPKRSFCREHLPITCTSKGFLAATAESMAKCGLLLLFIAFLLPAARATSCHPDDLRALRGFAGNLSGGAVLLRAAWSGASCCVWEGVNCDGTSGRVTALRLPGHGLVGLIPGASLAGLARLEELNLANNKLVGTIPSWIGELDHLCYLDLSDNSLVGEVPKSLIRLKGLVIAGHSLGMVFTNMPLYVKRNRRTLDEQPNTISGSNNTVRSGSTNVVSGNDNTVISGNNNNVAGSNNTVITGNDNTVTGSNHVVSGDKHIVTDNNNAVSGNDNNVSGSFHTVSGSHNTVSGTNNTVSGSNHVVSGSNKVVGDE

SEQ ID NO: 18211 - protein, 285 aa, Triticum aestivum
  peptide (1)..(285): Ceres Seq. ID no. 15173623
  misc_feature (155)..(280): Pfam Name: Pfam Description:  Histidine kinase-
  misc_feature (168)..(284): NCBI GI NO: 7573548 NR Description: ice recrystallisation inhibition protein
  misc_feature (6)..(128): NCBI GI NO: 34899380 NR Description: contains ESTsAU056601
  misc_feature (37)..(217): NCBI GI NO: 34899380 NR Description: contains ESTsAU056601
  misc_feature (6)..(285): NCBI GI NO: 15238872 NR Description: leucine-rich repeat transmembrane protein kinase
  misc_feature (6)..(285): NCBI GI NO: 15228969 NR Description: disease resistance protein family
  misc_feature (3)..(143): NCBI GI NO: 15233013 NR Description: leucine-rich repeat transmembrane protein kinase
  misc_feature (6)..(285): NCBI GI NO: 34911420 NR Description: putative leucine rich repeat containing proteinkinase
  misc_feature (1)..(136): NCBI GI NO: 34895882 NR Description: putative protein kinase Xa21
  misc_feature (1)..(176): NCBI GI NO: 18642534 NR Description: candidate plant disease resistance protein
  misc_feature (1)..(229): NCBI GI NO: 27497120 NR Description: floral organ regulator 2
MAKCGLLLLFIAFLLPAARATSCHPDDLRALRGFAGNLSGGAVLLRAAWSGASCCVWEGVNCDGTSGRVTALRLPGHGLVGLIPGASLAGLARLEELNLANNKLVGTIPSWIGELDHLCYLDLSDNSLVGEVPKSLIRLKGLVIAGHSLGMVFTNMPLYVKRNRRTLDEQPNTISGSNNTVRSGSTNVVSGNDNTVISGNNNNVAGSNNTVITGNDNTVTGSNHVVSGDKHIVTDNNNAVSGNDNNVSGSFHTVSGSHNTVSGTNNTVSGSNHVVSGSNKVVGDE

SEQ ID NO: 18212 - DNA, 1440 bp, Triticum aestivum
  misc_feature (1)..(1440): Ceres Seq. ID no. 13662367
atcagaaatccaaagccaaaaaccactctctaaacccgacacaaaaactcaagcccgaacccaagaaagcttccttcccgagacgagatcaagatggctcccgagctggccggcaagatgaccgccaaggccgccgtggcggcggccaagcccgcgacgaaggcgtacgtgacgttcctggcgggggcgggggactactggatgggcgtggtggggcttgccaagggcctgcgcaaggttgggtcggcctacccgctggtggtggccgtgctgcccgacgtgcccgagctccaccgcaagatcctcgtctcccagggctgcatcgtccgcgagatcgctcccgtgtacccgcccgagaaccacacccagtttgccatggcctactacgtcatcaactactccaagctccgcatctgggagtttgtggagtacgagaggatggtgtacctcgacgccgacatccaggtgttcgacaacatcgacgagttgtttgatctgcccaaggggcatttctacgccgtgatggactgcttctgcgagaagacgtggagccacaccccgcagtaccagatcggctactgccagcagtgtcccgacaaggtgacgtggccggccgccgagatgggcccgccgccggcgctctacttcaacgccggcatgttcgtgcacgagcccagcatggccaccgccaaggcgctccttgacaccctccgcgtgacgccgacgaccccattcgcggagcaggatttcctcaacatgttcttcagggagcagtacaagccgatcccgctggtctacaaccttgttctggcgatgctctggaggcacccggagaacgtgcagctggagaaggtcaaggtggtgcactactgcgctgcgggatcgaagccatggaggttcacgggcaaagaggagaacatggacagggaggacatcaagatcctcgccaggaactggtgggacatctacaacgacgagagcctcgatttcaagggcctgcccgccctggccgccgacgccgacgagctcgaggcggcggccaagaagccgctccgcgcggcgcttgcggaagccggcaccgtcaagtacgtcaccgcgccctcggctgcgtgatccccggttgcctagctccggcccgtgccactgtggtcatcaaagcaggaagccgggcacctataagcatttgcattttggtattttgcgtctgttcggttccaagttagcagtatcatttcaagtttaagataggatcgaaagagtccacgtatgtgaatatcctcgaccctttgtgaagtagagtgctgagtcgtcctgtatgaaagaattatgtgtgaatcaataggaagctttaaaaattatggcatatatttttcacgtcaaaaaaaaaaaaaaaaaaaaaaaaggagggggggggagggaaaaaaaaaaaaaaaagagctt

SEQ ID NO: 18213 - protein, 339 aa, Triticum aestivum
  peptide (1)..(339): Ceres Seq. ID no. 13662368
  misc_feature (1)..(339): NCBI GI NO: 32330230 NR Description: galactinol synthase 3 [Zea mays]
  misc_feature (1)..(339): NCBI GI NO: 34898096 NR Description: WSI76 protein induced by water stress
  misc_feature (2)..(339): NCBI GI NO: 4588376 NR Description: galactinol synthase [Brassica napus]
  misc_feature (1)..(339): NCBI GI NO: 15226522 NR Description: galactinol synthase, putative
  misc_feature (1)..(339): NCBI GI NO: 15223567 NR Description: galactinol synthase, putative
  misc_feature (1)..(339): NCBI GI NO: 20340247 NR Description: galactinol synthase-like protein
  misc_feature (1)..(339): NCBI GI NO: 5541885 NR Description: putative galactinol synthase [Pisum sativum]
  misc_feature (1)..(339): NCBI GI NO: 15219093 NR Description: galactinol synthase, putative
  misc_feature (12)..(339): NCBI GI NO: 18874402 NR Description: galactinol synthase [Cucumis melo]
  misc_feature (1)..(339): NCBI GI NO: 5608497 NR Description: galactinol synthase, isoform GolS-1
MAPELAGKMTAKAAVAAAKPATKAYVTFLAGAGDYWMGVVGLAKGLRKVGSAYPLVVAVLPDVPELHRKILVSQGCIVREIAPVYPPENHTQFAMAYYVINYSKLRIWEFVEYERMVYLDADIQVFDNIDELFDLPKGHFYAVMDCFCEKTWSHTPQYQIGYCQQCPDKVTWPAAEMGPPPALYFNAGMFVHEPSMATAKALLDTLRVTPTTPFAEQDFLNMFFREQYKPIPLVYNLVLAMLWRHPENVQLEKVKVVHYCAAGSKPWRFTGKEENMDREDIKILARNWWDIYNDESLDFKGLPALAADADELEAAAKKPLRAALAEAGTVKYVTAPSAA

SEQ ID NO: 18214 - protein, 331 aa, Triticum aestivum
  peptide (1)..(331): Ceres Seq. ID no. 13662369
  misc_feature (1)..(331): NCBI GI NO: 32330230 NR Description: galactinol synthase 3 [Zea mays]
  misc_feature (1)..(331): NCBI GI NO: 34898096 NR Description: WSI76 protein induced by water stress
  misc_feature (1)..(331): NCBI GI NO: 4588376 NR Description: galactinol synthase [Brassica napus]
  misc_feature (1)..(331): NCBI GI NO: 15226522 NR Description: galactinol synthase, putative
  misc_feature (1)..(331): NCBI GI NO: 15223567 NR Description: galactinol synthase, putative
  misc_feature (1)..(331): NCBI GI NO: 20340247 NR Description: galactinol synthase-like protein
  misc_feature (1)..(331): NCBI GI NO: 5541885 NR Description: putative galactinol synthase [Pisum sativum]
  misc_feature (1)..(331): NCBI GI NO: 15219093 NR Description: galactinol synthase, putative
  misc_feature (4)..(331): NCBI GI NO: 18874402 NR Description: galactinol synthase [Cucumis melo]
  misc_feature (1)..(331): NCBI GI NO: 5608497 NR Description: galactinol synthase, isoform GolS-1
MTAKAAVAAAKPATKAYVTFLAGAGDYWMGVVGLAKGLRKVGSAYPLVVAVLPDVPELHRKILVSQGCIVREIAPVYPPENHTQFAMAYYVINYSKLRIWEFVEYERMVYLDADIQVFDNIDELFDLPKGHFYAVMDCFCEKTWSHTPQYQIGYCQQCPDKVTWPAAEMGPPPALYFNAGMFVHEPSMATAKALLDTLRVTPTTPFAEQDFLNMFFREQYKPIPLVYNLVLAMLWRHPENVQLEKVKVVHYCAAGSKPWRFTGKEENMDREDIKILARNWWDIYNDESLDFKGLPALAADADELEAAAKKPLRAALAEAGTVKYVTAPSAA

SEQ ID NO: 18215 - protein, 303 aa, Triticum aestivum
  peptide (1)..(303): Ceres Seq. ID no. 13662370
  misc_feature (1)..(303): NCBI GI NO: 32330230 NR Description: galactinol synthase 3 [Zea mays]
  misc_feature (1)..(303): NCBI GI NO: 34898096 NR Description: WSI76 protein induced by water stress
  misc_feature (1)..(303): NCBI GI NO: 4588376 NR Description: galactinol synthase [Brassica napus]
  misc_feature (1)..(303): NCBI GI NO: 15226522 NR Description: galactinol synthase, putative
  misc_feature (1)..(303): NCBI GI NO: 15223567 NR Description: galactinol synthase, putative
  misc_feature (1)..(303): NCBI GI NO: 20340247 NR Description: galactinol synthase-like protein
  misc_feature (1)..(303): NCBI GI NO: 5541885 NR Description: putative galactinol synthase [Pisum sativum]
  misc_feature (1)..(303): NCBI GI NO: 15219093 NR Description: galactinol synthase, putative
  misc_feature (1)..(303): NCBI GI NO: 18874402 NR Description: galactinol synthase [Cucumis melo]
  misc_feature (1)..(303): NCBI GI NO: 5608497 NR Description: galactinol synthase, isoform GolS-1
MGVVGLAKGLRKVGSAYPLVVAVLPDVPELHRKILVSQGCIVREIAPVYPPENHTQFAMAYYVINYSKLRIWEFVEYERMVYLDADIQVFDNIDELFDLPKGHFYAVMDCFCEKTWSHTPQYQIGYCQQCPDKVTWPAAEMGPPPALYFNAGMFVHEPSMATAKALLDTLRVTPTTPFAEQDFLNMFFREQYKPIPLVYNLVLAMLWRHPENVQLEKVKVVHYCAAGSKPWRFTGKEENMDREDIKILARNWWDIYNDESLDFKGLPALAADADELEAAAKKPLRAALAEAGTVKYVTAPSAA

SEQ ID NO: 18216 - DNA, 1442 bp, Triticum aestivum
  misc_feature (1)..(1442): Ceres Seq. ID no. 15169607
gaccaagcccagcccataccggcagccacctccgtcgtcgtcggtactgacgcggcacgagccggcgaatccgacaggccccctacctctcgctcgccgcgagatcccgcgtccatggcggtcggcatcgcgctcctgctcgaccttgcggcccgcgcgccccgctcctccgcctcgctccactcgcacgccgccttctccgccgccgccgccgccgccgccgcggcagccctgtccgcctccggcgtacccctctccgcgcggccattcttcggttttccaggattcactgttgctcattgtgatgctggtgcaacttatggatcgattgatagtcctgatcttgccaatgatcttaatgagaagatacatgactcgattcatgatctccaattaccgataaaagaatacccgttggagctgaagccgcttttgtatgcatttggctttaagcatttgagtatgacgactattagggcctttttattatactatttaccacttctggagcctcgtccgcccactgatgacgatgacgatgacgatctgcttcaagatgattcagagaggccgccggttgacctggttactcccttccataattcattgaagcaaatcgctcgcgagatttctgttgtaacaacaagaagagtattcgaaaggattgcggtttgtcatgtttcacaaagaacagcatggaagcttctcaaagatgctgcaaaatcatcgaagaggaaagctctgagggggatgtcaattccagaatacacatactgtgttgccagaacaactttccgagcgcatgcattgggagtagctgctacttgggttgtacaatctgtcgtccaggtctacaaatgttttattcgtcaacctgataatgatgacgaattgttcgacgagaaggaaaaactcagattgtttgcgagaaggatctatagtgtaaccatcaaatgtggtttctctttggtttttgcctcgattggagcaggcctcggcgtccttctgcatccagtgcatggacaatggattggttgtatccttggagattttgcaggaccagttgttgctatccttattttcgagaagttacagttcccgctagaaggttaaagaccaccatctcctgctacaaagttaagaaacccaggtcatccgaccttgtttctagcctgcctggttttcgaagaacatgaagtggagctccttggccttgagtctaccctttcaggatattcattggcctaacttggagctcaaagttgatgaataactatgcatgcatggttaatagcttttcgtggcacaatgcctttgggtattgtgtaatgcttacttttggcacatttaataactagctactgtacttcgttgccgtgctttacattttgaactcaaaggaacatttctgtccactggtttgctaaatttctacagtaagc

SEQ ID NO: 18217 - protein, 370 aa, Triticum aestivum
  peptide (1)..(370): Ceres Seq. ID no. 15169608
  misc_feature (42)..(363): NCBI GI NO: 15240548 NR Description: expressed protein [Arabidopsis thaliana]
DQAQPIPAATSVVVGTDAARAGESDRPPTSRSPRDPASMAVGIALLLDLAARAPRSSASLHSHAAFSAAAAAAAAAALSASGVPLSARPFFGFPGFTVAHCDAGATYGSIDSPDLANDLNEKIHDSIHDLQLPIKEYPLELKPLLYAFGFKHLSMTTIRAFLLYYLPLLEPRPPTDDDDDDDLLQDDSERPPVDLVTPFHNSLKQIAREISVVTTRRVFERIAVCHVSQRTAWKLLKDAAKSSKRKALRGMSIPEYTYCVARTTFRAHALGVAATWVVQSVVQVYKCFIRQPDNDDELFDEKEKLRLFARRIYSVTIKCGFSLVFASIGAGLGVLLHPVHGQWIGCILGDFAGPVVAILIFEKLQFPLEG

SEQ ID NO: 18218 - protein, 332 aa, Triticum aestivum
  peptide (1)..(332): Ceres Seq. ID no. 15169609
  misc_feature (4)..(325): NCBI GI NO: 15240548 NR Description: expressed protein [Arabidopsis thaliana]
MAVGIALLLDLAARAPRSSASLHSHAAFSAAAAAAAAAALSASGVPLSARPFFGFPGFTVAHCDAGATYGSIDSPDLANDLNEKIHDSIHDLQLPIKEYPLELKPLLYAFGFKHLSMTTIRAFLLYYLPLLEPRPPTDDDDDDDLLQDDSERPPVDLVTPFHNSLKQIAREISVVTTRRVFERIAVCHVSQRTAWKLLKDAAKSSKRKALRGMSIPEYTYCVARTTFRAHALGVAATWVVQSVVQVYKCFIRQPDNDDELFDEKEKLRLFARRIYSVTIKCGFSLVFASIGAGLGVLLHPVHGQWIGCILGDFAGPVVAILIFEKLQFPLEG

SEQ ID NO: 18219 - protein, 216 aa, Triticum aestivum
  peptide (1)..(216): Ceres Seq. ID no. 15169610
  misc_feature (1)..(209): NCBI GI NO: 15240548 NR Description: expressed protein [Arabidopsis thaliana]
MTTIRAFLLYYLPLLEPRPPTDDDDDDDLLQDDSERPPVDLVTPFHNSLKQIAREISVVTTRRVFERIAVCHVSQRTAWKLLKDAAKSSKRKALRGMSIPEYTYCVARTTFRAHALGVAATWVVQSVVQVYKCFIRQPDNDDELFDEKEKLRLFARRIYSVTIKCGFSLVFASIGAGLGVLLHPVHGQWIGCILGDFAGPVVAILIFEKLQFPLEG

SEQ ID NO: 18220 - DNA, 1446 bp, Triticum aestivum
  misc_feature (1)..(1446): Ceres Seq. ID no. 13595926
acagacacccaacggcatcatcatcatcaccgccaccgccacttcttctagatagctcctggtaccgccgtgccgtcattagccgcgggagcagagcctggacgagtcccagatcggtcggcaccgggaggcattcaggtaggcgggcaggcaggagtgggagctagattaagcgcagtgcgccggcatgggcgccgggattaggatcttggcggcggcgctcctggcgctcgcggccgtcggcggcgcgacggcgcagctccggcagggctactactccgccagctgccccaacgtggaggccatcgtgcaggccgcggtcgccctcaaggtccagcagacgcccgtcgccgtcggtgccaccgtccgcctcttcttccacgactgcttcgtccagggatgcgacgcgtcggtcatcatcgtgtcgtcggggaacaacacggcggagaaggaccacgtgagcaacctctccctcgccggcgacggcttcgacaccgtcatcaaggccaaggcggccgtggacacgcagtgccccagccccaacctggtgtcctgcgcggacatcctcaccatggccacccgggacgtcatcagcctggccggcggcccggcgtaccccgtggagctggggaggctggacgggctggtgtcgacggcgagcaacgtggacgggaacctgccgccgccgtccttcaacctcgaccagctgacggccatgttcgccgccaacaacctgtcccaggsccgacatgattgcgctctccgcggcgcacacagtggggttcgcgcactgcgggacgttcacgggccggatccagacggcggcggtggacccgacgatggaccccgggtacgcgtcgcagctgctggcggcgtgcccggccggggtggaccccaacgtggcgctggagatcgacccggtgacgccgcacgccttcgacaaccagtacttcatcaacctgcagaaggggatgggcctgctcacctccgaccaggtcctctacgccgacgtccggtcgcgccccaccgtcgacgcctgggcggccaacagctccgacttccaggccgccttcgtcgccgccatgaccaacctcggccgcgtcggggtcaagacggacccggcgctcggcaacatccgccgcgactgcgccgtgctcaacagctgattggttggttattgcattcgctgaagctggagaccaagatgcagtacaacctcgatcgatgcttggggatgtcatcaactgttcatagttagctgggccgctcgatggggtggcgctgagattataatacaagtagctttcaggacacaagtctagttctaatccatcagaaggttaatggttgaggagtctgttgagttgagcatcatcgattacctagagtcgaatgtattcaatgtgtgcgtaatattggagcgagatttattcgaacattttctcc

SEQ ID NO: 18221 - protein, 356 aa, Triticum aestivum
  peptide (1)..(356): Ceres Seq. ID no. 15221701
  misc_feature (41)..(197): Pfam Name: Pfam Description:  Peroxidase
  misc_feature (1)..(197): NCBI GI NO: 17027274 NR Description: putative peroxidase
  misc_feature (6)..(197): NCBI GI NO: 34915320 NR Description: putative peroxidase
  misc_feature (6)..(197): NCBI GI NO: 28629828 NR Description: peroxidase 1 [Artemisia annua]
  misc_feature (5)..(197): NCBI GI NO: 14485511 NR Description: putative peroxidase [Solanum tuberosum]
  misc_feature (22)..(197): NCBI GI NO: 15229646 NR Description: peroxidase, putative [Arabidopsis thaliana]
  misc_feature (1)..(197): NCBI GI NO: 2117624 NR Description: peroxidase (EC 1.11.1.7) 2 precursor - alfalfa
  misc_feature (1)..(197): NCBI GI NO: 13992528 NR Description: peroxidase2 [Medicago sativa]
  misc_feature (8)..(197): NCBI GI NO: 15235597 NR Description: peroxidase, putative [Arabidopsis thaliana]
  misc_feature (21)..(197): NCBI GI NO: 1546708 NR Description: peroxidase ATP9a [Arabidopsis thaliana]
  misc_feature (7)..(197): NCBI GI NO: 15235600 NR Description: peroxidase, putative [Arabidopsis thaliana]
  misc_feature (186)..(186): Xaa is any aa, unknown or other
MGAGIRILAAALLALAAVGGATAQLRQGYYSASCPNVEAIVQAAVALKVQQTPVAVGATVRLFFHDCFVQGCDASVIIVSSGNNTAEKDHVSNLSLAGDGFDTVIKAKAAVDTQCPSPNLVSCADILTMATRDVISLAGGPAYPVELGRLDGLVSTASNVDGNLPPPSFNLDQLTAMFAANNLSQXRHDCALRGAHSGVRALRDVHGPDPDGGGGPDDGPRVRVAAAGGVPGRGGPQRGAGDRPGDAARLRQPVLHQPAEGDGPAHLRPGPLRRRPVAPHRRRLGGQQLRLPGRLRRRHDQPRPRRGQDGPGARQHPPRLRRAQQLIGWLLHSLKLETKMQYNLDRCLGMSSTVHS

SEQ ID NO: 18222 - protein, 228 aa, Triticum aestivum
  peptide (1)..(228): Ceres Seq. ID no. 15221702
  misc_feature (1)..(69): Pfam Name: Pfam Description:  Peroxidase
  misc_feature (1)..(69): NCBI GI NO: 17027274 NR Description: putative peroxidase
  misc_feature (1)..(69): NCBI GI NO: 34915320 NR Description: putative peroxidase
  misc_feature (1)..(69): NCBI GI NO: 28629828 NR Description: peroxidase 1 [Artemisia annua]
  misc_feature (1)..(69): NCBI GI NO: 14485511 NR Description: putative peroxidase [Solanum tuberosum]
  misc_feature (1)..(69): NCBI GI NO: 15229646 NR Description: peroxidase, putative [Arabidopsis thaliana]
  misc_feature (1)..(69): NCBI GI NO: 2117624 NR Description: peroxidase (EC 1.11.1.7) 2 precursor - alfalfa
  misc_feature (1)..(69): NCBI GI NO: 13992528 NR Description: peroxidase2 [Medicago sativa]
  misc_feature (1)..(69): NCBI GI NO: 15235597 NR Description: peroxidase, putative [Arabidopsis thaliana]
  misc_feature (1)..(69): NCBI GI NO: 1546708 NR Description: peroxidase ATP9a [Arabidopsis thaliana]
  misc_feature (1)..(69): NCBI GI NO: 15235600 NR Description: peroxidase, putative [Arabidopsis thaliana]
  misc_feature (58)..(58): Xaa is any aa, unknown or other
MATRDVISLAGGPAYPVELGRLDGLVSTASNVDGNLPPPSFNLDQLTAMFAANNLSQXRHDCALRGAHSGVRALRDVHGPDPDGGGGPDDGPRVRVAAAGGVPGRGGPQRGAGDRPGDAARLRQPVLHQPAEGDGPAHLRPGPLRRRPVAPHRRRLGGQQLRLPGRLRRRHDQPRPRRGQDGPGARQHPPRLRRAQQLIGWLLHSLKLETKMQYNLDRCLGMSSTVHS

SEQ ID NO: 18223 - protein, 180 aa, Triticum aestivum
  peptide (1)..(180): Ceres Seq. ID no. 15221703
  misc_feature (1)..(21): NCBI GI NO: 17027274 NR Description: putative peroxidase
  misc_feature (1)..(21): NCBI GI NO: 34915320 NR Description: putative peroxidase
  misc_feature (1)..(21): NCBI GI NO: 28629828 NR Description: peroxidase 1 [Artemisia annua]
  misc_feature (1)..(21): NCBI GI NO: 14485511 NR Description: putative peroxidase [Solanum tuberosum]
  misc_feature (1)..(21): NCBI GI NO: 15229646 NR Description: peroxidase, putative [Arabidopsis thaliana]
  misc_feature (1)..(21): NCBI GI NO: 2117624 NR Description: peroxidase (EC 1.11.1.7) 2 precursor - alfalfa
  misc_feature (1)..(21): NCBI GI NO: 13992528 NR Description: peroxidase2 [Medicago sativa]
  misc_feature (1)..(21): NCBI GI NO: 15235597 NR Description: peroxidase, putative [Arabidopsis thaliana]
  misc_feature (1)..(21): NCBI GI NO: 1546708 NR Description: peroxidase ATP9a [Arabidopsis thaliana]
  misc_feature (1)..(21): NCBI GI NO: 15235600 NR Description: peroxidase, putative [Arabidopsis thaliana]
  misc_feature (10)..(10): Xaa is any aa, unknown or other
MFAANNLSQXRHDCALRGAHSGVRALRDVHGPDPDGGGGPDDGPRVRVAAAGGVPGRGGPQRGAGDRPGDAARLRQPVLHQPAEGDGPAHLRPGPLRRRPVAPHRRRLGGQQLRLPGRLRRRHDQPRPRRGQDGPGARQHPPRLRRAQQLIGWLLHSLKLETKMQYNLDRCLGMSSTVHS

SEQ ID NO: 18224 - DNA, 1515 bp, Triticum aestivum
  misc_feature (1)..(1515): Ceres Seq. ID no. 12465151
accgatcattttggcgggagagcagcagttggccgcctccactctccactttcccgcgcagagtaaatcagcaatggacggcggctccggctcctccttccaggccgtagcggcggctgccgccatggagatggaggagtacctcaactggaagaagaacgcgccggtgctctacgacctcgtcatgtcccacccgctcgagtggccctcgctcaccgtccagtggctcccctcggggtcgccggcctccgcccgctcccaccgcctcgtcctcggcacccacgcctccgacgactccgccaaccacctcatgctcgtcgacgccgtgctcccgctcccgccgcgcctggccgccgcggccgccgccgaggaccgcgccgtcccggccccgtccgtgtccatcggccgctcggcgccgcatcagggcgaggtcaaccgcgcccggtgcatgccgcagcggccgtacaccgtggccaccaagacctgcgtcgatgaggtgcacgtgtaccacctcggggaggacggtgagaagggcggcgcggatgtcgtgctcaggggccatggcgcggaggggtatgggctggcgtggagcgccacgaaggaggggttcctgctgagcggctcgtatgataagaagatttgcctgtgggatctcaaggccgggaatggagccccggttctggacgcgcagcaggtgtttgaggctcatgaggatgttgttgaagatgttgcttggcaccttaaggatgaaaacctatttggatctgttggcgatgactgcaagttcatgatgtgggacctgcgtacgaacaaaccagaacaatctatagttgcgcaccaaaaggaagttaactctctgtccttcaatccatttaatgaatggatcttggctacagcatctggtgatggaactattaagctgtttgaccagcgaaaactatctagaagcttgcatgctttcgacaaccatgagggcgaggttttccaggttgagtggaatccaaacatggagactgtattagcatcccatgctgcagacaaaagggtgatgatatgggacgttaacaggatcggcgaggagcaggcggacgaggacgcgggcgacgggccaccggagctgcttttcgtccacggcgggcacacggccaagatctcggagctgtcgtggaaccccagcgagaagtgggtggtggccagcgtggcggaggacaacgtgctgcagatctgggagatggccgagagcatatacagcgacgacaacagcaacaacgccaacagcgcctcgtgcctgtccacataagaagacgccgccaaccaacttcttccctgatgtgtggacgatggccgatggggacatggctcgttcgtagtctttgggtggacgcgtcgcgtgcggtttacttgtagtgcctcgtgcggtttcgtcgcttaattagcagctgctgctatcgtttggcgcctagatcctgtagacatggatggatggagaagtgactctggaatatttgtgcgtcc

SEQ ID NO: 18225 - protein, 432 aa, Triticum aestivum
  peptide (1)..(432): Ceres Seq. ID no. 12465152
  misc_feature (228)..(266): Pfam Name: Pfam Description:  WD domain, G-beta repeat
  misc_feature (44)..(425): NCBI GI NO: 20977604 NR Description: nucleosome/chromatin assembly factor 104
  misc_feature (45)..(422): NCBI GI NO: 15236251 NR Description: WD-40 repeat protein (MSI3); protein id:At4g35050
  misc_feature (45)..(422): NCBI GI NO: 27754479 NR Description: putative WD-40 repeat protein (MSI3)
  misc_feature (45)..(422): NCBI GI NO: 2394233 NR Description: WD-40 repeat protein [Arabidopsis thaliana]
  misc_feature (45)..(419): NCBI GI NO: 21593624 NR Description: putative WD-40 repeat protein, MSI2
  misc_feature (45)..(419): NCBI GI NO: 15227294 NR Description: putative WD-40 repeat protein, MSI2
  misc_feature (45)..(418): NCBI GI NO: 39595121 NR Description: Hypothetical protein CBG03710
  misc_feature (45)..(418): NCBI GI NO: 17508127 NR Description: Synthetic multivulva protein LIN-53
  misc_feature (66)..(420): NCBI GI NO: 15237140 NR Description: WD-40 repeat protein MSI1
  misc_feature (77)..(420): NCBI GI NO: 17017388 NR Description: MSI type nucleosome/chromatin assembly factor C
PIILAGEQQLAASTLHFPAQSKSAMDGGSGSSFQAVAAAAAMEMEEYLNWKKNAPVLYDLVMSHPLEWPSLTVQWLPSGSPASARSHRLVLGTHASDDSANHLMLVDAVLPLPPRLAAAAAAEDRAVPAPSVSIGRSAPHQGEVNRARCMPQRPYTVATKTCVDEVHVYHLGEDGEKGGADVVLRGHGAEGYGLAWSATKEGFLLSGSYDKKICLWDLKAGNGAPVLDAQQVFEAHEDVVEDVAWHLKDENLFGSVGDDCKFMMWDLRTNKPEQSIVAHQKEVNSLSFNPFNEWILATASGDGTIKLFDQRKLSRSLHAFDNHEGEVFQVEWNPNMETVLASHAADKRVMIWDVNRIGEEQADEDAGDGPPELLFVHGGHTAKISELSWNPSEKWVVASVAEDNVLQIWEMAESIYSDDNSNNANSASCLST

SEQ ID NO: 18226 - protein, 408 aa, Triticum aestivum
  peptide (1)..(408): Ceres Seq. ID no. 12465153
  misc_feature (204)..(242): Pfam Name: Pfam Description:  WD domain, G-beta repeat
  misc_feature (20)..(401): NCBI GI NO: 20977604 NR Description: nucleosome/chromatin assembly factor 104
  misc_feature (21)..(398): NCBI GI NO: 15236251 NR Description: WD-40 repeat protein (MSI3); protein id:At4g35050
  misc_feature (21)..(398): NCBI GI NO: 27754479 NR Description: putative WD-40 repeat protein (MSI3)
  misc_feature (21)..(398): NCBI GI NO: 2394233 NR Description: WD-40 repeat protein [Arabidopsis thaliana]
  misc_feature (21)..(395): NCBI GI NO: 21593624 NR Description: putative WD-40 repeat protein, MSI2
  misc_feature (21)..(395): NCBI GI NO: 15227294 NR Description: putative WD-40 repeat protein, MSI2
  misc_feature (21)..(394): NCBI GI NO: 39595121 NR Description: Hypothetical protein CBG03710
  misc_feature (21)..(394): NCBI GI NO: 17508127 NR Description: Synthetic multivulva protein LIN-53
  misc_feature (42)..(396): NCBI GI NO: 15237140 NR Description: WD-40 repeat protein MSI1
  misc_feature (53)..(396): NCBI GI NO: 17017388 NR Description: MSI type nucleosome/chromatin assembly factor C
MDGGSGSSFQAVAAAAAMEMEEYLNWKKNAPVLYDLVMSHPLEWPSLTVQWLPSGSPASARSHRLVLGTHASDDSANHLMLVDAVLPLPPRLAAAAAAEDRAVPAPSVSIGRSAPHQGEVNRARCMPQRPYTVATKTCVDEVHVYHLGEDGEKGGADVVLRGHGAEGYGLAWSATKEGFLLSGSYDKKICLWDLKAGNGAPVLDAQQVFEAHEDVVEDVAWHLKDENLFGSVGDDCKFMMWDLRTNKPEQSIVAHQKEVNSLSFNPFNEWILATASGDGTIKLFDQRKLSRSLHAFDNHEGEVFQVEWNPNMETVLASHAADKRVMIWDVNRIGEEQADEDAGDGPPELLFVHGGHTAKISELSWNPSEKWVVASVAEDNVLQIWEMAESIYSDDNSNNANSASCLST

SEQ ID NO: 18227 - protein, 391 aa, Triticum aestivum
  peptide (1)..(391): Ceres Seq. ID no. 12465154
  misc_feature (187)..(225): Pfam Name: Pfam Description:  WD domain, G-beta repeat
  misc_feature (3)..(384): NCBI GI NO: 20977604 NR Description: nucleosome/chromatin assembly factor 104
  misc_feature (4)..(381): NCBI GI NO: 15236251 NR Description: WD-40 repeat protein (MSI3); protein id:At4g35050
  misc_feature (4)..(381): NCBI GI NO: 27754479 NR Description: putative WD-40 repeat protein (MSI3)
  misc_feature (4)..(381): NCBI GI NO: 2394233 NR Description: WD-40 repeat protein [Arabidopsis thaliana]
  misc_feature (4)..(378): NCBI GI NO: 21593624 NR Description: putative WD-40 repeat protein, MSI2
  misc_feature (4)..(378): NCBI GI NO: 15227294 NR Description: putative WD-40 repeat protein, MSI2
  misc_feature (4)..(377): NCBI GI NO: 39595121 NR Description: Hypothetical protein CBG03710
  misc_feature (4)..(377): NCBI GI NO: 17508127 NR Description: Synthetic multivulva protein LIN-53
  misc_feature (25)..(379): NCBI GI NO: 15237140 NR Description: WD-40 repeat protein MSI1
  misc_feature (36)..(379): NCBI GI NO: 17017388 NR Description: MSI type nucleosome/chromatin assembly factor C
MEMEEYLNWKKNAPVLYDLVMSHPLEWPSLTVQWLPSGSPASARSHRLVLGTHASDDSANHLMLVDAVLPLPPRLAAAAAAEDRAVPAPSVSIGRSAPHQGEVNRARCMPQRPYTVATKTCVDEVHVYHLGEDGEKGGADVVLRGHGAEGYGLAWSATKEGFLLSGSYDKKICLWDLKAGNGAPVLDAQQVFEAHEDVVEDVAWHLKDENLFGSVGDDCKFMMWDLRTNKPEQSIVAHQKEVNSLSFNPFNEWILATASGDGTIKLFDQRKLSRSLHAFDNHEGEVFQVEWNPNMETVLASHAADKRVMIWDVNRIGEEQADEDAGDGPPELLFVHGGHTAKISELSWNPSEKWVVASVAEDNVLQIWEMAESIYSDDNSNNANSASCLST

SEQ ID NO: 18228 - DNA, 1198 bp, Triticum aestivum
  misc_feature (1)..(1198): Ceres Seq. ID no. 15176085
ctgataggcgatagcgataccattccttcctccacggagcgatggaagacacgacgccgcccgctgacgagaggccgctggtgctcctggggcagccgctcttcccggagttcgccaccgcgctggccggccgcttccggttcgtcctggtcgcggacgccgacgccgcgaccctggcccaggggagggcgctgctcatcgggctcaacccggtcacggacgaccacctggccgcgctcccggcgctcgggctcgtggcgggcatctccgtgggcgtcaaccacgtcgacctcgccgcctgccggcgccgcgggatcgccgtcaccaacgcaggcgccgccttcgcggtcgacacggccgactacggcgtcgggctcgtcgtcgccgtgctccgccggttggccgccgccgaggcccacgtccgggccggcaggtgggcggccgacggcgactatcctctcaccaccaaggtgagcggcaagcgggtggggatcgtggggctgggcaacatcggctcccgcatcgcgcggcgtctcgccgccttcggctgcgccgtctcctacaactcgaggtcgcccaagccgtcggcgccgtacgagttcgtcccggccgtgcgcgacatcgccgccggcagcgacgtgctggtgctatcctgcgcgctgacggaggagacgaggcacgtggtgaaccgggaggtgatggaggcgctggggaaggccggcgtactggtgaacgtcggccgcggcggcctcgtggacgagccggagctggtccgctgcctgcaggagggcgtcatcggcggcgccggcttggacgtgttcgagagcgagccggacgtgccgccggagctcttctccatggacaacgtcgtgctttcggcgcacagagccgtggccacgccggagtccatccgcggcacgatcgagctcgtcgcggccaacctcgacgccttcttcgcagggaagccactgctcagccccgtggagctctgagacaaccgccgccgccggagggttcttacaaggacgctgtcgtgagcggcggcaactagtgtgatcttgccgtccacggcggtaacgaataataagagaggacgtgacaaggcagctggtagaggcgaagcattggcttagggcgacgccatcctgtattttcctatctgtacacgatgtcatgtgaattatatcgacttgctgcc

SEQ ID NO: 18229 - protein, 316 aa, Triticum aestivum
  peptide (1)..(316): Ceres Seq. ID no. 15176086
  misc_feature (106)..(281): Pfam Name: Pfam Description:  D-isomer specific 2-hydroxyacid dehydrogenase
  misc_feature (7)..(316): NCBI GI NO: 38345308 NR Description: OSJNBb0085F13.13
  misc_feature (8)..(316): NCBI GI NO: 15222015 NR Description: oxidoreductase family [Arabidopsis thaliana]
  misc_feature (6)..(314): NCBI GI NO: 32488421 NR Description: OSJNBb0085F13.11
  misc_feature (8)..(316): NCBI GI NO: 38345306 NR Description: OSJNBb0085F13.6
  misc_feature (12)..(315): NCBI GI NO: 32488422 NR Description: OSJNBb0085F13.12
  misc_feature (57)..(314): NCBI GI NO: 7485630 NR Description: probable glycerate dehydrogenase
  misc_feature (5)..(316): NCBI GI NO: 21636166 NR Description: unknown [Aegilops tauschii]
  misc_feature (65)..(314): NCBI GI NO: 34904262 NR Description: putative Caulobacter crescentus D-isomer specific2-hydroxyacid dehydrogenases family
  misc_feature (3)..(314): NCBI GI NO: 17548726 NR Description: PUTATIVE D-3-PHOSPHOGLYCERATE DEHYDROGENASEOXIDOREDUCTASE PROTEIN
  misc_feature (63)..(314): NCBI GI NO: 16262721 NR Description: putative D-isomer specific 2-hydroxyacid
MEDTTPPADERPLVLLGQPLFPEFATALAGRFRFVLVADADAATLAQGRALLIGLNPVTDDHLAALPALGLVAGISVGVNHVDLAACRRRGIAVTNAGAAFAVDTADYGVGLVVAVLRRLAAAEAHVRAGRWAADGDYPLTTKVSGKRVGIVGLGNIGSRIARRLAAFGCAVSYNSRSPKPSAPYEFVPAVRDIAAGSDVLVLSCALTEETRHVVNREVMEALGKAGVLVNVGRGGLVDEPELVRCLQEGVIGGAGLDVFESEPDVPPELFSMDNVVLSAHRAVATPESIRGTIELVAANLDAFFAGKPLLSPVEL

SEQ ID NO: 18230 - DNA, 1824 bp, Triticum aestivum
  misc_feature (1)..(1824): Ceres Seq. ID no. 14301912
ctcccaaacccgacactccaacccctaccgagaggtgcacgaggaggccgcccaccaccaccaccaccaccacccaccatggccatggcgacggcgctccgcaagctctccgcccgcggccagcccctctcccgcctcacgccgctctactccatggcgtctctgccggcgacggaggagagatccgcagtcacctggcccaagcagttgaacgcgccgctggaggaggtcgaccccgagattgccgacatcatcgagctcgagaaggcccgccaatggaaggggctggagctcatcccgtcggagaacttcacctccctctcggtgatgcaggcggtgggatccgtcatgaccaacaagtacagcgaggggtaccccggcgcgagatactacggtggaaacgaatacattgatatggccgagacgctgtgccagaaacgtgctttggaggctttcaatttggacccagagaagtggggagtgaatgtgcaacctctatcgggttcacctgccaacttccatgtatacactgctctgctgaagccacatgatagaattatggctctggatcttcctcacggtggacatctttcccatggttaccagactgacacaaagaaaatctcagcagtttcaatattctttgagacaatgccttacagactggatgaaagcactggcttgattgattatggccagttggagaaaagtgccgttctttttaggccaaagttgattgttgctggtgctagtgcatatgcccgcctttatgattataaccgcatgcggaagatctgtgacaagcagaaggcagttcttctcgcagacatggcacatatcagtgggctagttgctgctggtgtcattccgtctccttttgagtatgcagatgtggtgactaccactacccacaagtctctccgtggtccacgtggagccatgatctttttccggaagggggtgaaagaaataaacaaacaagggaaggaggttaagtatgattttgaggacaaaatcaatgctgctgtcttcccaggtctgcaaggtggaccccataaccatactattactggcctggccgttgcgcttaagcaggcaactactcaggagtacagagcttatcaagagcaagttatgagtaactctgctagatttgctgagagcttgacttcaaaaggttacgacattgtctctggtgggactgataaccatttagttttggtgaacctcaagaaaaagggaatagatggttcacgtgtggagaaggttttagaaaatgtgcatattgcagcaaacaagaacacggttcctggtgatgtttcagctatggtacccggaggcatcaggatgggaacccccgcacttacatcaagaggatttgttgaggaggacttcgccaaggttgctgacttcttcgattcggcagtgaacttggccttgaaggttaaagctgcagcagcaggtaccaaactgaaggactttgttgccacattgcaatccgacagcaacatccaagctgaaattgcaaagcttcgccacgatgtggaggaatatgcgaaacaattcccaacaattggattcgagaaggagaccatgaagtacaagaactaagaactgctatgtttcaacagcaaggaagcaaacaagaagcacagtttgaggacaagtcatgtaaacaatagatccacgatgaagcgccaccttatgtaaaagtaatccaatcattttacagaatatgggaactttgtcgatagtttcttattgcaggcacatactgtaagatgcttcgctgatatgctatatgaaccgccatccttcttggac

SEQ ID NO: 18231 - protein, 536 aa, Triticum aestivum
  peptide (1)..(536): Ceres Seq. ID no. 14301913
  misc_feature (74)..(472): Pfam Name: Pfam Description:  Serine hydroxymethyltransferase
  misc_feature (18)..(536): NCBI GI NO: 31126793 NR Description: putative glycine hydroxymethyltransferase
  misc_feature (27)..(536): NCBI GI NO: 15235745 NR Description: glycine hydroxymethyltransferase like protein
  misc_feature (27)..(536): NCBI GI NO: 15809972 NR Description: AT4g37930/F20D10_50 [Arabidopsis thaliana]
  misc_feature (27)..(536): NCBI GI NO: 1346155 NR Description: Serine hydroxymethyltransferase 1
  misc_feature (27)..(536): NCBI GI NO: 1707998 NR Description: SERINE HYDROXYMETHYLTRANSFERASE
  misc_feature (27)..(536): NCBI GI NO: 1346156 NR Description: Serine hydroxymethyltransferase 2
  misc_feature (27)..(534): NCBI GI NO: 462187 NR Description: SERINE HYDROXYMETHYLTRANSFERASE
  misc_feature (29)..(535): NCBI GI NO: 30690394 NR Description: glycine hydroxymethyltransferase - like protein
  misc_feature (29)..(535): NCBI GI NO: 14334888 NR Description: putative glycine hydroxymethyltransferase
  misc_feature (29)..(535): NCBI GI NO: 30690400 NR Description: glycine hydroxymethyltransferase - like protein
LPNPTLQPLPRGARGGRPPPPPPPPTMAMATALRKLSARGQPLSRLTPLYSMASLPATEERSAVTWPKQLNAPLEEVDPEIADIIELEKARQWKGLELIPSENFTSLSVMQAVGSVMTNKYSEGYPGARYYGGNEYIDMAETLCQKRALEAFNLDPEKWGVNVQPLSGSPANFHVYTALLKPHDRIMALDLPHGGHLSHGYQTDTKKISAVSIFFETMPYRLDESTGLIDYGQLEKSAVLFRPKLIVAGASAYARLYDYNRMRKICDKQKAVLLADMAHISGLVAAGVIPSPFEYADVVTTTTHKSLRGPRGAMIFFRKGVKEINKQGKEVKYDFEDKINAAVFPGLQGGPHNHTITGLAVALKQATTQEYRAYQEQVMSNSARFAESLTSKGYDIVSGGTDNHLVLVNLKKKGIDGSRVEKVLENVHIAANKNTVPGDVSAMVPGGIRMGTPALTSRGFVEEDFAKVADFFDSAVNLALKVKAAAAGTKLKDFVATLQSDSNIQAEIAKLRHDVEEYAKQFPTIGFEKETMKYKN

SEQ ID NO: 18232 - protein, 510 aa, Triticum aestivum
  peptide (1)..(510): Ceres Seq. ID no. 14301914
  misc_feature (48)..(446): Pfam Name: Pfam Description:  Serine hydroxymethyltransferase
  misc_feature (1)..(510): NCBI GI NO: 31126793 NR Description: putative glycine hydroxymethyltransferase
  misc_feature (1)..(510): NCBI GI NO: 15235745 NR Description: glycine hydroxymethyltransferase like protein
  misc_feature (1)..(510): NCBI GI NO: 15809972 NR Description: AT4g37930/F20D10_50 [Arabidopsis thaliana]
  misc_feature (1)..(510): NCBI GI NO: 1346155 NR Description: Serine hydroxymethyltransferase 1
  misc_feature (1)..(510): NCBI GI NO: 1707998 NR Description: SERINE HYDROXYMETHYLTRANSFERASE
  misc_feature (1)..(510): NCBI GI NO: 1346156 NR Description: Serine hydroxymethyltransferase 2
  misc_feature (1)..(508): NCBI GI NO: 462187 NR Description: SERINE HYDROXYMETHYLTRANSFERASE
  misc_feature (3)..(509): NCBI GI NO: 30690394 NR Description: glycine hydroxymethyltransferase - like protein
  misc_feature (3)..(509): NCBI GI NO: 14334888 NR Description: putative glycine hydroxymethyltransferase
  misc_feature (3)..(509): NCBI GI NO: 30690400 NR Description: glycine hydroxymethyltransferase - like protein
MAMATALRKLSARGQPLSRLTPLYSMASLPATEERSAVTWPKQLNAPLEEVDPEIADIIELEKARQWKGLELIPSENFTSLSVMQAVGSVMTNKYSEGYPGARYYGGNEYIDMAETLCQKRALEAFNLDPEKWGVNVQPLSGSPANFHVYTALLKPHDRIMALDLPHGGHLSHGYQTDTKKISAVSIFFETMPYRLDESTGLIDYGQLEKSAVLFRPKLIVAGASAYARLYDYNRMRKICDKQKAVLLADMAHISGLVAAGVIPSPFEYADVVTTTTHKSLRGPRGAMIFFRKGVKEINKQGKEVKYDFEDKINAAVFPGLQGGPHNHTITGLAVALKQATTQEYRAYQEQVMSNSARFAESLTSKGYDIVSGGTDNHLVLVNLKKKGIDGSRVEKVLENVHIAANKNTVPGDVSAMVPGGIRMGTPALTSRGFVEEDFAKVADFFDSAVNLALKVKAAAAGTKLKDFVATLQSDSNIQAEIAKLRHDVEEYAKQFPTIGFEKETMKYKN

SEQ ID NO: 18233 - protein, 508 aa, Triticum aestivum
  peptide (1)..(508): Ceres Seq. ID no. 14301915
  misc_feature (46)..(444): Pfam Name: Pfam Description:  Serine hydroxymethyltransferase
  misc_feature (1)..(508): NCBI GI NO: 31126793 NR Description: putative glycine hydroxymethyltransferase
  misc_feature (1)..(508): NCBI GI NO: 15235745 NR Description: glycine hydroxymethyltransferase like protein
  misc_feature (1)..(508): NCBI GI NO: 15809972 NR Description: AT4g37930/F20D10_50 [Arabidopsis thaliana]
  misc_feature (1)..(508): NCBI GI NO: 1346155 NR Description: Serine hydroxymethyltransferase 1
  misc_feature (1)..(508): NCBI GI NO: 1707998 NR Description: SERINE HYDROXYMETHYLTRANSFERASE
  misc_feature (1)..(508): NCBI GI NO: 1346156 NR Description: Serine hydroxymethyltransferase 2
  misc_feature (1)..(506): NCBI GI NO: 462187 NR Description: SERINE HYDROXYMETHYLTRANSFERASE
  misc_feature (1)..(507): NCBI GI NO: 30690394 NR Description: glycine hydroxymethyltransferase - like protein
  misc_feature (1)..(507): NCBI GI NO: 14334888 NR Description: putative glycine hydroxymethyltransferase
  misc_feature (1)..(507): NCBI GI NO: 30690400 NR Description: glycine hydroxymethyltransferase - like protein
MATALRKLSARGQPLSRLTPLYSMASLPATEERSAVTWPKQLNAPLEEVDPEIADIIELEKARQWKGLELIPSENFTSLSVMQAVGSVMTNKYSEGYPGARYYGGNEYIDMAETLCQKRALEAFNLDPEKWGVNVQPLSGSPANFHVYTALLKPHDRIMALDLPHGGHLSHGYQTDTKKISAVSIFFETMPYRLDESTGLIDYGQLEKSAVLFRPKLIVAGASAYARLYDYNRMRKICDKQKAVLLADMAHISGLVAAGVIPSPFEYADVVTTTTHKSLRGPRGAMIFFRKGVKEINKQGKEVKYDFEDKINAAVFPGLQGGPHNHTITGLAVALKQATTQEYRAYQEQVMSNSARFAESLTSKGYDIVSGGTDNHLVLVNLKKKGIDGSRVEKVLENVHIAANKNTVPGDVSAMVPGGIRMGTPALTSRGFVEEDFAKVADFFDSAVNLALKVKAAAAGTKLKDFVATLQSDSNIQAEIAKLRHDVEEYAKQFPTIGFEKETMKYKN

SEQ ID NO: 18234 - DNA, 1792 bp, Triticum aestivum
  misc_feature (1)..(1792): Ceres Seq. ID no. 14308053
aaagaatttcagacagctaaacaaactcggccgcccagcttcctcctcctcctcctccccctccttcccctcgacctgctggtgaccgccgtctgccttctccgacgaatctccccgcgagttcggcctagctccacagggagtctcgaatctcccctttgccgctgagtcgaggaagaagatcggctcgggttcgcttgctcgttcgctcgaggacgagattcagcggcgggactgattgattgattgggcgtgagcgagagcggatgaaggggaagggcggggcgctcgacaggaggtcgtctgcgaggtggaggctgctgctgctctgcgccttcagctttgggctcggcatgctcttcaccaaccgcttctggacagcaccaagtaccaataaccacatcatgtcccaacacaggagacaagaccaggagttgcaacttgtgtcagaggattgcaatacaaagaggaagcatggggagcacaaggatataatgggagaggtaaccaggacccatgaagccatacaattgttggataagtcaatctcaacgctgcagatggagcttgcagcaaagcgaagcacgttggaactggtccgttctggtgtgccagtaacttcagaaactagtcaaccaaggaaaaaagcattcgttgtcgttggagttaacaccgctttcagtagccgcaagcgtcgtgattcagtcagggagacatggatgcctcaaggtgagaagctgctgcagcttgaagaacagaagggaatagttatccgcttcactataggccatagtgctacatccaatagtatattggacaaagcaatagatgcagaagatgaacagcatcacgactttcttagactggaccatgtcgaggggtatcatgaactctccgcaaagacaaaaatcttcttctccacgtccgtgggcatttgggatgctgactttttcgtcaaggtcgatgatgatgtgcatgtgaacttaggaatgcttgccactacccttgcgaggcataaagcgaaaccaagaacttatattggctgcatgaagtcaggcccagttctggctgacaagaatctgaagtaccatgaacctgaggcctggaaatttggggaggatggaaacaagtattttcgccatgctactggacagatatatgctatctcaaaagatcttgcgacctatatctcaataaatcaacctatcttacacaagtatgcgaacgaagatgtatcacttgggtcatggtttatcgggttagaggttaatcatattgatgaaaggaacatgtgctgcggaactccaccagactgtgagtggaaagggcaagctggcaatatctgcgtggcatcctttgattggagctgcagcggcatatgcaagtccgtcgagagactcaaggatgtacatgctcgatgcggcgaaggcgattcttctgtttggagtgatctaatctagctaataccctccctggcgtaaatatgtagcatcctcagtaaaccctgacgatcgtgcctcagtggctacaactgaaatgaccgaaattgcacaacaggtccgcagatggactatatttctggtagttcggtctgaggcaacacatgtagtgtagatgatacttgttcagtcgttgagagatctcagtagatgggaattgctttgtgccatcacctgtgacgtcagtagtgttagaagagagaccaaagcgagcgagttacacagctgctgtgtaccacagattaggggaaaacatctactgcaaattttgatcaattcttttgatgtcggtt

SEQ ID NO: 18235 - protein, 397 aa, Triticum aestivum
  peptide (1)..(397): Ceres Seq. ID no. 14308054
  misc_feature (142)..(340): Pfam Name: Pfam Description:  Galactosyltransferase
  misc_feature (13)..(396): NCBI GI NO: 4138265 NR Description: Avr9 elicitor response protein [Nicotiana tabacum]
  misc_feature (13)..(397): NCBI GI NO: 30699558 NR Description: Avr9 elicitor response protein -related
  misc_feature (13)..(397): NCBI GI NO: 12323294 NR Description: putative
  misc_feature (13)..(397): NCBI GI NO: 34365705 NR Description: At1g77810 [Arabidopsis thaliana]
  misc_feature (6)..(394): NCBI GI NO: 15220440 NR Description: galactosyltransferase family
  misc_feature (2)..(393): NCBI GI NO: 15225684 NR Description: galactosyltransferase family
  misc_feature (8)..(393): NCBI GI NO: 18395060 NR Description: galactosyltransferase family
  misc_feature (13)..(393): NCBI GI NO: 15223337 NR Description: galactosyltransferase family
  misc_feature (13)..(392): NCBI GI NO: 18416895 NR Description: galactosyltransferase family
  misc_feature (21)..(394): NCBI GI NO: 34907342 NR Description: putative elicitor response protein
MKGKGGALDRRSSARWRLLLLCAFSFGLGMLFTNRFWTAPSTNNHIMSQHRRQDQELQLVSEDCNTKRKHGEHKDIMGEVTRTHEAIQLLDKSISTLQMELAAKRSTLELVRSGVPVTSETSQPRKKAFVVVGVNTAFSSRKRRDSVRETWMPQGEKLLQLEEQKGIVIRFTIGHSATSNSILDKAIDAEDEQHHDFLRLDHVEGYHELSAKTKIFFSTSVGIWDADFFVKVDDDVHVNLGMLATTLARHKAKPRTYIGCMKSGPVLADKNLKYHEPEAWKFGEDGNKYFRHATGQIYAISKDLATYISINQPILHKYANEDVSLGSWFIGLEVNHIDERNMCCGTPPDCEWKGQAGNICVASFDWSCSGICKSVERLKDVHARCGEGDSSVWSDLI

SEQ ID NO: 18236 - protein, 368 aa, Triticum aestivum
  peptide (1)..(368): Ceres Seq. ID no. 14308055
  misc_feature (113)..(311): Pfam Name: Pfam Description:  Galactosyltransferase
  misc_feature (1)..(367): NCBI GI NO: 4138265 NR Description: Avr9 elicitor response protein [Nicotiana tabacum]
  misc_feature (1)..(368): NCBI GI NO: 30699558 NR Description: Avr9 elicitor response protein -related
  misc_feature (1)..(368): NCBI GI NO: 12323294 NR Description: putative
  misc_feature (1)..(368): NCBI GI NO: 34365705 NR Description: At1g77810 [Arabidopsis thaliana]
  misc_feature (1)..(365): NCBI GI NO: 15220440 NR Description: galactosyltransferase family
  misc_feature (1)..(364): NCBI GI NO: 15225684 NR Description: galactosyltransferase family
  misc_feature (1)..(364): NCBI GI NO: 18395060 NR Description: galactosyltransferase family
  misc_feature (1)..(364): NCBI GI NO: 15223337 NR Description: galactosyltransferase family
  misc_feature (1)..(363): NCBI GI NO: 18416895 NR Description: galactosyltransferase family
  misc_feature (1)..(365): NCBI GI NO: 34907342 NR Description: putative elicitor response protein
MLFTNRFWTAPSTNNHIMSQHRRQDQELQLVSEDCNTKRKHGEHKDIMGEVTRTHEAIQLLDKSISTLQMELAAKRSTLELVRSGVPVTSETSQPRKKAFVVVGVNTAFSSRKRRDSVRETWMPQGEKLLQLEEQKGIVIRFTIGHSATSNSILDKAIDAEDEQHHDFLRLDHVEGYHELSAKTKIFFSTSVGIWDADFFVKVDDDVHVNLGMLATTLARHKAKPRTYIGCMKSGPVLADKNLKYHEPEAWKFGEDGNKYFRHATGQIYAISKDLATYISINQPILHKYANEDVSLGSWFIGLEVNHIDERNMCCGTPPDCEWKGQAGNICVASFDWSCSGICKSVERLKDVHARCGEGDSSVWSDLI

SEQ ID NO: 18237 - protein, 351 aa, Triticum aestivum
  peptide (1)..(351): Ceres Seq. ID no. 14308056
  misc_feature (96)..(294): Pfam Name: Pfam Description:  Galactosyltransferase
  misc_feature (1)..(350): NCBI GI NO: 4138265 NR Description: Avr9 elicitor response protein [Nicotiana tabacum]
  misc_feature (1)..(351): NCBI GI NO: 30699558 NR Description: Avr9 elicitor response protein -related
  misc_feature (1)..(351): NCBI GI NO: 12323294 NR Description: putative
  misc_feature (1)..(351): NCBI GI NO: 34365705 NR Description: At1g77810 [Arabidopsis thaliana]
  misc_feature (1)..(348): NCBI GI NO: 15220440 NR Description: galactosyltransferase family
  misc_feature (1)..(347): NCBI GI NO: 15225684 NR Description: galactosyltransferase family
  misc_feature (1)..(347): NCBI GI NO: 18395060 NR Description: galactosyltransferase family
  misc_feature (1)..(347): NCBI GI NO: 15223337 NR Description: galactosyltransferase family
  misc_feature (1)..(346): NCBI GI NO: 18416895 NR Description: galactosyltransferase family
  misc_feature (1)..(348): NCBI GI NO: 34907342 NR Description: putative elicitor response protein
MSQHRRQDQELQLVSEDCNTKRKHGEHKDIMGEVTRTHEAIQLLDKSISTLQMELAAKRSTLELVRSGVPVTSETSQPRKKAFVVVGVNTAFSSRKRRDSVRETWMPQGEKLLQLEEQKGIVIRFTIGHSATSNSILDKAIDAEDEQHHDFLRLDHVEGYHELSAKTKIFFSTSVGIWDADFFVKVDDDVHVNLGMLATTLARHKAKPRTYIGCMKSGPVLADKNLKYHEPEAWKFGEDGNKYFRHATGQIYAISKDLATYISINQPILHKYANEDVSLGSWFIGLEVNHIDERNMCCGTPPDCEWKGQAGNICVASFDWSCSGICKSVERLKDVHARCGEGDSSVWSDLI

SEQ ID NO: 18238 - DNA, 1580 bp, Triticum aestivum
  misc_feature (1)..(1580): Ceres Seq. ID no. 13596244
ggttctgacccccgattcggtccgtcgattgtgatttcccctcgatttcgtgcgggattagtggccggaattaatcgccatgacggcgtcgtcgccgatggtgctgtccctcctgctcttcgcctcgctcacggcgctgctcgtcctggcccctcgcacggcgtcgccgccgctgccgctggccgtggtggttggggacgaggaggcgccgccggccgccgctggtggtgctgcggggatcagcggcggaggggcgggagttgaggagggaccggaggacctcgcgctataccggcgcgtgacgctcgacgccggcgagggcgcggcggtggcgtccaaggtggcgttcatgttcctgaccaactccgacctcaccttcgcgccgctttgggagcgcttcttcgcggggcacgctgaccagttcaacgtctacgtgcacgcagacccggcggtgcggctgcggctcccccctacgccttccttccggggccgcttcgtcgcggccaagccgacgcggcgcggggacccgagcctcatcgctgcggcgcggcggctgcttgtcgccgcgctactcgacgacccggccaacgcctacttcgcgctgctctcgcagcactgcgtcccgctccactccttcccgcggctctacgaggcgctcttcccgcccaaggccgcgcaccaccaccgcctcccgagctatatcgaggtgctcaccggcgagccccagatgcccgcgcgctacgtggcgcgcggtgacgacgccatgctcccggaggtgcccttcgaccggttccgcatcggctcccagttcttcacgctggcccgccgccacgccgtgctagtcgtccgcgagcgccgtctctggcgaaagtttagggagccgtgcctgccggagtcgcagggctcgtgctacccggaggagcactatttcccgacgcttctcgacatggccgaccccgccggctgcacccggtacacgctcacgcgcgtcaactggaccgacagcttcgagggccacccgcacacgtattccgcgccagaggtgtcgccgcggctcatcgccgagctacgccagtccaacagctccacctatgagcacatgttcgcgcgcaagttcgcgcccgactgccttggcccgctcatggccatcgccgacaccgtcatcttcaaagattgatcgatgcggtgctctgcatcatagatacacgtaggaggtctatccgttgagagttgcgcgtgcgagaagacgaaagcagtgtcgttattctccgttgaatcttcacacggttcagactggtgctttgcctctgtgccctccaccgttcttctcctcctggtacttctatgtagacttaagtggcaacaacctaatgcaaagcggcaggtgttgcatctgatggtcagtccatccatccactgtatttttcctacctcgtgcggctgcctaaggctgctgttctgttgaaatgcgtaaaaggatggattgtggcggtgttctgttcagctgaaactgaaaaggaactttgtaccggtttatttcagcttgtgtacataaccaaggaataaaataatcattctgc

SEQ ID NO: 18239 - protein, 365 aa, Triticum aestivum
  peptide (1)..(365): Ceres Seq. ID no. 13596245
  misc_feature (134)..(245): Pfam Name: Pfam Description:  Arabidopsis protein of unknown function, DUF266
  misc_feature (3)..(365): NCBI GI NO: 34394888 NR Description: unknown protein
  misc_feature (87)..(365): NCBI GI NO: 15231121 NR Description: expressed protein [Arabidopsis thaliana]
  misc_feature (87)..(365): NCBI GI NO: 30688302 NR Description: expressed protein [Arabidopsis thaliana]
  misc_feature (62)..(365): NCBI GI NO: 15236739 NR Description: expressed protein [Arabidopsis thaliana]
  misc_feature (87)..(365): NCBI GI NO: 15239393 NR Description: hypothetical protein [Arabidopsis thaliana]
  misc_feature (67)..(362): NCBI GI NO: 34907318 NR Description: contains ESTsAU096118
  misc_feature (87)..(362): NCBI GI NO: 38344090 NR Description: OSJNBb0056F09.13
  misc_feature (87)..(331): NCBI GI NO: 26452247 NR Description: unknown protein [Arabidopsis thaliana]
  misc_feature (86)..(338): NCBI GI NO: 17065016 NR Description: Unknown protein [Arabidopsis thaliana]
  misc_feature (86)..(338): NCBI GI NO: 22327910 NR Description: expressed protein [Arabidopsis thaliana]
MTASSPMVLSLLLFASLTALLVLAPRTASPPLPLAVVVGDEEAPPAAAGGAAGISGGGAGVEEGPEDLALYRRVTLDAGEGAAVASKVAFMFLTNSDLTFAPLWERFFAGHADQFNVYVHADPAVRLRLPPTPSFRGRFVAAKPTRRGDPSLIAAARRLLVAALLDDPANAYFALLSQHCVPLHSFPRLYEALFPPKAAHHHRLPSYIEVLTGEPQMPARYVARGDDAMLPEVPFDRFRIGSQFFTLARRHAVLVVRERRLWRKFREPCLPESQGSCYPEEHYFPTLLDMADPAGCTRYTLTRVNWTDSFEGHPHTYSAPEVSPRLIAELRQSNSSTYEHMFARKFAPDCLGPLMAIADTVIFKD

SEQ ID NO: 18240 - protein, 359 aa, Triticum aestivum
  peptide (1)..(359): Ceres Seq. ID no. 13596246
  misc_feature (128)..(239): Pfam Name: Pfam Description:  Arabidopsis protein of unknown function, DUF266
  misc_feature (1)..(359): NCBI GI NO: 34394888 NR Description: unknown protein
  misc_feature (81)..(359): NCBI GI NO: 15231121 NR Description: expressed protein [Arabidopsis thaliana]
  misc_feature (81)..(359): NCBI GI NO: 30688302 NR Description: expressed protein [Arabidopsis thaliana]
  misc_feature (56)..(359): NCBI GI NO: 15236739 NR Description: expressed protein [Arabidopsis thaliana]
  misc_feature (81)..(359): NCBI GI NO: 15239393 NR Description: hypothetical protein [Arabidopsis thaliana]
  misc_feature (61)..(356): NCBI GI NO: 34907318 NR Description: contains ESTsAU096118
  misc_feature (81)..(356): NCBI GI NO: 38344090 NR Description: OSJNBb0056F09.13
  misc_feature (81)..(325): NCBI GI NO: 26452247 NR Description: unknown protein [Arabidopsis thaliana]
  misc_feature (80)..(332): NCBI GI NO: 17065016 NR Description: Unknown protein [Arabidopsis thaliana]
  misc_feature (80)..(332): NCBI GI NO: 22327910 NR Description: expressed protein [Arabidopsis thaliana]
MVLSLLLFASLTALLVLAPRTASPPLPLAVVVGDEEAPPAAAGGAAGISGGGAGVEEGPEDLALYRRVTLDAGEGAAVASKVAFMFLTNSDLTFAPLWERFFAGHADQFNVYVHADPAVRLRLPPTPSFRGRFVAAKPTRRGDPSLIAAARRLLVAALLDDPANAYFALLSQHCVPLHSFPRLYEALFPPKAAHHHRLPSYIEVLTGEPQMPARYVARGDDAMLPEVPFDRFRIGSQFFTLARRHAVLVVRERRLWRKFREPCLPESQGSCYPEEHYFPTLLDMADPAGCTRYTLTRVNWTDSFEGHPHTYSAPEVSPRLIAELRQSNSSTYEHMFARKFAPDCLGPLMAIADTVIFKD

SEQ ID NO: 18241 - protein, 275 aa, Triticum aestivum
  peptide (1)..(275): Ceres Seq. ID no. 13596247
  misc_feature (44)..(155): Pfam Name: Pfam Description:  Arabidopsis protein of unknown function, DUF266
  misc_feature (1)..(275): NCBI GI NO: 34394888 NR Description: unknown protein
  misc_feature (1)..(275): NCBI GI NO: 15231121 NR Description: expressed protein [Arabidopsis thaliana]
  misc_feature (1)..(275): NCBI GI NO: 30688302 NR Description: expressed protein [Arabidopsis thaliana]
  misc_feature (1)..(275): NCBI GI NO: 15236739 NR Description: expressed protein [Arabidopsis thaliana]
  misc_feature (1)..(275): NCBI GI NO: 15239393 NR Description: hypothetical protein [Arabidopsis thaliana]
  misc_feature (1)..(272): NCBI GI NO: 34907318 NR Description: contains ESTsAU096118
  misc_feature (1)..(272): NCBI GI NO: 38344090 NR Description: OSJNBb0056F09.13
  misc_feature (1)..(241): NCBI GI NO: 26452247 NR Description: unknown protein [Arabidopsis thaliana]
  misc_feature (1)..(248): NCBI GI NO: 17065016 NR Description: Unknown protein [Arabidopsis thaliana]
  misc_feature (1)..(248): NCBI GI NO: 22327910 NR Description: expressed protein [Arabidopsis thaliana]
MFLTNSDLTFAPLWERFFAGHADQFNVYVHADPAVRLRLPPTPSFRGRFVAAKPTRRGDPSLIAAARRLLVAALLDDPANAYFALLSQHCVPLHSFPRLYEALFPPKAAHHHRLPSYIEVLTGEPQMPARYVARGDDAMLPEVPFDRFRIGSQFFTLARRHAVLVVRERRLWRKFREPCLPESQGSCYPEEHYFPTLLDMADPAGCTRYTLTRVNWTDSFEGHPHTYSAPEVSPRLIAELRQSNSSTYEHMFARKFAPDCLGPLMAIADTVIFKD

SEQ ID NO: 18242 - DNA, 1533 bp, Triticum aestivum
  misc_feature (1)..(1533): Ceres Seq. ID no. 14302824
ctctttcggtcttggaatccttcctccctcccttccctccgtgtcgcccgcgctccgcctaccggatcgcaattccgcatcgccccgccgcagccccagccccagccccggccaggcccccatggcgaggcgatccgccccgctcctccgccgcctggtctcctccgcgccgcccctcccgggccacggcggcggcgcgcgccgcacggtcacctacatgccccgcccgggcgatggcaccccgcgccccgtcacgctcatcccgggcgacggcatcggacccctcgtcaccggcgccgtggagcaggtcatggaggccatgcacgcgcccgtctacttcgagtcctacgacgtccacggcgacatgcccgccgtgccgcccgccgtcatcgaatccatccgccgcaacaaggtctgcctcaagggcggcctcgccacccccgtcggcgggggcgtctcctccctcaacatgcagctccgcaaggagctcgacctcttcgcctccctcgtcaactgcgccaacgtccccggcctgcccaccaggcaccagaacgtcgacatcgtcgtcatcagggagaacaccgagggcgagtactcgggcctcgagcacgaggtcgtcccgggggtcgtcgagagcctcaaggtgatcacgaagttttgctccgagaggattgccaaatatgccttcgagtatgcttaccttaactaccggaagaaagtcacagcagtgcataaagcaaacatcatgaaacttgctgatggtttgttcttggagtcttgccgtgagattgctgctaaatatccaagtattgagtataatgaaatcattgttgacaactgctgcatgcaacttgtttcaaggcctgagcaatttgatgttatggttacgcctaacctttacggcaatttggttgccaacacagctgcaggtcttgttggaggaacaggtgtcatgccaggaggtaatgtaggtcaggatcatgccatcttcgagcaaggtgcttctgcaggaaatgtgggaaatgacaatcttgtagagcagcagaaagcaaaccctgtcgccctgctcctgtcgtctgctatgatgttgaggcatttgcagttcccgtcgttcgctgaccgtctggaaactgcggtgaagcgggtcattgcagatggcaagtacaggacaaaggatctgggcggcaccagcaccacccaggaagttactgatgcagtgatcgctaatctggattaggtacctgatgcacgcctgaagaatcgattcttttggaggactggtttaaaggtcccaactcctgagtgctattttttccgtacagcattagatcggcaattatgtttgagaaataattgaggaacccacgaggattattcttcccactatactttgtagcaaggcaaaacaccttgtgttgcagaggggatagctggctaccttaaatttaaacggcatgtattgaaagtttattctcagttcttattcgtggttatcactcccatggaaccggaaatctggtcctctttttcagt

SEQ ID NO: 18243 - protein, 411 aa, Triticum aestivum
  peptide (1)..(411): Ceres Seq. ID no. 14302825
  misc_feature (84)..(406): Pfam Name: Pfam Description:  Isocitrate/isopropylmalate dehydrogenase
  misc_feature (41)..(411): NCBI GI NO: 3790188 NR Description: NAD-dependent isocitrate dehydrogenase
  misc_feature (41)..(411): NCBI GI NO: 15236932 NR Description: isocitrate dehydrogenase
  misc_feature (41)..(411): NCBI GI NO: 21537157 NR Description: NAD+ dependent isocitrate dehydrogenase subunit 1
  misc_feature (41)..(411): NCBI GI NO: 1766046 NR Description: NAD+ dependent isocitrate dehydrogenase subunit 1
  misc_feature (41)..(411): NCBI GI NO: 15237075 NR Description: isocitrate dehydrogenase
  misc_feature (41)..(411): NCBI GI NO: 28974502 NR Description: NAD-dependent isocitrate dehydrogenase beta subunit
  misc_feature (41)..(411): NCBI GI NO: 28974498 NR Description: NAD-dependent isocitrate dehydrogenase beta subunit
  misc_feature (41)..(411): NCBI GI NO: 15227370 NR Description: isocitrate dehydrogenase
  misc_feature (68)..(411): NCBI GI NO: 28974504 NR Description: NAD-dependent isocitrate dehydrogenase gamma subunit
  misc_feature (84)..(411): NCBI GI NO: 32408949 NR Description: hypothetical protein [Neurospora crassa]
SFGLGILPPSLPSVSPALRLPDRNSASPRRSPSPSPGQAPMARRSAPLLRRLVSSAPPLPGHGGGARRTVTYMPRPGDGTPRPVTLIPGDGIGPLVTGAVEQVMEAMHAPVYFESYDVHGDMPAVPPAVIESIRRNKVCLKGGLATPVGGGVSSLNMQLRKELDLFASLVNCANVPGLPTRHQNVDIVVIRENTEGEYSGLEHEVVPGVVESLKVITKFCSERIAKYAFEYAYLNYRKKVTAVHKANIMKLADGLFLESCREIAAKYPSIEYNEIIVDNCCMQLVSRPEQFDVMVTPNLYGNLVANTAAGLVGGTGVMPGGNVGQDHAIFEQGASAGNVGNDNLVEQQKANPVALLLSSAMMLRHLQFPSFADRLETAVKRVIADGKYRTKDLGGTSTTQEVTDAVIANLD

SEQ ID NO: 18244 - protein, 371 aa, Triticum aestivum
  peptide (1)..(371): Ceres Seq. ID no. 14302826
  misc_feature (44)..(366): Pfam Name: Pfam Description:  Isocitrate/isopropylmalate dehydrogenase
  misc_feature (1)..(371): NCBI GI NO: 3790188 NR Description: NAD-dependent isocitrate dehydrogenase
  misc_feature (1)..(371): NCBI GI NO: 15236932 NR Description: isocitrate dehydrogenase
  misc_feature (1)..(371): NCBI GI NO: 21537157 NR Description: NAD+ dependent isocitrate dehydrogenase subunit 1
  misc_feature (1)..(371): NCBI GI NO: 1766046 NR Description: NAD+ dependent isocitrate dehydrogenase subunit 1
  misc_feature (1)..(371): NCBI GI NO: 15237075 NR Description: isocitrate dehydrogenase
  misc_feature (1)..(371): NCBI GI NO: 28974502 NR Description: NAD-dependent isocitrate dehydrogenase beta subunit
  misc_feature (1)..(371): NCBI GI NO: 28974498 NR Description: NAD-dependent isocitrate dehydrogenase beta subunit
  misc_feature (1)..(371): NCBI GI NO: 15227370 NR Description: isocitrate dehydrogenase
  misc_feature (28)..(371): NCBI GI NO: 28974504 NR Description: NAD-dependent isocitrate dehydrogenase gamma subunit
  misc_feature (44)..(371): NCBI GI NO: 32408949 NR Description: hypothetical protein [Neurospora crassa]
MARRSAPLLRRLVSSAPPLPGHGGGARRTVTYMPRPGDGTPRPVTLIPGDGIGPLVTGAVEQVMEAMHAPVYFESYDVHGDMPAVPPAVIESIRRNKVCLKGGLATPVGGGVSSLNMQLRKELDLFASLVNCANVPGLPTRHQNVDIVVIRENTEGEYSGLEHEVVPGVVESLKVITKFCSERIAKYAFEYAYLNYRKKVTAVHKANIMKLADGLFLESCREIAAKYPSIEYNEIIVDNCCMQLVSRPEQFDVMVTPNLYGNLVANTAAGLVGGTGVMPGGNVGQDHAIFEQGASAGNVGNDNLVEQQKANPVALLLSSAMMLRHLQFPSFADRLETAVKRVIADGKYRTKDLGGTSTTQEVTDAVIANLD

SEQ ID NO: 18245 - protein, 339 aa, Triticum aestivum
  peptide (1)..(339): Ceres Seq. ID no. 14302827
  misc_feature (12)..(334): Pfam Name: Pfam Description:  Isocitrate/isopropylmalate dehydrogenase
  misc_feature (1)..(339): NCBI GI NO: 3790188 NR Description: NAD-dependent isocitrate dehydrogenase
  misc_feature (1)..(339): NCBI GI NO: 15236932 NR Description: isocitrate dehydrogenase
  misc_feature (1)..(339): NCBI GI NO: 21537157 NR Description: NAD+ dependent isocitrate dehydrogenase subunit 1
  misc_feature (1)..(339): NCBI GI NO: 1766046 NR Description: NAD+ dependent isocitrate dehydrogenase subunit 1
  misc_feature (1)..(339): NCBI GI NO: 15237075 NR Description: isocitrate dehydrogenase
  misc_feature (1)..(339): NCBI GI NO: 28974502 NR Description: NAD-dependent isocitrate dehydrogenase beta subunit
  misc_feature (1)..(339): NCBI GI NO: 28974498 NR Description: NAD-dependent isocitrate dehydrogenase beta subunit
  misc_feature (1)..(339): NCBI GI NO: 15227370 NR Description: isocitrate dehydrogenase
  misc_feature (1)..(339): NCBI GI NO: 28974504 NR Description: NAD-dependent isocitrate dehydrogenase gamma subunit
  misc_feature (12)..(339): NCBI GI NO: 32408949 NR Description: hypothetical protein [Neurospora crassa]
MPRPGDGTPRPVTLIPGDGIGPLVTGAVEQVMEAMHAPVYFESYDVHGDMPAVPPAVIESIRRNKVCLKGGLATPVGGGVSSLNMQLRKELDLFASLVNCANVPGLPTRHQNVDIVVIRENTEGEYSGLEHEVVPGVVESLKVITKFCSERIAKYAFEYAYLNYRKKVTAVHKANIMKLADGLFLESCREIAAKYPSIEYNEIIVDNCCMQLVSRPEQFDVMVTPNLYGNLVANTAAGLVGGTGVMPGGNVGQDHAIFEQGASAGNVGNDNLVEQQKANPVALLLSSAMMLRHLQFPSFADRLETAVKRVIADGKYRTKDLGGTSTTQEVTDAVIANLD

SEQ ID NO: 18246 - DNA, 865 bp, Triticum aestivum
  misc_feature (1)..(865): Ceres Seq. ID no. 12584376
atccatccattcattctcctaccgaactctcagcctctcacacaactacaacgccgcaaaagagcatcaatcaaaatccagcagatcatcaagaggagcagcaaatccatctccatgggagcagggatgaagcgcgcgagggaggaggagccaaccgtctcgctggcgctgtccctcagcacagactcctcggcgtcgaccacgacgtcggacgactcgggcaccggtgcggctacgccggcggcgcccgggaagaggacaaggcggaggagagtagtggcgacgtcaggggaaggggacttcgtctgcaagacttgcggccgggccttcgagacgttccaggcgctgggcggccaccggaccagccacctccgcggccgccacgggctggagctcggcgtcggcgttgccagggccatcaaggagcggcaaaggcgcgaggacaggcagcagcacgactgccacatctgcgggctgggcttcgagacgggccaggcgctcggcggccacatgcgtcggcaccgcgaggagatggcgctcgaccggtgggtcgcgctgtcggatcaggaggcggggcaccaggccgccgccgaccggctgcctgtcttgctcgagctgttcgtctagttggctaggtggatatctctgtttcttactacagtataatccaggacttgtacatgtcttttgaatcaggtaggttacgatagaatatgttattgctggttagcatttccgctcgtgggattttgctcggaatcggttcgttttcttaaccgatcgactggggatttagatacactttgtgcttacattagacaaaaaattgttttgttctatatgcaattgacagattcttgcactt

SEQ ID NO: 18247 - protein, 210 aa, Triticum aestivum
  peptide (1)..(210): Ceres Seq. ID no. 12584377
PSIHSPTELSASHTTTTPQKSINQNPADHQEEQQIHLHGSRDEAREGGGANRLAGAVPQHRLLGVDHDVGRLGHRCGYAGGAREEDKAEESSGDVRGRGLRLQDLRPGLRDVPGAGRPPDQPPPRPPRAGARRRRCQGHQGAAKARGQAAARLPHLRAGLRDGPGARRPHASAPRGDGARPVGRAVGSGGGAPGRRRPAACLARAVRLVG

SEQ ID NO: 18248 - protein, 208 aa, Triticum aestivum
  peptide (1)..(208): Ceres Seq. ID no. 12584378
  misc_feature (152)..(174): Pfam Name: Pfam Description:  Zinc finger, C2H2 type
  misc_feature (43)..(207): NCBI GI NO: 29124140 NR Description: putative Cys2/His2 zinc-finger protein
  misc_feature (76)..(208): NCBI GI NO: 29124117 NR Description: putative Cys2/His2 zinc-finger protein
  misc_feature (94)..(201): NCBI GI NO: 18652814 NR Description: C2H2 zinc finger protein [Oryza sativa]
  misc_feature (94)..(201): NCBI GI NO: 34908122 NR Description: P0031D11.19
  misc_feature (92)..(177): NCBI GI NO: 34908110 NR Description: P0031D11.12
  misc_feature (99)..(175): NCBI GI NO: 32172482 NR Description: C2H2 type zinc finger transcription factor ZFP17
  misc_feature (92)..(177): NCBI GI NO: 30420734 NR Description: zinc finger transcription factor ZFP19
  misc_feature (100)..(177): NCBI GI NO: 2346976 NR Description: ZPT2-13 [Petunia x hybrida]
  misc_feature (100)..(175): NCBI GI NO: 2346974 NR Description: ZPT2-12 [Petunia x hybrida]
  misc_feature (101)..(191): NCBI GI NO: 1786134 NR Description: PEThy;ZPT2-5 [Petunia x hybrida]
IHPFILLPNSQPLTQLQRRKRASIKIQQIIKRSSKSISMGAGMKRAREEEPTVSLALSLSTDSSASTTTSDDSGTGAATPAAPGKRTRRRRVVATSGEGDFVCKTCGRAFETFQALGGHRTSHLRGRHGLELGVGVARAIKERQRREDRQQHDCHICGLGFETGQALGGHMRRHREEMALDRWVALSDQEAGHQAAADRLPVLLELFV

SEQ ID NO: 18249 - protein, 170 aa, Triticum aestivum
  peptide (1)..(170): Ceres Seq. ID no. 12584379
  misc_feature (114)..(136): Pfam Name: Pfam Description:  Zinc finger, C2H2 type
  misc_feature (5)..(169): NCBI GI NO: 29124140 NR Description: putative Cys2/His2 zinc-finger protein
  misc_feature (38)..(170): NCBI GI NO: 29124117 NR Description: putative Cys2/His2 zinc-finger protein
  misc_feature (56)..(163): NCBI GI NO: 18652814 NR Description: C2H2 zinc finger protein [Oryza sativa]
  misc_feature (56)..(163): NCBI GI NO: 34908122 NR Description: P0031D11.19
  misc_feature (54)..(139): NCBI GI NO: 34908110 NR Description: P0031D11.12
  misc_feature (61)..(137): NCBI GI NO: 32172482 NR Description: C2H2 type zinc finger transcription factor ZFP17
  misc_feature (54)..(139): NCBI GI NO: 30420734 NR Description: zinc finger transcription factor ZFP19
  misc_feature (62)..(139): NCBI GI NO: 2346976 NR Description: ZPT2-13 [Petunia x hybrida]
  misc_feature (62)..(137): NCBI GI NO: 2346974 NR Description: ZPT2-12 [Petunia x hybrida]
  misc_feature (63)..(153): NCBI GI NO: 1786134 NR Description: PEThy;ZPT2-5 [Petunia x hybrida]
MGAGMKRAREEEPTVSLALSLSTDSSASTTTSDDSGTGAATPAAPGKRTRRRRVVATSGEGDFVCKTCGRAFETFQALGGHRTSHLRGRHGLELGVGVARAIKERQRREDRQQHDCHICGLGFETGQALGGHMRRHREEMALDRWVALSDQEAGHQAAADRLPVLLELFV

SEQ ID NO: 18250 - DNA, 1005 bp, Triticum aestivum
  misc_feature (1)..(1005): Ceres Seq. ID no. 12624943
ctccctccccgcagccaaatcgagatctctctcccccgtccctctcccacccccaccccacccccgccggccggccgtccgcggcgacgagcccaccagaggaaacatggcgtcggcgctctcctccctccgctacggcgacagcctgtcggtggtggccatctcgggcgccacggcggtgctctgcgaggccatctcctggctcctcatctaccgcaccgccacctacaactccctccgcgcctccatcgagcgccactcccgcaagctcgactccatgaagtccatctcctcgggcgccggcggcgccgcgccctcctcccagccggcctcctcgcgggccaagaagatggaccgcgtcgagtccagcctcaaggacgcctcgcgggagctctccctcgccaagctcaagtccggtgccgtcgtcgccgccgtgctcttcgtcgtcttcggcctcctcaactcgctcttcgagggccgcgccgtcgccaagctgcccttcgcgcccgtcccgctcgtgcagcgcatgagccaccgcggcctgcccgggaacgaccccaccgactgcgccatggtcttcctctacttcctctgctccatgagcatacggacaaacctccagaagctgctcggcttcacgccgccccgcgcggccgcgggggccggcggtggcctcttcgccatgcccgatcccaaagccaattgagcttgatgatcccctcttctatacatacatgtgatgcacctggtctgaagcaaagcatctgagttggtctcccggaaagagttgctgccctgaaaggaagataaataacctacctagtcgctcagaggagaaacactgcaagacactgtaacgacacaattcattttttccacccatgataagcaggcgtgaaccgtgcgtaggctggctgtatcgatcatgaacattctcgagttcacccgaagcaatctgttgccgggtttgtcgtagggttgtactttatcatcagtcgttctagt

SEQ ID NO: 18251 - protein, 255 aa, Triticum aestivum
  peptide (1)..(255): Ceres Seq. ID no. 12624944
LPPRSQIEISLPRPSPTPTPPPPAGRPRRRAHQRKHGVGALLPPLRRQPVGGGHLGRHGGALRGHLLAPHLPHRHLQLPPRLHRAPLPQARLHEVHLLGRRRRRALLPAGLLAGQEDGPRRVQPQGRLAGALPRQAQVRCRRRRRALRRLRPPQLALRGPRRRQAALRARPARAAHEPPRPARERPHRLRHGLPLLPLLHEHTDKPPEAARLHAAPRGRGGRRWPLRHARSQSQLSLMIPSSIHTCDAPGLKQSI

SEQ ID NO: 18252 - protein, 234 aa, Triticum aestivum
  peptide (1)..(234): Ceres Seq. ID no. 12624945
  misc_feature (36)..(234): NCBI GI NO: 15240119 NR Description: putative protein; protein id: At5g06660
  misc_feature (36)..(234): NCBI GI NO: 21554161 NR Description: unknown [Arabidopsis thaliana]
  misc_feature (41)..(234): NCBI GI NO: 18399454 NR Description: expressed protein; protein id: At3g12030
  misc_feature (41)..(234): NCBI GI NO: 21553820 NR Description: unknown [Arabidopsis thaliana]
  misc_feature (42)..(231): NCBI GI NO: 3283893 NR Description: unknown [Homo sapiens]
  misc_feature (42)..(231): NCBI GI NO: 23956188 NR Description: RIKEN cDNA 1190006A08 [Mus musculus]
  misc_feature (51)..(231): NCBI GI NO: 33328806 NR Description: meg-2-like protein [Rattus norvegicus]
  misc_feature (45)..(231): NCBI GI NO: 24585112 NR Description: CG10470-PA [Drosophila melanogaster]
  misc_feature (45)..(231): NCBI GI NO: 3170241 NR Description: TU37B2 [Anopheles gambiae]
  misc_feature (46)..(234): NCBI GI NO: 17533405 NR Description: Putative protein
SLPAAKSRSLSPVPLPPPPHPRRPAVRGDEPTRGNMASALSSLRYGDSLSVVAISGATAVLCEAISWLLIYRTATYNSLRASIERHSRKLDSMKSISSGAGGAAPSSQPASSRAKKMDRVESSLKDASRELSLAKLKSGAVVAAVLFVVFGLLNSLFEGRAVAKLPFAPVPLVQRMSHRGLPGNDPTDCAMVFLYFLCSMSIRTNLQKLLGFTPPRAAAGAGGGLFAMPDPKAN

SEQ ID NO: 18253 - protein, 199 aa, Triticum aestivum
  peptide (1)..(199): Ceres Seq. ID no. 12624946
  misc_feature (1)..(199): NCBI GI NO: 15240119 NR Description: putative protein; protein id: At5g06660
  misc_feature (1)..(199): NCBI GI NO: 21554161 NR Description: unknown [Arabidopsis thaliana]
  misc_feature (6)..(199): NCBI GI NO: 18399454 NR Description: expressed protein; protein id: At3g12030
  misc_feature (6)..(199): NCBI GI NO: 21553820 NR Description: unknown [Arabidopsis thaliana]
  misc_feature (7)..(196): NCBI GI NO: 3283893 NR Description: unknown [Homo sapiens]
  misc_feature (7)..(196): NCBI GI NO: 23956188 NR Description: RIKEN cDNA 1190006A08 [Mus musculus]
  misc_feature (16)..(196): NCBI GI NO: 33328806 NR Description: meg-2-like protein [Rattus norvegicus]
  misc_feature (10)..(196): NCBI GI NO: 24585112 NR Description: CG10470-PA [Drosophila melanogaster]
  misc_feature (10)..(196): NCBI GI NO: 3170241 NR Description: TU37B2 [Anopheles gambiae]
  misc_feature (11)..(199): NCBI GI NO: 17533405 NR Description: Putative protein
MASALSSLRYGDSLSVVAISGATAVLCEAISWLLIYRTATYNSLRASIERHSRKLDSMKSISSGAGGAAPSSQPASSRAKKMDRVESSLKDASRELSLAKLKSGAVVAAVLFVVFGLLNSLFEGRAVAKLPFAPVPLVQRMSHRGLPGNDPTDCAMVFLYFLCSMSIRTNLQKLLGFTPPRAAAGAGGGLFAMPDPKAN

SEQ ID NO: 18254 - DNA, 1452 bp, Triticum aestivum
  misc_feature (1)..(1452): Ceres Seq. ID no. 13598276
aatttttttcatttcattctcggcggcctagtcctctccctttccctccccatcaccttggtcttcctcctcgattcgatccgaacccatccgattcggaagagaggtggtgatgccgcttgtggaatcgcctcaatggcgccggaaggccaccgatttcttctcttcatctagcttcaagctgaagcaggcagggcaatctgcaggggataatatagctgatgttgccggtaaggttggaacagtggtgaagagtcggtgggctatcttccaggatgctagacagcgaccgccaccaccaggagatactgtgcaggagcgcttcatctctgctgctgccaacactggagtgattctgaggaagggcatttcagagacaaaggagaaggtcgcggtgggaaaggtcaaagttgaagaggctgccaaaaaaactgcggacaaaagcaaaactattttgaacaatattgaacgctggcagaagggagttgcgagcaatgacgtttttggtgttcctgttgaagccactgtacaacgggagcaatctggtaaagctgtgcctctgatactggtgaggtgtgcagaccacttggttatatcaggcttgagtaatgagtacttgttcaaatctgaaggcggcagaaaagttcttcagcaactagtttcactttacaatgaggattcgggtgcatctttgcctgatggtgttagccctattgatgtagctgcactgatcaagtgctaccttgccagcatccccgaaccacttacaacatttgctctttatgatgagcttaaagatgcgagggttagcattgatgatcttaagaacatactgaagaagcttccaaatgtgaactacatgacactagaatttgttacagcattgctactaagagtaagccgtaaatcagcactcaacaagatggactcttgtacccttgctgtggagttcgcacctttgatcatatggcagcaaggggattctggaacagatttgcggaatcatctcagattcacactgaaaccacctccaaaaattgtggacacgacgacaagtaccactacatgggacttgctagatgaggatgatgtggatgcttcgtcgcaaatccccttggacgatggttcgcctccagactatggtgctattgaggtgatccagtgcttgattgagcatcacaatcccatattcacggatgcaaacgagactgtatggagatgacctgacctggccggctcctctttagatttctgtggtatttagctcgtgctatgtacaagttccaggtagtaggatggagtggagtgccgcgaataagtctagtctcggggacaagcattttggtccaaactttttttgtcttgttttgtgggagtaaaagtaggaactgtatatattaattgtccacatggcagagttgtcttgtgggatttgcctcgacatggctcgtc

SEQ ID NO: 18255 - protein, 369 aa, Triticum aestivum
  peptide (1)..(369): Ceres Seq. ID no. 15222287
  misc_feature (149)..(288): Pfam Name: Pfam Description:  RhoGAP domain
  misc_feature (1)..(369): NCBI GI NO: 28564771 NR Description: putative auxin-regulated protein
  misc_feature (1)..(369): NCBI GI NO: 18424478 NR Description: auxin-regulated protein [Arabidopsis thaliana]
  misc_feature (1)..(369): NCBI GI NO: 21553593 NR Description: unknown [Arabidopsis thaliana]
  misc_feature (128)..(296): NCBI GI NO: 2624718 NR Description: Gtpase-Activation Domain From Rhogap
  misc_feature (128)..(296): NCBI GI NO: 3402094 NR Description: Chain A, Complex Between Cdc42hs
  misc_feature (128)..(296): NCBI GI NO: 6730013 NR Description: Chain B
  misc_feature (128)..(296): NCBI GI NO: 3660275 NR Description: Chain A, RhoRHOGAPGDP(DOT)ALF4 COMPLEX
  misc_feature (1)..(335): NCBI GI NO: 21361736 NR Description: homolog of rat nadrin; RhoGAP protein
  misc_feature (128)..(296): NCBI GI NO: 4139447 NR Description: Chain B
  misc_feature (1)..(335): NCBI GI NO: 25535923 NR Description: RhoGAP protein [imported] - human
MPLVESPQWRRKATDFFSSSSFKLKQAGQSAGDNIADVAGKVGTVVKSRWAIFQDARQRPPPPGDTVQERFISAAANTGVILRKGISETKEKVAVGKVKVEEAAKKTADKSKTILNNIERWQKGVASNDVFGVPVEATVQREQSGKAVPLILVRCADHLVISGLSNEYLFKSEGGRKVLQQLVSLYNEDSGASLPDGVSPIDVAALIKCYLASIPEPLTTFALYDELKDARVSIDDLKNILKKLPNVNYMTLEFVTALLLRVSRKSALNKMDSCTLAVEFAPLIIWQQGDSGTDLRNHLRFTLKPPPKIVDTTTSTTTWDLLDEDDVDASSQIPLDDGSPPDYGAIEVIQCLIEHHNPIFTDANETVWR

SEQ ID NO: 18256 - DNA, 1172 bp, Triticum aestivum
  misc_feature (1)..(1172): Ceres Seq. ID no. 13582807
aaacacctagaacatcctattccaaaacttccacccttcaccgccgccagcgccacagcctccaagccctcgatctcccccatcggagctccctgcccacaaccccccacccccacccaaccatggcggaccgcggcggcgagcgtggtggcgaccgcggaggcgagcgcggcgggttcggccgcggcttcgggcgcggcgggcgcggggaccgtggcgggcgccgcggcggtcgtcgtggcccccgccaggaggaggagaagtgggtgcccgtcaccaagctcggccgcctcgtcaaggagggccgcttcaccaagatggaggagctctacctccactcgctccccatcaaggagcaccagatcgtggagcagctctgcccggggctcaaggacgaggtgatgaagatcacccccgtgcagaagcagacccgcgccggccagcggacccgcttcaaggcgttcgtcgtcgtcggcgacagcaacggccacgtcgggctcggcgtcaagtgcgccaaggaggtggccacggccatccgcggcgccatcatcctcgccaagctctccatcgtgcccgtcaggaggggctactgggggaacaagatcggcctgccccacaccgtgccctgcaaggtcaccggcaagtgcggctctgtcaccgtgcgcatggtgcccgccccgaggggttccgggatcgtcgccgcgcgcgtccccaagaaggtgctccagttcgctggtattgatgatgtcttcacttcctcgcgtggatccaccaagacccttggcaacttcgtcaaggcaaccttcgactgcctgatgaagacctatggattcctcacccctgacttctggagggagacgaccttcaccaaggcgccataccaggagttcaccgacattttggtgaagccgaccaaggccctgatgcttgatgcaccagccgagaagatcgaagcttaggatgtcggtgtaaagggtttttacaagctgagagctgtctaatgcactttgctttatttagttattaatactttgaatcgtgctgtttcaggatgtctctttttgccgtcaagtgttggtttgtggaactatgctactctcttttatcgtcaatggaagctacataattatggcaatcgatcttttttatctatagatgcttggcttctacct

SEQ ID NO: 18257 - protein, 318 aa, Triticum aestivum
  peptide (1)..(318): Ceres Seq. ID no. 15222751
  misc_feature (211)..(284): Pfam Name: Pfam Description:  Ribosomal protein S5, C-terminal domain
  misc_feature (47)..(318): NCBI GI NO: 30103021 NR Description: putative 40S ribosomal protein S2
  misc_feature (41)..(318): NCBI GI NO: 34393314 NR Description: putative 40S ribosomal protein S2
  misc_feature (41)..(317): NCBI GI NO: 15227443 NR Description: 40S ribosomal protein S2 (RPS2C)
  misc_feature (41)..(317): NCBI GI NO: 21553851 NR Description: 40S ribosomal protein S2 [Arabidopsis thaliana]
  misc_feature (41)..(307): NCBI GI NO: 18406325 NR Description: 40S ribosomal protein, putative
  misc_feature (41)..(307): NCBI GI NO: 15217951 NR Description: 40S ribosomal protein S2 (RPS2A)
  misc_feature (41)..(307): NCBI GI NO: 21618011 NR Description: ribosomal protein S2, putative
  misc_feature (47)..(315): NCBI GI NO: 15230312 NR Description: 40S ribosomal protein S2 (RPS2D)
  misc_feature (41)..(307): NCBI GI NO: 21539457 NR Description: ribosomal protein S2, putative
  misc_feature (43)..(307): NCBI GI NO: 25294520 NR Description: hypothetical protein RF12
TPRTSYSKTSTLHRRQRHSLQALDLPHRSSLPTTPHPHPTMADRGGERGGDRGGERGGFGRGFGRGGRGDRGGRRGGRRGPRQEEEKWVPVTKLGRLVKEGRFTKMEELYLHSLPIKEHQIVEQLCPGLKDEVMKITPVQKQTRAGQRTRFKAFVVVGDSNGHVGLGVKCAKEVATAIRGAIILAKLSIVPVRRGYWGNKIGLPHTVPCKVTGKCGSVTVRMVPAPRGSGIVAARVPKKVLQFAGIDDVFTSSRGSTKTLGNFVKATFDCLMKTYGFLTPDFWRETTFTKAPYQEFTDILVKPTKALMLDAPAEKIEA

SEQ ID NO: 18258 - protein, 278 aa, Triticum aestivum
  peptide (1)..(278): Ceres Seq. ID no. 15222752
  misc_feature (171)..(244): Pfam Name: Pfam Description:  Ribosomal protein S5, C-terminal domain
  misc_feature (7)..(278): NCBI GI NO: 30103021 NR Description: putative 40S ribosomal protein S2
  misc_feature (1)..(278): NCBI GI NO: 34393314 NR Description: putative 40S ribosomal protein S2
  misc_feature (1)..(277): NCBI GI NO: 15227443 NR Description: 40S ribosomal protein S2 (RPS2C)
  misc_feature (1)..(277): NCBI GI NO: 21553851 NR Description: 40S ribosomal protein S2 [Arabidopsis thaliana]
  misc_feature (1)..(267): NCBI GI NO: 18406325 NR Description: 40S ribosomal protein, putative
  misc_feature (1)..(267): NCBI GI NO: 15217951 NR Description: 40S ribosomal protein S2 (RPS2A)
  misc_feature (1)..(267): NCBI GI NO: 21618011 NR Description: ribosomal protein S2, putative
  misc_feature (7)..(275): NCBI GI NO: 15230312 NR Description: 40S ribosomal protein S2 (RPS2D)
  misc_feature (1)..(267): NCBI GI NO: 21539457 NR Description: ribosomal protein S2, putative
  misc_feature (3)..(267): NCBI GI NO: 25294520 NR Description: hypothetical protein RF12
MADRGGERGGDRGGERGGFGRGFGRGGRGDRGGRRGGRRGPRQEEEKWVPVTKLGRLVKEGRFTKMEELYLHSLPIKEHQIVEQLCPGLKDEVMKITPVQKQTRAGQRTRFKAFVVVGDSNGHVGLGVKCAKEVATAIRGAIILAKLSIVPVRRGYWGNKIGLPHTVPCKVTGKCGSVTVRMVPAPRGSGIVAARVPKKVLQFAGIDDVFTSSRGSTKTLGNFVKATFDCLMKTYGFLTPDFWRETTFTKAPYQEFTDILVKPTKALMLDAPAEKIEA

SEQ ID NO: 18259 - protein, 213 aa, Triticum aestivum
  peptide (1)..(213): Ceres Seq. ID no. 15222753
  misc_feature (106)..(179): Pfam Name: Pfam Description:  Ribosomal protein S5, C-terminal domain
  misc_feature (1)..(213): NCBI GI NO: 30103021 NR Description: putative 40S ribosomal protein S2
  misc_feature (1)..(213): NCBI GI NO: 34393314 NR Description: putative 40S ribosomal protein S2
  misc_feature (1)..(212): NCBI GI NO: 15227443 NR Description: 40S ribosomal protein S2 (RPS2C)
  misc_feature (1)..(212): NCBI GI NO: 21553851 NR Description: 40S ribosomal protein S2 [Arabidopsis thaliana]
  misc_feature (1)..(202): NCBI GI NO: 18406325 NR Description: 40S ribosomal protein, putative
  misc_feature (1)..(202): NCBI GI NO: 15217951 NR Description: 40S ribosomal protein S2 (RPS2A)
  misc_feature (1)..(202): NCBI GI NO: 21618011 NR Description: ribosomal protein S2, putative
  misc_feature (1)..(210): NCBI GI NO: 15230312 NR Description: 40S ribosomal protein S2 (RPS2D)
  misc_feature (1)..(202): NCBI GI NO: 21539457 NR Description: ribosomal protein S2, putative
  misc_feature (1)..(202): NCBI GI NO: 25294520 NR Description: hypothetical protein RF12
MEELYLHSLPIKEHQIVEQLCPGLKDEVMKITPVQKQTRAGQRTRFKAFVVVGDSNGHVGLGVKCAKEVATAIRGAIILAKLSIVPVRRGYWGNKIGLPHTVPCKVTGKCGSVTVRMVPAPRGSGIVAARVPKKVLQFAGIDDVFTSSRGSTKTLGNFVKATFDCLMKTYGFLTPDFWRETTFTKAPYQEFTDILVKPTKALMLDAPAEKIEA

SEQ ID NO: 18260 - DNA, 1540 bp, Triticum aestivum
  misc_feature (1)..(1540): Ceres Seq. ID no. 13595932
gaaattttccattcccccacccgcccttcacttcccttcacccgtcgctctcagccccgcagcgctagctagggttgggatcgatttggggcctagggttaggtcagtttctccatggcggcggcggcggcggcggaggggtccggggcagagggccgcggcgaggccgccgccggcggcaggcggcagcagcagcaggggctggcggagcgccggatgctccggtcccagtaccacgccatgaagaccctcatcaacgaggagagggatgacatggcgaaggaggactccgacaagttcgcctccatcatcacgcaggtggagagcttgcacgagcaagtgcagagacccagggagcaagtagcggatgcagaggctctgctagatattacaaccacgctggtaaaatccgtgaggtcccagtcaagtgaaggaatcacaccttctgatttcgtaacagcattgctgaagaaatttgggcagcaagcaacccttgattccgagcctgtctcgttgcgctgggctgatgttgggctttctgcttcacatgtcttcagggctgcgcctggatgctgcaccatgcttggacccatggatacagaagtaaagcagcggaagctttcagttgttagtagaaaaagaagtgccaggccaactgaaaatacttgtcctgaagagcttgctgattcttctgagggagcaaagacagacactgaccggaatgtgactgttgtatttgatatcctgaggaaaaataagcgtgcgaggctggagacccttgttttgaacagacaatcatttgcccaaacggttgagaatgtttttgcattgtctttcctagttaaagatggcagggtggcaataaacattgatgacaatgggcaccatatagtctatccacgaaatgcacctgctgctagtgccatagcgtcaggagaagtgtcctacagccattttgttttcagatatgattacagagattggaagcttatgaaagaagtcgttcctgaagggcaagaactgatgccgcacaggaccgcgcacagcctctcttctgaagagcgagaacagctggagccgtgtgcgcaacgaacaccgataaggaaactttgccggaaccggggtttggttcttcaggagcagatggttgttgcagagacacccgaggaggacagaagctccaaacgcaagcgtctattcatagatcaggagtgatcatgcctgcttgaaatgccttgtgccgcggtctacgctgtgtctgtatgtaggaggtatttgcctgattaacgtacccattgtagaacaaggtgtgccatagcaccgcttgtgctagttcttaccttgagacgagattcctccgggagaggaaagagggcaatagaaatgtaagctcaatagaaatgctactgtagttctttagatcagtcggcttaaataatgttcttggaatcggacttgtataatgtcgctcagagtaatatgcttgtgctgatagagaaaaagaaaaggtttgcttctagctgagccaaagttcctattc

SEQ ID NO: 18261 - protein, 366 aa, Triticum aestivum
  peptide (1)..(366): Ceres Seq. ID no. 13595933
  misc_feature (24)..(360): NCBI GI NO: 15223745 NR Description: expressed protein [Arabidopsis thaliana]
  misc_feature (23)..(349): NCBI GI NO: 9294403 NR Description: gene_id:MOE17.7~unknown protein
  misc_feature (23)..(307): NCBI GI NO: 15232359 NR Description: hypothetical protein [Arabidopsis thaliana]
  misc_feature (1)..(360): NCBI GI NO: 28411875 NR Description: OSJNBa0016N23.27
  misc_feature (258)..(366): NCBI GI NO: 5441894 NR Description: EST AU030111
  misc_feature (12)..(74): NCBI GI NO: 5441894 NR Description: EST AU030111
  misc_feature (201)..(314): NCBI GI NO: 38344630 NR Description: OSJNBb0003A12.16
MAAAAAAEGSGAEGRGEAAAGGRRQQQQGLAERRMLRSQYHAMKTLINEERDDMAKEDSDKFASIITQVESLHEQVQRPREQVADAEALLDITTTLVKSVRSQSSEGITPSDFVTALLKKFGQQATLDSEPVSLRWADVGLSASHVFRAAPGCCTMLGPMDTEVKQRKLSVVSRKRSARPTENTCPEELADSSEGAKTDTDRNVTVVFDILRKNKRARLETLVLNRQSFAQTVENVFALSFLVKDGRVAINIDDNGHHIVYPRNAPAASAIASGEVSYSHFVFRYDYRDWKLMKEVVPEGQELMPHRTAHSLSSEEREQLEPCAQRTPIRKLCRNRGLVLQEQMVVAETPEEDRSSKRKRLFIDQE

SEQ ID NO: 18262 - protein, 332 aa, Triticum aestivum
  peptide (1)..(332): Ceres Seq. ID no. 13595934
  misc_feature (1)..(326): NCBI GI NO: 15223745 NR Description: expressed protein [Arabidopsis thaliana]
  misc_feature (1)..(315): NCBI GI NO: 9294403 NR Description: gene_id:MOE17.7~unknown protein
  misc_feature (1)..(273): NCBI GI NO: 15232359 NR Description: hypothetical protein [Arabidopsis thaliana]
  misc_feature (1)..(326): NCBI GI NO: 28411875 NR Description: OSJNBa0016N23.27
  misc_feature (224)..(332): NCBI GI NO: 5441894 NR Description: EST AU030111
  misc_feature (1)..(40): NCBI GI NO: 5441894 NR Description: EST AU030111
  misc_feature (167)..(280): NCBI GI NO: 38344630 NR Description: OSJNBb0003A12.16
MLRSQYHAMKTLINEERDDMAKEDSDKFASIITQVESLHEQVQRPREQVADAEALLDITTTLVKSVRSQSSEGITPSDFVTALLKKFGQQATLDSEPVSLRWADVGLSASHVFRAAPGCCTMLGPMDTEVKQRKLSVVSRKRSARPTENTCPEELADSSEGAKTDTDRNVTVVFDILRKNKRARLETLVLNRQSFAQTVENVFALSFLVKDGRVAINIDDNGHHIVYPRNAPAASAIASGEVSYSHFVFRYDYRDWKLMKEVVPEGQELMPHRTAHSLSSEEREQLEPCAQRTPIRKLCRNRGLVLQEQMVVAETPEEDRSSKRKRLFIDQE

SEQ ID NO: 18263 - protein, 324 aa, Triticum aestivum
  peptide (1)..(324): Ceres Seq. ID no. 13595935
  misc_feature (1)..(318): NCBI GI NO: 15223745 NR Description: expressed protein [Arabidopsis thaliana]
  misc_feature (1)..(307): NCBI GI NO: 9294403 NR Description: gene_id:MOE17.7~unknown protein
  misc_feature (1)..(265): NCBI GI NO: 15232359 NR Description: hypothetical protein [Arabidopsis thaliana]
  misc_feature (1)..(318): NCBI GI NO: 28411875 NR Description: OSJNBa0016N23.27
  misc_feature (216)..(324): NCBI GI NO: 5441894 NR Description: EST AU030111
  misc_feature (1)..(32): NCBI GI NO: 5441894 NR Description: EST AU030111
  misc_feature (159)..(272): NCBI GI NO: 38344630 NR Description: OSJNBb0003A12.16
MKTLINEERDDMAKEDSDKFASIITQVESLHEQVQRPREQVADAEALLDITTTLVKSVRSQSSEGITPSDFVTALLKKFGQQATLDSEPVSLRWADVGLSASHVFRAAPGCCTMLGPMDTEVKQRKLSVVSRKRSARPTENTCPEELADSSEGAKTDTDRNVTVVFDILRKNKRARLETLVLNRQSFAQTVENVFALSFLVKDGRVAINIDDNGHHIVYPRNAPAASAIASGEVSYSHFVFRYDYRDWKLMKEVVPEGQELMPHRTAHSLSSEEREQLEPCAQRTPIRKLCRNRGLVLQEQMVVAETPEEDRSSKRKRLFIDQE

SEQ ID NO: 18264 - DNA, 1035 bp, Triticum aestivum
  misc_feature (1)..(1035): Ceres Seq. ID no. 13598268
aacatcctaatcgaaaaaaaagcacggttcatcccgatcgaagaggaccaaaaaggcccaaacccactcccatcccctcgtcacgcgtctcccggacccttcctcgtctctctctctctgaacaccccacccagccgaccaaatcgccgcacgagggcgcgccatggagccggcggtggagaggaaggtgcccgagcaggaggagcagctgcagccgtcgcacgcccgggccgaggacgcgccgcccgccgccgtcgaggaggaggacgaggcggaggcggaggagagcgagcgccgcaaccgcgagctcaaggccggcctccatcccctcaggcgcaagctcgtgctctggtacacccgccggacgcccgggacgaggtcgcagtcgtacgaggacaacatcaaaaagatcgtcgatttcagcactgtcgagtcgttctgggtttgctactgccacctcgcacgcccgtcctccctcccgagccccacggacctgcatcttttcaaagagggtgtccgtccactctgggaggatcctgcaaatcggaatggtggcaagtggattatacggttcaagaaggctgtttctgggcgtttctgggaggatttggtgctggttctagcgggtgatcaacttgattatagtgatgatgtttgtggcattgtgctaagttgtcgtttcaatgaagacatcctgagcgtctggaatcggaatgcatcagaccaccaggctgtgatgacattaagagactcgattaagaggcacttgaagctgccacacacctatctgatggagtacaaaccacatgacgcctctctgcgagacaactcgtcctacaggaacacatggctgagaggttaagctttatgtcgtcaaaactagtcatggccctcgttccgaactacagtaaatccttgtggatttccagttctgacgtttcaacccagccatgatgtatgattactctttgtcatgctactatgtactctccaaatttcaaatgctgaagtatcgacttttataaaaaaaaaaaa

SEQ ID NO: 18265 - protein, 232 aa, Triticum aestivum
  peptide (1)..(232): Ceres Seq. ID no. 13598269
  misc_feature (38)..(232): NCBI GI NO: 25453555 NR Description: eukaryotic cap-binding protein
  misc_feature (38)..(232): NCBI GI NO: 15238740 NR Description: eukaryotic cap-binding protein (gb|AAC17220.1)
  misc_feature (32)..(228): NCBI GI NO: 13624327 NR Description: eukaryotic translation initiation factor 4E like 3
  misc_feature (17)..(228): NCBI GI NO: 37590370 NR Description: Unknown (protein for MGC:73242) [Danio rerio]
  misc_feature (32)..(220): NCBI GI NO: 3329384 NR Description: translation initiation factor 4e [Homo sapiens]
  misc_feature (32)..(220): NCBI GI NO: 4757702 NR Description: eukaryotic translation initiation factor 4E-like 3
  misc_feature (32)..(220): NCBI GI NO: 12653185 NR Description: EIF4EL3 protein [Homo sapiens]
  misc_feature (32)..(220): NCBI GI NO: 29839292 NR Description: Eukaryotic translation initiation factor 4E type 3
  misc_feature (32)..(220): NCBI GI NO: 3201958 NR Description: eIF4E-like protein 4E-LP [Mus musculus]
  misc_feature (32)..(219): NCBI GI NO: 29144998 NR Description: Similar to RIKEN cDNA 2700069E09 gene
MEPAVERKVPEQEEQLQPSHARAEDAPPAAVEEEDEAEAEESERRNRELKAGLHPLRRKLVLWYTRRTPGTRSQSYEDNIKKIVDFSTVESFWVCYCHLARPSSLPSPTDLHLFKEGVRPLWEDPANRNGGKWIIRFKKAVSGRFWEDLVLVLAGDQLDYSDDVCGIVLSCRFNEDILSVWNRNASDHQAVMTLRDSIKRHLKLPHTYLMEYKPHDASLRDNSSYRNTWLRG

SEQ ID NO: 18266 - protein, 209 aa, Triticum aestivum
  peptide (1)..(209): Ceres Seq. ID no. 13598270
NILIEKKARFIPIEEDQKGPNPLPSPRHASPGPFLVSLSLNTPPSRPNRRTRARHGAGGGEEGARAGGAAAAVARPGRGRAARRRRGGGRGGGGGERAPQPRAQGRPPSPQAQARALVHPPDARDEVAVVRGQHQKDRRFQHCRVVLGLLLPPRTPVLPPEPHGPASFQRGCPSTLGGSCKSEWWQVDYTVQEGCFWAFLGGFGAGSSG

SEQ ID NO: 18267 - protein, 206 aa, Triticum aestivum
  peptide (1)..(206): Ceres Seq. ID no. 13598271
  misc_feature (34)..(131): Pfam Name: Pfam Description:  Cupin
  misc_feature (13)..(175): NCBI GI NO: 30424862 NR Description: RIKEN cDNA 5033413A03 [Mus musculus]
  misc_feature (13)..(177): NCBI GI NO: 5821145 NR Description: RNA binding protein [Homo sapiens]
HPNRKKSTVHPDRRGPKRPKPTPIPSSRVSRTLPRLSLSEHPTQPTKSPHEGAPWSRRWRGRCPSRRSSCSRRTPGPRTRRPPPSRRRTRRRRRRASAATASSRPASIPSGASSCSGTPAGRPGRGRSRTRTTSKRSSISALSSRSGFATATSHARPPSRAPRTCIFSKRVSVHSGRILQIGMVASGLYGSRRLFLGVSGRIWCWF

SEQ ID NO: 18268 - DNA, 1016 bp, Triticum aestivum
  misc_feature (1)..(1016): Ceres Seq. ID no. 13654441
atactgaatcacacggaaccttgaggcacacccacgggagaaaatggcagacacaggagacgagctgaagctgctgggcatgtgggcgagcccgtacgtggtcagggtgcagctcgcactccgcctcaagggcgtgagctacgagtacgtcgaggaggacctcgccaacaagagcgagctcttcctccgctccaacccggttcacaagacggtcccgatcctcatccacaacggcaagcccgtctgcgagtcccaggtcatcctccagtacatcgacgaggccttcgccggcgtcggcccgcccctcctccccgccgacccctacgagcgcgccgtcgcgcgcttctgggccgcctacgtcgaggacaagctgctggcgccgtgggggaaggtgttcagggtgaccaccgacgaggagagggccgagtggacgcggcagacggcggcggccctgggtcctctggaggatggcctcagggagtgctccaaggggaaggggttcttcggcggcgactgcgtcgggtacgtcgacgtcctgctcggcagcatggtgccgtgggtgcgcgccaccgagaggctctccggcgacaagttagtcgacgccggcaaggccccgctgctggcggcatggatggaccgcattagcgagctcgacgccgccaaggcggtcttccaggacgtcgacagggtggttgagtacgccgggggaatacagacccggctttccgccgcggctgcaagcacccaataaagcggcatggcgacatggtgcgtggctgatgcaaggagaaaatagccaagtgtgcaattagctgaaattattaaactggccacgtttctgtttcctttttcccgaataatggcgtcgtttctcaggaacacataacatacaagcatgtgatattaccagtttaaaaacttgtgtggtcatcgtgacagctcctcctctgtttttaagggatatttacatttttgtccttggctttgtcacattagtggggtttgtcttttgtttt

SEQ ID NO: 18269 - protein, 235 aa, Triticum aestivum
  peptide (1)..(235): Ceres Seq. ID no. 13654442
  misc_feature (89)..(204): Pfam Name: Pfam Description:  Glutathione S-transferase, C-terminal domain
  misc_feature (1)..(235): NCBI GI NO: 37536330 NR Description: putative glutathione S-transferase
  misc_feature (6)..(233): NCBI GI NO: 37536334 NR Description: putative glutathione S-transferase
  misc_feature (7)..(233): NCBI GI NO: 37536332 NR Description: putative glutathione S-transferase
  misc_feature (5)..(233): NCBI GI NO: 21730248 NR Description: Chain A
  misc_feature (5)..(233): NCBI GI NO: 22038178 NR Description: glutathione-S-transferase 2 [Aegilops tauschii]
  misc_feature (1)..(233): NCBI GI NO: 37536308 NR Description: putative glutathione S-transferase
  misc_feature (5)..(231): NCBI GI NO: 11385521 NR Description: glutathione S-transferase GST 35 [Zea mays]
  misc_feature (1)..(233): NCBI GI NO: 37536310 NR Description: putative glutathione S-transferase
  misc_feature (1)..(233): NCBI GI NO: 33304612 NR Description: tau class GST protein 3
  misc_feature (1)..(233): NCBI GI NO: 33304610 NR Description: tau class GST protein 4
MADTGDELKLLGMWASPYVVRVQLALRLKGVSYEYVEEDLANKSELFLRSNPVHKTVPILIHNGKPVCESQVILQYIDEAFAGVGPPLLPADPYERAVARFWAAYVEDKLLAPWGKVFRVTTDEERAEWTRQTAAALGPLEDGLRECSKGKGFFGGDCVGYVDVLLGSMVPWVRATERLSGDKLVDAGKAPLLAAWMDRISELDAAKAVFQDVDRVVEYAGGIQTRLSAAAASTQ

SEQ ID NO: 18270 - protein, 223 aa, Triticum aestivum
  peptide (1)..(223): Ceres Seq. ID no. 13654443
  misc_feature (77)..(192): Pfam Name: Pfam Description:  Glutathione S-transferase, C-terminal domain
  misc_feature (1)..(223): NCBI GI NO: 37536330 NR Description: putative glutathione S-transferase
  misc_feature (1)..(221): NCBI GI NO: 37536334 NR Description: putative glutathione S-transferase
  misc_feature (1)..(221): NCBI GI NO: 37536332 NR Description: putative glutathione S-transferase
  misc_feature (1)..(221): NCBI GI NO: 21730248 NR Description: Chain A
  misc_feature (1)..(221): NCBI GI NO: 22038178 NR Description: glutathione-S-transferase 2 [Aegilops tauschii]
  misc_feature (1)..(221): NCBI GI NO: 37536308 NR Description: putative glutathione S-transferase
  misc_feature (1)..(219): NCBI GI NO: 11385521 NR Description: glutathione S-transferase GST 35 [Zea mays]
  misc_feature (1)..(221): NCBI GI NO: 37536310 NR Description: putative glutathione S-transferase
  misc_feature (1)..(221): NCBI GI NO: 33304612 NR Description: tau class GST protein 3
  misc_feature (1)..(221): NCBI GI NO: 33304610 NR Description: tau class GST protein 4
MWASPYVVRVQLALRLKGVSYEYVEEDLANKSELFLRSNPVHKTVPILIHNGKPVCESQVILQYIDEAFAGVGPPLLPADPYERAVARFWAAYVEDKLLAPWGKVFRVTTDEERAEWTRQTAAALGPLEDGLRECSKGKGFFGGDCVGYVDVLLGSMVPWVRATERLSGDKLVDAGKAPLLAAWMDRISELDAAKAVFQDVDRVVEYAGGIQTRLSAAAASTQ

SEQ ID NO: 18271 - DNA, 1968 bp, Triticum aestivum
  misc_feature (1)..(1968): Ceres Seq. ID no. 13596261
aaagggaccggcgctcgcggcgaccaggaaggcaaggaacgcgtccggttcttggataagcggaggcgcggcaccgcaccgcacgcggcattcgtcaatataagaaggccgccgggggtgggaggcggagggacaactccgtctacacaagcgcgcgcgcacccaccaaagtcttctgccgatttcttcgtctccgctctcctcgtgttcgggttgttggccgagcgacagttgggattctgtagaggaggttgaaagtacttgaaacaaatggggattggggatgcatcacctagtgaaaaccagtctgcacacaaggaacagagggatgagaccacgccacttctcccggtcaaggcggaagaggaagatgggatccatgagttcaatggagcgtctttctcgggtgcagttttcaatctgtcgacaaccatcgtgggggctggaattatggccctgccagcaagtatcaagatgctaggcattatccctggtattttgatgatcatccttgtggcattgctcactgaggcatcaattgacatgatggtcaggtgcagccaccaggccaagattacatcctatggctggctcatgggtgactcttttggtcaatgggggaggattgcactgcaagcatctgtggtcataaacaacgttggcgtcatgattgtatacatgattatcatcggtgatgtgctatcgggaacatctacaactggtgttcatcaccggggtatctttgaggggtggtttgggcctcatttctggaattctcgtccagttgttctccttgccacaactatttttgtgtttgctccattggtgagctttaagcgattggattcattgagatacacatctgctctgtcagttgctcttgctgtggtttttgttgtcatcactgctggaattgctattctcagactgatagaagggaccgcggagattcccaaactcttccctgagatacatgaactcaattccatctgggaactctttacagctgtgccggttcttgtcactgcctatatttgccactacaatgttcacagcatcgataacgaactggaagatagaagtcagactaagccaattgtgcgaacttcattggctctctgttcaagtgtttatgttgcaacaagcttctttgcatatttactcttcggcgagggtaccctctccgatgtgctcgctaattttgactctgaccttcatattccattcagctctgtcttcaatgatatagtcagagtgagctatgtagtccatgtcatgctggtcttccctatagtcttctttgcccttaggctcaacctggatggactcctcttccccacctcaaggcacatttctcatgacaaccgaaggtttatcattatcaccgtctcactcctcgctgtgatttatcttgctgccaacttcataccaagcatctgggatgcgttccagttcaccggtgctacagctgctgtcctgattggtttcatctttcctgccatgatcatactgagggattcttatgggattgcaaccaagcgcgacaaggttttagctgtaaccatgattgtgcttgctgtgctctccaattcagtggccctgtacagcgatgcgatgagcatcttctacaggaaggtggaggcctagtctgctccatgcctccatactccaagggaataagtccaatgcacatgcacaattcggagtgattattgagctttagttagtatattgcgcagtcaagcaatgtgatttcatggtggccactaatttttgttttggacacttgagaggattttgtttgctgcatttgtctagttccttgaacatgtaatccggctcagcatctagatgagcaatttgtgatctggtcgcaggtgtttgtatttattggcaagaacaagatttttatttacttttgggggtcatgtacatgttcatattcggtcatcttgaaattgatgtttg

SEQ ID NO: 18272 - protein, 458 aa, Triticum aestivum
  peptide (1)..(458): Ceres Seq. ID no. 13596262
  misc_feature (24)..(455): NCBI GI NO: 34898706 NR Description: hypothetical protein
  misc_feature (3)..(452): NCBI GI NO: 18406463 NR Description: amino acid transporter family
  misc_feature (20)..(452): NCBI GI NO: 9758059 NR Description: amino acid transporter-like protein
  misc_feature (20)..(452): NCBI GI NO: 15241555 NR Description: amino acid transporter family
  misc_feature (23)..(451): NCBI GI NO: 15228851 NR Description: amino acid transporter family
  misc_feature (24)..(444): NCBI GI NO: 30688270 NR Description: amino acid transporter family
  misc_feature (42)..(415): NCBI GI NO: 34907894 NR Description: P0439E11.11
  misc_feature (41)..(451): NCBI GI NO: 18412864 NR Description: amino acid transporter family
  misc_feature (93)..(444): NCBI GI NO: 25408697 NR Description: hypothetical protein At2g40420
  misc_feature (24)..(78): NCBI GI NO: 25408697 NR Description: hypothetical protein At2g40420
MGIGDASPSENQSAHKEQRDETTPLLPVKAEEEDGIHEFNGASFSGAVFNLSTTIVGAGIMALPASIKMLGIIPGILMIILVALLTEASIDMMVRCSHQAKITSYGWLMGDSFGQWGRIALQASVVINNVGVMIVYMIIIGDVLSGTSTTGVHHRGIFEGWFGPHFWNSRPVVLLATTIFVFAPLVSFKRLDSLRYTSALSVALAVVFVVITAGIAILRLIEGTAEIPKLFPEIHELNSIWELFTAVPVLVTAYICHYNVHSIDNELEDRSQTKPIVRTSLALCSSVYVATSFFAYLLFGEGTLSDVLANFDSDLHIPFSSVFNDIVRVSYVVHVMLVFPIVFFALRLNLDGLLFPTSRHISHDNRRFIIITVSLLAVIYLAANFIPSIWDAFQFTGATAAVLIGFIFPAMIILRDSYGIATKRDKVLAVTMIVLAVLSNSVALYSDAMSIFYRKVEA

SEQ ID NO: 18273 - protein, 398 aa, Triticum aestivum
  peptide (1)..(398): Ceres Seq. ID no. 13596263
  misc_feature (1)..(395): NCBI GI NO: 34898706 NR Description: hypothetical protein
  misc_feature (1)..(392): NCBI GI NO: 18406463 NR Description: amino acid transporter family
  misc_feature (1)..(392): NCBI GI NO: 9758059 NR Description: amino acid transporter-like protein
  misc_feature (1)..(392): NCBI GI NO: 15241555 NR Description: amino acid transporter family
  misc_feature (1)..(391): NCBI GI NO: 15228851 NR Description: amino acid transporter family
  misc_feature (1)..(384): NCBI GI NO: 30688270 NR Description: amino acid transporter family
  misc_feature (1)..(355): NCBI GI NO: 34907894 NR Description: P0439E11.11
  misc_feature (1)..(391): NCBI GI NO: 18412864 NR Description: amino acid transporter family
  misc_feature (33)..(384): NCBI GI NO: 25408697 NR Description: hypothetical protein At2g40420
  misc_feature (1)..(18): NCBI GI NO: 25408697 NR Description: hypothetical protein At2g40420
MALPASIKMLGIIPGILMIILVALLTEASIDMMVRCSHQAKITSYGWLMGDSFGQWGRIALQASVVINNVGVMIVYMIIIGDVLSGTSTTGVHHRGIFEGWFGPHFWNSRPVVLLATTIFVFAPLVSFKRLDSLRYTSALSVALAVVFVVITAGIAILRLIEGTAEIPKLFPEIHELNSIWELFTAVPVLVTAYICHYNVHSIDNELEDRSQTKPIVRTSLALCSSVYVATSFFAYLLFGEGTLSDVLANFDSDLHIPFSSVFNDIVRVSYVVHVMLVFPIVFFALRLNLDGLLFPTSRHISHDNRRFIIITVSLLAVIYLAANFIPSIWDAFQFTGATAAVLIGFIFPAMIILRDSYGIATKRDKVLAVTMIVLAVLSNSVALYSDAMSIFYRKVEA

SEQ ID NO: 18274 - protein, 390 aa, Triticum aestivum
  peptide (1)..(390): Ceres Seq. ID no. 13596264
  misc_feature (1)..(387): NCBI GI NO: 34898706 NR Description: hypothetical protein
  misc_feature (1)..(384): NCBI GI NO: 18406463 NR Description: amino acid transporter family
  misc_feature (1)..(384): NCBI GI NO: 9758059 NR Description: amino acid transporter-like protein
  misc_feature (1)..(384): NCBI GI NO: 15241555 NR Description: amino acid transporter family
  misc_feature (1)..(383): NCBI GI NO: 15228851 NR Description: amino acid transporter family
  misc_feature (1)..(376): NCBI GI NO: 30688270 NR Description: amino acid transporter family
  misc_feature (1)..(347): NCBI GI NO: 34907894 NR Description: P0439E11.11
  misc_feature (1)..(383): NCBI GI NO: 18412864 NR Description: amino acid transporter family
  misc_feature (25)..(376): NCBI GI NO: 25408697 NR Description: hypothetical protein At2g40420
  misc_feature (1)..(262): NCBI GI NO: 24461850 NR Description: CTV.3 [Poncirus trifoliata]
MLGIIPGILMIILVALLTEASIDMMVRCSHQAKITSYGWLMGDSFGQWGRIALQASVVINNVGVMIVYMIIIGDVLSGTSTTGVHHRGIFEGWFGPHFWNSRPVVLLATTIFVFAPLVSFKRLDSLRYTSALSVALAVVFVVITAGIAILRLIEGTAEIPKLFPEIHELNSIWELFTAVPVLVTAYICHYNVHSIDNELEDRSQTKPIVRTSLALCSSVYVATSFFAYLLFGEGTLSDVLANFDSDLHIPFSSVFNDIVRVSYVVHVMLVFPIVFFALRLNLDGLLFPTSRHISHDNRRFIIITVSLLAVIYLAANFIPSIWDAFQFTGATAAVLIGFIFPAMIILRDSYGIATKRDKVLAVTMIVLAVLSNSVALYSDAMSIFYRKVEA

SEQ ID NO: 18275 - DNA, 1427 bp, Triticum aestivum
  misc_feature (1)..(1427): Ceres Seq. ID no. 13598277
ccggacccaaacaaacaaccctagccttccgcgtcgcccacgcgcgcctcgcctccgccgcttttctctccgccccggaaacagactcgccgcctcccatcccattgccgtcctcctcgccggccgatggcgctggagacgcggaagctctacgtcggcggcctcccgccgtcggcgcagcaggaagaactccaggagcacttcagccgctacggcgaggtgctgcgcgtccgtgtcgtccgcgactgggagacgggccagtgccgcggcttcgcgttcgtcgagtttgccgacgacgagggcccgcgcgccgcgcttcaggagaaggagaaggccaaccatgtcttcggcgaccgcacggtggatgttaaacgagctcggaccaggccaatgcgataccaaaatgagcaatcattctaccaatacactttaaatcagagcccaattcagagcccaattcagagcccagttcacaaccagtggtacactcagtcttctagtaacaactcatatgctggtaatggtcatagaacttgtgatccaaacaaggtctttgttggtgggctacgaggtaatgttaccaaggagcacctccagagctattttgagaagtttggtagaataacagatgttgttgtgatacgcgagggggctagtcagagatcaagaggctttggtttcattacatttgattcagaggaggctatggtaaatgtcttggagagtaaattccatgacttgaacggtacaaaggttgaaactaagagagctattcccaagggtcatagctactaccaggataggctacaatataatcctatgatatggaatggcaacaatcctcccattggctttgctggagcatacccacctcacatgcagcatattgttaataatcattatgtgatgcctatgccacaatacatgtgcttaccagagtatgtctacatgatgaatggaggagtccccttgacaaggcaaggttcactctatacaggctacggaacacaaattggatatggttatgatcatgtgaatacaaatcgttttggtgctcaacttggggaagctaaaagtgataacaaattgattgaagacataacagagcaacaagtggacctaccagctaccaggcaagaaactttgggcatggatgaccaggctactgttacaacattgtaatgatggacagcaacttgttatctgggaactcggcaactgtgaagaacttgagatgaaattctttggtgacaatacgtgtgtggaaatcctgcgttactttggaccttgtgtacattgcaaccggcaatagaccctcccgcaccatgtttaaactctatgttactgccgttccattttttttggtgacgaacctgttttgaaattggtctgggttacacatgttacctgtgcgtggttatctgctc

SEQ ID NO: 18276 - protein, 351 aa, Triticum aestivum
  peptide (1)..(351): Ceres Seq. ID no. 15222288
  misc_feature (142)..(211): Pfam Name: a.k.a. RRM, RBD, or RNP domain Pfam Description: RNA recognition motif.
  misc_feature (4)..(281): NCBI GI NO: 28201305 NR Description: putative RNA binding protein
  misc_feature (141)..(305): NCBI GI NO: 40539059 NR Description: putative RNA binding protein
  misc_feature (3)..(96): NCBI GI NO: 40539059 NR Description: putative RNA binding protein
  misc_feature (1)..(304): NCBI GI NO: 37535274 NR Description: putative RNA-binding protein
  misc_feature (113)..(319): NCBI GI NO: 18416794 NR Description: heterogeneous nuclear ribonucleoprotein
  misc_feature (2)..(87): NCBI GI NO: 18416794 NR Description: heterogeneous nuclear ribonucleoprotein
  misc_feature (112)..(309): NCBI GI NO: 15226106 NR Description: heterogeneous nuclear ribonucleoprotein
  misc_feature (1)..(87): NCBI GI NO: 15226106 NR Description: heterogeneous nuclear ribonucleoprotein
  misc_feature (113)..(319): NCBI GI NO: 7487039 NR Description: hypothetical protein T15N24
  misc_feature (2)..(87): NCBI GI NO: 7487039 NR Description: hypothetical protein T15N24
MALETRKLYVGGLPPSAQQEELQEHFSRYGEVLRVRVVRDWETGQCRGFAFVEFADDEGPRAALQEKEKANHVFGDRTVDVKRARTRPMRYQNEQSFYQYTLNQSPIQSPIQSPVHNQWYTQSSSNNSYAGNGHRTCDPNKVFVGGLRGNVTKEHLQSYFEKFGRITDVVVIREGASQRSRGFGFITFDSEEAMVNVLESKFHDLNGTKVETKRAIPKGHSYYQDRLQYNPMIWNGNNPPIGFAGAYPPHMQHIVNNHYVMPMPQYMCLPEYVYMMNGGVPLTRQGSLYTGYGTQIGYGYDHVNTNRFGAQLGEAKSDNKLIEDITEQQVDLPATRQETLGMDDQATVTTL

SEQ ID NO: 18277 - protein, 263 aa, Triticum aestivum
  peptide (1)..(263): Ceres Seq. ID no. 15222289
  misc_feature (54)..(123): Pfam Name: a.k.a. RRM, RBD, or RNP domain Pfam Description: RNA recognition motif.
  misc_feature (1)..(193): NCBI GI NO: 28201305 NR Description: putative RNA binding protein
  misc_feature (53)..(217): NCBI GI NO: 40539059 NR Description: putative RNA binding protein
  misc_feature (1)..(216): NCBI GI NO: 37535274 NR Description: putative RNA-binding protein
  misc_feature (25)..(231): NCBI GI NO: 18416794 NR Description: heterogeneous nuclear ribonucleoprotein
  misc_feature (24)..(221): NCBI GI NO: 15226106 NR Description: heterogeneous nuclear ribonucleoprotein
  misc_feature (25)..(231): NCBI GI NO: 7487039 NR Description: hypothetical protein T15N24
  misc_feature (1)..(28): NCBI GI NO: 22531168 NR Description: RNA-binding protein-like [Arabidopsis thaliana]
  misc_feature (1)..(28): NCBI GI NO: 30696616 NR Description: RNA recognition motif (RRM)-containing protein
  misc_feature (43)..(130): NCBI GI NO: 22531168 NR Description: RNA-binding protein-like [Arabidopsis thaliana]
  misc_feature (43)..(130): NCBI GI NO: 30696616 NR Description: RNA recognition motif (RRM)-containing protein
MRYQNEQSFYQYTLNQSPIQSPIQSPVHNQWYTQSSSNNSYAGNGHRTCDPNKVFVGGLRGNVTKEHLQSYFEKFGRITDVVVIREGASQRSRGFGFITFDSEEAMVNVLESKFHDLNGTKVETKRAIPKGHSYYQDRLQYNPMIWNGNNPPIGFAGAYPPHMQHIVNNHYVMPMPQYMCLPEYVYMMNGGVPLTRQGSLYTGYGTQIGYGYDHVNTNRFGAQLGEAKSDNKLIEDITEQQVDLPATRQETLGMDDQATVTTL

SEQ ID NO: 18278 - DNA, 2016 bp, Triticum aestivum
  misc_feature (1)..(2016): Ceres Seq. ID no. 13582783
ggtaatccatttgaaatgactagaaagacaaatatttcggaacggaggaagtacatgacactcttatactcgcaagagttcaattctattctactcgagaagacactcactccctgtgagaaattctaaaaggaaatgcttttacactgcatgaaagctcgaaaactggctacatcagagccttgaaattgcaggccaggcatcagatcacgaaaggcattacactgttggtggcggtcctccctccaaccaactccaaaggtttgcaatacatatagcatgtaagcagcagcttcctatatatttgatgagttctctttccgcagcttggctggcctctccttgtgcgattctgcatatctcctcttcttgttggctcttcttcttttgcgctcagcttgtgtaagctccacgtcttctttaatatcccctttcccttcaaaaacttcttcgggagcgagcattgcggcatctgaaacagctacaggtgcaacctcttccattgctagagcaggtatattaacttgtatggacatatcctcaatgaccggctttggggcaaagtggaaatgagagagcgcatccaacttcaagcatatcctcttaaataaatcatttgcctcattcttcagttcatctgaaatagcaagtgtggcaggtgcaatgccagttttttccttaaactcatcctcatactgttcagcaagaccctttttgctcttgttttcatccatctccttttgctgctttggaactttatacggcaaggttgaaggcttttcaacatcatcaaaatgaccctccgcaattcttttctttatcatctcttcgagagaagctgtgacttcctccgtgattactggggcaggtcttacattatgctcaaaatcaagatccacttccagggcactatttttgggcctcctggaagcatcaacctctccctgcatgatccatttactgggttcaagactagctttctccattaggtctatttggttacgcatcttcaagagccccttttcatgagttgaaagaccttgttcatcctctaatgctggaccatcatttacatcatccttctcaatgtcatccacttccatttcatgcaattcatccttgaagtggactttctttgtgaaaccatttctcttcttgacttgttgcttactgctttcctcaaaaaaatcctcataccttatatctccgccagatttccccacaccctcttcatcatcagactcaaaatcttccaaatccaaatcgtcatcttcatcatcacccccatcatcttcatccacatcctcctcatcactatcgtcctccatcaagttcacacttgccttcttcttctctcctcccttggaacccccaccgtactcctgctcctccccctcctccataaacttttccaggtccttcatcttcaggaacctgtcctccaccccgttccctttcttcgcccctagctcctccgtttcttcatcctccccctcctccgattccaactcgtcatccgtgtcctccaggccaccctcatcctcctcctccgattcgtcaccctctccatcctcctcctcgtctgacgggccctccacggcttcagcgggcttggacggcggaggagtagccaacggctgcgcaggcggttggtgctcgaggcggcggagctggcggtggaggtgggggaggagggggcgggagagcagctcgctctgggaccaaatctgctcggcgtcgaagttggggccggcgaggaggttggggaggggcggcggctgcacgggggagacaacggcgagcgacgagtggaagtgcttcagagccgcccgggcggcggcggcgaggtccgcggacggggagaggtagacggacgggtcggcgcgccgcagctgctgcagcgccacctcgcccttctccgcggcaagcggctcgtccaaatccatggccattgccgtggtggccgggagcgaattggttgactggagtatgtggaggcgacgctgggaaagagag

SEQ ID NO: 18279 - protein, 260 aa, Triticum aestivum
  peptide (1)..(260): Ceres Seq. ID no. 13582784
  misc_feature (37)..(174): Pfam Name: Pfam Description:  Lipoprotein amino terminal region
  misc_feature (1)..(260): NCBI GI NO: 28828184 NR Description: similar to Leishmania major. Ppg3
  misc_feature (1)..(260): NCBI GI NO: 28828184 NR Description: similar to Leishmania major. Ppg3
  misc_feature (1)..(185): NCBI GI NO: 13592175 NR Description: ppg3 [Leishmania major]
  misc_feature (1)..(174): NCBI GI NO: 34809533 NR Description: Epa5p [Candida glabrata]
  misc_feature (1)..(172): NCBI GI NO: 32699068 NR Description: hypothetical protein FLJ35107 [Homo sapiens]
  misc_feature (1)..(174): NCBI GI NO: 32699068 NR Description: hypothetical protein FLJ35107 [Homo sapiens]
  misc_feature (23)..(260): NCBI GI NO: 28828184 NR Description: similar to Leishmania major. Ppg3
  misc_feature (1)..(173): NCBI GI NO: 32699068 NR Description: hypothetical protein FLJ35107 [Homo sapiens]
  misc_feature (1)..(173): NCBI GI NO: 32699068 NR Description: hypothetical protein FLJ35107 [Homo sapiens]
  misc_feature (1)..(171): NCBI GI NO: 34809533 NR Description: Epa5p [Candida glabrata]
MSSTSISCNSSLKWTFFVKPFLFLTCCLLLSSKKSSYLISPPDFPTPSSSSDSKSSKSKSSSSSSPPSSSSTSSSSLSSSIKFTLAFFFSPPLEPPPYSCSSPSSINFSRSFIFRNLSSTPFPFFAPSSSVSSSSPSSDSNSSSVSSRPPSSSSSDSSPSPSSSSSDGPSTASAGLDGGGVANGCAGGWCSRRRSWRWRWGRRGRESSSLWDQICSASKLGPARRLGRGGGCTGETTASDEWKCFRAARAAAARSADGER

SEQ ID NO: 18280 - DNA, 768 bp, Triticum aestivum
  misc_feature (1)..(768): Ceres Seq. ID no. 15178530
agcgcgtccccattccgatccgttggcttcctgttcatacattctcccctcccggcgccgcctccagcctagggtttcctcccgccgtccgccgccatggctcgccgcagcggaggaggaaggtcttcccgccctgctccacgtgctgctccagtgagaaacccaccagcgccagcccgtcaagctcctccacctgctactacccagaatagcggtggtggtatcatgagtggaattgggtccaccattgctcagggcatggctttcggtactggcagtgccatggcgcacagggctgttgatgctgtgatgggtccccgcaccattcagcatgagactgttgtcggtgaggctgctgcatctatgactccaatggacaatgctgctgatgacaagtgtggcaacccttccaaggccttccaagattgcatcaaccactacggaagcgacatcagcaagtgccagttctacctcgacatgctgaacgagtgccgccgtggaggagcaggagctggtgcaactctttaagctactatctttgcttgattgcggcttaattggtcggaacctgttttcagtcatgatgatgatgatatatatctcctaaataattcattggcaatattatgaacctatgccacagcttatgtctattacctaccctagtttgtggtctctgttgtcctgggagtatttccttgtattgatgttggaattaccttcatggcagtgggtttataaatatggagtttaaaaaaaaaaaaaaaa

SEQ ID NO: 18281 - protein, 143 aa, Triticum aestivum; identical to SEQ ID NO: 13997
  peptide (1)..(143): Ceres Seq. ID no. 15178531
  misc_feature (1)..(139): NCBI GI NO: 13174237 NR Description: unknown protein [Oryza sativa]
  misc_feature (1)..(141): NCBI GI NO: 15237688 NR Description: expressed protein [Arabidopsis thaliana]
  misc_feature (1)..(141): NCBI GI NO: 15242455 NR Description: expressed protein [Arabidopsis thaliana]
  misc_feature (38)..(134): NCBI GI NO: 23509031 NR Description: hypothetical protein, conserved

SEQ ID NO: 18282 - protein, 100 aa, Triticum aestivum; identical to SEQ ID NO: 13998
  peptide (1)..(100): Ceres Seq. ID no. 15178532
  misc_feature (1)..(96): NCBI GI NO: 13174237 NR Description: unknown protein [Oryza sativa]
  misc_feature (1)..(98): NCBI GI NO: 15237688 NR Description: expressed protein [Arabidopsis thaliana]
  misc_feature (1)..(98): NCBI GI NO: 15242455 NR Description: expressed protein [Arabidopsis thaliana]
  misc_feature (1)..(91): NCBI GI NO: 23509031 NR Description: hypothetical protein, conserved

SEQ ID NO: 18283 - protein, 89 aa, Triticum aestivum; identical to SEQ ID NO: 13999
  peptide (1)..(89): Ceres Seq. ID no. 15178533
  misc_feature (1)..(85): NCBI GI NO: 13174237 NR Description: unknown protein [Oryza sativa]
  misc_feature (1)..(87): NCBI GI NO: 15237688 NR Description: expressed protein [Arabidopsis thaliana]
  misc_feature (1)..(87): NCBI GI NO: 15242455 NR Description: expressed protein [Arabidopsis thaliana]
  misc_feature (1)..(80): NCBI GI NO: 23509031 NR Description: hypothetical protein, conserved

SEQ ID NO: 18284 - DNA, 885 bp, Triticum aestivum
  misc_feature (1)..(885): Ceres Seq. ID no. 12614051
cacgcacgcacccgagccccacaattcccatcccccactccactccccaccgaaaaaccatggcgcggcggagcggcatgctcctcctactcgccgcggccgccctgcttgccctcggcgcgggcgccgccgtgccgccgtcgtgcgagcgcatcgagtgcccggcgtacgacgtggtggacagcgccaacgggttcgagatccggcggtacaaggacgccatgtgggtgtccaccgcgcccatcgaggacatctcgctcgtcgacgccacccgctccggcttcctccagcttttcaagtacatccaggggaagaacgcctacaacgagacgatcgagatgacggcgccggtgctgacgcgggtggcgcccagcgacgggcccttctgcgtctcctccttcgtggtcagcttctacgtgccggcgaagaaccaggcggacccgccgccggccgagggcctgcacgtgcagaggtgggccggggcgaggtacgcggccgtgcgccggttcggcggcttcgtggccgacgccgacgtcggcaagcaggccgcgctgctcgacgccagcctgcaggggaccaggtgggccgccgccgtgtccgacggccgcaaggccgacccggcgtccgagtacaccgtggcgcagtacaactcgccgttcgagttcagcggcagggtcaacgagatctggatgctcttcgacaccatggccgcgtctgacatgtaactggctagatcaatcagtgaactcgtatatgagtgtcttgtcttttaagcttctatataaccggacgaataatggtggtgccttataaactgcttaagcgaaatagtgaactgttttgcgctgtatggacttgcgagcaataaagtgcctcttttggtgc

SEQ ID NO: 18285 - protein, 240 aa, Triticum aestivum
  peptide (1)..(240): Ceres Seq. ID no. 12614052
  misc_feature (50)..(233): Pfam Name: Pfam Description:  SOUL heme-binding protein
  misc_feature (20)..(240): NCBI GI NO: 34903864 NR Description: unnamed protein product
  misc_feature (45)..(233): NCBI GI NO: 15220033 NR Description: SOUL-like protein; protein id: At1g17100
  misc_feature (43)..(233): NCBI GI NO: 18411970 NR Description: expressed protein; protein id: At1g78450
  misc_feature (43)..(233): NCBI GI NO: 21593898 NR Description: SOUL-like protein [Arabidopsis thaliana]
  misc_feature (30)..(233): NCBI GI NO: 34904402 NR Description: unnamed protein product
  misc_feature (45)..(233): NCBI GI NO: 15218357 NR Description: hypothetical protein; protein id: At1g78460.1
  misc_feature (51)..(233): NCBI GI NO: 28278449 NR Description: Similar to heme binding protein 2 [Danio rerio]
  misc_feature (41)..(231): NCBI GI NO: 7657603 NR Description: heme binding protein 2
  misc_feature (65)..(231): NCBI GI NO: 15778345 NR Description: C6ORF34B [Homo sapiens]
  misc_feature (41)..(231): NCBI GI NO: 27731687 NR Description: similar to heme binding protein 2
RTHPSPTIPIPHSTPHRKTMARRSGMLLLLAAAALLALGAGAAVPPSCERIECPAYDVVDSANGFEIRRYKDAMWVSTAPIEDISLVDATRSGFLQLFKYIQGKNAYNETIEMTAPVLTRVAPSDGPFCVSSFVVSFYVPAKNQADPPPAEGLHVQRWAGARYAAVRRFGGFVADADVGKQAALLDASLQGTRWAAAVSDGRKADPASEYTVAQYNSPFEFSGRVNEIWMLFDTMAASDM

SEQ ID NO: 18286 - protein, 238 aa, Triticum aestivum
  peptide (1)..(238): Ceres Seq. ID no. 12614053
THAPEPHNSHPPLHSPPKNHGAAERHAPPTRRGRPACPRRGRRRAAVVRAHRVPGVRRGGQRQRVRDPAVQGRHVGVHRAHRGHLARRRHPLRLPPAFQVHPGEERLQRDDRDDGAGADAGGAQRRALLRLLLRGQLLRAGEEPGGPAAGRGPARAEVGRGEVRGRAPVRRLRGRRRRRQAGRAARRQPAGDQVGRRRVRRPQGRPGVRVHRGAVQLAVRVQRQGQRDLDALRHHGRV

SEQ ID NO: 18287 - protein, 221 aa, Triticum aestivum
  peptide (1)..(221): Ceres Seq. ID no. 12614054
  misc_feature (31)..(214): Pfam Name: Pfam Description:  SOUL heme-binding protein
  misc_feature (1)..(221): NCBI GI NO: 34903864 NR Description: unnamed protein product
  misc_feature (26)..(214): NCBI GI NO: 15220033 NR Description: SOUL-like protein; protein id: At1g17100
  misc_feature (24)..(214): NCBI GI NO: 18411970 NR Description: expressed protein; protein id: At1g78450
  misc_feature (24)..(214): NCBI GI NO: 21593898 NR Description: SOUL-like protein [Arabidopsis thaliana]
  misc_feature (11)..(214): NCBI GI NO: 34904402 NR Description: unnamed protein product
  misc_feature (26)..(214): NCBI GI NO: 15218357 NR Description: hypothetical protein; protein id: At1g78460.1
  misc_feature (32)..(214): NCBI GI NO: 28278449 NR Description: Similar to heme binding protein 2 [Danio rerio]
  misc_feature (22)..(212): NCBI GI NO: 7657603 NR Description: heme binding protein 2
  misc_feature (46)..(212): NCBI GI NO: 15778345 NR Description: C6ORF34B [Homo sapiens]
  misc_feature (22)..(212): NCBI GI NO: 27731687 NR Description: similar to heme binding protein 2
MARRSGMLLLLAAAALLALGAGAAVPPSCERIECPAYDVVDSANGFEIRRYKDAMWVSTAPIEDISLVDATRSGFLQLFKYIQGKNAYNETIEMTAPVLTRVAPSDGPFCVSSFVVSFYVPAKNQADPPPAEGLHVQRWAGARYAAVRRFGGFVADADVGKQAALLDASLQGTRWAAAVSDGRKADPASEYTVAQYNSPFEFSGRVNEIWMLFDTMAASDM

SEQ ID NO: 18288 - DNA, 867 bp, Triticum aestivum
  misc_feature (1)..(867): Ceres Seq. ID no. 13596128
aacaatctacatttgacttccagcagaggaagcgagccaagatgggcacaccggcggccgtcagggtgatcggcgccttcgacagcccgtttagccaccgcgccgaggtcgccctgtgcctcaagggcgttccctacgagctcatcctggaggagctccacaacaagagcgagctgctgcttacgagcaaccccgtccacaagaaggtgcccgtgctcctccacggcgaccgcaccatctgcgagtcgctcatcatcgtcgagtacgttgacgagaccttcgacgggccggcgcttctcccaacggacccctacgaccgtgccactgcccgcttgtggtcccgcttcatcgatgacaagtgctcgaagccgttctggctggcgatgtggactgatggggaagcgcagaaggggttcacgaaggagatcaaggagaacttcgcgctcctggaggcgcagctcgagggtaagaggttcttcggcggcggcaccattggcctcgtcgacatagccgcctgcgggttcgcgcactggctcaccgtctgcgaggaggtttctggcgtgacactggtcacggccgaggagttccctcgcctgtgccgctgggccaaagagtatgcctccgacgagaaggtcagagcgtgcctgccggacagggcgcagatgctcgcccatttcacggccaacaaggagatgttcatggccatggcaaagtcaatgctgccaaaataatgtgatgtatgttgatgtggaagtggatgcgtgcatgaaagatatcgtagcccagagcgcatggtcgtcatgtgatggaataaagaaaaagcatttactagtattaatcagtcatctgatttatttattatttctc

SEQ ID NO: 18289 - protein, 242 aa, Triticum aestivum
  peptide (1)..(242): Ceres Seq. ID no. 13596129
  misc_feature (99)..(209): Pfam Name: Pfam Description:  Glutathione S-transferase, C-terminal domain
  misc_feature (14)..(241): NCBI GI NO: 11385509 NR Description: glutathione S-transferase GST 29 [Zea mays]
  misc_feature (17)..(242): NCBI GI NO: 19386822 NR Description: putative glutathione S-transferase GST 24
  misc_feature (20)..(240): NCBI GI NO: 4468798 NR Description: GST7 protein [Zea mays]
  misc_feature (20)..(238): NCBI GI NO: 13699857 NR Description: glutathione S-transferase GST 24 [Zea mays]
  misc_feature (19)..(238): NCBI GI NO: 11385507 NR Description: glutathione S-transferase GST 28 [Zea mays]
  misc_feature (20)..(242): NCBI GI NO: 19386820 NR Description: putative glutathione S-transferase GST 24
  misc_feature (20)..(240): NCBI GI NO: 19386819 NR Description: putative glutathione S-transferase GST 24
  misc_feature (20)..(240): NCBI GI NO: 34896730 NR Description: putative glutathione transferase
  misc_feature (20)..(240): NCBI GI NO: 19386818 NR Description: putative glutathione S-transferase GST 24
  misc_feature (20)..(237): NCBI GI NO: 19386817 NR Description: putative glutathione S-transferase GST 24
QSTFDFQQRKRAKMGTPAAVRVIGAFDSPFSHRAEVALCLKGVPYELILEELHNKSELLLTSNPVHKKVPVLLHGDRTICESLIIVEYVDETFDGPALLPTDPYDRATARLWSRFIDDKCSKPFWLAMWTDGEAQKGFTKEIKENFALLEAQLEGKRFFGGGTIGLVDIAACGFAHWLTVCEEVSGVTLVTAEEFPRLCRWAKEYASDEKVRACLPDRAQMLAHFTANKEMFMAMAKSMLPK

SEQ ID NO: 18290 - protein, 229 aa, Triticum aestivum
  peptide (1)..(229): Ceres Seq. ID no. 13596130
  misc_feature (86)..(196): Pfam Name: Pfam Description:  Glutathione S-transferase, C-terminal domain
  misc_feature (1)..(228): NCBI GI NO: 11385509 NR Description: glutathione S-transferase GST 29 [Zea mays]
  misc_feature (4)..(229): NCBI GI NO: 19386822 NR Description: putative glutathione S-transferase GST 24
  misc_feature (7)..(227): NCBI GI NO: 4468798 NR Description: GST7 protein [Zea mays]
  misc_feature (7)..(225): NCBI GI NO: 13699857 NR Description: glutathione S-transferase GST 24 [Zea mays]
  misc_feature (6)..(225): NCBI GI NO: 11385507 NR Description: glutathione S-transferase GST 28 [Zea mays]
  misc_feature (7)..(229): NCBI GI NO: 19386820 NR Description: putative glutathione S-transferase GST 24
  misc_feature (7)..(227): NCBI GI NO: 19386819 NR Description: putative glutathione S-transferase GST 24
  misc_feature (7)..(227): NCBI GI NO: 34896730 NR Description: putative glutathione transferase
  misc_feature (7)..(227): NCBI GI NO: 19386818 NR Description: putative glutathione S-transferase GST 24
  misc_feature (7)..(224): NCBI GI NO: 19386817 NR Description: putative glutathione S-transferase GST 24
MGTPAAVRVIGAFDSPFSHRAEVALCLKGVPYELILEELHNKSELLLTSNPVHKKVPVLLHGDRTICESLIIVEYVDETFDGPALLPTDPYDRATARLWSRFIDDKCSKPFWLAMWTDGEAQKGFTKEIKENFALLEAQLEGKRFFGGGTIGLVDIAACGFAHWLTVCEEVSGVTLVTAEEFPRLCRWAKEYASDEKVRACLPDRAQMLAHFTANKEMFMAMAKSMLPK

SEQ ID NO: 18291 - DNA, 1083 bp, Triticum aestivum
  misc_feature (1)..(1083): Ceres Seq. ID no. 13595993
acctagaacatcctaatcgaaaaaacaaaaacaaacgcgagcgagacccttgcctcaagacctcctccgccccacctccctcctcctactcggcccgtcgtccacgccgagggagccgtcgggcatggcggcgacggcagatccgcgggcgaagccgccggccgcgccctcgacgcaccacctcgagccgtgggcgcgcccgcagcagccgccgcctctaccccaccgcgttgagtcgccctcggggggtgcgtcgggcgcccgcgatcgccgccgctcgtcgtctcactcccaccgcggggccgacgccggagacgacggcgggatcgaggggctccgcgtgaagctcatgggccacctgcgcgacgcggccgaccggcttcgcgtgccccagaaaagtcctcccctgcccccgccgcccccaccgaccaagccgaaggagcccgagccagaccgcatggcgcggcctccaccccccacggagccgccacaggagaacgtcgcggacaagccgtggaagctgcgggaacgcacgcggcggcggccggccgcgctgtcgtcgtcatggccggcggcgccgactccgccgtcgcgacggcgcaagcgggcccctttctcggtggccctggagccggaggagatcgaggaggacatctacgcgctgacgggcggccggccgcggcggcggccgaggaagcggccgcgcgccgtacagcggcagctcgattcgctcttccccgggctctggctggccgaggtcaccgccgacgactacaaggtgcccgacgacgagtagccgctccctcccgccggcgactacaaggttccgacgacgaagctcatggcatcacctccgcgcgtcgtaggacaggtagcccgaatttatagtaacttggagtagctaggcgtagacgcgtggtcgcgtggagcgagccggtcatgtactcgtgttcaccagttattattaagtttattacaacaaaaaaaaaactccagctaccgactttccttgtcataaaaaaaaaaaaaaaaaagcttatcgatacacgtcgactgtttaaacacaatmragggggggcccgg

SEQ ID NO: 18292 - protein, 223 aa, Triticum aestivum
  peptide (1)..(223): Ceres Seq. ID no. 15221724
  misc_feature (43)..(222): NCBI GI NO: 34911320 NR Description: P0519D04.29
  misc_feature (99)..(221): NCBI GI NO: 34911314 NR Description: P0519D04.26
  misc_feature (158)..(221): NCBI GI NO: 15229616 NR Description: expressed protein [Arabidopsis thaliana]
  misc_feature (50)..(221): NCBI GI NO: 18395654 NR Description: expressed protein [Arabidopsis thaliana]
  misc_feature (121)..(201): NCBI GI NO: 34895592 NR Description: unnamed protein product
  misc_feature (41)..(221): NCBI GI NO: 18409003 NR Description: expressed protein [Arabidopsis thaliana]
  misc_feature (157)..(221): NCBI GI NO: 11358418 NR Description: hypothetical protein T8B10
  misc_feature (157)..(221): NCBI GI NO: 13430778 NR Description: unknown protein [Arabidopsis thaliana]
  misc_feature (157)..(221): NCBI GI NO: 18411597 NR Description: expressed protein [Arabidopsis thaliana]
  misc_feature (50)..(221): NCBI GI NO: 25518652 NR Description: hypothetical protein F4F7
MAATADPRAKPPAAPSTHHLEPWARPQQPPPLPHRVESPSGGASGARDRRRSSSHSHRGADAGDDGGIEGLRVKLMGHLRDAADRLRVPQKSPPLPPPPPPTKPKEPEPDRMARPPPPTEPPQENVADKPWKLRERTRRRPAALSSSWPAAPTPPSRRRKRAPFSVALEPEEIEEDIYALTGGRPRRRPRKRPRAVQRQLDSLFPGLWLAEVTADDYKVPDDE

SEQ ID NO: 18293 - protein, 148 aa, Triticum aestivum
  peptide (1)..(148): Ceres Seq. ID no. 15221725
  misc_feature (1)..(147): NCBI GI NO: 34911320 NR Description: P0519D04.29
  misc_feature (24)..(146): NCBI GI NO: 34911314 NR Description: P0519D04.26
  misc_feature (83)..(146): NCBI GI NO: 15229616 NR Description: expressed protein [Arabidopsis thaliana]
  misc_feature (1)..(146): NCBI GI NO: 18395654 NR Description: expressed protein [Arabidopsis thaliana]
  misc_feature (46)..(126): NCBI GI NO: 34895592 NR Description: unnamed protein product
  misc_feature (1)..(146): NCBI GI NO: 18409003 NR Description: expressed protein [Arabidopsis thaliana]
  misc_feature (82)..(146): NCBI GI NO: 11358418 NR Description: hypothetical protein T8B10
  misc_feature (82)..(146): NCBI GI NO: 13430778 NR Description: unknown protein [Arabidopsis thaliana]
  misc_feature (82)..(146): NCBI GI NO: 18411597 NR Description: expressed protein [Arabidopsis thaliana]
  misc_feature (1)..(146): NCBI GI NO: 25518652 NR Description: hypothetical protein F4F7
MGHLRDAADRLRVPQKSPPLPPPPPPTKPKEPEPDRMARPPPPTEPPQENVADKPWKLRERTRRRPAALSSSWPAAPTPPSRRRKRAPFSVALEPEEIEEDIYALTGGRPRRRPRKRPRAVQRQLDSLFPGLWLAEVTADDYKVPDDE

SEQ ID NO: 18294 - protein, 113 aa, Triticum aestivum
  peptide (1)..(113): Ceres Seq. ID no. 15221726
  misc_feature (19)..(113): NCBI GI NO: 5821151 NR Description: RNA binding protein [Homo sapiens]
  misc_feature (19)..(113): NCBI GI NO: 6634015 NR Description: KIAA0324 protein [Homo sapiens]
  misc_feature (19)..(113): NCBI GI NO: 7512967 NR Description: hypothetical protein KIAA0324 - human (fragment)
  misc_feature (19)..(113): NCBI GI NO: 6649242 NR Description: splicing coactivator subunit SRm300 [Homo sapiens]
  misc_feature (19)..(113): NCBI GI NO: 19923466 NR Description: splicing coactivator subunit SRm300
  misc_feature (3)..(113): NCBI GI NO: 5821145 NR Description: RNA binding protein [Homo sapiens]
  misc_feature (3)..(113): NCBI GI NO: 5821143 NR Description: RNA binding protein [Homo sapiens]
  misc_feature (33)..(113): NCBI GI NO: 7949115 NR Description: Ser/Arg-related nuclear matrix protein
  misc_feature (3)..(113): NCBI GI NO: 6649242 NR Description: splicing coactivator subunit SRm300 [Homo sapiens]
  misc_feature (3)..(113): NCBI GI NO: 19923466 NR Description: splicing coactivator subunit SRm300
LEHPNRKNKNKRERDPCLKTSSAPPPSSYSARRPRRGSRRAWRRRQIRGRSRRPRPRRTTSSRGRARSSRRLYPTALSRPRGVRRAPAIAAARRLTPTAGPTPETTAGSRGSA

SEQ ID NO: 18295 - DNA, 1644 bp, Triticum aestivum
  misc_feature (1)..(1644): Ceres Seq. ID no. 13596131
gcaaaaggaccaaactcacgcgacgacgaagaaagaagcggagaccggagatcgagatcgccggtgggagagatggagccgagacgagcgatccaccgcagatccggcgcgctcctcctcctcctcgccgctgtattcgcggcggccgccggcgcctccgcctccgccatcggcgacaggtgcgccgcctgcaaagccgtcgcggctgagctagagattggaatatcaagtgagaaaccaagaaaccacttggacttgcgtaacaggttaaattcgaaaggtcagcgcgaggggaaggtcatcgattacagagtcagtgagcttcggattgtagagcttctggatgacctatgtgataagatgcaagactatacgctgcagaagttggaatcaggcgaaaaagaatgggtgaaagtaccaagctggagcagttttcaaactgataagaaagctgcagcacgagcacactccaaaaatctatccagttactgtggaaggttactggaggaaactgaggacgagcttgctgagtggataaaaacaagctcggcagaatccgcggacgtgagccaggccctttgccaggatattagcaaacactgccagttaacaagtgctacagccccggtcgacgatgaactataacagcacgtgttagctccccgtatttactcgacaaagaaaagcagatgaatgcctgagaagcgtcaaagaagaagctccagtaggatatgaggctgtgatgtcttagcgtctgcatttttacacactcgcattgttgtcttaaagagggacttgcagattttcacatatgattactgatgtattgagaacattcaaactttgaggaatttctgcatgctgaattacagttagcagcatggtatgattcgctgaactaatctgaattcaacaatgcgagtgaggtatcatggacctcgaactgttaagccactagctgctttctacagtgatgtttcaggcatcagtgcatcagtagagtcaaccaatggggaggccatgccacacccgttagatgaaattgagccaaaaaaggatgttgaaccggagaattgtccattctggtgggcgcgttcgcccgaaaatatactgcagcaggatacatatctagcactggcagcttcttttgtaatcctgcggttgctgtatcttctattcccaaggatagtttctgcagcaaaatgggcatggaggaggcatactctgtttgcgaacttgatgggcgtgcatgaatatttcttcacctacctcgagcaagcaagacagaaattgagtaggttatacccttcgaagcgagggaatttacaggagggggcaaggaatgccactgcctgggcctccaaatcattagcatctgtgtcaatcggagaaccaagcactatcggaaggacgaactccacgaatgaactgaggtgaagtgtaaacttttttgtccgcagggatattatgtacagtagagtgatgaggatatgagcaccaagaatctgttgtaaccagctttgttagctattgtaacatcatcattagaataagcacctcccccagtattgttgccattataaccttgtcttgaatagctgttgcccaaacatattcttggaggaaaaaggtttgacgtgttcc

SEQ ID NO: 18296 - protein, 214 aa, Triticum aestivum
  peptide (1)..(214): Ceres Seq. ID no. 13596132
  misc_feature (37)..(213): NCBI GI NO: 21593763 NR Description: unknown [Arabidopsis thaliana]
  misc_feature (37)..(213): NCBI GI NO: 18400653 NR Description: expressed protein [Arabidopsis thaliana]
  misc_feature (37)..(100): NCBI GI NO: 25373216 NR Description: unknown protein [imported] - Arabidopsis thaliana
  misc_feature (150)..(213): NCBI GI NO: 25373216 NR Description: unknown protein [imported] - Arabidopsis thaliana
  misc_feature (109)..(144): NCBI GI NO: 25373216 NR Description: unknown protein [imported] - Arabidopsis thaliana
  misc_feature (40)..(213): NCBI GI NO: 20129845 NR Description: CG12918-PA [Drosophila melanogaster]
  misc_feature (36)..(201): NCBI GI NO: 7657176 NR Description: transmembrane protein 4 [Homo sapiens]
  misc_feature (36)..(201): NCBI GI NO: 9903607 NR Description: transmembrane protein 4
AKGPNSRDDEERSGDRRSRSPVGEMEPRRAIHRRSGALLLLLAAVFAAAAGASASAIGDRCAACKAVAAELEIGISSEKPRNHLDLRNRLNSKGQREGKVIDYRVSELRIVELLDDLCDKMQDYTLQKLESGEKEWVKVPSWSSFQTDKKAAARAHSKNLSSYCGRLLEETEDELAEWIKTSSAESADVSQALCQDISKHCQLTSATAPVDDEL

SEQ ID NO: 18297 - protein, 190 aa, Triticum aestivum
  peptide (1)..(190): Ceres Seq. ID no. 13596133
  misc_feature (13)..(189): NCBI GI NO: 21593763 NR Description: unknown [Arabidopsis thaliana]
  misc_feature (13)..(189): NCBI GI NO: 18400653 NR Description: expressed protein [Arabidopsis thaliana]
  misc_feature (13)..(76): NCBI GI NO: 25373216 NR Description: unknown protein [imported] - Arabidopsis thaliana
  misc_feature (126)..(189): NCBI GI NO: 25373216 NR Description: unknown protein [imported] - Arabidopsis thaliana
  misc_feature (85)..(120): NCBI GI NO: 25373216 NR Description: unknown protein [imported] - Arabidopsis thaliana
  misc_feature (16)..(189): NCBI GI NO: 20129845 NR Description: CG12918-PA [Drosophila melanogaster]
  misc_feature (12)..(177): NCBI GI NO: 7657176 NR Description: transmembrane protein 4 [Homo sapiens]
  misc_feature (12)..(177): NCBI GI NO: 9903607 NR Description: transmembrane protein 4
MEPRRAIHRRSGALLLLLAAVFAAAAGASASAIGDRCAACKAVAAELEIGISSEKPRNHLDLRNRLNSKGQREGKVIDYRVSELRIVELLDDLCDKMQDYTLQKLESGEKEWVKVPSWSSFQTDKKAAARAHSKNLSSYCGRLLEETEDELAEWIKTSSAESADVSQALCQDISKHCQLTSATAPVDDEL

SEQ ID NO: 18298 - protein, 173 aa, Triticum aestivum
  peptide (1)..(173): Ceres Seq. ID no. 13596134
  misc_feature (1)..(173): NCBI GI NO: 29367467 NR Description: disulfide isomerase-like protein
  misc_feature (1)..(171): NCBI GI NO: 18399435 NR Description: expressed protein [Arabidopsis thaliana]
  misc_feature (41)..(171): NCBI GI NO: 15236643 NR Description: protein disulfide isomerase -related
  misc_feature (1)..(22): NCBI GI NO: 15236643 NR Description: protein disulfide isomerase -related
  misc_feature (1)..(162): NCBI GI NO: 9758894 NR Description: contains similarity to protein disulfide isomerase-related protein~gene_id:MRG7
  misc_feature (1)..(162): NCBI GI NO: 18418521 NR Description: expressed protein [Arabidopsis thaliana]
  misc_feature (1)..(162): NCBI GI NO: 21536613 NR Description: contains similarity to protein disulfide isomerase-related protein
MRVRYHGPRTVKPLAAFYSDVSGISASVESTNGEAMPHPLDEIEPKKDVEPENCPFWWARSPENILQQDTYLALAASFVILRLLYLLFPRIVSAAKWAWRRHTLFANLMGVHEYFFTYLEQARQKLSRLYPSKRGNLQEGARNATAWASKSLASVSIGEPSTIGRTNSTNELR

SEQ ID NO: 18299 - DNA, 828 bp, Triticum aestivum
  misc_feature (1)..(828): Ceres Seq. ID no. 13596179
acacacgaaagcaacagccagcgatcgagacagcaagagaagctcactcagctcagctaccaccagtcccggtcacagcaatcggcatggccagcaagtcggcgtccctgctgatcctcgcggcgctggtggccgcggcgtgcctcacggagctgggctcggcggcgcgcggcgtgccggcggagaagcccgcggaggacgatgtgaagcggccggacacgttccaggaggggacggtgctgatcccggggatcgggcggtacgagctgggcacccactacatccccgacatcggcgggctggaccacagcatcccggccgccgccagtggacagttcatccccggcgccgacgacacctgggtgcccaaccccggctttgagattcccaaccccttccgcccccgctccgactctccctgatgggccgagccggccggccgccagcacgtccacgccaacgcccaccgtccgcccacacgttgcacccgtccatctacttggtagagctagcctgctacaaatcattttccgctagctttttggttgctacaataaaatagctgctgctacatggccatgcatgcatgtgtctgcgactgcgttcgcgccgtcgacgtctcgtgtttgattgaagtgtacgtgtagtcgtgtatgggatatggacggatgcgtaggaagcatccatcgcatgtctcgcttggtttgttgttgccagtgtaatgtgtttcagttcagtaagttttttgaatgataaaaaaaaaaaaaaaaaagcttatcgataccgtcgatccttcgakgkggggcccgktaaacmcaataaagtggg

SEQ ID NO: 18300 - protein, 139 aa, Triticum aestivum
  peptide (1)..(139): Ceres Seq. ID no. 15221789
  misc_feature (29)..(139): NCBI GI NO: 33146757 NR Description: unknown protein
  misc_feature (29)..(127): NCBI GI NO: 34899778 NR Description: OJ1773_H01.12
TRKQQPAIETAREAHSAQLPPVPVTAIGMASKSASLLILAALVAAACLTELGSAARGVPAEKPAEDDVKRPDTFQEGTVLIPGIGRYELGTHYIPDIGGLDHSIPAAASGQFIPGADDTWVPNPGFEIPNPFRPRSDSP

SEQ ID NO: 18301 - protein, 126 aa, Triticum aestivum
  peptide (1)..(126): Ceres Seq. ID no. 15221790
HTKATASDRDSKRSSLSSATTSPGHSNRHGQQVGVPADPRGAGGRGVPHGAGLGGARRAGGEARGGRCEAAGHVPGGDGADPGDRAVRAGHPLHPRHRRAGPQHPGRRQWTVHPRRRRHLGAQPRL

SEQ ID NO: 18302 - protein, 111 aa, Triticum aestivum
  peptide (1)..(111): Ceres Seq. ID no. 15221791
  misc_feature (1)..(111): NCBI GI NO: 33146757 NR Description: unknown protein
  misc_feature (1)..(99): NCBI GI NO: 34899778 NR Description: OJ1773_H01.12
MASKSASLLILAALVAAACLTELGSAARGVPAEKPAEDDVKRPDTFQEGTVLIPGIGRYELGTHYIPDIGGLDHSIPAAASGQFIPGADDTWVPNPGFEIPNPFRPRSDSP

SEQ ID NO: 18303 - DNA, 749 bp, Triticum aestivum
  misc_feature (1)..(749): Ceres Seq. ID no. 13582851
atctgccgatctcccccgttccccacctcccccttcccgtcgggccgtagccaccgcaccgcccccgatggcctcctccgctgccggcgccggcaagtcactgatccagacattccgcaagttcttcaagaagccgtgggagatcaccggcccgtgctcctcgcccgagtaccgcagcgcggtcccgggtgcgctcgagtaccgtcaaaccctgcccggccacccttcgcgaggactccctcagggccgtcatccccacctccgactcggagaccgtgttcgacatcaagtactacccgcgcgactgcggccgcaaccgcccgcccgtccgccgcaccctcctccgcaagcccgatctcgagcgctacatggccgccaagcagttcgaccccgccaaggacttccccgtcccctacgtcaattctgctgtcgagtacagcgaagtcggcggcggctacaccaagtgatccaggtcttgtggtcaagctgcagcagaagctgcactcacttcatttccgcttttccttgaaagtcccttcctcttttgtttcggagaaaaatttctggttgtaaaagatgatggtggcaataatatggctcttggggagtaaaccggatgcacctaccttgtaagttgtgttccaaaagtcagccagcctaatgctgatttgtggtttaattaaatttatgaaaaactcaaatcttctgctggaatccgtacatgatctactttcactgcgttttgacag

SEQ ID NO: 18304 - protein, 190 aa, Triticum aestivum
  peptide (1)..(190): Ceres Seq. ID no. 13582852
  misc_feature (47)..(158): Pfam Name: Pfam Description:  Caudal like protein activation region
  misc_feature (60)..(167): NCBI GI NO: 30140331 NR Description: putative arabinagalactan protein [Lotus japonicus]
  misc_feature (67)..(155): NCBI GI NO: 20138131 NR Description: Vegetative cell wall protein gp1 precursor
  misc_feature (50)..(156): NCBI GI NO: 22531676 NR Description: D4 dopamine receptor [Equus grevyi]
  misc_feature (50)..(156): NCBI GI NO: 22531678 NR Description: D4 dopamine receptor [Equus zebra]
  misc_feature (67)..(155): NCBI GI NO: 20138131 NR Description: Vegetative cell wall protein gp1 precursor
  misc_feature (53)..(156): NCBI GI NO: 22531670 NR Description: D4 dopamine receptor [Equus hemionus]
  misc_feature (58)..(138): NCBI GI NO: 6523547 NR Description: hydroxyproline-rich glycoprotein DZ-HRGP
  misc_feature (58)..(157): NCBI GI NO: 20138131 NR Description: Vegetative cell wall protein gp1 precursor
  misc_feature (58)..(149): NCBI GI NO: 30696750 NR Description: hypothetical protein [Arabidopsis thaliana]
  misc_feature (67)..(157): NCBI GI NO: 20138131 NR Description: Vegetative cell wall protein gp1 precursor
ICRSPPFPTSPFPSGRSHRTAPDGLLRCRRRQVTDPDIPQVLQEAVGDHRPVLLARVPQRGPGCARVPSNPARPPFARTPSGPSSPPPTRRPCSTSSTTRATAAATARPSAAPSSASPISSATWPPSSSTPPRTSPSPTSILLSSTAKSAAATPSDPGLVVKLQQKLHSLHFRFSLKVPSSFVSEKNFWL

SEQ ID NO: 18305 - protein, 175 aa, Triticum aestivum
  peptide (1)..(175): Ceres Seq. ID no. 13582853
  misc_feature (11)..(72): NCBI GI NO: 34909786 NR Description: P0512C01.35
  misc_feature (23)..(72): NCBI GI NO: 15241510 NR Description: expressed protein [Arabidopsis thaliana]
  misc_feature (23)..(72): NCBI GI NO: 21592443 NR Description: unknown [Arabidopsis thaliana]
SADLPRSPPPPSRRAVATAPPPMASSAAGAGKSLIQTFRKFFKKPWEITGPCSSPEYRSAVPGALEYRQTLPGHPSRGLPQGRHPHLRLGDRVRHQVLPARLRPQPPARPPHPPPQARSRALHGRQAVRPRQGLPRPLRQFCCRVQRSRRRLHQVIQVLWSSCSRSCTHFISAFP

SEQ ID NO: 18306 - protein, 153 aa, Triticum aestivum
  peptide (1)..(153): Ceres Seq. ID no. 13582854
  misc_feature (1)..(50): NCBI GI NO: 34909786 NR Description: P0512C01.35
  misc_feature (1)..(50): NCBI GI NO: 15241510 NR Description: expressed protein [Arabidopsis thaliana]
  misc_feature (1)..(50): NCBI GI NO: 21592443 NR Description: unknown [Arabidopsis thaliana]
MASSAAGAGKSLIQTFRKFFKKPWEITGPCSSPEYRSAVPGALEYRQTLPGHPSRGLPQGRHPHLRLGDRVRHQVLPARLRPQPPARPPHPPPQARSRALHGRQAVRPRQGLPRPLRQFCCRVQRSRRRLHQVIQVLWSSCSRSCTHFISAFP

SEQ ID NO: 18307 - DNA, 996 bp, Triticum aestivum
  misc_feature (1)..(996): Ceres Seq. ID no. 13654321
gtcagcaagcaacattaactcacttgttgagctccacactccagctccagcgcagccgcagagtgcagagtgagtgagtgggcatgggcgaggaggccaattgcgacgccgtgatggaggacggcaacggcaacgacaacggcaaggccaaggagaacggccacgccacagccgttgtggccatgccggacgtcaaggccaaggccgaggacgccgtggtggcgccgggtgacccccgcctgcagggcatctccgacgccatccgcgtcgtcccgcacttccccaagcaaggcatcatgttcaacgacatcacgacgctcctgctgcggcccggggtgttcaaggacgccctggacatgtttgtggagcgctaccgcggcatgggcatcgccgccgtcgccgggattgaggcgagaggatttatatttggccccgcgattgcactagccatcggtgccaagttcattccgttgcgcaagcctaagaaactcccaggtgaggtgatttctgagacctatgttctcgaatacggaactgattgtctggagatgcatgttggtgctatcgaaccccgtgagcgtgttttgatagttgatgatctggttgcaactggtgggacactttgtgctgctataaatcttctggaacgtgctggagctgatgtcgttgagtgtgcttgtctcattgggctccctaaatttaaggatttttacaagctcaacgggaagcctgtctatgtactggtggagtctctggaatatgaaaaataagaaaccggtgaccaggtgagggacgcatcatggcttcatcctgctgcggtagtattagggagtgggggaggttagggagcggtacgtgaatggatgggtgtagtctttgtaggctgagtggtttcttcaactgtactgaagagcttcttccttgtgctcgggagaaatgatcgttagctgagacgcgagtcctgtagttccattattatcattggttattattatt

SEQ ID NO: 18308 - protein, 228 aa, Triticum aestivum
  peptide (1)..(228): Ceres Seq. ID no. 15219640
  misc_feature (1)..(223): NCBI GI NO: 40019121 NR Description: adenine phosphoribosyltransferase [Zea mays]
  misc_feature (19)..(223): NCBI GI NO: 29826070 NR Description: adenine phosphoribosyltransferase form 2
  misc_feature (50)..(223): NCBI GI NO: 33354190 NR Description: putative adenine phosphoribosyl transferase
  misc_feature (49)..(228): NCBI GI NO: 15220047 NR Description: adenine phosphoribosyltransferase
  misc_feature (49)..(228): NCBI GI NO: 1402894 NR Description: adenine phosphoribosyltransferase
  misc_feature (49)..(222): NCBI GI NO: 15238973 NR Description: adenine phosphoribosyltransferase - like protein
  misc_feature (50)..(222): NCBI GI NO: 15235709 NR Description: adenine phosphoribosyltransferase (EC 2
  misc_feature (50)..(222): NCBI GI NO: 21536749 NR Description: adenine phosphoribosyltransferase (EC 2
  misc_feature (50)..(222): NCBI GI NO: 15234553 NR Description: adenine phosphoribosyltransferase -related
  misc_feature (29)..(223): NCBI GI NO: 32492063 NR Description: adenine phosphoribosyltransferase [Brassica napus]
MGEEANCDAVMEDGNGNDNGKAKENGHATAVVAMPDVKAKAEDAVVAPGDPRLQGISDAIRVVPHFPKQGIMFNDITTLLLRPGVFKDALDMFVERYRGMGIAAVAGIEARGFIFGPAIALAIGAKFIPLRKPKKLPGEVISETYVLEYGTDCLEMHVGAIEPRERVLIVDDLVATGGTLCAAINLLERAGADVVECACLIGLPKFKDFYKLNGKPVYVLVESLEYEK

SEQ ID NO: 18309 - protein, 218 aa, Triticum aestivum
  peptide (1)..(218): Ceres Seq. ID no. 15219641
  misc_feature (1)..(213): NCBI GI NO: 40019121 NR Description: adenine phosphoribosyltransferase [Zea mays]
  misc_feature (9)..(213): NCBI GI NO: 29826070 NR Description: adenine phosphoribosyltransferase form 2
  misc_feature (40)..(213): NCBI GI NO: 33354190 NR Description: putative adenine phosphoribosyl transferase
  misc_feature (39)..(218): NCBI GI NO: 15220047 NR Description: adenine phosphoribosyltransferase
  misc_feature (39)..(218): NCBI GI NO: 1402894 NR Description: adenine phosphoribosyltransferase
  misc_feature (39)..(212): NCBI GI NO: 15238973 NR Description: adenine phosphoribosyltransferase - like protein
  misc_feature (40)..(212): NCBI GI NO: 15235709 NR Description: adenine phosphoribosyltransferase (EC 2
  misc_feature (40)..(212): NCBI GI NO: 21536749 NR Description: adenine phosphoribosyltransferase (EC 2
  misc_feature (40)..(212): NCBI GI NO: 15234553 NR Description: adenine phosphoribosyltransferase -related
  misc_feature (19)..(213): NCBI GI NO: 32492063 NR Description: adenine phosphoribosyltransferase [Brassica napus]
MEDGNGNDNGKAKENGHATAVVAMPDVKAKAEDAVVAPGDPRLQGISDAIRVVPHFPKQGIMFNDITTLLLRPGVFKDALDMFVERYRGMGIAAVAGIEARGFIFGPAIALAIGAKFIPLRKPKKLPGEVISETYVLEYGTDCLEMHVGAIEPRERVLIVDDLVATGGTLCAAINLLERAGADVVECACLIGLPKFKDFYKLNGKPVYVLVESLEYEK

SEQ ID NO: 18310 - protein, 195 aa, Triticum aestivum
  peptide (1)..(195): Ceres Seq. ID no. 15219642
  misc_feature (1)..(190): NCBI GI NO: 40019121 NR Description: adenine phosphoribosyltransferase [Zea mays]
  misc_feature (1)..(190): NCBI GI NO: 29826070 NR Description: adenine phosphoribosyltransferase form 2
  misc_feature (17)..(190): NCBI GI NO: 33354190 NR Description: putative adenine phosphoribosyl transferase
  misc_feature (16)..(195): NCBI GI NO: 15220047 NR Description: adenine phosphoribosyltransferase
  misc_feature (16)..(195): NCBI GI NO: 1402894 NR Description: adenine phosphoribosyltransferase
  misc_feature (16)..(189): NCBI GI NO: 15238973 NR Description: adenine phosphoribosyltransferase - like protein
  misc_feature (17)..(189): NCBI GI NO: 15235709 NR Description: adenine phosphoribosyltransferase (EC 2
  misc_feature (17)..(189): NCBI GI NO: 21536749 NR Description: adenine phosphoribosyltransferase (EC 2
  misc_feature (17)..(189): NCBI GI NO: 15234553 NR Description: adenine phosphoribosyltransferase -related
  misc_feature (1)..(190): NCBI GI NO: 32492063 NR Description: adenine phosphoribosyltransferase [Brassica napus]
MPDVKAKAEDAVVAPGDPRLQGISDAIRVVPHFPKQGIMFNDITTLLLRPGVFKDALDMFVERYRGMGIAAVAGIEARGFIFGPAIALAIGAKFIPLRKPKKLPGEVISETYVLEYGTDCLEMHVGAIEPRERVLIVDDLVATGGTLCAAINLLERAGADVVECACLIGLPKFKDFYKLNGKPVYVLVESLEYEK

SEQ ID NO: 18311 - DNA, 821 bp, Triticum aestivum
  misc_feature (1)..(821): Ceres Seq. ID no. 12584129
accggagaaggcgccttcctcttctccccaaaccttctcttctccgcgttccatccgtcctcatcatggctgtagagggggccgggaagggggtgtcatcgatgtgctgttcaagcggcgagttgcagcggaggggcgcgggcaagaggatgctatcgagggttcttgcggatagtgttgatcgttctgggttgttggagtgggccaaatacctgacgacgggtaagatagaggtgctgtacaagcagtggatgctcggctgcgaccataaggctgtaccattctccacaacaaaaagtcaaagtgggcatgtttcttctgtctttaaacttgtgcactatgagctggtgttgcaatgcttgaagaagttgcctggcgttgttgtgcaagatataccttatagaacaagccgtgctgttcaaaatgctggcacaaactgcgcttctgataaagaagttgacgagcttctcataaagctgcccggtcgattacgagatgcacttctataccattccaacttgaaggtgtgaaatttgagcttcagaggcaagggcgctgccttattacatatgagatggggcttggcaagactctccaagtgagcatattgtattttgtgtataactatcgtgcggatagtttatatgcagaaaattgtttgttccacggtgttacaacttgtaaaatacagtaaattggcttatggatattgagcgcactgatattgagcttgcatcaatacattttgggcagtaacagattagaattttatgtctattttactgaacagttaattatatagcatttgctttttagacctt

SEQ ID NO: 18312 - protein, 175 aa, Triticum aestivum
  peptide (1)..(175): Ceres Seq. ID no. 12584130
  misc_feature (87)..(175): NCBI GI NO: 34393588 NR Description: DNA-dependent ATPase A-like protein
  misc_feature (113)..(175): NCBI GI NO: 34393589 NR Description: putative DNA helicase
  misc_feature (91)..(168): NCBI GI NO: 11357391 NR Description: hypothetical protein F13G24
  misc_feature (91)..(168): NCBI GI NO: 15240867 NR Description: putative protein; protein id: At5g07810.1
RRRRLPLLPKPSLLRVPSVLIMAVEGAGKGVSSMCCSSGELQRRGAGKRMLSRVLADSVDRSGLLEWAKYLTTGKIEVLYKQWMLGCDHKAVPFSTTKSQSGHVSSVFKLVHYELVLQCLKKLPGVVVQDIPYRTSRAVQNAGTNCASDKEVDELLIKLPGRLRDALLYHSNLKV

SEQ ID NO: 18313 - protein, 154 aa, Triticum aestivum
  peptide (1)..(154): Ceres Seq. ID no. 12584131
  misc_feature (66)..(154): NCBI GI NO: 34393588 NR Description: DNA-dependent ATPase A-like protein
  misc_feature (92)..(154): NCBI GI NO: 34393589 NR Description: putative DNA helicase
  misc_feature (70)..(147): NCBI GI NO: 11357391 NR Description: hypothetical protein F13G24
  misc_feature (70)..(147): NCBI GI NO: 15240867 NR Description: putative protein; protein id: At5g07810.1
MAVEGAGKGVSSMCCSSGELQRRGAGKRMLSRVLADSVDRSGLLEWAKYLTTGKIEVLYKQWMLGCDHKAVPFSTTKSQSGHVSSVFKLVHYELVLQCLKKLPGVVVQDIPYRTSRAVQNAGTNCASDKEVDELLIKLPGRLRDALLYHSNLKV

SEQ ID NO: 18314 - protein, 142 aa, Triticum aestivum
  peptide (1)..(142): Ceres Seq. ID no. 12584132
  misc_feature (54)..(142): NCBI GI NO: 34393588 NR Description: DNA-dependent ATPase A-like protein
  misc_feature (80)..(142): NCBI GI NO: 34393589 NR Description: putative DNA helicase
  misc_feature (58)..(135): NCBI GI NO: 11357391 NR Description: hypothetical protein F13G24
  misc_feature (58)..(135): NCBI GI NO: 15240867 NR Description: putative protein; protein id: At5g07810.1
MCCSSGELQRRGAGKRMLSRVLADSVDRSGLLEWAKYLTTGKIEVLYKQWMLGCDHKAVPFSTTKSQSGHVSSVFKLVHYELVLQCLKKLPGVVVQDIPYRTSRAVQNAGTNCASDKEVDELLIKLPGRLRDALLYHSNLKV

SEQ ID NO: 18315 - DNA, 1180 bp, Triticum aestivum
  misc_feature (1)..(1180): Ceres Seq. ID no. 13654322
aatccccgaccagactcgtcgctccctgacccttcccctccaacgccgaagccctaacacgcagctccggcggctgagctcgcagtccgccccctcgcaccttcgtccccagcgcgcgcgcacccccacggccaaccacgcggcgaggcgcatcctccttcgacccccgacgaagcaggcggggagcctgacgcggccccgcgcggccttggccagatgacgaggaccagcggcgcgaacggcggcgggcagcaggggtcggggaagctcccgcgtaagcgcttctaccgggcgcgcgcgcacagcaacccgctcagcgactcgcacttcccgatcccgatagcgcccgacgacgtcgacctctcgcagcactacccgcgctacttcccggccgacaagggcgagcacggtgatggggacggggacgcggaggcgccccggatccgcttcgctgacgtcgggtgcgggtttggtgggctgctcgtcgggctctcgccgctcttccccgacaagctaatgatcggcatggagctgagggacaaggtgactgagtatgtcaaagagagggttctggctttgagagcatcaaatccaggacagtatgacaacatatccgttgtgcgcaccaattcaatgaaatacattcctaactactttggaaaggctcagctctccaaaatgttcttcctgttccctgatcctcacttcaaggagaagaaccaccggaggagggtgattagcatgcatttgctcgatgaatacgcttacgtgatggaagtgggaggaatcatatacactattactgatgtagaggagcttggtatatggatgcgcacatgtctggagaaacacccactcttccaagctgttccagaggaagagataaaagtcgatccagttgtgaagctactgtctagtgccaccgaagaaggccagaaggtcgcgaggaatggagggcagactttccaggccatcttcaggcgcatctccttgcaagaggaataagcaattttggaacttactaagctcttagcacagtgtactttcctggacttcgctagatggatttgtgccatttctatacatttttgtagcatgatttcactatgcagtagtcttacgtagcgctgctatctcaaatgtttggctctactttacaaaaaaattctggaagattgct

SEQ ID NO: 18316 - protein, 262 aa, Triticum aestivum
  peptide (1)..(262): Ceres Seq. ID no. 13654323
  misc_feature (40)..(257): Pfam Name: Pfam Description:  Putative methyltransferase
  misc_feature (18)..(258): NCBI GI NO: 15238631 NR Description: methyltransferase-related protein
  misc_feature (19)..(257): NCBI GI NO: 15215058 NR Description: methyltransferase-like 1 [Mus musculus]
  misc_feature (19)..(257): NCBI GI NO: 4160294 NR Description: methyltransferase-like protein 1 [Mus musculus]
  misc_feature (19)..(257): NCBI GI NO: 6754682 NR Description: methyltransferase-like 1; methyltransferase-like 1
  misc_feature (19)..(257): NCBI GI NO: 1418767 NR Description: D1075-like [Homo sapiens]
  misc_feature (19)..(257): NCBI GI NO: 10880981 NR Description: methyltransferase-like protein 1 isoform a
  misc_feature (18)..(257): NCBI GI NO: 17536689 NR Description: Putative methyltransferase
  misc_feature (18)..(257): NCBI GI NO: 39597269 NR Description: Hypothetical protein CBG02883
  misc_feature (12)..(257): NCBI GI NO: 6320000 NR Description: Transfer RNA methyltransferase; Trm8p
  misc_feature (18)..(257): NCBI GI NO: 20128915 NR Description: CG4045-PA [Drosophila melanogaster]
MTRTSGANGGGQQGSGKLPRKRFYRARAHSNPLSDSHFPIPIAPDDVDLSQHYPRYFPADKGEHGDGDGDAEAPRIRFADVGCGFGGLLVGLSPLFPDKLMIGMELRDKVTEYVKERVLALRASNPGQYDNISVVRTNSMKYIPNYFGKAQLSKMFFLFPDPHFKEKNHRRRVISMHLLDEYAYVMEVGGIIYTITDVEELGIWMRTCLEKHPLFQAVPEEEIKVDPVVKLLSSATEEGQKVARNGGQTFQAIFRRISLQEE

SEQ ID NO: 18317 - protein, 162 aa, Triticum aestivum
  peptide (1)..(162): Ceres Seq. ID no. 13654324
  misc_feature (1)..(157): Pfam Name: Pfam Description:  Putative methyltransferase
  misc_feature (1)..(158): NCBI GI NO: 15238631 NR Description: methyltransferase-related protein
  misc_feature (1)..(157): NCBI GI NO: 15215058 NR Description: methyltransferase-like 1 [Mus musculus]
  misc_feature (1)..(157): NCBI GI NO: 4160294 NR Description: methyltransferase-like protein 1 [Mus musculus]
  misc_feature (1)..(157): NCBI GI NO: 6754682 NR Description: methyltransferase-like 1; methyltransferase-like 1
  misc_feature (1)..(157): NCBI GI NO: 1418767 NR Description: D1075-like [Homo sapiens]
  misc_feature (1)..(157): NCBI GI NO: 10880981 NR Description: methyltransferase-like protein 1 isoform a
  misc_feature (1)..(157): NCBI GI NO: 17536689 NR Description: Putative methyltransferase
  misc_feature (1)..(157): NCBI GI NO: 39597269 NR Description: Hypothetical protein CBG02883
  misc_feature (1)..(157): NCBI GI NO: 6320000 NR Description: Transfer RNA methyltransferase; Trm8p
  misc_feature (1)..(157): NCBI GI NO: 20128915 NR Description: CG4045-PA [Drosophila melanogaster]
MIGMELRDKVTEYVKERVLALRASNPGQYDNISVVRTNSMKYIPNYFGKAQLSKMFFLFPDPHFKEKNHRRRVISMHLLDEYAYVMEVGGIIYTITDVEELGIWMRTCLEKHPLFQAVPEEEIKVDPVVKLLSSATEEGQKVARNGGQTFQAIFRRISLQEE

SEQ ID NO: 18318 - protein, 159 aa, Triticum aestivum
  peptide (1)..(159): Ceres Seq. ID no. 13654325
  misc_feature (1)..(154): Pfam Name: Pfam Description:  Putative methyltransferase
  misc_feature (1)..(155): NCBI GI NO: 15238631 NR Description: methyltransferase-related protein
  misc_feature (1)..(154): NCBI GI NO: 15215058 NR Description: methyltransferase-like 1 [Mus musculus]
  misc_feature (1)..(154): NCBI GI NO: 4160294 NR Description: methyltransferase-like protein 1 [Mus musculus]
  misc_feature (1)..(154): NCBI GI NO: 6754682 NR Description: methyltransferase-like 1; methyltransferase-like 1
  misc_feature (1)..(154): NCBI GI NO: 1418767 NR Description: D1075-like [Homo sapiens]
  misc_feature (1)..(154): NCBI GI NO: 10880981 NR Description: methyltransferase-like protein 1 isoform a
  misc_feature (1)..(154): NCBI GI NO: 17536689 NR Description: Putative methyltransferase
  misc_feature (1)..(154): NCBI GI NO: 39597269 NR Description: Hypothetical protein CBG02883
  misc_feature (1)..(154): NCBI GI NO: 6320000 NR Description: Transfer RNA methyltransferase; Trm8p
  misc_feature (1)..(154): NCBI GI NO: 20128915 NR Description: CG4045-PA [Drosophila melanogaster]
MELRDKVTEYVKERVLALRASNPGQYDNISVVRTNSMKYIPNYFGKAQLSKMFFLFPDPHFKEKNHRRRVISMHLLDEYAYVMEVGGIIYTITDVEELGIWMRTCLEKHPLFQAVPEEEIKVDPVVKLLSSATEEGQKVARNGGQTFQAIFRRISLQEE

SEQ ID NO: 18319 - DNA, 1115 bp, Triticum aestivum
  misc_feature (1)..(1115): Ceres Seq. ID no. 12592883
ctactgaataaacgccagaggcggcggcaccacgaaagcgaagccccctccccgtctacagtctctccacgcggggcacagatcaccactcgccgccgcacctccacgccggcggatatggagcgcgccggcgccgcgccgggggtccctgcggcaggggagggcgcggcggcggcggccgcagcgccgaccccggtggcaggggcaggggtggtgaaggggaggtcctgcaagggctgcctcttctactcgtcggtgctcaggtccaaagggcgcggccccgtctgcgtcggcgtcacccgcggcatcccccaagttcctgatcgtatggttggagaaattgagctgggagctatccaagaaggtcgcaacctttccaacttcaaatatgcatgtgctggatattccatatacctagatgacaaggatacctctacagtgaagggagagaagcatgcagagctccctatctgtgttggagttgagctattgacagacagagctccaactaaacaagctccagctcacgtaactaaacaagctccaggtcacatgaaaaaagaagctactcaagcacatggacacaaacctgcgctgacacaagccgatttcataaccaaatttcagaggaatgctggacttgtggccagtggtgtggtcaggaacatgaataaaattgggacttacgtcaaagacacggtggatgacatcctgtacccataccgcaagcgtcccaagtaaaacctagctcttgttctccttcaatcctggagtagaatagagaaaaatgtgggagcatgtaatctattacttccggagacactggcgcaggagtagcctcgcttggtttctgaggctgtggctgggatttcactgcctgtcagttcatgcctaacgctagcaggctgttgtatgcctgcctgttttggattcttgccatgttcctttggtagagcctctccgctccccagcttgcaatgcgatcttcattctgctggttcctccagcaatgtataggatgcaatgtaacaaagctataaaggagctcatcttttgcctatttgaggctatcctttggagaataataaattaataataggccgtcatttggctcc

SEQ ID NO: 18320 - protein, 246 aa, Triticum aestivum
  peptide (1)..(246): Ceres Seq. ID no. 12592884
  misc_feature (73)..(246): NCBI GI NO: 15230397 NR Description: putative protein; protein id: At3g51100.1
LLNKRQRRRHHESEAPSPSTVSPRGAQITTRRRTSTPADMERAGAAPGVPAAGEGAAAAAAAPTPVAGAGVVKGRSCKGCLFYSSVLRSKGRGPVCVGVTRGIPQVPDRMVGEIELGAIQEGRNLSNFKYACAGYSIYLDDKDTSTVKGEKHAELPICVGVELLTDRAPTKQAPAHVTKQAPGHMKKEATQAHGHKPALTQADFITKFQRNAGLVASGVVRNMNKIGTYVKDTVDDILYPYRKRPK

SEQ ID NO: 18321 - protein, 207 aa, Triticum aestivum
  peptide (1)..(207): Ceres Seq. ID no. 12592885
  misc_feature (34)..(207): NCBI GI NO: 15230397 NR Description: putative protein; protein id: At3g51100.1
MERAGAAPGVPAAGEGAAAAAAAPTPVAGAGVVKGRSCKGCLFYSSVLRSKGRGPVCVGVTRGIPQVPDRMVGEIELGAIQEGRNLSNFKYACAGYSIYLDDKDTSTVKGEKHAELPICVGVELLTDRAPTKQAPAHVTKQAPGHMKKEATQAHGHKPALTQADFITKFQRNAGLVASGVVRNMNKIGTYVKDTVDDILYPYRKRPK

SEQ ID NO: 18322 - protein, 137 aa, Triticum aestivum
  peptide (1)..(137): Ceres Seq. ID no. 12592886
  misc_feature (1)..(137): NCBI GI NO: 15230397 NR Description: putative protein; protein id: At3g51100.1
MVGEIELGAIQEGRNLSNFKYACAGYSIYLDDKDTSTVKGEKHAELPICVGVELLTDRAPTKQAPAHVTKQAPGHMKKEATQAHGHKPALTQADFITKFQRNAGLVASGVVRNMNKIGTYVKDTVDDILYPYRKRPK

SEQ ID NO: 18323 - DNA, 786 bp, Triticum aestivum
  misc_feature (1)..(786): Ceres Seq. ID no. 12584296
aggccgtctgctccgaagctcctcctcccccgcatctctcctttcgcccccacctctctccggcgcacggctccgacgcgatggccgccccactccggcgggtcttcccctccctcggccgggccctgctctcgcctacgccggcgcggatgctctccgcggaggcctccgatgccctcgtggagatcaagcccggggagatcggcatggtctccgggatccccgaggagcacctccgccgcaaggttctaatctattcaccagctaggactgcatctcagcaaggttctggcaaagtcgggaggtggaaaatcaatttcgtgtcaacccaaaagtgggagaacccattgatgggatggacatcgactggtgatccgtatgctaatgttggtgaagctggacttacgtttgacagtgccgaatcagcgaaggcatttgctgaaaagcacggatgggaatatgtggttaggaagcgccatacacctcttctgaagcccaaaacgtatgcagagaacttcaagtggaagggccccccgaagacggaggaagcagcctaagctgtggatttgtatgttgtctggagattttcataagatgttgttttcccctgccgctcgtgctgatttcactttgttcaatacctgtcgtgcaatatgagctagaacatgtctccattaaacgtgtaataagcacgcattgcaactgaactcgtcgctcatctcatcaaaatgcttgttattagccttgcctgtaaaattccccttcacacagaatttcttggctact

SEQ ID NO: 18324 - protein, 184 aa, Triticum aestivum
  peptide (1)..(184): Ceres Seq. ID no. 12584297
  misc_feature (80)..(164): Pfam Name: Pfam Description:  ETC complex I subunit conserved region
  misc_feature (27)..(164): NCBI GI NO: 34901114 NR Description: NADH-ubiquinone oxidoreductase 18 kDa subunit
  misc_feature (43)..(181): NCBI GI NO: 15240784 NR Description: putative protein; protein id: At5g67590
  misc_feature (43)..(181): NCBI GI NO: 21555571 NR Description: unknown [Arabidopsis thaliana]
  misc_feature (23)..(174): NCBI GI NO: 6754814 NR Description: NADH dehydrogenase
  misc_feature (43)..(174): NCBI GI NO: 28461229 NR Description: NADH dehydrogenase
  misc_feature (66)..(174): NCBI GI NO: 4505369 NR Description: NADH dehydrogenase
  misc_feature (66)..(174): NCBI GI NO: 13528960 NR Description: NADH dehydrogenase
  misc_feature (66)..(174): NCBI GI NO: 14919381 NR Description: Similar to NADH dehydrogenase
  misc_feature (66)..(174): NCBI GI NO: 19110803 NR Description: NADH dehydrogenase [Gallus gallus]
  misc_feature (66)..(174): NCBI GI NO: 31199457 NR Description: ENSANGP00000021474 [Anopheles gambiae]
AVCSEAPPPPHLSFRPHLSPAHGSDAMAAPLRRVFPSLGRALLSPTPARMLSAEASDALVEIKPGEIGMVSGIPEEHLRRKVLIYSPARTASQQGSGKVGRWKINFVSTQKWENPLMGWTSTGDPYANVGEAGLTFDSAESAKAFAEKHGWEYVVRKRHTPLLKPKTYAENFKWKGPPKTEEAA

SEQ ID NO: 18325 - protein, 158 aa, Triticum aestivum
  peptide (1)..(158): Ceres Seq. ID no. 12584298
  misc_feature (54)..(138): Pfam Name: Pfam Description:  ETC complex I subunit conserved region
  misc_feature (1)..(138): NCBI GI NO: 34901114 NR Description: NADH-ubiquinone oxidoreductase 18 kDa subunit
  misc_feature (17)..(155): NCBI GI NO: 15240784 NR Description: putative protein; protein id: At5g67590
  misc_feature (17)..(155): NCBI GI NO: 21555571 NR Description: unknown [Arabidopsis thaliana]
  misc_feature (1)..(148): NCBI GI NO: 6754814 NR Description: NADH dehydrogenase
  misc_feature (17)..(148): NCBI GI NO: 28461229 NR Description: NADH dehydrogenase
  misc_feature (40)..(148): NCBI GI NO: 4505369 NR Description: NADH dehydrogenase
  misc_feature (40)..(148): NCBI GI NO: 14919381 NR Description: Similar to NADH dehydrogenase
  misc_feature (40)..(148): NCBI GI NO: 13528960 NR Description: NADH dehydrogenase
  misc_feature (40)..(148): NCBI GI NO: 19110803 NR Description: NADH dehydrogenase [Gallus gallus]
  misc_feature (40)..(148): NCBI GI NO: 31199457 NR Description: ENSANGP00000021474 [Anopheles gambiae]
MAAPLRRVFPSLGRALLSPTPARMLSAEASDALVEIKPGEIGMVSGIPEEHLRRKVLIYSPARTASQQGSGKVGRWKINFVSTQKWENPLMGWTSTGDPYANVGEAGLTFDSAESAKAFAEKHGWEYVVRKRHTPLLKPKTYAENFKWKGPPKTEEAA

SEQ ID NO: 18326 - protein, 135 aa, Triticum aestivum
  peptide (1)..(135): Ceres Seq. ID no. 12584299
  misc_feature (31)..(115): Pfam Name: Pfam Description:  ETC complex I subunit conserved region
  misc_feature (1)..(115): NCBI GI NO: 34901114 NR Description: NADH-ubiquinone oxidoreductase 18 kDa subunit
  misc_feature (1)..(132): NCBI GI NO: 15240784 NR Description: putative protein; protein id: At5g67590
  misc_feature (1)..(132): NCBI GI NO: 21555571 NR Description: unknown [Arabidopsis thaliana]
  misc_feature (1)..(125): NCBI GI NO: 6754814 NR Description: NADH dehydrogenase
  misc_feature (1)..(125): NCBI GI NO: 28461229 NR Description: NADH dehydrogenase
  misc_feature (17)..(125): NCBI GI NO: 4505369 NR Description: NADH dehydrogenase
  misc_feature (17)..(125): NCBI GI NO: 14919381 NR Description: Similar to NADH dehydrogenase
  misc_feature (17)..(125): NCBI GI NO: 13528960 NR Description: NADH dehydrogenase
  misc_feature (17)..(125): NCBI GI NO: 19110803 NR Description: NADH dehydrogenase [Gallus gallus]
  misc_feature (17)..(125): NCBI GI NO: 31199457 NR Description: ENSANGP00000021474 [Anopheles gambiae]
MLSAEASDALVEIKPGEIGMVSGIPEEHLRRKVLIYSPARTASQQGSGKVGRWKINFVSTQKWENPLMGWTSTGDPYANVGEAGLTFDSAESAKAFAEKHGWEYVVRKRHTPLLKPKTYAENFKWKGPPKTEEAA

SEQ ID NO: 18327 - DNA, 957 bp, Triticum aestivum
  misc_feature (1)..(957): Ceres Seq. ID no. 13591072
acttgaatgcccttgcgacgtctcctatcatggctatctataaacgccggccggccacaccatgccttctcctcctcctcctcctcctcctcgtcaacagctagccagcaagaagcagagcagctcagaaccgagcacagaccgaagcggagccaaacgaaagaagggatctaacctagccagccggcgatcgaccgagagatggcgcggtggtgtcagctggcggcggtgctgctcgccgtgtcgatggcggcgtcgacgacggtggcgcaggacgcgctgcagaccaagtgccaggaggacctgcagaagctgtcagactgcatggactacgcgacggggcacgaggacacgccgtcggccaagtgctgcgaggacacggcggacacgcagaagtcgcggcccgagtgcctctgctccatcatccagcaggtgcacagcggcagccacggcgtgcagcagctcggcctccgcttcgaccgcctcctggcccagcccgccgcctgcaagctccccaacgccaacgtttccctctgcatcaacctgctgcacctgaccccgagctcgccagactacgctctcttcgcaaatgcttccaagattactccgtccactgccgcgccagcgagagacaccgccgacggcttcaaggttccgacggggctcggttatggcgtcgtggcggcggccgtcgtctctgctgtcttctcatccatcttctgatttttggacaagcacacgctcttttatcctctccctttcttctatccttcatgtttgtttacataactctgcaagttcccacacaacgacacgatgctttagatgatctatatctactcacgtggtaagaggattcgttcggatgacttactcttgttttaccccagacaagtagatggaaagttgagacttgtgtttcttcatgtggaagtgatggtttgtagtaatatcctg

SEQ ID NO: 18328 - protein, 173 aa, Triticum aestivum
  peptide (1)..(173): Ceres Seq. ID no. 13591073
  misc_feature (31)..(112): Pfam Name: Pfam Description:  Protease inhibitor/seed storage/LTP family
  misc_feature (7)..(173): NCBI GI NO: 21553541 NR Description: lipid transfer protein, putative
  misc_feature (7)..(173): NCBI GI NO: 15217777 NR Description: lipid transfer protein - related
  misc_feature (4)..(168): NCBI GI NO: 25553602 NR Description: OJ1656_E11.34
  misc_feature (1)..(173): NCBI GI NO: 25553595 NR Description: OJ1656_E11.26
  misc_feature (7)..(166): NCBI GI NO: 15224863 NR Description: lipid transfer protein - related
  misc_feature (8)..(155): NCBI GI NO: 15224862 NR Description: lipid transfer protein family
  misc_feature (7)..(112): NCBI GI NO: 25406727 NR Description: protein F10O3.7 [imported] - Arabidopsis thaliana
  misc_feature (6)..(173): NCBI GI NO: 18403453 NR Description: protease inhibitor/seed storage/lipid transfer
  misc_feature (6)..(173): NCBI GI NO: 24417478 NR Description: unknown [Arabidopsis thaliana]
  misc_feature (9)..(153): NCBI GI NO: 28269454 NR Description: putative protease inhibitor
MARWCQLAAVLLAVSMAASTTVAQDALQTKCQEDLQKLSDCMDYATGHEDTPSAKCCEDTADTQKSRPECLCSIIQQVHSGSHGVQQLGLRFDRLLAQPAACKLPNANVSLCINLLHLTPSSPDYALFANASKITPSTAAPARDTADGFKVPTGLGYGVVAAAVVSAVFSSIF

SEQ ID NO: 18329 - protein, 164 aa, Triticum aestivum
  peptide (1)..(164): Ceres Seq. ID no. 13591074
  misc_feature (47)..(113): Pfam Name: Pfam Description:  TT viral orf 1
MPSPPPPPPPRQQLASKKQSSSEPSTDRSGAKRKKGSNLASRRSTERWRGGVSWRRCCSPCRWRRRRRWRRTRCRPSARRTCRSCQTAWTTRRGTRTRRRPSAARTRRTRRSRGPSASAPSSSRCTAAATACSSSASASTASWPSPPPASSPTPTFPSASTCCT

SEQ ID NO: 18330 - protein, 158 aa, Triticum aestivum
  peptide (1)..(158): Ceres Seq. ID no. 13591075
  misc_feature (16)..(97): Pfam Name: Pfam Description:  Protease inhibitor/seed storage/LTP family
  misc_feature (1)..(158): NCBI GI NO: 21553541 NR Description: lipid transfer protein, putative
  misc_feature (1)..(158): NCBI GI NO: 15217777 NR Description: lipid transfer protein - related
  misc_feature (1)..(153): NCBI GI NO: 25553602 NR Description: OJ1656_E11.34
  misc_feature (1)..(158): NCBI GI NO: 25553595 NR Description: OJ1656_E11.26
  misc_feature (1)..(151): NCBI GI NO: 15224863 NR Description: lipid transfer protein - related
  misc_feature (1)..(140): NCBI GI NO: 15224862 NR Description: lipid transfer protein family
  misc_feature (1)..(97): NCBI GI NO: 25406727 NR Description: protein F10O3.7 [imported] - Arabidopsis thaliana
  misc_feature (1)..(158): NCBI GI NO: 18403453 NR Description: protease inhibitor/seed storage/lipid transfer
  misc_feature (1)..(158): NCBI GI NO: 24417478 NR Description: unknown [Arabidopsis thaliana]
  misc_feature (1)..(138): NCBI GI NO: 28269454 NR Description: putative protease inhibitor
MAASTTVAQDALQTKCQEDLQKLSDCMDYATGHEDTPSAKCCEDTADTQKSRPECLCSIIQQVHSGSHGVQQLGLRFDRLLAQPAACKLPNANVSLCINLLHLTPSSPDYALFANASKITPSTAAPARDTADGFKVPTGLGYGVVAAAVVSAVFSSIF

SEQ ID NO: 18331 - DNA, 1286 bp, Triticum aestivum
  misc_feature (1)..(1286): Ceres Seq. ID no. 13654238
agaacatcctaatcgaaaaaaccgctccccgccgccggttcagtcccctccgccggcggcgagatgtccttcttcttccgcgcggcgtcgcggccgcgttcgtcgcagcaagacctcgtgcgctccatcaaggactccctcctcgcgctcgacaccaagaccggcgccaaggcccttgaagatgttgagaaaaacatattcaccttgagacagacactttctggtgatggagaagttgaaccaaaccaggatcatgtgttacagatagcccttgaaatttgcaaggagggtgtcctttctctttttgttcagaacctgccttcgctgggttgggagggtagaaaggatcttgcccactgctggtgcattttgttgaggcagaaggttgatgaaagtcactgctgcgtgcagtatatcgaaaatcatgttgatcttctagatttccttgttgtatgctacaagaacttggaagtcgcattgaactgtggaaacatgttgcgagaatgcataaaatatccctcacttgcaaaatatatattggagtcaaatagcttcgagttgtttttccagtatgttgaattgccaaactttgatattgcttctgatgctctgaatacgttcaaggatttgctcactagacatgaagatgcagtctccgagtttctcatttcccattatgaacagttctttgaactctacaaaaggcttttaacttcagataattatgtgacaagaagacaatcagtgaagtttctttcagagtttctgttggaggccccaaatgctcagataatgaagcggtacattttggaagttcgttacttgaacattatgatgggtctactaaaggattcaagcaaaaatatcaggatatgttcctttcacatatttaaggtatttgttgccaatccaaacaagcctcgtgatatcattcaagttttggtagacaaccacaaagaattattgaagttactccatgctcttcctgcaagcaagggtgaagatgaacaacttgacgaggagcgagacttaattatcaaggaaatcgagaagctcgtgctcttgtcagtatagaccctcaagaaattcaaaattaccctttgaaaaaaaaaacagtggtcgagaaaggcaatccatttcttcctgtgtaatgtgataccctgtatagaattgtctagtgttgttatcatatttacagaaacagctcgtcattccacaagagcatgaagcattgctgcatgcatatatggttcaaacaaatctgccgcaccagattcgatatatat

SEQ ID NO: 18332 - protein, 336 aa, Triticum aestivum
  peptide (1)..(336): Ceres Seq. ID no. 15219632
  misc_feature (33)..(332): Pfam Name: Pfam Description:  Mo25 protein family
  misc_feature (1)..(336): NCBI GI NO: 33146499 NR Description: unknown protein
  misc_feature (1)..(336): NCBI GI NO: 34898912 NR Description: hypothetical protein
  misc_feature (1)..(331): NCBI GI NO: 18419772 NR Description: expressed protein [Arabidopsis thaliana]
  misc_feature (10)..(331): NCBI GI NO: 7706481 NR Description: MO25 protein [Homo sapiens]
  misc_feature (10)..(331): NCBI GI NO: 34877516 NR Description: similar to MO25 protein [Rattus norvegicus]
  misc_feature (10)..(331): NCBI GI NO: 31204803 NR Description: ENSANGP00000021363 [Anopheles gambiae]
  misc_feature (10)..(331): NCBI GI NO: 31982582 NR Description: MO25 protein; calcium binding protein, 39 kDa
  misc_feature (10)..(331): NCBI GI NO: 18044843 NR Description: MO25 protein [Mus musculus]
  misc_feature (10)..(331): NCBI GI NO: 1794137 NR Description: DMO25 [Drosophila melanogaster]
  misc_feature (10)..(331): NCBI GI NO: 17647657 NR Description: Mo25 CG4083-PA [Drosophila melanogaster]
MSFFFRAASRPRSSQQDLVRSIKDSLLALDTKTGAKALEDVEKNIFTLRQTLSGDGEVEPNQDHVLQIALEICKEGVLSLFVQNLPSLGWEGRKDLAHCWCILLRQKVDESHCCVQYIENHVDLLDFLVVCYKNLEVALNCGNMLRECIKYPSLAKYILESNSFELFFQYVELPNFDIASDALNTFKDLLTRHEDAVSEFLISHYEQFFELYKRLLTSDNYVTRRQSVKFLSEFLLEAPNAQIMKRYILEVRYLNIMMGLLKDSSKNIRICSFHIFKVFVANPNKPRDIIQVLVDNHKELLKLLHALPASKGEDEQLDEERDLIIKEIEKLVLLSV

SEQ ID NO: 18333 - protein, 193 aa, Triticum aestivum
  peptide (1)..(193): Ceres Seq. ID no. 15219633
  misc_feature (1)..(189): Pfam Name: Pfam Description:  Mo25 protein family
  misc_feature (1)..(193): NCBI GI NO: 33146499 NR Description: unknown protein
  misc_feature (1)..(193): NCBI GI NO: 34898912 NR Description: hypothetical protein
  misc_feature (1)..(188): NCBI GI NO: 18419772 NR Description: expressed protein [Arabidopsis thaliana]
  misc_feature (1)..(188): NCBI GI NO: 7706481 NR Description: MO25 protein [Homo sapiens]
  misc_feature (1)..(188): NCBI GI NO: 34877516 NR Description: similar to MO25 protein [Rattus norvegicus]
  misc_feature (1)..(188): NCBI GI NO: 31204803 NR Description: ENSANGP00000021363 [Anopheles gambiae]
  misc_feature (1)..(188): NCBI GI NO: 31982582 NR Description: MO25 protein; calcium binding protein, 39 kDa
  misc_feature (1)..(188): NCBI GI NO: 18044843 NR Description: MO25 protein [Mus musculus]
  misc_feature (1)..(188): NCBI GI NO: 1794137 NR Description: DMO25 [Drosophila melanogaster]
  misc_feature (1)..(188): NCBI GI NO: 17647657 NR Description: Mo25 CG4083-PA [Drosophila melanogaster]
MLRECIKYPSLAKYILESNSFELFFQYVELPNFDIASDALNTFKDLLTRHEDAVSEFLISHYEQFFELYKRLLTSDNYVTRRQSVKFLSEFLLEAPNAQIMKRYILEVRYLNIMMGLLKDSSKNIRICSFHIFKVFVANPNKPRDIIQVLVDNHKELLKLLHALPASKGEDEQLDEERDLIIKEIEKLVLLSV

SEQ ID NO: 18334 - DNA, 1321 bp, Triticum aestivum
  misc_feature (1)..(1321): Ceres Seq. ID no. 13596362
cacactccatgcactagtactctgcaggcactgagctcatcaaggtagcttagctaggatcaatggcgtcgagcaggacagcagcgatgctggtcctcgtggccgcggtgctgtgccctgcagccttgtccaagccgtcggcggcgttcatctctatgcccaccgaccacgtcggtggccgtattcctcccgtctcccccgccgatggactcgccttcgacttccatgccgactcctgcccgcagttgcaggacgtggtgcgctccgccgtggagaccgcgctccagagggagatcgccctcgccgccggcctccttcgcatcttcttccacgactgcttccctcagggctgtgacgcgtcggtccttctgacgggagacggcagcgagctccagttgccgccgaatctgacgctccaaccgcgggcgctgcagctcattgagtccatccgtgcccaggtgcacgccgcctgcggacccgtcgtctcctgcgccgacatcacggccctcgccacccgcgatgccgttgccttctccgggggtcagggctacgacgtgccgctcggcaggctcgacagcctcgcgccggcgccgagctcggccgtcttcgatctcccccaggccagctccaacgcctccacgctcatcgacgtcttcgagacccgcaacctcgacaatgtcgacctcgtcacgctctcaggtggccacaccatcgggaagggccactgcagctccttctccaaccgcttctccgaggactccgacttcgtccgaagcctcgcctccaactgctccagcgacttcaaccggctgcaggacctcgacgtcaccaccccggacgtgttcgacatcaagtacttcaccaacctgcaacagggaaagggggtgttcacctccgaccagaagctcaccgcggactggcgcaccgaatgggttgtcaacggctttgccgggaaccactggtggttcttcggccagtttgctgcttccatgaccaagctcgggaatctccaggggccccaaggaaacgtcggcgagatccgtcgcaacagctgcttcgtgcgcaatggacagagcatcctcaccaccaccagcgacgaggggctcgccgcctctgcttgagatcaccgatgttagcgagattaatgtcttaataagagctcgctagctaatgtagcccatgttattctagatttactcttgtttaaaatcatattatggcactttgttctgggactcctaaaaggcgcgcttcgcctcggtgtgctataattcttttatagggccaaaaaaaaaaaaaaaaaagcttatcgataccgtcg

SEQ ID NO: 18335 - protein, 352 aa, Triticum aestivum
  peptide (1)..(352): Ceres Seq. ID no. 13596363
  misc_feature (66)..(298): Pfam Name: Pfam Description:  Peroxidase
  misc_feature (1)..(352): NCBI GI NO: 5777628 NR Description: CAA303716.1 protein [Oryza sativa]
  misc_feature (43)..(352): NCBI GI NO: 38345511 NR Description: OSJNBa0039K24.14
  misc_feature (45)..(352): NCBI GI NO: 5777624 NR Description: CAA303712.1 protein [Oryza sativa]
  misc_feature (43)..(351): NCBI GI NO: 38345508 NR Description: OSJNBa0039K24.10
  misc_feature (42)..(352): NCBI GI NO: 5777627 NR Description: CAA303715.1 protein [Oryza sativa]
  misc_feature (42)..(352): NCBI GI NO: 38345507 NR Description: OSJNBa0039K24.8
  misc_feature (49)..(352): NCBI GI NO: 38345506 NR Description: OSJNBa0039K24.4
  misc_feature (1)..(335): NCBI GI NO: 7433075 NR Description: probable peroxidase (EC 1
  misc_feature (49)..(338): NCBI GI NO: 7433070 NR Description: probable peroxidase (EC 1.11.1.7), cationic - rice
  misc_feature (26)..(338): NCBI GI NO: 1084393 NR Description: peroxidase (EC 1.11.1.7) precursor - parsley
MASSRTAAMLVLVAAVLCPAALSKPSAAFISMPTDHVGGRIPPVSPADGLAFDFHADSCPQLQDVVRSAVETALQREIALAAGLLRIFFHDCFPQGCDASVLLTGDGSELQLPPNLTLQPRALQLIESIRAQVHAACGPVVSCADITALATRDAVAFSGGQGYDVPLGRLDSLAPAPSSAVFDLPQASSNASTLIDVFETRNLDNVDLVTLSGGHTIGKGHCSSFSNRFSEDSDFVRSLASNCSSDFNRLQDLDVTTPDVFDIKYFTNLQQGKGVFTSDQKLTADWRTEWVVNGFAGNHWWFFGQFAASMTKLGNLQGPQGNVGEIRRNSCFVRNGQSILTTTSDEGLAASA

SEQ ID NO: 18336 - protein, 344 aa, Triticum aestivum
  peptide (1)..(344): Ceres Seq. ID no. 13596364
  misc_feature (58)..(290): Pfam Name: Pfam Description:  Peroxidase
  misc_feature (1)..(344): NCBI GI NO: 5777628 NR Description: CAA303716.1 protein [Oryza sativa]
  misc_feature (35)..(344): NCBI GI NO: 38345511 NR Description: OSJNBa0039K24.14
  misc_feature (37)..(344): NCBI GI NO: 5777624 NR Description: CAA303712.1 protein [Oryza sativa]
  misc_feature (35)..(343): NCBI GI NO: 38345508 NR Description: OSJNBa0039K24.10
  misc_feature (34)..(344): NCBI GI NO: 5777627 NR Description: CAA303715.1 protein [Oryza sativa]
  misc_feature (34)..(344): NCBI GI NO: 38345507 NR Description: OSJNBa0039K24.8
  misc_feature (41)..(344): NCBI GI NO: 38345506 NR Description: OSJNBa0039K24.4
  misc_feature (1)..(327): NCBI GI NO: 7433075 NR Description: probable peroxidase (EC 1
  misc_feature (41)..(330): NCBI GI NO: 7433070 NR Description: probable peroxidase (EC 1.11.1.7), cationic - rice
  misc_feature (18)..(330): NCBI GI NO: 1084393 NR Description: peroxidase (EC 1.11.1.7) precursor - parsley
MLVLVAAVLCPAALSKPSAAFISMPTDHVGGRIPPVSPADGLAFDFHADSCPQLQDVVRSAVETALQREIALAAGLLRIFFHDCFPQGCDASVLLTGDGSELQLPPNLTLQPRALQLIESIRAQVHAACGPVVSCADITALATRDAVAFSGGQGYDVPLGRLDSLAPAPSSAVFDLPQASSNASTLIDVFETRNLDNVDLVTLSGGHTIGKGHCSSFSNRFSEDSDFVRSLASNCSSDFNRLQDLDVTTPDVFDIKYFTNLQQGKGVFTSDQKLTADWRTEWVVNGFAGNHWWFFGQFAASMTKLGNLQGPQGNVGEIRRNSCFVRNGQSILTTTSDEGLAASA

SEQ ID NO: 18337 - protein, 321 aa, Triticum aestivum
  peptide (1)..(321): Ceres Seq. ID no. 13596365
  misc_feature (35)..(267): Pfam Name: Pfam Description:  Peroxidase
  misc_feature (1)..(321): NCBI GI NO: 5777628 NR Description: CAA303716.1 protein [Oryza sativa]
  misc_feature (12)..(321): NCBI GI NO: 38345511 NR Description: OSJNBa0039K24.14
  misc_feature (14)..(321): NCBI GI NO: 5777624 NR Description: CAA303712.1 protein [Oryza sativa]
  misc_feature (12)..(320): NCBI GI NO: 38345508 NR Description: OSJNBa0039K24.10
  misc_feature (11)..(321): NCBI GI NO: 5777627 NR Description: CAA303715.1 protein [Oryza sativa]
  misc_feature (11)..(321): NCBI GI NO: 38345507 NR Description: OSJNBa0039K24.8
  misc_feature (18)..(321): NCBI GI NO: 38345506 NR Description: OSJNBa0039K24.4
  misc_feature (1)..(304): NCBI GI NO: 7433075 NR Description: probable peroxidase (EC 1
  misc_feature (18)..(307): NCBI GI NO: 7433070 NR Description: probable peroxidase (EC 1.11.1.7), cationic - rice
  misc_feature (1)..(307): NCBI GI NO: 1084393 NR Description: peroxidase (EC 1.11.1.7) precursor - parsley
MPTDHVGGRIPPVSPADGLAFDFHADSCPQLQDVVRSAVETALQREIALAAGLLRIFFHDCFPQGCDASVLLTGDGSELQLPPNLTLQPRALQLIESIRAQVHAACGPVVSCADITALATRDAVAFSGGQGYDVPLGRLDSLAPAPSSAVFDLPQASSNASTLIDVFETRNLDNVDLVTLSGGHTIGKGHCSSFSNRFSEDSDFVRSLASNCSSDFNRLQDLDVTTPDVFDIKYFTNLQQGKGVFTSDQKLTADWRTEWVVNGFAGNHWWFFGQFAASMTKLGNLQGPQGNVGEIRRNSCFVRNGQSILTTTSDEGLAASA

SEQ ID NO: 18338 - DNA, 1406 bp, Triticum aestivum
  misc_feature (1)..(1406): Ceres Seq. ID no. 13654451
agaacatcctaatcgaaaaattccaagcaccacctgctcctctcctccaacccacgcgcccacgcacgcactaactacctcccttccccggagctcggcggagagacaagaagccaagccaccgctacgtacgccatgggcgaggacaagaaggagaagccgggcaaggcagacggtggcgaccagaagaaggacgccgcggcggcggcccagcccatcgtgctcaaggtcgacttgcattgcgccggctgcgccaccaaggttaagcgggccatcaagaacgcccctggcgtggagtcggttaagactgacacggcggccaacaaggtggtcgtcaccggcgccgcggacgcggcggagatcaaagagcgcatcgaggccaggaccaagaagcccgttcaaatcgtctccgccggagccgcctcgcccaacaaggacaacaaggagaaagacaaggacaagaagcccgacgccggcgataagccggagaaagagaagagcaaggcagcagacaaggagaagggcggtgccggtgccggtgctgakmawaaagagaawaawgtggawaccgccgacaagcccaaggaggaggagaagaaaccaaaggagcccaaagaggagacggtgacgctcaagatcaggctgcactgcgacggctgcatcgaccgcatcaagcggcgcgtcaacaagatcaaaggagtgaaggaagtgacggtggacgctgccaaggacctggtgaaggtgactggcaccatggacgcagccgccctgccgggctacctcagggacaagctcagtcggccggtggaggtggtcacccccggcaagaaggacggcgacaagaaagacgacggggagaagaagaaggacaagggcgctggcgagggcggcgaaaagaagaaggacggcggtggcggcggcgaggacaagaaggacaagtccgcggcgtccgtggcgccgatgcccatggcggacccgagcatgtaccagatgcccccacagtacggctacatgccgtaccccccggcgcccgtcggctactacggccccgccgccccgccgccgaaccccggcttctacccgaacgccgggccccagtacccgccgccctacgcgacgtaccccgcccacgcgccccagatgttcagcgacgagaaccccaacgcctgctccgtcatgtgagcagccacgccacgccacgccacgagccgacgagcacgacgcgaagcccaggctcgctgccgcagcatcagttatcaaaccagagaagcacggcctgggcttagcgcgcggtaccattagcctagctagcagctggtagttagcttagcgcaccgagaattagcagacatgtaaatggcgacagcgatcccgtcccgcgatgttaatgtaatgttccacgatcc

SEQ ID NO: 18339 - protein, 348 aa, Triticum aestivum
  peptide (1)..(348): Ceres Seq. ID no. 15219655
  misc_feature (164)..(226): Pfam Name: Pfam Description:  Heavy-metal-associated domain
  misc_feature (1)..(348): NCBI GI NO: 37534752 NR Description: putative metal-binding protein
  misc_feature (1)..(303): NCBI GI NO: 15242741 NR Description: heavy-metal-associated domain-containing protein
  misc_feature (282)..(348): NCBI GI NO: 15242741 NR Description: heavy-metal-associated domain-containing protein
  misc_feature (52)..(188): NCBI GI NO: 29367499 NR Description: unknown [Oryza sativa (japonica cultivar-group)]
  misc_feature (149)..(348): NCBI GI NO: 4097571 NR Description: GMFP5 [Glycine max]
  misc_feature (76)..(348): NCBI GI NO: 27529838 NR Description: hypothetical protein [Nicotiana tabacum]
  misc_feature (1)..(348): NCBI GI NO: 18404283 NR Description: heavy-metal-associated domain-containing protein
  misc_feature (3)..(110): NCBI GI NO: 15233023 NR Description: copper-binding protein - related
  misc_feature (149)..(247): NCBI GI NO: 15233023 NR Description: copper-binding protein - related
  misc_feature (322)..(348): NCBI GI NO: 15233023 NR Description: copper-binding protein - related
  misc_feature (137)..(137): Xaa is any aa, unknown or other
  misc_feature (138)..(138): Xaa is any aa, unknown or other
  misc_feature (141)..(141): Xaa is any aa, unknown or other
  misc_feature (142)..(142): Xaa is any aa, unknown or other
  misc_feature (144)..(144): Xaa is any aa, unknown or other
MGEDKKEKPGKADGGDQKKDAAAAAQPIVLKVDLHCAGCATKVKRAIKNAPGVESVKTDTAANKVVVTGAADAAEIKERIEARTKKPVQIVSAGAASPNKDNKEKDKDKKPDAGDKPEKEKSKAADKEKGGAGAGAXXKEXXVXTADKPKEEEKKPKEPKEETVTLKIRLHCDGCIDRIKRRVNKIKGVKEVTVDAAKDLVKVTGTMDAAALPGYLRDKLSRPVEVVTPGKKDGDKKDDGEKKKDKGAGEGGEKKKDGGGGGEDKKDKSAASVAPMPMADPSMYQMPPQYGYMPYPPAPVGYYGPAAPPPNPGFYPNAGPQYPPPYATYPAHAPQMFSDENPNACSVM

SEQ ID NO: 18340 - protein, 208 aa, Triticum aestivum
  peptide (1)..(208): Ceres Seq. ID no. 15219656
  misc_feature (9)..(208): NCBI GI NO: 28972153 NR Description: mKIAA0324 protein [Mus musculus]
  misc_feature (9)..(208): NCBI GI NO: 30424862 NR Description: RIKEN cDNA 5033413A03 [Mus musculus]
  misc_feature (9)..(208): NCBI GI NO: 6649242 NR Description: splicing coactivator subunit SRm300 [Homo sapiens]
  misc_feature (9)..(208): NCBI GI NO: 5821151 NR Description: RNA binding protein [Homo sapiens]
  misc_feature (9)..(208): NCBI GI NO: 6634015 NR Description: KIAA0324 protein [Homo sapiens]
  misc_feature (9)..(208): NCBI GI NO: 7512967 NR Description: hypothetical protein KIAA0324 - human (fragment)
  misc_feature (9)..(208): NCBI GI NO: 19923466 NR Description: splicing coactivator subunit SRm300
  misc_feature (3)..(208): NCBI GI NO: 28972153 NR Description: mKIAA0324 protein [Mus musculus]
  misc_feature (3)..(208): NCBI GI NO: 30424862 NR Description: RIKEN cDNA 5033413A03 [Mus musculus]
  misc_feature (4)..(208): NCBI GI NO: 5821151 NR Description: RNA binding protein [Homo sapiens]
  misc_feature (182)..(182): Xaa is any aa, unknown or other
  misc_feature (183)..(183): Xaa is any aa, unknown or other
  misc_feature (186)..(186): Xaa is any aa, unknown or other
  misc_feature (187)..(187): Xaa is any aa, unknown or other
  misc_feature (189)..(189): Xaa is any aa, unknown or other
EHPNRKIPSTTCSSPPTHAPTHALTTSLPRSSAERQEAKPPLRTPWARTRRRSRARQTVATRRRTPRRRPSPSCSRSTCIAPAAPPRLSGPSRTPLAWSRLRLTRRPTRWSSPAPRTRRRSKSASRPGPRSPFKSSPPEPPRPTRTTRRKTRTRSPTPAISRRKRRARQQTRRRAVPVPVLXXKRXXWXPPTSPRRRRRNQRSPKRRR

SEQ ID NO: 18341 - DNA, 1419 bp, Triticum aestivum; identical to SEQ ID NO: 16167
  misc_feature (1)..(1419): Ceres Seq. ID no. 13654452

SEQ ID NO: 18342 - protein, 358 aa, Triticum aestivum; identical to SEQ ID NO: 16168
  peptide (1)..(358): Ceres Seq. ID no. 15219657
  misc_feature (187)..(249): Pfam Name: Pfam Description:  bZIP transcription factor
  misc_feature (151)..(358): NCBI GI NO: 29367343 NR Description: bZIP-like protein
  misc_feature (169)..(358): NCBI GI NO: 19401702 NR Description: susceptibility transcription factor RVS1
  misc_feature (78)..(353): NCBI GI NO: 2921823 NR Description: shoot-forming PKSF1 [Paulownia kawakamii]
  misc_feature (64)..(316): NCBI GI NO: 8777512 NR Description: bZIP transcriptional activator RSG
  misc_feature (113)..(355): NCBI GI NO: 34394739 NR Description: putative transcription activator RF2a
  misc_feature (83)..(324): NCBI GI NO: 21553989 NR Description: VirE2-interacting protein VIP1
  misc_feature (83)..(324): NCBI GI NO: 7258340 NR Description: VirE2-interacting protein VIP1
  misc_feature (83)..(324): NCBI GI NO: 18400998 NR Description: VirE2-interacting protein VIP1
  misc_feature (49)..(337): NCBI GI NO: 15221391 NR Description: bZIP protein [Arabidopsis thaliana]
  misc_feature (49)..(337): NCBI GI NO: 21553831 NR Description: transcriptional activator RF2a, putative

SEQ ID NO: 18343 - protein, 332 aa, Triticum aestivum; identical to SEQ ID NO: 16169
  peptide (1)..(332): Ceres Seq. ID no. 15219658
  misc_feature (161)..(223): Pfam Name: Pfam Description:  bZIP transcription factor
  misc_feature (125)..(332): NCBI GI NO: 29367343 NR Description: bZIP-like protein
  misc_feature (143)..(332): NCBI GI NO: 19401702 NR Description: susceptibility transcription factor RVS1
  misc_feature (52)..(327): NCBI GI NO: 2921823 NR Description: shoot-forming PKSF1 [Paulownia kawakamii]
  misc_feature (38)..(290): NCBI GI NO: 8777512 NR Description: bZIP transcriptional activator RSG
  misc_feature (87)..(329): NCBI GI NO: 34394739 NR Description: putative transcription activator RF2a
  misc_feature (57)..(298): NCBI GI NO: 21553989 NR Description: VirE2-interacting protein VIP1
  misc_feature (57)..(298): NCBI GI NO: 7258340 NR Description: VirE2-interacting protein VIP1
  misc_feature (57)..(298): NCBI GI NO: 18400998 NR Description: VirE2-interacting protein VIP1
  misc_feature (23)..(311): NCBI GI NO: 15221391 NR Description: bZIP protein [Arabidopsis thaliana]
  misc_feature (23)..(311): NCBI GI NO: 21553831 NR Description: transcriptional activator RF2a, putative

SEQ ID NO: 18344 - protein, 258 aa, Triticum aestivum; identical to SEQ ID NO: 16170
  peptide (1)..(258): Ceres Seq. ID no. 15219659
  misc_feature (87)..(149): Pfam Name: Pfam Description:  bZIP transcription factor
  misc_feature (51)..(258): NCBI GI NO: 29367343 NR Description: bZIP-like protein
  misc_feature (69)..(258): NCBI GI NO: 19401702 NR Description: susceptibility transcription factor RVS1
  misc_feature (1)..(253): NCBI GI NO: 2921823 NR Description: shoot-forming PKSF1 [Paulownia kawakamii]
  misc_feature (1)..(216): NCBI GI NO: 8777512 NR Description: bZIP transcriptional activator RSG
  misc_feature (13)..(255): NCBI GI NO: 34394739 NR Description: putative transcription activator RF2a
  misc_feature (1)..(224): NCBI GI NO: 21553989 NR Description: VirE2-interacting protein VIP1
  misc_feature (1)..(224): NCBI GI NO: 7258340 NR Description: VirE2-interacting protein VIP1
  misc_feature (1)..(224): NCBI GI NO: 18400998 NR Description: VirE2-interacting protein VIP1
  misc_feature (1)..(237): NCBI GI NO: 15221391 NR Description: bZIP protein [Arabidopsis thaliana]
  misc_feature (1)..(237): NCBI GI NO: 21553831 NR Description: transcriptional activator RF2a, putative

SEQ ID NO: 18345 - DNA, 1316 bp, Triticum aestivum
  misc_feature (1)..(1316): Ceres Seq. ID no. 15225352
ttttttcttgacgcccccaaaaccctagccgcttcttctctctgcccactccccgcgcgagccacagacggccgccgcctcacaccgctgagacctcctcctccccagtcaagcgcgagagtataccccagaataacaccaccatggccggcggcaagatccagaagaagcgacacggcggaggtggcggcggcggcggcgcgcggctgcagggcgggatcccgttcgagaagtccaagggccagcacatcctgcggaacccggcgctggtggactccatcatcgccaaggccggcctcaagccgaccgacaccgtcctcgagatcgggcccggaacgggaaatctcaccaagcggctgctcgaggccggcgtcaaggccgttgtcgccgtcgagctcgacccgcggatggttctcgagctgagccgccggttccaggggcaccccctctcctcacgcctcaaggttatccaaggagatgttcttaaatgtgatcttccgtacttcgatatctgcgtggcaaacatcccataccagatatcgtccccccttacattcaagcttctgtcacaccgtccgatcttcaggtgtgctgtgatcatgtttcaacgtgaatttgccatgagacttgtagcacagcctggagacactctgtactgccgtctgtcagtgaacgtgcagctcctatctcgcgtgtcacatctgctgaaggttgggcggaataacttcaggcctccacccaaggtagattcttcagttgttcgcatcgagccaaggaaacccctccctcctgtcagcttcaaagagtgggatggacttgtaaggatttgtttcaatcggaaaaacaaaactctgggctcccttttcaagcagaagcgcgtccttgagttgctagagaagaattacaagacaatgcaatctctccaacttgcccaagaatctgaaatgggcgaggagaagatgtcacctgatgatgttgcggtgctagccaatatggtcgaggacctgagcatggagatgagtgatgagaaagaggacgacgacatggaaatggatgatgctgacgtggcagatggccgtgctagcttcagagaaaagattatgggtatattgcagcagggtgattttgcagagaagaggtcttccaagctgagccaagttgatttcctctacttgctgtctctgttcaacaaagcaggtatacatttttcgtgagggcccgcttagtcagctagcttgagatggatcttgaaaagccatgtttattttttggtttatgttatgtaagtcctatataagttaaaagtcatctttgtg

SEQ ID NO: 18346 - protein, 356 aa, Triticum aestivum
  peptide (1)..(356): Ceres Seq. ID no. 15225353
  misc_feature (1)..(356): NCBI GI NO: 15226591 NR Description: dimethyladenosine transferase -related
  misc_feature (24)..(305): NCBI GI NO: 21313560 NR Description: RIKEN cDNA 1500031M22 [Mus musculus]
  misc_feature (314)..(356): NCBI GI NO: 21313560 NR Description: RIKEN cDNA 1500031M22 [Mus musculus]
  misc_feature (24)..(305): NCBI GI NO: 7657198 NR Description: putative dimethyladenosine transferase
  misc_feature (314)..(356): NCBI GI NO: 7657198 NR Description: putative dimethyladenosine transferase
  misc_feature (24)..(305): NCBI GI NO: 27151490 NR Description: Probable dimethyladenosine transferase
  misc_feature (314)..(356): NCBI GI NO: 27151490 NR Description: Probable dimethyladenosine transferase
  misc_feature (25)..(300): NCBI GI NO: 21358017 NR Description: CG11837-PA [Drosophila melanogaster]
  misc_feature (316)..(356): NCBI GI NO: 21358017 NR Description: CG11837-PA [Drosophila melanogaster]
  misc_feature (1)..(305): NCBI GI NO: 34854204 NR Description: similar to RIKEN cDNA 1500031M22
MAGGKIQKKRHGGGGGGGGARLQGGIPFEKSKGQHILRNPALVDSIIAKAGLKPTDTVLEIGPGTGNLTKRLLEAGVKAVVAVELDPRMVLELSRRFQGHPLSSRLKVIQGDVLKCDLPYFDICVANIPYQISSPLTFKLLSHRPIFRCAVIMFQREFAMRLVAQPGDTLYCRLSVNVQLLSRVSHLLKVGRNNFRPPPKVDSSVVRIEPRKPLPPVSFKEWDGLVRICFNRKNKTLGSLFKQKRVLELLEKNYKTMQSLQLAQESEMGEEKMSPDDVAVLANMVEDLSMEMSDEKEDDDMEMDDADVADGRASFREKIMGILQQGDFAEKRSSKLSQVDFLYLLSLFNKAGIHFS

SEQ ID NO: 18347 - protein, 268 aa, Triticum aestivum
  peptide (1)..(268): Ceres Seq. ID no. 15225354
  misc_feature (1)..(268): NCBI GI NO: 15226591 NR Description: dimethyladenosine transferase -related
  misc_feature (1)..(217): NCBI GI NO: 21313560 NR Description: RIKEN cDNA 1500031M22 [Mus musculus]
  misc_feature (226)..(268): NCBI GI NO: 21313560 NR Description: RIKEN cDNA 1500031M22 [Mus musculus]
  misc_feature (1)..(217): NCBI GI NO: 7657198 NR Description: putative dimethyladenosine transferase
  misc_feature (226)..(268): NCBI GI NO: 7657198 NR Description: putative dimethyladenosine transferase
  misc_feature (1)..(217): NCBI GI NO: 27151490 NR Description: Probable dimethyladenosine transferase
  misc_feature (226)..(268): NCBI GI NO: 27151490 NR Description: Probable dimethyladenosine transferase
  misc_feature (1)..(212): NCBI GI NO: 21358017 NR Description: CG11837-PA [Drosophila melanogaster]
  misc_feature (228)..(268): NCBI GI NO: 21358017 NR Description: CG11837-PA [Drosophila melanogaster]
  misc_feature (1)..(217): NCBI GI NO: 34854204 NR Description: similar to RIKEN cDNA 1500031M22
MVLELSRRFQGHPLSSRLKVIQGDVLKCDLPYFDICVANIPYQISSPLTFKLLSHRPIFRCAVIMFQREFAMRLVAQPGDTLYCRLSVNVQLLSRVSHLLKVGRNNFRPPPKVDSSVVRIEPRKPLPPVSFKEWDGLVRICFNRKNKTLGSLFKQKRVLELLEKNYKTMQSLQLAQESEMGEEKMSPDDVAVLANMVEDLSMEMSDEKEDDDMEMDDADVADGRASFREKIMGILQQGDFAEKRSSKLSQVDFLYLLSLFNKAGIHFS

SEQ ID NO: 18348 - protein, 204 aa, Triticum aestivum
  peptide (1)..(204): Ceres Seq. ID no. 15225355
  misc_feature (1)..(204): NCBI GI NO: 15226591 NR Description: dimethyladenosine transferase -related
  misc_feature (1)..(153): NCBI GI NO: 21313560 NR Description: RIKEN cDNA 1500031M22 [Mus musculus]
  misc_feature (162)..(204): NCBI GI NO: 21313560 NR Description: RIKEN cDNA 1500031M22 [Mus musculus]
  misc_feature (1)..(153): NCBI GI NO: 7657198 NR Description: putative dimethyladenosine transferase
  misc_feature (162)..(204): NCBI GI NO: 7657198 NR Description: putative dimethyladenosine transferase
  misc_feature (1)..(153): NCBI GI NO: 27151490 NR Description: Probable dimethyladenosine transferase
  misc_feature (162)..(204): NCBI GI NO: 27151490 NR Description: Probable dimethyladenosine transferase
  misc_feature (1)..(148): NCBI GI NO: 21358017 NR Description: CG11837-PA [Drosophila melanogaster]
  misc_feature (164)..(204): NCBI GI NO: 21358017 NR Description: CG11837-PA [Drosophila melanogaster]
  misc_feature (1)..(153): NCBI GI NO: 34854204 NR Description: similar to RIKEN cDNA 1500031M22
MFQREFAMRLVAQPGDTLYCRLSVNVQLLSRVSHLLKVGRNNFRPPPKVDSSVVRIEPRKPLPPVSFKEWDGLVRICFNRKNKTLGSLFKQKRVLELLEKNYKTMQSLQLAQESEMGEEKMSPDDVAVLANMVEDLSMEMSDEKEDDDMEMDDADVADGRASFREKIMGILQQGDFAEKRSSKLSQVDFLYLLSLFNKAGIHFS

SEQ ID NO: 18349 - DNA, 554 bp, Triticum aestivum
  misc_feature (1)..(554): Ceres Seq. ID no. 13596273
  misc_feature (538)..(538): n is a, c, t, g, unknown, or other
  misc_feature (537)..(537): n is a, c, t, g, unknown, or other
  misc_feature (536)..(536): n is a, c, t, g, unknown, or other
aaaccagcaagcttcacacacttccttccttcctgttgtggctcctgtacatgcgcgctagcctcgcctcgtacgcgcaagacctcgccatgcctgccttggacgtcatgccggagaaggcccaccacccggccatgtcgccgtcgcaccacggccacgggtgggacgccagcggcgcccccacccccatgcacaagaggctggacggcaaggtggccattgtcaccggcggcgcgcggggcatcggggaggccatcgtcaggctcttcgtcaagcacggcgccaaggtggtcatcgcggacatcgacgacgccgccggcgaggcgctggccgcctcgctcggcccgcacgtcgccttcgtgcgctgcgacgtgtccgtggaggaggacgtggagcgcgccgtcgaccgcgccgtgtcgcgctacggccgcctcgacgtcttctgcaacaacgccggggtgctgggccgccagaacagcgccgccaagagcatcctcacgttcgacgccggcgagttcgaccgcgtgctccgcgtnnncgcgctgggcaccgcg

SEQ ID NO: 18350 - protein, 184 aa, Triticum aestivum
  peptide (1)..(184): Ceres Seq. ID no. 13596274
  misc_feature (17)..(183): NCBI GI NO: 1877480 NR Description: short-chain alcohol dehydrogenase
  misc_feature (17)..(183): NCBI GI NO: 1877482 NR Description: short-chain alcohol dehydrogenase
  misc_feature (17)..(183): NCBI GI NO: 1717794 NR Description: SEX DETERMINATION PROTEIN TASSELSEED 2
  misc_feature (22)..(183): NCBI GI NO: 38326766 NR Description: tasselseed2 protein [Bouteloua hirsuta]
  misc_feature (40)..(183): NCBI GI NO: 15192925 NR Description: alcohol dehydrogenase [Zea mays subsp. mays]
  misc_feature (40)..(183): NCBI GI NO: 15192935 NR Description: alcohol dehydrogenase [Zea mays subsp. mays]
  misc_feature (40)..(183): NCBI GI NO: 15192933 NR Description: alcohol dehydrogenase [Zea mays subsp. mays]
  misc_feature (40)..(183): NCBI GI NO: 15192931 NR Description: alcohol dehydrogenase [Zea mays subsp. mays]
  misc_feature (40)..(183): NCBI GI NO: 15192927 NR Description: alcohol dehydrogenase [Zea mays subsp. mays]
  misc_feature (40)..(183): NCBI GI NO: 15192945 NR Description: alcohol dehydrogenase [Zea mays subsp. mays]
  misc_feature (178)..(178): Xaa is any aa, unknown or other
  misc_feature (179)..(179): Xaa is any aa, unknown or other
TSKLHTLPSFLLWLLYMRASLASYAQDLAMPALDVMPEKAHHPAMSPSHHGHGWDASGAPTPMHKRLDGKVAIVTGGARGIGEAIVRLFVKHGAKVVIADIDDAAGEALAASLGPHVAFVRCDVSVEEDVERAVDRAVSRYGRLDVFCNNAGVLGRQNSAAKSILTFDAGEFDRVLRXXALGTA

SEQ ID NO: 18351 - protein, 184 aa, Triticum aestivum
  peptide (1)..(184): Ceres Seq. ID no. 13596275
  misc_feature (2)..(177): Pfam Name: Pfam Description:  Equine herpesvirus glycoprotein gp2
  misc_feature (11)..(178): NCBI GI NO: 11360494 NR Description: antifreeze glycopeptide AFGP polyprotein precursor
  misc_feature (10)..(175): NCBI GI NO: 28574039 NR Description: Salivary gland secretion 1 CG3047-PA
  misc_feature (17)..(174): NCBI GI NO: 28574039 NR Description: Salivary gland secretion 1 CG3047-PA
  misc_feature (21)..(183): NCBI GI NO: 11360494 NR Description: antifreeze glycopeptide AFGP polyprotein precursor
  misc_feature (16)..(174): NCBI GI NO: 28574039 NR Description: Salivary gland secretion 1 CG3047-PA
  misc_feature (2)..(182): NCBI GI NO: 29826652 NR Description: hypothetical protein
  misc_feature (15)..(174): NCBI GI NO: 28574039 NR Description: Salivary gland secretion 1 CG3047-PA
  misc_feature (17)..(174): NCBI GI NO: 28574039 NR Description: Salivary gland secretion 1 CG3047-PA
  misc_feature (17)..(176): NCBI GI NO: 28574039 NR Description: Salivary gland secretion 1 CG3047-PA
  misc_feature (17)..(176): NCBI GI NO: 28574039 NR Description: Salivary gland secretion 1 CG3047-PA
  misc_feature (179)..(179): Xaa is any aa, unknown or other
  misc_feature (180)..(180): Xaa is any aa, unknown or other
KPASFTHFLPSCCGSCTCALASPRTRKTSPCLPWTSCRRRPTTRPCRRRTTATGGTPAAPPPPCTRGWTARWPLSPAARGASGRPSSGSSSSTAPRWSSRTSTTPPARRWPPRSARTSPSCAATCPWRRTWSAPSTAPCRATAASTSSATTPGCWAARTAPPRASSRSTPASSTACSAXXRWAP

SEQ ID NO: 18352 - protein, 168 aa, Triticum aestivum
  peptide (1)..(168): Ceres Seq. ID no. 13596276
  misc_feature (1)..(167): NCBI GI NO: 1877480 NR Description: short-chain alcohol dehydrogenase
  misc_feature (1)..(167): NCBI GI NO: 1877482 NR Description: short-chain alcohol dehydrogenase
  misc_feature (1)..(167): NCBI GI NO: 1717794 NR Description: SEX DETERMINATION PROTEIN TASSELSEED 2
  misc_feature (6)..(167): NCBI GI NO: 38326766 NR Description: tasselseed2 protein [Bouteloua hirsuta]
  misc_feature (24)..(167): NCBI GI NO: 15192925 NR Description: alcohol dehydrogenase [Zea mays subsp. mays]
  misc_feature (24)..(167): NCBI GI NO: 15192935 NR Description: alcohol dehydrogenase [Zea mays subsp. mays]
  misc_feature (24)..(167): NCBI GI NO: 15192947 NR Description: alcohol dehydrogenase [Zea mays subsp. mays]
  misc_feature (24)..(167): NCBI GI NO: 15192969 NR Description: alcohol dehydrogenase [Zea mays subsp. mays]
  misc_feature (24)..(167): NCBI GI NO: 15192953 NR Description: alcohol dehydrogenase [Zea mays subsp. mays]
  misc_feature (24)..(167): NCBI GI NO: 15192945 NR Description: alcohol dehydrogenase [Zea mays subsp. mays]
  misc_feature (162)..(162): Xaa is any aa, unknown or other
  misc_feature (163)..(163): Xaa is any aa, unknown or other
MRASLASYAQDLAMPALDVMPEKAHHPAMSPSHHGHGWDASGAPTPMHKRLDGKVAIVTGGARGIGEAIVRLFVKHGAKVVIADIDDAAGEALAASLGPHVAFVRCDVSVEEDVERAVDRAVSRYGRLDVFCNNAGVLGRQNSAAKSILTFDAGEFDRVLRXXALGTA

SEQ ID NO: 18353 - DNA, 968 bp, Triticum aestivum
  misc_feature (1)..(968): Ceres Seq. ID no. 13596277
ctttttttcccctcctcccgttgcctccacgcctccgagccagccagacacgcgagagggtagaccgcggcggcgaggcctcctgctttgcgcctagggttttgattcgatcccccccgccgccgccgccgcctgccggatggccatggagagggagctcatggagaccttcgaggccgccaagaaggccgccgacgccgccgccgaggaggccgacggctcctcccccgaggccgagcgctgcctcgacgccctgcgccgcctccgcgagttccgcgtcaacaccgacgtcctcgtctccacgcaggttggcaaacgtcttcggtacctgacgaagcaccctaactcagacatacaggcggtggctgcagacctttttgggtactggaagaaggttgttattgaagagacaggaaagaaaaacggcacaccagcaaatggaaaatcaaacaactctgcagctaaggctgagaaacctcagcccatgaaggttgaaaggaagtcagcgaacgtgaaggttgaaaagaactctacgtcgacgactgtgaagactgaaaagaatgcaactgtgaagactgaaaaggattctatgtcggcaagtgtgaagattgagaagactgtgaatagtgattccaaagtccaagttaaggtagagaaggtttcaaaggaagttagcagaacatctgaaacaaagaaaccatcttctgttccaaatggtcccccaaagctgacatcccttgtcagatgcaacgatgctgctcgagataaatacagggagcttcttgttgacgccttcgtcaaggtttccaaggaaactagtgatgatgacagagaggaaataagagatctcctggaccaggtaaatgcatgcgacccatatagagttgctgtgacagtggagtcggcgctgtttgagaggatagggcgttccaccgggacccacaaggtgaaatacaggtcgatactgt

SEQ ID NO: 18354 - protein, 276 aa, Triticum aestivum
  peptide (1)..(276): Ceres Seq. ID no. 13596278
  misc_feature (3)..(275): NCBI GI NO: 28876018 NR Description: putative transcription elongation factor
  misc_feature (3)..(275): NCBI GI NO: 23617251 NR Description: putative transcription elongation factor
  misc_feature (3)..(275): NCBI GI NO: 15224901 NR Description: elongation factor -related [Arabidopsis thaliana]
  misc_feature (3)..(275): NCBI GI NO: 18377737 NR Description: putative elongation factor [Arabidopsis thaliana]
  misc_feature (195)..(275): NCBI GI NO: 15227992 NR Description: F-box protein family [Arabidopsis thaliana]
  misc_feature (195)..(275): NCBI GI NO: 15233998 NR Description: hypothetical protein [Arabidopsis thaliana]
MAMERELMETFEAAKKAADAAAEEADGSSPEAERCLDALRRLREFRVNTDVLVSTQVGKRLRYLTKHPNSDIQAVAADLFGYWKKVVIEETGKKNGTPANGKSNNSAAKAEKPQPMKVERKSANVKVEKNSTSTTVKTEKNATVKTEKDSMSASVKIEKTVNSDSKVQVKVEKVSKEVSRTSETKKPSSVPNGPPKLTSLVRCNDAARDKYRELLVDAFVKVSKETSDDDREEIRDLLDQVNACDPYRVAVTVESALFERIGRSTGTHKVKYRSIL

SEQ ID NO: 18355 - protein, 274 aa, Triticum aestivum
  peptide (1)..(274): Ceres Seq. ID no. 13596279
  misc_feature (1)..(273): NCBI GI NO: 28876018 NR Description: putative transcription elongation factor
  misc_feature (1)..(273): NCBI GI NO: 23617251 NR Description: putative transcription elongation factor
  misc_feature (1)..(273): NCBI GI NO: 15224901 NR Description: elongation factor -related [Arabidopsis thaliana]
  misc_feature (1)..(273): NCBI GI NO: 18377737 NR Description: putative elongation factor [Arabidopsis thaliana]
  misc_feature (193)..(273): NCBI GI NO: 15227992 NR Description: F-box protein family [Arabidopsis thaliana]
  misc_feature (193)..(273): NCBI GI NO: 15233998 NR Description: hypothetical protein [Arabidopsis thaliana]
MERELMETFEAAKKAADAAAEEADGSSPEAERCLDALRRLREFRVNTDVLVSTQVGKRLRYLTKHPNSDIQAVAADLFGYWKKVVIEETGKKNGTPANGKSNNSAAKAEKPQPMKVERKSANVKVEKNSTSTTVKTEKNATVKTEKDSMSASVKIEKTVNSDSKVQVKVEKVSKEVSRTSETKKPSSVPNGPPKLTSLVRCNDAARDKYRELLVDAFVKVSKETSDDDREEIRDLLDQVNACDPYRVAVTVESALFERIGRSTGTHKVKYRSIL

SEQ ID NO: 18356 - protein, 269 aa, Triticum aestivum
  peptide (1)..(269): Ceres Seq. ID no. 13596280
  misc_feature (1)..(268): NCBI GI NO: 28876018 NR Description: putative transcription elongation factor
  misc_feature (1)..(268): NCBI GI NO: 23617251 NR Description: putative transcription elongation factor
  misc_feature (1)..(268): NCBI GI NO: 15224901 NR Description: elongation factor -related [Arabidopsis thaliana]
  misc_feature (1)..(268): NCBI GI NO: 18377737 NR Description: putative elongation factor [Arabidopsis thaliana]
  misc_feature (188)..(268): NCBI GI NO: 15227992 NR Description: F-box protein family [Arabidopsis thaliana]
  misc_feature (188)..(268): NCBI GI NO: 15233998 NR Description: hypothetical protein [Arabidopsis thaliana]
METFEAAKKAADAAAEEADGSSPEAERCLDALRRLREFRVNTDVLVSTQVGKRLRYLTKHPNSDIQAVAADLFGYWKKVVIEETGKKNGTPANGKSNNSAAKAEKPQPMKVERKSANVKVEKNSTSTTVKTEKNATVKTEKDSMSASVKIEKTVNSDSKVQVKVEKVSKEVSRTSETKKPSSVPNGPPKLTSLVRCNDAARDKYRELLVDAFVKVSKETSDDDREEIRDLLDQVNACDPYRVAVTVESALFERIGRSTGTHKVKYRSIL

SEQ ID NO: 18357 - DNA, 739 bp, Triticum aestivum
  misc_feature (1)..(739): Ceres Seq. ID no. 12584242
agatctcgccatccatcccaagtcgtccgtcgtcggctactgccacttcccccgaagaggacctcactccccaccccagcccagccctccccgcccgctgcacagtccaaatccccgctccggccggcgaccgaccgaggatgcccgcctccatgcccaagctgctcttcctcctcctcctcctcctcgccgcggccgcccactcttcaccggaggtgccggatgcggcgggagcggggtccgagcaggcggcggtgcgcatggtgccgatggccccggctggggggtcggggttcagcggggtggtgctgaacgagacgcggcggcggctggggagcttccagctctgcgcgccctgcacctgctgcggcgggcccaggggcgtctgcgtcctctccccgtgctgctacgccatcaactgcaacatccccaaccgccccttcggattctgctccttcacgcccaggtcatgcgactgcctccactgcaacgtctgagctctgctgccgagtgtgatgaatgagggtaatgttgagagcgatagtaagtattttagagtgatgagggtgggagaaaaaacgacatgatagcatgagagttcccccaacccgaatgcttgccgatttgttattgttttagccctatagccattttgctaccgaattgttattaagtatatggtgtagctgctacctctcgatggaattggttggttattagcaaagagttggtgaattgg

SEQ ID NO: 18358 - protein, 173 aa, Triticum aestivum
  peptide (1)..(173): Ceres Seq. ID no. 12584243
  misc_feature (9)..(93): Pfam Name: Pfam Description:  TT viral ORF2
DLAIHPKSSVVGYCHFPRRGPHSPPQPSPPRPLHSPNPRSGRRPTEDARLHAQAALPPPPPPRRGRPLFTGGAGCGGSGVRAGGGAHGADGPGWGVGVQRGGAERDAAAAGELPALRALHLLRRAQGRLRPLPVLLRHQLQHPQPPLRILLLHAQVMRLPPLQRLSSAAECDE

SEQ ID NO: 18359 - protein, 164 aa, Triticum aestivum
  peptide (1)..(164): Ceres Seq. ID no. 12584244
  misc_feature (48)..(164): NCBI GI NO: 34906984 NR Description: P0413C03.15
  misc_feature (54)..(164): NCBI GI NO: 21593890 NR Description: unknown [Arabidopsis thaliana]
  misc_feature (54)..(164): NCBI GI NO: 18408246 NR Description: Expressed protein; protein id: At1g65295
  misc_feature (54)..(164): NCBI GI NO: 21954063 NR Description: unknown protein [Arabidopsis thaliana]
  misc_feature (107)..(164): NCBI GI NO: 18412619 NR Description: Expressed protein; protein id: At5g01015
ISPSIPSRPSSATATSPEEDLTPHPSPALPARCTVQIPAPAGDRPRMPASMPKLLFLLLLLLAAAAHSSPEVPDAAGAGSEQAAVRMVPMAPAGGSGFSGVVLNETRRRLGSFQLCAPCTCCGGPRGVCVLSPCCYAINCNIPNRPFGFCSFTPRSCDCLHCNV

SEQ ID NO: 18360 - protein, 118 aa, Triticum aestivum
  peptide (1)..(118): Ceres Seq. ID no. 12584245
  misc_feature (2)..(118): NCBI GI NO: 34906984 NR Description: P0413C03.15
  misc_feature (8)..(118): NCBI GI NO: 21593890 NR Description: unknown [Arabidopsis thaliana]
  misc_feature (8)..(118): NCBI GI NO: 18408246 NR Description: Expressed protein; protein id: At1g65295
  misc_feature (8)..(118): NCBI GI NO: 21954063 NR Description: unknown protein [Arabidopsis thaliana]
  misc_feature (61)..(118): NCBI GI NO: 18412619 NR Description: Expressed protein; protein id: At5g01015
MPASMPKLLFLLLLLLAAAAHSSPEVPDAAGAGSEQAAVRMVPMAPAGGSGFSGVVLNETRRRLGSFQLCAPCTCCGGPRGVCVLSPCCYAINCNIPNRPFGFCSFTPRSCDCLHCNV

SEQ ID NO: 18361 - DNA, 952 bp, Triticum aestivum
  misc_feature (1)..(952): Ceres Seq. ID no. 12587236
cttgggattttgccgctcccgcccccgctcctccccggccgcgccgcgcctcgtctcgccggcccggcgaccacaggcaggcagtccaagaccaggatggcggcgtgccccgccgcgaccacggctcgcgtgggagcagcgcacggaggaggcctctggaggagaagcgggaggagcccgagcctcctcccgcgcccggcccgtagcacgagcaccacggcgcgcgcctcggagctacagcaggcccccgcccccgcccccgccccggccgccgccgtcccgacccacaaggtcaccgtccacgaccgggagcgcggggtcgtccaccagttcgtcgtgccccaggaccagtacattctgcacaccgcggaggcacaggacatcacgctcccattcgcctgccgccatggttgctgcactagctgcgctgttaggataaaatcagggcaaataagacagcctgaagctctcggaatatctgccgacttaagagagcagggctatgctttgttatgtgttggctacccatcctctgatcttgaagttgaaacgcaagatgaagacgaggtatattggctccagtttggaagatactttgcgcgggggcctgttgatagagatgattacgcgctagagcttgcaatgggagacgagtgaaacgtgcctaacagcggtacggtttttaagctgcggtttgtaggttatatagagttgcaaaaaagacttgatttgcaagtggagaaagaaaagaaaagaaaagagaaagacccctctgctcaatgttgtgtttttgcaaatttgctgtgcaaatgtatatgcttcttgcagagatgccatcctttttgctcctctgtattcccagtagacaaagaacgctatggactgtatgtatgtaaaaagctgtgaacttgtagtacctacttatttagcacctcaactcaatcttgagtgg

SEQ ID NO: 18362 - protein, 218 aa, Triticum aestivum
  peptide (1)..(218): Ceres Seq. ID no. 12587237
  misc_feature (102)..(178): Pfam Name: Pfam Description:  2Fe-2S iron-sulfur cluster binding domain
  misc_feature (33)..(218): NCBI GI NO: 13174248 NR Description: putative ferredoxin [Oryza sativa]
  misc_feature (69)..(218): NCBI GI NO: 15223230 NR Description: ferredoxin, putative; protein id: At1g32550
  misc_feature (95)..(204): NCBI GI NO: 23127555 NR Description: hypothetical protein [Nostoc punctiforme]
  misc_feature (95)..(204): NCBI GI NO: 17230411 NR Description: ferredoxin [Nostoc sp. PCC 7120]
  misc_feature (95)..(204): NCBI GI NO: 16330840 NR Description: ferredoxin [Synechocystis sp. PCC 6803]
  misc_feature (95)..(204): NCBI GI NO: 22299199 NR Description: ferredoxin [Thermosynechococcus elongatus BP-1]
  misc_feature (96)..(204): NCBI GI NO: 37522751 NR Description: ferredoxin [Gloeobacter violaceus]
  misc_feature (95)..(204): NCBI GI NO: 33865808 NR Description: Ferredoxin [Synechococcus sp. WH 8102]
  misc_feature (95)..(202): NCBI GI NO: 33861455 NR Description: ferredoxin, petF-like protein
  misc_feature (96)..(197): NCBI GI NO: 33864459 NR Description: ferredoxin, PetF like protein
LGILPLPPPLLPGRAAPRLAGPATTGRQSKTRMAACPAATTARVGAAHGGGLWRRSGRSPSLLPRPARSTSTTARASELQQAPAPAPAPAAAVPTHKVTVHDRERGVVHQFVVPQDQYILHTAEAQDITLPFACRHGCCTSCAVRIKSGQIRQPEALGISADLREQGYALLCVGYPSSDLEVETQDEDEVYWLQFGRYFARGPVDRDDYALELAMGDE

SEQ ID NO: 18363 - protein, 186 aa, Triticum aestivum
  peptide (1)..(186): Ceres Seq. ID no. 12587238
  misc_feature (70)..(146): Pfam Name: Pfam Description:  2Fe-2S iron-sulfur cluster binding domain
  misc_feature (1)..(186): NCBI GI NO: 13174248 NR Description: putative ferredoxin [Oryza sativa]
  misc_feature (37)..(186): NCBI GI NO: 15223230 NR Description: ferredoxin, putative; protein id: At1g32550
  misc_feature (63)..(172): NCBI GI NO: 23127555 NR Description: hypothetical protein [Nostoc punctiforme]
  misc_feature (63)..(172): NCBI GI NO: 17230411 NR Description: ferredoxin [Nostoc sp. PCC 7120]
  misc_feature (63)..(172): NCBI GI NO: 16330840 NR Description: ferredoxin [Synechocystis sp. PCC 6803]
  misc_feature (63)..(172): NCBI GI NO: 22299199 NR Description: ferredoxin [Thermosynechococcus elongatus BP-1]
  misc_feature (64)..(172): NCBI GI NO: 37522751 NR Description: ferredoxin [Gloeobacter violaceus]
  misc_feature (63)..(172): NCBI GI NO: 33865808 NR Description: Ferredoxin [Synechococcus sp. WH 8102]
  misc_feature (63)..(170): NCBI GI NO: 33861455 NR Description: ferredoxin, petF-like protein
  misc_feature (64)..(165): NCBI GI NO: 33864459 NR Description: ferredoxin, PetF like protein
MAACPAATTARVGAAHGGGLWRRSGRSPSLLPRPARSTSTTARASELQQAPAPAPAPAAAVPTHKVTVHDRERGVVHQFVVPQDQYILHTAEAQDITLPFACRHGCCTSCAVRIKSGQIRQPEALGISADLREQGYALLCVGYPSSDLEVETQDEDEVYWLQFGRYFARGPVDRDDYALELAMGDE

SEQ ID NO: 18364 - protein, 145 aa, Triticum aestivum
  peptide (1)..(145): Ceres Seq. ID no. 12587239
  misc_feature (5)..(143): Pfam Name: Pfam Description:  Herpesvirus glycoprotein D
LGFCRSRPRSSPAAPRLVSPARRPQAGSPRPGWRRAPPRPRLAWEQRTEEASGGEAGGARASSRARPVARAPRRAPRSYSRPPPPPPPRPPPSRPTRSPSTTGSAGSSTSSSCPRTSTFCTPRRHRTSRSHSPAAMVAALAALLG

SEQ ID NO: 18365 - DNA, 1386 bp, Triticum aestivum
  misc_feature (1)..(1386): Ceres Seq. ID no. 15226556
acctgtctattccccaacaactggactccaacctcctcctcgcaccctcctcgtcccgtcgaatccatcgaggcgagggaaaaaaagagaggagaggttagggttccgaatggactatcctggaaggttctagaagcgtacgctcgttgggagggctccgggcggtgcgctgcagtggttgatggaggaggagaaggccagggggttgtcctcggcggcctcgccgctgatcccgccgacatcctcggagatcgacctcgaggccggtgccggggaccagctccagtgccggatctgcctcgagaccgacgggagagacttcatcgcgccctgcaagtgcaaggggacatccaagtacgtgcaccgcgactgcctcgaccactggagagcggtcaaggagggatttgcattttctcattgcaccacctgcaaggctccttattacttgagggttcatgtccacactgacaggaaatggcgaacactaaagtttcgtttctttgttactagagatatattattcatctttgctctagtccagtttgttatctctgcattggcttatttggtacattttattgatgggtaccagcaatattggctgaggacggcctggggtttcgataatgaagttactttttattatatatgtggagctttgttgttttttgctttactcgggttatcaggatgcttcataacgtgttatgaccgaagagtacggagtgacttggctcagccttgtcgagaactgtgcctctgttgctgccagccagggatgtgtgcagattgccatcttcctggcacactttgcatgtggactgactgcaccacatgctttgaaggctgtgcaactacagccggggagtgtggtggttgcttgggaggtgcaggggaagcagggttaccattgctcctcatcatgggagtaatcgtgctcgggctcttcacggttgtcggcatcttctatagcgttctggtggcaactatggtagggcagaggatctggcaaagacactaccacatccttgcgaaacgaatgctaacaaaggagtacgttgtggaagatgttgacggtgaacgtgcagattggtctccgccgccactccctgcagagcacgtccagcagctcaaatccctgggactcctatagcccatgacatggagctgatggctgttgatgatgaccttaagttgaggaccagcaccacgcactgccccagctgtacaggaagcacatactaagccgatggcagggcatctcttgtatccgcaatttgcgcagcccaacatggtgcgatatcatcgttcctttttgtacattgtaacagggaaacttaccacgccttgatttttatacaaatgagtcaactcgtgcccgtctag

SEQ ID NO: 18366 - protein, 323 aa, Triticum aestivum
  peptide (1)..(323): Ceres Seq. ID no. 15226557
  misc_feature (36)..(83): Pfam Name: RING finger Pfam Description: Zinc finger, C3HC4 type
  misc_feature (14)..(323): NCBI GI NO: 28393273 NR Description: unknown protein [Arabidopsis thaliana]
  misc_feature (14)..(135): NCBI GI NO: 15227153 NR Description: zinc finger
  misc_feature (233)..(323): NCBI GI NO: 15227153 NR Description: zinc finger
  misc_feature (159)..(207): NCBI GI NO: 15227153 NR Description: zinc finger
  misc_feature (2)..(210): NCBI GI NO: 40253895 NR Description: zinc finger (C3HC4-type RING finger) protein -like
  misc_feature (219)..(323): NCBI GI NO: 40253895 NR Description: zinc finger (C3HC4-type RING finger) protein -like
  misc_feature (10)..(130): NCBI GI NO: 25402638 NR Description: hypothetical protein
  misc_feature (206)..(323): NCBI GI NO: 25402638 NR Description: hypothetical protein
  misc_feature (30)..(173): NCBI GI NO: 18403075 NR Description: zinc finger
  misc_feature (252)..(322): NCBI GI NO: 18403075 NR Description: zinc finger
MEEEKARGLSSAASPLIPPTSSEIDLEAGAGDQLQCRICLETDGRDFIAPCKCKGTSKYVHRDCLDHWRAVKEGFAFSHCTTCKAPYYLRVHVHTDRKWRTLKFRFFVTRDILFIFALVQFVISALAYLVHFIDGYQQYWLRTAWGFDNEVTFYYICGALLFFALLGLSGCFITCYDRRVRSDLAQPCRELCLCCCQPGMCADCHLPGTLCMWTDCTTCFEGCATTAGECGGCLGGAGEAGLPLLLIMGVIVLGLFTVVGIFYSVLVATMVGQRIWQRHYHILAKRMLTKEYVVEDVDGERADWSPPPLPAEHVQQLKSLGLL

SEQ ID NO: 18367 - DNA, 549 bp, Triticum aestivum
  misc_feature (1)..(549): Ceres Seq. ID no. 13654459
cgaaaacagtccagactacacccggtgagcgccctttccctcttccccgacctcccatcccttctccgtgcgttcgccgctgctttgccctagctgggtggcaggcggcccacgaaattcttggacagagattagtagatttcccggccccggccgggggaagataaggatagtctccttcggcgaggttggaattaggccccactgagcgcccccagccatgagttgcgggagatctgaaaacactaccagaaaatgcaggacgcgttcaacacctggtgaaacgatgtatctacatactgcagatgctaaaaagatcacccactaccaagctaatctaccaacaacaatggatcgcgatatcggcgcctaccctgtgaagcaccactttccgtctcctatagtttcttggatagaagacctttctagctttggcgatgttccttttagtcatgatactgaatacgtggatgatcaatcaacaccttcatttgggcagtcttttgcatctagcaatttgcatgacatgcaaatatcagtgagattgac

SEQ ID NO: 18368 - protein, 109 aa, Triticum aestivum
  peptide (1)..(109): Ceres Seq. ID no. 13654460
  misc_feature (4)..(108): NCBI GI NO: 34912064 NR Description: P0445H04.34
MSCGRSENTTRKCRTRSTPGETMYLHTADAKKITHYQANLPTTMDRDIGAYPVKHHFPSPIVSWIEDLSSFGDVPFSHDTEYVDDQSTPSFGQSFASSNLHDMQISVRL

SEQ ID NO: 18369 - protein, 87 aa, Triticum aestivum
  peptide (1)..(87): Ceres Seq. ID no. 13654461
  misc_feature (1)..(86): NCBI GI NO: 34912064 NR Description: P0445H04.34
MYLHTADAKKITHYQANLPTTMDRDIGAYPVKHHFPSPIVSWIEDLSSFGDVPFSHDTEYVDDQSTPSFGQSFASSNLHDMQISVRL

SEQ ID NO: 18370 - protein, 66 aa, Triticum aestivum
  peptide (1)..(66): Ceres Seq. ID no. 13654462
  misc_feature (1)..(65): NCBI GI NO: 34912064 NR Description: P0445H04.34
MDRDIGAYPVKHHFPSPIVSWIEDLSSFGDVPFSHDTEYVDDQSTPSFGQSFASSNLHDMQISVRL

SEQ ID NO: 18371 - DNA, 1378 bp, Triticum aestivum
  misc_feature (1)..(1378): Ceres Seq. ID no. 13654314
atcattcactcatcaaacgcgacgcacagagacagagggagagggtccgctgtacttgcatccttccctgcccccttcccctctcctccaagtccagaaatccgttcccctctcccccctccctccctctcgtctgcacccgagacgctcctctagatcagttcctcggtgcggttacctctcgccggaagccaagccaccatggtgtcgccggacgctatccgcaccgtcatcggcgtcataggcaatgcaaccgccctggtgctcttcctatccccagtgccgacgttcatccaaatctggaagaagaagacggtggagcagtactcggcggtgccgtacctggcgacgctgctcaactgcatgatgtgggtgctctacgggctcccgctggtgcacccgcacagcatgctcgtcatcaccatcaacggcaccggcatgctcatcgagctcacctacgtcgccctcttcctcaccttctccgtcggcgccgcccgccgccgagtcctcctcctgctggtcgccgaggtcgccttcgtcgccgcggtcggcgcgctcgtcctctccctcggccacaaacacgagcgcaggtccatggtcgtcggcatcctctgcgtcctattcggcaccggcatgtacgccgcgccgctttccgtcatgaaaatggtgatccagaccaagagcgtggagtacatgcccctgttcttgtccgtggcctcgctcgtcaatggcatctgatggactgcctacgccctcatcaagttaggcctctacatcaccatccccaacgggctgggcgtgatgttcgctgtggggcagatcatcctgtacggcatctactacaagtcgacgcagcagatcctggaggcccgtaagcgcaaggccgaccaggtgcccatgaccgaggtcgtcgtcgacggcaagagcggcagcgccaccaactcaggcgccgccaacggccactactagaagcaataccactactattaactcccgattgaagcgccttcataaatcaccttagctaattctcccatgaatcatgtacgtacgctgcgcgcccagggctcctgtgcactgtcgcgtcttcttgtgcgctctactacccttgaaagacctgttcttcatcttgtctcctttatgcctaccgtgcgtacggccgctactgtcaatcagacggctaaccgcgaccctggttggcgaatccgcgaccctggttggcggatcactggtgttcttggttttctggaagaactatgacagtccaaaggggacggcgtgttgagtttttcttatacatgttattatactactactgtttttgtttgtatttgttttggccgggaatactactactgttttgttgttgcagttgtcg

SEQ ID NO: 18372 - protein, 290 aa, Triticum aestivum
  peptide (1)..(290): Ceres Seq. ID no. 13654315
  misc_feature (138)..(184): Pfam Name: Pfam Description:  Protamine P1
HSLIKRDAQRQRERVRCTCILPCPLPLSSKSRNPFPSPPSLPLVCTRDAPLDQFLGAVTSRRKPSHHGVAGRYPHRHRRHRQCNRPGALPIPSADVHPNLEEEDGGAVLGGAVPGDAAQLHDVGALRAPAGAPAQHARHHHQRHRHAHRAHLRRPLPHLLRRRRPPPSPPPAGRRGRLRRRGRRARPLPRPQTRAQVHGRRHPLRPIRHRHVRRAAFRHENGDPDQERGVHAPVLVRGLARQWHLMDCLRPHQVRPLHHHPQRAGRDVRCGADHPVRHLLQVDAADPGGP

SEQ ID NO: 18373 - protein, 178 aa, Triticum aestivum
  peptide (1)..(178): Ceres Seq. ID no. 13654316
  misc_feature (1)..(178): NCBI GI NO: 34912462 NR Description: MtN3-like protein
  misc_feature (1)..(178): NCBI GI NO: 34912454 NR Description: P0681B11.31
  misc_feature (39)..(178): NCBI GI NO: 431154 NR Description: ORF [Lilium longiflorum]
  misc_feature (7)..(178): NCBI GI NO: 18413388 NR Description: nodulin MtN3 family protein [Arabidopsis thaliana]
  misc_feature (1)..(178): NCBI GI NO: 18405611 NR Description: nodulin MtN3 family protein [Arabidopsis thaliana]
  misc_feature (1)..(178): NCBI GI NO: 21592355 NR Description: contains similarity to nodulin MtN3 protein
  misc_feature (7)..(178): NCBI GI NO: 15219732 NR Description: nodulin MtN3 family protein [Arabidopsis thaliana]
  misc_feature (28)..(178): NCBI GI NO: 7486148 NR Description: hypothetical protein F25I24
  misc_feature (28)..(178): NCBI GI NO: 7486709 NR Description: hypothetical protein F8M12
  misc_feature (1)..(178): NCBI GI NO: 10177463 NR Description: contains similarity to MtN3 protein~gene_id:MQB2
MVSPDAIRTVIGVIGNATALVLFLSPVPTFIQIWKKKTVEQYSAVPYLATLLNCMMWVLYGLPLVHPHSMLVITINGTGMLIELTYVALFLTFSVGAARRRVLLLLVAEVAFVAAVGALVLSLGHKHERRSMVVGILCVLFGTGMYAAPLSVMKMVIQTKSVEYMPLFLSVASLVNGI

SEQ ID NO: 18374 - DNA, 1385 bp, Triticum aestivum
  misc_feature (1)..(1385): Ceres Seq. ID no. 12614389
aaaaaagaaataaaaaatcacgccctcccctcccctcccctccccgcagccgcagcgaacctcggcgatggcggcggcggcggacgaggcgtggtgccgggagacggttccccgggtgatggagctggtgagcccgcgcctcccccagcgcgacgcctgcgccctgctctcagtcagcccctggtgccaccgcgccctcgccgccaaccccaagctctgggaggtgctcgacctgcacgagatgaagaaagctggcgagcggctcatttcggcgcttacactggcaaggtatcgccatctcaaggtcgtgaaccttgaattcgctcaagatattgaggaccggcattttctccatctgaaagaaacgggtgctatcttactggaagagttggaactcctgaacctgaatgcatgtcagaagatctctgatacagggattggatctgccaccagtctttgtcctaatctccgggccctgtcgatctattggattgttggattgacagacgcaagcattgaacacgctgtgaagaactgcaagcagataatcgacttgaatctgagtggctgtaagaatatctcagatagaggaatacagctagttgccgataattatcaaggactacagaagttggacataaccaggtgcattaagttgactgatgatgcattgcaaaaagttcttgagaaatgctctgctcttgaaagcttgaacatgtatgccctttcaagttttaccgacaaggcttatacaaaaattggatatttagccaacctgacatttctagacctatgtggggcccagaacctaactgacgacggtcttagcagtatatcaagatgcggaagtttgacatatctcaatttatcttggtgcgtacgtgttactgatgttggggtggtagctatcgcacaaggttgtcggtcccttgaactactaagtttattcggaatacttggagtaactgatgcctgcctggaggctttgtcaaaatcttgcccaaatagtctcacgactctggatgtaaatggctgtactggtattaagaggaggagccgggacgacctgatccaactgttcccacgattgagttgcttcaaggtgcacagctagaaacaacggcttgggcttttgtagaattatcattaccctggctggcactcgaaaaagcatatgcggaagtgtctggcgctggagaaacagagcagcacgacagagtttttgccgcctgctggttccttgattctatgctgatgtgagagagatcgcaggacctgtacaatcgattttcgtaatatgtgtggcgtctctcggttacattgttacaaaaattaaaaaccatgacgcacttattttctacatgaccaaagtcatcttttcttcg

SEQ ID NO: 18375 - protein, 348 aa, Triticum aestivum
  peptide (1)..(348): Ceres Seq. ID no. 12614390
  misc_feature (6)..(348): NCBI GI NO: 18410977 NR Description: putative protein; protein id: At3g58530
  misc_feature (6)..(348): NCBI GI NO: 15450960 NR Description: putative protein [Arabidopsis thaliana]
  misc_feature (119)..(348): NCBI GI NO: 11357437 NR Description: hypothetical protein F14P22
  misc_feature (6)..(321): NCBI GI NO: 11357437 NR Description: hypothetical protein F14P22
  misc_feature (31)..(323): NCBI GI NO: 7022695 NR Description: unnamed protein product [Homo sapiens]
  misc_feature (31)..(323): NCBI GI NO: 6164721 NR Description: F-box protein Fbl2 [Homo sapiens]
  misc_feature (31)..(323): NCBI GI NO: 5919219 NR Description: leucine-rich repeats containing F-box protein FBL3
  misc_feature (31)..(323): NCBI GI NO: 30519963 NR Description: F-box and leucine-rich repeat protein 2
  misc_feature (31)..(323): NCBI GI NO: 16306582 NR Description: F-box and leucine-rich repeat protein 2
  misc_feature (31)..(323): NCBI GI NO: 6063090 NR Description: F-box protein FBL2 [Homo sapiens]
MAAAADEAWCRETVPRVMELVSPRLPQRDACALLSVSPWCHRALAANPKLWEVLDLHEMKKAGERLISALTLARYRHLKVVNLEFAQDIEDRHFLHLKETGAILLEELELLNLNACQKISDTGIGSATSLCPNLRALSIYWIVGLTDASIEHAVKNCKQIIDLNLSGCKNISDRGIQLVADNYQGLQKLDITRCIKLTDDALQKVLEKCSALESLNMYALSSFTDKAYTKIGYLANLTFLDLCGAQNLTDDGLSSISRCGSLTYLNLSWCVRVTDVGVVAIAQGCRSLELLSLFGILGVTDACLEALSKSCPNSLTTLDVNGCTGIKRRSRDDLIQLFPRLSCFKVHS

SEQ ID NO: 18376 - protein, 331 aa, Triticum aestivum
  peptide (1)..(331): Ceres Seq. ID no. 12614391
  misc_feature (1)..(331): NCBI GI NO: 18410977 NR Description: putative protein; protein id: At3g58530
  misc_feature (1)..(331): NCBI GI NO: 15450960 NR Description: putative protein [Arabidopsis thaliana]
  misc_feature (102)..(331): NCBI GI NO: 11357437 NR Description: hypothetical protein F14P22
  misc_feature (1)..(304): NCBI GI NO: 11357437 NR Description: hypothetical protein F14P22
  misc_feature (14)..(306): NCBI GI NO: 7022695 NR Description: unnamed protein product [Homo sapiens]
  misc_feature (14)..(306): NCBI GI NO: 6164721 NR Description: F-box protein Fbl2 [Homo sapiens]
  misc_feature (14)..(306): NCBI GI NO: 5919219 NR Description: leucine-rich repeats containing F-box protein FBL3
  misc_feature (14)..(306): NCBI GI NO: 30519963 NR Description: F-box and leucine-rich repeat protein 2
  misc_feature (14)..(306): NCBI GI NO: 16306582 NR Description: F-box and leucine-rich repeat protein 2
  misc_feature (14)..(306): NCBI GI NO: 6063090 NR Description: F-box protein FBL2 [Homo sapiens]
MELVSPRLPQRDACALLSVSPWCHRALAANPKLWEVLDLHEMKKAGERLISALTLARYRHLKVVNLEFAQDIEDRHFLHLKETGAILLEELELLNLNACQKISDTGIGSATSLCPNLRALSIYWIVGLTDASIEHAVKNCKQIIDLNLSGCKNISDRGIQLVADNYQGLQKLDITRCIKLTDDALQKVLEKCSALESLNMYALSSFTDKAYTKIGYLANLTFLDLCGAQNLTDDGLSSISRCGSLTYLNLSWCVRVTDVGVVAIAQGCRSLELLSLFGILGVTDACLEALSKSCPNSLTTLDVNGCTGIKRRSRDDLIQLFPRLSCFKVHS

SEQ ID NO: 18377 - protein, 290 aa, Triticum aestivum
  peptide (1)..(290): Ceres Seq. ID no. 12614392
  misc_feature (1)..(290): NCBI GI NO: 18410977 NR Description: putative protein; protein id: At3g58530
  misc_feature (1)..(290): NCBI GI NO: 15450960 NR Description: putative protein [Arabidopsis thaliana]
  misc_feature (61)..(290): NCBI GI NO: 11357437 NR Description: hypothetical protein F14P22
  misc_feature (1)..(263): NCBI GI NO: 11357437 NR Description: hypothetical protein F14P22
  misc_feature (1)..(265): NCBI GI NO: 7022695 NR Description: unnamed protein product [Homo sapiens]
  misc_feature (1)..(265): NCBI GI NO: 6164721 NR Description: F-box protein Fbl2 [Homo sapiens]
  misc_feature (1)..(265): NCBI GI NO: 5919219 NR Description: leucine-rich repeats containing F-box protein FBL3
  misc_feature (1)..(265): NCBI GI NO: 30519963 NR Description: F-box and leucine-rich repeat protein 2
  misc_feature (1)..(265): NCBI GI NO: 16306582 NR Description: F-box and leucine-rich repeat protein 2
  misc_feature (1)..(265): NCBI GI NO: 6063090 NR Description: F-box protein FBL2 [Homo sapiens]
MKKAGERLISALTLARYRHLKVVNLEFAQDIEDRHFLHLKETGAILLEELELLNLNACQKISDTGIGSATSLCPNLRALSIYWIVGLTDASIEHAVKNCKQIIDLNLSGCKNISDRGIQLVADNYQGLQKLDITRCIKLTDDALQKVLEKCSALESLNMYALSSFTDKAYTKIGYLANLTFLDLCGAQNLTDDGLSSISRCGSLTYLNLSWCVRVTDVGVVAIAQGCRSLELLSLFGILGVTDACLEALSKSCPNSLTTLDVNGCTGIKRRSRDDLIQLFPRLSCFKVHS

SEQ ID NO: 18378 - DNA, 1357 bp, Triticum aestivum
  misc_feature (1)..(1357): Ceres Seq. ID no. 12614549
ccgcaggctcccagcacaaacaactgctaagcccactttgatggtgaatcgagccgttttgccgcagcaccatcgtcgacttgtagggatcaagggccagcgtcaacgcctttgaaagaaatcgaaggaattagggctactaataattcaggtggtgcgtagatcacaagaaggcgacggttaaggaagatcgaggatgccaaagcagcggcacgggaaacgcctaggcgctcttgagctagagcctcggcctcggcaggatcacctgtaccttgtctttgatgactggtcgttcggatataccatccgcaaggtaaatacgtcgaatcgcttcaatccccccgtgcagcgcttgcctcggcctttcttcaaattggaggcgccgcacgagtctccggagtacttcgcgtcagcctttggcactaggattttgctgatgcatcccagggatcctgcgggtcataacttgtccggcagcttcttccccatgttggacgtccgctcgcggagtctcacctttggccctgggctcgagtttccgattcatcccgtctatctcgccgtcggcaataagctattcattattgccgaagcctcttttgagatgctctacttggatccacaatctggctccgagtggtcgtgggaactgctcccacatccgccattccagatttacgacgtctgctcgtacgctttgtacggacattctctccttgtgagcaccgagaacgaagcctttgctgccaccttcacctttgacacggtaaaaagttcatggaaacaacttggcaagtgggtgctgcctttcgagggtcgtggtcacttcgaccctctcctgggcgcatttgttgggctctcgaaagacccagacaccctcggccaactcatttgctgctacatgcacacctccgacactggccacacccttgagttgaagctcagcaaggagaagctgttcagcgaggacccagccttgaggcacataggcgccacccttgtgtacatggaaagccagagcaaattctgcctcgtagaatgtgtctccattgttgacgacagtgctgatcaggagctcaaggaagaggaagacctgccccaatctggctgctgtctttgttgtttgactacattctatctctgtcatgacatgaatggagacccgacgaccggcaggagctgtatggtgcagtactacgaagtgcctagagcaacctctatgttgttcctccaagatcctgttgcattttggatgtaaaatgctaaaatcatgttatgatgaccgagttcctatgtttatttttcactcagttgtgactgctgcatttctatgttttaataatgtgtttactcgtct

SEQ ID NO: 18379 - protein, 353 aa, Triticum aestivum
  peptide (1)..(353): Ceres Seq. ID no. 12614550
  misc_feature (17)..(236): NCBI GI NO: 34902598 NR Description: Hypothetical protein
  misc_feature (147)..(353): NCBI GI NO: 34898170 NR Description: hypothetical protein~predicted by FGENESH etc.
  misc_feature (142)..(353): NCBI GI NO: 34900482 NR Description: hypothetical protein~predicted by FGENESH etc.
  misc_feature (184)..(283): NCBI GI NO: 20804941 NR Description: P0456E05.21
  misc_feature (202)..(353): NCBI GI NO: 34393439 NR Description: unknown protein
MPKQRHGKRLGALELEPRPRQDHLYLVFDDWSFGYTIRKVNTSNRFNPPVQRLPRPFFKLEAPHESPEYFASAFGTRILLMHPRDPAGHNLSGSFFPMLDVRSRSLTFGPGLEFPIHPVYLAVGNKLFIIAEASFEMLYLDPQSGSEWSWELLPHPPFQIYDVCSYALYGHSLLVSTENEAFAATFTFDTVKSSWKQLGKWVLPFEGRGHFDPLLGAFVGLSKDPDTLGQLICCYMHTSDTGHTLELKLSKEKLFSEDPALRHIGATLVYMESQSKFCLVECVSIVDDSADQELKEEEDLPQSGCCLCCLTTFYLCHDMNGDPTTGRSCMVQYYEVPRATSMLFLQDPVAFWM

SEQ ID NO: 18380 - protein, 273 aa, Triticum aestivum
  peptide (1)..(273): Ceres Seq. ID no. 12614551
  misc_feature (1)..(156): NCBI GI NO: 34902598 NR Description: Hypothetical protein
  misc_feature (67)..(273): NCBI GI NO: 34898170 NR Description: hypothetical protein~predicted by FGENESH etc.
  misc_feature (62)..(273): NCBI GI NO: 34900482 NR Description: hypothetical protein~predicted by FGENESH etc.
  misc_feature (104)..(203): NCBI GI NO: 20804941 NR Description: P0456E05.21
  misc_feature (122)..(273): NCBI GI NO: 34393439 NR Description: unknown protein
MHPRDPAGHNLSGSFFPMLDVRSRSLTFGPGLEFPIHPVYLAVGNKLFIIAEASFEMLYLDPQSGSEWSWELLPHPPFQIYDVCSYALYGHSLLVSTENEAFAATFTFDTVKSSWKQLGKWVLPFEGRGHFDPLLGAFVGLSKDPDTLGQLICCYMHTSDTGHTLELKLSKEKLFSEDPALRHIGATLVYMESQSKFCLVECVSIVDDSADQELKEEEDLPQSGCCLCCLTTFYLCHDMNGDPTTGRSCMVQYYEVPRATSMLFLQDPVAFWM

SEQ ID NO: 18381 - protein, 256 aa, Triticum aestivum
  peptide (1)..(256): Ceres Seq. ID no. 12614552
  misc_feature (1)..(139): NCBI GI NO: 34902598 NR Description: Hypothetical protein
  misc_feature (50)..(256): NCBI GI NO: 34898170 NR Description: hypothetical protein~predicted by FGENESH etc.
  misc_feature (45)..(256): NCBI GI NO: 34900482 NR Description: hypothetical protein~predicted by FGENESH etc.
  misc_feature (87)..(186): NCBI GI NO: 20804941 NR Description: P0456E05.21
  misc_feature (105)..(256): NCBI GI NO: 34393439 NR Description: unknown protein
MLDVRSRSLTFGPGLEFPIHPVYLAVGNKLFIIAEASFEMLYLDPQSGSEWSWELLPHPPFQIYDVCSYALYGHSLLVSTENEAFAATFTFDTVKSSWKQLGKWVLPFEGRGHFDPLLGAFVGLSKDPDTLGQLICCYMHTSDTGHTLELKLSKEKLFSEDPALRHIGATLVYMESQSKFCLVECVSIVDDSADQELKEEEDLPQSGCCLCCLTTFYLCHDMNGDPTTGRSCMVQYYEVPRATSMLFLQDPVAFWM

SEQ ID NO: 18382 - DNA, 1723 bp, Triticum aestivum
  misc_feature (1)..(1723): Ceres Seq. ID no. 14313536
aaaaaaccctgcccctctctgtttttctctctccctccgaggtttttagggtttcgcatccgcatcagccgccgccggaaccggggaggcggcgatacgtcgcgatgcagccaacataccagccgccaatgaacggccagcacgcgcctcagccgaaggcctctggggctccgccgcctcctctgcagcaggcacccccgccgcagcagtactaccaggcgccgccgcagtactaccagcagggacccccgccggcgatgtggggccacccgcagcagcatatgcctccgcagtacgcgcctccgccgcagcagtacgcgcctcagcctcctcagcagtacgcgccgccgccgcagcattacgcgccgccgccgccgcagtacggagcgcagatggctggcgggccgcctcccggaggcgaggatatcaggtcgctgtggatcggagatctccagtactggatggatgagacctacctctacaacgcctttgcgcctgtggggccgcagcaggtcacctcagtgaaaattatccgcaacaaacatactgggcagcctgagggttatggttttattgaatttcaatctcgagctgctgcggaatatgctcttgggacctttaatgggcagatgatgcctaatgttgaacaagttttcaagctaaactgggcttcttgtagtgctggtgacaagcggggtgacgatggttctgatcacacaatatttgttggtgatttggctgctgatgttactgacgccatgttggaagagatattcaaagccacctacccatcagttaaaggtgctaatgttgttactgacagggccactggtcgctccaaaggatatggttttgtacgttttggagatctaaatgagcagacacgtgctatgactgagatgaatggagtgctattgtctacaagacaaatgaggattgggcctgcagctaacaagaagaatatgggtactcagcagacatattcaactaatgcagggtaccagagctctcaagtaaatgaggcggcgaatgatcccaacaatactacaatctttgtgggcgggttagattccaatatagatgagaactatctaaggcaagtttttactccatatggcgaagttggttatgtgaagattcctgtaggcaagcgttgtggatttgtccaatttaccagcagggcgtgcgctgagcaggccatcagtgcgctgaatgggtctcagattggtagttccaatgttcgtctttcatggggccgtagccaaaacaaacaggctccccagcaggatgcaaaccagggtaatggcaacagctactatggatatcaacagggtcctgatgcatactatggtgcacccaatgtgcaagatcctagcatgcaaaactatggatactctggttatggcagttacgagcagcaacagcagccatctcagcagcagcaacctcctcagcagcagccaccacagcagcaacagcagcagcccccacagcagtgaccattgaggcaatggagcgcaatcacagattcagagctgcatgaactgaatgctaccgcgtcatgagttatcgtataggtgtccttgtttgtaagatgggtcgtatctagtagtactttgaccgttgggcagtagctctagttctattcagtgcttctcttggttttaaattatcaaactatgtccatgactgagttaagcttttaatgttattttggatcacc

SEQ ID NO: 18383 - protein, 498 aa, Triticum aestivum
  peptide (1)..(498): Ceres Seq. ID no. 14313537
  misc_feature (240)..(312): Pfam Name: a.k.a. RRM, RBD, or RNP domain Pfam Description: RNA recognition motif.
  misc_feature (49)..(490): NCBI GI NO: 34901884 NR Description: putative RNA Binding Protein 45
  misc_feature (86)..(490): NCBI GI NO: 34395214 NR Description: putative RNA Binding Protein
  misc_feature (61)..(485): NCBI GI NO: 34896988 NR Description: putative RNA binding protein [Oryza sativa]
  misc_feature (74)..(485): NCBI GI NO: 39545835 NR Description: OSJNBb0060E08.6
  misc_feature (56)..(480): NCBI GI NO: 40253807 NR Description: putative RNA Binding Protein 45
  misc_feature (65)..(475): NCBI GI NO: 9663767 NR Description: RNA Binding Protein 45 [Nicotiana plumbaginifolia]
  misc_feature (80)..(492): NCBI GI NO: 15221071 NR Description: RNA binding protein 45 (RBP45), putative
  misc_feature (80)..(492): NCBI GI NO: 21592583 NR Description: putative DNA binding protein
  misc_feature (58)..(481): NCBI GI NO: 7485342 NR Description: hypothetical protein F10M23
  misc_feature (58)..(481): NCBI GI NO: 18416906 NR Description: RNA binding protein 45 (RBP45), putative
KTLPLSVFLSPSEVFRVSHPHQPPPEPGRRRYVAMQPTYQPPMNGQHAPQPKASGAPPPPLQQAPPPQQYYQAPPQYYQQGPPPAMWGHPQQHMPPQYAPPPQQYAPQPPQQYAPPPQHYAPPPPQYGAQMAGGPPPGGEDIRSLWIGDLQYWMDETYLYNAFAPVGPQQVTSVKIIRNKHTGQPEGYGFIEFQSRAAAEYALGTFNGQMMPNVEQVFKLNWASCSAGDKRGDDGSDHTIFVGDLAADVTDAMLEEIFKATYPSVKGANVVTDRATGRSKGYGFVRFGDLNEQTRAMTEMNGVLLSTRQMRIGPAANKKNMGTQQTYSTNAGYQSSQVNEAANDPNNTTIFVGGLDSNIDENYLRQVFTPYGEVGYVKIPVGKRCGFVQFTSRACAEQAISALNGSQIGSSNVRLSWGRSQNKQAPQQDANQGNGNSYYGYQQGPDAYYGAPNVQDPSMQNYGYSGYGSYEQQQQPSQQQQPPQQQPPQQQQQQPPQQ

SEQ ID NO: 18384 - protein, 464 aa, Triticum aestivum
  peptide (1)..(464): Ceres Seq. ID no. 14313538
  misc_feature (206)..(278): Pfam Name: a.k.a. RRM, RBD, or RNP domain Pfam Description: RNA recognition motif.
  misc_feature (15)..(456): NCBI GI NO: 34901884 NR Description: putative RNA Binding Protein 45
  misc_feature (52)..(456): NCBI GI NO: 34395214 NR Description: putative RNA Binding Protein
  misc_feature (27)..(451): NCBI GI NO: 34896988 NR Description: putative RNA binding protein [Oryza sativa]
  misc_feature (40)..(451): NCBI GI NO: 39545835 NR Description: OSJNBb0060E08.6
  misc_feature (22)..(446): NCBI GI NO: 40253807 NR Description: putative RNA Binding Protein 45
  misc_feature (31)..(441): NCBI GI NO: 9663767 NR Description: RNA Binding Protein 45 [Nicotiana plumbaginifolia]
  misc_feature (46)..(458): NCBI GI NO: 15221071 NR Description: RNA binding protein 45 (RBP45), putative
  misc_feature (46)..(458): NCBI GI NO: 21592583 NR Description: putative DNA binding protein
  misc_feature (24)..(447): NCBI GI NO: 7485342 NR Description: hypothetical protein F10M23
  misc_feature (24)..(447): NCBI GI NO: 18416906 NR Description: RNA binding protein 45 (RBP45), putative
MQPTYQPPMNGQHAPQPKASGAPPPPLQQAPPPQQYYQAPPQYYQQGPPPAMWGHPQQHMPPQYAPPPQQYAPQPPQQYAPPPQHYAPPPPQYGAQMAGGPPPGGEDIRSLWIGDLQYWMDETYLYNAFAPVGPQQVTSVKIIRNKHTGQPEGYGFIEFQSRAAAEYALGTFNGQMMPNVEQVFKLNWASCSAGDKRGDDGSDHTIFVGDLAADVTDAMLEEIFKATYPSVKGANVVTDRATGRSKGYGFVRFGDLNEQTRAMTEMNGVLLSTRQMRIGPAANKKNMGTQQTYSTNAGYQSSQVNEAANDPNNTTIFVGGLDSNIDENYLRQVFTPYGEVGYVKIPVGKRCGFVQFTSRACAEQAISALNGSQIGSSNVRLSWGRSQNKQAPQQDANQGNGNSYYGYQQGPDAYYGAPNVQDPSMQNYGYSGYGSYEQQQQPSQQQQPPQQQPPQQQQQQPPQQ

SEQ ID NO: 18385 - protein, 456 aa, Triticum aestivum
  peptide (1)..(456): Ceres Seq. ID no. 14313539
  misc_feature (198)..(270): Pfam Name: a.k.a. RRM, RBD, or RNP domain Pfam Description: RNA recognition motif.
  misc_feature (7)..(448): NCBI GI NO: 34901884 NR Description: putative RNA Binding Protein 45
  misc_feature (44)..(448): NCBI GI NO: 34395214 NR Description: putative RNA Binding Protein
  misc_feature (19)..(443): NCBI GI NO: 34896988 NR Description: putative RNA binding protein [Oryza sativa]
  misc_feature (32)..(443): NCBI GI NO: 39545835 NR Description: OSJNBb0060E08.6
  misc_feature (14)..(438): NCBI GI NO: 40253807 NR Description: putative RNA Binding Protein 45
  misc_feature (23)..(433): NCBI GI NO: 9663767 NR Description: RNA Binding Protein 45 [Nicotiana plumbaginifolia]
  misc_feature (38)..(450): NCBI GI NO: 15221071 NR Description: RNA binding protein 45 (RBP45), putative
  misc_feature (38)..(450): NCBI GI NO: 21592583 NR Description: putative DNA binding protein
  misc_feature (16)..(439): NCBI GI NO: 7485342 NR Description: hypothetical protein F10M23
  misc_feature (16)..(439): NCBI GI NO: 18416906 NR Description: RNA binding protein 45 (RBP45), putative
MNGQHAPQPKASGAPPPPLQQAPPPQQYYQAPPQYYQQGPPPAMWGHPQQHMPPQYAPPPQQYAPQPPQQYAPPPQHYAPPPPQYGAQMAGGPPPGGEDIRSLWIGDLQYWMDETYLYNAFAPVGPQQVTSVKIIRNKHTGQPEGYGFIEFQSRAAAEYALGTFNGQMMPNVEQVFKLNWASCSAGDKRGDDGSDHTIFVGDLAADVTDAMLEEIFKATYPSVKGANVVTDRATGRSKGYGFVRFGDLNEQTRAMTEMNGVLLSTRQMRIGPAANKKNMGTQQTYSTNAGYQSSQVNEAANDPNNTTIFVGGLDSNIDENYLRQVFTPYGEVGYVKIPVGKRCGFVQFTSRACAEQAISALNGSQIGSSNVRLSWGRSQNKQAPQQDANQGNGNSYYGYQQGPDAYYGAPNVQDPSMQNYGYSGYGSYEQQQQPSQQQQPPQQQPPQQQQQQPPQQ

SEQ ID NO: 18386 - DNA, 1358 bp, Triticum aestivum
  misc_feature (1)..(1358): Ceres Seq. ID no. 13596315
gattgattccagaagaggtagtctgctcggcgaatttcatcccctaggaatccttctccttccttccttgggacgagcagggagggccgtggacatggaggattcctcctcctacttgccggggccggcggcggatttcgtcgactacctgggccccgacacctccgccaccgtcttcaccatgctccaccaccccgccgacctcgcacgcgcatccgccgtctcccgatcctggcgacaattcgttatcgacaaccagttcagcaagctgcagtgcctgcgggcctgcccggagctctccaccttcaccaccgtccacctcaccaccaccaccaccaccaccaccagaaacccctctcaatgccaggaccaggacaccgccgagaagctccaccgggtgtacacgcacctcgcccacggcctcctctcgccctacaaccccagggactgcatcatccactgcatcggcgcctccagcaccgacaacttccccaacgagaccatcgagaacaccctcgaccccgtcgaccaccttgactccaacaggccatcctactggtccagcgccggccagagggaccccgccgtgcccgagtgcctcatatatcgcctccaggccgatctctgcctcgttcacgagatcaagctgcagccattcaaagcgtttttccagcatggcgacccgatatattcgccaaagagcatccgggtccagatgggctatccaagctcaccgctacgccctgaagcactcgtctctgatgaaaatgaaggccagttgattgatgatacaaactatgtctggacctacacatctccagaattcccaatgctgcaggaaaatgttttgcaatccttcaagttaccacacccggttctctgtattggcggggtggtcaaggttgagcttcttgggagggttcagaaacaggcaatcgatggtctctactacatatgcatatctcatgtccaaataatggggaaggcactctcacgagacctcggggtcgttcctcgcgggaacggcctcgtcctgaactactatctgcatccccatacatgcggcgttccccgcagcgagtcgtcacgggacaatgggcgcagcaggtggcagggcttggcgtcgaggatctggcattctggcacggcgcgaaggataggagggctgaaccaaacgctgctgagcagactgtttggcggtccgttgcggcttgtggtcgtagcggacgaatcggaaggggaggaggaggatgatcttccttagaaggaaggaaggagctcaagggtcttatttgatttgatttgattttctgcacatatataaaagagtgactgtccttttgtggtgctgtgctgtg

SEQ ID NO: 18387 - protein, 420 aa, Triticum aestivum
  peptide (1)..(420): Ceres Seq. ID no. 13596316
  misc_feature (45)..(336): NCBI GI NO: 18411435 NR Description: F-box protein family [Arabidopsis thaliana]
  misc_feature (183)..(336): NCBI GI NO: 28393062 NR Description: putative F-box protein [Arabidopsis thaliana]
  misc_feature (271)..(345): NCBI GI NO: 18308222 NR Description: unknown protein [Oryza sativa]
  misc_feature (82)..(261): NCBI GI NO: 7452420 NR Description: hypothetical protein A_TM018A10
  misc_feature (132)..(241): NCBI GI NO: 28850404 NR Description: hypothetical protein [Dictyostelium discoideum]
  misc_feature (270)..(348): NCBI GI NO: 28850404 NR Description: hypothetical protein [Dictyostelium discoideum]
IDSRRGSLLGEFHPLGILLLPSLGRAGRAVDMEDSSSYLPGPAADFVDYLGPDTSATVFTMLHHPADLARASAVSRSWRQFVIDNQFSKLQCLRACPELSTFTTVHLTTTTTTTTRNPSQCQDQDTAEKLHRVYTHLAHGLLSPYNPRDCIIHCIGASSTDNFPNETIENTLDPVDHLDSNRPSYWSSAGQRDPAVPECLIYRLQADLCLVHEIKLQPFKAFFQHGDPIYSPKSIRVQMGYPSSPLRPEALVSDENEGQLIDDTNYVWTYTSPEFPMLQENVLQSFKLPHPVLCIGGVVKVELLGRVQKQAIDGLYYICISHVQIMGKALSRDLGVVPRGNGLVLNYYLHPHTCGVPRSESSRDNGRSRWQGLASRIWHSGTARRIGGLNQTLLSRLFGGPLRLVVVADESEGEEEDDLP

SEQ ID NO: 18388 - protein, 389 aa, Triticum aestivum
  peptide (1)..(389): Ceres Seq. ID no. 13596317
  misc_feature (14)..(305): NCBI GI NO: 18411435 NR Description: F-box protein family [Arabidopsis thaliana]
  misc_feature (152)..(305): NCBI GI NO: 28393062 NR Description: putative F-box protein [Arabidopsis thaliana]
  misc_feature (240)..(314): NCBI GI NO: 18308222 NR Description: unknown protein [Oryza sativa]
  misc_feature (51)..(230): NCBI GI NO: 7452420 NR Description: hypothetical protein A_TM018A10
  misc_feature (101)..(210): NCBI GI NO: 28850404 NR Description: hypothetical protein [Dictyostelium discoideum]
  misc_feature (239)..(317): NCBI GI NO: 28850404 NR Description: hypothetical protein [Dictyostelium discoideum]
MEDSSSYLPGPAADFVDYLGPDTSATVFTMLHHPADLARASAVSRSWRQFVIDNQFSKLQCLRACPELSTFTTVHLTTTTTTTTRNPSQCQDQDTAEKLHRVYTHLAHGLLSPYNPRDCIIHCIGASSTDNFPNETIENTLDPVDHLDSNRPSYWSSAGQRDPAVPECLIYRLQADLCLVHEIKLQPFKAFFQHGDPIYSPKSIRVQMGYPSSPLRPEALVSDENEGQLIDDTNYVWTYTSPEFPMLQENVLQSFKLPHPVLCIGGVVKVELLGRVQKQAIDGLYYICISHVQIMGKALSRDLGVVPRGNGLVLNYYLHPHTCGVPRSESSRDNGRSRWQGLASRIWHSGTARRIGGLNQTLLSRLFGGPLRLVVVADESEGEEEDDLP

SEQ ID NO: 18389 - protein, 360 aa, Triticum aestivum
  peptide (1)..(360): Ceres Seq. ID no. 13596318
  misc_feature (1)..(276): NCBI GI NO: 18411435 NR Description: F-box protein family [Arabidopsis thaliana]
  misc_feature (123)..(276): NCBI GI NO: 28393062 NR Description: putative F-box protein [Arabidopsis thaliana]
  misc_feature (211)..(285): NCBI GI NO: 18308222 NR Description: unknown protein [Oryza sativa]
  misc_feature (22)..(201): NCBI GI NO: 7452420 NR Description: hypothetical protein A_TM018A10
  misc_feature (72)..(181): NCBI GI NO: 28850404 NR Description: hypothetical protein [Dictyostelium discoideum]
  misc_feature (210)..(288): NCBI GI NO: 28850404 NR Description: hypothetical protein [Dictyostelium discoideum]
MLHHPADLARASAVSRSWRQFVIDNQFSKLQCLRACPELSTFTTVHLTTTTTTTTRNPSQCQDQDTAEKLHRVYTHLAHGLLSPYNPRDCIIHCIGASSTDNFPNETIENTLDPVDHLDSNRPSYWSSAGQRDPAVPECLIYRLQADLCLVHEIKLQPFKAFFQHGDPIYSPKSIRVQMGYPSSPLRPEALVSDENEGQLIDDTNYVWTYTSPEFPMLQENVLQSFKLPHPVLCIGGVVKVELLGRVQKQAIDGLYYICISHVQIMGKALSRDLGVVPRGNGLVLNYYLHPHTCGVPRSESSRDNGRSRWQGLASRIWHSGTARRIGGLNQTLLSRLFGGPLRLVVVADESEGEEEDDLP

SEQ ID NO: 18390 - DNA, 2259 bp, Triticum aestivum
  misc_feature (1)..(2259): Ceres Seq. ID no. 13596319
  misc_feature (879)..(879): n is a, c, t, g, unknown, or other
ctagcagcgcccattaaaaaaatgaataccacgctgagggaggcctcttcctcgctcgatcccgaccgatccccgcgcagtgggggccacgcctctccatgacgcaagggccgacgtcactcctcccggtctgggcgcggacgactgcgcgaaggcccagtagtcgacgccagtcgctccacgccaccaccgcagaggccatggatggagaagacgcgcaccacaggccctcttcctcctcctcgtccggcggcccctttctctccggcctctgcgccgccgcgctccgccgcaagcccatctccgcgcgcgcctctgccgccgcctccggcgagggcctcgtgcggcagctcggcgtcctcgagctcgtgctcctcgggatcggcgcgtccatcggtgccggcatcttcgtcatcaccggaaccggcgcccgcgacgccggcccaggtgttacaatcagttttgctctcgctggagctgcgtgtgtgctcaatgcattgtgctatgctgaactggcatctcgttttcctgccgtggtcgggggagcatacttgtacacatatgcagcgtttaatgaactcacggccttcttggttttcacccagttgatgcttgattaccatattggggctgcaagcattgctcgtagcctagcaagctattttatccaattcttggagctgattccttctgtgaaaggcaatgttccgagttggattgggcatggagaagagttttttggtggtgtcgtttcagttaacatattggctccaatccttcttgtcatcctgactgtgatcctatgccgcggtgtcaaagaatcatctgcagtgaatacctttatgactacattgaagataatcatcgtcatagtcgttntatttgctggtgtgtttgaggtggatgtatcaaactggtcaccatttatgccgaatggtttcaaagctgttgtaaccggatctacagtagtcttctttgcatatgttggattcgatgcagttgctaattctgccgaggaagctaaaaacccacagcgggacttgcctattggcatcctaggaagccttctggcatgtgtcatcctatatgttgctgtatgcttggtgattactggaatgttgccatatacattactgggtgaagatgctcccttggctgaggctttttctgcaaaggggctgaaatttgtaactgttttgatcagcattggagctgttgctggtcttactacaacacttcttgttggtctgtatgttcagtcacgtttgtatcttggacttggaagggatggcctactaccttcaatattttctaaagttcatccaacactgcatactcctctgcactctcagatctgggttggttgtgttgcagcagtcttagctggcctctttaatgtgcatgcactctctcatattctctcagttggcacactgacaggctactcggttgtatcagcttgtgtgatcacacttcgatggagcgacaaagcaactaattctcgctcccttggaaaattttcaatctggcaggagggtgttttttgtcttgtcatagtggctctctgtggtttcatagcaggaatatcctaccggtttagctattctattgccttcatcatcatagcttttctgatagctacagtcggcagtttttctctgctgtttcgacaggtgtatgttcctgtggacccacctcgcttttcttgtcctggagttcctatggttccgattgtctctgttttcttcaatatgtttttgtttgctcagctacatgaagaagcttggtacagatttgtcatccttagtctcatcgcggtgggggtatatgctggatatggtcagtacaacgctgttccgtctacttcggaccactcgtctgttgcgtatcatggagtgccttcggaagccccatgatctattgcaagcctccaagtttatctgaaaatccatgtaccattggatcgtcaggggaggccatggccgtaagcctacctgtattgctcgaagccgtatgtgtagtatgttctccatagttccatatgtacatctgtatgatattttggaggtcagccaccatatcatttaccaatgaaatgacagcgaaagttttgttgagcaggatacacacacacagacacaccaaagattcacttggaaaggctttgaaagtcacgattgaaagctttatgtacttgtagtattacagttcataacttcatacatgtacttaattcatctgaaaaaaaacttagttcgc

SEQ ID NO: 18391 - protein, 605 aa, Triticum aestivum
  peptide (1)..(605): Ceres Seq. ID no. 15221835
  misc_feature (225)..(390): Pfam Name: Pfam Description:  Spore germination protein
  misc_feature (41)..(592): NCBI GI NO: 18390592 NR Description: expressed protein [Arabidopsis thaliana]
  misc_feature (117)..(592): NCBI GI NO: 25406885 NR Description: hypothetical protein
  misc_feature (35)..(383): NCBI GI NO: 14140148 NR Description: putative protein [Oryza sativa]
  misc_feature (219)..(592): NCBI GI NO: 14140148 NR Description: putative protein [Oryza sativa]
  misc_feature (64)..(460): NCBI GI NO: 17546307 NR Description: PROBABLE AMINO-ACID TRANSPORTER TRANSMEMBRANEPROTEIN
  misc_feature (500)..(595): NCBI GI NO: 17546307 NR Description: PROBABLE AMINO-ACID TRANSPORTER TRANSMEMBRANEPROTEIN
  misc_feature (80)..(461): NCBI GI NO: 37521235 NR Description: probable amino acid transporter
  misc_feature (508)..(585): NCBI GI NO: 37521235 NR Description: probable amino acid transporter
  misc_feature (81)..(462): NCBI GI NO: 20808968 NR Description: Amino acid transporters
  misc_feature (508)..(586): NCBI GI NO: 20808968 NR Description: Amino acid transporters
  misc_feature (261)..(261): Xaa is any aa, unknown or other
MTQGPTSLLPVWARTTARRPSSRRQSLHATTAEAMDGEDAHHRPSSSSSSGGPFLSGLCAAALRRKPISARASAAASGEGLVRQLGVLELVLLGIGASIGAGIFVITGTGARDAGPGVTISFALAGAACVLNALCYAELASRFPAVVGGAYLYTYAAFNELTAFLVFTQLMLDYHIGAASIARSLASYFIQFLELIPSVKGNVPSWIGHGEEFFGGVVSVNILAPILLVILTVILCRGVKESSAVNTFMTTLKIIIVIVVXFAGVFEVDVSNWSPFMPNGFKAVVTGSTVVFFAYVGFDAVANSAEEAKNPQRDLPIGILGSLLACVILYVAVCLVITGMLPYTLLGEDAPLAEAFSAKGLKFVTVLISIGAVAGLTTTLLVGLYVQSRLYLGLGRDGLLPSIFSKVHPTLHTPLHSQIWVGCVAAVLAGLFNVHALSHILSVGTLTGYSVVSACVITLRWSDKATNSRSLGKFSIWQEGVFCLVIVALCGFIAGISYRFSYSIAFIIIAFLIATVGSFSLLFRQVYVPVDPPRFSCPGVPMVPIVSVFFNMFLFAQLHEEAWYRFVILSLIAVGVYAGYGQYNAVPSTSDHSSVAYHGVPSEAP

SEQ ID NO: 18392 - protein, 571 aa, Triticum aestivum
  peptide (1)..(571): Ceres Seq. ID no. 15221836
  misc_feature (191)..(356): Pfam Name: Pfam Description:  Spore germination protein
  misc_feature (7)..(558): NCBI GI NO: 18390592 NR Description: expressed protein [Arabidopsis thaliana]
  misc_feature (83)..(558): NCBI GI NO: 25406885 NR Description: hypothetical protein
  misc_feature (1)..(349): NCBI GI NO: 14140148 NR Description: putative protein [Oryza sativa]
  misc_feature (185)..(558): NCBI GI NO: 14140148 NR Description: putative protein [Oryza sativa]
  misc_feature (30)..(426): NCBI GI NO: 17546307 NR Description: PROBABLE AMINO-ACID TRANSPORTER TRANSMEMBRANEPROTEIN
  misc_feature (466)..(561): NCBI GI NO: 17546307 NR Description: PROBABLE AMINO-ACID TRANSPORTER TRANSMEMBRANEPROTEIN
  misc_feature (46)..(427): NCBI GI NO: 37521235 NR Description: probable amino acid transporter
  misc_feature (474)..(551): NCBI GI NO: 37521235 NR Description: probable amino acid transporter
  misc_feature (47)..(428): NCBI GI NO: 20808968 NR Description: Amino acid transporters
  misc_feature (474)..(552): NCBI GI NO: 20808968 NR Description: Amino acid transporters
  misc_feature (227)..(227): Xaa is any aa, unknown or other
MDGEDAHHRPSSSSSSGGPFLSGLCAAALRRKPISARASAAASGEGLVRQLGVLELVLLGIGASIGAGIFVITGTGARDAGPGVTISFALAGAACVLNALCYAELASRFPAVVGGAYLYTYAAFNELTAFLVFTQLMLDYHIGAASIARSLASYFIQFLELIPSVKGNVPSWIGHGEEFFGGVVSVNILAPILLVILTVILCRGVKESSAVNTFMTTLKIIIVIVVXFAGVFEVDVSNWSPFMPNGFKAVVTGSTVVFFAYVGFDAVANSAEEAKNPQRDLPIGILGSLLACVILYVAVCLVITGMLPYTLLGEDAPLAEAFSAKGLKFVTVLISIGAVAGLTTTLLVGLYVQSRLYLGLGRDGLLPSIFSKVHPTLHTPLHSQIWVGCVAAVLAGLFNVHALSHILSVGTLTGYSVVSACVITLRWSDKATNSRSLGKFSIWQEGVFCLVIVALCGFIAGISYRFSYSIAFIIIAFLIATVGSFSLLFRQVYVPVDPPRFSCPGVPMVPIVSVFFNMFLFAQLHEEAWYRFVILSLIAVGVYAGYGQYNAVPSTSDHSSVAYHGVPSEAP

SEQ ID NO: 18393 - protein, 435 aa, Triticum aestivum
  peptide (1)..(435): Ceres Seq. ID no. 15221837
  misc_feature (55)..(220): Pfam Name: Pfam Description:  Spore germination protein
  misc_feature (1)..(422): NCBI GI NO: 18390592 NR Description: expressed protein [Arabidopsis thaliana]
  misc_feature (1)..(422): NCBI GI NO: 25406885 NR Description: hypothetical protein
  misc_feature (1)..(213): NCBI GI NO: 14140148 NR Description: putative protein [Oryza sativa]
  misc_feature (49)..(422): NCBI GI NO: 14140148 NR Description: putative protein [Oryza sativa]
  misc_feature (1)..(290): NCBI GI NO: 17546307 NR Description: PROBABLE AMINO-ACID TRANSPORTER TRANSMEMBRANEPROTEIN
  misc_feature (330)..(425): NCBI GI NO: 17546307 NR Description: PROBABLE AMINO-ACID TRANSPORTER TRANSMEMBRANEPROTEIN
  misc_feature (1)..(291): NCBI GI NO: 37521235 NR Description: probable amino acid transporter
  misc_feature (338)..(415): NCBI GI NO: 37521235 NR Description: probable amino acid transporter
  misc_feature (1)..(292): NCBI GI NO: 20808968 NR Description: Amino acid transporters
  misc_feature (338)..(416): NCBI GI NO: 20808968 NR Description: Amino acid transporters
  misc_feature (91)..(91): Xaa is any aa, unknown or other
MLDYHIGAASIARSLASYFIQFLELIPSVKGNVPSWIGHGEEFFGGVVSVNILAPILLVILTVILCRGVKESSAVNTFMTTLKIIIVIVVXFAGVFEVDVSNWSPFMPNGFKAVVTGSTVVFFAYVGFDAVANSAEEAKNPQRDLPIGILGSLLACVILYVAVCLVITGMLPYTLLGEDAPLAEAFSAKGLKFVTVLISIGAVAGLTTTLLVGLYVQSRLYLGLGRDGLLPSIFSKVHPTLHTPLHSQIWVGCVAAVLAGLFNVHALSHILSVGTLTGYSVVSACVITLRWSDKATNSRSLGKFSIWQEGVFCLVIVALCGFIAGISYRFSYSIAFIIIAFLIATVGSFSLLFRQVYVPVDPPRFSCPGVPMVPIVSVFFNMFLFAQLHEEAWYRFVILSLIAVGVYAGYGQYNAVPSTSDHSSVAYHGVPSEAP

SEQ ID NO: 18394 - DNA, 1154 bp, Triticum aestivum
  misc_feature (1)..(1154): Ceres Seq. ID no. 12614145
atcccctcccccattcccttctcccccctcccactccgccatggcctccttcgtttccgcctcctccaccaccacagcactcctctgctccgcccctcccgcctcccgcggcgggctcgtggtggcgtgggcggccccggcccggcgcgcgctcgcggctcctctgcgcgcggcagcggcgcaggggtcggccaactccgcgccggtcatgatggagagcaaggtcaagaagaggaacaagaagggcgccggcgccgggggcctccccgccgccatcgacgtcgagatccgggaggccgagcagtacctcgccaccgacgggcaggaacctactccagaagacttcccctttgaaatggttgatgaagatgggatgagcgtggttattctgaaaagggactacaaggatgagaagattgaggtcattgtcagcatgcctaacgtggaaggggatcctgagtttgatgaagatgacgagggcgatgatgaggatgctgccaaggacgatgacgatgaagatgaggacggccaagaaagtagcctttctatgaaggtgatagtctccaaggaatctggcccgaacctcgagttcacctgcacagccttccacgaggagatcaccattgacgacatgatgatagcagagaaaacagagtctgattcagagaaattcccctttgagggccctgagttcaccgagcttcctccgaacgtgcagaagggcctgttcaagttcctggaggtacgaggtgtgacgctgacgaccaccaacttcatgcacgattacatgattaccaagcagaccaaggagtacgtccggtggatgaccaagctcaagggtttggttcagtagtgacgttgaacagatggccttgccccgtgactcgacagcaaaatttggtagtgtagccttctagcacgcgtagcaagagcactaagaaccctgcaaaaccagtagtttgaagtgtatctgtagtcctgtatcagcagctagctaggcagagtgagttccatttgtgttcttctggagctggccggtgaaaatcctgtaggaaggtggttactagtagcgatgaaacaagacttcctgagcttaatacaagctgtgtttctgatacttttatgcttaaatatatccggtaatgactgttgtt

SEQ ID NO: 18395 - protein, 283 aa, Triticum aestivum
  peptide (1)..(283): Ceres Seq. ID no. 12614146
  misc_feature (92)..(282): Pfam Name: Pfam Description:  Mitochondrial glycoprotein
  misc_feature (16)..(283): NCBI GI NO: 34895742 NR Description: P0019D06.29
  misc_feature (14)..(283): NCBI GI NO: 34895730 NR Description: P0019D06.23
  misc_feature (29)..(283): NCBI GI NO: 11357566 NR Description: hypothetical protein F1I16
  misc_feature (92)..(283): NCBI GI NO: 18410318 NR Description: Expressed protein; protein id: At3g55605
  misc_feature (80)..(283): NCBI GI NO: 15239320 NR Description: putative protein; protein id: At5g05990
  misc_feature (92)..(283): NCBI GI NO: 7487698 NR Description: hypothetical protein At2g39790
  misc_feature (92)..(283): NCBI GI NO: 18405164 NR Description: Expressed protein; protein id: At2g39795
  misc_feature (92)..(283): NCBI GI NO: 21593469 NR Description: unknown [Arabidopsis thaliana]
  misc_feature (61)..(283): NCBI GI NO: 15241669 NR Description: putative protein; protein id: At5g02050
  misc_feature (61)..(283): NCBI GI NO: 21592321 NR Description: unknown [Arabidopsis thaliana]
SPPPFPSPPSHSAMASFVSASSTTTALLCSAPPASRGGLVVAWAAPARRALAAPLRAAAAQGSANSAPVMMESKVKKRNKKGAGAGGLPAAIDVEIREAEQYLATDGQEPTPEDFPFEMVDEDGMSVVILKRDYKDEKIEVIVSMPNVEGDPEFDEDDEGDDEDAAKDDDDEDEDGQESSLSMKVIVSKESGPNLEFTCTAFHEEITIDDMMIAEKTESDSEKFPFEGPEFTELPPNVQKGLFKFLEVRGVTLTTTNFMHDYMITKQTKEYVRWMTKLKGLVQ

SEQ ID NO: 18396 - protein, 270 aa, Triticum aestivum
  peptide (1)..(270): Ceres Seq. ID no. 12614147
  misc_feature (79)..(269): Pfam Name: Pfam Description:  Mitochondrial glycoprotein
  misc_feature (3)..(270): NCBI GI NO: 34895742 NR Description: P0019D06.29
  misc_feature (1)..(270): NCBI GI NO: 34895730 NR Description: P0019D06.23
  misc_feature (16)..(270): NCBI GI NO: 11357566 NR Description: hypothetical protein F1I16
  misc_feature (79)..(270): NCBI GI NO: 18410318 NR Description: Expressed protein; protein id: At3g55605
  misc_feature (67)..(270): NCBI GI NO: 15239320 NR Description: putative protein; protein id: At5g05990
  misc_feature (79)..(270): NCBI GI NO: 7487698 NR Description: hypothetical protein At2g39790
  misc_feature (79)..(270): NCBI GI NO: 18405164 NR Description: Expressed protein; protein id: At2g39795
  misc_feature (79)..(270): NCBI GI NO: 21593469 NR Description: unknown [Arabidopsis thaliana]
  misc_feature (48)..(270): NCBI GI NO: 15241669 NR Description: putative protein; protein id: At5g02050
  misc_feature (48)..(270): NCBI GI NO: 21592321 NR Description: unknown [Arabidopsis thaliana]
MASFVSASSTTTALLCSAPPASRGGLVVAWAAPARRALAAPLRAAAAQGSANSAPVMMESKVKKRNKKGAGAGGLPAAIDVEIREAEQYLATDGQEPTPEDFPFEMVDEDGMSVVILKRDYKDEKIEVIVSMPNVEGDPEFDEDDEGDDEDAAKDDDDEDEDGQESSLSMKVIVSKESGPNLEFTCTAFHEEITIDDMMIAEKTESDSEKFPFEGPEFTELPPNVQKGLFKFLEVRGVTLTTTNFMHDYMITKQTKEYVRWMTKLKGLVQ

SEQ ID NO: 18397 - protein, 214 aa, Triticum aestivum
  peptide (1)..(214): Ceres Seq. ID no. 12614148
  misc_feature (23)..(213): Pfam Name: Pfam Description:  Mitochondrial glycoprotein
  misc_feature (1)..(214): NCBI GI NO: 34895742 NR Description: P0019D06.29
  misc_feature (1)..(214): NCBI GI NO: 34895730 NR Description: P0019D06.23
  misc_feature (1)..(214): NCBI GI NO: 11357566 NR Description: hypothetical protein F1I16
  misc_feature (23)..(214): NCBI GI NO: 18410318 NR Description: Expressed protein; protein id: At3g55605
  misc_feature (11)..(214): NCBI GI NO: 15239320 NR Description: putative protein; protein id: At5g05990
  misc_feature (23)..(214): NCBI GI NO: 7487698 NR Description: hypothetical protein At2g39790
  misc_feature (23)..(214): NCBI GI NO: 18405164 NR Description: Expressed protein; protein id: At2g39795
  misc_feature (23)..(214): NCBI GI NO: 21593469 NR Description: unknown [Arabidopsis thaliana]
  misc_feature (1)..(214): NCBI GI NO: 15241669 NR Description: putative protein; protein id: At5g02050
  misc_feature (1)..(214): NCBI GI NO: 21592321 NR Description: unknown [Arabidopsis thaliana]
MMESKVKKRNKKGAGAGGLPAAIDVEIREAEQYLATDGQEPTPEDFPFEMVDEDGMSVVILKRDYKDEKIEVIVSMPNVEGDPEFDEDDEGDDEDAAKDDDDEDEDGQESSLSMKVIVSKESGPNLEFTCTAFHEEITIDDMMIAEKTESDSEKFPFEGPEFTELPPNVQKGLFKFLEVRGVTLTTTNFMHDYMITKQTKEYVRWMTKLKGLVQ

SEQ ID NO: 18398 - DNA, 1486 bp, Triticum aestivum
  misc_feature (1)..(1486): Ceres Seq. ID no. 13596180
agagttcagaacactgccactgaaacacagaagcaaatatgcagagcaccgtcgtgctttacacatggatggtcaggggccacctccaccccatgacacagttcgcccaccatctcgccgcacatggcgttcctgtcaccgtcgccgtcgccgacgtcccgtctataggcaagtcctctgagaccattgccggcctcgccgcatcctatccttccgtctccttccacctactcccgccgtcggcgacccgttccgcccagacggctgaccccgatgccgatccattcatcgcccttgtcgccgacctccgcgccaccaactctgccctcctcgccttcctgaggcccctcccgtccctcaaggctctagtcaccgacttcttctgcgcctacgggtttgatgccgccgcagagctcggcgtcccggcctaccttttcttcacctccgctgcgtcggtccttgctgcctacctgcacatccccgtcatgcgctccactgtctccttccgggacatggggcgctccctgctgcacttccccggagtccacccaattccggcgtctgacttgccggaagtgctgctcgaccgcggcgacagccagtacaagacaatccttagccttatggagcagctgccaagatctaagggcattctgtcgaacacgttcgagtggctggagccccgcgccgtcaaggcgataaaagacgggactccctgtcccggcgagtcagtaccgaaactgttctgcgtcggtccattggtcggcgaggagaggggaagcgccgtgaagcacgaatgcctgagatggctagacaagcagccagcgcggagcgtggtattcctctgcttcgggagcgcgagctcggtgcccgcagagcagttaaaggagatcgccgtgggactggagaagagcgggcacgcgttcttatgggccgtgcgagcgcccgttgcgccggacgccgacgcgacgaagcggttcgaggggcgggccgaggcggcggtggagccgctgctgccggagggattcttggacaggacgaggggacgcgggatggtggtttcctcctgggcgccgcaagtggaggtgctccggcacccggcgaccggcgcgttcgtgacgcattgcggatggaactcgacgctagagggtgttgtagccggggtgccgatgctgtgctggcccatgtacgcggagcagaggatgaacaaggtgttcgtcgtggaggagatgaaactcggggtggccatgagcggctacgacgaggggatagttaaagcggatgaggtagaggggaaggtgagactgatcatggagtccgagcaaggggaggagatcagggaacggatgacgatggcacaagtgattgctgccaatgcgctggaaagcggtggatcttcggcggcagcatttgttgacttcgtggataatctgaagatttcgatattcgattgaatcgttgactctgtagtggaattttcaaactg

SEQ ID NO: 18399 - protein, 471 aa, Triticum aestivum
  peptide (1)..(471): Ceres Seq. ID no. 15221792
  misc_feature (5)..(469): Pfam Name: Pfam Description:  UDP-glucoronosyl and UDP-glucosyl transferase
  misc_feature (1)..(469): NCBI GI NO: 34910218 NR Description: putative flavonol glucosyltransferase
  misc_feature (1)..(468): NCBI GI NO: 34910228 NR Description: putative flavonol glucosyltransferase
  misc_feature (1)..(469): NCBI GI NO: 34910204 NR Description: putative flavonol glucosyltransferase
  misc_feature (1)..(465): NCBI GI NO: 34910222 NR Description: putative flavonol glucosyltransferase
  misc_feature (1)..(466): NCBI GI NO: 34910206 NR Description: putative flavonol glucosyltransferase
  misc_feature (5)..(464): NCBI GI NO: 22535568 NR Description: putative glucosyltransferase
  misc_feature (2)..(464): NCBI GI NO: 21593785 NR Description: putative glucosyltransferase
  misc_feature (2)..(464): NCBI GI NO: 18401158 NR Description: glycosyltransferase family [Arabidopsis thaliana]
  misc_feature (15)..(462): NCBI GI NO: 19911209 NR Description: glucosyltransferase-13 [Vigna angularis]
  misc_feature (1)..(454): NCBI GI NO: 2501494 NR Description: Flavonol 3-O-glucosyltransferase 5
MQSTVVLYTWMVRGHLHPMTQFAHHLAAHGVPVTVAVADVPSIGKSSETIAGLAASYPSVSFHLLPPSATRSAQTADPDADPFIALVADLRATNSALLAFLRPLPSLKALVTDFFCAYGFDAAAELGVPAYLFFTSAASVLAAYLHIPVMRSTVSFRDMGRSLLHFPGVHPIPASDLPEVLLDRGDSQYKTILSLMEQLPRSKGILSNTFEWLEPRAVKAIKDGTPCPGESVPKLFCVGPLVGEERGSAVKHECLRWLDKQPARSVVFLCFGSASSVPAEQLKEIAVGLEKSGHAFLWAVRAPVAPDADATKRFEGRAEAAVEPLLPEGFLDRTRGRGMVVSSWAPQVEVLRHPATGAFVTHCGWNSTLEGVVAGVPMLCWPMYAEQRMNKVFVVEEMKLGVAMSGYDEGIVKADEVEGKVRLIMESEQGEEIRERMTMAQVIAANALESGGSSAAAFVDFVDNLKISIFD

SEQ ID NO: 18400 - protein, 461 aa, Triticum aestivum
  peptide (1)..(461): Ceres Seq. ID no. 15221793
  misc_feature (1)..(459): Pfam Name: Pfam Description:  UDP-glucoronosyl and UDP-glucosyl transferase
  misc_feature (1)..(459): NCBI GI NO: 34910218 NR Description: putative flavonol glucosyltransferase
  misc_feature (1)..(458): NCBI GI NO: 34910228 NR Description: putative flavonol glucosyltransferase
  misc_feature (1)..(459): NCBI GI NO: 34910204 NR Description: putative flavonol glucosyltransferase
  misc_feature (1)..(455): NCBI GI NO: 34910222 NR Description: putative flavonol glucosyltransferase
  misc_feature (1)..(456): NCBI GI NO: 34910206 NR Description: putative flavonol glucosyltransferase
  misc_feature (1)..(454): NCBI GI NO: 22535568 NR Description: putative glucosyltransferase
  misc_feature (1)..(454): NCBI GI NO: 21593785 NR Description: putative glucosyltransferase
  misc_feature (1)..(454): NCBI GI NO: 18401158 NR Description: glycosyltransferase family [Arabidopsis thaliana]
  misc_feature (5)..(452): NCBI GI NO: 19911209 NR Description: glucosyltransferase-13 [Vigna angularis]
  misc_feature (1)..(444): NCBI GI NO: 2501494 NR Description: Flavonol 3-O-glucosyltransferase 5
MVRGHLHPMTQFAHHLAAHGVPVTVAVADVPSIGKSSETIAGLAASYPSVSFHLLPPSATRSAQTADPDADPFIALVADLRATNSALLAFLRPLPSLKALVTDFFCAYGFDAAAELGVPAYLFFTSAASVLAAYLHIPVMRSTVSFRDMGRSLLHFPGVHPIPASDLPEVLLDRGDSQYKTILSLMEQLPRSKGILSNTFEWLEPRAVKAIKDGTPCPGESVPKLFCVGPLVGEERGSAVKHECLRWLDKQPARSVVFLCFGSASSVPAEQLKEIAVGLEKSGHAFLWAVRAPVAPDADATKRFEGRAEAAVEPLLPEGFLDRTRGRGMVVSSWAPQVEVLRHPATGAFVTHCGWNSTLEGVVAGVPMLCWPMYAEQRMNKVFVVEEMKLGVAMSGYDEGIVKADEVEGKVRLIMESEQGEEIRERMTMAQVIAANALESGGSSAAAFVDFVDNLKISIFD

SEQ ID NO: 18401 - protein, 453 aa, Triticum aestivum
  peptide (1)..(453): Ceres Seq. ID no. 15221794
  misc_feature (1)..(451): Pfam Name: Pfam Description:  UDP-glucoronosyl and UDP-glucosyl transferase
  misc_feature (1)..(451): NCBI GI NO: 34910218 NR Description: putative flavonol glucosyltransferase
  misc_feature (1)..(450): NCBI GI NO: 34910228 NR Description: putative flavonol glucosyltransferase
  misc_feature (1)..(451): NCBI GI NO: 34910204 NR Description: putative flavonol glucosyltransferase
  misc_feature (1)..(447): NCBI GI NO: 34910222 NR Description: putative flavonol glucosyltransferase
  misc_feature (1)..(448): NCBI GI NO: 34910206 NR Description: putative flavonol glucosyltransferase
  misc_feature (1)..(446): NCBI GI NO: 22535568 NR Description: putative glucosyltransferase
  misc_feature (1)..(446): NCBI GI NO: 21593785 NR Description: putative glucosyltransferase
  misc_feature (1)..(446): NCBI GI NO: 18401158 NR Description: glycosyltransferase family [Arabidopsis thaliana]
  misc_feature (1)..(444): NCBI GI NO: 19911209 NR Description: glucosyltransferase-13 [Vigna angularis]
  misc_feature (1)..(436): NCBI GI NO: 2501494 NR Description: Flavonol 3-O-glucosyltransferase 5
MTQFAHHLAAHGVPVTVAVADVPSIGKSSETIAGLAASYPSVSFHLLPPSATRSAQTADPDADPFIALVADLRATNSALLAFLRPLPSLKALVTDFFCAYGFDAAAELGVPAYLFFTSAASVLAAYLHIPVMRSTVSFRDMGRSLLHFPGVHPIPASDLPEVLLDRGDSQYKTILSLMEQLPRSKGILSNTFEWLEPRAVKAIKDGTPCPGESVPKLFCVGPLVGEERGSAVKHECLRWLDKQPARSVVFLCFGSASSVPAEQLKEIAVGLEKSGHAFLWAVRAPVAPDADATKRFEGRAEAAVEPLLPEGFLDRTRGRGMVVSSWAPQVEVLRHPATGAFVTHCGWNSTLEGVVAGVPMLCWPMYAEQRMNKVFVVEEMKLGVAMSGYDEGIVKADEVEGKVRLIMESEQGEEIRERMTMAQVIAANALESGGSSAAAFVDFVDNLKISIFD

SEQ ID NO: 18402 - DNA, 523 bp, Triticum aestivum
  misc_feature (1)..(523): Ceres Seq. ID no. 12584310
  misc_feature (468)..(468): n is a, c, t, g, unknown, or other
atcggacctgcccagaccagccaacagtgagctagctagctagcgagatgagagttgcggtggtgggcggcggggtgagcgggctgacggcggcacaggagctcgcggcgagcggtggcgcacgtgtcaccgtgtacgagaaggaggactggcttggagggggtgccaggaccgtggccgtcggtgacggcccctgcctcgtccgcctcgacctttgccccatggtcttcaagcaggcaacatgccccaacatgatgcaatggttagagttgcttggggtggagattgaaagatcggagttatctttctcagtgagcacaaaattggataacggcagacaatgcgaatggagcactagcaatggtatctcgagcctttttgcacaaaagagcaatgcattgaggcctagcttttggtgcactatccgtgagatactcaagttcaagagtgatgtgcttaggtacctgnagtatcatgaaaaataaccatcatcttggccgaaatgaaactttggggcagtttg

SEQ ID NO: 18403 - protein, 145 aa, Triticum aestivum
  peptide (1)..(145): Ceres Seq. ID no. 12584311
  misc_feature (10)..(140): Pfam Name: Pfam Description:  Flavin containing amine oxidoreductase
  misc_feature (1)..(140): NCBI GI NO: 9294509 NR Description: mycolic acid methyl transferase-like protein
  misc_feature (1)..(140): NCBI GI NO: 18086398 NR Description: AT3g23510/MEE5_5 [Arabidopsis thaliana]
  misc_feature (1)..(140): NCBI GI NO: 22331288 NR Description: unknown protein; protein id: At3g23530
  misc_feature (1)..(140): NCBI GI NO: 11994312 NR Description: contains similarity to cyclopropane fatty acidsynthase~gene_id:MEE5
  misc_feature (1)..(140): NCBI GI NO: 30687094 NR Description: cyclopropane-fatty-acyl-phospholipid synthase -related
  misc_feature (63)..(145): NCBI GI NO: 34393848 NR Description: putative cyclopropane synthase
  misc_feature (1)..(145): NCBI GI NO: 21069167 NR Description: cyclopropane synthase [Sterculia foetida]
  misc_feature (1)..(132): NCBI GI NO: 23470137 NR Description: hypothetical protein
  misc_feature (1)..(132): NCBI GI NO: 28868333 NR Description: amine oxidase, flavin-containing
  misc_feature (1)..(144): NCBI GI NO: 39997425 NR Description: conserved hypothetical protein
  misc_feature (141)..(141): Xaa is any aa, unknown or other
MRVAVVGGGVSGLTAAQELAASGGARVTVYEKEDWLGGGARTVAVGDGPCLVRLDLCPMVFKQATCPNMMQWLELLGVEIERSELSFSVSTKLDNGRQCEWSTSNGISSLFAQKSNALRPSFWCTIREILKFKSDVLRYLXYHEK

SEQ ID NO: 18404 - protein, 87 aa, Triticum aestivum
  peptide (1)..(87): Ceres Seq. ID no. 12584312
  misc_feature (1)..(82): Pfam Name: Pfam Description:  Flavin containing amine oxidoreductase
  misc_feature (1)..(82): NCBI GI NO: 9294509 NR Description: mycolic acid methyl transferase-like protein
  misc_feature (1)..(82): NCBI GI NO: 18086398 NR Description: AT3g23510/MEE5_5 [Arabidopsis thaliana]
  misc_feature (1)..(82): NCBI GI NO: 22331288 NR Description: unknown protein; protein id: At3g23530
  misc_feature (1)..(82): NCBI GI NO: 11994312 NR Description: contains similarity to cyclopropane fatty acidsynthase~gene_id:MEE5
  misc_feature (1)..(82): NCBI GI NO: 30687094 NR Description: cyclopropane-fatty-acyl-phospholipid synthase -related
  misc_feature (5)..(87): NCBI GI NO: 34393848 NR Description: putative cyclopropane synthase
  misc_feature (1)..(87): NCBI GI NO: 21069167 NR Description: cyclopropane synthase [Sterculia foetida]
  misc_feature (1)..(74): NCBI GI NO: 23470137 NR Description: hypothetical protein
  misc_feature (1)..(74): NCBI GI NO: 28868333 NR Description: amine oxidase, flavin-containing
  misc_feature (1)..(86): NCBI GI NO: 39997425 NR Description: conserved hypothetical protein
  misc_feature (83)..(83): Xaa is any aa, unknown or other
MVFKQATCPNMMQWLELLGVEIERSELSFSVSTKLDNGRQCEWSTSNGISSLFAQKSNALRPSFWCTIREILKFKSDVLRYLXYHEK

SEQ ID NO: 18405 - protein, 77 aa, Triticum aestivum
  peptide (1)..(77): Ceres Seq. ID no. 12584313
  misc_feature (1)..(72): Pfam Name: Pfam Description:  Flavin containing amine oxidoreductase
  misc_feature (1)..(72): NCBI GI NO: 9294509 NR Description: mycolic acid methyl transferase-like protein
  misc_feature (1)..(72): NCBI GI NO: 18086398 NR Description: AT3g23510/MEE5_5 [Arabidopsis thaliana]
  misc_feature (1)..(72): NCBI GI NO: 22331288 NR Description: unknown protein; protein id: At3g23530
  misc_feature (1)..(72): NCBI GI NO: 11994312 NR Description: contains similarity to cyclopropane fatty acidsynthase~gene_id:MEE5
  misc_feature (1)..(72): NCBI GI NO: 30687094 NR Description: cyclopropane-fatty-acyl-phospholipid synthase -related
  misc_feature (1)..(77): NCBI GI NO: 34393848 NR Description: putative cyclopropane synthase
  misc_feature (1)..(77): NCBI GI NO: 21069167 NR Description: cyclopropane synthase [Sterculia foetida]
  misc_feature (1)..(64): NCBI GI NO: 23470137 NR Description: hypothetical protein
  misc_feature (1)..(64): NCBI GI NO: 28868333 NR Description: amine oxidase, flavin-containing
  misc_feature (1)..(76): NCBI GI NO: 39997425 NR Description: conserved hypothetical protein
  misc_feature (73)..(73): Xaa is any aa, unknown or other
MMQWLELLGVEIERSELSFSVSTKLDNGRQCEWSTSNGISSLFAQKSNALRPSFWCTIREILKFKSDVLRYLXYHEK

SEQ ID NO: 18406 - DNA, 720 bp, Triticum aestivum
  misc_feature (1)..(720): Ceres Seq. ID no. 12584327
cgaaaagcaacaagggcagctcgcatttcgccgctcaccgagccctcgaggcgcgctatccatggccacgtactacccttccggcgcctccgcgctcctgctccccgtcccgcgaacccgcgccgcctttccgcagatgtttcccggtccggcttccgggaggagctctccctgtgcagctgttcggccgcagcggaggggaagggaagcggtgggcgtcgtgcgagcatgcttcaatcctttcggggacgaacgcatcctccgggaggccttgaaggagccagttgcattcatgggtggcgtgtttgctggtctcttgaggcttgacctgaatgaggatcctctcaaggagtgggtaactcgaacggtagaggcttctggaatagctgaagagaatagtgctgaggaatcaaatgagggagctcaaaatgatggaccccaacaaattgagattgagtgagtgtcatggaatattgttaccaggagaaagctatggatactgccattttgctaggtcaatgagcaatgaagtcttgccaccaatattttcaaactgggagaaacataggcttgcgtgtcttgacatgacagtgcagacaatggtgttattttacaagccttgacaattcatgcttgttcagcactgtacctttatcaagattgtcttcagcactgtacttttttcactgttcgattccagtttcctcagttggttcgggt

SEQ ID NO: 18407 - protein, 152 aa, Triticum aestivum
  peptide (1)..(152): Ceres Seq. ID no. 12584328
  misc_feature (27)..(152): NCBI GI NO: 21742078 NR Description: OSJNBa0074L08.1
  misc_feature (76)..(152): NCBI GI NO: 18396668 NR Description: expressed protein; protein id: At1g28150
  misc_feature (76)..(152): NCBI GI NO: 21553386 NR Description: unknown [Arabidopsis thaliana]
  misc_feature (86)..(152): NCBI GI NO: 23040751 NR Description: hypothetical protein
  misc_feature (86)..(152): NCBI GI NO: 16331273 NR Description: unknown protein [Synechocystis sp. PCC 6803]
EKQQGQLAFRRSPSPRGALSMATYYPSGASALLLPVPRTRAAFPQMFPGPASGRSSPCAAVRPQRRGREAVGVVRACFNPFGDERILREALKEPVAFMGGVFAGLLRLDLNEDPLKEWVTRTVEASGIAEENSAEESNEGAQNDGPQQIEIE

SEQ ID NO: 18408 - protein, 132 aa, Triticum aestivum
  peptide (1)..(132): Ceres Seq. ID no. 12584329
  misc_feature (7)..(132): NCBI GI NO: 21742078 NR Description: OSJNBa0074L08.1
  misc_feature (56)..(132): NCBI GI NO: 18396668 NR Description: expressed protein; protein id: At1g28150
  misc_feature (56)..(132): NCBI GI NO: 21553386 NR Description: unknown [Arabidopsis thaliana]
  misc_feature (66)..(132): NCBI GI NO: 23040751 NR Description: hypothetical protein
  misc_feature (66)..(132): NCBI GI NO: 16331273 NR Description: unknown protein [Synechocystis sp. PCC 6803]
MATYYPSGASALLLPVPRTRAAFPQMFPGPASGRSSPCAAVRPQRRGREAVGVVRACFNPFGDERILREALKEPVAFMGGVFAGLLRLDLNEDPLKEWVTRTVEASGIAEENSAEESNEGAQNDGPQQIEIE

SEQ ID NO: 18409 - protein, 108 aa, Triticum aestivum
  peptide (1)..(108): Ceres Seq. ID no. 12584330
RKATRAARISPLTEPSRRAIHGHVLPFRRLRAPAPRPANPRRLSADVSRSGFREELSLCSCSAAAEGKGSGGRRASMLQSFRGRTHPPGGLEGASCIHGWRVCWSLEA

SEQ ID NO: 18410 - DNA, 980 bp, Triticum aestivum
  misc_feature (1)..(980): Ceres Seq. ID no. 13583037
cccgattacttcagccgccggccgccgccactgccgccagcctcggccagagcttctccgtcccctacccctacagaccgcgatctcgtcctgaaccaccggccgcgactgctgctccgcttgctctcccccgtcggagatccgcccggagcgactttcgtctttctgggtagtgccgacgctacagaaagcccaaacccggaaacagagaagacgacgccacatctacatttgcactcccacgcttaaagccggaggcggcgtaggaagcagcgatagccatggcgtcgtcgttggcaacggcaccggctgctgtacgtgaaatgcagagcgaccttgagtcccaggccaacgccctcagcaagatccagaaagacatctccaagaaccacgaggtccgcaagcagttcaccatccaggtcggcgagaatgaactcgtcctcaaggagctggagctgctgaatgaaggggcaaacgtgtacaagctgattgggccagtgttggtcaagcaggacaatgcagaggcgaaggccaacatcaagaagcgcatcgagtacatcacggctgagctagagagaatggatcgggcgctcaaggacttggaggagaaacagaatagcaagaaggaatcgataatcaagctgcaacagaagatgcaggctgtacaagcgaaggctcaggcgtaaatgaagggttccctgcattagggcctttgtcctcccaaatgttgggtcgtgttatctatcccctaaaaaggtgaaagaaatctgtagtgttcagagattgagagaagttcaaggtttgtgtagtgagagattttgtttgggagtggatacttggttgaagatgtacctcttgctggtttctagtaatatgcttgaaatgacttttattttgagaaggaattggatcaatcttttcatgtaccattttatttcttctatctttgcttatgttgattaatagattcatttttagcg

SEQ ID NO: 18411 - protein, 134 aa, Triticum aestivum
  peptide (1)..(134): Ceres Seq. ID no. 13583038
  misc_feature (19)..(126): Pfam Name: Pfam Description:  KE2 family protein
  misc_feature (10)..(134): NCBI GI NO: 30691134 NR Description: hydrophilic protein -related
  misc_feature (10)..(134): NCBI GI NO: 26450257 NR Description: unknown protein [Arabidopsis thaliana]
  misc_feature (10)..(97): NCBI GI NO: 25403096 NR Description: probable hydrophilic protein, 29542-30030
  misc_feature (15)..(134): NCBI GI NO: 33585747 NR Description: Unknown (protein for MGC:66282) [Danio rerio]
  misc_feature (15)..(134): NCBI GI NO: 7657162 NR Description: HLA class II region expressed gene KE2
  misc_feature (15)..(132): NCBI GI NO: 27704620 NR Description: similar to H2-K region expressed gene 2
  misc_feature (15)..(130): NCBI GI NO: 6754128 NR Description: H2-K region expressed gene 2 [Mus musculus]
  misc_feature (10)..(130): NCBI GI NO: 24667085 NR Description: CG7770-PA [Drosophila melanogaster]
  misc_feature (20)..(134): NCBI GI NO: 39582756 NR Description: Hypothetical protein CBG21902
  misc_feature (20)..(134): NCBI GI NO: 17506717 NR Description: KE2 family protein (14.7 kD)
MASSLATAPAAVREMQSDLESQANALSKIQKDISKNHEVRKQFTIQVGENELVLKELELLNEGANVYKLIGPVLVKQDNAEAKANIKKRIEYITAELERMDRALKDLEEKQNSKKESIIKLQQKMQAVQAKAQA

SEQ ID NO: 18412 - protein, 120 aa, Triticum aestivum
  peptide (1)..(120): Ceres Seq. ID no. 13583039
  misc_feature (5)..(112): Pfam Name: Pfam Description:  KE2 family protein
  misc_feature (1)..(120): NCBI GI NO: 30691134 NR Description: hydrophilic protein -related
  misc_feature (1)..(120): NCBI GI NO: 26450257 NR Description: unknown protein [Arabidopsis thaliana]
  misc_feature (1)..(83): NCBI GI NO: 25403096 NR Description: probable hydrophilic protein, 29542-30030
  misc_feature (1)..(120): NCBI GI NO: 33585747 NR Description: Unknown (protein for MGC:66282) [Danio rerio]
  misc_feature (1)..(120): NCBI GI NO: 7657162 NR Description: HLA class II region expressed gene KE2
  misc_feature (1)..(118): NCBI GI NO: 27704620 NR Description: similar to H2-K region expressed gene 2
  misc_feature (1)..(116): NCBI GI NO: 6754128 NR Description: H2-K region expressed gene 2 [Mus musculus]
  misc_feature (1)..(116): NCBI GI NO: 24667085 NR Description: CG7770-PA [Drosophila melanogaster]
  misc_feature (6)..(120): NCBI GI NO: 39582756 NR Description: Hypothetical protein CBG21902
  misc_feature (6)..(120): NCBI GI NO: 17506717 NR Description: KE2 family protein (14.7 kD)
MQSDLESQANALSKIQKDISKNHEVRKQFTIQVGENELVLKELELLNEGANVYKLIGPVLVKQDNAEAKANIKKRIEYITAELERMDRALKDLEEKQNSKKESIIKLQQKMQAVQAKAQA

SEQ ID NO: 18413 - protein, 82 aa, Triticum aestivum
  peptide (1)..(82): Ceres Seq. ID no. 13583040
PDYFSRRPPPLPPASARASPSPTPTDRDLVLNHRPRLLLRLLSPVGDPPGATFVFLGSADATESPNPETEKTTPHLHLHSHA

SEQ ID NO: 18414 - DNA, 1126 bp, Triticum aestivum
  misc_feature (1)..(1126): Ceres Seq. ID no. 14302493
ccccccagctccaaccagccagaccatccaaccaacgccgcaccgcaacaacaaccgccgcgcacgcgccgagcacggtcgaacacttgccatggctcccaagaacgcgctccccgtcgccgtcgccgccgccgcggacgccggcatggagcccaggttccgcggcgtgcgcaagcggccgtggggcaggtacgcggcggagatccgcgacccggccaggaaggcccgcgtctggctcggcaccttcgacaccgccgaggccgcggcccgcgcctacgacgccgccgcgctccactaccgcgggcccaaggccaagaccaacttccccgtcggcaccgtcgccgccttcgcccacgtcccgctcccgccgcccaaggcgctggccgtcagccccagcagcagcaccgtcgagtcttcgtcccgggacacgccggccgcggcgcccgccgctcctgctgctgctgcccccgcgcccccgccggcgctcgacctgagcctggcgatgccggccatggtggcggcgcagccgttcctgttcctggaccccagggtcgcggtgaccgtggccgtggccgcgccggcgccggccccctgccggtcagcggcgatcagcggcatgaacaaggtggcgtcccgcgaggaagagcagagcgacaccgggtcgtcgtcatccgtggtggacgcctcgccggccgtgggcgtggggttcgacctgaacctgccgccgccggtggagatggcgtaggagatggaccgatctcggtcgcccgatgacgacgcggcccggaagtaaagcaaagcgctctcgtggtagaatttaaagtttagaagaatggcgtgtacttactagtaagaggttaatcggccgtttaattgccaggatcgatccatcgatgggtaagggtaagtaggtgtacatagatcgcgtgcgtgcgttttttgcatggggaggcaggtaggatgaaacacatccatctatctgctcccaatgttacttacaatttccttaaaagcaagggaaaaaaagacaaaaaggaagaagccagtagtagagcattttgttcttcagtgtacaatatttgatctctgtctctcggattaatgtgaaatttatgatttccattcc

SEQ ID NO: 18415 - protein, 257 aa, Triticum aestivum
  peptide (1)..(257): Ceres Seq. ID no. 14302494
  misc_feature (38)..(202): Pfam Name: Pfam Description:  Progesterone receptor
PPSSNQPDHPTNAAPQQQPPRTRRARSNTCHGSQERAPRRRRRRRGRRHGAQVPRRAQAAVGQVRGGDPRPGQEGPRLARHLRHRRGRGPRLRRRRAPLPRAQGQDQLPRRHRRRLRPRPAPAAQGAGRQPQQQHRRVFVPGHAGRGARRSCCCCPRAPAGARPEPGDAGHGGGAAVPVPGPQGRGDRGRGRAGAGPLPVSGDQRHEQGGVPRGRAERHRVVVIRGGRLAGRGRGVRPEPAAAGGDGVGDGPISVAR

SEQ ID NO: 18416 - protein, 247 aa, Triticum aestivum
  peptide (1)..(247): Ceres Seq. ID no. 14302495
  misc_feature (50)..(109): Pfam Name: Pfam Description:  AP2 domain
  misc_feature (31)..(247): NCBI GI NO: 38345793 NR Description: OSJNBa0085I10.10
  misc_feature (31)..(177): NCBI GI NO: 4099914 NR Description: ethylene-responsive element binding protein homolog
  misc_feature (50)..(247): NCBI GI NO: 15232526 NR Description: ethylene responsive element binding factor 4
  misc_feature (22)..(245): NCBI GI NO: 34908900 NR Description: ethylene-responsive element binding factor 3
  misc_feature (31)..(233): NCBI GI NO: 4099921 NR Description: EREBP-3 homolog [Stylosanthes hamata]
  misc_feature (50)..(227): NCBI GI NO: 2281635 NR Description: AP2 domain containing protein RAP2.5
  misc_feature (51)..(163): NCBI GI NO: 32488388 NR Description: OSJNBa0043A12.18
  misc_feature (26)..(247): NCBI GI NO: 4587373 NR Description: ethylene responsive element binding factor
  misc_feature (50)..(166): NCBI GI NO: 20340233 NR Description: ethylene responsive element binding factor 4-like
  misc_feature (42)..(204): NCBI GI NO: 33519168 NR Description: AP2 domain-containing protein AP29
PPAPTSQTIQPTPHRNNNRRARAEHGRTLAMAPKNALPVAVAAAADAGMEPRFRGVRKRPWGRYAAEIRDPARKARVWLGTFDTAEAAARAYDAAALHYRGPKAKTNFPVGTVAAFAHVPLPPPKALAVSPSSSTVESSSRDTPAAAPAAPAAAAPAPPPALDLSLAMPAMVAAQPFLFLDPRVAVTVAVAAPAPAPCRSAAISGMNKVASREEEQSDTGSSSSVVDASPAVGVGFDLNLPPPVEMA

SEQ ID NO: 18417 - protein, 217 aa, Triticum aestivum
  peptide (1)..(217): Ceres Seq. ID no. 14302496
  misc_feature (20)..(79): Pfam Name: Pfam Description:  AP2 domain
  misc_feature (1)..(217): NCBI GI NO: 38345793 NR Description: OSJNBa0085I10.10
  misc_feature (1)..(147): NCBI GI NO: 4099914 NR Description: ethylene-responsive element binding protein homolog
  misc_feature (20)..(217): NCBI GI NO: 15232526 NR Description: ethylene responsive element binding factor 4
  misc_feature (1)..(215): NCBI GI NO: 34908900 NR Description: ethylene-responsive element binding factor 3
  misc_feature (1)..(203): NCBI GI NO: 4099921 NR Description: EREBP-3 homolog [Stylosanthes hamata]
  misc_feature (20)..(197): NCBI GI NO: 2281635 NR Description: AP2 domain containing protein RAP2.5
  misc_feature (21)..(133): NCBI GI NO: 32488388 NR Description: OSJNBa0043A12.18
  misc_feature (1)..(217): NCBI GI NO: 4587373 NR Description: ethylene responsive element binding factor
  misc_feature (20)..(136): NCBI GI NO: 20340233 NR Description: ethylene responsive element binding factor 4-like
  misc_feature (12)..(174): NCBI GI NO: 33519168 NR Description: AP2 domain-containing protein AP29
MAPKNALPVAVAAAADAGMEPRFRGVRKRPWGRYAAEIRDPARKARVWLGTFDTAEAAARAYDAAALHYRGPKAKTNFPVGTVAAFAHVPLPPPKALAVSPSSSTVESSSRDTPAAAPAAPAAAAPAPPPALDLSLAMPAMVAAQPFLFLDPRVAVTVAVAAPAPAPCRSAAISGMNKVASREEEQSDTGSSSSVVDASPAVGVGFDLNLPPPVEMA

SEQ ID NO: 18418 - DNA, 908 bp, Triticum aestivum
  misc_feature (1)..(908): Ceres Seq. ID no. 13591023
attcaaccatggaagccatggcgtcatcgtcgtcggcggctaagcctaagcccagcaccaccctccgcgtggccgccttcagcggctccctccgcaagggctcgtggcacggcggcctcatccgcgcggccgaggagctgtgcgaggagtccatcccggagctgcaaatcgaccacgtcgacatctccggcctgcccatgtccaacccggacctggagacggacgacggcgacggcttcccgccggacgtcgaggcgttccgggacagggtccgcgccgccgactgctttctcttcgcctcgcccgagtacaactactccgtgaccgccacgctgaagaacgcgctggactgggcgtcgaggggcacgcacaagtgctgggcggacaaggccgcggccatcgtctccgcgggcggcagctgcggcgggggcagggcggcgttccacctccgccagatcggggtgttcctggacatccacttcatcaacaagccggagctccaggtcagggcgtacgaggacccgcccaagtttgacgccgacgggaacctcgtcgacgccgagacgagggagcggctcaagcaggtgctcctctcgctgcaggccttcgcgctccggctccagcactaactagcaggagcggaggactgagcgaagaagaaacttggcaccgtgcgattacctaaacgttaatctgcattttcctttgcgtgttggatatgtaggtacttttgactatttcactttcttttaggggttacttttcacttttgttgggcggaatacattttgctctgtattcgtgcaccagtctttatgtggttctgtaagaaagagtaagctgctgtaaacagtgtgtttgtaagaaatcacgcaagtaccctttttataaacgtttcgttaagtttt

SEQ ID NO: 18419 - protein, 208 aa, Triticum aestivum
  peptide (1)..(208): Ceres Seq. ID no. 13591024
  misc_feature (21)..(194): Pfam Name: Pfam Description:  NADPH-dependent FMN reductase
  misc_feature (12)..(207): NCBI GI NO: 34906648 NR Description: putative NADPH:quinone oxidoreductase
  misc_feature (21)..(207): NCBI GI NO: 34906652 NR Description: putative NADPH:quinone oxidoreductase
  misc_feature (21)..(207): NCBI GI NO: 15232856 NR Description: NADPH:quinone oxidoreductase (NQR)
  misc_feature (21)..(207): NCBI GI NO: 5002232 NR Description: NADPH:quinone oxidoreductase
  misc_feature (12)..(207): NCBI GI NO: 24745889 NR Description: NAD(P)H:quinone oxidoreductase [Solanum tuberosum]
  misc_feature (18)..(207): NCBI GI NO: 15596401 NR Description: conserved hypothetical protein
  misc_feature (18)..(208): NCBI GI NO: 40549313 NR Description: YieF [Salmonella enterica]
  misc_feature (18)..(207): NCBI GI NO: 26250454 NR Description: Hypothetical protein yieF
  misc_feature (18)..(207): NCBI GI NO: 16767134 NR Description: putative oxidoreductase
  misc_feature (18)..(207): NCBI GI NO: 15804310 NR Description: orf, hypothetical protein
STMEAMASSSSAAKPKPSTTLRVAAFSGSLRKGSWHGGLIRAAEELCEESIPELQIDHVDISGLPMSNPDLETDDGDGFPPDVEAFRDRVRAADCFLFASPEYNYSVTATLKNALDWASRGTHKCWADKAAAIVSAGGSCGGGRAAFHLRQIGVFLDIHFINKPELQVRAYEDPPKFDADGNLVDAETRERLKQVLLSLQAFALRLQH

SEQ ID NO: 18420 - protein, 206 aa, Triticum aestivum
  peptide (1)..(206): Ceres Seq. ID no. 13591025
  misc_feature (19)..(192): Pfam Name: Pfam Description:  NADPH-dependent FMN reductase
  misc_feature (10)..(205): NCBI GI NO: 34906648 NR Description: putative NADPH:quinone oxidoreductase
  misc_feature (19)..(205): NCBI GI NO: 34906652 NR Description: putative NADPH:quinone oxidoreductase
  misc_feature (19)..(205): NCBI GI NO: 15232856 NR Description: NADPH:quinone oxidoreductase (NQR)
  misc_feature (19)..(205): NCBI GI NO: 5002232 NR Description: NADPH:quinone oxidoreductase
  misc_feature (10)..(205): NCBI GI NO: 24745889 NR Description: NAD(P)H:quinone oxidoreductase [Solanum tuberosum]
  misc_feature (16)..(205): NCBI GI NO: 15596401 NR Description: conserved hypothetical protein
  misc_feature (16)..(206): NCBI GI NO: 40549313 NR Description: YieF [Salmonella enterica]
  misc_feature (16)..(205): NCBI GI NO: 26250454 NR Description: Hypothetical protein yieF
  misc_feature (16)..(205): NCBI GI NO: 16767134 NR Description: putative oxidoreductase
  misc_feature (16)..(205): NCBI GI NO: 15804310 NR Description: orf, hypothetical protein
MEAMASSSSAAKPKPSTTLRVAAFSGSLRKGSWHGGLIRAAEELCEESIPELQIDHVDISGLPMSNPDLETDDGDGFPPDVEAFRDRVRAADCFLFASPEYNYSVTATLKNALDWASRGTHKCWADKAAAIVSAGGSCGGGRAAFHLRQIGVFLDIHFINKPELQVRAYEDPPKFDADGNLVDAETRERLKQVLLSLQAFALRLQH

SEQ ID NO: 18421 - protein, 203 aa, Triticum aestivum
  peptide (1)..(203): Ceres Seq. ID no. 13591026
  misc_feature (16)..(189): Pfam Name: Pfam Description:  NADPH-dependent FMN reductase
  misc_feature (7)..(202): NCBI GI NO: 34906648 NR Description: putative NADPH:quinone oxidoreductase
  misc_feature (16)..(202): NCBI GI NO: 34906652 NR Description: putative NADPH:quinone oxidoreductase
  misc_feature (16)..(202): NCBI GI NO: 15232856 NR Description: NADPH:quinone oxidoreductase (NQR)
  misc_feature (16)..(202): NCBI GI NO: 5002232 NR Description: NADPH:quinone oxidoreductase
  misc_feature (7)..(202): NCBI GI NO: 24745889 NR Description: NAD(P)H:quinone oxidoreductase [Solanum tuberosum]
  misc_feature (13)..(202): NCBI GI NO: 15596401 NR Description: conserved hypothetical protein
  misc_feature (13)..(203): NCBI GI NO: 40549313 NR Description: YieF [Salmonella enterica]
  misc_feature (13)..(202): NCBI GI NO: 26250454 NR Description: Hypothetical protein yieF
  misc_feature (13)..(202): NCBI GI NO: 16767134 NR Description: putative oxidoreductase
  misc_feature (13)..(202): NCBI GI NO: 15804310 NR Description: orf, hypothetical protein
MASSSSAAKPKPSTTLRVAAFSGSLRKGSWHGGLIRAAEELCEESIPELQIDHVDISGLPMSNPDLETDDGDGFPPDVEAFRDRVRAADCFLFASPEYNYSVTATLKNALDWASRGTHKCWADKAAAIVSAGGSCGGGRAAFHLRQIGVFLDIHFINKPELQVRAYEDPPKFDADGNLVDAETRERLKQVLLSLQAFALRLQH

SEQ ID NO: 18422 - DNA, 748 bp, Triticum aestivum
  misc_feature (1)..(748): Ceres Seq. ID no. 12614157
atcttacctcgagcgaggcaaccggcagcagcctccgctgccagagtgccggtgggcgcgcgatgcaccagctttccctggccgcgcggccgccggcgccgcagtctcagtgttctcggagtaggacggcgtgccgctgtagcctgaagcaggcgcctgcctctctcgccgtggccgcaagacggtgcgctgccgcgccgctcttggccgcgtcgctcctcctcgccgccgccgccgcgtctcctggcattcctgccggtactccaccagcgtttgcccaatcccaaggcgcggcgctgttccggaaagcgtgcatcgggtgccacgacacgggagggaacatcctacagccgggcgccaccctctccatgaaggatcttgagaggaacggagttgccacggaggaagagatatacaacatcacttactacgggaagggaaggatgccgggttatggagagcaatgcacgccgagagggcagtgtaccttcggcccccggctgcctgaagaggatatcaagatgcttgcagcatttgtcaaatcgcaagcagagaacgggtggccaaagatcgacggtgatgtcgagtgatccgattagggttgaacacgaggtgctggctccatttcgcgaggaggctgaaaccataactgttgatgaggttaaattttttttttttttttgactcgcaaactgtagaacaattgttctaagtaattttatattaataaaatgaaaatagttattcg

SEQ ID NO: 18423 - protein, 195 aa, Triticum aestivum
  peptide (1)..(195): Ceres Seq. ID no. 12614158
  misc_feature (21)..(193): NCBI GI NO: 34899810 NR Description: putative c6 type cytochrome
  misc_feature (65)..(193): NCBI GI NO: 18422509 NR Description: expressed protein; protein id: At5g45040
  misc_feature (95)..(193): NCBI GI NO: 10177496 NR Description: gene_id:K21C13.23~unknown protein
  misc_feature (123)..(193): NCBI GI NO: 34393286 NR Description: cytochrome C6, chloroplast precursor-like protein
  misc_feature (83)..(187): NCBI GI NO: 22652035 NR Description: putative cytochrome c6-2
  misc_feature (88)..(187): NCBI GI NO: 23040173 NR Description: hypothetical protein
  misc_feature (69)..(187): NCBI GI NO: 33866050 NR Description: cytochrome C6
  misc_feature (84)..(187): NCBI GI NO: 33862735 NR Description: Cytochrome c, class IC:Cytochrome c, class I
  misc_feature (87)..(187): NCBI GI NO: 17227657 NR Description: cytochrome c6 [Nostoc sp. PCC 7120]
  misc_feature (96)..(189): NCBI GI NO: 117921 NR Description: Cytochrome C6
LTSSEATGSSLRCQSAGGRAMHQLSLAARPPAPQSQCSRSRTACRCSLKQAPASLAVAARRCAAAPLLAASLLLAAAAASPGIPAGTPPAFAQSQGAALFRKACIGCHDTGGNILQPGATLSMKDLERNGVATEEEIYNITYYGKGRMPGYGEQCTPRGQCTFGPRLPEEDIKMLAAFVKSQAENGWPKIDGDVE

SEQ ID NO: 18424 - protein, 175 aa, Triticum aestivum
  peptide (1)..(175): Ceres Seq. ID no. 12614159
  misc_feature (1)..(173): NCBI GI NO: 34899810 NR Description: putative c6 type cytochrome
  misc_feature (45)..(173): NCBI GI NO: 18422509 NR Description: expressed protein; protein id: At5g45040
  misc_feature (75)..(173): NCBI GI NO: 10177496 NR Description: gene_id:K21C13.23~unknown protein
  misc_feature (103)..(173): NCBI GI NO: 34393286 NR Description: cytochrome C6, chloroplast precursor-like protein
  misc_feature (63)..(167): NCBI GI NO: 22652035 NR Description: putative cytochrome c6-2
  misc_feature (68)..(167): NCBI GI NO: 23040173 NR Description: hypothetical protein
  misc_feature (49)..(167): NCBI GI NO: 33866050 NR Description: cytochrome C6
  misc_feature (64)..(167): NCBI GI NO: 33862735 NR Description: Cytochrome c, class IC:Cytochrome c, class I
  misc_feature (67)..(167): NCBI GI NO: 17227657 NR Description: cytochrome c6 [Nostoc sp. PCC 7120]
  misc_feature (76)..(169): NCBI GI NO: 117921 NR Description: Cytochrome C6
MHQLSLAARPPAPQSQCSRSRTACRCSLKQAPASLAVAARRCAAAPLLAASLLLAAAAASPGIPAGTPPAFAQSQGAALFRKACIGCHDTGGNILQPGATLSMKDLERNGVATEEEIYNITYYGKGRMPGYGEQCTPRGQCTFGPRLPEEDIKMLAAFVKSQAENGWPKIDGDVE

SEQ ID NO: 18425 - DNA, 596 bp, Triticum aestivum
  misc_feature (1)..(596): Ceres Seq. ID no. 13590767
gaacatcctaatcgaaaaactcaagccagcaagcaagaagcacacaggaagctcctagccaacaccaatcaaagcctccatccaatcccaagcaacctcgaggatgtcttgctgcggaggaaactgcggctgcggcagcgcctgcaagtgcggcaacggctgcggcggctgcaacatgtacccggaggttgaggccgccggcgccaccctcctcgtctccgccaccgccacccacaaggcgagctcgggcgggatggagatggcggcggagaacggcggctgcggctgcacccagtgcaagtgcggcaccagctgcggctgctcctgctgcagctgctagatctatcatcggtcatgcatgcaccgcgcgcatcatatctatgatctatctacaatctacttaccatgtaacgccacctgatcgagggtctttgtatgtatgtaagcacctgccagcatgagcagagcaggtgcactgccatgcatgtaaaccgacccctaaataaaatctcccgtggtttaaccagaaaaaaaaaaaaaaaaaagcttatcgataccgtcgacctcgagggggggmccggyacccarttcgccct

SEQ ID NO: 18426 - protein, 78 aa, Triticum aestivum
  peptide (1)..(78): Ceres Seq. ID no. 15221004
  misc_feature (1)..(78): Pfam Name: Pfam Description:  Metallothionein
  misc_feature (1)..(78): NCBI GI NO: 23954355 NR Description: metallothioneine type2
  misc_feature (1)..(78): NCBI GI NO: 2497904 NR Description: Metallothionein-like protein type 2
  misc_feature (1)..(78): NCBI GI NO: 7441818 NR Description: metallothionein-like protein - rice
  misc_feature (1)..(78): NCBI GI NO: 7441819 NR Description: metallothionein-like protein - rice
  misc_feature (1)..(69): NCBI GI NO: 100596 NR Description: metallothionein-like protein - barley
  misc_feature (1)..(78): NCBI GI NO: 5853156 NR Description: metallothionein-like protein [Ipomoea batatas]
  misc_feature (1)..(78): NCBI GI NO: 2407331 NR Description: metallothionein-1 like protein [Oenanthe javanica]
  misc_feature (1)..(78): NCBI GI NO: 541943 NR Description: metallothionein - soybean
  misc_feature (1)..(78): NCBI GI NO: 3694984 NR Description: metallothionein-1-like protein
  misc_feature (1)..(78): NCBI GI NO: 2497897 NR Description: Metallothionein-like protein type 2 B
MSCCGGNCGCGSACKCGNGCGGCNMYPEVEAAGATLLVSATATHKASSGGMEMAAENGGCGCTQCKCGTSCGCSCCSC

SEQ ID NO: 18427 - protein, 63 aa, Triticum aestivum
  peptide (1)..(63): Ceres Seq. ID no. 15221005
EHPNRKTQASKQEAHRKLLANTNQSLHPIPSNLEDVLLRRKLRLRQRLQVRQRLRRLQHVPGG

SEQ ID NO: 18428 - protein, 54 aa, Triticum aestivum
  peptide (1)..(54): Ceres Seq. ID no. 15221006
  misc_feature (1)..(54): Pfam Name: Pfam Description:  Metallothionein
  misc_feature (1)..(54): NCBI GI NO: 23954355 NR Description: metallothioneine type2
  misc_feature (1)..(54): NCBI GI NO: 2497904 NR Description: Metallothionein-like protein type 2
  misc_feature (1)..(54): NCBI GI NO: 7441818 NR Description: metallothionein-like protein - rice
  misc_feature (1)..(54): NCBI GI NO: 7441819 NR Description: metallothionein-like protein - rice
  misc_feature (1)..(45): NCBI GI NO: 100596 NR Description: metallothionein-like protein - barley
  misc_feature (1)..(54): NCBI GI NO: 5853156 NR Description: metallothionein-like protein [Ipomoea batatas]
  misc_feature (1)..(54): NCBI GI NO: 2407331 NR Description: metallothionein-1 like protein [Oenanthe javanica]
  misc_feature (1)..(54): NCBI GI NO: 541943 NR Description: metallothionein - soybean
  misc_feature (1)..(54): NCBI GI NO: 3694984 NR Description: metallothionein-1-like protein
  misc_feature (1)..(54): NCBI GI NO: 2497897 NR Description: Metallothionein-like protein type 2 B
MYPEVEAAGATLLVSATATHKASSGGMEMAAENGGCGCTQCKCGTSCGCSCCSC

SEQ ID NO: 18429 - DNA, 1060 bp, Triticum aestivum
  misc_feature (1)..(1060): Ceres Seq. ID no. 13596269
aaattcgatccgtaatagcgttttttcgcgtactcccgagaccccaatcttttccccctctcgtcgcatcggcggcggcgacaggacatcgggcggcggcggcggcggcggcggctggacagccgcagaacgaaggaagggctcccctgtagcgccgttcctcgtcccgatccgcacggatccgccccacctaagggccccgtgcacaaggagcaaagatgataaaccttttcaagatcaaggggcagaagaacgaagaggcagccaactcgaaaggggggcctcccgtcaagaagcaaagtcctggggaattacgtctccataaagatattgctgaacttaaccttccaaagacaactaaaatttcctttccaaatggaaaggatgatctcatgaactttgaagccactctacgacctgatgaaggatactacgtaggtgggacatttactttcaccttccaagtatctccttcctaccctcacgaggctctgaaggtcaagtgcaagaccaaggtttaccatcctaatattgacctagaaggaaatgtctgcctgaacattctgcgtgaagactggaagcctgtcttgaacatcaacaccataatatatggcttaaaccttcttttctcacaacccaatgacgaggaccccttgaatcatgaagccgcggccgtcctccgagacaacccacagaagttccagagaaatgttcaaacggcgatgtcgggaggctatgttgataacacccatttcccaaggtgcaagtaaggtctgctatgtggagctctggttccgactcttgcccagttgccctgaatgcccttgcacagtctgaaggatgtggcatgtacccaggaaatgtatcgcatttgtgttagacgtgactgttattatgcttgtttggtggatgtaccggagtcatgcatgttgaagaaacatgctaagcagaaacaaaaacctcgcctgttattcagctgaaaagttggcggaagtgttccaagcgcagcaatcatatgagcatataactgaattatgaaaaataaaagagtctctgggcc

SEQ ID NO: 18430 - protein, 183 aa, Triticum aestivum
  peptide (1)..(183): Ceres Seq. ID no. 13596270
  misc_feature (1)..(182): NCBI GI NO: 40253382 NR Description: putative RUB1 conjugating enzyme
  misc_feature (1)..(182): NCBI GI NO: 37531910 NR Description: putative ubiquitin-conjugating enzyme
  misc_feature (1)..(182): NCBI GI NO: 6635457 NR Description: RUB1 conjugating enzyme [Arabidopsis thaliana]
  misc_feature (1)..(182): NCBI GI NO: 26000688 NR Description: RUB1 conjugating enzyme [Olea europaea]
  misc_feature (1)..(182): NCBI GI NO: 18398792 NR Description: RUB1-conjugating enzyme, putative
  misc_feature (1)..(182): NCBI GI NO: 25407764 NR Description: ubiquitin-protein ligase-like protein
  misc_feature (30)..(182): NCBI GI NO: 10946511 NR Description: RUB1 conjugating enzyme [Lycopersicon esculentum]
  misc_feature (1)..(182): NCBI GI NO: 38174699 NR Description: Unknown (protein for MGC:75750)
  misc_feature (1)..(182): NCBI GI NO: 4507791 NR Description: ubiquitin-conjugating enzyme E2M
  misc_feature (1)..(182): NCBI GI NO: 30585323 NR Description: Homo sapiens ubiquitin-conjugating enzyme E2M
MINLFKIKGQKNEEAANSKGGPPVKKQSPGELRLHKDIAELNLPKTTKISFPNGKDDLMNFEATLRPDEGYYVGGTFTFTFQVSPSYPHEALKVKCKTKVYHPNIDLEGNVCLNILREDWKPVLNINTIIYGLNLLFSQPNDEDPLNHEAAAVLRDNPQKFQRNVQTAMSGGYVDNTHFPRCK

SEQ ID NO: 18431 - protein, 125 aa, Triticum aestivum
  peptide (1)..(125): Ceres Seq. ID no. 13596271
  misc_feature (1)..(124): NCBI GI NO: 40253382 NR Description: putative RUB1 conjugating enzyme
  misc_feature (1)..(124): NCBI GI NO: 37531910 NR Description: putative ubiquitin-conjugating enzyme
  misc_feature (1)..(124): NCBI GI NO: 6635457 NR Description: RUB1 conjugating enzyme [Arabidopsis thaliana]
  misc_feature (1)..(124): NCBI GI NO: 26000688 NR Description: RUB1 conjugating enzyme [Olea europaea]
  misc_feature (1)..(124): NCBI GI NO: 18398792 NR Description: RUB1-conjugating enzyme, putative
  misc_feature (1)..(124): NCBI GI NO: 25407764 NR Description: ubiquitin-protein ligase-like protein
  misc_feature (1)..(124): NCBI GI NO: 10946511 NR Description: RUB1 conjugating enzyme [Lycopersicon esculentum]
  misc_feature (1)..(124): NCBI GI NO: 38174699 NR Description: Unknown (protein for MGC:75750)
  misc_feature (1)..(124): NCBI GI NO: 4507791 NR Description: ubiquitin-conjugating enzyme E2M
  misc_feature (1)..(124): NCBI GI NO: 30585323 NR Description: Homo sapiens ubiquitin-conjugating enzyme E2M
MNFEATLRPDEGYYVGGTFTFTFQVSPSYPHEALKVKCKTKVYHPNIDLEGNVCLNILREDWKPVLNINTIIYGLNLLFSQPNDEDPLNHEAAAVLRDNPQKFQRNVQTAMSGGYVDNTHFPRCK

SEQ ID NO: 18432 - protein, 107 aa, Triticum aestivum
  peptide (1)..(107): Ceres Seq. ID no. 13596272
NSIRNSVFSRTPETPIFSPSRRIGGGDRTSGGGGGGGGWTAAERRKGSPVAPFLVPIRTDPPHLRAPCTRSKDDKPFQDQGAEERRGSQLERGASRQEAKSWGITSP

SEQ ID NO: 18433 - DNA, 1613 bp, Triticum aestivum
  misc_feature (1)..(1613): Ceres Seq. ID no. 13596321
atgatcgcctatttaagcttctcctgttctcgcccaccctgccccatcccattcccactctctcccagcagcggcggcagcggcacgtcgtcgtcctcctccccctcgccgtccgcgcgtccgtccaacagaggctgggaaccttaaagcggaacagggttcatggagggtggaggcgcaagaaatgtttctgcagcggcagcacagacaaaggaaagtgcggatgacggctcctgcaagccactgcctccttgctgtgtcaaggcgcaggctgctgtggcggaatctgaggccaagtgccacgctaccgtggtgtctgggtggttcacaggaacccggtcacgctctggcaaaccaagcaaagcgcagtacttcaacaatccaatgtggcctggggaggctcattcgttgaaagtagagaagattttgtaccaggggaaatcgccataccaagaagttttagtatttgagtcttcaacctatgggaatgtccttgtgcttgatggaattgttcagctcactgacaaggatgaatgtgcataccaggaaatggttactcaccttgcactgtgctcaattccatctcctaaaaatgttttggttgtcggaggtggtgatggtggtgtactacgagaaatagccaagcatgattcagtggagagtatagacatatgtgagattgatcagctagttattgatgtttgtaaagattttttcccacgtctatatgttggatataaagaccctcgtgtcaaacttcatgttggtgatgctgtggagttcttgagaaactctccagaaggaaaatatgatgccattattgttgattcatcagatccaattgggccagctcaggaacttgtggagaagcccttttttcagacaattgctagggctttaaagcctggcggtgttctttctaatctagctgaaagtatgtggctgcacacacatctaatccaggatatgctttctatctgtcgagaggtattcaagggtggcgtgcactatgcctgggcaagtgttccaacatatcctagtggtgtcattggatttttgctatgtgcgaaggaaggtccaccggtggacttcttaactcctgtgaatccaatcgagaaaattgaaggagctactaaagatggacgagagatgagattttacaattcagagattcataaggctgcttttattctgccaacgtttgtaaagagggagctggaggcatataactcttccactgaaaaggagagaccggagaagccaaccgcaaaaccagtgaagatgaaggtaatgcgggacagcgctattaccgcttcctagaccgcgggcggacacctgtgtgctatccatcttccccgatgagacccgccgcacctgtatatccacgttccacgcctgtcctttgctaccaaattttattcaatagttacatgattgtgtggtgctctagcatagttgcgtgacacaactgagggtgtaatatcactaaatgtgtatggtgtgttgcagttggtgaataaaggagcaaacagaaggggatgtgtgatgtgtttcccttatctgtaacatgtatgatgtttcattgttgcgtgagttctcgtggtgcaagtacc

SEQ ID NO: 18434 - protein, 385 aa, Triticum aestivum
  peptide (1)..(385): Ceres Seq. ID no. 13596322
  misc_feature (53)..(310): Pfam Name: Pfam Description:  Spermine/spermidine synthase
  misc_feature (1)..(385): NCBI GI NO: 33354149 NR Description: aminopropyl transferase
  misc_feature (1)..(358): NCBI GI NO: 18423473 NR Description: spermidine synthase [Arabidopsis thaliana]
  misc_feature (1)..(358): NCBI GI NO: 15983394 NR Description: AT5g53120/MFH8_5 [Arabidopsis thaliana]
  misc_feature (17)..(358): NCBI GI NO: 21592832 NR Description: spermidine synthase [Arabidopsis thaliana]
  misc_feature (22)..(358): NCBI GI NO: 33150481 NR Description: putative spermine synthase
  misc_feature (1)..(358): NCBI GI NO: 9757993 NR Description: spermidine synthase [Arabidopsis thaliana]
  misc_feature (73)..(354): NCBI GI NO: 6094330 NR Description: Spermidine synthase 2
  misc_feature (73)..(354): NCBI GI NO: 6094335 NR Description: Spermidine synthase
  misc_feature (73)..(354): NCBI GI NO: 6094327 NR Description: Spermidine synthase 1
  misc_feature (41)..(353): NCBI GI NO: 6094329 NR Description: Spermidine synthase 2
MEGGGARNVSAAAAQTKESADDGSCKPLPPCCVKAQAAVAESEAKCHATVVSGWFTGTRSRSGKPSKAQYFNNPMWPGEAHSLKVEKILYQGKSPYQEVLVFESSTYGNVLVLDGIVQLTDKDECAYQEMVTHLALCSIPSPKNVLVVGGGDGGVLREIAKHDSVESIDICEIDQLVIDVCKDFFPRLYVGYKDPRVKLHVGDAVEFLRNSPEGKYDAIIVDSSDPIGPAQELVEKPFFQTIARALKPGGVLSNLAESMWLHTHLIQDMLSICREVFKGGVHYAWASVPTYPSGVIGFLLCAKEGPPVDFLTPVNPIEKIEGATKDGREMRFYNSEIHKAAFILPTFVKRELEAYNSSTEKERPEKPTAKPVKMKVMRDSAITAS

SEQ ID NO: 18435 - protein, 311 aa, Triticum aestivum
  peptide (1)..(311): Ceres Seq. ID no. 13596323
  misc_feature (1)..(236): Pfam Name: Pfam Description:  Spermine/spermidine synthase
  misc_feature (1)..(311): NCBI GI NO: 33354149 NR Description: aminopropyl transferase
  misc_feature (1)..(284): NCBI GI NO: 18423473 NR Description: spermidine synthase [Arabidopsis thaliana]
  misc_feature (1)..(284): NCBI GI NO: 15983394 NR Description: AT5g53120/MFH8_5 [Arabidopsis thaliana]
  misc_feature (1)..(284): NCBI GI NO: 21592832 NR Description: spermidine synthase [Arabidopsis thaliana]
  misc_feature (1)..(284): NCBI GI NO: 33150481 NR Description: putative spermine synthase
  misc_feature (1)..(284): NCBI GI NO: 9757993 NR Description: spermidine synthase [Arabidopsis thaliana]
  misc_feature (1)..(280): NCBI GI NO: 6094330 NR Description: Spermidine synthase 2
  misc_feature (1)..(280): NCBI GI NO: 6094335 NR Description: Spermidine synthase
  misc_feature (1)..(280): NCBI GI NO: 6094327 NR Description: Spermidine synthase 1
  misc_feature (1)..(279): NCBI GI NO: 6094329 NR Description: Spermidine synthase 2
MWPGEAHSLKVEKILYQGKSPYQEVLVFESSTYGNVLVLDGIVQLTDKDECAYQEMVTHLALCSIPSPKNVLVVGGGDGGVLREIAKHDSVESIDICEIDQLVIDVCKDFFPRLYVGYKDPRVKLHVGDAVEFLRNSPEGKYDAIIVDSSDPIGPAQELVEKPFFQTIARALKPGGVLSNLAESMWLHTHLIQDMLSICREVFKGGVHYAWASVPTYPSGVIGFLLCAKEGPPVDFLTPVNPIEKIEGATKDGREMRFYNSEIHKAAFILPTFVKRELEAYNSSTEKERPEKPTAKPVKMKVMRDSAITAS

SEQ ID NO: 18436 - protein, 256 aa, Triticum aestivum
  peptide (1)..(256): Ceres Seq. ID no. 13596324
  misc_feature (1)..(181): Pfam Name: Pfam Description:  Spermine/spermidine synthase
  misc_feature (1)..(256): NCBI GI NO: 33354149 NR Description: aminopropyl transferase
  misc_feature (1)..(229): NCBI GI NO: 18423473 NR Description: spermidine synthase [Arabidopsis thaliana]
  misc_feature (1)..(229): NCBI GI NO: 15983394 NR Description: AT5g53120/MFH8_5 [Arabidopsis thaliana]
  misc_feature (1)..(229): NCBI GI NO: 21592832 NR Description: spermidine synthase [Arabidopsis thaliana]
  misc_feature (1)..(229): NCBI GI NO: 33150481 NR Description: putative spermine synthase
  misc_feature (1)..(229): NCBI GI NO: 9757993 NR Description: spermidine synthase [Arabidopsis thaliana]
  misc_feature (1)..(225): NCBI GI NO: 6094330 NR Description: Spermidine synthase 2
  misc_feature (1)..(225): NCBI GI NO: 6094335 NR Description: Spermidine synthase
  misc_feature (1)..(225): NCBI GI NO: 6094327 NR Description: Spermidine synthase 1
  misc_feature (1)..(224): NCBI GI NO: 6094329 NR Description: Spermidine synthase 2
MVTHLALCSIPSPKNVLVVGGGDGGVLREIAKHDSVESIDICEIDQLVIDVCKDFFPRLYVGYKDPRVKLHVGDAVEFLRNSPEGKYDAIIVDSSDPIGPAQELVEKPFFQTIARALKPGGVLSNLAESMWLHTHLIQDMLSICREVFKGGVHYAWASVPTYPSGVIGFLLCAKEGPPVDFLTPVNPIEKIEGATKDGREMRFYNSEIHKAAFILPTFVKRELEAYNSSTEKERPEKPTAKPVKMKVMRDSAITAS

SEQ ID NO: 18437 - DNA, 674 bp, Triticum aestivum
  misc_feature (1)..(674): Ceres Seq. ID no. 13654360
tttttttggttggttgatgcaaagttgcctagctacgcttgcagattaactatcaagccccatggtcgttgtcgtctacttataagcatccattgctggaccgtcagaccttcaagtagctaggagctccagttggtttgcttgctttgattggcgatgaacggtgcggcgctagacaacgtgatccggcggctgctggaggtgcggcgggggcggccggggaagcagcaagtgcagcaggtgcagctgggcgagggggagatccggcagctctgcgccgccgccaaggacgtcttcatgcgccagcccaacctgctccagctcgacgcccccatcaagatcgccggtgacatccacggtcagtacacggacctgctgcggctgtttgagctgggcggcttcccgccgcagcacaagtacctgttcctgggcgactacgtggaccgcggcaagcagagcatcgagaccatctgcctgctgctcgcctacaagctccggtacccggagcacttcttcctcctccgcggcaaccacgagtgcgcctccgtcaaccgcgtctacggcttctacgacgagtgcaagcgccgctactccgtccgtctctggcgccacttctccgactgcttcaactgcatgcccgtcgccgccctcgtcgagtcgcgcatcctctgcat

SEQ ID NO: 18438 - protein, 172 aa, Triticum aestivum
  peptide (1)..(172): Ceres Seq. ID no. 13654361
  misc_feature (58)..(171): Pfam Name: Pfam Description:  Calcineurin-like phosphoesterase
  misc_feature (1)..(171): NCBI GI NO: 15227080 NR Description: phosphoprotein phosphatase-type 1 catalytic subunit
  misc_feature (1)..(171): NCBI GI NO: 25289017 NR Description: phosphoprotein phosphatase (EC 3
  misc_feature (1)..(171): NCBI GI NO: 5053113 NR Description: phosphatase PP1 [Chlamydomonas reinhardtii]
  misc_feature (1)..(171): NCBI GI NO: 1346753 NR Description: SERINE/THREONINE PROTEIN PHOSPHATASE PP1 ISOZYME 2
  misc_feature (1)..(171): NCBI GI NO: 15225576 NR Description: phosphoprotein phosphatase type 1 catalytic subunit
  misc_feature (1)..(171): NCBI GI NO: 130709 NR Description: SERINE/THREONINE PROTEIN PHOSPHATASE PP1
  misc_feature (1)..(171): NCBI GI NO: 7435133 NR Description: phosphoprotein phosphatase (EC 3
  misc_feature (1)..(171): NCBI GI NO: 1346762 NR Description: SERINE/THREONINE PROTEIN PHOSPHATASE PP1
  misc_feature (64)..(171): NCBI GI NO: 34902038 NR Description: putative SERINE/THREONINE PROTEIN PHOSPHATASE PP1
  misc_feature (1)..(64): NCBI GI NO: 34902038 NR Description: putative SERINE/THREONINE PROTEIN PHOSPHATASE PP1
MNGAALDNVIRRLLEVRRGRPGKQQVQQVQLGEGEIRQLCAAAKDVFMRQPNLLQLDAPIKIAGDIHGQYTDLLRLFELGGFPPQHKYLFLGDYVDRGKQSIETICLLLAYKLRYPEHFFLLRGNHECASVNRVYGFYDECKRRYSVRLWRHFSDCFNCMPVAALVESRILC

SEQ ID NO: 18439 - protein, 125 aa, Triticum aestivum
  peptide (1)..(125): Ceres Seq. ID no. 13654362
  misc_feature (11)..(124): Pfam Name: Pfam Description:  Calcineurin-like phosphoesterase
  misc_feature (1)..(124): NCBI GI NO: 15227080 NR Description: phosphoprotein phosphatase-type 1 catalytic subunit
  misc_feature (1)..(124): NCBI GI NO: 25289017 NR Description: phosphoprotein phosphatase (EC 3
  misc_feature (1)..(124): NCBI GI NO: 5053113 NR Description: phosphatase PP1 [Chlamydomonas reinhardtii]
  misc_feature (1)..(124): NCBI GI NO: 1346753 NR Description: SERINE/THREONINE PROTEIN PHOSPHATASE PP1 ISOZYME 2
  misc_feature (1)..(124): NCBI GI NO: 15225576 NR Description: phosphoprotein phosphatase type 1 catalytic subunit
  misc_feature (1)..(124): NCBI GI NO: 130709 NR Description: SERINE/THREONINE PROTEIN PHOSPHATASE PP1
  misc_feature (1)..(124): NCBI GI NO: 7435133 NR Description: phosphoprotein phosphatase (EC 3
  misc_feature (1)..(124): NCBI GI NO: 1346762 NR Description: SERINE/THREONINE PROTEIN PHOSPHATASE PP1
  misc_feature (17)..(124): NCBI GI NO: 34902038 NR Description: putative SERINE/THREONINE PROTEIN PHOSPHATASE PP1
  misc_feature (1)..(17): NCBI GI NO: 34902038 NR Description: putative SERINE/THREONINE PROTEIN PHOSPHATASE PP1
MRQPNLLQLDAPIKIAGDIHGQYTDLLRLFELGGFPPQHKYLFLGDYVDRGKQSIETICLLLAYKLRYPEHFFLLRGNHECASVNRVYGFYDECKRRYSVRLWRHFSDCFNCMPVAALVESRILC

SEQ ID NO: 18440 - DNA, 1217 bp, Triticum aestivum
  misc_feature (1)..(1217): Ceres Seq. ID no. 12613701
aactgggaccaatgtgggcggttgtataaacgagtaggcgtgccgcacagagcaagcaagaggccgcgcgcagcacagtgccgcagccgctgcaagacgcaaagagagagccaagccttttccctttcggaaaggacagacagagtcgaggtaccgcggctagggatggggttcctcccgctgcttcaggtcgtcctcctggccgccgcggcggcggcgagggctccggcggcgcgggcgtggggcgaggagggccacttcatgacctgcaagatcgccgagggttttttgacgagcgaggcgtcggcggcggtgaaggggctcctgccggagtgggccaacggcgagctcgcggcggcgtgctcgtggccggacgccgtgcggcgccaaatgccgtggtccagctccctgcacttcgccgacacccccggcgactgcaagttcagctacgccagggactgccacggcacgaaaggggagaaggacatgtgcgtggtgggaggcatcaacaactacactgccgcgctccaagactcatcaagcccgtataatcggacggagagcctgctgttcctgtcgcacttcctgggcgacatccaccagcccatgcactgcggccgcaccgccgacctcggcggcaacaccatcgtcgtcacttggtacaacacgaccaagaccaaccttcacaaggtgtgggatgagaaggtcatcgaaacggccatgaacaggttctacaaggacgaccgaagcgccatgatccaggccatcaagctcaaccttaccaacgagtggtctaaagaagagaatcagtgggcggcgtgctatactcgaaccacaacctgtgctgacaagtacgcagaggagagtgcggagctgtcgtgccccgcgtacgtgggcgctgagcaaggctccaacttggaagatgagtacttcttctcggcgctcccggtggttcagaagaggattgcccagggaggcgtcaggctgggtgcgatcctcaaccagatcttcagtgggaagaacaacagcagcattcagagcagctaaggtccattagacgaaactaacgaatgagattgtgcaaggggttagcccaaacgttatgaaggagaataaggttatcatgttcgtctgaccatgttgacttcatactatgtaagtgagttggtcagtgcgtacttctgtaatcgaatccagtatttcctgaatgtgatgat

SEQ ID NO: 18441 - protein, 348 aa, Triticum aestivum
  peptide (1)..(348): Ceres Seq. ID no. 12613702
  misc_feature (59)..(348): NCBI GI NO: 38345900 NR Description: OSJNBa0060D06.10
  misc_feature (56)..(347): NCBI GI NO: 13274190 NR Description: putative nuclease [Hordeum vulgare subsp. vulgare]
  misc_feature (56)..(347): NCBI GI NO: 5672692 NR Description: nuclease I [Hordeum vulgare]
  misc_feature (56)..(347): NCBI GI NO: 7489371 NR Description: endonuclease (EC 3.1.30.-) precursor - barley
  misc_feature (52)..(337): NCBI GI NO: 9558456 NR Description: unnamed protein product
  misc_feature (52)..(337): NCBI GI NO: 34895514 NR Description: putative bifunctional nuclease
  misc_feature (76)..(337): NCBI GI NO: 4099835 NR Description: bifunctional nuclease [Zinnia elegans]
  misc_feature (78)..(340): NCBI GI NO: 22328857 NR Description: expressed protein; protein id: At4g21585.1
  misc_feature (78)..(340): NCBI GI NO: 18415729 NR Description: endonuclease, putative; protein id: At4g21600
  misc_feature (62)..(337): NCBI GI NO: 4099833 NR Description: bifunctional nuclease [Zinnia elegans]
NWDQCGRLYKRVGVPHRASKRPRAAQCRSRCKTQRESQAFSLSERTDRVEVPRLGMGFLPLLQVVLLAAAAAARAPAARAWGEEGHFMTCKIAEGFLTSEASAAVKGLLPEWANGELAAACSWPDAVRRQMPWSSSLHFADTPGDCKFSYARDCHGTKGEKDMCVVGGINNYTAALQDSSSPYNRTESLLFLSHFLGDIHQPMHCGRTADLGGNTIVVTWYNTTKTNLHKVWDEKVIETAMNRFYKDDRSAMIQAIKLNLTNEWSKEENQWAACYTRTTTCADKYAEESAELSCPAYVGAEQGSNLEDEYFFSALPVVQKRIAQGGVRLGAILNQIFSGKNNSSIQSS

SEQ ID NO: 18442 - protein, 293 aa, Triticum aestivum
  peptide (1)..(293): Ceres Seq. ID no. 12613703
  misc_feature (4)..(293): NCBI GI NO: 38345900 NR Description: OSJNBa0060D06.10
  misc_feature (1)..(292): NCBI GI NO: 13274190 NR Description: putative nuclease [Hordeum vulgare subsp. vulgare]
  misc_feature (1)..(292): NCBI GI NO: 5672692 NR Description: nuclease I [Hordeum vulgare]
  misc_feature (1)..(292): NCBI GI NO: 7489371 NR Description: endonuclease (EC 3.1.30.-) precursor - barley
  misc_feature (1)..(282): NCBI GI NO: 9558456 NR Description: unnamed protein product
  misc_feature (1)..(282): NCBI GI NO: 34895514 NR Description: putative bifunctional nuclease
  misc_feature (21)..(282): NCBI GI NO: 4099835 NR Description: bifunctional nuclease [Zinnia elegans]
  misc_feature (23)..(285): NCBI GI NO: 22328857 NR Description: expressed protein; protein id: At4g21585.1
  misc_feature (23)..(285): NCBI GI NO: 18415729 NR Description: endonuclease, putative; protein id: At4g21600
  misc_feature (7)..(282): NCBI GI NO: 4099833 NR Description: bifunctional nuclease [Zinnia elegans]
MGFLPLLQVVLLAAAAAARAPAARAWGEEGHFMTCKIAEGFLTSEASAAVKGLLPEWANGELAAACSWPDAVRRQMPWSSSLHFADTPGDCKFSYARDCHGTKGEKDMCVVGGINNYTAALQDSSSPYNRTESLLFLSHFLGDIHQPMHCGRTADLGGNTIVVTWYNTTKTNLHKVWDEKVIETAMNRFYKDDRSAMIQAIKLNLTNEWSKEENQWAACYTRTTTCADKYAEESAELSCPAYVGAEQGSNLEDEYFFSALPVVQKRIAQGGVRLGAILNQIFSGKNNSSIQSS

SEQ ID NO: 18443 - protein, 261 aa, Triticum aestivum
  peptide (1)..(261): Ceres Seq. ID no. 12613704
  misc_feature (1)..(261): NCBI GI NO: 38345900 NR Description: OSJNBa0060D06.10
  misc_feature (1)..(260): NCBI GI NO: 13274190 NR Description: putative nuclease [Hordeum vulgare subsp. vulgare]
  misc_feature (1)..(260): NCBI GI NO: 5672692 NR Description: nuclease I [Hordeum vulgare]
  misc_feature (1)..(260): NCBI GI NO: 7489371 NR Description: endonuclease (EC 3.1.30.-) precursor - barley
  misc_feature (1)..(250): NCBI GI NO: 9558456 NR Description: unnamed protein product
  misc_feature (1)..(250): NCBI GI NO: 34895514 NR Description: putative bifunctional nuclease
  misc_feature (1)..(250): NCBI GI NO: 4099835 NR Description: bifunctional nuclease [Zinnia elegans]
  misc_feature (1)..(253): NCBI GI NO: 22328857 NR Description: expressed protein; protein id: At4g21585.1
  misc_feature (1)..(253): NCBI GI NO: 18415729 NR Description: endonuclease, putative; protein id: At4g21600
  misc_feature (1)..(250): NCBI GI NO: 4099833 NR Description: bifunctional nuclease [Zinnia elegans]
MTCKIAEGFLTSEASAAVKGLLPEWANGELAAACSWPDAVRRQMPWSSSLHFADTPGDCKFSYARDCHGTKGEKDMCVVGGINNYTAALQDSSSPYNRTESLLFLSHFLGDIHQPMHCGRTADLGGNTIVVTWYNTTKTNLHKVWDEKVIETAMNRFYKDDRSAMIQAIKLNLTNEWSKEENQWAACYTRTTTCADKYAEESAELSCPAYVGAEQGSNLEDEYFFSALPVVQKRIAQGGVRLGAILNQIFSGKNNSSIQSS

SEQ ID NO: 18444 - DNA, 1112 bp, Triticum aestivum
  misc_feature (1)..(1112): Ceres Seq. ID no. 13596325
tttttctttcaagcaagcaagcaagcaagcagaggagagggaccgggaccgggagtgagaggaagtcgagctcttttcttcgtcgacgctggtttttggcccctgactgctggtcgagatgtcgaagatggcggacgagaaggtgatttcggcgccggcgaccggcggaggagaggacgggctgatcgcaggggacctgtcagccacggaggcgcgtgtccgtccgttggagacgctgctgcgcgccgcgcctctggggctctgcgtcgccgccatggccgtcatgctccgcgacacgcagaccaacgagtacggcaccgtctcctactccgacctcggcggattcaagtacctggtttatgccaacgggctgtgcgcggcctactycctggtctccgcgttctacactgccgtgccgcggccggcgaccctgtcccgctcctggatcgtcttcctcctagatcaggtgttcacgtacctgatcctggcggccggcgcggcgtcggcagagctactctacctggcgtacaacggcgacaaggaggtgacgtggagcgaggcgtgcggcgtgttcggcggcttctgcaggcaggcccggacgtcggtggccatcaccttcggctccgtcgtctgctacatcctcctctccctcatctcgtcctaccgcctcttcagcgcctacgacgcacccatgccctcgctcggcaacaagggcgtcgagatcgctgccttcccgcgctgagccgagaggatccctagctgctgtgccttggctactcgatgacgggtcaaaactcaaaacacgtacgtacgtagtagtatcgctgtgtgtgtaggcgaacgaaataatctgtaagggctcatagttaatttcaagctacatatagtgcatctgcctctcttctttttactttattctatatataccgtactagctttgaatcttctgctgtgaggctgtggtggattcattgatgcgttccaaaaatgcgaacctagttccgttgcaggcacccaagtgatctatgtaactacgatgagcttcctaatttaaggagttcagttgcttgtaaggtgcttgaagcaaagcaaaatcaatactcttttcgttc

SEQ ID NO: 18445 - protein, 252 aa, Triticum aestivum
  peptide (1)..(252): Ceres Seq. ID no. 15221840
  misc_feature (129)..(129): Xaa is any aa, unknown or other
FFFQASKQASRGEGPGPGVRGSRALFFVDAGFWPLTAGRDVEDGGREGDFGAGDRRRRGRADRRGPVSHGGACPSVGDAAARRASGALRRRHGRHAPRHADQRVRHRLLLRPRRIQVPGLCQRAVRGLXPGLRVLHCRAAAGDPVPLLDRLPPRSGVHVPDPGGRRGVGRATLPGVQRRQGGDVERGVRRVRRLLQAGPDVGGHHLRLRRLLHPPLPHLVLPPLQRLRRTHALARQQGRRDRCLPALSREDP

SEQ ID NO: 18446 - protein, 207 aa, Triticum aestivum
  peptide (1)..(207): Ceres Seq. ID no. 15221841
  misc_feature (34)..(173): Pfam Name: DUF588 Pfam Description: Domain of unknown function
  misc_feature (4)..(207): NCBI GI NO: 38344646 NR Description: OSJNBa0094P09.18
  misc_feature (1)..(205): NCBI GI NO: 17380964 NR Description: unknown protein [Arabidopsis thaliana]
  misc_feature (14)..(205): NCBI GI NO: 18394453 NR Description: expressed integral membrane protein common family
  misc_feature (34)..(205): NCBI GI NO: 16973324 NR Description: hypothetical protein [Gossypium hirsutum]
  misc_feature (65)..(205): NCBI GI NO: 14030504 NR Description: salicylic acid-induced fragment 1 protein
  misc_feature (27)..(191): NCBI GI NO: 15231842 NR Description: expressed protein [Arabidopsis thaliana]
  misc_feature (37)..(197): NCBI GI NO: 15240435 NR Description: expressed protein [Arabidopsis thaliana]
  misc_feature (31)..(190): NCBI GI NO: 18414659 NR Description: expressed integral membrane protein common family
  misc_feature (17)..(188): NCBI GI NO: 18403948 NR Description: expressed integral membrane protein common family
  misc_feature (40)..(184): NCBI GI NO: 15227576 NR Description: hypothetical integral membrane protein commonfamily
  misc_feature (90)..(90): Xaa is any aa, unknown or other
MSKMADEKVISAPATGGGEDGLIAGDLSATEARVRPLETLLRAAPLGLCVAAMAVMLRDTQTNEYGTVSYSDLGGFKYLVYANGLCAAYXLVSAFYTAVPRPATLSRSWIVFLLDQVFTYLILAAGAASAELLYLAYNGDKEVTWSEACGVFGGFCRQARTSVAITFGSVVCYILLSLISSYRLFSAYDAPMPSLGNKGVEIAAFPR

SEQ ID NO: 18447 - protein, 204 aa, Triticum aestivum
  peptide (1)..(204): Ceres Seq. ID no. 15221842
  misc_feature (31)..(170): Pfam Name: DUF588 Pfam Description: Domain of unknown function
  misc_feature (1)..(204): NCBI GI NO: 38344646 NR Description: OSJNBa0094P09.18
  misc_feature (1)..(202): NCBI GI NO: 17380964 NR Description: unknown protein [Arabidopsis thaliana]
  misc_feature (11)..(202): NCBI GI NO: 18394453 NR Description: expressed integral membrane protein common family
  misc_feature (31)..(202): NCBI GI NO: 16973324 NR Description: hypothetical protein [Gossypium hirsutum]
  misc_feature (62)..(202): NCBI GI NO: 14030504 NR Description: salicylic acid-induced fragment 1 protein
  misc_feature (24)..(188): NCBI GI NO: 15231842 NR Description: expressed protein [Arabidopsis thaliana]
  misc_feature (34)..(194): NCBI GI NO: 15240435 NR Description: expressed protein [Arabidopsis thaliana]
  misc_feature (28)..(187): NCBI GI NO: 18414659 NR Description: expressed integral membrane protein common family
  misc_feature (14)..(185): NCBI GI NO: 18403948 NR Description: expressed integral membrane protein common family
  misc_feature (37)..(181): NCBI GI NO: 15227576 NR Description: hypothetical integral membrane protein commonfamily
  misc_feature (87)..(87): Xaa is any aa, unknown or other
MADEKVISAPATGGGEDGLIAGDLSATEARVRPLETLLRAAPLGLCVAAMAVMLRDTQTNEYGTVSYSDLGGFKYLVYANGLCAAYXLVSAFYTAVPRPATLSRSWIVFLLDQVFTYLILAAGAASAELLYLAYNGDKEVTWSEACGVFGGFCRQARTSVAITFGSVVCYILLSLISSYRLFSAYDAPMPSLGNKGVEIAAFPR

SEQ ID NO: 18448 - DNA, 1045 bp, Triticum aestivum
  misc_feature (1)..(1045): Ceres Seq. ID no. 13596373
aaaactcgcaaagcccgtagcaaactcgcaatctctcaaacaagctcatggccacctcggcgatcacatccccagcggcgccggaagcgacgctgcccctggccggccgcgtggccatcgtcaccggcgcgtcccgcgggatcgggcgcggcatcgcgacccacctgtcgtccctcggcgccagcctggtcctcgggtacgcctccagctctcagcaggcggacgcgctggccgctgagctcccgcgcgccgtggcggtgaaggccgacgtctcggacgaggcgggcgtccggtccctctttgacgccgcggagaccgccttcggcggcccggcgcacatcctcgtggcctgcgctggccagggcatcgggacctacccgtccctcgccaacaccgccacctcggacttcgacaacgtgttcgccgtgaacacccgaggtgcgtttctgtgcctgcgcgaggcggcgaaccggctgcaccgcgggggcgggggccggatcgtggccgtgtcctcgacgctggcggcgacgctgctccccggctacgcggcgtacgtggcgtctaaggcggccgtggaggcgatggtgcgggtggccgcgaaggagctcgggtcggcacgggtgacggtgaactgcatcgcgccggggccggtggcgacggagctcttcttcgacgggaagagcgaggaggcggtggagaggttcagggctgggcacccgatggggcggcttggggaggtcggcgacatcgcgcctgcggtggggttcctctgcaccgacgcggccgagtgggtgaacggccaggtcattcggctcaacggcggcattgcttaattcattggcgtggctgtcgctctgtttctccctttcaaacggatatctccgttttcttaaaaaattgctgtgcctgtttttttgttggaggattgtgattagctgcttttggtgcttgaataaagaagaaaacacaatgatatggtgtactccgtaaactattgtaggtgctcagagttgcatgtatcttttttatgaaagaagttgcacgc

SEQ ID NO: 18449 - protein, 261 aa, Triticum aestivum
  peptide (1)..(261): Ceres Seq. ID no. 13596374
  misc_feature (1)..(261): NCBI GI NO: 34395018 NR Description: putative short-chain dehydrogenase/reductase
  misc_feature (2)..(259): NCBI GI NO: 34393370 NR Description: putative short-chain dehydrogenase/reductase
  misc_feature (2)..(259): NCBI GI NO: 34395019 NR Description: putative short-chain dehydrogenase/reductase
  misc_feature (10)..(261): NCBI GI NO: 37534988 NR Description: putative short-chain alcohol dehydrogenase
  misc_feature (14)..(259): NCBI GI NO: 15235621 NR Description: short-chain dehydrogenase/reductase family protein
  misc_feature (7)..(259): NCBI GI NO: 15229203 NR Description: short-chain dehydrogenase/reductase family protein
  misc_feature (18)..(258): NCBI GI NO: 9758903 NR Description: Brn1-like protein [Arabidopsis thaliana]
  misc_feature (1)..(259): NCBI GI NO: 30679011 NR Description: short-chain type dehydrogenase/reductase -related
  misc_feature (18)..(244): NCBI GI NO: 30686710 NR Description: short-chain dehydrogenase/reductase family protein
  misc_feature (16)..(259): NCBI GI NO: 1711355 NR Description: SHORT-CHAIN TYPE DEHYDROGENASE/REDUCTASE
MATSAITSPAAPEATLPLAGRVAIVTGASRGIGRGIATHLSSLGASLVLGYASSSQQADALAAELPRAVAVKADVSDEAGVRSLFDAAETAFGGPAHILVACAGQGIGTYPSLANTATSDFDNVFAVNTRGAFLCLREAANRLHRGGGGRIVAVSSTLAATLLPGYAAYVASKAAVEAMVRVAAKELGSARVTVNCIAPGPVATELFFDGKSEEAVERFRAGHPMGRLGEVGDIAPAVGFLCTDAAEWVNGQVIRLNGGIA

SEQ ID NO: 18450 - DNA, 1297 bp, Triticum aestivum
  misc_feature (1)..(1297): Ceres Seq. ID no. 13654367
aacggagagaatggccggcgacgtcgcgcgcagggagctccgggcgcgcgtgggggcgatgccgtgggcggtgcggctccagctgcgcgcgctcgaggccgccgtcgacgccacgcagcgccgggacggcaccgtcaaccgcttcctcttctcgctgctcgtggaccgccaggcgcccgccaaccccgcgcgcgccgacgccgggggcgtccgctccgtggacgtcaccgtcgacgcgtccaccggcgtgcgggcccgcgtctactttacggccggggcgggggcggaggcagacgcgtcgccgcgccccgtgatcgtctacttccacggcggcggcttcacggtgttctccgcggccacccggccctacgacgagctctgccgcaccatgtgccgcgagacgggcgccgtcgtcgtgtccgtgacctaccgcctcgcgcccgagcaccgctaccccgcggcctacgacgacggggaggccgccctccggtacctcgccaccaccggcctgcccgccgaggtccccgtccgcgtcgacctctcccgctgcttcctcgccggcgacagcgccggcgccaacatcgcgcaccacgtggcccagcgctggacggcggcacccgcgacaacgcctccagccgtccacctcgccggcctcctgctcctgtcctcctacttcggcggagaggaccggaccgagtcggagcaagcgctggagggcgtggccccgatcgtgaacctccgccggtccgacttctggtggaaggcgtacttgccggagggcgccgaccgaaaccacccggccgcgcacgtgacgggcgaggccggcccggagccggagctgccggatgcgttcccgcgggcgatggtggtcgtcggcgggctcgacccgctccaggactgggggaggcggtacgccggcatgctgcgccggaagggcaaggaggtgcgcgtgatggagttcacggaggctgtacacgccttctacttcttcccggcgctgcccgagaccggcaagctcgtcgcggagatctcggcgttcgtggagagcaccgcgccgagctcgaccgcctagagaactagagacgatgattaggacaactcgtcgtggatctcgtacgtccccgtctctgctgatgttatattgttggctgatagcctatttcactgtcgaagtcgctgcgagcagccgcgtctgttaaattattacactgtggtgtataagttcgagttgccatctcgatattttctttgtgcaacatgtggcatgggtgatggggacatggcagtgatggcacct

SEQ ID NO: 18451 - protein, 359 aa, Triticum aestivum
  peptide (1)..(359): Ceres Seq. ID no. 13654368
  misc_feature (22)..(248): Pfam Name: Pfam Description:  HlyD family secretion protein
  misc_feature (6)..(298): NCBI GI NO: 23018055 NR Description: hypothetical protein [Thermobifida fusca]
  misc_feature (6)..(337): NCBI GI NO: 23018788 NR Description: hypothetical protein [Thermobifida fusca]
NGENGRRRRAQGAPGARGGDAVGGAAPAARARGRRRRHAAPGRHRQPLPLLAARGPPGARQPRARRRRGRPLRGRHRRRVHRRAGPRLLYGRGGGGGRRVAAPRDRLLPRRRLHGVLRGHPALRRALPHHVPRDGRRRRVRDLPPRARAPLPRGLRRRGGRPPVPRHHRPARRGPRPRRPLPLLPRRRQRRRQHRAPRGPALDGGTRDNASSRPPRRPPAPVLLLRRRGPDRVGASAGGRGPDREPPPVRLLVEGVLAGGRRPKPPGRARDGRGRPGAGAAGCVPAGDGGRRRARPAPGLGEAVRRHAAPEGQGGARDGVHGGCTRLLLLPGAARDRQARRGDLGVRGEHRAELDRLEN

SEQ ID NO: 18452 - protein, 356 aa, Triticum aestivum
  peptide (1)..(356): Ceres Seq. ID no. 13654369
  misc_feature (103)..(147): Pfam Name: Pfam Description:  Carboxylesterase
  misc_feature (4)..(356): NCBI GI NO: 34904772 NR Description: similar to carboxylesterase
  misc_feature (2)..(352): NCBI GI NO: 34904770 NR Description: similar to carboxylesterase
  misc_feature (20)..(356): NCBI GI NO: 34393714 NR Description: putative esterase
  misc_feature (20)..(356): NCBI GI NO: 34904774 NR Description: similar to carboxylesterase
  misc_feature (4)..(356): NCBI GI NO: 34904760 NR Description: similar to carboxylesterase
  misc_feature (14)..(348): NCBI GI NO: 34904758 NR Description: hypothetical protein~predicted by GeneMark
  misc_feature (20)..(356): NCBI GI NO: 21618039 NR Description: unknown [Arabidopsis thaliana]
  misc_feature (20)..(356): NCBI GI NO: 15237783 NR Description: expressed protein [Arabidopsis thaliana]
  misc_feature (4)..(349): NCBI GI NO: 15240483 NR Description: expressed protein [Arabidopsis thaliana]
  misc_feature (12)..(349): NCBI GI NO: 15229905 NR Description: expressed protein [Arabidopsis thaliana]
TERMAGDVARRELRARVGAMPWAVRLQLRALEAAVDATQRRDGTVNRFLFSLLVDRQAPANPARADAGGVRSVDVTVDASTGVRARVYFTAGAGAEADASPRPVIVYFHGGGFTVFSAATRPYDELCRTMCRETGAVVVSVTYRLAPEHRYPAAYDDGEAALRYLATTGLPAEVPVRVDLSRCFLAGDSAGANIAHHVAQRWTAAPATTPPAVHLAGLLLLSSYFGGEDRTESEQALEGVAPIVNLRRSDFWWKAYLPEGADRNHPAAHVTGEAGPEPELPDAFPRAMVVVGGLDPLQDWGRRYAGMLRRKGKEVRVMEFTEAVHAFYFFPALPETGKLVAEISAFVESTAPSSTA

SEQ ID NO: 18453 - protein, 353 aa, Triticum aestivum
  peptide (1)..(353): Ceres Seq. ID no. 13654370
  misc_feature (100)..(144): Pfam Name: Pfam Description:  Carboxylesterase
  misc_feature (1)..(353): NCBI GI NO: 34904772 NR Description: similar to carboxylesterase
  misc_feature (1)..(349): NCBI GI NO: 34904770 NR Description: similar to carboxylesterase
  misc_feature (17)..(353): NCBI GI NO: 34393714 NR Description: putative esterase
  misc_feature (17)..(353): NCBI GI NO: 34904774 NR Description: similar to carboxylesterase
  misc_feature (1)..(353): NCBI GI NO: 34904760 NR Description: similar to carboxylesterase
  misc_feature (11)..(345): NCBI GI NO: 34904758 NR Description: hypothetical protein~predicted by GeneMark
  misc_feature (17)..(353): NCBI GI NO: 21618039 NR Description: unknown [Arabidopsis thaliana]
  misc_feature (17)..(353): NCBI GI NO: 15237783 NR Description: expressed protein [Arabidopsis thaliana]
  misc_feature (1)..(346): NCBI GI NO: 15240483 NR Description: expressed protein [Arabidopsis thaliana]
  misc_feature (9)..(346): NCBI GI NO: 15229905 NR Description: expressed protein [Arabidopsis thaliana]
MAGDVARRELRARVGAMPWAVRLQLRALEAAVDATQRRDGTVNRFLFSLLVDRQAPANPARADAGGVRSVDVTVDASTGVRARVYFTAGAGAEADASPRPVIVYFHGGGFTVFSAATRPYDELCRTMCRETGAVVVSVTYRLAPEHRYPAAYDDGEAALRYLATTGLPAEVPVRVDLSRCFLAGDSAGANIAHHVAQRWTAAPATTPPAVHLAGLLLLSSYFGGEDRTESEQALEGVAPIVNLRRSDFWWKAYLPEGADRNHPAAHVTGEAGPEPELPDAFPRAMVVVGGLDPLQDWGRRYAGMLRRKGKEVRVMEFTEAVHAFYFFPALPETGKLVAEISAFVESTAPSSTA

SEQ ID NO: 18454 - DNA, 929 bp, Triticum aestivum
  misc_feature (1)..(929): Ceres Seq. ID no. 13596185
acgaaggcaaagcgaacacacaaacccaaacccaaacccacccacttctcctctcaagccttcgcctgccaccgacgccacccaagcccccaaccctagcgaggactgaaagaggaggaggcggcggcaaccccgtcgaccggaggggagatggtgttcttcgcgctgctcgtgggggcagagctcgacggcctcaccaacctgcagccccgcggcggctgcgacgaccccagctacccttactacttcaagctgcggtgcgagagctgcggagagacgagcgccaagaccacctgcgtctccctcaacgaggtcgtcgaactgcccaccggcaaaggcacctccaatctcctccagaagtgcaagttatgttcgagggatggatcagttgtgatgattcctgggcagggaacaccactgactgctgagcagagccagaaaggagagatgacttgtttgatggtctttgaatgcagaggctatgaacctattgagttcgcttttggtaatggctggaaggctgaatctgtacatgggacaccatttgacattgatctttctgaaggagagtttgatgagtatgatgagaagggagagtgccctgtcgctctatccaagctgcagtcaacattcaaagtggtgaagaagcagggttttcatgggaagaccagatatgtctaagatccagtttctcttgggctcttcaaacattggagtcagagatgtgtaaagcgcatctacaaagttgaatcctcgatgttgattttgtatttgaactaagttcatgcccatgattcggtggatttgccatgaatttggttaagcttgcagtgatgtggcctcctgtttggaaaaattgaatattctgcctatcagtggtttcaaacttagatctatggctctaccatatcaatcataaaattatttag

SEQ ID NO: 18455 - protein, 176 aa, Triticum aestivum
  peptide (1)..(176): Ceres Seq. ID no. 13596186
  misc_feature (1)..(164): Pfam Name: DUF866 Pfam Description: Eukaryotic protein of unknown function
  misc_feature (1)..(174): NCBI GI NO: 34914208 NR Description: OSJNBb0049O23.17
  misc_feature (1)..(165): NCBI GI NO: 18418118 NR Description: expressed protein [Arabidopsis thaliana]
  misc_feature (1)..(165): NCBI GI NO: 7486215 NR Description: hypothetical protein F26P21
  misc_feature (3)..(165): NCBI GI NO: 7503539 NR Description: hypothetical protein F46B6
  misc_feature (5)..(161): NCBI GI NO: 8923541 NR Description: hypothetical protein FLJ20580 [Homo sapiens]
  misc_feature (1)..(166): NCBI GI NO: 24653302 NR Description: CG4646-PA [Drosophila melanogaster]
  misc_feature (5)..(161): NCBI GI NO: 27715611 NR Description: similar to hypothetical protein FLJ20580
  misc_feature (5)..(161): NCBI GI NO: 21539639 NR Description: RIKEN cDNA 0610037L13 [Mus musculus]
  misc_feature (5)..(161): NCBI GI NO: 26328397 NR Description: unnamed protein product [Mus musculus]
  misc_feature (1)..(166): NCBI GI NO: 21430774 NR Description: SD14289p [Drosophila melanogaster]
MVFFALLVGAELDGLTNLQPRGGCDDPSYPYYFKLRCESCGETSAKTTCVSLNEVVELPTGKGTSNLLQKCKLCSRDGSVVMIPGQGTPLTAEQSQKGEMTCLMVFECRGYEPIEFAFGNGWKAESVHGTPFDIDLSEGEFDEYDEKGECPVALSKLQSTFKVVKKQGFHGKTRYV

SEQ ID NO: 18456 - protein, 141 aa, Triticum aestivum
  peptide (1)..(141): Ceres Seq. ID no. 13596187
EGKANTQTQTQTHPLLLSSLRLPPTPPKPPTLARTERGGGGGNPVDRRGDGVLRAARGGRARRPHQPAAPRRLRRPQLPLLLQAAVRELRRDERQDHLRLPQRGRRTAHRQRHLQSPPEVQVMFEGWISCDDSWAGNTTDC

SEQ ID NO: 18457 - protein, 95 aa, Triticum aestivum
  peptide (1)..(95): Ceres Seq. ID no. 13596188
  misc_feature (1)..(83): Pfam Name: DUF866 Pfam Description: Eukaryotic protein of unknown function
  misc_feature (1)..(93): NCBI GI NO: 34914208 NR Description: OSJNBb0049O23.17
  misc_feature (1)..(84): NCBI GI NO: 18418118 NR Description: expressed protein [Arabidopsis thaliana]
  misc_feature (1)..(84): NCBI GI NO: 7486215 NR Description: hypothetical protein F26P21
  misc_feature (1)..(84): NCBI GI NO: 7503539 NR Description: hypothetical protein F46B6
  misc_feature (1)..(80): NCBI GI NO: 8923541 NR Description: hypothetical protein FLJ20580 [Homo sapiens]
  misc_feature (1)..(85): NCBI GI NO: 24653302 NR Description: CG4646-PA [Drosophila melanogaster]
  misc_feature (1)..(80): NCBI GI NO: 27715611 NR Description: similar to hypothetical protein FLJ20580
  misc_feature (1)..(80): NCBI GI NO: 21539639 NR Description: RIKEN cDNA 0610037L13 [Mus musculus]
  misc_feature (1)..(80): NCBI GI NO: 26328397 NR Description: unnamed protein product [Mus musculus]
  misc_feature (1)..(85): NCBI GI NO: 21430774 NR Description: SD14289p [Drosophila melanogaster]
MIPGQGTPLTAEQSQKGEMTCLMVFECRGYEPIEFAFGNGWKAESVHGTPFDIDLSEGEFDEYDEKGECPVALSKLQSTFKVVKKQGFHGKTRYV

SEQ ID NO: 18458 - DNA, 1296 bp, Triticum aestivum
  misc_feature (1)..(1296): Ceres Seq. ID no. 13503500
aaggtaacgcgtctctgttcatctcacctcaccacgcgcgtacactttctctctcccctccctccctttattagatctctctcgctcaacaaaattcctcaactcgagctccctgaccgcaaccactcaaccacccagcaggcccagcaccaccgcgtctaagcaggtgccgcctccgcctccgcgtccttgtctgcggcggctgcaatggccgaccgcgtctaccccgccgccaagcccactccgccgcccccaatggccaacggaggcggcggcccggcggcgcccaagccgcagatgtaccagcgccccatctacaggccgcaggggcaggcgaagagcaggcgcgggcggtcctgccggtgcagcttgtgctgctgcttctgctgggcactgctggtggtcgtcctcctcgcgctagtcgccgcggccgcgggcggcgccttctacgtgctctaccggccgcaacgccccagcttcaccgtctcctctgtccgcctcagcacgttcaacctctcctcctccaccaccgcgcccgtcctcaccgactccatccagctcaccgtcaccgccaagaaccccaacaagaagctcgtctatttctacgacgacttctcattctcggccgccaccgccgccaacgcagtcccgctcggggacgccaccgtgcccgggttcgcgcatgatgccggcaacaccaccgttttcactgcgaccatcaccgccgctggtgtcaccgtagaccccagcggcgccggctctgaccttaagatgtccggcgctttctccgtcgctatagatgccgacacgcgggccggcgtcaaggtcggcagcctcaagaccaagaagatgggcatccaggtgcactgcgagggcatcaaggtgacgccacccagtccacctccgccagcgccgaagaaggtaaaggggaagaatggcaccgccctggcgcctgcgcctgcgttggacaacgccgagacgaccgcgatggtgagcaccgccgcgcactcgtgcaaggtcagagtccgtgtgaagatctggaagtggaccttctaggtataatgccaactttagggactgccatgcaaaacattcaggaaacatatatttttcactttatattggaaagtagagaccatgaatatcgtcggtgtaaattccctcaaagttgattctatttttgttcttgtttggaattttcttaaacatatttttggtggatgtataacttggtgatttgttatttgtaagattacggttcgaatgaaaaaaaaaaaaaaaaaagcttatcgatac

SEQ ID NO: 18459 - protein, 282 aa, Triticum aestivum
  peptide (1)..(282): Ceres Seq. ID no. 13503501
  misc_feature (10)..(282): NCBI GI NO: 34903552 NR Description: P0001B06.28
  misc_feature (20)..(282): NCBI GI NO: 34914304 NR Description: B1151A10.19
  misc_feature (3)..(230): NCBI GI NO: 11762174 NR Description: At1g17620 [Arabidopsis thaliana]
  misc_feature (3)..(230): NCBI GI NO: 18394509 NR Description: expressed protein [Arabidopsis thaliana]
  misc_feature (11)..(243): NCBI GI NO: 15239804 NR Description: expressed protein [Arabidopsis thaliana]
  misc_feature (11)..(243): NCBI GI NO: 21536796 NR Description: unknown [Arabidopsis thaliana]
  misc_feature (8)..(226): NCBI GI NO: 25408980 NR Description: hypothetical protein At2g46300
  misc_feature (8)..(226): NCBI GI NO: 30690312 NR Description: expressed protein [Arabidopsis thaliana]
  misc_feature (8)..(226): NCBI GI NO: 26449684 NR Description: unknown protein [Arabidopsis thaliana]
  misc_feature (1)..(230): NCBI GI NO: 18401317 NR Description: expressed protein [Arabidopsis thaliana]
MADRVYPAAKPTPPPPMANGGGGPAAPKPQMYQRPIYRPQGQAKSRRGRSCRCSLCCCFCWALLVVVLLALVAAAAGGAFYVLYRPQRPSFTVSSVRLSTFNLSSSTTAPVLTDSIQLTVTAKNPNKKLVYFYDDFSFSAATAANAVPLGDATVPGFAHDAGNTTVFTATITAAGVTVDPSGAGSDLKMSGAFSVAIDADTRAGVKVGSLKTKKMGIQVHCEGIKVTPPSPPPPAPKKVKGKNGTALAPAPALDNAETTAMVSTAAHSCKVRVRVKIWKWTF

SEQ ID NO: 18460 - protein, 266 aa, Triticum aestivum
  peptide (1)..(266): Ceres Seq. ID no. 13503502
  misc_feature (1)..(266): NCBI GI NO: 34903552 NR Description: P0001B06.28
  misc_feature (4)..(266): NCBI GI NO: 34914304 NR Description: B1151A10.19
  misc_feature (1)..(214): NCBI GI NO: 11762174 NR Description: At1g17620 [Arabidopsis thaliana]
  misc_feature (1)..(214): NCBI GI NO: 18394509 NR Description: expressed protein [Arabidopsis thaliana]
  misc_feature (1)..(227): NCBI GI NO: 15239804 NR Description: expressed protein [Arabidopsis thaliana]
  misc_feature (1)..(227): NCBI GI NO: 21536796 NR Description: unknown [Arabidopsis thaliana]
  misc_feature (1)..(210): NCBI GI NO: 25408980 NR Description: hypothetical protein At2g46300
  misc_feature (1)..(210): NCBI GI NO: 30690312 NR Description: expressed protein [Arabidopsis thaliana]
  misc_feature (1)..(210): NCBI GI NO: 26449684 NR Description: unknown protein [Arabidopsis thaliana]
  misc_feature (1)..(214): NCBI GI NO: 18401317 NR Description: expressed protein [Arabidopsis thaliana]
MANGGGGPAAPKPQMYQRPIYRPQGQAKSRRGRSCRCSLCCCFCWALLVVVLLALVAAAAGGAFYVLYRPQRPSFTVSSVRLSTFNLSSSTTAPVLTDSIQLTVTAKNPNKKLVYFYDDFSFSAATAANAVPLGDATVPGFAHDAGNTTVFTATITAAGVTVDPSGAGSDLKMSGAFSVAIDADTRAGVKVGSLKTKKMGIQVHCEGIKVTPPSPPPPAPKKVKGKNGTALAPAPALDNAETTAMVSTAAHSCKVRVRVKIWKWTF

SEQ ID NO: 18461 - protein, 252 aa, Triticum aestivum
  peptide (1)..(252): Ceres Seq. ID no. 13503503
  misc_feature (1)..(252): NCBI GI NO: 34903552 NR Description: P0001B06.28
  misc_feature (1)..(252): NCBI GI NO: 34914304 NR Description: B1151A10.19
  misc_feature (1)..(200): NCBI GI NO: 11762174 NR Description: At1g17620 [Arabidopsis thaliana]
  misc_feature (1)..(200): NCBI GI NO: 18394509 NR Description: expressed protein [Arabidopsis thaliana]
  misc_feature (1)..(213): NCBI GI NO: 15239804 NR Description: expressed protein [Arabidopsis thaliana]
  misc_feature (1)..(213): NCBI GI NO: 21536796 NR Description: unknown [Arabidopsis thaliana]
  misc_feature (1)..(196): NCBI GI NO: 25408980 NR Description: hypothetical protein At2g46300
  misc_feature (1)..(196): NCBI GI NO: 30690312 NR Description: expressed protein [Arabidopsis thaliana]
  misc_feature (1)..(196): NCBI GI NO: 26449684 NR Description: unknown protein [Arabidopsis thaliana]
  misc_feature (1)..(200): NCBI GI NO: 18401317 NR Description: expressed protein [Arabidopsis thaliana]
MYQRPIYRPQGQAKSRRGRSCRCSLCCCFCWALLVVVLLALVAAAAGGAFYVLYRPQRPSFTVSSVRLSTFNLSSSTTAPVLTDSIQLTVTAKNPNKKLVYFYDDFSFSAATAANAVPLGDATVPGFAHDAGNTTVFTATITAAGVTVDPSGAGSDLKMSGAFSVAIDADTRAGVKVGSLKTKKMGIQVHCEGIKVTPPSPPPPAPKKVKGKNGTALAPAPALDNAETTAMVSTAAHSCKVRVRVKIWKWTF

SEQ ID NO: 18462 - DNA, 940 bp, Triticum aestivum
  misc_feature (1)..(940): Ceres Seq. ID no. 13596338
gagaaaggaacggctgccgtcccctgcctgcaaccgcaactcaaccagtcagtcgccattactcttgtttctcatcacccaccgcgagcgcgaagcaggaggagcagcaccatgctggggcatctagtcgggctggtgaaggtgcgggtgacgcgcggggtgaacctcgccatccgcgacctccgctccagcgacccctacgtcgtcgtccgcatgggcaagcagaagctgaagacgcgagttgtaaggaagagtatcaatccggagtggaacgatgaactgaccctctccatcgaagatcctaccattcctgtcaaactggacgtgttcgacaaggacacattcttcgacgacccgatgggcaacgcggagctggacatcggcccgctggtggaggccgcgaggatgagggtccagctgcagggcgtcgctgacaacaccgtggtgaagaagctggtgcccaaccggcagaactgcctcgccgagcagagcgccatctacctgtccgagggcacggtgaagcaggacgtggtgctcaggctgaggaacgtcgagtgcggggaggtcgagctccagctccagtggatcgacatccccggctccaagggcgtatcaggcttttaattagctctctgtgcactctctgctgtttgcagagttctttctcaagtgaaaagctggagtaaattctgattagaatccaagcttaagttaggatttagattatgtgcgatagatgactgtgtggtcgaacttcctaagatggactgaaaaaggaagaactggtggcaggggcgcaaaaattctcagaaaaaaaaaaaaaaaaaaaaaaaaaaaaaaaaaaaaaaaaaaaaaaaaaaaaaaaaaaaaaaaaaaaaaaaaargaaaaaaaaaaaaaaaaaggtttwtcgatmccgccvacccccgggggggggcccgg

SEQ ID NO: 18463 - protein, 207 aa, Triticum aestivum
  peptide (1)..(207): Ceres Seq. ID no. 15221843
  misc_feature (46)..(124): Pfam Name: Pfam Description:  C2 domain
  misc_feature (41)..(204): NCBI GI NO: 15240322 NR Description: C2 domain-containing protein
  misc_feature (34)..(204): NCBI GI NO: 30684739 NR Description: C2 domain-containing protein
  misc_feature (20)..(204): NCBI GI NO: 25405940 NR Description: protein T1N15.21 [imported] - Arabidopsis thaliana
  misc_feature (33)..(204): NCBI GI NO: 15221907 NR Description: C2 domain-containing protein
  misc_feature (42)..(204): NCBI GI NO: 18409682 NR Description: C2 domain-containing protein
  misc_feature (42)..(204): NCBI GI NO: 13430460 NR Description: unknown protein [Arabidopsis thaliana]
  misc_feature (42)..(200): NCBI GI NO: 33146442 NR Description: zinc finger and C2 domain protein-like
  misc_feature (37)..(204): NCBI GI NO: 15219500 NR Description: C2 domain-containing protein
  misc_feature (41)..(201): NCBI GI NO: 18408493 NR Description: C2 domain-containing protein
  misc_feature (43)..(204): NCBI GI NO: 18409675 NR Description: C2 domain-containing protein
EKGTAAVPCLQPQLNQSVAITLVSHHPPRARSRRSSTMLGHLVGLVKVRVTRGVNLAIRDLRSSDPYVVVRMGKQKLKTRVVRKSINPEWNDELTLSIEDPTIPVKLDVFDKDTFFDDPMGNAELDIGPLVEAARMRVQLQGVADNTVVKKLVPNRQNCLAEQSAIYLSEGTVKQDVVLRLRNVECGEVELQLQWIDIPGSKGVSGF

SEQ ID NO: 18464 - protein, 170 aa, Triticum aestivum
  peptide (1)..(170): Ceres Seq. ID no. 15221844
  misc_feature (9)..(87): Pfam Name: Pfam Description:  C2 domain
  misc_feature (4)..(167): NCBI GI NO: 15240322 NR Description: C2 domain-containing protein
  misc_feature (1)..(167): NCBI GI NO: 30684739 NR Description: C2 domain-containing protein
  misc_feature (1)..(167): NCBI GI NO: 25405940 NR Description: protein T1N15.21 [imported] - Arabidopsis thaliana
  misc_feature (1)..(167): NCBI GI NO: 15221907 NR Description: C2 domain-containing protein
  misc_feature (5)..(167): NCBI GI NO: 18409682 NR Description: C2 domain-containing protein
  misc_feature (5)..(167): NCBI GI NO: 13430460 NR Description: unknown protein [Arabidopsis thaliana]
  misc_feature (5)..(163): NCBI GI NO: 33146442 NR Description: zinc finger and C2 domain protein-like
  misc_feature (1)..(167): NCBI GI NO: 15219500 NR Description: C2 domain-containing protein
  misc_feature (4)..(164): NCBI GI NO: 18408493 NR Description: C2 domain-containing protein
  misc_feature (6)..(167): NCBI GI NO: 18409675 NR Description: C2 domain-containing protein
MLGHLVGLVKVRVTRGVNLAIRDLRSSDPYVVVRMGKQKLKTRVVRKSINPEWNDELTLSIEDPTIPVKLDVFDKDTFFDDPMGNAELDIGPLVEAARMRVQLQGVADNTVVKKLVPNRQNCLAEQSAIYLSEGTVKQDVVLRLRNVECGEVELQLQWIDIPGSKGVSGF

SEQ ID NO: 18465 - protein, 136 aa, Triticum aestivum
  peptide (1)..(136): Ceres Seq. ID no. 15221845
  misc_feature (1)..(53): Pfam Name: Pfam Description:  C2 domain
  misc_feature (1)..(133): NCBI GI NO: 15240322 NR Description: C2 domain-containing protein
  misc_feature (1)..(133): NCBI GI NO: 30684739 NR Description: C2 domain-containing protein
  misc_feature (1)..(133): NCBI GI NO: 25405940 NR Description: protein T1N15.21 [imported] - Arabidopsis thaliana
  misc_feature (1)..(133): NCBI GI NO: 15221907 NR Description: C2 domain-containing protein
  misc_feature (1)..(133): NCBI GI NO: 18409682 NR Description: C2 domain-containing protein
  misc_feature (1)..(133): NCBI GI NO: 13430460 NR Description: unknown protein [Arabidopsis thaliana]
  misc_feature (1)..(129): NCBI GI NO: 33146442 NR Description: zinc finger and C2 domain protein-like
  misc_feature (1)..(133): NCBI GI NO: 15219500 NR Description: C2 domain-containing protein
  misc_feature (1)..(130): NCBI GI NO: 18408493 NR Description: C2 domain-containing protein
  misc_feature (1)..(133): NCBI GI NO: 18409675 NR Description: C2 domain-containing protein
MGKQKLKTRVVRKSINPEWNDELTLSIEDPTIPVKLDVFDKDTFFDDPMGNAELDIGPLVEAARMRVQLQGVADNTVVKKLVPNRQNCLAEQSAIYLSEGTVKQDVVLRLRNVECGEVELQLQWIDIPGSKGVSGF

SEQ ID NO: 18466 - DNA, 1059 bp, Triticum aestivum
  misc_feature (1)..(1059): Ceres Seq. ID no. 13596339
cctgcctctgcgtcttcctctgcttcctcttctcctcccaatccaatccttgtagaatcttccaccggcgcccgggtaagatgaacggcctcctcgtgtccccgtgcacaaggccgcccctgctccgccccttcccgagcccggccacccgtctcctacccgccagaaccctagttcttcgcccgctccgcctcccccgtggcgtctgtgcgtcccctcctcccccgcgcgccgccgccgccgctgcgtctgcagtgggcggccttctggcgccgctcgaggttggcctgcgcagcatcaacctcgcgccgctgcgcccgccggttgcggcggccatgtcggcggccgtgcgctggctgggggtctaccgggaggttctgcttgtcggggtgctcttctcctggtttcccaacatcccctgggaccgccagcccttctccgctctgcgagacctctgcgacccttttctcgccctctgccgcgaggtcgtgccgcccgtcttcggccgcaagctcgatctcagcccgctcgtcgccttcatggcgatagacatcctcatcatgatccttcgcccacagccacgcatgtgatggaattgaaggatagtcgttggtatgttaagatccactatggttttgtcgttgctggatattacaagataagaagtggtggttgaatgatctttagcaagggtagcagaatttgagtgattttgagacgttttgtagacaagtgtagcttccttgataaaacttctgccaagtagatatgtgctagctacagtctttgtgattctgctctgttcccagacggatttgtctatgatatggcaacacggatctgcatgtagtgagcgattcagagaactgaatcgaaagctgagccattcctgaacggtttgcgagagaatcccaaactagcttaggcaggctcattaatgtgcatggtctacttttttcttctttttccttccaccatgaggatcttatctccttttctgacttggctaatgtgtttacctccagagccacttgttctggttgagtgttgatatactcg

SEQ ID NO: 18467 - protein, 195 aa, Triticum aestivum
  peptide (1)..(195): Ceres Seq. ID no. 13596340
  misc_feature (108)..(189): Pfam Name: Pfam Description:  YGGT family
  misc_feature (27)..(195): NCBI GI NO: 34393226 NR Description: unknown protein
  misc_feature (36)..(189): NCBI GI NO: 15234345 NR Description: expressed protein [Arabidopsis thaliana]
  misc_feature (36)..(189): NCBI GI NO: 21592772 NR Description: unknown [Arabidopsis thaliana]
  misc_feature (104)..(185): NCBI GI NO: 18397948 NR Description: expressed protein [Arabidopsis thaliana]
  misc_feature (104)..(185): NCBI GI NO: 21617923 NR Description: unknown [Arabidopsis thaliana]
  misc_feature (118)..(189): NCBI GI NO: 22298077 NR Description: ORF_ID:tsr0534~hypothetical protein
  misc_feature (112)..(195): NCBI GI NO: 17229553 NR Description: hypothetical protein [Nostoc sp. PCC 7120]
  misc_feature (108)..(185): NCBI GI NO: 37523109 NR Description: hypothetical protein [Gloeobacter violaceus]
  misc_feature (113)..(189): NCBI GI NO: 11467623 NR Description: hypothetical chloroplast RF19 [Guillardia theta]
  misc_feature (108)..(189): NCBI GI NO: 33862954 NR Description: conserved hypothetical membrane protein
CLCVFLCFLFSSQSNPCRIFHRRPGKMNGLLVSPCTRPPLLRPFPSPATRLLPARTLVLRPLRLPRGVCASPPPPRAAAAAASAVGGLLAPLEVGLRSINLAPLRPPVAAAMSAAVRWLGVYREVLLVGVLFSWFPNIPWDRQPFSALRDLCDPFLALCREVVPPVFGRKLDLSPLVAFMAIDILIMILRPQPRM

SEQ ID NO: 18468 - protein, 169 aa, Triticum aestivum
  peptide (1)..(169): Ceres Seq. ID no. 13596341
  misc_feature (82)..(163): Pfam Name: Pfam Description:  YGGT family
  misc_feature (1)..(169): NCBI GI NO: 34393226 NR Description: unknown protein
  misc_feature (10)..(163): NCBI GI NO: 15234345 NR Description: expressed protein [Arabidopsis thaliana]
  misc_feature (10)..(163): NCBI GI NO: 21592772 NR Description: unknown [Arabidopsis thaliana]
  misc_feature (78)..(159): NCBI GI NO: 18397948 NR Description: expressed protein [Arabidopsis thaliana]
  misc_feature (78)..(159): NCBI GI NO: 21617923 NR Description: unknown [Arabidopsis thaliana]
  misc_feature (92)..(163): NCBI GI NO: 22298077 NR Description: ORF_ID:tsr0534~hypothetical protein
  misc_feature (86)..(169): NCBI GI NO: 17229553 NR Description: hypothetical protein [Nostoc sp. PCC 7120]
  misc_feature (82)..(159): NCBI GI NO: 37523109 NR Description: hypothetical protein [Gloeobacter violaceus]
  misc_feature (87)..(163): NCBI GI NO: 11467623 NR Description: hypothetical chloroplast RF19 [Guillardia theta]
  misc_feature (82)..(163): NCBI GI NO: 33862954 NR Description: conserved hypothetical membrane protein
MNGLLVSPCTRPPLLRPFPSPATRLLPARTLVLRPLRLPRGVCASPPPPRAAAAAASAVGGLLAPLEVGLRSINLAPLRPPVAAAMSAAVRWLGVYREVLLVGVLFSWFPNIPWDRQPFSALRDLCDPFLALCREVVPPVFGRKLDLSPLVAFMAIDILIMILRPQPRM

SEQ ID NO: 18469 - DNA, 1194 bp, Triticum aestivum
  misc_feature (1)..(1194): Ceres Seq. ID no. 15225069
agtacttcgacgacccacctcagagcaggaccgcatcgccttcctcctcgtccccgcgcctcccacccgccggccggaaggggagacgaaggcgaagcgcagccaagatgccgcagcggcactcgaagaacaacaacgacctcgccttcttcacctacgaggagaagcggaagctcgggtacggcacccagcgggagcggctcggcaaggactccatcaagcccttcgatgcctgctgcctctgcctcaagccgctcatcgacccgctcgcctgccccaagggccacaccttctgcaaggagtgcatcctcgagtgcctcctcgcgcagaagaaggacatcaagcgcaagcttatagctcatgactcccagaaaaagcaagagaaggaagaggaggaggagaagctggtgctgcaaaagtccaaggaattggatgcttttgatcagcagaatcatggagcagtcccccagtactatgatcgcagcggttcccaagacaagaatggttttcatggagccaacagtgtgaagactacctccttcgaagaggaagccctacgcaccatgaaggcgttctggcttccgtcagctacacccgaagctactgtcaaggtagatgctccttctactgacacaatctgtcccgaggggcaggagaagctcaagctgaaatcactcttccctatttctttcaccgaggagaacgctcgtcagaagagcaataagtcagtggagaaaagctacatctgccccagctgcaagtccaatctcacaaacacaatgtccctggtggcgatcagcacctgtggccatgtcttctgcaagaagtgctcggacaagttcatagcaacagataaggtctgcttaatgtgcagcaaaccgtgcaaagagaggaatttgattaatttagagaaaggaggaacgggtttcgctgcacacgatgaccacctagaggcaaagaacttcaagcatttagggagtggttctggactaggattggtgaagcctgctcctaaggcatagccttcaattatgtaactgttgttgtataatgctgtcagtcatcgttgtggcacgaatatatgtaacctggattttttaaatgttttgatatcttttgatatgtatgatctggaacaaacgatactcaggtttttcatccaagtgataatgtgcttgcggttttgctccatgc

SEQ ID NO: 18470 - protein, 339 aa, Triticum aestivum
  peptide (1)..(339): Ceres Seq. ID no. 15225070
  misc_feature (36)..(335): NCBI GI NO: 18407260 NR Description: expressed protein [Arabidopsis thaliana]
  misc_feature (36)..(335): NCBI GI NO: 26449463 NR Description: unknown protein [Arabidopsis thaliana]
  misc_feature (39)..(319): NCBI GI NO: 38174118 NR Description: Unknown (protein for MGC:75989)
  misc_feature (39)..(322): NCBI GI NO: 31213459 NR Description: ENSANGP00000021661 [Anopheles gambiae]
  misc_feature (39)..(319): NCBI GI NO: 7705716 NR Description: eNOS interacting protein; CGI-25 protein
  misc_feature (39)..(319): NCBI GI NO: 24643007 NR Description: CG6179-PA [Drosophila melanogaster]
  misc_feature (39)..(319): NCBI GI NO: 15030017 NR Description: ENOS interacting protein [Homo sapiens]
  misc_feature (39)..(319): NCBI GI NO: 27731403 NR Description: similar to RIKEN cDNA 2310061K06
  misc_feature (39)..(319): NCBI GI NO: 13384956 NR Description: RIKEN cDNA 2310061K06 [Mus musculus]
  misc_feature (39)..(319): NCBI GI NO: 39593613 NR Description: Hypothetical protein CBG05897
YFDDPPQSRTASPSSSSPRLPPAGRKGRRRRSAAKMPQRHSKNNNDLAFFTYEEKRKLGYGTQRERLGKDSIKPFDACCLCLKPLIDPLACPKGHTFCKECILECLLAQKKDIKRKLIAHDSQKKQEKEEEEEKLVLQKSKELDAFDQQNHGAVPQYYDRSGSQDKNGFHGANSVKTTSFEEEALRTMKAFWLPSATPEATVKVDAPSTDTICPEGQEKLKLKSLFPISFTEENARQKSNKSVEKSYICPSCKSNLTNTMSLVAISTCGHVFCKKCSDKFIATDKVCLMCSKPCKERNLINLEKGGTGFAAHDDHLEAKNFKHLGSGSGLGLVKPAPKA

SEQ ID NO: 18471 - protein, 304 aa, Triticum aestivum
  peptide (1)..(304): Ceres Seq. ID no. 15225071
  misc_feature (1)..(300): NCBI GI NO: 18407260 NR Description: expressed protein [Arabidopsis thaliana]
  misc_feature (1)..(300): NCBI GI NO: 26449463 NR Description: unknown protein [Arabidopsis thaliana]
  misc_feature (4)..(284): NCBI GI NO: 38174118 NR Description: Unknown (protein for MGC:75989)
  misc_feature (4)..(287): NCBI GI NO: 31213459 NR Description: ENSANGP00000021661 [Anopheles gambiae]
  misc_feature (4)..(284): NCBI GI NO: 7705716 NR Description: eNOS interacting protein; CGI-25 protein
  misc_feature (4)..(284): NCBI GI NO: 24643007 NR Description: CG6179-PA [Drosophila melanogaster]
  misc_feature (4)..(284): NCBI GI NO: 15030017 NR Description: ENOS interacting protein [Homo sapiens]
  misc_feature (4)..(284): NCBI GI NO: 27731403 NR Description: similar to RIKEN cDNA 2310061K06
  misc_feature (4)..(284): NCBI GI NO: 13384956 NR Description: RIKEN cDNA 2310061K06 [Mus musculus]
  misc_feature (4)..(284): NCBI GI NO: 39593613 NR Description: Hypothetical protein CBG05897
MPQRHSKNNNDLAFFTYEEKRKLGYGTQRERLGKDSIKPFDACCLCLKPLIDPLACPKGHTFCKECILECLLAQKKDIKRKLIAHDSQKKQEKEEEEEKLVLQKSKELDAFDQQNHGAVPQYYDRSGSQDKNGFHGANSVKTTSFEEEALRTMKAFWLPSATPEATVKVDAPSTDTICPEGQEKLKLKSLFPISFTEENARQKSNKSVEKSYICPSCKSNLTNTMSLVAISTCGHVFCKKCSDKFIATDKVCLMCSKPCKERNLINLEKGGTGFAAHDDHLEAKNFKHLGSGSGLGLVKPAPKA

SEQ ID NO: 18472 - DNA, 1708 bp, Triticum aestivum
  misc_feature (1)..(1708): Ceres Seq. ID no. 13654539
aggaagagaagagatcagatcagatctcatctcagtctcctctgctcaggtcgccggcgatggcgatggcgccgtccctccgcaccaccgtcctgctcctcctcttcctcctcgccgcctcttctcaggcggaggcggcacaagcggcggaggacggcatccgggtcctctccgccgagaaaaggatcgacctcaccggccccattgtcaaggtcttcctcaccctcaaggtccagaacgccgccaccggcgccgacgcctcacacgtcctcatcgccttcacgcctgccgaggccgaccacctcgccatcgtcaaggccacccgggccgagggcaagcgcaagaagaaggcctacatcccgctcccagtaacacccgccgacgccgccaccgccgctcccaacggcgcccgcctctactccatctcccttcccagcccactaaaacccgccgagaccaccacggtggaggtcttctacgtgctcacccactccctcgagcccttccctgccgagatcacccagtccgagtcccagctcgtctactaccgcgacagcgccgtcatcctctcgccgtaccatgtccaggagcagggcacctacgtcaagacgcccagcagcagggtcgagtccttcaccagggccgaccccaccagccgctcgggccctgatgtcaaatacggcgcgtacagcaaccagctcccatacgcctactcgcccatcattctgcattatgagaacaaccatgcgtttgctgtcgtcgaggagctcgtgcgcaaggtggagatctcccactgggggaacgtccaggtcaccgagcactacaagttgaagcatggcggtgccaagcacaaaggagtcttttcaaggctcgagtatcaggctaggcaatctatcagcggagcgtcatcatttaagaatcttcttgcaaggttgcctccacgagttcattcagtctactatcgtgatgagattggtaacatctcctcatcccatctgcgcagtgattcatacaagtcagaactagaaattgaaccaagatatccgctttttggtgggtggcactgcactttcaccatcggctatggtatgccactgcaagatttcctgtttgaatcggctgatggccgacgctttgccaatcttacatttggatgccctctactgaatactgtggttgataatcttaccatcaaggttgtgcttcccgagggatcgaaaagcccgcaggctgttgttcctttcgagaccgagcaacatcttgagactagctattcatacctggatgttgtggggaggacgacagtggtgataaagaagaaaaacgtagtaggagagcacaatgttccattccaggtgtactacgagttcagtcccatcttcatgctggcggagccgctgatgctggtgaccgcagtgctgctcttgttcgcggcgtgcattgtctatcttcacacggatctgtccatcgcgaaatcgcaggcctcctgaaggaggagtagctgcaaactagtcgttgtgatgaagtaattgatggtggtgaaacattagctttggggagttttgtagaagaagcaagcatgacgataattgattgctgtaggaactttgactcttttttttttattttcctgtggaagaaaaagaaaaatcacaattggattggatgttgagcaacaacttggttagtctgatcaagatacgttttt

SEQ ID NO: 18473 - protein, 495 aa, Triticum aestivum
  peptide (1)..(495): Ceres Seq. ID no. 15219664
  misc_feature (53)..(484): Pfam Name: Pfam Description:  Ribophorin I
  misc_feature (45)..(491): NCBI GI NO: 15226341 NR Description: ribophorin I -related [Arabidopsis thaliana]
  misc_feature (22)..(495): NCBI GI NO: 7489438 NR Description: ribophorin I homolog - barley (fragment)
  misc_feature (28)..(495): NCBI GI NO: 15223039 NR Description: ribophorin I
  misc_feature (27)..(495): NCBI GI NO: 28277278 NR Description: Similar to ribophorin I [Xenopus laevis]
  misc_feature (27)..(495): NCBI GI NO: 28175644 NR Description: Similar to ribophorin I [Xenopus laevis]
  misc_feature (27)..(495): NCBI GI NO: 40674542 NR Description: Unknown (protein for MGC:76266)
  misc_feature (23)..(495): NCBI GI NO: 9857227 NR Description: ribophorin I [Sus scrofa]
  misc_feature (30)..(495): NCBI GI NO: 16359229 NR Description: ribophorin I [Mus musculus]
  misc_feature (30)..(495): NCBI GI NO: 38512106 NR Description: Ribophorin I [Rattus norvegicus]
  misc_feature (31)..(495): NCBI GI NO: 4506675 NR Description: ribophorin I [Homo sapiens]
EEKRSDQISSQSPLLRSPAMAMAPSLRTTVLLLLFLLAASSQAEAAQAAEDGIRVLSAEKRIDLTGPIVKVFLTLKVQNAATGADASHVLIAFTPAEADHLAIVKATRAEGKRKKKAYIPLPVTPADAATAAPNGARLYSISLPSPLKPAETTTVEVFYVLTHSLEPFPAEITQSESQLVYYRDSAVILSPYHVQEQGTYVKTPSSRVESFTRADPTSRSGPDVKYGAYSNQLPYAYSPIILHYENNHAFAVVEELVRKVEISHWGNVQVTEHYKLKHGGAKHKGVFSRLEYQARQSISGASSFKNLLARLPPRVHSVYYRDEIGNISSSHLRSDSYKSELEIEPRYPLFGGWHCTFTIGYGMPLQDFLFESADGRRFANLTFGCPLLNTVVDNLTIKVVLPEGSKSPQAVVPFETEQHLETSYSYLDVVGRTTVVIKKKNVVGEHNVPFQVYYEFSPIFMLAEPLMLVTAVLLLFAACIVYLHTDLSIAKSQAS

SEQ ID NO: 18474 - protein, 476 aa, Triticum aestivum
  peptide (1)..(476): Ceres Seq. ID no. 15219665
  misc_feature (34)..(465): Pfam Name: Pfam Description:  Ribophorin I
  misc_feature (26)..(472): NCBI GI NO: 15226341 NR Description: ribophorin I -related [Arabidopsis thaliana]
  misc_feature (3)..(476): NCBI GI NO: 7489438 NR Description: ribophorin I homolog - barley (fragment)
  misc_feature (9)..(476): NCBI GI NO: 15223039 NR Description: ribophorin I
  misc_feature (8)..(476): NCBI GI NO: 28277278 NR Description: Similar to ribophorin I [Xenopus laevis]
  misc_feature (8)..(476): NCBI GI NO: 28175644 NR Description: Similar to ribophorin I [Xenopus laevis]
  misc_feature (8)..(476): NCBI GI NO: 40674542 NR Description: Unknown (protein for MGC:76266)
  misc_feature (4)..(476): NCBI GI NO: 9857227 NR Description: ribophorin I [Sus scrofa]
  misc_feature (11)..(476): NCBI GI NO: 16359229 NR Description: ribophorin I [Mus musculus]
  misc_feature (11)..(476): NCBI GI NO: 38512106 NR Description: Ribophorin I [Rattus norvegicus]
  misc_feature (12)..(476): NCBI GI NO: 4506675 NR Description: ribophorin I [Homo sapiens]
MAMAPSLRTTVLLLLFLLAASSQAEAAQAAEDGIRVLSAEKRIDLTGPIVKVFLTLKVQNAATGADASHVLIAFTPAEADHLAIVKATRAEGKRKKKAYIPLPVTPADAATAAPNGARLYSISLPSPLKPAETTTVEVFYVLTHSLEPFPAEITQSESQLVYYRDSAVILSPYHVQEQGTYVKTPSSRVESFTRADPTSRSGPDVKYGAYSNQLPYAYSPIILHYENNHAFAVVEELVRKVEISHWGNVQVTEHYKLKHGGAKHKGVFSRLEYQARQSISGASSFKNLLARLPPRVHSVYYRDEIGNISSSHLRSDSYKSELEIEPRYPLFGGWHCTFTIGYGMPLQDFLFESADGRRFANLTFGCPLLNTVVDNLTIKVVLPEGSKSPQAVVPFETEQHLETSYSYLDVVGRTTVVIKKKNVVGEHNVPFQVYYEFSPIFMLAEPLMLVTAVLLLFAACIVYLHTDLSIAKSQAS

SEQ ID NO: 18475 - protein, 474 aa, Triticum aestivum
  peptide (1)..(474): Ceres Seq. ID no. 15219666
  misc_feature (32)..(463): Pfam Name: Pfam Description:  Ribophorin I
  misc_feature (24)..(470): NCBI GI NO: 15226341 NR Description: ribophorin I -related [Arabidopsis thaliana]
  misc_feature (1)..(474): NCBI GI NO: 7489438 NR Description: ribophorin I homolog - barley (fragment)
  misc_feature (7)..(474): NCBI GI NO: 15223039 NR Description: ribophorin I
  misc_feature (6)..(474): NCBI GI NO: 28277278 NR Description: Similar to ribophorin I [Xenopus laevis]
  misc_feature (6)..(474): NCBI GI NO: 28175644 NR Description: Similar to ribophorin I [Xenopus laevis]
  misc_feature (6)..(474): NCBI GI NO: 40674542 NR Description: Unknown (protein for MGC:76266)
  misc_feature (2)..(474): NCBI GI NO: 9857227 NR Description: ribophorin I [Sus scrofa]
  misc_feature (9)..(474): NCBI GI NO: 16359229 NR Description: ribophorin I [Mus musculus]
  misc_feature (9)..(474): NCBI GI NO: 38512106 NR Description: Ribophorin I [Rattus norvegicus]
  misc_feature (10)..(474): NCBI GI NO: 4506675 NR Description: ribophorin I [Homo sapiens]
MAPSLRTTVLLLLFLLAASSQAEAAQAAEDGIRVLSAEKRIDLTGPIVKVFLTLKVQNAATGADASHVLIAFTPAEADHLAIVKATRAEGKRKKKAYIPLPVTPADAATAAPNGARLYSISLPSPLKPAETTTVEVFYVLTHSLEPFPAEITQSESQLVYYRDSAVILSPYHVQEQGTYVKTPSSRVESFTRADPTSRSGPDVKYGAYSNQLPYAYSPIILHYENNHAFAVVEELVRKVEISHWGNVQVTEHYKLKHGGAKHKGVFSRLEYQARQSISGASSFKNLLARLPPRVHSVYYRDEIGNISSSHLRSDSYKSELEIEPRYPLFGGWHCTFTIGYGMPLQDFLFESADGRRFANLTFGCPLLNTVVDNLTIKVVLPEGSKSPQAVVPFETEQHLETSYSYLDVVGRTTVVIKKKNVVGEHNVPFQVYYEFSPIFMLAEPLMLVTAVLLLFAACIVYLHTDLSIAKSQAS

SEQ ID NO: 18476 - DNA, 891 bp, Triticum aestivum
  misc_feature (1)..(891): Ceres Seq. ID no. 13596295
aaaaccctagcgccacaaccagacggcaggtaagggaggaggagagcggcggcgaagatggtgtcgctgaagctgcagaagcgcctggcctcgagcgtcctcaagtgcggcaagggcaaggtctggctcgaccccaatgaggtcaacgagatctccatggccaactcccggcagaacatccggaagctggtaaaggatggtttcatcatcaggaagcctcagaagatccactccaggtctcgtgcaaggagggcacatgaggccaagcagaagggccgtcactctggatatggtaagcgtaggggtaccagggaggctaggctccccaccaagatcctgtggatgcggaggatgcgcgtcctgaggcgccttctgcgcaagtaccgtgaggccaagaagatcgacaagcacatgtaccatgacatgtacctgaaggtcaagggtaacatgttcaagaacaagagggtcctcatggagagtatccacaagtccaaggctgagaaggcaagagagaagaccctctctgatcagtttgaggccaagcgcgccaagagcaaggcaagcagggagaggaagcatgccaggagggaggagagattggctcagggccccagagatcatgcaccagcaccagcggctgcagctccagctccagcagcagcggcaccaaagaaggccaaggccaagaagtgaaggtctgacatgaagctttagctttctggtatcatgaagggttagcctgattttggagcatctgaagttcagaactgttttctgtgcaatatctgtgtgccgcgtatgagataccttaaatatcatatcgtgtttgttctgttggatgttgcttatgcagagtttctttaaacatttcggttcaccgaacctagtttt

SEQ ID NO: 18477 - protein, 211 aa, Triticum aestivum
  peptide (1)..(211): Ceres Seq. ID no. 13596296
  misc_feature (2)..(149): Pfam Name: Pfam Description:  Ribosomal protein L19e
  misc_feature (1)..(208): NCBI GI NO: 29837764 NR Description: putative ribosomal protein L19
  misc_feature (1)..(211): NCBI GI NO: 15218602 NR Description: 60S ribosomal protein L19 (RPL19A)
  misc_feature (1)..(211): NCBI GI NO: 18087585 NR Description: At1g02780/T14P4_3 [Arabidopsis thaliana]
  misc_feature (1)..(204): NCBI GI NO: 40287526 NR Description: 60S ribosomal protein L19 [Capsicum annuum]
  misc_feature (1)..(211): NCBI GI NO: 15235290 NR Description: 60S ribosomal protein L19 (RPL19C)
  misc_feature (1)..(201): NCBI GI NO: 7440943 NR Description: ribosomal protein L19
  misc_feature (1)..(208): NCBI GI NO: 15228314 NR Description: 60S ribosomal protein L19 (RPL19B)
  misc_feature (1)..(182): NCBI GI NO: 28200276 NR Description: ribosomal protein L19
  misc_feature (1)..(182): NCBI GI NO: 28630352 NR Description: ribosomal protein L19 [Branchiostoma lanceolatum]
  misc_feature (1)..(203): NCBI GI NO: 40643028 NR Description: ribosomal protein L19 [Crassostrea gigas]
MVSLKLQKRLASSVLKCGKGKVWLDPNEVNEISMANSRQNIRKLVKDGFIIRKPQKIHSRSRARRAHEAKQKGRHSGYGKRRGTREARLPTKILWMRRMRVLRRLLRKYREAKKIDKHMYHDMYLKVKGNMFKNKRVLMESIHKSKAEKAREKTLSDQFEAKRAKSKASRERKHARREERLAQGPRDHAPAPAAAAPAPAAAAPKKAKAKK

SEQ ID NO: 18478 - protein, 178 aa, Triticum aestivum
  peptide (1)..(178): Ceres Seq. ID no. 13596297
  misc_feature (1)..(116): Pfam Name: Pfam Description:  Ribosomal protein L19e
  misc_feature (1)..(175): NCBI GI NO: 29837764 NR Description: putative ribosomal protein L19
  misc_feature (1)..(178): NCBI GI NO: 15218602 NR Description: 60S ribosomal protein L19 (RPL19A)
  misc_feature (1)..(178): NCBI GI NO: 18087585 NR Description: At1g02780/T14P4_3 [Arabidopsis thaliana]
  misc_feature (1)..(171): NCBI GI NO: 40287526 NR Description: 60S ribosomal protein L19 [Capsicum annuum]
  misc_feature (1)..(178): NCBI GI NO: 15235290 NR Description: 60S ribosomal protein L19 (RPL19C)
  misc_feature (1)..(168): NCBI GI NO: 7440943 NR Description: ribosomal protein L19
  misc_feature (1)..(175): NCBI GI NO: 15228314 NR Description: 60S ribosomal protein L19 (RPL19B)
  misc_feature (1)..(149): NCBI GI NO: 28200276 NR Description: ribosomal protein L19
  misc_feature (1)..(149): NCBI GI NO: 28630352 NR Description: ribosomal protein L19 [Branchiostoma lanceolatum]
  misc_feature (1)..(170): NCBI GI NO: 40643028 NR Description: ribosomal protein L19 [Crassostrea gigas]
MANSRQNIRKLVKDGFIIRKPQKIHSRSRARRAHEAKQKGRHSGYGKRRGTREARLPTKILWMRRMRVLRRLLRKYREAKKIDKHMYHDMYLKVKGNMFKNKRVLMESIHKSKAEKAREKTLSDQFEAKRAKSKASRERKHARREERLAQGPRDHAPAPAAAAPAPAAAAPKKAKAKK

SEQ ID NO: 18479 - protein, 116 aa, Triticum aestivum
  peptide (1)..(116): Ceres Seq. ID no. 13596298
  misc_feature (1)..(54): Pfam Name: Pfam Description:  Ribosomal protein L19e
  misc_feature (1)..(113): NCBI GI NO: 29837764 NR Description: putative ribosomal protein L19
  misc_feature (1)..(116): NCBI GI NO: 15218602 NR Description: 60S ribosomal protein L19 (RPL19A)
  misc_feature (1)..(116): NCBI GI NO: 18087585 NR Description: At1g02780/T14P4_3 [Arabidopsis thaliana]
  misc_feature (1)..(109): NCBI GI NO: 40287526 NR Description: 60S ribosomal protein L19 [Capsicum annuum]
  misc_feature (1)..(116): NCBI GI NO: 15235290 NR Description: 60S ribosomal protein L19 (RPL19C)
  misc_feature (1)..(106): NCBI GI NO: 7440943 NR Description: ribosomal protein L19
  misc_feature (1)..(113): NCBI GI NO: 15228314 NR Description: 60S ribosomal protein L19 (RPL19B)
  misc_feature (1)..(87): NCBI GI NO: 28200276 NR Description: ribosomal protein L19
  misc_feature (1)..(87): NCBI GI NO: 28630352 NR Description: ribosomal protein L19 [Branchiostoma lanceolatum]
  misc_feature (1)..(108): NCBI GI NO: 40643028 NR Description: ribosomal protein L19 [Crassostrea gigas]
MRRMRVLRRLLRKYREAKKIDKHMYHDMYLKVKGNMFKNKRVLMESIHKSKAEKAREKTLSDQFEAKRAKSKASRERKHARREERLAQGPRDHAPAPAAAAPAPAAAAPKKAKAKK

SEQ ID NO: 18480 - DNA, 578 bp, Triticum aestivum
  misc_feature (1)..(578): Ceres Seq. ID no. 13596299
aaaccctagctcgttccccttctagccttaaaccttcttcccccatctcacgaaaaagggcaacatctaagcggcggcggcggcgggcggtgaccatggcggagctgaagcggctgtcggagagccgcgacctaacccgcatcgagcggataggtgcgcactcccacatccgggggctggggctggactcctccatcgaggcccgcgatgcctcggaggggatggtcggccagctccccgcgcgccgcgccgctggactcatcctccagctcatccgccaggggaagatcgccggccgcgccgtcctcctcgcagggcagccggggaccggcaagaccgccctcgccatgggcatcgccaagtcgctcggcgccgagacgcccttcgcctccgtcgctgcctccgagctcttctccctcgacctctccaagaccgaggcgctcacccaggcgttccgccgcgccattggcgttcgcatcaaggaggaagcggagatcattgagggcgaggtcgttgagatctcaatcgaccgccctgtctccgccagtagctcgggcataccttcaggtgctaccgcg

SEQ ID NO: 18481 - protein, 192 aa, Triticum aestivum
  peptide (1)..(192): Ceres Seq. ID no. 13596300
  misc_feature (101)..(150): Pfam Name: AAA Pfam Description: ATPase family associated with various cellular activities
  misc_feature (32)..(185): NCBI GI NO: 15240788 NR Description: RuvB DNA helicase-related protein
  misc_feature (32)..(184): NCBI GI NO: 15229623 NR Description: RuvB DNA helicase - like protein
  misc_feature (31)..(186): NCBI GI NO: 6755382 NR Description: RuvB-like protein 2 [Mus musculus]
  misc_feature (31)..(186): NCBI GI NO: 4929561 NR Description: CGI-46 protein [Homo sapiens]
  misc_feature (31)..(186): NCBI GI NO: 5730023 NR Description: RuvB-like 2
  misc_feature (31)..(186): NCBI GI NO: 33872272 NR Description: RUVBL2 protein [Homo sapiens]
  misc_feature (31)..(186): NCBI GI NO: 29126859 NR Description: Similar to RuvB-like protein 2 [Xenopus laevis]
  misc_feature (31)..(186): NCBI GI NO: 30316328 NR Description: RuvB-like 2 (Reptin)
  misc_feature (37)..(186): NCBI GI NO: 27819634 NR Description: RuvB-like protein 2 [Danio rerio]
  misc_feature (41)..(186): NCBI GI NO: 29840994 NR Description: similar to GenBank Accession Number AF151804 CGI-46protein in Homo sapiens
TLARSPSSLKPSSPISRKRATSKRRRRRAVTMAELKRLSESRDLTRIERIGAHSHIRGLGLDSSIEARDASEGMVGQLPARRAAGLILQLIRQGKIAGRAVLLAGQPGTGKTALAMGIAKSLGAETPFASVAASELFSLDLSKTEALTQAFRRAIGVRIKEEAEIIEGEVVEISIDRPVSASSSGIPSGATA

SEQ ID NO: 18482 - protein, 161 aa, Triticum aestivum
  peptide (1)..(161): Ceres Seq. ID no. 13596301
  misc_feature (70)..(119): Pfam Name: AAA Pfam Description: ATPase family associated with various cellular activities
  misc_feature (1)..(154): NCBI GI NO: 15240788 NR Description: RuvB DNA helicase-related protein
  misc_feature (1)..(153): NCBI GI NO: 15229623 NR Description: RuvB DNA helicase - like protein
  misc_feature (1)..(155): NCBI GI NO: 6755382 NR Description: RuvB-like protein 2 [Mus musculus]
  misc_feature (1)..(155): NCBI GI NO: 4929561 NR Description: CGI-46 protein [Homo sapiens]
  misc_feature (1)..(155): NCBI GI NO: 5730023 NR Description: RuvB-like 2
  misc_feature (1)..(155): NCBI GI NO: 33872272 NR Description: RUVBL2 protein [Homo sapiens]
  misc_feature (1)..(155): NCBI GI NO: 29126859 NR Description: Similar to RuvB-like protein 2 [Xenopus laevis]
  misc_feature (1)..(155): NCBI GI NO: 30316328 NR Description: RuvB-like 2 (Reptin)
  misc_feature (6)..(155): NCBI GI NO: 27819634 NR Description: RuvB-like protein 2 [Danio rerio]
  misc_feature (10)..(155): NCBI GI NO: 29840994 NR Description: similar to GenBank Accession Number AF151804 CGI-46protein in Homo sapiens
MAELKRLSESRDLTRIERIGAHSHIRGLGLDSSIEARDASEGMVGQLPARRAAGLILQLIRQGKIAGRAVLLAGQPGTGKTALAMGIAKSLGAETPFASVAASELFSLDLSKTEALTQAFRRAIGVRIKEEAEIIEGEVVEISIDRPVSASSSGIPSGATA

SEQ ID NO: 18483 - protein, 123 aa, Triticum aestivum
  peptide (1)..(123): Ceres Seq. ID no. 13596302
  misc_feature (27)..(80): Pfam Name: 20 copies Pfam Description: Collagen triple helix repeat
  misc_feature (1)..(117): NCBI GI NO: 2429362 NR Description: proline rich protein [Santalum album]
  misc_feature (1)..(122): NCBI GI NO: 1076205 NR Description: hypothetical protein WP6 - Chlamydomonas eugametos
  misc_feature (1)..(86): NCBI GI NO: 22988596 NR Description: hypothetical protein [Burkholderia fungorum]
  misc_feature (1)..(91): NCBI GI NO: 1076205 NR Description: hypothetical protein WP6 - Chlamydomonas eugametos
MPRRGWSASSPRAAPLDSSSSSSARGRSPAAPSSSQGSRGPARPPSPWASPSRSAPRRPSPPSLPPSSSPSTSPRPRRSPRRSAAPLAFASRRKRRSLRARSLRSQSTALSPPVARAYLQVLP

SEQ ID NO: 18484 - DNA, 1247 bp, Triticum aestivum
  misc_feature (1)..(1247): Ceres Seq. ID no. 13596354
ccgtatatcccaacccaaccccagcaaaagcagtccgcgacttgcgagcagagtacacgacgcgaccgcgagccaaaccctaccgcgaacacgtcggcgatgagctcctccaacggcaacggcgggaagaagccggcaccgtccggcgggcgcgggggcatccgcaccctcgccgacatcaaccgcggcccctccgggttcccaggcgcaggcggcagcggcagcgactccgatgagccccaggagtactacaccggcggcgagaagagtgggatgcttgttcaagatccaacaaggagaaataatgtggactcaatctttgagcaagctagagtgatgggtgctcagcaagttccactgccttcttttgaaggccaatcttccagctcaaccagctttgcaggaacaggtcgtctgctttcaggggatgcgcagacagcaccagctgctcctcaaccaccgcaggatgttcttcacaatatacatttctggaacaatggtttcacagtagatgatggtccactaagagcctatgaggacgctgcaaatgcagacttcattgagagcatcaagaagtcccagtgcccccaagagctggagcctgctgatcgaaggacagctgtccatgtcaatgttataaaacgacatggagattatgaggaacctgcaaggcctcgatcagctttccagggtgttggtagaacccttggtgggtcttcagcagatgagagtcctgcaccagctcctgtgacacaagagccccacggtgctcccaggtcaattggcatagttgtggacgactcgcagccctttacatccatacagctaaggttagcggacggcactcgcatggtcgctcggtttaaccttaaccacaccgtgggcgacatcaggtctttcattgatgcatcccgcccaggagctgcgcggccgtatcagttgcagactggcttcccacccaagcagctgactgaccctacgcagactgttgaccaagctggactcaagaactccgttatcatgcagaagatgtagttctcaccgagctggatctgtcgcacagaatgtctttccgatgcaattattaaattagtgctgctgaatggtttatcatgtccactagatactgcactttgcatgcaacctgtgatgtactggttgttttgtcgataaacgtcagtggagtctatattcgtcttgctaccaattatgaatgtctatcaaagttaatgaatgtccggttgtct

SEQ ID NO: 18485 - protein, 344 aa, Triticum aestivum
  peptide (1)..(344): Ceres Seq. ID no. 13596355
  misc_feature (266)..(343): Pfam Name: Pfam Description:  UBX domain
  misc_feature (43)..(343): NCBI GI NO: 18412499 NR Description: membrane trafficking factor -related
  misc_feature (43)..(343): NCBI GI NO: 7487458 NR Description: hypothetical protein T27D20
  misc_feature (1)..(344): NCBI GI NO: 13123659 NR Description: phosphatase-like protein Psc923 [Pisum sativum]
  misc_feature (42)..(343): NCBI GI NO: 13123657 NR Description: phosphatase-like protein Mtc923
  misc_feature (7)..(343): NCBI GI NO: 18414442 NR Description: phosphatase like protein [Arabidopsis thaliana]
  misc_feature (7)..(343): NCBI GI NO: 15292665 NR Description: putative phosphatase [Arabidopsis thaliana]
  misc_feature (43)..(343): NCBI GI NO: 15234731 NR Description: expressed protein [Arabidopsis thaliana]
  misc_feature (7)..(340): NCBI GI NO: 7485149 NR Description: hypothetical protein - Arabidopsis thaliana
  misc_feature (2)..(325): NCBI GI NO: 40739694 NR Description: hypothetical protein AN8228.2
  misc_feature (76)..(344): NCBI GI NO: 20149635 NR Description: p47 protein [Homo sapiens]
PYIPTQPQQKQSATCEQSTRRDREPNPTANTSAMSSSNGNGGKKPAPSGGRGGIRTLADINRGPSGFPGAGGSGSDSDEPQEYYTGGEKSGMLVQDPTRRNNVDSIFEQARVMGAQQVPLPSFEGQSSSSTSFAGTGRLLSGDAQTAPAAPQPPQDVLHNIHFWNNGFTVDDGPLRAYEDAANADFIESIKKSQCPQELEPADRRTAVHVNVIKRHGDYEEPARPRSAFQGVGRTLGGSSADESPAPAPVTQEPHGAPRSIGIVVDDSQPFTSIQLRLADGTRMVARFNLNHTVGDIRSFIDASRPGAARPYQLQTGFPPKQLTDPTQTVDQAGLKNSVIMQKM

SEQ ID NO: 18486 - protein, 311 aa, Triticum aestivum
  peptide (1)..(311): Ceres Seq. ID no. 13596356
  misc_feature (233)..(310): Pfam Name: Pfam Description:  UBX domain
  misc_feature (10)..(310): NCBI GI NO: 18412499 NR Description: membrane trafficking factor -related
  misc_feature (10)..(310): NCBI GI NO: 7487458 NR Description: hypothetical protein T27D20
  misc_feature (1)..(311): NCBI GI NO: 13123659 NR Description: phosphatase-like protein Psc923 [Pisum sativum]
  misc_feature (9)..(310): NCBI GI NO: 13123657 NR Description: phosphatase-like protein Mtc923
  misc_feature (1)..(310): NCBI GI NO: 18414442 NR Description: phosphatase like protein [Arabidopsis thaliana]
  misc_feature (1)..(310): NCBI GI NO: 15292665 NR Description: putative phosphatase [Arabidopsis thaliana]
  misc_feature (10)..(310): NCBI GI NO: 15234731 NR Description: expressed protein [Arabidopsis thaliana]
  misc_feature (1)..(307): NCBI GI NO: 7485149 NR Description: hypothetical protein - Arabidopsis thaliana
  misc_feature (1)..(292): NCBI GI NO: 40739694 NR Description: hypothetical protein AN8228.2
  misc_feature (43)..(311): NCBI GI NO: 20149635 NR Description: p47 protein [Homo sapiens]
MSSSNGNGGKKPAPSGGRGGIRTLADINRGPSGFPGAGGSGSDSDEPQEYYTGGEKSGMLVQDPTRRNNVDSIFEQARVMGAQQVPLPSFEGQSSSSTSFAGTGRLLSGDAQTAPAAPQPPQDVLHNIHFWNNGFTVDDGPLRAYEDAANADFIESIKKSQCPQELEPADRRTAVHVNVIKRHGDYEEPARPRSAFQGVGRTLGGSSADESPAPAPVTQEPHGAPRSIGIVVDDSQPFTSIQLRLADGTRMVARFNLNHTVGDIRSFIDASRPGAARPYQLQTGFPPKQLTDPTQTVDQAGLKNSVIMQKM

SEQ ID NO: 18487 - protein, 253 aa, Triticum aestivum
  peptide (1)..(253): Ceres Seq. ID no. 13596357
  misc_feature (175)..(252): Pfam Name: Pfam Description:  UBX domain
  misc_feature (1)..(252): NCBI GI NO: 18412499 NR Description: membrane trafficking factor -related
  misc_feature (1)..(252): NCBI GI NO: 7487458 NR Description: hypothetical protein T27D20
  misc_feature (1)..(253): NCBI GI NO: 13123659 NR Description: phosphatase-like protein Psc923 [Pisum sativum]
  misc_feature (1)..(252): NCBI GI NO: 13123657 NR Description: phosphatase-like protein Mtc923
  misc_feature (1)..(252): NCBI GI NO: 18414442 NR Description: phosphatase like protein [Arabidopsis thaliana]
  misc_feature (1)..(252): NCBI GI NO: 15292665 NR Description: putative phosphatase [Arabidopsis thaliana]
  misc_feature (1)..(252): NCBI GI NO: 15234731 NR Description: expressed protein [Arabidopsis thaliana]
  misc_feature (1)..(249): NCBI GI NO: 7485149 NR Description: hypothetical protein - Arabidopsis thaliana
  misc_feature (1)..(234): NCBI GI NO: 40739694 NR Description: hypothetical protein AN8228.2
  misc_feature (1)..(253): NCBI GI NO: 20149635 NR Description: p47 protein [Homo sapiens]
MLVQDPTRRNNVDSIFEQARVMGAQQVPLPSFEGQSSSSTSFAGTGRLLSGDAQTAPAAPQPPQDVLHNIHFWNNGFTVDDGPLRAYEDAANADFIESIKKSQCPQELEPADRRTAVHVNVIKRHGDYEEPARPRSAFQGVGRTLGGSSADESPAPAPVTQEPHGAPRSIGIVVDDSQPFTSIQLRLADGTRMVARFNLNHTVGDIRSFIDASRPGAARPYQLQTGFPPKQLTDPTQTVDQAGLKNSVIMQKM

SEQ ID NO: 18488 - DNA, 1704 bp, Triticum aestivum
  misc_feature (1)..(1704): Ceres Seq. ID no. 12627133
acagtagaccacggtcacggacagcggcgacctccttcacagcgtcgctttgccgccggccgtagaaaccctgcaccgccgccgtttggtttcgaattgaatcgggctctgttgatgggcagcttgcgcgctccgcctcagctcgccggcggtaccagccttggtcgcggttaccggccctgtcttgcctcctccggggtccccaaatccaaagtgctgagtgttagctgcccgatgaagtcctataggctgtccgatctcagcgatgccgaggttagcggcctcaaggcgcgccctcgcattgacttcacctccattttcagcacggtgaatccgattgttgaagatgtgcgcgtcagaggtgatgctgcggttaaggattatacagaaaagtttgacaaggtcactctcgataatgccgttgtgcgtgttagcgatctcccagatgcagagcttgatccagctgttaaggaagcctttgatgtggcgtatgacaacatttatgccttccatgtttcacaaaagtcgccagaaaagacagttgagaatatgaaaggcgtgagatgtaaaaggataacaagatgcattggttctgtcgggctgtatgttccagggggcactgcagtcttgccttcaactgcattgatgcttgctgtgcctgcacagattgctggatgcaaaactgtagttcttgccacaccccctagttgtgatggtagcatatgtaaggaggttctttactgtgccaaaaaagctggtgttacacacatactaaaagctgggggagctcaggcaatctccgctatggcatggggaaccgcatcatgcccaaaggttgagaaaatatttggtcctggcaaccagtatgtcacagctgctaaaatgattcttcagaacagcgaagctatggtctctatagacatgcctgctggcccttcagaagttctggtaattgctgacaaatatgccaacccagttcatgttgccgctgatctgctatctcaggcagaacatggcccagatagtcaggttgttctagttattgctggagatggtgttgatttaggtgccattgaagcagaagttagcaagcagtgcgatgctcttcctagaggcgactttgcttccaaagcacttggccacagtttcactgtgtttgccagagatatggttgaggcattatcgttctcaaatatgtatgctcctgagcatttgatcatcaacgtaaaggatgctgagcaatgggaggagctcatcgagaacgcagggtcagttttcttgggacaatggacccccgagagcgtgggtgactatgccagtgggacgaaccacgtcctcccaacctacggttacgcgaggatgtacagcggtgtgtcgctgaactctttcctcaagtacatcactgttcaatccctgactgaagaagggctgagaaggctgggcccctacgtcgcaaagatggcagaagtcgaagggctagaagcgcacaagcgagctgttaccctcagactgcaagaggtcgaagccactgtaactgtgtaaactgttagcatggtctgttgtgccagtctatttgatgcttggggactgatatttttcttcatttttatcggatggaacttgccagagtttaaggtgaagaatacgaagctgtttcatggaataatgctacttatgtcgatctgttaaatgaataaacttgtg

SEQ ID NO: 18489 - protein, 513 aa, Triticum aestivum
  peptide (1)..(513): Ceres Seq. ID no. 12627134
  misc_feature (92)..(505): Pfam Name: Pfam Description:  Histidinol dehydrogenase
  misc_feature (74)..(513): NCBI GI NO: 34904356 NR Description: unnamed protein product
  misc_feature (64)..(509): NCBI GI NO: 10177677 NR Description: histidinol dehydrogenase [Arabidopsis thaliana]
  misc_feature (75)..(509): NCBI GI NO: 30697913 NR Description: histidinol dehydrogenase [Arabidopsis thaliana]
  misc_feature (75)..(509): NCBI GI NO: 30697915 NR Description: histidinol dehydrogenase [Arabidopsis thaliana]
  misc_feature (75)..(512): NCBI GI NO: 123178 NR Description: Histidinol dehydrogenase, chloroplast precursor
  misc_feature (60)..(509): NCBI GI NO: 3982577 NR Description: histidinol dehydrogenase [Thlaspi goesingense]
  misc_feature (79)..(509): NCBI GI NO: 21593566 NR Description: histidinol dehydrogenase [Arabidopsis thaliana]
  misc_feature (69)..(504): NCBI GI NO: 31095443 NR Description: HIS4 [Hebeloma cylindrosporum]
  misc_feature (105)..(504): NCBI GI NO: 40746471 NR Description: hypothetical protein AN0797.2
  misc_feature (81)..(503): NCBI GI NO: 19112678 NR Description: histidinol dehydrogenase
TVDHGHGQRRPPSQRRFAAGRRNPAPPPFGFELNRALLMGSLRAPPQLAGGTSLGRGYRPCLASSGVPKSKVLSVSCPMKSYRLSDLSDAEVSGLKARPRIDFTSIFSTVNPIVEDVRVRGDAAVKDYTEKFDKVTLDNAVVRVSDLPDAELDPAVKEAFDVAYDNIYAFHVSQKSPEKTVENMKGVRCKRITRCIGSVGLYVPGGTAVLPSTALMLAVPAQIAGCKTVVLATPPSCDGSICKEVLYCAKKAGVTHILKAGGAQAISAMAWGTASCPKVEKIFGPGNQYVTAAKMILQNSEAMVSIDMPAGPSEVLVIADKYANPVHVAADLLSQAEHGPDSQVVLVIAGDGVDLGAIEAEVSKQCDALPRGDFASKALGHSFTVFARDMVEALSFSNMYAPEHLIINVKDAEQWEELIENAGSVFLGQWTPESVGDYASGTNHVLPTYGYARMYSGVSLNSFLKYITVQSLTEEGLRRLGPYVAKMAEVEGLEAHKRAVTLRLQEVEATVTV

SEQ ID NO: 18490 - protein, 475 aa, Triticum aestivum
  peptide (1)..(475): Ceres Seq. ID no. 12627135
  misc_feature (54)..(467): Pfam Name: Pfam Description:  Histidinol dehydrogenase
  misc_feature (36)..(475): NCBI GI NO: 34904356 NR Description: unnamed protein product
  misc_feature (26)..(471): NCBI GI NO: 10177677 NR Description: histidinol dehydrogenase [Arabidopsis thaliana]
  misc_feature (37)..(471): NCBI GI NO: 30697913 NR Description: histidinol dehydrogenase [Arabidopsis thaliana]
  misc_feature (37)..(471): NCBI GI NO: 30697915 NR Description: histidinol dehydrogenase [Arabidopsis thaliana]
  misc_feature (37)..(474): NCBI GI NO: 123178 NR Description: Histidinol dehydrogenase, chloroplast precursor
  misc_feature (22)..(471): NCBI GI NO: 3982577 NR Description: histidinol dehydrogenase [Thlaspi goesingense]
  misc_feature (41)..(471): NCBI GI NO: 21593566 NR Description: histidinol dehydrogenase [Arabidopsis thaliana]
  misc_feature (31)..(466): NCBI GI NO: 31095443 NR Description: HIS4 [Hebeloma cylindrosporum]
  misc_feature (67)..(466): NCBI GI NO: 40746471 NR Description: hypothetical protein AN0797.2
  misc_feature (43)..(465): NCBI GI NO: 19112678 NR Description: histidinol dehydrogenase
MGSLRAPPQLAGGTSLGRGYRPCLASSGVPKSKVLSVSCPMKSYRLSDLSDAEVSGLKARPRIDFTSIFSTVNPIVEDVRVRGDAAVKDYTEKFDKVTLDNAVVRVSDLPDAELDPAVKEAFDVAYDNIYAFHVSQKSPEKTVENMKGVRCKRITRCIGSVGLYVPGGTAVLPSTALMLAVPAQIAGCKTVVLATPPSCDGSICKEVLYCAKKAGVTHILKAGGAQAISAMAWGTASCPKVEKIFGPGNQYVTAAKMILQNSEAMVSIDMPAGPSEVLVIADKYANPVHVAADLLSQAEHGPDSQVVLVIAGDGVDLGAIEAEVSKQCDALPRGDFASKALGHSFTVFARDMVEALSFSNMYAPEHLIINVKDAEQWEELIENAGSVFLGQWTPESVGDYASGTNHVLPTYGYARMYSGVSLNSFLKYITVQSLTEEGLRRLGPYVAKMAEVEGLEAHKRAVTLRLQEVEATVTV

SEQ ID NO: 18491 - protein, 435 aa, Triticum aestivum
  peptide (1)..(435): Ceres Seq. ID no. 12627136
  misc_feature (14)..(427): Pfam Name: Pfam Description:  Histidinol dehydrogenase
  misc_feature (1)..(435): NCBI GI NO: 34904356 NR Description: unnamed protein product
  misc_feature (1)..(431): NCBI GI NO: 10177677 NR Description: histidinol dehydrogenase [Arabidopsis thaliana]
  misc_feature (1)..(431): NCBI GI NO: 30697913 NR Description: histidinol dehydrogenase [Arabidopsis thaliana]
  misc_feature (1)..(431): NCBI GI NO: 30697915 NR Description: histidinol dehydrogenase [Arabidopsis thaliana]
  misc_feature (1)..(434): NCBI GI NO: 123178 NR Description: Histidinol dehydrogenase, chloroplast precursor
  misc_feature (1)..(431): NCBI GI NO: 3982577 NR Description: histidinol dehydrogenase [Thlaspi goesingense]
  misc_feature (1)..(431): NCBI GI NO: 21593566 NR Description: histidinol dehydrogenase [Arabidopsis thaliana]
  misc_feature (1)..(426): NCBI GI NO: 31095443 NR Description: HIS4 [Hebeloma cylindrosporum]
  misc_feature (27)..(426): NCBI GI NO: 40746471 NR Description: hypothetical protein AN0797.2
  misc_feature (3)..(425): NCBI GI NO: 19112678 NR Description: histidinol dehydrogenase
MKSYRLSDLSDAEVSGLKARPRIDFTSIFSTVNPIVEDVRVRGDAAVKDYTEKFDKVTLDNAVVRVSDLPDAELDPAVKEAFDVAYDNIYAFHVSQKSPEKTVENMKGVRCKRITRCIGSVGLYVPGGTAVLPSTALMLAVPAQIAGCKTVVLATPPSCDGSICKEVLYCAKKAGVTHILKAGGAQAISAMAWGTASCPKVEKIFGPGNQYVTAAKMILQNSEAMVSIDMPAGPSEVLVIADKYANPVHVAADLLSQAEHGPDSQVVLVIAGDGVDLGAIEAEVSKQCDALPRGDFASKALGHSFTVFARDMVEALSFSNMYAPEHLIINVKDAEQWEELIENAGSVFLGQWTPESVGDYASGTNHVLPTYGYARMYSGVSLNSFLKYITVQSLTEEGLRRLGPYVAKMAEVEGLEAHKRAVTLRLQEVEATVTV

SEQ ID NO: 18492 - DNA, 797 bp, Triticum aestivum
  misc_feature (1)..(797): Ceres Seq. ID no. 12584421
aacagggaagcgaaggcggcggcgcgggcgacgagcggagacgacgactgccggctgccgccttctctccggccaaagaaaccataggtggcaggaggatggaggtgaagctcaaggacctcgtcccggcagcgactaacacagtgaacacgacgttcatcgtggttgacaaggcgccacgcccgacccacgcaaacgcgcacggcagggaggagacatgcccgtcactagtggctgacgagacggcagcggtgcatttccttctgtggggcaccgagtgcgatgccttcgagtctggggacatcgtgcggctcacgagtggcatcttctcgtaccatagaggcaacaacctgttcttgcgcgccgggaagcgaggacgaatggagaaggtgggcgagttcaccatgatgttcgtcgagacgcccaacatgagcgaggtgaggtgggggcccgatccaggcgacccaaggaagatggtgcaggaggctgtcgtgtcgccctactcccaagtcttcaagccgctgcattgatgcctatcatttcaggcttccagctcattgttgctaagtctcattaaatcatatgcaatagtgcaatactaaccgtggtagtaaattatgcaacactaaccacttgctgagttttgtatgctttctccttaaaatgtcactgggccatcgttctaatgtcttgagatgtttctcatgtaaacggagctcatagaagatttagctagccaaaagtatatcccaagctgtgttgatgtgaacaacagtgtactttttccctgaaatgtc

SEQ ID NO: 18493 - protein, 175 aa, Triticum aestivum
  peptide (1)..(175): Ceres Seq. ID no. 12584422
  misc_feature (77)..(143): Pfam Name: Pfam Description:  OB-fold nucleic acid binding domain
  misc_feature (35)..(174): NCBI GI NO: 34898746 NR Description: hypothetical protein~similar to Arabidopsisthaliana chromosome5
  misc_feature (35)..(174): NCBI GI NO: 34898750 NR Description: hypothetical protein~similar to Arabidopsisthaliana chromosome5
  misc_feature (33)..(174): NCBI GI NO: 15242865 NR Description: unknown protein; protein id: At5g63690.1
  misc_feature (34)..(166): NCBI GI NO: 28076937 NR Description: RIKEN cDNA 2610036N15 [Mus musculus]
  misc_feature (34)..(145): NCBI GI NO: 13129048 NR Description: hypothetical protein MGC2731 [Homo sapiens]
  misc_feature (34)..(145): NCBI GI NO: 34862206 NR Description: similar to RIKEN cDNA 2610036N15
  misc_feature (37)..(160): NCBI GI NO: 16877754 NR Description: Similar to RIKEN cDNA 4930434H03 gene
  misc_feature (37)..(160): NCBI GI NO: 30844321 NR Description: RIKEN cDNA 5830411E10 [Mus musculus]
  misc_feature (37)..(160): NCBI GI NO: 26340138 NR Description: unnamed protein product [Mus musculus]
  misc_feature (35)..(166): NCBI GI NO: 20129311 NR Description: CG5181-PA [Drosophila melanogaster]
QGSEGGGAGDERRRRLPAAAFSPAKETIGGRRMEVKLKDLVPAATNTVNTTFIVVDKAPRPTHANAHGREETCPSLVADETAAVHFLLWGTECDAFESGDIVRLTSGIFSYHRGNNLFLRAGKRGRMEKVGEFTMMFVETPNMSEVRWGPDPGDPRKMVQEAVVSPYSQVFKPLH

SEQ ID NO: 18494 - protein, 143 aa, Triticum aestivum
  peptide (1)..(143): Ceres Seq. ID no. 12584423
  misc_feature (45)..(111): Pfam Name: Pfam Description:  OB-fold nucleic acid binding domain
  misc_feature (3)..(142): NCBI GI NO: 34898746 NR Description: hypothetical protein~similar to Arabidopsisthaliana chromosome5
  misc_feature (3)..(142): NCBI GI NO: 34898750 NR Description: hypothetical protein~similar to Arabidopsisthaliana chromosome5
  misc_feature (1)..(142): NCBI GI NO: 15242865 NR Description: unknown protein; protein id: At5g63690.1
  misc_feature (2)..(134): NCBI GI NO: 28076937 NR Description: RIKEN cDNA 2610036N15 [Mus musculus]
  misc_feature (2)..(113): NCBI GI NO: 13129048 NR Description: hypothetical protein MGC2731 [Homo sapiens]
  misc_feature (2)..(113): NCBI GI NO: 34862206 NR Description: similar to RIKEN cDNA 2610036N15
  misc_feature (5)..(128): NCBI GI NO: 16877754 NR Description: Similar to RIKEN cDNA 4930434H03 gene
  misc_feature (5)..(128): NCBI GI NO: 30844321 NR Description: RIKEN cDNA 5830411E10 [Mus musculus]
  misc_feature (5)..(128): NCBI GI NO: 26340138 NR Description: unnamed protein product [Mus musculus]
  misc_feature (3)..(134): NCBI GI NO: 20129311 NR Description: CG5181-PA [Drosophila melanogaster]
MEVKLKDLVPAATNTVNTTFIVVDKAPRPTHANAHGREETCPSLVADETAAVHFLLWGTECDAFESGDIVRLTSGIFSYHRGNNLFLRAGKRGRMEKVGEFTMMFVETPNMSEVRWGPDPGDPRKMVQEAVVSPYSQVFKPLH

SEQ ID NO: 18495 - DNA, 613 bp, Triticum aestivum
  misc_feature (1)..(613): Ceres Seq. ID no. 12584462
atagattccaaagccagccaaccatctaatcagtaatggaggggctcatcccgttcgtctacaaggccatcaaggagcggcgcacccggagctactccaggtgcggctcggcgcgcggcgccgccgtcgcggacgaggacgacgtctgggagcagcagaagcagcagtgggcggcggcggacggcgcggggagggaggcggggcaccggcggcaccggtcgctggaggagctggccggcgaggtgggctccgcggcgcccgagtggccggcccgcggggcgatgcgccggggccggagcgccaggatcttctcctgcatcggcggcatgtgatcaatacgtatgaatgatacgtgctgctggtgctctgcctgctttgtttagctactactttagccgtgcctgtaaggtaaggttcatggtgatttgaagacgaagagtagtacgtagaagagtctgtgtggtgcgcgcgtgttgtgtgtactccagccaaagtgtatatacatgggtttgatgatgctgaagatgtaaaaactggtggtgcatgctcgtttgagcctgtccaaccgatggtactgcacgaatggactcgtttgcaagctacgtgttcaggg

SEQ ID NO: 18496 - protein, 98 aa, Triticum aestivum
  peptide (1)..(98): Ceres Seq. ID no. 12584463
  misc_feature (1)..(82): NCBI GI NO: 34907500 NR Description: B1099D03.20
MEGLIPFVYKAIKERRTRSYSRCGSARGAAVADEDDVWEQQKQQWAAADGAGREAGHRRHRSLEELAGEVGSAAPEWPARGAMRRGRSARIFSCIGGM

SEQ ID NO: 18497 - DNA, 1245 bp, Triticum aestivum
  misc_feature (1)..(1245): Ceres Seq. ID no. 13598327
acacacaggcagaatatggagaccaagcagagcacagaagggaaatggtcgcacgggaagaccatgccggtgaagaacgtccaggcgctggccgcggacgcggcggagctgacggaggaggccatcaagcggtacatcaggccggcgagggccgacgatgtcgtcgttgctgctcacggcgataatagcagccagagcattcctgtgatcgaccttggtaggctccttgatccccggagctatcagctggaggcggccaggctcaggtccgcatgtgaggagtggggcttcttccaggtgaaaaaccatgaaattcctgacacagttcttgaaaacatgaggaacgacctcgagcacttcttcaggcttcccctcgatgagaagaacagatttggccagttgcctggagacctccaaggctatggccaagcatttgttgagtccgaacatcaaacgctcgactggtgtgacaggctttacctagtgacccagccacctcacgatcgtgaaatgagaccatggcctacaactcctgtcagcttcagggaatccattgagtcgtactcctctgagctgatgagggtgactggctcgctcatggcaatcatcgctagaaacctaggcgttgatctccccagtgatacatacgtgagtcaggcattgaggatgacctactaccctgcatgccccgtggctcatgataaggttttggggatttcaccacattccgacatttctatgctaacgctggtatgggagttgaatatggtgggagggctccagatcaagagacaagatgcatgggtgccggtaaaaccccacccccaaggcattggtggtgaatgttggtgactttcttgagataatgacaaacggaaagtaccaaagcattgagcacagggtcaccgttaatcctcacaaggagaggatgtccatttctgcttttcacctcccaaagtttgatatgagcgtgggcccattatctgaaatagttggggccgagctcaagaaatacaagaccctgagggtggacgaggttgctaaggttgttttctcgagcaaacttgacggcaagaaaaccaaggactatgccatgcttagagtctgagtctacaagagcagaaacttggagcagaaatttcgacagccgtatataggcctgaaacatttgcgctgctccattttggtcatggttaattggccgatgtatatgaatgtgaactaataaatgtatccagatgtgag

SEQ ID NO: 18498 - protein, 283 aa, Triticum aestivum
  peptide (1)..(283): Ceres Seq. ID no. 15222308
  misc_feature (217)..(278): Pfam Name: II Pfam Description: 2OG-Fe
  misc_feature (21)..(277): NCBI GI NO: 37536802 NR Description: putative ethylene-forming enzyme
  misc_feature (21)..(277): NCBI GI NO: 37536804 NR Description: putative ethylene-forming enzyme
  misc_feature (21)..(275): NCBI GI NO: 37536796 NR Description: putative dioxygenase
  misc_feature (21)..(272): NCBI GI NO: 37536792 NR Description: putative dioxygenase
  misc_feature (20)..(273): NCBI GI NO: 34895204 NR Description: P0463A02.24
  misc_feature (21)..(271): NCBI GI NO: 37536808 NR Description: putative ethylene-forming enzyme
  misc_feature (25)..(275): NCBI GI NO: 37536820 NR Description: putative ethylene-forming enzyme
  misc_feature (13)..(278): NCBI GI NO: 15235017 NR Description: oxidoreductase, 2OG-Fe(II) oxygenase family
  misc_feature (43)..(278): NCBI GI NO: 18402992 NR Description: oxidoreductase, 2OG-Fe(II) oxygenase family
  misc_feature (6)..(275): NCBI GI NO: 15219988 NR Description: oxidoreductase, 2OG-Fe(II) oxygenase family
THRQNMETKQSTEGKWSHGKTMPVKNVQALAADAAELTEEAIKRYIRPARADDVVVAAHGDNSSQSIPVIDLGRLLDPRSYQLEAARLRSACEEWGFFQVKNHEIPDTVLENMRNDLEHFFRLPLDEKNRFGQLPGDLQGYGQAFVESEHQTLDWCDRLYLVTQPPHDREMRPWPTTPVSFRESIESYSSELMRVTGSLMAIIARNLGVDLPSDTYVSQALRMTYYPACPVAHDKVLGISPHSDISMLTLVWELNMVGGLQIKRQDAWVPVKPHPQGIGGECW

SEQ ID NO: 18499 - protein, 278 aa, Triticum aestivum
  peptide (1)..(278): Ceres Seq. ID no. 15222309
  misc_feature (212)..(273): Pfam Name: II Pfam Description: 2OG-Fe
  misc_feature (16)..(272): NCBI GI NO: 37536802 NR Description: putative ethylene-forming enzyme
  misc_feature (16)..(272): NCBI GI NO: 37536804 NR Description: putative ethylene-forming enzyme
  misc_feature (16)..(270): NCBI GI NO: 37536796 NR Description: putative dioxygenase
  misc_feature (16)..(267): NCBI GI NO: 37536792 NR Description: putative dioxygenase
  misc_feature (15)..(268): NCBI GI NO: 34895204 NR Description: P0463A02.24
  misc_feature (16)..(266): NCBI GI NO: 37536808 NR Description: putative ethylene-forming enzyme
  misc_feature (20)..(270): NCBI GI NO: 37536820 NR Description: putative ethylene-forming enzyme
  misc_feature (8)..(273): NCBI GI NO: 15235017 NR Description: oxidoreductase, 2OG-Fe(II) oxygenase family
  misc_feature (38)..(273): NCBI GI NO: 18402992 NR Description: oxidoreductase, 2OG-Fe(II) oxygenase family
  misc_feature (1)..(270): NCBI GI NO: 15219988 NR Description: oxidoreductase, 2OG-Fe(II) oxygenase family
METKQSTEGKWSHGKTMPVKNVQALAADAAELTEEAIKRYIRPARADDVVVAAHGDNSSQSIPVIDLGRLLDPRSYQLEAARLRSACEEWGFFQVKNHEIPDTVLENMRNDLEHFFRLPLDEKNRFGQLPGDLQGYGQAFVESEHQTLDWCDRLYLVTQPPHDREMRPWPTTPVSFRESIESYSSELMRVTGSLMAIIARNLGVDLPSDTYVSQALRMTYYPACPVAHDKVLGISPHSDISMLTLVWELNMVGGLQIKRQDAWVPVKPHPQGIGGECW

SEQ ID NO: 18500 - protein, 262 aa, Triticum aestivum
  peptide (1)..(262): Ceres Seq. ID no. 15222310
  misc_feature (196)..(257): Pfam Name: II Pfam Description: 2OG-Fe
  misc_feature (1)..(256): NCBI GI NO: 37536802 NR Description: putative ethylene-forming enzyme
  misc_feature (1)..(256): NCBI GI NO: 37536804 NR Description: putative ethylene-forming enzyme
  misc_feature (1)..(254): NCBI GI NO: 37536796 NR Description: putative dioxygenase
  misc_feature (1)..(251): NCBI GI NO: 37536792 NR Description: putative dioxygenase
  misc_feature (1)..(252): NCBI GI NO: 34895204 NR Description: P0463A02.24
  misc_feature (1)..(250): NCBI GI NO: 37536808 NR Description: putative ethylene-forming enzyme
  misc_feature (4)..(254): NCBI GI NO: 37536820 NR Description: putative ethylene-forming enzyme
  misc_feature (1)..(257): NCBI GI NO: 15235017 NR Description: oxidoreductase, 2OG-Fe(II) oxygenase family
  misc_feature (22)..(257): NCBI GI NO: 18402992 NR Description: oxidoreductase, 2OG-Fe(II) oxygenase family
  misc_feature (1)..(254): NCBI GI NO: 15219988 NR Description: oxidoreductase, 2OG-Fe(II) oxygenase family
MPVKNVQALAADAAELTEEAIKRYIRPARADDVVVAAHGDNSSQSIPVIDLGRLLDPRSYQLEAARLRSACEEWGFFQVKNHEIPDTVLENMRNDLEHFFRLPLDEKNRFGQLPGDLQGYGQAFVESEHQTLDWCDRLYLVTQPPHDREMRPWPTTPVSFRESIESYSSELMRVTGSLMAIIARNLGVDLPSDTYVSQALRMTYYPACPVAHDKVLGISPHSDISMLTLVWELNMVGGLQIKRQDAWVPVKPHPQGIGGECW

SEQ ID NO: 18501 - DNA, 1600 bp, Triticum aestivum
  misc_feature (1)..(1600): Ceres Seq. ID no. 13591190
agagcagagcagaacttgaagcagaacagagccaaaaccaacccaaaaagcatttcgtgctaggacagtgaagccatggagaagaccgttgtcctgtaccctggcgtcggcgtcggccacctggtgccgatggtggaggtcgccaagctgttcctcaagcacggcctggccgtcaccgtggtgctcatcgatccgcaggtcgagtccacggacttctccgccgccgtcgcccgcgcgagggcctccaacccctccgtcgccttccacgtcctgccgccgccgcccgccgattccaactccaacagcgcgcccacgcaccccgtcatccagattttccggctcctgaaatccatgaacgctcccctcctcgacttcctccgctcgctgccctccgtcgacgcactcgtcctcgacatgttctgcgtcgacgcccaagatgtcgcggccgagctcaagctgccggtctactacttctacgcgtcggccgccgccgatctcgcgctcttcttcaacctgccgagcaagctcgccggcagtaaggtaaaggagctcggcgactctatcatcactttcccgggtgttcctccgttaaaggcttcggacttacccgaagtcacccacaacgatgaagtactcaaggccatctcaggcatgttcgaccgaatgccagatgccaacggaattctcattaattccttcgagtcgctggagacgcgggcggtgcgcgctctcaaggacgggctctgcgtccctggtcgtgccacgccgccggtctactgcatcgggccgttggtttcgggaggcggagacaaggagcacgagtgcctccggtggctggacgcgcagccggaccagagcgtggtgttcctctccttcggcagcatgggcacgttctccggtaagcagctcgaggagattgcaactggattagaaaagtcaggggagagattcctgtgggtcgtgcggagcccgcgcaatcccgactacaagtacggcgattcgctgccggagcccgatctcgacgcgctcatgccggaagggttcttggagaggaccaaggacagagggctcgtgatcaagtcttgggcgccgcaggtggaggtcctgcgccacagggcgaccggcgcattcatgacgcactgcggctggaactcgacgctggagggcatcacggcagggttgccgctgctgtgctggccgctgtacgcggagcagaaggtgaacaaggtgcacatagtggagggaatgaagctcggggtggagatgagaggctacaacgaagaggtggttaaggccgaggaagtggaggagaaggtcaggtgggttatggcgtccgagggcggcaaggcgctcagggagcgggtggcggcggcgaaggatgcagctgccgaggcgctcaaggaagggggctcgtccgacttggcgtttgtccaattcctcaacgacctggacacttccatagccccaaccgtgcagcattgatgtgaaacttgtaatctttatttaatgttcgattcgtagtagcgggctatctcattttgatattatatgcggactaagtttatttccgaaccctttcgcagctactgttggtttgttc

SEQ ID NO: 18502 - protein, 468 aa, Triticum aestivum
  peptide (1)..(468): Ceres Seq. ID no. 13591191
  misc_feature (4)..(462): Pfam Name: Pfam Description:  UDP-glucoronosyl and UDP-glucosyl transferase
  misc_feature (1)..(463): NCBI GI NO: 34910204 NR Description: putative flavonol glucosyltransferase
  misc_feature (1)..(462): NCBI GI NO: 34910206 NR Description: putative flavonol glucosyltransferase
  misc_feature (3)..(461): NCBI GI NO: 34910228 NR Description: putative flavonol glucosyltransferase
  misc_feature (1)..(461): NCBI GI NO: 34910222 NR Description: putative flavonol glucosyltransferase
  misc_feature (1)..(458): NCBI GI NO: 34910218 NR Description: putative flavonol glucosyltransferase
  misc_feature (3)..(455): NCBI GI NO: 22535568 NR Description: putative glucosyltransferase
  misc_feature (2)..(455): NCBI GI NO: 21593785 NR Description: putative glucosyltransferase
  misc_feature (2)..(455): NCBI GI NO: 18401158 NR Description: glycosyltransferase family [Arabidopsis thaliana]
  misc_feature (1)..(450): NCBI GI NO: 15234056 NR Description: glycosyltransferase family [Arabidopsis thaliana]
  misc_feature (1)..(465): NCBI GI NO: 28380078 NR Description: Hydroquinone glucosyltransferase
MEKTVVLYPGVGVGHLVPMVEVAKLFLKHGLAVTVVLIDPQVESTDFSAAVARARASNPSVAFHVLPPPPADSNSNSAPTHPVIQIFRLLKSMNAPLLDFLRSLPSVDALVLDMFCVDAQDVAAELKLPVYYFYASAAADLALFFNLPSKLAGSKVKELGDSIITFPGVPPLKASDLPEVTHNDEVLKAISGMFDRMPDANGILINSFESLETRAVRALKDGLCVPGRATPPVYCIGPLVSGGGDKEHECLRWLDAQPDQSVVFLSFGSMGTFSGKQLEEIATGLEKSGERFLWVVRSPRNPDYKYGDSLPEPDLDALMPEGFLERTKDRGLVIKSWAPQVEVLRHRATGAFMTHCGWNSTLEGITAGLPLLCWPLYAEQKVNKVHIVEGMKLGVEMRGYNEEVVKAEEVEEKVRWVMASEGGKALRERVAAAKDAAAEALKEGGSSDLAFVQFLNDLDTSIAPTVQH

SEQ ID NO: 18503 - protein, 450 aa, Triticum aestivum
  peptide (1)..(450): Ceres Seq. ID no. 13591192
  misc_feature (1)..(444): Pfam Name: Pfam Description:  UDP-glucoronosyl and UDP-glucosyl transferase
  misc_feature (1)..(445): NCBI GI NO: 34910204 NR Description: putative flavonol glucosyltransferase
  misc_feature (1)..(444): NCBI GI NO: 34910206 NR Description: putative flavonol glucosyltransferase
  misc_feature (1)..(443): NCBI GI NO: 34910228 NR Description: putative flavonol glucosyltransferase
  misc_feature (1)..(443): NCBI GI NO: 34910222 NR Description: putative flavonol glucosyltransferase
  misc_feature (1)..(440): NCBI GI NO: 34910218 NR Description: putative flavonol glucosyltransferase
  misc_feature (1)..(437): NCBI GI NO: 22535568 NR Description: putative glucosyltransferase
  misc_feature (1)..(437): NCBI GI NO: 21593785 NR Description: putative glucosyltransferase
  misc_feature (1)..(437): NCBI GI NO: 18401158 NR Description: glycosyltransferase family [Arabidopsis thaliana]
  misc_feature (1)..(432): NCBI GI NO: 15234056 NR Description: glycosyltransferase family [Arabidopsis thaliana]
  misc_feature (1)..(447): NCBI GI NO: 28380078 NR Description: Hydroquinone glucosyltransferase
MVEVAKLFLKHGLAVTVVLIDPQVESTDFSAAVARARASNPSVAFHVLPPPPADSNSNSAPTHPVIQIFRLLKSMNAPLLDFLRSLPSVDALVLDMFCVDAQDVAAELKLPVYYFYASAAADLALFFNLPSKLAGSKVKELGDSIITFPGVPPLKASDLPEVTHNDEVLKAISGMFDRMPDANGILINSFESLETRAVRALKDGLCVPGRATPPVYCIGPLVSGGGDKEHECLRWLDAQPDQSVVFLSFGSMGTFSGKQLEEIATGLEKSGERFLWVVRSPRNPDYKYGDSLPEPDLDALMPEGFLERTKDRGLVIKSWAPQVEVLRHRATGAFMTHCGWNSTLEGITAGLPLLCWPLYAEQKVNKVHIVEGMKLGVEMRGYNEEVVKAEEVEEKVRWVMASEGGKALRERVAAAKDAAAEALKEGGSSDLAFVQFLNDLDTSIAPTVQH

SEQ ID NO: 18504 - protein, 376 aa, Triticum aestivum
  peptide (1)..(376): Ceres Seq. ID no. 13591193
  misc_feature (1)..(370): Pfam Name: Pfam Description:  UDP-glucoronosyl and UDP-glucosyl transferase
  misc_feature (1)..(371): NCBI GI NO: 34910204 NR Description: putative flavonol glucosyltransferase
  misc_feature (1)..(370): NCBI GI NO: 34910206 NR Description: putative flavonol glucosyltransferase
  misc_feature (1)..(369): NCBI GI NO: 34910228 NR Description: putative flavonol glucosyltransferase
  misc_feature (1)..(369): NCBI GI NO: 34910222 NR Description: putative flavonol glucosyltransferase
  misc_feature (1)..(366): NCBI GI NO: 34910218 NR Description: putative flavonol glucosyltransferase
  misc_feature (1)..(363): NCBI GI NO: 22535568 NR Description: putative glucosyltransferase
  misc_feature (1)..(363): NCBI GI NO: 21593785 NR Description: putative glucosyltransferase
  misc_feature (1)..(363): NCBI GI NO: 18401158 NR Description: glycosyltransferase family [Arabidopsis thaliana]
  misc_feature (1)..(358): NCBI GI NO: 15234056 NR Description: glycosyltransferase family [Arabidopsis thaliana]
  misc_feature (1)..(373): NCBI GI NO: 28380078 NR Description: Hydroquinone glucosyltransferase
MNAPLLDFLRSLPSVDALVLDMFCVDAQDVAAELKLPVYYFYASAAADLALFFNLPSKLAGSKVKELGDSIITFPGVPPLKASDLPEVTHNDEVLKAISGMFDRMPDANGILINSFESLETRAVRALKDGLCVPGRATPPVYCIGPLVSGGGDKEHECLRWLDAQPDQSVVFLSFGSMGTFSGKQLEEIATGLEKSGERFLWVVRSPRNPDYKYGDSLPEPDLDALMPEGFLERTKDRGLVIKSWAPQVEVLRHRATGAFMTHCGWNSTLEGITAGLPLLCWPLYAEQKVNKVHIVEGMKLGVEMRGYNEEVVKAEEVEEKVRWVMASEGGKALRERVAAAKDAAAEALKEGGSSDLAFVQFLNDLDTSIAPTVQH

SEQ ID NO: 18505 - DNA, 1338 bp, Triticum aestivum
  misc_feature (1)..(1338): Ceres Seq. ID no. 13596375
cccccctccagttcgcacgagaccwttacctwgaacatsytwatcagaaaaccccaaaccctgaaaaggtcacgccgccgctgcgactccggccgccggcctcccctcctagatggaacctcagcaagagtcgaccgtcgacggccgcaagaggcggcgtagaggaggagtcgggaaacgccagaaggattcttcttgctcacaacaggcacctccgcctgcccctccagtggatgcggcctcccccctggagaagcggcgtcgcaaggccggcgaggccgccgcaatacccaaggggcgcaagcctgcgagcctactcgaaaagatgcgtgcaaggttatctggaggtcatttcagaatgttaaacgagaaactgtacacttgcagtggccaggatgcatttgactactttaaaaacgagcctgagctttttgacgtgtatcatgcaggatatcaagagcagatgtcacattggccagagcagccagttaatgtgataatcaagtggttgaagagtcataacaaatcatggaccgttgctgattttggatgtggcaatgcagcagttgctaaaaacgtgaagaacaaggtcttctccatcgatcttgtttcagatgacccttcagtgattgcttgtgatatggctcataccccattggagccatcctctgtagatgtggcgatattctgtctttctttgatgggaaccaactttccgagttatctacaggaagctaacagagtcctcaagccaagtggttggcttcttattgcggaagtgaggagtaggctagacccgaacaccggaggtgctgatcctgataagttctccgaagccatcagccagcttggcttttcccttgtttcgaaggatgagaagaacaaaatgtttgtcctgttttatttcaggaaaaaggaaaagagcaaggtggcgaaaaacattgaatggccccagttgaaaccttgcttatacaagcggcgatgatctcatcctccactatggtcgctccagacctcttccagagtgtggttaaattaatcgatgtcttgtgctaaactagtcatccttttctactcctatttcttttacctttgggcagctgtatgttcaaagaatcagaccacaccagatatgacctagtaagcgctgtaactcgaggcagtttagaagtgtattattatacagttctgaatctgcttcatatcttctttcctgggccttgtaaacgagtggaggataagttcaacaaagggcattatttctgcgttacttattatatttgatactccctctgtaaagaaatataagatcgtttaactcgaggcatgatttctttg

SEQ ID NO: 18506 - protein, 290 aa, Triticum aestivum
  peptide (1)..(290): Ceres Seq. ID no. 15221850
  misc_feature (6)..(290): NCBI GI NO: 30693618 NR Description: expressed protein [Arabidopsis thaliana]
  misc_feature (6)..(279): NCBI GI NO: 9758079 NR Description: contains similarity to unknownprotein~dbj|BAA23705
  misc_feature (253)..(290): NCBI GI NO: 9758079 NR Description: contains similarity to unknownprotein~dbj|BAA23705
  misc_feature (1)..(290): NCBI GI NO: 2662099 NR Description: KIAA0409 [Homo sapiens]
  misc_feature (1)..(290): NCBI GI NO: 12758125 NR Description: KIAA0409 protein [Homo sapiens]
  misc_feature (1)..(290): NCBI GI NO: 20270198 NR Description: RIKEN cDNA 1500003O22 [Mus musculus]
  misc_feature (1)..(290): NCBI GI NO: 26346719 NR Description: unnamed protein product [Mus musculus]
  misc_feature (55)..(290): NCBI GI NO: 17542244 NR Description: Rrp8p like [Caenorhabditis elegans]
  misc_feature (23)..(290): NCBI GI NO: 34858882 NR Description: similar to RIKEN cDNA 1500003O22
  misc_feature (16)..(290): NCBI GI NO: 39587878 NR Description: Hypothetical protein CBG13492
MEPQQESTVDGRKRRRRGGVGKRQKDSSCSQQAPPPAPPVDAASPLEKRRRKAGEAAAIPKGRKPASLLEKMRARLSGGHFRMLNEKLYTCSGQDAFDYFKNEPELFDVYHAGYQEQMSHWPEQPVNVIIKWLKSHNKSWTVADFGCGNAAVAKNVKNKVFSIDLVSDDPSVIACDMAHTPLEPSSVDVAIFCLSLMGTNFPSYLQEANRVLKPSGWLLIAEVRSRLDPNTGGADPDKFSEAISQLGFSLVSKDEKNKMFVLFYFRKKEKSKVAKNIEWPQLKPCLYKRR

SEQ ID NO: 18507 - protein, 219 aa, Triticum aestivum
  peptide (1)..(219): Ceres Seq. ID no. 15221851
  misc_feature (1)..(219): NCBI GI NO: 30693618 NR Description: expressed protein [Arabidopsis thaliana]
  misc_feature (1)..(208): NCBI GI NO: 9758079 NR Description: contains similarity to unknownprotein~dbj|BAA23705
  misc_feature (182)..(219): NCBI GI NO: 9758079 NR Description: contains similarity to unknownprotein~dbj|BAA23705
  misc_feature (1)..(219): NCBI GI NO: 2662099 NR Description: KIAA0409 [Homo sapiens]
  misc_feature (1)..(219): NCBI GI NO: 12758125 NR Description: KIAA0409 protein [Homo sapiens]
  misc_feature (1)..(219): NCBI GI NO: 20270198 NR Description: RIKEN cDNA 1500003O22 [Mus musculus]
  misc_feature (1)..(219): NCBI GI NO: 26346719 NR Description: unnamed protein product [Mus musculus]
  misc_feature (1)..(219): NCBI GI NO: 17542244 NR Description: Rrp8p like [Caenorhabditis elegans]
  misc_feature (1)..(219): NCBI GI NO: 34858882 NR Description: similar to RIKEN cDNA 1500003O22
  misc_feature (1)..(219): NCBI GI NO: 39587878 NR Description: Hypothetical protein CBG13492
MRARLSGGHFRMLNEKLYTCSGQDAFDYFKNEPELFDVYHAGYQEQMSHWPEQPVNVIIKWLKSHNKSWTVADFGCGNAAVAKNVKNKVFSIDLVSDDPSVIACDMAHTPLEPSSVDVAIFCLSLMGTNFPSYLQEANRVLKPSGWLLIAEVRSRLDPNTGGADPDKFSEAISQLGFSLVSKDEKNKMFVLFYFRKKEKSKVAKNIEWPQLKPCLYKRR

SEQ ID NO: 18508 - protein, 208 aa, Triticum aestivum
  peptide (1)..(208): Ceres Seq. ID no. 15221852
  misc_feature (1)..(208): NCBI GI NO: 30693618 NR Description: expressed protein [Arabidopsis thaliana]
  misc_feature (1)..(197): NCBI GI NO: 9758079 NR Description: contains similarity to unknownprotein~dbj|BAA23705
  misc_feature (171)..(208): NCBI GI NO: 9758079 NR Description: contains similarity to unknownprotein~dbj|BAA23705
  misc_feature (1)..(208): NCBI GI NO: 2662099 NR Description: KIAA0409 [Homo sapiens]
  misc_feature (1)..(208): NCBI GI NO: 12758125 NR Description: KIAA0409 protein [Homo sapiens]
  misc_feature (1)..(208): NCBI GI NO: 20270198 NR Description: RIKEN cDNA 1500003O22 [Mus musculus]
  misc_feature (1)..(208): NCBI GI NO: 26346719 NR Description: unnamed protein product [Mus musculus]
  misc_feature (1)..(208): NCBI GI NO: 17542244 NR Description: Rrp8p like [Caenorhabditis elegans]
  misc_feature (1)..(208): NCBI GI NO: 34858882 NR Description: similar to RIKEN cDNA 1500003O22
  misc_feature (1)..(208): NCBI GI NO: 39587878 NR Description: Hypothetical protein CBG13492
MLNEKLYTCSGQDAFDYFKNEPELFDVYHAGYQEQMSHWPEQPVNVIIKWLKSHNKSWTVADFGCGNAAVAKNVKNKVFSIDLVSDDPSVIACDMAHTPLEPSSVDVAIFCLSLMGTNFPSYLQEANRVLKPSGWLLIAEVRSRLDPNTGGADPDKFSEAISQLGFSLVSKDEKNKMFVLFYFRKKEKSKVAKNIEWPQLKPCLYKRR

SEQ ID NO: 18509 - DNA, 1456 bp, Triticum aestivum
  misc_feature (1)..(1456): Ceres Seq. ID no. 13502973
accattacctagaacaycctamtcsarwwcacacacgcacaacacaagaaaccgcaggaaaaataataccaagccgaccaatcatggctcgcccccgcctccggctgctcctcgtcgccgccgccgtcctcctcctcctccacccggccctctcctcggcggcggaggggctggaggaccccctcatcgagcaggtggtcgggggcgacgcggagaacgagctggagctcaacgcggaggcgcacttcgcgagcttcgtccggcggttcggcaagtcctacagggacgccgacgagcacgcgcaccggctctccgtgttcagggacaacctccgccgcgcgcgccgccaccagcgcctcgacccctccgcggtgcacggcatcaccaagttctccgacctcacccccgacgagttccgggagcgcttcctcggcctccgcaagtcccgccggagcttcctcaaggggatctccgggtcggcgcacgacgcgccggccctccccaccgacggcctccccacagagttcgactggcgcgagcacggcgcggtcggcccagtcaaggaccagggttcgtgcgggtcgtgctggtccttcagtacgtcgggggcgctggagggtgccaactacctcgccaccggaaagctggaggtgctcagcgagcagcagctggtcgactgcgaccaccagtgtgacccgtcagaaccacgcgcatgtgatgcgggatgcaatggtggcttgatgactacagctttcagctatctcgcaaaagccggtggcttagaaaccgagaaggattacccatacactgggaggaacagtgcctgcaagtttgacaaatccaaaattgctgctcaagttaagaattttagtactgttgctattgacgaagatcagattgccgctaaccttgtgaaacatggcccacttgcaattggtatcaatgcagtattcatgcaaacgtacattggtggtgtctcatgcccatacatctgcggaaggcatcttgatcatggtgttctcctggttggctatggatcagctggttacgcaccgctccgcttcaaggagaaaccatactggatcataaagaactcatggggcgaaaactggggcgagagcgggtactacaagatctgcaggggtccgcatgtcaaaaacaagtgcggtgtcgattccatggtctccacggttaccgccatccatacctctaagaaggaataagatcttgtagtactcagtctggattgcctatagacatgcttgtgtgccaggactaggtattccatgatggttattccagtattgccttgcaattcgtaaccagtaaatatgtgaaacttctcttgattgctgtaatgtatctctgggttgctatgtattgctacgcagttcttggaacatggtagcagatatttgttgccatcattaatgtatataatctggtgttctggttg

SEQ ID NO: 18510 - protein, 406 aa, Triticum aestivum
  peptide (1)..(406): Ceres Seq. ID no. 15223212
  misc_feature (171)..(398): Pfam Name: Pfam Description:  Papain family cysteine protease
  misc_feature (28)..(406): NCBI GI NO: 38344381 NR Description: OSJNBb0054B09.3
  misc_feature (38)..(405): NCBI GI NO: 1706260 NR Description: Cysteine proteinase 1 precursor
  misc_feature (32)..(403): NCBI GI NO: 15705865 NR Description: cysteine proteinase precursor
  misc_feature (31)..(406): NCBI GI NO: 7211745 NR Description: papain-like cysteine proteinase isoform III
  misc_feature (44)..(405): NCBI GI NO: 34761156 NR Description: cysteine proteinase precursor [Ipomoea batatas]
  misc_feature (44)..(406): NCBI GI NO: 7381219 NR Description: papain-like cysteine proteinase isoform I
  misc_feature (44)..(406): NCBI GI NO: 7211741 NR Description: papain-like cysteine proteinase isoform I
  misc_feature (28)..(403): NCBI GI NO: 7435795 NR Description: cysteine proteinase (EC 3
  misc_feature (36)..(406): NCBI GI NO: 7381221 NR Description: papain-like cysteine proteinase isoform II
  misc_feature (44)..(406): NCBI GI NO: 7211743 NR Description: papain-like cysteine proteinase isoform II
  misc_feature (5)..(5): Xaa is any aa, unknown or other
  misc_feature (7)..(7): Xaa is any aa, unknown or other
  misc_feature (8)..(8): Xaa is any aa, unknown or other
  misc_feature (9)..(9): Xaa is any aa, unknown or other
HYLEXPXXXHTRTTQETAGKIIPSRPIMARPRLRLLLVAAAVLLLLHPALSSAAEGLEDPLIEQVVGGDAENELELNAEAHFASFVRRFGKSYRDADEHAHRLSVFRDNLRRARRHQRLDPSAVHGITKFSDLTPDEFRERFLGLRKSRRSFLKGISGSAHDAPALPTDGLPTEFDWREHGAVGPVKDQGSCGSCWSFSTSGALEGANYLATGKLEVLSEQQLVDCDHQCDPSEPRACDAGCNGGLMTTAFSYLAKAGGLETEKDYPYTGRNSACKFDKSKIAAQVKNFSTVAIDEDQIAANLVKHGPLAIGINAVFMQTYIGGVSCPYICGRHLDHGVLLVGYGSAGYAPLRFKEKPYWIIKNSWGENWGESGYYKICRGPHVKNKCGVDSMVSTVTAIHTSKKE

SEQ ID NO: 18511 - protein, 379 aa, Triticum aestivum
  peptide (1)..(379): Ceres Seq. ID no. 15223213
  misc_feature (144)..(371): Pfam Name: Pfam Description:  Papain family cysteine protease
  misc_feature (1)..(379): NCBI GI NO: 38344381 NR Description: OSJNBb0054B09.3
  misc_feature (11)..(378): NCBI GI NO: 1706260 NR Description: Cysteine proteinase 1 precursor
  misc_feature (5)..(376): NCBI GI NO: 15705865 NR Description: cysteine proteinase precursor
  misc_feature (4)..(379): NCBI GI NO: 7211745 NR Description: papain-like cysteine proteinase isoform III
  misc_feature (17)..(378): NCBI GI NO: 34761156 NR Description: cysteine proteinase precursor [Ipomoea batatas]
  misc_feature (17)..(379): NCBI GI NO: 7381219 NR Description: papain-like cysteine proteinase isoform I
  misc_feature (17)..(379): NCBI GI NO: 7211741 NR Description: papain-like cysteine proteinase isoform I
  misc_feature (1)..(376): NCBI GI NO: 7435795 NR Description: cysteine proteinase (EC 3
  misc_feature (9)..(379): NCBI GI NO: 7381221 NR Description: papain-like cysteine proteinase isoform II
  misc_feature (17)..(379): NCBI GI NO: 7211743 NR Description: papain-like cysteine proteinase isoform II
MARPRLRLLLVAAAVLLLLHPALSSAAEGLEDPLIEQVVGGDAENELELNAEAHFASFVRRFGKSYRDADEHAHRLSVFRDNLRRARRHQRLDPSAVHGITKFSDLTPDEFRERFLGLRKSRRSFLKGISGSAHDAPALPTDGLPTEFDWREHGAVGPVKDQGSCGSCWSFSTSGALEGANYLATGKLEVLSEQQLVDCDHQCDPSEPRACDAGCNGGLMTTAFSYLAKAGGLETEKDYPYTGRNSACKFDKSKIAAQVKNFSTVAIDEDQIAANLVKHGPLAIGINAVFMQTYIGGVSCPYICGRHLDHGVLLVGYGSAGYAPLRFKEKPYWIIKNSWGENWGESGYYKICRGPHVKNKCGVDSMVSTVTAIHTSKKE

SEQ ID NO: 18512 - protein, 230 aa, Triticum aestivum
  peptide (1)..(230): Ceres Seq. ID no. 15223214
  misc_feature (6)..(6): Xaa is any aa, unknown or other
  misc_feature (7)..(7): Xaa is any aa, unknown or other
  misc_feature (8)..(8): Xaa is any aa, unknown or other
  misc_feature (9)..(9): Xaa is any aa, unknown or other
  misc_feature (10)..(10): Xaa is any aa, unknown or other
PLPRTXXXXXHTHNTRNRRKNNTKPTNHGSPPPPAAPRRRRRPPPPPPGPLLGGGGAGGPPHRAGGRGRRGERAGAQRGGALRELRPAVRQVLQGRRRARAPALRVQGQPPPRAPPPAPRPLRGARHHQVLRPHPRRVPGALPRPPQVPPELPQGDLRVGARRAGPPHRRPPHRVRLARARRGRPSQGPGFVRVVLVLQYVGGAGGCQLPRHRKAGGAQRAAAGRLRPPV

SEQ ID NO: 18513 - DNA, 1492 bp, Triticum aestivum
  misc_feature (1)..(1492): Ceres Seq. ID no. 13596376
ctcactcacgtcgcctctctgccagccctcgacatggcgcgttccactcgtctcgtcgcttccaccgccacggctctcctcctcctcctcctgtcggcgtgctcgtgccgcgcggccggcgacagcccgagcgccgtggtgctggcggtgaggaaggacggcgcgacggggcagtacctgacgggcttccggcagcgcacgccccaggtgccggtgacggccgtgctcgacctcggcggcggcacgctctgggtggactgcgacgccgggtacgtgtcctcgtcctacgcgcgcgtgccgtgcgcgtccaagctgtgccgcctcgccaagaccggcgcctgcgccaccagctgcgtcggcaagccatccccggggtgcctcaacgatacctgcggcgggttcccggagaacaccgtcacgcgcgtcagcaccggcgggaacctcatcacggacgtgctgtcggtgtccaccaccttccgcccggggccggggccgctcgccaccgcgccggcgtttctgttcacgtgcggagccacgttcctgaccgagggcctggccgccggcgccaccggcatggcgtcgctcagccgcgcccgcttcgcgctcccgacgcagctcgccgccgccttccgcttctcccgcaagttcgcgctctgcctcacttcgacctccgcggccggggccgtcgtcttcggcgacgcgccctacgcgttccagcccggggtggacctctccaagtcgctcctctacaccccgctgctcgtcaacaacgtgagcaccgccggcgtctccggcgagaaggacaagtcgaacgagtacttcatcggcgtgacggccatcaaggtgaacgggcgcgccgtgccgctgaacgcctcgctgctggtcatcgacaagcagggcggcggcggcaccaagctcagcacggtggcgccctacaccgtgctggagacctccatccacaaggcggtcacggacgcgttcgcggcggagacggccatgatcccccgggtgcgggccgtggcgccgttcaagctctgctacgacgggagcaaggtggggagcacgcgcgtgggcccggccgtgccgaccgtcgagctggtgctgcagagcgaggccgcgtcgtgggtggtgttcggggccaactcgatggtggccgtcaagggcggcgcgctgtgccttggcgtggtggacggcggcgcggccccgcggacgtcggtggtggtcgggggccacatgatggaggacaacctgctggagttcgatctgcagcggtcgcggctcgggttcagctcctccctgctcttccgccagaccacctgcaacaacttccgccttgggtagaaagaaacaaatggcatccggatgggatcgcagaagatgatctgggcgcttgcgtcaagcagactgcaatcgaaatttgtttgtgtgttgtgtttccccttgggttctgttttggctgtttgaataatcaacaggagatcgaacgattgtc

SEQ ID NO: 18514 - protein, 496 aa, Triticum aestivum
  peptide (1)..(496): Ceres Seq. ID no. 13596377
  misc_feature (1)..(420): NCBI GI NO: 23104656 NR Description: hypothetical protein [Azotobacter vinelandii]
  misc_feature (6)..(426): NCBI GI NO: 23106243 NR Description: hypothetical protein [Azotobacter vinelandii]
HSRRLSASPRHGAFHSSRRFHRHGSPPPPPVGVLVPRGRRQPERRGAGGEEGRRDGAVPDGLPAAHAPGAGDGRARPRRRHALGGLRRRVRVLVLRARAVRVQAVPPRQDRRLRHQLRRQAIPGVPQRYLRRVPGEHRHARQHRREPHHGRAVGVHHLPPGAGAARHRAGVSVHVRSHVPDRGPGRRRHRHGVAQPRPLRAPDAARRRLPLLPQVRALPHFDLRGRGRRLRRRALRVPARGGPLQVAPLHPAARQQREHRRRLRREGQVERVLHRRDGHQGERARRAAERLAAGHRQAGRRRHQAQHGGALHRAGDLHPQGGHGRVRGGDGHDPPGAGRGAVQALLRREQGGEHARGPGRADRRAGAAERGRVVGGVRGQLDGGRQGRRAVPWRGGRRRGPADVGGGRGPHDGGQPAGVRSAAVAARVQLLPALPPDHLQQLPPWVERNKWHPDGIAEDDLGACVKQTAIEICLCVVFPLGFCFGCLNNQQEIERL

SEQ ID NO: 18515 - protein, 446 aa, Triticum aestivum
  peptide (1)..(446): Ceres Seq. ID no. 13596378
  misc_feature (43)..(432): Pfam Name: Pfam Description:  Eukaryotic aspartyl protease
  misc_feature (12)..(443): NCBI GI NO: 32482806 NR Description: putative xyloglucanase inhibitor
  misc_feature (12)..(443): NCBI GI NO: 27372527 NR Description: xyloglucan-specific fungal endoglucanase inhibitor protein precursor
  misc_feature (43)..(443): NCBI GI NO: 7488910 NR Description: dermal glycoprotein precursor
  misc_feature (24)..(443): NCBI GI NO: 15218740 NR Description: expressed protein [Arabidopsis thaliana]
  misc_feature (24)..(443): NCBI GI NO: 21537233 NR Description: EDGP precursor [Arabidopsis thaliana]
  misc_feature (15)..(443): NCBI GI NO: 18379072 NR Description: expressed protein [Arabidopsis thaliana]
  misc_feature (46)..(434): NCBI GI NO: 1401240 NR Description: 7S seed globulin precursor
  misc_feature (46)..(434): NCBI GI NO: 14549156 NR Description: Basic 7S globulin precursor (Bg) (SBg7S)
  misc_feature (1)..(442): NCBI GI NO: 662366 NR Description: conglutin gamma [Lupinus angustifolius]
  misc_feature (1)..(442): NCBI GI NO: 99969 NR Description: conglutin gamma precursor
LTHVASLPALDMARSTRLVASTATALLLLLLSACSCRAAGDSPSAVVLAVRKDGATGQYLTGFRQRTPQVPVTAVLDLGGGTLWVDCDAGYVSSSYARVPCASKLCRLAKTGACATSCVGKPSPGCLNDTCGGFPENTVTRVSTGGNLITDVLSVSTTFRPGPGPLATAPAFLFTCGATFLTEGLAAGATGMASLSRARFALPTQLAAAFRFSRKFALCLTSTSAAGAVVFGDAPYAFQPGVDLSKSLLYTPLLVNNVSTAGVSGEKDKSNEYFIGVTAIKVNGRAVPLNASLLVIDKQGGGGTKLSTVAPYTVLETSIHKAVTDAFAAETAMIPRVRAVAPFKLCYDGSKVGSTRVGPAVPTVELVLQSEAASWVVFGANSMVAVKGGALCLGVVDGGAAPRTSVVVGGHMMEDNLLEFDLQRSRLGFSSSLLFRQTTCNNFRLG

SEQ ID NO: 18516 - protein, 435 aa, Triticum aestivum
  peptide (1)..(435): Ceres Seq. ID no. 13596379
  misc_feature (32)..(421): Pfam Name: Pfam Description:  Eukaryotic aspartyl protease
  misc_feature (1)..(432): NCBI GI NO: 32482806 NR Description: putative xyloglucanase inhibitor
  misc_feature (1)..(432): NCBI GI NO: 27372527 NR Description: xyloglucan-specific fungal endoglucanase inhibitor protein precursor
  misc_feature (32)..(432): NCBI GI NO: 7488910 NR Description: dermal glycoprotein precursor
  misc_feature (13)..(432): NCBI GI NO: 15218740 NR Description: expressed protein [Arabidopsis thaliana]
  misc_feature (13)..(432): NCBI GI NO: 21537233 NR Description: EDGP precursor [Arabidopsis thaliana]
  misc_feature (4)..(432): NCBI GI NO: 18379072 NR Description: expressed protein [Arabidopsis thaliana]
  misc_feature (35)..(423): NCBI GI NO: 1401240 NR Description: 7S seed globulin precursor
  misc_feature (35)..(423): NCBI GI NO: 14549156 NR Description: Basic 7S globulin precursor (Bg) (SBg7S)
  misc_feature (1)..(431): NCBI GI NO: 662366 NR Description: conglutin gamma [Lupinus angustifolius]
  misc_feature (1)..(431): NCBI GI NO: 99969 NR Description: conglutin gamma precursor
MARSTRLVASTATALLLLLLSACSCRAAGDSPSAVVLAVRKDGATGQYLTGFRQRTPQVPVTAVLDLGGGTLWVDCDAGYVSSSYARVPCASKLCRLAKTGACATSCVGKPSPGCLNDTCGGFPENTVTRVSTGGNLITDVLSVSTTFRPGPGPLATAPAFLFTCGATFLTEGLAAGATGMASLSRARFALPTQLAAAFRFSRKFALCLTSTSAAGAVVFGDAPYAFQPGVDLSKSLLYTPLLVNNVSTAGVSGEKDKSNEYFIGVTAIKVNGRAVPLNASLLVIDKQGGGGTKLSTVAPYTVLETSIHKAVTDAFAAETAMIPRVRAVAPFKLCYDGSKVGSTRVGPAVPTVELVLQSEAASWVVFGANSMVAVKGGALCLGVVDGGAAPRTSVVVGGHMMEDNLLEFDLQRSRLGFSSSLLFRQTTCNNFRLG

SEQ ID NO: 18517 - DNA, 681 bp, Triticum aestivum
  misc_feature (1)..(681): Ceres Seq. ID no. 13654517
gcacacactctccgcgacaccgtaatccccggcccctccggcgattccccactctctcagccccgatccactccgccgccgcgccagctcgccatggctgccgccgacgaggcgcagggcttccgcccgctggacgaggcgtcgctggtggcctacatccgggcgaccccggcgctggccgccagcctcggcggccgcgtcgacgacctcgccgtcaaggaggtcggcgacggcaacctcaacttcgtctacatcgtctcctccgacgccggctccgtcgtcgtcaagcaggcgctgccgtacatccgctgcgtgggggactcgtggccgatgacgagggagcgggcctactttgaggcctccgcgctgcgggagcacggccgcctctgcccggaccacgtcccggaggtctaccacttcgaccgcgccatgtcgctcatcgggatgcgctacatcaagccgccccacatcatcctccgcaagggcctcatcgccggcgtcgagtaccccctcctcgccgagcacatgtccgactacatggccaagaccctcttcttcacctccctcctctacaactccaccaccgagcacaagaagcaagttgctcgctactgcgagaacgtggagatgtgcaggctcacggagctgtttaaacacaataaagttggaactggagggggg

SEQ ID NO: 18518 - protein, 227 aa, Triticum aestivum
  peptide (1)..(227): Ceres Seq. ID no. 13654518
  misc_feature (37)..(215): NCBI GI NO: 32488394 NR Description: OSJNBa0043A12.24
  misc_feature (31)..(215): NCBI GI NO: 32488395 NR Description: OSJNBa0043A12.25
  misc_feature (41)..(215): NCBI GI NO: 18402794 NR Description: expressed protein [Arabidopsis thaliana]
  misc_feature (36)..(215): NCBI GI NO: 27380009 NR Description: bll4898 [Bradyrhizobium japonicum]
  misc_feature (41)..(215): NCBI GI NO: 13476069 NR Description: hypothetical protein [Mesorhizobium loti]
  misc_feature (37)..(215): NCBI GI NO: 16265283 NR Description: conserved hypothetical protein
  misc_feature (70)..(217): NCBI GI NO: 18921366 NR Description: 5-methylthioribose kinase [Klebsiella pneumoniae]
  misc_feature (58)..(215): NCBI GI NO: 16078420 NR Description: ykrT [Bacillus subtilis]
  misc_feature (58)..(215): NCBI GI NO: 37999472 NR Description: Methylthioribose kinase (MTR kinase)
  misc_feature (74)..(215): NCBI GI NO: 30022120 NR Description: 5-methylthioribose kinase
AHTLRDTVIPGPSGDSPLSQPRSTPPPRQLAMAAADEAQGFRPLDEASLVAYIRATPALAASLGGRVDDLAVKEVGDGNLNFVYIVSSDAGSVVVKQALPYIRCVGDSWPMTRERAYFEASALREHGRLCPDHVPEVYHFDRAMSLIGMRYIKPPHIILRKGLIAGVEYPLLAEHMSDYMAKTLFFTSLLYNSTTEHKKQVARYCENVEMCRLTELFKHNKVGTGGG

SEQ ID NO: 18519 - protein, 196 aa, Triticum aestivum
  peptide (1)..(196): Ceres Seq. ID no. 13654519
  misc_feature (6)..(184): NCBI GI NO: 32488394 NR Description: OSJNBa0043A12.24
  misc_feature (1)..(184): NCBI GI NO: 32488395 NR Description: OSJNBa0043A12.25
  misc_feature (10)..(184): NCBI GI NO: 18402794 NR Description: expressed protein [Arabidopsis thaliana]
  misc_feature (5)..(184): NCBI GI NO: 27380009 NR Description: bll4898 [Bradyrhizobium japonicum]
  misc_feature (10)..(184): NCBI GI NO: 13476069 NR Description: hypothetical protein [Mesorhizobium loti]
  misc_feature (6)..(184): NCBI GI NO: 16265283 NR Description: conserved hypothetical protein
  misc_feature (39)..(186): NCBI GI NO: 18921366 NR Description: 5-methylthioribose kinase [Klebsiella pneumoniae]
  misc_feature (27)..(184): NCBI GI NO: 16078420 NR Description: ykrT [Bacillus subtilis]
  misc_feature (27)..(184): NCBI GI NO: 37999472 NR Description: Methylthioribose kinase (MTR kinase)
  misc_feature (43)..(184): NCBI GI NO: 30022120 NR Description: 5-methylthioribose kinase
MAAADEAQGFRPLDEASLVAYIRATPALAASLGGRVDDLAVKEVGDGNLNFVYIVSSDAGSVVVKQALPYIRCVGDSWPMTRERAYFEASALREHGRLCPDHVPEVYHFDRAMSLIGMRYIKPPHIILRKGLIAGVEYPLLAEHMSDYMAKTLFFTSLLYNSTTEHKKQVARYCENVEMCRLTELFKHNKVGTGGG

SEQ ID NO: 18520 - protein, 117 aa, Triticum aestivum
  peptide (1)..(117): Ceres Seq. ID no. 13654520
THSPRHRNPRPLRRFPTLSAPIHSAAAPARHGCRRRGAGLPPAGRGVAGGLHPGDPGAGRQPRRPRRRPRRQGGRRRQPQLRLHRLLRRRLRRRQAGAAVHPLRGGLVADDEGAGLL

SEQ ID NO: 18521 - DNA, 1688 bp, Triticum aestivum
  misc_feature (1)..(1688): Ceres Seq. ID no. 14301471
agcaatttggcctagactagagtttatctcttgcatttccccgcgcgtagcagcaagcacaagaggagagatcgcgcatttatttacagagctgttgggagaatccaggaggaagtcgaagtactccggtccggccaagaagggggagacagagcgggggaggacgccggggcgccgagtttggggagaggaggagatggagacggacagcccgcggagcccggaggcggagatcgggcaccgggtggaggacctgtgggaggtggcgcagccgcagctgtccccgtcggagaagctcaactcctgcttcgaggacatccccgtcgccgccttcccgcgcacccacccctcgcaagtgatcgagataccttcggatgccagccttgctgatactgttgagacattgtccaagaataaaattttgagtgcacccataagaaacgtcgatgctccagaggatgctacttggatagacaaatacatcggtattgtggaatttgctggtattgcaatgtggttgcttcatcagtctgatgcttcaggtaatggaacagctggttctgcagttggatcacctgtggtcaatctagcatctaggttaggctctttcacattcagaagaacgtcatctggcagggtagaaaccactactgattcagaatcagatgaagctgcatcagtgggtggaagcttttttgaaacccttacttcctctgagttctacaagaacacaaaggttggcgatatctcaggaagcttccgatgggcgccatttcttgccctgcagacatctgacacattcctcactatgctgcttcttctatccaagtacaggatgaagagcctccccgtggtagatatgggggggaatcagattgagaatatcattacacaatcttccgttgtgcacatgcttgcagagtgtgttggactatcttggtttgaaagctggggaactaagaaactctgtgaactgggtcttcctctgatgaagccatacagacttgttaaggtaaatgaagaccagccagtcctaaaagccttccaactaatgagggaaaagggggttggtggtgtgcctgttatggacacaaatggaacaaaagcaattggtaacattagcatcagagatgtccaatatcttcttagtgcccccaagatatacaaacaatacaggacaatctcagccaaggatttccttaccgcggtccggcaccatctccaggagcagcacgaagcgtcgccgttgctgcacgacgtgatcacatgcaaaagagacgacgtgatcaaggaaatcatactgaagctggactcgaccaagatccacaggatctacgtggtcgacgacaagggggataccgagggggtgatcacgctgagggacataatctccaagctggtgcacgagccacggcattactttggggatttcttcgacggcgtcgtccccctacccgcaaacagtaccgtatgacaaaactctgtgatagtatgtacaaaaaatgtacattatctttttgctcattccccatcttcttcttaagttgtggttgctgttgctgttgctgtggagagacctctgtggggagtactaatgaagaaccaatggggtggatgacagtgtgcgttgaataatctgagaattgcctgagctttgcgatgagaatgatgatgcctttcttctttcg

SEQ ID NO: 18522 - protein, 490 aa, Triticum aestivum
  peptide (1)..(490): Ceres Seq. ID no. 14301472
  misc_feature (117)..(174): Pfam Name: Pfam Description:  CBS domain
  misc_feature (66)..(490): NCBI GI NO: 38346640 NR Description: OSJNBa0072D21.10
  misc_feature (69)..(490): NCBI GI NO: 32364482 NR Description: AKIN gamma [Medicago truncatula]
  misc_feature (216)..(490): NCBI GI NO: 15228397 NR Description: CBS domain containing protein
  misc_feature (73)..(176): NCBI GI NO: 15228397 NR Description: CBS domain containing protein
  misc_feature (216)..(490): NCBI GI NO: 21592917 NR Description: unknown [Arabidopsis thaliana]
  misc_feature (73)..(176): NCBI GI NO: 21592917 NR Description: unknown [Arabidopsis thaliana]
  misc_feature (61)..(490): NCBI GI NO: 19386799 NR Description: OJ1485_B09.7
  misc_feature (224)..(477): NCBI GI NO: 34912162 NR Description: P0712E02.24
  misc_feature (93)..(229): NCBI GI NO: 34912162 NR Description: P0712E02.24
  misc_feature (114)..(474): NCBI GI NO: 25404839 NR Description: hypothetical protein T17F3.17
AIWPRLEFISCISPRVAASTRGEIAHLFTELLGESRRKSKYSGPAKKGETERGRTPGRRVWGEEEMETDSPRSPEAEIGHRVEDLWEVAQPQLSPSEKLNSCFEDIPVAAFPRTHPSQVIEIPSDASLADTVETLSKNKILSAPIRNVDAPEDATWIDKYIGIVEFAGIAMWLLHQSDASGNGTAGSAVGSPVVNLASRLGSFTFRRTSSGRVETTTDSESDEAASVGGSFFETLTSSEFYKNTKVGDISGSFRWAPFLALQTSDTFLTMLLLLSKYRMKSLPVVDMGGNQIENIITQSSVVHMLAECVGLSWFESWGTKKLCELGLPLMKPYRLVKVNEDQPVLKAFQLMREKGVGGVPVMDTNGTKAIGNISIRDVQYLLSAPKIYKQYRTISAKDFLTAVRHHLQEQHEASPLLHDVITCKRDDVIKEIILKLDSTKIHRIYVVDDKGDTEGVITLRDIISKLVHEPRHYFGDFFDGVVPLPANSTV

SEQ ID NO: 18523 - protein, 425 aa, Triticum aestivum
  peptide (1)..(425): Ceres Seq. ID no. 14301473
  misc_feature (52)..(109): Pfam Name: Pfam Description:  CBS domain
  misc_feature (1)..(425): NCBI GI NO: 38346640 NR Description: OSJNBa0072D21.10
  misc_feature (4)..(425): NCBI GI NO: 32364482 NR Description: AKIN gamma [Medicago truncatula]
  misc_feature (151)..(425): NCBI GI NO: 15228397 NR Description: CBS domain containing protein
  misc_feature (8)..(111): NCBI GI NO: 15228397 NR Description: CBS domain containing protein
  misc_feature (151)..(425): NCBI GI NO: 21592917 NR Description: unknown [Arabidopsis thaliana]
  misc_feature (8)..(111): NCBI GI NO: 21592917 NR Description: unknown [Arabidopsis thaliana]
  misc_feature (1)..(425): NCBI GI NO: 19386799 NR Description: OJ1485_B09.7
  misc_feature (159)..(412): NCBI GI NO: 34912162 NR Description: P0712E02.24
  misc_feature (28)..(164): NCBI GI NO: 34912162 NR Description: P0712E02.24
  misc_feature (49)..(409): NCBI GI NO: 25404839 NR Description: hypothetical protein T17F3.17
METDSPRSPEAEIGHRVEDLWEVAQPQLSPSEKLNSCFEDIPVAAFPRTHPSQVIEIPSDASLADTVETLSKNKILSAPIRNVDAPEDATWIDKYIGIVEFAGIAMWLLHQSDASGNGTAGSAVGSPVVNLASRLGSFTFRRTSSGRVETTTDSESDEAASVGGSFFETLTSSEFYKNTKVGDISGSFRWAPFLALQTSDTFLTMLLLLSKYRMKSLPVVDMGGNQIENIITQSSVVHMLAECVGLSWFESWGTKKLCELGLPLMKPYRLVKVNEDQPVLKAFQLMREKGVGGVPVMDTNGTKAIGNISIRDVQYLLSAPKIYKQYRTISAKDFLTAVRHHLQEQHEASPLLHDVITCKRDDVIKEIILKLDSTKIHRIYVVDDKGDTEGVITLRDIISKLVHEPRHYFGDFFDGVVPLPANSTV

SEQ ID NO: 18524 - protein, 320 aa, Triticum aestivum
  peptide (1)..(320): Ceres Seq. ID no. 14301474
  misc_feature (1)..(320): NCBI GI NO: 38346640 NR Description: OSJNBa0072D21.10
  misc_feature (1)..(320): NCBI GI NO: 32364482 NR Description: AKIN gamma [Medicago truncatula]
  misc_feature (46)..(320): NCBI GI NO: 15228397 NR Description: CBS domain containing protein
  misc_feature (46)..(320): NCBI GI NO: 21592917 NR Description: unknown [Arabidopsis thaliana]
  misc_feature (1)..(320): NCBI GI NO: 19386799 NR Description: OJ1485_B09.7
  misc_feature (54)..(307): NCBI GI NO: 34912162 NR Description: P0712E02.24
  misc_feature (1)..(59): NCBI GI NO: 34912162 NR Description: P0712E02.24
  misc_feature (1)..(304): NCBI GI NO: 25404839 NR Description: hypothetical protein T17F3.17
  misc_feature (75)..(304): NCBI GI NO: 18409372 NR Description: CBS domain containing protein
  misc_feature (48)..(294): NCBI GI NO: 34912990 NR Description: P0663E10.8
MWLLHQSDASGNGTAGSAVGSPVVNLASRLGSFTFRRTSSGRVETTTDSESDEAASVGGSFFETLTSSEFYKNTKVGDISGSFRWAPFLALQTSDTFLTMLLLLSKYRMKSLPVVDMGGNQIENIITQSSVVHMLAECVGLSWFESWGTKKLCELGLPLMKPYRLVKVNEDQPVLKAFQLMREKGVGGVPVMDTNGTKAIGNISIRDVQYLLSAPKIYKQYRTISAKDFLTAVRHHLQEQHEASPLLHDVITCKRDDVIKEIILKLDSTKIHRIYVVDDKGDTEGVITLRDIISKLVHEPRHYFGDFFDGVVPLPANSTV

SEQ ID NO: 18525 - DNA, 595 bp, Triticum aestivum
  misc_feature (1)..(595): Ceres Seq. ID no. 13596380
cgcaactcctttgcacagtcaccggtctgtactgtacctgggagtataatggaacaaccaaacagtgagaaggatgagcacgagctcagccttgacctcaccctccgcgtgagctcggcagctgaggcggagcagggcggcttcttcctctgcgtctactgcgaccgcaagttccgcagctcgcaggcgcttggtggccaccagaacgcgcacaagcacgagcgcagcctcgcccaccgccggcgggagatggccgccgccacgggtgcacacggggccggaacgcgcgcgcatgcggcgcaggacgagaggcccaggtatgtttccgccggtgatttcgtcgagccttccgctgggaaggcggggaggacggaggcaagtccgtggaaggttgctgctgctcccatgactgatgatgtggacctgtcgctcaggctatgatcgatctcttcttctagctagttgagtttctctcatggaattccgacctgcgcgcgcgtcgcgccgtattttgggctcctatttcttgtgtattctccgatcaatctgactgaatgtacttaccgaaattttcttcaaatatatgtgtgccgcc

SEQ ID NO: 18526 - protein, 146 aa, Triticum aestivum
  peptide (1)..(146): Ceres Seq. ID no. 13596381
  misc_feature (49)..(71): Pfam Name: Pfam Description:  Zinc finger, C2H2 type
  misc_feature (18)..(92): NCBI GI NO: 15238724 NR Description: ZFP3 zinc finger protein [Arabidopsis thaliana]
  misc_feature (16)..(84): NCBI GI NO: 15241084 NR Description: zinc finger protein -related
  misc_feature (27)..(84): NCBI GI NO: 15242152 NR Description: zinc finger protein 2 (ZFP2)
  misc_feature (19)..(91): NCBI GI NO: 18395528 NR Description: zinc finger protein 7, ZFP7 [Arabidopsis thaliana]
  misc_feature (49)..(100): NCBI GI NO: 15218939 NR Description: C2H2-type zinc finger protein -related
  misc_feature (33)..(94): NCBI GI NO: 15238913 NR Description: zinc finger -related protein
  misc_feature (38)..(80): NCBI GI NO: 15241284 NR Description: zinc finger (C2H2 type) protein family
  misc_feature (49)..(82): NCBI GI NO: 15239730 NR Description: hypothetical protein [Arabidopsis thaliana]
RNSFAQSPVCTVPGSIMEQPNSEKDEHELSLDLTLRVSSAAEAEQGGFFLCVYCDRKFRSSQALGGHQNAHKHERSLAHRRREMAAATGAHGAGTRAHAAQDERPRYVSAGDFVEPSAGKAGRTEASPWKVAAAPMTDDVDLSLRL

SEQ ID NO: 18527 - protein, 130 aa, Triticum aestivum
  peptide (1)..(130): Ceres Seq. ID no. 13596382
  misc_feature (33)..(55): Pfam Name: Pfam Description:  Zinc finger, C2H2 type
  misc_feature (2)..(76): NCBI GI NO: 15238724 NR Description: ZFP3 zinc finger protein [Arabidopsis thaliana]
  misc_feature (1)..(68): NCBI GI NO: 15241084 NR Description: zinc finger protein -related
  misc_feature (11)..(68): NCBI GI NO: 15242152 NR Description: zinc finger protein 2 (ZFP2)
  misc_feature (3)..(75): NCBI GI NO: 18395528 NR Description: zinc finger protein 7, ZFP7 [Arabidopsis thaliana]
  misc_feature (33)..(84): NCBI GI NO: 15218939 NR Description: C2H2-type zinc finger protein -related
  misc_feature (17)..(78): NCBI GI NO: 15238913 NR Description: zinc finger -related protein
  misc_feature (22)..(64): NCBI GI NO: 15241284 NR Description: zinc finger (C2H2 type) protein family
  misc_feature (33)..(66): NCBI GI NO: 15239730 NR Description: hypothetical protein [Arabidopsis thaliana]
MEQPNSEKDEHELSLDLTLRVSSAAEAEQGGFFLCVYCDRKFRSSQALGGHQNAHKHERSLAHRRREMAAATGAHGAGTRAHAAQDERPRYVSAGDFVEPSAGKAGRTEASPWKVAAAPMTDDVDLSLRL

SEQ ID NO: 18528 - DNA, 1474 bp, Triticum aestivum
  misc_feature (1)..(1474): Ceres Seq. ID no. 13596370
attattcttaaccctctcgccccgcctccccgtctcctcctccggtcgcccaaccgagcaggggtgtcgccattgttgtcgcctctcacccgcaggccgcctccgcgtccgtcactaggccacgagacctaggatcccccgccccctcgctgtgacctcgccgcgatgtggtggagggcggtggccagggctcgccgccggatcccgggagcgcggcccgtgtcgacggcggcggcggggaagagcggccgcgaggtggtggtgccgcggttcggcgggccggaggtgctgcagctgaggcagggggtgcccgcgcccgatctgaagcccggcgaggtgcttgtgcgcgcgcgcgccgtctccatcaaccccctcgacttgcgaatgcgggctggctatggccgttgcatattcgagccactcctacctctcatcattggccgggacatcagtggtgaagtcgcagctacagggacttctgtgtcgtcattctatattgggcaagaagtgtttggtgccttgcatccaacagcgattagagggacatgtgctgattatgcagttctttcacaggatgagcttacttctaaaccatctacgctcactcatgtggaggccagtgcaattccctttgctgcgttgactgcgtggcgtgctttatatggtactgctggaatttctaaaggacaaagattacttgtgcttggtggaggaggagcagttgggctttctgctgttcagcttgcggtagctgcagggtgtagtgtttcagctacctgtggagcccaaagtattgagcaagttttggcagccggtgctgaaaaggctattgattacgccactgaggatactgaatcaacagttacaggaaagtttgatgctgtgttagacacaataggagtagctgaaactgaaagaattggtattaatcttctgagaagaggcggacattatatgacccttcagggagaggcagcttcactagcagatagatatggattatatgtgggacttcctgctgctaccgctactttactgaagaaacagatgcagtatcgttgttctcatgggatagagtactggtggacatacatgagagctgatcctgacggtctccatgagatccagaggctgtccggagctggaaaactacagatacctgtggagaagacttttcctatcagccaagtaagagaagctcatgaggccaaggagaaaagactggtgcctggcaaggtggttctagagttcgactagtgttagcaggggttcgtccgacgatcacggaaggaccgacgttccttcttaattgtaccatgatgtttattttttgtctttctcccaaagaaaagtcgtgcggctttgaagctctaaatttgctcgttctctaggtagtactacagggttattttgtcggggtttagtgtaaatgcagtaaataatgatatgcaatacgaagagacttatttcagtg

SEQ ID NO: 18529 - protein, 363 aa, Triticum aestivum
  peptide (1)..(363): Ceres Seq. ID no. 13596371
  misc_feature (1)..(363): NCBI GI NO: 30351052 NR Description: oxidoreductase [Setaria italica]
  misc_feature (1)..(341): NCBI GI NO: 34909604 NR Description: putative oxidoreductase-like protein
  misc_feature (29)..(362): NCBI GI NO: 15232485 NR Description: oxidoreductase, zinc-binding dehydrogenase family
  misc_feature (29)..(362): NCBI GI NO: 21592930 NR Description: zinc-binding dehydrogenase, putative
  misc_feature (1)..(360): NCBI GI NO: 14522882 NR Description: NOGO-interacting mitochondrial protein
  misc_feature (29)..(268): NCBI GI NO: 29827741 NR Description: putative oxidoreductase
  misc_feature (309)..(360): NCBI GI NO: 29827741 NR Description: putative oxidoreductase
  misc_feature (1)..(360): NCBI GI NO: 17887352 NR Description: NOGO-interacting mitochondrial protein
  misc_feature (32)..(360): NCBI GI NO: 14249346 NR Description: reticulon 4 interacting protein 1
  misc_feature (33)..(279): NCBI GI NO: 27382786 NR Description: blr7675 [Bradyrhizobium japonicum]
MWWRAVARARRRIPGARPVSTAAAGKSGREVVVPRFGGPEVLQLRQGVPAPDLKPGEVLVRARAVSINPLDLRMRAGYGRCIFEPLLPLIIGRDISGEVAATGTSVSSFYIGQEVFGALHPTAIRGTCADYAVLSQDELTSKPSTLTHVEASAIPFAALTAWRALYGTAGISKGQRLLVLGGGGAVGLSAVQLAVAAGCSVSATCGAQSIEQVLAAGAEKAIDYATEDTESTVTGKFDAVLDTIGVAETERIGINLLRRGGHYMTLQGEAASLADRYGLYVGLPAATATLLKKQMQYRCSHGIEYWWTYMRADPDGLHEIQRLSGAGKLQIPVEKTFPISQVREAHEAKEKRLVPGKVVLEFD

SEQ ID NO: 18530 - protein, 290 aa, Triticum aestivum
  peptide (1)..(290): Ceres Seq. ID no. 13596372
  misc_feature (1)..(290): NCBI GI NO: 30351052 NR Description: oxidoreductase [Setaria italica]
  misc_feature (1)..(268): NCBI GI NO: 34909604 NR Description: putative oxidoreductase-like protein
  misc_feature (1)..(289): NCBI GI NO: 15232485 NR Description: oxidoreductase, zinc-binding dehydrogenase family
  misc_feature (1)..(289): NCBI GI NO: 21592930 NR Description: zinc-binding dehydrogenase, putative
  misc_feature (1)..(287): NCBI GI NO: 14522882 NR Description: NOGO-interacting mitochondrial protein
  misc_feature (1)..(195): NCBI GI NO: 29827741 NR Description: putative oxidoreductase
  misc_feature (236)..(287): NCBI GI NO: 29827741 NR Description: putative oxidoreductase
  misc_feature (1)..(287): NCBI GI NO: 17887352 NR Description: NOGO-interacting mitochondrial protein
  misc_feature (1)..(287): NCBI GI NO: 14249346 NR Description: reticulon 4 interacting protein 1
  misc_feature (1)..(206): NCBI GI NO: 27382786 NR Description: blr7675 [Bradyrhizobium japonicum]
MRAGYGRCIFEPLLPLIIGRDISGEVAATGTSVSSFYIGQEVFGALHPTAIRGTCADYAVLSQDELTSKPSTLTHVEASAIPFAALTAWRALYGTAGISKGQRLLVLGGGGAVGLSAVQLAVAAGCSVSATCGAQSIEQVLAAGAEKAIDYATEDTESTVTGKFDAVLDTIGVAETERIGINLLRRGGHYMTLQGEAASLADRYGLYVGLPAATATLLKKQMQYRCSHGIEYWWTYMRADPDGLHEIQRLSGAGKLQIPVEKTFPISQVREAHEAKEKRLVPGKVVLEFD

SEQ ID NO: 18531 - DNA, 1599 bp, Triticum aestivum
  misc_feature (1)..(1599): Ceres Seq. ID no. 14313567
acacacgcgcgcgcgcacacgcaagaaccgcccaagccgaacacacaagcaaagggagggacagcgcgcgagatcgagatgaaggtggaggtggtggacacgacgctggtgacgccgagcgagccgacgccgcggcacacgctgtggctctccaacctcgacctcgccgtgcccaagacgcacacgccgctcgtctactactacccggcgccccccgccggcgacggcggcgagaagcaggaagagttcttcgcgccggagaggctgcgggaggcgctggcgagggcgctggtgccgttctacccgctggcagggcggatggcgacgggccccgagggccggctcgagatcgactgcaacggcgagggcgcgctgttcgtcgtcgcgcgggccgacttcaccggcgacgagatgttccgggacttcgagccctccccggaggcgcgccgcctgctcgtccccttcgccgcctccggcgacccgccctgcctcctcgccatggtccaggtgacgttcctcaagtgcggcggcgtggccgtgggcacgggcatgcaccacgtgaccatggacggcgcgggcgcgatccagttcatccggacgtggacgaccctggcgcgcggcctggacgccgcgtccgtgcacccgtccccgccggtgcacgaccgcacggtgctgcgcgcgcgctctcccccgcatgccaccttcgagcacccggtctactccccgagcaacctcaacggcctgccccgccccttcgtcacccgcgtctacgccgtgtcccccaagctcctcgccggcatcaagtccagctgcgcgcccggcgtgtccacctactgcgcgctcaccgcgcacctgtggcgcgccatgtgcgtggcccgcgggctggcccccgacgccgagtcgcggctgcgcgtgccggccaacatccggcagcgcctgcgcccgcagctgccggccaactacttcggcaacgccatcgtgcgggacctggtgacggtgcgcgtcggcgacgtgctgtcgcagccgctggggttcgtggcggagcggatcaagcgcgcggtggcgcgggtggacgacgccttcgtgcgctccgtcatcgactacctggaggtggagtcggagaagggcagccaggcggcgcgcgggcagttcatgccggagacggacctgtgggtggtgagctggctgggcatgcccatccacgacgccgacttcggctggggctgccccaagttcgtggcgccggcgcagatgttcggcagcggcacggcctacgtcacgcaggcgcccgacaaggacgacggcgtgtccgtgctgttcgcgctcgagccagagtacctgcagtgcttcgagaaggccttctacggggagtgaccgaccaaagccttctacggtgatgcgcctttcaaagagccacttgggagttgggatctcgagtccgtcgatagtgtggagtgctgtatcataacgcaacagatactgcggaagtgtcgaggttgctgcttgtttctcgcgcctttcttcactgctactatgtgacattgtgggctaactattatctatacaaagtctaaatgaaaatggcctcaggtttagctc

SEQ ID NO: 18532 - protein, 464 aa, Triticum aestivum
  peptide (1)..(464): Ceres Seq. ID no. 14313568
  misc_feature (18)..(437): NCBI GI NO: 23106243 NR Description: hypothetical protein [Azotobacter vinelandii]
  misc_feature (10)..(450): NCBI GI NO: 79833 NR Description: hypothetical 119
  misc_feature (177)..(459): NCBI GI NO: 22960097 NR Description: hypothetical protein [Rhodobacter sphaeroides]
TRARAHARTAQAEHTSKGRDSARDRDEGGGGGHDAGDAERADAAAHAVALQPRPRRAQDAHAARLLLPGAPRRRRRREAGRVLRAGEAAGGAGEGAGAVLPAGRADGDGPRGPARDRLQRRGRAVRRRAGRLHRRRDVPGLRALPGGAPPARPLRRLRRPALPPRHGPGDVPQVRRRGRGHGHAPRDHGRRGRDPVHPDVDDPGARPGRRVRAPVPAGARPHGAARALSPACHLRAPGLLPEQPQRPAPPLRHPRLRRVPQAPRRHQVQLRARRVHLLRAHRAPVARHVRGPRAGPRRRVAAARAGQHPAAPAPAAAGQLLRQRHRAGPGDGARRRRAVAAAGVRGGADQARGGAGGRRLRALRHRLPGGGVGEGQPGGARAVHAGDGPVGGELAGHAHPRRRLRLGLPQVRGAGADVRQRHGLRHAGARQGRRRVRAVRARARVPAVLREGLLRGVTDQSLLR

SEQ ID NO: 18533 - protein, 457 aa, Triticum aestivum
  peptide (1)..(457): Ceres Seq. ID no. 14313569
  misc_feature (27)..(455): Pfam Name: Pfam Description:  Transferase family
  misc_feature (27)..(455): NCBI GI NO: 27475616 NR Description: hydroxycinnamoyl transferase [Nicotiana tabacum]
  misc_feature (26)..(455): NCBI GI NO: 6469032 NR Description: N-hydroxycinnamoyl/benzoyltransferase
  misc_feature (27)..(455): NCBI GI NO: 15239747 NR Description: anthranilate N-hydroxycinnamoyl/ benzoyltransferasefamily
  misc_feature (27)..(455): NCBI GI NO: 21536883 NR Description: anthranilate N-benzoyltransferase
  misc_feature (27)..(455): NCBI GI NO: 40644899 NR Description: hydroxycinnamoyl CoA quinate transferase
  misc_feature (27)..(455): NCBI GI NO: 38345030 NR Description: OSJNBa0029H02.14
  misc_feature (27)..(455): NCBI GI NO: 40644084 NR Description: hydroxycinnamoyl CoA quinate transferase
  misc_feature (27)..(455): NCBI GI NO: 32400293 NR Description: hydroxyanthranilate hydroxycinnamoyltransferase 2
  misc_feature (27)..(455): NCBI GI NO: 32400295 NR Description: hydroxyanthranilate hydroxycinnamoyltransferase 3
  misc_feature (27)..(455): NCBI GI NO: 32400291 NR Description: hydroxyanthranilate hydroxycinnamoyltransferase 1
THARAHTQEPPKPNTQAKGGTAREIEMKVEVVDTTLVTPSEPTPRHTLWLSNLDLAVPKTHTPLVYYYPAPPAGDGGEKQEEFFAPERLREALARALVPFYPLAGRMATGPEGRLEIDCNGEGALFVVARADFTGDEMFRDFEPSPEARRLLVPFAASGDPPCLLAMVQVTFLKCGGVAVGTGMHHVTMDGAGAIQFIRTWTTLARGLDAASVHPSPPVHDRTVLRARSPPHATFEHPVYSPSNLNGLPRPFVTRVYAVSPKLLAGIKSSCAPGVSTYCALTAHLWRAMCVARGLAPDAESRLRVPANIRQRLRPQLPANYFGNAIVRDLVTVRVGDVLSQPLGFVAERIKRAVARVDDAFVRSVIDYLEVESEKGSQAARGQFMPETDLWVVSWLGMPIHDADFGWGCPKFVAPAQMFGSGTAYVTQAPDKDDGVSVLFALEPEYLQCFEKAFYGE

SEQ ID NO: 18534 - protein, 431 aa, Triticum aestivum
  peptide (1)..(431): Ceres Seq. ID no. 14313570
  misc_feature (1)..(429): Pfam Name: Pfam Description:  Transferase family
  misc_feature (1)..(429): NCBI GI NO: 27475616 NR Description: hydroxycinnamoyl transferase [Nicotiana tabacum]
  misc_feature (1)..(429): NCBI GI NO: 6469032 NR Description: N-hydroxycinnamoyl/benzoyltransferase
  misc_feature (1)..(429): NCBI GI NO: 15239747 NR Description: anthranilate N-hydroxycinnamoyl/ benzoyltransferasefamily
  misc_feature (1)..(429): NCBI GI NO: 21536883 NR Description: anthranilate N-benzoyltransferase
  misc_feature (1)..(429): NCBI GI NO: 40644899 NR Description: hydroxycinnamoyl CoA quinate transferase
  misc_feature (1)..(429): NCBI GI NO: 38345030 NR Description: OSJNBa0029H02.14
  misc_feature (1)..(429): NCBI GI NO: 40644084 NR Description: hydroxycinnamoyl CoA quinate transferase
  misc_feature (1)..(429): NCBI GI NO: 32400293 NR Description: hydroxyanthranilate hydroxycinnamoyltransferase 2
  misc_feature (1)..(429): NCBI GI NO: 32400295 NR Description: hydroxyanthranilate hydroxycinnamoyltransferase 3
  misc_feature (1)..(429): NCBI GI NO: 32400291 NR Description: hydroxyanthranilate hydroxycinnamoyltransferase 1
MKVEVVDTTLVTPSEPTPRHTLWLSNLDLAVPKTHTPLVYYYPAPPAGDGGEKQEEFFAPERLREALARALVPFYPLAGRMATGPEGRLEIDCNGEGALFVVARADFTGDEMFRDFEPSPEARRLLVPFAASGDPPCLLAMVQVTFLKCGGVAVGTGMHHVTMDGAGAIQFIRTWTTLARGLDAASVHPSPPVHDRTVLRARSPPHATFEHPVYSPSNLNGLPRPFVTRVYAVSPKLLAGIKSSCAPGVSTYCALTAHLWRAMCVARGLAPDAESRLRVPANIRQRLRPQLPANYFGNAIVRDLVTVRVGDVLSQPLGFVAERIKRAVARVDDAFVRSVIDYLEVESEKGSQAARGQFMPETDLWVVSWLGMPIHDADFGWGCPKFVAPAQMFGSGTAYVTQAPDKDDGVSVLFALEPEYLQCFEKAFYGE

SEQ ID NO: 18535 - DNA, 1098 bp, Triticum aestivum
  misc_feature (1)..(1098): Ceres Seq. ID no. 13589024
aaacaacctagaacatcctaatcgaaaaaaaccctttcgaaagaatccccaaatctcgcacgctccaaaggcccgaaaccctagctctctgctttcatccccgccaccgtccccatggcgccagggctcaaacgcttcaccgacgtcgcggcagacggcacgccccgcctcgacgacgccgccggcgaggagctcgtgtgcgtggagcgcgccgcctcggtcgccctcggcagccgcgcgccggagcccccgggaaccctcttcatcaccaccaggagggtgatttggctcagcggggcggagaagggcaaaggatacgcggtgggcttcctggacatcacgctccacgcagtgtcgcgcgacccggaggcgtacccctcgccgtgcctctacactcagattgaagccaaagctgactctgatgaagaggatggtgattttgactctgaagcaggtggtgactcacagctaccaaaaatctctgagatgcgtattatattggcagatgctgcccaactagattcactttttaatgccttctgccattgtgctgaactgaaccctgatcctactgctgaagaaaatgaagacagtgacttgttccatggtggggatatgaccaatggtggttggattcatggcgatgaagatgaacacatggttgatggaatcgaccctgagttttttattcccaacccgataggtcaaaatggtggagatgacctcagttcttcagtacttgagcttcaaatcaatgaccagcgtttcgaggatgcggatgaagaggaggcccatgaaaatgggcattagaagcagatatatgctcgttttacttatcatgatcctcgtgaggaccatgtcattagtttggttgaagattgctgtagatgcagcttggttcgcctcatgctgttgtgtcccacactttccttttgtcctttaatagacgctgctataggatcgaggactctgagggcaaccgtgtagagttgcgtcgatggtaacttttatgggagaaggtcttgcttactggtcaagaatgtaacatgtagagcttggtggagaatccgattgatggatttcaataacttttgatct

SEQ ID NO: 18536 - protein, 231 aa, Triticum aestivum
  peptide (1)..(231): Ceres Seq. ID no. 13589025
  misc_feature (44)..(113): Pfam Name: ICln Pfam Description: Nucleotide-sensitive chloride conductance regulator
  misc_feature (1)..(229): NCBI GI NO: 15241766 NR Description: expressed protein [Arabidopsis thaliana]
  misc_feature (1)..(97): NCBI GI NO: 37531484 NR Description: unknown protein
  misc_feature (68)..(231): NCBI GI NO: 37531488 NR Description: hypothetical protein
  misc_feature (95)..(231): NCBI GI NO: 21671879 NR Description: Hypothetical protein
  misc_feature (47)..(165): NCBI GI NO: 1060971 NR Description: chloride channel [Oryctolagus cuniculus]
  misc_feature (47)..(165): NCBI GI NO: 1095482 NR Description: Cl current-related protein
  misc_feature (47)..(165): NCBI GI NO: 2197127 NR Description: swelling-induced chloride conductance regulatory protein pIcIn
  misc_feature (47)..(165): NCBI GI NO: 7513563 NR Description: swelling-induced chloride conductance regulatory protein plcln
  misc_feature (130)..(231): NCBI GI NO: 19881624 NR Description: Hypothetical protein [Oryza sativa]
  misc_feature (47)..(165): NCBI GI NO: 13431571 NR Description: Chloride conductance regulatory protein ICln
MAPGLKRFTDVAADGTPRLDDAAGEELVCVERAASVALGSRAPEPPGTLFITTRRVIWLSGAEKGKGYAVGFLDITLHAVSRDPEAYPSPCLYTQIEAKADSDEEDGDFDSEAGGDSQLPKISEMRIILADAAQLDSLFNAFCHCAELNPDPTAEENEDSDLFHGGDMTNGGWIHGDEDEHMVDGIDPEFFIPNPIGQNGGDDLSSSVLELQINDQRFEDADEEEAHENGH

SEQ ID NO: 18537 - DNA, 1859 bp, Triticum aestivum
  misc_feature (1)..(1859): Ceres Seq. ID no. 13654528
attcttcttctctctccccaccgcctcccccttcctcgtcctcctctctcagtccgaagccgattacttagcagcttgccttcgtctttctctcctgcggttcctggagctacgtcttctcggcccctgccctttggttcgccgctccgctcccccccttctgccgcaaagggggacactcatggcgagtctagtagttctggcatcgctgcttgccgtaattgggctcgcgcagggggaggcgcaatgtgcgcggtacagcgggcggccgcggccacatagcgtgaccatcactgagtttggggccgtcggcgacggcctgaccgtcaatacggtgcccttccagaacgccatcttctacctgcggtcctttgccgacaagggcggcgcacagctgtacgtgcccaaggggcggtggctcaccggcagcttcaacctcaccagccacctcacccttttcctggagaaggacgctgtcatcatcggcaccgaggatgtgacacaatggccaattgtggaacctttgccatcatatggccaaggaattgatcttccgggtgcaaggcatcgcagcttaataaatgggcacaatgttaccgatgtcataattacagggaacagtggaatcgtagacggccagggtttgatatggtggaattggtttcgctcaaataaattgaactatagccggcctcatcttgtggagtttgaggattcggaagaaattgtgatttcgaacttgacatttttagattctccagcatggggtatacatcctgtgtattgcagcaatgtaacaatccgtaatgtcacaatcgagactggattggatgctccactcaccaatggaattgtcccagattcatgctcgaatatgtgcattgaggacagcagaattagcgtcggtcatgatgccatctcattaaaaagtgggtgggacaactatggcattacatttggaaggccaacctcagacattcacattagtagagtggatctgcaagcctcactgggagctgctcttgcatttggcagtgagatgtctggtgggatctcggatgttcatgttgatcaccttcatattcatggttcatccaaaggtatatccttcaggaccgcaccaggccgtggtggttatataagggatgcgatagtatcagatgtccaaatggaagacgtccatgttgcaatcgagttcaccggcgattggtcaagccatcctgatgaacattttgatttgtctgcactcccggagatcagtggaatcaccttaaaagacatggttggaaaaaacatttcgtttgcaggagttttgtcgggaatcgatggcgatcctttcaccaatatctgcctctccaatatcaatttcaccatagctgattcagcgcattctgcctcttggtcttgctccaacatttctggatactccgagtcggtatttcccgaggcttgttccgacctccacagtcaatcatcaaattcctccatctgctcatccacccttagctaccatgcccttgcgacagcgtaaatgcatatagcacccaatattcatcctttcatgtttctgtccatgtacaatctggagacatctagctctagcttcatcgccatctttcccccaaaaaaattctcttccgttataggtgcatcaaagaatcatcgggcttcgtacagtcagctttgaggctcataatacaaaattttggctggcgtccttgatgagtccagagaggtgtttccttgtacagttacatttgttcattcaatctgtaagaaattttgtccggtaggttgtcgagtccaaagagttggtttatattgctgtttattttattgccatatataaaataaacatt

SEQ ID NO: 18538 - protein, 509 aa, Triticum aestivum
  peptide (1)..(509): Ceres Seq. ID no. 13654529
  misc_feature (127)..(484): Pfam Name: Pfam Description:  Glycosyl hydrolases family 28
  misc_feature (65)..(509): NCBI GI NO: 7939578 NR Description: polygalacturonase-like protein
  misc_feature (65)..(509): NCBI GI NO: 15228881 NR Description: polygalacturonase, putative [Arabidopsis thaliana]
  misc_feature (65)..(509): NCBI GI NO: 21553827 NR Description: polygalacturonase, putative [Arabidopsis thaliana]
  misc_feature (91)..(507): NCBI GI NO: 40714685 NR Description: putative polygalacturonase
  misc_feature (64)..(492): NCBI GI NO: 22327662 NR Description: expressed protein [Arabidopsis thaliana]
  misc_feature (64)..(487): NCBI GI NO: 30679999 NR Description: polygalacturonase, putative [Arabidopsis thaliana]
  misc_feature (79)..(502): NCBI GI NO: 18412253 NR Description: polygalacturonase, putative [Arabidopsis thaliana]
  misc_feature (79)..(502): NCBI GI NO: 11263971 NR Description: hypothetical protein T17J13
  misc_feature (126)..(509): NCBI GI NO: 34393209 NR Description: putative polygalacturonase
  misc_feature (123)..(487): NCBI GI NO: 21593399 NR Description: polygalacturonase-like protein
FFFSLPTASPFLVLLSQSEADYLAACLRLSLLRFLELRLLGPCPLVRRSAPPLLPQRGTLMASLVVLASLLAVIGLAQGEAQCARYSGRPRPHSVTITEFGAVGDGLTVNTVPFQNAIFYLRSFADKGGAQLYVPKGRWLTGSFNLTSHLTLFLEKDAVIIGTEDVTQWPIVEPLPSYGQGIDLPGARHRSLINGHNVTDVIITGNSGIVDGQGLIWWNWFRSNKLNYSRPHLVEFEDSEEIVISNLTFLDSPAWGIHPVYCSNVTIRNVTIETGLDAPLTNGIVPDSCSNMCIEDSRISVGHDAISLKSGWDNYGITFGRPTSDIHISRVDLQASLGAALAFGSEMSGGISDVHVDHLHIHGSSKGISFRTAPGRGGYIRDAIVSDVQMEDVHVAIEFTGDWSSHPDEHFDLSALPEISGITLKDMVGKNISFAGVLSGIDGDPFTNICLSNINFTIADSAHSASWSCSNISGYSESVFPEACSDLHSQSSNSSICSSTLSYHALATA

SEQ ID NO: 18539 - protein, 449 aa, Triticum aestivum
  peptide (1)..(449): Ceres Seq. ID no. 13654530
  misc_feature (67)..(424): Pfam Name: Pfam Description:  Glycosyl hydrolases family 28
  misc_feature (5)..(449): NCBI GI NO: 7939578 NR Description: polygalacturonase-like protein
  misc_feature (5)..(449): NCBI GI NO: 15228881 NR Description: polygalacturonase, putative [Arabidopsis thaliana]
  misc_feature (5)..(449): NCBI GI NO: 21553827 NR Description: polygalacturonase, putative [Arabidopsis thaliana]
  misc_feature (31)..(447): NCBI GI NO: 40714685 NR Description: putative polygalacturonase
  misc_feature (4)..(432): NCBI GI NO: 22327662 NR Description: expressed protein [Arabidopsis thaliana]
  misc_feature (4)..(427): NCBI GI NO: 30679999 NR Description: polygalacturonase, putative [Arabidopsis thaliana]
  misc_feature (19)..(442): NCBI GI NO: 18412253 NR Description: polygalacturonase, putative [Arabidopsis thaliana]
  misc_feature (19)..(442): NCBI GI NO: 11263971 NR Description: hypothetical protein T17J13
  misc_feature (66)..(449): NCBI GI NO: 34393209 NR Description: putative polygalacturonase
  misc_feature (63)..(427): NCBI GI NO: 21593399 NR Description: polygalacturonase-like protein
MASLVVLASLLAVIGLAQGEAQCARYSGRPRPHSVTITEFGAVGDGLTVNTVPFQNAIFYLRSFADKGGAQLYVPKGRWLTGSFNLTSHLTLFLEKDAVIIGTEDVTQWPIVEPLPSYGQGIDLPGARHRSLINGHNVTDVIITGNSGIVDGQGLIWWNWFRSNKLNYSRPHLVEFEDSEEIVISNLTFLDSPAWGIHPVYCSNVTIRNVTIETGLDAPLTNGIVPDSCSNMCIEDSRISVGHDAISLKSGWDNYGITFGRPTSDIHISRVDLQASLGAALAFGSEMSGGISDVHVDHLHIHGSSKGISFRTAPGRGGYIRDAIVSDVQMEDVHVAIEFTGDWSSHPDEHFDLSALPEISGITLKDMVGKNISFAGVLSGIDGDPFTNICLSNINFTIADSAHSASWSCSNISGYSESVFPEACSDLHSQSSNSSICSSTLSYHALATA

SEQ ID NO: 18540 - DNA, 1008 bp, Triticum aestivum
  misc_feature (1)..(1008): Ceres Seq. ID no. 13654531
aaccgccgccgtctgcccgtctgcacgcccatggccaccctcgcgccacgccccgacctcctcctcgtcgctctgagaaggtcccgcgctaggacgcttcgcgtccgcgccgccgccgtcccacgtgcccgccgtcctccggtgccaccgcaggcagcgcggcgcgtcttcctcggcctcggcgccgctttcgtcgaccagctcgcccgcatggcctccggtggtgccccgtcccgctcgttcgtggccgcggcgcggccaaggcagggggtctccccggtcgaagagattttgaagaatgtggagtggccggacgagttccctttcaagcccgacgacttcggccgcttcgacgagtcatcagatactgtgttctattcggctccccgttttgtcacgcacattgacgacccagcaatcagagcgctcacaaaatactactcgcaagttcttcctccaagcaacactccaggcgtggccatcctggacatgtgcagtagctgggtgagccattatccagctgggtacaagcaagagaagatcgtagggatgggtatgaatgaaaacgagctgaaaaagaatccggttttgacacagtatgttgtgcaagacctcaatttgaatccgaagcttccttttgacgataacacctttgatgttataacgaacgtggttagtgtagactacttgacaaaaccaatggatgtttttaaagagatgagacgaatacttaaaccatctggattagctatcatgagcttttcaaatcgctgcttttggacaaaagctatatccatttggacatcaactggtgatgctgaccatgcttggatagttggtgcatactaccattatgctggagggttcgagccccctgaggctgttgatatatctcccaatccaggacaaacagatccgatgtacattgtttgctctagaaagaaaactgcttaattaaatatattttgtatcggaattttgcttaaaagaccaaatactagctgacgc

SEQ ID NO: 18541 - protein, 317 aa, Triticum aestivum
  peptide (1)..(317): Ceres Seq. ID no. 13654532
  misc_feature (11)..(317): NCBI GI NO: 34910520 NR Description: B1142C05.17
  misc_feature (54)..(314): NCBI GI NO: 15233624 NR Description: expressed protein [Arabidopsis thaliana]
  misc_feature (73)..(314): NCBI GI NO: 14030675 NR Description: AT4g29590/T16L4_100 [Arabidopsis thaliana]
  misc_feature (54)..(314): NCBI GI NO: 21536833 NR Description: unknown [Arabidopsis thaliana]
  misc_feature (111)..(314): NCBI GI NO: 22970815 NR Description: hypothetical protein [Chloroflexus aurantiacus]
  misc_feature (161)..(314): NCBI GI NO: 32394624 NR Description: methyltrasferase [Griffithsia japonica]
  misc_feature (110)..(315): NCBI GI NO: 17232182 NR Description: hypothetical protein [Nostoc sp. PCC 7120]
  misc_feature (110)..(295): NCBI GI NO: 23129867 NR Description: hypothetical protein [Nostoc punctiforme]
  misc_feature (116)..(299): NCBI GI NO: 15232158 NR Description: expressed protein [Arabidopsis thaliana]
  misc_feature (111)..(315): NCBI GI NO: 22298320 NR Description: ORF_ID:tlr0778~hypothetical protein
NRRRLPVCTPMATLAPRPDLLLVALRRSRARTLRVRAAAVPRARRPPVPPQAARRVFLGLGAAFVDQLARMASGGAPSRSFVAAARPRQGVSPVEEILKNVEWPDEFPFKPDDFGRFDESSDTVFYSAPRFVTHIDDPAIRALTKYYSQVLPPSNTPGVAILDMCSSWVSHYPAGYKQEKIVGMGMNENELKKNPVLTQYVVQDLNLNPKLPFDDNTFDVITNVVSVDYLTKPMDVFKEMRRILKPSGLAIMSFSNRCFWTKAISIWTSTGDADHAWIVGAYYHYAGGFEPPEAVDISPNPGQTDPMYIVCSRKKTA

SEQ ID NO: 18542 - protein, 307 aa, Triticum aestivum
  peptide (1)..(307): Ceres Seq. ID no. 13654533
  misc_feature (1)..(307): NCBI GI NO: 34910520 NR Description: B1142C05.17
  misc_feature (44)..(304): NCBI GI NO: 15233624 NR Description: expressed protein [Arabidopsis thaliana]
  misc_feature (63)..(304): NCBI GI NO: 14030675 NR Description: AT4g29590/T16L4_100 [Arabidopsis thaliana]
  misc_feature (44)..(304): NCBI GI NO: 21536833 NR Description: unknown [Arabidopsis thaliana]
  misc_feature (101)..(304): NCBI GI NO: 22970815 NR Description: hypothetical protein [Chloroflexus aurantiacus]
  misc_feature (151)..(304): NCBI GI NO: 32394624 NR Description: methyltrasferase [Griffithsia japonica]
  misc_feature (100)..(305): NCBI GI NO: 17232182 NR Description: hypothetical protein [Nostoc sp. PCC 7120]
  misc_feature (100)..(285): NCBI GI NO: 23129867 NR Description: hypothetical protein [Nostoc punctiforme]
  misc_feature (106)..(289): NCBI GI NO: 15232158 NR Description: expressed protein [Arabidopsis thaliana]
  misc_feature (101)..(305): NCBI GI NO: 22298320 NR Description: ORF_ID:tlr0778~hypothetical protein
MATLAPRPDLLLVALRRSRARTLRVRAAAVPRARRPPVPPQAARRVFLGLGAAFVDQLARMASGGAPSRSFVAAARPRQGVSPVEEILKNVEWPDEFPFKPDDFGRFDESSDTVFYSAPRFVTHIDDPAIRALTKYYSQVLPPSNTPGVAILDMCSSWVSHYPAGYKQEKIVGMGMNENELKKNPVLTQYVVQDLNLNPKLPFDDNTFDVITNVVSVDYLTKPMDVFKEMRRILKPSGLAIMSFSNRCFWTKAISIWTSTGDADHAWIVGAYYHYAGGFEPPEAVDISPNPGQTDPMYIVCSRKKTA

SEQ ID NO: 18543 - protein, 247 aa, Triticum aestivum
  peptide (1)..(247): Ceres Seq. ID no. 13654534
  misc_feature (1)..(247): NCBI GI NO: 34910520 NR Description: B1142C05.17
  misc_feature (1)..(244): NCBI GI NO: 15233624 NR Description: expressed protein [Arabidopsis thaliana]
  misc_feature (3)..(244): NCBI GI NO: 14030675 NR Description: AT4g29590/T16L4_100 [Arabidopsis thaliana]
  misc_feature (1)..(244): NCBI GI NO: 21536833 NR Description: unknown [Arabidopsis thaliana]
  misc_feature (41)..(244): NCBI GI NO: 22970815 NR Description: hypothetical protein [Chloroflexus aurantiacus]
  misc_feature (91)..(244): NCBI GI NO: 32394624 NR Description: methyltrasferase [Griffithsia japonica]
  misc_feature (40)..(245): NCBI GI NO: 17232182 NR Description: hypothetical protein [Nostoc sp. PCC 7120]
  misc_feature (40)..(225): NCBI GI NO: 23129867 NR Description: hypothetical protein [Nostoc punctiforme]
  misc_feature (46)..(229): NCBI GI NO: 15232158 NR Description: expressed protein [Arabidopsis thaliana]
  misc_feature (41)..(245): NCBI GI NO: 22298320 NR Description: ORF_ID:tlr0778~hypothetical protein
MASGGAPSRSFVAAARPRQGVSPVEEILKNVEWPDEFPFKPDDFGRFDESSDTVFYSAPRFVTHIDDPAIRALTKYYSQVLPPSNTPGVAILDMCSSWVSHYPAGYKQEKIVGMGMNENELKKNPVLTQYVVQDLNLNPKLPFDDNTFDVITNVVSVDYLTKPMDVFKEMRRILKPSGLAIMSFSNRCFWTKAISIWTSTGDADHAWIVGAYYHYAGGFEPPEAVDISPNPGQTDPMYIVCSRKKTA

SEQ ID NO: 18544 - DNA, 802 bp, Triticum aestivum
  misc_feature (1)..(802): Ceres Seq. ID no. 12614534
acggcgaaacaccccagaaatcccacccgtctccacccagataatcgcgagagatatttcgtcccggacgcgtccgccccgacgaccgaccgacaaacagcgcaaaagtaggagggagaggatgagcaccatggcgatgtcggcgctgaacccggacgcgcccatgttcatcccggcggcgttcaagaaggtggaggactactcgcccgagtggtgggagctcgtcaagaccaccgcctggttccgcgaccactggttccgccagcaccagctctacgaggacctcgccgacaacgtggacgtggacgacgtcgccgccctcctccccgacgactccgtcgacctgctcgacgccgacgacctcttctactccccgccgtcgccccagccccagcccgacttctaccactacaaaccagcagggttcggcggcgacatggacgcggtgctcaagacgctgagcctgaactcgccgaggggcggcggccccgcagcagcctgggcgccgatgaggcacgccgagaagccagcgcagcacgtcagccccagggccggcggtgccgcccgccgcgccatccaccagcctcgctagagctaaacgagtgctgctgccgccgctgctgctgtgtagtgtaaccttgagttcagttcagtcgggttcagtctagtctctccctgcatctgtgtatacagctgaaaaatgaaggggaaaacaaactgcaggcccctgcttgctagctagtgatttcccttcccttgtagcttccctcccgtgttcagaaatgggtcaagaacaaaagct

SEQ ID NO: 18545 - protein, 196 aa, Triticum aestivum
  peptide (1)..(196): Ceres Seq. ID no. 12614535
  misc_feature (41)..(196): NCBI GI NO: 34395186 NR Description: unknown protein
  misc_feature (46)..(196): NCBI GI NO: 34899128 NR Description: P0496C02.30
  misc_feature (41)..(196): NCBI GI NO: 32352142 NR Description: hypothetical protein
  misc_feature (47)..(196): NCBI GI NO: 15227351 NR Description: ERD15 protein; protein id: At2g41430
  misc_feature (47)..(196): NCBI GI NO: 21592689 NR Description: ERD15 protein [Arabidopsis thaliana]
  misc_feature (47)..(196): NCBI GI NO: 8489786 NR Description: dehydration-induced protein ERD15
  misc_feature (46)..(101): NCBI GI NO: 21592596 NR Description: unknown [Arabidopsis thaliana]
  misc_feature (46)..(101): NCBI GI NO: 18414176 NR Description: Expressed protein; protein id: At4g14270
RRNTPEIPPVSTQIIARDISSRTRPPRRPTDKQRKSRRERMSTMAMSALNPDAPMFIPAAFKKVEDYSPEWWELVKTTAWFRDHWFRQHQLYEDLADNVDVDDVAALLPDDSVDLLDADDLFYSPPSPQPQPDFYHYKPAGFGGDMDAVLKTLSLNSPRGGGPAAAWAPMRHAEKPAQHVSPRAGGAARRAIHQPR

SEQ ID NO: 18546 - protein, 156 aa, Triticum aestivum
  peptide (1)..(156): Ceres Seq. ID no. 12614536
  misc_feature (1)..(156): NCBI GI NO: 34395186 NR Description: unknown protein
  misc_feature (6)..(156): NCBI GI NO: 34899128 NR Description: P0496C02.30
  misc_feature (1)..(156): NCBI GI NO: 32352142 NR Description: hypothetical protein
  misc_feature (7)..(156): NCBI GI NO: 15227351 NR Description: ERD15 protein; protein id: At2g41430
  misc_feature (7)..(156): NCBI GI NO: 21592689 NR Description: ERD15 protein [Arabidopsis thaliana]
  misc_feature (7)..(156): NCBI GI NO: 8489786 NR Description: dehydration-induced protein ERD15
  misc_feature (6)..(61): NCBI GI NO: 21592596 NR Description: unknown [Arabidopsis thaliana]
  misc_feature (6)..(61): NCBI GI NO: 18414176 NR Description: Expressed protein; protein id: At4g14270
MSTMAMSALNPDAPMFIPAAFKKVEDYSPEWWELVKTTAWFRDHWFRQHQLYEDLADNVDVDDVAALLPDDSVDLLDADDLFYSPPSPQPQPDFYHYKPAGFGGDMDAVLKTLSLNSPRGGGPAAAWAPMRHAEKPAQHVSPRAGGAARRAIHQPR

SEQ ID NO: 18547 - protein, 153 aa, Triticum aestivum
  peptide (1)..(153): Ceres Seq. ID no. 12614537
  misc_feature (1)..(153): NCBI GI NO: 34395186 NR Description: unknown protein
  misc_feature (3)..(153): NCBI GI NO: 34899128 NR Description: P0496C02.30
  misc_feature (1)..(153): NCBI GI NO: 32352142 NR Description: hypothetical protein
  misc_feature (4)..(153): NCBI GI NO: 15227351 NR Description: ERD15 protein; protein id: At2g41430
  misc_feature (4)..(153): NCBI GI NO: 21592689 NR Description: ERD15 protein [Arabidopsis thaliana]
  misc_feature (4)..(153): NCBI GI NO: 8489786 NR Description: dehydration-induced protein ERD15
  misc_feature (3)..(58): NCBI GI NO: 21592596 NR Description: unknown [Arabidopsis thaliana]
  misc_feature (3)..(58): NCBI GI NO: 18414176 NR Description: Expressed protein; protein id: At4g14270
MAMSALNPDAPMFIPAAFKKVEDYSPEWWELVKTTAWFRDHWFRQHQLYEDLADNVDVDDVAALLPDDSVDLLDADDLFYSPPSPQPQPDFYHYKPAGFGGDMDAVLKTLSLNSPRGGGPAAAWAPMRHAEKPAQHVSPRAGGAARRAIHQPR

SEQ ID NO: 18548 - DNA, 588 bp, Triticum aestivum
  misc_feature (1)..(588): Ceres Seq. ID no. 12624963
agttcactcaaacacagccacgcaacactatcactcaaacacagccgcacaagctagacttacctcctcagtagtataccggagcctcccagctagcaatatggcaaagtgcatcgccgtcgcgctcctgctactggtggcgctcgcgtactgcgacgggagggagctgaaccagaaggaccaggcactggcaacggcacgcggtgccggtgccgccggtggcggcgttggcgaggagaagattttggggttgcctgacctgccgcctgtgggaaccgttaccggtaccagcaccactaacggcccgctggtggcgcttcctgccattcccgggatccctgctcacccatgatcacctctagttcatgttctggcttacaagatgaagctcacctcgtgactttagacttcaaggctgtagcttaacatcgcccggaaggcaaacaccggcgtttcgctgatgtccatgttccttttaatgggcgtctgtatcaactatcctcgtctgtaattcttttcggtccgctttcctgtatttttcgatccttgatgtgctacatgtataaatgctactttcttcgcagtgtt

SEQ ID NO: 18549 - protein, 116 aa, Triticum aestivum
  peptide (1)..(116): Ceres Seq. ID no. 12624964
  misc_feature (34)..(116): NCBI GI NO: 7489410 NR Description: probable acclimation protein - barley
  misc_feature (34)..(116): NCBI GI NO: 422006 NR Description: acclimation protein - rye
  misc_feature (34)..(116): NCBI GI NO: 7690288 NR Description: low temperature induced protein [Hordeum vulgare]
  misc_feature (34)..(115): NCBI GI NO: 7489365 NR Description: acclimation protein 2 - barley
  misc_feature (43)..(116): NCBI GI NO: 422007 NR Description: acclimation protein - rye (fragment)
  misc_feature (34)..(116): NCBI GI NO: 8468624 NR Description: cold-responsive protein [Triticum aestivum]
  misc_feature (52)..(112): NCBI GI NO: 12054814 NR Description: Lt1.1 protein [Triticum aestivum]
VHSNTATQHYHSNTAAQARLTSSVVYRSLPASNMAKCIAVALLLLVALAYCDGRELNQKDQALATARGAGAAGGGVGEEKILGLPDLPPVGTVTGTSTTNGPLVALPAIPGIPAHP

SEQ ID NO: 18550 - protein, 83 aa, Triticum aestivum
  peptide (1)..(83): Ceres Seq. ID no. 12624965
  misc_feature (1)..(83): NCBI GI NO: 7489410 NR Description: probable acclimation protein - barley
  misc_feature (1)..(83): NCBI GI NO: 422006 NR Description: acclimation protein - rye
  misc_feature (1)..(83): NCBI GI NO: 7690288 NR Description: low temperature induced protein [Hordeum vulgare]
  misc_feature (1)..(82): NCBI GI NO: 7489365 NR Description: acclimation protein 2 - barley
  misc_feature (10)..(83): NCBI GI NO: 422007 NR Description: acclimation protein - rye (fragment)
  misc_feature (1)..(83): NCBI GI NO: 8468624 NR Description: cold-responsive protein [Triticum aestivum]
  misc_feature (19)..(79): NCBI GI NO: 12054814 NR Description: Lt1.1 protein [Triticum aestivum]
MAKCIAVALLLLVALAYCDGRELNQKDQALATARGAGAAGGGVGEEKILGLPDLPPVGTVTGTSTTNGPLVALPAIPGIPAHP

SEQ ID NO: 18551 - DNA, 1400 bp, Triticum aestivum
  misc_feature (1)..(1400): Ceres Seq. ID no. 13654468
  misc_feature (900)..(900): n is a, c, t, g, unknown, or other
atcgaataattaatcccgaggcgtcttgaaaaatatatcccaggatggcgatgtcgacggcgacgcggatgctggcgcgccgcgccgcccccgccctcctccgctccgccgccagccccggcctcctccgctcccccgccgccggcacaggccccagccccgccctcgcgctgccggcgctgctgcaggcgcaaggccggtggtaccgcgcatcaggaggggacccgtcaccgtcgttctacgagccgccgccgaccccggccaacctgggcctgagcatcgtcccggagaagaaggcgttcgtggtggagcgctttggcaagtacctcaagacactgtcgtcggggatccacctcctgatgcccggcgtggaccgcatcgcctacgtgcactcgctcaaggaggaggcaatccccatcccggacaactcggcaatcacaaaggacaacgtctcgatacagatcggaggagtgctatacgtcaagatcgtcgacccctacaaggcctcgtacggcgtggagaaccccatctatgctgtcatccagcttgcgcagacaaccatgaggagtgaacttggcaagattaccctcgacaagacctttgaggagagggacacgctcaacaccaacattgtgaagtcaatcaatgaggcagcagaaacttggggtttgaagtgtcttcgctacgaaatcagggacatcactcctccagatggagtcaagaaggccatggagatgcaggcagcagcagagcgcaagaaacgtgctcagatcctcgagtctgaaggtgctatgatggagaatgcaaacaaagcaaagggtgaagctgaagcgattcttgccaggtcacaggccactgctgaagggatcaggatggtctcggagtcgtttaaaactgaangcagcacagaggctggcagcttgaggattgctgaacagtacatcagagcattcagtgaactggctagaaatacgaacacgatgcttcttcccagagacgcagtcacaccggggccaatgattgctcagggccctccagatatgcacccacacgtacaagcagaaactgaccctgggaagccccagccccagccagcggggggcggtggcggcagaagaggctgatttgcccctcgggatgccatccatgagcgacctcggggcctttccgcacaagaagtaaagtagtgagtgtggaatcttgttgatgaggccctttttttttcttcttcttttctgttagggaggaatgaatagctagactggatagatagattggtagggaggcagcgcaactttgtcatgagtgaagatttactgattaggtcggtcgtttggtcggataaaacacaatactctgttggttagggacagctttgagagcaagctttttgtctgtct

SEQ ID NO: 18552 - protein, 359 aa, Triticum aestivum
  peptide (1)..(359): Ceres Seq. ID no. 13654469
  misc_feature (41)..(337): NCBI GI NO: 34905182 NR Description: P0498E12.9
  misc_feature (17)..(295): NCBI GI NO: 7716464 NR Description: stomatin-like protein [Zea mays]
  misc_feature (15)..(327): NCBI GI NO: 23394406 NR Description: unknown [Phytophthora infestans]
  misc_feature (24)..(270): NCBI GI NO: 7487517 NR Description: hypothetical protein T29A15
  misc_feature (24)..(270): NCBI GI NO: 18417021 NR Description: expressed protein [Arabidopsis thaliana]
  misc_feature (1)..(270): NCBI GI NO: 15239547 NR Description: expressed protein [Arabidopsis thaliana]
  misc_feature (1)..(270): NCBI GI NO: 21554125 NR Description: stomatin-like protein [Arabidopsis thaliana]
  misc_feature (73)..(328): NCBI GI NO: 23491123 NR Description: SPFH domain / Band 7 family, putative
  misc_feature (74)..(328): NCBI GI NO: 16805265 NR Description: band 7-related protein
  misc_feature (73)..(312): NCBI GI NO: 23028719 NR Description: hypothetical protein
  misc_feature (286)..(286): Xaa is any aa, unknown or other
MAMSTATRMLARRAAPALLRSAASPGLLRSPAAGTGPSPALALPALLQAQGRWYRASGGDPSPSFYEPPPTPANLGLSIVPEKKAFVVERFGKYLKTLSSGIHLLMPGVDRIAYVHSLKEEAIPIPDNSAITKDNVSIQIGGVLYVKIVDPYKASYGVENPIYAVIQLAQTTMRSELGKITLDKTFEERDTLNTNIVKSINEAAETWGLKCLRYEIRDITPPDGVKKAMEMQAAAERKKRAQILESEGAMMENANKAKGEAEAILARSQATAEGIRMVSESFKTEXSTEAGSLRIAEQYIRAFSELARNTNTMLLPRDAVTPGPMIAQGPPDMHPHVQAETDPGKPQPQPAGGGGGRRG

SEQ ID NO: 18553 - protein, 357 aa, Triticum aestivum
  peptide (1)..(357): Ceres Seq. ID no. 13654470
  misc_feature (39)..(335): NCBI GI NO: 34905182 NR Description: P0498E12.9
  misc_feature (15)..(293): NCBI GI NO: 7716464 NR Description: stomatin-like protein [Zea mays]
  misc_feature (13)..(325): NCBI GI NO: 23394406 NR Description: unknown [Phytophthora infestans]
  misc_feature (22)..(268): NCBI GI NO: 7487517 NR Description: hypothetical protein T29A15
  misc_feature (22)..(268): NCBI GI NO: 18417021 NR Description: expressed protein [Arabidopsis thaliana]
  misc_feature (1)..(268): NCBI GI NO: 15239547 NR Description: expressed protein [Arabidopsis thaliana]
  misc_feature (1)..(268): NCBI GI NO: 21554125 NR Description: stomatin-like protein [Arabidopsis thaliana]
  misc_feature (71)..(326): NCBI GI NO: 23491123 NR Description: SPFH domain / Band 7 family, putative
  misc_feature (72)..(326): NCBI GI NO: 16805265 NR Description: band 7-related protein
  misc_feature (71)..(310): NCBI GI NO: 23028719 NR Description: hypothetical protein
  misc_feature (284)..(284): Xaa is any aa, unknown or other
MSTATRMLARRAAPALLRSAASPGLLRSPAAGTGPSPALALPALLQAQGRWYRASGGDPSPSFYEPPPTPANLGLSIVPEKKAFVVERFGKYLKTLSSGIHLLMPGVDRIAYVHSLKEEAIPIPDNSAITKDNVSIQIGGVLYVKIVDPYKASYGVENPIYAVIQLAQTTMRSELGKITLDKTFEERDTLNTNIVKSINEAAETWGLKCLRYEIRDITPPDGVKKAMEMQAAAERKKRAQILESEGAMMENANKAKGEAEAILARSQATAEGIRMVSESFKTEXSTEAGSLRIAEQYIRAFSELARNTNTMLLPRDAVTPGPMIAQGPPDMHPHVQAETDPGKPQPQPAGGGGGRRG

SEQ ID NO: 18554 - protein, 351 aa, Triticum aestivum
  peptide (1)..(351): Ceres Seq. ID no. 13654471
  misc_feature (33)..(329): NCBI GI NO: 34905182 NR Description: P0498E12.9
  misc_feature (9)..(287): NCBI GI NO: 7716464 NR Description: stomatin-like protein [Zea mays]
  misc_feature (7)..(319): NCBI GI NO: 23394406 NR Description: unknown [Phytophthora infestans]
  misc_feature (16)..(262): NCBI GI NO: 7487517 NR Description: hypothetical protein T29A15
  misc_feature (16)..(262): NCBI GI NO: 18417021 NR Description: expressed protein [Arabidopsis thaliana]
  misc_feature (1)..(262): NCBI GI NO: 15239547 NR Description: expressed protein [Arabidopsis thaliana]
  misc_feature (1)..(262): NCBI GI NO: 21554125 NR Description: stomatin-like protein [Arabidopsis thaliana]
  misc_feature (65)..(320): NCBI GI NO: 23491123 NR Description: SPFH domain / Band 7 family, putative
  misc_feature (66)..(320): NCBI GI NO: 16805265 NR Description: band 7-related protein
  misc_feature (65)..(304): NCBI GI NO: 23028719 NR Description: hypothetical protein
  misc_feature (278)..(278): Xaa is any aa, unknown or other
MLARRAAPALLRSAASPGLLRSPAAGTGPSPALALPALLQAQGRWYRASGGDPSPSFYEPPPTPANLGLSIVPEKKAFVVERFGKYLKTLSSGIHLLMPGVDRIAYVHSLKEEAIPIPDNSAITKDNVSIQIGGVLYVKIVDPYKASYGVENPIYAVIQLAQTTMRSELGKITLDKTFEERDTLNTNIVKSINEAAETWGLKCLRYEIRDITPPDGVKKAMEMQAAAERKKRAQILESEGAMMENANKAKGEAEAILARSQATAEGIRMVSESFKTEXSTEAGSLRIAEQYIRAFSELARNTNTMLLPRDAVTPGPMIAQGPPDMHPHVQAETDPGKPQPQPAGGGGGRRG

SEQ ID NO: 18555 - DNA, 897 bp, Triticum aestivum
  misc_feature (1)..(897): Ceres Seq. ID no. 12583993
ccacacccaagaagcgctccatagctacaccaccaccaagctgatagcaagcaagcaagcattgacaaatccaccatggcgaggcttcagctttccgtcgtggcggcctgcgccgtcctcctcgcgctcgccgccccctccctcgccggcgaccccgacatgctccaggacgtctgcgtcgccgacctggcatccccgatcaagatcaacgggttcccatgcaaggcgaacatcacggccgacgacttcttcttcgccggactcaagaaggccggcaacaccaacaacccggctggttcggtcgtcactgcggctaacgtgctgtcattccccggggtgaacacgctcggcgtgtccatggcgcgcatcgactacgccgtgggagggcagaacccgccacacacccacccgcgcgccaccgagatcatcttcgtcaccgagggaaccctggaggtgggattcatcaccaccgctaacaagctcttcactaaggtcgtcaccgtcggagaggtgttcgtcttcccgcgagggctcgtgcacttccagcagaacaggggcaactgctctgcctccgtcatcgccgccttcaacagccagcttcagggcacccaagccatcgccaccacgctcttggctgccacaccaccagtgccaaccgacgtgctggccaaggccttcagggttgataacgaagacatcgacgccgtcaaggccaggttcaactagggagcctctgccgtctcgcaactctccatccatttcggaagaaaagaatcgtttgtttgttactgaataaatggtattcaagtcatcaagtgagctgtagcgtgtagttgatttgttgttgtgtatgttacatttgttcatctttgagataataaaacttgcttctgtttc

SEQ ID NO: 18556 - protein, 216 aa, Triticum aestivum
  peptide (1)..(216): Ceres Seq. ID no. 12583994
  misc_feature (61)..(209): Pfam Name: Pfam Description:  Cupin
  misc_feature (1)..(215): NCBI GI NO: 34902528 NR Description: probable germin protein 4
  misc_feature (1)..(215): NCBI GI NO: 34906612 NR Description: germin(oxalate oxidase)-like protein
  misc_feature (1)..(215): NCBI GI NO: 31712108 NR Description: germin-like protein
  misc_feature (8)..(215): NCBI GI NO: 34904670 NR Description: putative germin protein
  misc_feature (7)..(215): NCBI GI NO: 27805638 NR Description: Nectarin 1 precursor (Superoxide dismutase [Mn])
  misc_feature (22)..(215): NCBI GI NO: 15217561 NR Description: germin-like protein; protein id: At1g09560
  misc_feature (2)..(214): NCBI GI NO: 18202917 NR Description: Germin-like protein subfamily 2 member 2 precursor
  misc_feature (3)..(215): NCBI GI NO: 7447345 NR Description: probable germin protein - tomato
  misc_feature (24)..(215): NCBI GI NO: 18203447 NR Description: Nectarin 1 precursor (Superoxide dismutase [Mn])
  misc_feature (15)..(215): NCBI GI NO: 15228673 NR Description: germin-like protein (GLP10); protein id:At3g62020
MARLQLSVVAACAVLLALAAPSLAGDPDMLQDVCVADLASPIKINGFPCKANITADDFFFAGLKKAGNTNNPAGSVVTAANVLSFPGVNTLGVSMARIDYAVGGQNPPHTHPRATEIIFVTEGTLEVGFITTANKLFTKVVTVGEVFVFPRGLVHFQQNRGNCSASVIAAFNSQLQGTQAIATTLLAATPPVPTDVLAKAFRVDNEDIDAVKARFN

SEQ ID NO: 18557 - protein, 188 aa, Triticum aestivum
  peptide (1)..(188): Ceres Seq. ID no. 12583995
  misc_feature (33)..(181): Pfam Name: Pfam Description:  Cupin
  misc_feature (1)..(187): NCBI GI NO: 34902528 NR Description: probable germin protein 4
  misc_feature (1)..(187): NCBI GI NO: 34906612 NR Description: germin(oxalate oxidase)-like protein
  misc_feature (1)..(187): NCBI GI NO: 31712108 NR Description: germin-like protein
  misc_feature (1)..(187): NCBI GI NO: 34904670 NR Description: putative germin protein
  misc_feature (1)..(187): NCBI GI NO: 27805638 NR Description: Nectarin 1 precursor (Superoxide dismutase [Mn])
  misc_feature (1)..(187): NCBI GI NO: 15217561 NR Description: germin-like protein; protein id: At1g09560
  misc_feature (1)..(186): NCBI GI NO: 18202917 NR Description: Germin-like protein subfamily 2 member 2 precursor
  misc_feature (1)..(187): NCBI GI NO: 7447345 NR Description: probable germin protein - tomato
  misc_feature (1)..(187): NCBI GI NO: 18203447 NR Description: Nectarin 1 precursor (Superoxide dismutase [Mn])
  misc_feature (1)..(187): NCBI GI NO: 15228673 NR Description: germin-like protein (GLP10); protein id:At3g62020
MLQDVCVADLASPIKINGFPCKANITADDFFFAGLKKAGNTNNPAGSVVTAANVLSFPGVNTLGVSMARIDYAVGGQNPPHTHPRATEIIFVTEGTLEVGFITTANKLFTKVVTVGEVFVFPRGLVHFQQNRGNCSASVIAAFNSQLQGTQAIATTLLAATPPVPTDVLAKAFRVDNEDIDAVKARFN

SEQ ID NO: 18558 - protein, 122 aa, Triticum aestivum
  peptide (1)..(122): Ceres Seq. ID no. 12583996
  misc_feature (1)..(115): Pfam Name: Pfam Description:  Cupin
  misc_feature (1)..(121): NCBI GI NO: 34902528 NR Description: probable germin protein 4
  misc_feature (1)..(121): NCBI GI NO: 34906612 NR Description: germin(oxalate oxidase)-like protein
  misc_feature (1)..(121): NCBI GI NO: 31712108 NR Description: germin-like protein
  misc_feature (1)..(121): NCBI GI NO: 34904670 NR Description: putative germin protein
  misc_feature (1)..(121): NCBI GI NO: 27805638 NR Description: Nectarin 1 precursor (Superoxide dismutase [Mn])
  misc_feature (1)..(121): NCBI GI NO: 15217561 NR Description: germin-like protein; protein id: At1g09560
  misc_feature (1)..(120): NCBI GI NO: 18202917 NR Description: Germin-like protein subfamily 2 member 2 precursor
  misc_feature (1)..(121): NCBI GI NO: 7447345 NR Description: probable germin protein - tomato
  misc_feature (1)..(121): NCBI GI NO: 18203447 NR Description: Nectarin 1 precursor (Superoxide dismutase [Mn])
  misc_feature (1)..(121): NCBI GI NO: 15228673 NR Description: germin-like protein (GLP10); protein id:At3g62020
MARIDYAVGGQNPPHTHPRATEIIFVTEGTLEVGFITTANKLFTKVVTVGEVFVFPRGLVHFQQNRGNCSASVIAAFNSQLQGTQAIATTLLAATPPVPTDVLAKAFRVDNEDIDAVKARFN

SEQ ID NO: 18559 - DNA, 1401 bp, Triticum aestivum
  misc_feature (1)..(1401): Ceres Seq. ID no. 12625108
aacttcaaccccccacgccactcgccaacgcctccgccgtccactcgccttctcgccgccacttgctctgctcaccgcgagcgcgtgcgtgcgtgcgcgcccccggagcgacgatggccgccgcactgccaccgtcgccgcccgccgccctcgcggcgctgctgctcctggtgatgctttcgccggccgcggcgcgcgtccctggcgtgtacaccggcggcgactggcagagcgcgcacgccaccttctacggcggcagcgacgcctccggcaccatgggcggcgcgtgcgggtacgggaacctgtacagccaagggtacggggtgaacaacgcggcgctgagcacggcgctgttcaacgaggggcagaggtgcggcgcctgcttcgagatccggtgcgagaaccagcctgggtgggcgtggtgcctcccggggaggccgtccatcgtcgtcaccgccaccaacttctgcccgcccaactacgcgctcccctccgacgacggcggctggtgcaacccgccccgcccccacttcgacctcgccatgcccatgttcctccacatggcgcagtaccgcgccggcatcgtccccgtctcctaccgccgggtggcgtgccggaagtctggcggggtgcggttcacgatcaacgggttcaggtacttcaacctggtgctgatcacgaacgtggcgggggcgggggacctggtgcgggccagcgtgaaggggtccagcaccgggtggatgcccatgtcccgcaactggggccagaactggcagtccaacgccatcctcgtcggccaggccctctccttccgcgtcaccgccagcgaccgccgcacctccacctcctggaacgccgcgccgcagagctggcgcttcggacagaccttcgagggcaagaacttcagggtctgatcccaccgtgaccttcccttcctcttctccggcgacggtcggcggcatgggcgggaggttcatcgtcttatatataaacgagtactactactacatactagtgggtgagtaattactacagtgagcgagtgagcggtctgtgttggtgtgtttttcccgtccttggtgcgtggcctgtgaatgcatatgcaaggtgcaagcaggttgataccagtagtagcagtaaaagtctagtcttgattagggtaaagaggtgatggttgctgggtactgaagtgtggagtggtggctgaagtggctgcaaagctgcagctgaagatgggagcggcgagtgtagcccgcagctgctgcttctccggtgtcgtcccgtcccgtgtcgtgtcatctttgtctccatggcacgctgctggctgttactagtactatttatcaatcgatcaatcatggacctgatttatatgtctatctatcagcttgatgattccct

SEQ ID NO: 18560 - protein, 307 aa, Triticum aestivum
  peptide (1)..(307): Ceres Seq. ID no. 12625109
TSTPHATRQRLRRPLAFSPPLALLTASACVRARPRSDDGRRTATVAARRPRGAAAPGDAFAGRGARPWRVHRRRLAERARHLLRRQRRLRHHGRRVRVREPVQPRVRGEQRGAEHGAVQRGAEVRRLLRDPVREPAWVGVVPPGEAVHRRHRHQLLPAQLRAPLRRRRLVQPAPPPLRPRHAHVPPHGAVPRRHRPRLLPPGGVPEVWRGAVHDQRVQVLQPGADHERGGGGGPGAGQREGVQHRVDAHVPQLGPELAVQRHPRRPGPLLPRHRQRPPHLHLLERRAAELALRTDLRGQELQGLIPP

SEQ ID NO: 18561 - protein, 303 aa, Triticum aestivum
  peptide (1)..(303): Ceres Seq. ID no. 12625110
  misc_feature (210)..(287): Pfam Name: Pfam Description:  Pollen allergen
  misc_feature (42)..(303): NCBI GI NO: 34897422 NR Description: alpha-expansin
  misc_feature (50)..(303): NCBI GI NO: 1076531 NR Description: pollen allergen homolog, hypothetical
  misc_feature (48)..(303): NCBI GI NO: 20502784 NR Description: expansin 11 precursor [Rumex palustris]
  misc_feature (44)..(303): NCBI GI NO: 16923359 NR Description: alpha-expansin 6 precursor [Cucumis sativus]
  misc_feature (48)..(303): NCBI GI NO: 20502786 NR Description: expansin 12 precursor [Rumex palustris]
  misc_feature (48)..(303): NCBI GI NO: 20502782 NR Description: expansin 10 precursor [Rumex palustris]
  misc_feature (53)..(303): NCBI GI NO: 40217878 NR Description: expansin-2 [Petunia x hybrida]
  misc_feature (48)..(303): NCBI GI NO: 29467509 NR Description: expansin [Pyrus communis]
  misc_feature (45)..(303): NCBI GI NO: 13898655 NR Description: expansin [Prunus cerasus]
  misc_feature (65)..(303): NCBI GI NO: 7488994 NR Description: expansin 1 - tomato
LQPPTPLANASAVHSPSRRHLLCSPRARACVRAPGATMAAALPPSPPAALAALLLLVMLSPAAARVPGVYTGGDWQSAHATFYGGSDASGTMGGACGYGNLYSQGYGVNNAALSTALFNEGQRCGACFEIRCENQPGWAWCLPGRPSIVVTATNFCPPNYALPSDDGGWCNPPRPHFDLAMPMFLHMAQYRAGIVPVSYRRVACRKSGGVRFTINGFRYFNLVLITNVAGAGDLVRASVKGSSTGWMPMSRNWGQNWQSNAILVGQALSFRVTASDRRTSTSWNAAPQSWRFGQTFEGKNFRV

SEQ ID NO: 18562 - protein, 266 aa, Triticum aestivum
  peptide (1)..(266): Ceres Seq. ID no. 12625111
  misc_feature (173)..(250): Pfam Name: Pfam Description:  Pollen allergen
  misc_feature (5)..(266): NCBI GI NO: 34897422 NR Description: alpha-expansin
  misc_feature (13)..(266): NCBI GI NO: 1076531 NR Description: pollen allergen homolog, hypothetical
  misc_feature (11)..(266): NCBI GI NO: 20502784 NR Description: expansin 11 precursor [Rumex palustris]
  misc_feature (7)..(266): NCBI GI NO: 16923359 NR Description: alpha-expansin 6 precursor [Cucumis sativus]
  misc_feature (11)..(266): NCBI GI NO: 20502786 NR Description: expansin 12 precursor [Rumex palustris]
  misc_feature (11)..(266): NCBI GI NO: 20502782 NR Description: expansin 10 precursor [Rumex palustris]
  misc_feature (16)..(266): NCBI GI NO: 40217878 NR Description: expansin-2 [Petunia x hybrida]
  misc_feature (11)..(266): NCBI GI NO: 29467509 NR Description: expansin [Pyrus communis]
  misc_feature (8)..(266): NCBI GI NO: 13898655 NR Description: expansin [Prunus cerasus]
  misc_feature (28)..(266): NCBI GI NO: 7488994 NR Description: expansin 1 - tomato
MAAALPPSPPAALAALLLLVMLSPAAARVPGVYTGGDWQSAHATFYGGSDASGTMGGACGYGNLYSQGYGVNNAALSTALFNEGQRCGACFEIRCENQPGWAWCLPGRPSIVVTATNFCPPNYALPSDDGGWCNPPRPHFDLAMPMFLHMAQYRAGIVPVSYRRVACRKSGGVRFTINGFRYFNLVLITNVAGAGDLVRASVKGSSTGWMPMSRNWGQNWQSNAILVGQALSFRVTASDRRTSTSWNAAPQSWRFGQTFEGKNFRV

SEQ ID NO: 18563 - DNA, 1030 bp, Triticum aestivum
  misc_feature (1)..(1030): Ceres Seq. ID no. 13582815
aacccaatatacacggagaagagatcgtcatcatccgccaaaccagatcggctcggctgcttcctcttcttcaacttcgcagaatcgctggtcttctcgtcctctagttaagtccctcgacagcaatgggaggaggcaacgacggtcatgggtacccacccggtggccaggggggataccctccgcaagggtacccgccgcagcagggaggttaccctccacagcaaggatacccgcctgcacctggagcttacccacctgcacctggggcataccctcctgcacctggggcataccctcctgcgcccggagcgggtggcagtgacggggagaaggggctcctctccaacatcatgcacggtgttgccggtgctcatggtggtggccatggctacccatctggtggccacgggtaccccccgcagcagcatggataccctcagcaaggctaccctcctcagcatggctacccaccgcaacagcatggctaccctccacagcagcatggctatccccctgctggctaccctggctcatctggtcacagtggtagccatggaggaggaggcatgggcatgggcggcatgctagctggaggcgcagcagctgctgccgccgcttacggagcacacaagatttctcacggcggccacggtggaggtggacacatgatgggaggcatgatgggcggccatggaggctatggcggcgggtacggccaccacggcggcaagttcaagcacgggaagcacggccacggcaagttcaagcacggcaagcatgggaagcacggcatgttcggcggcggcggaaagttcaagaagtggaagtaatgcgctagctagtagcttcaccatggctgatgaatcaaaaaaatacctaaactcttcgtgtaggcttccagaacttggtttggtcagggaaagcctttgagatgtatctaagcagggtgtggtgtggttgctgcccggatctcgtggagcttccatcctttcctctatatgatttggcactctagtctgcgtctgtg

SEQ ID NO: 18564 - protein, 235 aa, Triticum aestivum
  peptide (1)..(235): Ceres Seq. ID no. 13582816
  misc_feature (1)..(229): Pfam Name: Pfam Description:  Dehydrin
  misc_feature (67)..(235): NCBI GI NO: 33668156 NR Description: GPRP [Oryza sativa (indica cultivar-group)]
  misc_feature (67)..(235): NCBI GI NO: 6478148 NR Description: putative glycine and proline-rich protein
  misc_feature (60)..(235): NCBI GI NO: 13543234 NR Description: Unknown (protein for MGC:12025) [Mus musculus]
  misc_feature (86)..(235): NCBI GI NO: 15234178 NR Description: glycine/proline-rich protein
  misc_feature (64)..(227): NCBI GI NO: 8099125 NR Description: rice EST C27893 corresponds to a region of thepredicated gene
  misc_feature (64)..(235): NCBI GI NO: 13543234 NR Description: Unknown (protein for MGC:12025) [Mus musculus]
  misc_feature (43)..(228): NCBI GI NO: 18422542 NR Description: proline-rich protein family [Arabidopsis thaliana]
  misc_feature (65)..(235): NCBI GI NO: 15238005 NR Description: glycine/proline-rich protein
  misc_feature (87)..(235): NCBI GI NO: 18398103 NR Description: proline-rich protein family [Arabidopsis thaliana]
  misc_feature (87)..(235): NCBI GI NO: 21553447 NR Description: putative glycine and proline-rich protein
MGGGNDGHGYPPGGQGGYPPQGYPPQQGGYPPQQGYPPAPGAYPPAPGAYPPAPGAYPPAPGAGGSDGEKGLLSNIMHGVAGAHGGGHGYPSGGHGYPPQQHGYPQQGYPPQHGYPPQQHGYPPQQHGYPPAGYPGSSGHSGSHGGGGMGMGGMLAGGAAAAAAAYGAHKISHGGHGGGGHMMGGMMGGHGGYGGGYGHHGGKFKHGKHGHGKFKHGKHGKHGMFGGGGKFKKWK

SEQ ID NO: 18565 - protein, 159 aa, Triticum aestivum
  peptide (1)..(159): Ceres Seq. ID no. 13582817
  misc_feature (1)..(153): Pfam Name: Pfam Description:  Dehydrin
  misc_feature (1)..(159): NCBI GI NO: 33668156 NR Description: GPRP [Oryza sativa (indica cultivar-group)]
  misc_feature (1)..(159): NCBI GI NO: 6478148 NR Description: putative glycine and proline-rich protein
  misc_feature (1)..(159): NCBI GI NO: 13543234 NR Description: Unknown (protein for MGC:12025) [Mus musculus]
  misc_feature (10)..(159): NCBI GI NO: 15234178 NR Description: glycine/proline-rich protein
  misc_feature (1)..(151): NCBI GI NO: 8099125 NR Description: rice EST C27893 corresponds to a region of thepredicated gene
  misc_feature (1)..(159): NCBI GI NO: 13543234 NR Description: Unknown (protein for MGC:12025) [Mus musculus]
  misc_feature (1)..(152): NCBI GI NO: 18422542 NR Description: proline-rich protein family [Arabidopsis thaliana]
  misc_feature (1)..(159): NCBI GI NO: 15238005 NR Description: glycine/proline-rich protein
  misc_feature (11)..(159): NCBI GI NO: 18398103 NR Description: proline-rich protein family [Arabidopsis thaliana]
  misc_feature (11)..(159): NCBI GI NO: 21553447 NR Description: putative glycine and proline-rich protein
MHGVAGAHGGGHGYPSGGHGYPPQQHGYPQQGYPPQHGYPPQQHGYPPQQHGYPPAGYPGSSGHSGSHGGGGMGMGGMLAGGAAAAAAAYGAHKISHGGHGGGGHMMGGMMGGHGGYGGGYGHHGGKFKHGKHGHGKFKHGKHGKHGMFGGGGKFKKWK

SEQ ID NO: 18566 - protein, 147 aa, Triticum aestivum
  peptide (1)..(147): Ceres Seq. ID no. 13582818
MGTHPVARGDTLRKGTRRSREVTLHSKDTRLHLELTHLHLGHTLLHLGHTLLRPERVAVTGRRGSSPTSCTVLPVLMVVAMATHLVATGTPRSSMDTLSKATLLSMATHRNSMATLHSSMAIPLLATLAHLVTVVAMEEEAWAWAAC

SEQ ID NO: 18567 - DNA, 1289 bp, Triticum aestivum
  misc_feature (1)..(1289): Ceres Seq. ID no. 14313540
atcttttccaagcgcagaggcaaagttgtgcacgaggagggcgtgcggcatcggccaactgcagcgcagcggcgccggcggatcttctctccccgcgccgtcccggagtgctccgtccgtgccagtaagcaaaacctacaggattagaagaagccacaatggaaggaagcatcagcggtccgtcagagaaaagggttgccgtggtgaccggagggaaccgggggatggggctggagatatgccggcagcttgcggggcacgggctcgccgtcgtcttgacggcgagggacgacaagaggggcgctgaggcagccgaaacgctccgggaggaggggctatcggacgtcgcgtttcatcagctggagatcagcgagcccgccagtgccgctcgtctggctgctttcgtaaagaagaagttcggcaagcttgacatactggtcaacaatgccggagtgctcggggtgaccacggacgtcggcgacccggcgacccttcaggaaacgcttgcaggcaaggatgggatggagagagccgaatggctgaggcaacggaccacacagaccacccaggatgcagaggactgcctgaggatcaactaccacggcaacaagaccgtcacggaagccctcctcccgctcctccgatcatcctccgacggcagaattgtcaacgtaacctcagcctgggggctgctcaggtatttcagcggcgacgagctccggcgggagctggacgacgtcgcaaacctcacgacgcagcggctcgacgagatgtcggacctgttcctcgaggacctgggcaagggcaatggcgcgctggagcgccgcgggtggccggccgacccggtctacgcggcctacatggcgtccaaggcgctggtgtgcgcctacaccagggtgatcgccagggaggagggcgccgcgctgcgggtcaactgcgtgcaccccggatacgtcgtcaccgggatgaacgactacaccggcgtgctcacggccgcggagggcgccgccgccgcggttgcagttgcactcgcggagaaggggggcgtcaccggcgcctacttcgaccgcactgaactcggagcgtcctttgtgtgatttctccgtggagcagttgtgacataagtatatctagaattatgttatctttgcaataacacaatgtcatgagttgttccagatatggagaattatgttgtgttcacttttttttctctccgctctcagaagtactctccgttcactattatatgatgttctaacttttttataaatcagatgtttttagac

SEQ ID NO: 18568 - protein, 312 aa, Triticum aestivum
  peptide (1)..(312): Ceres Seq. ID no. 14313541
  misc_feature (1)..(312): NCBI GI NO: 38346772 NR Description: OSJNBa0081C01.23
  misc_feature (1)..(312): NCBI GI NO: 38346767 NR Description: OSJNBa0081C01.18
  misc_feature (1)..(312): NCBI GI NO: 38346774 NR Description: OSJNBa0081C01.25
  misc_feature (1)..(312): NCBI GI NO: 38346768 NR Description: OSJNBa0081C01.19
  misc_feature (1)..(312): NCBI GI NO: 38346769 NR Description: OSJNBa0081C01.20
  misc_feature (11)..(311): NCBI GI NO: 33146492 NR Description: carbonyl reductase -like protein
  misc_feature (12)..(307): NCBI GI NO: 15224100 NR Description: short-chain dehydrogenase/reductase family protein
  misc_feature (9)..(307): NCBI GI NO: 18378884 NR Description: short-chain dehydrogenase/reductase family protein
  misc_feature (12)..(307): NCBI GI NO: 15233062 NR Description: short-chain dehydrogenase/reductase family protein
  misc_feature (12)..(307): NCBI GI NO: 25518668 NR Description: hypothetical protein T1N6
MEGSISGPSEKRVAVVTGGNRGMGLEICRQLAGHGLAVVLTARDDKRGAEAAETLREEGLSDVAFHQLEISEPASAARLAAFVKKKFGKLDILVNNAGVLGVTTDVGDPATLQETLAGKDGMERAEWLRQRTTQTTQDAEDCLRINYHGNKTVTEALLPLLRSSSDGRIVNVTSAWGLLRYFSGDELRRELDDVANLTTQRLDEMSDLFLEDLGKGNGALERRGWPADPVYAAYMASKALVCAYTRVIAREEGAALRVNCVHPGYVVTGMNDYTGVLTAAEGAAAAVAVALAEKGGVTGAYFDRTELGASFV

SEQ ID NO: 18569 - protein, 290 aa, Triticum aestivum
  peptide (1)..(290): Ceres Seq. ID no. 14313542
  misc_feature (1)..(290): NCBI GI NO: 38346772 NR Description: OSJNBa0081C01.23
  misc_feature (1)..(290): NCBI GI NO: 38346767 NR Description: OSJNBa0081C01.18
  misc_feature (1)..(290): NCBI GI NO: 38346774 NR Description: OSJNBa0081C01.25
  misc_feature (1)..(290): NCBI GI NO: 38346768 NR Description: OSJNBa0081C01.19
  misc_feature (1)..(290): NCBI GI NO: 38346769 NR Description: OSJNBa0081C01.20
  misc_feature (1)..(289): NCBI GI NO: 33146492 NR Description: carbonyl reductase -like protein
  misc_feature (1)..(285): NCBI GI NO: 15224100 NR Description: short-chain dehydrogenase/reductase family protein
  misc_feature (1)..(285): NCBI GI NO: 18378884 NR Description: short-chain dehydrogenase/reductase family protein
  misc_feature (1)..(285): NCBI GI NO: 15233062 NR Description: short-chain dehydrogenase/reductase family protein
  misc_feature (1)..(285): NCBI GI NO: 25518668 NR Description: hypothetical protein T1N6
MGLEICRQLAGHGLAVVLTARDDKRGAEAAETLREEGLSDVAFHQLEISEPASAARLAAFVKKKFGKLDILVNNAGVLGVTTDVGDPATLQETLAGKDGMERAEWLRQRTTQTTQDAEDCLRINYHGNKTVTEALLPLLRSSSDGRIVNVTSAWGLLRYFSGDELRRELDDVANLTTQRLDEMSDLFLEDLGKGNGALERRGWPADPVYAAYMASKALVCAYTRVIAREEGAALRVNCVHPGYVVTGMNDYTGVLTAAEGAAAAVAVALAEKGGVTGAYFDRTELGASFV

SEQ ID NO: 18570 - protein, 191 aa, Triticum aestivum
  peptide (1)..(191): Ceres Seq. ID no. 14313543
  misc_feature (1)..(191): NCBI GI NO: 38346772 NR Description: OSJNBa0081C01.23
  misc_feature (1)..(191): NCBI GI NO: 38346767 NR Description: OSJNBa0081C01.18
  misc_feature (1)..(191): NCBI GI NO: 38346774 NR Description: OSJNBa0081C01.25
  misc_feature (1)..(191): NCBI GI NO: 38346768 NR Description: OSJNBa0081C01.19
  misc_feature (1)..(191): NCBI GI NO: 38346769 NR Description: OSJNBa0081C01.20
  misc_feature (1)..(190): NCBI GI NO: 33146492 NR Description: carbonyl reductase -like protein
  misc_feature (1)..(186): NCBI GI NO: 15224100 NR Description: short-chain dehydrogenase/reductase family protein
  misc_feature (1)..(186): NCBI GI NO: 18378884 NR Description: short-chain dehydrogenase/reductase family protein
  misc_feature (1)..(186): NCBI GI NO: 15233062 NR Description: short-chain dehydrogenase/reductase family protein
  misc_feature (1)..(186): NCBI GI NO: 25518668 NR Description: hypothetical protein T1N6
MERAEWLRQRTTQTTQDAEDCLRINYHGNKTVTEALLPLLRSSSDGRIVNVTSAWGLLRYFSGDELRRELDDVANLTTQRLDEMSDLFLEDLGKGNGALERRGWPADPVYAAYMASKALVCAYTRVIAREEGAALRVNCVHPGYVVTGMNDYTGVLTAAEGAAAAVAVALAEKGGVTGAYFDRTELGASFV

SEQ ID NO: 18571 - DNA, 1603 bp, Triticum aestivum
  misc_feature (1)..(1603): Ceres Seq. ID no. 13662301
ctcttgtctatgcagcttgcttcccctatctattttctagagggagggggagagagggacaaccaagatccaaatcttggccagcgactcgatcggatctccagccgacgccggcgaccatggctcgccatcacctccttctcttcctccctcttctcgcgcttgccttctcctttgtcatcgccgcccctgagagacagggagatgccgcggccttcatcgatggcgcatcgcaccgctacctgagggatcagccagaggaccaggccacgtccatgtcacttggtgaagtttctgcagctgtttctgtcttgcttggttttgcaccacctgccattcttcctgcaccttcttctgcaaagttaaacaagctgctactcccaaacccatttgacagacctcgttctgttttcttgatgcaacttgatggatcccatgactatgttaatggcttcatatctgatgccggcagtatttacaaaaccaagattgatggtgcaaaaagtgctgctatagagctttcagataaggatgaattgattgtcattcgttcggatgaatcttctggattagatgttcttgataacgaactcgccaacttggcaacctggttggcgggatcctatcagaaagctgatagcaaattaaacattcccttgaagagtggaaacagtcttactttgttcctcactaaggaagcagacgttgaatttgcatccagcttgatctcccttcttaaaaccatcgaaaggggtattcaggttcacgaagatttctcaggaggcatggtgagccctgcagagttattagtatgccacttcacgggcattaaggctctggaagatgaatatggttccgcagaaattgttaagcagggagctgaagtagttcagacagctctcacaaaagcatttgatcaattgcagggagcatataatggaaaaattgttggactggtaatatccgctaaggaggcttcaacatccttggcatccatcatcgatgcaccgtcttcattgcatatctcaagacggcttgcagaagcatctaaaactaatgctacagcttctatagctgctatatatcttgttagattgagtcttgcatggattacagggatcatccttctcgtctcaactctcattgggatttgcttgctcatgaacatgccgcttacgagggacacactcctatattcaaatgccaagattgattagtttgtgctacatacgaattttcacacgatgacatgaaagttttcaacagtcatgcttggtttttcctttggatcctggggtttacagtaggaacgtgagtgtgggcttgctgttcatgcagtgtagcataaaaatactgttgctatgtccttcatttagaatcatactgccactgcctgtttgggcttctcatgtttttccgtaaataaataacaatattcgagtggggtttattttgttaatatcggtcatgattgtatttttgcaaaaagcagtatctgaataaattcgccactcgaatattcattgggatatattttgtcttcatatatgacgttaaatgatttattgagttgaaatttcatataaattgattaatcatatgt

SEQ ID NO: 18572 - protein, 404 aa, Triticum aestivum
  peptide (1)..(404): Ceres Seq. ID no. 13662302
  misc_feature (66)..(404): NCBI GI NO: 15230073 NR Description: type 1 membrane protein -related
  misc_feature (292)..(404): NCBI GI NO: 40716478 NR Description: putative membrane protein type I [Musa acuminata]
LVYAACFPYLFSRGRGREGQPRSKSWPATRSDLQPTPATMARHHLLLFLPLLALAFSFVIAAPERQGDAAAFIDGASHRYLRDQPEDQATSMSLGEVSAAVSVLLGFAPPAILPAPSSAKLNKLLLPNPFDRPRSVFLMQLDGSHDYVNGFISDAGSIYKTKIDGAKSAAIELSDKDELIVIRSDESSGLDVLDNELANLATWLAGSYQKADSKLNIPLKSGNSLTLFLTKEADVEFASSLISLLKTIERGIQVHEDFSGGMVSPAELLVCHFTGIKALEDEYGSAEIVKQGAEVVQTALTKAFDQLQGAYNGKIVGLVISAKEASTSLASIIDAPSSLHISRRLAEASKTNATASIAAIYLVRLSLAWITGIILLVSTLIGICLLMNMPLTRDTLLYSNAKID

SEQ ID NO: 18573 - protein, 365 aa, Triticum aestivum
  peptide (1)..(365): Ceres Seq. ID no. 13662303
  misc_feature (27)..(365): NCBI GI NO: 15230073 NR Description: type 1 membrane protein -related
  misc_feature (253)..(365): NCBI GI NO: 40716478 NR Description: putative membrane protein type I [Musa acuminata]
MARHHLLLFLPLLALAFSFVIAAPERQGDAAAFIDGASHRYLRDQPEDQATSMSLGEVSAAVSVLLGFAPPAILPAPSSAKLNKLLLPNPFDRPRSVFLMQLDGSHDYVNGFISDAGSIYKTKIDGAKSAAIELSDKDELIVIRSDESSGLDVLDNELANLATWLAGSYQKADSKLNIPLKSGNSLTLFLTKEADVEFASSLISLLKTIERGIQVHEDFSGGMVSPAELLVCHFTGIKALEDEYGSAEIVKQGAEVVQTALTKAFDQLQGAYNGKIVGLVISAKEASTSLASIIDAPSSLHISRRLAEASKTNATASIAAIYLVRLSLAWITGIILLVSTLIGICLLMNMPLTRDTLLYSNAKID

SEQ ID NO: 18574 - protein, 313 aa, Triticum aestivum
  peptide (1)..(313): Ceres Seq. ID no. 13662304
  misc_feature (1)..(313): NCBI GI NO: 15230073 NR Description: type 1 membrane protein -related
  misc_feature (201)..(313): NCBI GI NO: 40716478 NR Description: putative membrane protein type I [Musa acuminata]
MSLGEVSAAVSVLLGFAPPAILPAPSSAKLNKLLLPNPFDRPRSVFLMQLDGSHDYVNGFISDAGSIYKTKIDGAKSAAIELSDKDELIVIRSDESSGLDVLDNELANLATWLAGSYQKADSKLNIPLKSGNSLTLFLTKEADVEFASSLISLLKTIERGIQVHEDFSGGMVSPAELLVCHFTGIKALEDEYGSAEIVKQGAEVVQTALTKAFDQLQGAYNGKIVGLVISAKEASTSLASIIDAPSSLHISRRLAEASKTNATASIAAIYLVRLSLAWITGIILLVSTLIGICLLMNMPLTRDTLLYSNAKID

SEQ ID NO: 18575 - DNA, 1179 bp, Triticum aestivum
  misc_feature (1)..(1179): Ceres Seq. ID no. 13598708
acacacagcgacctactatctcataagcctataccatccgttgagccacacccaactccgccatggcgaacccctccaatttccagatcactccccgcgccgcgttcgtggagagcaacgagctcaacttccgcagtctgtacctgttccacacttccctcggcgcaaaccagacccagtccaccgtaatagacccgaatgctagtaccggtttgggtcagacggctgttaacaactgggcgatatgtgatagccctagccccggtgccaccgtcgttgcacgtgcacatggcctgcatatctatgccggtaactggcagaacaccttcagcataacctttgaagttgaaaggtttaaggggtcaacgcttcaggtgatggggatatctgttgaggaaggtgagtgggctattgttggtggcacaggacagttcgcaatggcaaacggtgtcatatacaaaaagttccatgagcagaggagcgacggtaacatcatagaactcactgtccacgcgttctgtccagtgctgaaaggctcgccgagccttctcacaaagcttgggccatggggtggaagtggagggtcagataaagacatcgttgaggcaccaaggcgtctagagagcatcacagttagcagcggctcgattattgattcaatcaaattttcttatgttgaccaagctggccagaagcacacaagtggaccctggggaggatccggaggaaatccgaacacgatcgtactcggggcttctgagtttgtgaaggaagtttctggaacatacggcatttatgacgcagaccaacacaacataataatgtcactgaaattcatcaccaatgtgaaggcttatgggcctttcggagaagcgaatggaacccctttcaccatacctgtggaaaacaatagcagcatagtgggcttcttcgggcgtagtgggatatatctcgatgcgcttggtgtctacgtgcgcccgctctaagcaacaacagctaatgttcttattttcggcgtttgtttctcatttcaaataagaagatgggatcgttgtcctttctcatccggaagatcctatgtagccacccggacttttaggtccctttgttgtgatgaataaaaatatcagttttcttacaaaaaaaaaaaaaaaaaagcttatcgataccgtcgacctc

SEQ ID NO: 18576 - protein, 307 aa, Triticum aestivum
  peptide (1)..(307): Ceres Seq. ID no. 13598709
  misc_feature (5)..(155): Pfam Name: Pfam Description:  Dirigent-like protein
  misc_feature (5)..(307): NCBI GI NO: 7489385 NR Description: jakalin homolog - barley
  misc_feature (5)..(307): NCBI GI NO: 7489383 NR Description: jacalin homolog - barley
  misc_feature (5)..(297): NCBI GI NO: 7489384 NR Description: jacalin homolog - barley
  misc_feature (5)..(307): NCBI GI NO: 9313027 NR Description: beta-glucosidase aggregating factor precursor
  misc_feature (5)..(303): NCBI GI NO: 16151819 NR Description: VER2 [Triticum aestivum]
  misc_feature (1)..(306): NCBI GI NO: 7489661 NR Description: benzothiadiazole-induced protein
  misc_feature (39)..(305): NCBI GI NO: 21311647 NR Description: hessian fly response gene 1 protein
  misc_feature (5)..(211): NCBI GI NO: 7489672 NR Description: jasmonate-induced protein homolog - wheat
  misc_feature (163)..(306): NCBI GI NO: 38344523 NR Description: OSJNBa0016N04.16
  misc_feature (163)..(306): NCBI GI NO: 38344523 NR Description: OSJNBa0016N04.16
MANPSNFQITPRAAFVESNELNFRSLYLFHTSLGANQTQSTVIDPNASTGLGQTAVNNWAICDSPSPGATVVARAHGLHIYAGNWQNTFSITFEVERFKGSTLQVMGISVEEGEWAIVGGTGQFAMANGVIYKKFHEQRSDGNIIELTVHAFCPVLKGSPSLLTKLGPWGGSGGSDKDIVEAPRRLESITVSSGSIIDSIKFSYVDQAGQKHTSGPWGGSGGNPNTIVLGASEFVKEVSGTYGIYDADQHNIIMSLKFITNVKAYGPFGEANGTPFTIPVENNSSIVGFFGRSGIYLDALGVYVRPL

SEQ ID NO: 18577 - protein, 202 aa, Triticum aestivum
  peptide (1)..(202): Ceres Seq. ID no. 13598710
  misc_feature (71)..(201): Pfam Name: Pfam Description:  Jacalin-like lectin domain
  misc_feature (1)..(202): NCBI GI NO: 7489385 NR Description: jakalin homolog - barley
  misc_feature (1)..(202): NCBI GI NO: 7489383 NR Description: jacalin homolog - barley
  misc_feature (1)..(192): NCBI GI NO: 7489384 NR Description: jacalin homolog - barley
  misc_feature (1)..(202): NCBI GI NO: 9313027 NR Description: beta-glucosidase aggregating factor precursor
  misc_feature (1)..(198): NCBI GI NO: 16151819 NR Description: VER2 [Triticum aestivum]
  misc_feature (1)..(201): NCBI GI NO: 7489661 NR Description: benzothiadiazole-induced protein
  misc_feature (1)..(200): NCBI GI NO: 21311647 NR Description: hessian fly response gene 1 protein
  misc_feature (1)..(106): NCBI GI NO: 7489672 NR Description: jasmonate-induced protein homolog - wheat
  misc_feature (58)..(201): NCBI GI NO: 38344523 NR Description: OSJNBa0016N04.16
  misc_feature (58)..(201): NCBI GI NO: 38344523 NR Description: OSJNBa0016N04.16
MGISVEEGEWAIVGGTGQFAMANGVIYKKFHEQRSDGNIIELTVHAFCPVLKGSPSLLTKLGPWGGSGGSDKDIVEAPRRLESITVSSGSIIDSIKFSYVDQAGQKHTSGPWGGSGGNPNTIVLGASEFVKEVSGTYGIYDADQHNIIMSLKFITNVKAYGPFGEANGTPFTIPVENNSSIVGFFGRSGIYLDALGVYVRPL

SEQ ID NO: 18578 - protein, 182 aa, Triticum aestivum
  peptide (1)..(182): Ceres Seq. ID no. 13598711
  misc_feature (51)..(181): Pfam Name: Pfam Description:  Jacalin-like lectin domain
  misc_feature (1)..(182): NCBI GI NO: 7489385 NR Description: jakalin homolog - barley
  misc_feature (1)..(182): NCBI GI NO: 7489383 NR Description: jacalin homolog - barley
  misc_feature (1)..(172): NCBI GI NO: 7489384 NR Description: jacalin homolog - barley
  misc_feature (1)..(182): NCBI GI NO: 9313027 NR Description: beta-glucosidase aggregating factor precursor
  misc_feature (1)..(178): NCBI GI NO: 16151819 NR Description: VER2 [Triticum aestivum]
  misc_feature (1)..(181): NCBI GI NO: 7489661 NR Description: benzothiadiazole-induced protein
  misc_feature (1)..(180): NCBI GI NO: 21311647 NR Description: hessian fly response gene 1 protein
  misc_feature (1)..(86): NCBI GI NO: 7489672 NR Description: jasmonate-induced protein homolog - wheat
  misc_feature (38)..(181): NCBI GI NO: 38344523 NR Description: OSJNBa0016N04.16
  misc_feature (38)..(181): NCBI GI NO: 38344523 NR Description: OSJNBa0016N04.16
MANGVIYKKFHEQRSDGNIIELTVHAFCPVLKGSPSLLTKLGPWGGSGGSDKDIVEAPRRLESITVSSGSIIDSIKFSYVDQAGQKHTSGPWGGSGGNPNTIVLGASEFVKEVSGTYGIYDADQHNIIMSLKFITNVKAYGPFGEANGTPFTIPVENNSSIVGFFGRSGIYLDALGVYVRPL

SEQ ID NO: 18579 - DNA, 669 bp, Triticum aestivum
  misc_feature (1)..(669): Ceres Seq. ID no. 13585156
gagtttacccgacgccaccccctcttttctttcccccttcctcttcaactcccgtctcacctctcccgacgccgaaccgaatcgcagcagcggcagccggagaagaagagatcgagcgccagcagccatgtccggcatggaggaggaggagaacgccgccgagctcaagatcggcgaagagttcctgaaggccaagtgcctgatgaactgcgaggtggcgataatcctggagcacaagtgggagcagctgcagcacatgtcggacggcggcgccgaccaggtctcgcaggtcttcgagaagtcgcaggcctacgtcaagcgcttcagccgctacaagaaccccgacgcggtccgccaggtccgcgagacgctctcccgctacagcctcgtcgagttcgagctctgcaccctcgggaacctctgccccgacaccgccgacgaggccaaggcgctcgtcccctccctcgtccccggcggcaggttcgacagcgacgaccgggtcgacaagatgctcaacgacctctccctcatcaagaagttcgagtagtagcccccataatatgctcttcttgtcttcctccagtgatatgtttaagcttcagattatctccttttattgcgctatgatcataagacatcagtgtcagtctcaaatgaatggagttaatt

SEQ ID NO: 18580 - protein, 208 aa, Triticum aestivum
  peptide (1)..(208): Ceres Seq. ID no. 13585157
EFTRRHPLFSFPLPLQLPSHLSRRRTESQQRQPEKKRSSASSHVRHGGGGERRRAQDRRRVPEGQVPDELRGGDNPGAQVGAAAAHVGRRRRPGLAGLREVAGLRQALQPLQEPRRGPPGPRDALPLQPRRVRALHPREPLPRHRRRGQGARPLPRPRRQVRQRRPGRQDAQRPLPHQEVRVVAPIICSSCLPPVICLSFRLSPFIAL

SEQ ID NO: 18581 - protein, 181 aa, Triticum aestivum
  peptide (1)..(181): Ceres Seq. ID no. 13585158
  misc_feature (62)..(180): Pfam Name: Pfam Description:  RNA polymerase Rpb4
  misc_feature (43)..(181): NCBI GI NO: 15242547 NR Description: 15
  misc_feature (49)..(181): NCBI GI NO: 4758574 NR Description: DNA directed RNA polymerase II polypeptide D
  misc_feature (49)..(181): NCBI GI NO: 34878674 NR Description: similar to RIKEN cDNA 2610028L19
  misc_feature (49)..(174): NCBI GI NO: 27263229 NR Description: RNA polymerase II accessory factor rpb4
  misc_feature (49)..(181): NCBI GI NO: 17533967 NR Description: RNA polymerase Rpb4 family member
  misc_feature (49)..(181): NCBI GI NO: 39582357 NR Description: Hypothetical protein CBG13151
  misc_feature (74)..(181): NCBI GI NO: 28076931 NR Description: RIKEN cDNA 2610028L19 [Mus musculus]
  misc_feature (49)..(181): NCBI GI NO: 7503310 NR Description: hypothetical protein F43E2
  misc_feature (60)..(174): NCBI GI NO: 24647897 NR Description: CG31237-PA [Drosophila melanogaster]
SLPDATPSFLSPFLFNSRLTSPDAEPNRSSGSRRRRDRAPAAMSGMEEEENAAELKIGEEFLKAKCLMNCEVAIILEHKWEQLQHMSDGGADQVSQVFEKSQAYVKRFSRYKNPDAVRQVRETLSRYSLVEFELCTLGNLCPDTADEAKALVPSLVPGGRFDSDDRVDKMLNDLSLIKKFE

SEQ ID NO: 18582 - protein, 139 aa, Triticum aestivum
  peptide (1)..(139): Ceres Seq. ID no. 13585159
  misc_feature (20)..(138): Pfam Name: Pfam Description:  RNA polymerase Rpb4
  misc_feature (1)..(139): NCBI GI NO: 15242547 NR Description: 15
  misc_feature (7)..(139): NCBI GI NO: 4758574 NR Description: DNA directed RNA polymerase II polypeptide D
  misc_feature (7)..(139): NCBI GI NO: 34878674 NR Description: similar to RIKEN cDNA 2610028L19
  misc_feature (7)..(132): NCBI GI NO: 27263229 NR Description: RNA polymerase II accessory factor rpb4
  misc_feature (7)..(139): NCBI GI NO: 17533967 NR Description: RNA polymerase Rpb4 family member
  misc_feature (7)..(139): NCBI GI NO: 39582357 NR Description: Hypothetical protein CBG13151
  misc_feature (32)..(139): NCBI GI NO: 28076931 NR Description: RIKEN cDNA 2610028L19 [Mus musculus]
  misc_feature (7)..(139): NCBI GI NO: 7503310 NR Description: hypothetical protein F43E2
  misc_feature (18)..(132): NCBI GI NO: 24647897 NR Description: CG31237-PA [Drosophila melanogaster]
MSGMEEEENAAELKIGEEFLKAKCLMNCEVAIILEHKWEQLQHMSDGGADQVSQVFEKSQAYVKRFSRYKNPDAVRQVRETLSRYSLVEFELCTLGNLCPDTADEAKALVPSLVPGGRFDSDDRVDKMLNDLSLIKKFE

SEQ ID NO: 18583 - DNA, 1032 bp, Triticum aestivum
  misc_feature (1)..(1032): Ceres Seq. ID no. 13596366
aacaagctccattcatctattcttcgtctccaccgatccctttggtagaccaaccagcagcagctctcggctcacctctccctgctcctcgatctatctagtctagtcttcagtgtggccatggcgaaggtgcacccgaacctggccgtgccgtctctggggatggcggcggcggcggcggcccgcgacgacgagccggtgacactgacggtgtggcgcaagtcgctgctcttcaactgccgggggttcacggtgttcgacgccagcggcaacctggtgtaccgcgtggacatctacgcgtccgactcccgcgccgaggtggtgctcatggacgccgcggggcggccggtgctcaccgtccgccgcaagaaggccatcagcctcatgggcgaccagtggctggtgttccccggcgaggagacgcgcgcgccgccgctctacgcggtgaagcgcacgccgcagtacatgcgcggcggcggcaagtcgacggcgcacgtggcggcgtgcgcgggcggcgcgcggtacgaggtggaggggtcgtacgcgcggcggtgctgcgcggtgtacgacgagcagcggcgcgcggtggtggaggtgcagcccaaggaggcggtgggcacggacgtgttccggatggtggtgcggccggcgggcatggacgtgtcgctggccatggccgtcgtgctcgcgctggaccagatgctcgggaggccggggctgctcaggagctggtcctcgtagcgccactgagactgggtcgcctccttcggtttgcctccttcgatttccgaaattgtttgggcccgagagcagaacagctcccatgtgccccccttctctctcttttttttgtttcctttttggaaactttctctttgatatatatgaaggtctatgtgcatcgaaatccttcttgaggtgtatggttttgttcatttttactgtaataaaaccatgcattttgtaaagattattaaagtgggatgaaactgtattactcctatacttctataaaagaagtcacactaggcc

SEQ ID NO: 18584 - protein, 206 aa, Triticum aestivum
  peptide (1)..(206): Ceres Seq. ID no. 13596367
  misc_feature (23)..(190): Pfam Name: DUF567 Pfam Description: Protein of unknown function
  misc_feature (1)..(206): NCBI GI NO: 34909256 NR Description: B1148D12.16
  misc_feature (1)..(204): NCBI GI NO: 27542765 NR Description: hypothetical protein-like protein
  misc_feature (1)..(204): NCBI GI NO: 27542769 NR Description: hypothetical protein-like protein
  misc_feature (1)..(194): NCBI GI NO: 15224921 NR Description: expressed protein [Arabidopsis thaliana]
  misc_feature (4)..(194): NCBI GI NO: 15238123 NR Description: hypothetical protein [Arabidopsis thaliana]
  misc_feature (3)..(175): NCBI GI NO: 27542767 NR Description: hypothetical protein-like protein
  misc_feature (22)..(196): NCBI GI NO: 18400907 NR Description: expressed protein [Arabidopsis thaliana]
  misc_feature (22)..(196): NCBI GI NO: 21554362 NR Description: unknown [Arabidopsis thaliana]
  misc_feature (25)..(196): NCBI GI NO: 15220064 NR Description: expressed protein [Arabidopsis thaliana]
  misc_feature (1)..(190): NCBI GI NO: 9279574 NR Description: gb|AAF02862
MAKVHPNLAVPSLGMAAAAAARDDEPVTLTVWRKSLLFNCRGFTVFDASGNLVYRVDIYASDSRAEVVLMDAAGRPVLTVRRKKAISLMGDQWLVFPGEETRAPPLYAVKRTPQYMRGGGKSTAHVAACAGGARYEVEGSYARRCCAVYDEQRRAVVEVQPKEAVGTDVFRMVVRPAGMDVSLAMAVVLALDQMLGRPGLLRSWSS

SEQ ID NO: 18585 - protein, 192 aa, Triticum aestivum
  peptide (1)..(192): Ceres Seq. ID no. 13596368
  misc_feature (9)..(176): Pfam Name: DUF567 Pfam Description: Protein of unknown function
  misc_feature (1)..(192): NCBI GI NO: 34909256 NR Description: B1148D12.16
  misc_feature (1)..(190): NCBI GI NO: 27542765 NR Description: hypothetical protein-like protein
  misc_feature (1)..(190): NCBI GI NO: 27542769 NR Description: hypothetical protein-like protein
  misc_feature (1)..(180): NCBI GI NO: 15224921 NR Description: expressed protein [Arabidopsis thaliana]
  misc_feature (1)..(180): NCBI GI NO: 15238123 NR Description: hypothetical protein [Arabidopsis thaliana]
  misc_feature (1)..(161): NCBI GI NO: 27542767 NR Description: hypothetical protein-like protein
  misc_feature (8)..(182): NCBI GI NO: 18400907 NR Description: expressed protein [Arabidopsis thaliana]
  misc_feature (8)..(182): NCBI GI NO: 21554362 NR Description: unknown [Arabidopsis thaliana]
  misc_feature (11)..(182): NCBI GI NO: 15220064 NR Description: expressed protein [Arabidopsis thaliana]
  misc_feature (1)..(176): NCBI GI NO: 9279574 NR Description: gb|AAF02862
MAAAAAARDDEPVTLTVWRKSLLFNCRGFTVFDASGNLVYRVDIYASDSRAEVVLMDAAGRPVLTVRRKKAISLMGDQWLVFPGEETRAPPLYAVKRTPQYMRGGGKSTAHVAACAGGARYEVEGSYARRCCAVYDEQRRAVVEVQPKEAVGTDVFRMVVRPAGMDVSLAMAVVLALDQMLGRPGLLRSWSS

SEQ ID NO: 18586 - protein, 137 aa, Triticum aestivum
  peptide (1)..(137): Ceres Seq. ID no. 13596369
  misc_feature (1)..(121): Pfam Name: DUF567 Pfam Description: Protein of unknown function
  misc_feature (1)..(137): NCBI GI NO: 34909256 NR Description: B1148D12.16
  misc_feature (1)..(135): NCBI GI NO: 27542765 NR Description: hypothetical protein-like protein
  misc_feature (1)..(135): NCBI GI NO: 27542769 NR Description: hypothetical protein-like protein
  misc_feature (1)..(125): NCBI GI NO: 15224921 NR Description: expressed protein [Arabidopsis thaliana]
  misc_feature (1)..(125): NCBI GI NO: 15238123 NR Description: hypothetical protein [Arabidopsis thaliana]
  misc_feature (1)..(106): NCBI GI NO: 27542767 NR Description: hypothetical protein-like protein
  misc_feature (1)..(127): NCBI GI NO: 18400907 NR Description: expressed protein [Arabidopsis thaliana]
  misc_feature (1)..(127): NCBI GI NO: 21554362 NR Description: unknown [Arabidopsis thaliana]
  misc_feature (1)..(127): NCBI GI NO: 15220064 NR Description: expressed protein [Arabidopsis thaliana]
  misc_feature (1)..(121): NCBI GI NO: 9279574 NR Description: gb|AAF02862
MDAAGRPVLTVRRKKAISLMGDQWLVFPGEETRAPPLYAVKRTPQYMRGGGKSTAHVAACAGGARYEVEGSYARRCCAVYDEQRRAVVEVQPKEAVGTDVFRMVVRPAGMDVSLAMAVVLALDQMLGRPGLLRSWSS

SEQ ID NO: 18587 - DNA, 1107 bp, Triticum aestivum
  misc_feature (1)..(1107): Ceres Seq. ID no. 14301526
aaccaagattcaaagaatccaatccagtccaatccatcttctctttgccactcttctccgccggagctgctgccaaagtctctgtctttctctgtgtccgtccagtagatgagcatggcggcgacggcggccacggccacgccctggccctccacctcctcctccgtcctcgcccctcgcacccgccaccacgccacccgcagcccccgcgccctccgctccggcttcctcggccgcgccctcaccctcgccgcccccacagaccgcccctcccccgtctccgtctccgtgcgcgcggcctgggacggccccctctcctcggcgcgcctcatcatgcagggccgcaacgtcaagctgacggagaagctcaaggagcacatcgaggacaaggtggggcgcgcggtgcacaaccacgcgcacctggtgcgggaggtggacgtgcgcctctccgcccgcggcggcgacctcagcaagggccccaagctctcccgctgcgaggtcacgctcttcacgcgccgccacggcgtcgtgcgcgcagaggaggaggaggagtcatcctactcctccatcgacgccgccgccgccgtcgtcaagcgcaagctgaggaagatcaaggagaaggagaccgacgtgcgccacctcaagggcaccaaggagtggcaggcctccgggctgtccgacgtggaagacgagtcggaggcagaggagctggaggatgacgacgatgacgagctcgtggaggtcatcggcgccgaggacgaggagaccgtgctcaccaaggttgtgcgcaccaaggtgttcgagatggcgccgctgacggtggatgaggcgctggagcagctggagaacgtcgaccacgacttctacgccttcaggaacgagcagacaggggaggtgaacatcctgtacaagaggaaggagggagggttcgggctcatcatccccaagcaggacggccatgtcgacaaggccaccgtcaacgccaaggagaaggagcaccccgtcgccggctgacgtctcctctccatgacaccaagtggatcactagctgtagctgcattagtcggtctgttttttccctgatgataataatggtggtgggtgtcc

SEQ ID NO: 18588 - protein, 301 aa, Triticum aestivum
  peptide (1)..(301): Ceres Seq. ID no. 14301527
  misc_feature (73)..(174): Pfam Name: Pfam Description:  Sigma 54 modulation protein / S30EA ribosomal protein
  misc_feature (36)..(298): NCBI GI NO: 30102988 NR Description: putative ribosomal protein
  misc_feature (10)..(300): NCBI GI NO: 18420800 NR Description: expressed protein [Arabidopsis thaliana]
  misc_feature (52)..(287): NCBI GI NO: 134034 NR Description: Plastid-specific 30S ribosomal protein 1
  misc_feature (52)..(287): NCBI GI NO: 170131 NR Description: ribosomal protein 30S subunit
  misc_feature (52)..(180): NCBI GI NO: 227070 NR Description: ribosomal protein CS-S5
  misc_feature (193)..(301): NCBI GI NO: 22298376 NR Description: ORF_ID:tlr0833~light repressed protein A homolog
  misc_feature (73)..(181): NCBI GI NO: 22298376 NR Description: ORF_ID:tlr0833~light repressed protein A homolog
  misc_feature (73)..(174): NCBI GI NO: 17230676 NR Description: light-repressed protein [Nostoc sp. PCC 7120]
  misc_feature (209)..(286): NCBI GI NO: 17230676 NR Description: light-repressed protein [Nostoc sp. PCC 7120]
  misc_feature (73)..(174): NCBI GI NO: 23125050 NR Description: hypothetical protein [Nostoc punctiforme]
MSMAATAATATPWPSTSSSVLAPRTRHHATRSPRALRSGFLGRALTLAAPTDRPSPVSVSVRAAWDGPLSSARLIMQGRNVKLTEKLKEHIEDKVGRAVHNHAHLVREVDVRLSARGGDLSKGPKLSRCEVTLFTRRHGVVRAEEEEESSYSSIDAAAAVVKRKLRKIKEKETDVRHLKGTKEWQASGLSDVEDESEAEELEDDDDDELVEVIGAEDEETVLTKVVRTKVFEMAPLTVDEALEQLENVDHDFYAFRNEQTGEVNILYKRKEGGFGLIIPKQDGHVDKATVNAKEKEHPVAG

SEQ ID NO: 18589 - protein, 299 aa, Triticum aestivum
  peptide (1)..(299): Ceres Seq. ID no. 14301528
  misc_feature (71)..(172): Pfam Name: Pfam Description:  Sigma 54 modulation protein / S30EA ribosomal protein
  misc_feature (34)..(296): NCBI GI NO: 30102988 NR Description: putative ribosomal protein
  misc_feature (8)..(298): NCBI GI NO: 18420800 NR Description: expressed protein [Arabidopsis thaliana]
  misc_feature (50)..(285): NCBI GI NO: 134034 NR Description: Plastid-specific 30S ribosomal protein 1
  misc_feature (50)..(285): NCBI GI NO: 170131 NR Description: ribosomal protein 30S subunit
  misc_feature (50)..(178): NCBI GI NO: 227070 NR Description: ribosomal protein CS-S5
  misc_feature (191)..(299): NCBI GI NO: 22298376 NR Description: ORF_ID:tlr0833~light repressed protein A homolog
  misc_feature (71)..(179): NCBI GI NO: 22298376 NR Description: ORF_ID:tlr0833~light repressed protein A homolog
  misc_feature (71)..(172): NCBI GI NO: 17230676 NR Description: light-repressed protein [Nostoc sp. PCC 7120]
  misc_feature (207)..(284): NCBI GI NO: 17230676 NR Description: light-repressed protein [Nostoc sp. PCC 7120]
  misc_feature (71)..(172): NCBI GI NO: 23125050 NR Description: hypothetical protein [Nostoc punctiforme]
MAATAATATPWPSTSSSVLAPRTRHHATRSPRALRSGFLGRALTLAAPTDRPSPVSVSVRAAWDGPLSSARLIMQGRNVKLTEKLKEHIEDKVGRAVHNHAHLVREVDVRLSARGGDLSKGPKLSRCEVTLFTRRHGVVRAEEEEESSYSSIDAAAAVVKRKLRKIKEKETDVRHLKGTKEWQASGLSDVEDESEAEELEDDDDDELVEVIGAEDEETVLTKVVRTKVFEMAPLTVDEALEQLENVDHDFYAFRNEQTGEVNILYKRKEGGFGLIIPKQDGHVDKATVNAKEKEHPVAG

SEQ ID NO: 18590 - protein, 238 aa, Triticum aestivum
  peptide (1)..(238): Ceres Seq. ID no. 14301529
  misc_feature (57)..(163): Pfam Name: Pfam Description:  FHIPEP family
  misc_feature (52)..(238): NCBI GI NO: 23018788 NR Description: hypothetical protein [Thermobifida fusca]
PRFKESNPVQSIFSLPLFSAGAAAKVSVFLCVRPVDEHGGDGGHGHALALHLLLRPRPSHPPPRHPQPPRPPLRLPRPRPHPRRPHRPPLPRLRLRARGLGRPPLLGAPHHAGPQRQADGEAQGAHRGQGGARGAQPRAPGAGGGRAPLRPRRRPQQGPQALPLRGHALHAPPRRRARRGGGGVILLLHRRRRRRRQAQAEEDQGEGDRRAPPQGHQGVAGLRAVRRGRRVGGRGAGG

SEQ ID NO: 18591 - DNA, 1374 bp, Triticum aestivum
  misc_feature (1)..(1374): Ceres Seq. ID no. 14302287
acacaccactccttcccctcccctgatctccccgccgcgccgatccccccaccagcgcagcagccatggcgaccgcctacaacctccggtcccgcgacgagccggacgacttcgacgagttcgactccacgccctacggcggcggctacgacctcttcgtcaccttcggccgcccgctcccgccctccgacgagacctgctacccctgctccgccccctccacctcctacgacgcgccccactacgccgccgaggagccctccccctacgcccaccaccagaagccgcagcccgcctacggcttccgcccccagaacgagcagcagcagcagccttcctacggccgcgaggacgacgactccggctacgtatccaagcccaagcccaagccccagcccgcgtacggcttccgcccccaggcggaggaggagcagcgcccgtcctacggcggcggcggggaggaggatgactccggctacggatccaagccgcagcccgcctacggcttccgcccccagcaggaggagcagccggcctacggctccggctacgggtccaagccccagcgctcccaggaggacacctacggatctggctacggccggaagccgcagcaggaggagcccgcctacgggtccgggtacggctccggctacgggaggaagccgcaggccgaggagagctacggatctgggtacgggaacacgacgcagccggaggagggctacggctccggctacgggtccaagccgcaggtggagcagacctacggcgggtcggagtacggctctgggtacggaaggaagccgcaggtggaggagagctatgggtcggggtacggaagcaggccgcaggggggagaggagtatggtagtgctgggtatggtgggaggaagactgaggaggagggctatggtggttctgggtatggatctgggaggaaggtgcaagaggaggatgaaggtgcctatggctctggtgggtaccagaagcccaagccgtatggagaggagactcaggcttcgtatggtggtgggtatgagaagcccagctacggcggggggaactatggccgcaagaagcaggatgacgactctgatgatgagaagaagaaccgttacgcgaagcgcgatgactcggatgatgagaaggagcgttacgagaagcaccaccaccaccgccgccacaactacgacgactaagcatccagcatggtcttgacctgctgccatcgcccccacatctcgctactacacgaataaagattggtcttgtttcccttgttggtgccggatcattcccctcttttatgaacttgtatgactgcaacctaaagtgtgctatgtgggtggtttatatgtttgaactatctcc

SEQ ID NO: 18592 - protein, 406 aa, Triticum aestivum
  peptide (1)..(406): Ceres Seq. ID no. 14302288
  misc_feature (27)..(263): Pfam Name: Pfam Description:  Equine herpesvirus glycoprotein gp2
  misc_feature (6)..(266): NCBI GI NO: 27375632 NR Description: blr0521 [Bradyrhizobium japonicum]
  misc_feature (14)..(260): NCBI GI NO: 27375632 NR Description: blr0521 [Bradyrhizobium japonicum]
  misc_feature (6)..(250): NCBI GI NO: 188864 NR Description: mucin
  misc_feature (6)..(250): NCBI GI NO: 188864 NR Description: mucin
  misc_feature (6)..(262): NCBI GI NO: 188864 NR Description: mucin
  misc_feature (6)..(241): NCBI GI NO: 6523547 NR Description: hydroxyproline-rich glycoprotein DZ-HRGP
  misc_feature (6)..(231): NCBI GI NO: 188864 NR Description: mucin
  misc_feature (6)..(406): NCBI GI NO: 4505285 NR Description: mucin 2 [Homo sapiens]
  misc_feature (6)..(263): NCBI GI NO: 1082604 NR Description: mucin 5AC (clone JER58) - human (fragment)
  misc_feature (6)..(262): NCBI GI NO: 186396 NR Description: mucin
THHSFPSPDLPAAPIPPPAQQPWRPPTTSGPATSRTTSTSSTPRPTAAATTSSSPSAARSRPPTRPATPAPPPPPPTTRPTTPPRSPPPTPTTRSRSPPTASAPRTSSSSSLPTAARTTTPATYPSPSPSPSPRTASAPRRRRSSARPTAAAGRRMTPATDPSRSPPTASAPSRRSSRPTAPATGPSPSAPRRTPTDLATAGSRSRRSPPTGPGTAPATGGSRRPRRATDLGTGTRRSRRRATAPATGPSRRWSRPTAGRSTALGTEGSRRWRRAMGRGTEAGRRGERSMVVLGMVGGRLRRRAMVVLGMDLGGRCKRRMKVPMALVGTRSPSRMERRLRLRMVVGMRSPATAGGTMAARSRMTTLMMRRRTVTRSAMTRMMRRSVTRSTTTTAATTTTTKHPAWS

SEQ ID NO: 18593 - protein, 378 aa, Triticum aestivum
  peptide (1)..(378): Ceres Seq. ID no. 14302289
  misc_feature (66)..(338): Pfam Name: Pfam Description:  High molecular weight glutenin subunit
  misc_feature (11)..(378): NCBI GI NO: 32352182 NR Description: hypothetical protein
  misc_feature (5)..(378): NCBI GI NO: 24417262 NR Description: unknown [Arabidopsis thaliana]
  misc_feature (5)..(378): NCBI GI NO: 9758332 NR Description: gene_id:MIJ24
  misc_feature (132)..(336): NCBI GI NO: 27881721 NR Description: Unknown (protein for MGC:52724) [Xenopus laevis]
  misc_feature (32)..(344): NCBI GI NO: 24654243 NR Description: CG15920-PA [Drosophila melanogaster]
  misc_feature (110)..(360): NCBI GI NO: 7440064 NR Description: fus-like protein - human (fragment)
  misc_feature (4)..(337): NCBI GI NO: 6425089 NR Description: heterokaryon incompatibility protein HET-C
  misc_feature (132)..(340): NCBI GI NO: 7440064 NR Description: fus-like protein - human (fragment)
  misc_feature (46)..(301): NCBI GI NO: 7440064 NR Description: fus-like protein - human (fragment)
  misc_feature (46)..(298): NCBI GI NO: 27881721 NR Description: Unknown (protein for MGC:52724) [Xenopus laevis]
MATAYNLRSRDEPDDFDEFDSTPYGGGYDLFVTFGRPLPPSDETCYPCSAPSTSYDAPHYAAEEPSPYAHHQKPQPAYGFRPQNEQQQQPSYGREDDDSGYVSKPKPKPQPAYGFRPQAEEEQRPSYGGGGEEDDSGYGSKPQPAYGFRPQQEEQPAYGSGYGSKPQRSQEDTYGSGYGRKPQQEEPAYGSGYGSGYGRKPQAEESYGSGYGNTTQPEEGYGSGYGSKPQVEQTYGGSEYGSGYGRKPQVEESYGSGYGSRPQGGEEYGSAGYGGRKTEEEGYGGSGYGSGRKVQEEDEGAYGSGGYQKPKPYGEETQASYGGGYEKPSYGGGNYGRKKQDDDSDDEKKNRYAKRDDSDDEKERYEKHHHHRRHNYDD

SEQ ID NO: 18594 - protein, 251 aa, Triticum aestivum
  peptide (1)..(251): Ceres Seq. ID no. 14302290
  misc_feature (1)..(108): Pfam Name: Pfam Description:  Equine herpesvirus glycoprotein gp2
  misc_feature (1)..(111): NCBI GI NO: 27375632 NR Description: blr0521 [Bradyrhizobium japonicum]
  misc_feature (1)..(105): NCBI GI NO: 27375632 NR Description: blr0521 [Bradyrhizobium japonicum]
  misc_feature (1)..(95): NCBI GI NO: 188864 NR Description: mucin
  misc_feature (1)..(95): NCBI GI NO: 188864 NR Description: mucin
  misc_feature (1)..(107): NCBI GI NO: 188864 NR Description: mucin
  misc_feature (1)..(86): NCBI GI NO: 6523547 NR Description: hydroxyproline-rich glycoprotein DZ-HRGP
  misc_feature (1)..(76): NCBI GI NO: 188864 NR Description: mucin
  misc_feature (1)..(251): NCBI GI NO: 4505285 NR Description: mucin 2 [Homo sapiens]
  misc_feature (1)..(108): NCBI GI NO: 1082604 NR Description: mucin 5AC (clone JER58) - human (fragment)
  misc_feature (1)..(107): NCBI GI NO: 186396 NR Description: mucin
MTPATDPSRSPPTASAPSRRSSRPTAPATGPSPSAPRRTPTDLATAGSRSRRSPPTGPGTAPATGGSRRPRRATDLGTGTRRSRRRATAPATGPSRRWSRPTAGRSTALGTEGSRRWRRAMGRGTEAGRRGERSMVVLGMVGGRLRRRAMVVLGMDLGGRCKRRMKVPMALVGTRSPSRMERRLRLRMVVGMRSPATAGGTMAARSRMTTLMMRRRTVTRSAMTRMMRRSVTRSTTTTAATTTTTKHPAWS

SEQ ID NO: 18595 - DNA, 1476 bp, Triticum aestivum
  misc_feature (1)..(1476): Ceres Seq. ID no. 13598282
cccgctgcctattagaacccggcctcgctgcctccacaggcagccgccagtgctcaactgcggcagctaaaactcgattttatccccggaaaatagatcgcctctagtcagcggcggcgccgccgcttcgcttctcggcttgctcggctggtttctctgtaaaaatggtcaatgcacagatggtgagtgggtacttggacaattcgttcaatgcactcatggtttctggtggcggtgagagtggacagacacagaatggtggcacggacaccaccttgtcaggttggaaggacctccccatggagcttctgctgaggatcatatcagtagctggagatgacaggatggccattgtagcctccggtgtttgtaccgggtggcgtgatgcactaggatggggagccacgagtctctccttctcgtggtgccaggaccacatgaatgagttggtgatatcactggcccacaaatttacaaagcttcaagtcctttctctaaggcaaatcaagcctcagcttgaagacagtgcagtggaggctgtagcaaattcttgtcatgatttgcgcgagttggatctgagcagaagcttcaggcttagtgatcggtccttgtatgctctggcacatgggtgccctcaccttacaaggctgaacatcagtggatgttccaatttcagtgatgctgctttgatctacctcactagtcagtgcaagaacttgaaatgcttgaatctgtgcgggtgtgtgcgggcagcatccgacagagcattgcaggccatagcccgcaactgtagtcagctgcaatctttgaaccttggttggtgcgatactgtcactgacgggggagtcactagcttggcatcaggatgtcctgaacttagggccgtcgacttgtgtggctgtgttcttataacagatgagagcgtggttgctcttgcaaacggctgcccacacctgcgttccctggggctgtactactgccagaacatcaccaaccgggccatgtactcgctggccgagaacagccgcatcaggagcaagggcatgagctgggacacggccaagagcagccgcggccgcgacgacaaggacggcctcgccagcctcaacatcagccagtgcaccgcgctgacgcccccgaccgtgcaggcggtgtgcgactccttcccggcgctccacacgtgcccggagaggcactccctcatcatcagcggctgcctgagcctcaccgccgtgcactgcgcgtgcgcccaccaccggcaccgcgccggggccgggagagccatcctgtcaaaccatgcctactgaggtccctccctgtgtggatcatggcagggttctgagatcccggcatggccgagtttgtatcgtgctgtatcagcgaacgtgaagtggaaccgaaggtgcggtggaagtctgtgtgtctgtacttggacattaacaaaatgagttctccgaagaatatgtgagccttgcc

SEQ ID NO: 18596 - protein, 380 aa, Triticum aestivum
  peptide (1)..(380): Ceres Seq. ID no. 13598283
  misc_feature (1)..(380): NCBI GI NO: 34907434 NR Description: P0018C10.44
  misc_feature (37)..(368): NCBI GI NO: 18394987 NR Description: F-box protein family [Arabidopsis thaliana]
  misc_feature (37)..(368): NCBI GI NO: 21554029 NR Description: F-box protein AtFBL5 [Arabidopsis thaliana]
  misc_feature (38)..(367): NCBI GI NO: 18411319 NR Description: F-box protein family [Arabidopsis thaliana]
  misc_feature (230)..(367): NCBI GI NO: 26450797 NR Description: unknown protein [Arabidopsis thaliana]
  misc_feature (25)..(360): NCBI GI NO: 24652783 NR Description: CG9003-PA [Drosophila melanogaster]
  misc_feature (106)..(340): NCBI GI NO: 7512791 NR Description: hypothetical protein DKFZp564P0622
  misc_feature (88)..(337): NCBI GI NO: 15237286 NR Description: expressed protein [Arabidopsis thaliana]
  misc_feature (42)..(367): NCBI GI NO: 5919219 NR Description: leucine-rich repeats containing F-box protein FBL3
  misc_feature (42)..(367): NCBI GI NO: 7022695 NR Description: unnamed protein product [Homo sapiens]
MVNAQMVSGYLDNSFNALMVSGGGESGQTQNGGTDTTLSGWKDLPMELLLRIISVAGDDRMAIVASGVCTGWRDALGWGATSLSFSWCQDHMNELVISLAHKFTKLQVLSLRQIKPQLEDSAVEAVANSCHDLRELDLSRSFRLSDRSLYALAHGCPHLTRLNISGCSNFSDAALIYLTSQCKNLKCLNLCGCVRAASDRALQAIARNCSQLQSLNLGWCDTVTDGGVTSLASGCPELRAVDLCGCVLITDESVVALANGCPHLRSLGLYYCQNITNRAMYSLAENSRIRSKGMSWDTAKSSRGRDDKDGLASLNISQCTALTPPTVQAVCDSFPALHTCPERHSLIISGCLSLTAVHCACAHHRHRAGAGRAILSNHAY

SEQ ID NO: 18597 - protein, 375 aa, Triticum aestivum
  peptide (1)..(375): Ceres Seq. ID no. 13598284
  misc_feature (1)..(375): NCBI GI NO: 34907434 NR Description: P0018C10.44
  misc_feature (32)..(363): NCBI GI NO: 18394987 NR Description: F-box protein family [Arabidopsis thaliana]
  misc_feature (32)..(363): NCBI GI NO: 21554029 NR Description: F-box protein AtFBL5 [Arabidopsis thaliana]
  misc_feature (33)..(362): NCBI GI NO: 18411319 NR Description: F-box protein family [Arabidopsis thaliana]
  misc_feature (225)..(362): NCBI GI NO: 26450797 NR Description: unknown protein [Arabidopsis thaliana]
  misc_feature (20)..(355): NCBI GI NO: 24652783 NR Description: CG9003-PA [Drosophila melanogaster]
  misc_feature (101)..(335): NCBI GI NO: 7512791 NR Description: hypothetical protein DKFZp564P0622
  misc_feature (83)..(332): NCBI GI NO: 15237286 NR Description: expressed protein [Arabidopsis thaliana]
  misc_feature (37)..(362): NCBI GI NO: 5919219 NR Description: leucine-rich repeats containing F-box protein FBL3
  misc_feature (37)..(362): NCBI GI NO: 7022695 NR Description: unnamed protein product [Homo sapiens]
MVSGYLDNSFNALMVSGGGESGQTQNGGTDTTLSGWKDLPMELLLRIISVAGDDRMAIVASGVCTGWRDALGWGATSLSFSWCQDHMNELVISLAHKFTKLQVLSLRQIKPQLEDSAVEAVANSCHDLRELDLSRSFRLSDRSLYALAHGCPHLTRLNISGCSNFSDAALIYLTSQCKNLKCLNLCGCVRAASDRALQAIARNCSQLQSLNLGWCDTVTDGGVTSLASGCPELRAVDLCGCVLITDESVVALANGCPHLRSLGLYYCQNITNRAMYSLAENSRIRSKGMSWDTAKSSRGRDDKDGLASLNISQCTALTPPTVQAVCDSFPALHTCPERHSLIISGCLSLTAVHCACAHHRHRAGAGRAILSNHAY

SEQ ID NO: 18598 - protein, 362 aa, Triticum aestivum
  peptide (1)..(362): Ceres Seq. ID no. 13598285
  misc_feature (1)..(362): NCBI GI NO: 34907434 NR Description: P0018C10.44
  misc_feature (19)..(350): NCBI GI NO: 18394987 NR Description: F-box protein family [Arabidopsis thaliana]
  misc_feature (19)..(350): NCBI GI NO: 21554029 NR Description: F-box protein AtFBL5 [Arabidopsis thaliana]
  misc_feature (20)..(349): NCBI GI NO: 18411319 NR Description: F-box protein family [Arabidopsis thaliana]
  misc_feature (212)..(349): NCBI GI NO: 26450797 NR Description: unknown protein [Arabidopsis thaliana]
  misc_feature (7)..(342): NCBI GI NO: 24652783 NR Description: CG9003-PA [Drosophila melanogaster]
  misc_feature (88)..(322): NCBI GI NO: 7512791 NR Description: hypothetical protein DKFZp564P0622
  misc_feature (70)..(319): NCBI GI NO: 15237286 NR Description: expressed protein [Arabidopsis thaliana]
  misc_feature (24)..(349): NCBI GI NO: 5919219 NR Description: leucine-rich repeats containing F-box protein FBL3
  misc_feature (24)..(349): NCBI GI NO: 7022695 NR Description: unnamed protein product [Homo sapiens]
MVSGGGESGQTQNGGTDTTLSGWKDLPMELLLRIISVAGDDRMAIVASGVCTGWRDALGWGATSLSFSWCQDHMNELVISLAHKFTKLQVLSLRQIKPQLEDSAVEAVANSCHDLRELDLSRSFRLSDRSLYALAHGCPHLTRLNISGCSNFSDAALIYLTSQCKNLKCLNLCGCVRAASDRALQAIARNCSQLQSLNLGWCDTVTDGGVTSLASGCPELRAVDLCGCVLITDESVVALANGCPHLRSLGLYYCQNITNRAMYSLAENSRIRSKGMSWDTAKSSRGRDDKDGLASLNISQCTALTPPTVQAVCDSFPALHTCPERHSLIISGCLSLTAVHCACAHHRHRAGAGRAILSNHAY

SEQ ID NO: 18599 - DNA, 1377 bp, Triticum aestivum
  misc_feature (1)..(1377): Ceres Seq. ID no. 12614610
tccttcggccccgcagcttttctctctcctcaccgtcgcgcgtgtgcccctcctttctgtctctctctcctccgcgcgcgctccctcactctcctcccatccgtctaatggaggccctcgccggcgccgccgcctcgtccgcgctcctcccggccttccccgcccaccagcctcactcccgcgtggcgctccgcgcccgcccctgcggcccccttcgcgcggccgccggcggcggaggcaaggacgacgccgccaagccgaacgggacccccgtcgtcaagttgaaggttgatccaagtcaaaacggagctcttggtccggtcacaactgacaagtcacgcacgacctcatcaaccaattcaactccggactccagtggatccagagctggcttgttcagaacccctatatctggtggtgtgcagagtgcaacttttgcccatggtttacctccaccggctttggctgttcgcaatttaatggaacaggcacgatttgctcatctatgcactgtcatgtctggcatgcatcatcgacgtgctggatatccatttggttcacttgttgactttgctaatgactcaatgggccacccaatattttctctgtcgcccttagcaatccacactagaaacttgctctctgatccaagatgcacacttgttgtccaggtacctggatggagtggattgtctaatgctcgtgtcacaatatttggtgatgtctaccctttgccagctgagcaacaggaatgggcacataagcaatatgttgcaaaacaccaacaatgggcgtctcaacagtggggaaatttttactactacaggatgcagaatatcagcgacatatattttattggaggctttggcactgttgcatgggtagatgtgaaacagtatgaaactattcaacctgacaagatagcagttgacggcggcgaacaaagcttaaaggagttgaacgctattttctctaaaccacttagagagttcatgtctgctgaaggggaggttgacgatgctgctcttatatccgtagacagcaaagggatagacattcgggttcgccagggtgcacagttcaacatccagagacttgcatttgatgtaccatacaaggtggagactctagaggaggccaagagagcactccataagataatcaagacaagcagcaaataagccgaagcgcacacgacctgcacttggtttcaccagccctacaagcccacgccgtgagtcgacaaaaataaccaaggatatgtaatctagcgtacacagacgcaaaataagatgatttctctttaataatgagaaactccctggcaagtccccatatagtgtgtacccatatgcttgtatcgcttgaactgtagtg

SEQ ID NO: 18600 - protein, 392 aa, Triticum aestivum
  peptide (1)..(392): Ceres Seq. ID no. 12614611
  misc_feature (71)..(392): NCBI GI NO: 34905136 NR Description: P0700D12.12
  misc_feature (120)..(388): NCBI GI NO: 15217955 NR Description: unknown protein; protein id: At1g51560
  misc_feature (120)..(388): NCBI GI NO: 18377805 NR Description: unknown protein [Arabidopsis thaliana]
  misc_feature (126)..(388): NCBI GI NO: 15232479 NR Description: unknown protein; protein id: At3g21140
  misc_feature (126)..(388): NCBI GI NO: 11994274 NR Description: gb|AAF00629
  misc_feature (57)..(392): NCBI GI NO: 34393557 NR Description: putative root border cell-specific protein
  misc_feature (168)..(390): NCBI GI NO: 18396698 NR Description: auxin-regulated protein; protein id: At3g03890
  misc_feature (168)..(367): NCBI GI NO: 30678976 NR Description: auxin-regulated protein [Arabidopsis thaliana]
  misc_feature (171)..(357): NCBI GI NO: 15599584 NR Description: hypothetical protein [Pseudomonas aeruginosa PA01]
  misc_feature (168)..(308): NCBI GI NO: 6006853 NR Description: unknown protein [Arabidopsis thaliana]
LRPRSFSLSSPSRVCPSFLSLSPPRALPHSPPIRLMEALAGAAASSALLPAFPAHQPHSRVALRARPCGPLRAAAGGGGKDDAAKPNGTPVVKLKVDPSQNGALGPVTTDKSRTTSSTNSTPDSSGSRAGLFRTPISGGVQSATFAHGLPPPALAVRNLMEQARFAHLCTVMSGMHHRRAGYPFGSLVDFANDSMGHPIFSLSPLAIHTRNLLSDPRCTLVVQVPGWSGLSNARVTIFGDVYPLPAEQQEWAHKQYVAKHQQWASQQWGNFYYYRMQNISDIYFIGGFGTVAWVDVKQYETIQPDKIAVDGGEQSLKELNAIFSKPLREFMSAEGEVDDAALISVDSKGIDIRVRQGAQFNIQRLAFDVPYKVETLEEAKRALHKIIKTSSK

SEQ ID NO: 18601 - protein, 357 aa, Triticum aestivum
  peptide (1)..(357): Ceres Seq. ID no. 12614612
  misc_feature (36)..(357): NCBI GI NO: 34905136 NR Description: P0700D12.12
  misc_feature (85)..(353): NCBI GI NO: 15217955 NR Description: unknown protein; protein id: At1g51560
  misc_feature (85)..(353): NCBI GI NO: 18377805 NR Description: unknown protein [Arabidopsis thaliana]
  misc_feature (91)..(353): NCBI GI NO: 15232479 NR Description: unknown protein; protein id: At3g21140
  misc_feature (91)..(353): NCBI GI NO: 11994274 NR Description: gb|AAF00629
  misc_feature (22)..(357): NCBI GI NO: 34393557 NR Description: putative root border cell-specific protein
  misc_feature (133)..(355): NCBI GI NO: 18396698 NR Description: auxin-regulated protein; protein id: At3g03890
  misc_feature (133)..(332): NCBI GI NO: 30678976 NR Description: auxin-regulated protein [Arabidopsis thaliana]
  misc_feature (136)..(322): NCBI GI NO: 15599584 NR Description: hypothetical protein [Pseudomonas aeruginosa PA01]
  misc_feature (133)..(273): NCBI GI NO: 6006853 NR Description: unknown protein [Arabidopsis thaliana]
MEALAGAAASSALLPAFPAHQPHSRVALRARPCGPLRAAAGGGGKDDAAKPNGTPVVKLKVDPSQNGALGPVTTDKSRTTSSTNSTPDSSGSRAGLFRTPISGGVQSATFAHGLPPPALAVRNLMEQARFAHLCTVMSGMHHRRAGYPFGSLVDFANDSMGHPIFSLSPLAIHTRNLLSDPRCTLVVQVPGWSGLSNARVTIFGDVYPLPAEQQEWAHKQYVAKHQQWASQQWGNFYYYRMQNISDIYFIGGFGTVAWVDVKQYETIQPDKIAVDGGEQSLKELNAIFSKPLREFMSAEGEVDDAALISVDSKGIDIRVRQGAQFNIQRLAFDVPYKVETLEEAKRALHKIIKTSSK

SEQ ID NO: 18602 - protein, 233 aa, Triticum aestivum
  peptide (1)..(233): Ceres Seq. ID no. 12614613
  misc_feature (1)..(233): NCBI GI NO: 34905136 NR Description: P0700D12.12
  misc_feature (1)..(229): NCBI GI NO: 15217955 NR Description: unknown protein; protein id: At1g51560
  misc_feature (1)..(229): NCBI GI NO: 18377805 NR Description: unknown protein [Arabidopsis thaliana]
  misc_feature (1)..(229): NCBI GI NO: 15232479 NR Description: unknown protein; protein id: At3g21140
  misc_feature (1)..(229): NCBI GI NO: 11994274 NR Description: gb|AAF00629
  misc_feature (1)..(233): NCBI GI NO: 34393557 NR Description: putative root border cell-specific protein
  misc_feature (9)..(231): NCBI GI NO: 18396698 NR Description: auxin-regulated protein; protein id: At3g03890
  misc_feature (9)..(208): NCBI GI NO: 30678976 NR Description: auxin-regulated protein [Arabidopsis thaliana]
  misc_feature (12)..(198): NCBI GI NO: 15599584 NR Description: hypothetical protein [Pseudomonas aeruginosa PA01]
  misc_feature (9)..(149): NCBI GI NO: 6006853 NR Description: unknown protein [Arabidopsis thaliana]
MEQARFAHLCTVMSGMHHRRAGYPFGSLVDFANDSMGHPIFSLSPLAIHTRNLLSDPRCTLVVQVPGWSGLSNARVTIFGDVYPLPAEQQEWAHKQYVAKHQQWASQQWGNFYYYRMQNISDIYFIGGFGTVAWVDVKQYETIQPDKIAVDGGEQSLKELNAIFSKPLREFMSAEGEVDDAALISVDSKGIDIRVRQGAQFNIQRLAFDVPYKVETLEEAKRALHKIIKTSSK

SEQ ID NO: 18603 - DNA, 1387 bp, Triticum aestivum
  misc_feature (1)..(1387): Ceres Seq. ID no. 13596281
ccttcagccccaaatccctatcccaaatttccaaggaatcatggcgcgctgctccccgccgctgctgcgccgcttcttctgctgcgccgccaaatctgcctcggccacatccgccgccgccggcaccaagaagaagaacatcgtcttcttgggatctccccaggtggcggcctcggtcctggacacgttgttggccgcgtccagctcccccgactccgcattccaggtcgctgccgtcgtgacgcagccgccggccgccaagaacagggggaggaagctgttgccgtcggccgtcgcgcagctcgcgctcgagcgtgggttccctggcgacctcatcttcacccccgagcgcgctggggaggagtcctttctgtctgacttgaagggggtgaaaccagaactttgcatcactgctgcttacgggaacattttgccacagaggtttcttgacatcccaccatgtgcaggtacagttaatatacacccaagtttgttgcctctatatcgtggtgcagctcctgtgcagagggcattgcaggatggtgttgcagaaacaggtgtttcccttgcatatactatccgtgccttggatgcaggtccagtgattgcttgtgaaaggttttctgtcgatgaatgcatcaaggcaccagagctgcttgctatactattcaatatagggtccaagctactgctggatgaactaccatccgttcttgatggttcagctaagcaaaaggcgaagccacaagatgactccaaagctacactggcgcccaagatgaattcggacgagtcctggctgacatttgacgaagaagctaaagttctccataacaaggtgcgagcatttgcaggatggcctggaacccgtgcaaaattgcaacttatgaaccaaaatggcgaacctgatgttctagacatcaaggttatcagtacgaacgtttccacgtcatgtgacaaagtcggagacgaaaacgaaatactattctcagggaactcactgctcgttccttgcagtgggtcaacttggcttgaggtcttggagcttcagctacctggaaagaaggtaaccacagctcgggacttctggaatggtttgcgtggtcagaagctgttaaaatcaacatagagggaaatctgcattcattttgcagcacatgtgcaaaggatgcaaatgccacgacggccatatgccgtgctcggtttagatgcatcttgcaggattaaagggctgttgacatttatccttagagaaatttgcaggggagcaaaaagatggtcttaatttttgtaaagaaaattatttagattttttgccctaactttttttttacaaatcaataatttttcaaaaaaaaaaaaaaaaaagcttatcgataccgtcgac

SEQ ID NO: 18604 - protein, 375 aa, Triticum aestivum
  peptide (1)..(375): Ceres Seq. ID no. 13596282
  misc_feature (45)..(234): Pfam Name: Pfam Description:  Formyl transferase
  misc_feature (14)..(328): NCBI GI NO: 34911294 NR Description: similar to formyl transferase
  misc_feature (345)..(374): NCBI GI NO: 34911294 NR Description: similar to formyl transferase
  misc_feature (21)..(373): NCBI GI NO: 7657875 NR Description: Fmt protein [Brassica napus var. napus]
  misc_feature (21)..(373): NCBI GI NO: 15219681 NR Description: formyltransferase, putative [Arabidopsis thaliana]
  misc_feature (21)..(373): NCBI GI NO: 29824361 NR Description: putative formyl transferase [Arabidopsis thaliana]
  misc_feature (180)..(373): NCBI GI NO: 6069504 NR Description: S-locus protein 8 [Brassica rapa]
  misc_feature (166)..(355): NCBI GI NO: 15864563 NR Description: fmt putative protein [Brassica napus]
  misc_feature (47)..(367): NCBI GI NO: 26986812 NR Description: methionyl-tRNA formyltransferase
  misc_feature (47)..(373): NCBI GI NO: 15643294 NR Description: methionyl-tRNA formyltransferase
  misc_feature (47)..(371): NCBI GI NO: 22990871 NR Description: hypothetical protein [Enterococcus faecium]
LQPQIPIPNFQGIMARCSPPLLRRFFCCAAKSASATSAAAGTKKKNIVFLGSPQVAASVLDTLLAASSSPDSAFQVAAVVTQPPAAKNRGRKLLPSAVAQLALERGFPGDLIFTPERAGEESFLSDLKGVKPELCITAAYGNILPQRFLDIPPCAGTVNIHPSLLPLYRGAAPVQRALQDGVAETGVSLAYTIRALDAGPVIACERFSVDECIKAPELLAILFNIGSKLLLDELPSVLDGSAKQKAKPQDDSKATLAPKMNSDESWLTFDEEAKVLHNKVRAFAGWPGTRAKLQLMNQNGEPDVLDIKVISTNVSTSCDKVGDENEILFSGNSLLVPCSGSTWLEVLELQLPGKKVTTARDFWNGLRGQKLLKST

SEQ ID NO: 18605 - protein, 362 aa, Triticum aestivum
  peptide (1)..(362): Ceres Seq. ID no. 13596283
  misc_feature (32)..(221): Pfam Name: Pfam Description:  Formyl transferase
  misc_feature (1)..(315): NCBI GI NO: 34911294 NR Description: similar to formyl transferase
  misc_feature (332)..(361): NCBI GI NO: 34911294 NR Description: similar to formyl transferase
  misc_feature (8)..(360): NCBI GI NO: 7657875 NR Description: Fmt protein [Brassica napus var. napus]
  misc_feature (8)..(360): NCBI GI NO: 15219681 NR Description: formyltransferase, putative [Arabidopsis thaliana]
  misc_feature (8)..(360): NCBI GI NO: 29824361 NR Description: putative formyl transferase [Arabidopsis thaliana]
  misc_feature (167)..(360): NCBI GI NO: 6069504 NR Description: S-locus protein 8 [Brassica rapa]
  misc_feature (153)..(342): NCBI GI NO: 15864563 NR Description: fmt putative protein [Brassica napus]
  misc_feature (34)..(354): NCBI GI NO: 26986812 NR Description: methionyl-tRNA formyltransferase
  misc_feature (34)..(360): NCBI GI NO: 15643294 NR Description: methionyl-tRNA formyltransferase
  misc_feature (34)..(358): NCBI GI NO: 22990871 NR Description: hypothetical protein [Enterococcus faecium]
MARCSPPLLRRFFCCAAKSASATSAAAGTKKKNIVFLGSPQVAASVLDTLLAASSSPDSAFQVAAVVTQPPAAKNRGRKLLPSAVAQLALERGFPGDLIFTPERAGEESFLSDLKGVKPELCITAAYGNILPQRFLDIPPCAGTVNIHPSLLPLYRGAAPVQRALQDGVAETGVSLAYTIRALDAGPVIACERFSVDECIKAPELLAILFNIGSKLLLDELPSVLDGSAKQKAKPQDDSKATLAPKMNSDESWLTFDEEAKVLHNKVRAFAGWPGTRAKLQLMNQNGEPDVLDIKVISTNVSTSCDKVGDENEILFSGNSLLVPCSGSTWLEVLELQLPGKKVTTARDFWNGLRGQKLLKST

SEQ ID NO: 18606 - DNA, 2258 bp, Triticum aestivum
  misc_feature (1)..(2258): Ceres Seq. ID no. 13590780
aaacaaacccttcyswwaaccagccgccgccactatatgcttatctgcctccgacgaggcctctccctcctccggcagcgccagccccggctcccgccccgcctcctcctccacctctccgccgagccgatgggcgacccggccgtcgcgccggacgccgcctacctggaggcggtgacgcagaagcggatccgcatcttcgaggagatccaggcccggcaggccctcgagcgcctcaacatcggcggcgaccccatcagagtaactttgcctgatggtgcgataaaggaaggcaagaagtggatatcgaccccgatggatatcgcctcggggatatcaactgggctggccgctagctgcctgatagcgcaggtgaatggtgtgctctgggacatgacgaggccattggaaggcgactgtgacttgaagctgttcaagttcgacagcaacgaagggcgtgacacgttctggcactcgagtgctcatattcttggagagtccatcgagagggtgtatggctgcaagttgtgcattggaccttgtactacaagaggagagggtttttactacgacgcccactacaaggacttgacactgaatgatacacactttggtctcattgacaagcaagctaaaaaggctgttgcggagaagcaaccatttgaacgcattgaagtctccagagcagaagctcttgaagtttttgcggaaaatgaatttaaggttgaaataattaacgaattgcccgaggacaagaccattacagtatacagatgtggtcctttggtcgacctttgccgtggcccgcacatcccaaatacttcctttgttaaagctttcgcttgcctcaaggcttcagcatcatactggagaggaaaagcagaccgtgaaagcctgcagagagtatatggaatctctttccctgattctaaacgtctcaaggaatatcaacatatgatagaggaagctaagaaacgcgatcataggttattggggcagtcccagaaactcttctttttccatccacttagcccaggtagctgcttcttccttccaaatggcgctataatatataacaaattgatggattttttgcgcaaggagtatagagagagaggctaccaagaggttctgagtccaaatatttacaacatgcaactttgggaaacctctggacatgctgcaaactacaaggacaacatgtttgtttttgagatcgagaaacaagaatttggccttaagccaatgaattgtcctggccattgcctaatgtttggacacgaggttcgatcgtatagagagttgcctctccgcatggctgattttggagttctgcacagaaatgaacttagtggtgcacttacaggtttgacacgtgtcagaagattccaacaggacgatgcccatattttttgcacggagagccaaatcaaggatgaagttcggtcttgcttggagttcattgattatgtttataaaatatttgggtttgaatacgagctggagttatcaacgagaccagagaagtatttaggtgacattgagacctggaacaaagcagagcaacaactgacagaagcattgaatgagtttgggaagccatggaagataaatgaagcagatggtgctttctatggcccgaaaatagatattggtgtgtttgatgccctcaagaggaaatttcagtgtgcaactctacagctcgattttcagctgccacttcgcttcaagttgacttattctgcagaggacgaagccaagcttgagaggcctgtaatgatacacagggcaatactaggatcagttgaaaggatgtttgccattcttttggagcactataacggtaaatggccgttgtggttaagcccccgacaagccattgtttgctgtgtatctgccaattcactaacatatgcaaaagaggttcatgctcagatacgtgcagctggttttcatgttgacattgacatgactgatagaacaattcaaaagaaggtgcgggaggctcagttagcccaattcaactatattctagtcgtcggcgcaaaagaggcagagtctggaaaggtctctctgagggtaagagacagggcagacctatccacagagaacattgctgacgtcatcgcacgttttaatgatgaagttgcgtctttccagtgatttttaagtcgcttcatcttcttttgttaagacatctactgcacaacccacattgtaatttggtgaagtgtgaggtgaatgaaaatcgtgatact

SEQ ID NO: 18607 - protein, 720 aa, Triticum aestivum
  peptide (1)..(720): Ceres Seq. ID no. 15221007
  misc_feature (346)..(499): Pfam Name: G, H, P, S and T Pfam Description: tRNA synthetase class II core domain
  misc_feature (52)..(719): NCBI GI NO: 11271129 NR Description: threonine-tRNA ligase (EC 6.1.1.3)
  misc_feature (52)..(719): NCBI GI NO: 30690426 NR Description: threonyl-tRNA synthetase [Arabidopsis thaliana]
  misc_feature (52)..(719): NCBI GI NO: 15081626 NR Description: AT5g26830/F2P16_90 [Arabidopsis thaliana]
  misc_feature (196)..(720): NCBI GI NO: 20429011 NR Description: threonyl-tRNA synthetase
  misc_feature (185)..(719): NCBI GI NO: 7437517 NR Description: threonine-tRNA ligase (EC 6
  misc_feature (52)..(173): NCBI GI NO: 7437517 NR Description: threonine-tRNA ligase (EC 6
  misc_feature (50)..(715): NCBI GI NO: 17532457 NR Description: Threonyl tRNA Synthetase TRS-1 (84.4 kD) (trs-1)
  misc_feature (50)..(715): NCBI GI NO: 39597482 NR Description: Hypothetical protein CBG03144
  misc_feature (42)..(711): NCBI GI NO: 24583839 NR Description: Threonyl-tRNA synthetase CG5353-PA
  misc_feature (42)..(711): NCBI GI NO: 25013040 NR Description: RH56418p [Drosophila melanogaster]
  misc_feature (5)..(5): Xaa is any aa, unknown or other
  misc_feature (6)..(6): Xaa is any aa, unknown or other
KQTLXXTSRRHYMLICLRRGLSLLRQRQPRLPPRLLLHLSAEPMGDPAVAPDAAYLEAVTQKRIRIFEEIQARQALERLNIGGDPIRVTLPDGAIKEGKKWISTPMDIASGISTGLAASCLIAQVNGVLWDMTRPLEGDCDLKLFKFDSNEGRDTFWHSSAHILGESIERVYGCKLCIGPCTTRGEGFYYDAHYKDLTLNDTHFGLIDKQAKKAVAEKQPFERIEVSRAEALEVFAENEFKVEIINELPEDKTITVYRCGPLVDLCRGPHIPNTSFVKAFACLKASASYWRGKADRESLQRVYGISFPDSKRLKEYQHMIEEAKKRDHRLLGQSQKLFFFHPLSPGSCFFLPNGAIIYNKLMDFLRKEYRERGYQEVLSPNIYNMQLWETSGHAANYKDNMFVFEIEKQEFGLKPMNCPGHCLMFGHEVRSYRELPLRMADFGVLHRNELSGALTGLTRVRRFQQDDAHIFCTESQIKDEVRSCLEFIDYVYKIFGFEYELELSTRPEKYLGDIETWNKAEQQLTEALNEFGKPWKINEADGAFYGPKIDIGVFDALKRKFQCATLQLDFQLPLRFKLTYSAEDEAKLERPVMIHRAILGSVERMFAILLEHYNGKWPLWLSPRQAIVCCVSANSLTYAKEVHAQIRAAGFHVDIDMTDRTIQKKVREAQLAQFNYILVVGAKEAESGKVSLRVRDRADLSTENIADVIARFNDEVASFQ

SEQ ID NO: 18608 - protein, 708 aa, Triticum aestivum
  peptide (1)..(708): Ceres Seq. ID no. 15221008
  misc_feature (334)..(487): Pfam Name: G, H, P, S and T Pfam Description: tRNA synthetase class II core domain
  misc_feature (40)..(707): NCBI GI NO: 11271129 NR Description: threonine-tRNA ligase (EC 6.1.1.3)
  misc_feature (40)..(707): NCBI GI NO: 30690426 NR Description: threonyl-tRNA synthetase [Arabidopsis thaliana]
  misc_feature (40)..(707): NCBI GI NO: 15081626 NR Description: AT5g26830/F2P16_90 [Arabidopsis thaliana]
  misc_feature (184)..(708): NCBI GI NO: 20429011 NR Description: threonyl-tRNA synthetase
  misc_feature (173)..(707): NCBI GI NO: 7437517 NR Description: threonine-tRNA ligase (EC 6
  misc_feature (40)..(161): NCBI GI NO: 7437517 NR Description: threonine-tRNA ligase (EC 6
  misc_feature (38)..(703): NCBI GI NO: 17532457 NR Description: Threonyl tRNA Synthetase TRS-1 (84.4 kD) (trs-1)
  misc_feature (38)..(703): NCBI GI NO: 39597482 NR Description: Hypothetical protein CBG03144
  misc_feature (30)..(699): NCBI GI NO: 24583839 NR Description: Threonyl-tRNA synthetase CG5353-PA
  misc_feature (30)..(699): NCBI GI NO: 25013040 NR Description: RH56418p [Drosophila melanogaster]
MLICLRRGLSLLRQRQPRLPPRLLLHLSAEPMGDPAVAPDAAYLEAVTQKRIRIFEEIQARQALERLNIGGDPIRVTLPDGAIKEGKKWISTPMDIASGISTGLAASCLIAQVNGVLWDMTRPLEGDCDLKLFKFDSNEGRDTFWHSSAHILGESIERVYGCKLCIGPCTTRGEGFYYDAHYKDLTLNDTHFGLIDKQAKKAVAEKQPFERIEVSRAEALEVFAENEFKVEIINELPEDKTITVYRCGPLVDLCRGPHIPNTSFVKAFACLKASASYWRGKADRESLQRVYGISFPDSKRLKEYQHMIEEAKKRDHRLLGQSQKLFFFHPLSPGSCFFLPNGAIIYNKLMDFLRKEYRERGYQEVLSPNIYNMQLWETSGHAANYKDNMFVFEIEKQEFGLKPMNCPGHCLMFGHEVRSYRELPLRMADFGVLHRNELSGALTGLTRVRRFQQDDAHIFCTESQIKDEVRSCLEFIDYVYKIFGFEYELELSTRPEKYLGDIETWNKAEQQLTEALNEFGKPWKINEADGAFYGPKIDIGVFDALKRKFQCATLQLDFQLPLRFKLTYSAEDEAKLERPVMIHRAILGSVERMFAILLEHYNGKWPLWLSPRQAIVCCVSANSLTYAKEVHAQIRAAGFHVDIDMTDRTIQKKVREAQLAQFNYILVVGAKEAESGKVSLRVRDRADLSTENIADVIARFNDEVASFQ

SEQ ID NO: 18609 - protein, 677 aa, Triticum aestivum
  peptide (1)..(677): Ceres Seq. ID no. 15221009
  misc_feature (303)..(456): Pfam Name: G, H, P, S and T Pfam Description: tRNA synthetase class II core domain
  misc_feature (9)..(676): NCBI GI NO: 11271129 NR Description: threonine-tRNA ligase (EC 6.1.1.3)
  misc_feature (9)..(676): NCBI GI NO: 30690426 NR Description: threonyl-tRNA synthetase [Arabidopsis thaliana]
  misc_feature (9)..(676): NCBI GI NO: 15081626 NR Description: AT5g26830/F2P16_90 [Arabidopsis thaliana]
  misc_feature (153)..(677): NCBI GI NO: 20429011 NR Description: threonyl-tRNA synthetase
  misc_feature (142)..(676): NCBI GI NO: 7437517 NR Description: threonine-tRNA ligase (EC 6
  misc_feature (9)..(130): NCBI GI NO: 7437517 NR Description: threonine-tRNA ligase (EC 6
  misc_feature (7)..(672): NCBI GI NO: 17532457 NR Description: Threonyl tRNA Synthetase TRS-1 (84.4 kD) (trs-1)
  misc_feature (7)..(672): NCBI GI NO: 39597482 NR Description: Hypothetical protein CBG03144
  misc_feature (1)..(668): NCBI GI NO: 24583839 NR Description: Threonyl-tRNA synthetase CG5353-PA
  misc_feature (1)..(668): NCBI GI NO: 25013040 NR Description: RH56418p [Drosophila melanogaster]
MGDPAVAPDAAYLEAVTQKRIRIFEEIQARQALERLNIGGDPIRVTLPDGAIKEGKKWISTPMDIASGISTGLAASCLIAQVNGVLWDMTRPLEGDCDLKLFKFDSNEGRDTFWHSSAHILGESIERVYGCKLCIGPCTTRGEGFYYDAHYKDLTLNDTHFGLIDKQAKKAVAEKQPFERIEVSRAEALEVFAENEFKVEIINELPEDKTITVYRCGPLVDLCRGPHIPNTSFVKAFACLKASASYWRGKADRESLQRVYGISFPDSKRLKEYQHMIEEAKKRDHRLLGQSQKLFFFHPLSPGSCFFLPNGAIIYNKLMDFLRKEYRERGYQEVLSPNIYNMQLWETSGHAANYKDNMFVFEIEKQEFGLKPMNCPGHCLMFGHEVRSYRELPLRMADFGVLHRNELSGALTGLTRVRRFQQDDAHIFCTESQIKDEVRSCLEFIDYVYKIFGFEYELELSTRPEKYLGDIETWNKAEQQLTEALNEFGKPWKINEADGAFYGPKIDIGVFDALKRKFQCATLQLDFQLPLRFKLTYSAEDEAKLERPVMIHRAILGSVERMFAILLEHYNGKWPLWLSPRQAIVCCVSANSLTYAKEVHAQIRAAGFHVDIDMTDRTIQKKVREAQLAQFNYILVVGAKEAESGKVSLRVRDRADLSTENIADVIARFNDEVASFQ

SEQ ID NO: 18610 - DNA, 1351 bp, Triticum aestivum
  misc_feature (1)..(1351): Ceres Seq. ID no. 13595944
gctacacctttgttaacgaaccgcactgccgccgtccccgtctgcctccggccatcaaccatggcgaggagttccatggccgcggtgctcgccgtcctggccgtggcggcgctccggtgcgcgccggccgccgcggagctcccgctggtggagcacccggccaagaacgacgggtcgctcagcctgctcgtcatcggggactggggccgcaacggcacctacaaccaatccagggtcgcggaccagatggggaaggtcggggagaggctggacatcgacttcgtggtctccaccggcgacaacttctacgaggacggcctcacgggcgttcatgaccagcagttcgaggaatccttcaccaatatctacaccgcccagagcttgcagaagccgtggtatctcgttcttggaaaccatgactaccggggcaatgcgcttgcacagcttgacccagtcatgcgcaagctcgatgagcgattcgtttgcatgagatcattcattgtcaatgcagagatcgtggagttcttcttcatcgacactactccattccagctcaagtactggactcaccctaaagacagtcactatgactggagaggagtggcgcctcgagaaaactacatagctaatctgctgaaggatttggatgaggcaatgaagaaatcaactgcaaagtggaagatcgctattgggcatcataccatcaggagcgtcagtgatcatggggacaccaaggagctcctgcaattgcttcttccagtcctcaaggttaacggcatcgacttctacatcaatgggcacgaccactgcctggaacacattagcagcagagacagtccgatccaatacttcactagcggaggcggttcaaaagcatggaggggagtctaccagccaaatgatgataagctccagttcttttatgatgggcaagggttcatgtccctccagctaaaccaggaccaagctgacttcatcttttatgatgtttctgggaaagtcttgtacaagtggagctcgcgcaaaacaaactacttccagccctccatctatgtcactgcagaatgagggagatgcagatcatggcaggagaattagtttggtagcgctatttgtgaaagaaattgaatgtgccactgtggtaacagtggtaaaggtaatagattggtatttagtatggtgtgtggttcagcgctgaagaaatattgaactggctgtgaattgtctacaataaaggagcagagatgctcagtatggtgtccattggttctgatgcatacataagtcgcagggatctattgatgcgatgtgcatttagagaaatatatgcataaactctaatattgtaccc

SEQ ID NO: 18611 - protein, 355 aa, Triticum aestivum
  peptide (1)..(355): Ceres Seq. ID no. 15221712
  misc_feature (60)..(271): Pfam Name: Pfam Description:  Calcineurin-like phosphoesterase
  misc_feature (26)..(355): NCBI GI NO: 37530584 NR Description: putative purple acid phosphatase
  misc_feature (43)..(342): NCBI GI NO: 39918795 NR Description: putative acid phosphatase [Lupinus luteus]
  misc_feature (43)..(351): NCBI GI NO: 30683951 NR Description: calcineurin-like phosphoesterase family
  misc_feature (43)..(351): NCBI GI NO: 30911094 NR Description: putative purple acid phosphatase
  misc_feature (20)..(342): NCBI GI NO: 7331195 NR Description: putative purple acid phosphatase precursor
  misc_feature (35)..(346): NCBI GI NO: 22325419 NR Description: calcineurin-like phosphoesterase family
  misc_feature (25)..(342): NCBI GI NO: 22329781 NR Description: calcineurin-like phosphoesterase family
  misc_feature (43)..(351): NCBI GI NO: 25752249 NR Description: probable acid phosphatase (EC 3
  misc_feature (24)..(342): NCBI GI NO: 18401643 NR Description: calcineurin-like phosphoesterase family
  misc_feature (24)..(342): NCBI GI NO: 21536860 NR Description: acid phosphatase type 5 [Arabidopsis thaliana]
ATPLLTNRTAAVPVCLRPSTMARSSMAAVLAVLAVAALRCAPAAAELPLVEHPAKNDGSLSLLVIGDWGRNGTYNQSRVADQMGKVGERLDIDFVVSTGDNFYEDGLTGVHDQQFEESFTNIYTAQSLQKPWYLVLGNHDYRGNALAQLDPVMRKLDERFVCMRSFIVNAEIVEFFFIDTTPFQLKYWTHPKDSHYDWRGVAPRENYIANLLKDLDEAMKKSTAKWKIAIGHHTIRSVSDHGDTKELLQLLLPVLKVNGIDFYINGHDHCLEHISSRDSPIQYFTSGGGSKAWRGVYQPNDDKLQFFYDGQGFMSLQLNQDQADFIFYDVSGKVLYKWSSRKTNYFQPSIYVTAE

SEQ ID NO: 18612 - protein, 335 aa, Triticum aestivum
  peptide (1)..(335): Ceres Seq. ID no. 15221713
  misc_feature (40)..(251): Pfam Name: Pfam Description:  Calcineurin-like phosphoesterase
  misc_feature (6)..(335): NCBI GI NO: 37530584 NR Description: putative purple acid phosphatase
  misc_feature (23)..(322): NCBI GI NO: 39918795 NR Description: putative acid phosphatase [Lupinus luteus]
  misc_feature (23)..(331): NCBI GI NO: 30683951 NR Description: calcineurin-like phosphoesterase family
  misc_feature (23)..(331): NCBI GI NO: 30911094 NR Description: putative purple acid phosphatase
  misc_feature (1)..(322): NCBI GI NO: 7331195 NR Description: putative purple acid phosphatase precursor
  misc_feature (15)..(326): NCBI GI NO: 22325419 NR Description: calcineurin-like phosphoesterase family
  misc_feature (5)..(322): NCBI GI NO: 22329781 NR Description: calcineurin-like phosphoesterase family
  misc_feature (23)..(331): NCBI GI NO: 25752249 NR Description: probable acid phosphatase (EC 3
  misc_feature (4)..(322): NCBI GI NO: 18401643 NR Description: calcineurin-like phosphoesterase family
  misc_feature (4)..(322): NCBI GI NO: 21536860 NR Description: acid phosphatase type 5 [Arabidopsis thaliana]
MARSSMAAVLAVLAVAALRCAPAAAELPLVEHPAKNDGSLSLLVIGDWGRNGTYNQSRVADQMGKVGERLDIDFVVSTGDNFYEDGLTGVHDQQFEESFTNIYTAQSLQKPWYLVLGNHDYRGNALAQLDPVMRKLDERFVCMRSFIVNAEIVEFFFIDTTPFQLKYWTHPKDSHYDWRGVAPRENYIANLLKDLDEAMKKSTAKWKIAIGHHTIRSVSDHGDTKELLQLLLPVLKVNGIDFYINGHDHCLEHISSRDSPIQYFTSGGGSKAWRGVYQPNDDKLQFFYDGQGFMSLQLNQDQADFIFYDVSGKVLYKWSSRKTNYFQPSIYVTAE

SEQ ID NO: 18613 - protein, 330 aa, Triticum aestivum
  peptide (1)..(330): Ceres Seq. ID no. 15221714
  misc_feature (35)..(246): Pfam Name: Pfam Description:  Calcineurin-like phosphoesterase
  misc_feature (1)..(330): NCBI GI NO: 37530584 NR Description: putative purple acid phosphatase
  misc_feature (18)..(317): NCBI GI NO: 39918795 NR Description: putative acid phosphatase [Lupinus luteus]
  misc_feature (18)..(326): NCBI GI NO: 30683951 NR Description: calcineurin-like phosphoesterase family
  misc_feature (18)..(326): NCBI GI NO: 30911094 NR Description: putative purple acid phosphatase
  misc_feature (1)..(317): NCBI GI NO: 7331195 NR Description: putative purple acid phosphatase precursor
  misc_feature (10)..(321): NCBI GI NO: 22325419 NR Description: calcineurin-like phosphoesterase family
  misc_feature (1)..(317): NCBI GI NO: 22329781 NR Description: calcineurin-like phosphoesterase family
  misc_feature (18)..(326): NCBI GI NO: 25752249 NR Description: probable acid phosphatase (EC 3
  misc_feature (1)..(317): NCBI GI NO: 18401643 NR Description: calcineurin-like phosphoesterase family
  misc_feature (1)..(317): NCBI GI NO: 21536860 NR Description: acid phosphatase type 5 [Arabidopsis thaliana]
MAAVLAVLAVAALRCAPAAAELPLVEHPAKNDGSLSLLVIGDWGRNGTYNQSRVADQMGKVGERLDIDFVVSTGDNFYEDGLTGVHDQQFEESFTNIYTAQSLQKPWYLVLGNHDYRGNALAQLDPVMRKLDERFVCMRSFIVNAEIVEFFFIDTTPFQLKYWTHPKDSHYDWRGVAPRENYIANLLKDLDEAMKKSTAKWKIAIGHHTIRSVSDHGDTKELLQLLLPVLKVNGIDFYINGHDHCLEHISSRDSPIQYFTSGGGSKAWRGVYQPNDDKLQFFYDGQGFMSLQLNQDQADFIFYDVSGKVLYKWSSRKTNYFQPSIYVTAE

SEQ ID NO: 18614 - DNA, 1300 bp, Triticum aestivum
  misc_feature (1)..(1300): Ceres Seq. ID no. 13595945
aaaagggaagcaggcatattctattgctgggagtagaacttgggcggcatggatcagcttgacgagcaatcgttcctggacgagctcatgtcgctgcgccgggaggaggcgccgtcgccggctccgtggcaggcgtatccgggcagcggcatgatgacgacgagcgacctcctcttctacggcggcgagggcaccaccgaggcgagcagcggcatggactttgccgggccgtttcagcagcccatggcgccaccgccggccacatctccgcaccggccgcacgagaagttcaacttcgactgcctcagcgaagtatgcaacccttacggcagctgcgtcggcggcgtacctaagcctggggtcgtccacgcggctggccaggcgtatgccctccaggatgccatggcgcagaacggcacgagtggcggcaagctgcatcacggtggtggcaggtcgtcgtcgtccccggcgccgttcgtgttcgcaggtgtcgccggggagagctcggagatgaccaggggcgccttctccggcgcccacgctagaagcaagctcaacggtggcactacgtccaagaacctcatggcggaaaggcggcgccggaagcgtctcaacgaccgcctctccatgctccgctccatcgtgcccaagattaccaagatggataggacctcgatcctcggggacaccatagactacgtgaatgagctaaccgagcggatccaaaccctcgaggaggagatcggcgccacgccggaggatctgaacctgctgaacaccacgaagaatttctccagcggtagcagtgaggagatgccgatgaggaattccaccaagtttgtcatcgagaagcagggcgacggtggaacgaggatcgacatctgctgcgccacaagccccggcgtgctgatctcgacggtgagcgcgctggaggtgttggggctggagatcgaacagtgcgtcgtcagctgcttcggcgacttcgccatgcaggcatcctgctcacaagaggaagggaggagccgtgtgacaagaaccgacgagatcaagcaggcattgttcacgagtgcaggctatggaggaaggtgtctgtagtagtagttgtaattttgtaatattcgtctgtgagttctctgttgaatagtagtggttatgtaaaaaaaattgaatagtagtactatctaaagttcagctgtttgtgaccagattgtaatagttgggtgtgtgtccgtgagtataatgcatgcatgtatgtatcattgtatggagtggagtattgggatttggccgacatgaaaag

SEQ ID NO: 18615 - protein, 348 aa, Triticum aestivum
  peptide (1)..(348): Ceres Seq. ID no. 13595946
  misc_feature (173)..(222): Pfam Name: Pfam Description:  Helix-loop-helix DNA-binding domain
  misc_feature (3)..(346): NCBI GI NO: 22758263 NR Description: Putative bHLH transcription protein
  misc_feature (27)..(329): NCBI GI NO: 37536566 NR Description: hypothetical protein
  misc_feature (114)..(348): NCBI GI NO: 21537346 NR Description: unknown [Arabidopsis thaliana]
  misc_feature (114)..(348): NCBI GI NO: 18424973 NR Description: bHLH protein [Arabidopsis thaliana]
  misc_feature (158)..(348): NCBI GI NO: 15238199 NR Description: bHLH protein [Arabidopsis thaliana]
  misc_feature (158)..(348): NCBI GI NO: 20127062 NR Description: putative bHLH transcription factor
  misc_feature (151)..(345): NCBI GI NO: 22331357 NR Description: bHLH protein family [Arabidopsis thaliana]
  misc_feature (172)..(345): NCBI GI NO: 25513489 NR Description: F13K23.12 protein - Arabidopsis thaliana
  misc_feature (172)..(345): NCBI GI NO: 15222101 NR Description: bHLH protein [Arabidopsis thaliana]
  misc_feature (37)..(236): NCBI GI NO: 34907076 NR Description: OSJNBa0093F16.27
MDQLDEQSFLDELMSLRREEAPSPAPWQAYPGSGMMTTSDLLFYGGEGTTEASSGMDFAGPFQQPMAPPPATSPHRPHEKFNFDCLSEVCNPYGSCVGGVPKPGVVHAAGQAYALQDAMAQNGTSGGKLHHGGGRSSSSPAPFVFAGVAGESSEMTRGAFSGAHARSKLNGGTTSKNLMAERRRRKRLNDRLSMLRSIVPKITKMDRTSILGDTIDYVNELTERIQTLEEEIGATPEDLNLLNTTKNFSSGSSEEMPMRNSTKFVIEKQGDGGTRIDICCATSPGVLISTVSALEVLGLEIEQCVVSCFGDFAMQASCSQEEGRSRVTRTDEIKQALFTSAGYGGRCL

SEQ ID NO: 18616 - protein, 335 aa, Triticum aestivum
  peptide (1)..(335): Ceres Seq. ID no. 13595947
  misc_feature (160)..(209): Pfam Name: Pfam Description:  Helix-loop-helix DNA-binding domain
  misc_feature (1)..(333): NCBI GI NO: 22758263 NR Description: Putative bHLH transcription protein
  misc_feature (14)..(316): NCBI GI NO: 37536566 NR Description: hypothetical protein
  misc_feature (101)..(335): NCBI GI NO: 21537346 NR Description: unknown [Arabidopsis thaliana]
  misc_feature (101)..(335): NCBI GI NO: 18424973 NR Description: bHLH protein [Arabidopsis thaliana]
  misc_feature (145)..(335): NCBI GI NO: 15238199 NR Description: bHLH protein [Arabidopsis thaliana]
  misc_feature (145)..(335): NCBI GI NO: 20127062 NR Description: putative bHLH transcription factor
  misc_feature (138)..(332): NCBI GI NO: 22331357 NR Description: bHLH protein family [Arabidopsis thaliana]
  misc_feature (159)..(332): NCBI GI NO: 25513489 NR Description: F13K23.12 protein - Arabidopsis thaliana
  misc_feature (159)..(332): NCBI GI NO: 15222101 NR Description: bHLH protein [Arabidopsis thaliana]
  misc_feature (24)..(223): NCBI GI NO: 34907076 NR Description: OSJNBa0093F16.27
MSLRREEAPSPAPWQAYPGSGMMTTSDLLFYGGEGTTEASSGMDFAGPFQQPMAPPPATSPHRPHEKFNFDCLSEVCNPYGSCVGGVPKPGVVHAAGQAYALQDAMAQNGTSGGKLHHGGGRSSSSPAPFVFAGVAGESSEMTRGAFSGAHARSKLNGGTTSKNLMAERRRRKRLNDRLSMLRSIVPKITKMDRTSILGDTIDYVNELTERIQTLEEEIGATPEDLNLLNTTKNFSSGSSEEMPMRNSTKFVIEKQGDGGTRIDICCATSPGVLISTVSALEVLGLEIEQCVVSCFGDFAMQASCSQEEGRSRVTRTDEIKQALFTSAGYGGRCL

SEQ ID NO: 18617 - protein, 314 aa, Triticum aestivum
  peptide (1)..(314): Ceres Seq. ID no. 13595948
  misc_feature (139)..(188): Pfam Name: Pfam Description:  Helix-loop-helix DNA-binding domain
  misc_feature (1)..(312): NCBI GI NO: 22758263 NR Description: Putative bHLH transcription protein
  misc_feature (1)..(295): NCBI GI NO: 37536566 NR Description: hypothetical protein
  misc_feature (80)..(314): NCBI GI NO: 21537346 NR Description: unknown [Arabidopsis thaliana]
  misc_feature (80)..(314): NCBI GI NO: 18424973 NR Description: bHLH protein [Arabidopsis thaliana]
  misc_feature (124)..(314): NCBI GI NO: 15238199 NR Description: bHLH protein [Arabidopsis thaliana]
  misc_feature (124)..(314): NCBI GI NO: 20127062 NR Description: putative bHLH transcription factor
  misc_feature (117)..(311): NCBI GI NO: 22331357 NR Description: bHLH protein family [Arabidopsis thaliana]
  misc_feature (138)..(311): NCBI GI NO: 25513489 NR Description: F13K23.12 protein - Arabidopsis thaliana
  misc_feature (138)..(311): NCBI GI NO: 15222101 NR Description: bHLH protein [Arabidopsis thaliana]
  misc_feature (3)..(202): NCBI GI NO: 34907076 NR Description: OSJNBa0093F16.27
MMTTSDLLFYGGEGTTEASSGMDFAGPFQQPMAPPPATSPHRPHEKFNFDCLSEVCNPYGSCVGGVPKPGVVHAAGQAYALQDAMAQNGTSGGKLHHGGGRSSSSPAPFVFAGVAGESSEMTRGAFSGAHARSKLNGGTTSKNLMAERRRRKRLNDRLSMLRSIVPKITKMDRTSILGDTIDYVNELTERIQTLEEEIGATPEDLNLLNTTKNFSSGSSEEMPMRNSTKFVIEKQGDGGTRIDICCATSPGVLISTVSALEVLGLEIEQCVVSCFGDFAMQASCSQEEGRSRVTRTDEIKQALFTSAGYGGRCL

SEQ ID NO: 18618 - DNA, 1383 bp, Triticum aestivum
  misc_feature (1)..(1383): Ceres Seq. ID no. 13595998
  misc_feature (594)..(594): n is a, c, t, g, unknown, or other
  misc_feature (593)..(593): n is a, c, t, g, unknown, or other
  misc_feature (543)..(543): n is a, c, t, g, unknown, or other
  misc_feature (595)..(595): n is a, c, t, g, unknown, or other
  misc_feature (592)..(592): n is a, c, t, g, unknown, or other
  misc_feature (597)..(597): n is a, c, t, g, unknown, or other
  misc_feature (596)..(596): n is a, c, t, g, unknown, or other
  misc_feature (545)..(545): n is a, c, t, g, unknown, or other
  misc_feature (544)..(544): n is a, c, t, g, unknown, or other
aaaaatccattcaaagcgctctgctctctgccccgcccgccggctcatctccgcgcgcagaggcagcgtcgcagcgagcacacaccaccttcgatccctcctcctcctcctcctcctcctgcttcttctctcgcgtacacggctgcgcgtgtgacgatggcgaggacgtcgtcgtcgccgacggcgacgaggctgccgctgctgcttgtgctgctgtcgtcgctggccttgcaggcggcggcgcagaagtacaatgcggtgtacagcttcggcgactcgatcacggacacggggaacctgtgcaccaacgggcggccctcggcgatcaccttcacgcagccgccctacggggagacctacttcgggagccccacctgccgctgctccgacggccgcgtcatcgtcgacttcctcagcaccaagtacggcctccccttcctgcccccctccaagtccacctycgccgacttcaaaaagggcgccaacatggscatcaccggcgccaccgscatggacgcccccttcttycgytcctcggctcgnnntctccgacaagatctggaacaacgggcccatcagcttccagctccannnnnnggttccagaccatcacctcctccgtctgcggcagcagctgcaagagctacctggcgaactcgctcttcatcttcggggagttcggggggaacgactacaacgcgatgctgttcggcaactacaacacggaccaggcgagcacgtacgcgccgcagatcgtggacaccatcggcgccggcgtggagaagctggtcgcgatgggggccgtggacgtggtggtgccgggggtgctccccatcggctgcttccccatctacctcaccatctacggcacctccagcgccgccgactacgacgccctcggctgcctcaagaagttcaacgacctctccacgtaccacaacagcctgctgcaggccaaggtgtccgccctccaggccaagtacaagtcggcgcgcatcatgtacgccgacttctacgccggggtctacgacatggtccggagccccagcaaatacgggttcagctcggtgtttgaggcgtgctgcgggtcggggggaggcaagtacaactacgccaacagcgcgcggtgcggcatgtccggcgcctccgcctgcgccagcccggcgtcccacctcagctgggacggcatccacctcaccgaggccgcctacaagcagatcaccgacggctggctcaacggcgccttctgccacccaggcatcacccactagccagtcactcccactggtcgatcaatcagcttatgcatcgtcgtccatggatccatcattaatcaatcaatcgattatattattattattattattattaaaaaaaaaaaaa

SEQ ID NO: 18619 - protein, 461 aa, Triticum aestivum
  peptide (1)..(461): Ceres Seq. ID no. 15221730
  misc_feature (87)..(178): Pfam Name: Pfam Description:  GDSL-like Lipase/Acylhydrolase
  misc_feature (68)..(178): NCBI GI NO: 34903956 NR Description: OSJNBa0038J17.23
  misc_feature (68)..(177): NCBI GI NO: 34903958 NR Description: OSJNBa0038J17.24
  misc_feature (58)..(176): NCBI GI NO: 34903996 NR Description: unnamed protein product
  misc_feature (53)..(175): NCBI GI NO: 15218728 NR Description: lipase, putative [Arabidopsis thaliana]
  misc_feature (46)..(175): NCBI GI NO: 10764858 NR Description: F1K23.17 [Arabidopsis thaliana]
  misc_feature (67)..(177): NCBI GI NO: 10764858 NR Description: F1K23.17 [Arabidopsis thaliana]
  misc_feature (68)..(175): NCBI GI NO: 10764854 NR Description: F1K23.13 [Arabidopsis thaliana]
  misc_feature (73)..(175): NCBI GI NO: 10764854 NR Description: F1K23.13 [Arabidopsis thaliana]
  misc_feature (68)..(175): NCBI GI NO: 10764854 NR Description: F1K23.13 [Arabidopsis thaliana]
  misc_feature (95)..(176): NCBI GI NO: 10764854 NR Description: F1K23.13 [Arabidopsis thaliana]
  misc_feature (154)..(154): Xaa is any aa, unknown or other
  misc_feature (164)..(164): Xaa is any aa, unknown or other
  misc_feature (170)..(170): Xaa is any aa, unknown or other
  misc_feature (176)..(176): Xaa is any aa, unknown or other
  misc_feature (177)..(177): Xaa is any aa, unknown or other
  misc_feature (181)..(181): Xaa is any aa, unknown or other
  misc_feature (182)..(182): Xaa is any aa, unknown or other
  misc_feature (198)..(198): Xaa is any aa, unknown or other
  misc_feature (199)..(199): Xaa is any aa, unknown or other
KNPFKALCSLPRPPAHLRAQRQRRSEHTPPSIPPPPPPPPASSLAYTAARVTMARTSSSPTATRLPLLLVLLSSLALQAAAQKYNAVYSFGDSITDTGNLCTNGRPSAITFTQPPYGETYFGSPTCRCSDGRVIVDFLSTKYGLPFLPPSKSTXADFKKGANMXITGATXMDAPFXXSSAXXLRQDLEQRAHQLPAPXXGSRPSPPPSAAAAARATWRTRSSSSGSSGGTTTTRCCSATTTRTRRARTRRRSWTPSAPAWRSWSRWGPWTWWCRGCSPSAASPSTSPSTAPPAPPTTTPSAASRSSTTSPRTTTACCRPRCPPSRPSTSRRASCTPTSTPGSTTWSGAPANTGSARCLRRAAGRGEASTTTPTARGAACPAPPPAPARRPTSAGTASTSPRPPTSRSPTAGSTAPSATQASPTSQSLPLVDQSAYASSSMDPSLINQSIILLLLLLLKKKK

SEQ ID NO: 18620 - protein, 422 aa, Triticum aestivum
  peptide (1)..(422): Ceres Seq. ID no. 15221731
  misc_feature (200)..(410): Pfam Name: Pfam Description:  GDSL-like Lipase/Acylhydrolase
  misc_feature (200)..(422): NCBI GI NO: 34903956 NR Description: OSJNBa0038J17.23
  misc_feature (200)..(420): NCBI GI NO: 34903958 NR Description: OSJNBa0038J17.24
  misc_feature (192)..(420): NCBI GI NO: 34903996 NR Description: unnamed protein product
  misc_feature (186)..(418): NCBI GI NO: 15218728 NR Description: lipase, putative [Arabidopsis thaliana]
  misc_feature (186)..(418): NCBI GI NO: 10764858 NR Description: F1K23.17 [Arabidopsis thaliana]
  misc_feature (189)..(418): NCBI GI NO: 10764858 NR Description: F1K23.17 [Arabidopsis thaliana]
  misc_feature (186)..(422): NCBI GI NO: 10764854 NR Description: F1K23.13 [Arabidopsis thaliana]
  misc_feature (186)..(418): NCBI GI NO: 10764854 NR Description: F1K23.13 [Arabidopsis thaliana]
  misc_feature (185)..(412): NCBI GI NO: 10764854 NR Description: F1K23.13 [Arabidopsis thaliana]
  misc_feature (260)..(418): NCBI GI NO: 10764854 NR Description: F1K23.13 [Arabidopsis thaliana]
  misc_feature (153)..(153): Xaa is any aa, unknown or other
  misc_feature (163)..(163): Xaa is any aa, unknown or other
  misc_feature (169)..(169): Xaa is any aa, unknown or other
  misc_feature (176)..(176): Xaa is any aa, unknown or other
  misc_feature (177)..(177): Xaa is any aa, unknown or other
  misc_feature (181)..(181): Xaa is any aa, unknown or other
  misc_feature (197)..(197): Xaa is any aa, unknown or other
  misc_feature (198)..(198): Xaa is any aa, unknown or other
  misc_feature (199)..(199): Xaa is any aa, unknown or other
KSIQSALLSAPPAGSSPRAEAASQRAHTTFDPSSSSSSSCFFSRVHGCACDDGEDVVVADGDEAAAAACAAVVAGLAGGGAEVQCGVQLRRLDHGHGEPVHQRAALGDHLHAAALRGDLLREPHLPLLRRPRHRRLPQHQVRPPLPAPLQVHXRRLQKGRQHXHHRRHXHGRPLLXXLGSXSPTRSGTTGPSASSSXXXFQTITSSVCGSSCKSYLANSLFIFGEFGGNDYNAMLFGNYNTDQASTYAPQIVDTIGAGVEKLVAMGAVDVVVPGVLPIGCFPIYLTIYGTSSAADYDALGCLKKFNDLSTYHNSLLQAKVSALQAKYKSARIMYADFYAGVYDMVRSPSKYGFSSVFEACCGSGGGKYNYANSARCGMSGASACASPASHLSWDGIHLTEAAYKQITDGWLNGAFCHPGITH

SEQ ID NO: 18621 - protein, 409 aa, Triticum aestivum
  peptide (1)..(409): Ceres Seq. ID no. 15221732
  misc_feature (35)..(126): Pfam Name: Pfam Description:  GDSL-like Lipase/Acylhydrolase
  misc_feature (16)..(126): NCBI GI NO: 34903956 NR Description: OSJNBa0038J17.23
  misc_feature (16)..(125): NCBI GI NO: 34903958 NR Description: OSJNBa0038J17.24
  misc_feature (6)..(124): NCBI GI NO: 34903996 NR Description: unnamed protein product
  misc_feature (1)..(123): NCBI GI NO: 15218728 NR Description: lipase, putative [Arabidopsis thaliana]
  misc_feature (1)..(123): NCBI GI NO: 10764858 NR Description: F1K23.17 [Arabidopsis thaliana]
  misc_feature (15)..(125): NCBI GI NO: 10764858 NR Description: F1K23.17 [Arabidopsis thaliana]
  misc_feature (16)..(123): NCBI GI NO: 10764854 NR Description: F1K23.13 [Arabidopsis thaliana]
  misc_feature (21)..(123): NCBI GI NO: 10764854 NR Description: F1K23.13 [Arabidopsis thaliana]
  misc_feature (16)..(123): NCBI GI NO: 10764854 NR Description: F1K23.13 [Arabidopsis thaliana]
  misc_feature (43)..(124): NCBI GI NO: 10764854 NR Description: F1K23.13 [Arabidopsis thaliana]
  misc_feature (102)..(102): Xaa is any aa, unknown or other
  misc_feature (112)..(112): Xaa is any aa, unknown or other
  misc_feature (118)..(118): Xaa is any aa, unknown or other
  misc_feature (124)..(124): Xaa is any aa, unknown or other
  misc_feature (125)..(125): Xaa is any aa, unknown or other
  misc_feature (129)..(129): Xaa is any aa, unknown or other
  misc_feature (130)..(130): Xaa is any aa, unknown or other
  misc_feature (146)..(146): Xaa is any aa, unknown or other
  misc_feature (147)..(147): Xaa is any aa, unknown or other
MARTSSSPTATRLPLLLVLLSSLALQAAAQKYNAVYSFGDSITDTGNLCTNGRPSAITFTQPPYGETYFGSPTCRCSDGRVIVDFLSTKYGLPFLPPSKSTXADFKKGANMXITGATXMDAPFXXSSAXXLRQDLEQRAHQLPAPXXGSRPSPPPSAAAAARATWRTRSSSSGSSGGTTTTRCCSATTTRTRRARTRRRSWTPSAPAWRSWSRWGPWTWWCRGCSPSAASPSTSPSTAPPAPPTTTPSAASRSSTTSPRTTTACCRPRCPPSRPSTSRRASCTPTSTPGSTTWSGAPANTGSARCLRRAAGRGEASTTTPTARGAACPAPPPAPARRPTSAGTASTSPRPPTSRSPTAGSTAPSATQASPTSQSLPLVDQSAYASSSMDPSLINQSIILLLLLLLKKKK

SEQ ID NO: 18622 - DNA, 1839 bp, Triticum aestivum
  misc_feature (1)..(1839): Ceres Seq. ID no. 15170670
cctccttcctcctccccctcgcttcttcacggaatccaaaccccaaacaccagccatggcgatggcgtcctttcgcccccttcctctcgcgctcctgctcgccgcgtgcctctccgcgctcgtgctggccgtggcgcacgcgcggaccccacggctggagcccaccatccggctgccgtcgcagcgcgccggcgggcaggaggacgatggctccatcgggaccaggtgggccgtcctcatcgccggctccaacggctactacaactaccgccaccaggcggatatctgccacgcctaccagatcatgaagaagggtggtctcaaggatgagaacatcatcgtattcatgtacgatgacattgcgcacaacccggagaacccgaggccgggcgtcatcatcaaccacccccagggtggagatgtctatgctggggtccctaaggactacactggaaaggaggttaatgtcaagaacttctttgctgtcctgctcggtaataaaaccgcggtgagtggtgggaacggcaaagttgtggacagtggccctaatgatcacatttttgtgttttacagtgaccatgggggtcctggggtccttgggatgcctacctatccatacctttacggtgacgatcttgtagatgtcctgaagaaaaagcacgctgctggaacctacaaaagcctggtattttaccttgaagcctgcgaatctgggagcatctttgagggacttctgccaaatgacatcggtgtctatgcgaccaccgcttcgaatgcagaggaaagcagttggggaacgtattgccccggcgagtacccgagccctccgccggaatatgacacttgcttgggcgacctgtacagcatttcttggatggaagacagtgatgtccacaacctgagaactgaatctctcaagcagcagtataacctggtcaagaagagaacggcagctcaggactcatacagctatggttcccatgtgatgcaatacggttctttggacctgaatgctgaacatttgttctcgtacattgggtcaaaccctgctaacgagaacactacatttgttgaagataacgcactgccatcattctcaagagctgttaatcagagggatgctgatcttgtttatttctggcagaagtaccggaaattggccgagagctcccctgagaaaaacgatgctcggaagcaattgcttgaaatgatgggtcatagatctcatattgacaacagcatcgagctgattggaaaccttctgtttggttctgcgggtggtccgatggttctaaaggctgttcgcccagctggtgagcctcttgttgatgactggagttgtctcaagtctacggtgcgcacttttgaatcacaatgtggctcactggcgcagtatggaatgaagcacatgcggccctttgcaaacatctgcaatgccggcattgttcctgaagcgacggcaaaggttgctgctcaggcatgcacgagcatcccaaccaacccctggagtgccacacacaagggttttagtgcttaaaccagaggtgaagcaacttggtccctatctcagctattgtaccatataccaaagtccccttcctattcacacagggttagtagtgcttgaacggacgaaccttagatgaataaataagaattatggcattacttcagctattccaccacaccaaattaccttggttgtgtccaacttatagtgtacatatacccgtagtagaaaggtgatttcctgtgattactgtacatactcgtgatagtttgtgatcagatgtgtagctcgcaattccatatatgaagaatgcaatcgctgctatttgc

SEQ ID NO: 18623 - protein, 511 aa, Triticum aestivum
  peptide (1)..(511): Ceres Seq. ID no. 15170671
  misc_feature (27)..(392): Pfam Name: Pfam Description:  Peptidase C13 family
  misc_feature (27)..(511): NCBI GI NO: 4154281 NR Description: C13 endopeptidase NP1 precursor [Zea mays]
  misc_feature (27)..(511): NCBI GI NO: 11558854 NR Description: putative legumain [Zea mays]
  misc_feature (27)..(511): NCBI GI NO: 6634705 NR Description: legumain-like protease [Zea mays]
  misc_feature (28)..(511): NCBI GI NO: 34914086 NR Description: asparaginyl endopeptidase
  misc_feature (27)..(511): NCBI GI NO: 11558852 NR Description: putative legumain [Zea mays]
  misc_feature (27)..(511): NCBI GI NO: 6634703 NR Description: legumain-like protease [Zea mays]
  misc_feature (67)..(511): NCBI GI NO: 1351408 NR Description: Vacuolar processing enzyme precursor (VPE)
  misc_feature (65)..(511): NCBI GI NO: 27544008 NR Description: vacuolar processing enzyme-1b [Nicotiana tabacum]
  misc_feature (19)..(511): NCBI GI NO: 15233996 NR Description: gamma-VPE (vacuolar processing enzyme)
  misc_feature (33)..(382): NCBI GI NO: 38567871 NR Description: OSJNBa0091D06.13
LLPPPPRFFTESKPQTPAMAMASFRPLPLALLLAACLSALVLAVAHARTPRLEPTIRLPSQRAGGQEDDGSIGTRWAVLIAGSNGYYNYRHQADICHAYQIMKKGGLKDENIIVFMYDDIAHNPENPRPGVIINHPQGGDVYAGVPKDYTGKEVNVKNFFAVLLGNKTAVSGGNGKVVDSGPNDHIFVFYSDHGGPGVLGMPTYPYLYGDDLVDVLKKKHAAGTYKSLVFYLEACESGSIFEGLLPNDIGVYATTASNAEESSWGTYCPGEYPSPPPEYDTCLGDLYSISWMEDSDVHNLRTESLKQQYNLVKKRTAAQDSYSYGSHVMQYGSLDLNAEHLFSYIGSNPANENTTFVEDNALPSFSRAVNQRDADLVYFWQKYRKLAESSPEKNDARKQLLEMMGHRSHIDNSIELIGNLLFGSAGGPMVLKAVRPAGEPLVDDWSCLKSTVRTFESQCGSLAQYGMKHMRPFANICNAGIVPEATAKVAAQACTSIPTNPWSATHKGFSA

SEQ ID NO: 18624 - protein, 493 aa, Triticum aestivum
  peptide (1)..(493): Ceres Seq. ID no. 15170672
  misc_feature (9)..(374): Pfam Name: Pfam Description:  Peptidase C13 family
  misc_feature (9)..(493): NCBI GI NO: 4154281 NR Description: C13 endopeptidase NP1 precursor [Zea mays]
  misc_feature (9)..(493): NCBI GI NO: 11558854 NR Description: putative legumain [Zea mays]
  misc_feature (9)..(493): NCBI GI NO: 6634705 NR Description: legumain-like protease [Zea mays]
  misc_feature (10)..(493): NCBI GI NO: 34914086 NR Description: asparaginyl endopeptidase
  misc_feature (9)..(493): NCBI GI NO: 11558852 NR Description: putative legumain [Zea mays]
  misc_feature (9)..(493): NCBI GI NO: 6634703 NR Description: legumain-like protease [Zea mays]
  misc_feature (49)..(493): NCBI GI NO: 1351408 NR Description: Vacuolar processing enzyme precursor (VPE)
  misc_feature (47)..(493): NCBI GI NO: 27544008 NR Description: vacuolar processing enzyme-1b [Nicotiana tabacum]
  misc_feature (1)..(493): NCBI GI NO: 15233996 NR Description: gamma-VPE (vacuolar processing enzyme)
  misc_feature (15)..(364): NCBI GI NO: 38567871 NR Description: OSJNBa0091D06.13
MAMASFRPLPLALLLAACLSALVLAVAHARTPRLEPTIRLPSQRAGGQEDDGSIGTRWAVLIAGSNGYYNYRHQADICHAYQIMKKGGLKDENIIVFMYDDIAHNPENPRPGVIINHPQGGDVYAGVPKDYTGKEVNVKNFFAVLLGNKTAVSGGNGKVVDSGPNDHIFVFYSDHGGPGVLGMPTYPYLYGDDLVDVLKKKHAAGTYKSLVFYLEACESGSIFEGLLPNDIGVYATTASNAEESSWGTYCPGEYPSPPPEYDTCLGDLYSISWMEDSDVHNLRTESLKQQYNLVKKRTAAQDSYSYGSHVMQYGSLDLNAEHLFSYIGSNPANENTTFVEDNALPSFSRAVNQRDADLVYFWQKYRKLAESSPEKNDARKQLLEMMGHRSHIDNSIELIGNLLFGSAGGPMVLKAVRPAGEPLVDDWSCLKSTVRTFESQCGSLAQYGMKHMRPFANICNAGIVPEATAKVAAQACTSIPTNPWSATHKGFSA

SEQ ID NO: 18625 - protein, 491 aa, Triticum aestivum
  peptide (1)..(491): Ceres Seq. ID no. 15170673
  misc_feature (7)..(372): Pfam Name: Pfam Description:  Peptidase C13 family
  misc_feature (7)..(491): NCBI GI NO: 4154281 NR Description: C13 endopeptidase NP1 precursor [Zea mays]
  misc_feature (7)..(491): NCBI GI NO: 11558854 NR Description: putative legumain [Zea mays]
  misc_feature (7)..(491): NCBI GI NO: 6634705 NR Description: legumain-like protease [Zea mays]
  misc_feature (8)..(491): NCBI GI NO: 34914086 NR Description: asparaginyl endopeptidase
  misc_feature (7)..(491): NCBI GI NO: 11558852 NR Description: putative legumain [Zea mays]
  misc_feature (7)..(491): NCBI GI NO: 6634703 NR Description: legumain-like protease [Zea mays]
  misc_feature (47)..(491): NCBI GI NO: 1351408 NR Description: Vacuolar processing enzyme precursor (VPE)
  misc_feature (45)..(491): NCBI GI NO: 27544008 NR Description: vacuolar processing enzyme-1b [Nicotiana tabacum]
  misc_feature (1)..(491): NCBI GI NO: 15233996 NR Description: gamma-VPE (vacuolar processing enzyme)
  misc_feature (13)..(362): NCBI GI NO: 38567871 NR Description: OSJNBa0091D06.13
MASFRPLPLALLLAACLSALVLAVAHARTPRLEPTIRLPSQRAGGQEDDGSIGTRWAVLIAGSNGYYNYRHQADICHAYQIMKKGGLKDENIIVFMYDDIAHNPENPRPGVIINHPQGGDVYAGVPKDYTGKEVNVKNFFAVLLGNKTAVSGGNGKVVDSGPNDHIFVFYSDHGGPGVLGMPTYPYLYGDDLVDVLKKKHAAGTYKSLVFYLEACESGSIFEGLLPNDIGVYATTASNAEESSWGTYCPGEYPSPPPEYDTCLGDLYSISWMEDSDVHNLRTESLKQQYNLVKKRTAAQDSYSYGSHVMQYGSLDLNAEHLFSYIGSNPANENTTFVEDNALPSFSRAVNQRDADLVYFWQKYRKLAESSPEKNDARKQLLEMMGHRSHIDNSIELIGNLLFGSAGGPMVLKAVRPAGEPLVDDWSCLKSTVRTFESQCGSLAQYGMKHMRPFANICNAGIVPEATAKVAAQACTSIPTNPWSATHKGFSA

SEQ ID NO: 18626 - DNA, 551 bp, Triticum aestivum
  misc_feature (1)..(551): Ceres Seq. ID no. 13590591
agaaaagaataccgcctccctaaaaaaactaggaaaaacagtctcctcaccggtccgtcgtcctcgccgtcgccctacccatctcgccggcgccgtcggggacccgcggggagcatggatgccatggaggaggatacgcctccagcgctaccgccaccgccaccgcctacgacgggcgcgaagcagccgccgtacaaggatcctgacgacgggaggcagcggttcctactggagctggagttcatccagtgcctcgccaaccccatctacatcaactatctagcgcagaatcggtactttgaggatgaggcgttcatcgggtatctcaagtacctcaagtattggcagcgtccggagtacatcaaatacataatgtatccgcactgccttttctttcttgagcttctccaaaatgcaaatttccgaaacgcaatggcacatccagcaaacaaggaagttgctcataggcagcaatatttcttctggaaaaactacaggaacaatagactgaagcacattctgccgcgttcttcttccgaaccaacttctgc

SEQ ID NO: 18627 - protein, 183 aa, Triticum aestivum
  peptide (1)..(183): Ceres Seq. ID no. 13590592
  misc_feature (64)..(182): NCBI GI NO: 12597881 NR Description: hypothetical protein [Oryza sativa]
  misc_feature (63)..(182): NCBI GI NO: 33146796 NR Description: SOH1-like protein
  misc_feature (63)..(182): NCBI GI NO: 34899976 NR Description: P0039H02.5
  misc_feature (39)..(181): NCBI GI NO: 22326900 NR Description: SOH1 - like protein [Arabidopsis thaliana]
  misc_feature (63)..(182): NCBI GI NO: 34899964 NR Description: P0428D12.23
  misc_feature (67)..(171): NCBI GI NO: 27673870 NR Description: similar to CGI-125 protein
  misc_feature (67)..(171): NCBI GI NO: 13385570 NR Description: RIKEN cDNA 3110004H13 [Mus musculus]
  misc_feature (67)..(171): NCBI GI NO: 7705592 NR Description: CGI-125 protein [Homo sapiens]
  misc_feature (72)..(173): NCBI GI NO: 21355471 NR Description: CG1057-PA [Drosophila melanogaster]
  misc_feature (66)..(162): NCBI GI NO: 19075359 NR Description: conserved hypothetical protein
RKEYRLPKKTRKNSLLTGPSSSPSPYPSRRRRRGPAGSMDAMEEDTPPALPPPPPPTTGAKQPPYKDPDDGRQRFLLELEFIQCLANPIYINYLAQNRYFEDEAFIGYLKYLKYWQRPEYIKYIMYPHCLFFLELLQNANFRNAMAHPANKEVAHRQQYFFWKNYRNNRLKHILPRSSSEPTS

SEQ ID NO: 18628 - protein, 145 aa, Triticum aestivum
  peptide (1)..(145): Ceres Seq. ID no. 13590593
  misc_feature (26)..(144): NCBI GI NO: 12597881 NR Description: hypothetical protein [Oryza sativa]
  misc_feature (25)..(144): NCBI GI NO: 33146796 NR Description: SOH1-like protein
  misc_feature (25)..(144): NCBI GI NO: 34899976 NR Description: P0039H02.5
  misc_feature (1)..(143): NCBI GI NO: 22326900 NR Description: SOH1 - like protein [Arabidopsis thaliana]
  misc_feature (25)..(144): NCBI GI NO: 34899964 NR Description: P0428D12.23
  misc_feature (29)..(133): NCBI GI NO: 27673870 NR Description: similar to CGI-125 protein
  misc_feature (29)..(133): NCBI GI NO: 13385570 NR Description: RIKEN cDNA 3110004H13 [Mus musculus]
  misc_feature (29)..(133): NCBI GI NO: 7705592 NR Description: CGI-125 protein [Homo sapiens]
  misc_feature (34)..(135): NCBI GI NO: 21355471 NR Description: CG1057-PA [Drosophila melanogaster]
  misc_feature (28)..(124): NCBI GI NO: 19075359 NR Description: conserved hypothetical protein
MDAMEEDTPPALPPPPPPTTGAKQPPYKDPDDGRQRFLLELEFIQCLANPIYINYLAQNRYFEDEAFIGYLKYLKYWQRPEYIKYIMYPHCLFFLELLQNANFRNAMAHPANKEVAHRQQYFFWKNYRNNRLKHILPRSSSEPTS

SEQ ID NO: 18629 - protein, 142 aa, Triticum aestivum
  peptide (1)..(142): Ceres Seq. ID no. 13590594
  misc_feature (23)..(141): NCBI GI NO: 12597881 NR Description: hypothetical protein [Oryza sativa]
  misc_feature (22)..(141): NCBI GI NO: 33146796 NR Description: SOH1-like protein
  misc_feature (22)..(141): NCBI GI NO: 34899976 NR Description: P0039H02.5
  misc_feature (1)..(140): NCBI GI NO: 22326900 NR Description: SOH1 - like protein [Arabidopsis thaliana]
  misc_feature (22)..(141): NCBI GI NO: 34899964 NR Description: P0428D12.23
  misc_feature (26)..(130): NCBI GI NO: 27673870 NR Description: similar to CGI-125 protein
  misc_feature (26)..(130): NCBI GI NO: 13385570 NR Description: RIKEN cDNA 3110004H13 [Mus musculus]
  misc_feature (26)..(130): NCBI GI NO: 7705592 NR Description: CGI-125 protein [Homo sapiens]
  misc_feature (31)..(132): NCBI GI NO: 21355471 NR Description: CG1057-PA [Drosophila melanogaster]
  misc_feature (25)..(121): NCBI GI NO: 19075359 NR Description: conserved hypothetical protein
MEEDTPPALPPPPPPTTGAKQPPYKDPDDGRQRFLLELEFIQCLANPIYINYLAQNRYFEDEAFIGYLKYLKYWQRPEYIKYIMYPHCLFFLELLQNANFRNAMAHPANKEVAHRQQYFFWKNYRNNRLKHILPRSSSEPTS

SEQ ID NO: 18630 - DNA, 1497 bp, Triticum aestivum
  misc_feature (1)..(1497): Ceres Seq. ID no. 13595999
acacctgctctcccccttcattaaaaactgcccatttatttatcaattccggcgaccctcctcccaccggcgacgactaggacgaggcaccgccggcaatcatgtgcggcggcgcgatcctcaaggacctcaaggtccccgcgccgacgcggaaggtgacggcggcggtgctgtggcccgagaagaacaagcccaagcgggccgacggcgtggcccggcgcctcgcggggctcggccggcgcggggggctcgggctggacgacggcgacgtggacttcgaggccgacttcgaggagttcgaggccgactccggggactccgacgtggagctcaggcgcgccggggttgctgggaaggacggccacgacgtggtcgtcgagatcaagcccttattcgccgtcaagaggtccctctcccaagatgacttaagcaccatgactactgctggttttgatggtcctgcacaaaggtcagcaaaaaggaagagaaagaacgagttcaggggtatccgccagcgcccctggggtaagtgggctgctgaaatcagagatcctagcaagggtgtccgtgtctggcttggtactttcaacagtgctgaagaagctgcaagagcttatgatgttgaagcacgaaggatccgtggcaagaagrccaaggttaactttccagaggaactaacagttcatcagaagcgccgtgcttgccctgctgctcctaaagttcycaagtcaagcgcagcacaggaacctaccgtcataccagcagtcaacaaccttgccaacccaaatgctttcgtctacccgcctgctgactttgcatcaaagcagccacttgttcagcctgacaacgtgccatatgttcccgcaattaactctgctgcccctgttgaagctcctgttatgaatatgtactctgaccagggaagcaactcctttggctgctctgacttgggctgggagtatgacaccaagactccagatatatcatccattgctcccatttccaccattgctgaaggaacagagtctgcacttctccagagtaacacctacaacccagcagtgattgccgaaggagctgaatctgcgcttgtccagagcaacacctacaactcagtggtgcctcctgttatggagaacaatgctgtcgattttgagccttggatgaggtttcttgttgatgatggcgtggatgagccgatagatagccttctgaattttgatgtgcctcaggatgtcgttggcaacatggacctttggagcttcgatgacatgcccatctgtggcgaaattttctgagggattcaaacccctgtatatcaggacaaagggaataagactatgggagattgggaagcaccctgttgtcacctttggttagtatatgcctatgtgcaagcttagatgcaaaaaagccgcatcttgagttgtagtcgaccctttccctagttgactgtcaatgaaccgttgtcatttatgagtctgatgaaccgttgcc

SEQ ID NO: 18631 - protein, 398 aa, Triticum aestivum
  peptide (1)..(398): Ceres Seq. ID no. 15221733
  misc_feature (130)..(191): Pfam Name: Pfam Description:  AP2 domain
  misc_feature (1)..(321): NCBI GI NO: 6689918 NR Description: transcription factor EREBP1 [Oryza sativa]
  misc_feature (320)..(393): NCBI GI NO: 6689918 NR Description: transcription factor EREBP1 [Oryza sativa]
  misc_feature (15)..(321): NCBI GI NO: 6176534 NR Description: EREBP-like protein [Oryza sativa]
  misc_feature (327)..(398): NCBI GI NO: 6176534 NR Description: EREBP-like protein [Oryza sativa]
  misc_feature (64)..(321): NCBI GI NO: 30525870 NR Description: ethylene-responsive element binding protein
  misc_feature (45)..(393): NCBI GI NO: 18496063 NR Description: ethylene responsive element binding protein
  misc_feature (1)..(76): NCBI GI NO: 18496063 NR Description: ethylene responsive element binding protein
  misc_feature (45)..(393): NCBI GI NO: 38343926 NR Description: ethylene transcription factor [Fagus sylvatica]
  misc_feature (1)..(76): NCBI GI NO: 38343926 NR Description: ethylene transcription factor [Fagus sylvatica]
  misc_feature (1)..(391): NCBI GI NO: 19880313 NR Description: putative EREBP-type transcription factor
  misc_feature (184)..(184): Xaa is any aa, unknown or other
  misc_feature (208)..(208): Xaa is any aa, unknown or other
MCGGAILKDLKVPAPTRKVTAAVLWPEKNKPKRADGVARRLAGLGRRGGLGLDDGDVDFEADFEEFEADSGDSDVELRRAGVAGKDGHDVVVEIKPLFAVKRSLSQDDLSTMTTAGFDGPAQRSAKRKRKNEFRGIRQRPWGKWAAEIRDPSKGVRVWLGTFNSAEEAARAYDVEARRIRGKKXKVNFPEELTVHQKRRACPAAPKVXKSSAAQEPTVIPAVNNLANPNAFVYPPADFASKQPLVQPDNVPYVPAINSAAPVEAPVMNMYSDQGSNSFGCSDLGWEYDTKTPDISSIAPISTIAEGTESALLQSNTYNPAVIAEGAESALVQSNTYNSVVPPVMENNAVDFEPWMRFLVDDGVDEPIDSLLNFDVPQDVVGNMDLWSFDDMPICGEIF

SEQ ID NO: 18632 - protein, 287 aa, Triticum aestivum
  peptide (1)..(287): Ceres Seq. ID no. 15221734
  misc_feature (19)..(80): Pfam Name: Pfam Description:  AP2 domain
  misc_feature (1)..(210): NCBI GI NO: 6689918 NR Description: transcription factor EREBP1 [Oryza sativa]
  misc_feature (209)..(282): NCBI GI NO: 6689918 NR Description: transcription factor EREBP1 [Oryza sativa]
  misc_feature (1)..(210): NCBI GI NO: 6176534 NR Description: EREBP-like protein [Oryza sativa]
  misc_feature (216)..(287): NCBI GI NO: 6176534 NR Description: EREBP-like protein [Oryza sativa]
  misc_feature (1)..(210): NCBI GI NO: 30525870 NR Description: ethylene-responsive element binding protein
  misc_feature (1)..(282): NCBI GI NO: 18496063 NR Description: ethylene responsive element binding protein
  misc_feature (1)..(282): NCBI GI NO: 38343926 NR Description: ethylene transcription factor [Fagus sylvatica]
  misc_feature (1)..(280): NCBI GI NO: 19880313 NR Description: putative EREBP-type transcription factor
  misc_feature (1)..(210): NCBI GI NO: 24940524 NR Description: ethylene response element binding protein
  misc_feature (1)..(210): NCBI GI NO: 30525872 NR Description: ethylene-responsive element binding protein
  misc_feature (73)..(73): Xaa is any aa, unknown or other
  misc_feature (97)..(97): Xaa is any aa, unknown or other
MTTAGFDGPAQRSAKRKRKNEFRGIRQRPWGKWAAEIRDPSKGVRVWLGTFNSAEEAARAYDVEARRIRGKKXKVNFPEELTVHQKRRACPAAPKVXKSSAAQEPTVIPAVNNLANPNAFVYPPADFASKQPLVQPDNVPYVPAINSAAPVEAPVMNMYSDQGSNSFGCSDLGWEYDTKTPDISSIAPISTIAEGTESALLQSNTYNPAVIAEGAESALVQSNTYNSVVPPVMENNAVDFEPWMRFLVDDGVDEPIDSLLNFDVPQDVVGNMDLWSFDDMPICGEIF

SEQ ID NO: 18633 - DNA, 1335 bp, Triticum aestivum
  misc_feature (1)..(1335): Ceres Seq. ID no. 15226254
acacccacccaccccctcctccttacttgacctagaacctggcctcgggccgacgcctcctgctccctctcgctgtcgcgtctcccggcgatcctctccgtcgacgccccggctagccgccatcgtttcccggcgaccagatcgacggcaatcccatcctccttgatctccctctcgggcgtcgggagatctacgtggggacatgcataagctggggagaggaagccgcgacaaggtgcaacagttcatggccataactggtgcaagcgagaaggtcgcccttcaggcactgaaagctagtgattggcacttagaagggtcttttgattatttctacagccagccacagatttctgtgaccaattctcgacatctttacagcagatacaaagaacgtgatgctgatatgatcatggtggagggcacatctcaactttgcaacgacctgttggtggatcctcaggatgttgtcatgcttgtcatatcatggcacatgaaagctgccacaatgtgtgaatttactcgccaggaattcattgatggtctgcagtcaattggggtagattcaattgagaagctccgtgagaaacttccatcactgcgagctgagataaaggacgataataagttccgtgagatatacaactttgcatttgcttgggctagggaaaagggtcagaaatcccttccactggagacagctattggaatgtggaggttgctgtttgctgaaaggcattggcccttaatcgatcactggtgtcagtttctccaggtcaggcataacaaagccatctctagggacacatggtctcagctgttggaatttgttaagacaattgatccacagttatccaattatgacgaagaaggtgcttggccctacctaattgatgaatttgtggagtacctaaccgagaatggatgcgttcagcgtaacaagtgaaccattcgaggctgcattctgacttggatatcatgatttggtggtacaaacatgattcatgtcgatcaatagaatatttatctttggatgtcggcattgttccagctccccttcacaaagcagatgatgtcgtttggtggaatctacttgcgcaggggtgatttcactggctaggattgcaaactatctatctggtttgtattttgtgctgcacctatctgctacagcatacccaaaatagttattggtttactgctgaatgggcgatgggtctatagttcatgtaggtctaggtatgaggtaatgcgaacttgtgctatcggtattgatcgattgttgccagatggggcacctttctatgaggtaatgcaaacttgtgatatctttcg

SEQ ID NO: 18634 - protein, 247 aa, Triticum aestivum
  peptide (1)..(247): Ceres Seq. ID no. 15226255
  misc_feature (123)..(237): Pfam Name: DUF298 Pfam Description: Domain of unknown function
  misc_feature (1)..(245): NCBI GI NO: 15292985 NR Description: unknown protein [Arabidopsis thaliana]
  misc_feature (1)..(245): NCBI GI NO: 18399737 NR Description: expressed protein [Arabidopsis thaliana]
  misc_feature (1)..(236): NCBI GI NO: 34784818 NR Description: C13orf17 protein [Homo sapiens]
  misc_feature (1)..(236): NCBI GI NO: 34784120 NR Description: Unknown (protein for MGC:66414) [Danio rerio]
  misc_feature (1)..(236): NCBI GI NO: 6166507 NR Description: RP42 [Mus musculus]
  misc_feature (1)..(236): NCBI GI NO: 36030883 NR Description: RP42 homolog
  misc_feature (1)..(236): NCBI GI NO: 18700658 NR Description: leucine zipper protein [Homo sapiens]
  misc_feature (1)..(236): NCBI GI NO: 9896486 NR Description: RP42 protein [Homo sapiens]
  misc_feature (1)..(236): NCBI GI NO: 15826860 NR Description: testis derived transcript 3 [Mus musculus]
  misc_feature (2)..(236): NCBI GI NO: 34857167 NR Description: similar to RP42 homolog [Rattus norvegicus]
MHKLGRGSRDKVQQFMAITGASEKVALQALKASDWHLEGSFDYFYSQPQISVTNSRHLYSRYKERDADMIMVEGTSQLCNDLLVDPQDVVMLVISWHMKAATMCEFTRQEFIDGLQSIGVDSIEKLREKLPSLRAEIKDDNKFREIYNFAFAWAREKGQKSLPLETAIGMWRLLFAERHWPLIDHWCQFLQVRHNKAISRDTWSQLLEFVKTIDPQLSNYDEEGAWPYLIDEFVEYLTENGCVQRNK

SEQ ID NO: 18635 - protein, 232 aa, Triticum aestivum
  peptide (1)..(232): Ceres Seq. ID no. 15226256
  misc_feature (108)..(222): Pfam Name: DUF298 Pfam Description: Domain of unknown function
  misc_feature (1)..(230): NCBI GI NO: 15292985 NR Description: unknown protein [Arabidopsis thaliana]
  misc_feature (1)..(230): NCBI GI NO: 18399737 NR Description: expressed protein [Arabidopsis thaliana]
  misc_feature (1)..(221): NCBI GI NO: 34784818 NR Description: C13orf17 protein [Homo sapiens]
  misc_feature (1)..(221): NCBI GI NO: 34784120 NR Description: Unknown (protein for MGC:66414) [Danio rerio]
  misc_feature (1)..(221): NCBI GI NO: 6166507 NR Description: RP42 [Mus musculus]
  misc_feature (1)..(221): NCBI GI NO: 36030883 NR Description: RP42 homolog
  misc_feature (1)..(221): NCBI GI NO: 18700658 NR Description: leucine zipper protein [Homo sapiens]
  misc_feature (1)..(221): NCBI GI NO: 9896486 NR Description: RP42 protein [Homo sapiens]
  misc_feature (1)..(221): NCBI GI NO: 15826860 NR Description: testis derived transcript 3 [Mus musculus]
  misc_feature (1)..(221): NCBI GI NO: 34857167 NR Description: similar to RP42 homolog [Rattus norvegicus]
MAITGASEKVALQALKASDWHLEGSFDYFYSQPQISVTNSRHLYSRYKERDADMIMVEGTSQLCNDLLVDPQDVVMLVISWHMKAATMCEFTRQEFIDGLQSIGVDSIEKLREKLPSLRAEIKDDNKFREIYNFAFAWAREKGQKSLPLETAIGMWRLLFAERHWPLIDHWCQFLQVRHNKAISRDTWSQLLEFVKTIDPQLSNYDEEGAWPYLIDEFVEYLTENGCVQRNK

SEQ ID NO: 18636 - protein, 179 aa, Triticum aestivum
  peptide (1)..(179): Ceres Seq. ID no. 15226257
  misc_feature (55)..(169): Pfam Name: DUF298 Pfam Description: Domain of unknown function
  misc_feature (1)..(177): NCBI GI NO: 15292985 NR Description: unknown protein [Arabidopsis thaliana]
  misc_feature (1)..(177): NCBI GI NO: 18399737 NR Description: expressed protein [Arabidopsis thaliana]
  misc_feature (1)..(168): NCBI GI NO: 34784818 NR Description: C13orf17 protein [Homo sapiens]
  misc_feature (1)..(168): NCBI GI NO: 34784120 NR Description: Unknown (protein for MGC:66414) [Danio rerio]
  misc_feature (1)..(168): NCBI GI NO: 6166507 NR Description: RP42 [Mus musculus]
  misc_feature (1)..(168): NCBI GI NO: 36030883 NR Description: RP42 homolog
  misc_feature (1)..(168): NCBI GI NO: 18700658 NR Description: leucine zipper protein [Homo sapiens]
  misc_feature (1)..(168): NCBI GI NO: 9896486 NR Description: RP42 protein [Homo sapiens]
  misc_feature (1)..(168): NCBI GI NO: 15826860 NR Description: testis derived transcript 3 [Mus musculus]
  misc_feature (1)..(168): NCBI GI NO: 34857167 NR Description: similar to RP42 homolog [Rattus norvegicus]
MIMVEGTSQLCNDLLVDPQDVVMLVISWHMKAATMCEFTRQEFIDGLQSIGVDSIEKLREKLPSLRAEIKDDNKFREIYNFAFAWAREKGQKSLPLETAIGMWRLLFAERHWPLIDHWCQFLQVRHNKAISRDTWSQLLEFVKTIDPQLSNYDEEGAWPYLIDEFVEYLTENGCVQRNK

SEQ ID NO: 18637 - DNA, 1323 bp, Triticum aestivum
  misc_feature (1)..(1323): Ceres Seq. ID no. 14302291
attcgactccacaccctcggttcacacacagtgatcagctcagctacagcctacagagcacagacccaaccccgggagacaacagagcacggcgaggatgctgctgaacccggcctcggaggcgatggtgctggacagcatcaggcagcacctcatggaggacacggcggctccggcgccggaggcgaggaggcagaggccggcctactgccgcagcgccagcttcgggagcctggtggccgaccagtggagcgagtcgctcccgttccgcgcggacgactccgacgacatggtcgtctacggcgcgctccgcgacgccttctcctgcggctggctccccgacggctccttcgccgccgtcaagccggagcccctcctgccttccccggactcctgctatgtcggcttcctcgagccggagacgcctccggccacgtccccgggcgggagcgaggaggaggccgccgcggcgttcatgggcgaggaggcggccgcggccgtggcgagggggaagcactaccgcggggtgaggcagcggccgtggggcaagttcgcggcggagatccgggacccggccaagaacggcgcccgcgtgtggctcggcacctacgacaccgccgaggacgccgccgtggcctacgaccgcgccgcgtaccgcatgcgcggctcccgcgcgctcctcaacttcccgctccgcatcggctccgagatcgccgccgcgcacgccgcggccgcggccgccggcgacaagcggccgtcgcccgagcccgcgacatcggactcgtcatcctcctcgtcctcctccgggtccccgaaaaggaggaagagaggcgaggccgcggccgcgtccatggccatggcgctggtgccgccgtcctcgcagttgagccggccggcccacgcgtggtaccccgccgtgccggcggagcaggtggccatggcgccgtgcgtgcagcagctggtcagctaggccccgctctccagcccccgggcgcacgatcgtgaaagacaatgcgcaagtgcagtggattcgccagcaagtgcatggacgcgacagcaacaggagcccgcctttcactgttgcacggtgcaaggtggtgatggcaatggagtgcgatacctatcgagcgagcaggcaaagcaaccttggcgacggctccatttggatagatatttggatatttgatggcaatggaagataagctctcggagcaactgggcgctgcaatttggtctggaacgatagttcctcctctggctgctcggtgcaactcgcccaagtgggtcaaagcgaaactgtgctagtatcgggttgtcgtggtt

SEQ ID NO: 18638 - protein, 334 aa, Triticum aestivum
  peptide (1)..(334): Ceres Seq. ID no. 14302292
  misc_feature (137)..(213): Pfam Name: Pfam Description:  Cupin
IRLHTLGSHTVISSATAYRAQTQPRETTEHGEDAAEPGLGGDGAGQHQAAPHGGHGGSGAGGEEAEAGLLPQRQLREPGGRPVERVAPVPRGRLRRHGRLRRAPRRLLLRLAPRRLLRRRQAGAPPAFPGLLLCRLPRAGDASGHVPGRERGGGRRGVHGRGGGRGRGEGEALPRGEAAAVGQVRGGDPGPGQERRPRVARHLRHRRGRRRGLRPRRVPHARLPRAPQLPAPHRLRDRRRARRGRGRRRQAAVARARDIGLVILLVLLRVPEKEEERRGRGRVHGHGAGAAVLAVEPAGPRVVPRRAGGAGGHGAVRAAAGQLGPALQPPGARS

SEQ ID NO: 18639 - protein, 290 aa, Triticum aestivum
  peptide (1)..(290): Ceres Seq. ID no. 14302293
  misc_feature (138)..(203): Pfam Name: Pfam Description:  AP2 domain
  misc_feature (1)..(289): NCBI GI NO: 38346167 NR Description: OSJNBa0079A21.14
  misc_feature (1)..(279): NCBI GI NO: 14140141 NR Description: putative AP2-related transcription factor
  misc_feature (1)..(289): NCBI GI NO: 7528276 NR Description: AP2-related transcription factor
  misc_feature (35)..(248): NCBI GI NO: 8809571 NR Description: ethylene-responsive element binding factor
  misc_feature (42)..(248): NCBI GI NO: 7489113 NR Description: DNA binding protein EREBP-2 - common tobacco
  misc_feature (1)..(256): NCBI GI NO: 21264420 NR Description: Ethylene responsive element binding factor 1
  misc_feature (1)..(256): NCBI GI NO: 25350258 NR Description: ethylene responsive element binding factor 1
  misc_feature (132)..(263): NCBI GI NO: 7489123 NR Description: ethylene-responsive transcription factor ERF1 -common tobacco
  misc_feature (23)..(91): NCBI GI NO: 7489123 NR Description: ethylene-responsive transcription factor ERF1 -common tobacco
  misc_feature (34)..(256): NCBI GI NO: 25350257 NR Description: EREBP-2 protein [imported] - Arabidopsis thaliana
MLLNPASEAMVLDSIRQHLMEDTAAPAPEARRQRPAYCRSASFGSLVADQWSESLPFRADDSDDMVVYGALRDAFSCGWLPDGSFAAVKPEPLLPSPDSCYVGFLEPETPPATSPGGSEEEAAAAFMGEEAAAAVARGKHYRGVRQRPWGKFAAEIRDPAKNGARVWLGTYDTAEDAAVAYDRAAYRMRGSRALLNFPLRIGSEIAAAHAAAAAAGDKRPSPEPATSDSSSSSSSSGSPKRRKRGEAAAASMAMALVPPSSQLSRPAHAWYPAVPAEQVAMAPCVQQLVS

SEQ ID NO: 18640 - protein, 281 aa, Triticum aestivum
  peptide (1)..(281): Ceres Seq. ID no. 14302294
  misc_feature (129)..(194): Pfam Name: Pfam Description:  AP2 domain
  misc_feature (1)..(280): NCBI GI NO: 38346167 NR Description: OSJNBa0079A21.14
  misc_feature (1)..(270): NCBI GI NO: 14140141 NR Description: putative AP2-related transcription factor
  misc_feature (1)..(280): NCBI GI NO: 7528276 NR Description: AP2-related transcription factor
  misc_feature (26)..(239): NCBI GI NO: 8809571 NR Description: ethylene-responsive element binding factor
  misc_feature (33)..(239): NCBI GI NO: 7489113 NR Description: DNA binding protein EREBP-2 - common tobacco
  misc_feature (1)..(247): NCBI GI NO: 21264420 NR Description: Ethylene responsive element binding factor 1
  misc_feature (1)..(247): NCBI GI NO: 25350258 NR Description: ethylene responsive element binding factor 1
  misc_feature (123)..(254): NCBI GI NO: 7489123 NR Description: ethylene-responsive transcription factor ERF1 -common tobacco
  misc_feature (14)..(82): NCBI GI NO: 7489123 NR Description: ethylene-responsive transcription factor ERF1 -common tobacco
  misc_feature (25)..(247): NCBI GI NO: 25350257 NR Description: EREBP-2 protein [imported] - Arabidopsis thaliana
MVLDSIRQHLMEDTAAPAPEARRQRPAYCRSASFGSLVADQWSESLPFRADDSDDMVVYGALRDAFSCGWLPDGSFAAVKPEPLLPSPDSCYVGFLEPETPPATSPGGSEEEAAAAFMGEEAAAAVARGKHYRGVRQRPWGKFAAEIRDPAKNGARVWLGTYDTAEDAAVAYDRAAYRMRGSRALLNFPLRIGSEIAAAHAAAAAAGDKRPSPEPATSDSSSSSSSSGSPKRRKRGEAAAASMAMALVPPSSQLSRPAHAWYPAVPAEQVAMAPCVQQLVS

SEQ ID NO: 18641 - DNA, 1180 bp, Triticum aestivum
  misc_feature (1)..(1180): Ceres Seq. ID no. 12613576
gatcgatcgagtcgattctcgcgcagagcttgagagagatcggaggcgatgggaggcggcagcatggggatccgcgcggccgccagggccgccttcatcggcggctaccgctccgcctcgaacgcccgccgctccgccctgccctcctcctccgccgccgcggccgacacccgccccgtctccacggccaccaccttcgacgactggtacatccccgaccgcgaggtgttcggccccgtgccctcccacgaggaggccatggccgccaccctcgacctcagggacgccttcgagattgccaagattgattcccatggtggccgcctggatatctccaagacacatatctcccatgatggccttgatgatcccacaaaggttgctcaggaaacatttcaggatcatctccattcagaagcatctaagcatgaagagaagcatgacagtttatccgttgcctctggatcctctgcacgtgttattgaagccttcaccatgctacacgagagtcctgaagctcaggatgttgttgcttcgcttgcttctgataagaatgtctgggaagctgtgatgaagaacaagaaacttgtggagttttacaagacaaacctcagcgagtcatccagtgtcactgacgaagctgagcagagcgacgccgagagctcgcagagcagcaatggtgtcgtctcgccggcagatgcattcagtgattacattcagatgatgaaggcgttcgtgtcggagatggtgacgaatctttcgagcataatgcaggacctggtggccacgtcagacgagggccagagcaaggggaggttgaagaccctgatcatcaactccaagaaggatttcacaaatggcccgtcgtccttcgtgctcctggccatcgcgtctattctggtcgttttgctcaagcgtgcatagttctaaataaaacaaaggagctggcagagtggttgttctgagtttagtttcgtttcagctttttgagacagacaggatttgatcttctttttctacttattagttcatcaaatggtcgattctacgcactgtacaggtcgacgttaagtcttttcaagggtttatctggtggctgtgtgttcacctggggatgaacatgttctgcatgatgtttagctgttactgcaactttatatgatggagtttagttttcttt

SEQ ID NO: 18642 - protein, 291 aa, Triticum aestivum
  peptide (1)..(291): Ceres Seq. ID no. 12613577
  misc_feature (1)..(291): NCBI GI NO: 15239670 NR Description: putative protein; protein id: At5g54540
MGGGSMGIRAAARAAFIGGYRSASNARRSALPSSSAAAADTRPVSTATTFDDWYIPDREVFGPVPSHEEAMAATLDLRDAFEIAKIDSHGGRLDISKTHISHDGLDDPTKVAQETFQDHLHSEASKHEEKHDSLSVASGSSARVIEAFTMLHESPEAQDVVASLASDKNVWEAVMKNKKLVEFYKTNLSESSSVTDEAEQSDAESSQSSNGVVSPADAFSDYIQMMKAFVSEMVTNLSSIMQDLVATSDEGQSKGRLKTLIINSKKDFTNGPSSFVLLAIASILVVLLKRA

SEQ ID NO: 18643 - protein, 286 aa, Triticum aestivum
  peptide (1)..(286): Ceres Seq. ID no. 12613578
  misc_feature (1)..(286): NCBI GI NO: 15239670 NR Description: putative protein; protein id: At5g54540
MGIRAAARAAFIGGYRSASNARRSALPSSSAAAADTRPVSTATTFDDWYIPDREVFGPVPSHEEAMAATLDLRDAFEIAKIDSHGGRLDISKTHISHDGLDDPTKVAQETFQDHLHSEASKHEEKHDSLSVASGSSARVIEAFTMLHESPEAQDVVASLASDKNVWEAVMKNKKLVEFYKTNLSESSSVTDEAEQSDAESSQSSNGVVSPADAFSDYIQMMKAFVSEMVTNLSSIMQDLVATSDEGQSKGRLKTLIINSKKDFTNGPSSFVLLAIASILVVLLKRA

SEQ ID NO: 18644 - protein, 221 aa, Triticum aestivum
  peptide (1)..(221): Ceres Seq. ID no. 12613579
  misc_feature (1)..(221): NCBI GI NO: 15239670 NR Description: putative protein; protein id: At5g54540
MAATLDLRDAFEIAKIDSHGGRLDISKTHISHDGLDDPTKVAQETFQDHLHSEASKHEEKHDSLSVASGSSARVIEAFTMLHESPEAQDVVASLASDKNVWEAVMKNKKLVEFYKTNLSESSSVTDEAEQSDAESSQSSNGVVSPADAFSDYIQMMKAFVSEMVTNLSSIMQDLVATSDEGQSKGRLKTLIINSKKDFTNGPSSFVLLAIASILVVLLKRA

SEQ ID NO: 18645 - DNA, 1303 bp, Triticum aestivum
  misc_feature (1)..(1303): Ceres Seq. ID no. 13596000
aacaaaccaaccgccaacacttccattccaggcatcaaccatggcttctcctcggcatctgatgaagctttcggctgctcttctcctcctctgtgttggcgtgtgtgtggctcgcaacagtgacttctccattgtcggctactcggaggaggacctgtcgtccaacgacagactcgtcgagctgtttgagaagtggctggccaagcaccagaaggcgtacgcgagcttcgaggagaagctgcacaagttcgaggtgttcaaggacaacctgaagcacatcgacaagatcaaccgggaagtgaccagctactggctcggcctcaacgagtttgccgacctcaccaacgtcgagttcaaggccgcctacctcggcctcaatgctgctccggctcgtcggggcagcagccgaagcttcaggtacgaggacgtgagtgccagcgacctgcccaagtctgtggactggaggaagaagggcgcggtgacagaggtgaagaaccaggggcagtgcggcagctgctgggccttctcgacggtggcggcagtggaagggatcaacgccatcgtgacaggcaacctgactgcgctgtcggagcaggagctcatcgactgcagcgtcgatggcaacagtggctgcaatggcggcttgatggactacgccttctcctacatcgcgtccagtggcgggctacacaccgaggaggcgtacccctacctcatggaggaaggcagctgcggcgacggtaagaaggccgagtccaaggcggtgacgatcagcggcttcgaggacgtgccggccaatgacgagcaggcgctgatcaaggctctcgcccaccagcccgtctccgtcgccatcgaggcctccggcaggcacttccagttctacagcgggggagttttcgacggtccttgcggcgcgcagctagatcacggcgtggcggcggtcgggtacgggtcggacaaggggaagggccacgactacatcatcgtgaggaactcgtggggtgcggactggggcgagaagggttacatcaggatgaagaggggcaccagcaacggcgagggcctctgcggcatcaacaagatggcctcctacccaaccaaggacaagtgatgttccagcctcaaatcctgcatccagaggattgaagatttgaaccatccttgagagtccttgttcccgatctttgcatttccctgctttttctttcacgtttttccttttctcaatggttcctttcggttaatgcgacgaacatggactgaaataataaaatttatttccaagtttctattgagattgccc

SEQ ID NO: 18646 - protein, 369 aa, Triticum aestivum
  peptide (1)..(369): Ceres Seq. ID no. 13596001
  misc_feature (148)..(366): Pfam Name: Pfam Description:  Papain family cysteine protease
  misc_feature (27)..(368): NCBI GI NO: 14719319 NR Description: putative cysteine proteinase [Oryza sativa]
  misc_feature (15)..(368): NCBI GI NO: 34905996 NR Description: putative cysteine proteinase
  misc_feature (7)..(369): NCBI GI NO: 18418684 NR Description: cysteine protease XCP1 [Arabidopsis thaliana]
  misc_feature (14)..(369): NCBI GI NO: 18394919 NR Description: cysteine proteinase XCP2 [Arabidopsis thaliana]
  misc_feature (30)..(369): NCBI GI NO: 37780041 NR Description: cysteine protease 14 [Trifolium repens]
  misc_feature (30)..(369): NCBI GI NO: 37780039 NR Description: cysteine protease 14 [Trifolium repens]
  misc_feature (22)..(369): NCBI GI NO: 22759715 NR Description: cysteine proteinase [Zinnia elegans]
  misc_feature (22)..(369): NCBI GI NO: 30141025 NR Description: cysteine protease-4 [Helianthus annuus]
  misc_feature (22)..(354): NCBI GI NO: 7435773 NR Description: cysteine proteinase (EC 3
  misc_feature (14)..(328): NCBI GI NO: 8886940 NR Description: F2D10.37 [Arabidopsis thaliana]
TNQPPTLPFQASTMASPRHLMKLSAALLLLCVGVCVARNSDFSIVGYSEEDLSSNDRLVELFEKWLAKHQKAYASFEEKLHKFEVFKDNLKHIDKINREVTSYWLGLNEFADLTNVEFKAAYLGLNAAPARRGSSRSFRYEDVSASDLPKSVDWRKKGAVTEVKNQGQCGSCWAFSTVAAVEGINAIVTGNLTALSEQELIDCSVDGNSGCNGGLMDYAFSYIASSGGLHTEEAYPYLMEEGSCGDGKKAESKAVTISGFEDVPANDEQALIKALAHQPVSVAIEASGRHFQFYSGGVFDGPCGAQLDHGVAAVGYGSDKGKGHDYIIVRNSWGADWGEKGYIRMKRGTSNGEGLCGINKMASYPTKDK

SEQ ID NO: 18647 - protein, 356 aa, Triticum aestivum
  peptide (1)..(356): Ceres Seq. ID no. 13596002
  misc_feature (135)..(353): Pfam Name: Pfam Description:  Papain family cysteine protease
  misc_feature (14)..(355): NCBI GI NO: 14719319 NR Description: putative cysteine proteinase [Oryza sativa]
  misc_feature (2)..(355): NCBI GI NO: 34905996 NR Description: putative cysteine proteinase
  misc_feature (1)..(356): NCBI GI NO: 18418684 NR Description: cysteine protease XCP1 [Arabidopsis thaliana]
  misc_feature (1)..(356): NCBI GI NO: 18394919 NR Description: cysteine proteinase XCP2 [Arabidopsis thaliana]
  misc_feature (17)..(356): NCBI GI NO: 37780041 NR Description: cysteine protease 14 [Trifolium repens]
  misc_feature (17)..(356): NCBI GI NO: 37780039 NR Description: cysteine protease 14 [Trifolium repens]
  misc_feature (9)..(356): NCBI GI NO: 22759715 NR Description: cysteine proteinase [Zinnia elegans]
  misc_feature (9)..(356): NCBI GI NO: 30141025 NR Description: cysteine protease-4 [Helianthus annuus]
  misc_feature (9)..(341): NCBI GI NO: 7435773 NR Description: cysteine proteinase (EC 3
  misc_feature (1)..(315): NCBI GI NO: 8886940 NR Description: F2D10.37 [Arabidopsis thaliana]
MASPRHLMKLSAALLLLCVGVCVARNSDFSIVGYSEEDLSSNDRLVELFEKWLAKHQKAYASFEEKLHKFEVFKDNLKHIDKINREVTSYWLGLNEFADLTNVEFKAAYLGLNAAPARRGSSRSFRYEDVSASDLPKSVDWRKKGAVTEVKNQGQCGSCWAFSTVAAVEGINAIVTGNLTALSEQELIDCSVDGNSGCNGGLMDYAFSYIASSGGLHTEEAYPYLMEEGSCGDGKKAESKAVTISGFEDVPANDEQALIKALAHQPVSVAIEASGRHFQFYSGGVFDGPCGAQLDHGVAAVGYGSDKGKGHDYIIVRNSWGADWGEKGYIRMKRGTSNGEGLCGINKMASYPTKDK

SEQ ID NO: 18648 - protein, 349 aa, Triticum aestivum
  peptide (1)..(349): Ceres Seq. ID no. 13596003
  misc_feature (128)..(346): Pfam Name: Pfam Description:  Papain family cysteine protease
  misc_feature (7)..(348): NCBI GI NO: 14719319 NR Description: putative cysteine proteinase [Oryza sativa]
  misc_feature (1)..(348): NCBI GI NO: 34905996 NR Description: putative cysteine proteinase
  misc_feature (1)..(349): NCBI GI NO: 18418684 NR Description: cysteine protease XCP1 [Arabidopsis thaliana]
  misc_feature (1)..(349): NCBI GI NO: 18394919 NR Description: cysteine proteinase XCP2 [Arabidopsis thaliana]
  misc_feature (10)..(349): NCBI GI NO: 37780041 NR Description: cysteine protease 14 [Trifolium repens]
  misc_feature (10)..(349): NCBI GI NO: 37780039 NR Description: cysteine protease 14 [Trifolium repens]
  misc_feature (2)..(349): NCBI GI NO: 22759715 NR Description: cysteine proteinase [Zinnia elegans]
  misc_feature (2)..(349): NCBI GI NO: 30141025 NR Description: cysteine protease-4 [Helianthus annuus]
  misc_feature (2)..(334): NCBI GI NO: 7435773 NR Description: cysteine proteinase (EC 3
  misc_feature (1)..(308): NCBI GI NO: 8886940 NR Description: F2D10.37 [Arabidopsis thaliana]
MKLSAALLLLCVGVCVARNSDFSIVGYSEEDLSSNDRLVELFEKWLAKHQKAYASFEEKLHKFEVFKDNLKHIDKINREVTSYWLGLNEFADLTNVEFKAAYLGLNAAPARRGSSRSFRYEDVSASDLPKSVDWRKKGAVTEVKNQGQCGSCWAFSTVAAVEGINAIVTGNLTALSEQELIDCSVDGNSGCNGGLMDYAFSYIASSGGLHTEEAYPYLMEEGSCGDGKKAESKAVTISGFEDVPANDEQALIKALAHQPVSVAIEASGRHFQFYSGGVFDGPCGAQLDHGVAAVGYGSDKGKGHDYIIVRNSWGADWGEKGYIRMKRGTSNGEGLCGINKMASYPTKDK

SEQ ID NO: 18649 - DNA, 1532 bp, Triticum aestivum
  misc_feature (1)..(1532): Ceres Seq. ID no. 13654122
aaagaaaggcttggcgaagaggttaacgaatcgatcttctccgagttttttgtcctcgaggaatttagcaccgctcgggattctcaggccatgatgatcggtgtcgcaggcttcagccggcacatcggccagctcttgagtaaaagcaacgggtttattgcggcgtccctgtccgcggcgagctgcgcggacgaggcggagaaggccgagggggcggggtgccgggacgacgcggcggcgctgaggctcaaatggattgccatggcggcgatactggtgtccggcgtgatgggcgtgggcctgtcgctcgtggggcggaagcggcggacggtgcagaccggcagcgctgtcttcgtggccgccaaggctttcgcggccggcgtgatcctggccacggggttcgttcacatgctgcacgacgccgagcacgcgctctccaacccctgcctcccggccgcgccctggcggcggttcccgttccccgggttcgtcgccatgctcgctgctcttgccacgctggtgctcgacgtcctggtcaccaggttctacgagaccaagcaccgtgcggaggtagctcgggtcaaggctgacgccgctgccgcactcgccgccgcgtccacctccgccagcgacgaagacatcaccgtggtcaccgtcgtcgagggtgagcacaaggtcccgctcttgcaagcccactcccattcccacgcgcagtcgcatggtcacgagctggtgcaaccacaaggacgcgagggggaggtgtcagaccacgtgcgctccgtcgtggtatcacagatactggaaatggggattgtgtcgcactcggtgatcattgggctgtcgcttggtgtgtctcggagcccctgcacaatcaggccactggtggcagcgctctcattccaccagttcttcgagggatttgccctcggtgggtgcattgcgcaggctcagtttaagaacctttcggcagttatgatggcgtccttttttgccattacaacaccaactggtatcgccgctggggccggtttgtcctcattttacaacgccaatagccccagggctctagtggtcgaaggcatcctcgactctgtgtcggccggcatactcatatacatggcgctggtggatctaatcgcagccgatttcttgggtgggaagatgacagggtcgccacggcagcaagtgatggcctatgtcgccctgttcctaggtgcgctctccatgtcatcgcttgcagtttgggcctgaaccggtttaatgagatgaaggtagcggatgacgcctacgtcccaacatactgcctgtgatacatgtacataactaatgcatgtgcctgtgttcatatgattgcatacatacatcagataacgtgcccttgtttttgatgggcatgagagaacagcgccggtggaaacgcctgagcattgcctctgtatatactagatgaatccccgtgcgttgctgcgggatattttgtgctaaaatttctaatgtggagagatacgccatgtaaagaaaaatagtgactt

SEQ ID NO: 18650 - protein, 416 aa, Triticum aestivum
  peptide (1)..(416): Ceres Seq. ID no. 13654123
  misc_feature (44)..(416): NCBI GI NO: 30526082 NR Description: putative ZIP-like zinc transporter
  misc_feature (53)..(416): NCBI GI NO: 40888862 NR Description: TPA: putative ZIP-like protein
  misc_feature (266)..(416): NCBI GI NO: 40888856 NR Description: TPA: putative ZIP-like protein
  misc_feature (53)..(186): NCBI GI NO: 40888856 NR Description: TPA: putative ZIP-like protein
  misc_feature (53)..(243): NCBI GI NO: 18406954 NR Description: metal transporter, putative (IRT3)
  misc_feature (221)..(416): NCBI GI NO: 18406954 NR Description: metal transporter, putative (IRT3)
  misc_feature (15)..(416): NCBI GI NO: 30682009 NR Description: metal transporter, putative (ZIP4)
  misc_feature (221)..(416): NCBI GI NO: 21553732 NR Description: putative iron-regulated transporter
  misc_feature (57)..(243): NCBI GI NO: 21553732 NR Description: putative iron-regulated transporter
  misc_feature (234)..(416): NCBI GI NO: 30841912 NR Description: putative zinc transporter OsZIP2 [Oryza sativa]
KERLGEEVNESIFSEFFVLEEFSTARDSQAMMIGVAGFSRHIGQLLSKSNGFIAASLSAASCADEAEKAEGAGCRDDAAALRLKWIAMAAILVSGVMGVGLSLVGRKRRTVQTGSAVFVAAKAFAAGVILATGFVHMLHDAEHALSNPCLPAAPWRRFPFPGFVAMLAALATLVLDVLVTRFYETKHRAEVARVKADAAAALAAASTSASDEDITVVTVVEGEHKVPLLQAHSHSHAQSHGHELVQPQGREGEVSDHVRSVVVSQILEMGIVSHSVIIGLSLGVSRSPCTIRPLVAALSFHQFFEGFALGGCIAQAQFKNLSAVMMASFFAITTPTGIAAGAGLSSFYNANSPRALVVEGILDSVSAGILIYMALVDLIAADFLGGKMTGSPRQQVMAYVALFLGALSMSSLAVWA

SEQ ID NO: 18651 - protein, 386 aa, Triticum aestivum
  peptide (1)..(386): Ceres Seq. ID no. 13654124
  misc_feature (14)..(386): NCBI GI NO: 30526082 NR Description: putative ZIP-like zinc transporter
  misc_feature (23)..(386): NCBI GI NO: 40888862 NR Description: TPA: putative ZIP-like protein
  misc_feature (236)..(386): NCBI GI NO: 40888856 NR Description: TPA: putative ZIP-like protein
  misc_feature (23)..(156): NCBI GI NO: 40888856 NR Description: TPA: putative ZIP-like protein
  misc_feature (23)..(213): NCBI GI NO: 18406954 NR Description: metal transporter, putative (IRT3)
  misc_feature (191)..(386): NCBI GI NO: 18406954 NR Description: metal transporter, putative (IRT3)
  misc_feature (1)..(386): NCBI GI NO: 30682009 NR Description: metal transporter, putative (ZIP4)
  misc_feature (191)..(386): NCBI GI NO: 21553732 NR Description: putative iron-regulated transporter
  misc_feature (27)..(213): NCBI GI NO: 21553732 NR Description: putative iron-regulated transporter
  misc_feature (204)..(386): NCBI GI NO: 30841912 NR Description: putative zinc transporter OsZIP2 [Oryza sativa]
MMIGVAGFSRHIGQLLSKSNGFIAASLSAASCADEAEKAEGAGCRDDAAALRLKWIAMAAILVSGVMGVGLSLVGRKRRTVQTGSAVFVAAKAFAAGVILATGFVHMLHDAEHALSNPCLPAAPWRRFPFPGFVAMLAALATLVLDVLVTRFYETKHRAEVARVKADAAAALAAASTSASDEDITVVTVVEGEHKVPLLQAHSHSHAQSHGHELVQPQGREGEVSDHVRSVVVSQILEMGIVSHSVIIGLSLGVSRSPCTIRPLVAALSFHQFFEGFALGGCIAQAQFKNLSAVMMASFFAITTPTGIAAGAGLSSFYNANSPRALVVEGILDSVSAGILIYMALVDLIAADFLGGKMTGSPRQQVMAYVALFLGALSMSSLAVWA

SEQ ID NO: 18652 - protein, 385 aa, Triticum aestivum
  peptide (1)..(385): Ceres Seq. ID no. 13654125
  misc_feature (13)..(385): NCBI GI NO: 30526082 NR Description: putative ZIP-like zinc transporter
  misc_feature (22)..(385): NCBI GI NO: 40888862 NR Description: TPA: putative ZIP-like protein
  misc_feature (235)..(385): NCBI GI NO: 40888856 NR Description: TPA: putative ZIP-like protein
  misc_feature (22)..(155): NCBI GI NO: 40888856 NR Description: TPA: putative ZIP-like protein
  misc_feature (22)..(212): NCBI GI NO: 18406954 NR Description: metal transporter, putative (IRT3)
  misc_feature (190)..(385): NCBI GI NO: 18406954 NR Description: metal transporter, putative (IRT3)
  misc_feature (1)..(385): NCBI GI NO: 30682009 NR Description: metal transporter, putative (ZIP4)
  misc_feature (190)..(385): NCBI GI NO: 21553732 NR Description: putative iron-regulated transporter
  misc_feature (26)..(212): NCBI GI NO: 21553732 NR Description: putative iron-regulated transporter
  misc_feature (203)..(385): NCBI GI NO: 30841912 NR Description: putative zinc transporter OsZIP2 [Oryza sativa]
MIGVAGFSRHIGQLLSKSNGFIAASLSAASCADEAEKAEGAGCRDDAAALRLKWIAMAAILVSGVMGVGLSLVGRKRRTVQTGSAVFVAAKAFAAGVILATGFVHMLHDAEHALSNPCLPAAPWRRFPFPGFVAMLAALATLVLDVLVTRFYETKHRAEVARVKADAAAALAAASTSASDEDITVVTVVEGEHKVPLLQAHSHSHAQSHGHELVQPQGREGEVSDHVRSVVVSQILEMGIVSHSVIIGLSLGVSRSPCTIRPLVAALSFHQFFEGFALGGCIAQAQFKNLSAVMMASFFAITTPTGIAAGAGLSSFYNANSPRALVVEGILDSVSAGILIYMALVDLIAADFLGGKMTGSPRQQVMAYVALFLGALSMSSLAVWA

SEQ ID NO: 18653 - DNA, 1824 bp, Triticum aestivum
  misc_feature (1)..(1824): Ceres Seq. ID no. 12613725
atcggagcctgctcgcccgcgcacactcggaagacgacgcagacgccgccatgggggacgccgtcgctggcgccgtcgactaccgcggccggcccgcctcccgcgccgccaccggcggctggaagtcctcggtgttcgtcatggcaatggagatcgccgagcggttcgcgtacaagggcgtggcggcgaacctcatcacgtacctcacggggccgctgggccagcccatggcgcgcgcggcggcgtccatcgacgcgtggaagggcgtctcccagatgctgccgctgccggtggcctgcgtcgccgacgcctggctcggccgctaccgggccatcgtcctcgcctccatcctcttcgtcgtgagcatgggcacgctgtcgctgtcgtcggcgttccacatcttccgctccggcggccacgtggccgtcttctacgtcgcgctctacctggtggcgctgggcgagggcgcgcacaagccctgcgcgcaggcgttcgcggccgaccagttcgacgagaaggaccccaaggagaacgtggcaaggagctccttcttcaactggtggtacttcggcatgtgcgccggcaccgccgtcaccaccatggtctccagctacgtccaggacaacgtcggctggggcctcggcttcggtatcccctgcatcgtcatcctcgtctccctcgccgtcttcctcattggcaccccctcctaccgctactacaccaccaaggagcccagccccgtcgcccgcgtcggcaaggcgctcctggtgctgatcaagagctggagatcgaagcaccgcaccaatccggcgagcggcaaggtggaggcccataagaactccgacgaggacctcgtggaggaggtgagtagcgtcttccgcctgctgcccatctgggcctcctgcataatctacgccatcatcttctcccagacctccaccttcttcaccaagcaggcggccacgctggaccgccggatcggccccaacttcaaggtgccgccggcggcgctgcagaccttcatcagcgtcagcatcgtggccttcatcccggtctacgaccgtctcttcgtgccgctcgcgcgccgctacacggggcggcccacgggcatcaccatgctgcagagggtcggcgccggcctctccctctccctcgtcgccgtcgtgctctcggcgctcgtggagatgaagcggctcgccgtcgccagggacgccggcctgctggacgcccccaaggcttctcaccttcccatgacgctctggtggatggtgccgcagtacgtcctcatcggcgtctccgacgtgttcgccatgatcggcctccaggagttcttctacgaccaggtccccgacgccgtgcgcagcctcggcctcgcgctcttcctcagcatcttcggcgtcggccacctcctcagcagcttcctcatctccgtcatcgacagggccacggccaggcgcggcgccagctggttctccaacaacctcaaccgcgcgcacctcgactacttctactggctgctcgccgggctctgcgtcgtcgagctcgtcgccttcttcttcttctcgcgagcctatgtctacaagaagaagagcgacgatggcgattacaggggaggtgatgctgatgctacattggtgtaacttattaattcgggttagtactacgccgtgcgaaattttcaaaacaagtacagtacaaaattttcagattgtttgttatagagtgcgctcgcggtagattgtcataaattttggggtttaaaaacacactcaaaacggatcttttcttaactgaacctgaatgaatcattcgacttttctttgc

SEQ ID NO: 18654 - protein, 545 aa, Triticum aestivum
  peptide (1)..(545): Ceres Seq. ID no. 12613726
  misc_feature (108)..(464): Pfam Name: Pfam Description:  POT family
  misc_feature (14)..(545): NCBI GI NO: 34908690 NR Description: P0039A07.26
  misc_feature (136)..(529): NCBI GI NO: 34908688 NR Description: P0039A07.25
  misc_feature (20)..(131): NCBI GI NO: 34908688 NR Description: P0039A07.25
  misc_feature (14)..(261): NCBI GI NO: 30687920 NR Description: oligopeptide transporter -related
  misc_feature (283)..(528): NCBI GI NO: 30687920 NR Description: oligopeptide transporter -related
  misc_feature (7)..(275): NCBI GI NO: 15219905 NR Description: peptide transporter, putative
  misc_feature (269)..(528): NCBI GI NO: 15219905 NR Description: peptide transporter, putative
  misc_feature (268)..(528): NCBI GI NO: 18086410 NR Description: At1g72120/F28P5_2 [Arabidopsis thaliana]
  misc_feature (21)..(262): NCBI GI NO: 18086410 NR Description: At1g72120/F28P5_2 [Arabidopsis thaliana]
  misc_feature (7)..(275): NCBI GI NO: 28416707 NR Description: At1g22550 [Arabidopsis thaliana]
RSLLARAHSEDDADAAMGDAVAGAVDYRGRPASRAATGGWKSSVFVMAMEIAERFAYKGVAANLITYLTGPLGQPMARAAASIDAWKGVSQMLPLPVACVADAWLGRYRAIVLASILFVVSMGTLSLSSAFHIFRSGGHVAVFYVALYLVALGEGAHKPCAQAFAADQFDEKDPKENVARSSFFNWWYFGMCAGTAVTTMVSSYVQDNVGWGLGFGIPCIVILVSLAVFLIGTPSYRYYTTKEPSPVARVGKALLVLIKSWRSKHRTNPASGKVEAHKNSDEDLVEEVSSVFRLLPIWASCIIYAIIFSQTSTFFTKQAATLDRRIGPNFKVPPAALQTFISVSIVAFIPVYDRLFVPLARRYTGRPTGITMLQRVGAGLSLSLVAVVLSALVEMKRLAVARDAGLLDAPKASHLPMTLWWMVPQYVLIGVSDVFAMIGLQEFFYDQVPDAVRSLGLALFLSIFGVGHLLSSFLISVIDRATARRGASWFSNNLNRAHLDYFYWLLAGLCVVELVAFFFFSRAYVYKKKSDDGDYRGGDADATLV

SEQ ID NO: 18655 - protein, 529 aa, Triticum aestivum
  peptide (1)..(529): Ceres Seq. ID no. 12613727
  misc_feature (92)..(448): Pfam Name: Pfam Description:  POT family
  misc_feature (1)..(529): NCBI GI NO: 34908690 NR Description: P0039A07.26
  misc_feature (120)..(513): NCBI GI NO: 34908688 NR Description: P0039A07.25
  misc_feature (4)..(115): NCBI GI NO: 34908688 NR Description: P0039A07.25
  misc_feature (1)..(245): NCBI GI NO: 30687920 NR Description: oligopeptide transporter -related
  misc_feature (267)..(512): NCBI GI NO: 30687920 NR Description: oligopeptide transporter -related
  misc_feature (1)..(259): NCBI GI NO: 15219905 NR Description: peptide transporter, putative
  misc_feature (253)..(512): NCBI GI NO: 15219905 NR Description: peptide transporter, putative
  misc_feature (252)..(512): NCBI GI NO: 18086410 NR Description: At1g72120/F28P5_2 [Arabidopsis thaliana]
  misc_feature (5)..(246): NCBI GI NO: 18086410 NR Description: At1g72120/F28P5_2 [Arabidopsis thaliana]
  misc_feature (1)..(259): NCBI GI NO: 28416707 NR Description: At1g22550 [Arabidopsis thaliana]
MGDAVAGAVDYRGRPASRAATGGWKSSVFVMAMEIAERFAYKGVAANLITYLTGPLGQPMARAAASIDAWKGVSQMLPLPVACVADAWLGRYRAIVLASILFVVSMGTLSLSSAFHIFRSGGHVAVFYVALYLVALGEGAHKPCAQAFAADQFDEKDPKENVARSSFFNWWYFGMCAGTAVTTMVSSYVQDNVGWGLGFGIPCIVILVSLAVFLIGTPSYRYYTTKEPSPVARVGKALLVLIKSWRSKHRTNPASGKVEAHKNSDEDLVEEVSSVFRLLPIWASCIIYAIIFSQTSTFFTKQAATLDRRIGPNFKVPPAALQTFISVSIVAFIPVYDRLFVPLARRYTGRPTGITMLQRVGAGLSLSLVAVVLSALVEMKRLAVARDAGLLDAPKASHLPMTLWWMVPQYVLIGVSDVFAMIGLQEFFYDQVPDAVRSLGLALFLSIFGVGHLLSSFLISVIDRATARRGASWFSNNLNRAHLDYFYWLLAGLCVVELVAFFFFSRAYVYKKKSDDGDYRGGDADATLV

SEQ ID NO: 18656 - protein, 499 aa, Triticum aestivum
  peptide (1)..(499): Ceres Seq. ID no. 12613728
  misc_feature (62)..(418): Pfam Name: Pfam Description:  POT family
  misc_feature (1)..(499): NCBI GI NO: 34908690 NR Description: P0039A07.26
  misc_feature (90)..(483): NCBI GI NO: 34908688 NR Description: P0039A07.25
  misc_feature (1)..(85): NCBI GI NO: 34908688 NR Description: P0039A07.25
  misc_feature (1)..(215): NCBI GI NO: 30687920 NR Description: oligopeptide transporter -related
  misc_feature (237)..(482): NCBI GI NO: 30687920 NR Description: oligopeptide transporter -related
  misc_feature (1)..(229): NCBI GI NO: 15219905 NR Description: peptide transporter, putative
  misc_feature (223)..(482): NCBI GI NO: 15219905 NR Description: peptide transporter, putative
  misc_feature (222)..(482): NCBI GI NO: 18086410 NR Description: At1g72120/F28P5_2 [Arabidopsis thaliana]
  misc_feature (1)..(216): NCBI GI NO: 18086410 NR Description: At1g72120/F28P5_2 [Arabidopsis thaliana]
  misc_feature (1)..(229): NCBI GI NO: 28416707 NR Description: At1g22550 [Arabidopsis thaliana]
MAMEIAERFAYKGVAANLITYLTGPLGQPMARAAASIDAWKGVSQMLPLPVACVADAWLGRYRAIVLASILFVVSMGTLSLSSAFHIFRSGGHVAVFYVALYLVALGEGAHKPCAQAFAADQFDEKDPKENVARSSFFNWWYFGMCAGTAVTTMVSSYVQDNVGWGLGFGIPCIVILVSLAVFLIGTPSYRYYTTKEPSPVARVGKALLVLIKSWRSKHRTNPASGKVEAHKNSDEDLVEEVSSVFRLLPIWASCIIYAIIFSQTSTFFTKQAATLDRRIGPNFKVPPAALQTFISVSIVAFIPVYDRLFVPLARRYTGRPTGITMLQRVGAGLSLSLVAVVLSALVEMKRLAVARDAGLLDAPKASHLPMTLWWMVPQYVLIGVSDVFAMIGLQEFFYDQVPDAVRSLGLALFLSIFGVGHLLSSFLISVIDRATARRGASWFSNNLNRAHLDYFYWLLAGLCVVELVAFFFFSRAYVYKKKSDDGDYRGGDADATLV

SEQ ID NO: 18657 - DNA, 734 bp, Triticum aestivum
  misc_feature (1)..(734): Ceres Seq. ID no. 13595953
  misc_feature (673)..(673): n is a, c, t, g, unknown, or other
  misc_feature (670)..(670): n is a, c, t, g, unknown, or other
  misc_feature (672)..(672): n is a, c, t, g, unknown, or other
  misc_feature (681)..(681): n is a, c, t, g, unknown, or other
  misc_feature (671)..(671): n is a, c, t, g, unknown, or other
tctattcactccgtcgctcggcgccctagagcaagaacatggcgatcgcgatctcgcaggaggccttcgatgacatggtccgggagaacatggaggacctcggaatggaccccgacgaggccctcgccgacgccgtcgacgccctcaccctccagggcgccaacctctccgggatcatcaggcgcgtgcctggggacgccgtggcggaggaggtgaacccggtgatgcgggtgctggacgaactgaaggcctctgccagtggtaggtcgggggaggatcttgacaggctggtctctttgctcgacgagttgctcgagctgtgctccggcgagggggcggagaatgcggccgtggcggcacggaacggtggcgtggaggcgctcgtcgccctgtgcgcttcggctggggttatgcaggaggggctgcttgcttcgggcttgaaggcgctgagctccctgatccgtgatgttgggagcactgaaaagttcaggcaaagccaagggcccaaaattgtcatggatatcttgaaaggagccctggaaaattcagatatactcgatggtggttttagtgtcatggcagcggcatctgctggcaatgaagttgtgaaagacgcctttatggacttgaaggtcgatgaactcattctggaggttatgaggaacaaatnnnntagtaaantgcaaagcgtgtatgatgccatacgtgttctgttgacacccgatgataaccga

SEQ ID NO: 18658 - protein, 232 aa, Triticum aestivum
  peptide (1)..(232): Ceres Seq. ID no. 13595954
  misc_feature (5)..(231): NCBI GI NO: 18418335 NR Description: expressed protein [Arabidopsis thaliana]
  misc_feature (40)..(231): NCBI GI NO: 7485612 NR Description: hypothetical protein F17I5
  misc_feature (5)..(231): NCBI GI NO: 12846520 NR Description: unnamed protein product [Mus musculus]
  misc_feature (5)..(231): NCBI GI NO: 34877647 NR Description: similar to hypothetical gene MGC19595
  misc_feature (5)..(231): NCBI GI NO: 26340074 NR Description: unnamed protein product [Mus musculus]
  misc_feature (5)..(231): NCBI GI NO: 29789345 NR Description: arginine/serine-rich 14 splicing factor
  misc_feature (5)..(231): NCBI GI NO: 26348633 NR Description: unnamed protein product [Mus musculus]
  misc_feature (1)..(231): NCBI GI NO: 4106984 NR Description: R30923_1 [Homo sapiens]
  misc_feature (5)..(231): NCBI GI NO: 15529984 NR Description: hypothetical gene MGC19595 [Homo sapiens]
  misc_feature (1)..(231): NCBI GI NO: 19922518 NR Description: CG5721-PA [Drosophila melanogaster]
  misc_feature (211)..(211): Xaa is any aa, unknown or other
  misc_feature (212)..(212): Xaa is any aa, unknown or other
  misc_feature (215)..(215): Xaa is any aa, unknown or other
MAIAISQEAFDDMVRENMEDLGMDPDEALADAVDALTLQGANLSGIIRRVPGDAVAEEVNPVMRVLDELKASASGRSGEDLDRLVSLLDELLELCSGEGAENAAVAARNGGVEALVALCASAGVMQEGLLASGLKALSSLIRDVGSTEKFRQSQGPKIVMDILKGALENSDILDGGFSVMAAASAGNEVVKDAFMDLKVDELILEVMRNKXXSKXQSVYDAIRVLLTPDDNR

SEQ ID NO: 18659 - protein, 220 aa, Triticum aestivum
  peptide (1)..(220): Ceres Seq. ID no. 13595955
  misc_feature (1)..(219): NCBI GI NO: 18418335 NR Description: expressed protein [Arabidopsis thaliana]
  misc_feature (28)..(219): NCBI GI NO: 7485612 NR Description: hypothetical protein F17I5
  misc_feature (1)..(219): NCBI GI NO: 12846520 NR Description: unnamed protein product [Mus musculus]
  misc_feature (1)..(219): NCBI GI NO: 34877647 NR Description: similar to hypothetical gene MGC19595
  misc_feature (1)..(219): NCBI GI NO: 26340074 NR Description: unnamed protein product [Mus musculus]
  misc_feature (1)..(219): NCBI GI NO: 29789345 NR Description: arginine/serine-rich 14 splicing factor
  misc_feature (1)..(219): NCBI GI NO: 26348633 NR Description: unnamed protein product [Mus musculus]
  misc_feature (1)..(219): NCBI GI NO: 4106984 NR Description: R30923_1 [Homo sapiens]
  misc_feature (1)..(219): NCBI GI NO: 15529984 NR Description: hypothetical gene MGC19595 [Homo sapiens]
  misc_feature (1)..(219): NCBI GI NO: 19922518 NR Description: CG5721-PA [Drosophila melanogaster]
  misc_feature (199)..(199): Xaa is any aa, unknown or other
  misc_feature (200)..(200): Xaa is any aa, unknown or other
  misc_feature (203)..(203): Xaa is any aa, unknown or other
MVRENMEDLGMDPDEALADAVDALTLQGANLSGIIRRVPGDAVAEEVNPVMRVLDELKASASGRSGEDLDRLVSLLDELLELCSGEGAENAAVAARNGGVEALVALCASAGVMQEGLLASGLKALSSLIRDVGSTEKFRQSQGPKIVMDILKGALENSDILDGGFSVMAAASAGNEVVKDAFMDLKVDELILEVMRNKXXSKXQSVYDAIRVLLTPDDNR

SEQ ID NO: 18660 - protein, 215 aa, Triticum aestivum
  peptide (1)..(215): Ceres Seq. ID no. 13595956
  misc_feature (1)..(214): NCBI GI NO: 18418335 NR Description: expressed protein [Arabidopsis thaliana]
  misc_feature (23)..(214): NCBI GI NO: 7485612 NR Description: hypothetical protein F17I5
  misc_feature (1)..(214): NCBI GI NO: 12846520 NR Description: unnamed protein product [Mus musculus]
  misc_feature (1)..(214): NCBI GI NO: 34877647 NR Description: similar to hypothetical gene MGC19595
  misc_feature (1)..(214): NCBI GI NO: 26340074 NR Description: unnamed protein product [Mus musculus]
  misc_feature (1)..(214): NCBI GI NO: 29789345 NR Description: arginine/serine-rich 14 splicing factor
  misc_feature (1)..(214): NCBI GI NO: 26348633 NR Description: unnamed protein product [Mus musculus]
  misc_feature (1)..(214): NCBI GI NO: 4106984 NR Description: R30923_1 [Homo sapiens]
  misc_feature (1)..(214): NCBI GI NO: 15529984 NR Description: hypothetical gene MGC19595 [Homo sapiens]
  misc_feature (1)..(214): NCBI GI NO: 19922518 NR Description: CG5721-PA [Drosophila melanogaster]
  misc_feature (194)..(194): Xaa is any aa, unknown or other
  misc_feature (195)..(195): Xaa is any aa, unknown or other
  misc_feature (198)..(198): Xaa is any aa, unknown or other
MEDLGMDPDEALADAVDALTLQGANLSGIIRRVPGDAVAEEVNPVMRVLDELKASASGRSGEDLDRLVSLLDELLELCSGEGAENAAVAARNGGVEALVALCASAGVMQEGLLASGLKALSSLIRDVGSTEKFRQSQGPKIVMDILKGALENSDILDGGFSVMAAASAGNEVVKDAFMDLKVDELILEVMRNKXXSKXQSVYDAIRVLLTPDDNR

SEQ ID NO: 18661 - DNA, 1246 bp, Triticum aestivum
  misc_feature (1)..(1246): Ceres Seq. ID no. 13596350
agaacatcctaatcgaaaaacgagaagccacagggaggcgaaccgaaagcaaaaccgcaggactagcaggagagacagagatcccccgaaccctaaccctaccagcacctcccgtcgccggttgagatggcgatggacgcggagcggaggcaggcggagctgatcgagcagttctcggcgcaggcggcggcgctctcctcggctcctcagctggcggcgctcgtgctcgaggccacctcccacccggcgctctttgccttctccgagctcctcacccttccagccctctccaagctaacgggcacgcagtacgcctcgtcgctggacctgctccgcctcttcgcctacggcaccctcaaggactacaagagtaattctagcgccctccctgcattgttgcctgatcaagcccggaagctgaagcaactcagcgtgctaactttggctgagtcaaccaaggtacttccatatgatcagctcatgcaagagctagacgtttccaatgtgagagaacttgaagatttcctcatcaacgagtgcatgtactcaggtattgtcagaggcaagttggaccaactgcggcggtgctttgaagtacaatttgcagctggaagggacctcacacctgatcagctaaccaacatgattgagaccttgtctgactggttgggaacatcagataatttattacaccacattcaggagaaaatcaagtgggctgatacaacaagtgaattgaacaagaagcaccagaaagaatttgaagacagagtggaagaagccaagaagtcagtcaaggcagacaatgacttacgggggcatgacgactttctctctgaatctggaggaataatggattttgaggaggaccgcatccgaccaaaaaggaggcgacaaccaatggcgtagtttgactgaagtatcacacctatggtccctgctcgcagaagtgccgatgctgttcttgagacattttgtcaccggagtttaggagcatcaattagggtgcttcccatgaagcgagtctctgttgagaaaacgcttgtttttggtatgagatgttacaaagagatgatttactgccgtatttatttagtagcacgaagggcatatgggtgacttcgcactgtaaagattatggttctgaaaagtttggtgacctaaggtgttcgccaaaaaaaaaaaaaaaaaagcttatcgataccgtcgactgtttaaacacaataaagtgggaactggagggggg

SEQ ID NO: 18662 - protein, 260 aa, Triticum aestivum
  peptide (1)..(260): Ceres Seq. ID no. 13596351
  misc_feature (66)..(159): Pfam Name: Pfam Description:  PCI domain
  misc_feature (3)..(259): NCBI GI NO: 18378920 NR Description: COP9 complex subunit, FUS5 [Arabidopsis thaliana]
  misc_feature (3)..(223): NCBI GI NO: 30678240 NR Description: COP9 complex subunit, FUS5 [Arabidopsis thaliana]
  misc_feature (1)..(260): NCBI GI NO: 37589772 NR Description: Unknown (protein for IMAGE:4786730) [Danio rerio]
  misc_feature (6)..(225): NCBI GI NO: 12232385 NR Description: COP9 constitutive photomorphogenic homolog subunit7B
  misc_feature (6)..(225): NCBI GI NO: 15215085 NR Description: Cops7b protein [Mus musculus]
  misc_feature (6)..(225): NCBI GI NO: 34877558 NR Description: similar to Cops7b protein [Rattus norvegicus]
  misc_feature (6)..(225): NCBI GI NO: 27764886 NR Description: COP9
  misc_feature (6)..(225): NCBI GI NO: 3309176 NR Description: COP9 complex subunit 7b [Mus musculus]
  misc_feature (14)..(224): NCBI GI NO: 34858454 NR Description: similar to COP9 complex subunit 7a; COP9
  misc_feature (14)..(224): NCBI GI NO: 7242142 NR Description: COP9
MAMDAERRQAELIEQFSAQAAALSSAPQLAALVLEATSHPALFAFSELLTLPALSKLTGTQYASSLDLLRLFAYGTLKDYKSNSSALPALLPDQARKLKQLSVLTLAESTKVLPYDQLMQELDVSNVRELEDFLINECMYSGIVRGKLDQLRRCFEVQFAAGRDLTPDQLTNMIETLSDWLGTSDNLLHHIQEKIKWADTTSELNKKHQKEFEDRVEEAKKSVKADNDLRGHDDFLSESGGIMDFEEDRIRPKRRRQPMA

SEQ ID NO: 18663 - protein, 258 aa, Triticum aestivum
  peptide (1)..(258): Ceres Seq. ID no. 13596352
  misc_feature (64)..(157): Pfam Name: Pfam Description:  PCI domain
  misc_feature (1)..(257): NCBI GI NO: 18378920 NR Description: COP9 complex subunit, FUS5 [Arabidopsis thaliana]
  misc_feature (1)..(221): NCBI GI NO: 30678240 NR Description: COP9 complex subunit, FUS5 [Arabidopsis thaliana]
  misc_feature (1)..(258): NCBI GI NO: 37589772 NR Description: Unknown (protein for IMAGE:4786730) [Danio rerio]
  misc_feature (4)..(223): NCBI GI NO: 12232385 NR Description: COP9 constitutive photomorphogenic homolog subunit7B
  misc_feature (4)..(223): NCBI GI NO: 15215085 NR Description: Cops7b protein [Mus musculus]
  misc_feature (4)..(223): NCBI GI NO: 34877558 NR Description: similar to Cops7b protein [Rattus norvegicus]
  misc_feature (4)..(223): NCBI GI NO: 27764886 NR Description: COP9
  misc_feature (4)..(223): NCBI GI NO: 3309176 NR Description: COP9 complex subunit 7b [Mus musculus]
  misc_feature (12)..(222): NCBI GI NO: 34858454 NR Description: similar to COP9 complex subunit 7a; COP9
  misc_feature (12)..(222): NCBI GI NO: 7242142 NR Description: COP9
MDAERRQAELIEQFSAQAAALSSAPQLAALVLEATSHPALFAFSELLTLPALSKLTGTQYASSLDLLRLFAYGTLKDYKSNSSALPALLPDQARKLKQLSVLTLAESTKVLPYDQLMQELDVSNVRELEDFLINECMYSGIVRGKLDQLRRCFEVQFAAGRDLTPDQLTNMIETLSDWLGTSDNLLHHIQEKIKWADTTSELNKKHQKEFEDRVEEAKKSVKADNDLRGHDDFLSESGGIMDFEEDRIRPKRRRQPMA

SEQ ID NO: 18664 - protein, 142 aa, Triticum aestivum
  peptide (1)..(142): Ceres Seq. ID no. 13596353
  misc_feature (1)..(141): NCBI GI NO: 18378920 NR Description: COP9 complex subunit, FUS5 [Arabidopsis thaliana]
  misc_feature (1)..(105): NCBI GI NO: 30678240 NR Description: COP9 complex subunit, FUS5 [Arabidopsis thaliana]
  misc_feature (1)..(142): NCBI GI NO: 37589772 NR Description: Unknown (protein for IMAGE:4786730) [Danio rerio]
  misc_feature (1)..(107): NCBI GI NO: 12232385 NR Description: COP9 constitutive photomorphogenic homolog subunit7B
  misc_feature (1)..(107): NCBI GI NO: 15215085 NR Description: Cops7b protein [Mus musculus]
  misc_feature (1)..(107): NCBI GI NO: 34877558 NR Description: similar to Cops7b protein [Rattus norvegicus]
  misc_feature (1)..(107): NCBI GI NO: 27764886 NR Description: COP9
  misc_feature (1)..(107): NCBI GI NO: 3309176 NR Description: COP9 complex subunit 7b [Mus musculus]
  misc_feature (1)..(106): NCBI GI NO: 34858454 NR Description: similar to COP9 complex subunit 7a; COP9
  misc_feature (1)..(106): NCBI GI NO: 7242142 NR Description: COP9
MQELDVSNVRELEDFLINECMYSGIVRGKLDQLRRCFEVQFAAGRDLTPDQLTNMIETLSDWLGTSDNLLHHIQEKIKWADTTSELNKKHQKEFEDRVEEAKKSVKADNDLRGHDDFLSESGGIMDFEEDRIRPKRRRQPMA

SEQ ID NO: 18665 - DNA, 1591 bp, Triticum aestivum
  misc_feature (1)..(1591): Ceres Seq. ID no. 13590671
ccttctcttgttggcgtcgcctccatccggctcggcttcttccacccgtacccgtagattgatttccatccgggtcccttccgttccacggcaagtatccgtcgcacgattcaggtcccccccctcgccgtcgtccatggcgctgcagtacgtggaggcgcagcggcaggcgcggccggacctcgccgactggtacgccgacctcgccgacctctaccagcgcaagctctggcaccagctcaccctcaagctcgaccaattcctccagatcccggccgcacagactggcgacacgctcatacagctctacaacaacttcatctccgatttcgaaacaaagatcaatttgctcaaacttgcccagtttgccgtcatagcctcgcgccaatatcccgacaaggatgccgccatcgccttcctcgaggggataatcgccaagcttcgcgaaaccagggagctgcggatcaatgagcctatccttcatgtcaagatgcagattgcggcaattcacctcgacaaagggaaccacaaggagtgcaagaacctgctggaggaagggaagaccaccctggatggcatgactgatgtggatcctacggtccacgctagcttctactggatatcgtctcagtaccataagtcgctccaagagtttgctgagttctataagaacgcgcttctctatctggcctacacaaccgtagggtctctctcagggtcattcaagctggacttggcatttgacctttcccttgcagccttgctgggggacaacatctacaacttcggggaattgttagctcaccctattatcaatagtcttattgggaccaaggtggagtgggtctatcacatgttacaagcgttcaacaccggcaacctagctctctaccaagagctttgtggggttcacaatgctgctcttagtgcacagcctgcattggtgcagaatgaacagaaactgcttgagaagatcaatattctgtgtctgatggagataatcttcagccggccatcagaagatagaactatcccattaagtgttattgccaagcagactaagctttcaaccagcgaagtggaatgtcttcttatgaagagcctctcggttcatctcatagaaggaatcatcgatgaagtcgacagcacggttcatgtttcgtgggtccagcctagagtacttggcatcccacaggtgaaggcgttgcgtgagcgcctggactcgtgggtcggcaaagtgcataccacactgttgtccatcgaggcagagacccccgatctcgtggcggcttagcttgttggccaaaaatgattctgaataggctttggttgtcagcaaggcggcggtgtaaaacgagagaccatctggctgtgctgcgcgtgctagctgctcttttcttgataacgaaaacttgttgccttgggtgtcctattggtctggacttgtaacttccttctatcatcacggatcgaaacagagaaatcataccggcagagggtgtcactagttttttcctgttgaactttataatctgtaatccagcggtttgacattttttcttcttccattgtgctatggacatggactcgc

SEQ ID NO: 18666 - protein, 430 aa, Triticum aestivum
  peptide (1)..(430): Ceres Seq. ID no. 13590672
  misc_feature (280)..(388): Pfam Name: Pfam Description:  PCI domain
  misc_feature (46)..(430): NCBI GI NO: 34914614 NR Description: putative 26S proteasome subunit
  misc_feature (47)..(430): NCBI GI NO: 30684612 NR Description: 26S proteasome regulatory subunit (RPN9) -related
  misc_feature (47)..(430): NCBI GI NO: 22327608 NR Description: 26S proteasome regulatory subunit (RPN9), putative
  misc_feature (150)..(430): NCBI GI NO: 17298163 NR Description: 26S proteasome regulatory particle non-ATPase subunit9b
  misc_feature (47)..(369): NCBI GI NO: 9758666 NR Description: 26S proteasome subunit-like protein
  misc_feature (52)..(428): NCBI GI NO: 29612578 NR Description: Similar to proteasome
  misc_feature (48)..(428): NCBI GI NO: 28872728 NR Description: proteasome 26S non-ATPase subunit 13 isoform 1
  misc_feature (48)..(428): NCBI GI NO: 32880133 NR Description: proteasome
  misc_feature (48)..(428): NCBI GI NO: 3746882 NR Description: 26S proteasome subunit 11 [Homo sapiens]
  misc_feature (52)..(428): NCBI GI NO: 3618343 NR Description: 26S proteasome subunit p40.5 [Homo sapiens]
LLLLASPPSGSASSTRTRRLISIRVPSVPRQVSVARFRSPPSPSSMALQYVEAQRQARPDLADWYADLADLYQRKLWHQLTLKLDQFLQIPAAQTGDTLIQLYNNFISDFETKINLLKLAQFAVIASRQYPDKDAAIAFLEGIIAKLRETRELRINEPILHVKMQIAAIHLDKGNHKECKNLLEEGKTTLDGMTDVDPTVHASFYWISSQYHKSLQEFAEFYKNALLYLAYTTVGSLSGSFKLDLAFDLSLAALLGDNIYNFGELLAHPIINSLIGTKVEWVYHMLQAFNTGNLALYQELCGVHNAALSAQPALVQNEQKLLEKINILCLMEIIFSRPSEDRTIPLSVIAKQTKLSTSEVECLLMKSLSVHLIEGIIDEVDSTVHVSWVQPRVLGIPQVKALRERLDSWVGKVHTTLLSIEAETPDLVAA

SEQ ID NO: 18667 - protein, 385 aa, Triticum aestivum
  peptide (1)..(385): Ceres Seq. ID no. 13590673
  misc_feature (235)..(343): Pfam Name: Pfam Description:  PCI domain
  misc_feature (1)..(385): NCBI GI NO: 34914614 NR Description: putative 26S proteasome subunit
  misc_feature (2)..(385): NCBI GI NO: 30684612 NR Description: 26S proteasome regulatory subunit (RPN9) -related
  misc_feature (2)..(385): NCBI GI NO: 22327608 NR Description: 26S proteasome regulatory subunit (RPN9), putative
  misc_feature (105)..(385): NCBI GI NO: 17298163 NR Description: 26S proteasome regulatory particle non-ATPase subunit9b
  misc_feature (2)..(324): NCBI GI NO: 9758666 NR Description: 26S proteasome subunit-like protein
  misc_feature (7)..(383): NCBI GI NO: 29612578 NR Description: Similar to proteasome
  misc_feature (3)..(383): NCBI GI NO: 28872728 NR Description: proteasome 26S non-ATPase subunit 13 isoform 1
  misc_feature (3)..(383): NCBI GI NO: 32880133 NR Description: proteasome
  misc_feature (3)..(383): NCBI GI NO: 3746882 NR Description: 26S proteasome subunit 11 [Homo sapiens]
  misc_feature (7)..(383): NCBI GI NO: 3618343 NR Description: 26S proteasome subunit p40.5 [Homo sapiens]
MALQYVEAQRQARPDLADWYADLADLYQRKLWHQLTLKLDQFLQIPAAQTGDTLIQLYNNFISDFETKINLLKLAQFAVIASRQYPDKDAAIAFLEGIIAKLRETRELRINEPILHVKMQIAAIHLDKGNHKECKNLLEEGKTTLDGMTDVDPTVHASFYWISSQYHKSLQEFAEFYKNALLYLAYTTVGSLSGSFKLDLAFDLSLAALLGDNIYNFGELLAHPIINSLIGTKVEWVYHMLQAFNTGNLALYQELCGVHNAALSAQPALVQNEQKLLEKINILCLMEIIFSRPSEDRTIPLSVIAKQTKLSTSEVECLLMKSLSVHLIEGIIDEVDSTVHVSWVQPRVLGIPQVKALRERLDSWVGKVHTTLLSIEAETPDLVAA

SEQ ID NO: 18668 - protein, 267 aa, Triticum aestivum
  peptide (1)..(267): Ceres Seq. ID no. 13590674
  misc_feature (117)..(225): Pfam Name: Pfam Description:  PCI domain
  misc_feature (1)..(267): NCBI GI NO: 34914614 NR Description: putative 26S proteasome subunit
  misc_feature (1)..(267): NCBI GI NO: 30684612 NR Description: 26S proteasome regulatory subunit (RPN9) -related
  misc_feature (1)..(267): NCBI GI NO: 22327608 NR Description: 26S proteasome regulatory subunit (RPN9), putative
  misc_feature (1)..(267): NCBI GI NO: 17298163 NR Description: 26S proteasome regulatory particle non-ATPase subunit9b
  misc_feature (1)..(206): NCBI GI NO: 9758666 NR Description: 26S proteasome subunit-like protein
  misc_feature (1)..(265): NCBI GI NO: 29612578 NR Description: Similar to proteasome
  misc_feature (1)..(265): NCBI GI NO: 28872728 NR Description: proteasome 26S non-ATPase subunit 13 isoform 1
  misc_feature (1)..(265): NCBI GI NO: 32880133 NR Description: proteasome
  misc_feature (1)..(265): NCBI GI NO: 3746882 NR Description: 26S proteasome subunit 11 [Homo sapiens]
  misc_feature (1)..(265): NCBI GI NO: 3618343 NR Description: 26S proteasome subunit p40.5 [Homo sapiens]
MQIAAIHLDKGNHKECKNLLEEGKTTLDGMTDVDPTVHASFYWISSQYHKSLQEFAEFYKNALLYLAYTTVGSLSGSFKLDLAFDLSLAALLGDNIYNFGELLAHPIINSLIGTKVEWVYHMLQAFNTGNLALYQELCGVHNAALSAQPALVQNEQKLLEKINILCLMEIIFSRPSEDRTIPLSVIAKQTKLSTSEVECLLMKSLSVHLIEGIIDEVDSTVHVSWVQPRVLGIPQVKALRERLDSWVGKVHTTLLSIEAETPDLVAA

SEQ ID NO: 18669 - DNA, 1564 bp, Triticum aestivum
  misc_feature (1)..(1564): Ceres Seq. ID no. 13596004
aaaaacaaacaaaaggcggacccaactccccctcctccaccttccccggagcgcaaatctcccctcccaatccccacccccgtcggtagccgatcgcgtcgacgatgctgggcgccgcgaggagatccggatgcgtgctggggcaactgatgcagaccctccgcccggcggcgtcggcggccacggcggcgaggagctactccgcgaccccgaaggagatgactgtgcgtgaagcattgaattccgcccttgacgaggagatgtctgccgacccttctgttttcttaatgggagaagaggttggagagtaccaaggtgcgtacaagataacaaagggtttgctggacaagtatggtcctgatagggttctcgatacaccaatcacagaggctggttttactggcattggcgttggtgctgcctaccaaggtcttagacctgtagtagagttcatgacatttaacttctcgatgcaggcaattgatcacatcatcaattcagctgccaaatcaaactacatgtcagctggtcagatatccgttcctattgtttttcgaggaccaaatggggcagctgctggagttggtgctcaacactcgcagtgctatgcagcatggtatgcccatgttccaggattgaaggtcctaactccttattctgcagaagatgctcgtggcttgctaaaagcagcaatcagggatccagaccctgtagttttcctggaaaatgaactactctatggtgaatcgtttcctattaaggctgaagtacttgattctagcttcagtgtcccaatcggcaaagctaagatagaacgggaaggaaaagatgttacaattactgcattctctaagatggttgggtatgctcttcaggcggcagagatactgtccaaggagggaatcagtgctgaggtgatcaaccttcggtcaattagaccattggatagagctgctatcaatgcatccgttaggaaaaccaacagattggtaaccgtcgaagaaggctttccacaacatggtgttggtgctgaaatatgcatgtccgtagtggaggacagctttgagtatcttgatgcaccagttgagaggattgccggagctgatgtacctatgccctatgcggcaaaccttgaaagattggcagttccacaggttgaggacatcgtccgtgctgcaaagcgagcttgctacagatcatcatgaatggcggcaaccgcctaagcacaaatgcacgttttgtttatcggccttcttctttgttccttgtccagaaaagatgtactgaatcgcataattgtatcccccaactcttgtgagctaattttgtagatctgcatgcattgttgattccaatctgtcggcggcagtcggatgactgcattcagttcatggttcatcctgaggcgtttgaatcgtgcaacttctggaggtttacatcactgagggatgtctcaataacatgtatgtaactgaattacagacgttcacatgattttgctgtggcttaggccgatctgtaagtgtgatcaatatcgcggagaaaactggaacattgaaatgct

SEQ ID NO: 18670 - protein, 366 aa, Triticum aestivum
  peptide (1)..(366): Ceres Seq. ID no. 13596005
  misc_feature (232)..(354): Pfam Name: Pfam Description:  Transketolase, C-terminal domain
  misc_feature (1)..(366): NCBI GI NO: 38175533 NR Description: putative pyruvate dehydrogenase E1 beta subunitisoform 1 protein
  misc_feature (1)..(366): NCBI GI NO: 3851003 NR Description: pyruvate dehydrogenase E1 beta subunit isoform 3
  misc_feature (1)..(366): NCBI GI NO: 3850999 NR Description: pyruvate dehydrogenase E1 beta subunit isoform 1
  misc_feature (1)..(366): NCBI GI NO: 3851001 NR Description: pyruvate dehydrogenase E1 beta subunit isoform 2
  misc_feature (1)..(365): NCBI GI NO: 15241286 NR Description: pyruvate dehydrogenase E1 component beta subunit
  misc_feature (1)..(365): NCBI GI NO: 520478 NR Description: pyruvate dehydrogenase E1 beta subunit
  misc_feature (11)..(366): NCBI GI NO: 1709454 NR Description: Pyruvate dehydrogenase E1 component beta subunit
  misc_feature (39)..(365): NCBI GI NO: 22968973 NR Description: hypothetical protein [Rhodospirillum rubrum]
  misc_feature (15)..(357): NCBI GI NO: 21358145 NR Description: CG11876-PD [Drosophila melanogaster]
  misc_feature (15)..(357): NCBI GI NO: 25012844 NR Description: RH05604p [Drosophila melanogaster]
MLGAARRSGCVLGQLMQTLRPAASAATAARSYSATPKEMTVREALNSALDEEMSADPSVFLMGEEVGEYQGAYKITKGLLDKYGPDRVLDTPITEAGFTGIGVGAAYQGLRPVVEFMTFNFSMQAIDHIINSAAKSNYMSAGQISVPIVFRGPNGAAAGVGAQHSQCYAAWYAHVPGLKVLTPYSAEDARGLLKAAIRDPDPVVFLENELLYGESFPIKAEVLDSSFSVPIGKAKIEREGKDVTITAFSKMVGYALQAAEILSKEGISAEVINLRSIRPLDRAAINASVRKTNRLVTVEEGFPQHGVGAEICMSVVEDSFEYLDAPVERIAGADVPMPYAANLERLAVPQVEDIVRAAKRACYRSS

SEQ ID NO: 18671 - protein, 351 aa, Triticum aestivum
  peptide (1)..(351): Ceres Seq. ID no. 13596006
  misc_feature (217)..(339): Pfam Name: Pfam Description:  Transketolase, C-terminal domain
  misc_feature (1)..(351): NCBI GI NO: 38175533 NR Description: putative pyruvate dehydrogenase E1 beta subunitisoform 1 protein
  misc_feature (1)..(351): NCBI GI NO: 3851003 NR Description: pyruvate dehydrogenase E1 beta subunit isoform 3
  misc_feature (1)..(351): NCBI GI NO: 3850999 NR Description: pyruvate dehydrogenase E1 beta subunit isoform 1
  misc_feature (1)..(351): NCBI GI NO: 3851001 NR Description: pyruvate dehydrogenase E1 beta subunit isoform 2
  misc_feature (1)..(350): NCBI GI NO: 15241286 NR Description: pyruvate dehydrogenase E1 component beta subunit
  misc_feature (1)..(350): NCBI GI NO: 520478 NR Description: pyruvate dehydrogenase E1 beta subunit
  misc_feature (1)..(351): NCBI GI NO: 1709454 NR Description: Pyruvate dehydrogenase E1 component beta subunit
  misc_feature (24)..(350): NCBI GI NO: 22968973 NR Description: hypothetical protein [Rhodospirillum rubrum]
  misc_feature (1)..(342): NCBI GI NO: 21358145 NR Description: CG11876-PD [Drosophila melanogaster]
  misc_feature (1)..(342): NCBI GI NO: 25012844 NR Description: RH05604p [Drosophila melanogaster]
MQTLRPAASAATAARSYSATPKEMTVREALNSALDEEMSADPSVFLMGEEVGEYQGAYKITKGLLDKYGPDRVLDTPITEAGFTGIGVGAAYQGLRPVVEFMTFNFSMQAIDHIINSAAKSNYMSAGQISVPIVFRGPNGAAAGVGAQHSQCYAAWYAHVPGLKVLTPYSAEDARGLLKAAIRDPDPVVFLENELLYGESFPIKAEVLDSSFSVPIGKAKIEREGKDVTITAFSKMVGYALQAAEILSKEGISAEVINLRSIRPLDRAAINASVRKTNRLVTVEEGFPQHGVGAEICMSVVEDSFEYLDAPVERIAGADVPMPYAANLERLAVPQVEDIVRAAKRACYRSS

SEQ ID NO: 18672 - protein, 328 aa, Triticum aestivum
  peptide (1)..(328): Ceres Seq. ID no. 13596007
  misc_feature (194)..(316): Pfam Name: Pfam Description:  Transketolase, C-terminal domain
  misc_feature (1)..(328): NCBI GI NO: 38175533 NR Description: putative pyruvate dehydrogenase E1 beta subunitisoform 1 protein
  misc_feature (1)..(328): NCBI GI NO: 3851003 NR Description: pyruvate dehydrogenase E1 beta subunit isoform 3
  misc_feature (1)..(328): NCBI GI NO: 3850999 NR Description: pyruvate dehydrogenase E1 beta subunit isoform 1
  misc_feature (1)..(328): NCBI GI NO: 3851001 NR Description: pyruvate dehydrogenase E1 beta subunit isoform 2
  misc_feature (1)..(327): NCBI GI NO: 15241286 NR Description: pyruvate dehydrogenase E1 component beta subunit
  misc_feature (1)..(327): NCBI GI NO: 520478 NR Description: pyruvate dehydrogenase E1 beta subunit
  misc_feature (1)..(328): NCBI GI NO: 1709454 NR Description: Pyruvate dehydrogenase E1 component beta subunit
  misc_feature (1)..(327): NCBI GI NO: 22968973 NR Description: hypothetical protein [Rhodospirillum rubrum]
  misc_feature (1)..(319): NCBI GI NO: 21358145 NR Description: CG11876-PD [Drosophila melanogaster]
  misc_feature (1)..(319): NCBI GI NO: 25012844 NR Description: RH05604p [Drosophila melanogaster]
MTVREALNSALDEEMSADPSVFLMGEEVGEYQGAYKITKGLLDKYGPDRVLDTPITEAGFTGIGVGAAYQGLRPVVEFMTFNFSMQAIDHIINSAAKSNYMSAGQISVPIVFRGPNGAAAGVGAQHSQCYAAWYAHVPGLKVLTPYSAEDARGLLKAAIRDPDPVVFLENELLYGESFPIKAEVLDSSFSVPIGKAKIEREGKDVTITAFSKMVGYALQAAEILSKEGISAEVINLRSIRPLDRAAINASVRKTNRLVTVEEGFPQHGVGAEICMSVVEDSFEYLDAPVERIAGADVPMPYAANLERLAVPQVEDIVRAAKRACYRSS

SEQ ID NO: 18673 - DNA, 605 bp, Triticum aestivum
  misc_feature (1)..(605): Ceres Seq. ID no. 15224958
aggctttgagtccattttgggaccggttcaggggatagatacagcagcaagtccaacaacggtagtagtaacaaagatggaggagtaccaggggcagcacggtcacgccgtcgacgagtacggcgaccccgtggccgggcacggcaaccctgtggcaccctccgccgccggcgcgttcacgggcgccggcgggcagctccagcacggcagggaggagcacaagaccggcgggatactgcaccgctccggcagctccagctccagctcgtcttctgaggacgacggcatgggcgggaggaggaagaagggcgtcaaggagaagctcccgggtggccacaaagacaaccagcagcacatggccgcgggaactggagctggcggggcttatgggcagcacacggccgcgggaactggggccggcggagactacggccagcatgggcacgcaggaatggccggcgccggcgccggcgagaagaagggactcgtggacaagatcaaggagaagctgcccggacagcactgagctgccggccccggctggctgtccgctgcctactagtcctcttgagctaaggctcgagctgaataaaaacaaattgagg

SEQ ID NO: 18674 - protein, 174 aa, Triticum aestivum
  peptide (1)..(174): Ceres Seq. ID no. 15224959
  misc_feature (35)..(174): Pfam Name: Pfam Description:  Dehydrin
  misc_feature (28)..(174): NCBI GI NO: 5052009 NR Description: dehydrin 12 [Hordeum vulgare]
  misc_feature (28)..(174): NCBI GI NO: 1181296 NR Description: dehydrin [Triticum turgidum subsp. durum]
  misc_feature (28)..(174): NCBI GI NO: 4105117 NR Description: dehydrin 9 [Hordeum vulgare]
  misc_feature (28)..(174): NCBI GI NO: 2970213 NR Description: dehydrin-/LEA group 2-like protein
  misc_feature (28)..(174): NCBI GI NO: 231983 NR Description: DEHYDRIN RAB 15
  misc_feature (28)..(174): NCBI GI NO: 1181292 NR Description: dehydrin [Triticum turgidum subsp. durum]
  misc_feature (32)..(174): NCBI GI NO: 118487 NR Description: DEHYDRIN DHN3 (B17)
  misc_feature (26)..(174): NCBI GI NO: 118481 NR Description: DEHYDRIN RAB 16C
  misc_feature (32)..(174): NCBI GI NO: 4105107 NR Description: dehydrin 3 [Hordeum vulgare]
  misc_feature (32)..(174): NCBI GI NO: 6017932 NR Description: dehydrin; DHN3 [Hordeum vulgare]
GFESILGPVQGIDTAASPTTVVVTKMEEYQGQHGHAVDEYGDPVAGHGNPVAPSAAGAFTGAGGQLQHGREEHKTGGILHRSGSSSSSSSSEDDGMGGRRKKGVKEKLPGGHKDNQQHMAAGTGAGGAYGQHTAAGTGAGGDYGQHGHAGMAGAGAGEKKGLVDKIKEKLPGQH

SEQ ID NO: 18675 - protein, 149 aa, Triticum aestivum
  peptide (1)..(149): Ceres Seq. ID no. 15224960
  misc_feature (10)..(149): Pfam Name: Pfam Description:  Dehydrin
  misc_feature (3)..(149): NCBI GI NO: 5052009 NR Description: dehydrin 12 [Hordeum vulgare]
  misc_feature (3)..(149): NCBI GI NO: 1181296 NR Description: dehydrin [Triticum turgidum subsp. durum]
  misc_feature (3)..(149): NCBI GI NO: 4105117 NR Description: dehydrin 9 [Hordeum vulgare]
  misc_feature (3)..(149): NCBI GI NO: 2970213 NR Description: dehydrin-/LEA group 2-like protein
  misc_feature (3)..(149): NCBI GI NO: 231983 NR Description: DEHYDRIN RAB 15
  misc_feature (3)..(149): NCBI GI NO: 1181292 NR Description: dehydrin [Triticum turgidum subsp. durum]
  misc_feature (7)..(149): NCBI GI NO: 118487 NR Description: DEHYDRIN DHN3 (B17)
  misc_feature (1)..(149): NCBI GI NO: 118481 NR Description: DEHYDRIN RAB 16C
  misc_feature (7)..(149): NCBI GI NO: 4105107 NR Description: dehydrin 3 [Hordeum vulgare]
  misc_feature (7)..(149): NCBI GI NO: 6017932 NR Description: dehydrin; DHN3 [Hordeum vulgare]
MEEYQGQHGHAVDEYGDPVAGHGNPVAPSAAGAFTGAGGQLQHGREEHKTGGILHRSGSSSSSSSSEDDGMGGRRKKGVKEKLPGGHKDNQQHMAAGTGAGGAYGQHTAAGTGAGGDYGQHGHAGMAGAGAGEKKGLVDKIKEKLPGQH

SEQ ID NO: 18676 - DNA, 1335 bp, Triticum aestivum
  misc_feature (1)..(1335): Ceres Seq. ID no. 13654187
aaaaaccgcaacccccaccccaccccaccccaccccacccaccacagcaacgagggcaagcgtgcgtcaacatcagacgactcgtcccggattgtgattcgcggaggcgtttcccggcgcccagatgagctcacggatggccggatcggtcctcctccgccgcgccggcgccggcgccagccgcctcttcgccaccaccccgtctccggcggccagggccgtcctcggtggaggtgagggcgcgtgggtgcggctgatgtccacctccgcggcctcgcaggtcaaggacgaggcggccaaggcggtcaaggcggaggcggccaaggcggtcaaggcggaggcggccaagggcgacggggagaagaaggaggtggccatcagcagctactgggggatcgagcagtcgaagaagctggtgcgcgaggacggcaccgagtggaagtggtcttgcttcaggccatgggagacgtacaccgcggacacgtcgatcgatctgaccaagcaccacgtgcccaacacgatgctcgacaagatcgcctactacaccgtcaagtccctgcgcttccccaccgacatcttcttccagaggaggtatggctgccgcgcaatgatgctggagactgttgccgcagtgccggggatggtgggcggcatgctcctccacctgcgctcgctccggcgcttcgagcagagcggcggctggatccgcgcgctgctggaggaggccgagaacgagcgcatgcacctcatgaccttcatggaggtggcgcagcccaggtggtacgagcgcgccctcgtcatcgccgtccagggcgtcttcttcaacgcctacttcttcggctacctcatctcgcccaagttcgcgcaccgcgtcgtcgggtacctcgaggaggaggccgtccactcctacacggagttcctcaaggacctcgacgacggcaagatcgacaacgtccccgccccggccatcgccatcgactactggcgcctccctgccaacgccaccctcaaggacgtggtcaccgtggtgcgcgccgacgaggctcaccaccgcgacgtcaaccacttcgcatcggacgtgtactaccagggtatgcagctgaaggccaccccggccccgatcggataccactgaggctggccgtgttctgctgaattttgcatcgctactattactactactaccaagcaaatgagtgtttcgttttgaaggcagaggaaatgagagctctttagctgtataggatgttgcaattgttgctcgtttggtaactattccgtactgagaaataagcagtgtgcttgtcagttacgtatctaggatattgttgaacc

SEQ ID NO: 18677 - protein, 336 aa, Triticum aestivum
  peptide (1)..(336): Ceres Seq. ID no. 13654188
  misc_feature (75)..(334): Pfam Name: Pfam Description:  Alternative oxidase
  misc_feature (1)..(336): NCBI GI NO: 19912725 NR Description: alternative oxidase [Triticum aestivum]
  misc_feature (1)..(336): NCBI GI NO: 3218544 NR Description: alternative oxidase
  misc_feature (1)..(336): NCBI GI NO: 25989199 NR Description: alternative oxidase AOX2 precursor [Zea mays]
  misc_feature (75)..(336): NCBI GI NO: 5802557 NR Description: alternative oxidase [Triticum aestivum]
  misc_feature (1)..(336): NCBI GI NO: 19912727 NR Description: alternative oxidase [Triticum aestivum]
  misc_feature (1)..(336): NCBI GI NO: 25989197 NR Description: alternative oxidase AOX1 precursor [Zea mays]
  misc_feature (1)..(336): NCBI GI NO: 16902306 NR Description: alternative oxidase 1c
  misc_feature (53)..(336): NCBI GI NO: 421824 NR Description: alternative respiratory pathway oxidase (EC 1
  misc_feature (53)..(336): NCBI GI NO: 11278947 NR Description: alternative respiratory pathway oxidase (EC 1
  misc_feature (53)..(336): NCBI GI NO: 15228734 NR Description: alternative oxidase 1a, mitochondrial (AOX1A)
MSSRMAGSVLLRRAGAGASRLFATTPSPAARAVLGGGEGAWVRLMSTSAASQVKDEAAKAVKAEAAKAVKAEAAKGDGEKKEVAISSYWGIEQSKKLVREDGTEWKWSCFRPWETYTADTSIDLTKHHVPNTMLDKIAYYTVKSLRFPTDIFFQRRYGCRAMMLETVAAVPGMVGGMLLHLRSLRRFEQSGGWIRALLEEAENERMHLMTFMEVAQPRWYERALVIAVQGVFFNAYFFGYLISPKFAHRVVGYLEEEAVHSYTEFLKDLDDGKIDNVPAPAIAIDYWRLPANATLKDVVTVVRADEAHHRDVNHFASDVYYQGMQLKATPAPIGYH

SEQ ID NO: 18678 - protein, 332 aa, Triticum aestivum
  peptide (1)..(332): Ceres Seq. ID no. 13654189
  misc_feature (71)..(330): Pfam Name: Pfam Description:  Alternative oxidase
  misc_feature (1)..(332): NCBI GI NO: 19912725 NR Description: alternative oxidase [Triticum aestivum]
  misc_feature (1)..(332): NCBI GI NO: 3218544 NR Description: alternative oxidase
  misc_feature (1)..(332): NCBI GI NO: 25989199 NR Description: alternative oxidase AOX2 precursor [Zea mays]
  misc_feature (71)..(332): NCBI GI NO: 5802557 NR Description: alternative oxidase [Triticum aestivum]
  misc_feature (1)..(332): NCBI GI NO: 19912727 NR Description: alternative oxidase [Triticum aestivum]
  misc_feature (1)..(332): NCBI GI NO: 25989197 NR Description: alternative oxidase AOX1 precursor [Zea mays]
  misc_feature (1)..(332): NCBI GI NO: 16902306 NR Description: alternative oxidase 1c
  misc_feature (49)..(332): NCBI GI NO: 421824 NR Description: alternative respiratory pathway oxidase (EC 1
  misc_feature (49)..(332): NCBI GI NO: 15228734 NR Description: alternative oxidase 1a, mitochondrial (AOX1A)
  misc_feature (49)..(332): NCBI GI NO: 1872517 NR Description: alternative oxidase [Arabidopsis thaliana]
MAGSVLLRRAGAGASRLFATTPSPAARAVLGGGEGAWVRLMSTSAASQVKDEAAKAVKAEAAKAVKAEAAKGDGEKKEVAISSYWGIEQSKKLVREDGTEWKWSCFRPWETYTADTSIDLTKHHVPNTMLDKIAYYTVKSLRFPTDIFFQRRYGCRAMMLETVAAVPGMVGGMLLHLRSLRRFEQSGGWIRALLEEAENERMHLMTFMEVAQPRWYERALVIAVQGVFFNAYFFGYLISPKFAHRVVGYLEEEAVHSYTEFLKDLDDGKIDNVPAPAIAIDYWRLPANATLKDVVTVVRADEAHHRDVNHFASDVYYQGMQLKATPAPIGYH

SEQ ID NO: 18679 - protein, 292 aa, Triticum aestivum
  peptide (1)..(292): Ceres Seq. ID no. 13654190
  misc_feature (31)..(290): Pfam Name: Pfam Description:  Alternative oxidase
  misc_feature (1)..(292): NCBI GI NO: 19912725 NR Description: alternative oxidase [Triticum aestivum]
  misc_feature (1)..(292): NCBI GI NO: 3218544 NR Description: alternative oxidase
  misc_feature (1)..(292): NCBI GI NO: 25989199 NR Description: alternative oxidase AOX2 precursor [Zea mays]
  misc_feature (31)..(292): NCBI GI NO: 5802557 NR Description: alternative oxidase [Triticum aestivum]
  misc_feature (1)..(292): NCBI GI NO: 19912727 NR Description: alternative oxidase [Triticum aestivum]
  misc_feature (1)..(292): NCBI GI NO: 25989197 NR Description: alternative oxidase AOX1 precursor [Zea mays]
  misc_feature (1)..(292): NCBI GI NO: 16902306 NR Description: alternative oxidase 1c
  misc_feature (9)..(292): NCBI GI NO: 421824 NR Description: alternative respiratory pathway oxidase (EC 1
  misc_feature (9)..(292): NCBI GI NO: 11278947 NR Description: alternative respiratory pathway oxidase (EC 1
  misc_feature (9)..(292): NCBI GI NO: 1872517 NR Description: alternative oxidase [Arabidopsis thaliana]
MSTSAASQVKDEAAKAVKAEAAKAVKAEAAKGDGEKKEVAISSYWGIEQSKKLVREDGTEWKWSCFRPWETYTADTSIDLTKHHVPNTMLDKIAYYTVKSLRFPTDIFFQRRYGCRAMMLETVAAVPGMVGGMLLHLRSLRRFEQSGGWIRALLEEAENERMHLMTFMEVAQPRWYERALVIAVQGVFFNAYFFGYLISPKFAHRVVGYLEEEAVHSYTEFLKDLDDGKIDNVPAPAIAIDYWRLPANATLKDVVTVVRADEAHHRDVNHFASDVYYQGMQLKATPAPIGYH

SEQ ID NO: 18680 - DNA, 1654 bp, Triticum aestivum
  misc_feature (1)..(1654): Ceres Seq. ID no. 13595961
accaagcaaagctgaatcagaacactccaatgtcaacgccaagaagggtggtcgtcgtcgccggccagagcctaagccacctcatctccatgctggagttcgccgcgatgtgcctccgtcgcggcctcgcggtgaccgtcgccgtcccggacccgtccctcaccgccccggccttccgctccaccatcggccggtacgcctcccggctccccaccctctccgtccactccctccctccccctcccgccctcgacgccgcctccgctgccgcccacccgttcatccgcatgcaggccgcctcccgctcccaggcacctgtcctgcgggacttcctccatagcctccccgacgtccacgcgctcgtggccgacatgctcgccgtctgtgacctcgacgtagccacggagctgggcatcccggggcacctgttcttctccacaggcgccgccagcctctccgtcttcctccaattgcctttgttttgctccgggcgcgccggaaacttgaaagatctcggcgacacgcccgtgtcgttccccggcatgtccccgatgccggcgtctcacttggtcgacgcggtgctcgacagagggacggacctctacgcgactgtgctggacgtattcggtcggatcgcgggtgcgcgcggcattctggtgaataccttcgacgcgctggagggctcagcggtgtcggcgcttagagacgggcgctgcctgcgcggccgcgccacgccgccagtttactgcgtcgggccgttgatcgcggagggggaagaggaggaggaaagacacccatgcctcccgtggctggacgcgcagcccgagcgtagcgtcgtgttcctctgcttcggcagccgatgcacggtgtcgctccagcagatcggtgagatggccaaggggctggagaagtccgggcacaggttcttgtgggtgctgcgcgcgcctcctgccttcgccgcagccggcggcggaccggacgcggcgctgtctcttctcccggaggggttcttggcccggaccgcggacaggggcttcgtggtgactgcgtcctgggtgcctcaggtggaggtgctgcgtcactcatccactggtgcgttcgtaacccactgtggatggaactcgacgctggaggcggtggtcgccggtgtgccaatggtgtgctggccgttggtagccgagcagtggatgaacaaggtgtacattgtccaagatatgaaggttggcgtggaggtgagagggtataagcgcgggggccttgtcagggccgacgatgttgacgcggcggttaggcagatcatggacatggagccggagagacggcgagcactcgaggaacggatcatggcggtaaagaagagcgctcaagcagtatggaaggaagatggctcctcctgtaccgcgttcaccgagtttatgatgcaaacggagtaaccattgtaatcattagcagcaactatccatgaagcaaatggagtgatcattagtttatgaagcaaagggacatcagcagcagatgcttaggtgtgggtaaggatatgtaagttgcacgttgcagcattgcgcaccattgggttgtaattaagcttgaattatatgagtatagtccaatctgttggtccaaaaaaaaaaaaaaaaaagcttatcgataccgt

SEQ ID NO: 18681 - protein, 476 aa, Triticum aestivum
  peptide (1)..(476): Ceres Seq. ID no. 13595962
  misc_feature (16)..(476): Pfam Name: Pfam Description:  UDP-glucoronosyl and UDP-glucosyl transferase
  misc_feature (16)..(476): NCBI GI NO: 34910206 NR Description: putative flavonol glucosyltransferase
  misc_feature (11)..(472): NCBI GI NO: 34910228 NR Description: putative flavonol glucosyltransferase
  misc_feature (14)..(472): NCBI GI NO: 34910222 NR Description: putative flavonol glucosyltransferase
  misc_feature (15)..(472): NCBI GI NO: 34910218 NR Description: putative flavonol glucosyltransferase
  misc_feature (14)..(472): NCBI GI NO: 34910204 NR Description: putative flavonol glucosyltransferase
  misc_feature (16)..(464): NCBI GI NO: 22535568 NR Description: putative glucosyltransferase
  misc_feature (16)..(472): NCBI GI NO: 18401158 NR Description: glycosyltransferase family [Arabidopsis thaliana]
  misc_feature (16)..(472): NCBI GI NO: 21593785 NR Description: putative glucosyltransferase
  misc_feature (117)..(474): NCBI GI NO: 34394688 NR Description: putative glucosyltransferase
  misc_feature (9)..(476): NCBI GI NO: 19911209 NR Description: glucosyltransferase-13 [Vigna angularis]
QAKLNQNTPMSTPRRVVVVAGQSLSHLISMLEFAAMCLRRGLAVTVAVPDPSLTAPAFRSTIGRYASRLPTLSVHSLPPPPALDAASAAAHPFIRMQAASRSQAPVLRDFLHSLPDVHALVADMLAVCDLDVATELGIPGHLFFSTGAASLSVFLQLPLFCSGRAGNLKDLGDTPVSFPGMSPMPASHLVDAVLDRGTDLYATVLDVFGRIAGARGILVNTFDALEGSAVSALRDGRCLRGRATPPVYCVGPLIAEGEEEEERHPCLPWLDAQPERSVVFLCFGSRCTVSLQQIGEMAKGLEKSGHRFLWVLRAPPAFAAAGGGPDAALSLLPEGFLARTADRGFVVTASWVPQVEVLRHSSTGAFVTHCGWNSTLEAVVAGVPMVCWPLVAEQWMNKVYIVQDMKVGVEVRGYKRGGLVRADDVDAAVRQIMDMEPERRRALEERIMAVKKSAQAVWKEDGSSCTAFTEFMMQTE

SEQ ID NO: 18682 - protein, 467 aa, Triticum aestivum
  peptide (1)..(467): Ceres Seq. ID no. 13595963
  misc_feature (7)..(467): Pfam Name: Pfam Description:  UDP-glucoronosyl and UDP-glucosyl transferase
  misc_feature (7)..(467): NCBI GI NO: 34910206 NR Description: putative flavonol glucosyltransferase
  misc_feature (2)..(463): NCBI GI NO: 34910228 NR Description: putative flavonol glucosyltransferase
  misc_feature (5)..(463): NCBI GI NO: 34910222 NR Description: putative flavonol glucosyltransferase
  misc_feature (6)..(463): NCBI GI NO: 34910218 NR Description: putative flavonol glucosyltransferase
  misc_feature (5)..(463): NCBI GI NO: 34910204 NR Description: putative flavonol glucosyltransferase
  misc_feature (7)..(455): NCBI GI NO: 22535568 NR Description: putative glucosyltransferase
  misc_feature (7)..(463): NCBI GI NO: 18401158 NR Description: glycosyltransferase family [Arabidopsis thaliana]
  misc_feature (7)..(463): NCBI GI NO: 21593785 NR Description: putative glucosyltransferase
  misc_feature (108)..(465): NCBI GI NO: 34394688 NR Description: putative glucosyltransferase
  misc_feature (1)..(467): NCBI GI NO: 19911209 NR Description: glucosyltransferase-13 [Vigna angularis]
MSTPRRVVVVAGQSLSHLISMLEFAAMCLRRGLAVTVAVPDPSLTAPAFRSTIGRYASRLPTLSVHSLPPPPALDAASAAAHPFIRMQAASRSQAPVLRDFLHSLPDVHALVADMLAVCDLDVATELGIPGHLFFSTGAASLSVFLQLPLFCSGRAGNLKDLGDTPVSFPGMSPMPASHLVDAVLDRGTDLYATVLDVFGRIAGARGILVNTFDALEGSAVSALRDGRCLRGRATPPVYCVGPLIAEGEEEEERHPCLPWLDAQPERSVVFLCFGSRCTVSLQQIGEMAKGLEKSGHRFLWVLRAPPAFAAAGGGPDAALSLLPEGFLARTADRGFVVTASWVPQVEVLRHSSTGAFVTHCGWNSTLEAVVAGVPMVCWPLVAEQWMNKVYIVQDMKVGVEVRGYKRGGLVRADDVDAAVRQIMDMEPERRRALEERIMAVKKSAQAVWKEDGSSCTAFTEFMMQTE

SEQ ID NO: 18683 - protein, 447 aa, Triticum aestivum
  peptide (1)..(447): Ceres Seq. ID no. 13595964
  misc_feature (1)..(447): Pfam Name: Pfam Description:  UDP-glucoronosyl and UDP-glucosyl transferase
  misc_feature (1)..(447): NCBI GI NO: 34910206 NR Description: putative flavonol glucosyltransferase
  misc_feature (1)..(443): NCBI GI NO: 34910228 NR Description: putative flavonol glucosyltransferase
  misc_feature (1)..(443): NCBI GI NO: 34910222 NR Description: putative flavonol glucosyltransferase
  misc_feature (1)..(443): NCBI GI NO: 34910218 NR Description: putative flavonol glucosyltransferase
  misc_feature (1)..(443): NCBI GI NO: 34910204 NR Description: putative flavonol glucosyltransferase
  misc_feature (1)..(435): NCBI GI NO: 22535568 NR Description: putative glucosyltransferase
  misc_feature (1)..(443): NCBI GI NO: 18401158 NR Description: glycosyltransferase family [Arabidopsis thaliana]
  misc_feature (1)..(443): NCBI GI NO: 21593785 NR Description: putative glucosyltransferase
  misc_feature (88)..(445): NCBI GI NO: 34394688 NR Description: putative glucosyltransferase
  misc_feature (1)..(447): NCBI GI NO: 19911209 NR Description: glucosyltransferase-13 [Vigna angularis]
MLEFAAMCLRRGLAVTVAVPDPSLTAPAFRSTIGRYASRLPTLSVHSLPPPPALDAASAAAHPFIRMQAASRSQAPVLRDFLHSLPDVHALVADMLAVCDLDVATELGIPGHLFFSTGAASLSVFLQLPLFCSGRAGNLKDLGDTPVSFPGMSPMPASHLVDAVLDRGTDLYATVLDVFGRIAGARGILVNTFDALEGSAVSALRDGRCLRGRATPPVYCVGPLIAEGEEEEERHPCLPWLDAQPERSVVFLCFGSRCTVSLQQIGEMAKGLEKSGHRFLWVLRAPPAFAAAGGGPDAALSLLPEGFLARTADRGFVVTASWVPQVEVLRHSSTGAFVTHCGWNSTLEAVVAGVPMVCWPLVAEQWMNKVYIVQDMKVGVEVRGYKRGGLVRADDVDAAVRQIMDMEPERRRALEERIMAVKKSAQAVWKEDGSSCTAFTEFMMQTE

SEQ ID NO: 18684 - DNA, 965 bp, Triticum aestivum
  misc_feature (1)..(965): Ceres Seq. ID no. 13654535
aaaccatcgtcactcacgacagaaacagaaataggaagacgagagaacagaagagccagagacactaaaacgaaatggcatcctcctcttccttccttctcattgctgcacttcttgcgttggtctcatggcaggccactgcttttgatcctagcccactccaggacttttgtgtcgccgacatgaattcaccagtccgtgtcaatgggtttgtttgcaagaacccgttggaggttaatgcagatgacttcttcaaggcggccaacctcgacaagcctagggtgcccaacaaggttggatccaacgtcactttgatcaacgccatgcagattgctggactcaacaccctcggcatctcaattgcacgcatcgactatgctcccttgggtcaaaacccaccacacacgcaccctcgcgccactgagatcctcacggtgctcgaggggacactgtatgttggatttgtcacatccaaccagcccgcccccaacagaaacaagttcctctccaaggtgctcaacaaaggtgatgtgtttgtcttccccgtggggctcatccacttccaattcaaccccaacccccaccagcctgctgttgcaattgccgcgctaagcagccagaacccaggggctatcacaattgccaatgcagtgtttgggtcagacccaccaatatcagatgatgttcttgccaaggcatttcaggtggaaaagaatacaattgactatctccaggctcagttctgggagaacaaccactactaagtcagacctttgttaattagccggaagaccagtgcacaagcgaaggacatggttgagttcctagatatgcatcctaatctataaaataaatggagcatatgtcatgccattgtgtgtctgtaatcagtgaatgtatttctaccttctgaataattgacaatattgtatttatcacactaatatgatctcatttgcttcttt

SEQ ID NO: 18685 - protein, 229 aa, Triticum aestivum
  peptide (1)..(229): Ceres Seq. ID no. 13654536
  misc_feature (63)..(217): Pfam Name: Pfam Description:  Cupin
  misc_feature (1)..(229): NCBI GI NO: 5869975 NR Description: germin-like protein [Triticum aestivum]
  misc_feature (1)..(228): NCBI GI NO: 9837111 NR Description: germin A [Hordeum vulgare]
  misc_feature (1)..(228): NCBI GI NO: 7447340 NR Description: germin-like protein - barley
  misc_feature (1)..(228): NCBI GI NO: 5869973 NR Description: germin-like protein [Triticum aestivum]
  misc_feature (3)..(229): NCBI GI NO: 5499730 NR Description: germin-like protein 1 precursor [Oryza sativa]
  misc_feature (1)..(229): NCBI GI NO: 7447336 NR Description: germin-like protein 6 - rice
  misc_feature (1)..(229): NCBI GI NO: 40253797 NR Description: putative germin A
  misc_feature (3)..(229): NCBI GI NO: 40253804 NR Description: putative germin A
  misc_feature (3)..(229): NCBI GI NO: 40253800 NR Description: putative germin A
  misc_feature (3)..(229): NCBI GI NO: 5499732 NR Description: germin-like protein 2 precursor [Oryza sativa]
MASSSSFLLIAALLALVSWQATAFDPSPLQDFCVADMNSPVRVNGFVCKNPLEVNADDFFKAANLDKPRVPNKVGSNVTLINAMQIAGLNTLGISIARIDYAPLGQNPPHTHPRATEILTVLEGTLYVGFVTSNQPAPNRNKFLSKVLNKGDVFVFPVGLIHFQFNPNPHQPAVAIAALSSQNPGAITIANAVFGSDPPISDDVLAKAFQVEKNTIDYLQAQFWENNHY

SEQ ID NO: 18686 - protein, 193 aa, Triticum aestivum
  peptide (1)..(193): Ceres Seq. ID no. 13654537
  misc_feature (27)..(181): Pfam Name: Pfam Description:  Cupin
  misc_feature (1)..(193): NCBI GI NO: 5869975 NR Description: germin-like protein [Triticum aestivum]
  misc_feature (1)..(192): NCBI GI NO: 9837111 NR Description: germin A [Hordeum vulgare]
  misc_feature (1)..(192): NCBI GI NO: 7447340 NR Description: germin-like protein - barley
  misc_feature (1)..(192): NCBI GI NO: 5869973 NR Description: germin-like protein [Triticum aestivum]
  misc_feature (1)..(193): NCBI GI NO: 5499730 NR Description: germin-like protein 1 precursor [Oryza sativa]
  misc_feature (1)..(193): NCBI GI NO: 7447336 NR Description: germin-like protein 6 - rice
  misc_feature (1)..(193): NCBI GI NO: 40253797 NR Description: putative germin A
  misc_feature (1)..(193): NCBI GI NO: 40253804 NR Description: putative germin A
  misc_feature (1)..(193): NCBI GI NO: 40253800 NR Description: putative germin A
  misc_feature (1)..(193): NCBI GI NO: 5499732 NR Description: germin-like protein 2 precursor [Oryza sativa]
MNSPVRVNGFVCKNPLEVNADDFFKAANLDKPRVPNKVGSNVTLINAMQIAGLNTLGISIARIDYAPLGQNPPHTHPRATEILTVLEGTLYVGFVTSNQPAPNRNKFLSKVLNKGDVFVFPVGLIHFQFNPNPHQPAVAIAALSSQNPGAITIANAVFGSDPPISDDVLAKAFQVEKNTIDYLQAQFWENNHY

SEQ ID NO: 18687 - protein, 146 aa, Triticum aestivum
  peptide (1)..(146): Ceres Seq. ID no. 13654538
  misc_feature (1)..(134): Pfam Name: Pfam Description:  Cupin
  misc_feature (1)..(146): NCBI GI NO: 5869975 NR Description: germin-like protein [Triticum aestivum]
  misc_feature (1)..(145): NCBI GI NO: 9837111 NR Description: germin A [Hordeum vulgare]
  misc_feature (1)..(145): NCBI GI NO: 7447340 NR Description: germin-like protein - barley
  misc_feature (1)..(145): NCBI GI NO: 5869973 NR Description: germin-like protein [Triticum aestivum]
  misc_feature (1)..(146): NCBI GI NO: 5499730 NR Description: germin-like protein 1 precursor [Oryza sativa]
  misc_feature (1)..(146): NCBI GI NO: 7447336 NR Description: germin-like protein 6 - rice
  misc_feature (1)..(146): NCBI GI NO: 40253797 NR Description: putative germin A
  misc_feature (1)..(146): NCBI GI NO: 40253804 NR Description: putative germin A
  misc_feature (1)..(146): NCBI GI NO: 40253800 NR Description: putative germin A
  misc_feature (1)..(146): NCBI GI NO: 5499732 NR Description: germin-like protein 2 precursor [Oryza sativa]
MQIAGLNTLGISIARIDYAPLGQNPPHTHPRATEILTVLEGTLYVGFVTSNQPAPNRNKFLSKVLNKGDVFVFPVGLIHFQFNPNPHQPAVAIAALSSQNPGAITIANAVFGSDPPISDDVLAKAFQVEKNTIDYLQAQFWENNHY

SEQ ID NO: 18688 - DNA, 1723 bp, Triticum aestivum
  misc_feature (1)..(1723): Ceres Seq. ID no. 13595965
ctagccgccgccactgcaccggcgcctcccccgccccactgactggcttcctagggctgccctccgcccgcttcttcaccggcgcgttggtcgcgaccccgccaccccgccaccctcgccagcgctggtccctgcacggacggcacgaacgccgccgccccgtacaagatactgcaccgactccgcagcccgtcctcgtcctagggcagaccccacccccgcggctccgctttcttagcactctcgccgtcgcgccgccgggagccaggcatgacgacgcgtatcgcgcccggcgtgggcgcgaacctcctcgggcagcactcggcggagcgcaaccaggacgccaccacctacgtcggcaacctcgacccgcaggtttccgaggaattactgtgggagttgtttgtccaagcaggccctgttgttaatgtctatgtcccgaaagacagagttacaaatctacaccagggctatgggtttgtagaatttaggagtgaggaagatgcagattatgctattaagattttgaacatgctcaaattgtatggaaagccaataagagtaaacaaggcttcccaagacaagaagagcttggatgtgggtgcgaatctttttattggcaatcttgatccggaagtcgatgagaagcttctctatgacaccttcagtgcatttggtgtgattgtgaccaaccctaagataatgcgggaccctgaaactggaaattctcgagggtttggctttgtgagctatgactcctttgaatcatctgatcaagctatagaggccatgaacaaccagcatttatgtaatcggccaatcactgtctcatatgcttacaagaaagacacgaaaggagagcgccatggcacaccagcagagaggttgcttgcggcgaacaacccaggatctcagaagcataggccacacacaatgtttgcaactgctccgccaacccaagggcttcaaaacggtggtgttggtgcacctgtgccacggccttttgccaatgggaatgtcccaggacagatgcaacatgtcagaccgccgccgccacctgttggtcaataccctcccatgcagatgcatggacagcctgcctggcctggtcctccacagaatatgcaacaagtaccacctccgatgcaacagcagcttcaatacaggcttccagggatgcccccgccgccgcaaaacatgatgcccccaccgcaaaacatgatgccgccacctcatcacatggccaggccgccgccgccacctcccaatatgcaagctccacctatgtggaggccacccccacccccacaacaaggtggtggaatgccgccacctccaatgtccatgccacctcctccaccgccaccttctggttaaaaatacaaatgggtgtcttccatgggttaatttggcgcgcagcagttgtagaccaagggtgttaaaagtctttcatatattgtcatgtaacttgcagcactaggagaatatcagaattgagagaattagcggacggtgatacaaaatgcgtggcttttgtgattgcatgtacggtacctgccttgtgggtgctgctgctgtgtgctctgcttaggacaattatggaccgtgatctgcgctatctctttacattgttattactgacagaatcgtgttttaaacaggcccctggtgattgacagttgtcgcgcataaaaaaaaaaaaaaaaaagcttatcgataccgt

SEQ ID NO: 18689 - protein, 368 aa, Triticum aestivum
  peptide (1)..(368): Ceres Seq. ID no. 13595966
  misc_feature (28)..(98): Pfam Name: a.k.a. RRM, RBD, or RNP domain Pfam Description: RNA recognition motif.
  misc_feature (1)..(368): NCBI GI NO: 37535012 NR Description: putative spliceosomal protein
  misc_feature (1)..(364): NCBI GI NO: 15224186 NR Description: pre-mRNA splicing factor SF3b, putative
  misc_feature (1)..(364): NCBI GI NO: 14334958 NR Description: putative spliceosome associated protein
  misc_feature (1)..(364): NCBI GI NO: 21593441 NR Description: putative spliceosome associated protein
  misc_feature (19)..(368): NCBI GI NO: 34193906 NR Description: Splicing factor 3b, subunit 4 [Danio rerio]
  misc_feature (19)..(368): NCBI GI NO: 24119253 NR Description: splicing factor 3b, subunit 4 [Danio rerio]
  misc_feature (19)..(366): NCBI GI NO: 28374170 NR Description: Similar to splicing factor 3b, subunit 4, 49kD
  misc_feature (19)..(365): NCBI GI NO: 5032069 NR Description: splicing factor 3b, subunit 4
  misc_feature (19)..(365): NCBI GI NO: 23346437 NR Description: splicing factor 3b, subunit 4
  misc_feature (19)..(365): NCBI GI NO: 34858075 NR Description: similar to Sf3b4 protein [Rattus norvegicus]
MTTRIAPGVGANLLGQHSAERNQDATTYVGNLDPQVSEELLWELFVQAGPVVNVYVPKDRVTNLHQGYGFVEFRSEEDADYAIKILNMLKLYGKPIRVNKASQDKKSLDVGANLFIGNLDPEVDEKLLYDTFSAFGVIVTNPKIMRDPETGNSRGFGFVSYDSFESSDQAIEAMNNQHLCNRPITVSYAYKKDTKGERHGTPAERLLAANNPGSQKHRPHTMFATAPPTQGLQNGGVGAPVPRPFANGNVPGQMQHVRPPPPPVGQYPPMQMHGQPAWPGPPQNMQQVPPPMQQQLQYRLPGMPPPPQNMMPPPQNMMPPPHHMARPPPPPPNMQAPPMWRPPPPPQQGGGMPPPPMSMPPPPPPPSG

SEQ ID NO: 18690 - protein, 281 aa, Triticum aestivum
  peptide (1)..(281): Ceres Seq. ID no. 13595967
  misc_feature (171)..(280): Pfam Name: Pfam Description:  Extensin-like region
  misc_feature (1)..(281): NCBI GI NO: 37535012 NR Description: putative spliceosomal protein
  misc_feature (1)..(277): NCBI GI NO: 15224186 NR Description: pre-mRNA splicing factor SF3b, putative
  misc_feature (1)..(277): NCBI GI NO: 14334958 NR Description: putative spliceosome associated protein
  misc_feature (1)..(277): NCBI GI NO: 21593441 NR Description: putative spliceosome associated protein
  misc_feature (1)..(281): NCBI GI NO: 34193906 NR Description: Splicing factor 3b, subunit 4 [Danio rerio]
  misc_feature (1)..(281): NCBI GI NO: 24119253 NR Description: splicing factor 3b, subunit 4 [Danio rerio]
  misc_feature (1)..(279): NCBI GI NO: 28374170 NR Description: Similar to splicing factor 3b, subunit 4, 49kD
  misc_feature (1)..(278): NCBI GI NO: 5032069 NR Description: splicing factor 3b, subunit 4
  misc_feature (1)..(278): NCBI GI NO: 23346437 NR Description: splicing factor 3b, subunit 4
  misc_feature (1)..(278): NCBI GI NO: 34858075 NR Description: similar to Sf3b4 protein [Rattus norvegicus]
MLKLYGKPIRVNKASQDKKSLDVGANLFIGNLDPEVDEKLLYDTFSAFGVIVTNPKIMRDPETGNSRGFGFVSYDSFESSDQAIEAMNNQHLCNRPITVSYAYKKDTKGERHGTPAERLLAANNPGSQKHRPHTMFATAPPTQGLQNGGVGAPVPRPFANGNVPGQMQHVRPPPPPVGQYPPMQMHGQPAWPGPPQNMQQVPPPMQQQLQYRLPGMPPPPQNMMPPPQNMMPPPHHMARPPPPPPNMQAPPMWRPPPPPQQGGGMPPPPMSMPPPPPPPSG

SEQ ID NO: 18691 - protein, 224 aa, Triticum aestivum
  peptide (1)..(224): Ceres Seq. ID no. 13595968
  misc_feature (114)..(223): Pfam Name: Pfam Description:  Extensin-like region
  misc_feature (1)..(224): NCBI GI NO: 37535012 NR Description: putative spliceosomal protein
  misc_feature (1)..(220): NCBI GI NO: 15224186 NR Description: pre-mRNA splicing factor SF3b, putative
  misc_feature (1)..(220): NCBI GI NO: 14334958 NR Description: putative spliceosome associated protein
  misc_feature (1)..(220): NCBI GI NO: 21593441 NR Description: putative spliceosome associated protein
  misc_feature (1)..(224): NCBI GI NO: 34193906 NR Description: Splicing factor 3b, subunit 4 [Danio rerio]
  misc_feature (1)..(224): NCBI GI NO: 24119253 NR Description: splicing factor 3b, subunit 4 [Danio rerio]
  misc_feature (1)..(222): NCBI GI NO: 28374170 NR Description: Similar to splicing factor 3b, subunit 4, 49kD
  misc_feature (1)..(221): NCBI GI NO: 5032069 NR Description: splicing factor 3b, subunit 4
  misc_feature (1)..(221): NCBI GI NO: 23346437 NR Description: splicing factor 3b, subunit 4
  misc_feature (1)..(221): NCBI GI NO: 34858075 NR Description: similar to Sf3b4 protein [Rattus norvegicus]
MRDPETGNSRGFGFVSYDSFESSDQAIEAMNNQHLCNRPITVSYAYKKDTKGERHGTPAERLLAANNPGSQKHRPHTMFATAPPTQGLQNGGVGAPVPRPFANGNVPGQMQHVRPPPPPVGQYPPMQMHGQPAWPGPPQNMQQVPPPMQQQLQYRLPGMPPPPQNMMPPPQNMMPPPHHMARPPPPPPNMQAPPMWRPPPPPQQGGGMPPPPMSMPPPPPPPSG

SEQ ID NO: 18692 - DNA, 1250 bp, Triticum aestivum
  misc_feature (1)..(1250): Ceres Seq. ID no. 13654191
ctcccccctccacgtctcgctagaaacgcacgcacacgcgtatagtagcagtgtagcaccaacgggcagtcgggcactagctagctccttcgagtccgatcgatcggatcggcatgacgctggatgccctgtgcgcggccggcgacgtcctcgtctacgacaccttcaacgcggcggcggccgtgagtgccgcgccggccgagagcagcctcctcttctgcgacgtcgccggagcggcatggatggcggggtctgctgccgctgaggcgccggctgtgaccatagtgccggtggaagaaggggagaaggcgcaggggaggaggaagcggcggcggcgggcgaggagctgcaagaatcgcgaggacgccgagagccagcggatgacccacattgccgtcgagcgcaaccgccgccgccagatgaacgagtacctcgccgtgctccgctccctcatgccggagtcctacgcccaccggggcgaccaagcatccattgtcggcggcgccatcgatttcgtcaaggagctcgagcagctgctgcagtccctggaggcgcagaagcgcacgctcctcgcccagccgcagcaggagcacaagccgctgcccatccgtgacgcgatgccatcgtcgagcaaaacggtcacggccgcggcgacaactacgacgagcagcggcagcggcgagggcaagcaggcgtcggcgatgcgcgaggggatgggtccgccgttcgcggggttcttcacgtacccacagtacgtgtgtcgcctcccgccgcgggacgacgccgacgaccgcgccggggcggcggacatcgaggtgacgctggtggagacgcacgccaacgtccgggtgatggcgccgcggcggccggggcagctgctcaggatggtcgccgggatggaggcgctcaggctcaccgtgctgcacctcaacgtcaccacgctcggctcgctcgcgctctactccctcagcgtcaaggtggaggaagggtgcgggccgacgacggcggacgacatcgccgcggcggtgcaccatgtgctctgcctcgtcgacgccgaggcgacgtcgcagcggctgctcgccggtgggcagcaggagattttaagttagctaggtggaccggggcaacgccggcaagcttgccgtctgaggcaggggtagtaatttgtaaagtgtagtggacctctacgaggctttggagcatggttaataagagcatgtgcagccggactttgcaaatccgcacgcctg

SEQ ID NO: 18693 - protein, 331 aa, Triticum aestivum
  peptide (1)..(331): Ceres Seq. ID no. 13654192
  misc_feature (88)..(139): Pfam Name: Pfam Description:  Helix-loop-helix DNA-binding domain
  misc_feature (1)..(288): NCBI GI NO: 38346722 NR Description: OSJNBa0086O06.20
  misc_feature (182)..(315): NCBI GI NO: 18395124 NR Description: bHLH protein family [Arabidopsis thaliana]
  misc_feature (51)..(157): NCBI GI NO: 18395124 NR Description: bHLH protein family [Arabidopsis thaliana]
  misc_feature (180)..(317): NCBI GI NO: 15218391 NR Description: bHLH protein family [Arabidopsis thaliana]
  misc_feature (204)..(315): NCBI GI NO: 21593808 NR Description: unknown [Arabidopsis thaliana]
  misc_feature (51)..(157): NCBI GI NO: 21593808 NR Description: unknown [Arabidopsis thaliana]
  misc_feature (66)..(151): NCBI GI NO: 15218391 NR Description: bHLH protein family [Arabidopsis thaliana]
  misc_feature (49)..(152): NCBI GI NO: 37533680 NR Description: putative helix-loop-helix DNA-binding protein
  misc_feature (228)..(309): NCBI GI NO: 37533680 NR Description: putative helix-loop-helix DNA-binding protein
  misc_feature (67)..(315): NCBI GI NO: 21593074 NR Description: bHLH DNA-binding protein-like protein
MTLDALCAAGDVLVYDTFNAAAAVSAAPAESSLLFCDVAGAAWMAGSAAAEAPAVTIVPVEEGEKAQGRRKRRRRARSCKNREDAESQRMTHIAVERNRRRQMNEYLAVLRSLMPESYAHRGDQASIVGGAIDFVKELEQLLQSLEAQKRTLLAQPQQEHKPLPIRDAMPSSSKTVTAAATTTTSSGSGEGKQASAMREGMGPPFAGFFTYPQYVCRLPPRDDADDRAGAADIEVTLVETHANVRVMAPRRPGQLLRMVAGMEALRLTVLHLNVTTLGSLALYSLSVKVEEGCGPTTADDIAAAVHHVLCLVDAEATSQRLLAGGQQEILS

SEQ ID NO: 18694 - protein, 288 aa, Triticum aestivum
  peptide (1)..(288): Ceres Seq. ID no. 13654193
  misc_feature (45)..(96): Pfam Name: Pfam Description:  Helix-loop-helix DNA-binding domain
  misc_feature (1)..(245): NCBI GI NO: 38346722 NR Description: OSJNBa0086O06.20
  misc_feature (139)..(272): NCBI GI NO: 18395124 NR Description: bHLH protein family [Arabidopsis thaliana]
  misc_feature (8)..(114): NCBI GI NO: 18395124 NR Description: bHLH protein family [Arabidopsis thaliana]
  misc_feature (137)..(274): NCBI GI NO: 15218391 NR Description: bHLH protein family [Arabidopsis thaliana]
  misc_feature (161)..(272): NCBI GI NO: 21593808 NR Description: unknown [Arabidopsis thaliana]
  misc_feature (8)..(114): NCBI GI NO: 21593808 NR Description: unknown [Arabidopsis thaliana]
  misc_feature (23)..(108): NCBI GI NO: 15218391 NR Description: bHLH protein family [Arabidopsis thaliana]
  misc_feature (6)..(109): NCBI GI NO: 37533680 NR Description: putative helix-loop-helix DNA-binding protein
  misc_feature (185)..(266): NCBI GI NO: 37533680 NR Description: putative helix-loop-helix DNA-binding protein
  misc_feature (24)..(272): NCBI GI NO: 21593074 NR Description: bHLH DNA-binding protein-like protein
MAGSAAAEAPAVTIVPVEEGEKAQGRRKRRRRARSCKNREDAESQRMTHIAVERNRRRQMNEYLAVLRSLMPESYAHRGDQASIVGGAIDFVKELEQLLQSLEAQKRTLLAQPQQEHKPLPIRDAMPSSSKTVTAAATTTTSSGSGEGKQASAMREGMGPPFAGFFTYPQYVCRLPPRDDADDRAGAADIEVTLVETHANVRVMAPRRPGQLLRMVAGMEALRLTVLHLNVTTLGSLALYSLSVKVEEGCGPTTADDIAAAVHHVLCLVDAEATSQRLLAGGQQEILS

SEQ ID NO: 18695 - protein, 242 aa, Triticum aestivum
  peptide (1)..(242): Ceres Seq. ID no. 13654194
  misc_feature (1)..(50): Pfam Name: Pfam Description:  Helix-loop-helix DNA-binding domain
  misc_feature (1)..(199): NCBI GI NO: 38346722 NR Description: OSJNBa0086O06.20
  misc_feature (93)..(226): NCBI GI NO: 18395124 NR Description: bHLH protein family [Arabidopsis thaliana]
  misc_feature (1)..(68): NCBI GI NO: 18395124 NR Description: bHLH protein family [Arabidopsis thaliana]
  misc_feature (91)..(228): NCBI GI NO: 15218391 NR Description: bHLH protein family [Arabidopsis thaliana]
  misc_feature (115)..(226): NCBI GI NO: 21593808 NR Description: unknown [Arabidopsis thaliana]
  misc_feature (1)..(68): NCBI GI NO: 21593808 NR Description: unknown [Arabidopsis thaliana]
  misc_feature (1)..(62): NCBI GI NO: 15218391 NR Description: bHLH protein family [Arabidopsis thaliana]
  misc_feature (1)..(63): NCBI GI NO: 37533680 NR Description: putative helix-loop-helix DNA-binding protein
  misc_feature (139)..(220): NCBI GI NO: 37533680 NR Description: putative helix-loop-helix DNA-binding protein
  misc_feature (1)..(226): NCBI GI NO: 21593074 NR Description: bHLH DNA-binding protein-like protein
MTHIAVERNRRRQMNEYLAVLRSLMPESYAHRGDQASIVGGAIDFVKELEQLLQSLEAQKRTLLAQPQQEHKPLPIRDAMPSSSKTVTAAATTTTSSGSGEGKQASAMREGMGPPFAGFFTYPQYVCRLPPRDDADDRAGAADIEVTLVETHANVRVMAPRRPGQLLRMVAGMEALRLTVLHLNVTTLGSLALYSLSVKVEEGCGPTTADDIAAAVHHVLCLVDAEATSQRLLAGGQQEILS

SEQ ID NO: 18696 - DNA, 2304 bp, Triticum aestivum
  misc_feature (1)..(2304): Ceres Seq. ID no. 12465083
ggatctcacctctgccccttttctccatcctccgactcgccgccgccgccgggagccgacccaacaagcccgagcgccagccatggccatcggatctctcctcgcctcgcggctggccaggtccggccacgccctcgccacgcgcgccatcgctcaggctccccggacccacaatcatcatcacgcgacgtctcccctgctctccaggctcggagccgtggcccgcgctttcagctcaaggcccgccgccgccgatgtcatcgggatcgatttgggcacgacgaactcatgtgtctccgtcatggaaggaaagacaccacgggtgattgagaatgctgaaggtgcgaggacaacgccctccattgttgccacaaacagcaaaggcgagatcttgattggcatcactgccagtcgacaggcagtgacaaatgccgagaacacagttcgtgggtccaagcgcctgattggtagagcttttgatgacccccaaacacagaaggaaatgaagatggtgccttacaagattgtcaggggaacaaatggtgatgcctgggtggagatggctgggaagtcatactccccgagtcagattggtgcgtttgttcttaccaagatgaaggaaactgcagaggcttaccttggcaagtcggtctccaaggctgttattacagtcccagcttatttcaatgatgcccagcgtcaggccaccaaggatgctggtaggattgctgggttggaggtgatgaggattatcaatgagcccactgctgcagctctgtcgtatggaatgaacaacaaggagggcctgattgctgtatttgacttgggcggtggaacatttgatgtatcaatccttgagatttctaatggcgtttttgaggtcaaggcgaccaatggagatactttccttggtggtgaggactttgatgctacattgctcaactacctggttagtgaatataagaactctgacaacattgatctgagcaaggacaagttggccctgcaaaggctcagggaagctgctgagaaggcgaaggttgagctttcctcaactccacagactgaaatcaatctccccttcatcacagcagatgcctctggtgcgaagcatttcaacattaccttgaccagatcaaagtttgagtctcttgtgggcaacctcattgagagaactcgcatcccatgtacaaactgcctcaaggatgctggtgtttctgcaaaggagattgatgaggttctactggttggtggtatgacaagggtgccaaaggtccaggatattgtttctcagatattcggcaagtcgccaagcaagggtgtcaatcctgatgaggctgttgccatgggagctgccattcagggtggcattttgaggggtgatgtgaaggagctcttgctgctggatgtcacgcccctttcccttggtattgagactcttggaggcatcttcacaaggctaatcaacaggaacactacaattccaaccaagaagagccagaccttctccactgctgcagataaccagacgcaggttggaatcaaggtgcttcagggtgagagggagatggccacagataacaagcttcttggtgaattccagcttgaaggcattccaccggccccgaggggtatgccacagattgaggtcacttttgacattgatgccaatggtattgtcaaggtgtcagcaaaggacaagtccactggcaaagagcaggatatcaccatcaaatcttcaggtggtttgtctgacagtgacatcgagaagatggtgaaggaggcggagctaaattctcagagggatcaggaaaggaagtcgttgattgacctcaggaactctgcagataccaccatctacagcattgagaagagcgtcagcgagtacaaagacaaggtccctgctgaagttgtcacggagatccagtctgctgtctctgatctgagagcagcaatggctggcgacgattcggacgccatcaagcagaagctggaggcggcgaacaaggcagtctcaaagattggacagcacatgcagggtggtggcggcgctgccgccggcgacagcggcagcagtggtggtggcgaccagactccggaagctgaataccaggaccccaaggaggccaagatgtagatttgttctgcatcaggtttcttctacttttttgtgtacccagtttaggaagttaatatctttatcctacctccgtctgcttaggtttctaagagggctacgacgatacctgtaacattttggcaattgttcgaattgcggataaattgtgagaggagcaaactcat

SEQ ID NO: 18697 - protein, 711 aa, Triticum aestivum
  peptide (1)..(711): Ceres Seq. ID no. 12465084
  misc_feature (86)..(680): Pfam Name: Pfam Description:  Hsp70 protein
  misc_feature (62)..(708): NCBI GI NO: 399940 NR Description: HEAT SHOCK 70 KD PROTEIN, MITOCHONDRIAL PRECURSOR
  misc_feature (34)..(708): NCBI GI NO: 7441844 NR Description: dnaK-type molecular chaperone PHSP1 precursor
  misc_feature (34)..(708): NCBI GI NO: 585272 NR Description: HEAT SHOCK 70 KD PROTEIN, MITOCHONDRIAL PRECURSOR
  misc_feature (63)..(708): NCBI GI NO: 7441879 NR Description: dnaK-type molecular chaperone HSC70-11
  misc_feature (68)..(708): NCBI GI NO: 27476086 NR Description: Putative heat shock 70 KD protein
  misc_feature (74)..(708): NCBI GI NO: 15242459 NR Description: heat shock protein 70
  misc_feature (63)..(708): NCBI GI NO: 7441881 NR Description: dnaK-type molecular chaperone HSC70-10
  misc_feature (28)..(708): NCBI GI NO: 585273 NR Description: Heat shock 70 kDa protein, mitochondrial precursor
  misc_feature (86)..(710): NCBI GI NO: 22962329 NR Description: hypothetical protein [Rhodopseudomonas palustris]
  misc_feature (20)..(710): NCBI GI NO: 34878657 NR Description: similar to grp75 [Rattus norvegicus]
DLTSAPFLHPPTRRRRREPTQQARAPAMAIGSLLASRLARSGHALATRAIAQAPRTHNHHHATSPLLSRLGAVARAFSSRPAAADVIGIDLGTTNSCVSVMEGKTPRVIENAEGARTTPSIVATNSKGEILIGITASRQAVTNAENTVRGSKRLIGRAFDDPQTQKEMKMVPYKIVRGTNGDAWVEMAGKSYSPSQIGAFVLTKMKETAEAYLGKSVSKAVITVPAYFNDAQRQATKDAGRIAGLEVMRIINEPTAAALSYGMNNKEGLIAVFDLGGGTFDVSILEISNGVFEVKATNGDTFLGGEDFDATLLNYLVSEYKNSDNIDLSKDKLALQRLREAAEKAKVELSSTPQTEINLPFITADASGAKHFNITLTRSKFESLVGNLIERTRIPCTNCLKDAGVSAKEIDEVLLVGGMTRVPKVQDIVSQIFGKSPSKGVNPDEAVAMGAAIQGGILRGDVKELLLLDVTPLSLGIETLGGIFTRLINRNTTIPTKKSQTFSTAADNQTQVGIKVLQGEREMATDNKLLGEFQLEGIPPAPRGMPQIEVTFDIDANGIVKVSAKDKSTGKEQDITIKSSGGLSDSDIEKMVKEAELNSQRDQERKSLIDLRNSADTTIYSIEKSVSEYKDKVPAEVVTEIQSAVSDLRAAMAGDDSDAIKQKLEAANKAVSKIGQHMQGGGGAAAGDSGSSGGGDQTPEAEYQDPKEAKM

SEQ ID NO: 18698 - protein, 684 aa, Triticum aestivum
  peptide (1)..(684): Ceres Seq. ID no. 12465085
  misc_feature (59)..(653): Pfam Name: Pfam Description:  Hsp70 protein
  misc_feature (35)..(681): NCBI GI NO: 399940 NR Description: HEAT SHOCK 70 KD PROTEIN, MITOCHONDRIAL PRECURSOR
  misc_feature (7)..(681): NCBI GI NO: 7441844 NR Description: dnaK-type molecular chaperone PHSP1 precursor
  misc_feature (7)..(681): NCBI GI NO: 585272 NR Description: HEAT SHOCK 70 KD PROTEIN, MITOCHONDRIAL PRECURSOR
  misc_feature (36)..(681): NCBI GI NO: 7441879 NR Description: dnaK-type molecular chaperone HSC70-11
  misc_feature (41)..(681): NCBI GI NO: 27476086 NR Description: Putative heat shock 70 KD protein
  misc_feature (47)..(681): NCBI GI NO: 15242459 NR Description: heat shock protein 70
  misc_feature (36)..(681): NCBI GI NO: 7441881 NR Description: dnaK-type molecular chaperone HSC70-10
  misc_feature (1)..(681): NCBI GI NO: 585273 NR Description: Heat shock 70 kDa protein, mitochondrial precursor
  misc_feature (59)..(683): NCBI GI NO: 22962329 NR Description: hypothetical protein [Rhodopseudomonas palustris]
  misc_feature (1)..(683): NCBI GI NO: 34878657 NR Description: similar to grp75 [Rattus norvegicus]
MAIGSLLASRLARSGHALATRAIAQAPRTHNHHHATSPLLSRLGAVARAFSSRPAAADVIGIDLGTTNSCVSVMEGKTPRVIENAEGARTTPSIVATNSKGEILIGITASRQAVTNAENTVRGSKRLIGRAFDDPQTQKEMKMVPYKIVRGTNGDAWVEMAGKSYSPSQIGAFVLTKMKETAEAYLGKSVSKAVITVPAYFNDAQRQATKDAGRIAGLEVMRIINEPTAAALSYGMNNKEGLIAVFDLGGGTFDVSILEISNGVFEVKATNGDTFLGGEDFDATLLNYLVSEYKNSDNIDLSKDKLALQRLREAAEKAKVELSSTPQTEINLPFITADASGAKHFNITLTRSKFESLVGNLIERTRIPCTNCLKDAGVSAKEIDEVLLVGGMTRVPKVQDIVSQIFGKSPSKGVNPDEAVAMGAAIQGGILRGDVKELLLLDVTPLSLGIETLGGIFTRLINRNTTIPTKKSQTFSTAADNQTQVGIKVLQGEREMATDNKLLGEFQLEGIPPAPRGMPQIEVTFDIDANGIVKVSAKDKSTGKEQDITIKSSGGLSDSDIEKMVKEAELNSQRDQERKSLIDLRNSADTTIYSIEKSVSEYKDKVPAEVVTEIQSAVSDLRAAMAGDDSDAIKQKLEAANKAVSKIGQHMQGGGGAAAGDSGSSGGGDQTPEAEYQDPKEAKM

SEQ ID NO: 18699 - protein, 611 aa, Triticum aestivum
  peptide (1)..(611): Ceres Seq. ID no. 12465086
  misc_feature (1)..(580): Pfam Name: Pfam Description:  Hsp70 protein
  misc_feature (1)..(608): NCBI GI NO: 399940 NR Description: HEAT SHOCK 70 KD PROTEIN, MITOCHONDRIAL PRECURSOR
  misc_feature (1)..(608): NCBI GI NO: 7441844 NR Description: dnaK-type molecular chaperone PHSP1 precursor
  misc_feature (1)..(608): NCBI GI NO: 585272 NR Description: HEAT SHOCK 70 KD PROTEIN, MITOCHONDRIAL PRECURSOR
  misc_feature (1)..(608): NCBI GI NO: 7441879 NR Description: dnaK-type molecular chaperone HSC70-11
  misc_feature (1)..(608): NCBI GI NO: 27476086 NR Description: Putative heat shock 70 KD protein
  misc_feature (1)..(608): NCBI GI NO: 15242459 NR Description: heat shock protein 70
  misc_feature (1)..(608): NCBI GI NO: 7441881 NR Description: dnaK-type molecular chaperone HSC70-10
  misc_feature (1)..(608): NCBI GI NO: 585273 NR Description: Heat shock 70 kDa protein, mitochondrial precursor
  misc_feature (1)..(610): NCBI GI NO: 22962329 NR Description: hypothetical protein [Rhodopseudomonas palustris]
  misc_feature (1)..(610): NCBI GI NO: 34878657 NR Description: similar to grp75 [Rattus norvegicus]
MEGKTPRVIENAEGARTTPSIVATNSKGEILIGITASRQAVTNAENTVRGSKRLIGRAFDDPQTQKEMKMVPYKIVRGTNGDAWVEMAGKSYSPSQIGAFVLTKMKETAEAYLGKSVSKAVITVPAYFNDAQRQATKDAGRIAGLEVMRIINEPTAAALSYGMNNKEGLIAVFDLGGGTFDVSILEISNGVFEVKATNGDTFLGGEDFDATLLNYLVSEYKNSDNIDLSKDKLALQRLREAAEKAKVELSSTPQTEINLPFITADASGAKHFNITLTRSKFESLVGNLIERTRIPCTNCLKDAGVSAKEIDEVLLVGGMTRVPKVQDIVSQIFGKSPSKGVNPDEAVAMGAAIQGGILRGDVKELLLLDVTPLSLGIETLGGIFTRLINRNTTIPTKKSQTFSTAADNQTQVGIKVLQGEREMATDNKLLGEFQLEGIPPAPRGMPQIEVTFDIDANGIVKVSAKDKSTGKEQDITIKSSGGLSDSDIEKMVKEAELNSQRDQERKSLIDLRNSADTTIYSIEKSVSEYKDKVPAEVVTEIQSAVSDLRAAMAGDDSDAIKQKLEAANKAVSKIGQHMQGGGGAAAGDSGSSGGGDQTPEAEYQDPKEAKM

SEQ ID NO: 18700 - DNA, 851 bp, Triticum aestivum
  misc_feature (1)..(851): Ceres Seq. ID no. 12613614
acaacttgggtcccccggcggtttcctccttcctctcggacaaaaccaaacgaaccaagatacaaacttcttcttcttcttcttcttcctccggcggatctcatcttcagatcacatccaagcagcgcaagcaggagacgagacgcgctccctcgctcgctccaccgtccacaaccaaaccaggcaaagggcagcgatgacgttcgacaaggtggaggagctgcggccgggcacctacggccacaacctccagctccgggtgctcagctccaagcccgtcgtcctccacaggccgcagggcggcagggccggcggcaacatgcgcatcgccgagtgcatcgtcggcgacgacaccggcgtcgtcgtattcaccgcccgcaacgagcaagtggacgtcatgaagcccggggctgtcgtggaggcgaggaaggcgagggtggacatgtacaaggggtcgatgcgcctggccgtggacaagtgggggacgctcaaggccgccgagagccctgcggacttcaaggtgaaggaggacaacaatgtgtccttggtcgagtttgagctcatcactgtgatgcagtgattgaagagggctcctcctcccccttgcctaggaggaggaggaggaggaggaggcagaggaggctcagcagctgttaggctgagcacaaagcaataagtcggccaatcatggctcatgttcttcaccccctcccccctctctctgtttactctttatttgctgaaagttttgctagtcctgctaccttggattaattgtcgttagtaataccatatatgtttgtgaggagttacaaaaaaaaaaaaaaaaaagcttatcgataccgtcgacc

SEQ ID NO: 18701 - protein, 192 aa, Triticum aestivum
  peptide (1)..(192): Ceres Seq. ID no. 12613615
  misc_feature (68)..(190): NCBI GI NO: 18391179 NR Description: expressed protein; protein id: At1g10590
  misc_feature (68)..(190): NCBI GI NO: 30681801 NR Description: expressed protein [Arabidopsis thaliana]
  misc_feature (68)..(192): NCBI GI NO: 18395285 NR Description: expressed protein; protein id: At1g23750
  misc_feature (68)..(129): NCBI GI NO: 6573753 NR Description: F20B24.1 [Arabidopsis thaliana]
  misc_feature (130)..(190): NCBI GI NO: 6573753 NR Description: F20B24.1 [Arabidopsis thaliana]
  misc_feature (68)..(192): NCBI GI NO: 34904470 NR Description: OSJNBa0086P08.14
  misc_feature (48)..(192): NCBI GI NO: 18403397 NR Description: Expressed protein; protein id: At2g33845
  misc_feature (68)..(190): NCBI GI NO: 34909622 NR Description: P0435B05.31
  misc_feature (68)..(191): NCBI GI NO: 24413970 NR Description: contains EST AU181579
  misc_feature (68)..(190): NCBI GI NO: 15235304 NR Description: putative protein; protein id: At4g28440
QLGSPGGFLLPLGQNQTNQDTNFFFFFFFLRRISSSDHIQAAQAGDETRSLARSTVHNQTRQRAAMTFDKVEELRPGTYGHNLQLRVLSSKPVVLHRPQGGRAGGNMRIAECIVGDDTGVVVFTARNEQVDVMKPGAVVEARKARVDMYKGSMRLAVDKWGTLKAAESPADFKVKEDNNVSLVEFELITVMQ

SEQ ID NO: 18702 - protein, 185 aa, Triticum aestivum
  peptide (1)..(185): Ceres Seq. ID no. 12613616
TTWVPRRFPPSSRTKPNEPRYKLLLLLLLPPADLIFRSHPSSASRRRDALPRSLHRPQPNQAKGSDDVRQGGGAAAGHLRPQPPAPGAQLQARRPPQAAGRQGRRQHAHRRVHRRRRHRRRRIHRPQRASGRHEARGCRGGEEGEGGHVQGVDAPGRGQVGDAQGRREPCGLQGEGGQQCVLGRV

SEQ ID NO: 18703 - protein, 127 aa, Triticum aestivum
  peptide (1)..(127): Ceres Seq. ID no. 12613617
  misc_feature (3)..(125): NCBI GI NO: 18391179 NR Description: expressed protein; protein id: At1g10590
  misc_feature (3)..(125): NCBI GI NO: 30681801 NR Description: expressed protein [Arabidopsis thaliana]
  misc_feature (3)..(127): NCBI GI NO: 18395285 NR Description: expressed protein; protein id: At1g23750
  misc_feature (3)..(64): NCBI GI NO: 6573753 NR Description: F20B24.1 [Arabidopsis thaliana]
  misc_feature (65)..(125): NCBI GI NO: 6573753 NR Description: F20B24.1 [Arabidopsis thaliana]
  misc_feature (3)..(127): NCBI GI NO: 34904470 NR Description: OSJNBa0086P08.14
  misc_feature (1)..(127): NCBI GI NO: 18403397 NR Description: Expressed protein; protein id: At2g33845
  misc_feature (3)..(125): NCBI GI NO: 34909622 NR Description: P0435B05.31
  misc_feature (3)..(126): NCBI GI NO: 24413970 NR Description: contains EST AU181579
  misc_feature (3)..(125): NCBI GI NO: 15235304 NR Description: putative protein; protein id: At4g28440
MTFDKVEELRPGTYGHNLQLRVLSSKPVVLHRPQGGRAGGNMRIAECIVGDDTGVVVFTARNEQVDVMKPGAVVEARKARVDMYKGSMRLAVDKWGTLKAAESPADFKVKEDNNVSLVEFELITVMQ

SEQ ID NO: 18704 - DNA, 732 bp, Triticum aestivum
  misc_feature (1)..(732): Ceres Seq. ID no. 12613751
atctacttgtagtacgtgttctttcccctccaccgcggccagagaaggaggagcatcgatccatggcgcgcttcttcggccgcctgtgggacagagctcaaggcaagctggatgttgtgaggatatgtgagaaggtgttcgacgaactggccgtcctcaacgccgagaagaacgccaagctcctggacgtcaaaaatctccacgtcgccaccctcatggtttacaactccatcaacaagcaactggtgggacctcacaaggaccctccatgcatgcaggtcgtcaaggagaaagcggagggcttccgcgacaaggggataacgcagcaggagttccgggagctgatcatggagtgggtgaggatcgacctccgcctcgtcctcgccaacaaggccgcggtggccgtcctggcggcaccgctgctcgccgtcacggccaagaacgccggcaggcaggtgccgaggatgagggacgcggtggataaggtgcccacgccgctgctcttcgtcgtcttctccgccgggctcatgctcctgcaggacatcagggcaggcaagcagtgaacacctgaaccggacgcggtgagcaatgcgcgatgtatttaagatgagtgtgcacctttactggaaatttgtatgcaggcagctcggtgtgaaaaatttgtagccaaagaaagtggtaaagggccgtacgtaatggcattcaatcttaatatggttatcaggcggctcc

SEQ ID NO: 18705 - protein, 186 aa, Triticum aestivum
  peptide (1)..(186): Ceres Seq. ID no. 12613752
  misc_feature (21)..(186): NCBI GI NO: 38344138 NR Description: OSJNBa0041A02.5
  misc_feature (21)..(184): NCBI GI NO: 38344137 NR Description: OSJNBa0041A02.4
  misc_feature (21)..(176): NCBI GI NO: 18408144 NR Description: expressed protein; protein id: At1g64850
LLVVRVLSPPPRPEKEEHRSMARFFGRLWDRAQGKLDVVRICEKVFDELAVLNAEKNAKLLDVKNLHVATLMVYNSINKQLVGPHKDPPCMQVVKEKAEGFRDKGITQQEFRELIMEWVRIDLRLVLANKAAVAVLAAPLLAVTAKNAGRQVPRMRDAVDKVPTPLLFVVFSAGLMLLQDIRAGKQ

SEQ ID NO: 18706 - protein, 166 aa, Triticum aestivum
  peptide (1)..(166): Ceres Seq. ID no. 12613753
  misc_feature (1)..(166): NCBI GI NO: 38344138 NR Description: OSJNBa0041A02.5
  misc_feature (1)..(164): NCBI GI NO: 38344137 NR Description: OSJNBa0041A02.4
  misc_feature (1)..(156): NCBI GI NO: 18408144 NR Description: expressed protein; protein id: At1g64850
MARFFGRLWDRAQGKLDVVRICEKVFDELAVLNAEKNAKLLDVKNLHVATLMVYNSINKQLVGPHKDPPCMQVVKEKAEGFRDKGITQQEFRELIMEWVRIDLRLVLANKAAVAVLAAPLLAVTAKNAGRQVPRMRDAVDKVPTPLLFVVFSAGLMLLQDIRAGKQ

SEQ ID NO: 18707 - protein, 115 aa, Triticum aestivum
  peptide (1)..(115): Ceres Seq. ID no. 12613754
  misc_feature (1)..(115): NCBI GI NO: 38344138 NR Description: OSJNBa0041A02.5
  misc_feature (1)..(113): NCBI GI NO: 38344137 NR Description: OSJNBa0041A02.4
  misc_feature (1)..(105): NCBI GI NO: 18408144 NR Description: expressed protein; protein id: At1g64850
MVYNSINKQLVGPHKDPPCMQVVKEKAEGFRDKGITQQEFRELIMEWVRIDLRLVLANKAAVAVLAAPLLAVTAKNAGRQVPRMRDAVDKVPTPLLFVVFSAGLMLLQDIRAGKQ

SEQ ID NO: 18708 - DNA, 781 bp, Triticum aestivum
  misc_feature (1)..(781): Ceres Seq. ID no. 13582876
aaaaaaaactcgctattctcaaaaaagaaaaaagaaaaactcgctgttcttgctctcggccggctgtactgctgctgctccttgagctctccgccctctcccggtctccccaatcgccccgccgccgcggcctccttgctgcctgcgtccgcttccgaccttccgtgctccgtcttctcctcgtcttccccgctcccacctccgcgctgccctcgaggatggaagagccgctgcggtacaagttcgggccgtataagattgacgcgagggaggtcttccacgccacgcccctcacctacgccatggtcaacctccgccccctcctccctggtcatgtgctcgtgtgccccaaacgtgaggtgaaacgatttgctgatctaagttctgatgagactagtgatttgtgggtaactgcaaaagaagttggtgcaaagctcgagcagtaccacaaagcttcttccatcacattcgcgattcaggatggtcctcaggctggccaaacagttgcccatgtccacatccacgtcatccccaggaagaaaggagattttgagaaaaacgatgaaatatatgatgcgattgacgtgaaagagaaggaaatgaaggagaagcttgacctggacgtcgaaagaaaagatagaagcatggaagaaatggctcatgaggccaccgagtaccgcgctcttttctcctagccagatagatgtatttctgatgaactctctaattatcatccgctgccactcttgcctaaaataagccttgtgactgcttgtcctcg

SEQ ID NO: 18709 - protein, 230 aa, Triticum aestivum
  peptide (1)..(230): Ceres Seq. ID no. 13582877
  misc_feature (79)..(230): NCBI GI NO: 27542770 NR Description: ATPase-like protein [Sorghum bicolor]
  misc_feature (79)..(229): NCBI GI NO: 27808510 NR Description: At5g58240 [Arabidopsis thaliana]
  misc_feature (79)..(229): NCBI GI NO: 8777325 NR Description: bis(5'-adenosyl)-triphosphatase-like protein
  misc_feature (79)..(229): NCBI GI NO: 30697031 NR Description: bis
  misc_feature (79)..(230): NCBI GI NO: 37589828 NR Description: Unknown (protein for MGC:73176) [Danio rerio]
  misc_feature (81)..(229): NCBI GI NO: 28828402 NR Description: similar to diadenosine tetraphosphatase
  misc_feature (77)..(229): NCBI GI NO: 11120730 NR Description: fragile histidine triad protein
  misc_feature (77)..(229): NCBI GI NO: 4503719 NR Description: fragile histidine triad gene; bis
  misc_feature (77)..(229): NCBI GI NO: 15215093 NR Description: Fhit protein [Mus musculus]
  misc_feature (77)..(229): NCBI GI NO: 6753862 NR Description: fragile histidine triad gene [Mus musculus]
KKLAILKKEKRKTRCSCSRPAVLLLLLELSALSRSPQSPRRRGLLAACVRFRPSVLRLLLVFPAPTSALPSRMEEPLRYKFGPYKIDAREVFHATPLTYAMVNLRPLLPGHVLVCPKREVKRFADLSSDETSDLWVTAKEVGAKLEQYHKASSITFAIQDGPQAGQTVAHVHIHVIPRKKGDFEKNDEIYDAIDVKEKEMKEKLDLDVERKDRSMEEMAHEATEYRALFS

SEQ ID NO: 18710 - protein, 158 aa, Triticum aestivum
  peptide (1)..(158): Ceres Seq. ID no. 13582878
  misc_feature (7)..(158): NCBI GI NO: 27542770 NR Description: ATPase-like protein [Sorghum bicolor]
  misc_feature (7)..(157): NCBI GI NO: 27808510 NR Description: At5g58240 [Arabidopsis thaliana]
  misc_feature (7)..(157): NCBI GI NO: 8777325 NR Description: bis(5'-adenosyl)-triphosphatase-like protein
  misc_feature (7)..(157): NCBI GI NO: 30697031 NR Description: bis
  misc_feature (7)..(158): NCBI GI NO: 37589828 NR Description: Unknown (protein for MGC:73176) [Danio rerio]
  misc_feature (9)..(157): NCBI GI NO: 28828402 NR Description: similar to diadenosine tetraphosphatase
  misc_feature (5)..(157): NCBI GI NO: 11120730 NR Description: fragile histidine triad protein
  misc_feature (5)..(157): NCBI GI NO: 4503719 NR Description: fragile histidine triad gene; bis
  misc_feature (5)..(157): NCBI GI NO: 15215093 NR Description: Fhit protein [Mus musculus]
  misc_feature (5)..(157): NCBI GI NO: 6753862 NR Description: fragile histidine triad gene [Mus musculus]
MEEPLRYKFGPYKIDAREVFHATPLTYAMVNLRPLLPGHVLVCPKREVKRFADLSSDETSDLWVTAKEVGAKLEQYHKASSITFAIQDGPQAGQTVAHVHIHVIPRKKGDFEKNDEIYDAIDVKEKEMKEKLDLDVERKDRSMEEMAHEATEYRALFS

SEQ ID NO: 18711 - protein, 130 aa, Triticum aestivum
  peptide (1)..(130): Ceres Seq. ID no. 13582879
  misc_feature (1)..(130): NCBI GI NO: 27542770 NR Description: ATPase-like protein [Sorghum bicolor]
  misc_feature (1)..(129): NCBI GI NO: 27808510 NR Description: At5g58240 [Arabidopsis thaliana]
  misc_feature (1)..(129): NCBI GI NO: 8777325 NR Description: bis(5'-adenosyl)-triphosphatase-like protein
  misc_feature (1)..(129): NCBI GI NO: 30697031 NR Description: bis
  misc_feature (1)..(130): NCBI GI NO: 37589828 NR Description: Unknown (protein for MGC:73176) [Danio rerio]
  misc_feature (1)..(129): NCBI GI NO: 28828402 NR Description: similar to diadenosine tetraphosphatase
  misc_feature (1)..(129): NCBI GI NO: 11120730 NR Description: fragile histidine triad protein
  misc_feature (1)..(129): NCBI GI NO: 4503719 NR Description: fragile histidine triad gene; bis
  misc_feature (1)..(129): NCBI GI NO: 15215093 NR Description: Fhit protein [Mus musculus]
  misc_feature (1)..(129): NCBI GI NO: 6753862 NR Description: fragile histidine triad gene [Mus musculus]
MVNLRPLLPGHVLVCPKREVKRFADLSSDETSDLWVTAKEVGAKLEQYHKASSITFAIQDGPQAGQTVAHVHIHVIPRKKGDFEKNDEIYDAIDVKEKEMKEKLDLDVERKDRSMEEMAHEATEYRALFS

SEQ ID NO: 18712 - DNA, 810 bp, Triticum aestivum
  misc_feature (1)..(810): Ceres Seq. ID no. 13582830
cttctttctccttccctgcccaccagtccaccgccgccgcctctccccccatccccctctcccacctcctccggcgtcggccagcaagcagccatggcgagccccgcgcgcatcgacgtggataagctgagcgtggagcagctcaaggcgctcaaggagcagaccgatctggaggtcaatctcctccaggacagcctatccaagatccgcaccgccgccacccgcctcgagaacgccacggccgccctccacgagctctccctccgcccccaagggaagaagctgctcgtgccgctcacggcgtccctctacgtgcccggcacgctcgacgacgccgagaaggtcctcgtcgacgttggcaccggctactacattgagaaaactatgactcaaggaaaagaatactgtgaaaggaaaattaatttgctgaagtccaacttcgatgaactacttgagatggcgaccaaaaagaagagcatagcagatgaaatgggcatgtttctgcaagccaagctgaggcaggcatcaccgagctcgagttcgtgagagcggaatgcgcgccctgtcccttgctttgttgccttgttggagcgccggggtggttcgctcactcgcagccctcagggaacataggaggttctttagctgttttggccgtgtgtgcaaggttctctgagatgatttactgaaacagcctgctccatcgtcagacttcatcctcgagtaatttggaattcggtatcaaacgtgtgtgtcttggatgcacaatctgctttaatggctttgacaatcaattatgagtttgttgct

SEQ ID NO: 18713 - protein, 181 aa, Triticum aestivum
  peptide (1)..(181): Ceres Seq. ID no. 13582831
  misc_feature (55)..(174): Pfam Name: Pfam Description:  Prefoldin subunit
  misc_feature (32)..(181): NCBI GI NO: 37535560 NR Description: putative c-myc binding protein
  misc_feature (33)..(181): NCBI GI NO: 15237277 NR Description: c-myc binding protein MM-1-related protein
  misc_feature (38)..(174): NCBI GI NO: 1731809 NR Description: c-myc binding protein [Homo sapiens]
  misc_feature (38)..(174): NCBI GI NO: 9910216 NR Description: prefoldin 5
  misc_feature (38)..(174): NCBI GI NO: 22202633 NR Description: prefoldin 5 isoform alpha
  misc_feature (38)..(174): NCBI GI NO: 27665420 NR Description: similar to Prefoldin subunit 5
  misc_feature (38)..(174): NCBI GI NO: 30585355 NR Description: Homo sapiens prefoldin 5 [synthetic construct]
  misc_feature (38)..(174): NCBI GI NO: 26348121 NR Description: unnamed protein product [Mus musculus]
  misc_feature (38)..(174): NCBI GI NO: 12643929 NR Description: Prefoldin subunit 5
  misc_feature (15)..(181): NCBI GI NO: 40746642 NR Description: hypothetical protein AN1205.2
LLSPSLPTSPPPPPLPPSPSPTSSGVGQQAAMASPARIDVDKLSVEQLKALKEQTDLEVNLLQDSLSKIRTAATRLENATAALHELSLRPQGKKLLVPLTASLYVPGTLDDAEKVLVDVGTGYYIEKTMTQGKEYCERKINLLKSNFDELLEMATKKKSIADEMGMFLQAKLRQASPSSSS

SEQ ID NO: 18714 - protein, 150 aa, Triticum aestivum
  peptide (1)..(150): Ceres Seq. ID no. 13582832
  misc_feature (24)..(143): Pfam Name: Pfam Description:  Prefoldin subunit
  misc_feature (1)..(150): NCBI GI NO: 37535560 NR Description: putative c-myc binding protein
  misc_feature (2)..(150): NCBI GI NO: 15237277 NR Description: c-myc binding protein MM-1-related protein
  misc_feature (7)..(143): NCBI GI NO: 1731809 NR Description: c-myc binding protein [Homo sapiens]
  misc_feature (7)..(143): NCBI GI NO: 12643929 NR Description: Prefoldin subunit 5
  misc_feature (7)..(143): NCBI GI NO: 9910216 NR Description: prefoldin 5
  misc_feature (7)..(143): NCBI GI NO: 26348121 NR Description: unnamed protein product [Mus musculus]
  misc_feature (7)..(143): NCBI GI NO: 30585355 NR Description: Homo sapiens prefoldin 5 [synthetic construct]
  misc_feature (7)..(143): NCBI GI NO: 27665420 NR Description: similar to Prefoldin subunit 5
  misc_feature (7)..(143): NCBI GI NO: 22202633 NR Description: prefoldin 5 isoform alpha
  misc_feature (1)..(150): NCBI GI NO: 40746642 NR Description: hypothetical protein AN1205.2
MASPARIDVDKLSVEQLKALKEQTDLEVNLLQDSLSKIRTAATRLENATAALHELSLRPQGKKLLVPLTASLYVPGTLDDAEKVLVDVGTGYYIEKTMTQGKEYCERKINLLKSNFDELLEMATKKKSIADEMGMFLQAKLRQASPSSSS

SEQ ID NO: 18715 - DNA, 1030 bp, Triticum aestivum
  misc_feature (1)..(1030): Ceres Seq. ID no. 13596009
gaataaaagtctacttcccccggttccgttccgttccgtttctcaggttctctttcctcacaccatcgacacgaatcgaccctgagtccccaatcgaatctcactgagtcccgagtcggtcgaaccgaatccctctcatccccgttgatcgcccacgcccaacattcggggaggaggaatagcggaggaggaggccaaggaccgccgccgccgccgccgccatggccgcgctgccggtgatgaagctggggacgctgctcctgcggacgctgtccaagcctatcgctaaccgcctcaagagccaggccgccgtccaccccaagtttcgcgacttcatcatcagcatcgcccagacaaaccatcgtatcactacaaggatacaaaggcgcatttatgggcatgctactaatgtggctatcagacctttagatgaggagaaggcagtacaagttgctacagatctcattggagaaggcttcatcttttcggttgctgtcgctgctttaattttcgaggtgcaaagaagtgctaggtcagaggctagaaaggaggaagctcgtaaacaggaacttgaggaactgagacaaaaggaagagattttagctaaagatttagaagatctcaagctgaagctggctgaacttgagcgcctcgccaaaggccggggcctttctggaatattgaacttcaaaggtgtcaatgcagcagatagcagcaaggaagcaacacctgcttgatttatcgattcaactttggtcaggagaaagggggatgttgtgttgttgagtttatgcacaaagcacctcacaattggctaattggtttcttctgtcacagttctttgatattatagccatgcccattctttgggtgaatggatcaaattttatggtggttgatccattagacatcctgaaataatagagtgattgtgtgaggaaaaagcccgggtacttttgggtaagtgaccgcagaacaagatataaagatgaatgtattcttactttgggcctttggctcgctgtytaac

SEQ ID NO: 18716 - protein, 171 aa, Triticum aestivum
  peptide (1)..(171): Ceres Seq. ID no. 15221738
  misc_feature (1)..(171): NCBI GI NO: 34904528 NR Description: B1066G12.9
  misc_feature (4)..(157): NCBI GI NO: 18396819 NR Description: expressed protein [Arabidopsis thaliana]
  misc_feature (4)..(146): NCBI GI NO: 15230967 NR Description: hypothetical protein [Arabidopsis thaliana]
  misc_feature (1)..(146): NCBI GI NO: 19112998 NR Description: hypothetical coiled-coil protein
  misc_feature (1)..(138): NCBI GI NO: 39849948 NR Description: Unknown (protein for MGC:75494) [Homo sapiens]
  misc_feature (1)..(138): NCBI GI NO: 21758920 NR Description: unnamed protein product [Homo sapiens]
  misc_feature (1)..(145): NCBI GI NO: 27676608 NR Description: similar to OPA3 protein; Optic atrophy 3
  misc_feature (1)..(138): NCBI GI NO: 13376717 NR Description: OPA3 protein; Optic atrophy 3
  misc_feature (1)..(145): NCBI GI NO: 26342969 NR Description: unnamed protein product [Mus musculus]
  misc_feature (1)..(144): NCBI GI NO: 24649440 NR Description: CG13601-PA [Drosophila melanogaster]
MAALPVMKLGTLLLRTLSKPIANRLKSQAAVHPKFRDFIISIAQTNHRITTRIQRRIYGHATNVAIRPLDEEKAVQVATDLIGEGFIFSVAVAALIFEVQRSARSEARKEEARKQELEELRQKEEILAKDLEDLKLKLAELERLAKGRGLSGILNFKGVNAADSSKEATPA

SEQ ID NO: 18717 - protein, 165 aa, Triticum aestivum
  peptide (1)..(165): Ceres Seq. ID no. 15221739
  misc_feature (1)..(165): NCBI GI NO: 34904528 NR Description: B1066G12.9
  misc_feature (1)..(151): NCBI GI NO: 18396819 NR Description: expressed protein [Arabidopsis thaliana]
  misc_feature (1)..(140): NCBI GI NO: 15230967 NR Description: hypothetical protein [Arabidopsis thaliana]
  misc_feature (1)..(140): NCBI GI NO: 19112998 NR Description: hypothetical coiled-coil protein
  misc_feature (1)..(132): NCBI GI NO: 39849948 NR Description: Unknown (protein for MGC:75494) [Homo sapiens]
  misc_feature (1)..(132): NCBI GI NO: 21758920 NR Description: unnamed protein product [Homo sapiens]
  misc_feature (1)..(139): NCBI GI NO: 27676608 NR Description: similar to OPA3 protein; Optic atrophy 3
  misc_feature (1)..(132): NCBI GI NO: 13376717 NR Description: OPA3 protein; Optic atrophy 3
  misc_feature (1)..(139): NCBI GI NO: 26342969 NR Description: unnamed protein product [Mus musculus]
  misc_feature (1)..(138): NCBI GI NO: 24649440 NR Description: CG13601-PA [Drosophila melanogaster]
MKLGTLLLRTLSKPIANRLKSQAAVHPKFRDFIISIAQTNHRITTRIQRRIYGHATNVAIRPLDEEKAVQVATDLIGEGFIFSVAVAALIFEVQRSARSEARKEEARKQELEELRQKEEILAKDLEDLKLKLAELERLAKGRGLSGILNFKGVNAADSSKEATPA

SEQ ID NO: 18718 - DNA, 1072 bp, Triticum aestivum
  misc_feature (1)..(1072): Ceres Seq. ID no. 13585188
agaacatcctaatcgaaaagcaaaagctactcaagaattgacccaacccacccggccttctcctaccaaccaagcagctccaaacaccaagaaatccacagaaaccgagatctctctctccccgacccgacggatccctggttgttgttgtagctgggcaatggcgaccgacgcgatcctggagaccatcaagcctcggcggagcccgtggctggaggacctcccagtgacgaatgggggcgcagcgaagggcggcaaggtcaacctgtccgggatgcgccggcgcgtgtcgtcgtccttgtcattgagcctccagccgctgtcctcgtcttcgtccgcggcgttccggcgcgcgcggtcgatgccgtcgatcaaggcgctggcggcggcgggcgcggtgcggcagtggtgggagtgggggctcggttgggtgatgacccggaagccctccttcgcgcgtggcctcgagatgagcgatgacgaggccgccctgctcgggtgccactgccgcggcacgctccggcacgtcttctacaaggcacgcgccgaggtgcgccgcctccttggccgcgacggccgcccgctcggaggcgtcgccgcgcaggacttcaggtacgactccgtcagctacgctcagaacttcgacaacggcgacgtcgacgccagatgctagctgctgcgccggcgcacgcatggattcggacgccgccaatcgtgccgaaagtgaaggtatacatggctcgattaatggctacgaactatatcttcttggacgtggcaataaaccgaattgtttgcaagacactagcagcatatagcacggcgtgtgtgtgtgtgtgttttggcggaacgatcgcagatgatccagcagcgagtgatgcgcactgttcagggaccagatgtatatttcttccactcttctttcttgtgtttttccgagtcttttcttggatacatccgtccctacaatgtaatcgagcccgtggatcgggatggggatcctgagctggctaaatgtacatgttgctgtaacacattgcaaaagcaaatcaataagcattcctggaacctg

SEQ ID NO: 18719 - protein, 223 aa, Triticum aestivum
  peptide (1)..(223): Ceres Seq. ID no. 13585189
  misc_feature (54)..(221): NCBI GI NO: 28411879 NR Description: OSJNBa0016N23.32
  misc_feature (58)..(195): NCBI GI NO: 21593793 NR Description: unknown [Arabidopsis thaliana]
  misc_feature (58)..(195): NCBI GI NO: 18418660 NR Description: expressed protein [Arabidopsis thaliana]
  misc_feature (60)..(195): NCBI GI NO: 7486016 NR Description: hypothetical protein F23E12
EHPNRKAKATQELTQPTRPSPTNQAAPNTKKSTETEISLSPTRRIPGCCCSWAMATDAILETIKPRRSPWLEDLPVTNGGAAKGGKVNLSGMRRRVSSSLSLSLQPLSSSSSAAFRRARSMPSIKALAAAGAVRQWWEWGLGWVMTRKPSFARGLEMSDDEAALLGCHCRGTLRHVFYKARAEVRRLLGRDGRPLGGVAAQDFRYDSVSYAQNFDNGDVDARC

SEQ ID NO: 18720 - protein, 170 aa, Triticum aestivum
  peptide (1)..(170): Ceres Seq. ID no. 13585190
  misc_feature (1)..(168): NCBI GI NO: 28411879 NR Description: OSJNBa0016N23.32
  misc_feature (5)..(142): NCBI GI NO: 21593793 NR Description: unknown [Arabidopsis thaliana]
  misc_feature (5)..(142): NCBI GI NO: 18418660 NR Description: expressed protein [Arabidopsis thaliana]
  misc_feature (7)..(142): NCBI GI NO: 7486016 NR Description: hypothetical protein F23E12
MATDAILETIKPRRSPWLEDLPVTNGGAAKGGKVNLSGMRRRVSSSLSLSLQPLSSSSSAAFRRARSMPSIKALAAAGAVRQWWEWGLGWVMTRKPSFARGLEMSDDEAALLGCHCRGTLRHVFYKARAEVRRLLGRDGRPLGGVAAQDFRYDSVSYAQNFDNGDVDARC

SEQ ID NO: 18721 - protein, 132 aa, Triticum aestivum
  peptide (1)..(132): Ceres Seq. ID no. 13585191
  misc_feature (1)..(130): NCBI GI NO: 28411879 NR Description: OSJNBa0016N23.32
  misc_feature (1)..(104): NCBI GI NO: 21593793 NR Description: unknown [Arabidopsis thaliana]
  misc_feature (1)..(104): NCBI GI NO: 18418660 NR Description: expressed protein [Arabidopsis thaliana]
  misc_feature (1)..(104): NCBI GI NO: 7486016 NR Description: hypothetical protein F23E12
MRRRVSSSLSLSLQPLSSSSSAAFRRARSMPSIKALAAAGAVRQWWEWGLGWVMTRKPSFARGLEMSDDEAALLGCHCRGTLRHVFYKARAEVRRLLGRDGRPLGGVAAQDFRYDSVSYAQNFDNGDVDARC

SEQ ID NO: 18722 - DNA, 1135 bp, Triticum aestivum
  misc_feature (1)..(1135): Ceres Seq. ID no. 14301534
atggcagtttgatctcatctcctcctcctcctcctccaccgccgcacgccacccccatccccatccccaccggagccgactgcggcggagcggagcgcaccggagatcttccttctttccttgtcggtaaggttctgtggccatgtctgacagcgagaaagaggtgccagtggaagtggaagaaggcgccacccgcggggccgactgggaggtcgtcacgctcaccgcgtccacctacgccgccgcgcccagcgggccagaaggagcagcagagggcaagaggctcggcgacggcaacgacggccgcgcctcgtccaccacgctgctcatgtcggaccacttcgtgttcccacccagcgagcacgagaacctgcccatagagaccgccctgctcgacccgcctcaggagagcaccagcgtggacgacgccggcttcaagaacgtcggtgggggctacgatgatgggtccgagacggtcaagtactatgacgaggggaagagcctgtcggtgcatgatgccgagatgatgatgggtgacgtggctgagttccacgcccaagatgacggacgcggttacgttgtccatgatgatgatgatgactcccaggacaagtctgatgcgcctctggacagcagcagcagcaagggccgtggctctggtgccccctgccagtgctggttgaagaagcacatgtcatgcctgtatgaccaggccaaggagaccaatcatctctggggtgcggttgtcgtggctgccctggttggccttgtcatcttgtggcgcaaagacaagttgcacatgagctgccttaaatggcgctctcgctcggcagtcagttaatgatccaatccgaattcctggactggtgggtctgtttgtggtcttcttcgtcgatacaatctctgacgagtcttcgcagatcgccctggaagtcattataaccaagaagaagatggccatgccaatatgattcgtgacaatgacgaaaggggtctctagttgtaataatatcaagtttgacagggtattttcttgttgccaggcttgtgagatgccaaagtttcttattgctcttgtacccatagtcgtcgtacctttgcactgtttaatacgaacggcgcgccctttcaagct

SEQ ID NO: 18723 - protein, 232 aa, Triticum aestivum
  peptide (1)..(232): Ceres Seq. ID no. 14301535
  misc_feature (1)..(231): NCBI GI NO: 1808686 NR Description: hypothetical protein [Sporobolus stapfianus]
  misc_feature (33)..(231): NCBI GI NO: 38346457 NR Description: OSJNBa0019G23.5
  misc_feature (33)..(141): NCBI GI NO: 10241633 NR Description: hypothetical protein
  misc_feature (13)..(227): NCBI GI NO: 7486469 NR Description: hypothetical protein At2g45980
  misc_feature (13)..(227): NCBI GI NO: 18406940 NR Description: expressed protein [Arabidopsis thaliana]
  misc_feature (13)..(227): NCBI GI NO: 21553358 NR Description: unknown [Arabidopsis thaliana]
  misc_feature (13)..(227): NCBI GI NO: 18411306 NR Description: expressed protein [Arabidopsis thaliana]
  misc_feature (13)..(227): NCBI GI NO: 30678620 NR Description: expressed protein [Arabidopsis thaliana]
  misc_feature (1)..(168): NCBI GI NO: 38346457 NR Description: OSJNBa0019G23.5
  misc_feature (1)..(112): NCBI GI NO: 10241633 NR Description: hypothetical protein
MSDSEKEVPVEVEEGATRGADWEVVTLTASTYAAAPSGPEGAAEGKRLGDGNDGRASSTTLLMSDHFVFPPSEHENLPIETALLDPPQESTSVDDAGFKNVGGGYDDGSETVKYYDEGKSLSVHDAEMMMGDVAEFHAQDDGRGYVVHDDDDDSQDKSDAPLDSSSSKGRGSGAPCQCWLKKHMSCLYDQAKETNHLWGAVVVAALVGLVILWRKDKLHMSCLKWRSRSAVS

SEQ ID NO: 18724 - protein, 170 aa, Triticum aestivum
  peptide (1)..(170): Ceres Seq. ID no. 14301536
  misc_feature (1)..(169): NCBI GI NO: 1808686 NR Description: hypothetical protein [Sporobolus stapfianus]
  misc_feature (1)..(169): NCBI GI NO: 38346457 NR Description: OSJNBa0019G23.5
  misc_feature (1)..(79): NCBI GI NO: 10241633 NR Description: hypothetical protein
  misc_feature (1)..(165): NCBI GI NO: 7486469 NR Description: hypothetical protein At2g45980
  misc_feature (1)..(165): NCBI GI NO: 18406940 NR Description: expressed protein [Arabidopsis thaliana]
  misc_feature (1)..(165): NCBI GI NO: 21553358 NR Description: unknown [Arabidopsis thaliana]
  misc_feature (1)..(165): NCBI GI NO: 18411306 NR Description: expressed protein [Arabidopsis thaliana]
  misc_feature (1)..(165): NCBI GI NO: 30678620 NR Description: expressed protein [Arabidopsis thaliana]
  misc_feature (1)..(106): NCBI GI NO: 38346457 NR Description: OSJNBa0019G23.5
  misc_feature (1)..(50): NCBI GI NO: 10241633 NR Description: hypothetical protein
MSDHFVFPPSEHENLPIETALLDPPQESTSVDDAGFKNVGGGYDDGSETVKYYDEGKSLSVHDAEMMMGDVAEFHAQDDGRGYVVHDDDDDSQDKSDAPLDSSSSKGRGSGAPCQCWLKKHMSCLYDQAKETNHLWGAVVVAALVGLVILWRKDKLHMSCLKWRSRSAVS

SEQ ID NO: 18725 - protein, 125 aa, Triticum aestivum
  peptide (1)..(125): Ceres Seq. ID no. 14301537
  misc_feature (7)..(125): Pfam Name: Pfam Description:  Formin Homology 2 Domain
GSLISSPPPPPPPPHATPIPIPTGADCGGAERTGDLPSFLVGKVLWPCLTARKRCQWKWKKAPPAGPTGRSSRSPRPPTPPRPAGQKEQQRARGSATATTAAPRPPRCSCRTTSCSHPASTRTCP

SEQ ID NO: 18726 - DNA, 1052 bp, Triticum aestivum
  misc_feature (1)..(1052): Ceres Seq. ID no. 13598314
aatcgaaaacattcagacccatcccagccaaaagcacctggccatcagcgttccttctcctagctttgtctcagttgtcttccggtcttctgctctgctctttggactaatggcccatgggaagaggtctaggcagcaggccgagtcgacctcggtcagcctgctggacctggacagcggcgacatggcgcgcatcctgctgctcttctccggccaccaccagcaccacgcccactacgggccttcgtcgcctgagagggtgttcgagtgcaagacctgcaaccggcggttcccgtccttccaggcgctcggtgggcaccgcgccagccacaagaagccgcgcctggcggacggcgccggcgccgagccgcccaagcccaaggtgcacggctgctccatctgcgggctcgagttcgccgtcggccaggcgctcggcggccacatgcgccgccaccgcgctgtcgcggcggcagggcccggcgtcgggcttgggctcagcctcggcctcggtctcgggccgaacgaggacggcaacaagaaggcggcggcggcggccgagctggcgctcgacctgaacgagccggcactggaggaggagccggccgatcgcgccatgcttgggctcgccgtgggattccggccccgtggtggttgactttcgacgttaggttgaacagaagaaatttgcgtctgaaccatacaaattttttgtagttcaatactatttgcattgagctgctcgagaagtcaacgacccttggaacattagaaatgctggctcgcgtatagtataacatttctaaagtctcaggggcaggggctctatatttacaaggtttgacttctggcggtatttgtagtactagacgggtttttctcttctgctccccctttttccacggggagttcagtttttttatgctccttggccttgaggcatatctactacggagtacgtatgaatatggttgtaaacctctcgaattacgcgaatattatacaaggattaaaaaaaaaaaaaaaaaagcttatcgatrccgtcgamacwcaat

SEQ ID NO: 18727 - protein, 217 aa, Triticum aestivum
  peptide (1)..(217): Ceres Seq. ID no. 15222302
  misc_feature (88)..(110): Pfam Name: Pfam Description:  Zinc finger, C2H2 type
  misc_feature (62)..(154): NCBI GI NO: 2346978 NR Description: ZPT2-14 [Petunia x hybrida]
  misc_feature (122)..(211): NCBI GI NO: 30420734 NR Description: zinc finger transcription factor ZFP19
  misc_feature (59)..(122): NCBI GI NO: 30420734 NR Description: zinc finger transcription factor ZFP19
  misc_feature (62)..(154): NCBI GI NO: 1786134 NR Description: PEThy;ZPT2-5 [Petunia x hybrida]
  misc_feature (37)..(122): NCBI GI NO: 34908110 NR Description: P0031D11.12
  misc_feature (122)..(211): NCBI GI NO: 34908110 NR Description: P0031D11.12
  misc_feature (61)..(199): NCBI GI NO: 15226942 NR Description: C2H2-type zinc finger protein -related
  misc_feature (57)..(153): NCBI GI NO: 2346974 NR Description: ZPT2-12 [Petunia x hybrida]
  misc_feature (62)..(152): NCBI GI NO: 2346976 NR Description: ZPT2-13 [Petunia x hybrida]
  misc_feature (8)..(132): NCBI GI NO: 2346972 NR Description: ZPT2-11 [Petunia x hybrida]
IENIQTHPSQKHLAISVPSPSFVSVVFRSSALLFGLMAHGKRSRQQAESTSVSLLDLDSGDMARILLLFSGHHQHHAHYGPSSPERVFECKTCNRRFPSFQALGGHRASHKKPRLADGAGAEPPKPKVHGCSICGLEFAVGQALGGHMRRHRAVAAAGPGVGLGLSLGLGLGPNEDGNKKAAAAAELALDLNEPALEEEPADRAMLGLAVGFRPRGG

SEQ ID NO: 18728 - protein, 181 aa, Triticum aestivum
  peptide (1)..(181): Ceres Seq. ID no. 15222303
  misc_feature (52)..(74): Pfam Name: Pfam Description:  Zinc finger, C2H2 type
  misc_feature (26)..(118): NCBI GI NO: 2346978 NR Description: ZPT2-14 [Petunia x hybrida]
  misc_feature (86)..(175): NCBI GI NO: 30420734 NR Description: zinc finger transcription factor ZFP19
  misc_feature (23)..(86): NCBI GI NO: 30420734 NR Description: zinc finger transcription factor ZFP19
  misc_feature (26)..(118): NCBI GI NO: 1786134 NR Description: PEThy;ZPT2-5 [Petunia x hybrida]
  misc_feature (1)..(86): NCBI GI NO: 34908110 NR Description: P0031D11.12
  misc_feature (86)..(175): NCBI GI NO: 34908110 NR Description: P0031D11.12
  misc_feature (25)..(163): NCBI GI NO: 15226942 NR Description: C2H2-type zinc finger protein -related
  misc_feature (21)..(117): NCBI GI NO: 2346974 NR Description: ZPT2-12 [Petunia x hybrida]
  misc_feature (26)..(116): NCBI GI NO: 2346976 NR Description: ZPT2-13 [Petunia x hybrida]
  misc_feature (1)..(96): NCBI GI NO: 2346972 NR Description: ZPT2-11 [Petunia x hybrida]
MAHGKRSRQQAESTSVSLLDLDSGDMARILLLFSGHHQHHAHYGPSSPERVFECKTCNRRFPSFQALGGHRASHKKPRLADGAGAEPPKPKVHGCSICGLEFAVGQALGGHMRRHRAVAAAGPGVGLGLSLGLGLGPNEDGNKKAAAAAELALDLNEPALEEEPADRAMLGLAVGFRPRGG

SEQ ID NO: 18729 - protein, 156 aa, Triticum aestivum
  peptide (1)..(156): Ceres Seq. ID no. 15222304
  misc_feature (27)..(49): Pfam Name: Pfam Description:  Zinc finger, C2H2 type
  misc_feature (1)..(93): NCBI GI NO: 2346978 NR Description: ZPT2-14 [Petunia x hybrida]
  misc_feature (61)..(150): NCBI GI NO: 30420734 NR Description: zinc finger transcription factor ZFP19
  misc_feature (1)..(61): NCBI GI NO: 30420734 NR Description: zinc finger transcription factor ZFP19
  misc_feature (1)..(93): NCBI GI NO: 1786134 NR Description: PEThy;ZPT2-5 [Petunia x hybrida]
  misc_feature (1)..(61): NCBI GI NO: 34908110 NR Description: P0031D11.12
  misc_feature (61)..(150): NCBI GI NO: 34908110 NR Description: P0031D11.12
  misc_feature (1)..(138): NCBI GI NO: 15226942 NR Description: C2H2-type zinc finger protein -related
  misc_feature (1)..(92): NCBI GI NO: 2346974 NR Description: ZPT2-12 [Petunia x hybrida]
  misc_feature (1)..(91): NCBI GI NO: 2346976 NR Description: ZPT2-13 [Petunia x hybrida]
  misc_feature (1)..(71): NCBI GI NO: 2346972 NR Description: ZPT2-11 [Petunia x hybrida]
MARILLLFSGHHQHHAHYGPSSPERVFECKTCNRRFPSFQALGGHRASHKKPRLADGAGAEPPKPKVHGCSICGLEFAVGQALGGHMRRHRAVAAAGPGVGLGLSLGLGLGPNEDGNKKAAAAAELALDLNEPALEEEPADRAMLGLAVGFRPRGG

SEQ ID NO: 18730 - DNA, 1438 bp, Triticum aestivum
  misc_feature (1)..(1438): Ceres Seq. ID no. 13596284
aaacgacctgccacttccagttctgctattactttagccacttgctgcgcacatctcggtgagctcgccactccggtggcggcggcggcgggcggagggaagaaaatggcaccgccgcggcgcgtgtgcgtgaccggcggcggcgggttcatcgcctcgtggctcgtcaagctgctcctctcccgcggctacgccgtccacgccaccctccgggacccatgtgaccccaagaatgtccacctcaagcagatggacgaggcccgggagaatctgcacctgctcaaggccgacgtgctcgactacgacgcgctaacacgtgcgtttgagggatgtgagggggtcttccacctcgccactccggtgcctgaagataagattgctgatcctgagtcagaagtattggctcctgctgtgaaaggtacttcaaatgtgctgaaggcctgctcagctatgaaggttcagaaggttattgtcttgtcatccaatgctgctgttgattttaacccgaattggcctcaagacagactcaaagatgagagtagctggtcagacaaagatttctgccaggagaatgaggactggtattctgttgccaagattgtggccgaacaggcatccttggaatattcagagaaacatggattaaatgttgttacgctttgccctcctttggtttttggcccattgttgcagcctactgttagaawaccagtagcaaattcttaatctatgttattaatggaggacctgacgtgatgagcaacaagctgtggcacattgtagacgtccgtgatgtcgcggatgccttgctgcttgtgtacgagaaggccgaatcgtctgggagatacatttgcgcgccgaatagcgtctgcacaaaggacttggtggacttgctgaggaagatgtacccacagtacagctatgtgaacaacatcgacgcggaccgtaaagcgccgctgtcatcgcagaagctgaaggatctgggctggaagccgaggaagctggaggagacgctctcggacagcgtgggctgctacgagaaggccggccttctgcagggttccgctgcgcgtcattgccggcttccgcatctgttccgtctggctggtgatcagtgaatgtaccgtggtgactggtgctttgttttcatatggtcggacttctgtaagctgtagtgtcgctggacggagcctcgcaacagcaacaatggtcgaacctcttcctttgcatccacaaataagcagctatccctgctgtatctgccgccccctgtctgtcacctccggaaatggacaaagtgtaaaacaagcagagcagagacgaaatgcatgtacttcctccgttcctaaataagtactatctctttctagagatttgtataagtgactacatacagagcaaaatgagtgaatctacactctaaattatgtttacatcc

SEQ ID NO: 18731 - protein, 241 aa, Triticum aestivum
  peptide (1)..(241): Ceres Seq. ID no. 15221824
  misc_feature (42)..(233): Pfam Name: Pfam Description:  NAD dependent epimerase/dehydratase family
  misc_feature (36)..(234): NCBI GI NO: 15223068 NR Description: cinnamoyl-CoA reductase family
  misc_feature (41)..(231): NCBI GI NO: 15226135 NR Description: cinnamoyl-CoA reductase family
  misc_feature (36)..(234): NCBI GI NO: 6554472 NR Description: putative cinnamoyl-CoA reductase; 14056-15506
  misc_feature (10)..(240): NCBI GI NO: 17978549 NR Description: cinnamoyl-CoA reductase [Lolium perenne]
  misc_feature (27)..(240): NCBI GI NO: 3341511 NR Description: cinnamoyl-CoA reductase [Saccharum officinarum]
  misc_feature (42)..(240): NCBI GI NO: 9964087 NR Description: cinnamoyl CoA reductase [Lolium perenne]
  misc_feature (33)..(238): NCBI GI NO: 17978649 NR Description: cinnamoyl-CoA reductase [Pinus taeda]
  misc_feature (24)..(240): NCBI GI NO: 25140432 NR Description: cinnamoyl CoA reductase [Hordeum vulgare]
  misc_feature (21)..(240): NCBI GI NO: 3242328 NR Description: cinnamoyl-CoA reductase [Zea mays]
  misc_feature (23)..(240): NCBI GI NO: 7431410 NR Description: cinnamoyl CoA reductase - maize
  misc_feature (236)..(236): Xaa is any aa, unknown or other
KRPATSSSAITLATCCAHLGELATPVAAAAGGGKKMAPPRRVCVTGGGGFIASWLVKLLLSRGYAVHATLRDPCDPKNVHLKQMDEARENLHLLKADVLDYDALTRAFEGCEGVFHLATPVPEDKIADPESEVLAPAVKGTSNVLKACSAMKVQKVIVLSSNAAVDFNPNWPQDRLKDESSWSDKDFCQENEDWYSVAKIVAEQASLEYSEKHGLNVVTLCPPLVFGPLLQPTVRXPVANS

SEQ ID NO: 18732 - protein, 206 aa, Triticum aestivum
  peptide (1)..(206): Ceres Seq. ID no. 15221825
  misc_feature (7)..(198): Pfam Name: Pfam Description:  NAD dependent epimerase/dehydratase family
  misc_feature (1)..(199): NCBI GI NO: 15223068 NR Description: cinnamoyl-CoA reductase family
  misc_feature (6)..(196): NCBI GI NO: 15226135 NR Description: cinnamoyl-CoA reductase family
  misc_feature (1)..(199): NCBI GI NO: 6554472 NR Description: putative cinnamoyl-CoA reductase; 14056-15506
  misc_feature (1)..(205): NCBI GI NO: 17978549 NR Description: cinnamoyl-CoA reductase [Lolium perenne]
  misc_feature (1)..(205): NCBI GI NO: 3341511 NR Description: cinnamoyl-CoA reductase [Saccharum officinarum]
  misc_feature (7)..(205): NCBI GI NO: 9964087 NR Description: cinnamoyl CoA reductase [Lolium perenne]
  misc_feature (1)..(203): NCBI GI NO: 17978649 NR Description: cinnamoyl-CoA reductase [Pinus taeda]
  misc_feature (1)..(205): NCBI GI NO: 25140432 NR Description: cinnamoyl CoA reductase [Hordeum vulgare]
  misc_feature (1)..(205): NCBI GI NO: 3242328 NR Description: cinnamoyl-CoA reductase [Zea mays]
  misc_feature (1)..(205): NCBI GI NO: 7431410 NR Description: cinnamoyl CoA reductase - maize
  misc_feature (201)..(201): Xaa is any aa, unknown or other
MAPPRRVCVTGGGGFIASWLVKLLLSRGYAVHATLRDPCDPKNVHLKQMDEARENLHLLKADVLDYDALTRAFEGCEGVFHLATPVPEDKIADPESEVLAPAVKGTSNVLKACSAMKVQKVIVLSSNAAVDFNPNWPQDRLKDESSWSDKDFCQENEDWYSVAKIVAEQASLEYSEKHGLNVVTLCPPLVFGPLLQPTVRXPVANS

SEQ ID NO: 18733 - protein, 158 aa, Triticum aestivum
  peptide (1)..(158): Ceres Seq. ID no. 15221826
  misc_feature (1)..(150): Pfam Name: Pfam Description:  NAD dependent epimerase/dehydratase family
  misc_feature (1)..(151): NCBI GI NO: 15223068 NR Description: cinnamoyl-CoA reductase family
  misc_feature (1)..(148): NCBI GI NO: 15226135 NR Description: cinnamoyl-CoA reductase family
  misc_feature (1)..(151): NCBI GI NO: 6554472 NR Description: putative cinnamoyl-CoA reductase; 14056-15506
  misc_feature (1)..(157): NCBI GI NO: 17978549 NR Description: cinnamoyl-CoA reductase [Lolium perenne]
  misc_feature (1)..(157): NCBI GI NO: 3341511 NR Description: cinnamoyl-CoA reductase [Saccharum officinarum]
  misc_feature (1)..(157): NCBI GI NO: 9964087 NR Description: cinnamoyl CoA reductase [Lolium perenne]
  misc_feature (1)..(155): NCBI GI NO: 17978649 NR Description: cinnamoyl-CoA reductase [Pinus taeda]
  misc_feature (1)..(157): NCBI GI NO: 25140432 NR Description: cinnamoyl CoA reductase [Hordeum vulgare]
  misc_feature (1)..(157): NCBI GI NO: 3242328 NR Description: cinnamoyl-CoA reductase [Zea mays]
  misc_feature (1)..(157): NCBI GI NO: 7431410 NR Description: cinnamoyl CoA reductase - maize
  misc_feature (153)..(153): Xaa is any aa, unknown or other
MDEARENLHLLKADVLDYDALTRAFEGCEGVFHLATPVPEDKIADPESEVLAPAVKGTSNVLKACSAMKVQKVIVLSSNAAVDFNPNWPQDRLKDESSWSDKDFCQENEDWYSVAKIVAEQASLEYSEKHGLNVVTLCPPLVFGPLLQPTVRXPVANS

SEQ ID NO: 18734 - DNA, 1290 bp, Triticum aestivum
  misc_feature (1)..(1290): Ceres Seq. ID no. 15225786
aattccttccagtcccccctctctctctcctccctacaattcacaattcgaaggcgcatccttgccccggtaagcggcggcggcgagtctacaggtttcctggggcggaggcgatggcggccgcaggcaagttcaaccggagtaacccggcggtgaagcggatcctgcaggaggtgaaggagatgcagtctaatccttcccccgatttcatggccttgcccctcgaggaggacatttttgagtggcaatttgctatcctggggcctcgagacagcgaatttgagggaggaatctaccacgggaggatccagttgccctcagactacccgttcaagccgccatccttcatgctgctcacgccaagtggaagattcgagattcagaagaagatatgtttgagcatatcaaattaccaccccgaacactggcagccatcatggagtgtacgcacagcactagtagcattgattgctttcatgccaacaaatcctggtggggcattgggttcactggactacaaaaaggaagatagacgagcgcttgccatcaaatcacgtgaaacaccaccaaaattcggctccccagaacgccaaagtgtaattgacgagatccatgagcaaatgctcagtaaagctccacctgttcctcaactgctgacaattggctctgaagaggagactaacaagacggcacccgacacttctggtgaacatgctgtcaaggcagcagaaggtgtcaacacttctggcagcagctctggttctgctaatgatactgaccttccaaagcctgattcagagtcagaagttgcagaaaacattgccagagctcaggcagatgtaatccccagggacagcggtccgagagttgttacagcaccgcagaaccccgttgtcacaatccagaagccaaagcatgacaggttgttgacgttggctgcatttgggctgactcttgctatcatggccctcgtgataaagaagttcttcaaaatcaatggtctggctggttacattgagggcaagttttaggtaggtttgtgcgtaagttgatataagaggagcgcctgcattatgcgtctgagcggctatgttatccttaccatatcttatataaaccacctaagaaatgtaaatggttattgtctagctatagatgaagtgaggtggtggtaccacccgtaccctactgtatgtagcactgatggaatacatgatatttcattatatgtgtgcgtgtgtggcttaagttgtaacgtttgttctggatgaagggcctcttggttactgc

SEQ ID NO: 18735 - protein, 342 aa, Triticum aestivum
  peptide (1)..(342): Ceres Seq. ID no. 15225787
  misc_feature (43)..(339): NCBI GI NO: 18401338 NR Description: ubiquitin-conjugating enzyme, putative
  misc_feature (43)..(329): NCBI GI NO: 38181767 NR Description: Unknown (protein for MGC:63554) [Danio rerio]
  misc_feature (43)..(307): NCBI GI NO: 7362937 NR Description: Non-Canonical UBiquitin Conjugating Enzyme 1
  misc_feature (43)..(331): NCBI GI NO: 7363050 NR Description: Non-Canonical UBiquitin Conjugating Enzyme 1
  misc_feature (43)..(304): NCBI GI NO: 31980960 NR Description: ubiquitin-conjugating enzyme E2, J1
  misc_feature (43)..(305): NCBI GI NO: 39596027 NR Description: Hypothetical protein CBG13052
  misc_feature (43)..(186): NCBI GI NO: 6841528 NR Description: HSPC153 [Homo sapiens]
  misc_feature (43)..(186): NCBI GI NO: 15277421 NR Description: ubiquitin-conjugating enzyme E2, J1
  misc_feature (43)..(186): NCBI GI NO: 9453733 NR Description: bA11D8
  misc_feature (43)..(186): NCBI GI NO: 34867116 NR Description: similar to non-canonical ubquitin conjugatingenzyme 1
FLPVPPLSLLPTIHNSKAHPCPGKRRRRVYRFPGAEAMAAAGKFNRSNPAVKRILQEVKEMQSNPSPDFMALPLEEDIFEWQFAILGPRDSEFEGGIYHGRIQLPSDYPFKPPSFMLLTPSGRFEIQKKICLSISNYHPEHWQPSWSVRTALVALIAFMPTNPGGALGSLDYKKEDRRALAIKSRETPPKFGSPERQSVIDEIHEQMLSKAPPVPQLLTIGSEEETNKTAPDTSGEHAVKAAEGVNTSGSSSGSANDTDLPKPDSESEVAENIARAQADVIPRDSGPRVVTAPQNPVVTIQKPKHDRLLTLAAFGLTLAIMALVIKKFFKINGLAGYIEGKF

SEQ ID NO: 18736 - protein, 305 aa, Triticum aestivum
  peptide (1)..(305): Ceres Seq. ID no. 15225788
  misc_feature (6)..(302): NCBI GI NO: 18401338 NR Description: ubiquitin-conjugating enzyme, putative
  misc_feature (6)..(292): NCBI GI NO: 38181767 NR Description: Unknown (protein for MGC:63554) [Danio rerio]
  misc_feature (6)..(270): NCBI GI NO: 7362937 NR Description: Non-Canonical UBiquitin Conjugating Enzyme 1
  misc_feature (6)..(294): NCBI GI NO: 7363050 NR Description: Non-Canonical UBiquitin Conjugating Enzyme 1
  misc_feature (6)..(267): NCBI GI NO: 31980960 NR Description: ubiquitin-conjugating enzyme E2, J1
  misc_feature (6)..(268): NCBI GI NO: 39596027 NR Description: Hypothetical protein CBG13052
  misc_feature (6)..(149): NCBI GI NO: 6841528 NR Description: HSPC153 [Homo sapiens]
  misc_feature (6)..(149): NCBI GI NO: 34867116 NR Description: similar to non-canonical ubquitin conjugatingenzyme 1
  misc_feature (6)..(149): NCBI GI NO: 9453733 NR Description: bA11D8
  misc_feature (6)..(149): NCBI GI NO: 15277421 NR Description: ubiquitin-conjugating enzyme E2, J1
MAAAGKFNRSNPAVKRILQEVKEMQSNPSPDFMALPLEEDIFEWQFAILGPRDSEFEGGIYHGRIQLPSDYPFKPPSFMLLTPSGRFEIQKKICLSISNYHPEHWQPSWSVRTALVALIAFMPTNPGGALGSLDYKKEDRRALAIKSRETPPKFGSPERQSVIDEIHEQMLSKAPPVPQLLTIGSEEETNKTAPDTSGEHAVKAAEGVNTSGSSSGSANDTDLPKPDSESEVAENIARAQADVIPRDSGPRVVTAPQNPVVTIQKPKHDRLLTLAAFGLTLAIMALVIKKFFKINGLAGYIEGKF

SEQ ID NO: 18737 - protein, 282 aa, Triticum aestivum
  peptide (1)..(282): Ceres Seq. ID no. 15225789
  misc_feature (1)..(279): NCBI GI NO: 18401338 NR Description: ubiquitin-conjugating enzyme, putative
  misc_feature (1)..(269): NCBI GI NO: 38181767 NR Description: Unknown (protein for MGC:63554) [Danio rerio]
  misc_feature (1)..(247): NCBI GI NO: 7362937 NR Description: Non-Canonical UBiquitin Conjugating Enzyme 1
  misc_feature (1)..(271): NCBI GI NO: 7363050 NR Description: Non-Canonical UBiquitin Conjugating Enzyme 1
  misc_feature (1)..(244): NCBI GI NO: 31980960 NR Description: ubiquitin-conjugating enzyme E2, J1
  misc_feature (1)..(245): NCBI GI NO: 39596027 NR Description: Hypothetical protein CBG13052
  misc_feature (1)..(126): NCBI GI NO: 6841528 NR Description: HSPC153 [Homo sapiens]
  misc_feature (1)..(126): NCBI GI NO: 34867116 NR Description: similar to non-canonical ubquitin conjugatingenzyme 1
  misc_feature (1)..(126): NCBI GI NO: 9453733 NR Description: bA11D8
  misc_feature (1)..(126): NCBI GI NO: 15277421 NR Description: ubiquitin-conjugating enzyme E2, J1
MQSNPSPDFMALPLEEDIFEWQFAILGPRDSEFEGGIYHGRIQLPSDYPFKPPSFMLLTPSGRFEIQKKICLSISNYHPEHWQPSWSVRTALVALIAFMPTNPGGALGSLDYKKEDRRALAIKSRETPPKFGSPERQSVIDEIHEQMLSKAPPVPQLLTIGSEEETNKTAPDTSGEHAVKAAEGVNTSGSSSGSANDTDLPKPDSESEVAENIARAQADVIPRDSGPRVVTAPQNPVVTIQKPKHDRLLTLAAFGLTLAIMALVIKKFFKINGLAGYIEGKF

SEQ ID NO: 18738 - DNA, 1288 bp, Triticum aestivum
  misc_feature (1)..(1288): Ceres Seq. ID no. 13598301
cttccccgccccattcgtcactgatcccccttctagaacctcccagaagccgaacgagagagcccgcaggggcggcgcacgggcatggcgatggcgacgcacacgggggtcgccgcctccaaggtcctcatcctcgtcggcgcaggcctgacgggatcgatcgtgcttcggaatggccgcttgtcggatgtattggcggagctccaggagctcatgaagggcgtaaatcaaggagaaggctcgagcgcatatgacatggctcttatccaagctcagattcggcatttagcccaagaagtcagagatttaactttgtcaaagcccattaccatattgagcggcaaatcggactcgggaggcagtttatcgtcctacatactgccagcagctgcagttggagcattaggttattgctatatgtggtgtaagggatggtccttgtcagatgtcatgtttgtcacaaaacgcaatatggccagtgctgtcgatagcatgtcgaagcaattggagcaagtttcatcagcactagcagcaaccaaaagacatctaacaaaacgccttgagaatttggatggcaaaatggacgaacaagtggaggtctccaaacaaatacggaatgaggtcactgatgttaaaactgatctgtcccaaattggctttgacgttgaagcaattcaacagatggtagctggactggaagagaagattgagttgcttgacaataaacaggatgcggctaatgctggtatatggtatctctgccgaatggcaggaggtataaaagagggaataaatgccaagtttttccaagaagcggatgaaaaactcaagctcttggacctggctcatactgaaaagaagccggtgaagggtctggagttatttctggagagcaccaaggaagtcaaggcactcgactccaagcctaagaccatcgtgcagattgatgccaagaaaccgatgaaggcgttcgacgtgcctgtgaagagcgctgcggtgcacaggtcaaacaggttcttaattcgcaaggaaggcctcgcactgtgatggacgccttcccgtgctgcttgcgatgtacattgcgttcttgcttgatttgtttggtagaaaatatagaagaataacctgcatcccgagtggtgattttccaggatagacaggttgatacgtctcaaggcaatttgtatttgttcctttgtattttttgggtcatttcatgttctggtctgaagttgctcgcttgtaaacaagtgaagaaataaataattaaaatacgttttgcattctc

SEQ ID NO: 18739 - protein, 320 aa, Triticum aestivum
  peptide (1)..(320): Ceres Seq. ID no. 15222293
  misc_feature (3)..(281): NCBI GI NO: 18390460 NR Description: expressed protein [Arabidopsis thaliana]
  misc_feature (3)..(293): NCBI GI NO: 18396143 NR Description: bZIP family transcription factor
  misc_feature (3)..(293): NCBI GI NO: 21537323 NR Description: unknown [Arabidopsis thaliana]
  misc_feature (3)..(293): NCBI GI NO: 25361065 NR Description: protein T7N9.6 [imported] - Arabidopsis thaliana
  misc_feature (3)..(256): NCBI GI NO: 15227027 NR Description: expressed protein [Arabidopsis thaliana]
  misc_feature (3)..(256): NCBI GI NO: 7487252 NR Description: hypothetical protein At2g02730
  misc_feature (1)..(225): NCBI GI NO: 34906300 NR Description: unnamed protein product
  misc_feature (14)..(215): NCBI GI NO: 34894218 NR Description: P0439B06.30
  misc_feature (9)..(222): NCBI GI NO: 30688826 NR Description: expressed protein [Arabidopsis thaliana]
  misc_feature (13)..(222): NCBI GI NO: 22329773 NR Description: expressed protein [Arabidopsis thaliana]
MAMATHTGVAASKVLILVGAGLTGSIVLRNGRLSDVLAELQELMKGVNQGEGSSAYDMALIQAQIRHLAQEVRDLTLSKPITILSGKSDSGGSLSSYILPAAAVGALGYCYMWCKGWSLSDVMFVTKRNMASAVDSMSKQLEQVSSALAATKRHLTKRLENLDGKMDEQVEVSKQIRNEVTDVKTDLSQIGFDVEAIQQMVAGLEEKIELLDNKQDAANAGIWYLCRMAGGIKEGINAKFFQEADEKLKLLDLAHTEKKPVKGLELFLESTKEVKALDSKPKTIVQIDAKKPMKAFDVPVKSAAVHRSNRFLIRKEGLAL

SEQ ID NO: 18740 - protein, 318 aa, Triticum aestivum
  peptide (1)..(318): Ceres Seq. ID no. 15222294
  misc_feature (1)..(279): NCBI GI NO: 18390460 NR Description: expressed protein [Arabidopsis thaliana]
  misc_feature (1)..(291): NCBI GI NO: 18396143 NR Description: bZIP family transcription factor
  misc_feature (1)..(291): NCBI GI NO: 21537323 NR Description: unknown [Arabidopsis thaliana]
  misc_feature (1)..(291): NCBI GI NO: 25361065 NR Description: protein T7N9.6 [imported] - Arabidopsis thaliana
  misc_feature (1)..(254): NCBI GI NO: 15227027 NR Description: expressed protein [Arabidopsis thaliana]
  misc_feature (1)..(254): NCBI GI NO: 7487252 NR Description: hypothetical protein At2g02730
  misc_feature (1)..(223): NCBI GI NO: 34906300 NR Description: unnamed protein product
  misc_feature (12)..(213): NCBI GI NO: 34894218 NR Description: P0439B06.30
  misc_feature (7)..(220): NCBI GI NO: 30688826 NR Description: expressed protein [Arabidopsis thaliana]
  misc_feature (11)..(220): NCBI GI NO: 22329773 NR Description: expressed protein [Arabidopsis thaliana]
MATHTGVAASKVLILVGAGLTGSIVLRNGRLSDVLAELQELMKGVNQGEGSSAYDMALIQAQIRHLAQEVRDLTLSKPITILSGKSDSGGSLSSYILPAAAVGALGYCYMWCKGWSLSDVMFVTKRNMASAVDSMSKQLEQVSSALAATKRHLTKRLENLDGKMDEQVEVSKQIRNEVTDVKTDLSQIGFDVEAIQQMVAGLEEKIELLDNKQDAANAGIWYLCRMAGGIKEGINAKFFQEADEKLKLLDLAHTEKKPVKGLELFLESTKEVKALDSKPKTIVQIDAKKPMKAFDVPVKSAAVHRSNRFLIRKEGLAL

SEQ ID NO: 18741 - protein, 277 aa, Triticum aestivum
  peptide (1)..(277): Ceres Seq. ID no. 15222295
  misc_feature (1)..(238): NCBI GI NO: 18390460 NR Description: expressed protein [Arabidopsis thaliana]
  misc_feature (1)..(250): NCBI GI NO: 18396143 NR Description: bZIP family transcription factor
  misc_feature (1)..(250): NCBI GI NO: 21537323 NR Description: unknown [Arabidopsis thaliana]
  misc_feature (1)..(250): NCBI GI NO: 25361065 NR Description: protein T7N9.6 [imported] - Arabidopsis thaliana
  misc_feature (1)..(213): NCBI GI NO: 15227027 NR Description: expressed protein [Arabidopsis thaliana]
  misc_feature (1)..(213): NCBI GI NO: 7487252 NR Description: hypothetical protein At2g02730
  misc_feature (1)..(182): NCBI GI NO: 34906300 NR Description: unnamed protein product
  misc_feature (1)..(172): NCBI GI NO: 34894218 NR Description: P0439B06.30
  misc_feature (1)..(179): NCBI GI NO: 30688826 NR Description: expressed protein [Arabidopsis thaliana]
  misc_feature (1)..(179): NCBI GI NO: 22329773 NR Description: expressed protein [Arabidopsis thaliana]
MKGVNQGEGSSAYDMALIQAQIRHLAQEVRDLTLSKPITILSGKSDSGGSLSSYILPAAAVGALGYCYMWCKGWSLSDVMFVTKRNMASAVDSMSKQLEQVSSALAATKRHLTKRLENLDGKMDEQVEVSKQIRNEVTDVKTDLSQIGFDVEAIQQMVAGLEEKIELLDNKQDAANAGIWYLCRMAGGIKEGINAKFFQEADEKLKLLDLAHTEKKPVKGLELFLESTKEVKALDSKPKTIVQIDAKKPMKAFDVPVKSAAVHRSNRFLIRKEGLAL

SEQ ID NO: 18742 - DNA, 1253 bp, Triticum aestivum
  misc_feature (1)..(1253): Ceres Seq. ID no. 13654231
cttatctcggcgccggagcccacgaccgcttccccgctcaccaccccaaccccgaaatatcccccaattccgacgcgaccgcggaaccctagccccccggcaatcttcgctggacccggagagccgctccggcgccatggcatccccggaaggatcaaactgggtattcgactgccccctcatggacgaccttgctgccgccgacttcgccgcggcatccgcaggaggcttctactggaccccgccgatgcagccgcagatgcacactcttgcgcaggccgtctccgccaccccggctcccaatccctgtgctgaaatcaatagctctgtttcggtggactgggaccatgccaaaggacaaccgaaaaataaacgtcctaggtcagaaactggtgctcaacctagctccaaagcatgcagggagaaagtgagaagggacaagctaaacgagaggttcttggaattgggtgctgtcttggatccggggaaaacacctaaaatcgacaaatgtgctatattaaatgatgctatccgtgcggtaactgaattgcgtagtgaagcagagaagttgaaggattccaatgagtctctccaagagaagattagagagctaaaggctgagaagaatgagctacgagatgagaagcaaaagttgaaggcggagaaagagagcctggagcagcagattaagttcatgaatgcccgtcagagcctcgtaccacacccttctgtcatcccagctgctgcattcgctgccgcccaaggccaagcggcagggcacaagctgatgatgcctgtgatgagctacccaggatttcccatgtggcagttcatgccgccttcagatgttgatacctccgatgaccccaagtcatgccctccggttgcataagccagcaaaaatcatttgcctcatctatctcatggggaaggatggctaaaaagccgtccgttaaattatatcttagtcgtcagtgttactatgcagaagccgtttagtgttactatatgtagttaaatcaagaaccgaactgaagcgtcgtcgttgtatcacccgggaacatttgattatcttgtgaaaccgttgtatattgttagtaaataaataccatccgttgaagcaaatggcgcttggacgccatagcattaccgacttgttactttgttcgacatgttgcccgtgatttttgacctataacataaatatgttgtgctgcaggtcaaaataaaaataaaaatatataggttgtgct

SEQ ID NO: 18743 - protein, 296 aa, Triticum aestivum
  peptide (1)..(296): Ceres Seq. ID no. 13654232
  misc_feature (135)..(184): Pfam Name: Pfam Description:  Helix-loop-helix DNA-binding domain
  misc_feature (46)..(296): NCBI GI NO: 32352190 NR Description: hypothetical protein
  misc_feature (96)..(296): NCBI GI NO: 29367409 NR Description: helix-loop-helix-like protein
  misc_feature (96)..(296): NCBI GI NO: 38636768 NR Description: helix-loop-helix-like protein
  misc_feature (46)..(296): NCBI GI NO: 15239706 NR Description: bHLH protein [Arabidopsis thaliana]
  misc_feature (46)..(296): NCBI GI NO: 21592325 NR Description: bHLH transcription factor, putative
  misc_feature (113)..(296): NCBI GI NO: 15223710 NR Description: bHLH protein [Arabidopsis thaliana]
  misc_feature (105)..(296): NCBI GI NO: 20127030 NR Description: putative bHLH transcription factor
  misc_feature (105)..(296): NCBI GI NO: 22331274 NR Description: bHLH protein [Arabidopsis thaliana]
  misc_feature (105)..(296): NCBI GI NO: 18414212 NR Description: bHLH protein [Arabidopsis thaliana]
  misc_feature (105)..(296): NCBI GI NO: 30682847 NR Description: bHLH protein [Arabidopsis thaliana]
LSRRRSPRPLPRSPPQPRNIPQFRRDRGTLAPRQSSLDPESRSGAMASPEGSNWVFDCPLMDDLAAADFAAASAGGFYWTPPMQPQMHTLAQAVSATPAPNPCAEINSSVSVDWDHAKGQPKNKRPRSETGAQPSSKACREKVRRDKLNERFLELGAVLDPGKTPKIDKCAILNDAIRAVTELRSEAEKLKDSNESLQEKIRELKAEKNELRDEKQKLKAEKESLEQQIKFMNARQSLVPHPSVIPAAAFAAAQGQAAGHKLMMPVMSYPGFPMWQFMPPSDVDTSDDPKSCPPVA

SEQ ID NO: 18744 - protein, 251 aa, Triticum aestivum
  peptide (1)..(251): Ceres Seq. ID no. 13654233
  misc_feature (90)..(139): Pfam Name: Pfam Description:  Helix-loop-helix DNA-binding domain
  misc_feature (1)..(251): NCBI GI NO: 32352190 NR Description: hypothetical protein
  misc_feature (51)..(251): NCBI GI NO: 29367409 NR Description: helix-loop-helix-like protein
  misc_feature (51)..(251): NCBI GI NO: 38636768 NR Description: helix-loop-helix-like protein
  misc_feature (1)..(251): NCBI GI NO: 15239706 NR Description: bHLH protein [Arabidopsis thaliana]
  misc_feature (1)..(251): NCBI GI NO: 21592325 NR Description: bHLH transcription factor, putative
  misc_feature (68)..(251): NCBI GI NO: 15223710 NR Description: bHLH protein [Arabidopsis thaliana]
  misc_feature (60)..(251): NCBI GI NO: 20127030 NR Description: putative bHLH transcription factor
  misc_feature (60)..(251): NCBI GI NO: 22331274 NR Description: bHLH protein [Arabidopsis thaliana]
  misc_feature (60)..(251): NCBI GI NO: 18414212 NR Description: bHLH protein [Arabidopsis thaliana]
  misc_feature (60)..(251): NCBI GI NO: 30682847 NR Description: bHLH protein [Arabidopsis thaliana]
MASPEGSNWVFDCPLMDDLAAADFAAASAGGFYWTPPMQPQMHTLAQAVSATPAPNPCAEINSSVSVDWDHAKGQPKNKRPRSETGAQPSSKACREKVRRDKLNERFLELGAVLDPGKTPKIDKCAILNDAIRAVTELRSEAEKLKDSNESLQEKIRELKAEKNELRDEKQKLKAEKESLEQQIKFMNARQSLVPHPSVIPAAAFAAAQGQAAGHKLMMPVMSYPGFPMWQFMPPSDVDTSDDPKSCPPVA

SEQ ID NO: 18745 - protein, 236 aa, Triticum aestivum
  peptide (1)..(236): Ceres Seq. ID no. 13654234
  misc_feature (75)..(124): Pfam Name: Pfam Description:  Helix-loop-helix DNA-binding domain
  misc_feature (1)..(236): NCBI GI NO: 32352190 NR Description: hypothetical protein
  misc_feature (36)..(236): NCBI GI NO: 29367409 NR Description: helix-loop-helix-like protein
  misc_feature (36)..(236): NCBI GI NO: 38636768 NR Description: helix-loop-helix-like protein
  misc_feature (1)..(236): NCBI GI NO: 15239706 NR Description: bHLH protein [Arabidopsis thaliana]
  misc_feature (1)..(236): NCBI GI NO: 21592325 NR Description: bHLH transcription factor, putative
  misc_feature (53)..(236): NCBI GI NO: 15223710 NR Description: bHLH protein [Arabidopsis thaliana]
  misc_feature (45)..(236): NCBI GI NO: 20127030 NR Description: putative bHLH transcription factor
  misc_feature (45)..(236): NCBI GI NO: 22331274 NR Description: bHLH protein [Arabidopsis thaliana]
  misc_feature (45)..(236): NCBI GI NO: 18414212 NR Description: bHLH protein [Arabidopsis thaliana]
  misc_feature (45)..(236): NCBI GI NO: 30682847 NR Description: bHLH protein [Arabidopsis thaliana]
MDDLAAADFAAASAGGFYWTPPMQPQMHTLAQAVSATPAPNPCAEINSSVSVDWDHAKGQPKNKRPRSETGAQPSSKACREKVRRDKLNERFLELGAVLDPGKTPKIDKCAILNDAIRAVTELRSEAEKLKDSNESLQEKIRELKAEKNELRDEKQKLKAEKESLEQQIKFMNARQSLVPHPSVIPAAAFAAAQGQAAGHKLMMPVMSYPGFPMWQFMPPSDVDTSDDPKSCPPVA

SEQ ID NO: 18746 - DNA, 1666 bp, Triticum aestivum
  misc_feature (1)..(1666): Ceres Seq. ID no. 13591174
aacgatcccttctccctcttccagatccattcctctcccagccccaggcctcgctcgcctcccccgttgggacggagagagctcggaagggcagggagccatgggttcctgggtccttcttgctgtggttctcgggtccttggtgggagctgcgcgcggctccgagccgtggtcgaacggcacgcaggtctactccaccaatgccaactccggcagcggcagcaacggcgccttcgtcgccctcactctcatccagtccgcggccgccaagggagccgtatgcttggatggaagtttaccgggttaccacctacaccggggatctggatcagggtcaaacaattggcttgtcaatctggagggtggaggatggtgcaatgatgttaaaagctgtgtgttccgcaagggcagtcggcgtgggtcatcgaaccacatggagaggcaactccagtttacaggcataatgagtaacaggcctgaagaaaatcctgatttctacaactggaacagagtgaaggttcggtattgtgatggtggatccttcaccggtgatggggctgacgcggcttcaggcctttatttccgaggtcagcgtatttggcaggctgctatcgatgacttgatggcccaaggaatgcgttctgctagtcaggcccttctttcgggatgctctgctgggggtgcttctgccatacttcactgtgatgagttccgtggaatgtttccatcaaataccagagtcaagtgcctcgctgatgctggaatgttccttgactctgttgacattgcgggtcgtcgagaaatgagagatttgttcaatggcattgtgagattgcagggttctggaagaagcttgcctcggtcttgtacctctcgcatggataaaacctcatgctttttcccgcagaacgtgttgccaaatattcaaactccgacttttatcttgaacactgcttacgacgtgtggcagcttcaagagagtttggctcccagaacggctgatccccggggtctatggcaaagttgcaagcagaattacgcctcttgcaatagcaatcagcttcagtttttaaatggcttcaggaatgaaatgcttaacgctgtgaagggtttctctgggtcagggcagaatggggtgtttatcaactcttgtttcgcccactgccagagcgagagacaggatacatggtactcaagcaagtctcctcgtcttggcaacaagagaatcgcagaagcggtcggtgactggttcttcgagaggggcaacgccaagtacaccgactgcgcgtacccttgtgacggcacgtgccatcaccttgtgttcaaagggaggcatctctaatacgatcatatcctttgataccagcagctgaagtgctgaaaacccagcgagtgggtacaaccgaaaaaaggaaggtatagatagaagaagatgggtgcaagttggtggcttgcccggcgtccatcgcctcagatatgatagggcagggcctcacatgcaaacgcgatgaggtcctctgcgttattttagtttcatatatcgtcgattctttccattgccaattgctactccctcgatgtatctgaatatttgaaccacactggtgtataaccttacatgttcatgtattgaatgtggtaatatgaaattatgaataatgtgctt

SEQ ID NO: 18747 - protein, 446 aa, Triticum aestivum
  peptide (1)..(446): Ceres Seq. ID no. 15221028
  misc_feature (59)..(424): Pfam Name: Pfam Description:  Pectinacetylesterase
  misc_feature (34)..(443): NCBI GI NO: 34913332 NR Description: putative pectin acetylesterase precursor
  misc_feature (59)..(442): NCBI GI NO: 25347293 NR Description: probable pectinacetylesterase precursor T8L23.6
  misc_feature (59)..(442): NCBI GI NO: 30696158 NR Description: pectinacetylesterase, putative
  misc_feature (59)..(442): NCBI GI NO: 21703105 NR Description: At1g57590/T8L23_6 [Arabidopsis thaliana]
  misc_feature (72)..(442): NCBI GI NO: 18397406 NR Description: pectinacetylesterase, putative
  misc_feature (79)..(442): NCBI GI NO: 28392968 NR Description: putative pectinacetylesterase
  misc_feature (37)..(442): NCBI GI NO: 15226462 NR Description: pectinacetylesterase, putative
  misc_feature (72)..(442): NCBI GI NO: 7487997 NR Description: pectin acetylesterase homolog F21E10
  misc_feature (79)..(442): NCBI GI NO: 15228677 NR Description: pectinacetylesterase family [Arabidopsis thaliana]
  misc_feature (72)..(288): NCBI GI NO: 6714404 NR Description: putative pectinacetylesterase
TIPSPSSRSIPLPAPGLARLPRWDGESSEGQGAMGSWVLLAVVLGSLVGAARGSEPWSNGTQVYSTNANSGSGSNGAFVALTLIQSAAAKGAVCLDGSLPGYHLHRGSGSGSNNWLVNLEGGGWCNDVKSCVFRKGSRRGSSNHMERQLQFTGIMSNRPEENPDFYNWNRVKVRYCDGGSFTGDGADAASGLYFRGQRIWQAAIDDLMAQGMRSASQALLSGCSAGGASAILHCDEFRGMFPSNTRVKCLADAGMFLDSVDIAGRREMRDLFNGIVRLQGSGRSLPRSCTSRMDKTSCFFPQNVLPNIQTPTFILNTAYDVWQLQESLAPRTADPRGLWQSCKQNYASCNSNQLQFLNGFRNEMLNAVKGFSGSGQNGVFINSCFAHCQSERQDTWYSSKSPRLGNKRIAEAVGDWFFERGNAKYTDCAYPCDGTCHHLVFKGRHL

SEQ ID NO: 18748 - protein, 413 aa, Triticum aestivum
  peptide (1)..(413): Ceres Seq. ID no. 15221029
  misc_feature (26)..(391): Pfam Name: Pfam Description:  Pectinacetylesterase
  misc_feature (1)..(410): NCBI GI NO: 34913332 NR Description: putative pectin acetylesterase precursor
  misc_feature (26)..(409): NCBI GI NO: 25347293 NR Description: probable pectinacetylesterase precursor T8L23.6
  misc_feature (26)..(409): NCBI GI NO: 30696158 NR Description: pectinacetylesterase, putative
  misc_feature (26)..(409): NCBI GI NO: 21703105 NR Description: At1g57590/T8L23_6 [Arabidopsis thaliana]
  misc_feature (39)..(409): NCBI GI NO: 18397406 NR Description: pectinacetylesterase, putative
  misc_feature (46)..(409): NCBI GI NO: 28392968 NR Description: putative pectinacetylesterase
  misc_feature (4)..(409): NCBI GI NO: 15226462 NR Description: pectinacetylesterase, putative
  misc_feature (39)..(409): NCBI GI NO: 7487997 NR Description: pectin acetylesterase homolog F21E10
  misc_feature (46)..(409): NCBI GI NO: 15228677 NR Description: pectinacetylesterase family [Arabidopsis thaliana]
  misc_feature (39)..(255): NCBI GI NO: 6714404 NR Description: putative pectinacetylesterase
MGSWVLLAVVLGSLVGAARGSEPWSNGTQVYSTNANSGSGSNGAFVALTLIQSAAAKGAVCLDGSLPGYHLHRGSGSGSNNWLVNLEGGGWCNDVKSCVFRKGSRRGSSNHMERQLQFTGIMSNRPEENPDFYNWNRVKVRYCDGGSFTGDGADAASGLYFRGQRIWQAAIDDLMAQGMRSASQALLSGCSAGGASAILHCDEFRGMFPSNTRVKCLADAGMFLDSVDIAGRREMRDLFNGIVRLQGSGRSLPRSCTSRMDKTSCFFPQNVLPNIQTPTFILNTAYDVWQLQESLAPRTADPRGLWQSCKQNYASCNSNQLQFLNGFRNEMLNAVKGFSGSGQNGVFINSCFAHCQSERQDTWYSSKSPRLGNKRIAEAVGDWFFERGNAKYTDCAYPCDGTCHHLVFKGRHL

SEQ ID NO: 18749 - protein, 302 aa, Triticum aestivum
  peptide (1)..(302): Ceres Seq. ID no. 15221030
  misc_feature (1)..(280): Pfam Name: Pfam Description:  Pectinacetylesterase
  misc_feature (1)..(299): NCBI GI NO: 34913332 NR Description: putative pectin acetylesterase precursor
  misc_feature (1)..(298): NCBI GI NO: 25347293 NR Description: probable pectinacetylesterase precursor T8L23.6
  misc_feature (1)..(298): NCBI GI NO: 30696158 NR Description: pectinacetylesterase, putative
  misc_feature (1)..(298): NCBI GI NO: 21703105 NR Description: At1g57590/T8L23_6 [Arabidopsis thaliana]
  misc_feature (1)..(298): NCBI GI NO: 18397406 NR Description: pectinacetylesterase, putative
  misc_feature (1)..(298): NCBI GI NO: 28392968 NR Description: putative pectinacetylesterase
  misc_feature (1)..(298): NCBI GI NO: 15226462 NR Description: pectinacetylesterase, putative
  misc_feature (1)..(298): NCBI GI NO: 7487997 NR Description: pectin acetylesterase homolog F21E10
  misc_feature (1)..(298): NCBI GI NO: 15228677 NR Description: pectinacetylesterase family [Arabidopsis thaliana]
  misc_feature (1)..(144): NCBI GI NO: 6714404 NR Description: putative pectinacetylesterase
MERQLQFTGIMSNRPEENPDFYNWNRVKVRYCDGGSFTGDGADAASGLYFRGQRIWQAAIDDLMAQGMRSASQALLSGCSAGGASAILHCDEFRGMFPSNTRVKCLADAGMFLDSVDIAGRREMRDLFNGIVRLQGSGRSLPRSCTSRMDKTSCFFPQNVLPNIQTPTFILNTAYDVWQLQESLAPRTADPRGLWQSCKQNYASCNSNQLQFLNGFRNEMLNAVKGFSGSGQNGVFINSCFAHCQSERQDTWYSSKSPRLGNKRIAEAVGDWFFERGNAKYTDCAYPCDGTCHHLVFKGRHL

SEQ ID NO: 18750 - DNA, 1379 bp, Triticum aestivum
  misc_feature (1)..(1379): Ceres Seq. ID no. 13598313
ccacaccatcgtcttatctcggggcctaagagccagaggaatcatttccttcttctccatccttccgtccagccttgttggtttcactgtgccgtcgatcggcatggcgaggaaatgctcgagctgcggccacaatggccacaactcgaggacctgcggcgggcaccgaggcgttgagagcggcggcggcggtgggctgaggctgtttggggtgcagctgcaggtgggcgccgcgcctctcaagaagagcttcagcatggagtgcctgtcgtcgaccgcgtcggcctactacgcggcggccgcggccgtgggtgtcgccgcgtccaactcgtcgtcgtccgtgtcgtcgtcgtcgtcgctcgtctcggtggaggagagcccggagaagatgggccacgggtacctctccgacgggctcatgggcagggctcaagagaggaagaaaggggttccatggaccgaggacgagcaccggaggttcctggccggcctggagaagctcgggaaaggcgactggcgaggcatctcccggcacttcgtcaccacacgcacgccgacgcaggtcgccagccacgcccagaagtacttcctccggcaggccggcctcgcgcagaagaagcggcggtccagcctcttcgacgtcgtggagaaaaatggcgacaggggagccaccgagcgtcgtcacaggctgaaacccgatgccaccagctccgtggacgcgatggggttaacgttccctgctctttccctgggcgccagccggccgaggccggacgcggcgctaccgccgtgcctgactctgatgccgagctgctcgccgccgtcgtcgatgatcggcgcaccgtcagcgagccgtgcaccgaagctccctccttccctgggcctggtggcaaatgcgaatcctcctcggcaggcgcctgacctggagctcaagatctcgtccacggccgcccggaagaccgaccagcaggccggtgctgccgccggttcgtcgccatcgccgaggacgccctttttcggaaccatcagggtcacctagagcgagcaaaagaccacccaccggagcgacggcttaaaagagatctttccgtagacgacgacgacgacgaagaagaacagcaacaagaagaaagagcttttgctagtggcgtgctacattaaacagtagtatgtcagtcagtgtgcgtgtgttgctggcatggcattaagaaatgccatcaccgatccatccataaccatcctgtattatcaccatcacaaggcccaactttactggcctaatttagccatgcaaataaacaaggaacgggcctcattggcatcaaaaaaaaaaaaaaaaaagcttatcgataccgtcgacctgtttaaacacaataaag

SEQ ID NO: 18751 - protein, 345 aa, Triticum aestivum
  peptide (1)..(345): Ceres Seq. ID no. 15222299
  misc_feature (149)..(196): Pfam Name: Pfam Description:  Myb-like DNA-binding domain
  misc_feature (35)..(234): NCBI GI NO: 34906444 NR Description: P0671B11.14
  misc_feature (36)..(221): NCBI GI NO: 34912404 NR Description: putative Myb-related transcription factor
  misc_feature (59)..(221): NCBI GI NO: 12406995 NR Description: MCB2 protein [Hordeum vulgare subsp. vulgare]
  misc_feature (35)..(250): NCBI GI NO: 2062176 NR Description: Myb-related transcription activator
  misc_feature (35)..(237): NCBI GI NO: 34906364 NR Description: unnamed protein product
  misc_feature (133)..(227): NCBI GI NO: 15241963 NR Description: expressed protein [Arabidopsis thaliana]
  misc_feature (35)..(106): NCBI GI NO: 15241963 NR Description: expressed protein [Arabidopsis thaliana]
  misc_feature (51)..(250): NCBI GI NO: 15228185 NR Description: myb family transcription factor
  misc_feature (35)..(246): NCBI GI NO: 7705206 NR Description: MybSt1 [Solanum tuberosum]
  misc_feature (35)..(246): NCBI GI NO: 1076660 NR Description: D13F(MYBST1) protein - potato
HTIVLSRGLRARGIISFFSILPSSLVGFTVPSIGMARKCSSCGHNGHNSRTCGGHRGVESGGGGGLRLFGVQLQVGAAPLKKSFSMECLSSTASAYYAAAAAVGVAASNSSSSVSSSSSLVSVEESPEKMGHGYLSDGLMGRAQERKKGVPWTEDEHRRFLAGLEKLGKGDWRGISRHFVTTRTPTQVASHAQKYFLRQAGLAQKKRRSSLFDVVEKNGDRGATERRHRLKPDATSSVDAMGLTFPALSLGASRPRPDAALPPCLTLMPSCSPPSSMIGAPSASRAPKLPPSLGLVANANPPRQAPDLELKISSTAARKTDQQAGAAAGSSPSPRTPFFGTIRVT

SEQ ID NO: 18752 - protein, 311 aa, Triticum aestivum
  peptide (1)..(311): Ceres Seq. ID no. 15222300
  misc_feature (115)..(162): Pfam Name: Pfam Description:  Myb-like DNA-binding domain
  misc_feature (1)..(200): NCBI GI NO: 34906444 NR Description: P0671B11.14
  misc_feature (2)..(187): NCBI GI NO: 34912404 NR Description: putative Myb-related transcription factor
  misc_feature (25)..(187): NCBI GI NO: 12406995 NR Description: MCB2 protein [Hordeum vulgare subsp. vulgare]
  misc_feature (1)..(216): NCBI GI NO: 2062176 NR Description: Myb-related transcription activator
  misc_feature (1)..(203): NCBI GI NO: 34906364 NR Description: unnamed protein product
  misc_feature (99)..(193): NCBI GI NO: 15241963 NR Description: expressed protein [Arabidopsis thaliana]
  misc_feature (1)..(72): NCBI GI NO: 15241963 NR Description: expressed protein [Arabidopsis thaliana]
  misc_feature (17)..(216): NCBI GI NO: 15228185 NR Description: myb family transcription factor
  misc_feature (1)..(212): NCBI GI NO: 7705206 NR Description: MybSt1 [Solanum tuberosum]
  misc_feature (1)..(212): NCBI GI NO: 1076660 NR Description: D13F(MYBST1) protein - potato
MARKCSSCGHNGHNSRTCGGHRGVESGGGGGLRLFGVQLQVGAAPLKKSFSMECLSSTASAYYAAAAAVGVAASNSSSSVSSSSSLVSVEESPEKMGHGYLSDGLMGRAQERKKGVPWTEDEHRRFLAGLEKLGKGDWRGISRHFVTTRTPTQVASHAQKYFLRQAGLAQKKRRSSLFDVVEKNGDRGATERRHRLKPDATSSVDAMGLTFPALSLGASRPRPDAALPPCLTLMPSCSPPSSMIGAPSASRAPKLPPSLGLVANANPPRQAPDLELKISSTAARKTDQQAGAAAGSSPSPRTPFFGTIRVT

SEQ ID NO: 18753 - protein, 260 aa, Triticum aestivum
  peptide (1)..(260): Ceres Seq. ID no. 15222301
  misc_feature (64)..(111): Pfam Name: Pfam Description:  Myb-like DNA-binding domain
  misc_feature (1)..(149): NCBI GI NO: 34906444 NR Description: P0671B11.14
  misc_feature (1)..(136): NCBI GI NO: 34912404 NR Description: putative Myb-related transcription factor
  misc_feature (1)..(136): NCBI GI NO: 12406995 NR Description: MCB2 protein [Hordeum vulgare subsp. vulgare]
  misc_feature (1)..(165): NCBI GI NO: 2062176 NR Description: Myb-related transcription activator
  misc_feature (1)..(152): NCBI GI NO: 34906364 NR Description: unnamed protein product
  misc_feature (48)..(142): NCBI GI NO: 15241963 NR Description: expressed protein [Arabidopsis thaliana]
  misc_feature (1)..(21): NCBI GI NO: 15241963 NR Description: expressed protein [Arabidopsis thaliana]
  misc_feature (1)..(165): NCBI GI NO: 15228185 NR Description: myb family transcription factor
  misc_feature (1)..(161): NCBI GI NO: 7705206 NR Description: MybSt1 [Solanum tuberosum]
  misc_feature (1)..(161): NCBI GI NO: 1076660 NR Description: D13F(MYBST1) protein - potato
MECLSSTASAYYAAAAAVGVAASNSSSSVSSSSSLVSVEESPEKMGHGYLSDGLMGRAQERKKGVPWTEDEHRRFLAGLEKLGKGDWRGISRHFVTTRTPTQVASHAQKYFLRQAGLAQKKRRSSLFDVVEKNGDRGATERRHRLKPDATSSVDAMGLTFPALSLGASRPRPDAALPPCLTLMPSCSPPSSMIGAPSASRAPKLPPSLGLVANANPPRQAPDLELKISSTAARKTDQQAGAAAGSSPSPRTPFFGTIRVT

SEQ ID NO: 18754 - DNA, 1269 bp, Triticum aestivum
  misc_feature (1)..(1269): Ceres Seq. ID no. 13596175
accgtctcagataacttaggattttcggtctcagattgtgaggagcggctcatcgacctctgccaactgccatcgcacttgctgttggagctcgtggactcgtggtgcgccctcatggaagggcccgtcctccccaacctgccaaacacgagggtcgccgtcgtcaccggagggaacaaagggatcggcttcgaggtgtgccgccagctggccagcggcggcgtcacggtcgtcttgacggcccgggacgagacgaggggcggggaggccgtcgagaggctcaatgcgctgggactctctggtgtcatcttccatcggctggagatcacggacgcttcgagcgccgcgacgctggctggttttctcaaggcccgctttggcaagcttgacattctggtgaataatgccgcagttggtggggttgagtacggccaagaattcgatacgaacgaggaaaagttcggtggcatggatttccaccagagagttgagtggatgttgaagaacgcacgggagcccatcgacagcgcgaagaacagcgtgcagacgaactactatggcacgaagcatgtaatcgaagccctgctgcctctgcttcaatcttcgtccgtgggaagaatagtgaacgtctcctccaattatggactgctaagacatatcggcagcgaggaggtgaggcaggagctcaacgacgtcgacaacctgacagaggggaggctagacgagctgctggagaagttcatgaaagacttcgaggccggcgcgctggagccgcacgggtggcccacaaagttctcggcgtacaaggtggccaaggccgccatgaacgcctactcgaggatcctggcgaggaggcaccctgagctgcgcgtcaactgcgcgcaccctggcttcgtcaagaccgacatgagcatggggtccggggtcctgacgccggaggagggcgcacgtaacttggtgaaggtggcgctgctgcctgacggcgggccgaccggcgcgtatttcgccatgggcgaggaggcgccgttcgtgtgaggtaccggcggtacgtgcgtgcgtgccgtacggttactgcttggatgcgttaaaaaaaaataagatgtgtcatctatcttttttcgacaaagggtgaggttcacagcggcagcgtccgccacctccaatgcatgacacgtgttcagtgagggctcgtataccgtccttcattgaacgcgcttttgcaacagaggtaatgtttctgaaacatatgtgatattgcagtagtttacg

SEQ ID NO: 18755 - protein, 344 aa, Triticum aestivum
  peptide (1)..(344): Ceres Seq. ID no. 13596176
  misc_feature (44)..(344): NCBI GI NO: 38346769 NR Description: OSJNBa0081C01.20
  misc_feature (39)..(344): NCBI GI NO: 38346774 NR Description: OSJNBa0081C01.25
  misc_feature (39)..(344): NCBI GI NO: 38346768 NR Description: OSJNBa0081C01.19
  misc_feature (49)..(344): NCBI GI NO: 38346772 NR Description: OSJNBa0081C01.23
  misc_feature (39)..(344): NCBI GI NO: 38346767 NR Description: OSJNBa0081C01.18
  misc_feature (51)..(339): NCBI GI NO: 33146492 NR Description: carbonyl reductase -like protein
  misc_feature (47)..(335): NCBI GI NO: 18378884 NR Description: short-chain dehydrogenase/reductase family protein
  misc_feature (50)..(335): NCBI GI NO: 25518668 NR Description: hypothetical protein T1N6
  misc_feature (51)..(335): NCBI GI NO: 34559416 NR Description: (-)-isopiperitenone reductase [Mentha x piperita]
  misc_feature (51)..(343): NCBI GI NO: 15233062 NR Description: short-chain dehydrogenase/reductase family protein
TVSDNLGFSVSDCEERLIDLCQLPSHLLLELVDSWCALMEGPVLPNLPNTRVAVVTGGNKGIGFEVCRQLASGGVTVVLTARDETRGGEAVERLNALGLSGVIFHRLEITDASSAATLAGFLKARFGKLDILVNNAAVGGVEYGQEFDTNEEKFGGMDFHQRVEWMLKNAREPIDSAKNSVQTNYYGTKHVIEALLPLLQSSSVGRIVNVSSNYGLLRHIGSEEVRQELNDVDNLTEGRLDELLEKFMKDFEAGALEPHGWPTKFSAYKVAKAAMNAYSRILARRHPELRVNCAHPGFVKTDMSMGSGVLTPEEGARNLVKVALLPDGGPTGAYFAMGEEAPFV

SEQ ID NO: 18756 - protein, 306 aa, Triticum aestivum
  peptide (1)..(306): Ceres Seq. ID no. 13596177
  misc_feature (6)..(306): NCBI GI NO: 38346769 NR Description: OSJNBa0081C01.20
  misc_feature (1)..(306): NCBI GI NO: 38346774 NR Description: OSJNBa0081C01.25
  misc_feature (1)..(306): NCBI GI NO: 38346768 NR Description: OSJNBa0081C01.19
  misc_feature (11)..(306): NCBI GI NO: 38346772 NR Description: OSJNBa0081C01.23
  misc_feature (1)..(306): NCBI GI NO: 38346767 NR Description: OSJNBa0081C01.18
  misc_feature (13)..(301): NCBI GI NO: 33146492 NR Description: carbonyl reductase -like protein
  misc_feature (9)..(297): NCBI GI NO: 18378884 NR Description: short-chain dehydrogenase/reductase family protein
  misc_feature (12)..(297): NCBI GI NO: 25518668 NR Description: hypothetical protein T1N6
  misc_feature (13)..(297): NCBI GI NO: 34559416 NR Description: (-)-isopiperitenone reductase [Mentha x piperita]
  misc_feature (13)..(305): NCBI GI NO: 15233062 NR Description: short-chain dehydrogenase/reductase family protein
MEGPVLPNLPNTRVAVVTGGNKGIGFEVCRQLASGGVTVVLTARDETRGGEAVERLNALGLSGVIFHRLEITDASSAATLAGFLKARFGKLDILVNNAAVGGVEYGQEFDTNEEKFGGMDFHQRVEWMLKNAREPIDSAKNSVQTNYYGTKHVIEALLPLLQSSSVGRIVNVSSNYGLLRHIGSEEVRQELNDVDNLTEGRLDELLEKFMKDFEAGALEPHGWPTKFSAYKVAKAAMNAYSRILARRHPELRVNCAHPGFVKTDMSMGSGVLTPEEGARNLVKVALLPDGGPTGAYFAMGEEAPFV

SEQ ID NO: 18757 - protein, 188 aa, Triticum aestivum
  peptide (1)..(188): Ceres Seq. ID no. 13596178
  misc_feature (1)..(188): NCBI GI NO: 38346769 NR Description: OSJNBa0081C01.20
  misc_feature (1)..(188): NCBI GI NO: 38346774 NR Description: OSJNBa0081C01.25
  misc_feature (1)..(188): NCBI GI NO: 38346768 NR Description: OSJNBa0081C01.19
  misc_feature (1)..(188): NCBI GI NO: 38346772 NR Description: OSJNBa0081C01.23
  misc_feature (1)..(188): NCBI GI NO: 38346767 NR Description: OSJNBa0081C01.18
  misc_feature (1)..(183): NCBI GI NO: 33146492 NR Description: carbonyl reductase -like protein
  misc_feature (1)..(179): NCBI GI NO: 18378884 NR Description: short-chain dehydrogenase/reductase family protein
  misc_feature (1)..(179): NCBI GI NO: 25518668 NR Description: hypothetical protein T1N6
  misc_feature (1)..(179): NCBI GI NO: 34559416 NR Description: (-)-isopiperitenone reductase [Mentha x piperita]
  misc_feature (1)..(187): NCBI GI NO: 15233062 NR Description: short-chain dehydrogenase/reductase family protein
MDFHQRVEWMLKNAREPIDSAKNSVQTNYYGTKHVIEALLPLLQSSSVGRIVNVSSNYGLLRHIGSEEVRQELNDVDNLTEGRLDELLEKFMKDFEAGALEPHGWPTKFSAYKVAKAAMNAYSRILARRHPELRVNCAHPGFVKTDMSMGSGVLTPEEGARNLVKVALLPDGGPTGAYFAMGEEAPFV

SEQ ID NO: 18758 - DNA, 1462 bp, Triticum aestivum
  misc_feature (1)..(1462): Ceres Seq. ID no. 15178668
ggttaccgcatcgtcgccaggacaagccgccagccagcccaacccaaaccaccggaccggagcagcagccgacgcctcacaaccgccgccgcgcaggcagacgagccagcgggagggagccatggatcggtaccagagggtggagaagccgcgggaggaggtgcccatcaaggagaacgagatccgcatcaccacccagggcaggatgcgcaactacatcacctacgccaccaccctcttccaggataagggttgcgatgaagttgtattcaaggcgatgggaagggccataaacaaaactgtgatgattgcagaattgatcaagaggagaattgtgggtctccatcaaaacactgccactgaatccactgatattactgacacatgggagccactggaggaaggcctacttccgcttgagacaacaaggcatgtgtctatgattactataactctttcaaagaaggagctggacacgtcatctgtcggataccaatctcctctgcctgctgacaaggtgaagccgtttgttgaatacgagaatgaagaagatgcgcactcacctcctgggcgaggaagaggccgtggccgaggccgtggaaggggaatgggaaggggtagagatgcacgtgggaatggatacatggagtatgctgatggtggatgggaaaatgagcatgctcctacctatgcaggcaatgggtatgctgaccatggtccagcttatgagggtaatgggtatgctcgtggtagaggccgtggtttcaggggccgtggcagaagaggtggctatggtggtcagcctgattatcagcatgatggagggtattatgatgaggcaccagcgccaccccgaggtgggggccgtggtttcagggggcgtggcaggagaggcggctatggtggtggccagcctgattatcagcaagacggaggttattacgaggaggctccttttcctgcaccagctggaggtcgtggtcgaggccgtggccgtgggagaggcggcccagctcggggcagagggcgcggtggcaatgccaatggcaacatggtgtatgccgccgcttcgggcgcataagcagtccgcagctcgctgccgtcgttagttggatgcctgctccaagcatgaatatgtatcatctgtgttgtttatctgtgatgacatatatactttgtataagcctgtcattcgttgggaatgaggccagattttgatctttgactagatttgtaggggtagcaccgttatgattgtgctttgttttctcaaagtagatgtcagactaattgtagctaccagttggtaaaggtttagagcagggcattctttcaatttttacataaacgaagtctttgttctctgttacattgtgccaatttcgtttggtgtcctgtctttgaaatgtaagttcaatttagtgggtacttacaatttgatttctgaaaaaaaaaaaaaaaa

SEQ ID NO: 18759 - protein, 359 aa, Triticum aestivum
  peptide (1)..(359): Ceres Seq. ID no. 15178669
  misc_feature (189)..(349): Pfam Name: Pfam Description:  High molecular weight glutenin subunit
  misc_feature (5)..(287): NCBI GI NO: 32526671 NR Description: chloroplast nucleoid DNA-binding protein -likeprotein
  misc_feature (41)..(342): NCBI GI NO: 18410994 NR Description: expressed protein [Arabidopsis thaliana]
  misc_feature (32)..(356): NCBI GI NO: 25518088 NR Description: T20H2.2 protein - Arabidopsis thaliana
  misc_feature (41)..(356): NCBI GI NO: 18394837 NR Description: glycine-rich protein [Arabidopsis thaliana]
  misc_feature (41)..(310): NCBI GI NO: 34897552 NR Description: OSJNBa0042L16.13
  misc_feature (41)..(323): NCBI GI NO: 24417384 NR Description: unknown [Arabidopsis thaliana]
  misc_feature (80)..(342): NCBI GI NO: 25404999 NR Description: protein T4O12.22 [imported] - Arabidopsis thaliana
  misc_feature (41)..(81): NCBI GI NO: 25404999 NR Description: protein T4O12.22 [imported] - Arabidopsis thaliana
  misc_feature (41)..(188): NCBI GI NO: 15231369 NR Description: hypothetical protein [Arabidopsis thaliana]
  misc_feature (47)..(304): NCBI GI NO: 23612874 NR Description: hypothetical protein, conserved
VTASSPGQAASQPNPNHRTGAAADASQPPPRRQTSQREGAMDRYQRVEKPREEVPIKENEIRITTQGRMRNYITYATTLFQDKGCDEVVFKAMGRAINKTVMIAELIKRRIVGLHQNTATESTDITDTWEPLEEGLLPLETTRHVSMITITLSKKELDTSSVGYQSPLPADKVKPFVEYENEEDAHSPPGRGRGRGRGRGRGMGRGRDARGNGYMEYADGGWENEHAPTYAGNGYADHGPAYEGNGYARGRGRGFRGRGRRGGYGGQPDYQHDGGYYDEAPAPPRGGGRGFRGRGRRGGYGGGQPDYQQDGGYYEEAPFPAPAGGRGRGRGRGRGGPARGRGRGGNANGNMVYAAASGA

SEQ ID NO: 18760 - protein, 319 aa, Triticum aestivum
  peptide (1)..(319): Ceres Seq. ID no. 15178670
  misc_feature (149)..(309): Pfam Name: Pfam Description:  High molecular weight glutenin subunit
  misc_feature (1)..(247): NCBI GI NO: 32526671 NR Description: chloroplast nucleoid DNA-binding protein -likeprotein
  misc_feature (1)..(302): NCBI GI NO: 18410994 NR Description: expressed protein [Arabidopsis thaliana]
  misc_feature (1)..(316): NCBI GI NO: 25518088 NR Description: T20H2.2 protein - Arabidopsis thaliana
  misc_feature (1)..(316): NCBI GI NO: 18394837 NR Description: glycine-rich protein [Arabidopsis thaliana]
  misc_feature (1)..(270): NCBI GI NO: 34897552 NR Description: OSJNBa0042L16.13
  misc_feature (1)..(283): NCBI GI NO: 24417384 NR Description: unknown [Arabidopsis thaliana]
  misc_feature (40)..(302): NCBI GI NO: 25404999 NR Description: protein T4O12.22 [imported] - Arabidopsis thaliana
  misc_feature (1)..(41): NCBI GI NO: 25404999 NR Description: protein T4O12.22 [imported] - Arabidopsis thaliana
  misc_feature (1)..(148): NCBI GI NO: 15231369 NR Description: hypothetical protein [Arabidopsis thaliana]
  misc_feature (7)..(264): NCBI GI NO: 23612874 NR Description: hypothetical protein, conserved
MDRYQRVEKPREEVPIKENEIRITTQGRMRNYITYATTLFQDKGCDEVVFKAMGRAINKTVMIAELIKRRIVGLHQNTATESTDITDTWEPLEEGLLPLETTRHVSMITITLSKKELDTSSVGYQSPLPADKVKPFVEYENEEDAHSPPGRGRGRGRGRGRGMGRGRDARGNGYMEYADGGWENEHAPTYAGNGYADHGPAYEGNGYARGRGRGFRGRGRRGGYGGQPDYQHDGGYYDEAPAPPRGGGRGFRGRGRRGGYGGGQPDYQQDGGYYEEAPFPAPAGGRGRGRGRGRGGPARGRGRGGNANGNMVYAAASGA

SEQ ID NO: 18761 - protein, 291 aa, Triticum aestivum
  peptide (1)..(291): Ceres Seq. ID no. 15178671
  misc_feature (121)..(281): Pfam Name: Pfam Description:  High molecular weight glutenin subunit
  misc_feature (1)..(219): NCBI GI NO: 32526671 NR Description: chloroplast nucleoid DNA-binding protein -likeprotein
  misc_feature (1)..(274): NCBI GI NO: 18410994 NR Description: expressed protein [Arabidopsis thaliana]
  misc_feature (1)..(288): NCBI GI NO: 25518088 NR Description: T20H2.2 protein - Arabidopsis thaliana
  misc_feature (1)..(288): NCBI GI NO: 18394837 NR Description: glycine-rich protein [Arabidopsis thaliana]
  misc_feature (1)..(242): NCBI GI NO: 34897552 NR Description: OSJNBa0042L16.13
  misc_feature (1)..(255): NCBI GI NO: 24417384 NR Description: unknown [Arabidopsis thaliana]
  misc_feature (12)..(274): NCBI GI NO: 25404999 NR Description: protein T4O12.22 [imported] - Arabidopsis thaliana
  misc_feature (1)..(13): NCBI GI NO: 25404999 NR Description: protein T4O12.22 [imported] - Arabidopsis thaliana
  misc_feature (1)..(120): NCBI GI NO: 15231369 NR Description: hypothetical protein [Arabidopsis thaliana]
  misc_feature (1)..(236): NCBI GI NO: 23612874 NR Description: hypothetical protein, conserved
MRNYITYATTLFQDKGCDEVVFKAMGRAINKTVMIAELIKRRIVGLHQNTATESTDITDTWEPLEEGLLPLETTRHVSMITITLSKKELDTSSVGYQSPLPADKVKPFVEYENEEDAHSPPGRGRGRGRGRGRGMGRGRDARGNGYMEYADGGWENEHAPTYAGNGYADHGPAYEGNGYARGRGRGFRGRGRRGGYGGQPDYQHDGGYYDEAPAPPRGGGRGFRGRGRRGGYGGGQPDYQQDGGYYEEAPFPAPAGGRGRGRGRGRGGPARGRGRGGNANGNMVYAAASGA

SEQ ID NO: 18762 - DNA, 1312 bp, Triticum aestivum
  misc_feature (1)..(1312): Ceres Seq. ID no. 13662323
atcacatcgtctcaccaagcagcagctagctaagctaagcctagccaaagcttctctagcttcggtagtccaggaaacatgaggctcgcggtggttctcctctgcgccctggtggccgtccaggtcgcgctcctcgccgccccggcggaggccggcgagctggtggtcgggtactacgacaagaaatgcaggggcgtggagaacgtcgtccagtggcacgtcaggagggcgctcaagaccaaccgccgcgccggtgccgccctcgtccgcctcctcttccacgactgcttcgtcaggggttgcgatgcctctgtgctccttgacgcgtcccccgagaaccctcacccggagaaggaggcgccggtgaacatcgggctggccgccttcgacctcctggaggagatcaaggcggccgtcgaggacaggtgccccggcgtggtgtcctgctctgacatcctcatttacgcagcccgtgacgcggcccacgccctcagcaatggcaacatccacttcgacgtccctgccgggcgcctcgacggcctcgtctcctcggggccgccgaggcccaggcggagctcccggactccaccttcaccgtgcagcagctcatcgacaayttcgcacgcaaggacttcgacgtggaggagctggtcatcytgtccggcgcgcactccatcggcgtcggccactgctcctccttcaccggccgcctcaccgcgccgccggagcagatcaacccggcctaccgcaaccttctcaaccacaagtgccaccagggcgccaacccggccgtcgtcaacaacgtccgcgatgaggactacgagacggtgtccaagttcatgcccgggttcaccagccgggtgcgcaagatcagcgacttcctcgacaacaccttctaccacaacaacctcgccaggatcgtcagcttcaactccgactggcagctcatgacccacaccgaggccaggggccacgtccacgagtacgccgacaacgccacgctctgggacggcgacttcgcggaatccctgctcaagctcagcaagctgtccatgcccgccgggagcaagggcggcatcaggaagaagtgcagcatcgccacccaccctctctactaaacaagtcgtatgcatgcatgaacaaggtcgatccaacgaagaagagaacctttgcccctggcggtgtgcggatttcttcaataatcatgtgatttttctggttcaatccattcttttgattcccattggttgtgtattttatttatggcaacatatatgtatcacggaaataaagttacggtctttcaaatgct

SEQ ID NO: 18763 - protein, 290 aa, Triticum aestivum
  peptide (1)..(290): Ceres Seq. ID no. 15220168
  misc_feature (44)..(157): Pfam Name: Pfam Description:  Peroxidase
  misc_feature (1)..(157): NCBI GI NO: 34894404 NR Description: putative peroxidase
  misc_feature (1)..(158): NCBI GI NO: 34894394 NR Description: putative peroxidase
  misc_feature (3)..(158): NCBI GI NO: 34894402 NR Description: putative peroxidase
  misc_feature (11)..(158): NCBI GI NO: 34894398 NR Description: putative peroxidase
  misc_feature (12)..(154): NCBI GI NO: 12039335 NR Description: putative peroxidase [Oryza sativa]
  misc_feature (12)..(154): NCBI GI NO: 12039346 NR Description: putative peroxidase [Oryza sativa]
  misc_feature (12)..(154): NCBI GI NO: 12039354 NR Description: putative peroxidase [Oryza sativa]
  misc_feature (21)..(158): NCBI GI NO: 34896268 NR Description: putative peroxidase [Oryza sativa]
  misc_feature (1)..(157): NCBI GI NO: 27261087 NR Description: putative peroxidase
  misc_feature (1)..(158): NCBI GI NO: 12056450 NR Description: peroxidase [Zea mays]
  misc_feature (180)..(180): Xaa is any aa, unknown or other
  misc_feature (193)..(193): Xaa is any aa, unknown or other
MRLAVVLLCALVAVQVALLAAPAEAGELVVGYYDKKCRGVENVVQWHVRRALKTNRRAGAALVRLLFHDCFVRGCDASVLLDASPENPHPEKEAPVNIGLAAFDLLEEIKAAVEDRCPGVVSCSDILIYAARDAAHALSNGNIHFDVPAGRLDGLVSSGPPRPRRSSRTPPSPCSSSSTXSHARTSTWRSWSXCPARTPSASATAPPSPAASPRRRSRSTRPTATFSTTSATRAPTRPSSTTSAMRTTRRCPSSCPGSPAGCARSATSSTTPSTTTTSPGSSASTPTGSS

SEQ ID NO: 18764 - DNA, 1493 bp, Triticum aestivum
  misc_feature (1)..(1493): Ceres Seq. ID no. 13596056
ctctcaaagcagtcaaccagccgcagctcctccctcattccaaagggccacggtctacggtttactctcaccaacccaccacccatcagcatggccgagcgtctcgccgcagccgccaccctccgcgccgccgctccgtccggccgcttcccggtcggccgccgcgccgggccatccagctctgccttcttcccctcctcatcctcgtcctccccggctctccgcctcgtcagcctccgcgccgcgtcgtctcggccctcccagaaggccaagtcggcggggagggggcgatcggtgaggtgcatagcagcggcgtcggacgcggcacagctgaaggccgcgcgcgaggacatcagggagctgctcaacacaacccactgccaccccatcctggttcgtttgggttggcatgattctggcacatatgacaaaaatattaaggactggccagaacgaggtggggctaatggaagtttaagatttgacgttgaactgaagcatggagccaatgccggtttggtaaatgctctaaagcttgtgcaacctatcaaggacaaatacccgagtataacttatgcggatttattccagttggcaagtgctacagcaattgaggaagctggtggcccaaagattccaatgaaatatggacgggttgatgtcacaggacctgagcagtgtccacctgaagggaagcttcctgatgctggcccgagtgctcctgctgaccacttgaggctggtattctacagaatgggccttgatgacaaggaaatcgttgctttgtctggggcacatacacttggaaggtctaggcccgaacggagtggctgggggaaacctgaaacaaaatatactaaaaatggtcctggtgcacctggtggacaatcatggacagctgaatggctgaagtttgataacagttacttcaaggagataaaagagaaaagagatcaggatcttcttgtgttgcctacagatgctgcattatttgaggacccagcattcaaggtctatgcagagaaatatgcagcagacgaagaagcattctttaatgactatgcggaggctcatgctaaactgagcagcctgggtgcaaagtttgatcctgccgagggattctcattggatgattagcgcggcgcgttagccagagaacccttgaagcagccaaacacacttccaaaaggaccagaggacggcacaacctaatcaccatcgttcctctccagcttggtgtcaccatactacaggacgaggcattttcccaacttattatcatatatgtacaagatagagattttcctttccagcttggtcaaattgttagatttggcaattgaggtgcaaaaataatacaggcatgcaaacaaatctgagccattcattcatgtgaacctgctccgatgacaaattcgtttcattcaaaaatttatcacatgatgctttgcctgccaaaaaaaaaaraacgggaggggggaaagcttatcgat

SEQ ID NO: 18765 - protein, 378 aa, Triticum aestivum
  peptide (1)..(378): Ceres Seq. ID no. 15221752
  misc_feature (114)..(346): Pfam Name: Pfam Description:  Peroxidase
  misc_feature (32)..(377): NCBI GI NO: 32879781 NR Description: stromal ascorbate peroxidase
  misc_feature (31)..(378): NCBI GI NO: 32879783 NR Description: thylakoid-bound ascorbate peroxidase
  misc_feature (95)..(378): NCBI GI NO: 25992557 NR Description: thylakoid-bound ascorbate peroxidase
  misc_feature (29)..(377): NCBI GI NO: 3202026 NR Description: stromal L-ascorbate peroxidase precursor
  misc_feature (29)..(377): NCBI GI NO: 7484621 NR Description: L-ascorbate peroxidase (EC 1
  misc_feature (32)..(378): NCBI GI NO: 21741210 NR Description: OSJNBb0086G13.5
  misc_feature (95)..(378): NCBI GI NO: 25992555 NR Description: thylakoid-bound ascorbate peroxidase
  misc_feature (31)..(377): NCBI GI NO: 2146725 NR Description: L-ascorbate peroxidase (EC 1
  misc_feature (35)..(377): NCBI GI NO: 1369920 NR Description: stromal ascorbate peroxidase [Spinacia oleracea]
  misc_feature (35)..(377): NCBI GI NO: 1944507 NR Description: thylakoid-bound ascorbate peroxidase
LSKQSTSRSSSLIPKGHGLRFTLTNPPPISMAERLAAAATLRAAAPSGRFPVGRRAGPSSSAFFPSSSSSSPALRLVSLRAASSRPSQKAKSAGRGRSVRCIAAASDAAQLKAAREDIRELLNTTHCHPILVRLGWHDSGTYDKNIKDWPERGGANGSLRFDVELKHGANAGLVNALKLVQPIKDKYPSITYADLFQLASATAIEEAGGPKIPMKYGRVDVTGPEQCPPEGKLPDAGPSAPADHLRLVFYRMGLDDKEIVALSGAHTLGRSRPERSGWGKPETKYTKNGPGAPGGQSWTAEWLKFDNSYFKEIKEKRDQDLLVLPTDAALFEDPAFKVYAEKYAADEEAFFNDYAEAHAKLSSLGAKFDPAEGFSLDD

SEQ ID NO: 18766 - protein, 348 aa, Triticum aestivum
  peptide (1)..(348): Ceres Seq. ID no. 15221753
  misc_feature (84)..(316): Pfam Name: Pfam Description:  Peroxidase
  misc_feature (2)..(347): NCBI GI NO: 32879781 NR Description: stromal ascorbate peroxidase
  misc_feature (1)..(348): NCBI GI NO: 32879783 NR Description: thylakoid-bound ascorbate peroxidase
  misc_feature (65)..(348): NCBI GI NO: 25992557 NR Description: thylakoid-bound ascorbate peroxidase
  misc_feature (1)..(347): NCBI GI NO: 3202026 NR Description: stromal L-ascorbate peroxidase precursor
  misc_feature (1)..(347): NCBI GI NO: 7484621 NR Description: L-ascorbate peroxidase (EC 1
  misc_feature (2)..(348): NCBI GI NO: 21741210 NR Description: OSJNBb0086G13.5
  misc_feature (65)..(348): NCBI GI NO: 25992555 NR Description: thylakoid-bound ascorbate peroxidase
  misc_feature (1)..(347): NCBI GI NO: 2146725 NR Description: L-ascorbate peroxidase (EC 1
  misc_feature (5)..(347): NCBI GI NO: 1369920 NR Description: stromal ascorbate peroxidase [Spinacia oleracea]
  misc_feature (5)..(347): NCBI GI NO: 1944507 NR Description: thylakoid-bound ascorbate peroxidase
MAERLAAAATLRAAAPSGRFPVGRRAGPSSSAFFPSSSSSSPALRLVSLRAASSRPSQKAKSAGRGRSVRCIAAASDAAQLKAAREDIRELLNTTHCHPILVRLGWHDSGTYDKNIKDWPERGGANGSLRFDVELKHGANAGLVNALKLVQPIKDKYPSITYADLFQLASATAIEEAGGPKIPMKYGRVDVTGPEQCPPEGKLPDAGPSAPADHLRLVFYRMGLDDKEIVALSGAHTLGRSRPERSGWGKPETKYTKNGPGAPGGQSWTAEWLKFDNSYFKEIKEKRDQDLLVLPTDAALFEDPAFKVYAEKYAADEEAFFNDYAEAHAKLSSLGAKFDPAEGFSLDD

SEQ ID NO: 18767 - DNA, 1796 bp, Triticum aestivum
  misc_feature (1)..(1796): Ceres Seq. ID no. 13654142
aaactgcaaaattccccaacagacgaccatgaagcttcggctgcgttccatggacgcgcgcggcggcgtcgctgagacgcaccgcgtgcagctgccggacacggccgtgctcgccgatgtgaagtccttcctcgccgccaagctctccgccgcgcagcccgtccccgccgagtccgtccgcctctccctcaaccgctcgcaggagctctgttcaccggacccctcagccaccctcgccgccctcggcctcgcatccggtgacctcctctatttcacgctctccgcagaattattatcgcagccaccgcctcctcaaacacttccccggaaccctagcccggatacagcctccatcgggcaaattgcttccggttcccaatctcctggggaggccggtggatcctcgtcaccgccgcaaaatctacacatacagcctgtctcttcgtcgctgccgcaaaatctacacatagagcctatctcttcgccgaggccgcgagccctccacgtggagcctattttgcccgtggcatctgatccgcccgatgtggtgatggcggaggccgtccacgcacccaagagcttgtcgagccttgtgattgggattctcaagcgggagatggaggcggaggatgctggatgcgcaaatggtacagttatccatcgcctagctgtgtccctgcaggcagctcttgtcgatgctggcttccttgcggagaatccgatggggtctcgccccggattgctgaaggactgggcctcgggtgcagcggcaacactgaccgtaaagtacaccctaccggagcttgtcgccatgctacctgagggtgaagaggggaagacagtggttttgaactgctcattgatgccaaattttgtgatgatatatgggtgtgtgcctggggcatgctcagaagtgcgcagattgtgcttggagttaccaaagctggcgccgctgctatatctggatagcaatgaagtgggtgcaacagaggagaaggagattcttgagctttggagggtgctgaaggatgagctgtgtcttccgctgatgatatctttgtgccaactcaacgggttgcgcttgccgccgtgcttgatggcattgccaggtgatctgaaggctaaagtcttggagtttgttcctggtgttgatcttgcaagggttcagtgcgcatgcaaggaattgcaggatcttgcagcagatgataatctttggaagatgaggcttgaactggagatgagtccttctagcaagggttctggatggagcggagattggaagcaaaggtttgtggcagcttggaaggtggacaacagtaggaggcatcacaagagaccacccagcccaaggttttcgggctatggttgggggatcggtacacgtaacccacttaacttcccagtaattggtggtgattcggaccgtctgccctttataaatcacaatatccttgggcgtagttttggaaatcagcggaggaacatctcgcccaactgcaatttcgagggtcatcgccaagggtttccttgatttaagttttcactagtatctcaagtatgcaatgcataggctgccttgtacatgtttataagttgcatgccagtgctcttatcctcgtgaacttttttgtctgtatcttagatcctatgtcttgtcgttttccggttattccttgctatgacaccaaagtacttctgctctgatctagccaacgccatgatcaattatgtaataaatagtttggacttatggtactgagagcttaactttgctctctatacatgtttcggtatct

SEQ ID NO: 18768 - protein, 509 aa, Triticum aestivum
  peptide (1)..(509): Ceres Seq. ID no. 13654143
  misc_feature (365)..(410): Pfam Name: Pfam Description:  F-box domain
  misc_feature (94)..(414): NCBI GI NO: 27311243 NR Description: Hypothetical protein
  misc_feature (10)..(145): NCBI GI NO: 27311243 NR Description: Hypothetical protein
  misc_feature (222)..(435): NCBI GI NO: 18395296 NR Description: F-box protein family [Arabidopsis thaliana]
  misc_feature (10)..(95): NCBI GI NO: 18395296 NR Description: F-box protein family [Arabidopsis thaliana]
  misc_feature (179)..(451): NCBI GI NO: 15220857 NR Description: F-box protein family [Arabidopsis thaliana]
  misc_feature (221)..(433): NCBI GI NO: 37530790 NR Description: unknown protein
  misc_feature (315)..(400): NCBI GI NO: 15223132 NR Description: hypothetical protein [Arabidopsis thaliana]
  misc_feature (221)..(434): NCBI GI NO: 37530850 NR Description: hypothetical protein
NCKIPQQTTMKLRLRSMDARGGVAETHRVQLPDTAVLADVKSFLAAKLSAAQPVPAESVRLSLNRSQELCSPDPSATLAALGLASGDLLYFTLSAELLSQPPPPQTLPRNPSPDTASIGQIASGSQSPGEAGGSSSPPQNLHIQPVSSSLPQNLHIEPISSPRPRALHVEPILPVASDPPDVVMAEAVHAPKSLSSLVIGILKREMEAEDAGCANGTVIHRLAVSLQAALVDAGFLAENPMGSRPGLLKDWASGAAATLTVKYTLPELVAMLPEGEEGKTVVLNCSLMPNFVMIYGCVPGACSEVRRLCLELPKLAPLLYLDSNEVGATEEKEILELWRVLKDELCLPLMISLCQLNGLRLPPCLMALPGDLKAKVLEFVPGVDLARVQCACKELQDLAADDNLWKMRLELEMSPSSKGSGWSGDWKQRFVAAWKVDNSRRHHKRPPSPRFSGYGWGIGTRNPLNFPVIGGDSDRLPFINHNILGRSFGNQRRNISPNCNFEGHRQGFP

SEQ ID NO: 18769 - protein, 500 aa, Triticum aestivum
  peptide (1)..(500): Ceres Seq. ID no. 13654144
  misc_feature (356)..(401): Pfam Name: Pfam Description:  F-box domain
  misc_feature (85)..(405): NCBI GI NO: 27311243 NR Description: Hypothetical protein
  misc_feature (1)..(136): NCBI GI NO: 27311243 NR Description: Hypothetical protein
  misc_feature (213)..(426): NCBI GI NO: 18395296 NR Description: F-box protein family [Arabidopsis thaliana]
  misc_feature (1)..(86): NCBI GI NO: 18395296 NR Description: F-box protein family [Arabidopsis thaliana]
  misc_feature (170)..(442): NCBI GI NO: 15220857 NR Description: F-box protein family [Arabidopsis thaliana]
  misc_feature (212)..(424): NCBI GI NO: 37530790 NR Description: unknown protein
  misc_feature (306)..(391): NCBI GI NO: 15223132 NR Description: hypothetical protein [Arabidopsis thaliana]
  misc_feature (212)..(425): NCBI GI NO: 37530850 NR Description: hypothetical protein
MKLRLRSMDARGGVAETHRVQLPDTAVLADVKSFLAAKLSAAQPVPAESVRLSLNRSQELCSPDPSATLAALGLASGDLLYFTLSAELLSQPPPPQTLPRNPSPDTASIGQIASGSQSPGEAGGSSSPPQNLHIQPVSSSLPQNLHIEPISSPRPRALHVEPILPVASDPPDVVMAEAVHAPKSLSSLVIGILKREMEAEDAGCANGTVIHRLAVSLQAALVDAGFLAENPMGSRPGLLKDWASGAAATLTVKYTLPELVAMLPEGEEGKTVVLNCSLMPNFVMIYGCVPGACSEVRRLCLELPKLAPLLYLDSNEVGATEEKEILELWRVLKDELCLPLMISLCQLNGLRLPPCLMALPGDLKAKVLEFVPGVDLARVQCACKELQDLAADDNLWKMRLELEMSPSSKGSGWSGDWKQRFVAAWKVDNSRRHHKRPPSPRFSGYGWGIGTRNPLNFPVIGGDSDRLPFINHNILGRSFGNQRRNISPNCNFEGHRQGFP

SEQ ID NO: 18770 - protein, 493 aa, Triticum aestivum
  peptide (1)..(493): Ceres Seq. ID no. 13654145
  misc_feature (349)..(394): Pfam Name: Pfam Description:  F-box domain
  misc_feature (78)..(398): NCBI GI NO: 27311243 NR Description: Hypothetical protein
  misc_feature (1)..(129): NCBI GI NO: 27311243 NR Description: Hypothetical protein
  misc_feature (206)..(419): NCBI GI NO: 18395296 NR Description: F-box protein family [Arabidopsis thaliana]
  misc_feature (1)..(79): NCBI GI NO: 18395296 NR Description: F-box protein family [Arabidopsis thaliana]
  misc_feature (163)..(435): NCBI GI NO: 15220857 NR Description: F-box protein family [Arabidopsis thaliana]
  misc_feature (205)..(417): NCBI GI NO: 37530790 NR Description: unknown protein
  misc_feature (299)..(384): NCBI GI NO: 15223132 NR Description: hypothetical protein [Arabidopsis thaliana]
  misc_feature (205)..(418): NCBI GI NO: 37530850 NR Description: hypothetical protein
MDARGGVAETHRVQLPDTAVLADVKSFLAAKLSAAQPVPAESVRLSLNRSQELCSPDPSATLAALGLASGDLLYFTLSAELLSQPPPPQTLPRNPSPDTASIGQIASGSQSPGEAGGSSSPPQNLHIQPVSSSLPQNLHIEPISSPRPRALHVEPILPVASDPPDVVMAEAVHAPKSLSSLVIGILKREMEAEDAGCANGTVIHRLAVSLQAALVDAGFLAENPMGSRPGLLKDWASGAAATLTVKYTLPELVAMLPEGEEGKTVVLNCSLMPNFVMIYGCVPGACSEVRRLCLELPKLAPLLYLDSNEVGATEEKEILELWRVLKDELCLPLMISLCQLNGLRLPPCLMALPGDLKAKVLEFVPGVDLARVQCACKELQDLAADDNLWKMRLELEMSPSSKGSGWSGDWKQRFVAAWKVDNSRRHHKRPPSPRFSGYGWGIGTRNPLNFPVIGGDSDRLPFINHNILGRSFGNQRRNISPNCNFEGHRQGFP

SEQ ID NO: 18771 - DNA, 1556 bp, Triticum aestivum
  misc_feature (1)..(1556): Ceres Seq. ID no. 15226246
ctcgagcgagtttccacgattttgcttgcgctacaacaacaacatgtcggtgctcccggagcccaccctagccggggtggcgcgagagctggcaaccctcgccgcgccgctctggctcgccgccctcgtcggcctgctcatcggctgggcctggcgcccgcgctgggcagcagcggtcgtcgacgtcgccgtcgccggccagcaccaccacgagcccgtcgccaaccacttggccgtcgtgcctagagctaagccggcctcggtggagccggtgacggaggaggaggaattggctgtcagcaccccggacctcatgcacctccgcagggtcgtcgaggagaaggacggcggccccgcctggacgcacatcatggaccgcaccctcccgacattccgctaccaggcctggaagagagaaccccagaacggaacgccgcagtaccgcagcagcaccatcttcgaagacgcgtcgcccgatgtcgtcagggatttcttctgggacgatgacttccggatcagcaacacctgggacgacatgctccttgagcacgacacgctggaggagtgcacgaagacggggacgatggttgttcgctgggtcaggaagtttccgttcttctgcagcgacagggagtatgttatcggtcgcaggatatgggcatctggaaagacctactactgcgttaccaagagcgtgcctcgtccctctgttccaaggtgcagcaaacctcgccgtgtggacctgtattactctagctggtgcatccgtccagttgaatcaagaaacggtgatggggcaatgacggcatgcgaggtgctcctgtttcatcacgaagacatgggtatcccatggagcatcgcgaagctcggcgtgcagcagggtatgtggggctgcgtcaaacggatcgagcctggcctacgggcataccagaccgcaagggcctccggcgagcccatctcgaaatgcgctgcaatggcacatgccaacacaaagtttgtcgccgacgagctcaccgcttcagagaacaacaccgaggccggttcgaccagcaacaacgcccaagccgagaagccgaagcactggacgggcaacctacccaaggtcttcgtgataggcagcgtggtcgccctggcttgcaccttcgacaaggggctactgaccaaggccctcgtgttcggaacggcgagaaggtttgcaggaccaggaagaagataggaaccaaacatcgacgatccatgacgcgcatttgttccgatgcacaaccgagcgagcgatgctacccggtattatttccggtcctgagacgctcgtgcttgcagatgaggacgaggacggcgtttgctcatgctagagagcatctgtaagcaggcttgtgtacatactgctgtagctgcagtctgtgaagctgagagctgattaggatatggaaccatgatgataatgagactgaattgtattggatgctgagacatggccatcatcatcattatgatgatgatgtactacaatgaataaggctcatattttggaggtgctataaaaacatagtgctttt

SEQ ID NO: 18772 - protein, 404 aa, Triticum aestivum
  peptide (1)..(404): Ceres Seq. ID no. 15226247
  misc_feature (147)..(228): Pfam Name: Pfam Description:  START domain
  misc_feature (15)..(404): NCBI GI NO: 38344869 NR Description: OSJNBa0020P07.12
  misc_feature (29)..(404): NCBI GI NO: 15217736 NR Description: membrane related protein CP5 -related
  misc_feature (29)..(404): NCBI GI NO: 22135902 NR Description: membrane related protein CP5, putative
  misc_feature (29)..(404): NCBI GI NO: 4741929 NR Description: membrane related protein CP5
  misc_feature (93)..(404): NCBI GI NO: 18033654 NR Description: putative nodule membrane protein [Medicago sativa]
  misc_feature (76)..(404): NCBI GI NO: 18423599 NR Description: membrane related protein-like
  misc_feature (38)..(88): NCBI GI NO: 18423599 NR Description: membrane related protein-like
  misc_feature (38)..(404): NCBI GI NO: 10178166 NR Description: membrane related protein-like
  misc_feature (76)..(404): NCBI GI NO: 21593272 NR Description: membrane related protein-like
  misc_feature (38)..(88): NCBI GI NO: 21593272 NR Description: membrane related protein-like
SSEFPRFCLRYNNNMSVLPEPTLAGVARELATLAAPLWLAALVGLLIGWAWRPRWAAAVVDVAVAGQHHHEPVANHLAVVPRAKPASVEPVTEEEELAVSTPDLMHLRRVVEEKDGGPAWTHIMDRTLPTFRYQAWKREPQNGTPQYRSSTIFEDASPDVVRDFFWDDDFRISNTWDDMLLEHDTLEECTKTGTMVVRWVRKFPFFCSDREYVIGRRIWASGKTYYCVTKSVPRPSVPRCSKPRRVDLYYSSWCIRPVESRNGDGAMTACEVLLFHHEDMGIPWSIAKLGVQQGMWGCVKRIEPGLRAYQTARASGEPISKCAAMAHANTKFVADELTASENNTEAGSTSNNAQAEKPKHWTGNLPKVFVIGSVVALACTFDKGLLTKALVFGTARRFAGPGRR

SEQ ID NO: 18773 - protein, 390 aa, Triticum aestivum
  peptide (1)..(390): Ceres Seq. ID no. 15226248
  misc_feature (133)..(214): Pfam Name: Pfam Description:  START domain
  misc_feature (1)..(390): NCBI GI NO: 38344869 NR Description: OSJNBa0020P07.12
  misc_feature (15)..(390): NCBI GI NO: 15217736 NR Description: membrane related protein CP5 -related
  misc_feature (15)..(390): NCBI GI NO: 22135902 NR Description: membrane related protein CP5, putative
  misc_feature (15)..(390): NCBI GI NO: 4741929 NR Description: membrane related protein CP5
  misc_feature (79)..(390): NCBI GI NO: 18033654 NR Description: putative nodule membrane protein [Medicago sativa]
  misc_feature (62)..(390): NCBI GI NO: 18423599 NR Description: membrane related protein-like
  misc_feature (24)..(74): NCBI GI NO: 18423599 NR Description: membrane related protein-like
  misc_feature (24)..(390): NCBI GI NO: 10178166 NR Description: membrane related protein-like
  misc_feature (62)..(390): NCBI GI NO: 21593272 NR Description: membrane related protein-like
  misc_feature (24)..(74): NCBI GI NO: 21593272 NR Description: membrane related protein-like
MSVLPEPTLAGVARELATLAAPLWLAALVGLLIGWAWRPRWAAAVVDVAVAGQHHHEPVANHLAVVPRAKPASVEPVTEEEELAVSTPDLMHLRRVVEEKDGGPAWTHIMDRTLPTFRYQAWKREPQNGTPQYRSSTIFEDASPDVVRDFFWDDDFRISNTWDDMLLEHDTLEECTKTGTMVVRWVRKFPFFCSDREYVIGRRIWASGKTYYCVTKSVPRPSVPRCSKPRRVDLYYSSWCIRPVESRNGDGAMTACEVLLFHHEDMGIPWSIAKLGVQQGMWGCVKRIEPGLRAYQTARASGEPISKCAAMAHANTKFVADELTASENNTEAGSTSNNAQAEKPKHWTGNLPKVFVIGSVVALACTFDKGLLTKALVFGTARRFAGPGRR

SEQ ID NO: 18774 - protein, 300 aa, Triticum aestivum
  peptide (1)..(300): Ceres Seq. ID no. 15226249
  misc_feature (43)..(124): Pfam Name: Pfam Description:  START domain
  misc_feature (1)..(300): NCBI GI NO: 38344869 NR Description: OSJNBa0020P07.12
  misc_feature (1)..(300): NCBI GI NO: 15217736 NR Description: membrane related protein CP5 -related
  misc_feature (1)..(300): NCBI GI NO: 22135902 NR Description: membrane related protein CP5, putative
  misc_feature (1)..(300): NCBI GI NO: 4741929 NR Description: membrane related protein CP5
  misc_feature (1)..(300): NCBI GI NO: 18033654 NR Description: putative nodule membrane protein [Medicago sativa]
  misc_feature (1)..(300): NCBI GI NO: 18423599 NR Description: membrane related protein-like
  misc_feature (1)..(300): NCBI GI NO: 10178166 NR Description: membrane related protein-like
  misc_feature (1)..(300): NCBI GI NO: 21593272 NR Description: membrane related protein-like
  misc_feature (1)..(295): NCBI GI NO: 18414239 NR Description: expressed protein [Arabidopsis thaliana]
  misc_feature (1)..(295): NCBI GI NO: 18403635 NR Description: expressed protein [Arabidopsis thaliana]
MHLRRVVEEKDGGPAWTHIMDRTLPTFRYQAWKREPQNGTPQYRSSTIFEDASPDVVRDFFWDDDFRISNTWDDMLLEHDTLEECTKTGTMVVRWVRKFPFFCSDREYVIGRRIWASGKTYYCVTKSVPRPSVPRCSKPRRVDLYYSSWCIRPVESRNGDGAMTACEVLLFHHEDMGIPWSIAKLGVQQGMWGCVKRIEPGLRAYQTARASGEPISKCAAMAHANTKFVADELTASENNTEAGSTSNNAQAEKPKHWTGNLPKVFVIGSVVALACTFDKGLLTKALVFGTARRFAGPGRR

SEQ ID NO: 18775 - DNA, 2094 bp, Triticum aestivum
  misc_feature (1)..(2094): Ceres Seq. ID no. 13654353
cccactagcactggagtattttggtgccttgcgtgtaaaatttctggtgctcccgtcttcttgatcccctccctccatggtcaagacctcaccttggaatggggaccctcatcggaaaagtaatggtcgtccatttttacaacgaggggtggataatcttctcctccttctcctcctccctgtataaaagggcctcctcctctgcccaactcatccagagcaacacttgttgccaagacagacaccagtctgctctgccctgcctcttgaaccaaaacagagcatccaagaggaggcagagagaggtagaagaagaagtagaagatggcgctcctcctccttgtgctggtcggcgttgtggtcggcgtggtgctggcgagcagcctgctgctgcgctggaacgaggtcaggtacggcaacggcaggaggaaggatggcgatggctgcttgccgccggggacaatgggctggccgctgttcggcgagaccaccgagttcctcaagcagggccccagcttcatgaagcagaggaggctcaggtacgggaggctgttccggacgcacatcctggggtgccccacggtggtgtgcatggacccggagctcaaccgccgcatgctgctgcagggcgagtccggcggcctcgtccccggctacccgcagtccatgctcgacatcctcggccgcaacaacatcgccgccgtgcacggcccgctccaccgcctcatgcgcggcgccatgctcggcctcgtccgccccgccgcgctccgcaccagcctcctccccaagatcgacgccttcatgcgcgaccacctccatggatgggcaggcagtgtcgtcgacgtccaggccaagaccaaggagatggccttgctgtccgcactccagcagatcgccggcatcacggctggcccactctctgacgccctcaaaacagagctatgcagcctggtgctcggcaccatctcgttgccgatcaaccttccgggaaccagctactaccagggcttccaggcaaggacgaagcttgtgtccatgctagagcagatgatcgcggagcggcggtcctctggtgatgctcacgatgacatgctggatgctctcttgagaagcggcgacgatgggacccgggagaaactcactgatgagcagatcatcgacttgctcatcgccctcatctactctggatacgagacgatgtcgaccacttcgatgatggctgtcaagtacctgtcggaccacccgcgagctcttgatgaactcaggagagagcatcttgatatcaggaaggggaaatcgccggaggaagccatcagttatgaagatttgaagtccatggccttcactcgagctgtcatttctgagacactaagattagctacagtcgtcaatgggctcctgaggaaaacaactcaggatgtggaaatgaatgggtatgtcattccaaaagggtggagaatctatgtttacaccagggagataaactacgacccattcatgtatcctgacccgatgactttcaatccgtggaggtggctggagaagaacatggaatcgcacccgcacttcatgttgttcggaggaggcggccggatgtgccccggaaaggaggtgggcacggccgagatcgcgacttttctccactatttcgtgacccgatacagatggcaggaagaaggcaagaacacgatcttgaaattcccccgggtggaggctcccaacgggttacatatccgagttcaagattactgattttgcaacatacattttgcagagtttaggtagatagggcccagactgaggcgacgagagtgcgattctgcaccgacggaaagattagatcagccttgtaagaaaataggaaacataggtatagtgtaggtattataggtttagtaggcaattgacgtagaaggccacaagaggcaactatgttcttccttgtgatcaattacatatgcatgataagcatcacaaaatatatgtgatatgtctggtgacttgaatctgataagcagttatacatatatgtgtatatctggtgccttgaatcgatgataagcagcaccatatatacgagatatgaggtgactt

SEQ ID NO: 18776 - protein, 475 aa, Triticum aestivum
  peptide (1)..(475): Ceres Seq. ID no. 13654354
  misc_feature (4)..(475): NCBI GI NO: 27127269 NR Description: cytochrome P450
  misc_feature (1)..(472): NCBI GI NO: 5921933 NR Description: Cytochrome P450 85 (Dwarf protein)
  misc_feature (1)..(475): NCBI GI NO: 9294419 NR Description: cytochrome P450 [Arabidopsis thaliana]
  misc_feature (1)..(475): NCBI GI NO: 18406372 NR Description: cytochrome p450, putative [Arabidopsis thaliana]
  misc_feature (5)..(475): NCBI GI NO: 21536828 NR Description: cytochrome P450 homolog, putative
  misc_feature (5)..(475): NCBI GI NO: 30693327 NR Description: cytochrome p450, putative [Arabidopsis thaliana]
  misc_feature (5)..(405): NCBI GI NO: 30693331 NR Description: cytochrome p450, putative [Arabidopsis thaliana]
  misc_feature (4)..(230): NCBI GI NO: 34896758 NR Description: 'OSJNBa0015G17.1'
  misc_feature (8)..(472): NCBI GI NO: 34903584 NR Description: cytochrome P450-like protein
  misc_feature (17)..(475): NCBI GI NO: 15239203 NR Description: cytochrome p450 90A1 [Arabidopsis thaliana]
MALLLLVLVGVVVGVVLASSLLLRWNEVRYGNGRRKDGDGCLPPGTMGWPLFGETTEFLKQGPSFMKQRRLRYGRLFRTHILGCPTVVCMDPELNRRMLLQGESGGLVPGYPQSMLDILGRNNIAAVHGPLHRLMRGAMLGLVRPAALRTSLLPKIDAFMRDHLHGWAGSVVDVQAKTKEMALLSALQQIAGITAGPLSDALKTELCSLVLGTISLPINLPGTSYYQGFQARTKLVSMLEQMIAERRSSGDAHDDMLDALLRSGDDGTREKLTDEQIIDLLIALIYSGYETMSTTSMMAVKYLSDHPRALDELRREHLDIRKGKSPEEAISYEDLKSMAFTRAVISETLRLATVVNGLLRKTTQDVEMNGYVIPKGWRIYVYTREINYDPFMYPDPMTFNPWRWLEKNMESHPHFMLFGGGGRMCPGKEVGTAEIATFLHYFVTRYRWQEEGKNTILKFPRVEAPNGLHIRVQDY

SEQ ID NO: 18777 - protein, 429 aa, Triticum aestivum
  peptide (1)..(429): Ceres Seq. ID no. 13654355
  misc_feature (1)..(429): NCBI GI NO: 27127269 NR Description: cytochrome P450
  misc_feature (1)..(426): NCBI GI NO: 5921933 NR Description: Cytochrome P450 85 (Dwarf protein)
  misc_feature (1)..(429): NCBI GI NO: 9294419 NR Description: cytochrome P450 [Arabidopsis thaliana]
  misc_feature (1)..(429): NCBI GI NO: 18406372 NR Description: cytochrome p450, putative [Arabidopsis thaliana]
  misc_feature (1)..(429): NCBI GI NO: 21536828 NR Description: cytochrome P450 homolog, putative
  misc_feature (1)..(429): NCBI GI NO: 30693327 NR Description: cytochrome p450, putative [Arabidopsis thaliana]
  misc_feature (1)..(359): NCBI GI NO: 30693331 NR Description: cytochrome p450, putative [Arabidopsis thaliana]
  misc_feature (1)..(184): NCBI GI NO: 34896758 NR Description: 'OSJNBa0015G17.1'
  misc_feature (1)..(426): NCBI GI NO: 34903584 NR Description: cytochrome P450-like protein
  misc_feature (1)..(429): NCBI GI NO: 15239203 NR Description: cytochrome p450 90A1 [Arabidopsis thaliana]
MGWPLFGETTEFLKQGPSFMKQRRLRYGRLFRTHILGCPTVVCMDPELNRRMLLQGESGGLVPGYPQSMLDILGRNNIAAVHGPLHRLMRGAMLGLVRPAALRTSLLPKIDAFMRDHLHGWAGSVVDVQAKTKEMALLSALQQIAGITAGPLSDALKTELCSLVLGTISLPINLPGTSYYQGFQARTKLVSMLEQMIAERRSSGDAHDDMLDALLRSGDDGTREKLTDEQIIDLLIALIYSGYETMSTTSMMAVKYLSDHPRALDELRREHLDIRKGKSPEEAISYEDLKSMAFTRAVISETLRLATVVNGLLRKTTQDVEMNGYVIPKGWRIYVYTREINYDPFMYPDPMTFNPWRWLEKNMESHPHFMLFGGGGRMCPGKEVGTAEIATFLHYFVTRYRWQEEGKNTILKFPRVEAPNGLHIRVQDY

SEQ ID NO: 18778 - protein, 410 aa, Triticum aestivum
  peptide (1)..(410): Ceres Seq. ID no. 13654356
  misc_feature (1)..(410): NCBI GI NO: 27127269 NR Description: cytochrome P450
  misc_feature (1)..(407): NCBI GI NO: 5921933 NR Description: Cytochrome P450 85 (Dwarf protein)
  misc_feature (1)..(410): NCBI GI NO: 9294419 NR Description: cytochrome P450 [Arabidopsis thaliana]
  misc_feature (1)..(410): NCBI GI NO: 18406372 NR Description: cytochrome p450, putative [Arabidopsis thaliana]
  misc_feature (1)..(410): NCBI GI NO: 21536828 NR Description: cytochrome P450 homolog, putative
  misc_feature (1)..(410): NCBI GI NO: 30693327 NR Description: cytochrome p450, putative [Arabidopsis thaliana]
  misc_feature (1)..(340): NCBI GI NO: 30693331 NR Description: cytochrome p450, putative [Arabidopsis thaliana]
  misc_feature (1)..(165): NCBI GI NO: 34896758 NR Description: 'OSJNBa0015G17.1'
  misc_feature (1)..(407): NCBI GI NO: 34903584 NR Description: cytochrome P450-like protein
  misc_feature (1)..(410): NCBI GI NO: 15239203 NR Description: cytochrome p450 90A1 [Arabidopsis thaliana]
MKQRRLRYGRLFRTHILGCPTVVCMDPELNRRMLLQGESGGLVPGYPQSMLDILGRNNIAAVHGPLHRLMRGAMLGLVRPAALRTSLLPKIDAFMRDHLHGWAGSVVDVQAKTKEMALLSALQQIAGITAGPLSDALKTELCSLVLGTISLPINLPGTSYYQGFQARTKLVSMLEQMIAERRSSGDAHDDMLDALLRSGDDGTREKLTDEQIIDLLIALIYSGYETMSTTSMMAVKYLSDHPRALDELRREHLDIRKGKSPEEAISYEDLKSMAFTRAVISETLRLATVVNGLLRKTTQDVEMNGYVIPKGWRIYVYTREINYDPFMYPDPMTFNPWRWLEKNMESHPHFMLFGGGGRMCPGKEVGTAEIATFLHYFVTRYRWQEEGKNTILKFPRVEAPNGLHIRVQDY

SEQ ID NO: 18779 - DNA, 1450 bp, Triticum aestivum
  misc_feature (1)..(1450): Ceres Seq. ID no. 14302059
ctttatccaccccatccaaatccccgattcctccaaccctcccagaccgcaatggccgccgccgccgccgccgccgccgagccctcctccgccgacagccgccgctacgtcgtgggctacgcgctcgcgcccaagaagcagaacagcttcatcaagccctcgctcatctcccgcgcggcggcgcgcggcgtggacctcgtccccgtcgacgacgcgcggcccctcgccgaccagggccccttcgacctcgtcatccacaagctctacggccacgactggcgcgcccagctccaggccttctccgcccgctacccctccgtccccgtcgtcgacccgccccacgccatcgaccgcctccacaaccgcatctccatgctccaggtcgtctccgagctcgacgtcccgctcaccgacgccgcctccgcctccgctgacggcgaaggccaccgccacaccttcggcatccccagccaggtcgtcgtctacgacgccgccgcgctcgccgactcgggcctcctcgccgcgctccgcttcccgctcatcgccaagcccctcgtcgccgacggcagcgccaagtcgcacaagatgtccctcgtctaccaccgagaggggctccgcaagctccgcccgccgctcgtcctgcaggagttcgtcaaccacggcggcgtcatattcaaggtttacgtcgtcggcggccacgtcacctgcgtcaagcgccgcagcctaccggacgtctccaaggagatcctcgaggacgccgccgccgagggcaccatctccttctcgcaggtatccaatctccccaatcagcgcacggccgaggagtactacgaggacatgcggctcgaggacgccgtcatgccgcccactgatttcgtcaacgagatcgcaggcgggctccgccgtgccctgggcctgcagctcttcaacttcgacatgatccgggatgttcgtgccgggaaccggtatctcgtcattgacatcaactacttccccggttacgcgaagatgcccggctacgagattgtccttactgatttcttctgggatatggttcacaaggacgacgtggccctcaaggaggaggagcagcagagcaatcatgctgttgtgaaatgagatggatttgctcggcatagcttgctcgcaaacctgcaattctttcatgtctgggggaaatgtgaggtggcaggatggttacaagactcgaggggaataacgagcaaccaattaggatggggagatggggattaacaggttctggatttacttgggtttcaaccagccgcaagcggaggacctgcaatgtaaatcctctctccttgctcctgtcataccggttgtttaggtatctttctgttcttcgtaatttgcttcacccagtttagttagaacaaaagtgggggaacagaagccaagttctgaagaagatatatttgttctggaaaac

SEQ ID NO: 18780 - protein, 372 aa, Triticum aestivum
  peptide (1)..(372): Ceres Seq. ID no. 14302060
  misc_feature (34)..(350): Pfam Name: Pfam Description:  Inositol 1, 3, 4-trisphosphate 5/6-kinase
  misc_feature (28)..(356): NCBI GI NO: 37537118 NR Description: putative inositol 1,3,4-trisphosphate 5/6-kinase
  misc_feature (21)..(372): NCBI GI NO: 27549256 NR Description: inositol phosphate kinase [Zea mays]
  misc_feature (29)..(354): NCBI GI NO: 7487924 NR Description: inositol 1,3,4-trisphosphate 5/6-kinase (EC 2
  misc_feature (29)..(354): NCBI GI NO: 15237403 NR Description: Inositol 1,3,4-Trisphosphate 5/6 kinase
  misc_feature (37)..(352): NCBI GI NO: 18413088 NR Description: inositol 1
  misc_feature (15)..(351): NCBI GI NO: 27311236 NR Description: Putative inositol 1,3,4-trisphosphate 5/6-kinase
  misc_feature (37)..(333): NCBI GI NO: 7487925 NR Description: inositol 1
  misc_feature (90)..(352): NCBI GI NO: 30680654 NR Description: inositol 1
  misc_feature (11)..(289): NCBI GI NO: 37530372 NR Description: putative inositol 1,3,4-trisphosphate 5/6-kinase
  misc_feature (34)..(351): NCBI GI NO: 30689810 NR Description: expressed protein [Arabidopsis thaliana]
LYPPHPNPRFLQPSQTAMAAAAAAAAEPSSADSRRYVVGYALAPKKQNSFIKPSLISRAAARGVDLVPVDDARPLADQGPFDLVIHKLYGHDWRAQLQAFSARYPSVPVVDPPHAIDRLHNRISMLQVVSELDVPLTDAASASADGEGHRHTFGIPSQVVVYDAAALADSGLLAALRFPLIAKPLVADGSAKSHKMSLVYHREGLRKLRPPLVLQEFVNHGGVIFKVYVVGGHVTCVKRRSLPDVSKEILEDAAAEGTISFSQVSNLPNQRTAEEYYEDMRLEDAVMPPTDFVNEIAGGLRRALGLQLFNFDMIRDVRAGNRYLVIDINYFPGYAKMPGYEIVLTDFFWDMVHKDDVALKEEEQQSNHAVVK

SEQ ID NO: 18781 - protein, 355 aa, Triticum aestivum
  peptide (1)..(355): Ceres Seq. ID no. 14302061
  misc_feature (17)..(333): Pfam Name: Pfam Description:  Inositol 1, 3, 4-trisphosphate 5/6-kinase
  misc_feature (11)..(339): NCBI GI NO: 37537118 NR Description: putative inositol 1,3,4-trisphosphate 5/6-kinase
  misc_feature (4)..(355): NCBI GI NO: 27549256 NR Description: inositol phosphate kinase [Zea mays]
  misc_feature (12)..(337): NCBI GI NO: 7487924 NR Description: inositol 1,3,4-trisphosphate 5/6-kinase (EC 2
  misc_feature (12)..(337): NCBI GI NO: 15237403 NR Description: Inositol 1,3,4-Trisphosphate 5/6 kinase
  misc_feature (20)..(335): NCBI GI NO: 18413088 NR Description: inositol 1
  misc_feature (1)..(334): NCBI GI NO: 27311236 NR Description: Putative inositol 1,3,4-trisphosphate 5/6-kinase
  misc_feature (20)..(316): NCBI GI NO: 7487925 NR Description: inositol 1
  misc_feature (73)..(335): NCBI GI NO: 30680654 NR Description: inositol 1
  misc_feature (1)..(272): NCBI GI NO: 37530372 NR Description: putative inositol 1,3,4-trisphosphate 5/6-kinase
  misc_feature (17)..(334): NCBI GI NO: 30689810 NR Description: expressed protein [Arabidopsis thaliana]
MAAAAAAAAEPSSADSRRYVVGYALAPKKQNSFIKPSLISRAAARGVDLVPVDDARPLADQGPFDLVIHKLYGHDWRAQLQAFSARYPSVPVVDPPHAIDRLHNRISMLQVVSELDVPLTDAASASADGEGHRHTFGIPSQVVVYDAAALADSGLLAALRFPLIAKPLVADGSAKSHKMSLVYHREGLRKLRPPLVLQEFVNHGGVIFKVYVVGGHVTCVKRRSLPDVSKEILEDAAAEGTISFSQVSNLPNQRTAEEYYEDMRLEDAVMPPTDFVNEIAGGLRRALGLQLFNFDMIRDVRAGNRYLVIDINYFPGYAKMPGYEIVLTDFFWDMVHKDDVALKEEEQQSNHAVVK

SEQ ID NO: 18782 - protein, 312 aa, Triticum aestivum
  peptide (1)..(312): Ceres Seq. ID no. 14302062
  misc_feature (26)..(312): Pfam Name: Pfam Description:  Equine herpesvirus glycoprotein gp2
  misc_feature (8)..(312): NCBI GI NO: 13592175 NR Description: ppg3 [Leishmania major]
  misc_feature (10)..(312): NCBI GI NO: 13592175 NR Description: ppg3 [Leishmania major]
  misc_feature (10)..(312): NCBI GI NO: 13592175 NR Description: ppg3 [Leishmania major]
  misc_feature (19)..(312): NCBI GI NO: 188864 NR Description: mucin
  misc_feature (20)..(312): NCBI GI NO: 13592175 NR Description: ppg3 [Leishmania major]
  misc_feature (10)..(312): NCBI GI NO: 13592175 NR Description: ppg3 [Leishmania major]
  misc_feature (31)..(312): NCBI GI NO: 13592175 NR Description: ppg3 [Leishmania major]
  misc_feature (19)..(312): NCBI GI NO: 186396 NR Description: mucin
  misc_feature (19)..(312): NCBI GI NO: 2135765 NR Description: mucin 2 precursor, intestinal - human (fragments)
  misc_feature (19)..(312): NCBI GI NO: 4505285 NR Description: mucin 2 [Homo sapiens]
FIHPIQIPDSSNPPRPQWPPPPPPPPSPPPPTAAATSWATRSRPRSRTASSSPRSSPARRRAAWTSSPSTTRGPSPTRAPSTSSSTSSTATTGAPSSRPSPPATPPSPSSTRPTPSTASTTASPCSRSSPSSTSRSPTPPPPPLTAKATATPSASPARSSSTTPPRSPTRASSPRSASRSSPSPSSPTAAPSRTRCPSSTTERGSASSARRSSCRSSSTTAASYSRFTSSAATSPASSAAAYRTSPRRSSRTPPPRAPSPSRRYPISPISARPRSTTRTCGSRTPSCRPLISSTRSQAGSAVPWACSSSTST

SEQ ID NO: 18783 - DNA, 670 bp, Triticum aestivum
  misc_feature (1)..(670): Ceres Seq. ID no. 13598286
gaaactacgaatgccttccggggtagcgaacccgccgcatgtctctccgcctcctcctcccacctcgcggcagcctacgcctcctttcccctctccatcgccaccagaccccaaggcctccgccctttcgaacgactgccaccggcgtcccacagagggcctctagtttcttcagtatccctatccgcgccttcaccagtatctccggcatggctgctgggacgcagcagcagaccgtggaggttagggagagcgtggagctgacggaggaggaggagcggatcttcgctaggctgctggacgtcgtccgccacttcggactcggcacccagctccgcgtcgccgggggatgggtccgggacaagctattggggaaaggctctgctgacattgacattgcacttgataatatgacgggccaaaatttctgtgagagagtaaatgagtactcaaaattcatgggtgaagagcagaaaggaatcggcgttatccagtgcaaccctgatcaatccaagcacctggaaactgcaagaatgcttatatatggcatatggattgattttgtcaacttgaggtccgaaaagtacgctgaaaacagtcgtattcctactgtggagattggaacagccaaagaagatgcactcccgcaggactaaaacatcatagctta

SEQ ID NO: 18784 - protein, 205 aa, Triticum aestivum
  peptide (1)..(205): Ceres Seq. ID no. 13598287
  misc_feature (35)..(205): NCBI GI NO: 7434868 NR Description: probable tRNA adenylyltransferase (EC 2
  misc_feature (35)..(205): NCBI GI NO: 15219925 NR Description: tRNA adenylyltransferase -related
  misc_feature (68)..(205): NCBI GI NO: 2129851 NR Description: tRNA adenylyltransferase (EC 2
  misc_feature (58)..(205): NCBI GI NO: 29246802 NR Description: GLP_0_2580_4190 [Giardia lamblia ATCC 50803]
  misc_feature (75)..(205): NCBI GI NO: 23508403 NR Description: hypothetical protein [Plasmodium falciparum 3D7]
  misc_feature (75)..(205): NCBI GI NO: 23483513 NR Description: tRNA nucleotidyltransferase
  misc_feature (73)..(205): NCBI GI NO: 27734230 NR Description: tRNA nucleotidyltransferase
  misc_feature (99)..(205): NCBI GI NO: 6321016 NR Description: tRNA nucleotidyltransferase
  misc_feature (69)..(205): NCBI GI NO: 9836828 NR Description: tRNA nucleotidyltransferase [Kluyveromyces lactis]
  misc_feature (73)..(205): NCBI GI NO: 19173101 NR Description: tRNA ADENILYL TRANSFERASE
MSLRLLLPPRGSLRLLSPLHRHQTPRPPPFRTTATGVPQRASSFFSIPIRAFTSISGMAAGTQQQTVEVRESVELTEEEERIFARLLDVVRHFGLGTQLRVAGGWVRDKLLGKGSADIDIALDNMTGQNFCERVNEYSKFMGEEQKGIGVIQCNPDQSKHLETARMLIYGIWIDFVNLRSEKYAENSRIPTVEIGTAKEDALPQD

SEQ ID NO: 18785 - protein, 148 aa, Triticum aestivum
  peptide (1)..(148): Ceres Seq. ID no. 13598288
  misc_feature (1)..(148): NCBI GI NO: 7434868 NR Description: probable tRNA adenylyltransferase (EC 2
  misc_feature (1)..(148): NCBI GI NO: 15219925 NR Description: tRNA adenylyltransferase -related
  misc_feature (11)..(148): NCBI GI NO: 2129851 NR Description: tRNA adenylyltransferase (EC 2
  misc_feature (1)..(148): NCBI GI NO: 29246802 NR Description: GLP_0_2580_4190 [Giardia lamblia ATCC 50803]
  misc_feature (18)..(148): NCBI GI NO: 23508403 NR Description: hypothetical protein [Plasmodium falciparum 3D7]
  misc_feature (18)..(148): NCBI GI NO: 23483513 NR Description: tRNA nucleotidyltransferase
  misc_feature (16)..(148): NCBI GI NO: 27734230 NR Description: tRNA nucleotidyltransferase
  misc_feature (42)..(148): NCBI GI NO: 6321016 NR Description: tRNA nucleotidyltransferase
  misc_feature (12)..(148): NCBI GI NO: 9836828 NR Description: tRNA nucleotidyltransferase [Kluyveromyces lactis]
  misc_feature (16)..(148): NCBI GI NO: 19173101 NR Description: tRNA ADENILYL TRANSFERASE
MAAGTQQQTVEVRESVELTEEEERIFARLLDVVRHFGLGTQLRVAGGWVRDKLLGKGSADIDIALDNMTGQNFCERVNEYSKFMGEEQKGIGVIQCNPDQSKHLETARMLIYGIWIDFVNLRSEKYAENSRIPTVEIGTAKEDALPQD

SEQ ID NO: 18786 - DNA, 1235 bp, Triticum aestivum
  misc_feature (1)..(1235): Ceres Seq. ID no. 13595983
gtcgtgctgcaattgagatcgactcgtcggtggccgacccctcggcggcgagcaccggggttagggtttaggggcctggatccatggctcggcccatgggatccagcggcttcgaggctgccctagccgtgtgccccgccgccgcccaggcctactccaagtactgcggtattgtatctggatgcacaaatgcgaacccaagggaagggttggcggatctttcacgaactatagataatatggaaggaatgagggatggaatatttggtgatattcacaagctcatgtcagttcttgagttcgatgatgtgagccaattcaattccttctatgattttgtcttcttcatttctcgtgaaaatggccaaaagaatattactgttcagaaggctcttgcagcatggaggatagttcttgttggaaggttccgattgcttgaccggtggtgtaactttgttgagaagtaccaacgtcacaacatttctgaggacgcctggcagcagctactagctttcagcaggtgtgtaaacgaggatctggaaggttatgatccaaaaggtgcttggcctgtcataattgatgattttgtggagcacatgcacagaatctaccgccctagtgactgctccagtgcaatggaatcacaatgcagcatttccaatacatttagaggtctaaatctattacctggatcaaagaggaaatgccctactcagtttaactccagtgaagagagcgtagagctctcagaagctcttagacactctgtccaacttaccccgtcgaagcgacttaaggaaagttctgcgcctactagatatggtgtttgggagcgagacgcaagtacccctttctttaacagcacaccagattgtcgcgaggacatgaatttacagaactcaagaggctgccttcagaactcacctcgtgttattgaggatggtttttcaaaagggttcgaaggttgcatttcaatgaaatgctcattttagtgcaatgaggaatgcatggcatcatcatttatgactgcccgttactccatatatttctgttttgcgtcaacaccattttgtatttgtacttaaagtcagtttcccagtggtgatattattttgtacacaaacagtgatgttatacatgtctgctatcgcagagaaaacggcttgtgattgttctttccaaaaaaaaaaaaaaaaaagsttatcgataccgtcgacctccaggaggcacccgcc

SEQ ID NO: 18787 - protein, 302 aa, Triticum aestivum
  peptide (1)..(302): Ceres Seq. ID no. 15221718
  misc_feature (1)..(302): NCBI GI NO: 33146550 NR Description: leucine zipper protein-like
  misc_feature (1)..(174): NCBI GI NO: 34913252 NR Description: P0011H09.36
  misc_feature (40)..(225): NCBI GI NO: 15228555 NR Description: expressed protein [Arabidopsis thaliana]
  misc_feature (53)..(194): NCBI GI NO: 24664675 NR Description: CG7427-PA [Drosophila melanogaster]
  misc_feature (53)..(170): NCBI GI NO: 34784120 NR Description: Unknown (protein for MGC:66414) [Danio rerio]
  misc_feature (53)..(170): NCBI GI NO: 32966900 NR Description: leucine zipper protein
  misc_feature (53)..(171): NCBI GI NO: 34784818 NR Description: RP42 homolog [Homo sapiens]
  misc_feature (72)..(171): NCBI GI NO: 7019967 NR Description: unnamed protein product [Homo sapiens]
  misc_feature (72)..(170): NCBI GI NO: 18700658 NR Description: leucine zipper protein [Homo sapiens]
  misc_feature (53)..(170): NCBI GI NO: 6166507 NR Description: RP42 [Mus musculus]
MARPMGSSGFEAALAVCPAAAQAYSKYCGIVSGCTNANPREGLADLSRTIDNMEGMRDGIFGDIHKLMSVLEFDDVSQFNSFYDFVFFISRENGQKNITVQKALAAWRIVLVGRFRLLDRWCNFVEKYQRHNISEDAWQQLLAFSRCVNEDLEGYDPKGAWPVIIDDFVEHMHRIYRPSDCSSAMESQCSISNTFRGLNLLPGSKRKCPTQFNSSEESVELSEALRHSVQLTPSKRLKESSAPTRYGVWERDASTPFFNSTPDCREDMNLQNSRGCLQNSPRVIEDGFSKGFEGCISMKCSF

SEQ ID NO: 18788 - protein, 298 aa, Triticum aestivum
  peptide (1)..(298): Ceres Seq. ID no. 15221719
  misc_feature (1)..(298): NCBI GI NO: 33146550 NR Description: leucine zipper protein-like
  misc_feature (1)..(170): NCBI GI NO: 34913252 NR Description: P0011H09.36
  misc_feature (36)..(221): NCBI GI NO: 15228555 NR Description: expressed protein [Arabidopsis thaliana]
  misc_feature (49)..(190): NCBI GI NO: 24664675 NR Description: CG7427-PA [Drosophila melanogaster]
  misc_feature (49)..(166): NCBI GI NO: 34784120 NR Description: Unknown (protein for MGC:66414) [Danio rerio]
  misc_feature (49)..(166): NCBI GI NO: 32966900 NR Description: leucine zipper protein
  misc_feature (49)..(167): NCBI GI NO: 34784818 NR Description: RP42 homolog [Homo sapiens]
  misc_feature (68)..(167): NCBI GI NO: 7019967 NR Description: unnamed protein product [Homo sapiens]
  misc_feature (68)..(166): NCBI GI NO: 18700658 NR Description: leucine zipper protein [Homo sapiens]
  misc_feature (49)..(166): NCBI GI NO: 6166507 NR Description: RP42 [Mus musculus]
MGSSGFEAALAVCPAAAQAYSKYCGIVSGCTNANPREGLADLSRTIDNMEGMRDGIFGDIHKLMSVLEFDDVSQFNSFYDFVFFISRENGQKNITVQKALAAWRIVLVGRFRLLDRWCNFVEKYQRHNISEDAWQQLLAFSRCVNEDLEGYDPKGAWPVIIDDFVEHMHRIYRPSDCSSAMESQCSISNTFRGLNLLPGSKRKCPTQFNSSEESVELSEALRHSVQLTPSKRLKESSAPTRYGVWERDASTPFFNSTPDCREDMNLQNSRGCLQNSPRVIEDGFSKGFEGCISMKCSF

SEQ ID NO: 18789 - protein, 250 aa, Triticum aestivum
  peptide (1)..(250): Ceres Seq. ID no. 15221720
  misc_feature (1)..(250): NCBI GI NO: 33146550 NR Description: leucine zipper protein-like
  misc_feature (1)..(122): NCBI GI NO: 34913252 NR Description: P0011H09.36
  misc_feature (1)..(173): NCBI GI NO: 15228555 NR Description: expressed protein [Arabidopsis thaliana]
  misc_feature (1)..(142): NCBI GI NO: 24664675 NR Description: CG7427-PA [Drosophila melanogaster]
  misc_feature (1)..(118): NCBI GI NO: 34784120 NR Description: Unknown (protein for MGC:66414) [Danio rerio]
  misc_feature (1)..(118): NCBI GI NO: 32966900 NR Description: leucine zipper protein
  misc_feature (1)..(119): NCBI GI NO: 34784818 NR Description: RP42 homolog [Homo sapiens]
  misc_feature (20)..(119): NCBI GI NO: 7019967 NR Description: unnamed protein product [Homo sapiens]
  misc_feature (20)..(118): NCBI GI NO: 18700658 NR Description: leucine zipper protein [Homo sapiens]
  misc_feature (1)..(118): NCBI GI NO: 6166507 NR Description: RP42 [Mus musculus]
MEGMRDGIFGDIHKLMSVLEFDDVSQFNSFYDFVFFISRENGQKNITVQKALAAWRIVLVGRFRLLDRWCNFVEKYQRHNISEDAWQQLLAFSRCVNEDLEGYDPKGAWPVIIDDFVEHMHRIYRPSDCSSAMESQCSISNTFRGLNLLPGSKRKCPTQFNSSEESVELSEALRHSVQLTPSKRLKESSAPTRYGVWERDASTPFFNSTPDCREDMNLQNSRGCLQNSPRVIEDGFSKGFEGCISMKCSF

SEQ ID NO: 18790 - DNA, 1295 bp, Triticum aestivum
  misc_feature (1)..(1295): Ceres Seq. ID no. 13596358
caaaaaccctagcgcatgcaccttgccggtccggccccgagacgcattccggaaacctccggaacgccgcaatggtttggtttcagtgcgaagactgcggcgagaacctcaagaagcccaagcttgccggccacttccgctcatgctccgcctacaagctttcctgcatcgactgcggcgcagtcttcggccaggacaccgtccagacgcacacccagtgcatctccgaggccgagaagtatggtcccaaggaactgaacaagccgtccagcaatgcacagggtaagccagacaagccaaagccaaatgccgatgttgatatcaatgttgggttgtcgacacgccctccttggttctgcagcctatgcaatacaactaccaccagcaagcaaactctcttggggcatgctgatggcaggaaacatagggcaaaagcaaaagcctttcatgcttctcagaagcaagaaaatggagctgaacaaactccaagcgacaaggaaactggtggagcaccaacaacagcatctacagaactaaatgacgggaagggtgctgacagtgaaagagatgctgacgaggatgttgtgaagagaaagagaacagatagcacaacctcggaggagccagataatgcaaaaagacaaaatttatcgaacttgaagactggagaggcgacacaatctgaaaatggagaagcggaactcaaaacaaagagcaaaagtgctgcagaagaactggtcaatgatgccaatcatcaagatattaagaagcagaaaatcaagtggaagaaaattattacgaagatactagagatgaattcggatggagctatgaagttaaagaagctacaaaagctagttatcagggaagttttagaatgtggtctgttgaaagataaggaacagctgcatgctctgttgatggacaagatagcttcgagctccaggttttctgtggacgggaagaacattagattggtggccaagaatgaagaatcatagtccctgacattttcttgtgctctatttaagatgttactaaaatttgagggaaaatgataccggcaatattatttttttagctgtcaattttggatttgttgtgcctctatcatttccagagaactgttccaagatacagaaactttgtgcttgatttttttttttttggaacagtgggaccaaaccgattttgtagctccagatgctgtgaacttttccggtatactgtatttggcaaggcaactcgtttgcaaattgacaactatatacgcaatcaagaaatgcgagctgccg

SEQ ID NO: 18791 - protein, 332 aa, Triticum aestivum
  peptide (1)..(332): Ceres Seq. ID no. 15221846
  misc_feature (11)..(270): NCBI GI NO: 21902026 NR Description: B1097D05.27
  misc_feature (24)..(262): NCBI GI NO: 18399026 NR Description: expressed protein [Arabidopsis thaliana]
  misc_feature (24)..(262): NCBI GI NO: 21536909 NR Description: unknown [Arabidopsis thaliana]
  misc_feature (149)..(329): NCBI GI NO: 7486241 NR Description: probable RNA-binding protein At2g19380 -Arabidopsis thaliana
  misc_feature (24)..(165): NCBI GI NO: 7486241 NR Description: probable RNA-binding protein At2g19380 -Arabidopsis thaliana
  misc_feature (18)..(262): NCBI GI NO: 7486241 NR Description: probable RNA-binding protein At2g19380 -Arabidopsis thaliana
  misc_feature (24)..(165): NCBI GI NO: 18399023 NR Description: RNA recognition motif (RRM)-containing protein
  misc_feature (80)..(166): NCBI GI NO: 7486241 NR Description: probable RNA-binding protein At2g19380 -Arabidopsis thaliana
  misc_feature (149)..(329): NCBI GI NO: 21902026 NR Description: B1097D05.27
  misc_feature (212)..(326): NCBI GI NO: 39581890 NR Description: Hypothetical protein CBG20151
KTLAHAPCRSGPETHSGNLRNAAMVWFQCEDCGENLKKPKLAGHFRSCSAYKLSCIDCGAVFGQDTVQTHTQCISEAEKYGPKELNKPSSNAQGKPDKPKPNADVDINVGLSTRPPWFCSLCNTTTTSKQTLLGHADGRKHRAKAKAFHASQKQENGAEQTPSDKETGGAPTTASTELNDGKGADSERDADEDVVKRKRTDSTTSEEPDNAKRQNLSNLKTGEATQSENGEAELKTKSKSAAEELVNDANHQDIKKQKIKWKKIITKILEMNSDGAMKLKKLQKLVIREVLECGLLKDKEQLHALLMDKIASSSRFSVDGKNIRLVAKNEES

SEQ ID NO: 18792 - protein, 309 aa, Triticum aestivum
  peptide (1)..(309): Ceres Seq. ID no. 15221847
  misc_feature (1)..(247): NCBI GI NO: 21902026 NR Description: B1097D05.27
  misc_feature (1)..(239): NCBI GI NO: 18399026 NR Description: expressed protein [Arabidopsis thaliana]
  misc_feature (1)..(239): NCBI GI NO: 21536909 NR Description: unknown [Arabidopsis thaliana]
  misc_feature (126)..(306): NCBI GI NO: 7486241 NR Description: probable RNA-binding protein At2g19380 -Arabidopsis thaliana
  misc_feature (1)..(142): NCBI GI NO: 7486241 NR Description: probable RNA-binding protein At2g19380 -Arabidopsis thaliana
  misc_feature (1)..(239): NCBI GI NO: 7486241 NR Description: probable RNA-binding protein At2g19380 -Arabidopsis thaliana
  misc_feature (1)..(142): NCBI GI NO: 18399023 NR Description: RNA recognition motif (RRM)-containing protein
  misc_feature (57)..(143): NCBI GI NO: 7486241 NR Description: probable RNA-binding protein At2g19380 -Arabidopsis thaliana
  misc_feature (126)..(306): NCBI GI NO: 21902026 NR Description: B1097D05.27
  misc_feature (189)..(303): NCBI GI NO: 39581890 NR Description: Hypothetical protein CBG20151
MVWFQCEDCGENLKKPKLAGHFRSCSAYKLSCIDCGAVFGQDTVQTHTQCISEAEKYGPKELNKPSSNAQGKPDKPKPNADVDINVGLSTRPPWFCSLCNTTTTSKQTLLGHADGRKHRAKAKAFHASQKQENGAEQTPSDKETGGAPTTASTELNDGKGADSERDADEDVVKRKRTDSTTSEEPDNAKRQNLSNLKTGEATQSENGEAELKTKSKSAAEELVNDANHQDIKKQKIKWKKIITKILEMNSDGAMKLKKLQKLVIREVLECGLLKDKEQLHALLMDKIASSSRFSVDGKNIRLVAKNEES

SEQ ID NO: 18793 - DNA, 1445 bp, Triticum aestivum
  misc_feature (1)..(1445): Ceres Seq. ID no. 13596087
ggtttgaagcaaaccggccggccaccaaccaaccaacgctcccgaatctatcccatcatatcatatcaaaccttccgccgccggcgagctactcgcagcgccggacagcccggcccacttgttctggttctctccctcctctgcccctccgccgcgagctccaacggagaggggaggaagaagcaaagcctcggacatggcacgcgtcctccctctggacatcgagcccggggaggcgcccagagctggtgagacggttgctagcacgccaagctcttcagctgtggtgtcatgcaatagaattgagcattctgagcaaaacataaaggacgacgaatacacgatgctgatgacgccaactcaacatgcaacagctgacaacaacacagaaattttacctcagcaacccaagtcaagtcacttcagttggtggatgacagctctgcttgtctgcttccttcttataatggcaacttatatctttgtgaaatttggagccccctttgcctttgagaaggttctttttccaatcatgaaatgggaagcaagtgcctttggtcgtccagtattggctcttgtcctcgtcgcgtctttggctatcttcccactcattttagtcccctctggaccttctatgtggttagcaggaatgatcttcggttatggctggggtttcgtgattattattgttgggactactcttggcatggttggagcatattggatcggctcattgttccgcgagcgactacatgcatggttaaagagatggcctcagcagatagctctaataaagcttgctggcgaagggagttggttccaccagtttcgagtggttgcgctattcagagtctcaccgtttccatactcgatttttaactatgccgtggccgtgacagaaatcaaattcagcccttatgtatgtggttcagttgccggaatgacacctgaggcattcatctatatctacagcgggcggttgatacgtacgctggccgatgtgaagtatggcaagcataagttgactactgtggagataatctacagcataatctcgttcatcgctgccgctgccctcacggtcgccttcacagtttacgccaagaagtcgctgaacaacataaaaggcccagatgatatctcagaggaccaccaacctgctgctggctctgctggggtgactgcactaaaaaatggccatcaggacgtgcatatcctgtagctttgtttacatgtcgtatgatgtctgtattcattcaattcatcagagaaaataggtagctaggctctgacagcaggtggatgcacctgtcttctaactagatvaatatgtatggttttactgcttgattagtttcatgtggttgatcacccaacatgtattttggccttgttgttggctactggaaatttggccttctcttgaggtgcacatattttttgtc

SEQ ID NO: 18794 - protein, 341 aa, Triticum aestivum
  peptide (1)..(341): Ceres Seq. ID no. 15221765
  misc_feature (36)..(320): NCBI GI NO: 18395356 NR Description: expressed protein [Arabidopsis thaliana]
  misc_feature (4)..(337): NCBI GI NO: 34913316 NR Description: P0519E12.36
  misc_feature (69)..(314): NCBI GI NO: 30685958 NR Description: expressed protein [Arabidopsis thaliana]
  misc_feature (40)..(313): NCBI GI NO: 15221330 NR Description: expressed protein [Arabidopsis thaliana]
  misc_feature (34)..(310): NCBI GI NO: 15234386 NR Description: expressed protein [Arabidopsis thaliana]
  misc_feature (185)..(320): NCBI GI NO: 25410981 NR Description: hypothetical protein At2g02370
  misc_feature (169)..(314): NCBI GI NO: 7486891 NR Description: hypothetical protein T12H17
  misc_feature (99)..(259): NCBI GI NO: 8778630 NR Description: F5O11.19 [Arabidopsis thaliana]
  misc_feature (257)..(313): NCBI GI NO: 8778630 NR Description: F5O11.19 [Arabidopsis thaliana]
  misc_feature (40)..(185): NCBI GI NO: 8778630 NR Description: F5O11.19 [Arabidopsis thaliana]
MARVLPLDIEPGEAPRAGETVASTPSSSAVVSCNRIEHSEQNIKDDEYTMLMTPTQHATADNNTEILPQQPKSSHFSWWMTALLVCFLLIMATYIFVKFGAPFAFEKVLFPIMKWEASAFGRPVLALVLVASLAIFPLILVPSGPSMWLAGMIFGYGWGFVIIIVGTTLGMVGAYWIGSLFRERLHAWLKRWPQQIALIKLAGEGSWFHQFRVVALFRVSPFPYSIFNYAVAVTEIKFSPYVCGSVAGMTPEAFIYIYSGRLIRTLADVKYGKHKLTTVEIIYSIISFIAAAALTVAFTVYAKKSLNNIKGPDDISEDHQPAAGSAGVTALKNGHQDVHIL

SEQ ID NO: 18795 - protein, 292 aa, Triticum aestivum
  peptide (1)..(292): Ceres Seq. ID no. 15221766
  misc_feature (1)..(271): NCBI GI NO: 18395356 NR Description: expressed protein [Arabidopsis thaliana]
  misc_feature (1)..(288): NCBI GI NO: 34913316 NR Description: P0519E12.36
  misc_feature (20)..(265): NCBI GI NO: 30685958 NR Description: expressed protein [Arabidopsis thaliana]
  misc_feature (1)..(264): NCBI GI NO: 15221330 NR Description: expressed protein [Arabidopsis thaliana]
  misc_feature (1)..(261): NCBI GI NO: 15234386 NR Description: expressed protein [Arabidopsis thaliana]
  misc_feature (136)..(271): NCBI GI NO: 25410981 NR Description: hypothetical protein At2g02370
  misc_feature (120)..(265): NCBI GI NO: 7486891 NR Description: hypothetical protein T12H17
  misc_feature (50)..(210): NCBI GI NO: 8778630 NR Description: F5O11.19 [Arabidopsis thaliana]
  misc_feature (208)..(264): NCBI GI NO: 8778630 NR Description: F5O11.19 [Arabidopsis thaliana]
  misc_feature (1)..(136): NCBI GI NO: 8778630 NR Description: F5O11.19 [Arabidopsis thaliana]
MLMTPTQHATADNNTEILPQQPKSSHFSWWMTALLVCFLLIMATYIFVKFGAPFAFEKVLFPIMKWEASAFGRPVLALVLVASLAIFPLILVPSGPSMWLAGMIFGYGWGFVIIIVGTTLGMVGAYWIGSLFRERLHAWLKRWPQQIALIKLAGEGSWFHQFRVVALFRVSPFPYSIFNYAVAVTEIKFSPYVCGSVAGMTPEAFIYIYSGRLIRTLADVKYGKHKLTTVEIIYSIISFIAAAALTVAFTVYAKKSLNNIKGPDDISEDHQPAAGSAGVTALKNGHQDVHIL

SEQ ID NO: 18796 - protein, 290 aa, Triticum aestivum
  peptide (1)..(290): Ceres Seq. ID no. 15221767
  misc_feature (1)..(269): NCBI GI NO: 18395356 NR Description: expressed protein [Arabidopsis thaliana]
  misc_feature (1)..(286): NCBI GI NO: 34913316 NR Description: P0519E12.36
  misc_feature (18)..(263): NCBI GI NO: 30685958 NR Description: expressed protein [Arabidopsis thaliana]
  misc_feature (1)..(262): NCBI GI NO: 15221330 NR Description: expressed protein [Arabidopsis thaliana]
  misc_feature (1)..(259): NCBI GI NO: 15234386 NR Description: expressed protein [Arabidopsis thaliana]
  misc_feature (134)..(269): NCBI GI NO: 25410981 NR Description: hypothetical protein At2g02370
  misc_feature (118)..(263): NCBI GI NO: 7486891 NR Description: hypothetical protein T12H17
  misc_feature (48)..(208): NCBI GI NO: 8778630 NR Description: F5O11.19 [Arabidopsis thaliana]
  misc_feature (206)..(262): NCBI GI NO: 8778630 NR Description: F5O11.19 [Arabidopsis thaliana]
  misc_feature (1)..(134): NCBI GI NO: 8778630 NR Description: F5O11.19 [Arabidopsis thaliana]
MTPTQHATADNNTEILPQQPKSSHFSWWMTALLVCFLLIMATYIFVKFGAPFAFEKVLFPIMKWEASAFGRPVLALVLVASLAIFPLILVPSGPSMWLAGMIFGYGWGFVIIIVGTTLGMVGAYWIGSLFRERLHAWLKRWPQQIALIKLAGEGSWFHQFRVVALFRVSPFPYSIFNYAVAVTEIKFSPYVCGSVAGMTPEAFIYIYSGRLIRTLADVKYGKHKLTTVEIIYSIISFIAAAALTVAFTVYAKKSLNNIKGPDDISEDHQPAAGSAGVTALKNGHQDVHIL

SEQ ID NO: 18797 - DNA, 1491 bp, Triticum aestivum
  misc_feature (1)..(1491): Ceres Seq. ID no. 13595984
gctcgtctctgccgatacttcacacaagaaagatgagatcgccggcaactcttccactactatcttccgatcgtttggtcgccatggcgccgtgacctcgccgtgcttcagcgatggccccgcgctggacctctgatgaccagacaagacggaccgaccgcaccgtgactccgacagccactccgtggtggtaatcagtggagtgccgccaccgtcgatcaaaatctttgacctcccgcatccaccgccagttctgtctccctgcaagcaaatctcagccgccattgctcagcttctgagcagcggagcggatccgagatggagcccatccctctgctcacgccgtacaagatgggccagttcgagctgtcgcaccgggtcgtgctggcgcccatgacgcggcagcgcgcctacggcggcgtgccgcagccgcacgccgccctctactactcccagcgcgccacccccggcggcctcctcatctccgaggccacgcgcgtcgcgccggcaaggcaggacgaggagccggcctcgttcagggacatgccgggggtctgggcgccggagcaggtcgaggcgtggaggcccgtggtcgacgccgtgcacgccgagggcgccgtcttcttctgccagctctggcacgccgcggccgcccccggcgacgccgtcagggaaaggcagcaggtgagcccgcagatgagctatgatggccgccgcgaggagctcacgtcgccgaggagggtggcagctgaggacgcgcccggcgtcgtcgacgcgttcagacgcgccgccaggaacgccatcgatgccggcttcgacggcgtcgagctccaaggcaccaacggctacttcgtcgtcgacggcggtggcccggagagtcgctgccggttcgcgctggaggtggtggacgccgtggcgcgggagatcggcggccaccgcctgggcctgcgactggaccagttcaccgcagagccggacgagcacgcgctggcgctccatgtcgtcagccggctcaacgacctcggcgtgctctactgccacatgatcgagcccaaggtggacggccggcggcgcgtgtcccggcggctgctgccttacagggaggcgttcggcggcacgttcatcgccagcggcgggtacgggcgggaggagggcgacgcggccgtcggcgaggggtacgccgacctggtggcgtacgggcggctcttcctggcgaacccggacctgccgaggaggttcgagctcggcgcgccgctcaacgactgcgtcagcgccaccttctacggcgccggcgccggcgccgcccaccccgccgtcggatacactgattacccgttcctagaatgatcgatgattgtgctcggatgttcttttcggcgtaaacaatcgaccatgatttgcctcctcagtgttgtatatatgatagtactaattttatggggattaagttcatcaaaaaaaaaaaaaaaaaagcttatcgataccgtcgac

SEQ ID NO: 18798 - protein, 342 aa, Triticum aestivum
  peptide (1)..(342): Ceres Seq. ID no. 13595985
  misc_feature (5)..(179): Pfam Name: Pfam Description:  NADH:flavin oxidoreductase / NADH oxidase family
  misc_feature (4)..(215): NCBI GI NO: 23495288 NR Description: 12-oxophytodienoic acid reductase [Oryza sativa]
  misc_feature (182)..(342): NCBI GI NO: 23495288 NR Description: 12-oxophytodienoic acid reductase [Oryza sativa]
  misc_feature (2)..(215): NCBI GI NO: 40645345 NR Description: hypothetical protein [Pisum sativum]
  misc_feature (182)..(342): NCBI GI NO: 40645345 NR Description: hypothetical protein [Pisum sativum]
  misc_feature (2)..(215): NCBI GI NO: 40645347 NR Description: hypothetical protein [Pisum sativum]
  misc_feature (182)..(342): NCBI GI NO: 40645347 NR Description: hypothetical protein [Pisum sativum]
  misc_feature (2)..(215): NCBI GI NO: 40645351 NR Description: hypothetical protein [Pisum sativum]
  misc_feature (182)..(342): NCBI GI NO: 40645351 NR Description: hypothetical protein [Pisum sativum]
  misc_feature (2)..(215): NCBI GI NO: 40645353 NR Description: hypothetical protein [Pisum sativum]
  misc_feature (182)..(342): NCBI GI NO: 40645353 NR Description: hypothetical protein [Pisum sativum]
MEPIPLLTPYKMGQFELSHRVVLAPMTRQRAYGGVPQPHAALYYSQRATPGGLLISEATRVAPARQDEEPASFRDMPGVWAPEQVEAWRPVVDAVHAEGAVFFCQLWHAAAAPGDAVRERQQVSPQMSYDGRREELTSPRRVAAEDAPGVVDAFRRAARNAIDAGFDGVELQGTNGYFVVDGGGPESRCRFALEVVDAVAREIGGHRLGLRLDQFTAEPDEHALALHVVSRLNDLGVLYCHMIEPKVDGRRRVSRRLLPYREAFGGTFIASGGYGREEGDAAVGEGYADLVAYGRLFLANPDLPRRFELGAPLNDCVSATFYGAGAGAAHPAVGYTDYPFLE

SEQ ID NO: 18799 - protein, 331 aa, Triticum aestivum
  peptide (1)..(331): Ceres Seq. ID no. 13595986
  misc_feature (1)..(168): Pfam Name: Pfam Description:  NADH:flavin oxidoreductase / NADH oxidase family
  misc_feature (1)..(204): NCBI GI NO: 23495288 NR Description: 12-oxophytodienoic acid reductase [Oryza sativa]
  misc_feature (171)..(331): NCBI GI NO: 23495288 NR Description: 12-oxophytodienoic acid reductase [Oryza sativa]
  misc_feature (1)..(204): NCBI GI NO: 40645345 NR Description: hypothetical protein [Pisum sativum]
  misc_feature (171)..(331): NCBI GI NO: 40645345 NR Description: hypothetical protein [Pisum sativum]
  misc_feature (1)..(204): NCBI GI NO: 40645347 NR Description: hypothetical protein [Pisum sativum]
  misc_feature (171)..(331): NCBI GI NO: 40645347 NR Description: hypothetical protein [Pisum sativum]
  misc_feature (1)..(204): NCBI GI NO: 40645351 NR Description: hypothetical protein [Pisum sativum]
  misc_feature (171)..(331): NCBI GI NO: 40645351 NR Description: hypothetical protein [Pisum sativum]
  misc_feature (1)..(204): NCBI GI NO: 40645353 NR Description: hypothetical protein [Pisum sativum]
  misc_feature (171)..(331): NCBI GI NO: 40645353 NR Description: hypothetical protein [Pisum sativum]
MGQFELSHRVVLAPMTRQRAYGGVPQPHAALYYSQRATPGGLLISEATRVAPARQDEEPASFRDMPGVWAPEQVEAWRPVVDAVHAEGAVFFCQLWHAAAAPGDAVRERQQVSPQMSYDGRREELTSPRRVAAEDAPGVVDAFRRAARNAIDAGFDGVELQGTNGYFVVDGGGPESRCRFALEVVDAVAREIGGHRLGLRLDQFTAEPDEHALALHVVSRLNDLGVLYCHMIEPKVDGRRRVSRRLLPYREAFGGTFIASGGYGREEGDAAVGEGYADLVAYGRLFLANPDLPRRFELGAPLNDCVSATFYGAGAGAAHPAVGYTDYPFLE

SEQ ID NO: 18800 - protein, 317 aa, Triticum aestivum
  peptide (1)..(317): Ceres Seq. ID no. 13595987
  misc_feature (1)..(154): Pfam Name: Pfam Description:  NADH:flavin oxidoreductase / NADH oxidase family
  misc_feature (1)..(190): NCBI GI NO: 23495288 NR Description: 12-oxophytodienoic acid reductase [Oryza sativa]
  misc_feature (157)..(317): NCBI GI NO: 23495288 NR Description: 12-oxophytodienoic acid reductase [Oryza sativa]
  misc_feature (1)..(190): NCBI GI NO: 40645345 NR Description: hypothetical protein [Pisum sativum]
  misc_feature (157)..(317): NCBI GI NO: 40645345 NR Description: hypothetical protein [Pisum sativum]
  misc_feature (1)..(190): NCBI GI NO: 40645347 NR Description: hypothetical protein [Pisum sativum]
  misc_feature (157)..(317): NCBI GI NO: 40645347 NR Description: hypothetical protein [Pisum sativum]
  misc_feature (1)..(190): NCBI GI NO: 40645351 NR Description: hypothetical protein [Pisum sativum]
  misc_feature (157)..(317): NCBI GI NO: 40645351 NR Description: hypothetical protein [Pisum sativum]
  misc_feature (1)..(190): NCBI GI NO: 40645353 NR Description: hypothetical protein [Pisum sativum]
  misc_feature (157)..(317): NCBI GI NO: 40645353 NR Description: hypothetical protein [Pisum sativum]
MTRQRAYGGVPQPHAALYYSQRATPGGLLISEATRVAPARQDEEPASFRDMPGVWAPEQVEAWRPVVDAVHAEGAVFFCQLWHAAAAPGDAVRERQQVSPQMSYDGRREELTSPRRVAAEDAPGVVDAFRRAARNAIDAGFDGVELQGTNGYFVVDGGGPESRCRFALEVVDAVAREIGGHRLGLRLDQFTAEPDEHALALHVVSRLNDLGVLYCHMIEPKVDGRRRVSRRLLPYREAFGGTFIASGGYGREEGDAAVGEGYADLVAYGRLFLANPDLPRRFELGAPLNDCVSATFYGAGAGAAHPAVGYTDYPFLE

SEQ ID NO: 18801 - DNA, 1148 bp, Triticum aestivum
  misc_feature (1)..(1148): Ceres Seq. ID no. 12614573
acaaagctggaccagaccagaccagaggcaggcagcattcgcagcagcagaagaagacgacgcagccgccaccgccaccgccaccaccgccgacgcgcgcagagctcgacactcgagagaggctgacgagggcgacgacgccggtggccatgtcggcggagacggagcggagctccacggagtcgtccgcggcgtccgggctcgacttcgaggacaccgcgctcacgctcaccctgcgcctccccggcgaccccgaccgcaagcgcggcgcctcctcctcctcctcctgctccctcgccgaccgctcctccctcctcgccgaggctccgccggcccccaaggagcgggtggttggctggccgccggtgaggtcgttccgcaagaacgcgctcgagaacgtcgccgccgggtccaccagggcggccgccgcgccggccaagttcgtcaaggtggccgtcgatggcgcgccctacctgcgcaaggtgaacctgcgggactacgccggctacgaccagctcctccgcgcgctccagggcaagttctgctcccacttcaccatcaggaagttcgccaacgacgagatgaagctggtggacgcggtgaacgggacggagtacgtgcccacctacgaggacaaggacggcgactggatgctcgtcggcgacgtcccctggaagatgtttgaggaagcctgccaacgcgtccgcctgatgaagaactccgaggccgtgaacgtagcacccagagctgcccggtgaggcacgccgcgtggcccttacgaacggtgctgccggaaaggaggaggaggctttgctctgccgaggagataggaatgtgtacagctatcggttaccactttgggtttacttgatgctcttgggtcgtgaaaagttgctggtttcattactcgtctgtagcagcaccactatagtctctactactacatatagaagatggtgatggtcaaagtactgggagcttgaaatatacgcctttacatatagtttgtttgtttgtctcttgatgaataagaccaagcttgcagaaactcggcgttctctgctgtttgcgcgcacccgtcgcgaggtcgcctgtgatgccgcaggcaacgcctttggctttgccttggtagagtttatttttgtgtc

SEQ ID NO: 18802 - protein, 251 aa, Triticum aestivum
  peptide (1)..(251): Ceres Seq. ID no. 12614574
  misc_feature (67)..(225): Pfam Name: Pfam Description:  AUX/IAA family
  misc_feature (50)..(225): NCBI GI NO: 34906138 NR Description: P0509B06.6
  misc_feature (86)..(249): NCBI GI NO: 4887022 NR Description: Nt-iaa4.1 deduced protein [Nicotiana tabacum]
  misc_feature (115)..(249): NCBI GI NO: 20269059 NR Description: aux/IAA protein
  misc_feature (32)..(130): NCBI GI NO: 20269059 NR Description: aux/IAA protein
  misc_feature (52)..(249): NCBI GI NO: 4887020 NR Description: Nt-iaa28 deduced protein [Nicotiana tabacum]
  misc_feature (29)..(249): NCBI GI NO: 32396295 NR Description: auxin-induced protein 2 [Pinus taeda]
  misc_feature (50)..(250): NCBI GI NO: 22531416 NR Description: IAA16 protein [Gossypium hirsutum]
  misc_feature (69)..(249): NCBI GI NO: 15219694 NR Description: putative auxin-induced protein, IAA17/AXR3-1
  misc_feature (69)..(249): NCBI GI NO: 21592887 NR Description: putative auxin-induced protein, IAA17/AXR3-1
  misc_feature (135)..(249): NCBI GI NO: 15229343 NR Description: auxin-induced protein; protein id: At3g04730
KAGPDQTRGRQHSQQQKKTTQPPPPPPPPPTRAELDTRERLTRATTPVAMSAETERSSTESSAASGLDFEDTALTLTLRLPGDPDRKRGASSSSSCSLADRSSLLAEAPPAPKERVVGWPPVRSFRKNALENVAAGSTRAAAAPAKFVKVAVDGAPYLRKVNLRDYAGYDQLLRALQGKFCSHFTIRKFANDEMKLVDAVNGTEYVPTYEDKDGDWMLVGDVPWKMFEEACQRVRLMKNSEAVNVAPRAAR

SEQ ID NO: 18803 - protein, 227 aa, Triticum aestivum
  peptide (1)..(227): Ceres Seq. ID no. 12614575
QSWTRPDQRQAAFAAAEEDDAAATATATTADARRARHSREADEGDDAGGHVGGDGAELHGVVRGVRARLRGHRAHAHPAPPRRPRPQARRLLLLLLLPRRPLLPPRRGSAGPQGAGGWLAAGEVVPQERARERRRRVHQGGRRAGQVRQGGRRWRALPAQGEPAGLRRLRPAPPRAPGQVLLPLHHQEVRQRRDEAGGRGERDGVRAHLRGQGRRLDARRRRPLEDV

SEQ ID NO: 18804 - protein, 202 aa, Triticum aestivum
  peptide (1)..(202): Ceres Seq. ID no. 12614576
  misc_feature (18)..(176): Pfam Name: Pfam Description:  AUX/IAA family
  misc_feature (1)..(176): NCBI GI NO: 34906138 NR Description: P0509B06.6
  misc_feature (37)..(200): NCBI GI NO: 4887022 NR Description: Nt-iaa4.1 deduced protein [Nicotiana tabacum]
  misc_feature (66)..(200): NCBI GI NO: 20269059 NR Description: aux/IAA protein
  misc_feature (1)..(81): NCBI GI NO: 20269059 NR Description: aux/IAA protein
  misc_feature (3)..(200): NCBI GI NO: 4887020 NR Description: Nt-iaa28 deduced protein [Nicotiana tabacum]
  misc_feature (1)..(200): NCBI GI NO: 32396295 NR Description: auxin-induced protein 2 [Pinus taeda]
  misc_feature (1)..(201): NCBI GI NO: 22531416 NR Description: IAA16 protein [Gossypium hirsutum]
  misc_feature (20)..(200): NCBI GI NO: 15219694 NR Description: putative auxin-induced protein, IAA17/AXR3-1
  misc_feature (20)..(200): NCBI GI NO: 21592887 NR Description: putative auxin-induced protein, IAA17/AXR3-1
  misc_feature (86)..(200): NCBI GI NO: 15229343 NR Description: auxin-induced protein; protein id: At3g04730
MSAETERSSTESSAASGLDFEDTALTLTLRLPGDPDRKRGASSSSSCSLADRSSLLAEAPPAPKERVVGWPPVRSFRKNALENVAAGSTRAAAAPAKFVKVAVDGAPYLRKVNLRDYAGYDQLLRALQGKFCSHFTIRKFANDEMKLVDAVNGTEYVPTYEDKDGDWMLVGDVPWKMFEEACQRVRLMKNSEAVNVAPRAAR

SEQ ID NO: 18805 - DNA, 1517 bp, Triticum aestivum
  misc_feature (1)..(1517): Ceres Seq. ID no. 13654241
atggcatgcgctatatcttcctccccaaagtttgtcggaattacaaaacagcccccgtactcttcctccccacctctcgcctaccgttcgcgtcctccgcccgaggcctccacgggagcgccggagcgcacgcctgatctccccgcctcctcctcccggcaccgcggccccggctcctagcccgcctcacgatcgggggacgaggcacgagtaggagggcgagggtgcgaggagatgcagagggaccgaggcgtctcggcggccgctgggggcgccggtgagaggaagcggataggcgaggcgatggacaggtcctccccgtcgacgtcctgggggttctccggcggacgcgagagggaccggatcgccgccggcaagcagccggaggtgccccgctccggcggcggatccaccgccatgtccaagggcaagttgtccgatggagaatcggatactgacagtgaagaatcagatctcagtggttctgatggagaagatacatcgtggatttcatggttctgtagcttgcgaggcaatgagtttttctgtgaagttgatgacgattacatacaagacgatttcaatctctgtgggctaagcggtcaagttccatattatgaatatgctcttgatctgatattggatgtcgagtcttcacatggtgatatgttcacagaagagcagaatgaacttattgaatcagctgctgagatgctttatggattgattcatgttcgatatattcttacaagtaaaggattggctgcaatgttggataaatacaagaattatgactttggcagatgtccaagagtgcactgcagcggccagccatgccttccagttggccagtcggacattcctcgttctagtaatgtgaaaatttactgcccaaagtgtgaagatctctactatccgagatccaaatatcaaagcaacattgacggagcttactttgggacaacgtttcctcacttgtttctgatgacgtacccacatttgaagccccagaaaccgtcacagcagtacgtccccaaggtttttggcttcaaacttcataagccataacaagtttgaagactgaaggtgcaaaaggttcatagcagagttgtctgatatgtcacgctgcacatcacttccaagctgctcatttgtgcgcgtggcgcagtttagcacttggttcagttggttacccgtggcttggccgaaaccgacctgacctctggctgatttcccttgtcctccgttttcgctctcgcctgacgttctgatttgatccttgtggcttgtttagtgtagtagatttcttctatcctgttctttatactcattattatatttgagtttggcagttgctaaaagaaggcagttcgtaacagtgttatgtctctgctgtgtatttttcattttgttttacattaggttcctttgccaaaatgtgatggtaatggtaatctgaaacattcgatccggctattcttattcttcacctgcaactgagtttgtatggaaagttt

SEQ ID NO: 18806 - protein, 277 aa, Triticum aestivum
  peptide (1)..(277): Ceres Seq. ID no. 13654242
  misc_feature (87)..(265): Pfam Name: Pfam Description:  Casein kinase II regulatory subunit
  misc_feature (1)..(277): NCBI GI NO: 11527000 NR Description: protein kinase CK2 regulatory subunit CK2B1
  misc_feature (3)..(276): NCBI GI NO: 37536920 NR Description: putative casein kinase II beta subunit
  misc_feature (6)..(277): NCBI GI NO: 34901776 NR Description: OJ1058_B11.17
  misc_feature (10)..(277): NCBI GI NO: 11527004 NR Description: protein kinase CK2 regulatory subunit CK2B3
  misc_feature (1)..(276): NCBI GI NO: 21261784 NR Description: protein kinase Ck2 regulatory subunit 2
  misc_feature (1)..(277): NCBI GI NO: 15238013 NR Description: casein kinase II beta chain, putative
  misc_feature (28)..(277): NCBI GI NO: 29367573 NR Description: possible protein kinase CK2 regulatory subunit
  misc_feature (1)..(277): NCBI GI NO: 15236597 NR Description: casein kinase II beta chain, putative
  misc_feature (16)..(277): NCBI GI NO: 11527002 NR Description: protein kinase CK2 regulatory subunit CK2B2
  misc_feature (8)..(275): NCBI GI NO: 15224934 NR Description: casein kinase II beta chain, putative
MQRDRGVSAAAGGAGERKRIGEAMDRSSPSTSWGFSGGRERDRIAAGKQPEVPRSGGGSTAMSKGKLSDGESDTDSEESDLSGSDGEDTSWISWFCSLRGNEFFCEVDDDYIQDDFNLCGLSGQVPYYEYALDLILDVESSHGDMFTEEQNELIESAAEMLYGLIHVRYILTSKGLAAMLDKYKNYDFGRCPRVHCSGQPCLPVGQSDIPRSSNVKIYCPKCEDLYYPRSKYQSNIDGAYFGTTFPHLFLMTYPHLKPQKPSQQYVPKVFGFKLHKP

SEQ ID NO: 18807 - protein, 254 aa, Triticum aestivum
  peptide (1)..(254): Ceres Seq. ID no. 13654243
  misc_feature (64)..(242): Pfam Name: Pfam Description:  Casein kinase II regulatory subunit
  misc_feature (1)..(254): NCBI GI NO: 11527000 NR Description: protein kinase CK2 regulatory subunit CK2B1
  misc_feature (1)..(253): NCBI GI NO: 37536920 NR Description: putative casein kinase II beta subunit
  misc_feature (1)..(254): NCBI GI NO: 34901776 NR Description: OJ1058_B11.17
  misc_feature (1)..(254): NCBI GI NO: 11527004 NR Description: protein kinase CK2 regulatory subunit CK2B3
  misc_feature (1)..(253): NCBI GI NO: 21261784 NR Description: protein kinase Ck2 regulatory subunit 2
  misc_feature (1)..(254): NCBI GI NO: 15238013 NR Description: casein kinase II beta chain, putative
  misc_feature (5)..(254): NCBI GI NO: 29367573 NR Description: possible protein kinase CK2 regulatory subunit
  misc_feature (1)..(254): NCBI GI NO: 15236597 NR Description: casein kinase II beta chain, putative
  misc_feature (1)..(254): NCBI GI NO: 11527002 NR Description: protein kinase CK2 regulatory subunit CK2B2
  misc_feature (1)..(252): NCBI GI NO: 15224934 NR Description: casein kinase II beta chain, putative
MDRSSPSTSWGFSGGRERDRIAAGKQPEVPRSGGGSTAMSKGKLSDGESDTDSEESDLSGSDGEDTSWISWFCSLRGNEFFCEVDDDYIQDDFNLCGLSGQVPYYEYALDLILDVESSHGDMFTEEQNELIESAAEMLYGLIHVRYILTSKGLAAMLDKYKNYDFGRCPRVHCSGQPCLPVGQSDIPRSSNVKIYCPKCEDLYYPRSKYQSNIDGAYFGTTFPHLFLMTYPHLKPQKPSQQYVPKVFGFKLHKP

SEQ ID NO: 18808 - protein, 216 aa, Triticum aestivum
  peptide (1)..(216): Ceres Seq. ID no. 13654244
  misc_feature (26)..(204): Pfam Name: Pfam Description:  Casein kinase II regulatory subunit
  misc_feature (1)..(216): NCBI GI NO: 11527000 NR Description: protein kinase CK2 regulatory subunit CK2B1
  misc_feature (1)..(215): NCBI GI NO: 37536920 NR Description: putative casein kinase II beta subunit
  misc_feature (1)..(216): NCBI GI NO: 34901776 NR Description: OJ1058_B11.17
  misc_feature (1)..(216): NCBI GI NO: 11527004 NR Description: protein kinase CK2 regulatory subunit CK2B3
  misc_feature (1)..(215): NCBI GI NO: 21261784 NR Description: protein kinase Ck2 regulatory subunit 2
  misc_feature (1)..(216): NCBI GI NO: 15238013 NR Description: casein kinase II beta chain, putative
  misc_feature (1)..(216): NCBI GI NO: 29367573 NR Description: possible protein kinase CK2 regulatory subunit
  misc_feature (1)..(216): NCBI GI NO: 15236597 NR Description: casein kinase II beta chain, putative
  misc_feature (1)..(216): NCBI GI NO: 11527002 NR Description: protein kinase CK2 regulatory subunit CK2B2
  misc_feature (1)..(214): NCBI GI NO: 15224934 NR Description: casein kinase II beta chain, putative
MSKGKLSDGESDTDSEESDLSGSDGEDTSWISWFCSLRGNEFFCEVDDDYIQDDFNLCGLSGQVPYYEYALDLILDVESSHGDMFTEEQNELIESAAEMLYGLIHVRYILTSKGLAAMLDKYKNYDFGRCPRVHCSGQPCLPVGQSDIPRSSNVKIYCPKCEDLYYPRSKYQSNIDGAYFGTTFPHLFLMTYPHLKPQKPSQQYVPKVFGFKLHKP

SEQ ID NO: 18809 - DNA, 1198 bp, Triticum aestivum
  misc_feature (1)..(1198): Ceres Seq. ID no. 13654155
ctagaacatcctaatcgaaaattatttgattactttgatttttctctatggaattctgaaatctgaggcgagtttgtgttagattgtgcctgggggcttgattagattgtttcgagatggcggcgtgccggggattcttcgagtgcctgctcaggctgctcaactttttcctcaccgtcgccggccttgccatggtcggctacgggatctacctgctcgtggagtggatgaggatctccggcggtggcgaaggggcaccgccgtctccggccccgccggctgagttgcttacgtttggccgcccgatgctcacggtcgtggcccttggagaaggaggcagtttcttcgacaagctacccaaagcatggttcatctatttgttcattggtgttggtgctgttatcttcatcgtttctctatttggctgcattggagcagggacaaggaatacgtgttgcttgtgttgttattctttcttggtcatattattaatccttgctgaggctggaggtgctgcattcatattctttgaccatagctggaaagatgtaattccagtggataagacacaaaactttgatgccatgtataactttctgaatgaaaactggaagattgcaagatgggttgctcttggtgttgttgtttttgaggtattgcttttcttgttagctcttgctatcagggcaatgaacaaacctgccgagtatgacagtgatgatgaaatcattggaactgttcgaagcactagcatccgtcagcctcttatccattcccagaatgctccggctactggtgttcccgtcccaacacttgatcaacgtgcgagcagaaatgatgcatggagccaaaggatgcgagagaagtatggtctggacacaagccaatttacttacaacccatcagatgcaaccagatatcagcaaaatggggcacctccagctgaagaaaggagccgttgcatcgtaatgtgaaaatccttcacgacgtcatccaaattgatggttcttgaacaggccatctcagcttgcacagtttggctataccgtgttgttcagagtggtgtatgaatagaggtccttttaccttaatgctcatcttatctgctgtcttctgaacaactccatgcacctgtaatttttgtgtgaacgagtattggccgttgatatctcattatatttcatgttttcctcggatt

SEQ ID NO: 18810 - protein, 285 aa, Triticum aestivum
  peptide (1)..(285): Ceres Seq. ID no. 15219620
  misc_feature (9)..(179): Pfam Name: Pfam Description:  Tetraspanin family
  misc_feature (3)..(285): NCBI GI NO: 18398417 NR Description: senescence-associated protein family
  misc_feature (122)..(285): NCBI GI NO: 25518327 NR Description: hypothetical protein F5D14
  misc_feature (3)..(105): NCBI GI NO: 25518327 NR Description: hypothetical protein F5D14
  misc_feature (106)..(285): NCBI GI NO: 34905192 NR Description: P0498E12.14
  misc_feature (4)..(262): NCBI GI NO: 18399283 NR Description: expressed protein [Arabidopsis thaliana]
  misc_feature (179)..(285): NCBI GI NO: 4097569 NR Description: GMFP4 [Glycine max]
  misc_feature (68)..(263): NCBI GI NO: 15235419 NR Description: expressed protein [Arabidopsis thaliana]
  misc_feature (80)..(262): NCBI GI NO: 25360978 NR Description: hypothetical protein At2g20230
  misc_feature (79)..(250): NCBI GI NO: 32487399 NR Description: OSJNBb0017I01.13
  misc_feature (3)..(107): NCBI GI NO: 34905192 NR Description: P0498E12.14
MAACRGFFECLLRLLNFFLTVAGLAMVGYGIYLLVEWMRISGGGEGAPPSPAPPAELLTFGRPMLTVVALGEGGSFFDKLPKAWFIYLFIGVGAVIFIVSLFGCIGAGTRNTCCLCCYSFLVILLILAEAGGAAFIFFDHSWKDVIPVDKTQNFDAMYNFLNENWKIARWVALGVVVFEVLLFLLALAIRAMNKPAEYDSDDEIIGTVRSTSIRQPLIHSQNAPATGVPVPTLDQRASRNDAWSQRMREKYGLDTSQFTYNPSDATRYQQNGAPPAEERSRCIVM

SEQ ID NO: 18811 - protein, 260 aa, Triticum aestivum
  peptide (1)..(260): Ceres Seq. ID no. 15219621
  misc_feature (1)..(154): Pfam Name: Pfam Description:  Tetraspanin family
  misc_feature (1)..(260): NCBI GI NO: 18398417 NR Description: senescence-associated protein family
  misc_feature (97)..(260): NCBI GI NO: 25518327 NR Description: hypothetical protein F5D14
  misc_feature (1)..(80): NCBI GI NO: 25518327 NR Description: hypothetical protein F5D14
  misc_feature (81)..(260): NCBI GI NO: 34905192 NR Description: P0498E12.14
  misc_feature (1)..(237): NCBI GI NO: 18399283 NR Description: expressed protein [Arabidopsis thaliana]
  misc_feature (154)..(260): NCBI GI NO: 4097569 NR Description: GMFP4 [Glycine max]
  misc_feature (43)..(238): NCBI GI NO: 15235419 NR Description: expressed protein [Arabidopsis thaliana]
  misc_feature (55)..(237): NCBI GI NO: 25360978 NR Description: hypothetical protein At2g20230
  misc_feature (54)..(225): NCBI GI NO: 32487399 NR Description: OSJNBb0017I01.13
  misc_feature (1)..(82): NCBI GI NO: 34905192 NR Description: P0498E12.14
MVGYGIYLLVEWMRISGGGEGAPPSPAPPAELLTFGRPMLTVVALGEGGSFFDKLPKAWFIYLFIGVGAVIFIVSLFGCIGAGTRNTCCLCCYSFLVILLILAEAGGAAFIFFDHSWKDVIPVDKTQNFDAMYNFLNENWKIARWVALGVVVFEVLLFLLALAIRAMNKPAEYDSDDEIIGTVRSTSIRQPLIHSQNAPATGVPVPTLDQRASRNDAWSQRMREKYGLDTSQFTYNPSDATRYQQNGAPPAEERSRCIVM

SEQ ID NO: 18812 - protein, 248 aa, Triticum aestivum
  peptide (1)..(248): Ceres Seq. ID no. 15219622
  misc_feature (1)..(142): Pfam Name: Pfam Description:  Tetraspanin family
  misc_feature (1)..(248): NCBI GI NO: 18398417 NR Description: senescence-associated protein family
  misc_feature (85)..(248): NCBI GI NO: 25518327 NR Description: hypothetical protein F5D14
  misc_feature (1)..(68): NCBI GI NO: 25518327 NR Description: hypothetical protein F5D14
  misc_feature (69)..(248): NCBI GI NO: 34905192 NR Description: P0498E12.14
  misc_feature (1)..(225): NCBI GI NO: 18399283 NR Description: expressed protein [Arabidopsis thaliana]
  misc_feature (142)..(248): NCBI GI NO: 4097569 NR Description: GMFP4 [Glycine max]
  misc_feature (31)..(226): NCBI GI NO: 15235419 NR Description: expressed protein [Arabidopsis thaliana]
  misc_feature (43)..(225): NCBI GI NO: 25360978 NR Description: hypothetical protein At2g20230
  misc_feature (42)..(213): NCBI GI NO: 32487399 NR Description: OSJNBb0017I01.13
  misc_feature (1)..(70): NCBI GI NO: 34905192 NR Description: P0498E12.14
MRISGGGEGAPPSPAPPAELLTFGRPMLTVVALGEGGSFFDKLPKAWFIYLFIGVGAVIFIVSLFGCIGAGTRNTCCLCCYSFLVILLILAEAGGAAFIFFDHSWKDVIPVDKTQNFDAMYNFLNENWKIARWVALGVVVFEVLLFLLALAIRAMNKPAEYDSDDEIIGTVRSTSIRQPLIHSQNAPATGVPVPTLDQRASRNDAWSQRMREKYGLDTSQFTYNPSDATRYQQNGAPPAEERSRCIVM

SEQ ID NO: 18813 - DNA, 1222 bp, Triticum aestivum
  misc_feature (1)..(1222): Ceres Seq. ID no. 14302096
atacttttcagagttgtggcatcgaacacattgtggaaggccttacaccgcagacgccccgcgccgcgtcaagaacacagaggacaaagcacggtctgggagagccagagcaacagcagcggcgaggctccagccatggcggtgagcaacaacatcacggcgtgcgtgacactgatggcgctcatctgcgcggtccccgtcatcgcctcgggggtgtggttcgcgtcggcgcagggggaggagtgcgcgcggctggcgcgctggcccgtggccatcctgggtggcctcatcctgctggcggcgctggcgggcttcgtcggcgcctactggaaccgccgccgcctcctcgccttctacctcttcgccatggcggcgctcatcgccctcctcatcgcgctcctcgtcttcgccttcgcggtcacccgcggctccggcgcctacccggtgctcggccgcgagtacgacgagtaccgcctcgacggcttctccatgtggctgcgcgggtacgtcgaccccgcccggtgggaggggatcaggtcctgcctcgccgtctctgacacctgcaagaagctcgcccgacaggccggctacgtcactgccgaccagttctaccagtcccgcctcacgccgctccagtcgggctgctgcaagcccctgtcggtgtgcgggttcgggtacgtgagcccgacggtgtggacaaacccggcgcggcccgcgtcggacccggactgcggcctgtggagcaacgacccggcgcagctgtgctacgagtgcgagtcgtgccgcgcgggcctcctggcggcgctgcggagccagtggcacaaggccaacatcgcgctcgtcgtcgccaccgtctcgctcgtcttcctctacctcatcggctgcagtgcctacaagaacgcgcacgccgaggccatctaccaccgctacaagtggtgattcccatttcccatcccatcccatcactgagaaccaaccgccatcgccagtttgcccatgtaatagactagtatgtttgcttcatactgtactgtattattattagtagcttggtaactggtagtaagctagtaggggaagatgggaacttcagattcatggtttgcccatgcatgtatcgtgaagaattttagcgagatgcatgcgctcttggtgttgatgtgaatgttgtttgtaatatgcagtagagatgttcttcagatttatggttaagaattttagt

SEQ ID NO: 18814 - protein, 312 aa, Triticum aestivum
  peptide (1)..(312): Ceres Seq. ID no. 14302097
  misc_feature (48)..(287): Pfam Name: Pfam Description:  Tetraspanin family
  misc_feature (46)..(311): NCBI GI NO: 15224802 NR Description: senescence-associated protein- related
  misc_feature (46)..(311): NCBI GI NO: 17979386 NR Description: putative senescence-associated protein 5
  misc_feature (46)..(311): NCBI GI NO: 15237490 NR Description: senescence-associated protein, putative
  misc_feature (46)..(300): NCBI GI NO: 15231187 NR Description: senescence-associated protein family
  misc_feature (48)..(311): NCBI GI NO: 3551954 NR Description: senescence-associated protein 5
  misc_feature (45)..(300): NCBI GI NO: 29367553 NR Description: senescence-associated protein-like protein
  misc_feature (49)..(309): NCBI GI NO: 20197174 NR Description: hypothetical protein [Arabidopsis thaliana]
  misc_feature (46)..(300): NCBI GI NO: 15238641 NR Description: senescence-associated protein family
  misc_feature (49)..(300): NCBI GI NO: 15234374 NR Description: senescence-associated protein, putative
  misc_feature (49)..(309): NCBI GI NO: 21537169 NR Description: senescence-associated protein-like protein
ILFRVVASNTLWKALHRRRPAPRQEHRGQSTVWESQSNSSGEAPAMAVSNNITACVTLMALICAVPVIASGVWFASAQGEECARLARWPVAILGGLILLAALAGFVGAYWNRRRLLAFYLFAMAALIALLIALLVFAFAVTRGSGAYPVLGREYDEYRLDGFSMWLRGYVDPARWEGIRSCLAVSDTCKKLARQAGYVTADQFYQSRLTPLQSGCCKPLSVCGFGYVSPTVWTNPARPASDPDCGLWSNDPAQLCYECESCRAGLLAALRSQWHKANIALVVATVSLVFLYLIGCSAYKNAHAEAIYHRYKW

SEQ ID NO: 18815 - protein, 267 aa, Triticum aestivum
  peptide (1)..(267): Ceres Seq. ID no. 14302098
  misc_feature (3)..(242): Pfam Name: Pfam Description:  Tetraspanin family
  misc_feature (1)..(266): NCBI GI NO: 15224802 NR Description: senescence-associated protein- related
  misc_feature (1)..(266): NCBI GI NO: 17979386 NR Description: putative senescence-associated protein 5
  misc_feature (1)..(266): NCBI GI NO: 15237490 NR Description: senescence-associated protein, putative
  misc_feature (1)..(255): NCBI GI NO: 15231187 NR Description: senescence-associated protein family
  misc_feature (3)..(266): NCBI GI NO: 3551954 NR Description: senescence-associated protein 5
  misc_feature (1)..(255): NCBI GI NO: 29367553 NR Description: senescence-associated protein-like protein
  misc_feature (4)..(264): NCBI GI NO: 20197174 NR Description: hypothetical protein [Arabidopsis thaliana]
  misc_feature (1)..(255): NCBI GI NO: 15238641 NR Description: senescence-associated protein family
  misc_feature (4)..(255): NCBI GI NO: 15234374 NR Description: senescence-associated protein, putative
  misc_feature (4)..(264): NCBI GI NO: 21537169 NR Description: senescence-associated protein-like protein
MAVSNNITACVTLMALICAVPVIASGVWFASAQGEECARLARWPVAILGGLILLAALAGFVGAYWNRRRLLAFYLFAMAALIALLIALLVFAFAVTRGSGAYPVLGREYDEYRLDGFSMWLRGYVDPARWEGIRSCLAVSDTCKKLARQAGYVTADQFYQSRLTPLQSGCCKPLSVCGFGYVSPTVWTNPARPASDPDCGLWSNDPAQLCYECESCRAGLLAALRSQWHKANIALVVATVSLVFLYLIGCSAYKNAHAEAIYHRYKW

SEQ ID NO: 18816 - protein, 254 aa, Triticum aestivum
  peptide (1)..(254): Ceres Seq. ID no. 14302099
  misc_feature (1)..(229): Pfam Name: Pfam Description:  Tetraspanin family
  misc_feature (1)..(253): NCBI GI NO: 15224802 NR Description: senescence-associated protein- related
  misc_feature (1)..(253): NCBI GI NO: 17979386 NR Description: putative senescence-associated protein 5
  misc_feature (1)..(253): NCBI GI NO: 15237490 NR Description: senescence-associated protein, putative
  misc_feature (1)..(242): NCBI GI NO: 15231187 NR Description: senescence-associated protein family
  misc_feature (1)..(253): NCBI GI NO: 3551954 NR Description: senescence-associated protein 5
  misc_feature (1)..(242): NCBI GI NO: 29367553 NR Description: senescence-associated protein-like protein
  misc_feature (1)..(251): NCBI GI NO: 20197174 NR Description: hypothetical protein [Arabidopsis thaliana]
  misc_feature (1)..(242): NCBI GI NO: 15238641 NR Description: senescence-associated protein family
  misc_feature (1)..(242): NCBI GI NO: 15234374 NR Description: senescence-associated protein, putative
  misc_feature (1)..(251): NCBI GI NO: 21537169 NR Description: senescence-associated protein-like protein
MALICAVPVIASGVWFASAQGEECARLARWPVAILGGLILLAALAGFVGAYWNRRRLLAFYLFAMAALIALLIALLVFAFAVTRGSGAYPVLGREYDEYRLDGFSMWLRGYVDPARWEGIRSCLAVSDTCKKLARQAGYVTADQFYQSRLTPLQSGCCKPLSVCGFGYVSPTVWTNPARPASDPDCGLWSNDPAQLCYECESCRAGLLAALRSQWHKANIALVVATVSLVFLYLIGCSAYKNAHAEAIYHRYKW

SEQ ID NO: 18817 - DNA, 966 bp, Triticum aestivum
  misc_feature (1)..(966): Ceres Seq. ID no. 14302271
cacgaaaatcattttcgcaactctcggagcgcaccaccaccaacttcttctgcgcaaaaggagagaaatagagaaaccaccaccaaaccccaagagcgagctcggtgcgcgcgcgcgcgagagagagagagagagagagagagagagagagagagaaacagaggaggcggcgccgagcgagcgcgatcccctcctcctcccccgtcgcgtgatcatggccatggccgcctccagatcgctctgggcctcccgcgccgcctcctacctcaagatctccgccttccccagggccttctccaccgtgctgaaggatctgaagtatgctgaaacccatgaatgggtaaaggttgatggtgattccgcaaccgttgggattacagaccatgcccaggaccatttgggtgatgttgtatatgtggagctgccagaagttggcgcttctgtatctcagggaacaaactttggtgctgttgaaagtgtgaaggcaaccagtgacatcaactcgccggtgtctggagaggtcattgcagtgaatgacgaactactagagaaaccagcattggtcaatggagatccatatgagggcggctggatcatcaaggtcaaggtcagcgatgcaggtgagctcaactcactgatggacgacaagaagtactcaaaattctgcgaggaagaggacagcaagcattaagcatggtggattctgaaagagaatctgcgcttcgacactcataggtgtttgtcatgtgctgttgggcactttgtaccacctgctttctcagcccagaaaggatcaaaacatggaataaatggcatttgcctaccctacaagggcttgcgagatccgaaatctgtatatcactcgagttcctttttcttgttgccatggtttcatctctgatttaagctctgttctgattagttggtattcaaattctaaatgcatacgtactgatgatgctacac

SEQ ID NO: 18818 - protein, 229 aa, Triticum aestivum
  peptide (1)..(229): Ceres Seq. ID no. 14302272
  misc_feature (105)..(225): Pfam Name: Pfam Description:  Glycine cleavage H-protein
  misc_feature (76)..(229): NCBI GI NO: 15226906 NR Description: glycine decarboxylase complex H-protein
  misc_feature (76)..(229): NCBI GI NO: 29124971 NR Description: glycine decarboxylase complex H-protein
  misc_feature (80)..(229): NCBI GI NO: 1346118 NR Description: Glycine cleavage system H protein
  misc_feature (80)..(229): NCBI GI NO: 2147453 NR Description: glycine cleavage system protein H precursor
  misc_feature (80)..(229): NCBI GI NO: 2499417 NR Description: Glycine cleavage system H protein
  misc_feature (80)..(229): NCBI GI NO: 2887286 NR Description: H protein [Flaveria anomala]
  misc_feature (80)..(227): NCBI GI NO: 37536058 NR Description: putative glycine decarboxylase subunit
  misc_feature (80)..(229): NCBI GI NO: 2119600 NR Description: glycine cleavage system protein H precursor
  misc_feature (80)..(229): NCBI GI NO: 3688309 NR Description: H-Protein precursor [Flaveria pringlei]
  misc_feature (80)..(225): NCBI GI NO: 1362140 NR Description: H-protein precursor - Flaveria trinervia
TKIIFATLGAHHHQLLLRKRREIEKPPPNPKSELGARARERERERERERERETEEAAPSERDPLLLPRRVIMAMAASRSLWASRAASYLKISAFPRAFSTVLKDLKYAETHEWVKVDGDSATVGITDHAQDHLGDVVYVELPEVGASVSQGTNFGAVESVKATSDINSPVSGEVIAVNDELLEKPALVNGDPYEGGWIIKVKVSDAGELNSLMDDKKYSKFCEEEDSKH

SEQ ID NO: 18819 - protein, 158 aa, Triticum aestivum
  peptide (1)..(158): Ceres Seq. ID no. 14302273
  misc_feature (34)..(154): Pfam Name: Pfam Description:  Glycine cleavage H-protein
  misc_feature (5)..(158): NCBI GI NO: 15226906 NR Description: glycine decarboxylase complex H-protein
  misc_feature (5)..(158): NCBI GI NO: 29124971 NR Description: glycine decarboxylase complex H-protein
  misc_feature (9)..(158): NCBI GI NO: 1346118 NR Description: Glycine cleavage system H protein
  misc_feature (9)..(158): NCBI GI NO: 2147453 NR Description: glycine cleavage system protein H precursor
  misc_feature (9)..(158): NCBI GI NO: 2887286 NR Description: H protein [Flaveria anomala]
  misc_feature (9)..(158): NCBI GI NO: 2499417 NR Description: Glycine cleavage system H protein
  misc_feature (9)..(156): NCBI GI NO: 37536058 NR Description: putative glycine decarboxylase subunit
  misc_feature (9)..(158): NCBI GI NO: 2119600 NR Description: glycine cleavage system protein H precursor
  misc_feature (9)..(158): NCBI GI NO: 3688309 NR Description: H-Protein precursor [Flaveria pringlei]
  misc_feature (9)..(154): NCBI GI NO: 1362140 NR Description: H-protein precursor - Flaveria trinervia
MAMAASRSLWASRAASYLKISAFPRAFSTVLKDLKYAETHEWVKVDGDSATVGITDHAQDHLGDVVYVELPEVGASVSQGTNFGAVESVKATSDINSPVSGEVIAVNDELLEKPALVNGDPYEGGWIIKVKVSDAGELNSLMDDKKYSKFCEEEDSKH

SEQ ID NO: 18820 - protein, 156 aa, Triticum aestivum
  peptide (1)..(156): Ceres Seq. ID no. 14302274
  misc_feature (32)..(152): Pfam Name: Pfam Description:  Glycine cleavage H-protein
  misc_feature (3)..(156): NCBI GI NO: 15226906 NR Description: glycine decarboxylase complex H-protein
  misc_feature (3)..(156): NCBI GI NO: 29124971 NR Description: glycine decarboxylase complex H-protein
  misc_feature (7)..(156): NCBI GI NO: 1346118 NR Description: Glycine cleavage system H protein
  misc_feature (7)..(156): NCBI GI NO: 2147453 NR Description: glycine cleavage system protein H precursor
  misc_feature (7)..(156): NCBI GI NO: 2887286 NR Description: H protein [Flaveria anomala]
  misc_feature (7)..(156): NCBI GI NO: 2499417 NR Description: Glycine cleavage system H protein
  misc_feature (7)..(154): NCBI GI NO: 37536058 NR Description: putative glycine decarboxylase subunit
  misc_feature (7)..(156): NCBI GI NO: 2119600 NR Description: glycine cleavage system protein H precursor
  misc_feature (7)..(156): NCBI GI NO: 3688309 NR Description: H-Protein precursor [Flaveria pringlei]
  misc_feature (7)..(152): NCBI GI NO: 1362140 NR Description: H-protein precursor - Flaveria trinervia
MAASRSLWASRAASYLKISAFPRAFSTVLKDLKYAETHEWVKVDGDSATVGITDHAQDHLGDVVYVELPEVGASVSQGTNFGAVESVKATSDINSPVSGEVIAVNDELLEKPALVNGDPYEGGWIIKVKVSDAGELNSLMDDKKYSKFCEEEDSKH

SEQ ID NO: 18821 - DNA, 462 bp, Triticum aestivum
  misc_feature (1)..(462): Ceres Seq. ID no. 13654250
  misc_feature (271)..(271): n is a, c, t, g, unknown, or other
  misc_feature (428)..(428): n is a, c, t, g, unknown, or other
  misc_feature (394)..(394): n is a, c, t, g, unknown, or other
  misc_feature (359)..(359): n is a, c, t, g, unknown, or other
  misc_feature (408)..(408): n is a, c, t, g, unknown, or other
  misc_feature (191)..(191): n is a, c, t, g, unknown, or other
cccaaaccccatccatcccttcctcctcccgagcagcctcctcgccgacgaaagtgccggagagctttccagaaggtcagggggagggatgggcgagttcgacgactactgggcgcgggcgtacaggggcgaccccgcggtgccgcactccgacccgcagcggctcatctccacctggaccggcgccttcnccctcggcgccgccgcctgcgtccaccaccacgtctccggcctcgcctccaacatcaagtcccttccccacagctggcangacatgacaatgatgctcgatcagaagcgctggaagaaaattcttgacaagaagcagcaacaagcttaagttccataaccttcaccgnttgggccacagttggaagagctttctatcttgctngttgggcatggcanaggaagttcttgcatcagtntggtattaggatagagtttttctacctcttgttt

SEQ ID NO: 18822 - protein, 112 aa, Triticum aestivum
  peptide (1)..(112): Ceres Seq. ID no. 13654251
  misc_feature (64)..(64): Xaa is any aa, unknown or other
  misc_feature (90)..(90): Xaa is any aa, unknown or other
PNPIHPFLLPSSLLADESAGELSRRSGGGMGEFDDYWARAYRGDPAVPHSDPQRLISTWTGAFXLGAAACVHHHVSGLASNIKSLPHSWXDMTMMLDQKRWKKILDKKQQQA

SEQ ID NO: 18823 - protein, 105 aa, Triticum aestivum
  peptide (1)..(105): Ceres Seq. ID no. 13654252
  misc_feature (64)..(64): Xaa is any aa, unknown or other
  misc_feature (91)..(91): Xaa is any aa, unknown or other
PKPHPSLPPPEQPPRRRKCRRAFQKVRGRDGRVRRLLGAGVQGRPRGAALRPAAAHLHLDRRLXPRRRRLRPPPRLRPRLQHQVPSPQLAXHDNDARSEALEENS

SEQ ID NO: 18824 - protein, 91 aa, Triticum aestivum
  peptide (1)..(91): Ceres Seq. ID no. 13654253
  misc_feature (2)..(88): Pfam Name: Pfam Description:  Glycoprotein GG/GX
  misc_feature (3)..(84): NCBI GI NO: 38566476 NR Description: polymorphic epithelial mucin [Capra hircus]
  misc_feature (63)..(63): Xaa is any aa, unknown or other
  misc_feature (90)..(90): Xaa is any aa, unknown or other
QTPSIPSSSRAASSPTKVPESFPEGQGEGWASSTTTGRGRTGATPRCRTPTRSGSSPPGPAPXPSAPPPASTTTSPASPPTSSPFPTAGXT

SEQ ID NO: 18825 - protein, 83 aa, Triticum aestivum
  peptide (1)..(83): Ceres Seq. ID no. 13654254
  misc_feature (35)..(35): Xaa is any aa, unknown or other
  misc_feature (61)..(61): Xaa is any aa, unknown or other
MGEFDDYWARAYRGDPAVPHSDPQRLISTWTGAFXLGAAACVHHHVSGLASNIKSLPHSWXDMTMMLDQKRWKKILDKKQQQA

SEQ ID NO: 18826 - DNA, 1147 bp, Triticum aestivum
  misc_feature (1)..(1147): Ceres Seq. ID no. 13596265
ctcacccaatacccacgagaacctctagctaccgtagcttagctgagcttcctagctgtagccatggccaagtatttccagagtgctcctgttagcaatgaagcattgaagcacaaggagattctgttggacggcctgtacatgcaccaggaccttgacggatcaccaaatcagaaccagaaaactatagtgaatcctaacctccctctgcagtttggctgcacagtggctaatgactggaccatatatgatggccttggccccgataagaagcttgttgcgcgtgcacaagggccacatatgggggcaggagtagccaaaggaagctggttcatatgtttcaacatggtgttcgtcgatgacaggtttgcgggttccagccttaaggtgctcggacattttgaagagccggtagaaggtgagtgggcaatccttggcgggacaggagagtttgcctatgcacaaggtgtggtcaccttcaagaaactccaggacggaagcactagggtcagacagcttcagatacgtgccatctgcctcagctttccatcgtcactttcaatgcctacgaagatggggccatggggtggaaatggaggctccattcaagacatcaccacaggaaccccgatgcgcctgcaaagtgtgacactcagcagcgagagcagctggattgtctctcttgcatttacttatattgacaaacttggaaagaggcgcaacgaaggcccctggggtcctgacaaagggaacagtcaaaccatcgagttcggacctaaagaatatgtgacggaaatatcagggacaattgacaatgtcatatcgtcacttgttatcacgacaaacatcaaaaagtatggaccgtttgggcatgagaagggcaaccgtttcagcgccgccgtgccagaaaacacatgtgttgtgggattctttgccaggaccgggaatgctcttgatgccattggcgtttaccacggacccatagtggtttgaactggatttaatgctgctttgctttagtttatggcaatctcatgcgagttcattttaagggaaagtgtgtttgttccacatttgttttccagcaataacatggcaagggtcatgcttacgtctgtgatccatgtctctctagtgcaagagtctt

SEQ ID NO: 18827 - protein, 309 aa, Triticum aestivum
  peptide (1)..(309): Ceres Seq. ID no. 13596266
  misc_feature (182)..(306): Pfam Name: Pfam Description:  Jacalin-like lectin domain
  misc_feature (4)..(303): NCBI GI NO: 21311647 NR Description: hessian fly response gene 1 protein
  misc_feature (4)..(249): NCBI GI NO: 7489661 NR Description: benzothiadiazole-induced protein
  misc_feature (5)..(307): NCBI GI NO: 7489385 NR Description: jakalin homolog - barley
  misc_feature (5)..(307): NCBI GI NO: 7489383 NR Description: jacalin homolog - barley
  misc_feature (5)..(297): NCBI GI NO: 7489384 NR Description: jacalin homolog - barley
  misc_feature (19)..(303): NCBI GI NO: 9313027 NR Description: beta-glucosidase aggregating factor precursor
  misc_feature (1)..(303): NCBI GI NO: 16151819 NR Description: VER2 [Triticum aestivum]
  misc_feature (86)..(235): NCBI GI NO: 29893221 NR Description: unknown [Triticum aestivum]
  misc_feature (4)..(156): NCBI GI NO: 37532940 NR Description: putative disease resistance protein
  misc_feature (158)..(306): NCBI GI NO: 7489661 NR Description: benzothiadiazole-induced protein
MAKYFQSAPVSNEALKHKEILLDGLYMHQDLDGSPNQNQKTIVNPNLPLQFGCTVANDWTIYDGLGPDKKLVARAQGPHMGAGVAKGSWFICFNMVFVDDRFAGSSLKVLGHFEEPVEGEWAILGGTGEFAYAQGVVTFKKLQDGSTRVRQLQIRAICLSFPSSLSMPTKMGPWGGNGGSIQDITTGTPMRLQSVTLSSESSWIVSLAFTYIDKLGKRRNEGPWGPDKGNSQTIEFGPKEYVTEISGTIDNVISSLVITTNIKKYGPFGHEKGNRFSAAVPENTCVVGFFARTGNALDAIGVYHGPIVV

SEQ ID NO: 18828 - protein, 283 aa, Triticum aestivum
  peptide (1)..(283): Ceres Seq. ID no. 13596267
  misc_feature (156)..(280): Pfam Name: Pfam Description:  Jacalin-like lectin domain
  misc_feature (1)..(277): NCBI GI NO: 21311647 NR Description: hessian fly response gene 1 protein
  misc_feature (1)..(223): NCBI GI NO: 7489661 NR Description: benzothiadiazole-induced protein
  misc_feature (1)..(281): NCBI GI NO: 7489385 NR Description: jakalin homolog - barley
  misc_feature (1)..(281): NCBI GI NO: 7489383 NR Description: jacalin homolog - barley
  misc_feature (1)..(271): NCBI GI NO: 7489384 NR Description: jacalin homolog - barley
  misc_feature (1)..(277): NCBI GI NO: 9313027 NR Description: beta-glucosidase aggregating factor precursor
  misc_feature (1)..(277): NCBI GI NO: 16151819 NR Description: VER2 [Triticum aestivum]
  misc_feature (60)..(209): NCBI GI NO: 29893221 NR Description: unknown [Triticum aestivum]
  misc_feature (1)..(130): NCBI GI NO: 37532940 NR Description: putative disease resistance protein
  misc_feature (132)..(280): NCBI GI NO: 7489661 NR Description: benzothiadiazole-induced protein
MHQDLDGSPNQNQKTIVNPNLPLQFGCTVANDWTIYDGLGPDKKLVARAQGPHMGAGVAKGSWFICFNMVFVDDRFAGSSLKVLGHFEEPVEGEWAILGGTGEFAYAQGVVTFKKLQDGSTRVRQLQIRAICLSFPSSLSMPTKMGPWGGNGGSIQDITTGTPMRLQSVTLSSESSWIVSLAFTYIDKLGKRRNEGPWGPDKGNSQTIEFGPKEYVTEISGTIDNVISSLVITTNIKKYGPFGHEKGNRFSAAVPENTCVVGFFARTGNALDAIGVYHGPIVV

SEQ ID NO: 18829 - protein, 230 aa, Triticum aestivum
  peptide (1)..(230): Ceres Seq. ID no. 13596268
  misc_feature (103)..(227): Pfam Name: Pfam Description:  Jacalin-like lectin domain
  misc_feature (1)..(224): NCBI GI NO: 21311647 NR Description: hessian fly response gene 1 protein
  misc_feature (1)..(170): NCBI GI NO: 7489661 NR Description: benzothiadiazole-induced protein
  misc_feature (1)..(228): NCBI GI NO: 7489385 NR Description: jakalin homolog - barley
  misc_feature (1)..(228): NCBI GI NO: 7489383 NR Description: jacalin homolog - barley
  misc_feature (1)..(218): NCBI GI NO: 7489384 NR Description: jacalin homolog - barley
  misc_feature (1)..(224): NCBI GI NO: 9313027 NR Description: beta-glucosidase aggregating factor precursor
  misc_feature (1)..(224): NCBI GI NO: 16151819 NR Description: VER2 [Triticum aestivum]
  misc_feature (7)..(156): NCBI GI NO: 29893221 NR Description: unknown [Triticum aestivum]
  misc_feature (1)..(77): NCBI GI NO: 37532940 NR Description: putative disease resistance protein
  misc_feature (79)..(227): NCBI GI NO: 7489661 NR Description: benzothiadiazole-induced protein
MGAGVAKGSWFICFNMVFVDDRFAGSSLKVLGHFEEPVEGEWAILGGTGEFAYAQGVVTFKKLQDGSTRVRQLQIRAICLSFPSSLSMPTKMGPWGGNGGSIQDITTGTPMRLQSVTLSSESSWIVSLAFTYIDKLGKRRNEGPWGPDKGNSQTIEFGPKEYVTEISGTIDNVISSLVITTNIKKYGPFGHEKGNRFSAAVPENTCVVGFFARTGNALDAIGVYHGPIVV

SEQ ID NO: 18830 - DNA, 1617 bp, Triticum aestivum
  misc_feature (1)..(1617): Ceres Seq. ID no. 13596089
aaagaaaccaaggacagagctgaaacatggagaccacggtccccgcggccacagccaccaccagctcgagctccggccacggagccggcggcggtgctgcgagagtcctgctcctcccgtacccgggggcgcagggccacaccaacccgatgctccagctcggccgccgcctggcgtaccacggcctccgccccacactcgtcgccacccgctacgtgctctccaccaccccgccccccggcgcgcccttcggcgtggccgccatctccgacggctgcgacgccggcggcatggcctcgtgcccggacatggcggagtacgtctcgcggctggcggccgtgggctccgagacgctgcgggagctcctcctgtcggaggcgcgcgcggggcggcccgtgcgcgtgctggtgtacgacgctcacctggcgtgggcgcggcgggtggcgcaggcgtccggcgtcgcggccgcggccttcttctcccagccgtgcgcggtggacgtcgtctacggggagctgtgggcggggcggctggcgctgccggcgacggacgggcgcgcgctgctcgcgagaggagcgctaggcgtggagctggggccggaggacatgccgccgttcgcggcggtgccggagtcgcagccaacgttcctcaaggtgtcagttgggcagttcgaggggctggaggacgccgacgacgtgctcgtcaactcattccgcgacctcgagccaaaggaggtagagtacatggagttaacatggagagcgaagatggttggcccaaccttgccatcattctacctcgacgatgatcgcctaccatccaataaatcatacggtttcgactttttcaacggtgatgcactgtgcatggattggctagagaagcaaagcaattcatccgttgtgctggtgtcctatgggactgtctctgattatgatgcaacccaactagaggagcttggcaatggactgtgcaattccggaaaaccttttctttgggttgtaaggtccaacgaggaacacaagttatccaaagaactcaaggaaaaatgtgaggagattggattaattgtctcatggtgcccccagcttgaggttcttgcacatagggctattggttgctttgttacccattgtggatggaactcgacattagaggcacttgctaatggtgtacctctagtgggtattccgcattgggctgaccaacccaccattgcaaagtatgtggagagtgcatggagcatgggtgtgcgtgtacggaaggacaataatggatatctaaagctagaggaggtcgagaggtgcattagagaggtgatggatatagagaaaaaggatgagtacaaaagaaatgctgtgaagtggatgcaaaaggccaaggaggcaatgcaggaaggaggaagttcagacaagaatatcgctgaatttgctaccaagtattcatcaatataaagtttgaacaatgttttacttcaatataagcaagtaggcagtgattttggccctacagaagtttagagtggccgacattttccatatgtaattgtagtgatatcttcttcacatttagaagtatgctggactttttatatatatacgacatgcgattttttct

SEQ ID NO: 18831 - protein, 475 aa, Triticum aestivum
  peptide (1)..(475): Ceres Seq. ID no. 15221771
  misc_feature (25)..(475): Pfam Name: Pfam Description:  UDP-glucoronosyl and UDP-glucosyl transferase
  misc_feature (14)..(474): NCBI GI NO: 38345012 NR Description: OSJNBa0052O21.15
  misc_feature (8)..(474): NCBI GI NO: 38345013 NR Description: OSJNBa0052O21.16
  misc_feature (21)..(474): NCBI GI NO: 38345011 NR Description: OSJNBa0052O21.14
  misc_feature (4)..(371): NCBI GI NO: 38345000 NR Description: OSJNBa0052O21.3
  misc_feature (1)..(364): NCBI GI NO: 38344998 NR Description: OSJNBa0052O21.1
  misc_feature (25)..(475): NCBI GI NO: 7385017 NR Description: UDP-glucose:salicylic acid glucosyltransferase
  misc_feature (25)..(472): NCBI GI NO: 15221233 NR Description: glycosyltransferase family [Arabidopsis thaliana]
  misc_feature (22)..(468): NCBI GI NO: 33114570 NR Description: glucosyltransferase 2 [Crocus sativus]
  misc_feature (25)..(436): NCBI GI NO: 15221232 NR Description: indole-3-acetate beta-glucosyltransferase -related
  misc_feature (27)..(475): NCBI GI NO: 28628183 NR Description: UDP-glucosyl transferase [Fragaria x ananassa]
METTVPAATATTSSSSGHGAGGGAARVLLLPYPGAQGHTNPMLQLGRRLAYHGLRPTLVATRYVLSTTPPPGAPFGVAAISDGCDAGGMASCPDMAEYVSRLAAVGSETLRELLLSEARAGRPVRVLVYDAHLAWARRVAQASGVAAAAFFSQPCAVDVVYGELWAGRLALPATDGRALLARGALGVELGPEDMPPFAAVPESQPTFLKVSVGQFEGLEDADDVLVNSFRDLEPKEVEYMELTWRAKMVGPTLPSFYLDDDRLPSNKSYGFDFFNGDALCMDWLEKQSNSSVVLVSYGTVSDYDATQLEELGNGLCNSGKPFLWVVRSNEEHKLSKELKEKCEEIGLIVSWCPQLEVLAHRAIGCFVTHCGWNSTLEALANGVPLVGIPHWADQPTIAKYVESAWSMGVRVRKDNNGYLKLEEVERCIREVMDIEKKDEYKRNAVKWMQKAKEAMQEGGSSDKNIAEFATKYSSI

SEQ ID NO: 18832 - protein, 434 aa, Triticum aestivum
  peptide (1)..(434): Ceres Seq. ID no. 15221772
  misc_feature (1)..(434): Pfam Name: Pfam Description:  UDP-glucoronosyl and UDP-glucosyl transferase
  misc_feature (1)..(433): NCBI GI NO: 38345012 NR Description: OSJNBa0052O21.15
  misc_feature (1)..(433): NCBI GI NO: 38345013 NR Description: OSJNBa0052O21.16
  misc_feature (1)..(433): NCBI GI NO: 38345011 NR Description: OSJNBa0052O21.14
  misc_feature (1)..(330): NCBI GI NO: 38345000 NR Description: OSJNBa0052O21.3
  misc_feature (1)..(323): NCBI GI NO: 38344998 NR Description: OSJNBa0052O21.1
  misc_feature (1)..(434): NCBI GI NO: 7385017 NR Description: UDP-glucose:salicylic acid glucosyltransferase
  misc_feature (1)..(431): NCBI GI NO: 15221233 NR Description: glycosyltransferase family [Arabidopsis thaliana]
  misc_feature (1)..(427): NCBI GI NO: 33114570 NR Description: glucosyltransferase 2 [Crocus sativus]
  misc_feature (1)..(395): NCBI GI NO: 15221232 NR Description: indole-3-acetate beta-glucosyltransferase -related
  misc_feature (1)..(434): NCBI GI NO: 28628183 NR Description: UDP-glucosyl transferase [Fragaria x ananassa]
MLQLGRRLAYHGLRPTLVATRYVLSTTPPPGAPFGVAAISDGCDAGGMASCPDMAEYVSRLAAVGSETLRELLLSEARAGRPVRVLVYDAHLAWARRVAQASGVAAAAFFSQPCAVDVVYGELWAGRLALPATDGRALLARGALGVELGPEDMPPFAAVPESQPTFLKVSVGQFEGLEDADDVLVNSFRDLEPKEVEYMELTWRAKMVGPTLPSFYLDDDRLPSNKSYGFDFFNGDALCMDWLEKQSNSSVVLVSYGTVSDYDATQLEELGNGLCNSGKPFLWVVRSNEEHKLSKELKEKCEEIGLIVSWCPQLEVLAHRAIGCFVTHCGWNSTLEALANGVPLVGIPHWADQPTIAKYVESAWSMGVRVRKDNNGYLKLEEVERCIREVMDIEKKDEYKRNAVKWMQKAKEAMQEGGSSDKNIAEFATKYSSI

SEQ ID NO: 18833 - protein, 387 aa, Triticum aestivum
  peptide (1)..(387): Ceres Seq. ID no. 15221773
  misc_feature (1)..(387): Pfam Name: Pfam Description:  UDP-glucoronosyl and UDP-glucosyl transferase
  misc_feature (1)..(386): NCBI GI NO: 38345012 NR Description: OSJNBa0052O21.15
  misc_feature (1)..(386): NCBI GI NO: 38345013 NR Description: OSJNBa0052O21.16
  misc_feature (1)..(386): NCBI GI NO: 38345011 NR Description: OSJNBa0052O21.14
  misc_feature (1)..(283): NCBI GI NO: 38345000 NR Description: OSJNBa0052O21.3
  misc_feature (1)..(276): NCBI GI NO: 38344998 NR Description: OSJNBa0052O21.1
  misc_feature (1)..(387): NCBI GI NO: 7385017 NR Description: UDP-glucose:salicylic acid glucosyltransferase
  misc_feature (1)..(384): NCBI GI NO: 15221233 NR Description: glycosyltransferase family [Arabidopsis thaliana]
  misc_feature (1)..(380): NCBI GI NO: 33114570 NR Description: glucosyltransferase 2 [Crocus sativus]
  misc_feature (1)..(348): NCBI GI NO: 15221232 NR Description: indole-3-acetate beta-glucosyltransferase -related
  misc_feature (1)..(387): NCBI GI NO: 28628183 NR Description: UDP-glucosyl transferase [Fragaria x ananassa]
MASCPDMAEYVSRLAAVGSETLRELLLSEARAGRPVRVLVYDAHLAWARRVAQASGVAAAAFFSQPCAVDVVYGELWAGRLALPATDGRALLARGALGVELGPEDMPPFAAVPESQPTFLKVSVGQFEGLEDADDVLVNSFRDLEPKEVEYMELTWRAKMVGPTLPSFYLDDDRLPSNKSYGFDFFNGDALCMDWLEKQSNSSVVLVSYGTVSDYDATQLEELGNGLCNSGKPFLWVVRSNEEHKLSKELKEKCEEIGLIVSWCPQLEVLAHRAIGCFVTHCGWNSTLEALANGVPLVGIPHWADQPTIAKYVESAWSMGVRVRKDNNGYLKLEEVERCIREVMDIEKKDEYKRNAVKWMQKAKEAMQEGGSSDKNIAEFATKYSSI

SEQ ID NO: 18834 - DNA, 1671 bp, Triticum aestivum
  misc_feature (1)..(1671): Ceres Seq. ID no. 13596090
agcgagtgagctcccacctccctccctcccctcctctctgctcccaccaccaaaccctccgatccaaaccctctctcacctcgcatgcggccgcgccccccgaggcggcggcgcagctgaccccttcccaccgccgctcccggagcccgccggcatgggcggggtcacgtccaccatcgccgcgcgcttcgccttcttcccgcccacgccgccctcctacacgctcgtcgccgacgcggccaccggccgcctcctcatccccgagatctcccggccccccgcgcgccgccggaggcgggacggcggcggggactcctcctcaggtgccgccgcagcagccgaggaggaggacgccacggaggtggtgcgcctccgcacgcgccgcgggaacgagatcgtcgccgtctacgtgcgccacgcgcgggcctccgccacgctgctctactcccacggcaacgccgccgacctcggccagatgtacggcctcttcgtcgagctcagccgccgcctccgcgtcaacattttcgggtatgattatgctggttatgggaggtctacagggaagcccactgagtataatacatatgcagacattgaagcagcatataactgcctcaaggaaaaatatggtgtgccagatgaggatataattttgtatggacaatctgttggaagtggtccaaccattgatcttgcttcacggttgccaaatttgcgagctgtggttcttcacagtcctattttatctggactgagagtgctatatccagtcaaaaaaactttttggtttgacatttacaagaatgtcgacaaaatcagcctggtgaattgtccagttcttgtcattcatggcacgtcagatgatgttgttgattggtcccatggaaagcagctatgggagctttgcaaggtgaaacattcgcctttgtggctaagtggcggtgggcactgcaaccttgagctgtatcctgactacatcaggcacttgaagaagtttgtgtcgagccttggcaaaaaatcaacgaaacctgacttgaaagagttaccagcaacagaagacacatctcgcaaagacgcagaatctgtgtcctcggacaaaccccaagaagctgcaaagtgccgacagatctcgcggaagagcttagatagtagagttgggaaatccaaaacggtggatgttcctgaaaagccacgaatgagctcagatgacgttgacaagtttaggaggagaagatgcttggtttggtgatctatgatatgacgtctgcacagttcatggagtagtttccgaacaccatggaatggggatcaagcaactgtgtcatactgtatagcgaggaacaacgccgacagttcccgcagtagagggataatagctgtgttaaatgtgggagaagaagaatgaggacgctggtgaataagctgttatttatcaaagagggtacgtctcaacgtggtaactttctcggttaattaacctgtattgcaacccccagtggtggtaggatttccatcatgtaaaagtgtaccgtgttattgtctgtaatcacgagggacaaggatagaacatttgcggccactttgcggcgcagtctaaagtcttggagcaatcacaagaagcaacatattctagtctggatatgcaaatatagtgttcatgaaaaaaaaaaa

SEQ ID NO: 18835 - protein, 415 aa, Triticum aestivum
  peptide (1)..(415): Ceres Seq. ID no. 13596091
  misc_feature (176)..(243): Pfam Name: Pfam Description:  alpha/beta hydrolase fold
  misc_feature (52)..(415): NCBI GI NO: 34911338 NR Description: P0519D04.38
  misc_feature (117)..(415): NCBI GI NO: 10177798 NR Description: emb|CAB87778
  misc_feature (52)..(91): NCBI GI NO: 10177798 NR Description: emb|CAB87778
  misc_feature (104)..(342): NCBI GI NO: 22330474 NR Description: expressed protein [Arabidopsis thaliana]
  misc_feature (52)..(91): NCBI GI NO: 22330474 NR Description: expressed protein [Arabidopsis thaliana]
  misc_feature (120)..(409): NCBI GI NO: 15233975 NR Description: expressed protein [Arabidopsis thaliana]
  misc_feature (52)..(86): NCBI GI NO: 15233975 NR Description: expressed protein [Arabidopsis thaliana]
  misc_feature (120)..(409): NCBI GI NO: 15232168 NR Description: expressed protein [Arabidopsis thaliana]
  misc_feature (52)..(86): NCBI GI NO: 15232168 NR Description: expressed protein [Arabidopsis thaliana]
  misc_feature (120)..(409): NCBI GI NO: 15241394 NR Description: expressed protein [Arabidopsis thaliana]
ASELPPPSLPSSLLPPPNPPIQTLSHLACGRAPRGGGAADPFPPPLPEPAGMGGVTSTIAARFAFFPPTPPSYTLVADAATGRLLIPEISRPPARRRRRDGGGDSSSGAAAAAEEEDATEVVRLRTRRGNEIVAVYVRHARASATLLYSHGNAADLGQMYGLFVELSRRLRVNIFGYDYAGYGRSTGKPTEYNTYADIEAAYNCLKEKYGVPDEDIILYGQSVGSGPTIDLASRLPNLRAVVLHSPILSGLRVLYPVKKTFWFDIYKNVDKISLVNCPVLVIHGTSDDVVDWSHGKQLWELCKVKHSPLWLSGGGHCNLELYPDYIRHLKKFVSSLGKKSTKPDLKELPATEDTSRKDAESVSSDKPQEAAKCRQISRKSLDSRVGKSKTVDVPEKPRMSSDDVDKFRRRRCLVW

SEQ ID NO: 18836 - protein, 364 aa, Triticum aestivum
  peptide (1)..(364): Ceres Seq. ID no. 13596092
  misc_feature (125)..(192): Pfam Name: Pfam Description:  alpha/beta hydrolase fold
  misc_feature (1)..(364): NCBI GI NO: 34911338 NR Description: P0519D04.38
  misc_feature (66)..(364): NCBI GI NO: 10177798 NR Description: emb|CAB87778
  misc_feature (1)..(40): NCBI GI NO: 10177798 NR Description: emb|CAB87778
  misc_feature (53)..(291): NCBI GI NO: 22330474 NR Description: expressed protein [Arabidopsis thaliana]
  misc_feature (1)..(40): NCBI GI NO: 22330474 NR Description: expressed protein [Arabidopsis thaliana]
  misc_feature (69)..(358): NCBI GI NO: 15233975 NR Description: expressed protein [Arabidopsis thaliana]
  misc_feature (1)..(35): NCBI GI NO: 15233975 NR Description: expressed protein [Arabidopsis thaliana]
  misc_feature (69)..(358): NCBI GI NO: 15232168 NR Description: expressed protein [Arabidopsis thaliana]
  misc_feature (1)..(35): NCBI GI NO: 15232168 NR Description: expressed protein [Arabidopsis thaliana]
  misc_feature (69)..(358): NCBI GI NO: 15241394 NR Description: expressed protein [Arabidopsis thaliana]
MGGVTSTIAARFAFFPPTPPSYTLVADAATGRLLIPEISRPPARRRRRDGGGDSSSGAAAAAEEEDATEVVRLRTRRGNEIVAVYVRHARASATLLYSHGNAADLGQMYGLFVELSRRLRVNIFGYDYAGYGRSTGKPTEYNTYADIEAAYNCLKEKYGVPDEDIILYGQSVGSGPTIDLASRLPNLRAVVLHSPILSGLRVLYPVKKTFWFDIYKNVDKISLVNCPVLVIHGTSDDVVDWSHGKQLWELCKVKHSPLWLSGGGHCNLELYPDYIRHLKKFVSSLGKKSTKPDLKELPATEDTSRKDAESVSSDKPQEAAKCRQISRKSLDSRVGKSKTVDVPEKPRMSSDDVDKFRRRRCLVW

SEQ ID NO: 18837 - protein, 257 aa, Triticum aestivum
  peptide (1)..(257): Ceres Seq. ID no. 13596093
  misc_feature (18)..(85): Pfam Name: Pfam Description:  alpha/beta hydrolase fold
  misc_feature (1)..(257): NCBI GI NO: 34911338 NR Description: P0519D04.38
  misc_feature (1)..(257): NCBI GI NO: 10177798 NR Description: emb|CAB87778
  misc_feature (1)..(184): NCBI GI NO: 22330474 NR Description: expressed protein [Arabidopsis thaliana]
  misc_feature (1)..(251): NCBI GI NO: 15233975 NR Description: expressed protein [Arabidopsis thaliana]
  misc_feature (1)..(251): NCBI GI NO: 15232168 NR Description: expressed protein [Arabidopsis thaliana]
  misc_feature (1)..(251): NCBI GI NO: 15241394 NR Description: expressed protein [Arabidopsis thaliana]
  misc_feature (1)..(244): NCBI GI NO: 15230760 NR Description: hypothetical protein [Arabidopsis thaliana]
  misc_feature (1)..(244): NCBI GI NO: 15240861 NR Description: expressed protein [Arabidopsis thaliana]
  misc_feature (1)..(184): NCBI GI NO: 25404647 NR Description: hypothetical protein T4O24.3
  misc_feature (1)..(256): NCBI GI NO: 9802758 NR Description: Hypothetical protein [Arabidopsis thaliana]
MYGLFVELSRRLRVNIFGYDYAGYGRSTGKPTEYNTYADIEAAYNCLKEKYGVPDEDIILYGQSVGSGPTIDLASRLPNLRAVVLHSPILSGLRVLYPVKKTFWFDIYKNVDKISLVNCPVLVIHGTSDDVVDWSHGKQLWELCKVKHSPLWLSGGGHCNLELYPDYIRHLKKFVSSLGKKSTKPDLKELPATEDTSRKDAESVSSDKPQEAAKCRQISRKSLDSRVGKSKTVDVPEKPRMSSDDVDKFRRRRCLVW

SEQ ID NO: 18838 - DNA, 1861 bp, Triticum aestivum
  misc_feature (1)..(1861): Ceres Seq. ID no. 13654166
aaactcgcttcccaatcccagctccttttatctatctatctattctgaggtgaggggtggggaggaggggattggctgcctgcaagcaatggcggtcaatgaggaggaggaggggacttcgccgctgctgatcaaggcggagcgccggcaccacccgggctgcccgggctgcgaccacgaccggaggaaggagctccgcaccgggctaccttacaaggaattctcctacgtctggatgatctgtcttaccaccgctttaccaatatcgtcactgttccccttcttgtatttcatgataagagacttgcatgttgcaaaaagaacagaagatattgggttctatgctgggtttgtaggtgcttcttttatgtttggtagatgtttgacttcaactctttggggaatagcagcagatcgtattgggaggaagcctgttgttgtgtttggcattctctctgtggtgatatttaatactttgtttgggcttagcgtcacctattggatggcaatagctacaaggtttctccttggcgctttaaatggcttacttggaccaatgaaggcttatgctattgaagtttgccgacctgaacatgaacctctagcactatcacttgtcagcacggcatggggaataggtctcatcattggtcctgctcttggaggctaccttgcactgcctgcagagaaatacccaaatatattttcacctgactcattatttggaaggttcccgtacttcttaccatgcttgtgcacatcagtctttgctgccattgttctgataagctgcatatggatgccggagacgttacacaagcataaagtcagtgatgatggaaatcaaagtgttgaagctttggaggcccatctgattgatccaaaagaggaggttggacaaagtaatagttcgaataccaagaagagcttattcaagaattggccattgatgtcatctataattgtttattgcgtcttctccttccacgatatggcttatacagaggtgttctctctatgggctgaaagtgacaggaagtatggtggactgagtttatcatctgaagatgtaggtcaaacacttgcaattacaggtgccagtcttcttgtgtatcaactatttatgtacccatccatcattaaagttcttggacctatcaaatcttctcagatcgcagctgttctgtgcatacctattctctttgcctacccctatatgacgtacctgtcaggacctggattatcgatcgtactgaatattgcatcagtcataaaaaataatcttggtgttactatcatcacaggcactttcatccttcaaaacaatgccgtgcctcagaaccaaagaggagcagcaaatggattagccatgactggaatgtcctttttcaaggcagttgcccctgcaggtgccggcattgtgttctcgtgggcgcagaaacgccagcatgctttcttctttccaggtgatcagatggtgttctttctgctaaacatcatcgagctccttggacttgtcctcacattcagacccttcctggccgtgccagagcagtatgaaagaaattagtctttattattatagaattttgtggattgttaatgagacgatgacgactcatgcggccccgcagctgcgaggagctcaagggcgcccttgcaccaggataagaggtgattacctgtacttgtgtgtaacatctatgttgtagcagcatctcagagtggaaggtggtgcatatatacatgtttgtctggtatatagatggtggtggccagttaagttggttgtttgccattagttaggtagcaacatttgtaaaactactgtacaatgcaagagactgtactagctgggaag

SEQ ID NO: 18839 - protein, 522 aa, Triticum aestivum
  peptide (1)..(522): Ceres Seq. ID no. 15219623
  misc_feature (46)..(520): NCBI GI NO: 23452823 NR Description: major facilitator superfamily antiporter
  misc_feature (47)..(518): NCBI GI NO: 30684565 NR Description: transporter-related protein [Arabidopsis thaliana]
  misc_feature (36)..(513): NCBI GI NO: 22326785 NR Description: transporter - related [Arabidopsis thaliana]
  misc_feature (40)..(517): NCBI GI NO: 23452821 NR Description: major facilitator superfamily antiporter
  misc_feature (63)..(513): NCBI GI NO: 20260160 NR Description: transporter-like protein [Arabidopsis thaliana]
  misc_feature (63)..(490): NCBI GI NO: 10177340 NR Description: transporter-like protein [Arabidopsis thaliana]
  misc_feature (123)..(521): NCBI GI NO: 23452819 NR Description: major facilitator superfamily antiporter
  misc_feature (35)..(514): NCBI GI NO: 15229781 NR Description: transporter - related [Arabidopsis thaliana]
  misc_feature (123)..(518): NCBI GI NO: 30684567 NR Description: transporter-related protein [Arabidopsis thaliana]
  misc_feature (123)..(518): NCBI GI NO: 21555230 NR Description: transporter-like protein [Arabidopsis thaliana]
NSLPNPSSFYLSIYSEVRGGEEGIGCLQAMAVNEEEEGTSPLLIKAERRHHPGCPGCDHDRRKELRTGLPYKEFSYVWMICLTTALPISSLFPFLYFMIRDLHVAKRTEDIGFYAGFVGASFMFGRCLTSTLWGIAADRIGRKPVVVFGILSVVIFNTLFGLSVTYWMAIATRFLLGALNGLLGPMKAYAIEVCRPEHEPLALSLVSTAWGIGLIIGPALGGYLALPAEKYPNIFSPDSLFGRFPYFLPCLCTSVFAAIVLISCIWMPETLHKHKVSDDGNQSVEALEAHLIDPKEEVGQSNSSNTKKSLFKNWPLMSSIIVYCVFSFHDMAYTEVFSLWAESDRKYGGLSLSSEDVGQTLAITGASLLVYQLFMYPSIIKVLGPIKSSQIAAVLCIPILFAYPYMTYLSGPGLSIVLNIASVIKNNLGVTIITGTFILQNNAVPQNQRGAANGLAMTGMSFFKAVAPAGAGIVFSWAQKRQHAFFFPGDQMVFFLLNIIELLGLVLTFRPFLAVPEQYERN

SEQ ID NO: 18840 - protein, 493 aa, Triticum aestivum
  peptide (1)..(493): Ceres Seq. ID no. 15219624
  misc_feature (17)..(491): NCBI GI NO: 23452823 NR Description: major facilitator superfamily antiporter
  misc_feature (18)..(489): NCBI GI NO: 30684565 NR Description: transporter-related protein [Arabidopsis thaliana]
  misc_feature (7)..(484): NCBI GI NO: 22326785 NR Description: transporter - related [Arabidopsis thaliana]
  misc_feature (11)..(488): NCBI GI NO: 23452821 NR Description: major facilitator superfamily antiporter
  misc_feature (34)..(484): NCBI GI NO: 20260160 NR Description: transporter-like protein [Arabidopsis thaliana]
  misc_feature (34)..(461): NCBI GI NO: 10177340 NR Description: transporter-like protein [Arabidopsis thaliana]
  misc_feature (94)..(492): NCBI GI NO: 23452819 NR Description: major facilitator superfamily antiporter
  misc_feature (6)..(485): NCBI GI NO: 15229781 NR Description: transporter - related [Arabidopsis thaliana]
  misc_feature (94)..(489): NCBI GI NO: 30684567 NR Description: transporter-related protein [Arabidopsis thaliana]
  misc_feature (94)..(489): NCBI GI NO: 21555230 NR Description: transporter-like protein [Arabidopsis thaliana]
MAVNEEEEGTSPLLIKAERRHHPGCPGCDHDRRKELRTGLPYKEFSYVWMICLTTALPISSLFPFLYFMIRDLHVAKRTEDIGFYAGFVGASFMFGRCLTSTLWGIAADRIGRKPVVVFGILSVVIFNTLFGLSVTYWMAIATRFLLGALNGLLGPMKAYAIEVCRPEHEPLALSLVSTAWGIGLIIGPALGGYLALPAEKYPNIFSPDSLFGRFPYFLPCLCTSVFAAIVLISCIWMPETLHKHKVSDDGNQSVEALEAHLIDPKEEVGQSNSSNTKKSLFKNWPLMSSIIVYCVFSFHDMAYTEVFSLWAESDRKYGGLSLSSEDVGQTLAITGASLLVYQLFMYPSIIKVLGPIKSSQIAAVLCIPILFAYPYMTYLSGPGLSIVLNIASVIKNNLGVTIITGTFILQNNAVPQNQRGAANGLAMTGMSFFKAVAPAGAGIVFSWAQKRQHAFFFPGDQMVFFLLNIIELLGLVLTFRPFLAVPEQYERN

SEQ ID NO: 18841 - protein, 444 aa, Triticum aestivum
  peptide (1)..(444): Ceres Seq. ID no. 15219625
  misc_feature (1)..(442): NCBI GI NO: 23452823 NR Description: major facilitator superfamily antiporter
  misc_feature (1)..(440): NCBI GI NO: 30684565 NR Description: transporter-related protein [Arabidopsis thaliana]
  misc_feature (1)..(435): NCBI GI NO: 22326785 NR Description: transporter - related [Arabidopsis thaliana]
  misc_feature (1)..(439): NCBI GI NO: 23452821 NR Description: major facilitator superfamily antiporter
  misc_feature (1)..(435): NCBI GI NO: 20260160 NR Description: transporter-like protein [Arabidopsis thaliana]
  misc_feature (1)..(412): NCBI GI NO: 10177340 NR Description: transporter-like protein [Arabidopsis thaliana]
  misc_feature (45)..(443): NCBI GI NO: 23452819 NR Description: major facilitator superfamily antiporter
  misc_feature (1)..(436): NCBI GI NO: 15229781 NR Description: transporter - related [Arabidopsis thaliana]
  misc_feature (45)..(440): NCBI GI NO: 30684567 NR Description: transporter-related protein [Arabidopsis thaliana]
  misc_feature (45)..(440): NCBI GI NO: 21555230 NR Description: transporter-like protein [Arabidopsis thaliana]
MICLTTALPISSLFPFLYFMIRDLHVAKRTEDIGFYAGFVGASFMFGRCLTSTLWGIAADRIGRKPVVVFGILSVVIFNTLFGLSVTYWMAIATRFLLGALNGLLGPMKAYAIEVCRPEHEPLALSLVSTAWGIGLIIGPALGGYLALPAEKYPNIFSPDSLFGRFPYFLPCLCTSVFAAIVLISCIWMPETLHKHKVSDDGNQSVEALEAHLIDPKEEVGQSNSSNTKKSLFKNWPLMSSIIVYCVFSFHDMAYTEVFSLWAESDRKYGGLSLSSEDVGQTLAITGASLLVYQLFMYPSIIKVLGPIKSSQIAAVLCIPILFAYPYMTYLSGPGLSIVLNIASVIKNNLGVTIITGTFILQNNAVPQNQRGAANGLAMTGMSFFKAVAPAGAGIVFSWAQKRQHAFFFPGDQMVFFLLNIIELLGLVLTFRPFLAVPEQYERN

SEQ ID NO: 18842 - DNA, 858 bp, Triticum aestivum
  misc_feature (1)..(858): Ceres Seq. ID no. 13590249
attaaaaggtggccgccgccgccgcccacccccaccacacacagagagaacacacgcaaggagcacgaggaggaggcaagggaagccgccgccgccgccccgtccctcctcgccggcccgccgcgacaggtttcaagatgtcaacctgcacgtttgcgacctcctgcgtgctcttgggcaatgctcgaacaaccgatgccccccagaaagcggtcaagagccgcctgagcttccttggccgaggcgccgtgcaggtgccgagcctgaggtcctcctctttcaagaagctggacgtctccgcggcggccacgtacaaggtgaagctggtgaccccggagggggacgagcacgagtttgaggcgccggacgacacctacatcctggactcggcggagacggcgggggtggagctgccctactcgtgccgggcgggggcatgctcgacctgcgcgggcaagattgaggcgggcgcggtggaccagtcggacgggtcgttcctggacgacgcgcagcaggagggctacgtgctgacgtgcgtcgcctaccccaagtcggactgcgtcatccacacccacaaggagggggacctgtattagggggcgtgccgtgctccgcccacatctctggtgccagttggttgtgtgttgggtagaagaagaaggtgtgtctgtctgtaaaaccttgatggttgtttatccccttcctggctgctgcctgtgtgcgtgcgtgctttggtcgttggtcggaggtggttaagattgttgggtgaagccactacacccacggatggagaaggcgaataaaatgagggaacagctcgctgtgactgtgacggcattataaagcggtttcatggtc

SEQ ID NO: 18843 - protein, 152 aa, Triticum aestivum
  peptide (1)..(152): Ceres Seq. ID no. 13590250
  misc_feature (64)..(139): Pfam Name: Pfam Description:  2Fe-2S iron-sulfur cluster binding domain
  misc_feature (1)..(152): NCBI GI NO: 40714664 NR Description: putative ferredoxin
  misc_feature (1)..(152): NCBI GI NO: 119958 NR Description: Ferredoxin III, chloroplast precursor (Fd III)
  misc_feature (17)..(152): NCBI GI NO: 3023750 NR Description: Ferredoxin VI, chloroplast precursor (Fd VI)
  misc_feature (1)..(152): NCBI GI NO: 13182955 NR Description: ferredoxin [Impatiens balsamina]
  misc_feature (59)..(152): NCBI GI NO: 6688560 NR Description: putative ferredoxin [Lycopersicon esculentum]
  misc_feature (1)..(152): NCBI GI NO: 7430754 NR Description: ferredoxin [2Fe-2S], root - rice
  misc_feature (1)..(152): NCBI GI NO: 19569591 NR Description: ferredoxin precursor [Triticum aestivum]
  misc_feature (1)..(151): NCBI GI NO: 2129915 NR Description: ferredoxin
  misc_feature (56)..(152): NCBI GI NO: 119934 NR Description: Ferredoxin, root R-B1
  misc_feature (56)..(152): NCBI GI NO: 15225888 NR Description: ferredoxin, putative [Arabidopsis thaliana]
MSTCTFATSCVLLGNARTTDAPQKAVKSRLSFLGRGAVQVPSLRSSSFKKLDVSAAATYKVKLVTPEGDEHEFEAPDDTYILDSAETAGVELPYSCRAGACSTCAGKIEAGAVDQSDGSFLDDAQQEGYVLTCVAYPKSDCVIHTHKEGDLY

SEQ ID NO: 18844 - protein, 118 aa, Triticum aestivum
  peptide (1)..(118): Ceres Seq. ID no. 13590251
LKGGRRRRPPPPHTERTHARSTRRRQGKPPPPPRPSSPARRDRFQDVNLHVCDLLRALGQCSNNRCPPESGQEPPELPWPRRRAGAEPEVLLFQEAGRLRGGHVQGEAGDPGGGRARV

SEQ ID NO: 18845 - DNA, 1306 bp, Triticum aestivum
  misc_feature (1)..(1306): Ceres Seq. ID no. 12613953
ataaaatcctccccgttccatctcggccctcttctctcccaaccctcccccccttcaccgccgccgccacccccccgccgcgagctccgccgccccaatctccccgcggcagccatggcgaacatgcaggagtcgctcgccctggtgggcacgatgcgcggccacaacgacgtggtgacggcgatcgccgcgccgatcgacaactcgccctacatcgtgtccggctcccgcgacaagtcgctgctggtctgggacctcaccaacccggtgccgtccctcggcgacggcaccgtcggcaccgactacgccgtgcccttccgccgcctcaccggccacggccacttcgtccaggacgtggtcatcagctccgacggccagttcgcgctctccggctcctgggacggcgagctccgcctctgggacctctccaccggcctcaccacccgccgcttcgtcggccacaccaaggacgtcatctcggtcgccttctccgtcgacaaccgccagatcgtctccgcctcccgcgacaacaccatcaagctctggaacaccctcggcgagtgcaagtacaccatcggcggcgacatgggcggcggcgagggccacaccggctgggtctcgtgcgtcaggttctcccccaacatccagcagcccaccatcgtctccggctcctgggacaagaccgtcaaggtctggaatctcaccaactgcaagctccgctccaccctcgccggccacggtggctacgtgaacgccgtcgccgtcagccccgatggctcgctctgcgcctccggcggcaaggacggcgtcacgctgctctgggacctgtccgaggggaagaggctgtaccagctggaagccggctccatcatccatgcgctctgcttctcgcccaaccgctactggctctgcgctgcgacagaggaatctgtcaagatctgggacctcgagtccaagcatgtcgtgcaggacctcaagccagaagtgcaggtctccaagaaccagatgctgtactgcacaagcttgagctggagcgcggacggaagcaccctctacaccggatacaccgacgggaccatcagggtcttcaagatccaagccgggttcgccggatacgcgtaggggtcttgctggccagagaggttgtaatgcccgtcaagtttttgactgttctgaggcaacattgtctgcctggtactttcagcttgagttactgtttactttctgcttaggtgatttgttgatgagcacattatgaggtactatggaagacgatccgtttcgcaccagggtttttgctgctttc

SEQ ID NO: 18846 - protein, 409 aa, Triticum aestivum
  peptide (1)..(409): Ceres Seq. ID no. 12613954
KILPVPSRPSSLPTLPPFTAAATPPPRAPPPQSPRGSHGEHAGVARPGGHDARPQRRGDGDRRADRQLALHRVRLPRQVAAGLGPHQPGAVPRRRHRRHRLRRALPPPHRPRPLRPGRGHQLRRPVRALRLLGRRAPPLGPLHRPHHPPLRRPHQGRHLGRLLRRQPPDRLRLPRQHHQALEHPRRVQVHHRRRHGRRRGPHRLGLVRQVLPQHPAAHHRLRLLGQDRQGLESHQLQAPLHPRRPRWLRERRRRQPRWLALRLRRQGRRHAALGPVRGEEAVPAGSRLHHPCALLLAQPLLALRCDRGICQDLGPRVQACRAGPQARSAGLQEPDAVLHKLELERGRKHPLHRIHRRDHQGLQDPSRVRRIRVGVLLAREVVMPVKFLTVLRQHCLPGTFSLSYCLLSA

SEQ ID NO: 18847 - protein, 373 aa, Triticum aestivum
  peptide (1)..(373): Ceres Seq. ID no. 12613955
  misc_feature (39)..(373): NCBI GI NO: 34911282 NR Description: guanine nucleotide-binding protein beta subujit-like protein
  misc_feature (43)..(365): NCBI GI NO: 4589836 NR Description: LeArcA2 protein [Lycopersicon esculentum]
  misc_feature (43)..(365): NCBI GI NO: 7446126 NR Description: GTP-binding protein beta chain homolog
  misc_feature (42)..(365): NCBI GI NO: 3023847 NR Description: GUANINE NUCLEOTIDE-BINDING PROTEIN BETA SUBUNIT-LIKE PROTEIN
  misc_feature (43)..(365): NCBI GI NO: 4589834 NR Description: LeArcA1 protein [Lycopersicon esculentum]
  misc_feature (42)..(365): NCBI GI NO: 15220941 NR Description: G-protein beta family; protein id: At1g18080
  misc_feature (42)..(365): NCBI GI NO: 3023858 NR Description: GUANINE NUCLEOTIDE-BINDING PROTEIN BETA SUBUNIT-LIKE PROTEIN
  misc_feature (42)..(365): NCBI GI NO: 2289095 NR Description: WD-40 repeat protein [Arabidopsis thaliana]
  misc_feature (43)..(365): NCBI GI NO: 1346110 NR Description: GUANINE NUCLEOTIDE-BINDING PROTEIN BETA SUBUNIT-LIKE PROTEIN
  misc_feature (42)..(365): NCBI GI NO: 3023857 NR Description: GUANINE NUCLEOTIDE-BINDING PROTEIN BETA SUBUNIT-LIKE PROTEIN
IKSSPFHLGPLLSQPSPPSPPPPPPRRELRRPNLPAAAMANMQESLALVGTMRGHNDVVTAIAAPIDNSPYIVSGSRDKSLLVWDLTNPVPSLGDGTVGTDYAVPFRRLTGHGHFVQDVVISSDGQFALSGSWDGELRLWDLSTGLTTRRFVGHTKDVISVAFSVDNRQIVSASRDNTIKLWNTLGECKYTIGGDMGGGEGHTGWVSCVRFSPNIQQPTIVSGSWDKTVKVWNLTNCKLRSTLAGHGGYVNAVAVSPDGSLCASGGKDGVTLLWDLSEGKRLYQLEAGSIIHALCFSPNRYWLCAATEESVKIWDLESKHVVQDLKPEVQVSKNQMLYCTSLSWSADGSTLYTGYTDGTIRVFKIQAGFAGYA

SEQ ID NO: 18848 - protein, 335 aa, Triticum aestivum
  peptide (1)..(335): Ceres Seq. ID no. 12613956
  misc_feature (1)..(335): NCBI GI NO: 34911282 NR Description: guanine nucleotide-binding protein beta subujit-like protein
  misc_feature (5)..(327): NCBI GI NO: 4589836 NR Description: LeArcA2 protein [Lycopersicon esculentum]
  misc_feature (5)..(327): NCBI GI NO: 7446126 NR Description: GTP-binding protein beta chain homolog
  misc_feature (4)..(327): NCBI GI NO: 3023847 NR Description: GUANINE NUCLEOTIDE-BINDING PROTEIN BETA SUBUNIT-LIKE PROTEIN
  misc_feature (5)..(327): NCBI GI NO: 4589834 NR Description: LeArcA1 protein [Lycopersicon esculentum]
  misc_feature (4)..(327): NCBI GI NO: 15220941 NR Description: G-protein beta family; protein id: At1g18080
  misc_feature (4)..(327): NCBI GI NO: 3023858 NR Description: GUANINE NUCLEOTIDE-BINDING PROTEIN BETA SUBUNIT-LIKE PROTEIN
  misc_feature (4)..(327): NCBI GI NO: 2289095 NR Description: WD-40 repeat protein [Arabidopsis thaliana]
  misc_feature (5)..(327): NCBI GI NO: 1346110 NR Description: GUANINE NUCLEOTIDE-BINDING PROTEIN BETA SUBUNIT-LIKE PROTEIN
  misc_feature (4)..(327): NCBI GI NO: 3023857 NR Description: GUANINE NUCLEOTIDE-BINDING PROTEIN BETA SUBUNIT-LIKE PROTEIN
MANMQESLALVGTMRGHNDVVTAIAAPIDNSPYIVSGSRDKSLLVWDLTNPVPSLGDGTVGTDYAVPFRRLTGHGHFVQDVVISSDGQFALSGSWDGELRLWDLSTGLTTRRFVGHTKDVISVAFSVDNRQIVSASRDNTIKLWNTLGECKYTIGGDMGGGEGHTGWVSCVRFSPNIQQPTIVSGSWDKTVKVWNLTNCKLRSTLAGHGGYVNAVAVSPDGSLCASGGKDGVTLLWDLSEGKRLYQLEAGSIIHALCFSPNRYWLCAATEESVKIWDLESKHVVQDLKPEVQVSKNQMLYCTSLSWSADGSTLYTGYTDGTIRVFKIQAGFAGYA

SEQ ID NO: 18849 - DNA, 1869 bp, Triticum aestivum
  misc_feature (1)..(1869): Ceres Seq. ID no. 12614124
caacacacatcatccaatcaacgcacatcacttcctcttataacacagttaaccatggataaggcatacattgccatcctctccttcgccttcctcttcctgatccactacattctaggcaaggtcaccaatggcaggcacagcaagggcgccgtccagctgccgccgagcccccgggccatcccgttcctcggccacctccacctcctggagaagccgttccacgccgctctgtgcggcctcgccaagcgcctcggccccgtcttctcgctgcgcctcggctcgcgccgcgcggtggtggtgtcctcgccggagtgcgccagggagtgcttcacggagcacgacgtgatcttcgccgaccggccccagttcccctcgcagctgctcgtgtccttcgacggcatcgcgctctccacgtccagctacggcccgcactggcgcaacctccgtcgcgtcgccgccgtgcagctgctctctgcgcaccgcgtcgcctgcatgtcgggcgtgatcgggggcgaggtgcgcgccatggcgcgccggcttttccgggccgccgcggcgtcccccgacggcgccgcgcgggtcgagctgaagcggaggctcttcgagctctccctcagcgtgctcatggagaccatcgcccagaccaaggggacccggccggaggccgacgccgacacggacatgtccctggaggcccaggagttcaagaaggtggtggacgagatcatcccgcacatcggcgccgccaacctgtgggactacctgccggtgctgcggtggttcgacgtgttcggagtgaggaacaagatccttgccgcggtgagcaggagggacgccttcatgctgcatctcatcgacaacgagcgccggaggcttgacgatggcggcgccgaaggcgacaagaagagcatgatcgccgtgctgctcactctgcagaagacggagccagaggtgtacaccgataccatgatcatggctctctgcgcgaatttattcggggctggaacggagaccacgtcgacgacgacggagtgggcgatgtcgctgctgctgaaccacccggcggccctcaaagaggcgcaggccgagatcgacgcggccgtggggacctcccggctggtgaccgccgacgacgtgccccggctggcctacctgcagtgcatcgtgagcgagacgctgcggctgtacccggcggcaccgatgctgctgccgcaccagtcctcggctgactgcaaggtcggcggctacaacgtgccgagcggcacgatgctgatggtgaacgcgtacgccatccaccgggacccggcggcgtgggagcggccgctggagttcgtcccggagcggttcgaggacgggaaggccgaggggcggttcatgatcccgttcgggatgggccggcggcggtgccccggagagacgctggcgctgcggactatcggcatggtgctggccacgctggtgcagtgcttcgactgggagcgcgtggacggcgcggaggtggacatgacggagggcggcgggctcaccatccccaaggccgtgccgctcgaggccgtgtgcaggccgcgcccggccatgcgcgacgtgcttgagagcctctgatctgacaatccaacttcgttcttggcatcataaaatgcatggactggtggcgtgctgatgtagtagtaaataaagtcgtgacccttgtgtgagcagagtcaagctagctatcatcctatgcagtaaattacaggtaagtgtcggggttttgtgagaactagctaaactatctaggtagcgctcgtggatcgtgatagtaccaagccagcaatttgtaatttagtttgtatcaagaatgttgtgtatgggataacaaattatttc

SEQ ID NO: 18850 - protein, 534 aa, Triticum aestivum
  peptide (1)..(534): Ceres Seq. ID no. 12614125
  misc_feature (19)..(534): NCBI GI NO: 13661746 NR Description: putative cytochrome P450 [Lolium rigidum]
  misc_feature (19)..(534): NCBI GI NO: 13661744 NR Description: putative cytochrome P450 [Lolium rigidum]
  misc_feature (19)..(534): NCBI GI NO: 13661748 NR Description: putative cytochrome P450 [Lolium rigidum]
  misc_feature (5)..(534): NCBI GI NO: 14488353 NR Description: putative cytochrome P450
  misc_feature (19)..(534): NCBI GI NO: 14488373 NR Description: putative cytochrome P450
  misc_feature (19)..(531): NCBI GI NO: 14488358 NR Description: putative cytochrome P450
  misc_feature (19)..(534): NCBI GI NO: 14488355 NR Description: putative cytochrome P450
  misc_feature (55)..(534): NCBI GI NO: 38344454 NR Description: OSJNBa0017P10.2
  misc_feature (13)..(534): NCBI GI NO: 3059131 NR Description: cytochrome P450 [Helianthus tuberosus]
  misc_feature (19)..(534): NCBI GI NO: 7430635 NR Description: cytochrome P450 (EC 1
QHTSSNQRTSLPLITQLTMDKAYIAILSFAFLFLIHYILGKVTNGRHSKGAVQLPPSPRAIPFLGHLHLLEKPFHAALCGLAKRLGPVFSLRLGSRRAVVVSSPECARECFTEHDVIFADRPQFPSQLLVSFDGIALSTSSYGPHWRNLRRVAAVQLLSAHRVACMSGVIGGEVRAMARRLFRAAAASPDGAARVELKRRLFELSLSVLMETIAQTKGTRPEADADTDMSLEAQEFKKVVDEIIPHIGAANLWDYLPVLRWFDVFGVRNKILAAVSRRDAFMLHLIDNERRRLDDGGAEGDKKSMIAVLLTLQKTEPEVYTDTMIMALCANLFGAGTETTSTTTEWAMSLLLNHPAALKEAQAEIDAAVGTSRLVTADDVPRLAYLQCIVSETLRLYPAAPMLLPHQSSADCKVGGYNVPSGTMLMVNAYAIHRDPAAWERPLEFVPERFEDGKAEGRFMIPFGMGRRRCPGETLALRTIGMVLATLVQCFDWERVDGAEVDMTEGGGLTIPKAVPLEAVCRPRPAMRDVLESL

SEQ ID NO: 18851 - protein, 516 aa, Triticum aestivum
  peptide (1)..(516): Ceres Seq. ID no. 12614126
  misc_feature (1)..(516): NCBI GI NO: 13661746 NR Description: putative cytochrome P450 [Lolium rigidum]
  misc_feature (1)..(516): NCBI GI NO: 13661744 NR Description: putative cytochrome P450 [Lolium rigidum]
  misc_feature (1)..(516): NCBI GI NO: 13661748 NR Description: putative cytochrome P450 [Lolium rigidum]
  misc_feature (1)..(516): NCBI GI NO: 14488353 NR Description: putative cytochrome P450
  misc_feature (1)..(516): NCBI GI NO: 14488373 NR Description: putative cytochrome P450
  misc_feature (1)..(513): NCBI GI NO: 14488358 NR Description: putative cytochrome P450
  misc_feature (1)..(516): NCBI GI NO: 14488355 NR Description: putative cytochrome P450
  misc_feature (37)..(516): NCBI GI NO: 38344454 NR Description: OSJNBa0017P10.2
  misc_feature (1)..(516): NCBI GI NO: 3059131 NR Description: cytochrome P450 [Helianthus tuberosus]
  misc_feature (1)..(516): NCBI GI NO: 7430635 NR Description: cytochrome P450 (EC 1
MDKAYIAILSFAFLFLIHYILGKVTNGRHSKGAVQLPPSPRAIPFLGHLHLLEKPFHAALCGLAKRLGPVFSLRLGSRRAVVVSSPECARECFTEHDVIFADRPQFPSQLLVSFDGIALSTSSYGPHWRNLRRVAAVQLLSAHRVACMSGVIGGEVRAMARRLFRAAAASPDGAARVELKRRLFELSLSVLMETIAQTKGTRPEADADTDMSLEAQEFKKVVDEIIPHIGAANLWDYLPVLRWFDVFGVRNKILAAVSRRDAFMLHLIDNERRRLDDGGAEGDKKSMIAVLLTLQKTEPEVYTDTMIMALCANLFGAGTETTSTTTEWAMSLLLNHPAALKEAQAEIDAAVGTSRLVTADDVPRLAYLQCIVSETLRLYPAAPMLLPHQSSADCKVGGYNVPSGTMLMVNAYAIHRDPAAWERPLEFVPERFEDGKAEGRFMIPFGMGRRRCPGETLALRTIGMVLATLVQCFDWERVDGAEVDMTEGGGLTIPKAVPLEAVCRPRPAMRDVLESL

SEQ ID NO: 18852 - protein, 369 aa, Triticum aestivum
  peptide (1)..(369): Ceres Seq. ID no. 12614127
  misc_feature (1)..(369): NCBI GI NO: 13661746 NR Description: putative cytochrome P450 [Lolium rigidum]
  misc_feature (1)..(369): NCBI GI NO: 13661744 NR Description: putative cytochrome P450 [Lolium rigidum]
  misc_feature (1)..(369): NCBI GI NO: 13661748 NR Description: putative cytochrome P450 [Lolium rigidum]
  misc_feature (1)..(369): NCBI GI NO: 14488353 NR Description: putative cytochrome P450
  misc_feature (1)..(369): NCBI GI NO: 14488373 NR Description: putative cytochrome P450
  misc_feature (1)..(366): NCBI GI NO: 14488358 NR Description: putative cytochrome P450
  misc_feature (1)..(369): NCBI GI NO: 14488355 NR Description: putative cytochrome P450
  misc_feature (1)..(369): NCBI GI NO: 38344454 NR Description: OSJNBa0017P10.2
  misc_feature (1)..(369): NCBI GI NO: 3059131 NR Description: cytochrome P450 [Helianthus tuberosus]
  misc_feature (1)..(369): NCBI GI NO: 7430635 NR Description: cytochrome P450 (EC 1
MSGVIGGEVRAMARRLFRAAAASPDGAARVELKRRLFELSLSVLMETIAQTKGTRPEADADTDMSLEAQEFKKVVDEIIPHIGAANLWDYLPVLRWFDVFGVRNKILAAVSRRDAFMLHLIDNERRRLDDGGAEGDKKSMIAVLLTLQKTEPEVYTDTMIMALCANLFGAGTETTSTTTEWAMSLLLNHPAALKEAQAEIDAAVGTSRLVTADDVPRLAYLQCIVSETLRLYPAAPMLLPHQSSADCKVGGYNVPSGTMLMVNAYAIHRDPAAWERPLEFVPERFEDGKAEGRFMIPFGMGRRRCPGETLALRTIGMVLATLVQCFDWERVDGAEVDMTEGGGLTIPKAVPLEAVCRPRPAMRDVLESL

SEQ ID NO: 18853 - DNA, 1223 bp, Triticum aestivum
  misc_feature (1)..(1223): Ceres Seq. ID no. 13596359
aactccactccgccgcgataagccctagcctccacctccgtctccatggcgaccaccaccaccctttcccacccgctctccgtgcccatcgccgggggccgcgtccggcgctgccccctcaccctgctcgccccggcccgcgcggccccccggcggccgacgcccctcctcgtcgcccgcgccaagcgcaccaacaactccagcgctgccccgaagcgagaggcggacgaggaggttgaggtggaggaggagctgccgtggatccaggacaaggcgctggacctcgtggagttcaccggcaccgtcacgcaggccatccccggcccccgcgtcggctccagccccgtgccgtggctcctcgctgtgccgctcgcctacgtcggcgtctccttcgccctcgccgccgtccgcaccttccgcaggttcacctccccgcgcactcagaagaagaagagggtgaccaagaatatattcttgttgaagtcactagacgagttgtttcagaagggcagggaagcagtggattttccagctcttcaagaactaatgcaaaagacaggatttgacatggatgatgtagtaagaaagtacatccgatacacactgaatgaaaaacaattcaatcctgatgtggttgtggatctcatacatcttaggaaagcatcgatgttagaagataatgaagttgctgaaattctgaatgagatatctagacgaattgttcgggaaaaaggtccaatagttatggacttatctgggtttacagagcaaggttttaagcggaagcttgctgtgcaaacattgttcggaaaaatcatgtacttatcagagctcccagagttctgttcccgggacggctcgcttgttgtcaaagaaatctttggagttacagacgaggatgcagacagccttcgcagtcgtaccctttctgaagctggtgatatcgagtcgttagaaaggatggtcgaagattctgatgaacatggtaccccatcatcatcttgaagtatgttagtggttggatacttatcatctttgagttttgtcaatggttgaagaagagagggttgtcctggatagttgactgcaagttttgtaaatctaccttctactaggattgtagcttctggcagtatctcggacctgtctaccacctgactaaaacaaggaagttgttgagagaatggtagcagtgagtttatataaagcgacaattgttaact

SEQ ID NO: 18854 - protein, 319 aa, Triticum aestivum
  peptide (1)..(319): Ceres Seq. ID no. 13596360
  misc_feature (7)..(317): NCBI GI NO: 38344450 NR Description: OSJNBa0038O10.22
  misc_feature (10)..(318): NCBI GI NO: 21592521 NR Description: unknown [Arabidopsis thaliana]
  misc_feature (10)..(308): NCBI GI NO: 18415850 NR Description: expressed protein [Arabidopsis thaliana]
  misc_feature (33)..(283): NCBI GI NO: 9759348 NR Description: gene_id:MAH20
MATTTTLSHPLSVPIAGGRVRRCPLTLLAPARAAPRRPTPLLVARAKRTNNSSAAPKREADEEVEVEEELPWIQDKALDLVEFTGTVTQAIPGPRVGSSPVPWLLAVPLAYVGVSFALAAVRTFRRFTSPRTQKKKRVTKNIFLLKSLDELFQKGREAVDFPALQELMQKTGFDMDDVVRKYIRYTLNEKQFNPDVVVDLIHLRKASMLEDNEVAEILNEISRRIVREKGPIVMDLSGFTEQGFKRKLAVQTLFGKIMYLSELPEFCSRDGSLVVKEIFGVTDEDADSLRSRTLSEAGDIESLERMVEDSDEHGTPSSS

SEQ ID NO: 18855 - DNA, 530 bp, Triticum aestivum
  misc_feature (1)..(530): Ceres Seq. ID no. 13654264
  misc_feature (477)..(477): n is a, c, t, g, unknown, or other
aagggaagttggcagaagctagagaagaattgaaactagcaaaactcttagagaagcgtcttgaagcccctcaacaagacagtgaggatggtgcacatgagttagccacagcagctgttcagcagagcaattcgatccagcagtctgccagcgtcaccactcacaccaatccgttgacctatgcccctccagcacaggaaaacaagtcggttgagcctcaaaaagcaatgtccagccgagaccgtctcagaatccaacgtgaatccctcactcacaagcgcaacgccctgaagttgaggagagaaggaaagactgcggaagcagatgcggaattcgaattggccaagtcactagagagccaactggaagagtcagatagccagggttcgaactctggaggaaagtctgaagcaagtgacgcgtttgtggaagatcttattgatcctcaaatgatgtctgccctgaaatccatcggcnggagcgcagctgacctgttcacgcaatctccgagccctcaacctttggtgaaa

SEQ ID NO: 18856 - protein, 176 aa, Triticum aestivum
  peptide (1)..(176): Ceres Seq. ID no. 13654265
  misc_feature (88)..(121): Pfam Name: Pfam Description:  TPR Domain
  misc_feature (1)..(175): NCBI GI NO: 31126731 NR Description: unknown protein
  misc_feature (1)..(158): NCBI GI NO: 15220569 NR Description: expressed protein [Arabidopsis thaliana]
  misc_feature (1)..(158): NCBI GI NO: 25404340 NR Description: hypothetical protein T13M11.5
  misc_feature (1)..(158): NCBI GI NO: 38564274 NR Description: At1g61690 [Arabidopsis thaliana]
  misc_feature (37)..(156): NCBI GI NO: 31126731 NR Description: unknown protein
  misc_feature (1)..(35): NCBI GI NO: 31126731 NR Description: unknown protein
  misc_feature (63)..(140): NCBI GI NO: 31126731 NR Description: unknown protein
  misc_feature (159)..(159): Xaa is any aa, unknown or other
GKLAEAREELKLAKLLEKRLEAPQQDSEDGAHELATAAVQQSNSIQQSASVTTHTNPLTYAPPAQENKSVEPQKAMSSRDRLRIQRESLTHKRNALKLRREGKTAEADAEFELAKSLESQLEESDSQGSNSGGKSEASDAFVEDLIDPQMMSALKSIGXSAADLFTQSPSPQPLVK

SEQ ID NO: 18857 - protein, 101 aa, Triticum aestivum
  peptide (1)..(101): Ceres Seq. ID no. 13654266
  misc_feature (13)..(46): Pfam Name: Pfam Description:  TPR Domain
  misc_feature (1)..(100): NCBI GI NO: 31126731 NR Description: unknown protein
  misc_feature (1)..(83): NCBI GI NO: 15220569 NR Description: expressed protein [Arabidopsis thaliana]
  misc_feature (1)..(83): NCBI GI NO: 25404340 NR Description: hypothetical protein T13M11.5
  misc_feature (1)..(83): NCBI GI NO: 38564274 NR Description: At1g61690 [Arabidopsis thaliana]
  misc_feature (1)..(81): NCBI GI NO: 31126731 NR Description: unknown protein
  misc_feature (1)..(65): NCBI GI NO: 31126731 NR Description: unknown protein
  misc_feature (84)..(84): Xaa is any aa, unknown or other
MSSRDRLRIQRESLTHKRNALKLRREGKTAEADAEFELAKSLESQLEESDSQGSNSGGKSEASDAFVEDLIDPQMMSALKSIGXSAADLFTQSPSPQPLVK

SEQ ID NO: 18858 - DNA, 1257 bp, Triticum aestivum
  misc_feature (1)..(1257): Ceres Seq. ID no. 13595992
acctaacccattcaagtcgatcaatcatcagcaaaaaaaacactatagtaacaactgacagcgtgagggcgctcgcaatggcgagccgtttgggagtcgtgctggctttagcggctgtcgtccttcttgccgccgcgggggccgccgccgggcaatccacgccacggccacccaacgcccagggcccgaagccgaagccgaagccgatgaaggtcaagtgcaccgagaaccgcaaggagaacccctactgtttcaaccggaacatggactgccccgccaactgcccccagtcctgctaccccgactgcaacacatgcaaacccgtctgcgtctgcaacaccccgggggcgtgcggcgacccgcggttcataggtggtgacggcaacgccttctacttccacggacgcagggacgccgacttctgcgtcgtctccgaccgcgaccttcacatcaacgcgcacttcatcggcaagagcggccacagtggcatgtcccgggacttcacctggatccaggccatcgctgtgctcttcgacggccaccgcctctacctcggcgccaggaagaccggcacctgggacgacgccgtcgagcacctggacatcaccctggacggcgagcctgtctaccttcccgctgacctcatcgaaggcgccaagtggacgtccagccgcgtgcccgagctgtcggtgacccgcaccaaggcggccaacggcgtcctcgtcaccgtcgccggaaagttcagcgtcagggccaacgccgtgcccatcaccgaggaggaatcgagggtgcaccgctacggtgtcaccgccgatgactgcctcgcgcacctcgagctggcgttcaagttcgacgcgctcaccgacgacgtccacggtgtggtcggacagacgtaccgctccgactacgtcaaccatttcgacgtgagggcctccatgcccaccatgggaggagatgccaccttcaccacctccagcctgttcgccgccgactgcagcgtggcgcgctatggagtcagccgtggaaacgacggtgccgcggtgctatctgagctcgctggtgtcacctgcgccagcggcatggacggcaaaggtgtcgtgtgcaagaagtaaaacgcttctgccatgcatatggcgagtgcccgtgtatgtctgcatgcatgcatggttgacaagtacacacagaaataagcaaaggacatacattaatgtgtttggaacttgtaactttatcaagaaatagtatgcgtccgtttgc

SEQ ID NO: 18859 - protein, 369 aa, Triticum aestivum
  peptide (1)..(369): Ceres Seq. ID no. 15221721
  misc_feature (28)..(369): NCBI GI NO: 4514637 NR Description: root cap protein 2 [Zea mays]
  misc_feature (56)..(369): NCBI GI NO: 11994465 NR Description: contains similarity to late embryogenesis abundantprotein~gene_id:MLD14
  misc_feature (56)..(369): NCBI GI NO: 30685319 NR Description: late embryogenesis abundant protein -related
  misc_feature (28)..(341): NCBI GI NO: 34905930 NR Description: similar to root cap protein
  misc_feature (30)..(341): NCBI GI NO: 34905936 NR Description: similar to root cap protein
  misc_feature (28)..(369): NCBI GI NO: 21741738 NR Description: OSJNBa0073L04.18
  misc_feature (70)..(369): NCBI GI NO: 7484468 NR Description: late embryonic abundant protein EMB7
  misc_feature (32)..(337): NCBI GI NO: 34905934 NR Description: similar to root cap protein
  misc_feature (26)..(336): NCBI GI NO: 34905940 NR Description: similar to root cap protein
  misc_feature (24)..(346): NCBI GI NO: 4514635 NR Description: root cap protein 1 [Zea mays]
LTHSSRSIISKKNTIVTTDSVRALAMASRLGVVLALAAVVLLAAAGAAAGQSTPRPPNAQGPKPKPKPMKVKCTENRKENPYCFNRNMDCPANCPQSCYPDCNTCKPVCVCNTPGACGDPRFIGGDGNAFYFHGRRDADFCVVSDRDLHINAHFIGKSGHSGMSRDFTWIQAIAVLFDGHRLYLGARKTGTWDDAVEHLDITLDGEPVYLPADLIEGAKWTSSRVPELSVTRTKAANGVLVTVAGKFSVRANAVPITEEESRVHRYGVTADDCLAHLELAFKFDALTDDVHGVVGQTYRSDYVNHFDVRASMPTMGGDATFTTSSLFAADCSVARYGVSRGNDGAAVLSELAGVTCASGMDGKGVVCKK

SEQ ID NO: 18860 - protein, 344 aa, Triticum aestivum
  peptide (1)..(344): Ceres Seq. ID no. 15221722
  misc_feature (3)..(344): NCBI GI NO: 4514637 NR Description: root cap protein 2 [Zea mays]
  misc_feature (31)..(344): NCBI GI NO: 11994465 NR Description: contains similarity to late embryogenesis abundantprotein~gene_id:MLD14
  misc_feature (31)..(344): NCBI GI NO: 30685319 NR Description: late embryogenesis abundant protein -related
  misc_feature (3)..(316): NCBI GI NO: 34905930 NR Description: similar to root cap protein
  misc_feature (5)..(316): NCBI GI NO: 34905936 NR Description: similar to root cap protein
  misc_feature (3)..(344): NCBI GI NO: 21741738 NR Description: OSJNBa0073L04.18
  misc_feature (45)..(344): NCBI GI NO: 7484468 NR Description: late embryonic abundant protein EMB7
  misc_feature (7)..(312): NCBI GI NO: 34905934 NR Description: similar to root cap protein
  misc_feature (1)..(311): NCBI GI NO: 34905940 NR Description: similar to root cap protein
  misc_feature (1)..(321): NCBI GI NO: 4514635 NR Description: root cap protein 1 [Zea mays]
MASRLGVVLALAAVVLLAAAGAAAGQSTPRPPNAQGPKPKPKPMKVKCTENRKENPYCFNRNMDCPANCPQSCYPDCNTCKPVCVCNTPGACGDPRFIGGDGNAFYFHGRRDADFCVVSDRDLHINAHFIGKSGHSGMSRDFTWIQAIAVLFDGHRLYLGARKTGTWDDAVEHLDITLDGEPVYLPADLIEGAKWTSSRVPELSVTRTKAANGVLVTVAGKFSVRANAVPITEEESRVHRYGVTADDCLAHLELAFKFDALTDDVHGVVGQTYRSDYVNHFDVRASMPTMGGDATFTTSSLFAADCSVARYGVSRGNDGAAVLSELAGVTCASGMDGKGVVCKK

SEQ ID NO: 18861 - protein, 301 aa, Triticum aestivum
  peptide (1)..(301): Ceres Seq. ID no. 15221723
  misc_feature (1)..(301): NCBI GI NO: 4514637 NR Description: root cap protein 2 [Zea mays]
  misc_feature (1)..(301): NCBI GI NO: 11994465 NR Description: contains similarity to late embryogenesis abundantprotein~gene_id:MLD14
  misc_feature (1)..(301): NCBI GI NO: 30685319 NR Description: late embryogenesis abundant protein -related
  misc_feature (1)..(273): NCBI GI NO: 34905930 NR Description: similar to root cap protein
  misc_feature (1)..(273): NCBI GI NO: 34905936 NR Description: similar to root cap protein
  misc_feature (1)..(301): NCBI GI NO: 21741738 NR Description: OSJNBa0073L04.18
  misc_feature (2)..(301): NCBI GI NO: 7484468 NR Description: late embryonic abundant protein EMB7
  misc_feature (1)..(269): NCBI GI NO: 34905934 NR Description: similar to root cap protein
  misc_feature (1)..(268): NCBI GI NO: 34905940 NR Description: similar to root cap protein
  misc_feature (1)..(278): NCBI GI NO: 4514635 NR Description: root cap protein 1 [Zea mays]
MKVKCTENRKENPYCFNRNMDCPANCPQSCYPDCNTCKPVCVCNTPGACGDPRFIGGDGNAFYFHGRRDADFCVVSDRDLHINAHFIGKSGHSGMSRDFTWIQAIAVLFDGHRLYLGARKTGTWDDAVEHLDITLDGEPVYLPADLIEGAKWTSSRVPELSVTRTKAANGVLVTVAGKFSVRANAVPITEEESRVHRYGVTADDCLAHLELAFKFDALTDDVHGVVGQTYRSDYVNHFDVRASMPTMGGDATFTTSSLFAADCSVARYGVSRGNDGAAVLSELAGVTCASGMDGKGVVCKK

SEQ ID NO: 18862 - DNA, 727 bp, Triticum aestivum
  misc_feature (1)..(727): Ceres Seq. ID no. 12584185
gacaaaaatcacgtgaggggatccttggagacgctctcatagcagagaggccgacgaacggtgaggtcaaaatcccgagcgaagagagaggcgggcaggaaagatggcggcggccgcactgcgtccggcgatcctccgccacatccgactctcgcccgccacggcggcccctctcgccgccgccgccgcggccggccggcccctcgccctcgcgccgtggctcgcgcggccaatgtcctcacacgacgcccacctcacccgcgacgaggtcgtcggccgcgtcctcgacgtcctcaagtgccaccccaaggtcgagccctccaaggtgacccccgaggcgcacttcgagaaggatctggggctggacagcctggacacggtggaggtggtgatggcgatcgaggaagagttcaagctcgagatccccgacttggaggctgacaagatcaactcgcttccgctcgccatcgagtatgtcgccaaccaccccatggccggctgagtgcccacccttccgattgccgaccgtgccagggtgaggcattttctcgtttctgtttggggatgatgaataattgcctggagttgttcaggaaaactggtccctggtgctccgcaatgtgtcggtcgctattggtcttggatgcaactgtaacattccgcagtgtcgctgatgaactggccttgttggtcgcacgcttgtttttgtagtatatctgtttaatcc

SEQ ID NO: 18863 - protein, 132 aa, Triticum aestivum
  peptide (1)..(132): Ceres Seq. ID no. 12584186
  misc_feature (59)..(125): Pfam Name: Pfam Description:  Phosphopantetheine attachment site
  misc_feature (1)..(131): NCBI GI NO: 34900336 NR Description: putative acyl carrier protein
  misc_feature (5)..(131): NCBI GI NO: 15224918 NR Description: acyl carrier protein; protein id: At2g44620
  misc_feature (5)..(131): NCBI GI NO: 15450375 NR Description: At2g44620/F16B22.11 [Arabidopsis thaliana]
  misc_feature (5)..(131): NCBI GI NO: 21553376 NR Description: acyl carrier protein, putative
  misc_feature (5)..(131): NCBI GI NO: 15217894 NR Description: acyl carrier protein, putative
  misc_feature (7)..(131): NCBI GI NO: 40743607 NR Description: hypothetical protein AN5704.2
  misc_feature (1)..(131): NCBI GI NO: 32407719 NR Description: hypothetical protein [Neurospora crassa]
  misc_feature (2)..(131): NCBI GI NO: 34485510 NR Description: acyl carrier protein 1 [Chlamydomonas reinhardtii]
  misc_feature (15)..(131): NCBI GI NO: 6322656 NR Description: mitochondrial acyl carrier protein; Acp1p
  misc_feature (24)..(127): NCBI GI NO: 27754007 NR Description: RIKEN cDNA 2610003B19 [Mus musculus]
MAAAALRPAILRHIRLSPATAAPLAAAAAAGRPLALAPWLARPMSSHDAHLTRDEVVGRVLDVLKCHPKVEPSKVTPEAHFEKDLGLDSLDTVEVVMAIEEEFKLEIPDLEADKINSLPLAIEYVANHPMAG

SEQ ID NO: 18864 - protein, 108 aa, Triticum aestivum
  peptide (1)..(108): Ceres Seq. ID no. 12584187
QKSREGILGDALIAERPTNGEVKIPSEERGGQERWRRPHCVRRSSATSDSRPPRRPLSPPPPRPAGPSPSRRGSRGQCPHTTPTSPATRSSAASSTSSSATPRSSPPR

SEQ ID NO: 18865 - protein, 89 aa, Triticum aestivum
  peptide (1)..(89): Ceres Seq. ID no. 12584188
  misc_feature (16)..(82): Pfam Name: Pfam Description:  Phosphopantetheine attachment site
  misc_feature (1)..(88): NCBI GI NO: 34900336 NR Description: putative acyl carrier protein
  misc_feature (1)..(88): NCBI GI NO: 15224918 NR Description: acyl carrier protein; protein id: At2g44620
  misc_feature (1)..(88): NCBI GI NO: 15450375 NR Description: At2g44620/F16B22.11 [Arabidopsis thaliana]
  misc_feature (1)..(88): NCBI GI NO: 21553376 NR Description: acyl carrier protein, putative
  misc_feature (1)..(88): NCBI GI NO: 15217894 NR Description: acyl carrier protein, putative
  misc_feature (1)..(88): NCBI GI NO: 40743607 NR Description: hypothetical protein AN5704.2
  misc_feature (1)..(88): NCBI GI NO: 32407719 NR Description: hypothetical protein [Neurospora crassa]
  misc_feature (1)..(88): NCBI GI NO: 34485510 NR Description: acyl carrier protein 1 [Chlamydomonas reinhardtii]
  misc_feature (1)..(88): NCBI GI NO: 6322656 NR Description: mitochondrial acyl carrier protein; Acp1p
  misc_feature (1)..(84): NCBI GI NO: 27754007 NR Description: RIKEN cDNA 2610003B19 [Mus musculus]
MSSHDAHLTRDEVVGRVLDVLKCHPKVEPSKVTPEAHFEKDLGLDSLDTVEVVMAIEEEFKLEIPDLEADKINSLPLAIEYVANHPMAG

SEQ ID NO: 18866 - DNA, 775 bp, Triticum aestivum
  misc_feature (1)..(775): Ceres Seq. ID no. 12598299
aaatcagacaaaacacgatggcatcagcagcgccattctccggcaccggcagtctccttcgcctgacaaaaccaggaacgccacagccccagttcttctcccctccgccgtctcgctcccacttccaccttcgaacccgccccgccaaggcaaagagcccaatcgccggagccatcgcctcctcttccatggcggcagcccagccccagacgtgcgacggccaacaacaacgggcggaggaggccatgaagctgctgttcgtcgagatgggcgtcgggtacgaccagcacggacaggacatcacctccgccgcggtgcgcgcctgcaaggatgccatctcctccaactccatccccgccttccgccgcgggtcgataccaggggtgaacagtgaacagatgaaactgcagatcaagctgggtgtcccgaggccggtgcagcatctgttggactttgagagaatcaaggccgtcttcccctatggtgagatcaccagctgcgaggtcattgacggcgggatgatctgttcaagtggaacatgcatcgaagcaatgggagataaaaacgatgactgctacattgtcaatgctgcagtttacgtcggttactaatgctagcctggaggaattgttgtattggaacagtggaaaacttgaaaaaaaaacctggccgggagaggggaactggaaattctcgtaggcaataagtatgtataactgttatgaacagagaaagggtcaaaatagggggaggccatgaagcctcccggtagtcc

SEQ ID NO: 18867 - protein, 202 aa, Triticum aestivum
  peptide (1)..(202): Ceres Seq. ID no. 12598300
  misc_feature (28)..(202): NCBI GI NO: 18396927 NR Description: expressed protein; protein id: At1g29040
  misc_feature (28)..(202): NCBI GI NO: 21954066 NR Description: unknown protein [Arabidopsis thaliana]
  misc_feature (6)..(159): NCBI GI NO: 34912624 NR Description: P0410E01.16
  misc_feature (82)..(202): NCBI GI NO: 30690579 NR Description: expressed protein [Arabidopsis thaliana]
  misc_feature (82)..(202): NCBI GI NO: 37520060 NR Description: hypothetical protein glr0491
  misc_feature (84)..(202): NCBI GI NO: 23098097 NR Description: hypothetical protein
  misc_feature (83)..(202): NCBI GI NO: 23098421 NR Description: hypothetical protein
  misc_feature (83)..(202): NCBI GI NO: 16802555 NR Description: lmo0512 [Listeria monocytogenes EGD-e]
  misc_feature (83)..(202): NCBI GI NO: 16799587 NR Description: lin0512 [Listeria innocua]
  misc_feature (81)..(200): NCBI GI NO: 23127863 NR Description: hypothetical protein [Nostoc punctiforme]
IRQNTMASAAPFSGTGSLLRLTKPGTPQPQFFSPPPSRSHFHLRTRPAKAKSPIAGAIASSSMAAAQPQTCDGQQQRAEEAMKLLFVEMGVGYDQHGQDITSAAVRACKDAISSNSIPAFRRGSIPGVNSEQMKLQIKLGVPRPVQHLLDFERIKAVFPYGEITSCEVIDGGMICSSGTCIEAMGDKNDDCYIVNAAVYVGY

SEQ ID NO: 18868 - protein, 197 aa, Triticum aestivum
  peptide (1)..(197): Ceres Seq. ID no. 12598301
  misc_feature (23)..(197): NCBI GI NO: 18396927 NR Description: expressed protein; protein id: At1g29040
  misc_feature (23)..(197): NCBI GI NO: 21954066 NR Description: unknown protein [Arabidopsis thaliana]
  misc_feature (1)..(154): NCBI GI NO: 34912624 NR Description: P0410E01.16
  misc_feature (77)..(197): NCBI GI NO: 30690579 NR Description: expressed protein [Arabidopsis thaliana]
  misc_feature (77)..(197): NCBI GI NO: 37520060 NR Description: hypothetical protein glr0491
  misc_feature (79)..(197): NCBI GI NO: 23098097 NR Description: hypothetical protein
  misc_feature (78)..(197): NCBI GI NO: 23098421 NR Description: hypothetical protein
  misc_feature (78)..(197): NCBI GI NO: 16802555 NR Description: lmo0512 [Listeria monocytogenes EGD-e]
  misc_feature (78)..(197): NCBI GI NO: 16799587 NR Description: lin0512 [Listeria innocua]
  misc_feature (76)..(195): NCBI GI NO: 23127863 NR Description: hypothetical protein [Nostoc punctiforme]
MASAAPFSGTGSLLRLTKPGTPQPQFFSPPPSRSHFHLRTRPAKAKSPIAGAIASSSMAAAQPQTCDGQQQRAEEAMKLLFVEMGVGYDQHGQDITSAAVRACKDAISSNSIPAFRRGSIPGVNSEQMKLQIKLGVPRPVQHLLDFERIKAVFPYGEITSCEVIDGGMICSSGTCIEAMGDKNDDCYIVNAAVYVGY

SEQ ID NO: 18869 - protein, 140 aa, Triticum aestivum
  peptide (1)..(140): Ceres Seq. ID no. 12598302
  misc_feature (1)..(140): NCBI GI NO: 18396927 NR Description: expressed protein; protein id: At1g29040
  misc_feature (1)..(140): NCBI GI NO: 21954066 NR Description: unknown protein [Arabidopsis thaliana]
  misc_feature (1)..(97): NCBI GI NO: 34912624 NR Description: P0410E01.16
  misc_feature (20)..(140): NCBI GI NO: 30690579 NR Description: expressed protein [Arabidopsis thaliana]
  misc_feature (20)..(140): NCBI GI NO: 37520060 NR Description: hypothetical protein glr0491
  misc_feature (22)..(140): NCBI GI NO: 23098097 NR Description: hypothetical protein
  misc_feature (21)..(140): NCBI GI NO: 23098421 NR Description: hypothetical protein
  misc_feature (21)..(140): NCBI GI NO: 16802555 NR Description: lmo0512 [Listeria monocytogenes EGD-e]
  misc_feature (21)..(140): NCBI GI NO: 16799587 NR Description: lin0512 [Listeria innocua]
  misc_feature (19)..(138): NCBI GI NO: 23127863 NR Description: hypothetical protein [Nostoc punctiforme]
MAAAQPQTCDGQQQRAEEAMKLLFVEMGVGYDQHGQDITSAAVRACKDAISSNSIPAFRRGSIPGVNSEQMKLQIKLGVPRPVQHLLDFERIKAVFPYGEITSCEVIDGGMICSSGTCIEAMGDKNDDCYIVNAAVYVGY

SEQ ID NO: 18870 - DNA, 899 bp, Triticum aestivum
  misc_feature (1)..(899): Ceres Seq. ID no. 13654167
cactcccctgtctgtctccaagtccaagatcacaccgcgctttcttccttccccgtcgccgatccagacgaagcgccgcacgccggttcccttcacccccgcccgccaacgtctccggccaggttggatccatggcggaaaagaaggtcgtgctgaagctggacctgcacgacgacaagcagaagcagagggctctcaaggtcgtctccactctccacggcatcgaccagatcgccgtggacatgaaggaccagaagatgacggtggtgggcaccgtcgaccccgtggacctcgtcggcaggctgcgcagcaagctcttccccacggcgcagatgctctccgtcggcccggccaaggaggagaagaaggacggcggcgccaagaaggacgacggcaagaaggatggcgacaagaaggagccgatcccggtgtacacgccgtggtacccgccgccgccgccgctgtaccacccgcacccgtactaccacaaccacagcgccgaggaggaccccagctcctgcgtcatctgctgatcggcgcgcgccgctcccttgtacattttgtagctggccgtgtgctctgctgcctgccggtcgaccatgcctgctacggtgatcgacggcgtgcaccatacttaaggccgtttaaggattttgcgccagtgatccggctgctgtgcttgtgcatctgcttagtttataaagtgcagatatggaatttattagtgtgtagtgtagaattactactagatagaactgctggagttggattttgagtgaaagttcaccgagtgctctgctctccaatgtgataacagagtagtgaaataattagattaagtgctctgctctctggtgtggaaagaaaatagtgaagcccaataaataaattgaaggtgc

SEQ ID NO: 18871 - protein, 257 aa, Triticum aestivum
  peptide (1)..(257): Ceres Seq. ID no. 13654168
TPLSVSKSKITPRFLPSPSPIQTKRRTPVPFTPARQRLRPGWIHGGKEGRAEAGPARRQAEAEGSQGRLHSPRHRPDRRGHEGPEDDGGGHRRPRGPRRQAAQQALPHGADALRRPGQGGEEGRRRQEGRRQEGWRQEGADPGVHAVVPAAAAAVPPAPVLPQPQRRGGPQLLRHLLIGARRSLVHFVAGRVLCCLPVDHACYGDRRRAPYLRPFKDFAPVIRLLCLCICLVYKVQIWNLLVCSVELLLDRTAGVGF

SEQ ID NO: 18872 - protein, 176 aa, Triticum aestivum
  peptide (1)..(176): Ceres Seq. ID no. 13654169
  misc_feature (49)..(118): Pfam Name: Pfam Description:  Heavy-metal-associated domain
  misc_feature (44)..(176): NCBI GI NO: 32488374 NR Description: OSJNBa0043A12.4
  misc_feature (47)..(175): NCBI GI NO: 29124977 NR Description: unknown [Populus tremuloides]
  misc_feature (47)..(155): NCBI GI NO: 21929729 NR Description: barley stem rust resistance protein
  misc_feature (47)..(155): NCBI GI NO: 21728344 NR Description: stem rust resistance protein Rpg1
  misc_feature (47)..(155): NCBI GI NO: 21929723 NR Description: barley stem rust resistance protein
  misc_feature (47)..(139): NCBI GI NO: 13543783 NR Description: Unknown (protein for MGC:7642) [Mus musculus]
  misc_feature (47)..(140): NCBI GI NO: 15223416 NR Description: heavy-metal-associated domain-containing protein
  misc_feature (47)..(139): NCBI GI NO: 34902246 NR Description: Unknown protein
  misc_feature (48)..(140): NCBI GI NO: 25517980 NR Description: F22L4.5 protein - Arabidopsis thaliana
  misc_feature (47)..(139): NCBI GI NO: 37536388 NR Description: hypothetical protein
LPCLSPSPRSHRAFFLPRRRSRRSAARRFPSPPPANVSGQVGSMAEKKVVLKLDLHDDKQKQRALKVVSTLHGIDQIAVDMKDQKMTVVGTVDPVDLVGRLRSKLFPTAQMLSVGPAKEEKKDGGAKKDDGKKDGDKKEPIPVYTPWYPPPPPLYHPHPYYHNHSAEEDPSSCVIC

SEQ ID NO: 18873 - protein, 133 aa, Triticum aestivum
  peptide (1)..(133): Ceres Seq. ID no. 13654170
  misc_feature (6)..(75): Pfam Name: Pfam Description:  Heavy-metal-associated domain
  misc_feature (1)..(133): NCBI GI NO: 32488374 NR Description: OSJNBa0043A12.4
  misc_feature (4)..(132): NCBI GI NO: 29124977 NR Description: unknown [Populus tremuloides]
  misc_feature (4)..(112): NCBI GI NO: 21929729 NR Description: barley stem rust resistance protein
  misc_feature (4)..(112): NCBI GI NO: 21728344 NR Description: stem rust resistance protein Rpg1
  misc_feature (4)..(112): NCBI GI NO: 21929723 NR Description: barley stem rust resistance protein
  misc_feature (4)..(96): NCBI GI NO: 13543783 NR Description: Unknown (protein for MGC:7642) [Mus musculus]
  misc_feature (4)..(97): NCBI GI NO: 15223416 NR Description: heavy-metal-associated domain-containing protein
  misc_feature (4)..(96): NCBI GI NO: 34902246 NR Description: Unknown protein
  misc_feature (5)..(97): NCBI GI NO: 25517980 NR Description: F22L4.5 protein - Arabidopsis thaliana
  misc_feature (4)..(96): NCBI GI NO: 37536388 NR Description: hypothetical protein
MAEKKVVLKLDLHDDKQKQRALKVVSTLHGIDQIAVDMKDQKMTVVGTVDPVDLVGRLRSKLFPTAQMLSVGPAKEEKKDGGAKKDDGKKDGDKKEPIPVYTPWYPPPPPLYHPHPYYHNHSAEEDPSSCVIC

SEQ ID NO: 18874 - DNA, 1130 bp, Triticum aestivum
  misc_feature (1)..(1130): Ceres Seq. ID no. 13654553
actgcacactaccacactccccactctcccacgccacgccgactagcttcctccattaccctcctcctttgcttgcccagacctcggcgaggctccggcgagagagcgagagcgaaagctcccttccgctgctgcaatggcggttcctctggtgctcatgctcttggtcgccatgttcaccggctcagatgcgatgtactgcgtgtgcaagtcggacgcgaacccggtggcgatgcagaaggccatcgactacgcgtgcggcaagggcgccgactgcacccagatcacctccagcgggccctgcttccagccctcctccgtcgtcgcccactgctcctacgcctgcaacagctactaccagaagaacgccggcatgggcgccacctgcgatttcatgggcgtcgccaccctcaccggcgccgaccccagcgccggatcctgcaagtaccccgccagcgctagcggcgtcggcactggagcaggcaccggcaccggcggcatgggaaccggcggcacagggacaggcaccggaggcatgggaaccggcaccggaaccagcaccggaacgggcacgggcgtcggcaccggcaccagcaccggcggcatggggagcatgaccccgccgggcgcgaccagctccgggatgccggggagccccttcggcggcggcgcgtacggcccgtctggcatgaaccaggactacagcgcagccgtggtcggtcgccgcgtggccgtcgcggggctcctcgtggcggcagccgcgccgctcctcctccacttcatctgatgcggtggtgaccactggttggccggcggaaaggcgcgtcggcaatgctggcgggtgcgacgccggattcggtgggcacgccccgccgcttttgtgtccggctcgctctctcgcctgcctttccggcgtctgcgtcgttttgatggttcgatcggacgtactagtagcgtagtgtctgtctgtctgtccatgagtgctagtactcttattaagctgaccaccccatgtggtgtttgtaccggtgcgggtcgtggtagagttgatgagatctggtaggggattctttcttccttctcgtagcggtgacggtgttccgagacatataattatgtgttgtcgttcc

SEQ ID NO: 18875 - protein, 216 aa, Triticum aestivum
  peptide (1)..(216): Ceres Seq. ID no. 13654554
  misc_feature (77)..(203): Pfam Name: Pfam Description:  Dehydrin
  misc_feature (1)..(167): NCBI GI NO: 22775658 NR Description: contains ESTs C91599
  misc_feature (1)..(184): NCBI GI NO: 21553768 NR Description: unknown [Arabidopsis thaliana]
  misc_feature (1)..(213): NCBI GI NO: 18409239 NR Description: expressed protein [Arabidopsis thaliana]
  misc_feature (1)..(184): NCBI GI NO: 25404810 NR Description: unknown protein, 45065-49536
  misc_feature (1)..(171): NCBI GI NO: 15222715 NR Description: glycosyl hydrolase family 17
  misc_feature (5)..(108): NCBI GI NO: 34909796 NR Description: P0403C05.4
  misc_feature (1)..(151): NCBI GI NO: 18394637 NR Description: glycosyl hydrolase family 17
  misc_feature (16)..(209): NCBI GI NO: 34912962 NR Description: beta-1,3 glucanase-like protein
  misc_feature (4)..(169): NCBI GI NO: 15241485 NR Description: glycosyl hydrolase family 17
  misc_feature (5)..(169): NCBI GI NO: 21592859 NR Description: unknown [Arabidopsis thaliana]
MAVPLVLMLLVAMFTGSDAMYCVCKSDANPVAMQKAIDYACGKGADCTQITSSGPCFQPSSVVAHCSYACNSYYQKNAGMGATCDFMGVATLTGADPSAGSCKYPASASGVGTGAGTGTGGMGTGGTGTGTGGMGTGTGTSTGTGTGVGTGTSTGGMGSMTPPGATSSGMPGSPFGGGAYGPSGMNQDYSAAVVGRRVAVAGLLVAAAAPLLLHFI

SEQ ID NO: 18876 - protein, 209 aa, Triticum aestivum
  peptide (1)..(209): Ceres Seq. ID no. 13654555
  misc_feature (70)..(196): Pfam Name: Pfam Description:  Dehydrin
  misc_feature (1)..(160): NCBI GI NO: 22775658 NR Description: contains ESTs C91599
  misc_feature (1)..(177): NCBI GI NO: 21553768 NR Description: unknown [Arabidopsis thaliana]
  misc_feature (1)..(206): NCBI GI NO: 18409239 NR Description: expressed protein [Arabidopsis thaliana]
  misc_feature (1)..(177): NCBI GI NO: 25404810 NR Description: unknown protein, 45065-49536
  misc_feature (1)..(164): NCBI GI NO: 15222715 NR Description: glycosyl hydrolase family 17
  misc_feature (1)..(101): NCBI GI NO: 34909796 NR Description: P0403C05.4
  misc_feature (1)..(144): NCBI GI NO: 18394637 NR Description: glycosyl hydrolase family 17
  misc_feature (9)..(202): NCBI GI NO: 34912962 NR Description: beta-1,3 glucanase-like protein
  misc_feature (1)..(162): NCBI GI NO: 15241485 NR Description: glycosyl hydrolase family 17
  misc_feature (1)..(162): NCBI GI NO: 21592859 NR Description: unknown [Arabidopsis thaliana]
MLLVAMFTGSDAMYCVCKSDANPVAMQKAIDYACGKGADCTQITSSGPCFQPSSVVAHCSYACNSYYQKNAGMGATCDFMGVATLTGADPSAGSCKYPASASGVGTGAGTGTGGMGTGGTGTGTGGMGTGTGTSTGTGTGVGTGTSTGGMGSMTPPGATSSGMPGSPFGGGAYGPSGMNQDYSAAVVGRRVAVAGLLVAAAAPLLLHFI

SEQ ID NO: 18877 - protein, 204 aa, Triticum aestivum
  peptide (1)..(204): Ceres Seq. ID no. 13654556
  misc_feature (65)..(191): Pfam Name: Pfam Description:  Dehydrin
  misc_feature (1)..(155): NCBI GI NO: 22775658 NR Description: contains ESTs C91599
  misc_feature (1)..(172): NCBI GI NO: 21553768 NR Description: unknown [Arabidopsis thaliana]
  misc_feature (1)..(201): NCBI GI NO: 18409239 NR Description: expressed protein [Arabidopsis thaliana]
  misc_feature (1)..(172): NCBI GI NO: 25404810 NR Description: unknown protein, 45065-49536
  misc_feature (1)..(159): NCBI GI NO: 15222715 NR Description: glycosyl hydrolase family 17
  misc_feature (1)..(96): NCBI GI NO: 34909796 NR Description: P0403C05.4
  misc_feature (1)..(139): NCBI GI NO: 18394637 NR Description: glycosyl hydrolase family 17
  misc_feature (4)..(197): NCBI GI NO: 34912962 NR Description: beta-1,3 glucanase-like protein
  misc_feature (1)..(157): NCBI GI NO: 15241485 NR Description: glycosyl hydrolase family 17
  misc_feature (1)..(157): NCBI GI NO: 21592859 NR Description: unknown [Arabidopsis thaliana]
MFTGSDAMYCVCKSDANPVAMQKAIDYACGKGADCTQITSSGPCFQPSSVVAHCSYACNSYYQKNAGMGATCDFMGVATLTGADPSAGSCKYPASASGVGTGAGTGTGGMGTGGTGTGTGGMGTGTGTSTGTGTGVGTGTSTGGMGSMTPPGATSSGMPGSPFGGGAYGPSGMNQDYSAAVVGRRVAVAGLLVAAAAPLLLHFI

SEQ ID NO: 18878 - DNA, 1408 bp, Triticum aestivum
  misc_feature (1)..(1408): Ceres Seq. ID no. 13596097
  misc_feature (1404)..(1404): n is a, c, t, g, unknown, or other
  misc_feature (1399)..(1399): n is a, c, t, g, unknown, or other
gccaacagtccaataaaagggactgcacccatcagtgtaaaaacaagcagcagtcaggcttcaatacaagcagactagtacgtagtacacgcaaggcagctcttctagttcttaggtgtgtgtagtacgtgcatcgatcctgtttgtttgatcctcatagagctacctactcgatcgcaccacttgaaattgcagccaaggccttgtagcacacccaagctagctagcagagcatttggtatttgaattggccgggaggaactatggtgctggacaagcaagacaggagcagagtcctggtaattggtggcacaggtcacattgggaagcacatcgttgctgcgagtgtccgccgcgacaacccgacctgtgtcctcattagggatgctgcaccggcttatctggccaaggcgcagctcctcaagagcttcattgattccggtgttgctctcatcaagggggatttatttgaccacgacagcctcgtaaatgccatcaagggtgcagatgccgtgatctcggccgtggggacctgtcagctcgacgagcagacgaggattgtcatggccatcaaggaggctggcaatgtcattaagaggttcctgccgtctgagttcggctctgacccagagcgggttcacaccgtggatccagcggccacactatacgctggtaaaatcagccttcgccgtctgatcgaggcggagggtatacctcatacatatgtctgctgcaacgggttcgccgaaacctaccttgtgagcatcggcgatgttacggctcttggcgctggtcctcggtccgacaagatcactgtcctaggcgatggagttgcaaaaggggtgtttgtggtggaagaggacatagctgcctacacggtgagagcgatcgaggatacgaggaccctgaacaagatcctgtacatgaggccgccggcgaacatcgtgtcccacaacgagctcatcgcactgtgggagaagaaagcgggaaggactttccagatcgctcgcatcccagagccggatctcctcaagttgatcaaggaggcggcataccctctcaacatgatgctgtcccactcgctctccgtcttggtgaggggcgaccaagccaacttcgacatcgagccgtcctttggtgttgaggccaccgagctgtaccctgacgtgaagtacaccaccgtcgacgagtacctggaccgcctcctctgacacttcttggctggatggagcactaaagatgatagagcagtggcctctccaaatgcaatgatgcgtgtgtcttgtgtgcaaattcaccagaaagaaaagaagaacctctgcgttccttgctaaaaaacatgatttgtggccgtgcataggctagtttatatatctttcctaataataaagggattatngcttntgcc

SEQ ID NO: 18879 - protein, 315 aa, Triticum aestivum
  peptide (1)..(315): Ceres Seq. ID no. 13596098
  misc_feature (7)..(315): Pfam Name: Pfam Description:  Isoflavone reductase
  misc_feature (7)..(315): NCBI GI NO: 1708421 NR Description: ISOFLAVONE REDUCTASE HOMOLOG IRL
  misc_feature (8)..(315): NCBI GI NO: 3243234 NR Description: isoflavone reductase related protein
  misc_feature (7)..(315): NCBI GI NO: 3114899 NR Description: phenylcoumaran benzylic ether reductase
  misc_feature (7)..(315): NCBI GI NO: 3114901 NR Description: phenylcoumaran benzylic ether reductase
  misc_feature (8)..(315): NCBI GI NO: 10764491 NR Description: allergenic isoflavone reductase-like protein Bet v6
  misc_feature (8)..(313): NCBI GI NO: 15234993 NR Description: isoflavone reductase, putative
  misc_feature (8)..(313): NCBI GI NO: 19310585 NR Description: putative NAD
  misc_feature (7)..(315): NCBI GI NO: 3114903 NR Description: phenylcoumaran benzylic ether reductase
  misc_feature (8)..(315): NCBI GI NO: 6573171 NR Description: isoflavone reductase homolog 2 [Glycine max]
  misc_feature (7)..(315): NCBI GI NO: 7578895 NR Description: phenylcoumaran benzylic ether reductase homolog Fi1
MVLDKQDRSRVLVIGGTGHIGKHIVAASVRRDNPTCVLIRDAAPAYLAKAQLLKSFIDSGVALIKGDLFDHDSLVNAIKGADAVISAVGTCQLDEQTRIVMAIKEAGNVIKRFLPSEFGSDPERVHTVDPAATLYAGKISLRRLIEAEGIPHTYVCCNGFAETYLVSIGDVTALGAGPRSDKITVLGDGVAKGVFVVEEDIAAYTVRAIEDTRTLNKILYMRPPANIVSHNELIALWEKKAGRTFQIARIPEPDLLKLIKEAAYPLNMMLSHSLSVLVRGDQANFDIEPSFGVEATELYPDVKYTTVDEYLDRLL

SEQ ID NO: 18880 - protein, 215 aa, Triticum aestivum
  peptide (1)..(215): Ceres Seq. ID no. 13596099
  misc_feature (1)..(215): Pfam Name: Pfam Description:  Isoflavone reductase
  misc_feature (1)..(215): NCBI GI NO: 1708421 NR Description: ISOFLAVONE REDUCTASE HOMOLOG IRL
  misc_feature (1)..(215): NCBI GI NO: 3243234 NR Description: isoflavone reductase related protein
  misc_feature (1)..(215): NCBI GI NO: 3114899 NR Description: phenylcoumaran benzylic ether reductase
  misc_feature (1)..(215): NCBI GI NO: 3114901 NR Description: phenylcoumaran benzylic ether reductase
  misc_feature (1)..(215): NCBI GI NO: 10764491 NR Description: allergenic isoflavone reductase-like protein Bet v6
  misc_feature (1)..(213): NCBI GI NO: 15234993 NR Description: isoflavone reductase, putative
  misc_feature (1)..(213): NCBI GI NO: 19310585 NR Description: putative NAD
  misc_feature (1)..(215): NCBI GI NO: 3114903 NR Description: phenylcoumaran benzylic ether reductase
  misc_feature (1)..(215): NCBI GI NO: 6573171 NR Description: isoflavone reductase homolog 2 [Glycine max]
  misc_feature (1)..(215): NCBI GI NO: 7578895 NR Description: phenylcoumaran benzylic ether reductase homolog Fi1
MAIKEAGNVIKRFLPSEFGSDPERVHTVDPAATLYAGKISLRRLIEAEGIPHTYVCCNGFAETYLVSIGDVTALGAGPRSDKITVLGDGVAKGVFVVEEDIAAYTVRAIEDTRTLNKILYMRPPANIVSHNELIALWEKKAGRTFQIARIPEPDLLKLIKEAAYPLNMMLSHSLSVLVRGDQANFDIEPSFGVEATELYPDVKYTTVDEYLDRLL

SEQ ID NO: 18881 - DNA, 1210 bp, Triticum aestivum
  misc_feature (1)..(1210): Ceres Seq. ID no. 14313544
acatcgatgagaaaaaggcagccaaggcgcacacttccaccacacaacgcgcgctttacgagagcagggaaccagaggggaactcgtgcttagctttcctgtagcttcgtttgcaccatccatggccgatccagccgaggagaccgtcgccgcgcccccgccgaccccggcagctcccgccgagggcgccccgccgctgtcggcggagccgccggctagcaccgacgcctcgccggagaaggcggccccgcctgcgcctgcgccggacacgacggtgaggtcccgggggttcaggctgctcggcgaggacacctccgtgcacaaggtgctcggtggcggtaaaactgctgatgtactgttatggaaggacaagaaaacaactgctgtagtgatcggtggcacaactgtcatatgggttttatttgaagtgcttgattaccatctcttaactctgctatcccatgtgatgattggtgtcctggccatcttgttcgtgtggtcgaaagctatgaccttcatcaagaagagtccgccagatattcctgtagtcgagatacctgaagacctcgctgtgaatgtatcacgggcactacgcagcgatgtcaacagatcacttcacttgttgcgcgagattgcaatggggcatgatctgaagaaattccttggtgtgattgctggtctctgggttctgtcagaagttggaagctgctgtgatttcctcaccttgatatatattgctgtcctgatgatccacacggtgccgatcttgtacgacaagtaccaggacaaggtggatcacttcgccggaaaggcccataccgaggcgtgcaagcactacgaggtgctggaccagaaggttctgagcaagataccccgaggaccggcgaaaaccaagaagacctagaatgctgggtgtctcgtgagtgcatgctgggtcgcttgtggttccgtgatcatatgcgtaatgcgacgagacgtcactcgtcttacggtcttgccttctgctcagcattgtattagctatttgtatatgcaactctgaaaacttcgaactgctacctttctactatcgcagtcgcttgtagatacctgtcctgttacttgtgtgtacgtgcggcagatgtgttctcgtgtggatgttcttagtgaaaacctgaatggatgttcttgaaagaaaataacctgctgaatactactggactattaatcc

SEQ ID NO: 18882 - protein, 260 aa, Triticum aestivum; identical to SEQ ID NO: 10829
  peptide (1)..(260): Ceres Seq. ID no. 14313545
  misc_feature (21)..(259): NCBI GI NO: 34904202 NR Description: P0492F05.25
  misc_feature (32)..(259): NCBI GI NO: 34909318 NR Description: OSJNBb0021A09.5
  misc_feature (58)..(260): NCBI GI NO: 34897094 NR Description: unknown protein
  misc_feature (49)..(260): NCBI GI NO: 34899590 NR Description: hypothetical protein~similar to Oryza sativachromosome3
  misc_feature (65)..(260): NCBI GI NO: 38345298 NR Description: OSJNBa0043A12.26
  misc_feature (1)..(251): NCBI GI NO: 4838513 NR Description: foocen-m2 [Rattus norvegicus]
  misc_feature (1)..(251): NCBI GI NO: 16740576 NR Description: RTN4 protein [Homo sapiens]
  misc_feature (1)..(251): NCBI GI NO: 24431933 NR Description: reticulon 4
  misc_feature (1)..(251): NCBI GI NO: 5821140 NR Description: ASY [Homo sapiens]
  misc_feature (1)..(251): NCBI GI NO: 34610241 NR Description: reticulon 4 isoform B2 [Mus musculus]

SEQ ID NO: 18883 - protein, 145 aa, Triticum aestivum; identical to SEQ ID NO: 10830
  peptide (1)..(145): Ceres Seq. ID no. 14313546
  misc_feature (1)..(144): NCBI GI NO: 34904202 NR Description: P0492F05.25
  misc_feature (1)..(144): NCBI GI NO: 34909318 NR Description: OSJNBb0021A09.5
  misc_feature (1)..(145): NCBI GI NO: 34897094 NR Description: unknown protein
  misc_feature (1)..(145): NCBI GI NO: 34899590 NR Description: hypothetical protein~similar to Oryza sativachromosome3
  misc_feature (1)..(145): NCBI GI NO: 38345298 NR Description: OSJNBa0043A12.26
  misc_feature (1)..(136): NCBI GI NO: 4838513 NR Description: foocen-m2 [Rattus norvegicus]
  misc_feature (1)..(136): NCBI GI NO: 16740576 NR Description: RTN4 protein [Homo sapiens]
  misc_feature (1)..(136): NCBI GI NO: 24431933 NR Description: reticulon 4
  misc_feature (1)..(136): NCBI GI NO: 5821140 NR Description: ASY [Homo sapiens]
  misc_feature (1)..(136): NCBI GI NO: 34610241 NR Description: reticulon 4 isoform B2 [Mus musculus]

SEQ ID NO: 18884 - protein, 131 aa, Triticum aestivum
  peptide (1)..(131): Ceres Seq. ID no. 14313547
  misc_feature (1)..(130): NCBI GI NO: 34904202 NR Description: P0492F05.25
  misc_feature (1)..(130): NCBI GI NO: 34909318 NR Description: OSJNBb0021A09.5
  misc_feature (1)..(131): NCBI GI NO: 34897094 NR Description: unknown protein
  misc_feature (1)..(131): NCBI GI NO: 34899590 NR Description: hypothetical protein~similar to Oryza sativachromosome3
  misc_feature (1)..(131): NCBI GI NO: 38345298 NR Description: OSJNBa0043A12.26
  misc_feature (1)..(122): NCBI GI NO: 4838513 NR Description: foocen-m2 [Rattus norvegicus]
  misc_feature (1)..(122): NCBI GI NO: 16740576 NR Description: RTN4 protein [Homo sapiens]
  misc_feature (1)..(122): NCBI GI NO: 24431933 NR Description: reticulon 4
  misc_feature (1)..(122): NCBI GI NO: 5821140 NR Description: ASY [Homo sapiens]
  misc_feature (1)..(122): NCBI GI NO: 34610241 NR Description: reticulon 4 isoform B2 [Mus musculus]
MTFIKKSPPDIPVVEIPEDLAVNVSRALRSDVNRSLHLLREIAMGHDLKKFLGVIAGLWVLSEVGSCCDFLTLIYIAVLMIHTVPILYDKYQDKVDHFAGKAHTEACKHYEVLDQKVLSKIPRGPAKTKKT

SEQ ID NO: 18885 - DNA, 1529 bp, Triticum aestivum
  misc_feature (1)..(1529): Ceres Seq. ID no. 14303576
atctgcgccttctggtgagagtacgtgtgttggttgttcttgcaggcacttgcacgcgtggtcaccatggagctgccccacgccgcgctcgcgctgatcgtcgccgcggccgccacgctctccgtcgcagtggcctacgacccgctggatcccaacgggaacatcaccatcaaatgggacgttctctcgtggacgccagacggatacgtcgcgacggtgacgatcaacaacttccagacgtaccggcagatcatggcgccggggtggacggtggggtggacgtgggcgaagcgggaggtgatctggtccatggtgggcgcgcaggccacggagcagggcgactgctccaagttcaaggccaacctcccgcactcgtgcaagcgcacccccgccgtcgtcgacctgctcccgggcgtgccctacaaccagcagatcgccaactgctgccgcggcggcgtcgtctccgcctacggccaggacccgtccggcgccgtgtcctccttccaggtcagcgtcggccaggccggcaccaccaaccgcaccgtcaaggtccccaagaacttcaccctcctcggccccggcccaggctacacctgcggccccgccaaggtcgtcccctccaccgtcttcctcaccgccgaccaccgccgcaagacccaggccctcatgacgtggaacgtgacgtgcacctactcgcagcacctggcgtccaagtacccgacctgctgcgtctccttctcctccttctacaacgacaccatcgtgccctgcgccaagtgcgcgtgcggctgcgagcacaagacctgcgcccgcagcgagcgggactcgaagcggctcatgtcggcgtcggggaagagcagcgcgcacgcggtcaccgcggtgcgcgggcacgtgaaccggcagagcgcggcgccgctgctgcagtgcacgacccacatgtgccccgtgcgcgtccactggcacgtcaagctcaactaccacgactactggcgcgccaaggtgaccgtcaccaacttcaactaccgcaccaactacaccggctggacgctcgtcgcccagcaccccaacctcgacaacatcaccgaggtcttcagcttcgactacaagcccgtcgtctcctacggctccatcaatgatacggcgctgttctacgggatgaagttcttcaacgaccagctcatggaggcggggccgtacgggaacgtgcagtcggaggtgctgatgcgcaaggacgccagcacattcacgttcaggcaggggtgggcgttcccgcggaagatctacttcaacggcgacgagtgccggatgccgccgccggactcctacccttacctgcccaactccgcgccggcgtcgctcgtgagctccgcctccgtcgtcgtcgccttcttggttctactcatggcatgagcgtcggaggcggccatgatgttttgcctgtagatcataggagaacgttttgggcttcaaggttgagatcggtggtgttttaatctggatataattaaacgcaagtttttccccattac

SEQ ID NO: 18886 - protein, 447 aa, Triticum aestivum
  peptide (1)..(447): Ceres Seq. ID no. 14303577
  misc_feature (10)..(447): NCBI GI NO: 34394570 NR Description: putative phytochelatin synthetase
  misc_feature (1)..(264): NCBI GI NO: 34014146 NR Description: BRITTLE CULM1
  misc_feature (271)..(445): NCBI GI NO: 34014146 NR Description: BRITTLE CULM1
  misc_feature (21)..(444): NCBI GI NO: 30685446 NR Description: phytochelatin synthetase -related
  misc_feature (40)..(444): NCBI GI NO: 11358657 NR Description: probable phytochelatin synthetase - Arabidopsisthaliana
  misc_feature (1)..(443): NCBI GI NO: 21553837 NR Description: phytochelatin synthetase-like protein
  misc_feature (1)..(443): NCBI GI NO: 18424412 NR Description: phytochelatin synthetase - like protein
  misc_feature (10)..(445): NCBI GI NO: 15232863 NR Description: predicted GPI-anchored protein
  misc_feature (6)..(428): NCBI GI NO: 30090032 NR Description: phytochelatin synthetase [Triticum monococcum]
  misc_feature (6)..(428): NCBI GI NO: 38230578 NR Description: phytochelatin synthetase [Triticum aestivum]
MELPHAALALIVAAAATLSVAVAYDPLDPNGNITIKWDVLSWTPDGYVATVTINNFQTYRQIMAPGWTVGWTWAKREVIWSMVGAQATEQGDCSKFKANLPHSCKRTPAVVDLLPGVPYNQQIANCCRGGVVSAYGQDPSGAVSSFQVSVGQAGTTNRTVKVPKNFTLLGPGPGYTCGPAKVVPSTVFLTADHRRKTQALMTWNVTCTYSQHLASKYPTCCVSFSSFYNDTIVPCAKCACGCEHKTCARSERDSKRLMSASGKSSAHAVTAVRGHVNRQSAAPLLQCTTHMCPVRVHWHVKLNYHDYWRAKVTVTNFNYRTNYTGWTLVAQHPNLDNITEVFSFDYKPVVSYGSINDTALFYGMKFFNDQLMEAGPYGNVQSEVLMRKDASTFTFRQGWAFPRKIYFNGDECRMPPPDSYPYLPNSAPASLVSSASVVVAFLVLLMA

SEQ ID NO: 18887 - protein, 385 aa, Triticum aestivum
  peptide (1)..(385): Ceres Seq. ID no. 14303578
  misc_feature (1)..(385): NCBI GI NO: 34394570 NR Description: putative phytochelatin synthetase
  misc_feature (1)..(202): NCBI GI NO: 34014146 NR Description: BRITTLE CULM1
  misc_feature (209)..(383): NCBI GI NO: 34014146 NR Description: BRITTLE CULM1
  misc_feature (1)..(382): NCBI GI NO: 30685446 NR Description: phytochelatin synthetase -related
  misc_feature (1)..(382): NCBI GI NO: 11358657 NR Description: probable phytochelatin synthetase - Arabidopsisthaliana
  misc_feature (1)..(381): NCBI GI NO: 21553837 NR Description: phytochelatin synthetase-like protein
  misc_feature (1)..(381): NCBI GI NO: 18424412 NR Description: phytochelatin synthetase - like protein
  misc_feature (1)..(383): NCBI GI NO: 15232863 NR Description: predicted GPI-anchored protein
  misc_feature (1)..(366): NCBI GI NO: 30090032 NR Description: phytochelatin synthetase [Triticum monococcum]
  misc_feature (1)..(366): NCBI GI NO: 38230578 NR Description: phytochelatin synthetase [Triticum aestivum]
MAPGWTVGWTWAKREVIWSMVGAQATEQGDCSKFKANLPHSCKRTPAVVDLLPGVPYNQQIANCCRGGVVSAYGQDPSGAVSSFQVSVGQAGTTNRTVKVPKNFTLLGPGPGYTCGPAKVVPSTVFLTADHRRKTQALMTWNVTCTYSQHLASKYPTCCVSFSSFYNDTIVPCAKCACGCEHKTCARSERDSKRLMSASGKSSAHAVTAVRGHVNRQSAAPLLQCTTHMCPVRVHWHVKLNYHDYWRAKVTVTNFNYRTNYTGWTLVAQHPNLDNITEVFSFDYKPVVSYGSINDTALFYGMKFFNDQLMEAGPYGNVQSEVLMRKDASTFTFRQGWAFPRKIYFNGDECRMPPPDSYPYLPNSAPASLVSSASVVVAFLVLLMA

SEQ ID NO: 18888 - protein, 377 aa, Triticum aestivum
  peptide (1)..(377): Ceres Seq. ID no. 14303579
LRLLVRVRVLVVLAGTCTRGHHGAAPRRARADRRRGRHALRRSGLRPAGSQREHHHQMGRSLVDARRIRRDGDDQQLPDVPADHGAGVDGGVDVGEAGGDLVHGGRAGHGAGRLLQVQGQPPALVQAHPRRRRPAPGRALQPADRQLLPRRRRLRLRPGPVRRRVLLPGQRRPGRHHQPHRQGPQELHPPRPRPRLHLRPRQGRPLHRLPHRRPPPQDPGPHDVERDVHLLAAPGVQVPDLLRLLLLLLQRHHRALRQVRVRLRAQDLRPQRAGLEAAHVGVGEEQRARGHRGARAREPAERGAAAAVHDPHVPRARPLARQAQLPRLLARQGDRHQLQLPHQLHRLDARRPAPQPRQHHRGLQLRLQARRLLRLHQ

SEQ ID NO: 18889 - DNA, 541 bp, Triticum aestivum
  misc_feature (1)..(541): Ceres Seq. ID no. 13589020
  misc_feature (437)..(437): n is a, c, t, g, unknown, or other
  misc_feature (361)..(361): n is a, c, t, g, unknown, or other
  misc_feature (462)..(462): n is a, c, t, g, unknown, or other
aactcccggtcccggacgacctgcttggctgcgcgcgtctcgataccacctaccccgtcgccgtcagagcctcttcccacgcgccgctcccctgtccccgcaccccccgccgccgccgccgccgctccccgggacgagatggaggtcgctgccgctgccgccgccgtcgccgtcccgaggcacaaggtgaagaagcagattaacctcttctactgcgccgagtgcgaggagctcgccctcaaggtcgccgccgcctccgacgccatccagctccagtctatcaactggaggaacttccccgacgggttcccgaacctcttcatcaacaacgcgcacgacatccgggggcaagacgttggcnttcttggcttctttaagttggccgggaatcatttttgaacagatttccgtattcttcgcgcttgcccaagctcttnatcgcctccttcacgctcgtgctgnccttcttcccaaccggtaccttcgagcgcgtcgaggaggagggcgacgtcgccaccggcttcacgctcgcgcgcatcct

SEQ ID NO: 18890 - protein, 132 aa, Triticum aestivum
  peptide (1)..(132): Ceres Seq. ID no. 13589021
  misc_feature (47)..(125): NCBI GI NO: 22671730 NR Description: phosphoribosyl pyrophosphate synthetase
  misc_feature (64)..(125): NCBI GI NO: 15228027 NR Description: ribose phosphate pyrophosphokinase -related
  misc_feature (65)..(125): NCBI GI NO: 4902879 NR Description: phosphoribosyl pyrophosphate synthase isozyme 4
  misc_feature (65)..(132): NCBI GI NO: 4902877 NR Description: phosphoribosyl pyrophosphate synthase isozyme 3
  misc_feature (50)..(125): NCBI GI NO: 34910736 NR Description: putative phosphoribosyl pyrophosphate synthase
  misc_feature (53)..(125): NCBI GI NO: 25529012 NR Description: ribose-phosphate diphosphokinase (EC 2
  misc_feature (53)..(125): NCBI GI NO: 15220191 NR Description: phosphoribosyl diphosphate synthase
  misc_feature (53)..(125): NCBI GI NO: 25402614 NR Description: hypothetical protein
  misc_feature (53)..(125): NCBI GI NO: 6573738 NR Description: F20B24.13 [Arabidopsis thaliana]
  misc_feature (121)..(121): Xaa is any aa, unknown or other
NSRSRTTCLAARVSIPPTPSPSEPLPTRRSPVPAPPAAAAAAPRDEMEVAAAAAAVAVPRHKVKKQINLFYCAECEELALKVAAASDAIQLQSINWRNFPDGFPNLFINNAHDIRGQDVGXLGFFKLAGNHF

SEQ ID NO: 18891 - protein, 86 aa, Triticum aestivum
  peptide (1)..(86): Ceres Seq. ID no. 13589022
  misc_feature (1)..(79): NCBI GI NO: 22671730 NR Description: phosphoribosyl pyrophosphate synthetase
  misc_feature (18)..(79): NCBI GI NO: 15228027 NR Description: ribose phosphate pyrophosphokinase -related
  misc_feature (19)..(79): NCBI GI NO: 4902879 NR Description: phosphoribosyl pyrophosphate synthase isozyme 4
  misc_feature (19)..(86): NCBI GI NO: 4902877 NR Description: phosphoribosyl pyrophosphate synthase isozyme 3
  misc_feature (4)..(79): NCBI GI NO: 34910736 NR Description: putative phosphoribosyl pyrophosphate synthase
  misc_feature (7)..(79): NCBI GI NO: 25529012 NR Description: ribose-phosphate diphosphokinase (EC 2
  misc_feature (7)..(79): NCBI GI NO: 15220191 NR Description: phosphoribosyl diphosphate synthase
  misc_feature (7)..(79): NCBI GI NO: 25402614 NR Description: hypothetical protein
  misc_feature (7)..(79): NCBI GI NO: 6573738 NR Description: F20B24.13 [Arabidopsis thaliana]
  misc_feature (75)..(75): Xaa is any aa, unknown or other
MEVAAAAAAVAVPRHKVKKQINLFYCAECEELALKVAAASDAIQLQSINWRNFPDGFPNLFINNAHDIRGQDVGXLGFFKLAGNHF

SEQ ID NO: 18892 - protein, 66 aa, Triticum aestivum
  peptide (1)..(66): Ceres Seq. ID no. 13589023
LPVPDDLLGCARLDTTYPVAVRASSHAPLPCPRTPRRRRRRSPGRDGGRCRCRRRRRPEAQGEEAD

SEQ ID NO: 18893 - DNA, 1410 bp, Triticum aestivum
  misc_feature (1)..(1410): Ceres Seq. ID no. 14313551
aggcttgtggtgctcccatcccatggcgccgtggctgctgctcccctccttcccgtggcctcccccgccccctcccggctcctcctctggccgcggcggcggaggcggtggaggcgacggcggagattggaagcccaacgtcgtcacggccatcgccggcgtccacctcggccgctccctccgccgtcgcctcgccggcctcctctgctcgccggaggtgcggtctcttgatgtcttaccgagaataggtgacatttggtttggaggatcacagccacttgacacacagcaccttcttgggacgctgggaaatgtgttctccacatcgtttgtttgcagttctgcttttttcggtgggaataggtcaggtgggagatacgtcggtagcggaaatttgcagcccagacggtctcatgggatcaactcgaagaagaggctgtggactaatgtccttcttgctgttaacatcctggcttatatcgctcagatagcatcgcaaggaaagcttcttatgtggggagcaaaggtcaacagcctgattgatagaggggagttttggcgtttggctacatcaacaattcttcatggaaatcttactcatcttgctttcaattgtttttctttgaattcgattggccctactgtggagctcgttactggtcctaaaagatttcttgctgtttatttcacttccgcactggcaggttcactaatgagttatcgctattgtcaatcaccttctgttggcgcatcaggggccatttttggactggttggtgcctatgctgtttatacatggaggcacagaaagcttttggggcatggaagggaaagtttagagcagatcgcacgtgtggtcatcttaaacatgggtatgggtctcctttcaaggggcattgacaactggggtcatctaggaggcttgctcgggggagtggctgcggcatggtttcttggtccagcttggcaaaatcagtatgtaccaaaggagggaagaatggtgttcaaagacagggcacccattcaccagctaataggcagtaaacgatcgcggtaacagcgtgtatgataaccgtgctcctatttttactgtgtatattagctgagaaacgtgggagaggaaggataaaagaaagtaagaaggaagatcgagacaacataccaagcaaagggagcagccgaaaaccatggctgatacctagttttgcagaagaaatcacccaccatgtccatgtgtggcggctgctgagctagctctagctcagaggagaagagcagtgcctctcgagctagttggtgtgtttggatcatttgcaactgttacacttgtgacagggtaggtcaggcgatactgacaattgtattttacgtacatgtttatttatcaagcattgctagcgcctcgttgat

SEQ ID NO: 18894 - protein, 351 aa, Triticum aestivum
  peptide (1)..(351): Ceres Seq. ID no. 14313552
  misc_feature (107)..(345): NCBI GI NO: 11761473 NR Description: unknown protein [Arabidopsis thaliana]
  misc_feature (107)..(345): NCBI GI NO: 30689150 NR Description: membrane protein, Rhomboid family
  misc_feature (107)..(330): NCBI GI NO: 25518651 NR Description: hypothetical protein F4F7
  misc_feature (169)..(320): NCBI GI NO: 22972591 NR Description: hypothetical protein [Chloroflexus aurantiacus]
  misc_feature (140)..(334): NCBI GI NO: 23020903 NR Description: hypothetical protein
  misc_feature (143)..(312): NCBI GI NO: 28210270 NR Description: conserved membrane protein (rhomboid family)
  misc_feature (148)..(318): NCBI GI NO: 23121840 NR Description: hypothetical protein
  misc_feature (144)..(319): NCBI GI NO: 16079543 NR Description: similar to hypothetical proteins
  misc_feature (132)..(323): NCBI GI NO: 15894241 NR Description: Uncharacterized membrane protein
  misc_feature (148)..(319): NCBI GI NO: 28378276 NR Description: integral membrane protein
GLWCSHPMAPWLLLPSFPWPPPPPPGSSSGRGGGGGGGDGGDWKPNVVTAIAGVHLGRSLRRRLAGLLCSPEVRSLDVLPRIGDIWFGGSQPLDTQHLLGTLGNVFSTSFVCSSAFFGGNRSGGRYVGSGNLQPRRSHGINSKKRLWTNVLLAVNILAYIAQIASQGKLLMWGAKVNSLIDRGEFWRLATSTILHGNLTHLAFNCFSLNSIGPTVELVTGPKRFLAVYFTSALAGSLMSYRYCQSPSVGASGAIFGLVGAYAVYTWRHRKLLGHGRESLEQIARVVILNMGMGLLSRGIDNWGHLGGLLGGVAAAWFLGPAWQNQYVPKEGRMVFKDRAPIHQLIGSKRSR

SEQ ID NO: 18895 - protein, 344 aa, Triticum aestivum
  peptide (1)..(344): Ceres Seq. ID no. 14313553
  misc_feature (100)..(338): NCBI GI NO: 11761473 NR Description: unknown protein [Arabidopsis thaliana]
  misc_feature (100)..(338): NCBI GI NO: 30689150 NR Description: membrane protein, Rhomboid family
  misc_feature (100)..(323): NCBI GI NO: 25518651 NR Description: hypothetical protein F4F7
  misc_feature (162)..(313): NCBI GI NO: 22972591 NR Description: hypothetical protein [Chloroflexus aurantiacus]
  misc_feature (133)..(327): NCBI GI NO: 23020903 NR Description: hypothetical protein
  misc_feature (136)..(305): NCBI GI NO: 28210270 NR Description: conserved membrane protein (rhomboid family)
  misc_feature (141)..(311): NCBI GI NO: 23121840 NR Description: hypothetical protein
  misc_feature (137)..(312): NCBI GI NO: 16079543 NR Description: similar to hypothetical proteins
  misc_feature (125)..(316): NCBI GI NO: 15894241 NR Description: Uncharacterized membrane protein
  misc_feature (141)..(312): NCBI GI NO: 28378276 NR Description: integral membrane protein
MAPWLLLPSFPWPPPPPPGSSSGRGGGGGGGDGGDWKPNVVTAIAGVHLGRSLRRRLAGLLCSPEVRSLDVLPRIGDIWFGGSQPLDTQHLLGTLGNVFSTSFVCSSAFFGGNRSGGRYVGSGNLQPRRSHGINSKKRLWTNVLLAVNILAYIAQIASQGKLLMWGAKVNSLIDRGEFWRLATSTILHGNLTHLAFNCFSLNSIGPTVELVTGPKRFLAVYFTSALAGSLMSYRYCQSPSVGASGAIFGLVGAYAVYTWRHRKLLGHGRESLEQIARVVILNMGMGLLSRGIDNWGHLGGLLGGVAAAWFLGPAWQNQYVPKEGRMVFKDRAPIHQLIGSKRSR

SEQ ID NO: 18896 - protein, 181 aa, Triticum aestivum
  peptide (1)..(181): Ceres Seq. ID no. 14313554
  misc_feature (1)..(175): NCBI GI NO: 11761473 NR Description: unknown protein [Arabidopsis thaliana]
  misc_feature (1)..(175): NCBI GI NO: 30689150 NR Description: membrane protein, Rhomboid family
  misc_feature (1)..(160): NCBI GI NO: 25518651 NR Description: hypothetical protein F4F7
  misc_feature (1)..(150): NCBI GI NO: 22972591 NR Description: hypothetical protein [Chloroflexus aurantiacus]
  misc_feature (1)..(164): NCBI GI NO: 23020903 NR Description: hypothetical protein
  misc_feature (1)..(142): NCBI GI NO: 28210270 NR Description: conserved membrane protein (rhomboid family)
  misc_feature (1)..(148): NCBI GI NO: 23121840 NR Description: hypothetical protein
  misc_feature (1)..(149): NCBI GI NO: 16079543 NR Description: similar to hypothetical proteins
  misc_feature (1)..(153): NCBI GI NO: 15894241 NR Description: Uncharacterized membrane protein
  misc_feature (1)..(149): NCBI GI NO: 28378276 NR Description: integral membrane protein
MWGAKVNSLIDRGEFWRLATSTILHGNLTHLAFNCFSLNSIGPTVELVTGPKRFLAVYFTSALAGSLMSYRYCQSPSVGASGAIFGLVGAYAVYTWRHRKLLGHGRESLEQIARVVILNMGMGLLSRGIDNWGHLGGLLGGVAAAWFLGPAWQNQYVPKEGRMVFKDRAPIHQLIGSKRSR

SEQ ID NO: 18897 - DNA, 1425 bp, Triticum aestivum
  misc_feature (1)..(1425): Ceres Seq. ID no. 13662335
ctacttcaaatagacttggaatgggccattagtacgagttggtgtggtgtgcatcgcgatctatggacatggacatggaggagcctccccacctgttcctgtgccccatctccatggagctcatgcaggagcccgtcacggtgtccaccggcgtcacctacgaccgccgcagcatcgagcgctggctcttctcgtacggccgggccacctgcccggccaccatgcagccgctcgccaaccttgacctcaccccgaaccacaccctcgcgcgcgtcatctcctcctggctcgaccgcggctccccttcctcctcctcctcgtcttcgtcgtcgccgtccacgtcgtcgctgtcgagtccggtccacgagctggggacgccgctgacgaggatgctggaggaggagcggctgcggtcggcgctgggcgacctcgaggagacgccgttcaaggtgaccgcgctcaagagcatgcggagctgcatggcgggcgacgtggccatgcagatcatcttcgtcgcctcgggcggcgttgaggcggtcggccgcgtgatggcgcaggcgctggccgagagcggcgcgggaggcgacttctccgcgttcacggtgtgcgaggaggccgccgcggtgctcgccgcgctcccgctctccgacaaggcgtcggtggggctcgttcttgcgccggagtgcctgaggcccgtcatggcgttgctccagcgcggcagcgcggaggcgaggttgcacgccatggacatcctcaccaagatctccagtgccggcgccggtgaccactggactgccggcatcgacgtcgacgacgtgctcaagtccctcctcgagctcctgtctgacgaggtctccgcgcgcctcagctcgcgcgcgctcgacgtgctgctggacgtcgtggagcggtcgccgagcgggcgcgccaaggccgtggaggtcggcgcggtgcacgtcctcgtcgagctcctcgtcgtggacgccgacgaccgccacgtcgccgagcggatactgctgcttctcaagcggctgtgcaagtgccccgagggccgcctcgccttcgccgagcacgacctgtcggtcgcggccgtggcgaggacaatgctgagggtgtcggatctggccacgcagctggccgtcaaggtgctgtggctcgtgtccatggtggcgcagtcggagaaggtgctcgaggacatggtgctcaccggcgccgtggcgaagctgctggggctgctgcacgtcgagagcgcgccgtccacgaagcaaaagacggtgaggatggtgaggatccacggcgtgttctggaggcagtacccttgcttccccaccgacctcaaggattacttgaggttgctcgattgatttgttcattagttccagataatctgcaagaaaagtgaacaaaaaccgtgaattttcttatagt

SEQ ID NO: 18898 - protein, 432 aa, Triticum aestivum
  peptide (1)..(432): Ceres Seq. ID no. 13662336
  misc_feature (7)..(75): Pfam Name: Pfam Description:  U-box domain
  misc_feature (7)..(432): NCBI GI NO: 38346713 NR Description: OSJNBa0086O06.11
  misc_feature (106)..(424): NCBI GI NO: 25408431 NR Description: hypothetical protein At2g35930
  misc_feature (106)..(424): NCBI GI NO: 30686609 NR Description: expressed protein [Arabidopsis thaliana]
  misc_feature (1)..(75): NCBI GI NO: 25408431 NR Description: hypothetical protein At2g35930
  misc_feature (1)..(75): NCBI GI NO: 30686609 NR Description: expressed protein [Arabidopsis thaliana]
  misc_feature (3)..(426): NCBI GI NO: 15231222 NR Description: expressed protein [Arabidopsis thaliana]
  misc_feature (132)..(425): NCBI GI NO: 21741126 NR Description: OSJNBa0070M12.4
  misc_feature (1)..(153): NCBI GI NO: 21741126 NR Description: OSJNBa0070M12.4
  misc_feature (2)..(429): NCBI GI NO: 30013683 NR Description: Avr9/Cf-9 rapidly elicited protein 74
  misc_feature (176)..(420): NCBI GI NO: 18402223 NR Description: expressed protein [Arabidopsis thaliana]
MDMDMEEPPHLFLCPISMELMQEPVTVSTGVTYDRRSIERWLFSYGRATCPATMQPLANLDLTPNHTLARVISSWLDRGSPSSSSSSSSSPSTSSLSSPVHELGTPLTRMLEEERLRSALGDLEETPFKVTALKSMRSCMAGDVAMQIIFVASGGVEAVGRVMAQALAESGAGGDFSAFTVCEEAAAVLAALPLSDKASVGLVLAPECLRPVMALLQRGSAEARLHAMDILTKISSAGAGDHWTAGIDVDDVLKSLLELLSDEVSARLSSRALDVLLDVVERSPSGRAKAVEVGAVHVLVELLVVDADDRHVAERILLLLKRLCKCPEGRLAFAEHDLSVAAVARTMLRVSDLATQLAVKVLWLVSMVAQSEKVLEDMVLTGAVAKLLGLLHVESAPSTKQKTVRMVRIHGVFWRQYPCFPTDLKDYLRLLD

SEQ ID NO: 18899 - protein, 430 aa, Triticum aestivum
  peptide (1)..(430): Ceres Seq. ID no. 13662337
  misc_feature (5)..(73): Pfam Name: Pfam Description:  U-box domain
  misc_feature (5)..(430): NCBI GI NO: 38346713 NR Description: OSJNBa0086O06.11
  misc_feature (104)..(422): NCBI GI NO: 25408431 NR Description: hypothetical protein At2g35930
  misc_feature (104)..(422): NCBI GI NO: 30686609 NR Description: expressed protein [Arabidopsis thaliana]
  misc_feature (1)..(73): NCBI GI NO: 25408431 NR Description: hypothetical protein At2g35930
  misc_feature (1)..(73): NCBI GI NO: 30686609 NR Description: expressed protein [Arabidopsis thaliana]
  misc_feature (1)..(424): NCBI GI NO: 15231222 NR Description: expressed protein [Arabidopsis thaliana]
  misc_feature (130)..(423): NCBI GI NO: 21741126 NR Description: OSJNBa0070M12.4
  misc_feature (1)..(151): NCBI GI NO: 21741126 NR Description: OSJNBa0070M12.4
  misc_feature (1)..(427): NCBI GI NO: 30013683 NR Description: Avr9/Cf-9 rapidly elicited protein 74
  misc_feature (174)..(418): NCBI GI NO: 18402223 NR Description: expressed protein [Arabidopsis thaliana]
MDMEEPPHLFLCPISMELMQEPVTVSTGVTYDRRSIERWLFSYGRATCPATMQPLANLDLTPNHTLARVISSWLDRGSPSSSSSSSSSPSTSSLSSPVHELGTPLTRMLEEERLRSALGDLEETPFKVTALKSMRSCMAGDVAMQIIFVASGGVEAVGRVMAQALAESGAGGDFSAFTVCEEAAAVLAALPLSDKASVGLVLAPECLRPVMALLQRGSAEARLHAMDILTKISSAGAGDHWTAGIDVDDVLKSLLELLSDEVSARLSSRALDVLLDVVERSPSGRAKAVEVGAVHVLVELLVVDADDRHVAERILLLLKRLCKCPEGRLAFAEHDLSVAAVARTMLRVSDLATQLAVKVLWLVSMVAQSEKVLEDMVLTGAVAKLLGLLHVESAPSTKQKTVRMVRIHGVFWRQYPCFPTDLKDYLRLLD

SEQ ID NO: 18900 - protein, 428 aa, Triticum aestivum
  peptide (1)..(428): Ceres Seq. ID no. 13662338
  misc_feature (3)..(71): Pfam Name: Pfam Description:  U-box domain
  misc_feature (3)..(428): NCBI GI NO: 38346713 NR Description: OSJNBa0086O06.11
  misc_feature (102)..(420): NCBI GI NO: 25408431 NR Description: hypothetical protein At2g35930
  misc_feature (102)..(420): NCBI GI NO: 30686609 NR Description: expressed protein [Arabidopsis thaliana]
  misc_feature (1)..(71): NCBI GI NO: 25408431 NR Description: hypothetical protein At2g35930
  misc_feature (1)..(71): NCBI GI NO: 30686609 NR Description: expressed protein [Arabidopsis thaliana]
  misc_feature (1)..(422): NCBI GI NO: 15231222 NR Description: expressed protein [Arabidopsis thaliana]
  misc_feature (128)..(421): NCBI GI NO: 21741126 NR Description: OSJNBa0070M12.4
  misc_feature (1)..(149): NCBI GI NO: 21741126 NR Description: OSJNBa0070M12.4
  misc_feature (1)..(425): NCBI GI NO: 30013683 NR Description: Avr9/Cf-9 rapidly elicited protein 74
  misc_feature (172)..(416): NCBI GI NO: 18402223 NR Description: expressed protein [Arabidopsis thaliana]
MEEPPHLFLCPISMELMQEPVTVSTGVTYDRRSIERWLFSYGRATCPATMQPLANLDLTPNHTLARVISSWLDRGSPSSSSSSSSSPSTSSLSSPVHELGTPLTRMLEEERLRSALGDLEETPFKVTALKSMRSCMAGDVAMQIIFVASGGVEAVGRVMAQALAESGAGGDFSAFTVCEEAAAVLAALPLSDKASVGLVLAPECLRPVMALLQRGSAEARLHAMDILTKISSAGAGDHWTAGIDVDDVLKSLLELLSDEVSARLSSRALDVLLDVVERSPSGRAKAVEVGAVHVLVELLVVDADDRHVAERILLLLKRLCKCPEGRLAFAEHDLSVAAVARTMLRVSDLATQLAVKVLWLVSMVAQSEKVLEDMVLTGAVAKLLGLLHVESAPSTKQKTVRMVRIHGVFWRQYPCFPTDLKDYLRLLD

SEQ ID NO: 18901 - DNA, 1559 bp, Triticum aestivum
  misc_feature (1)..(1559): Ceres Seq. ID no. 13654557
agcctctccccccgccgccgcccaagccgctaccctttcctcctccccgccgccgccgccgccatggccaccaccgcgcgcccgctcgtctccgtcaaggctctggacggggacatggcaaccgacgcggccggcgtcccgatgccgcacgtcatgaaggcgccgatccgccccgacgtcatcaccttcgtccacaggctcgtctcctgcaacagccgccagccctacgccgtctcccgcaaggccggtcaccagacctcggccgagtcctggggcacgggtcgcgccgtctcgcgtatcccgcgtgtcggcggtggcggtacccaccgcgccggccagggagccttcggcaacatgtgccgtggcggacgcatgttcgcgcccacccggatctggcgcaagtggcaccgtcgcgtcaacgtccgcctccgccgcgtcgccgtcgcctccgccctcgccgccaccgccgtcccggccatcgtcaccgcccgcggccaccgcatcgagtccgtccccgagttcccgctcgtcgtctccgactcggccgagggcatcgagaagaccgcccaggccatcaaggtcctcaagcagctgggcgcctacgccgacgccgagaaggccaagctgtccgtgggcatccgccccggcaagggtaagatgcgcaaccgcaggtacatcaaccgcaagggccccctcatcgtctacggcaccgagggctccaagatcgtcaaggccttccgcaacctccctggtgtggatgttgccaacgtcgagcgcctcaacttgctcgaccttgcccctggtggccaccttggccggtttgtgatctggaccgagtctgccttcaagaagctggacgaggtgtacggctcctttgaggcgtcttcctccaagaagaagggcttcgttctccccaggcccaagatgaccaatgctgaccttggccgcctcatcaactctgatgaggtccagtctgtggtgaagcccatcaacaaggaggtcaagcgcagggaggccaggaagaaccctctgaagaacgctgctgccgtcctcaagctgaacccctattttggaactgcccgcaggatggcagttcttgctgaggcagcccgtgttaaggccaggaaggagaagatcaactccaagaggaccaagctcagcgcggaggaggcatctaagatcaaggctgctgggaaggcctggtaccagaccatgatctctgacagcgactacactgagttcgacgtcttctccaagtggctcggcgtcagccagtgatcatctagttgtagtagcagtctatcgtcctaccttaagagaccctaaagtatgattttgtgtcatgttatcgtttatctggagtctgagacatcttgctgttttggtagctgtttatctcaagtgttttatctatggacgcattttgggagacatgttatatggcatgctttatcgtcgtcgagttcttagttcagattttgagtcgtgtttttcatatatactttgttatgaatgcgaaataatttttggcattgtgaagttttgtggttggcataccc

SEQ ID NO: 18902 - protein, 425 aa, Triticum aestivum
  peptide (1)..(425): Ceres Seq. ID no. 13654558
  misc_feature (46)..(288): Pfam Name: Pfam Description:  Ribosomal protein L4/L1 family
  misc_feature (22)..(425): NCBI GI NO: 34897236 NR Description: putative 60S ribosomal protein L1
  misc_feature (22)..(425): NCBI GI NO: 34393487 NR Description: putative 60S ribosomal protein L4/L1
  misc_feature (23)..(425): NCBI GI NO: 15232723 NR Description: 60S ribosomal protein L4/L1 (RPL4A)
  misc_feature (20)..(425): NCBI GI NO: 17367847 NR Description: 60S ribosomal protein L4 (L1)
  misc_feature (23)..(425): NCBI GI NO: 15242558 NR Description: 60S ribosomal protein L4/L1 (RPL4D)
  misc_feature (23)..(425): NCBI GI NO: 21593543 NR Description: 60S ribosomal protein L4-B (L1)
  misc_feature (23)..(425): NCBI GI NO: 26450328 NR Description: putative 60S ribosomal protein
  misc_feature (119)..(425): NCBI GI NO: 13605831 NR Description: AT5g02870/F9G14_180 [Arabidopsis thaliana]
  misc_feature (19)..(395): NCBI GI NO: 32822849 NR Description: Ribosomal protein [Xenopus laevis]
  misc_feature (19)..(395): NCBI GI NO: 27694877 NR Description: Similar to ribosomal protein [Xenopus laevis]
SLSPRRRPSRYPFLLPAAAAAMATTARPLVSVKALDGDMATDAAGVPMPHVMKAPIRPDVITFVHRLVSCNSRQPYAVSRKAGHQTSAESWGTGRAVSRIPRVGGGGTHRAGQGAFGNMCRGGRMFAPTRIWRKWHRRVNVRLRRVAVASALAATAVPAIVTARGHRIESVPEFPLVVSDSAEGIEKTAQAIKVLKQLGAYADAEKAKLSVGIRPGKGKMRNRRYINRKGPLIVYGTEGSKIVKAFRNLPGVDVANVERLNLLDLAPGGHLGRFVIWTESAFKKLDEVYGSFEASSSKKKGFVLPRPKMTNADLGRLINSDEVQSVVKPINKEVKRREARKNPLKNAAAVLKLNPYFGTARRMAVLAEAARVKARKEKINSKRTKLSAEEASKIKAAGKAWYQTMISDSDYTEFDVFSKWLGVSQ

SEQ ID NO: 18903 - protein, 404 aa, Triticum aestivum
  peptide (1)..(404): Ceres Seq. ID no. 13654559
  misc_feature (25)..(267): Pfam Name: Pfam Description:  Ribosomal protein L4/L1 family
  misc_feature (1)..(404): NCBI GI NO: 34897236 NR Description: putative 60S ribosomal protein L1
  misc_feature (1)..(404): NCBI GI NO: 34393487 NR Description: putative 60S ribosomal protein L4/L1
  misc_feature (2)..(404): NCBI GI NO: 15232723 NR Description: 60S ribosomal protein L4/L1 (RPL4A)
  misc_feature (1)..(404): NCBI GI NO: 17367847 NR Description: 60S ribosomal protein L4 (L1)
  misc_feature (2)..(404): NCBI GI NO: 15242558 NR Description: 60S ribosomal protein L4/L1 (RPL4D)
  misc_feature (2)..(404): NCBI GI NO: 21593543 NR Description: 60S ribosomal protein L4-B (L1)
  misc_feature (2)..(404): NCBI GI NO: 26450328 NR Description: putative 60S ribosomal protein
  misc_feature (98)..(404): NCBI GI NO: 13605831 NR Description: AT5g02870/F9G14_180 [Arabidopsis thaliana]
  misc_feature (1)..(374): NCBI GI NO: 32822849 NR Description: Ribosomal protein [Xenopus laevis]
  misc_feature (1)..(374): NCBI GI NO: 27694877 NR Description: Similar to ribosomal protein [Xenopus laevis]
MATTARPLVSVKALDGDMATDAAGVPMPHVMKAPIRPDVITFVHRLVSCNSRQPYAVSRKAGHQTSAESWGTGRAVSRIPRVGGGGTHRAGQGAFGNMCRGGRMFAPTRIWRKWHRRVNVRLRRVAVASALAATAVPAIVTARGHRIESVPEFPLVVSDSAEGIEKTAQAIKVLKQLGAYADAEKAKLSVGIRPGKGKMRNRRYINRKGPLIVYGTEGSKIVKAFRNLPGVDVANVERLNLLDLAPGGHLGRFVIWTESAFKKLDEVYGSFEASSSKKKGFVLPRPKMTNADLGRLINSDEVQSVVKPINKEVKRREARKNPLKNAAAVLKLNPYFGTARRMAVLAEAARVKARKEKINSKRTKLSAEEASKIKAAGKAWYQTMISDSDYTEFDVFSKWLGVSQ

SEQ ID NO: 18904 - protein, 387 aa, Triticum aestivum
  peptide (1)..(387): Ceres Seq. ID no. 13654560
  misc_feature (8)..(250): Pfam Name: Pfam Description:  Ribosomal protein L4/L1 family
  misc_feature (1)..(387): NCBI GI NO: 34897236 NR Description: putative 60S ribosomal protein L1
  misc_feature (1)..(387): NCBI GI NO: 34393487 NR Description: putative 60S ribosomal protein L4/L1
  misc_feature (1)..(387): NCBI GI NO: 15232723 NR Description: 60S ribosomal protein L4/L1 (RPL4A)
  misc_feature (1)..(387): NCBI GI NO: 17367847 NR Description: 60S ribosomal protein L4 (L1)
  misc_feature (1)..(387): NCBI GI NO: 15242558 NR Description: 60S ribosomal protein L4/L1 (RPL4D)
  misc_feature (1)..(387): NCBI GI NO: 21593543 NR Description: 60S ribosomal protein L4-B (L1)
  misc_feature (1)..(387): NCBI GI NO: 26450328 NR Description: putative 60S ribosomal protein
  misc_feature (81)..(387): NCBI GI NO: 13605831 NR Description: AT5g02870/F9G14_180 [Arabidopsis thaliana]
  misc_feature (1)..(357): NCBI GI NO: 32822849 NR Description: Ribosomal protein [Xenopus laevis]
  misc_feature (1)..(357): NCBI GI NO: 27694877 NR Description: Similar to ribosomal protein [Xenopus laevis]
MATDAAGVPMPHVMKAPIRPDVITFVHRLVSCNSRQPYAVSRKAGHQTSAESWGTGRAVSRIPRVGGGGTHRAGQGAFGNMCRGGRMFAPTRIWRKWHRRVNVRLRRVAVASALAATAVPAIVTARGHRIESVPEFPLVVSDSAEGIEKTAQAIKVLKQLGAYADAEKAKLSVGIRPGKGKMRNRRYINRKGPLIVYGTEGSKIVKAFRNLPGVDVANVERLNLLDLAPGGHLGRFVIWTESAFKKLDEVYGSFEASSSKKKGFVLPRPKMTNADLGRLINSDEVQSVVKPINKEVKRREARKNPLKNAAAVLKLNPYFGTARRMAVLAEAARVKARKEKINSKRTKLSAEEASKIKAAGKAWYQTMISDSDYTEFDVFSKWLGVSQ

SEQ ID NO: 18905 - DNA, 2074 bp, Triticum aestivum
  misc_feature (1)..(2074): Ceres Seq. ID no. 13598312
aaccgcaaccgcaaccgctccgcccggcatctcgcctcgtcgcacttccctccagccccacacccagccagcacccggagacgagacgtgtacgtgcgcgtagcaccaacccgagcccagcggtgcgccgcagaaacaggcaggcagcggtgcgcggcgggacggaaggccagggtgacgtgcgggcgcgggccgggccagaggcctaagtagcgagcagcgccgatcgacggaccgaccggtcatgccgagcgcgctggggagcggcttcgccgggtcggtgaggctcaagtacgtgaagctggggtaccagtacctggtgaaccacttcctgacgctgctgctggtgccggtcatggcggccacggcgctcgagctggcgcgcctcggccccggcgagctgctcgcgctctggcgcgccctcgacctcgacctcgtgcacatcctctgctccgccttcctcgtcgtcttcgtcgccaccgtctacttcatgtcccgccccaggcccgtcttcctcgtcgactactgctgctacaagccctcccccagcttccgggtgcccttcaccaccttcatggagcacatcaagctcatctccaacaacgacaagagcctgcgcttccagacccgcatcctcgagcgctccgggctcggcgaggagacctgcctcccgccggccaaccactacatcccgcccaaccccagcatggaggcgtcgcgcgccgaggcgcagctcgtcatcttcaacgccatcgacgacctcgtccgccgcacgggcctcaagcccaaggacatcgacatcctcgtcgtcaactgcagcctcttctccccgacgccctccctctccgccatgatcatcaacaagtacaagctccgcagcaacatccgcagcttcaacctctccggcatgggatgcagcgccgggctcatctccatcgacctcgcgcgcgacatgctccaggtgcatcccaactcgaacgctctggtgatctcgacggagatcatcacgcccaacttctaccacgggagccggcgggacatgctgctgcccaactgcctgttccggatgggcgcggcggcgatcctgctgtccaaccggcggcgggaggcgcggcgcgccaagtacaggctggtgcacgtggtgcgcacgcacaagggcgcggacgaccgcgcgtaccggtgcgtgtacgaggaggaggacgacgaggggcactcgggcatctcgctctccaaggagctcatggccatcgccggcgaggcgctcaagtccaacatcaccaccatgggcccgctggtgctgcccatgtcggagcagctgctcttcttcttccgcctggtggggcgcaaggtgatcaacagcaagtggaagccctacatcccggacttcaagctggcgttcgagcacttctgcatccacgccggcggccgcgccgtcatcgacgagctgcagaagaacctggagctgtcgccgcggcacgtggaggcgtcgcgcatgacgctgcaccggttcggcaacacctccagcagctcgctctggtacgagctcgcctacatcgaggccaagggccgcatgcgcaagggcgaccgcgtgtggcagatcggcttcggcagcggcttcaagtgcaacagcgccgtctggaagtgcctccgcaccgtcaagacgcccaccgacgggccctgggacgactgcatccagcgctaccccgtccacatcccggaggtcgtcaagctgtgaggcgtcatcgacgacgagctcggctcgccgccggcggccgtgccctgcatctgcatgtacgtgccccccaaaacctggagctctgtgggggccccgaccaaattaaaccaatctctttctcctttgctctctttcttccttttctttttctagtattttcttcgccataaattaaattacatggatactcgtgggatgcgtcacacaaggaggggatcattcacagggagattaatcggctacccgaatatttatattggacgacgctaacgtgggcgtggttgttaaattgtttgtgtcacgaaattccactgcagtgaaagggataattacattggc

SEQ ID NO: 18906 - protein, 496 aa, Triticum aestivum
  peptide (1)..(496): Ceres Seq. ID no. 15222296
  misc_feature (329)..(469): Pfam Name: Pfam Description:  Chalcone and stilbene synthases
  misc_feature (1)..(496): NCBI GI NO: 17979464 NR Description: At1g68530/T26J14_10 [Arabidopsis thaliana]
  misc_feature (1)..(496): NCBI GI NO: 15221431 NR Description: very-long-chain fatty acid condensing enzyme
  misc_feature (9)..(496): NCBI GI NO: 21593111 NR Description: very-long-chain fatty acid condensing enzyme CUT1
  misc_feature (7)..(496): NCBI GI NO: 15222592 NR Description: very-long-chain fatty acid condensing enzyme
  misc_feature (7)..(496): NCBI GI NO: 21618184 NR Description: fatty acid condensing enzyme CUT1, putative
  misc_feature (7)..(496): NCBI GI NO: 28393607 NR Description: putative fatty acid condensing enzyme CUT1
  misc_feature (1)..(488): NCBI GI NO: 15223556 NR Description: very-long-chain fatty acid condensing enzyme
  misc_feature (9)..(490): NCBI GI NO: 15226724 NR Description: very-long-chain fatty acid condensing enzyme
  misc_feature (1)..(496): NCBI GI NO: 9714501 NR Description: putative fatty acid elongase [Zea mays]
  misc_feature (9)..(491): NCBI GI NO: 29417540 NR Description: beta-ketoacyl-CoA-synthase [Marchantia polymorpha]
MPSALGSGFAGSVRLKYVKLGYQYLVNHFLTLLLVPVMAATALELARLGPGELLALWRALDLDLVHILCSAFLVVFVATVYFMSRPRPVFLVDYCCYKPSPSFRVPFTTFMEHIKLISNNDKSLRFQTRILERSGLGEETCLPPANHYIPPNPSMEASRAEAQLVIFNAIDDLVRRTGLKPKDIDILVVNCSLFSPTPSLSAMIINKYKLRSNIRSFNLSGMGCSAGLISIDLARDMLQVHPNSNALVISTEIITPNFYHGSRRDMLLPNCLFRMGAAAILLSNRRREARRAKYRLVHVVRTHKGADDRAYRCVYEEEDDEGHSGISLSKELMAIAGEALKSNITTMGPLVLPMSEQLLFFFRLVGRKVINSKWKPYIPDFKLAFEHFCIHAGGRAVIDELQKNLELSPRHVEASRMTLHRFGNTSSSSLWYELAYIEAKGRMRKGDRVWQIGFGSGFKCNSAVWKCLRTVKTPTDGPWDDCIQRYPVHIPEVVKL

SEQ ID NO: 18907 - protein, 459 aa, Triticum aestivum
  peptide (1)..(459): Ceres Seq. ID no. 15222297
  misc_feature (292)..(432): Pfam Name: Pfam Description:  Chalcone and stilbene synthases
  misc_feature (1)..(459): NCBI GI NO: 17979464 NR Description: At1g68530/T26J14_10 [Arabidopsis thaliana]
  misc_feature (1)..(459): NCBI GI NO: 15221431 NR Description: very-long-chain fatty acid condensing enzyme
  misc_feature (1)..(459): NCBI GI NO: 21593111 NR Description: very-long-chain fatty acid condensing enzyme CUT1
  misc_feature (1)..(459): NCBI GI NO: 15222592 NR Description: very-long-chain fatty acid condensing enzyme
  misc_feature (1)..(459): NCBI GI NO: 21618184 NR Description: fatty acid condensing enzyme CUT1, putative
  misc_feature (1)..(459): NCBI GI NO: 28393607 NR Description: putative fatty acid condensing enzyme CUT1
  misc_feature (1)..(451): NCBI GI NO: 15223556 NR Description: very-long-chain fatty acid condensing enzyme
  misc_feature (1)..(453): NCBI GI NO: 15226724 NR Description: very-long-chain fatty acid condensing enzyme
  misc_feature (1)..(459): NCBI GI NO: 9714501 NR Description: putative fatty acid elongase [Zea mays]
  misc_feature (1)..(454): NCBI GI NO: 29417540 NR Description: beta-ketoacyl-CoA-synthase [Marchantia polymorpha]
MAATALELARLGPGELLALWRALDLDLVHILCSAFLVVFVATVYFMSRPRPVFLVDYCCYKPSPSFRVPFTTFMEHIKLISNNDKSLRFQTRILERSGLGEETCLPPANHYIPPNPSMEASRAEAQLVIFNAIDDLVRRTGLKPKDIDILVVNCSLFSPTPSLSAMIINKYKLRSNIRSFNLSGMGCSAGLISIDLARDMLQVHPNSNALVISTEIITPNFYHGSRRDMLLPNCLFRMGAAAILLSNRRREARRAKYRLVHVVRTHKGADDRAYRCVYEEEDDEGHSGISLSKELMAIAGEALKSNITTMGPLVLPMSEQLLFFFRLVGRKVINSKWKPYIPDFKLAFEHFCIHAGGRAVIDELQKNLELSPRHVEASRMTLHRFGNTSSSSLWYELAYIEAKGRMRKGDRVWQIGFGSGFKCNSAVWKCLRTVKTPTDGPWDDCIQRYPVHIPEVVKL

SEQ ID NO: 18908 - protein, 414 aa, Triticum aestivum
  peptide (1)..(414): Ceres Seq. ID no. 15222298
  misc_feature (247)..(387): Pfam Name: Pfam Description:  Chalcone and stilbene synthases
  misc_feature (1)..(414): NCBI GI NO: 17979464 NR Description: At1g68530/T26J14_10 [Arabidopsis thaliana]
  misc_feature (1)..(414): NCBI GI NO: 15221431 NR Description: very-long-chain fatty acid condensing enzyme
  misc_feature (1)..(414): NCBI GI NO: 21593111 NR Description: very-long-chain fatty acid condensing enzyme CUT1
  misc_feature (1)..(414): NCBI GI NO: 15222592 NR Description: very-long-chain fatty acid condensing enzyme
  misc_feature (1)..(414): NCBI GI NO: 21618184 NR Description: fatty acid condensing enzyme CUT1, putative
  misc_feature (1)..(414): NCBI GI NO: 28393607 NR Description: putative fatty acid condensing enzyme CUT1
  misc_feature (1)..(406): NCBI GI NO: 15223556 NR Description: very-long-chain fatty acid condensing enzyme
  misc_feature (1)..(408): NCBI GI NO: 15226724 NR Description: very-long-chain fatty acid condensing enzyme
  misc_feature (1)..(414): NCBI GI NO: 9714501 NR Description: putative fatty acid elongase [Zea mays]
  misc_feature (1)..(409): NCBI GI NO: 29417540 NR Description: beta-ketoacyl-CoA-synthase [Marchantia polymorpha]
MSRPRPVFLVDYCCYKPSPSFRVPFTTFMEHIKLISNNDKSLRFQTRILERSGLGEETCLPPANHYIPPNPSMEASRAEAQLVIFNAIDDLVRRTGLKPKDIDILVVNCSLFSPTPSLSAMIINKYKLRSNIRSFNLSGMGCSAGLISIDLARDMLQVHPNSNALVISTEIITPNFYHGSRRDMLLPNCLFRMGAAAILLSNRRREARRAKYRLVHVVRTHKGADDRAYRCVYEEEDDEGHSGISLSKELMAIAGEALKSNITTMGPLVLPMSEQLLFFFRLVGRKVINSKWKPYIPDFKLAFEHFCIHAGGRAVIDELQKNLELSPRHVEASRMTLHRFGNTSSSSLWYELAYIEAKGRMRKGDRVWQIGFGSGFKCNSAVWKCLRTVKTPTDGPWDDCIQRYPVHIPEVVKL

SEQ ID NO: 18909 - DNA, 1874 bp, Triticum aestivum
  misc_feature (1)..(1874): Ceres Seq. ID no. 13596189
cctaatcgaaaaccacccacgcgcgcaccagccaccccccactatggcggcggcggcggcggcgtctccagccaccgcgccctcctccttcccctccgcccgcgcccacaagccgacgctcctctccctccgcgtctcgaccaagctcagagcccccgcggccgcggcggcatcggcggcatccgacccggccccggccttcaggtccgtcacggccttcgcgccggcgacggtggcgaacctcggcccgggcttcgacttcctgggctgcgcggtcgccgacgcctcgctctccctcggcgacacagtcacggccaccctcgacccctcgctgcccgccggcgcggtcgccatctcctgcatcacctccccgtcccgcccccgcctcgccgaccgcctctcccgcgacccgctccgcaactgcgcgggcatcgccgccgtcgccgcgctgcgggccctcggcgtgcgctcgcacggcgtctccctcagcctcgccaagggcctgccgctcggctccgggctcggctcctcggccgcgtccgcggccgccgccgccaaggccgtcgacgcgctcttcgggtccctgctcccccgcgacggcctcgtgctcgccggcctcgagtccgagaaggccgtcagcggcttccacgccgacaacatcgcgccggccatcctcggcggattcgtcatggtgcggagctacgacccgttctgcctcgtgtcgctgccctgcccgccggcgctccgcctctgcttcgtgctcgtcaccccggactttgaggcgccgacgagcaagatgcgcgccgcgctgccgaagaacatcgccatgggccaccacgtgcgcaactccagccaggccgccgcgctcgtcgccggcgtgctgcagggcgacgccgccctcatcggctccgcgatgtcgtccgacttcattgtcgagcccaccagggcgcccctgatacctggcatggccgcggtgaaggccgccgctcttgaagccggagcgctggggtgtaccatcagcggagcaggcccgaccgcagtagctgtcattgagggagaggagaagggggaggaggtcgcccggaggatgatcgacgccttcctgtcggtcggcaagctgaaagcgaccgccaccgtcgctcagctcgacagagccggcgccagggtcatctccacctcaaatttggagtagaagctagagagactttggtgctccgttcccattcgtgtatcggcctgacggcaagggggaagggagatgcggtataacgttgggttgcatctaggcgggggcaaggatggacatgaagacggtggaccaggcggtgagggcgagggcggcgacgaggtaggtccagaggaaaacgaccgagcactcctcctgggcgacgtcgtagagctgcgccatggtgctgatgctcatcgcgggcggcagcgcgaactggagcatgagcacatactggtacagcgggtccggcggcaggaagccgagctccctcgccgtcctcaccaccacgatcccgaccaccggcaggatcatgtagcgcacgcagacgatggccgcgatcacccaccgcgacatggtcgtcttgcgcaggcctgccagaccattattcagtttcagatggtctgacacagacagacagacagacagagattcagttgttgtttacctttggtgaggttccctccaaggatgagaatcacacaggggatggtgccatctctgcaacaaacaatggcataacatttcagtcagtagatgcactgcatgtgtatgccgtgttgaactgtaaaatgaattggacagcaaaaaaaaaaaaaaaaaagcttatcgataccgyckacctckagggrgsscccgagtacccaat

SEQ ID NO: 18910 - protein, 396 aa, Triticum aestivum
  peptide (1)..(396): Ceres Seq. ID no. 15221795
  misc_feature (15)..(392): NCBI GI NO: 15227800 NR Description: homoserine kinase [Arabidopsis thaliana]
  misc_feature (15)..(392): NCBI GI NO: 4927412 NR Description: homoserine kinase [Arabidopsis thaliana]
  misc_feature (15)..(392): NCBI GI NO: 39104572 NR Description: putative homoserine kinase HSK
  misc_feature (69)..(390): NCBI GI NO: 23136657 NR Description: hypothetical protein [Cytophaga hutchinsonii]
  misc_feature (68)..(394): NCBI GI NO: 21674844 NR Description: homoserine kinase [Chlorobium tepidum TLS]
  misc_feature (129)..(371): NCBI GI NO: 13541837 NR Description: Homoserine kinase [Thermoplasma volcanium]
  misc_feature (129)..(371): NCBI GI NO: 20177962 NR Description: Homoserine kinase (HK)
  misc_feature (135)..(388): NCBI GI NO: 14521243 NR Description: HOMOSERINE KINASE (HK). [Pyrococcus abyssi]
  misc_feature (73)..(94): NCBI GI NO: 14521243 NR Description: HOMOSERINE KINASE (HK). [Pyrococcus abyssi]
  misc_feature (72)..(390): NCBI GI NO: 14194907 NR Description: HOMOSERINE KINASE (HK)
LIENHPRAHQPPPTMAAAAAASPATAPSSFPSARAHKPTLLSLRVSTKLRAPAAAAASAASDPAPAFRSVTAFAPATVANLGPGFDFLGCAVADASLSLGDTVTATLDPSLPAGAVAISCITSPSRPRLADRLSRDPLRNCAGIAAVAALRALGVRSHGVSLSLAKGLPLGSGLGSSAASAAAAAKAVDALFGSLLPRDGLVLAGLESEKAVSGFHADNIAPAILGGFVMVRSYDPFCLVSLPCPPALRLCFVLVTPDFEAPTSKMRAALPKNIAMGHHVRNSSQAAALVAGVLQGDAALIGSAMSSDFIVEPTRAPLIPGMAAVKAAALEAGALGCTISGAGPTAVAVIEGEEKGEEVARRMIDAFLSVGKLKATATVAQLDRAGARVISTSNLE

SEQ ID NO: 18911 - protein, 382 aa, Triticum aestivum
  peptide (1)..(382): Ceres Seq. ID no. 15221796
  misc_feature (1)..(378): NCBI GI NO: 15227800 NR Description: homoserine kinase [Arabidopsis thaliana]
  misc_feature (1)..(378): NCBI GI NO: 4927412 NR Description: homoserine kinase [Arabidopsis thaliana]
  misc_feature (1)..(378): NCBI GI NO: 39104572 NR Description: putative homoserine kinase HSK
  misc_feature (55)..(376): NCBI GI NO: 23136657 NR Description: hypothetical protein [Cytophaga hutchinsonii]
  misc_feature (54)..(380): NCBI GI NO: 21674844 NR Description: homoserine kinase [Chlorobium tepidum TLS]
  misc_feature (115)..(357): NCBI GI NO: 13541837 NR Description: Homoserine kinase [Thermoplasma volcanium]
  misc_feature (115)..(357): NCBI GI NO: 20177962 NR Description: Homoserine kinase (HK)
  misc_feature (121)..(374): NCBI GI NO: 14521243 NR Description: HOMOSERINE KINASE (HK). [Pyrococcus abyssi]
  misc_feature (59)..(80): NCBI GI NO: 14521243 NR Description: HOMOSERINE KINASE (HK). [Pyrococcus abyssi]
  misc_feature (58)..(376): NCBI GI NO: 14194907 NR Description: HOMOSERINE KINASE (HK)
MAAAAAASPATAPSSFPSARAHKPTLLSLRVSTKLRAPAAAAASAASDPAPAFRSVTAFAPATVANLGPGFDFLGCAVADASLSLGDTVTATLDPSLPAGAVAISCITSPSRPRLADRLSRDPLRNCAGIAAVAALRALGVRSHGVSLSLAKGLPLGSGLGSSAASAAAAAKAVDALFGSLLPRDGLVLAGLESEKAVSGFHADNIAPAILGGFVMVRSYDPFCLVSLPCPPALRLCFVLVTPDFEAPTSKMRAALPKNIAMGHHVRNSSQAAALVAGVLQGDAALIGSAMSSDFIVEPTRAPLIPGMAAVKAAALEAGALGCTISGAGPTAVAVIEGEEKGEEVARRMIDAFLSVGKLKATATVAQLDRAGARVISTSNLE

SEQ ID NO: 18912 - protein, 259 aa, Triticum aestivum
  peptide (1)..(259): Ceres Seq. ID no. 15221797
  misc_feature (65)..(223): Pfam Name: Pfam Description:  HlyD family secretion protein
  misc_feature (2)..(259): NCBI GI NO: 23018788 NR Description: hypothetical protein [Thermobifida fusca]
PNRKPPTRAPATPHYGGGGGGVSSHRALLLPLRPRPQADAPLPPRLDQAQSPRGRGGIGGIRPGPGLQVRHGLRAGDGGEPRPGLRLPGLRGRRRLALPRRHSHGHPRPLAARRRGRHLLHHLPVPPPPRRPPLPRPAPQLRGHRRRRRAAGPRRALARRLPQPRQGPAARLRARLLGRVRGRRRQGRRRALRVPAPPRRPRARRPRVREGRQRLPRRQHRAGHPRRIRHGAELRPVLPRVAALPAGAPPLLRARHPGL

SEQ ID NO: 18913 - DNA, 1487 bp, Triticum aestivum
  misc_feature (1)..(1487): Ceres Seq. ID no. 13598278
gaggtcgacggtatcgataagcttttttttttttttttttctgaatagtatgttttttattaactcaatggtacgtagcacttgatttctctgtgtttcctagaatgaaacaatgtcttacgaaatgcttgttactctattcttatatgtcctgtacttttgaaattagaaaaataattactacaccacccccatactccatagacagaatttgccggtcttcaagggttagccagctcgaggtctccggttttcctcgccatctgctgctgcagcagctggttcttctgcgccgccgccttcttctgctggaccttctcgccatacatgtaggaggcaaagccccagaggcagagcaccagcgcgatgccctttggcccgtcgaacttctcgtggaggaagatgacggcgaggacctcggagagcggcaggaggacggcgaccatgatgccggcgaggagcgaagaggcgcaagtgacgagccccacgacgcccaggttgagcagctgccacgccacggcaccccatacgagcactaggtagtacttggtctcgccgagcccgaatgccgccgcctcgatcggcagcgcgttgaagtcgctcttgatggccatgccgagcaggcacaccatcgtgccggcgaggcccatcatggcctgcatctgcatcaccgtggagtagggtggcggcgcgctcgcggctggtcccctccgccgcccaaaccgctccatggcgacctcaacgagcggcagcacgagcccggcgagcgcggccgccgcgatggcctcgccgaacccggtccagtacgtcttggatggctcgcccgccggcttcccggacccgggaccgacgccgagcaccgcgggaccgatggtgagcagcaggacggcgttggcagagaagggcgtgaagcggagcccgacgaagaggaacgcgaacacggcggtgaaggcgagctgcgtcgccagtagcaaggacgacgtggacagcggcagcgcctgcgaccccatcgcatacacgaagcacgacacggcgtacaagctgcctagcacgacggccgcgccaacgaggcgaggcgggaggaggaggttgacgatgccgtggcggcggccgcggaagatggagacgcacaggggcgggaggaggagcggccagccggagatctggaccagcgcggagagccacaggcgttgcccgccgtggacgaagtagacccgcagcaggagcggcccgctggagccgatgaggacgaggcaggcgctgaatatgaccagcggtgaaggccggtagcgagccggcgaggcggccgtggcgcggggcggcgaggcgcttggcgtctttgctgcttcctgcatggccgggctggcactagcagttgtgatcgccatgatccgtcttagcttagctgcaagtatgtttgtactgctactttgctgtttcttggatgccctctctaatcctcccgcacagatgggatgagagcttgt

SEQ ID NO: 18914 - protein, 160 aa, Triticum aestivum
  peptide (1)..(160): Ceres Seq. ID no. 13598279
MATSTSGSTSPASAAAAMASPNPVQYVLDGSPAGFPDPGPTPSTAGPMVSSRTALAEKGVKRSPTKRNANTAVKASCVASSKDDVDSGSACDPIAYTKHDTAYKLPSTTAAPTRRGGRRRLTMPWRRPRKMETHRGGRRSGQPEIWTSAESHRRCPPWTK

SEQ ID NO: 18915 - protein, 144 aa, Triticum aestivum
  peptide (1)..(144): Ceres Seq. ID no. 13598280
  misc_feature (98)..(144): NCBI GI NO: 9837383 NR Description: retinitis pigmentosa GTPase regulator [Bos taurus]
MKQCLTKCLLLYSYMSCTFEIRKIITTPPPYSIDRICRSSRVSQLEVSGFPRHLLLQQLVLLRRRLLLLDLLAIHVGGKAPEAEHQRDALWPVELLVEEDDGEDLGERQEDGDHDAGEERRGASDEPHDAQVEQLPRHGTPYEH

SEQ ID NO: 18916 - protein, 143 aa, Triticum aestivum
  peptide (1)..(143): Ceres Seq. ID no. 13598281
MASPNPVQYVLDGSPAGFPDPGPTPSTAGPMVSSRTALAEKGVKRSPTKRNANTAVKASCVASSKDDVDSGSACDPIAYTKHDTAYKLPSTTAAPTRRGGRRRLTMPWRRPRKMETHRGGRRSGQPEIWTSAESHRRCPPWTK

SEQ ID NO: 18917 - DNA, 1094 bp, Triticum aestivum
  misc_feature (1)..(1094): Ceres Seq. ID no. 12614195
atctcatcctctctctctcacacacacacaaaaccactacaggcatccatcacgattccttgcctacgcctcctcatggcggctgccaccggcgccaagcagcagcatccgcacccagctccaccaccgggggcaacggtggtggaccccaagttcgagtgggcggagaaggccggcacctacgtgctccgcctcaccctgaccggcttcaggaaggacgacttccgggtgcaggtcgacggcgcgggccggctcaccatccgcggcaccaggccgggcgcctccctccacaaggtcttccagctgccctccgccgccagcctcgacgacatcgccggccgcttcgaggccggtgtgctcacgctcaccatgcccaagcgtgccggtgcgcccaaggaggagggtgcgccaacagagcaggtcgacggcgacgggaagaggagagacgccggcggtgagaagaaggtgcctgaacccgcaccttccggtgatgcggctcccacatccatcgaggagatcagaacgaagcccaaggaagagcagcagaggccgaagaaggaaaaagaactggatcccaaggctccccaggcggcagcagctgcgcagacaccggagaagcaagcaccgaatccaacctccagcgacaagaccatggcggtggttgaccgggagtgcctggcagagacggtgaggcgacgcggcgaggaagagagggcctaggctgctgcggcggcgacggccatggaagctagagcagagcaggagaagaaggcggcggccacggcgtgcagccgctggaaagagcgcatgacggaaggcctggggcagctgacggacatgaagtgggcggagagcgcaatggagatggcgaggaagaacaaggaggtggtggccgtcggagtcgccgccttcacactcggcttcttcgtctcccagaggctcttcaagaagtgagtagctatatggagcatgaacatgtcacatacaccaacagtgagtaatacgtacgggctagtattgtgtggttataatgtacattgactgaacaaccatgtaaaaaggtatttgtgtataatcaaagtgggtgtacattg
